United States Patent Application Publication US 2018/0305689 A1 - sequence listing, part 102

SEQ ID NO: 1487323 - RNA, 19 nt, Artificial Sequence
  Description of Artificial Sequence: Synthetic oligonucleotide
  Antisense strand to SEQ ID NO: 1487322
gaauguccggaucacauau

SEQ ID NO: 1487324 - RNA, 19 nt, Artificial Sequence
  Description of Artificial Sequence: Synthetic oligonucleotide
  Sense strand starting at position 2812 of SEQ ID NO: 1244420
uauacagucgugucugcau

SEQ ID NO: 1487325 - RNA, 19 nt, Artificial Sequence
  Description of Artificial Sequence: Synthetic oligonucleotide
  Antisense strand to SEQ ID NO: 1487324
augcagacacgacuguaua

SEQ ID NO: 1487326 - RNA, 19 nt, Artificial Sequence
  Description of Artificial Sequence: Synthetic oligonucleotide
  Sense strand starting at position 2814 of SEQ ID NO: 1244420
uacagucgugucugcauaa

SEQ ID NO: 1487327 - RNA, 19 nt, Artificial Sequence
  Description of Artificial Sequence: Synthetic oligonucleotide
  Antisense strand to SEQ ID NO: 1487326
uuaugcagacacgacugua

SEQ ID NO: 1487328 - RNA, 19 nt, Artificial Sequence
  Description of Artificial Sequence: Synthetic oligonucleotide
  Sense strand starting at position 2815 of SEQ ID NO: 1244420
acagucgugucugcauaag

SEQ ID NO: 1487329 - RNA, 19 nt, Artificial Sequence
  Description of Artificial Sequence: Synthetic oligonucleotide
  Antisense strand to SEQ ID NO: 1487328
cuuaugcagacacgacugu

SEQ ID NO: 1487330 - RNA, 19 nt, Artificial Sequence
  Description of Artificial Sequence: Synthetic oligonucleotide
  Sense strand starting at position 2948 of SEQ ID NO: 1244420
gagugucuccaugggcuua

SEQ ID NO: 1487331 - RNA, 19 nt, Artificial Sequence
  Description of Artificial Sequence: Synthetic oligonucleotide
  Antisense strand to SEQ ID NO: 1487330
uaagcccauggagacacuc

SEQ ID NO: 1487332 - RNA, 19 nt, Artificial Sequence
  Description of Artificial Sequence: Synthetic oligonucleotide
  Sense strand starting at position 2980 of SEQ ID NO: 1244420
cagggauuaugguuucuuc

SEQ ID NO: 1487333 - RNA, 19 nt, Artificial Sequence
  Description of Artificial Sequence: Synthetic oligonucleotide
  Antisense strand to SEQ ID NO: 1487332
gaagaaaccauaaucccug

SEQ ID NO: 1487334 - RNA, 19 nt, Artificial Sequence
  Description of Artificial Sequence: Synthetic oligonucleotide
  Sense strand starting at position 2983 of SEQ ID NO: 1244420
ggauuaugguuucuucucu

SEQ ID NO: 1487335 - RNA, 19 nt, Artificial Sequence
  Description of Artificial Sequence: Synthetic oligonucleotide
  Antisense strand to SEQ ID NO: 1487334
agagaagaaaccauaaucc

SEQ ID NO: 1487336 - RNA, 19 nt, Artificial Sequence
  Description of Artificial Sequence: Synthetic oligonucleotide
  Sense strand starting at position 2988 of SEQ ID NO: 1244420
augguuucuucucugaauu

SEQ ID NO: 1487337 - RNA, 19 nt, Artificial Sequence
  Description of Artificial Sequence: Synthetic oligonucleotide
  Antisense strand to SEQ ID NO: 1487336
aauucagagaagaaaccau

SEQ ID NO: 1487338 - RNA, 19 nt, Artificial Sequence
  Description of Artificial Sequence: Synthetic oligonucleotide
  Sense strand starting at position 2989 of SEQ ID NO: 1244420
ugguuucuucucugaauuc

SEQ ID NO: 1487339 - RNA, 19 nt, Artificial Sequence
  Description of Artificial Sequence: Synthetic oligonucleotide
  Antisense strand to SEQ ID NO: 1487338
gaauucagagaagaaacca

SEQ ID NO: 1487340 - RNA, 19 nt, Artificial Sequence
  Description of Artificial Sequence: Synthetic oligonucleotide
  Sense strand starting at position 2996 of SEQ ID NO: 1244420
uucucugaauuccugguau

SEQ ID NO: 1487341 - RNA, 19 nt, Artificial Sequence
  Description of Artificial Sequence: Synthetic oligonucleotide
  Antisense strand to SEQ ID NO: 1487340
auaccaggaauucagagaa

SEQ ID NO: 1487342 - RNA, 19 nt, Artificial Sequence
  Description of Artificial Sequence: Synthetic oligonucleotide
  Sense strand starting at position 2998 of SEQ ID NO: 1244420
cucugaauuccugguauac

SEQ ID NO: 1487343 - RNA, 19 nt, Artificial Sequence
  Description of Artificial Sequence: Synthetic oligonucleotide
  Antisense strand to SEQ ID NO: 1487342
guauaccaggaauucagag

SEQ ID NO: 1487344 - RNA, 19 nt, Artificial Sequence
  Description of Artificial Sequence: Synthetic oligonucleotide
  Sense strand starting at position 3000 of SEQ ID NO: 1244420
cugaauuccugguauacag

SEQ ID NO: 1487345 - RNA, 19 nt, Artificial Sequence
  Description of Artificial Sequence: Synthetic oligonucleotide
  Antisense strand to SEQ ID NO: 1487344
cuguauaccaggaauucag

SEQ ID NO: 1487346 - RNA, 19 nt, Artificial Sequence
  Description of Artificial Sequence: Synthetic oligonucleotide
  Sense strand starting at position 3002 of SEQ ID NO: 1244420
gaauuccugguauacagua

SEQ ID NO: 1487347 - RNA, 19 nt, Artificial Sequence
  Description of Artificial Sequence: Synthetic oligonucleotide
  Antisense strand to SEQ ID NO: 1487346
uacuguauaccaggaauuc

SEQ ID NO: 1487348 - RNA, 19 nt, Artificial Sequence
  Description of Artificial Sequence: Synthetic oligonucleotide
  Sense strand starting at position 3072 of SEQ ID NO: 1244420
acucauaucuguguaccca

SEQ ID NO: 1487349 - RNA, 19 nt, Artificial Sequence
  Description of Artificial Sequence: Synthetic oligonucleotide
  Antisense strand to SEQ ID NO: 1487348
uggguacacagauaugagu

SEQ ID NO: 1487350 - RNA, 19 nt, Artificial Sequence
  Description of Artificial Sequence: Synthetic oligonucleotide
  Sense strand starting at position 3073 of SEQ ID NO: 1244420
cucauaucuguguacccau

SEQ ID NO: 1487351 - RNA, 19 nt, Artificial Sequence
  Description of Artificial Sequence: Synthetic oligonucleotide
  Antisense strand to SEQ ID NO: 1487350
auggguacacagauaugag

SEQ ID NO: 1487352 - RNA, 19 nt, Artificial Sequence
  Description of Artificial Sequence: Synthetic oligonucleotide
  Sense strand starting at position 3289 of SEQ ID NO: 1244420
ucuuaaccauguuuggauu

SEQ ID NO: 1487353 - RNA, 19 nt, Artificial Sequence
  Description of Artificial Sequence: Synthetic oligonucleotide
  Antisense strand to SEQ ID NO: 1487352
aauccaaacaugguuaaga

SEQ ID NO: 1487354 - RNA, 19 nt, Artificial Sequence
  Description of Artificial Sequence: Synthetic oligonucleotide
  Sense strand starting at position 3713 of SEQ ID NO: 1244420
gcuagcagucuguagguga

SEQ ID NO: 1487355 - RNA, 19 nt, Artificial Sequence
  Description of Artificial Sequence: Synthetic oligonucleotide
  Antisense strand to SEQ ID NO: 1487354
ucaccuacagacugcuagc

SEQ ID NO: 1487356 - RNA, 19 nt, Artificial Sequence
  Description of Artificial Sequence: Synthetic oligonucleotide
  Sense strand starting at position 3720 of SEQ ID NO: 1244420
gucuguaggugacuuccaa

SEQ ID NO: 1487357 - RNA, 19 nt, Artificial Sequence
  Description of Artificial Sequence: Synthetic oligonucleotide
  Antisense strand to SEQ ID NO: 1487356
uuggaagucaccuacagac

SEQ ID NO: 1487358 - RNA, 19 nt, Artificial Sequence
  Description of Artificial Sequence: Synthetic oligonucleotide
  Sense strand starting at position 3724 of SEQ ID NO: 1244420
guaggugacuuccaagauc

SEQ ID NO: 1487359 - RNA, 19 nt, Artificial Sequence
  Description of Artificial Sequence: Synthetic oligonucleotide
  Antisense strand to SEQ ID NO: 1487358
gaucuuggaagucaccuac

SEQ ID NO: 1487360 - RNA, 19 nt, Artificial Sequence
  Description of Artificial Sequence: Synthetic oligonucleotide
  Sense strand starting at position 3735 of SEQ ID NO: 1244420
ccaagaucggcugaagcua

SEQ ID NO: 1487361 - RNA, 19 nt, Artificial Sequence
  Description of Artificial Sequence: Synthetic oligonucleotide
  Antisense strand to SEQ ID NO: 1487360
uagcuucagccgaucuugg

SEQ ID NO: 1487362 - RNA, 19 nt, Artificial Sequence
  Description of Artificial Sequence: Synthetic oligonucleotide
  Sense strand starting at position 3788 of SEQ ID NO: 1244420
cugugaauuucuuuccugu

SEQ ID NO: 1487363 - RNA, 19 nt, Artificial Sequence
  Description of Artificial Sequence: Synthetic oligonucleotide
  Antisense strand to SEQ ID NO: 1487362
acaggaaagaaauucacag

SEQ ID NO: 1487364 - RNA, 19 nt, Artificial Sequence
  Description of Artificial Sequence: Synthetic oligonucleotide
  Sense strand starting at position 3790 of SEQ ID NO: 1244420
gugaauuucuuuccugugu

SEQ ID NO: 1487365 - RNA, 19 nt, Artificial Sequence
  Description of Artificial Sequence: Synthetic oligonucleotide
  Antisense strand to SEQ ID NO: 1487364
acacaggaaagaaauucac

SEQ ID NO: 1487366 - RNA, 19 nt, Artificial Sequence
  Description of Artificial Sequence: Synthetic oligonucleotide
  Sense strand starting at position 3791 of SEQ ID NO: 1244420
ugaauuucuuuccugugua

SEQ ID NO: 1487367 - RNA, 19 nt, Artificial Sequence
  Description of Artificial Sequence: Synthetic oligonucleotide
  Antisense strand to SEQ ID NO: 1487366
uacacaggaaagaaauuca

SEQ ID NO: 1487368 - RNA, 19 nt, Artificial Sequence
  Description of Artificial Sequence: Synthetic oligonucleotide
  Sense strand starting at position 3851 of SEQ ID NO: 1244420
gguagacaucauugugguu

SEQ ID NO: 1487369 - RNA, 19 nt, Artificial Sequence
  Description of Artificial Sequence: Synthetic oligonucleotide
  Antisense strand to SEQ ID NO: 1487368
aaccacaaugaugucuacc

SEQ ID NO: 1487370 - RNA, 19 nt, Artificial Sequence
  Description of Artificial Sequence: Synthetic oligonucleotide
  Sense strand starting at position 3955 of SEQ ID NO: 1244420
agucauuccuuccagacag

SEQ ID NO: 1487371 - RNA, 19 nt, Artificial Sequence
  Description of Artificial Sequence: Synthetic oligonucleotide
  Antisense strand to SEQ ID NO: 1487370
cugucuggaaggaaugacu

SEQ ID NO: 1487372 - RNA, 19 nt, Artificial Sequence
  Description of Artificial Sequence: Synthetic oligonucleotide
  Sense strand starting at position 164 of SEQ ID NO: 1244421
caugaucagucccugagga

SEQ ID NO: 1487373 - RNA, 19 nt, Artificial Sequence
  Description of Artificial Sequence: Synthetic oligonucleotide
  Antisense strand to SEQ ID NO: 1487372
uccucagggacugaucaug

SEQ ID NO: 1487374 - RNA, 19 nt, Artificial Sequence
  Description of Artificial Sequence: Synthetic oligonucleotide
  Sense strand starting at position 165 of SEQ ID NO: 1244421
augaucagucccugaggaa

SEQ ID NO: 1487375 - RNA, 19 nt, Artificial Sequence
  Description of Artificial Sequence: Synthetic oligonucleotide
  Antisense strand to SEQ ID NO: 1487374
uuccucagggacugaucau

SEQ ID NO: 1487376 - RNA, 19 nt, Artificial Sequence
  Description of Artificial Sequence: Synthetic oligonucleotide
  Sense strand starting at position 502 of SEQ ID NO: 1244421
ggagauagauuugggaaau

SEQ ID NO: 1487377 - RNA, 19 nt, Artificial Sequence
  Description of Artificial Sequence: Synthetic oligonucleotide
  Antisense strand to SEQ ID NO: 1487376
auuucccaaaucuaucucc

SEQ ID NO: 1487378 - RNA, 19 nt, Artificial Sequence
  Description of Artificial Sequence: Synthetic oligonucleotide
  Sense strand starting at position 503 of SEQ ID NO: 1244421
gagauagauuugggaaaua

SEQ ID NO: 1487379 - RNA, 19 nt, Artificial Sequence
  Description of Artificial Sequence: Synthetic oligonucleotide
  Antisense strand to SEQ ID NO: 1487378
uauuucccaaaucuaucuc

SEQ ID NO: 1487380 - RNA, 19 nt, Artificial Sequence
  Description of Artificial Sequence: Synthetic oligonucleotide
  Sense strand starting at position 515 of SEQ ID NO: 1244421
ggaaauauuugguaggaga

SEQ ID NO: 1487381 - RNA, 19 nt, Artificial Sequence
  Description of Artificial Sequence: Synthetic oligonucleotide
  Antisense strand to SEQ ID NO: 1487380
ucuccuaccaaauauuucc

SEQ ID NO: 1487382 - RNA, 19 nt, Artificial Sequence
  Description of Artificial Sequence: Synthetic oligonucleotide
  Sense strand starting at position 518 of SEQ ID NO: 1244421
aauauuugguaggagaauc

SEQ ID NO: 1487383 - RNA, 19 nt, Artificial Sequence
  Description of Artificial Sequence: Synthetic oligonucleotide
  Antisense strand to SEQ ID NO: 1487382
gauucuccuaccaaauauu

SEQ ID NO: 1487384 - RNA, 19 nt, Artificial Sequence
  Description of Artificial Sequence: Synthetic oligonucleotide
  Sense strand starting at position 567 of SEQ ID NO: 1244421
gagugagaaugguuuaauc

SEQ ID NO: 1487385 - RNA, 19 nt, Artificial Sequence
  Description of Artificial Sequence: Synthetic oligonucleotide
  Antisense strand to SEQ ID NO: 1487384
gauuaaaccauucucacuc

SEQ ID NO: 1487386 - RNA, 19 nt, Artificial Sequence
  Description of Artificial Sequence: Synthetic oligonucleotide
  Sense strand starting at position 598 of SEQ ID NO: 1244421
uacggaauuuaggaaagau

SEQ ID NO: 1487387 - RNA, 19 nt, Artificial Sequence
  Description of Artificial Sequence: Synthetic oligonucleotide
  Antisense strand to SEQ ID NO: 1487386
aucuuuccuaaauuccgua

SEQ ID NO: 1487388 - RNA, 19 nt, Artificial Sequence
  Description of Artificial Sequence: Synthetic oligonucleotide
  Sense strand starting at position 728 of SEQ ID NO: 1244421
uccaguagauaguuggaua

SEQ ID NO: 1487389 - RNA, 19 nt, Artificial Sequence
  Description of Artificial Sequence: Synthetic oligonucleotide
  Antisense strand to SEQ ID NO: 1487388
uauccaacuaucuacugga

SEQ ID NO: 1487390 - RNA, 19 nt, Artificial Sequence
  Description of Artificial Sequence: Synthetic oligonucleotide
  Sense strand starting at position 729 of SEQ ID NO: 1244421
ccaguagauaguuggauau

SEQ ID NO: 1487391 - RNA, 19 nt, Artificial Sequence
  Description of Artificial Sequence: Synthetic oligonucleotide
  Antisense strand to SEQ ID NO: 1487390
auauccaacuaucuacugg

SEQ ID NO: 1487392 - RNA, 19 nt, Artificial Sequence
  Description of Artificial Sequence: Synthetic oligonucleotide
  Sense strand starting at position 741 of SEQ ID NO: 1244421
uggauauacagcuguggaa

SEQ ID NO: 1487393 - RNA, 19 nt, Artificial Sequence
  Description of Artificial Sequence: Synthetic oligonucleotide
  Antisense strand to SEQ ID NO: 1487392
uuccacagcuguauaucca

SEQ ID NO: 1487394 - RNA, 19 nt, Artificial Sequence
  Description of Artificial Sequence: Synthetic oligonucleotide
  Sense strand starting at position 764 of SEQ ID NO: 1244421
aagaaaggucuagguugga

SEQ ID NO: 1487395 - RNA, 19 nt, Artificial Sequence
  Description of Artificial Sequence: Synthetic oligonucleotide
  Antisense strand to SEQ ID NO: 1487394
uccaaccuagaccuuucuu

SEQ ID NO: 1487396 - RNA, 19 nt, Artificial Sequence
  Description of Artificial Sequence: Synthetic oligonucleotide
  Sense strand starting at position 767 of SEQ ID NO: 1244421
aaaggucuagguuggagau

SEQ ID NO: 1487397 - RNA, 19 nt, Artificial Sequence
  Description of Artificial Sequence: Synthetic oligonucleotide
  Antisense strand to SEQ ID NO: 1487396
aucuccaaccuagaccuuu

SEQ ID NO: 1487398 - RNA, 19 nt, Artificial Sequence
  Description of Artificial Sequence: Synthetic oligonucleotide
  Sense strand starting at position 768 of SEQ ID NO: 1244421
aaggucuagguuggagaua

SEQ ID NO: 1487399 - RNA, 19 nt, Artificial Sequence
  Description of Artificial Sequence: Synthetic oligonucleotide
  Antisense strand to SEQ ID NO: 1487398
uaucuccaaccuagaccuu

SEQ ID NO: 1487400 - RNA, 19 nt, Artificial Sequence
  Description of Artificial Sequence: Synthetic oligonucleotide
  Sense strand starting at position 792 of SEQ ID NO: 1244421
aguugagagucaucaacag

SEQ ID NO: 1487401 - RNA, 19 nt, Artificial Sequence
  Description of Artificial Sequence: Synthetic oligonucleotide
  Antisense strand to SEQ ID NO: 1487400
cuguugaugacucucaacu

SEQ ID NO: 1487402 - RNA, 19 nt, Artificial Sequence
  Description of Artificial Sequence: Synthetic oligonucleotide
  Sense strand starting at position 800 of SEQ ID NO: 1244421
gucaucaacagauggaagu

SEQ ID NO: 1487403 - RNA, 19 nt, Artificial Sequence
  Description of Artificial Sequence: Synthetic oligonucleotide
  Antisense strand to SEQ ID NO: 1487402
acuuccaucuguugaugac

SEQ ID NO: 1487404 - RNA, 19 nt, Artificial Sequence
  Description of Artificial Sequence: Synthetic oligonucleotide
  Sense strand starting at position 814 of SEQ ID NO: 1244421
gaaguaaagcugugggaau

SEQ ID NO: 1487405 - RNA, 19 nt, Artificial Sequence
  Description of Artificial Sequence: Synthetic oligonucleotide
  Antisense strand to SEQ ID NO: 1487404
auucccacagcuuuacuuc

SEQ ID NO: 1487406 - RNA, 19 nt, Artificial Sequence
  Description of Artificial Sequence: Synthetic oligonucleotide
  Sense strand starting at position 816 of SEQ ID NO: 1244421
aguaaagcugugggaauaa

SEQ ID NO: 1487407 - RNA, 19 nt, Artificial Sequence
  Description of Artificial Sequence: Synthetic oligonucleotide
  Antisense strand to SEQ ID NO: 1487406
uuauucccacagcuuuacu

SEQ ID NO: 1487408 - RNA, 19 nt, Artificial Sequence
  Description of Artificial Sequence: Synthetic oligonucleotide
  Sense strand starting at position 831 of SEQ ID NO: 1244421
auaaaugaguugccuuaga

SEQ ID NO: 1487409 - RNA, 19 nt, Artificial Sequence
  Description of Artificial Sequence: Synthetic oligonucleotide
  Antisense strand to SEQ ID NO: 1487408
ucuaaggcaacucauuuau

SEQ ID NO: 1487410 - RNA, 19 nt, Artificial Sequence
  Description of Artificial Sequence: Synthetic oligonucleotide
  Sense strand starting at position 886 of SEQ ID NO: 1244421
cuagcauuagacuggacua

SEQ ID NO: 1487411 - RNA, 19 nt, Artificial Sequence
  Description of Artificial Sequence: Synthetic oligonucleotide
  Antisense strand to SEQ ID NO: 1487410
uaguccagucuaaugcuag

SEQ ID NO: 1487412 - RNA, 19 nt, Artificial Sequence
  Description of Artificial Sequence: Synthetic oligonucleotide
  Sense strand starting at position 988 of SEQ ID NO: 1244421
gagugauuggcucaacgaa

SEQ ID NO: 1487413 - RNA, 19 nt, Artificial Sequence
  Description of Artificial Sequence: Synthetic oligonucleotide
  Antisense strand to SEQ ID NO: 1487412
uucguugagccaaucacuc

SEQ ID NO: 1487414 - RNA, 19 nt, Artificial Sequence
  Description of Artificial Sequence: Synthetic oligonucleotide
  Sense strand starting at position 1264 of SEQ ID NO: 1244421
agucguuugggugagggaa

SEQ ID NO: 1487415 - RNA, 19 nt, Artificial Sequence
  Description of Artificial Sequence: Synthetic oligonucleotide
  Antisense strand to SEQ ID NO: 1487414
uucccucacccaaacgacu

SEQ ID NO: 1487416 - RNA, 19 nt, Artificial Sequence
  Description of Artificial Sequence: Synthetic oligonucleotide
  Sense strand starting at position 1372 of SEQ ID NO: 1244421
guuuauauaagagguggga

SEQ ID NO: 1487417 - RNA, 19 nt, Artificial Sequence
  Description of Artificial Sequence: Synthetic oligonucleotide
  Antisense strand to SEQ ID NO: 1487416
ucccaccucuuauauaaac

SEQ ID NO: 1487418 - RNA, 19 nt, Artificial Sequence
  Description of Artificial Sequence: Synthetic oligonucleotide
  Sense strand starting at position 1374 of SEQ ID NO: 1244421
uuauauaagaggugggagu

SEQ ID NO: 1487419 - RNA, 19 nt, Artificial Sequence
  Description of Artificial Sequence: Synthetic oligonucleotide
  Antisense strand to SEQ ID NO: 1487418
acucccaccucuuauauaa

SEQ ID NO: 1487420 - RNA, 19 nt, Artificial Sequence
  Description of Artificial Sequence: Synthetic oligonucleotide
  Sense strand starting at position 1545 of SEQ ID NO: 1244421
cgucauuagggugaugaac

SEQ ID NO: 1487421 - RNA, 19 nt, Artificial Sequence
  Description of Artificial Sequence: Synthetic oligonucleotide
  Antisense strand to SEQ ID NO: 1487420
guucaucacccuaaugacg

SEQ ID NO: 1487422 - RNA, 19 nt, Artificial Sequence
  Description of Artificial Sequence: Synthetic oligonucleotide
  Sense strand starting at position 1691 of SEQ ID NO: 1244421
cuugacuuucccgggaaga

SEQ ID NO: 1487423 - RNA, 19 nt, Artificial Sequence
  Description of Artificial Sequence: Synthetic oligonucleotide
  Antisense strand to SEQ ID NO: 1487422
ucuucccgggaaagucaag

SEQ ID NO: 1487424 - RNA, 19 nt, Artificial Sequence
  Description of Artificial Sequence: Synthetic oligonucleotide
  Sense strand starting at position 1692 of SEQ ID NO: 1244421
uugacuuucccgggaagaa

SEQ ID NO: 1487425 - RNA, 19 nt, Artificial Sequence
  Description of Artificial Sequence: Synthetic oligonucleotide
  Antisense strand to SEQ ID NO: 1487424
uucuucccgggaaagucaa

SEQ ID NO: 1487426 - RNA, 19 nt, Artificial Sequence
  Description of Artificial Sequence: Synthetic oligonucleotide
  Sense strand starting at position 1748 of SEQ ID NO: 1244421
gggacuccuucccuacaga

SEQ ID NO: 1487427 - RNA, 19 nt, Artificial Sequence
  Description of Artificial Sequence: Synthetic oligonucleotide
  Antisense strand to SEQ ID NO: 1487426
ucuguagggaaggaguccc

SEQ ID NO: 1487428 - RNA, 19 nt, Artificial Sequence
  Description of Artificial Sequence: Synthetic oligonucleotide
  Sense strand starting at position 2477 of SEQ ID NO: 1244421
gacgaucguccuuauagga

SEQ ID NO: 1487429 - RNA, 19 nt, Artificial Sequence
  Description of Artificial Sequence: Synthetic oligonucleotide
  Antisense strand to SEQ ID NO: 1487428
uccuauaaggacgaucguc

SEQ ID NO: 1487430 - RNA, 19 nt, Artificial Sequence
  Description of Artificial Sequence: Synthetic oligonucleotide
  Sense strand starting at position 2560 of SEQ ID NO: 1244421
gaugacgacuuccuuacau

SEQ ID NO: 1487431 - RNA, 19 nt, Artificial Sequence
  Description of Artificial Sequence: Synthetic oligonucleotide
  Antisense strand to SEQ ID NO: 1487430
auguaaggaagucgucauc

SEQ ID NO: 1487432 - RNA, 19 nt, Artificial Sequence
  Description of Artificial Sequence: Synthetic oligonucleotide
  Sense strand starting at position 2591 of SEQ ID NO: 1244421
ccgcguucucuuguuaacu

SEQ ID NO: 1487433 - RNA, 19 nt, Artificial Sequence
  Description of Artificial Sequence: Synthetic oligonucleotide
  Antisense strand to SEQ ID NO: 1487432
aguuaacaagagaacgcgg

SEQ ID NO: 1487434 - RNA, 19 nt, Artificial Sequence
  Description of Artificial Sequence: Synthetic oligonucleotide
  Sense strand starting at position 2801 of SEQ ID NO: 1244421
ggcuuaucucguguucucu

SEQ ID NO: 1487435 - RNA, 19 nt, Artificial Sequence
  Description of Artificial Sequence: Synthetic oligonucleotide
  Antisense strand to SEQ ID NO: 1487434
agagaacacgagauaagcc

SEQ ID NO: 1487436 - RNA, 19 nt, Artificial Sequence
  Description of Artificial Sequence: Synthetic oligonucleotide
  Sense strand starting at position 2802 of SEQ ID NO: 1244421
gcuuaucucguguucucua

SEQ ID NO: 1487437 - RNA, 19 nt, Artificial Sequence
  Description of Artificial Sequence: Synthetic oligonucleotide
  Antisense strand to SEQ ID NO: 1487436
uagagaacacgagauaagc

SEQ ID NO: 1487438 - RNA, 19 nt, Artificial Sequence
  Description of Artificial Sequence: Synthetic oligonucleotide
  Sense strand starting at position 2848 of SEQ ID NO: 1244421
cugggugaucuuuauccuu

SEQ ID NO: 1487439 - RNA, 19 nt, Artificial Sequence
  Description of Artificial Sequence: Synthetic oligonucleotide
  Antisense strand to SEQ ID NO: 1487438
aaggauaaagaucacccag

SEQ ID NO: 1487440 - RNA, 19 nt, Artificial Sequence
  Description of Artificial Sequence: Synthetic oligonucleotide
  Sense strand starting at position 3026 of SEQ ID NO: 1244421
acaguuaggccagauuauu

SEQ ID NO: 1487441 - RNA, 19 nt, Artificial Sequence
  Description of Artificial Sequence: Synthetic oligonucleotide
  Antisense strand to SEQ ID NO: 1487440
aauaaucuggccuaacugu

SEQ ID NO: 1487442 - RNA, 19 nt, Artificial Sequence
  Description of Artificial Sequence: Synthetic oligonucleotide
  Sense strand starting at position 3251 of SEQ ID NO: 1244421
gguaauuugaggcggugau

SEQ ID NO: 1487443 - RNA, 19 nt, Artificial Sequence
  Description of Artificial Sequence: Synthetic oligonucleotide
  Antisense strand to SEQ ID NO: 1487442
aucaccgccucaaauuacc

SEQ ID NO: 1487444 - RNA, 19 nt, Artificial Sequence
  Description of Artificial Sequence: Synthetic oligonucleotide
  Sense strand starting at position 3315 of SEQ ID NO: 1244421
acuaucuaaugaguucgaa

SEQ ID NO: 1487445 - RNA, 19 nt, Artificial Sequence
  Description of Artificial Sequence: Synthetic oligonucleotide
  Antisense strand to SEQ ID NO: 1487444
uucgaacucauuagauagu

SEQ ID NO: 1487446 - RNA, 19 nt, Artificial Sequence
  Description of Artificial Sequence: Synthetic oligonucleotide
  Sense strand starting at position 3318 of SEQ ID NO: 1244421
aucuaaugaguucgaaaua

SEQ ID NO: 1487447 - RNA, 19 nt, Artificial Sequence
  Description of Artificial Sequence: Synthetic oligonucleotide
  Antisense strand to SEQ ID NO: 1487446
uauuucgaacucauuagau

SEQ ID NO: 1487448 - RNA, 19 nt, Artificial Sequence
  Description of Artificial Sequence: Synthetic oligonucleotide
  Sense strand starting at position 3349 of SEQ ID NO: 1244421
ggacgcaaugaauaguuau

SEQ ID NO: 1487449 - RNA, 19 nt, Artificial Sequence
  Description of Artificial Sequence: Synthetic oligonucleotide
  Antisense strand to SEQ ID NO: 1487448
auaacuauucauugcgucc

SEQ ID NO: 1487450 - RNA, 19 nt, Artificial Sequence
  Description of Artificial Sequence: Synthetic oligonucleotide
  Sense strand starting at position 3612 of SEQ ID NO: 1244421
gcagacggagcuuaaauua

SEQ ID NO: 1487451 - RNA, 19 nt, Artificial Sequence
  Description of Artificial Sequence: Synthetic oligonucleotide
  Antisense strand to SEQ ID NO: 1487450
uaauuuaagcuccgucugc

SEQ ID NO: 1487452 - RNA, 19 nt, Artificial Sequence
  Description of Artificial Sequence: Synthetic oligonucleotide
  Sense strand starting at position 222 of SEQ ID NO: 1244422
ggcuuucucccuccguauu

SEQ ID NO: 1487453 - RNA, 19 nt, Artificial Sequence
  Description of Artificial Sequence: Synthetic oligonucleotide
  Antisense strand to SEQ ID NO: 1487452
aauacggagggagaaagcc

SEQ ID NO: 1487454 - RNA, 19 nt, Artificial Sequence
  Description of Artificial Sequence: Synthetic oligonucleotide
  Sense strand starting at position 253 of SEQ ID NO: 1244422
uagaguugaucuguuacaa

SEQ ID NO: 1487455 - RNA, 19 nt, Artificial Sequence
  Description of Artificial Sequence: Synthetic oligonucleotide
  Antisense strand to SEQ ID NO: 1487454
uuguaacagaucaacucua

SEQ ID NO: 1487456 - RNA, 19 nt, Artificial Sequence
  Description of Artificial Sequence: Synthetic oligonucleotide
  Sense strand starting at position 619 of SEQ ID NO: 1244422
gcagaacguccauaacuga

SEQ ID NO: 1487457 - RNA, 19 nt, Artificial Sequence
  Description of Artificial Sequence: Synthetic oligonucleotide
  Antisense strand to SEQ ID NO: 1487456
ucaguuauggacguucugc

SEQ ID NO: 1487458 - RNA, 19 nt, Artificial Sequence
  Description of Artificial Sequence: Synthetic oligonucleotide
  Sense strand starting at position 624 of SEQ ID NO: 1244422
acguccauaacugagaguu

SEQ ID NO: 1487459 - RNA, 19 nt, Artificial Sequence
  Description of Artificial Sequence: Synthetic oligonucleotide
  Antisense strand to SEQ ID NO: 1487458
aacucucaguuauggacgu

SEQ ID NO: 1487460 - RNA, 19 nt, Artificial Sequence
  Description of Artificial Sequence: Synthetic oligonucleotide
  Sense strand starting at position 648 of SEQ ID NO: 1244422
cugaauguauaguucuaaa

SEQ ID NO: 1487461 - RNA, 19 nt, Artificial Sequence
  Description of Artificial Sequence: Synthetic oligonucleotide
  Antisense strand to SEQ ID NO: 1487460
uuuagaacuauacauucag

SEQ ID NO: 1487462 - RNA, 19 nt, Artificial Sequence
  Description of Artificial Sequence: Synthetic oligonucleotide
  Sense strand starting at position 880 of SEQ ID NO: 1244422
gcaagauguagaggaccaa

SEQ ID NO: 1487463 - RNA, 19 nt, Artificial Sequence
  Description of Artificial Sequence: Synthetic oligonucleotide
  Antisense strand to SEQ ID NO: 1487462
uugguccucuacaucuugc

SEQ ID NO: 1487464 - RNA, 19 nt, Artificial Sequence
  Description of Artificial Sequence: Synthetic oligonucleotide
  Sense strand starting at position 1340 of SEQ ID NO: 1244422
guacgacucaucuggacaa

SEQ ID NO: 1487465 - RNA, 19 nt, Artificial Sequence
  Description of Artificial Sequence: Synthetic oligonucleotide
  Antisense strand to SEQ ID NO: 1487464
uuguccagaugagucguac

SEQ ID NO: 1487466 - RNA, 19 nt, Artificial Sequence
  Description of Artificial Sequence: Synthetic oligonucleotide
  Sense strand starting at position 1735 of SEQ ID NO: 1244422
gugccuccgccacagauuu

SEQ ID NO: 1487467 - RNA, 19 nt, Artificial Sequence
  Description of Artificial Sequence: Synthetic oligonucleotide
  Antisense strand to SEQ ID NO: 1487466
aaaucuguggcggaggcac

SEQ ID NO: 1487468 - RNA, 19 nt, Artificial Sequence
  Description of Artificial Sequence: Synthetic oligonucleotide
  Sense strand starting at position 2193 of SEQ ID NO: 1244422
cucuguaaaggcgaucaga

SEQ ID NO: 1487469 - RNA, 19 nt, Artificial Sequence
  Description of Artificial Sequence: Synthetic oligonucleotide
  Antisense strand to SEQ ID NO: 1487468
ucugaucgccuuuacagag

SEQ ID NO: 1487470 - RNA, 19 nt, Artificial Sequence
  Description of Artificial Sequence: Synthetic oligonucleotide
  Sense strand starting at position 2196 of SEQ ID NO: 1244422
uguaaaggcgaucagagua

SEQ ID NO: 1487471 - RNA, 19 nt, Artificial Sequence
  Description of Artificial Sequence: Synthetic oligonucleotide
  Antisense strand to SEQ ID NO: 1487470
uacucugaucgccuuuaca

SEQ ID NO: 1487472 - RNA, 19 nt, Artificial Sequence
  Description of Artificial Sequence: Synthetic oligonucleotide
  Sense strand starting at position 2201 of SEQ ID NO: 1244422
aggcgaucagaguacagua

SEQ ID NO: 1487473 - RNA, 19 nt, Artificial Sequence
  Description of Artificial Sequence: Synthetic oligonucleotide
  Antisense strand to SEQ ID NO: 1487472
uacuguacucugaucgccu

SEQ ID NO: 1487474 - RNA, 19 nt, Artificial Sequence
  Description of Artificial Sequence: Synthetic oligonucleotide
  Sense strand starting at position 2301 of SEQ ID NO: 1244422
agagaaaguggacgaguua

SEQ ID NO: 1487475 - RNA, 19 nt, Artificial Sequence
  Description of Artificial Sequence: Synthetic oligonucleotide
  Antisense strand to SEQ ID NO: 1487474
uaacucguccacuuucucu

SEQ ID NO: 1487476 - RNA, 19 nt, Artificial Sequence
  Description of Artificial Sequence: Synthetic oligonucleotide
  Sense strand starting at position 2353 of SEQ ID NO: 1244422
agagaagcuagaugucuaa

SEQ ID NO: 1487477 - RNA, 19 nt, Artificial Sequence
  Description of Artificial Sequence: Synthetic oligonucleotide
  Antisense strand to SEQ ID NO: 1487476
uuagacaucuagcuucucu

SEQ ID NO: 1487478 - RNA, 19 nt, Artificial Sequence
  Description of Artificial Sequence: Synthetic oligonucleotide
  Sense strand starting at position 2405 of SEQ ID NO: 1244422
ggcauuuaacguugaguca

SEQ ID NO: 1487479 - RNA, 19 nt, Artificial Sequence
  Description of Artificial Sequence: Synthetic oligonucleotide
  Antisense strand to SEQ ID NO: 1487478
ugacucaacguuaaaugcc

SEQ ID NO: 1487480 - RNA, 19 nt, Artificial Sequence
  Description of Artificial Sequence: Synthetic oligonucleotide
  Sense strand starting at position 2452 of SEQ ID NO: 1244422
guguucuaggguggaggaa

SEQ ID NO: 1487481 - RNA, 19 nt, Artificial Sequence
  Description of Artificial Sequence: Synthetic oligonucleotide
  Antisense strand to SEQ ID NO: 1487480
uuccuccacccuagaacac

SEQ ID NO: 1487482 - RNA, 19 nt, Artificial Sequence
  Description of Artificial Sequence: Synthetic oligonucleotide
  Sense strand starting at position 2474 of SEQ ID NO: 1244422
gcuacaagucauggcauuu

SEQ ID NO: 1487483 - RNA, 19 nt, Artificial Sequence
  Description of Artificial Sequence: Synthetic oligonucleotide
  Antisense strand to SEQ ID NO: 1487482
aaaugccaugacuuguagc

SEQ ID NO: 1487484 - RNA, 19 nt, Artificial Sequence
  Description of Artificial Sequence: Synthetic oligonucleotide
  Sense strand starting at position 2657 of SEQ ID NO: 1244422
caugaucagucccugagga

SEQ ID NO: 1487485 - RNA, 19 nt, Artificial Sequence
  Description of Artificial Sequence: Synthetic oligonucleotide
  Antisense strand to SEQ ID NO: 1487484
uccucagggacugaucaug

SEQ ID NO: 1487486 - RNA, 19 nt, Artificial Sequence
  Description of Artificial Sequence: Synthetic oligonucleotide
  Sense strand starting at position 2658 of SEQ ID NO: 1244422
augaucagucccugaggaa

SEQ ID NO: 1487487 - RNA, 19 nt, Artificial Sequence
  Description of Artificial Sequence: Synthetic oligonucleotide
  Antisense strand to SEQ ID NO: 1487486
uuccucagggacugaucau

SEQ ID NO: 1487488 - RNA, 19 nt, Artificial Sequence
  Description of Artificial Sequence: Synthetic oligonucleotide
  Sense strand starting at position 2995 of SEQ ID NO: 1244422
ggagauagauuugggaaau

SEQ ID NO: 1487489 - RNA, 19 nt, Artificial Sequence
  Description of Artificial Sequence: Synthetic oligonucleotide
  Antisense strand to SEQ ID NO: 1487488
auuucccaaaucuaucucc

SEQ ID NO: 1487490 - RNA, 19 nt, Artificial Sequence
  Description of Artificial Sequence: Synthetic oligonucleotide
  Sense strand starting at position 2996 of SEQ ID NO: 1244422
gagauagauuugggaaaua

SEQ ID NO: 1487491 - RNA, 19 nt, Artificial Sequence
  Description of Artificial Sequence: Synthetic oligonucleotide
  Antisense strand to SEQ ID NO: 1487490
uauuucccaaaucuaucuc

SEQ ID NO: 1487492 - RNA, 19 nt, Artificial Sequence
  Description of Artificial Sequence: Synthetic oligonucleotide
  Sense strand starting at position 3008 of SEQ ID NO: 1244422
ggaaauauuugguaggaga

SEQ ID NO: 1487493 - RNA, 19 nt, Artificial Sequence
  Description of Artificial Sequence: Synthetic oligonucleotide
  Antisense strand to SEQ ID NO: 1487492
ucuccuaccaaauauuucc

SEQ ID NO: 1487494 - RNA, 19 nt, Artificial Sequence
  Description of Artificial Sequence: Synthetic oligonucleotide
  Sense strand starting at position 3011 of SEQ ID NO: 1244422
aauauuugguaggagaauc

SEQ ID NO: 1487495 - RNA, 19 nt, Artificial Sequence
  Description of Artificial Sequence: Synthetic oligonucleotide
  Antisense strand to SEQ ID NO: 1487494
gauucuccuaccaaauauu

SEQ ID NO: 1487496 - RNA, 19 nt, Artificial Sequence
  Description of Artificial Sequence: Synthetic oligonucleotide
  Sense strand starting at position 3060 of SEQ ID NO: 1244422
gagugagaaugguuuaauc

SEQ ID NO: 1487497 - RNA, 19 nt, Artificial Sequence
  Description of Artificial Sequence: Synthetic oligonucleotide
  Antisense strand to SEQ ID NO: 1487496
gauuaaaccauucucacuc

SEQ ID NO: 1487498 - RNA, 19 nt, Artificial Sequence
  Description of Artificial Sequence: Synthetic oligonucleotide
  Sense strand starting at position 3091 of SEQ ID NO: 1244422
uacggaauuuaggaaagau

SEQ ID NO: 1487499 - RNA, 19 nt, Artificial Sequence
  Description of Artificial Sequence: Synthetic oligonucleotide
  Antisense strand to SEQ ID NO: 1487498
aucuuuccuaaauuccgua

SEQ ID NO: 1487500 - RNA, 19 nt, Artificial Sequence
  Description of Artificial Sequence: Synthetic oligonucleotide
  Sense strand starting at position 3221 of SEQ ID NO: 1244422
uccaguagauaguuggaua

SEQ ID NO: 1487501 - RNA, 19 nt, Artificial Sequence
  Description of Artificial Sequence: Synthetic oligonucleotide
  Antisense strand to SEQ ID NO: 1487500
uauccaacuaucuacugga

SEQ ID NO: 1487502 - RNA, 19 nt, Artificial Sequence
  Description of Artificial Sequence: Synthetic oligonucleotide
  Sense strand starting at position 3222 of SEQ ID NO: 1244422
ccaguagauaguuggauau

SEQ ID NO: 1487503 - RNA, 19 nt, Artificial Sequence
  Description of Artificial Sequence: Synthetic oligonucleotide
  Antisense strand to SEQ ID NO: 1487502
auauccaacuaucuacugg

SEQ ID NO: 1487504 - RNA, 19 nt, Artificial Sequence
  Description of Artificial Sequence: Synthetic oligonucleotide
  Sense strand starting at position 3234 of SEQ ID NO: 1244422
uggauauacagcuguggaa

SEQ ID NO: 1487505 - RNA, 19 nt, Artificial Sequence
  Description of Artificial Sequence: Synthetic oligonucleotide
  Antisense strand to SEQ ID NO: 1487504
uuccacagcuguauaucca

SEQ ID NO: 1487506 - RNA, 19 nt, Artificial Sequence
  Description of Artificial Sequence: Synthetic oligonucleotide
  Sense strand starting at position 3257 of SEQ ID NO: 1244422
aagaaaggucuagguugga

SEQ ID NO: 1487507 - RNA, 19 nt, Artificial Sequence
  Description of Artificial Sequence: Synthetic oligonucleotide
  Antisense strand to SEQ ID NO: 1487506
uccaaccuagaccuuucuu

SEQ ID NO: 1487508 - RNA, 19 nt, Artificial Sequence
  Description of Artificial Sequence: Synthetic oligonucleotide
  Sense strand starting at position 3260 of SEQ ID NO: 1244422
aaaggucuagguuggagau

SEQ ID NO: 1487509 - RNA, 19 nt, Artificial Sequence
  Description of Artificial Sequence: Synthetic oligonucleotide
  Antisense strand to SEQ ID NO: 1487508
aucuccaaccuagaccuuu

SEQ ID NO: 1487510 - RNA, 19 nt, Artificial Sequence
  Description of Artificial Sequence: Synthetic oligonucleotide
  Sense strand starting at position 3261 of SEQ ID NO: 1244422
aaggucuagguuggagaua

SEQ ID NO: 1487511 - RNA, 19 nt, Artificial Sequence
  Description of Artificial Sequence: Synthetic oligonucleotide
  Antisense strand to SEQ ID NO: 1487510
uaucuccaaccuagaccuu

SEQ ID NO: 1487512 - RNA, 19 nt, Artificial Sequence
  Description of Artificial Sequence: Synthetic oligonucleotide
  Sense strand starting at position 3285 of SEQ ID NO: 1244422
aguugagagucaucaacag

SEQ ID NO: 1487513 - RNA, 19 nt, Artificial Sequence
  Description of Artificial Sequence: Synthetic oligonucleotide
  Antisense strand to SEQ ID NO: 1487512
cuguugaugacucucaacu

SEQ ID NO: 1487514 - RNA, 19 nt, Artificial Sequence
  Description of Artificial Sequence: Synthetic oligonucleotide
  Sense strand starting at position 3293 of SEQ ID NO: 1244422
gucaucaacagauggaagu

SEQ ID NO: 1487515 - RNA, 19 nt, Artificial Sequence
  Description of Artificial Sequence: Synthetic oligonucleotide
  Antisense strand to SEQ ID NO: 1487514
acuuccaucuguugaugac

SEQ ID NO: 1487516 - RNA, 19 nt, Artificial Sequence
  Description of Artificial Sequence: Synthetic oligonucleotide
  Sense strand starting at position 3307 of SEQ ID NO: 1244422
gaaguaaagcugugggaau

SEQ ID NO: 1487517 - RNA, 19 nt, Artificial Sequence
  Description of Artificial Sequence: Synthetic oligonucleotide
  Antisense strand to SEQ ID NO: 1487516
auucccacagcuuuacuuc

SEQ ID NO: 1487518 - RNA, 19 nt, Artificial Sequence
  Description of Artificial Sequence: Synthetic oligonucleotide
  Sense strand starting at position 3309 of SEQ ID NO: 1244422
aguaaagcugugggaauaa

SEQ ID NO: 1487519 - RNA, 19 nt, Artificial Sequence
  Description of Artificial Sequence: Synthetic oligonucleotide
  Antisense strand to SEQ ID NO: 1487518
uuauucccacagcuuuacu

SEQ ID NO: 1487520 - RNA, 19 nt, Artificial Sequence
  Description of Artificial Sequence: Synthetic oligonucleotide
  Sense strand starting at position 3324 of SEQ ID NO: 1244422
auaaaugaguugccuuaga

SEQ ID NO: 1487521 - RNA, 19 nt, Artificial Sequence
  Description of Artificial Sequence: Synthetic oligonucleotide
  Antisense strand to SEQ ID NO: 1487520
ucuaaggcaacucauuuau

SEQ ID NO: 1487522 - RNA, 19 nt, Artificial Sequence
  Description of Artificial Sequence: Synthetic oligonucleotide
  Sense strand starting at position 3379 of SEQ ID NO: 1244422
cuagcauuagacuggacua

SEQ ID NO: 1487523 - RNA, 19 nt, Artificial Sequence
  Description of Artificial Sequence: Synthetic oligonucleotide
  Antisense strand to SEQ ID NO: 1487522
uaguccagucuaaugcuag

SEQ ID NO: 1487524 - RNA, 19 nt, Artificial Sequence
  Description of Artificial Sequence: Synthetic oligonucleotide
  Sense strand starting at position 3481 of SEQ ID NO: 1244422
gagugauuggcucaacgaa

SEQ ID NO: 1487525 - RNA, 19 nt, Artificial Sequence
  Description of Artificial Sequence: Synthetic oligonucleotide
  Antisense strand to SEQ ID NO: 1487524
uucguugagccaaucacuc

SEQ ID NO: 1487526 - RNA, 19 nt, Artificial Sequence
  Description of Artificial Sequence: Synthetic oligonucleotide
  Sense strand starting at position 3757 of SEQ ID NO: 1244422
agucguuugggugagggaa

SEQ ID NO: 1487527 - RNA, 19 nt, Artificial Sequence
  Description of Artificial Sequence: Synthetic oligonucleotide
  Antisense strand to SEQ ID NO: 1487526
uucccucacccaaacgacu

SEQ ID NO: 1487528 - RNA, 19 nt, Artificial Sequence
  Description of Artificial Sequence: Synthetic oligonucleotide
  Sense strand starting at position 3865 of SEQ ID NO: 1244422
guuuauauaagagguggga

SEQ ID NO: 1487529 - RNA, 19 nt, Artificial Sequence
  Description of Artificial Sequence: Synthetic oligonucleotide
  Antisense strand to SEQ ID NO: 1487528
ucccaccucuuauauaaac

SEQ ID NO: 1487530 - RNA, 19 nt, Artificial Sequence
  Description of Artificial Sequence: Synthetic oligonucleotide
  Sense strand starting at position 3867 of SEQ ID NO: 1244422
uuauauaagaggugggagu

SEQ ID NO: 1487531 - RNA, 19 nt, Artificial Sequence
  Description of Artificial Sequence: Synthetic oligonucleotide
  Antisense strand to SEQ ID NO: 1487530
acucccaccucuuauauaa

SEQ ID NO: 1487532 - RNA, 19 nt, Artificial Sequence
  Description of Artificial Sequence: Synthetic oligonucleotide
  Sense strand starting at position 673 of SEQ ID NO: 1244423
ggaaguagauacuaauauu

SEQ ID NO: 1487533 - RNA, 19 nt, Artificial Sequence
  Description of Artificial Sequence: Synthetic oligonucleotide
  Antisense strand to SEQ ID NO: 1487532
aauauuaguaucuacuucc

SEQ ID NO: 1487534 - RNA, 19 nt, Artificial Sequence
  Description of Artificial Sequence: Synthetic oligonucleotide
  Sense strand starting at position 745 of SEQ ID NO: 1244423
auguccuauugccaaugau

SEQ ID NO: 1487535 - RNA, 19 nt, Artificial Sequence
  Description of Artificial Sequence: Synthetic oligonucleotide
  Antisense strand to SEQ ID NO: 1487534
aucauuggcaauaggacau

SEQ ID NO: 1487536 - RNA, 19 nt, Artificial Sequence
  Description of Artificial Sequence: Synthetic oligonucleotide
  Sense strand starting at position 772 of SEQ ID NO: 1244423
guucuuuacguccaagaua

SEQ ID NO: 1487537 - RNA, 19 nt, Artificial Sequence
  Description of Artificial Sequence: Synthetic oligonucleotide
  Antisense strand to SEQ ID NO: 1487536
uaucuuggacguaaagaac

SEQ ID NO: 1487538 - RNA, 19 nt, Artificial Sequence
  Description of Artificial Sequence: Synthetic oligonucleotide
  Sense strand starting at position 777 of SEQ ID NO: 1244423
uuacguccaagauaggauu

SEQ ID NO: 1487539 - RNA, 19 nt, Artificial Sequence
  Description of Artificial Sequence: Synthetic oligonucleotide
  Antisense strand to SEQ ID NO: 1487538
aauccuaucuuggacguaa

SEQ ID NO: 1487540 - RNA, 19 nt, Artificial Sequence
  Description of Artificial Sequence: Synthetic oligonucleotide
  Sense strand starting at position 788 of SEQ ID NO: 1244423
auaggauuagcauauagca

SEQ ID NO: 1487541 - RNA, 19 nt, Artificial Sequence
  Description of Artificial Sequence: Synthetic oligonucleotide
  Antisense strand to SEQ ID NO: 1487540
ugcuauaugcuaauccuau

SEQ ID NO: 1487542 - RNA, 19 nt, Artificial Sequence
  Description of Artificial Sequence: Synthetic oligonucleotide
  Sense strand starting at position 810 of SEQ ID NO: 1244423
ugcaguguuucccaaacua

SEQ ID NO: 1487543 - RNA, 19 nt, Artificial Sequence
  Description of Artificial Sequence: Synthetic oligonucleotide
  Antisense strand to SEQ ID NO: 1487542
uaguuugggaaacacugca

SEQ ID NO: 1487544 - RNA, 19 nt, Artificial Sequence
  Description of Artificial Sequence: Synthetic oligonucleotide
  Sense strand starting at position 899 of SEQ ID NO: 1244423
cccagaguuugguuuagua

SEQ ID NO: 1487545 - RNA, 19 nt, Artificial Sequence
  Description of Artificial Sequence: Synthetic oligonucleotide
  Antisense strand to SEQ ID NO: 1487544
uacuaaaccaaacucuggg

SEQ ID NO: 1487546 - RNA, 19 nt, Artificial Sequence
  Description of Artificial Sequence: Synthetic oligonucleotide
  Sense strand starting at position 901 of SEQ ID NO: 1244423
cagaguuugguuuaguaag

SEQ ID NO: 1487547 - RNA, 19 nt, Artificial Sequence
  Description of Artificial Sequence: Synthetic oligonucleotide
  Antisense strand to SEQ ID NO: 1487546
cuuacuaaaccaaacucug

SEQ ID NO: 1487548 - RNA, 19 nt, Artificial Sequence
  Description of Artificial Sequence: Synthetic oligonucleotide
  Sense strand starting at position 1341 of SEQ ID NO: 1244423
aagcauggguauucggaua

SEQ ID NO: 1487549 - RNA, 19 nt, Artificial Sequence
  Description of Artificial Sequence: Synthetic oligonucleotide
  Antisense strand to SEQ ID NO: 1487548
uauccgaauacccaugcuu

SEQ ID NO: 1487550 - RNA, 19 nt, Artificial Sequence
  Description of Artificial Sequence: Synthetic oligonucleotide
  Sense strand starting at position 1444 of SEQ ID NO: 1244423
gggauauuaacguguccca

SEQ ID NO: 1487551 - RNA, 19 nt, Artificial Sequence
  Description of Artificial Sequence: Synthetic oligonucleotide
  Antisense strand to SEQ ID NO: 1487550
ugggacacguuaauauccc

SEQ ID NO: 1487552 - RNA, 19 nt, Artificial Sequence
  Description of Artificial Sequence: Synthetic oligonucleotide
  Sense strand starting at position 1542 of SEQ ID NO: 1244423
cccuuugguuggcguguaa

SEQ ID NO: 1487553 - RNA, 19 nt, Artificial Sequence
  Description of Artificial Sequence: Synthetic oligonucleotide
  Antisense strand to SEQ ID NO: 1487552
uuacacgccaaccaaaggg

SEQ ID NO: 1487554 - RNA, 19 nt, Artificial Sequence
  Description of Artificial Sequence: Synthetic oligonucleotide
  Sense strand starting at position 1554 of SEQ ID NO: 1244423
cguguaaagcgcuaugcca

SEQ ID NO: 1487555 - RNA, 19 nt, Artificial Sequence
  Description of Artificial Sequence: Synthetic oligonucleotide
  Antisense strand to SEQ ID NO: 1487554
uggcauagcgcuuuacacg

SEQ ID NO: 1487556 - RNA, 19 nt, Artificial Sequence
  Description of Artificial Sequence: Synthetic oligonucleotide
  Sense strand starting at position 1646 of SEQ ID NO: 1244423
accgcagacccucgguaau

SEQ ID NO: 1487557 - RNA, 19 nt, Artificial Sequence
  Description of Artificial Sequence: Synthetic oligonucleotide
  Antisense strand to SEQ ID NO: 1487556
auuaccgagggucugcggu

SEQ ID NO: 1487558 - RNA, 19 nt, Artificial Sequence
  Description of Artificial Sequence: Synthetic oligonucleotide
  Sense strand starting at position 1648 of SEQ ID NO: 1244423
cgcagacccucgguaauau

SEQ ID NO: 1487559 - RNA, 19 nt, Artificial Sequence
  Description of Artificial Sequence: Synthetic oligonucleotide
  Antisense strand to SEQ ID NO: 1487558
auauuaccgagggucugcg

SEQ ID NO: 1487560 - RNA, 19 nt, Artificial Sequence
  Description of Artificial Sequence: Synthetic oligonucleotide
  Sense strand starting at position 1649 of SEQ ID NO: 1244423
gcagacccucgguaauaug

SEQ ID NO: 1487561 - RNA, 19 nt, Artificial Sequence
  Description of Artificial Sequence: Synthetic oligonucleotide
  Antisense strand to SEQ ID NO: 1487560
cauauuaccgagggucugc

SEQ ID NO: 1487562 - RNA, 19 nt, Artificial Sequence
  Description of Artificial Sequence: Synthetic oligonucleotide
  Sense strand starting at position 1652 of SEQ ID NO: 1244423
gacccucgguaauaugauu

SEQ ID NO: 1487563 - RNA, 19 nt, Artificial Sequence
  Description of Artificial Sequence: Synthetic oligonucleotide
  Antisense strand to SEQ ID NO: 1487562
aaucauauuaccgaggguc

SEQ ID NO: 1487564 - RNA, 19 nt, Artificial Sequence
  Description of Artificial Sequence: Synthetic oligonucleotide
  Sense strand starting at position 2155 of SEQ ID NO: 1244423
gggauuagaaaugggcuua

SEQ ID NO: 1487565 - RNA, 19 nt, Artificial Sequence
  Description of Artificial Sequence: Synthetic oligonucleotide
  Antisense strand to SEQ ID NO: 1487564
uaagcccauuucuaauccc

SEQ ID NO: 1487566 - RNA, 19 nt, Artificial Sequence
  Description of Artificial Sequence: Synthetic oligonucleotide
  Sense strand starting at position 2362 of SEQ ID NO: 1244423
ucucgaacuuucuggcaca

SEQ ID NO: 1487567 - RNA, 19 nt, Artificial Sequence
  Description of Artificial Sequence: Synthetic oligonucleotide
  Antisense strand to SEQ ID NO: 1487566
ugugccagaaaguucgaga

SEQ ID NO: 1487568 - RNA, 19 nt, Artificial Sequence
  Description of Artificial Sequence: Synthetic oligonucleotide
  Sense strand starting at position 2400 of SEQ ID NO: 1244423
cucagaguagccuggacua

SEQ ID NO: 1487569 - RNA, 19 nt, Artificial Sequence
  Description of Artificial Sequence: Synthetic oligonucleotide
  Antisense strand to SEQ ID NO: 1487568
uaguccaggcuacucugag

SEQ ID NO: 1487570 - RNA, 19 nt, Artificial Sequence
  Description of Artificial Sequence: Synthetic oligonucleotide
  Sense strand starting at position 2580 of SEQ ID NO: 1244423
ccacgccuagccuagaaau

SEQ ID NO: 1487571 - RNA, 19 nt, Artificial Sequence
  Description of Artificial Sequence: Synthetic oligonucleotide
  Antisense strand to SEQ ID NO: 1487570
auuucuaggcuaggcgugg

SEQ ID NO: 1487572 - RNA, 19 nt, Artificial Sequence
  Description of Artificial Sequence: Synthetic oligonucleotide
  Sense strand starting at position 2582 of SEQ ID NO: 1244423
acgccuagccuagaaauua

SEQ ID NO: 1487573 - RNA, 19 nt, Artificial Sequence
  Description of Artificial Sequence: Synthetic oligonucleotide
  Antisense strand to SEQ ID NO: 1487572
uaauuucuaggcuaggcgu

SEQ ID NO: 1487574 - RNA, 19 nt, Artificial Sequence
  Description of Artificial Sequence: Synthetic oligonucleotide
  Sense strand starting at position 2780 of SEQ ID NO: 1244423
gcaugcgccuguggucaua

SEQ ID NO: 1487575 - RNA, 19 nt, Artificial Sequence
  Description of Artificial Sequence: Synthetic oligonucleotide
  Antisense strand to SEQ ID NO: 1487574
uaugaccacaggcgcaugc

SEQ ID NO: 1487576 - RNA, 19 nt, Artificial Sequence
  Description of Artificial Sequence: Synthetic oligonucleotide
  Sense strand starting at position 2816 of SEQ ID NO: 1244423
ggugguagauucucuugaa

SEQ ID NO: 1487577 - RNA, 19 nt, Artificial Sequence
  Description of Artificial Sequence: Synthetic oligonucleotide
  Antisense strand to SEQ ID NO: 1487576
uucaagagaaucuaccacc

SEQ ID NO: 1487578 - RNA, 19 nt, Artificial Sequence
  Description of Artificial Sequence: Synthetic oligonucleotide
  Sense strand starting at position 2817 of SEQ ID NO: 1244423
gugguagauucucuugaac

SEQ ID NO: 1487579 - RNA, 19 nt, Artificial Sequence
  Description of Artificial Sequence: Synthetic oligonucleotide
  Antisense strand to SEQ ID NO: 1487578
guucaagagaaucuaccac

SEQ ID NO: 1487580 - RNA, 19 nt, Artificial Sequence
  Description of Artificial Sequence: Synthetic oligonucleotide
  Sense strand starting at position 2819 of SEQ ID NO: 1244423
gguagauucucuugaaccu

SEQ ID NO: 1487581 - RNA, 19 nt, Artificial Sequence
  Description of Artificial Sequence: Synthetic oligonucleotide
  Antisense strand to SEQ ID NO: 1487580
agguucaagagaaucuacc

SEQ ID NO: 1487582 - RNA, 19 nt, Artificial Sequence
  Description of Artificial Sequence: Synthetic oligonucleotide
  Sense strand starting at position 2971 of SEQ ID NO: 1244423
acucaauaauacucgagua

SEQ ID NO: 1487583 - RNA, 19 nt, Artificial Sequence
  Description of Artificial Sequence: Synthetic oligonucleotide
  Antisense strand to SEQ ID NO: 1487582
uacucgaguauuauugagu

SEQ ID NO: 1487584 - RNA, 19 nt, Artificial Sequence
  Description of Artificial Sequence: Synthetic oligonucleotide
  Sense strand starting at position 3012 of SEQ ID NO: 1244423
ucaucaaugcuguaaagca

SEQ ID NO: 1487585 - RNA, 19 nt, Artificial Sequence
  Description of Artificial Sequence: Synthetic oligonucleotide
  Antisense strand to SEQ ID NO: 1487584
ugcuuuacagcauugauga

SEQ ID NO: 1487586 - RNA, 19 nt, Artificial Sequence
  Description of Artificial Sequence: Synthetic oligonucleotide
  Sense strand starting at position 3020 of SEQ ID NO: 1244423
gcuguaaagcaauaauagu

SEQ ID NO: 1487587 - RNA, 19 nt, Artificial Sequence
  Description of Artificial Sequence: Synthetic oligonucleotide
  Antisense strand to SEQ ID NO: 1487586
acuauuauugcuuuacagc

SEQ ID NO: 1487588 - RNA, 19 nt, Artificial Sequence
  Description of Artificial Sequence: Synthetic oligonucleotide
  Sense strand starting at position 3065 of SEQ ID NO: 1244423
uguucuaagugcuuuccca

SEQ ID NO: 1487589 - RNA, 19 nt, Artificial Sequence
  Description of Artificial Sequence: Synthetic oligonucleotide
  Antisense strand to SEQ ID NO: 1487588
ugggaaagcacuuagaaca

SEQ ID NO: 1487590 - RNA, 19 nt, Artificial Sequence
  Description of Artificial Sequence: Synthetic oligonucleotide
  Sense strand starting at position 3118 of SEQ ID NO: 1244423
ccauauuacugaggaacug

SEQ ID NO: 1487591 - RNA, 19 nt, Artificial Sequence
  Description of Artificial Sequence: Synthetic oligonucleotide
  Antisense strand to SEQ ID NO: 1487590
caguuccucaguaauaugg

SEQ ID NO: 1487592 - RNA, 19 nt, Artificial Sequence
  Description of Artificial Sequence: Synthetic oligonucleotide
  Sense strand starting at position 3289 of SEQ ID NO: 1244423
gccucacucuggucagagu

SEQ ID NO: 1487593 - RNA, 19 nt, Artificial Sequence
  Description of Artificial Sequence: Synthetic oligonucleotide
  Antisense strand to SEQ ID NO: 1487592
acucugaccagagugaggc

SEQ ID NO: 1487594 - RNA, 19 nt, Artificial Sequence
  Description of Artificial Sequence: Synthetic oligonucleotide
  Sense strand starting at position 3298 of SEQ ID NO: 1244423
uggucagagucaccaucau

SEQ ID NO: 1487595 - RNA, 19 nt, Artificial Sequence
  Description of Artificial Sequence: Synthetic oligonucleotide
  Antisense strand to SEQ ID NO: 1487594
augauggugacucugacca

SEQ ID NO: 1487596 - RNA, 19 nt, Artificial Sequence
  Description of Artificial Sequence: Synthetic oligonucleotide
  Sense strand starting at position 3546 of SEQ ID NO: 1244423
gguuaaaucuugcuggcuu

SEQ ID NO: 1487597 - RNA, 19 nt, Artificial Sequence
  Description of Artificial Sequence: Synthetic oligonucleotide
  Antisense strand to SEQ ID NO: 1487596
aagccagcaagauuuaacc

SEQ ID NO: 1487598 - RNA, 19 nt, Artificial Sequence
  Description of Artificial Sequence: Synthetic oligonucleotide
  Sense strand starting at position 3547 of SEQ ID NO: 1244423
guuaaaucuugcuggcuuu

SEQ ID NO: 1487599 - RNA, 19 nt, Artificial Sequence
  Description of Artificial Sequence: Synthetic oligonucleotide
  Antisense strand to SEQ ID NO: 1487598
aaagccagcaagauuuaac

SEQ ID NO: 1487600 - RNA, 19 nt, Artificial Sequence
  Description of Artificial Sequence: Synthetic oligonucleotide
  Sense strand starting at position 3636 of SEQ ID NO: 1244423
acuguuauggagugaauug

SEQ ID NO: 1487601 - RNA, 19 nt, Artificial Sequence
  Description of Artificial Sequence: Synthetic oligonucleotide
  Antisense strand to SEQ ID NO: 1487600
caauucacuccauaacagu

SEQ ID NO: 1487602 - RNA, 19 nt, Artificial Sequence
  Description of Artificial Sequence: Synthetic oligonucleotide
  Sense strand starting at position 3637 of SEQ ID NO: 1244423
cuguuauggagugaauugu

SEQ ID NO: 1487603 - RNA, 19 nt, Artificial Sequence
  Description of Artificial Sequence: Synthetic oligonucleotide
  Antisense strand to SEQ ID NO: 1487602
acaauucacuccauaacag

SEQ ID NO: 1487604 - RNA, 19 nt, Artificial Sequence
  Description of Artificial Sequence: Synthetic oligonucleotide
  Sense strand starting at position 3878 of SEQ ID NO: 1244423
acgccucugcccuaauuua

SEQ ID NO: 1487605 - RNA, 19 nt, Artificial Sequence
  Description of Artificial Sequence: Synthetic oligonucleotide
  Antisense strand to SEQ ID NO: 1487604
uaaauuagggcagaggcgu

SEQ ID NO: 1487606 - RNA, 19 nt, Artificial Sequence
  Description of Artificial Sequence: Synthetic oligonucleotide
  Sense strand starting at position 609 of SEQ ID NO: 1244424
ggaaguagauacuaauauu

SEQ ID NO: 1487607 - RNA, 19 nt, Artificial Sequence
  Description of Artificial Sequence: Synthetic oligonucleotide
  Antisense strand to SEQ ID NO: 1487606
aauauuaguaucuacuucc

SEQ ID NO: 1487608 - RNA, 19 nt, Artificial Sequence
  Description of Artificial Sequence: Synthetic oligonucleotide
  Sense strand starting at position 681 of SEQ ID NO: 1244424
auguccuauugccaaugau

SEQ ID NO: 1487609 - RNA, 19 nt, Artificial Sequence
  Description of Artificial Sequence: Synthetic oligonucleotide
  Antisense strand to SEQ ID NO: 1487608
aucauuggcaauaggacau

SEQ ID NO: 1487610 - RNA, 19 nt, Artificial Sequence
  Description of Artificial Sequence: Synthetic oligonucleotide
  Sense strand starting at position 708 of SEQ ID NO: 1244424
guucuuuacguccaagaua

SEQ ID NO: 1487611 - RNA, 19 nt, Artificial Sequence
  Description of Artificial Sequence: Synthetic oligonucleotide
  Antisense strand to SEQ ID NO: 1487610
uaucuuggacguaaagaac

SEQ ID NO: 1487612 - RNA, 19 nt, Artificial Sequence
  Description of Artificial Sequence: Synthetic oligonucleotide
  Sense strand starting at position 713 of SEQ ID NO: 1244424
uuacguccaagauaggauu

SEQ ID NO: 1487613 - RNA, 19 nt, Artificial Sequence
  Description of Artificial Sequence: Synthetic oligonucleotide
  Antisense strand to SEQ ID NO: 1487612
aauccuaucuuggacguaa

SEQ ID NO: 1487614 - RNA, 19 nt, Artificial Sequence
  Description of Artificial Sequence: Synthetic oligonucleotide
  Sense strand starting at position 724 of SEQ ID NO: 1244424
auaggauuagcauauagca

SEQ ID NO: 1487615 - RNA, 19 nt, Artificial Sequence
  Description of Artificial Sequence: Synthetic oligonucleotide
  Antisense strand to SEQ ID NO: 1487614
ugcuauaugcuaauccuau

SEQ ID NO: 1487616 - RNA, 19 nt, Artificial Sequence
  Description of Artificial Sequence: Synthetic oligonucleotide
  Sense strand starting at position 746 of SEQ ID NO: 1244424
ugcaguguuucccaaacua

SEQ ID NO: 1487617 - RNA, 19 nt, Artificial Sequence
  Description of Artificial Sequence: Synthetic oligonucleotide
  Antisense strand to SEQ ID NO: 1487616
uaguuugggaaacacugca

SEQ ID NO: 1487618 - RNA, 19 nt, Artificial Sequence
  Description of Artificial Sequence: Synthetic oligonucleotide
  Sense strand starting at position 835 of SEQ ID NO: 1244424
cccagaguuugguuuagua

SEQ ID NO: 1487619 - RNA, 19 nt, Artificial Sequence
  Description of Artificial Sequence: Synthetic oligonucleotide
  Antisense strand to SEQ ID NO: 1487618
uacuaaaccaaacucuggg

SEQ ID NO: 1487620 - RNA, 19 nt, Artificial Sequence
  Description of Artificial Sequence: Synthetic oligonucleotide
  Sense strand starting at position 837 of SEQ ID NO: 1244424
cagaguuugguuuaguaag

SEQ ID NO: 1487621 - RNA, 19 nt, Artificial Sequence
  Description of Artificial Sequence: Synthetic oligonucleotide
  Antisense strand to SEQ ID NO: 1487620
cuuacuaaaccaaacucug

SEQ ID NO: 1487622 - RNA, 19 nt, Artificial Sequence
  Description of Artificial Sequence: Synthetic oligonucleotide
  Sense strand starting at position 1277 of SEQ ID NO: 1244424
aagcauggguauucggaua

SEQ ID NO: 1487623 - RNA, 19 nt, Artificial Sequence
  Description of Artificial Sequence: Synthetic oligonucleotide
  Antisense strand to SEQ ID NO: 1487622
uauccgaauacccaugcuu

SEQ ID NO: 1487624 - RNA, 19 nt, Artificial Sequence
  Description of Artificial Sequence: Synthetic oligonucleotide
  Sense strand starting at position 1380 of SEQ ID NO: 1244424
gggauauuaacguguccca

SEQ ID NO: 1487625 - RNA, 19 nt, Artificial Sequence
  Description of Artificial Sequence: Synthetic oligonucleotide
  Antisense strand to SEQ ID NO: 1487624
ugggacacguuaauauccc

SEQ ID NO: 1487626 - RNA, 19 nt, Artificial Sequence
  Description of Artificial Sequence: Synthetic oligonucleotide
  Sense strand starting at position 1478 of SEQ ID NO: 1244424
cccuuugguuggcguguaa

SEQ ID NO: 1487627 - RNA, 19 nt, Artificial Sequence
  Description of Artificial Sequence: Synthetic oligonucleotide
  Antisense strand to SEQ ID NO: 1487626
uuacacgccaaccaaaggg

SEQ ID NO: 1487628 - RNA, 19 nt, Artificial Sequence
  Description of Artificial Sequence: Synthetic oligonucleotide
  Sense strand starting at position 1490 of SEQ ID NO: 1244424
cguguaaagcgcuaugcca

SEQ ID NO: 1487629 - RNA, 19 nt, Artificial Sequence
  Description of Artificial Sequence: Synthetic oligonucleotide
  Antisense strand to SEQ ID NO: 1487628
uggcauagcgcuuuacacg

SEQ ID NO: 1487630 - RNA, 19 nt, Artificial Sequence
  Description of Artificial Sequence: Synthetic oligonucleotide
  Sense strand starting at position 1582 of SEQ ID NO: 1244424
accgcagacccucgguaau

SEQ ID NO: 1487631 - RNA, 19 nt, Artificial Sequence
  Description of Artificial Sequence: Synthetic oligonucleotide
  Antisense strand to SEQ ID NO: 1487630
auuaccgagggucugcggu

SEQ ID NO: 1487632 - RNA, 19 nt, Artificial Sequence
  Description of Artificial Sequence: Synthetic oligonucleotide
  Sense strand starting at position 1584 of SEQ ID NO: 1244424
cgcagacccucgguaauau

SEQ ID NO: 1487633 - RNA, 19 nt, Artificial Sequence
  Description of Artificial Sequence: Synthetic oligonucleotide
  Antisense strand to SEQ ID NO: 1487632
auauuaccgagggucugcg

SEQ ID NO: 1487634 - RNA, 19 nt, Artificial Sequence
  Description of Artificial Sequence: Synthetic oligonucleotide
  Sense strand starting at position 1585 of SEQ ID NO: 1244424
gcagacccucgguaauaug

SEQ ID NO: 1487635 - RNA, 19 nt, Artificial Sequence
  Description of Artificial Sequence: Synthetic oligonucleotide
  Antisense strand to SEQ ID NO: 1487634
cauauuaccgagggucugc

SEQ ID NO: 1487636 - RNA, 19 nt, Artificial Sequence
  Description of Artificial Sequence: Synthetic oligonucleotide
  Sense strand starting at position 1588 of SEQ ID NO: 1244424
gacccucgguaauaugauu

SEQ ID NO: 1487637 - RNA, 19 nt, Artificial Sequence
  Description of Artificial Sequence: Synthetic oligonucleotide
  Antisense strand to SEQ ID NO: 1487636
aaucauauuaccgaggguc

SEQ ID NO: 1487638 - RNA, 19 nt, Artificial Sequence
  Description of Artificial Sequence: Synthetic oligonucleotide
  Sense strand starting at position 2091 of SEQ ID NO: 1244424
gggauuagaaaugggcuua

SEQ ID NO: 1487639 - RNA, 19 nt, Artificial Sequence
  Description of Artificial Sequence: Synthetic oligonucleotide
  Antisense strand to SEQ ID NO: 1487638
uaagcccauuucuaauccc

SEQ ID NO: 1487640 - RNA, 19 nt, Artificial Sequence
  Description of Artificial Sequence: Synthetic oligonucleotide
  Sense strand starting at position 2298 of SEQ ID NO: 1244424
ucucgaacuuucuggcaca

SEQ ID NO: 1487641 - RNA, 19 nt, Artificial Sequence
  Description of Artificial Sequence: Synthetic oligonucleotide
  Antisense strand to SEQ ID NO: 1487640
ugugccagaaaguucgaga

SEQ ID NO: 1487642 - RNA, 19 nt, Artificial Sequence
  Description of Artificial Sequence: Synthetic oligonucleotide
  Sense strand starting at position 2336 of SEQ ID NO: 1244424
cucagaguagccuggacua

SEQ ID NO: 1487643 - RNA, 19 nt, Artificial Sequence
  Description of Artificial Sequence: Synthetic oligonucleotide
  Antisense strand to SEQ ID NO: 1487642
uaguccaggcuacucugag

SEQ ID NO: 1487644 - RNA, 19 nt, Artificial Sequence
  Description of Artificial Sequence: Synthetic oligonucleotide
  Sense strand starting at position 2516 of SEQ ID NO: 1244424
ccacgccuagccuagaaau

SEQ ID NO: 1487645 - RNA, 19 nt, Artificial Sequence
  Description of Artificial Sequence: Synthetic oligonucleotide
  Antisense strand to SEQ ID NO: 1487644
auuucuaggcuaggcgugg

SEQ ID NO: 1487646 - RNA, 19 nt, Artificial Sequence
  Description of Artificial Sequence: Synthetic oligonucleotide
  Sense strand starting at position 2518 of SEQ ID NO: 1244424
acgccuagccuagaaauua

SEQ ID NO: 1487647 - RNA, 19 nt, Artificial Sequence
  Description of Artificial Sequence: Synthetic oligonucleotide
  Antisense strand to SEQ ID NO: 1487646
uaauuucuaggcuaggcgu

SEQ ID NO: 1487648 - RNA, 19 nt, Artificial Sequence
  Description of Artificial Sequence: Synthetic oligonucleotide
  Sense strand starting at position 2716 of SEQ ID NO: 1244424
gcaugcgccuguggucaua

SEQ ID NO: 1487649 - RNA, 19 nt, Artificial Sequence
  Description of Artificial Sequence: Synthetic oligonucleotide
  Antisense strand to SEQ ID NO: 1487648
uaugaccacaggcgcaugc

SEQ ID NO: 1487650 - RNA, 19 nt, Artificial Sequence
  Description of Artificial Sequence: Synthetic oligonucleotide
  Sense strand starting at position 2752 of SEQ ID NO: 1244424
ggugguagauucucuugaa

SEQ ID NO: 1487651 - RNA, 19 nt, Artificial Sequence
  Description of Artificial Sequence: Synthetic oligonucleotide
  Antisense strand to SEQ ID NO: 1487650
uucaagagaaucuaccacc

SEQ ID NO: 1487652 - RNA, 19 nt, Artificial Sequence
  Description of Artificial Sequence: Synthetic oligonucleotide
  Sense strand starting at position 2753 of SEQ ID NO: 1244424
gugguagauucucuugaac

SEQ ID NO: 1487653 - RNA, 19 nt, Artificial Sequence
  Description of Artificial Sequence: Synthetic oligonucleotide
  Antisense strand to SEQ ID NO: 1487652
guucaagagaaucuaccac

SEQ ID NO: 1487654 - RNA, 19 nt, Artificial Sequence
  Description of Artificial Sequence: Synthetic oligonucleotide
  Sense strand starting at position 2755 of SEQ ID NO: 1244424
gguagauucucuugaaccu

SEQ ID NO: 1487655 - RNA, 19 nt, Artificial Sequence
  Description of Artificial Sequence: Synthetic oligonucleotide
  Antisense strand to SEQ ID NO: 1487654
agguucaagagaaucuacc

SEQ ID NO: 1487656 - RNA, 19 nt, Artificial Sequence
  Description of Artificial Sequence: Synthetic oligonucleotide
  Sense strand starting at position 2907 of SEQ ID NO: 1244424
acucaauaauacucgagua

SEQ ID NO: 1487657 - RNA, 19 nt, Artificial Sequence
  Description of Artificial Sequence: Synthetic oligonucleotide
  Antisense strand to SEQ ID NO: 1487656
uacucgaguauuauugagu

SEQ ID NO: 1487658 - RNA, 19 nt, Artificial Sequence
  Description of Artificial Sequence: Synthetic oligonucleotide
  Sense strand starting at position 2948 of SEQ ID NO: 1244424
ucaucaaugcuguaaagca

SEQ ID NO: 1487659 - RNA, 19 nt, Artificial Sequence
  Description of Artificial Sequence: Synthetic oligonucleotide
  Antisense strand to SEQ ID NO: 1487658
ugcuuuacagcauugauga

SEQ ID NO: 1487660 - RNA, 19 nt, Artificial Sequence
  Description of Artificial Sequence: Synthetic oligonucleotide
  Sense strand starting at position 2956 of SEQ ID NO: 1244424
gcuguaaagcaauaauagu

SEQ ID NO: 1487661 - RNA, 19 nt, Artificial Sequence
  Description of Artificial Sequence: Synthetic oligonucleotide
  Antisense strand to SEQ ID NO: 1487660
acuauuauugcuuuacagc

SEQ ID NO: 1487662 - RNA, 19 nt, Artificial Sequence
  Description of Artificial Sequence: Synthetic oligonucleotide
  Sense strand starting at position 3001 of SEQ ID NO: 1244424
uguucuaagugcuuuccca

SEQ ID NO: 1487663 - RNA, 19 nt, Artificial Sequence
  Description of Artificial Sequence: Synthetic oligonucleotide
  Antisense strand to SEQ ID NO: 1487662
ugggaaagcacuuagaaca

SEQ ID NO: 1487664 - RNA, 19 nt, Artificial Sequence
  Description of Artificial Sequence: Synthetic oligonucleotide
  Sense strand starting at position 3054 of SEQ ID NO: 1244424
ccauauuacugaggaacug

SEQ ID NO: 1487665 - RNA, 19 nt, Artificial Sequence
  Description of Artificial Sequence: Synthetic oligonucleotide
  Antisense strand to SEQ ID NO: 1487664
caguuccucaguaauaugg

SEQ ID NO: 1487666 - RNA, 19 nt, Artificial Sequence
  Description of Artificial Sequence: Synthetic oligonucleotide
  Sense strand starting at position 3225 of SEQ ID NO: 1244424
gccucacucuggucagagu

SEQ ID NO: 1487667 - RNA, 19 nt, Artificial Sequence
  Description of Artificial Sequence: Synthetic oligonucleotide
  Antisense strand to SEQ ID NO: 1487666
acucugaccagagugaggc

SEQ ID NO: 1487668 - RNA, 19 nt, Artificial Sequence
  Description of Artificial Sequence: Synthetic oligonucleotide
  Sense strand starting at position 3234 of SEQ ID NO: 1244424
uggucagagucaccaucau

SEQ ID NO: 1487669 - RNA, 19 nt, Artificial Sequence
  Description of Artificial Sequence: Synthetic oligonucleotide
  Antisense strand to SEQ ID NO: 1487668
augauggugacucugacca

SEQ ID NO: 1487670 - RNA, 19 nt, Artificial Sequence
  Description of Artificial Sequence: Synthetic oligonucleotide
  Sense strand starting at position 3482 of SEQ ID NO: 1244424
gguuaaaucuugcuggcuu

SEQ ID NO: 1487671 - RNA, 19 nt, Artificial Sequence
  Description of Artificial Sequence: Synthetic oligonucleotide
  Antisense strand to SEQ ID NO: 1487670
aagccagcaagauuuaacc

SEQ ID NO: 1487672 - RNA, 19 nt, Artificial Sequence
  Description of Artificial Sequence: Synthetic oligonucleotide
  Sense strand starting at position 3483 of SEQ ID NO: 1244424
guuaaaucuugcuggcuuu

SEQ ID NO: 1487673 - RNA, 19 nt, Artificial Sequence
  Description of Artificial Sequence: Synthetic oligonucleotide
  Antisense strand to SEQ ID NO: 1487672
aaagccagcaagauuuaac

SEQ ID NO: 1487674 - RNA, 19 nt, Artificial Sequence
  Description of Artificial Sequence: Synthetic oligonucleotide
  Sense strand starting at position 3572 of SEQ ID NO: 1244424
acuguuauggagugaauug

SEQ ID NO: 1487675 - RNA, 19 nt, Artificial Sequence
  Description of Artificial Sequence: Synthetic oligonucleotide
  Antisense strand to SEQ ID NO: 1487674
caauucacuccauaacagu

SEQ ID NO: 1487676 - RNA, 19 nt, Artificial Sequence
  Description of Artificial Sequence: Synthetic oligonucleotide
  Sense strand starting at position 3573 of SEQ ID NO: 1244424
cuguuauggagugaauugu

SEQ ID NO: 1487677 - RNA, 19 nt, Artificial Sequence
  Description of Artificial Sequence: Synthetic oligonucleotide
  Antisense strand to SEQ ID NO: 1487676
acaauucacuccauaacag

SEQ ID NO: 1487678 - RNA, 19 nt, Artificial Sequence
  Description of Artificial Sequence: Synthetic oligonucleotide
  Sense strand starting at position 3814 of SEQ ID NO: 1244424
acgccucugcccuaauuua

SEQ ID NO: 1487679 - RNA, 19 nt, Artificial Sequence
  Description of Artificial Sequence: Synthetic oligonucleotide
  Antisense strand to SEQ ID NO: 1487678
uaaauuagggcagaggcgu

SEQ ID NO: 1487680 - RNA, 19 nt, Artificial Sequence
  Description of Artificial Sequence: Synthetic oligonucleotide
  Sense strand starting at position 30 of SEQ ID NO: 1244425
uggaguacuuguuugguga

SEQ ID NO: 1487681 - RNA, 19 nt, Artificial Sequence
  Description of Artificial Sequence: Synthetic oligonucleotide
  Antisense strand to SEQ ID NO: 1487680
ucaccaaacaaguacucca

SEQ ID NO: 1487682 - RNA, 19 nt, Artificial Sequence
  Description of Artificial Sequence: Synthetic oligonucleotide
  Sense strand starting at position 31 of SEQ ID NO: 1244425
ggaguacuuguuuggugag

SEQ ID NO: 1487683 - RNA, 19 nt, Artificial Sequence
  Description of Artificial Sequence: Synthetic oligonucleotide
  Antisense strand to SEQ ID NO: 1487682
cucaccaaacaaguacucc

SEQ ID NO: 1487684 - RNA, 19 nt, Artificial Sequence
  Description of Artificial Sequence: Synthetic oligonucleotide
  Sense strand starting at position 33 of SEQ ID NO: 1244425
aguacuuguuuggugagua

SEQ ID NO: 1487685 - RNA, 19 nt, Artificial Sequence
  Description of Artificial Sequence: Synthetic oligonucleotide
  Antisense strand to SEQ ID NO: 1487684
uacucaccaaacaaguacu

SEQ ID NO: 1487686 - RNA, 19 nt, Artificial Sequence
  Description of Artificial Sequence: Synthetic oligonucleotide
  Sense strand starting at position 95 of SEQ ID NO: 1244425
ugcagaugaucucuaggua

SEQ ID NO: 1487687 - RNA, 19 nt, Artificial Sequence
  Description of Artificial Sequence: Synthetic oligonucleotide
  Antisense strand to SEQ ID NO: 1487686
uaccuagagaucaucugca

SEQ ID NO: 1487688 - RNA, 19 nt, Artificial Sequence
  Description of Artificial Sequence: Synthetic oligonucleotide
  Sense strand starting at position 96 of SEQ ID NO: 1244425
gcagaugaucucuagguag

SEQ ID NO: 1487689 - RNA, 19 nt, Artificial Sequence
  Description of Artificial Sequence: Synthetic oligonucleotide
  Antisense strand to SEQ ID NO: 1487688
cuaccuagagaucaucugc

SEQ ID NO: 1487690 - RNA, 19 nt, Artificial Sequence
  Description of Artificial Sequence: Synthetic oligonucleotide
  Sense strand starting at position 100 of SEQ ID NO: 1244425
augaucucuagguaggagu

SEQ ID NO: 1487691 - RNA, 19 nt, Artificial Sequence
  Description of Artificial Sequence: Synthetic oligonucleotide
  Antisense strand to SEQ ID NO: 1487690
acuccuaccuagagaucau

SEQ ID NO: 1487692 - RNA, 19 nt, Artificial Sequence
  Description of Artificial Sequence: Synthetic oligonucleotide
  Sense strand starting at position 211 of SEQ ID NO: 1244425
auguguggauguucuuaag

SEQ ID NO: 1487693 - RNA, 19 nt, Artificial Sequence
  Description of Artificial Sequence: Synthetic oligonucleotide
  Antisense strand to SEQ ID NO: 1487692
cuuaagaacauccacacau

SEQ ID NO: 1487694 - RNA, 19 nt, Artificial Sequence
  Description of Artificial Sequence: Synthetic oligonucleotide
  Sense strand starting at position 223 of SEQ ID NO: 1244425
ucuuaaggcacgugaucua

SEQ ID NO: 1487695 - RNA, 19 nt, Artificial Sequence
  Description of Artificial Sequence: Synthetic oligonucleotide
  Antisense strand to SEQ ID NO: 1487694
uagaucacgugccuuaaga

SEQ ID NO: 1487696 - RNA, 19 nt, Artificial Sequence
  Description of Artificial Sequence: Synthetic oligonucleotide
  Sense strand starting at position 226 of SEQ ID NO: 1244425
uaaggcacgugaucuauau

SEQ ID NO: 1487697 - RNA, 19 nt, Artificial Sequence
  Description of Artificial Sequence: Synthetic oligonucleotide
  Antisense strand to SEQ ID NO: 1487696
auauagaucacgugccuua

SEQ ID NO: 1487698 - RNA, 19 nt, Artificial Sequence
  Description of Artificial Sequence: Synthetic oligonucleotide
  Sense strand starting at position 230 of SEQ ID NO: 1244425
gcacgugaucuauauccag

SEQ ID NO: 1487699 - RNA, 19 nt, Artificial Sequence
  Description of Artificial Sequence: Synthetic oligonucleotide
  Antisense strand to SEQ ID NO: 1487698
cuggauauagaucacgugc

SEQ ID NO: 1487700 - RNA, 19 nt, Artificial Sequence
  Description of Artificial Sequence: Synthetic oligonucleotide
  Sense strand starting at position 276 of SEQ ID NO: 1244425
ggugacaugguacauaguu

SEQ ID NO: 1487701 - RNA, 19 nt, Artificial Sequence
  Description of Artificial Sequence: Synthetic oligonucleotide
  Antisense strand to SEQ ID NO: 1487700
aacuauguaccaugucacc

SEQ ID NO: 1487702 - RNA, 19 nt, Artificial Sequence
  Description of Artificial Sequence: Synthetic oligonucleotide
  Sense strand starting at position 328 of SEQ ID NO: 1244425
aguacugggaauugugauu

SEQ ID NO: 1487703 - RNA, 19 nt, Artificial Sequence
  Description of Artificial Sequence: Synthetic oligonucleotide
  Antisense strand to SEQ ID NO: 1487702
aaucacaauucccaguacu

SEQ ID NO: 1487704 - RNA, 19 nt, Artificial Sequence
  Description of Artificial Sequence: Synthetic oligonucleotide
  Sense strand starting at position 377 of SEQ ID NO: 1244425
agguugguugggugaugau

SEQ ID NO: 1487705 - RNA, 19 nt, Artificial Sequence
  Description of Artificial Sequence: Synthetic oligonucleotide
  Antisense strand to SEQ ID NO: 1487704
aucaucacccaaccaaccu

SEQ ID NO: 1487706 - RNA, 19 nt, Artificial Sequence
  Description of Artificial Sequence: Synthetic oligonucleotide
  Sense strand starting at position 391 of SEQ ID NO: 1244425
augauuuaauuguggagua

SEQ ID NO: 1487707 - RNA, 19 nt, Artificial Sequence
  Description of Artificial Sequence: Synthetic oligonucleotide
  Antisense strand to SEQ ID NO: 1487706
uacuccacaauuaaaucau

SEQ ID NO: 1487708 - RNA, 19 nt, Artificial Sequence
  Description of Artificial Sequence: Synthetic oligonucleotide
  Sense strand starting at position 505 of SEQ ID NO: 1244425
uguguaagguugcuggaaa

SEQ ID NO: 1487709 - RNA, 19 nt, Artificial Sequence
  Description of Artificial Sequence: Synthetic oligonucleotide
  Antisense strand to SEQ ID NO: 1487708
uuuccagcaaccuuacaca

SEQ ID NO: 1487710 - RNA, 19 nt, Artificial Sequence
  Description of Artificial Sequence: Synthetic oligonucleotide
  Sense strand starting at position 586 of SEQ ID NO: 1244425
agugguaagauggguguca

SEQ ID NO: 1487711 - RNA, 19 nt, Artificial Sequence
  Description of Artificial Sequence: Synthetic oligonucleotide
  Antisense strand to SEQ ID NO: 1487710
ugacacccaucuuaccacu

SEQ ID NO: 1487712 - RNA, 19 nt, Artificial Sequence
  Description of Artificial Sequence: Synthetic oligonucleotide
  Sense strand starting at position 588 of SEQ ID NO: 1244425
ugguaagaugggugucaga

SEQ ID NO: 1487713 - RNA, 19 nt, Artificial Sequence
  Description of Artificial Sequence: Synthetic oligonucleotide
  Antisense strand to SEQ ID NO: 1487712
ucugacacccaucuuacca

SEQ ID NO: 1487714 - RNA, 19 nt, Artificial Sequence
  Description of Artificial Sequence: Synthetic oligonucleotide
  Sense strand starting at position 648 of SEQ ID NO: 1244425
ugcugagauggcuggaauc

SEQ ID NO: 1487715 - RNA, 19 nt, Artificial Sequence
  Description of Artificial Sequence: Synthetic oligonucleotide
  Antisense strand to SEQ ID NO: 1487714
gauuccagccaucucagca

SEQ ID NO: 1487716 - RNA, 19 nt, Artificial Sequence
  Description of Artificial Sequence: Synthetic oligonucleotide
  Sense strand starting at position 696 of SEQ ID NO: 1244425
agguguucugauuagucuu

SEQ ID NO: 1487717 - RNA, 19 nt, Artificial Sequence
  Description of Artificial Sequence: Synthetic oligonucleotide
  Antisense strand to SEQ ID NO: 1487716
aagacuaaucagaacaccu

SEQ ID NO: 1487718 - RNA, 19 nt, Artificial Sequence
  Description of Artificial Sequence: Synthetic oligonucleotide
  Sense strand starting at position 699 of SEQ ID NO: 1244425
uguucugauuagucuugga

SEQ ID NO: 1487719 - RNA, 19 nt, Artificial Sequence
  Description of Artificial Sequence: Synthetic oligonucleotide
  Antisense strand to SEQ ID NO: 1487718
uccaagacuaaucagaaca

SEQ ID NO: 1487720 - RNA, 19 nt, Artificial Sequence
  Description of Artificial Sequence: Synthetic oligonucleotide
  Sense strand starting at position 770 of SEQ ID NO: 1244425
ugagcaguccuguagugaa

SEQ ID NO: 1487721 - RNA, 19 nt, Artificial Sequence
  Description of Artificial Sequence: Synthetic oligonucleotide
  Antisense strand to SEQ ID NO: 1487720
uucacuacaggacugcuca

SEQ ID NO: 1487722 - RNA, 19 nt, Artificial Sequence
  Description of Artificial Sequence: Synthetic oligonucleotide
  Sense strand starting at position 777 of SEQ ID NO: 1244425
uccuguagugaacaagagu

SEQ ID NO: 1487723 - RNA, 19 nt, Artificial Sequence
  Description of Artificial Sequence: Synthetic oligonucleotide
  Antisense strand to SEQ ID NO: 1487722
acucuuguucacuacagga

SEQ ID NO: 1487724 - RNA, 19 nt, Artificial Sequence
  Description of Artificial Sequence: Synthetic oligonucleotide
  Sense strand starting at position 858 of SEQ ID NO: 1244425
aggagcuucccugauccuu

SEQ ID NO: 1487725 - RNA, 19 nt, Artificial Sequence
  Description of Artificial Sequence: Synthetic oligonucleotide
  Antisense strand to SEQ ID NO: 1487724
aaggaucagggaagcuccu

SEQ ID NO: 1487726 - RNA, 19 nt, Artificial Sequence
  Description of Artificial Sequence: Synthetic oligonucleotide
  Sense strand starting at position 1048 of SEQ ID NO: 1244425
gguauucugccaggaacaa

SEQ ID NO: 1487727 - RNA, 19 nt, Artificial Sequence
  Description of Artificial Sequence: Synthetic oligonucleotide
  Antisense strand to SEQ ID NO: 1487726
uuguuccuggcagaauacc

SEQ ID NO: 1487728 - RNA, 19 nt, Artificial Sequence
  Description of Artificial Sequence: Synthetic oligonucleotide
  Sense strand starting at position 1049 of SEQ ID NO: 1244425
guauucugccaggaacaag

SEQ ID NO: 1487729 - RNA, 19 nt, Artificial Sequence
  Description of Artificial Sequence: Synthetic oligonucleotide
  Antisense strand to SEQ ID NO: 1487728
cuuguuccuggcagaauac

SEQ ID NO: 1487730 - RNA, 19 nt, Artificial Sequence
  Description of Artificial Sequence: Synthetic oligonucleotide
  Sense strand starting at position 1244 of SEQ ID NO: 1244425
gcguaaagaacuuauggag

SEQ ID NO: 1487731 - RNA, 19 nt, Artificial Sequence
  Description of Artificial Sequence: Synthetic oligonucleotide
  Antisense strand to SEQ ID NO: 1487730
cuccauaaguucuuuacgc

SEQ ID NO: 1487732 - RNA, 19 nt, Artificial Sequence
  Description of Artificial Sequence: Synthetic oligonucleotide
  Sense strand starting at position 2098 of SEQ ID NO: 1244425
gucuguuccucuccaugga

SEQ ID NO: 1487733 - RNA, 19 nt, Artificial Sequence
  Description of Artificial Sequence: Synthetic oligonucleotide
  Antisense strand to SEQ ID NO: 1487732
uccauggagaggaacagac

SEQ ID NO: 1487734 - RNA, 19 nt, Artificial Sequence
  Description of Artificial Sequence: Synthetic oligonucleotide
  Sense strand starting at position 2299 of SEQ ID NO: 1244425
agagacaagugguuaguga

SEQ ID NO: 1487735 - RNA, 19 nt, Artificial Sequence
  Description of Artificial Sequence: Synthetic oligonucleotide
  Antisense strand to SEQ ID NO: 1487734
ucacuaaccacuugucucu

SEQ ID NO: 1487736 - RNA, 19 nt, Artificial Sequence
  Description of Artificial Sequence: Synthetic oligonucleotide
  Sense strand starting at position 2306 of SEQ ID NO: 1244425
agugguuagugaccuggaa

SEQ ID NO: 1487737 - RNA, 19 nt, Artificial Sequence
  Description of Artificial Sequence: Synthetic oligonucleotide
  Antisense strand to SEQ ID NO: 1487736
uuccaggucacuaaccacu

SEQ ID NO: 1487738 - RNA, 19 nt, Artificial Sequence
  Description of Artificial Sequence: Synthetic oligonucleotide
  Sense strand starting at position 2615 of SEQ ID NO: 1244425
agucauuaauuagcuggaa

SEQ ID NO: 1487739 - RNA, 19 nt, Artificial Sequence
  Description of Artificial Sequence: Synthetic oligonucleotide
  Antisense strand to SEQ ID NO: 1487738
uuccagcuaauuaaugacu

SEQ ID NO: 1487740 - RNA, 19 nt, Artificial Sequence
  Description of Artificial Sequence: Synthetic oligonucleotide
  Sense strand starting at position 2633 of SEQ ID NO: 1244425
agaggcagguuuguuuaua

SEQ ID NO: 1487741 - RNA, 19 nt, Artificial Sequence
  Description of Artificial Sequence: Synthetic oligonucleotide
  Antisense strand to SEQ ID NO: 1487740
uauaaacaaaccugccucu

SEQ ID NO: 1487742 - RNA, 19 nt, Artificial Sequence
  Description of Artificial Sequence: Synthetic oligonucleotide
  Sense strand starting at position 2634 of SEQ ID NO: 1244425
gaggcagguuuguuuauau

SEQ ID NO: 1487743 - RNA, 19 nt, Artificial Sequence
  Description of Artificial Sequence: Synthetic oligonucleotide
  Antisense strand to SEQ ID NO: 1487742
auauaaacaaaccugccuc

SEQ ID NO: 1487744 - RNA, 19 nt, Artificial Sequence
  Description of Artificial Sequence: Synthetic oligonucleotide
  Sense strand starting at position 2651 of SEQ ID NO: 1244425
auguguuaauuacuccuga

SEQ ID NO: 1487745 - RNA, 19 nt, Artificial Sequence
  Description of Artificial Sequence: Synthetic oligonucleotide
  Antisense strand to SEQ ID NO: 1487744
ucaggaguaauuaacacau

SEQ ID NO: 1487746 - RNA, 19 nt, Artificial Sequence
  Description of Artificial Sequence: Synthetic oligonucleotide
  Sense strand starting at position 2815 of SEQ ID NO: 1244425
cuccauuuccuccgucaga

SEQ ID NO: 1487747 - RNA, 19 nt, Artificial Sequence
  Description of Artificial Sequence: Synthetic oligonucleotide
  Antisense strand to SEQ ID NO: 1487746
ucugacggaggaaauggag

SEQ ID NO: 1487748 - RNA, 19 nt, Artificial Sequence
  Description of Artificial Sequence: Synthetic oligonucleotide
  Sense strand starting at position 2894 of SEQ ID NO: 1244425
gggacagaugcgugauccu

SEQ ID NO: 1487749 - RNA, 19 nt, Artificial Sequence
  Description of Artificial Sequence: Synthetic oligonucleotide
  Antisense strand to SEQ ID NO: 1487748
aggaucacgcaucuguccc

SEQ ID NO: 1487750 - RNA, 19 nt, Artificial Sequence
  Description of Artificial Sequence: Synthetic oligonucleotide
  Sense strand starting at position 2945 of SEQ ID NO: 1244425
cgcaauguuaccucggcaa

SEQ ID NO: 1487751 - RNA, 19 nt, Artificial Sequence
  Description of Artificial Sequence: Synthetic oligonucleotide
  Antisense strand to SEQ ID NO: 1487750
uugccgagguaacauugcg

SEQ ID NO: 1487752 - RNA, 19 nt, Artificial Sequence
  Description of Artificial Sequence: Synthetic oligonucleotide
  Sense strand starting at position 3109 of SEQ ID NO: 1244425
agaaguauauauguugaga

SEQ ID NO: 1487753 - RNA, 19 nt, Artificial Sequence
  Description of Artificial Sequence: Synthetic oligonucleotide
  Antisense strand to SEQ ID NO: 1487752
ucucaacauauauacuucu

SEQ ID NO: 1487754 - RNA, 19 nt, Artificial Sequence
  Description of Artificial Sequence: Synthetic oligonucleotide
  Sense strand starting at position 3166 of SEQ ID NO: 1244425
cugccuguuggccaaucaa

SEQ ID NO: 1487755 - RNA, 19 nt, Artificial Sequence
  Description of Artificial Sequence: Synthetic oligonucleotide
  Antisense strand to SEQ ID NO: 1487754
uugauuggccaacaggcag

SEQ ID NO: 1487756 - RNA, 19 nt, Artificial Sequence
  Description of Artificial Sequence: Synthetic oligonucleotide
  Sense strand starting at position 3494 of SEQ ID NO: 1244425
ggcagacacccaggucauu

SEQ ID NO: 1487757 - RNA, 19 nt, Artificial Sequence
  Description of Artificial Sequence: Synthetic oligonucleotide
  Antisense strand to SEQ ID NO: 1487756
aaugaccugggugucugcc

SEQ ID NO: 1487758 - RNA, 19 nt, Artificial Sequence
  Description of Artificial Sequence: Synthetic oligonucleotide
  Sense strand starting at position 3614 of SEQ ID NO: 1244425
gucaauuuauuccagagau

SEQ ID NO: 1487759 - RNA, 19 nt, Artificial Sequence
  Description of Artificial Sequence: Synthetic oligonucleotide
  Antisense strand to SEQ ID NO: 1487758
aucucuggaauaaauugac

SEQ ID NO: 1487760 - RNA, 19 nt, Artificial Sequence
  Description of Artificial Sequence: Synthetic oligonucleotide
  Sense strand starting at position 18 of SEQ ID NO: 1244426
gcaggucccugagcagaau

SEQ ID NO: 1487761 - RNA, 19 nt, Artificial Sequence
  Description of Artificial Sequence: Synthetic oligonucleotide
  Antisense strand to SEQ ID NO: 1487760
auucugcucagggaccugc

SEQ ID NO: 1487762 - RNA, 19 nt, Artificial Sequence
  Description of Artificial Sequence: Synthetic oligonucleotide
  Sense strand starting at position 188 of SEQ ID NO: 1244426
agcagccuagauuaucaaa

SEQ ID NO: 1487763 - RNA, 19 nt, Artificial Sequence
  Description of Artificial Sequence: Synthetic oligonucleotide
  Antisense strand to SEQ ID NO: 1487762
uuugauaaucuaggcugcu

SEQ ID NO: 1487764 - RNA, 19 nt, Artificial Sequence
  Description of Artificial Sequence: Synthetic oligonucleotide
  Sense strand starting at position 216 of SEQ ID NO: 1244426
uaaauaagauggccaguua

SEQ ID NO: 1487765 - RNA, 19 nt, Artificial Sequence
  Description of Artificial Sequence: Synthetic oligonucleotide
  Antisense strand to SEQ ID NO: 1487764
uaacuggccaucuuauuua

SEQ ID NO: 1487766 - RNA, 19 nt, Artificial Sequence
  Description of Artificial Sequence: Synthetic oligonucleotide
  Sense strand starting at position 287 of SEQ ID NO: 1244426
ggagauauuuaccgggcua

SEQ ID NO: 1487767 - RNA, 19 nt, Artificial Sequence
  Description of Artificial Sequence: Synthetic oligonucleotide
  Antisense strand to SEQ ID NO: 1487766
uagcccgguaaauaucucc

SEQ ID NO: 1487768 - RNA, 19 nt, Artificial Sequence
  Description of Artificial Sequence: Synthetic oligonucleotide
  Sense strand starting at position 403 of SEQ ID NO: 1244426
aaucauuaguccuugggag

SEQ ID NO: 1487769 - RNA, 19 nt, Artificial Sequence
  Description of Artificial Sequence: Synthetic oligonucleotide
  Antisense strand to SEQ ID NO: 1487768
cucccaaggacuaaugauu

SEQ ID NO: 1487770 - RNA, 19 nt, Artificial Sequence
  Description of Artificial Sequence: Synthetic oligonucleotide
  Sense strand starting at position 404 of SEQ ID NO: 1244426
aucauuaguccuugggaga

SEQ ID NO: 1487771 - RNA, 19 nt, Artificial Sequence
  Description of Artificial Sequence: Synthetic oligonucleotide
  Antisense strand to SEQ ID NO: 1487770
ucucccaaggacuaaugau

SEQ ID NO: 1487772 - RNA, 19 nt, Artificial Sequence
  Description of Artificial Sequence: Synthetic oligonucleotide
  Sense strand starting at position 405 of SEQ ID NO: 1244426
ucauuaguccuugggagaa

SEQ ID NO: 1487773 - RNA, 19 nt, Artificial Sequence
  Description of Artificial Sequence: Synthetic oligonucleotide
  Antisense strand to SEQ ID NO: 1487772
uucucccaaggacuaauga

SEQ ID NO: 1487774 - RNA, 19 nt, Artificial Sequence
  Description of Artificial Sequence: Synthetic oligonucleotide
  Sense strand starting at position 519 of SEQ ID NO: 1244426
uuaagaagcccuuaggcuu

SEQ ID NO: 1487775 - RNA, 19 nt, Artificial Sequence
  Description of Artificial Sequence: Synthetic oligonucleotide
  Antisense strand to SEQ ID NO: 1487774
aagccuaagggcuucuuaa

SEQ ID NO: 1487776 - RNA, 19 nt, Artificial Sequence
  Description of Artificial Sequence: Synthetic oligonucleotide
  Sense strand starting at position 676 of SEQ ID NO: 1244426
cugcauagcuagucuacua

SEQ ID NO: 1487777 - RNA, 19 nt, Artificial Sequence
  Description of Artificial Sequence: Synthetic oligonucleotide
  Antisense strand to SEQ ID NO: 1487776
uaguagacuagcuaugcag

SEQ ID NO: 1487778 - RNA, 19 nt, Artificial Sequence
  Description of Artificial Sequence: Synthetic oligonucleotide
  Sense strand starting at position 696 of SEQ ID NO: 1244426
ccucauuugugguacucau

SEQ ID NO: 1487779 - RNA, 19 nt, Artificial Sequence
  Description of Artificial Sequence: Synthetic oligonucleotide
  Antisense strand to SEQ ID NO: 1487778
augaguaccacaaaugagg

SEQ ID NO: 1487780 - RNA, 19 nt, Artificial Sequence
  Description of Artificial Sequence: Synthetic oligonucleotide
  Sense strand starting at position 704 of SEQ ID NO: 1244426
gugguacucaugugugaug

SEQ ID NO: 1487781 - RNA, 19 nt, Artificial Sequence
  Description of Artificial Sequence: Synthetic oligonucleotide
  Antisense strand to SEQ ID NO: 1487780
caucacacaugaguaccac

SEQ ID NO: 1487782 - RNA, 19 nt, Artificial Sequence
  Description of Artificial Sequence: Synthetic oligonucleotide
  Sense strand starting at position 888 of SEQ ID NO: 1244426
acaggaaaguaguuaugca

SEQ ID NO: 1487783 - RNA, 19 nt, Artificial Sequence
  Description of Artificial Sequence: Synthetic oligonucleotide
  Antisense strand to SEQ ID NO: 1487782
ugcauaacuacuuuccugu

SEQ ID NO: 1487784 - RNA, 19 nt, Artificial Sequence
  Description of Artificial Sequence: Synthetic oligonucleotide
  Sense strand starting at position 892 of SEQ ID NO: 1244426
gaaaguaguuaugcaaagu

SEQ ID NO: 1487785 - RNA, 19 nt, Artificial Sequence
  Description of Artificial Sequence: Synthetic oligonucleotide
  Antisense strand to SEQ ID NO: 1487784
acuuugcauaacuacuuuc

SEQ ID NO: 1487786 - RNA, 19 nt, Artificial Sequence
  Description of Artificial Sequence: Synthetic oligonucleotide
  Sense strand starting at position 920 of SEQ ID NO: 1244426
ugacaagaguauuauaaag

SEQ ID NO: 1487787 - RNA, 19 nt, Artificial Sequence
  Description of Artificial Sequence: Synthetic oligonucleotide
  Antisense strand to SEQ ID NO: 1487786
cuuuauaauacucuuguca

SEQ ID NO: 1487788 - RNA, 19 nt, Artificial Sequence
  Description of Artificial Sequence: Synthetic oligonucleotide
  Sense strand starting at position 1008 of SEQ ID NO: 1244426
aaggucuucguaggaauua

SEQ ID NO: 1487789 - RNA, 19 nt, Artificial Sequence
  Description of Artificial Sequence: Synthetic oligonucleotide
  Antisense strand to SEQ ID NO: 1487788
uaauuccuacgaagaccuu

SEQ ID NO: 1487790 - RNA, 19 nt, Artificial Sequence
  Description of Artificial Sequence: Synthetic oligonucleotide
  Sense strand starting at position 1013 of SEQ ID NO: 1244426
cuucguaggaauuaguauu

SEQ ID NO: 1487791 - RNA, 19 nt, Artificial Sequence
  Description of Artificial Sequence: Synthetic oligonucleotide
  Antisense strand to SEQ ID NO: 1487790
aauacuaauuccuacgaag

SEQ ID NO: 1487792 - RNA, 19 nt, Artificial Sequence
  Description of Artificial Sequence: Synthetic oligonucleotide
  Sense strand starting at position 1055 of SEQ ID NO: 1244426
guguucaguggcuugcuua

SEQ ID NO: 1487793 - RNA, 19 nt, Artificial Sequence
  Description of Artificial Sequence: Synthetic oligonucleotide
  Antisense strand to SEQ ID NO: 1487792
uaagcaagccacugaacac

SEQ ID NO: 1487794 - RNA, 19 nt, Artificial Sequence
  Description of Artificial Sequence: Synthetic oligonucleotide
  Sense strand starting at position 1109 of SEQ ID NO: 1244426
auguguguugcucaugaga

SEQ ID NO: 1487795 - RNA, 19 nt, Artificial Sequence
  Description of Artificial Sequence: Synthetic oligonucleotide
  Antisense strand to SEQ ID NO: 1487794
ucucaugagcaacacacau

SEQ ID NO: 1487796 - RNA, 19 nt, Artificial Sequence
  Description of Artificial Sequence: Synthetic oligonucleotide
  Sense strand starting at position 1156 of SEQ ID NO: 1244426
cuagacagccaaugcauua

SEQ ID NO: 1487797 - RNA, 19 nt, Artificial Sequence
  Description of Artificial Sequence: Synthetic oligonucleotide
  Antisense strand to SEQ ID NO: 1487796
uaaugcauuggcugucuag

SEQ ID NO: 1487798 - RNA, 19 nt, Artificial Sequence
  Description of Artificial Sequence: Synthetic oligonucleotide
  Sense strand starting at position 1229 of SEQ ID NO: 1244426
gcugcaccuuggucaacau

SEQ ID NO: 1487799 - RNA, 19 nt, Artificial Sequence
  Description of Artificial Sequence: Synthetic oligonucleotide
  Antisense strand to SEQ ID NO: 1487798
auguugaccaaggugcagc

SEQ ID NO: 1487800 - RNA, 19 nt, Artificial Sequence
  Description of Artificial Sequence: Synthetic oligonucleotide
  Sense strand starting at position 2048 of SEQ ID NO: 1244426
gccacaaguggguacuaaa

SEQ ID NO: 1487801 - RNA, 19 nt, Artificial Sequence
  Description of Artificial Sequence: Synthetic oligonucleotide
  Antisense strand to SEQ ID NO: 1487800
uuuaguacccacuuguggc

SEQ ID NO: 1487802 - RNA, 19 nt, Artificial Sequence
  Description of Artificial Sequence: Synthetic oligonucleotide
  Sense strand starting at position 2097 of SEQ ID NO: 1244426
cuuugaaugugggaauaaa

SEQ ID NO: 1487803 - RNA, 19 nt, Artificial Sequence
  Description of Artificial Sequence: Synthetic oligonucleotide
  Antisense strand to SEQ ID NO: 1487802
uuuauucccacauucaaag

SEQ ID NO: 1487804 - RNA, 19 nt, Artificial Sequence
  Description of Artificial Sequence: Synthetic oligonucleotide
  Sense strand starting at position 2378 of SEQ ID NO: 1244426
uagucagguugaccugauu

SEQ ID NO: 1487805 - RNA, 19 nt, Artificial Sequence
  Description of Artificial Sequence: Synthetic oligonucleotide
  Antisense strand to SEQ ID NO: 1487804
aaucaggucaaccugacua

SEQ ID NO: 1487806 - RNA, 19 nt, Artificial Sequence
  Description of Artificial Sequence: Synthetic oligonucleotide
  Sense strand starting at position 2417 of SEQ ID NO: 1244426
ccaaacuuuccugggcaga

SEQ ID NO: 1487807 - RNA, 19 nt, Artificial Sequence
  Description of Artificial Sequence: Synthetic oligonucleotide
  Antisense strand to SEQ ID NO: 1487806
ucugcccaggaaaguuugg

SEQ ID NO: 1487808 - RNA, 19 nt, Artificial Sequence
  Description of Artificial Sequence: Synthetic oligonucleotide
  Sense strand starting at position 3133 of SEQ ID NO: 1244426
cagaguuuggcuugaccga

SEQ ID NO: 1487809 - RNA, 19 nt, Artificial Sequence
  Description of Artificial Sequence: Synthetic oligonucleotide
  Antisense strand to SEQ ID NO: 1487808
ucggucaagccaaacucug

SEQ ID NO: 1487810 - RNA, 19 nt, Artificial Sequence
  Description of Artificial Sequence: Synthetic oligonucleotide
  Sense strand starting at position 3173 of SEQ ID NO: 1244426
aagcaaagaucuuugugac

SEQ ID NO: 1487811 - RNA, 19 nt, Artificial Sequence
  Description of Artificial Sequence: Synthetic oligonucleotide
  Antisense strand to SEQ ID NO: 1487810
gucacaaagaucuuugcuu

SEQ ID NO: 1487812 - RNA, 19 nt, Artificial Sequence
  Description of Artificial Sequence: Synthetic oligonucleotide
  Sense strand starting at position 3174 of SEQ ID NO: 1244426
agcaaagaucuuugugaca

SEQ ID NO: 1487813 - RNA, 19 nt, Artificial Sequence
  Description of Artificial Sequence: Synthetic oligonucleotide
  Antisense strand to SEQ ID NO: 1487812
ugucacaaagaucuuugcu

SEQ ID NO: 1487814 - RNA, 19 nt, Artificial Sequence
  Description of Artificial Sequence: Synthetic oligonucleotide
  Sense strand starting at position 3273 of SEQ ID NO: 1244426
gugguaaucccgccugcaa

SEQ ID NO: 1487815 - RNA, 19 nt, Artificial Sequence
  Description of Artificial Sequence: Synthetic oligonucleotide
  Antisense strand to SEQ ID NO: 1487814
uugcaggcgggauuaccac

SEQ ID NO: 1487816 - RNA, 19 nt, Artificial Sequence
  Description of Artificial Sequence: Synthetic oligonucleotide
  Sense strand starting at position 3352 of SEQ ID NO: 1244426
uaaccaauccuuggguuga

SEQ ID NO: 1487817 - RNA, 19 nt, Artificial Sequence
  Description of Artificial Sequence: Synthetic oligonucleotide
  Antisense strand to SEQ ID NO: 1487816
ucaacccaaggauugguua

SEQ ID NO: 1487818 - RNA, 19 nt, Artificial Sequence
  Description of Artificial Sequence: Synthetic oligonucleotide
  Sense strand starting at position 3354 of SEQ ID NO: 1244426
accaauccuuggguugaaa

SEQ ID NO: 1487819 - RNA, 19 nt, Artificial Sequence
  Description of Artificial Sequence: Synthetic oligonucleotide
  Antisense strand to SEQ ID NO: 1487818
uuucaacccaaggauuggu

SEQ ID NO: 1487820 - RNA, 19 nt, Artificial Sequence
  Description of Artificial Sequence: Synthetic oligonucleotide
  Sense strand starting at position 3486 of SEQ ID NO: 1244426
ugcugucauaucgagacaa

SEQ ID NO: 1487821 - RNA, 19 nt, Artificial Sequence
  Description of Artificial Sequence: Synthetic oligonucleotide
  Antisense strand to SEQ ID NO: 1487820
uugucucgauaugacagca

SEQ ID NO: 1487822 - RNA, 19 nt, Artificial Sequence
  Description of Artificial Sequence: Synthetic oligonucleotide
  Sense strand starting at position 3592 of SEQ ID NO: 1244426
gguccacugauccgagaug

SEQ ID NO: 1487823 - RNA, 19 nt, Artificial Sequence
  Description of Artificial Sequence: Synthetic oligonucleotide
  Antisense strand to SEQ ID NO: 1487822
caucucggaucaguggacc

SEQ ID NO: 1487824 - RNA, 19 nt, Artificial Sequence
  Description of Artificial Sequence: Synthetic oligonucleotide
  Sense strand starting at position 3597 of SEQ ID NO: 1244426
acugauccgagauguccaa

SEQ ID NO: 1487825 - RNA, 19 nt, Artificial Sequence
  Description of Artificial Sequence: Synthetic oligonucleotide
  Antisense strand to SEQ ID NO: 1487824
uuggacaucucggaucagu

SEQ ID NO: 1487826 - RNA, 19 nt, Artificial Sequence
  Description of Artificial Sequence: Synthetic oligonucleotide
  Sense strand starting at position 3601 of SEQ ID NO: 1244426
auccgagauguccaauauc

SEQ ID NO: 1487827 - RNA, 19 nt, Artificial Sequence
  Description of Artificial Sequence: Synthetic oligonucleotide
  Antisense strand to SEQ ID NO: 1487826
gauauuggacaucucggau

SEQ ID NO: 1487828 - RNA, 19 nt, Artificial Sequence
  Description of Artificial Sequence: Synthetic oligonucleotide
  Sense strand starting at position 3604 of SEQ ID NO: 1244426
cgagauguccaauauccca

SEQ ID NO: 1487829 - RNA, 19 nt, Artificial Sequence
  Description of Artificial Sequence: Synthetic oligonucleotide
  Antisense strand to SEQ ID NO: 1487828
ugggauauuggacaucucg

SEQ ID NO: 1487830 - RNA, 19 nt, Artificial Sequence
  Description of Artificial Sequence: Synthetic oligonucleotide
  Sense strand starting at position 3773 of SEQ ID NO: 1244426
gccgguccucuccauaguu

SEQ ID NO: 1487831 - RNA, 19 nt, Artificial Sequence
  Description of Artificial Sequence: Synthetic oligonucleotide
  Antisense strand to SEQ ID NO: 1487830
aacuauggagaggaccggc

SEQ ID NO: 1487832 - RNA, 19 nt, Artificial Sequence
  Description of Artificial Sequence: Synthetic oligonucleotide
  Sense strand starting at position 3775 of SEQ ID NO: 1244426
cgguccucuccauaguuaa

SEQ ID NO: 1487833 - RNA, 19 nt, Artificial Sequence
  Description of Artificial Sequence: Synthetic oligonucleotide
  Antisense strand to SEQ ID NO: 1487832
uuaacuauggagaggaccg

SEQ ID NO: 1487834 - RNA, 19 nt, Artificial Sequence
  Description of Artificial Sequence: Synthetic oligonucleotide
  Sense strand starting at position 3786 of SEQ ID NO: 1244426
auaguuaauccugaucuug

SEQ ID NO: 1487835 - RNA, 19 nt, Artificial Sequence
  Description of Artificial Sequence: Synthetic oligonucleotide
  Antisense strand to SEQ ID NO: 1487834
caagaucaggauuaacuau

SEQ ID NO: 1487836 - RNA, 19 nt, Artificial Sequence
  Description of Artificial Sequence: Synthetic oligonucleotide
  Sense strand starting at position 3837 of SEQ ID NO: 1244426
cuccacugucgacaaauga

SEQ ID NO: 1487837 - RNA, 19 nt, Artificial Sequence
  Description of Artificial Sequence: Synthetic oligonucleotide
  Antisense strand to SEQ ID NO: 1487836
ucauuugucgacaguggag

SEQ ID NO: 1487838 - RNA, 19 nt, Artificial Sequence
  Description of Artificial Sequence: Synthetic oligonucleotide
  Sense strand starting at position 3854 of SEQ ID NO: 1244426
gauaaagcuguuggugcaa

SEQ ID NO: 1487839 - RNA, 19 nt, Artificial Sequence
  Description of Artificial Sequence: Synthetic oligonucleotide
  Antisense strand to SEQ ID NO: 1487838
uugcaccaacagcuuuauc

SEQ ID NO: 1487840 - RNA, 19 nt, Artificial Sequence
  Description of Artificial Sequence: Synthetic oligonucleotide
  Sense strand starting at position 77 of SEQ ID NO: 1244427
cagacaugauccucugggu

SEQ ID NO: 1487841 - RNA, 19 nt, Artificial Sequence
  Description of Artificial Sequence: Synthetic oligonucleotide
  Antisense strand to SEQ ID NO: 1487840
acccagaggaucaugucug

SEQ ID NO: 1487842 - RNA, 19 nt, Artificial Sequence
  Description of Artificial Sequence: Synthetic oligonucleotide
  Sense strand starting at position 471 of SEQ ID NO: 1244427
ccucuagaggcuugucuga

SEQ ID NO: 1487843 - RNA, 19 nt, Artificial Sequence
  Description of Artificial Sequence: Synthetic oligonucleotide
  Antisense strand to SEQ ID NO: 1487842
ucagacaagccucuagagg

SEQ ID NO: 1487844 - RNA, 19 nt, Artificial Sequence
  Description of Artificial Sequence: Synthetic oligonucleotide
  Sense strand starting at position 473 of SEQ ID NO: 1244427
ucuagaggcuugucugaag

SEQ ID NO: 1487845 - RNA, 19 nt, Artificial Sequence
  Description of Artificial Sequence: Synthetic oligonucleotide
  Antisense strand to SEQ ID NO: 1487844
cuucagacaagccucuaga

SEQ ID NO: 1487846 - RNA, 19 nt, Artificial Sequence
  Description of Artificial Sequence: Synthetic oligonucleotide
  Sense strand starting at position 482 of SEQ ID NO: 1244427
uugucugaagaaugauguu

SEQ ID NO: 1487847 - RNA, 19 nt, Artificial Sequence
  Description of Artificial Sequence: Synthetic oligonucleotide
  Antisense strand to SEQ ID NO: 1487846
aacaucauucuucagacaa

SEQ ID NO: 1487848 - RNA, 19 nt, Artificial Sequence
  Description of Artificial Sequence: Synthetic oligonucleotide
  Sense strand starting at position 488 of SEQ ID NO: 1244427
gaagaaugauguucuuaua

SEQ ID NO: 1487849 - RNA, 19 nt, Artificial Sequence
  Description of Artificial Sequence: Synthetic oligonucleotide
  Antisense strand to SEQ ID NO: 1487848
uauaagaacaucauucuuc

SEQ ID NO: 1487850 - RNA, 19 nt, Artificial Sequence
  Description of Artificial Sequence: Synthetic oligonucleotide
  Sense strand starting at position 539 of SEQ ID NO: 1244427
ucaggaaauuugcauaucu

SEQ ID NO: 1487851 - RNA, 19 nt, Artificial Sequence
  Description of Artificial Sequence: Synthetic oligonucleotide
  Antisense strand to SEQ ID NO: 1487850
agauaugcaaauuuccuga

SEQ ID NO: 1487852 - RNA, 19 nt, Artificial Sequence
  Description of Artificial Sequence: Synthetic oligonucleotide
  Sense strand starting at position 567 of SEQ ID NO: 1244427
cugacuaucucccugugua

SEQ ID NO: 1487853 - RNA, 19 nt, Artificial Sequence
  Description of Artificial Sequence: Synthetic oligonucleotide
  Antisense strand to SEQ ID NO: 1487852
uacacagggagauagucag

SEQ ID NO: 1487854 - RNA, 19 nt, Artificial Sequence
  Description of Artificial Sequence: Synthetic oligonucleotide
  Sense strand starting at position 568 of SEQ ID NO: 1244427
ugacuaucucccuguguaa

SEQ ID NO: 1487855 - RNA, 19 nt, Artificial Sequence
  Description of Artificial Sequence: Synthetic oligonucleotide
  Antisense strand to SEQ ID NO: 1487854
uuacacagggagauaguca

SEQ ID NO: 1487856 - RNA, 19 nt, Artificial Sequence
  Description of Artificial Sequence: Synthetic oligonucleotide
  Sense strand starting at position 570 of SEQ ID NO: 1244427
acuaucucccuguguaaau

SEQ ID NO: 1487857 - RNA, 19 nt, Artificial Sequence
  Description of Artificial Sequence: Synthetic oligonucleotide
  Antisense strand to SEQ ID NO: 1487856
auuuacacagggagauagu

SEQ ID NO: 1487858 - RNA, 19 nt, Artificial Sequence
  Description of Artificial Sequence: Synthetic oligonucleotide
  Sense strand starting at position 571 of SEQ ID NO: 1244427
cuaucucccuguguaaauc

SEQ ID NO: 1487859 - RNA, 19 nt, Artificial Sequence
  Description of Artificial Sequence: Synthetic oligonucleotide
  Antisense strand to SEQ ID NO: 1487858
gauuuacacagggagauag

SEQ ID NO: 1487860 - RNA, 19 nt, Artificial Sequence
  Description of Artificial Sequence: Synthetic oligonucleotide
  Sense strand starting at position 580 of SEQ ID NO: 1244427
uguguaaaucacuacuccu

SEQ ID NO: 1487861 - RNA, 19 nt, Artificial Sequence
  Description of Artificial Sequence: Synthetic oligonucleotide
  Antisense strand to SEQ ID NO: 1487860
aggaguagugauuuacaca

SEQ ID NO: 1487862 - RNA, 19 nt, Artificial Sequence
  Description of Artificial Sequence: Synthetic oligonucleotide
  Sense strand starting at position 718 of SEQ ID NO: 1244427
gcacuuacuguauaucaga

SEQ ID NO: 1487863 - RNA, 19 nt, Artificial Sequence
  Description of Artificial Sequence: Synthetic oligonucleotide
  Antisense strand to SEQ ID NO: 1487862
ucugauauacaguaagugc

SEQ ID NO: 1487864 - RNA, 19 nt, Artificial Sequence
  Description of Artificial Sequence: Synthetic oligonucleotide
  Sense strand starting at position 729 of SEQ ID NO: 1244427
auaucagacucugugcuaa

SEQ ID NO: 1487865 - RNA, 19 nt, Artificial Sequence
  Description of Artificial Sequence: Synthetic oligonucleotide
  Antisense strand to SEQ ID NO: 1487864
uuagcacagagucugauau

SEQ ID NO: 1487866 - RNA, 19 nt, Artificial Sequence
  Description of Artificial Sequence: Synthetic oligonucleotide
  Sense strand starting at position 731 of SEQ ID NO: 1244427
aucagacucugugcuaaau

SEQ ID NO: 1487867 - RNA, 19 nt, Artificial Sequence
  Description of Artificial Sequence: Synthetic oligonucleotide
  Antisense strand to SEQ ID NO: 1487866
auuuagcacagagucugau

SEQ ID NO: 1487868 - RNA, 19 nt, Artificial Sequence
  Description of Artificial Sequence: Synthetic oligonucleotide
  Sense strand starting at position 744 of SEQ ID NO: 1244427
cuaaauguuuaaccuggau

SEQ ID NO: 1487869 - RNA, 19 nt, Artificial Sequence
  Description of Artificial Sequence: Synthetic oligonucleotide
  Antisense strand to SEQ ID NO: 1487868
auccagguuaaacauuuag

SEQ ID NO: 1487870 - RNA, 19 nt, Artificial Sequence
  Description of Artificial Sequence: Synthetic oligonucleotide
  Sense strand starting at position 747 of SEQ ID NO: 1244427
aauguuuaaccuggaugau

SEQ ID NO: 1487871 - RNA, 19 nt, Artificial Sequence
  Description of Artificial Sequence: Synthetic oligonucleotide
  Antisense strand to SEQ ID NO: 1487870
aucauccagguuaaacauu

SEQ ID NO: 1487872 - RNA, 19 nt, Artificial Sequence
  Description of Artificial Sequence: Synthetic oligonucleotide
  Sense strand starting at position 849 of SEQ ID NO: 1244427
gugauuggcccagggugau

SEQ ID NO: 1487873 - RNA, 19 nt, Artificial Sequence
  Description of Artificial Sequence: Synthetic oligonucleotide
  Antisense strand to SEQ ID NO: 1487872
aucacccugggccaaucac

SEQ ID NO: 1487874 - RNA, 19 nt, Artificial Sequence
  Description of Artificial Sequence: Synthetic oligonucleotide
  Sense strand starting at position 868 of SEQ ID NO: 1244427
agugccaggacuggugaua

SEQ ID NO: 1487875 - RNA, 19 nt, Artificial Sequence
  Description of Artificial Sequence: Synthetic oligonucleotide
  Antisense strand to SEQ ID NO: 1487874
uaucaccaguccuggcacu

SEQ ID NO: 1487876 - RNA, 19 nt, Artificial Sequence
  Description of Artificial Sequence: Synthetic oligonucleotide
  Sense strand starting at position 936 of SEQ ID NO: 1244427
cgggaaugcacuugaauag

SEQ ID NO: 1487877 - RNA, 19 nt, Artificial Sequence
  Description of Artificial Sequence: Synthetic oligonucleotide
  Antisense strand to SEQ ID NO: 1487876
cuauucaagugcauucccg

SEQ ID NO: 1487878 - RNA, 19 nt, Artificial Sequence
  Description of Artificial Sequence: Synthetic oligonucleotide
  Sense strand starting at position 1320 of SEQ ID NO: 1244427
gggugucucacccgaagag

SEQ ID NO: 1487879 - RNA, 19 nt, Artificial Sequence
  Description of Artificial Sequence: Synthetic oligonucleotide
  Antisense strand to SEQ ID NO: 1487878
cucuucgggugagacaccc

SEQ ID NO: 1487880 - RNA, 19 nt, Artificial Sequence
  Description of Artificial Sequence: Synthetic oligonucleotide
  Sense strand starting at position 1444 of SEQ ID NO: 1244427
aucucugucccggaguuaa

SEQ ID NO: 1487881 - RNA, 19 nt, Artificial Sequence
  Description of Artificial Sequence: Synthetic oligonucleotide
  Antisense strand to SEQ ID NO: 1487880
uuaacuccgggacagagau

SEQ ID NO: 1487882 - RNA, 19 nt, Artificial Sequence
  Description of Artificial Sequence: Synthetic oligonucleotide
  Sense strand starting at position 1672 of SEQ ID NO: 1244427
gaagaagucagcugauagg

SEQ ID NO: 1487883 - RNA, 19 nt, Artificial Sequence
  Description of Artificial Sequence: Synthetic oligonucleotide
  Antisense strand to SEQ ID NO: 1487882
ccuaucagcugacuucuuc

SEQ ID NO: 1487884 - RNA, 19 nt, Artificial Sequence
  Description of Artificial Sequence: Synthetic oligonucleotide
  Sense strand starting at position 1783 of SEQ ID NO: 1244427
uucuguguuccucagauuc

SEQ ID NO: 1487885 - RNA, 19 nt, Artificial Sequence
  Description of Artificial Sequence: Synthetic oligonucleotide
  Antisense strand to SEQ ID NO: 1487884
gaaucugaggaacacagaa

SEQ ID NO: 1487886 - RNA, 19 nt, Artificial Sequence
  Description of Artificial Sequence: Synthetic oligonucleotide
  Sense strand starting at position 2167 of SEQ ID NO: 1244427
gguacaggcccauacuaaa

SEQ ID NO: 1487887 - RNA, 19 nt, Artificial Sequence
  Description of Artificial Sequence: Synthetic oligonucleotide
  Antisense strand to SEQ ID NO: 1487886
uuuaguaugggccuguacc

SEQ ID NO: 1487888 - RNA, 19 nt, Artificial Sequence
  Description of Artificial Sequence: Synthetic oligonucleotide
  Sense strand starting at position 2332 of SEQ ID NO: 1244427
ggcagcuccuuauugggaa

SEQ ID NO: 1487889 - RNA, 19 nt, Artificial Sequence
  Description of Artificial Sequence: Synthetic oligonucleotide
  Antisense strand to SEQ ID NO: 1487888
uucccaauaaggagcugcc

SEQ ID NO: 1487890 - RNA, 19 nt, Artificial Sequence
  Description of Artificial Sequence: Synthetic oligonucleotide
  Sense strand starting at position 2499 of SEQ ID NO: 1244427
cacuuagcuggugaacauu

SEQ ID NO: 1487891 - RNA, 19 nt, Artificial Sequence
  Description of Artificial Sequence: Synthetic oligonucleotide
  Antisense strand to SEQ ID NO: 1487890
aauguucaccagcuaagug

SEQ ID NO: 1487892 - RNA, 19 nt, Artificial Sequence
  Description of Artificial Sequence: Synthetic oligonucleotide
  Sense strand starting at position 2508 of SEQ ID NO: 1244427
ggugaacauuuccaccuga

SEQ ID NO: 1487893 - RNA, 19 nt, Artificial Sequence
  Description of Artificial Sequence: Synthetic oligonucleotide
  Antisense strand to SEQ ID NO: 1487892
ucagguggaaauguucacc

SEQ ID NO: 1487894 - RNA, 19 nt, Artificial Sequence
  Description of Artificial Sequence: Synthetic oligonucleotide
  Sense strand starting at position 2670 of SEQ ID NO: 1244427
ccaggaauuucuggagaug

SEQ ID NO: 1487895 - RNA, 19 nt, Artificial Sequence
  Description of Artificial Sequence: Synthetic oligonucleotide
  Antisense strand to SEQ ID NO: 1487894
caucuccagaaauuccugg

SEQ ID NO: 1487896 - RNA, 19 nt, Artificial Sequence
  Description of Artificial Sequence: Synthetic oligonucleotide
  Sense strand starting at position 2750 of SEQ ID NO: 1244427
cuccuuaugugccugauuu

SEQ ID NO: 1487897 - RNA, 19 nt, Artificial Sequence
  Description of Artificial Sequence: Synthetic oligonucleotide
  Antisense strand to SEQ ID NO: 1487896
aaaucaggcacauaaggag

SEQ ID NO: 1487898 - RNA, 19 nt, Artificial Sequence
  Description of Artificial Sequence: Synthetic oligonucleotide
  Sense strand starting at position 2751 of SEQ ID NO: 1244427
uccuuaugugccugauuua

SEQ ID NO: 1487899 - RNA, 19 nt, Artificial Sequence
  Description of Artificial Sequence: Synthetic oligonucleotide
  Antisense strand to SEQ ID NO: 1487898
uaaaucaggcacauaagga

SEQ ID NO: 1487900 - RNA, 19 nt, Artificial Sequence
  Description of Artificial Sequence: Synthetic oligonucleotide
  Sense strand starting at position 3159 of SEQ ID NO: 1244427
ggcuaauaagcacauugua

SEQ ID NO: 1487901 - RNA, 19 nt, Artificial Sequence
  Description of Artificial Sequence: Synthetic oligonucleotide
  Antisense strand to SEQ ID NO: 1487900
uacaaugugcuuauuagcc

SEQ ID NO: 1487902 - RNA, 19 nt, Artificial Sequence
  Description of Artificial Sequence: Synthetic oligonucleotide
  Sense strand starting at position 3177 of SEQ ID NO: 1244427
aggacauucuaauaucaga

SEQ ID NO: 1487903 - RNA, 19 nt, Artificial Sequence
  Description of Artificial Sequence: Synthetic oligonucleotide
  Antisense strand to SEQ ID NO: 1487902
ucugauauuagaauguccu

SEQ ID NO: 1487904 - RNA, 19 nt, Artificial Sequence
  Description of Artificial Sequence: Synthetic oligonucleotide
  Sense strand starting at position 3247 of SEQ ID NO: 1244427
cugagcacuccgugaagga

SEQ ID NO: 1487905 - RNA, 19 nt, Artificial Sequence
  Description of Artificial Sequence: Synthetic oligonucleotide
  Antisense strand to SEQ ID NO: 1487904
uccuucacggagugcucag

SEQ ID NO: 1487906 - RNA, 19 nt, Artificial Sequence
  Description of Artificial Sequence: Synthetic oligonucleotide
  Sense strand starting at position 3406 of SEQ ID NO: 1244427
uggaguuggcaucaaaccu

SEQ ID NO: 1487907 - RNA, 19 nt, Artificial Sequence
  Description of Artificial Sequence: Synthetic oligonucleotide
  Antisense strand to SEQ ID NO: 1487906
agguuugaugccaacucca

SEQ ID NO: 1487908 - RNA, 19 nt, Artificial Sequence
  Description of Artificial Sequence: Synthetic oligonucleotide
  Sense strand starting at position 3505 of SEQ ID NO: 1244427
cugucugacuuggugacaa

SEQ ID NO: 1487909 - RNA, 19 nt, Artificial Sequence
  Description of Artificial Sequence: Synthetic oligonucleotide
  Antisense strand to SEQ ID NO: 1487908
uugucaccaagucagacag

SEQ ID NO: 1487910 - RNA, 19 nt, Artificial Sequence
  Description of Artificial Sequence: Synthetic oligonucleotide
  Sense strand starting at position 3507 of SEQ ID NO: 1244427
gucugacuuggugacaaau

SEQ ID NO: 1487911 - RNA, 19 nt, Artificial Sequence
  Description of Artificial Sequence: Synthetic oligonucleotide
  Antisense strand to SEQ ID NO: 1487910
auuugucaccaagucagac

SEQ ID NO: 1487912 - RNA, 19 nt, Artificial Sequence
  Description of Artificial Sequence: Synthetic oligonucleotide
  Sense strand starting at position 3566 of SEQ ID NO: 1244427
ugaaaugacucacaggacu

SEQ ID NO: 1487913 - RNA, 19 nt, Artificial Sequence
  Description of Artificial Sequence: Synthetic oligonucleotide
  Antisense strand to SEQ ID NO: 1487912
aguccugugagucauuuca

SEQ ID NO: 1487914 - RNA, 19 nt, Artificial Sequence
  Description of Artificial Sequence: Synthetic oligonucleotide
  Sense strand starting at position 3650 of SEQ ID NO: 1244427
ggaagagaugccgagguca

SEQ ID NO: 1487915 - RNA, 19 nt, Artificial Sequence
  Description of Artificial Sequence: Synthetic oligonucleotide
  Antisense strand to SEQ ID NO: 1487914
ugaccucggcaucucuucc

SEQ ID NO: 1487916 - RNA, 19 nt, Artificial Sequence
  Description of Artificial Sequence: Synthetic oligonucleotide
  Sense strand starting at position 3652 of SEQ ID NO: 1244427
aagagaugccgaggucaag

SEQ ID NO: 1487917 - RNA, 19 nt, Artificial Sequence
  Description of Artificial Sequence: Synthetic oligonucleotide
  Antisense strand to SEQ ID NO: 1487916
cuugaccucggcaucucuu

SEQ ID NO: 1487918 - RNA, 19 nt, Artificial Sequence
  Description of Artificial Sequence: Synthetic oligonucleotide
  Sense strand starting at position 3924 of SEQ ID NO: 1244427
ucgucucuuacugggauca

SEQ ID NO: 1487919 - RNA, 19 nt, Artificial Sequence
  Description of Artificial Sequence: Synthetic oligonucleotide
  Antisense strand to SEQ ID NO: 1487918
ugaucccaguaagagacga

SEQ ID NO: 1487920 - RNA, 19 nt, Artificial Sequence
  Description of Artificial Sequence: Synthetic oligonucleotide
  Sense strand starting at position 71 of SEQ ID NO: 1244428
gaacuaauaugucaaugug

SEQ ID NO: 1487921 - RNA, 19 nt, Artificial Sequence
  Description of Artificial Sequence: Synthetic oligonucleotide
  Antisense strand to SEQ ID NO: 1487920
cacauugacauauuaguuc

SEQ ID NO: 1487922 - RNA, 19 nt, Artificial Sequence
  Description of Artificial Sequence: Synthetic oligonucleotide
  Sense strand starting at position 74 of SEQ ID NO: 1244428
cuaauaugucaauguggga

SEQ ID NO: 1487923 - RNA, 19 nt, Artificial Sequence
  Description of Artificial Sequence: Synthetic oligonucleotide
  Antisense strand to SEQ ID NO: 1487922
ucccacauugacauauuag

SEQ ID NO: 1487924 - RNA, 19 nt, Artificial Sequence
  Description of Artificial Sequence: Synthetic oligonucleotide
  Sense strand starting at position 632 of SEQ ID NO: 1244428
acaucuacuguguaccaaa

SEQ ID NO: 1487925 - RNA, 19 nt, Artificial Sequence
  Description of Artificial Sequence: Synthetic oligonucleotide
  Antisense strand to SEQ ID NO: 1487924
uuugguacacaguagaugu

SEQ ID NO: 1487926 - RNA, 19 nt, Artificial Sequence
  Description of Artificial Sequence: Synthetic oligonucleotide
  Sense strand starting at position 753 of SEQ ID NO: 1244428
gaaagugauguccgguaca

SEQ ID NO: 1487927 - RNA, 19 nt, Artificial Sequence
  Description of Artificial Sequence: Synthetic oligonucleotide
  Antisense strand to SEQ ID NO: 1487926
uguaccggacaucacuuuc

SEQ ID NO: 1487928 - RNA, 19 nt, Artificial Sequence
  Description of Artificial Sequence: Synthetic oligonucleotide
  Sense strand starting at position 756 of SEQ ID NO: 1244428
agugauguccgguacaaag

SEQ ID NO: 1487929 - RNA, 19 nt, Artificial Sequence
  Description of Artificial Sequence: Synthetic oligonucleotide
  Antisense strand to SEQ ID NO: 1487928
cuuuguaccggacaucacu

SEQ ID NO: 1487930 - RNA, 19 nt, Artificial Sequence
  Description of Artificial Sequence: Synthetic oligonucleotide
  Sense strand starting at position 1017 of SEQ ID NO: 1244428
aggaauaucugauacggga

SEQ ID NO: 1487931 - RNA, 19 nt, Artificial Sequence
  Description of Artificial Sequence: Synthetic oligonucleotide
  Antisense strand to SEQ ID NO: 1487930
ucccguaucagauauuccu

SEQ ID NO: 1487932 - RNA, 19 nt, Artificial Sequence
  Description of Artificial Sequence: Synthetic oligonucleotide
  Sense strand starting at position 1061 of SEQ ID NO: 1244428
aguaacuauuccguccaga

SEQ ID NO: 1487933 - RNA, 19 nt, Artificial Sequence
  Description of Artificial Sequence: Synthetic oligonucleotide
  Antisense strand to SEQ ID NO: 1487932
ucuggacggaauaguuacu

SEQ ID NO: 1487934 - RNA, 19 nt, Artificial Sequence
  Description of Artificial Sequence: Synthetic oligonucleotide
  Sense strand starting at position 1108 of SEQ ID NO: 1244428
ugaccuacccuguaucaca

SEQ ID NO: 1487935 - RNA, 19 nt, Artificial Sequence
  Description of Artificial Sequence: Synthetic oligonucleotide
  Antisense strand to SEQ ID NO: 1487934
ugugauacaggguagguca

SEQ ID NO: 1487936 - RNA, 19 nt, Artificial Sequence
  Description of Artificial Sequence: Synthetic oligonucleotide
  Sense strand starting at position 1416 of SEQ ID NO: 1244428
cccaaagacugcggagaau

SEQ ID NO: 1487937 - RNA, 19 nt, Artificial Sequence
  Description of Artificial Sequence: Synthetic oligonucleotide
  Antisense strand to SEQ ID NO: 1487936
auucuccgcagucuuuggg

SEQ ID NO: 1487938 - RNA, 19 nt, Artificial Sequence
  Description of Artificial Sequence: Synthetic oligonucleotide
  Sense strand starting at position 1481 of SEQ ID NO: 1244428
ggacuaaagcgccagaaau

SEQ ID NO: 1487939 - RNA, 19 nt, Artificial Sequence
  Description of Artificial Sequence: Synthetic oligonucleotide
  Antisense strand to SEQ ID NO: 1487938
auuucuggcgcuuuagucc

SEQ ID NO: 1487940 - RNA, 19 nt, Artificial Sequence
  Description of Artificial Sequence: Synthetic oligonucleotide
  Sense strand starting at position 1548 of SEQ ID NO: 1244428
gcacucagugcuugcugaa

SEQ ID NO: 1487941 - RNA, 19 nt, Artificial Sequence
  Description of Artificial Sequence: Synthetic oligonucleotide
  Antisense strand to SEQ ID NO: 1487940
uucagcaagcacugagugc

SEQ ID NO: 1487942 - RNA, 19 nt, Artificial Sequence
  Description of Artificial Sequence: Synthetic oligonucleotide
  Sense strand starting at position 1797 of SEQ ID NO: 1244428
ccucuuagagcugaacuca

SEQ ID NO: 1487943 - RNA, 19 nt, Artificial Sequence
  Description of Artificial Sequence: Synthetic oligonucleotide
  Antisense strand to SEQ ID NO: 1487942
ugaguucagcucuaagagg

SEQ ID NO: 1487944 - RNA, 19 nt, Artificial Sequence
  Description of Artificial Sequence: Synthetic oligonucleotide
  Sense strand starting at position 2048 of SEQ ID NO: 1244428
acgcuuccucuugggagua

SEQ ID NO: 1487945 - RNA, 19 nt, Artificial Sequence
  Description of Artificial Sequence: Synthetic oligonucleotide
  Antisense strand to SEQ ID NO: 1487944
uacucccaagaggaagcgu

SEQ ID NO: 1487946 - RNA, 19 nt, Artificial Sequence
  Description of Artificial Sequence: Synthetic oligonucleotide
  Sense strand starting at position 2061 of SEQ ID NO: 1244428
ggaguaggcagucauucua

SEQ ID NO: 1487947 - RNA, 19 nt, Artificial Sequence
  Description of Artificial Sequence: Synthetic oligonucleotide
  Antisense strand to SEQ ID NO: 1487946
uagaaugacugccuacucc

SEQ ID NO: 1487948 - RNA, 19 nt, Artificial Sequence
  Description of Artificial Sequence: Synthetic oligonucleotide
  Sense strand starting at position 2068 of SEQ ID NO: 1244428
gcagucauucuagggaaca

SEQ ID NO: 1487949 - RNA, 19 nt, Artificial Sequence
  Description of Artificial Sequence: Synthetic oligonucleotide
  Antisense strand to SEQ ID NO: 1487948
uguucccuagaaugacugc

SEQ ID NO: 1487950 - RNA, 19 nt, Artificial Sequence
  Description of Artificial Sequence: Synthetic oligonucleotide
  Sense strand starting at position 2069 of SEQ ID NO: 1244428
cagucauucuagggaacaa

SEQ ID NO: 1487951 - RNA, 19 nt, Artificial Sequence
  Description of Artificial Sequence: Synthetic oligonucleotide
  Antisense strand to SEQ ID NO: 1487950
uuguucccuagaaugacug

SEQ ID NO: 1487952 - RNA, 19 nt, Artificial Sequence
  Description of Artificial Sequence: Synthetic oligonucleotide
  Sense strand starting at position 2164 of SEQ ID NO: 1244428
cggguucucugacucacuu

SEQ ID NO: 1487953 - RNA, 19 nt, Artificial Sequence
  Description of Artificial Sequence: Synthetic oligonucleotide
  Antisense strand to SEQ ID NO: 1487952
aagugagucagagaacccg

SEQ ID NO: 1487954 - RNA, 19 nt, Artificial Sequence
  Description of Artificial Sequence: Synthetic oligonucleotide
  Sense strand starting at position 2182 of SEQ ID NO: 1244428
uccuucguucgcgagcaaa

SEQ ID NO: 1487955 - RNA, 19 nt, Artificial Sequence
  Description of Artificial Sequence: Synthetic oligonucleotide
  Antisense strand to SEQ ID NO: 1487954
uuugcucgcgaacgaagga

SEQ ID NO: 1487956 - RNA, 19 nt, Artificial Sequence
  Description of Artificial Sequence: Synthetic oligonucleotide
  Sense strand starting at position 2184 of SEQ ID NO: 1244428
cuucguucgcgagcaaauu

SEQ ID NO: 1487957 - RNA, 19 nt, Artificial Sequence
  Description of Artificial Sequence: Synthetic oligonucleotide
  Antisense strand to SEQ ID NO: 1487956
aauuugcucgcgaacgaag

SEQ ID NO: 1487958 - RNA, 19 nt, Artificial Sequence
  Description of Artificial Sequence: Synthetic oligonucleotide
  Sense strand starting at position 2244 of SEQ ID NO: 1244428
aagagugccugaccuagaa

SEQ ID NO: 1487959 - RNA, 19 nt, Artificial Sequence
  Description of Artificial Sequence: Synthetic oligonucleotide
  Antisense strand to SEQ ID NO: 1487958
uucuaggucaggcacucuu

SEQ ID NO: 1487960 - RNA, 19 nt, Artificial Sequence
  Description of Artificial Sequence: Synthetic oligonucleotide
  Sense strand starting at position 2246 of SEQ ID NO: 1244428
gagugccugaccuagaagu

SEQ ID NO: 1487961 - RNA, 19 nt, Artificial Sequence
  Description of Artificial Sequence: Synthetic oligonucleotide
  Antisense strand to SEQ ID NO: 1487960
acuucuaggucaggcacuc

SEQ ID NO: 1487962 - RNA, 19 nt, Artificial Sequence
  Description of Artificial Sequence: Synthetic oligonucleotide
  Sense strand starting at position 2344 of SEQ ID NO: 1244428
cgcauuauucuaggcccua

SEQ ID NO: 1487963 - RNA, 19 nt, Artificial Sequence
  Description of Artificial Sequence: Synthetic oligonucleotide
  Antisense strand to SEQ ID NO: 1487962
uagggccuagaauaaugcg

SEQ ID NO: 1487964 - RNA, 19 nt, Artificial Sequence
  Description of Artificial Sequence: Synthetic oligonucleotide
  Sense strand starting at position 2345 of SEQ ID NO: 1244428
gcauuauucuaggcccuag

SEQ ID NO: 1487965 - RNA, 19 nt, Artificial Sequence
  Description of Artificial Sequence: Synthetic oligonucleotide
  Antisense strand to SEQ ID NO: 1487964
cuagggccuagaauaaugc

SEQ ID NO: 1487966 - RNA, 19 nt, Artificial Sequence
  Description of Artificial Sequence: Synthetic oligonucleotide
  Sense strand starting at position 2371 of SEQ ID NO: 1244428
acaguaugcucucuuggag

SEQ ID NO: 1487967 - RNA, 19 nt, Artificial Sequence
  Description of Artificial Sequence: Synthetic oligonucleotide
  Antisense strand to SEQ ID NO: 1487966
cuccaagagagcauacugu

SEQ ID NO: 1487968 - RNA, 19 nt, Artificial Sequence
  Description of Artificial Sequence: Synthetic oligonucleotide
  Sense strand starting at position 2374 of SEQ ID NO: 1244428
guaugcucucuuggagcuu

SEQ ID NO: 1487969 - RNA, 19 nt, Artificial Sequence
  Description of Artificial Sequence: Synthetic oligonucleotide
  Antisense strand to SEQ ID NO: 1487968
aagcuccaagagagcauac

SEQ ID NO: 1487970 - RNA, 19 nt, Artificial Sequence
  Description of Artificial Sequence: Synthetic oligonucleotide
  Sense strand starting at position 2442 of SEQ ID NO: 1244428
uauguaauagaucgcauuu

SEQ ID NO: 1487971 - RNA, 19 nt, Artificial Sequence
  Description of Artificial Sequence: Synthetic oligonucleotide
  Antisense strand to SEQ ID NO: 1487970
aaaugcgaucuauuacaua

SEQ ID NO: 1487972 - RNA, 19 nt, Artificial Sequence
  Description of Artificial Sequence: Synthetic oligonucleotide
  Sense strand starting at position 2460 of SEQ ID NO: 1244428
uuguaagugcugugaagaa

SEQ ID NO: 1487973 - RNA, 19 nt, Artificial Sequence
  Description of Artificial Sequence: Synthetic oligonucleotide
  Antisense strand to SEQ ID NO: 1487972
uucuucacagcacuuacaa

SEQ ID NO: 1487974 - RNA, 19 nt, Artificial Sequence
  Description of Artificial Sequence: Synthetic oligonucleotide
  Sense strand starting at position 2485 of SEQ ID NO: 1244428
agagaaaucucugaguaag

SEQ ID NO: 1487975 - RNA, 19 nt, Artificial Sequence
  Description of Artificial Sequence: Synthetic oligonucleotide
  Antisense strand to SEQ ID NO: 1487974
cuuacucagagauuucucu

SEQ ID NO: 1487976 - RNA, 19 nt, Artificial Sequence
  Description of Artificial Sequence: Synthetic oligonucleotide
  Sense strand starting at position 2491 of SEQ ID NO: 1244428
aucucugaguaagugauaa

SEQ ID NO: 1487977 - RNA, 19 nt, Artificial Sequence
  Description of Artificial Sequence: Synthetic oligonucleotide
  Antisense strand to SEQ ID NO: 1487976
uuaucacuuacucagagau

SEQ ID NO: 1487978 - RNA, 19 nt, Artificial Sequence
  Description of Artificial Sequence: Synthetic oligonucleotide
  Sense strand starting at position 2495 of SEQ ID NO: 1244428
cugaguaagugauaauaga

SEQ ID NO: 1487979 - RNA, 19 nt, Artificial Sequence
  Description of Artificial Sequence: Synthetic oligonucleotide
  Antisense strand to SEQ ID NO: 1487978
ucuauuaucacuuacucag

SEQ ID NO: 1487980 - RNA, 19 nt, Artificial Sequence
  Description of Artificial Sequence: Synthetic oligonucleotide
  Sense strand starting at position 2542 of SEQ ID NO: 1244428
cccagugauucuucgagag

SEQ ID NO: 1487981 - RNA, 19 nt, Artificial Sequence
  Description of Artificial Sequence: Synthetic oligonucleotide
  Antisense strand to SEQ ID NO: 1487980
cucucgaagaaucacuggg

SEQ ID NO: 1487982 - RNA, 19 nt, Artificial Sequence
  Description of Artificial Sequence: Synthetic oligonucleotide
  Sense strand starting at position 2546 of SEQ ID NO: 1244428
gugauucuucgagagccaa

SEQ ID NO: 1487983 - RNA, 19 nt, Artificial Sequence
  Description of Artificial Sequence: Synthetic oligonucleotide
  Antisense strand to SEQ ID NO: 1487982
uuggcucucgaagaaucac

SEQ ID NO: 1487984 - RNA, 19 nt, Artificial Sequence
  Description of Artificial Sequence: Synthetic oligonucleotide
  Sense strand starting at position 2562 of SEQ ID NO: 1244428
caaguauuacgguggacau

SEQ ID NO: 1487985 - RNA, 19 nt, Artificial Sequence
  Description of Artificial Sequence: Synthetic oligonucleotide
  Antisense strand to SEQ ID NO: 1487984
auguccaccguaauacuug

SEQ ID NO: 1487986 - RNA, 19 nt, Artificial Sequence
  Description of Artificial Sequence: Synthetic oligonucleotide
  Sense strand starting at position 2563 of SEQ ID NO: 1244428
aaguauuacgguggacauc

SEQ ID NO: 1487987 - RNA, 19 nt, Artificial Sequence
  Description of Artificial Sequence: Synthetic oligonucleotide
  Antisense strand to SEQ ID NO: 1487986
gauguccaccguaauacuu

SEQ ID NO: 1487988 - RNA, 19 nt, Artificial Sequence
  Description of Artificial Sequence: Synthetic oligonucleotide
  Sense strand starting at position 2574 of SEQ ID NO: 1244428
uggacaucgagugguggaa

SEQ ID NO: 1487989 - RNA, 19 nt, Artificial Sequence
  Description of Artificial Sequence: Synthetic oligonucleotide
  Antisense strand to SEQ ID NO: 1487988
uuccaccacucgaugucca

SEQ ID NO: 1487990 - RNA, 19 nt, Artificial Sequence
  Description of Artificial Sequence: Synthetic oligonucleotide
  Sense strand starting at position 2610 of SEQ ID NO: 1244428
gccaaaucuuauguuguga

SEQ ID NO: 1487991 - RNA, 19 nt, Artificial Sequence
  Description of Artificial Sequence: Synthetic oligonucleotide
  Antisense strand to SEQ ID NO: 1487990
ucacaacauaagauuuggc

SEQ ID NO: 1487992 - RNA, 19 nt, Artificial Sequence
  Description of Artificial Sequence: Synthetic oligonucleotide
  Sense strand starting at position 2625 of SEQ ID NO: 1244428
gugagaugcuaauacagau

SEQ ID NO: 1487993 - RNA, 19 nt, Artificial Sequence
  Description of Artificial Sequence: Synthetic oligonucleotide
  Antisense strand to SEQ ID NO: 1487992
aucuguauuagcaucucac

SEQ ID NO: 1487994 - RNA, 19 nt, Artificial Sequence
  Description of Artificial Sequence: Synthetic oligonucleotide
  Sense strand starting at position 2759 of SEQ ID NO: 1244428
ggagcaauuggacgaauau

SEQ ID NO: 1487995 - RNA, 19 nt, Artificial Sequence
  Description of Artificial Sequence: Synthetic oligonucleotide
  Antisense strand to SEQ ID NO: 1487994
auauucguccaauugcucc

SEQ ID NO: 1487996 - RNA, 19 nt, Artificial Sequence
  Description of Artificial Sequence: Synthetic oligonucleotide
  Sense strand starting at position 2964 of SEQ ID NO: 1244428
guugauaaauuggaacuua

SEQ ID NO: 1487997 - RNA, 19 nt, Artificial Sequence
  Description of Artificial Sequence: Synthetic oligonucleotide
  Antisense strand to SEQ ID NO: 1487996
uaaguuccaauuuaucaac

SEQ ID NO: 1487998 - RNA, 19 nt, Artificial Sequence
  Description of Artificial Sequence: Synthetic oligonucleotide
  Sense strand starting at position 3938 of SEQ ID NO: 1244428
gugcucggccuuuauuuau

SEQ ID NO: 1487999 - RNA, 19 nt, Artificial Sequence
  Description of Artificial Sequence: Synthetic oligonucleotide
  Antisense strand to SEQ ID NO: 1487998
auaaauaaaggccgagcac

SEQ ID NO: 1488000 - RNA, 19 nt, Artificial Sequence
  Description of Artificial Sequence: Synthetic oligonucleotide
  Sense strand starting at position 48 of SEQ ID NO: 1244429
gaacuaauaugucaaugug

SEQ ID NO: 1488001 - RNA, 19 nt, Artificial Sequence
  Description of Artificial Sequence: Synthetic oligonucleotide
  Antisense strand to SEQ ID NO: 1488000
cacauugacauauuaguuc

SEQ ID NO: 1488002 - RNA, 19 nt, Artificial Sequence
  Description of Artificial Sequence: Synthetic oligonucleotide
  Sense strand starting at position 51 of SEQ ID NO: 1244429
cuaauaugucaauguggga

SEQ ID NO: 1488003 - RNA, 19 nt, Artificial Sequence
  Description of Artificial Sequence: Synthetic oligonucleotide
  Antisense strand to SEQ ID NO: 1488002
ucccacauugacauauuag

SEQ ID NO: 1488004 - RNA, 19 nt, Artificial Sequence
  Description of Artificial Sequence: Synthetic oligonucleotide
  Sense strand starting at position 609 of SEQ ID NO: 1244429
acaucuacuguguaccaaa

SEQ ID NO: 1488005 - RNA, 19 nt, Artificial Sequence
  Description of Artificial Sequence: Synthetic oligonucleotide
  Antisense strand to SEQ ID NO: 1488004
uuugguacacaguagaugu

SEQ ID NO: 1488006 - RNA, 19 nt, Artificial Sequence
  Description of Artificial Sequence: Synthetic oligonucleotide
  Sense strand starting at position 730 of SEQ ID NO: 1244429
gaaagugauguccgguaca

SEQ ID NO: 1488007 - RNA, 19 nt, Artificial Sequence
  Description of Artificial Sequence: Synthetic oligonucleotide
  Antisense strand to SEQ ID NO: 1488006
uguaccggacaucacuuuc

SEQ ID NO: 1488008 - RNA, 19 nt, Artificial Sequence
  Description of Artificial Sequence: Synthetic oligonucleotide
  Sense strand starting at position 733 of SEQ ID NO: 1244429
agugauguccgguacaaag

SEQ ID NO: 1488009 - RNA, 19 nt, Artificial Sequence
  Description of Artificial Sequence: Synthetic oligonucleotide
  Antisense strand to SEQ ID NO: 1488008
cuuuguaccggacaucacu

SEQ ID NO: 1488010 - RNA, 19 nt, Artificial Sequence
  Description of Artificial Sequence: Synthetic oligonucleotide
  Sense strand starting at position 994 of SEQ ID NO: 1244429
aggaauaucugauacggga

SEQ ID NO: 1488011 - RNA, 19 nt, Artificial Sequence
  Description of Artificial Sequence: Synthetic oligonucleotide
  Antisense strand to SEQ ID NO: 1488010
ucccguaucagauauuccu

SEQ ID NO: 1488012 - RNA, 19 nt, Artificial Sequence
  Description of Artificial Sequence: Synthetic oligonucleotide
  Sense strand starting at position 1038 of SEQ ID NO: 1244429
aguaacuauuccguccaga

SEQ ID NO: 1488013 - RNA, 19 nt, Artificial Sequence
  Description of Artificial Sequence: Synthetic oligonucleotide
  Antisense strand to SEQ ID NO: 1488012
ucuggacggaauaguuacu

SEQ ID NO: 1488014 - RNA, 19 nt, Artificial Sequence
  Description of Artificial Sequence: Synthetic oligonucleotide
  Sense strand starting at position 1085 of SEQ ID NO: 1244429
ugaccuacccuguaucaca

SEQ ID NO: 1488015 - RNA, 19 nt, Artificial Sequence
  Description of Artificial Sequence: Synthetic oligonucleotide
  Antisense strand to SEQ ID NO: 1488014
ugugauacaggguagguca

SEQ ID NO: 1488016 - RNA, 19 nt, Artificial Sequence
  Description of Artificial Sequence: Synthetic oligonucleotide
  Sense strand starting at position 1393 of SEQ ID NO: 1244429
cccaaagacugcggagaau

SEQ ID NO: 1488017 - RNA, 19 nt, Artificial Sequence
  Description of Artificial Sequence: Synthetic oligonucleotide
  Antisense strand to SEQ ID NO: 1488016
auucuccgcagucuuuggg

SEQ ID NO: 1488018 - RNA, 19 nt, Artificial Sequence
  Description of Artificial Sequence: Synthetic oligonucleotide
  Sense strand starting at position 1458 of SEQ ID NO: 1244429
ggacuaaagcgccagaaau

SEQ ID NO: 1488019 - RNA, 19 nt, Artificial Sequence
  Description of Artificial Sequence: Synthetic oligonucleotide
  Antisense strand to SEQ ID NO: 1488018
auuucuggcgcuuuagucc

SEQ ID NO: 1488020 - RNA, 19 nt, Artificial Sequence
  Description of Artificial Sequence: Synthetic oligonucleotide
  Sense strand starting at position 1525 of SEQ ID NO: 1244429
gcacucagugcuugcugaa

SEQ ID NO: 1488021 - RNA, 19 nt, Artificial Sequence
  Description of Artificial Sequence: Synthetic oligonucleotide
  Antisense strand to SEQ ID NO: 1488020
uucagcaagcacugagugc

SEQ ID NO: 1488022 - RNA, 19 nt, Artificial Sequence
  Description of Artificial Sequence: Synthetic oligonucleotide
  Sense strand starting at position 1774 of SEQ ID NO: 1244429
ccucuuagagcugaacuca

SEQ ID NO: 1488023 - RNA, 19 nt, Artificial Sequence
  Description of Artificial Sequence: Synthetic oligonucleotide
  Antisense strand to SEQ ID NO: 1488022
ugaguucagcucuaagagg

SEQ ID NO: 1488024 - RNA, 19 nt, Artificial Sequence
  Description of Artificial Sequence: Synthetic oligonucleotide
  Sense strand starting at position 2025 of SEQ ID NO: 1244429
acgcuuccucuugggagua

SEQ ID NO: 1488025 - RNA, 19 nt, Artificial Sequence
  Description of Artificial Sequence: Synthetic oligonucleotide
  Antisense strand to SEQ ID NO: 1488024
uacucccaagaggaagcgu

SEQ ID NO: 1488026 - RNA, 19 nt, Artificial Sequence
  Description of Artificial Sequence: Synthetic oligonucleotide
  Sense strand starting at position 2038 of SEQ ID NO: 1244429
ggaguaggcagucauucua

SEQ ID NO: 1488027 - RNA, 19 nt, Artificial Sequence
  Description of Artificial Sequence: Synthetic oligonucleotide
  Antisense strand to SEQ ID NO: 1488026
uagaaugacugccuacucc

SEQ ID NO: 1488028 - RNA, 19 nt, Artificial Sequence
  Description of Artificial Sequence: Synthetic oligonucleotide
  Sense strand starting at position 2045 of SEQ ID NO: 1244429
gcagucauucuagggaaca

SEQ ID NO: 1488029 - RNA, 19 nt, Artificial Sequence
  Description of Artificial Sequence: Synthetic oligonucleotide
  Antisense strand to SEQ ID NO: 1488028
uguucccuagaaugacugc

SEQ ID NO: 1488030 - RNA, 19 nt, Artificial Sequence
  Description of Artificial Sequence: Synthetic oligonucleotide
  Sense strand starting at position 2046 of SEQ ID NO: 1244429
cagucauucuagggaacaa

SEQ ID NO: 1488031 - RNA, 19 nt, Artificial Sequence
  Description of Artificial Sequence: Synthetic oligonucleotide
  Antisense strand to SEQ ID NO: 1488030
uuguucccuagaaugacug

SEQ ID NO: 1488032 - RNA, 19 nt, Artificial Sequence
  Description of Artificial Sequence: Synthetic oligonucleotide
  Sense strand starting at position 2141 of SEQ ID NO: 1244429
cggguucucugacucacuu

SEQ ID NO: 1488033 - RNA, 19 nt, Artificial Sequence
  Description of Artificial Sequence: Synthetic oligonucleotide
  Antisense strand to SEQ ID NO: 1488032
aagugagucagagaacccg

SEQ ID NO: 1488034 - RNA, 19 nt, Artificial Sequence
  Description of Artificial Sequence: Synthetic oligonucleotide
  Sense strand starting at position 2159 of SEQ ID NO: 1244429
uccuucguucgcgagcaaa

SEQ ID NO: 1488035 - RNA, 19 nt, Artificial Sequence
  Description of Artificial Sequence: Synthetic oligonucleotide
  Antisense strand to SEQ ID NO: 1488034
uuugcucgcgaacgaagga

SEQ ID NO: 1488036 - RNA, 19 nt, Artificial Sequence
  Description of Artificial Sequence: Synthetic oligonucleotide
  Sense strand starting at position 2161 of SEQ ID NO: 1244429
cuucguucgcgagcaaauu

SEQ ID NO: 1488037 - RNA, 19 nt, Artificial Sequence
  Description of Artificial Sequence: Synthetic oligonucleotide
  Antisense strand to SEQ ID NO: 1488036
aauuugcucgcgaacgaag

SEQ ID NO: 1488038 - RNA, 19 nt, Artificial Sequence
  Description of Artificial Sequence: Synthetic oligonucleotide
  Sense strand starting at position 2221 of SEQ ID NO: 1244429
aagagugccugaccuagaa

SEQ ID NO: 1488039 - RNA, 19 nt, Artificial Sequence
  Description of Artificial Sequence: Synthetic oligonucleotide
  Antisense strand to SEQ ID NO: 1488038
uucuaggucaggcacucuu

SEQ ID NO: 1488040 - RNA, 19 nt, Artificial Sequence
  Description of Artificial Sequence: Synthetic oligonucleotide
  Sense strand starting at position 2223 of SEQ ID NO: 1244429
gagugccugaccuagaagu

SEQ ID NO: 1488041 - RNA, 19 nt, Artificial Sequence
  Description of Artificial Sequence: Synthetic oligonucleotide
  Antisense strand to SEQ ID NO: 1488040
acuucuaggucaggcacuc

SEQ ID NO: 1488042 - RNA, 19 nt, Artificial Sequence
  Description of Artificial Sequence: Synthetic oligonucleotide
  Sense strand starting at position 2321 of SEQ ID NO: 1244429
cgcauuauucuaggcccua

SEQ ID NO: 1488043 - RNA, 19 nt, Artificial Sequence
  Description of Artificial Sequence: Synthetic oligonucleotide
  Antisense strand to SEQ ID NO: 1488042
uagggccuagaauaaugcg

SEQ ID NO: 1488044 - RNA, 19 nt, Artificial Sequence
  Description of Artificial Sequence: Synthetic oligonucleotide
  Sense strand starting at position 2322 of SEQ ID NO: 1244429
gcauuauucuaggcccuag

SEQ ID NO: 1488045 - RNA, 19 nt, Artificial Sequence
  Description of Artificial Sequence: Synthetic oligonucleotide
  Antisense strand to SEQ ID NO: 1488044
cuagggccuagaauaaugc

SEQ ID NO: 1488046 - RNA, 19 nt, Artificial Sequence
  Description of Artificial Sequence: Synthetic oligonucleotide
  Sense strand starting at position 2348 of SEQ ID NO: 1244429
acaguaugcucucuuggag

SEQ ID NO: 1488047 - RNA, 19 nt, Artificial Sequence
  Description of Artificial Sequence: Synthetic oligonucleotide
  Antisense strand to SEQ ID NO: 1488046
cuccaagagagcauacugu

SEQ ID NO: 1488048 - RNA, 19 nt, Artificial Sequence
  Description of Artificial Sequence: Synthetic oligonucleotide
  Sense strand starting at position 2351 of SEQ ID NO: 1244429
guaugcucucuuggagcuu

SEQ ID NO: 1488049 - RNA, 19 nt, Artificial Sequence
  Description of Artificial Sequence: Synthetic oligonucleotide
  Antisense strand to SEQ ID NO: 1488048
aagcuccaagagagcauac

SEQ ID NO: 1488050 - RNA, 19 nt, Artificial Sequence
  Description of Artificial Sequence: Synthetic oligonucleotide
  Sense strand starting at position 2419 of SEQ ID NO: 1244429
uauguaauagaucgcauuu

SEQ ID NO: 1488051 - RNA, 19 nt, Artificial Sequence
  Description of Artificial Sequence: Synthetic oligonucleotide
  Antisense strand to SEQ ID NO: 1488050
aaaugcgaucuauuacaua

SEQ ID NO: 1488052 - RNA, 19 nt, Artificial Sequence
  Description of Artificial Sequence: Synthetic oligonucleotide
  Sense strand starting at position 2437 of SEQ ID NO: 1244429
uuguaagugcugugaagaa

SEQ ID NO: 1488053 - RNA, 19 nt, Artificial Sequence
  Description of Artificial Sequence: Synthetic oligonucleotide
  Antisense strand to SEQ ID NO: 1488052
uucuucacagcacuuacaa

SEQ ID NO: 1488054 - RNA, 19 nt, Artificial Sequence
  Description of Artificial Sequence: Synthetic oligonucleotide
  Sense strand starting at position 2462 of SEQ ID NO: 1244429
agagaaaucucugaguaag

SEQ ID NO: 1488055 - RNA, 19 nt, Artificial Sequence
  Description of Artificial Sequence: Synthetic oligonucleotide
  Antisense strand to SEQ ID NO: 1488054
cuuacucagagauuucucu

SEQ ID NO: 1488056 - RNA, 19 nt, Artificial Sequence
  Description of Artificial Sequence: Synthetic oligonucleotide
  Sense strand starting at position 2468 of SEQ ID NO: 1244429
aucucugaguaagugauaa

SEQ ID NO: 1488057 - RNA, 19 nt, Artificial Sequence
  Description of Artificial Sequence: Synthetic oligonucleotide
  Antisense strand to SEQ ID NO: 1488056
uuaucacuuacucagagau

SEQ ID NO: 1488058 - RNA, 19 nt, Artificial Sequence
  Description of Artificial Sequence: Synthetic oligonucleotide
  Sense strand starting at position 2472 of SEQ ID NO: 1244429
cugaguaagugauaauaga

SEQ ID NO: 1488059 - RNA, 19 nt, Artificial Sequence
  Description of Artificial Sequence: Synthetic oligonucleotide
  Antisense strand to SEQ ID NO: 1488058
ucuauuaucacuuacucag

SEQ ID NO: 1488060 - RNA, 19 nt, Artificial Sequence
  Description of Artificial Sequence: Synthetic oligonucleotide
  Sense strand starting at position 2519 of SEQ ID NO: 1244429
cccagugauucuucgagag

SEQ ID NO: 1488061 - RNA, 19 nt, Artificial Sequence
  Description of Artificial Sequence: Synthetic oligonucleotide
  Antisense strand to SEQ ID NO: 1488060
cucucgaagaaucacuggg

SEQ ID NO: 1488062 - RNA, 19 nt, Artificial Sequence
  Description of Artificial Sequence: Synthetic oligonucleotide
  Sense strand starting at position 2523 of SEQ ID NO: 1244429
gugauucuucgagagccaa

SEQ ID NO: 1488063 - RNA, 19 nt, Artificial Sequence
  Description of Artificial Sequence: Synthetic oligonucleotide
  Antisense strand to SEQ ID NO: 1488062
uuggcucucgaagaaucac

SEQ ID NO: 1488064 - RNA, 19 nt, Artificial Sequence
  Description of Artificial Sequence: Synthetic oligonucleotide
  Sense strand starting at position 2539 of SEQ ID NO: 1244429
caaguauuacgguggacau

SEQ ID NO: 1488065 - RNA, 19 nt, Artificial Sequence
  Description of Artificial Sequence: Synthetic oligonucleotide
  Antisense strand to SEQ ID NO: 1488064
auguccaccguaauacuug

SEQ ID NO: 1488066 - RNA, 19 nt, Artificial Sequence
  Description of Artificial Sequence: Synthetic oligonucleotide
  Sense strand starting at position 2540 of SEQ ID NO: 1244429
aaguauuacgguggacauc

SEQ ID NO: 1488067 - RNA, 19 nt, Artificial Sequence
  Description of Artificial Sequence: Synthetic oligonucleotide
  Antisense strand to SEQ ID NO: 1488066
gauguccaccguaauacuu

SEQ ID NO: 1488068 - RNA, 19 nt, Artificial Sequence
  Description of Artificial Sequence: Synthetic oligonucleotide
  Sense strand starting at position 2551 of SEQ ID NO: 1244429
uggacaucgagugguggaa

SEQ ID NO: 1488069 - RNA, 19 nt, Artificial Sequence
  Description of Artificial Sequence: Synthetic oligonucleotide
  Antisense strand to SEQ ID NO: 1488068
uuccaccacucgaugucca

SEQ ID NO: 1488070 - RNA, 19 nt, Artificial Sequence
  Description of Artificial Sequence: Synthetic oligonucleotide
  Sense strand starting at position 2587 of SEQ ID NO: 1244429
gccaaaucuuauguuguga

SEQ ID NO: 1488071 - RNA, 19 nt, Artificial Sequence
  Description of Artificial Sequence: Synthetic oligonucleotide
  Antisense strand to SEQ ID NO: 1488070
ucacaacauaagauuuggc

SEQ ID NO: 1488072 - RNA, 19 nt, Artificial Sequence
  Description of Artificial Sequence: Synthetic oligonucleotide
  Sense strand starting at position 2602 of SEQ ID NO: 1244429
gugagaugcuaauacagau

SEQ ID NO: 1488073 - RNA, 19 nt, Artificial Sequence
  Description of Artificial Sequence: Synthetic oligonucleotide
  Antisense strand to SEQ ID NO: 1488072
aucuguauuagcaucucac

SEQ ID NO: 1488074 - RNA, 19 nt, Artificial Sequence
  Description of Artificial Sequence: Synthetic oligonucleotide
  Sense strand starting at position 2736 of SEQ ID NO: 1244429
ggagcaauuggacgaauau

SEQ ID NO: 1488075 - RNA, 19 nt, Artificial Sequence
  Description of Artificial Sequence: Synthetic oligonucleotide
  Antisense strand to SEQ ID NO: 1488074
auauucguccaauugcucc

SEQ ID NO: 1488076 - RNA, 19 nt, Artificial Sequence
  Description of Artificial Sequence: Synthetic oligonucleotide
  Sense strand starting at position 2941 of SEQ ID NO: 1244429
guugauaaauuggaacuua

SEQ ID NO: 1488077 - RNA, 19 nt, Artificial Sequence
  Description of Artificial Sequence: Synthetic oligonucleotide
  Antisense strand to SEQ ID NO: 1488076
uaaguuccaauuuaucaac

SEQ ID NO: 1488078 - RNA, 19 nt, Artificial Sequence
  Description of Artificial Sequence: Synthetic oligonucleotide
  Sense strand starting at position 3915 of SEQ ID NO: 1244429
gugcucggccuuuauuuau

SEQ ID NO: 1488079 - RNA, 19 nt, Artificial Sequence
  Description of Artificial Sequence: Synthetic oligonucleotide
  Antisense strand to SEQ ID NO: 1488078
auaaauaaaggccgagcac

SEQ ID NO: 1488080 - RNA, 19 nt, Artificial Sequence
  Description of Artificial Sequence: Synthetic oligonucleotide
  Sense strand starting at position 365 of SEQ ID NO: 1244430
gggauuucgcggcagcgaa

SEQ ID NO: 1488081 - RNA, 19 nt, Artificial Sequence
  Description of Artificial Sequence: Synthetic oligonucleotide
  Antisense strand to SEQ ID NO: 1488080
uucgcugccgcgaaauccc

SEQ ID NO: 1488082 - RNA, 19 nt, Artificial Sequence
  Description of Artificial Sequence: Synthetic oligonucleotide
  Sense strand starting at position 379 of SEQ ID NO: 1244430
gcgaaaugaacucggaaag

SEQ ID NO: 1488083 - RNA, 19 nt, Artificial Sequence
  Description of Artificial Sequence: Synthetic oligonucleotide
  Antisense strand to SEQ ID NO: 1488082
cuuuccgaguucauuucgc

SEQ ID NO: 1488084 - RNA, 19 nt, Artificial Sequence
  Description of Artificial Sequence: Synthetic oligonucleotide
  Sense strand starting at position 470 of SEQ ID NO: 1244430
ggcgaguuacccggaggaa

SEQ ID NO: 1488085 - RNA, 19 nt, Artificial Sequence
  Description of Artificial Sequence: Synthetic oligonucleotide
  Antisense strand to SEQ ID NO: 1488084
uuccuccggguaacucgcc

SEQ ID NO: 1488086 - RNA, 19 nt, Artificial Sequence
  Description of Artificial Sequence: Synthetic oligonucleotide
  Sense strand starting at position 471 of SEQ ID NO: 1244430
gcgaguuacccggaggaac

SEQ ID NO: 1488087 - RNA, 19 nt, Artificial Sequence
  Description of Artificial Sequence: Synthetic oligonucleotide
  Antisense strand to SEQ ID NO: 1488086
guuccuccggguaacucgc

SEQ ID NO: 1488088 - RNA, 19 nt, Artificial Sequence
  Description of Artificial Sequence: Synthetic oligonucleotide
  Sense strand starting at position 473 of SEQ ID NO: 1244430
gaguuacccggaggaacuu

SEQ ID NO: 1488089 - RNA, 19 nt, Artificial Sequence
  Description of Artificial Sequence: Synthetic oligonucleotide
  Antisense strand to SEQ ID NO: 1488088
aaguuccuccggguaacuc

SEQ ID NO: 1488090 - RNA, 19 nt, Artificial Sequence
  Description of Artificial Sequence: Synthetic oligonucleotide
  Sense strand starting at position 1161 of SEQ ID NO: 1244430
ggcagagaucgagacggau

SEQ ID NO: 1488091 - RNA, 19 nt, Artificial Sequence
  Description of Artificial Sequence: Synthetic oligonucleotide
  Antisense strand to SEQ ID NO: 1488090
auccgucucgaucucugcc

SEQ ID NO: 1488092 - RNA, 19 nt, Artificial Sequence
  Description of Artificial Sequence: Synthetic oligonucleotide
  Sense strand starting at position 1482 of SEQ ID NO: 1244430
cugcuugagcccugguuaa

SEQ ID NO: 1488093 - RNA, 19 nt, Artificial Sequence
  Description of Artificial Sequence: Synthetic oligonucleotide
  Antisense strand to SEQ ID NO: 1488092
uuaaccagggcucaagcag

SEQ ID NO: 1488094 - RNA, 19 nt, Artificial Sequence
  Description of Artificial Sequence: Synthetic oligonucleotide
  Sense strand starting at position 1642 of SEQ ID NO: 1244430
gcgggaugcucuucucgca

SEQ ID NO: 1488095 - RNA, 19 nt, Artificial Sequence
  Description of Artificial Sequence: Synthetic oligonucleotide
  Antisense strand to SEQ ID NO: 1488094
ugcgagaagagcaucccgc

SEQ ID NO: 1488096 - RNA, 19 nt, Artificial Sequence
  Description of Artificial Sequence: Synthetic oligonucleotide
  Sense strand starting at position 1984 of SEQ ID NO: 1244430
gugguacugcccugagaug

SEQ ID NO: 1488097 - RNA, 19 nt, Artificial Sequence
  Description of Artificial Sequence: Synthetic oligonucleotide
  Antisense strand to SEQ ID NO: 1488096
caucucagggcaguaccac

SEQ ID NO: 1488098 - RNA, 19 nt, Artificial Sequence
  Description of Artificial Sequence: Synthetic oligonucleotide
  Sense strand starting at position 2099 of SEQ ID NO: 1244430
uggccagauggaugacaau

SEQ ID NO: 1488099 - RNA, 19 nt, Artificial Sequence
  Description of Artificial Sequence: Synthetic oligonucleotide
  Antisense strand to SEQ ID NO: 1488098
auugucauccaucuggcca

SEQ ID NO: 1488100 - RNA, 19 nt, Artificial Sequence
  Description of Artificial Sequence: Synthetic oligonucleotide
  Sense strand starting at position 2119 of SEQ ID NO: 1244430
uggccucuguuauaccuua

SEQ ID NO: 1488101 - RNA, 19 nt, Artificial Sequence
  Description of Artificial Sequence: Synthetic oligonucleotide
  Antisense strand to SEQ ID NO: 1488100
uaagguauaacagaggcca

SEQ ID NO: 1488102 - RNA, 19 nt, Artificial Sequence
  Description of Artificial Sequence: Synthetic oligonucleotide
  Sense strand starting at position 2162 of SEQ ID NO: 1244430
agagcauuagcccaccaca

SEQ ID NO: 1488103 - RNA, 19 nt, Artificial Sequence
  Description of Artificial Sequence: Synthetic oligonucleotide
  Antisense strand to SEQ ID NO: 1488102
uguggugggcuaaugcucu

SEQ ID NO: 1488104 - RNA, 19 nt, Artificial Sequence
  Description of Artificial Sequence: Synthetic oligonucleotide
  Sense strand starting at position 2229 of SEQ ID NO: 1244430
uuggcuucgaucugaaaca

SEQ ID NO: 1488105 - RNA, 19 nt, Artificial Sequence
  Description of Artificial Sequence: Synthetic oligonucleotide
  Antisense strand to SEQ ID NO: 1488104
uguuucagaucgaagccaa

SEQ ID NO: 1488106 - RNA, 19 nt, Artificial Sequence
  Description of Artificial Sequence: Synthetic oligonucleotide
  Sense strand starting at position 2291 of SEQ ID NO: 1244430
ucgaaauugcacggacuuu

SEQ ID NO: 1488107 - RNA, 19 nt, Artificial Sequence
  Description of Artificial Sequence: Synthetic oligonucleotide
  Antisense strand to SEQ ID NO: 1488106
aaaguccgugcaauuucga

SEQ ID NO: 1488108 - RNA, 19 nt, Artificial Sequence
  Description of Artificial Sequence: Synthetic oligonucleotide
  Sense strand starting at position 2403 of SEQ ID NO: 1244430
ucuuuccuuccugggaaga

SEQ ID NO: 1488109 - RNA, 19 nt, Artificial Sequence
  Description of Artificial Sequence: Synthetic oligonucleotide
  Antisense strand to SEQ ID NO: 1488108
ucuucccaggaaggaaaga

SEQ ID NO: 1488110 - RNA, 19 nt, Artificial Sequence
  Description of Artificial Sequence: Synthetic oligonucleotide
  Sense strand starting at position 2405 of SEQ ID NO: 1244430
uuuccuuccugggaagacu

SEQ ID NO: 1488111 - RNA, 19 nt, Artificial Sequence
  Description of Artificial Sequence: Synthetic oligonucleotide
  Antisense strand to SEQ ID NO: 1488110
agucuucccaggaaggaaa

SEQ ID NO: 1488112 - RNA, 19 nt, Artificial Sequence
  Description of Artificial Sequence: Synthetic oligonucleotide
  Sense strand starting at position 2414 of SEQ ID NO: 1244430
ugggaagacuguccuuaac

SEQ ID NO: 1488113 - RNA, 19 nt, Artificial Sequence
  Description of Artificial Sequence: Synthetic oligonucleotide
  Antisense strand to SEQ ID NO: 1488112
guuaaggacagucuuccca

SEQ ID NO: 1488114 - RNA, 19 nt, Artificial Sequence
  Description of Artificial Sequence: Synthetic oligonucleotide
  Sense strand starting at position 2416 of SEQ ID NO: 1244430
ggaagacuguccuuaacug

SEQ ID NO: 1488115 - RNA, 19 nt, Artificial Sequence
  Description of Artificial Sequence: Synthetic oligonucleotide
  Antisense strand to SEQ ID NO: 1488114
caguuaaggacagucuucc

SEQ ID NO: 1488116 - RNA, 19 nt, Artificial Sequence
  Description of Artificial Sequence: Synthetic oligonucleotide
  Sense strand starting at position 2519 of SEQ ID NO: 1244430
aggccacgcuuuguguaaa

SEQ ID NO: 1488117 - RNA, 19 nt, Artificial Sequence
  Description of Artificial Sequence: Synthetic oligonucleotide
  Antisense strand to SEQ ID NO: 1488116
uuuacacaaagcguggccu

SEQ ID NO: 1488118 - RNA, 19 nt, Artificial Sequence
  Description of Artificial Sequence: Synthetic oligonucleotide
  Sense strand starting at position 3190 of SEQ ID NO: 1244430
ucgccaucaucugucugua

SEQ ID NO: 1488119 - RNA, 19 nt, Artificial Sequence
  Description of Artificial Sequence: Synthetic oligonucleotide
  Antisense strand to SEQ ID NO: 1488118
uacagacagaugauggcga

SEQ ID NO: 1488120 - RNA, 19 nt, Artificial Sequence
  Description of Artificial Sequence: Synthetic oligonucleotide
  Sense strand starting at position 3192 of SEQ ID NO: 1244430
gccaucaucugucuguaaa

SEQ ID NO: 1488121 - RNA, 19 nt, Artificial Sequence
  Description of Artificial Sequence: Synthetic oligonucleotide
  Antisense strand to SEQ ID NO: 1488120
uuuacagacagaugauggc

SEQ ID NO: 1488122 - RNA, 19 nt, Artificial Sequence
  Description of Artificial Sequence: Synthetic oligonucleotide
  Sense strand starting at position 3193 of SEQ ID NO: 1244430
ccaucaucugucuguaaag

SEQ ID NO: 1488123 - RNA, 19 nt, Artificial Sequence
  Description of Artificial Sequence: Synthetic oligonucleotide
  Antisense strand to SEQ ID NO: 1488122
cuuuacagacagaugaugg

SEQ ID NO: 1488124 - RNA, 19 nt, Artificial Sequence
  Description of Artificial Sequence: Synthetic oligonucleotide
  Sense strand starting at position 3263 of SEQ ID NO: 1244430
cucuauugccucuaccgaa

SEQ ID NO: 1488125 - RNA, 19 nt, Artificial Sequence
  Description of Artificial Sequence: Synthetic oligonucleotide
  Antisense strand to SEQ ID NO: 1488124
uucgguagaggcaauagag

SEQ ID NO: 1488126 - RNA, 19 nt, Artificial Sequence
  Description of Artificial Sequence: Synthetic oligonucleotide
  Sense strand starting at position 3375 of SEQ ID NO: 1244430
uggaucaucugaggugaga

SEQ ID NO: 1488127 - RNA, 19 nt, Artificial Sequence
  Description of Artificial Sequence: Synthetic oligonucleotide
  Antisense strand to SEQ ID NO: 1488126
ucucaccucagaugaucca

SEQ ID NO: 1488128 - RNA, 19 nt, Artificial Sequence
  Description of Artificial Sequence: Synthetic oligonucleotide
  Sense strand starting at position 3862 of SEQ ID NO: 1244430
gugagcugcugucaucaca

SEQ ID NO: 1488129 - RNA, 19 nt, Artificial Sequence
  Description of Artificial Sequence: Synthetic oligonucleotide
  Antisense strand to SEQ ID NO: 1488128
ugugaugacagcagcucac

SEQ ID NO: 1488130 - RNA, 19 nt, Artificial Sequence
  Description of Artificial Sequence: Synthetic oligonucleotide
  Sense strand starting at position 3957 of SEQ ID NO: 1244430
gcuagaugcagccauauga

SEQ ID NO: 1488131 - RNA, 19 nt, Artificial Sequence
  Description of Artificial Sequence: Synthetic oligonucleotide
  Antisense strand to SEQ ID NO: 1488130
ucauauggcugcaucuagc

SEQ ID NO: 1488132 - RNA, 19 nt, Artificial Sequence
  Description of Artificial Sequence: Synthetic oligonucleotide
  Sense strand starting at position 3964 of SEQ ID NO: 1244430
gcagccauaugacuaaguu

SEQ ID NO: 1488133 - RNA, 19 nt, Artificial Sequence
  Description of Artificial Sequence: Synthetic oligonucleotide
  Antisense strand to SEQ ID NO: 1488132
aacuuagucauauggcugc

SEQ ID NO: 1488134 - RNA, 19 nt, Artificial Sequence
  Description of Artificial Sequence: Synthetic oligonucleotide
  Sense strand starting at position 208 of SEQ ID NO: 1244431
ucccauuucuaaggucuga

SEQ ID NO: 1488135 - RNA, 19 nt, Artificial Sequence
  Description of Artificial Sequence: Synthetic oligonucleotide
  Antisense strand to SEQ ID NO: 1488134
ucagaccuuagaaauggga

SEQ ID NO: 1488136 - RNA, 19 nt, Artificial Sequence
  Description of Artificial Sequence: Synthetic oligonucleotide
  Sense strand starting at position 245 of SEQ ID NO: 1244431
gcuccuaguugcucaguua

SEQ ID NO: 1488137 - RNA, 19 nt, Artificial Sequence
  Description of Artificial Sequence: Synthetic oligonucleotide
  Antisense strand to SEQ ID NO: 1488136
uaacugagcaacuaggagc

SEQ ID NO: 1488138 - RNA, 19 nt, Artificial Sequence
  Description of Artificial Sequence: Synthetic oligonucleotide
  Sense strand starting at position 246 of SEQ ID NO: 1244431
cuccuaguugcucaguuaa

SEQ ID NO: 1488139 - RNA, 19 nt, Artificial Sequence
  Description of Artificial Sequence: Synthetic oligonucleotide
  Antisense strand to SEQ ID NO: 1488138
uuaacugagcaacuaggag

SEQ ID NO: 1488140 - RNA, 19 nt, Artificial Sequence
  Description of Artificial Sequence: Synthetic oligonucleotide
  Sense strand starting at position 248 of SEQ ID NO: 1244431
ccuaguugcucaguuaagu

SEQ ID NO: 1488141 - RNA, 19 nt, Artificial Sequence
  Description of Artificial Sequence: Synthetic oligonucleotide
  Antisense strand to SEQ ID NO: 1488140
acuuaacugagcaacuagg

SEQ ID NO: 1488142 - RNA, 19 nt, Artificial Sequence
  Description of Artificial Sequence: Synthetic oligonucleotide
  Sense strand starting at position 300 of SEQ ID NO: 1244431
uagauuagcugagggagau

SEQ ID NO: 1488143 - RNA, 19 nt, Artificial Sequence
  Description of Artificial Sequence: Synthetic oligonucleotide
  Antisense strand to SEQ ID NO: 1488142
aucucccucagcuaaucua

SEQ ID NO: 1488144 - RNA, 19 nt, Artificial Sequence
  Description of Artificial Sequence: Synthetic oligonucleotide
  Sense strand starting at position 306 of SEQ ID NO: 1244431
agcugagggagaugucuaa

SEQ ID NO: 1488145 - RNA, 19 nt, Artificial Sequence
  Description of Artificial Sequence: Synthetic oligonucleotide
  Antisense strand to SEQ ID NO: 1488144
uuagacaucucccucagcu

SEQ ID NO: 1488146 - RNA, 19 nt, Artificial Sequence
  Description of Artificial Sequence: Synthetic oligonucleotide
  Sense strand starting at position 313 of SEQ ID NO: 1244431
ggagaugucuaacaaagaa

SEQ ID NO: 1488147 - RNA, 19 nt, Artificial Sequence
  Description of Artificial Sequence: Synthetic oligonucleotide
  Antisense strand to SEQ ID NO: 1488146
uucuuuguuagacaucucc

SEQ ID NO: 1488148 - RNA, 19 nt, Artificial Sequence
  Description of Artificial Sequence: Synthetic oligonucleotide
  Sense strand starting at position 586 of SEQ ID NO: 1244431
uccuaagugguguguggaa

SEQ ID NO: 1488149 - RNA, 19 nt, Artificial Sequence
  Description of Artificial Sequence: Synthetic oligonucleotide
  Antisense strand to SEQ ID NO: 1488148
uuccacacaccacuuagga

SEQ ID NO: 1488150 - RNA, 19 nt, Artificial Sequence
  Description of Artificial Sequence: Synthetic oligonucleotide
  Sense strand starting at position 588 of SEQ ID NO: 1244431
cuaagugguguguggaaau

SEQ ID NO: 1488151 - RNA, 19 nt, Artificial Sequence
  Description of Artificial Sequence: Synthetic oligonucleotide
  Antisense strand to SEQ ID NO: 1488150
auuuccacacaccacuuag

SEQ ID NO: 1488152 - RNA, 19 nt, Artificial Sequence
  Description of Artificial Sequence: Synthetic oligonucleotide
  Sense strand starting at position 591 of SEQ ID NO: 1244431
agugguguguggaaauaua

SEQ ID NO: 1488153 - RNA, 19 nt, Artificial Sequence
  Description of Artificial Sequence: Synthetic oligonucleotide
  Antisense strand to SEQ ID NO: 1488152
uauauuuccacacaccacu

SEQ ID NO: 1488154 - RNA, 19 nt, Artificial Sequence
  Description of Artificial Sequence: Synthetic oligonucleotide
  Sense strand starting at position 1014 of SEQ ID NO: 1244431
ggccaagacuguucuaauc

SEQ ID NO: 1488155 - RNA, 19 nt, Artificial Sequence
  Description of Artificial Sequence: Synthetic oligonucleotide
  Antisense strand to SEQ ID NO: 1488154
gauuagaacagucuuggcc

SEQ ID NO: 1488156 - RNA, 19 nt, Artificial Sequence
  Description of Artificial Sequence: Synthetic oligonucleotide
  Sense strand starting at position 1022 of SEQ ID NO: 1244431
cuguucuaaucguaaagac

SEQ ID NO: 1488157 - RNA, 19 nt, Artificial Sequence
  Description of Artificial Sequence: Synthetic oligonucleotide
  Antisense strand to SEQ ID NO: 1488156
gucuuuacgauuagaacag

SEQ ID NO: 1488158 - RNA, 19 nt, Artificial Sequence
  Description of Artificial Sequence: Synthetic oligonucleotide
  Sense strand starting at position 1045 of SEQ ID NO: 1244431
ucauaccgucaaugacauu

SEQ ID NO: 1488159 - RNA, 19 nt, Artificial Sequence
  Description of Artificial Sequence: Synthetic oligonucleotide
  Antisense strand to SEQ ID NO: 1488158
aaugucauugacgguauga

SEQ ID NO: 1488160 - RNA, 19 nt, Artificial Sequence
  Description of Artificial Sequence: Synthetic oligonucleotide
  Sense strand starting at position 1100 of SEQ ID NO: 1244431
gaucuagauuuagggaauu

SEQ ID NO: 1488161 - RNA, 19 nt, Artificial Sequence
  Description of Artificial Sequence: Synthetic oligonucleotide
  Antisense strand to SEQ ID NO: 1488160
aauucccuaaaucuagauc

SEQ ID NO: 1488162 - RNA, 19 nt, Artificial Sequence
  Description of Artificial Sequence: Synthetic oligonucleotide
  Sense strand starting at position 1150 of SEQ ID NO: 1244431
aggucaucugccuggcaga

SEQ ID NO: 1488163 - RNA, 19 nt, Artificial Sequence
  Description of Artificial Sequence: Synthetic oligonucleotide
  Antisense strand to SEQ ID NO: 1488162
ucugccaggcagaugaccu

SEQ ID NO: 1488164 - RNA, 19 nt, Artificial Sequence
  Description of Artificial Sequence: Synthetic oligonucleotide
  Sense strand starting at position 1160 of SEQ ID NO: 1244431
ccuggcagaggucauguua

SEQ ID NO: 1488165 - RNA, 19 nt, Artificial Sequence
  Description of Artificial Sequence: Synthetic oligonucleotide
  Antisense strand to SEQ ID NO: 1488164
uaacaugaccucugccagg

SEQ ID NO: 1488166 - RNA, 19 nt, Artificial Sequence
  Description of Artificial Sequence: Synthetic oligonucleotide
  Sense strand starting at position 1244 of SEQ ID NO: 1244431
caccgaugagccugguuga

SEQ ID NO: 1488167 - RNA, 19 nt, Artificial Sequence
  Description of Artificial Sequence: Synthetic oligonucleotide
  Antisense strand to SEQ ID NO: 1488166
ucaaccaggcucaucggug

SEQ ID NO: 1488168 - RNA, 19 nt, Artificial Sequence
  Description of Artificial Sequence: Synthetic oligonucleotide
  Sense strand starting at position 1245 of SEQ ID NO: 1244431
accgaugagccugguugaa

SEQ ID NO: 1488169 - RNA, 19 nt, Artificial Sequence
  Description of Artificial Sequence: Synthetic oligonucleotide
  Antisense strand to SEQ ID NO: 1488168
uucaaccaggcucaucggu

SEQ ID NO: 1488170 - RNA, 19 nt, Artificial Sequence
  Description of Artificial Sequence: Synthetic oligonucleotide
  Sense strand starting at position 1247 of SEQ ID NO: 1244431
cgaugagccugguugaauu

SEQ ID NO: 1488171 - RNA, 19 nt, Artificial Sequence
  Description of Artificial Sequence: Synthetic oligonucleotide
  Antisense strand to SEQ ID NO: 1488170
aauucaaccaggcucaucg

SEQ ID NO: 1488172 - RNA, 19 nt, Artificial Sequence
  Description of Artificial Sequence: Synthetic oligonucleotide
  Sense strand starting at position 1272 of SEQ ID NO: 1244431
cuuagauucuuacccguaa

SEQ ID NO: 1488173 - RNA, 19 nt, Artificial Sequence
  Description of Artificial Sequence: Synthetic oligonucleotide
  Antisense strand to SEQ ID NO: 1488172
uuacggguaagaaucuaag

SEQ ID NO: 1488174 - RNA, 19 nt, Artificial Sequence
  Description of Artificial Sequence: Synthetic oligonucleotide
  Sense strand starting at position 1273 of SEQ ID NO: 1244431
uuagauucuuacccguaag

SEQ ID NO: 1488175 - RNA, 19 nt, Artificial Sequence
  Description of Artificial Sequence: Synthetic oligonucleotide
  Antisense strand to SEQ ID NO: 1488174
cuuacggguaagaaucuaa

SEQ ID NO: 1488176 - RNA, 19 nt, Artificial Sequence
  Description of Artificial Sequence: Synthetic oligonucleotide
  Sense strand starting at position 1276 of SEQ ID NO: 1244431
gauucuuacccguaagugu

SEQ ID NO: 1488177 - RNA, 19 nt, Artificial Sequence
  Description of Artificial Sequence: Synthetic oligonucleotide
  Antisense strand to SEQ ID NO: 1488176
acacuuacggguaagaauc

SEQ ID NO: 1488178 - RNA, 19 nt, Artificial Sequence
  Description of Artificial Sequence: Synthetic oligonucleotide
  Sense strand starting at position 1652 of SEQ ID NO: 1244431
gggauuucgcggcagcgaa

SEQ ID NO: 1488179 - RNA, 19 nt, Artificial Sequence
  Description of Artificial Sequence: Synthetic oligonucleotide
  Antisense strand to SEQ ID NO: 1488178
uucgcugccgcgaaauccc

SEQ ID NO: 1488180 - RNA, 19 nt, Artificial Sequence
  Description of Artificial Sequence: Synthetic oligonucleotide
  Sense strand starting at position 1666 of SEQ ID NO: 1244431
gcgaaaugaacucggaaag

SEQ ID NO: 1488181 - RNA, 19 nt, Artificial Sequence
  Description of Artificial Sequence: Synthetic oligonucleotide
  Antisense strand to SEQ ID NO: 1488180
cuuuccgaguucauuucgc

SEQ ID NO: 1488182 - RNA, 19 nt, Artificial Sequence
  Description of Artificial Sequence: Synthetic oligonucleotide
  Sense strand starting at position 1757 of SEQ ID NO: 1244431
ggcgaguuacccggaggaa

SEQ ID NO: 1488183 - RNA, 19 nt, Artificial Sequence
  Description of Artificial Sequence: Synthetic oligonucleotide
  Antisense strand to SEQ ID NO: 1488182
uuccuccggguaacucgcc

SEQ ID NO: 1488184 - RNA, 19 nt, Artificial Sequence
  Description of Artificial Sequence: Synthetic oligonucleotide
  Sense strand starting at position 1758 of SEQ ID NO: 1244431
gcgaguuacccggaggaac

SEQ ID NO: 1488185 - RNA, 19 nt, Artificial Sequence
  Description of Artificial Sequence: Synthetic oligonucleotide
  Antisense strand to SEQ ID NO: 1488184
guuccuccggguaacucgc

SEQ ID NO: 1488186 - RNA, 19 nt, Artificial Sequence
  Description of Artificial Sequence: Synthetic oligonucleotide
  Sense strand starting at position 1760 of SEQ ID NO: 1244431
gaguuacccggaggaacuu

SEQ ID NO: 1488187 - RNA, 19 nt, Artificial Sequence
  Description of Artificial Sequence: Synthetic oligonucleotide
  Antisense strand to SEQ ID NO: 1488186
aaguuccuccggguaacuc

SEQ ID NO: 1488188 - RNA, 19 nt, Artificial Sequence
  Description of Artificial Sequence: Synthetic oligonucleotide
  Sense strand starting at position 2448 of SEQ ID NO: 1244431
ggcagagaucgagacggau

SEQ ID NO: 1488189 - RNA, 19 nt, Artificial Sequence
  Description of Artificial Sequence: Synthetic oligonucleotide
  Antisense strand to SEQ ID NO: 1488188
auccgucucgaucucugcc

SEQ ID NO: 1488190 - RNA, 19 nt, Artificial Sequence
  Description of Artificial Sequence: Synthetic oligonucleotide
  Sense strand starting at position 2769 of SEQ ID NO: 1244431
cugcuugagcccugguuaa

SEQ ID NO: 1488191 - RNA, 19 nt, Artificial Sequence
  Description of Artificial Sequence: Synthetic oligonucleotide
  Antisense strand to SEQ ID NO: 1488190
uuaaccagggcucaagcag

SEQ ID NO: 1488192 - RNA, 19 nt, Artificial Sequence
  Description of Artificial Sequence: Synthetic oligonucleotide
  Sense strand starting at position 2929 of SEQ ID NO: 1244431
gcgggaugcucuucucgca

SEQ ID NO: 1488193 - RNA, 19 nt, Artificial Sequence
  Description of Artificial Sequence: Synthetic oligonucleotide
  Antisense strand to SEQ ID NO: 1488192
ugcgagaagagcaucccgc

SEQ ID NO: 1488194 - RNA, 19 nt, Artificial Sequence
  Description of Artificial Sequence: Synthetic oligonucleotide
  Sense strand starting at position 3271 of SEQ ID NO: 1244431
gugguacugcccugagaug

SEQ ID NO: 1488195 - RNA, 19 nt, Artificial Sequence
  Description of Artificial Sequence: Synthetic oligonucleotide
  Antisense strand to SEQ ID NO: 1488194
caucucagggcaguaccac

SEQ ID NO: 1488196 - RNA, 19 nt, Artificial Sequence
  Description of Artificial Sequence: Synthetic oligonucleotide
  Sense strand starting at position 3386 of SEQ ID NO: 1244431
uggccagauggaugacaau

SEQ ID NO: 1488197 - RNA, 19 nt, Artificial Sequence
  Description of Artificial Sequence: Synthetic oligonucleotide
  Antisense strand to SEQ ID NO: 1488196
auugucauccaucuggcca

SEQ ID NO: 1488198 - RNA, 19 nt, Artificial Sequence
  Description of Artificial Sequence: Synthetic oligonucleotide
  Sense strand starting at position 3449 of SEQ ID NO: 1244431
agagcauuagcccaccaca

SEQ ID NO: 1488199 - RNA, 19 nt, Artificial Sequence
  Description of Artificial Sequence: Synthetic oligonucleotide
  Antisense strand to SEQ ID NO: 1488198
uguggugggcuaaugcucu

SEQ ID NO: 1488200 - RNA, 19 nt, Artificial Sequence
  Description of Artificial Sequence: Synthetic oligonucleotide
  Sense strand starting at position 3516 of SEQ ID NO: 1244431
uuggcuucgaucugaaaca

SEQ ID NO: 1488201 - RNA, 19 nt, Artificial Sequence
  Description of Artificial Sequence: Synthetic oligonucleotide
  Antisense strand to SEQ ID NO: 1488200
uguuucagaucgaagccaa

SEQ ID NO: 1488202 - RNA, 19 nt, Artificial Sequence
  Description of Artificial Sequence: Synthetic oligonucleotide
  Sense strand starting at position 3578 of SEQ ID NO: 1244431
ucgaaauugcacggacuuu

SEQ ID NO: 1488203 - RNA, 19 nt, Artificial Sequence
  Description of Artificial Sequence: Synthetic oligonucleotide
  Antisense strand to SEQ ID NO: 1488202
aaaguccgugcaauuucga

SEQ ID NO: 1488204 - RNA, 19 nt, Artificial Sequence
  Description of Artificial Sequence: Synthetic oligonucleotide
  Sense strand starting at position 3690 of SEQ ID NO: 1244431
ucuuuccuuccugggaaga

SEQ ID NO: 1488205 - RNA, 19 nt, Artificial Sequence
  Description of Artificial Sequence: Synthetic oligonucleotide
  Antisense strand to SEQ ID NO: 1488204
ucuucccaggaaggaaaga

SEQ ID NO: 1488206 - RNA, 19 nt, Artificial Sequence
  Description of Artificial Sequence: Synthetic oligonucleotide
  Sense strand starting at position 3692 of SEQ ID NO: 1244431
uuuccuuccugggaagacu

SEQ ID NO: 1488207 - RNA, 19 nt, Artificial Sequence
  Description of Artificial Sequence: Synthetic oligonucleotide
  Antisense strand to SEQ ID NO: 1488206
agucuucccaggaaggaaa

SEQ ID NO: 1488208 - RNA, 19 nt, Artificial Sequence
  Description of Artificial Sequence: Synthetic oligonucleotide
  Sense strand starting at position 3701 of SEQ ID NO: 1244431
ugggaagacuguccuuaac

SEQ ID NO: 1488209 - RNA, 19 nt, Artificial Sequence
  Description of Artificial Sequence: Synthetic oligonucleotide
  Antisense strand to SEQ ID NO: 1488208
guuaaggacagucuuccca

SEQ ID NO: 1488210 - RNA, 19 nt, Artificial Sequence
  Description of Artificial Sequence: Synthetic oligonucleotide
  Sense strand starting at position 3703 of SEQ ID NO: 1244431
ggaagacuguccuuaacug

SEQ ID NO: 1488211 - RNA, 19 nt, Artificial Sequence
  Description of Artificial Sequence: Synthetic oligonucleotide
  Antisense strand to SEQ ID NO: 1488210
caguuaaggacagucuucc

SEQ ID NO: 1488212 - RNA, 19 nt, Artificial Sequence
  Description of Artificial Sequence: Synthetic oligonucleotide
  Sense strand starting at position 3806 of SEQ ID NO: 1244431
aggccacgcuuuguguaaa

SEQ ID NO: 1488213 - RNA, 19 nt, Artificial Sequence
  Description of Artificial Sequence: Synthetic oligonucleotide
  Antisense strand to SEQ ID NO: 1488212
uuuacacaaagcguggccu

SEQ ID NO: 1488214 - RNA, 19 nt, Artificial Sequence
  Description of Artificial Sequence: Synthetic oligonucleotide
  Sense strand starting at position 24 of SEQ ID NO: 1244432
gcuccuaguugcucaguua

SEQ ID NO: 1488215 - RNA, 19 nt, Artificial Sequence
  Description of Artificial Sequence: Synthetic oligonucleotide
  Antisense strand to SEQ ID NO: 1488214
uaacugagcaacuaggagc

SEQ ID NO: 1488216 - RNA, 19 nt, Artificial Sequence
  Description of Artificial Sequence: Synthetic oligonucleotide
  Sense strand starting at position 25 of SEQ ID NO: 1244432
cuccuaguugcucaguuaa

SEQ ID NO: 1488217 - RNA, 19 nt, Artificial Sequence
  Description of Artificial Sequence: Synthetic oligonucleotide
  Antisense strand to SEQ ID NO: 1488216
uuaacugagcaacuaggag

SEQ ID NO: 1488218 - RNA, 19 nt, Artificial Sequence
  Description of Artificial Sequence: Synthetic oligonucleotide
  Sense strand starting at position 27 of SEQ ID NO: 1244432
ccuaguugcucaguuaagu

SEQ ID NO: 1488219 - RNA, 19 nt, Artificial Sequence
  Description of Artificial Sequence: Synthetic oligonucleotide
  Antisense strand to SEQ ID NO: 1488218
acuuaacugagcaacuagg

SEQ ID NO: 1488220 - RNA, 19 nt, Artificial Sequence
  Description of Artificial Sequence: Synthetic oligonucleotide
  Sense strand starting at position 79 of SEQ ID NO: 1244432
uagauuagcugagggagau

SEQ ID NO: 1488221 - RNA, 19 nt, Artificial Sequence
  Description of Artificial Sequence: Synthetic oligonucleotide
  Antisense strand to SEQ ID NO: 1488220
aucucccucagcuaaucua

SEQ ID NO: 1488222 - RNA, 19 nt, Artificial Sequence
  Description of Artificial Sequence: Synthetic oligonucleotide
  Sense strand starting at position 85 of SEQ ID NO: 1244432
agcugagggagaugucuaa

SEQ ID NO: 1488223 - RNA, 19 nt, Artificial Sequence
  Description of Artificial Sequence: Synthetic oligonucleotide
  Antisense strand to SEQ ID NO: 1488222
uuagacaucucccucagcu

SEQ ID NO: 1488224 - RNA, 19 nt, Artificial Sequence
  Description of Artificial Sequence: Synthetic oligonucleotide
  Sense strand starting at position 92 of SEQ ID NO: 1244432
ggagaugucuaacaaagaa

SEQ ID NO: 1488225 - RNA, 19 nt, Artificial Sequence
  Description of Artificial Sequence: Synthetic oligonucleotide
  Antisense strand to SEQ ID NO: 1488224
uucuuuguuagacaucucc

SEQ ID NO: 1488226 - RNA, 19 nt, Artificial Sequence
  Description of Artificial Sequence: Synthetic oligonucleotide
  Sense strand starting at position 365 of SEQ ID NO: 1244432
uccuaagugguguguggaa

SEQ ID NO: 1488227 - RNA, 19 nt, Artificial Sequence
  Description of Artificial Sequence: Synthetic oligonucleotide
  Antisense strand to SEQ ID NO: 1488226
uuccacacaccacuuagga

SEQ ID NO: 1488228 - RNA, 19 nt, Artificial Sequence
  Description of Artificial Sequence: Synthetic oligonucleotide
  Sense strand starting at position 367 of SEQ ID NO: 1244432
cuaagugguguguggaaau

SEQ ID NO: 1488229 - RNA, 19 nt, Artificial Sequence
  Description of Artificial Sequence: Synthetic oligonucleotide
  Antisense strand to SEQ ID NO: 1488228
auuuccacacaccacuuag

SEQ ID NO: 1488230 - RNA, 19 nt, Artificial Sequence
  Description of Artificial Sequence: Synthetic oligonucleotide
  Sense strand starting at position 370 of SEQ ID NO: 1244432
agugguguguggaaauaua

SEQ ID NO: 1488231 - RNA, 19 nt, Artificial Sequence
  Description of Artificial Sequence: Synthetic oligonucleotide
  Antisense strand to SEQ ID NO: 1488230
uauauuuccacacaccacu

SEQ ID NO: 1488232 - RNA, 19 nt, Artificial Sequence
  Description of Artificial Sequence: Synthetic oligonucleotide
  Sense strand starting at position 793 of SEQ ID NO: 1244432
ggccaagacuguucuaauc

SEQ ID NO: 1488233 - RNA, 19 nt, Artificial Sequence
  Description of Artificial Sequence: Synthetic oligonucleotide
  Antisense strand to SEQ ID NO: 1488232
gauuagaacagucuuggcc

SEQ ID NO: 1488234 - RNA, 19 nt, Artificial Sequence
  Description of Artificial Sequence: Synthetic oligonucleotide
  Sense strand starting at position 795 of SEQ ID NO: 1244432
ccaagacuguucuaaucgu

SEQ ID NO: 1488235 - RNA, 19 nt, Artificial Sequence
  Description of Artificial Sequence: Synthetic oligonucleotide
  Antisense strand to SEQ ID NO: 1488234
acgauuagaacagucuugg

SEQ ID NO: 1488236 - RNA, 19 nt, Artificial Sequence
  Description of Artificial Sequence: Synthetic oligonucleotide
  Sense strand starting at position 801 of SEQ ID NO: 1244432
cuguucuaaucguaaagac

SEQ ID NO: 1488237 - RNA, 19 nt, Artificial Sequence
  Description of Artificial Sequence: Synthetic oligonucleotide
  Antisense strand to SEQ ID NO: 1488236
gucuuuacgauuagaacag

SEQ ID NO: 1488238 - RNA, 19 nt, Artificial Sequence
  Description of Artificial Sequence: Synthetic oligonucleotide
  Sense strand starting at position 824 of SEQ ID NO: 1244432
ucauaccgucaaugacauu

SEQ ID NO: 1488239 - RNA, 19 nt, Artificial Sequence
  Description of Artificial Sequence: Synthetic oligonucleotide
  Antisense strand to SEQ ID NO: 1488238
aaugucauugacgguauga

SEQ ID NO: 1488240 - RNA, 19 nt, Artificial Sequence
  Description of Artificial Sequence: Synthetic oligonucleotide
  Sense strand starting at position 879 of SEQ ID NO: 1244432
gaucuagauuuagggaauu

SEQ ID NO: 1488241 - RNA, 19 nt, Artificial Sequence
  Description of Artificial Sequence: Synthetic oligonucleotide
  Antisense strand to SEQ ID NO: 1488240
aauucccuaaaucuagauc

SEQ ID NO: 1488242 - RNA, 19 nt, Artificial Sequence
  Description of Artificial Sequence: Synthetic oligonucleotide
  Sense strand starting at position 929 of SEQ ID NO: 1244432
aggucaucugccuggcaga

SEQ ID NO: 1488243 - RNA, 19 nt, Artificial Sequence
  Description of Artificial Sequence: Synthetic oligonucleotide
  Antisense strand to SEQ ID NO: 1488242
ucugccaggcagaugaccu

SEQ ID NO: 1488244 - RNA, 19 nt, Artificial Sequence
  Description of Artificial Sequence: Synthetic oligonucleotide
  Sense strand starting at position 939 of SEQ ID NO: 1244432
ccuggcagaggucauguua

SEQ ID NO: 1488245 - RNA, 19 nt, Artificial Sequence
  Description of Artificial Sequence: Synthetic oligonucleotide
  Antisense strand to SEQ ID NO: 1488244
uaacaugaccucugccagg

SEQ ID NO: 1488246 - RNA, 19 nt, Artificial Sequence
  Description of Artificial Sequence: Synthetic oligonucleotide
  Sense strand starting at position 1023 of SEQ ID NO: 1244432
caccgaugagccugguuga

SEQ ID NO: 1488247 - RNA, 19 nt, Artificial Sequence
  Description of Artificial Sequence: Synthetic oligonucleotide
  Antisense strand to SEQ ID NO: 1488246
ucaaccaggcucaucggug

SEQ ID NO: 1488248 - RNA, 19 nt, Artificial Sequence
  Description of Artificial Sequence: Synthetic oligonucleotide
  Sense strand starting at position 1024 of SEQ ID NO: 1244432
accgaugagccugguugaa

SEQ ID NO: 1488249 - RNA, 19 nt, Artificial Sequence
  Description of Artificial Sequence: Synthetic oligonucleotide
  Antisense strand to SEQ ID NO: 1488248
uucaaccaggcucaucggu

SEQ ID NO: 1488250 - RNA, 19 nt, Artificial Sequence
  Description of Artificial Sequence: Synthetic oligonucleotide
  Sense strand starting at position 1026 of SEQ ID NO: 1244432
cgaugagccugguugaauu

SEQ ID NO: 1488251 - RNA, 19 nt, Artificial Sequence
  Description of Artificial Sequence: Synthetic oligonucleotide
  Antisense strand to SEQ ID NO: 1488250
aauucaaccaggcucaucg

SEQ ID NO: 1488252 - RNA, 19 nt, Artificial Sequence
  Description of Artificial Sequence: Synthetic oligonucleotide
  Sense strand starting at position 1051 of SEQ ID NO: 1244432
cuuagauucuuacccguaa

SEQ ID NO: 1488253 - RNA, 19 nt, Artificial Sequence
  Description of Artificial Sequence: Synthetic oligonucleotide
  Antisense strand to SEQ ID NO: 1488252
uuacggguaagaaucuaag

SEQ ID NO: 1488254 - RNA, 19 nt, Artificial Sequence
  Description of Artificial Sequence: Synthetic oligonucleotide
  Sense strand starting at position 1052 of SEQ ID NO: 1244432
uuagauucuuacccguaag

SEQ ID NO: 1488255 - RNA, 19 nt, Artificial Sequence
  Description of Artificial Sequence: Synthetic oligonucleotide
  Antisense strand to SEQ ID NO: 1488254
cuuacggguaagaaucuaa

SEQ ID NO: 1488256 - RNA, 19 nt, Artificial Sequence
  Description of Artificial Sequence: Synthetic oligonucleotide
  Sense strand starting at position 1055 of SEQ ID NO: 1244432
gauucuuacccguaagugu

SEQ ID NO: 1488257 - RNA, 19 nt, Artificial Sequence
  Description of Artificial Sequence: Synthetic oligonucleotide
  Antisense strand to SEQ ID NO: 1488256
acacuuacggguaagaauc

SEQ ID NO: 1488258 - RNA, 19 nt, Artificial Sequence
  Description of Artificial Sequence: Synthetic oligonucleotide
  Sense strand starting at position 1431 of SEQ ID NO: 1244432
gggauuucgcggcagcgaa

SEQ ID NO: 1488259 - RNA, 19 nt, Artificial Sequence
  Description of Artificial Sequence: Synthetic oligonucleotide
  Antisense strand to SEQ ID NO: 1488258
uucgcugccgcgaaauccc

SEQ ID NO: 1488260 - RNA, 19 nt, Artificial Sequence
  Description of Artificial Sequence: Synthetic oligonucleotide
  Sense strand starting at position 1445 of SEQ ID NO: 1244432
gcgaaaugaacucggaaag

SEQ ID NO: 1488261 - RNA, 19 nt, Artificial Sequence
  Description of Artificial Sequence: Synthetic oligonucleotide
  Antisense strand to SEQ ID NO: 1488260
cuuuccgaguucauuucgc

SEQ ID NO: 1488262 - RNA, 19 nt, Artificial Sequence
  Description of Artificial Sequence: Synthetic oligonucleotide
  Sense strand starting at position 1536 of SEQ ID NO: 1244432
ggcgaguuacccggaggaa

SEQ ID NO: 1488263 - RNA, 19 nt, Artificial Sequence
  Description of Artificial Sequence: Synthetic oligonucleotide
  Antisense strand to SEQ ID NO: 1488262
uuccuccggguaacucgcc

SEQ ID NO: 1488264 - RNA, 19 nt, Artificial Sequence
  Description of Artificial Sequence: Synthetic oligonucleotide
  Sense strand starting at position 1537 of SEQ ID NO: 1244432
gcgaguuacccggaggaac

SEQ ID NO: 1488265 - RNA, 19 nt, Artificial Sequence
  Description of Artificial Sequence: Synthetic oligonucleotide
  Antisense strand to SEQ ID NO: 1488264
guuccuccggguaacucgc

SEQ ID NO: 1488266 - RNA, 19 nt, Artificial Sequence
  Description of Artificial Sequence: Synthetic oligonucleotide
  Sense strand starting at position 1539 of SEQ ID NO: 1244432
gaguuacccggaggaacuu

SEQ ID NO: 1488267 - RNA, 19 nt, Artificial Sequence
  Description of Artificial Sequence: Synthetic oligonucleotide
  Antisense strand to SEQ ID NO: 1488266
aaguuccuccggguaacuc

SEQ ID NO: 1488268 - RNA, 19 nt, Artificial Sequence
  Description of Artificial Sequence: Synthetic oligonucleotide
  Sense strand starting at position 2227 of SEQ ID NO: 1244432
ggcagagaucgagacggau

SEQ ID NO: 1488269 - RNA, 19 nt, Artificial Sequence
  Description of Artificial Sequence: Synthetic oligonucleotide
  Antisense strand to SEQ ID NO: 1488268
auccgucucgaucucugcc

SEQ ID NO: 1488270 - RNA, 19 nt, Artificial Sequence
  Description of Artificial Sequence: Synthetic oligonucleotide
  Sense strand starting at position 2548 of SEQ ID NO: 1244432
cugcuugagcccugguuaa

SEQ ID NO: 1488271 - RNA, 19 nt, Artificial Sequence
  Description of Artificial Sequence: Synthetic oligonucleotide
  Antisense strand to SEQ ID NO: 1488270
uuaaccagggcucaagcag

SEQ ID NO: 1488272 - RNA, 19 nt, Artificial Sequence
  Description of Artificial Sequence: Synthetic oligonucleotide
  Sense strand starting at position 2708 of SEQ ID NO: 1244432
gcgggaugcucuucucgca

SEQ ID NO: 1488273 - RNA, 19 nt, Artificial Sequence
  Description of Artificial Sequence: Synthetic oligonucleotide
  Antisense strand to SEQ ID NO: 1488272
ugcgagaagagcaucccgc

SEQ ID NO: 1488274 - RNA, 19 nt, Artificial Sequence
  Description of Artificial Sequence: Synthetic oligonucleotide
  Sense strand starting at position 3050 of SEQ ID NO: 1244432
gugguacugcccugagaug

SEQ ID NO: 1488275 - RNA, 19 nt, Artificial Sequence
  Description of Artificial Sequence: Synthetic oligonucleotide
  Antisense strand to SEQ ID NO: 1488274
caucucagggcaguaccac

SEQ ID NO: 1488276 - RNA, 19 nt, Artificial Sequence
  Description of Artificial Sequence: Synthetic oligonucleotide
  Sense strand starting at position 3165 of SEQ ID NO: 1244432
uggccagauggaugacaau

SEQ ID NO: 1488277 - RNA, 19 nt, Artificial Sequence
  Description of Artificial Sequence: Synthetic oligonucleotide
  Antisense strand to SEQ ID NO: 1488276
auugucauccaucuggcca

SEQ ID NO: 1488278 - RNA, 19 nt, Artificial Sequence
  Description of Artificial Sequence: Synthetic oligonucleotide
  Sense strand starting at position 3228 of SEQ ID NO: 1244432
agagcauuagcccaccaca

SEQ ID NO: 1488279 - RNA, 19 nt, Artificial Sequence
  Description of Artificial Sequence: Synthetic oligonucleotide
  Antisense strand to SEQ ID NO: 1488278
uguggugggcuaaugcucu

SEQ ID NO: 1488280 - RNA, 19 nt, Artificial Sequence
  Description of Artificial Sequence: Synthetic oligonucleotide
  Sense strand starting at position 3295 of SEQ ID NO: 1244432
uuggcuucgaucugaaaca

SEQ ID NO: 1488281 - RNA, 19 nt, Artificial Sequence
  Description of Artificial Sequence: Synthetic oligonucleotide
  Antisense strand to SEQ ID NO: 1488280
uguuucagaucgaagccaa

SEQ ID NO: 1488282 - RNA, 19 nt, Artificial Sequence
  Description of Artificial Sequence: Synthetic oligonucleotide
  Sense strand starting at position 3357 of SEQ ID NO: 1244432
ucgaaauugcacggacuuu

SEQ ID NO: 1488283 - RNA, 19 nt, Artificial Sequence
  Description of Artificial Sequence: Synthetic oligonucleotide
  Antisense strand to SEQ ID NO: 1488282
aaaguccgugcaauuucga

SEQ ID NO: 1488284 - RNA, 19 nt, Artificial Sequence
  Description of Artificial Sequence: Synthetic oligonucleotide
  Sense strand starting at position 3469 of SEQ ID NO: 1244432
ucuuuccuuccugggaaga

SEQ ID NO: 1488285 - RNA, 19 nt, Artificial Sequence
  Description of Artificial Sequence: Synthetic oligonucleotide
  Antisense strand to SEQ ID NO: 1488284
ucuucccaggaaggaaaga

SEQ ID NO: 1488286 - RNA, 19 nt, Artificial Sequence
  Description of Artificial Sequence: Synthetic oligonucleotide
  Sense strand starting at position 3471 of SEQ ID NO: 1244432
uuuccuuccugggaagacu

SEQ ID NO: 1488287 - RNA, 19 nt, Artificial Sequence
  Description of Artificial Sequence: Synthetic oligonucleotide
  Antisense strand to SEQ ID NO: 1488286
agucuucccaggaaggaaa

SEQ ID NO: 1488288 - RNA, 19 nt, Artificial Sequence
  Description of Artificial Sequence: Synthetic oligonucleotide
  Sense strand starting at position 3480 of SEQ ID NO: 1244432
ugggaagacuguccuuaac

SEQ ID NO: 1488289 - RNA, 19 nt, Artificial Sequence
  Description of Artificial Sequence: Synthetic oligonucleotide
  Antisense strand to SEQ ID NO: 1488288
guuaaggacagucuuccca

SEQ ID NO: 1488290 - RNA, 19 nt, Artificial Sequence
  Description of Artificial Sequence: Synthetic oligonucleotide
  Sense strand starting at position 3482 of SEQ ID NO: 1244432
ggaagacuguccuuaacug

SEQ ID NO: 1488291 - RNA, 19 nt, Artificial Sequence
  Description of Artificial Sequence: Synthetic oligonucleotide
  Antisense strand to SEQ ID NO: 1488290
caguuaaggacagucuucc

SEQ ID NO: 1488292 - RNA, 19 nt, Artificial Sequence
  Description of Artificial Sequence: Synthetic oligonucleotide
  Sense strand starting at position 3585 of SEQ ID NO: 1244432
aggccacgcuuuguguaaa

SEQ ID NO: 1488293 - RNA, 19 nt, Artificial Sequence
  Description of Artificial Sequence: Synthetic oligonucleotide
  Antisense strand to SEQ ID NO: 1488292
uuuacacaaagcguggccu

SEQ ID NO: 1488294 - RNA, 19 nt, Artificial Sequence
  Description of Artificial Sequence: Synthetic oligonucleotide
  Sense strand starting at position 136 of SEQ ID NO: 1244433
uccuaagugguguguggaa

SEQ ID NO: 1488295 - RNA, 19 nt, Artificial Sequence
  Description of Artificial Sequence: Synthetic oligonucleotide
  Antisense strand to SEQ ID NO: 1488294
uuccacacaccacuuagga

SEQ ID NO: 1488296 - RNA, 19 nt, Artificial Sequence
  Description of Artificial Sequence: Synthetic oligonucleotide
  Sense strand starting at position 138 of SEQ ID NO: 1244433
cuaagugguguguggaaau

SEQ ID NO: 1488297 - RNA, 19 nt, Artificial Sequence
  Description of Artificial Sequence: Synthetic oligonucleotide
  Antisense strand to SEQ ID NO: 1488296
auuuccacacaccacuuag

SEQ ID NO: 1488298 - RNA, 19 nt, Artificial Sequence
  Description of Artificial Sequence: Synthetic oligonucleotide
  Sense strand starting at position 141 of SEQ ID NO: 1244433
agugguguguggaaauaua

SEQ ID NO: 1488299 - RNA, 19 nt, Artificial Sequence
  Description of Artificial Sequence: Synthetic oligonucleotide
  Antisense strand to SEQ ID NO: 1488298
uauauuuccacacaccacu

SEQ ID NO: 1488300 - RNA, 19 nt, Artificial Sequence
  Description of Artificial Sequence: Synthetic oligonucleotide
  Sense strand starting at position 564 of SEQ ID NO: 1244433
ggccaagacuguucuaauc

SEQ ID NO: 1488301 - RNA, 19 nt, Artificial Sequence
  Description of Artificial Sequence: Synthetic oligonucleotide
  Antisense strand to SEQ ID NO: 1488300
gauuagaacagucuuggcc

SEQ ID NO: 1488302 - RNA, 19 nt, Artificial Sequence
  Description of Artificial Sequence: Synthetic oligonucleotide
  Sense strand starting at position 566 of SEQ ID NO: 1244433
ccaagacuguucuaaucgu

SEQ ID NO: 1488303 - RNA, 19 nt, Artificial Sequence
  Description of Artificial Sequence: Synthetic oligonucleotide
  Antisense strand to SEQ ID NO: 1488302
acgauuagaacagucuugg

SEQ ID NO: 1488304 - RNA, 19 nt, Artificial Sequence
  Description of Artificial Sequence: Synthetic oligonucleotide
  Sense strand starting at position 572 of SEQ ID NO: 1244433
cuguucuaaucguaaagac

SEQ ID NO: 1488305 - RNA, 19 nt, Artificial Sequence
  Description of Artificial Sequence: Synthetic oligonucleotide
  Antisense strand to SEQ ID NO: 1488304
gucuuuacgauuagaacag

SEQ ID NO: 1488306 - RNA, 19 nt, Artificial Sequence
  Description of Artificial Sequence: Synthetic oligonucleotide
  Sense strand starting at position 595 of SEQ ID NO: 1244433
ucauaccgucaaugacauu

SEQ ID NO: 1488307 - RNA, 19 nt, Artificial Sequence
  Description of Artificial Sequence: Synthetic oligonucleotide
  Antisense strand to SEQ ID NO: 1488306
aaugucauugacgguauga

SEQ ID NO: 1488308 - RNA, 19 nt, Artificial Sequence
  Description of Artificial Sequence: Synthetic oligonucleotide
  Sense strand starting at position 650 of SEQ ID NO: 1244433
gaucuagauuuagggaauu

SEQ ID NO: 1488309 - RNA, 19 nt, Artificial Sequence
  Description of Artificial Sequence: Synthetic oligonucleotide
  Antisense strand to SEQ ID NO: 1488308
aauucccuaaaucuagauc

SEQ ID NO: 1488310 - RNA, 19 nt, Artificial Sequence
  Description of Artificial Sequence: Synthetic oligonucleotide
  Sense strand starting at position 689 of SEQ ID NO: 1244433
guacauaugucaggucauc

SEQ ID NO: 1488311 - RNA, 19 nt, Artificial Sequence
  Description of Artificial Sequence: Synthetic oligonucleotide
  Antisense strand to SEQ ID NO: 1488310
gaugaccugacauauguac

SEQ ID NO: 1488312 - RNA, 19 nt, Artificial Sequence
  Description of Artificial Sequence: Synthetic oligonucleotide
  Sense strand starting at position 700 of SEQ ID NO: 1244433
aggucaucugccuggcaga

SEQ ID NO: 1488313 - RNA, 19 nt, Artificial Sequence
  Description of Artificial Sequence: Synthetic oligonucleotide
  Antisense strand to SEQ ID NO: 1488312
ucugccaggcagaugaccu

SEQ ID NO: 1488314 - RNA, 19 nt, Artificial Sequence
  Description of Artificial Sequence: Synthetic oligonucleotide
  Sense strand starting at position 710 of SEQ ID NO: 1244433
ccuggcagaggucauguua

SEQ ID NO: 1488315 - RNA, 19 nt, Artificial Sequence
  Description of Artificial Sequence: Synthetic oligonucleotide
  Antisense strand to SEQ ID NO: 1488314
uaacaugaccucugccagg

SEQ ID NO: 1488316 - RNA, 19 nt, Artificial Sequence
  Description of Artificial Sequence: Synthetic oligonucleotide
  Sense strand starting at position 794 of SEQ ID NO: 1244433
caccgaugagccugguuga

SEQ ID NO: 1488317 - RNA, 19 nt, Artificial Sequence
  Description of Artificial Sequence: Synthetic oligonucleotide
  Antisense strand to SEQ ID NO: 1488316
ucaaccaggcucaucggug

SEQ ID NO: 1488318 - RNA, 19 nt, Artificial Sequence
  Description of Artificial Sequence: Synthetic oligonucleotide
  Sense strand starting at position 795 of SEQ ID NO: 1244433
accgaugagccugguugaa

SEQ ID NO: 1488319 - RNA, 19 nt, Artificial Sequence
  Description of Artificial Sequence: Synthetic oligonucleotide
  Antisense strand to SEQ ID NO: 1488318
uucaaccaggcucaucggu

SEQ ID NO: 1488320 - RNA, 19 nt, Artificial Sequence
  Description of Artificial Sequence: Synthetic oligonucleotide
  Sense strand starting at position 797 of SEQ ID NO: 1244433
cgaugagccugguugaauu

SEQ ID NO: 1488321 - RNA, 19 nt, Artificial Sequence
  Description of Artificial Sequence: Synthetic oligonucleotide
  Antisense strand to SEQ ID NO: 1488320
aauucaaccaggcucaucg

SEQ ID NO: 1488322 - RNA, 19 nt, Artificial Sequence
  Description of Artificial Sequence: Synthetic oligonucleotide
  Sense strand starting at position 822 of SEQ ID NO: 1244433
cuuagauucuuacccguaa

SEQ ID NO: 1488323 - RNA, 19 nt, Artificial Sequence
  Description of Artificial Sequence: Synthetic oligonucleotide
  Antisense strand to SEQ ID NO: 1488322
uuacggguaagaaucuaag

SEQ ID NO: 1488324 - RNA, 19 nt, Artificial Sequence
  Description of Artificial Sequence: Synthetic oligonucleotide
  Sense strand starting at position 823 of SEQ ID NO: 1244433
uuagauucuuacccguaag

SEQ ID NO: 1488325 - RNA, 19 nt, Artificial Sequence
  Description of Artificial Sequence: Synthetic oligonucleotide
  Antisense strand to SEQ ID NO: 1488324
cuuacggguaagaaucuaa

SEQ ID NO: 1488326 - RNA, 19 nt, Artificial Sequence
  Description of Artificial Sequence: Synthetic oligonucleotide
  Sense strand starting at position 826 of SEQ ID NO: 1244433
gauucuuacccguaagugu

SEQ ID NO: 1488327 - RNA, 19 nt, Artificial Sequence
  Description of Artificial Sequence: Synthetic oligonucleotide
  Antisense strand to SEQ ID NO: 1488326
acacuuacggguaagaauc

SEQ ID NO: 1488328 - RNA, 19 nt, Artificial Sequence
  Description of Artificial Sequence: Synthetic oligonucleotide
  Sense strand starting at position 835 of SEQ ID NO: 1244433
ccguaaguguagggauuca

SEQ ID NO: 1488329 - RNA, 19 nt, Artificial Sequence
  Description of Artificial Sequence: Synthetic oligonucleotide
  Antisense strand to SEQ ID NO: 1488328
ugaaucccuacacuuacgg

SEQ ID NO: 1488330 - RNA, 19 nt, Artificial Sequence
  Description of Artificial Sequence: Synthetic oligonucleotide
  Sense strand starting at position 1202 of SEQ ID NO: 1244433
gggauuucgcggcagcgaa

SEQ ID NO: 1488331 - RNA, 19 nt, Artificial Sequence
  Description of Artificial Sequence: Synthetic oligonucleotide
  Antisense strand to SEQ ID NO: 1488330
uucgcugccgcgaaauccc

SEQ ID NO: 1488332 - RNA, 19 nt, Artificial Sequence
  Description of Artificial Sequence: Synthetic oligonucleotide
  Sense strand starting at position 1216 of SEQ ID NO: 1244433
gcgaaaugaacucggaaag

SEQ ID NO: 1488333 - RNA, 19 nt, Artificial Sequence
  Description of Artificial Sequence: Synthetic oligonucleotide
  Antisense strand to SEQ ID NO: 1488332
cuuuccgaguucauuucgc

SEQ ID NO: 1488334 - RNA, 19 nt, Artificial Sequence
  Description of Artificial Sequence: Synthetic oligonucleotide
  Sense strand starting at position 1307 of SEQ ID NO: 1244433
ggcgaguuacccggaggaa

SEQ ID NO: 1488335 - RNA, 19 nt, Artificial Sequence
  Description of Artificial Sequence: Synthetic oligonucleotide
  Antisense strand to SEQ ID NO: 1488334
uuccuccggguaacucgcc

SEQ ID NO: 1488336 - RNA, 19 nt, Artificial Sequence
  Description of Artificial Sequence: Synthetic oligonucleotide
  Sense strand starting at position 1308 of SEQ ID NO: 1244433
gcgaguuacccggaggaac

SEQ ID NO: 1488337 - RNA, 19 nt, Artificial Sequence
  Description of Artificial Sequence: Synthetic oligonucleotide
  Antisense strand to SEQ ID NO: 1488336
guuccuccggguaacucgc

SEQ ID NO: 1488338 - RNA, 19 nt, Artificial Sequence
  Description of Artificial Sequence: Synthetic oligonucleotide
  Sense strand starting at position 1310 of SEQ ID NO: 1244433
gaguuacccggaggaacuu

SEQ ID NO: 1488339 - RNA, 19 nt, Artificial Sequence
  Description of Artificial Sequence: Synthetic oligonucleotide
  Antisense strand to SEQ ID NO: 1488338
aaguuccuccggguaacuc

SEQ ID NO: 1488340 - RNA, 19 nt, Artificial Sequence
  Description of Artificial Sequence: Synthetic oligonucleotide
  Sense strand starting at position 1998 of SEQ ID NO: 1244433
ggcagagaucgagacggau

SEQ ID NO: 1488341 - RNA, 19 nt, Artificial Sequence
  Description of Artificial Sequence: Synthetic oligonucleotide
  Antisense strand to SEQ ID NO: 1488340
auccgucucgaucucugcc

SEQ ID NO: 1488342 - RNA, 19 nt, Artificial Sequence
  Description of Artificial Sequence: Synthetic oligonucleotide
  Sense strand starting at position 2319 of SEQ ID NO: 1244433
cugcuugagcccugguuaa

SEQ ID NO: 1488343 - RNA, 19 nt, Artificial Sequence
  Description of Artificial Sequence: Synthetic oligonucleotide
  Antisense strand to SEQ ID NO: 1488342
uuaaccagggcucaagcag

SEQ ID NO: 1488344 - RNA, 19 nt, Artificial Sequence
  Description of Artificial Sequence: Synthetic oligonucleotide
  Sense strand starting at position 2479 of SEQ ID NO: 1244433
gcgggaugcucuucucgca

SEQ ID NO: 1488345 - RNA, 19 nt, Artificial Sequence
  Description of Artificial Sequence: Synthetic oligonucleotide
  Antisense strand to SEQ ID NO: 1488344
ugcgagaagagcaucccgc

SEQ ID NO: 1488346 - RNA, 19 nt, Artificial Sequence
  Description of Artificial Sequence: Synthetic oligonucleotide
  Sense strand starting at position 2821 of SEQ ID NO: 1244433
gugguacugcccugagaug

SEQ ID NO: 1488347 - RNA, 19 nt, Artificial Sequence
  Description of Artificial Sequence: Synthetic oligonucleotide
  Antisense strand to SEQ ID NO: 1488346
caucucagggcaguaccac

SEQ ID NO: 1488348 - RNA, 19 nt, Artificial Sequence
  Description of Artificial Sequence: Synthetic oligonucleotide
  Sense strand starting at position 2936 of SEQ ID NO: 1244433
uggccagauggaugacaau

SEQ ID NO: 1488349 - RNA, 19 nt, Artificial Sequence
  Description of Artificial Sequence: Synthetic oligonucleotide
  Antisense strand to SEQ ID NO: 1488348
auugucauccaucuggcca

SEQ ID NO: 1488350 - RNA, 19 nt, Artificial Sequence
  Description of Artificial Sequence: Synthetic oligonucleotide
  Sense strand starting at position 2956 of SEQ ID NO: 1244433
uggccucuguuauaccuua

SEQ ID NO: 1488351 - RNA, 19 nt, Artificial Sequence
  Description of Artificial Sequence: Synthetic oligonucleotide
  Antisense strand to SEQ ID NO: 1488350
uaagguauaacagaggcca

SEQ ID NO: 1488352 - RNA, 19 nt, Artificial Sequence
  Description of Artificial Sequence: Synthetic oligonucleotide
  Sense strand starting at position 2999 of SEQ ID NO: 1244433
agagcauuagcccaccaca

SEQ ID NO: 1488353 - RNA, 19 nt, Artificial Sequence
  Description of Artificial Sequence: Synthetic oligonucleotide
  Antisense strand to SEQ ID NO: 1488352
uguggugggcuaaugcucu

SEQ ID NO: 1488354 - RNA, 19 nt, Artificial Sequence
  Description of Artificial Sequence: Synthetic oligonucleotide
  Sense strand starting at position 3066 of SEQ ID NO: 1244433
uuggcuucgaucugaaaca

SEQ ID NO: 1488355 - RNA, 19 nt, Artificial Sequence
  Description of Artificial Sequence: Synthetic oligonucleotide
  Antisense strand to SEQ ID NO: 1488354
uguuucagaucgaagccaa

SEQ ID NO: 1488356 - RNA, 19 nt, Artificial Sequence
  Description of Artificial Sequence: Synthetic oligonucleotide
  Sense strand starting at position 3128 of SEQ ID NO: 1244433
ucgaaauugcacggacuuu

SEQ ID NO: 1488357 - RNA, 19 nt, Artificial Sequence
  Description of Artificial Sequence: Synthetic oligonucleotide
  Antisense strand to SEQ ID NO: 1488356
aaaguccgugcaauuucga

SEQ ID NO: 1488358 - RNA, 19 nt, Artificial Sequence
  Description of Artificial Sequence: Synthetic oligonucleotide
  Sense strand starting at position 3240 of SEQ ID NO: 1244433
ucuuuccuuccugggaaga

SEQ ID NO: 1488359 - RNA, 19 nt, Artificial Sequence
  Description of Artificial Sequence: Synthetic oligonucleotide
  Antisense strand to SEQ ID NO: 1488358
ucuucccaggaaggaaaga

SEQ ID NO: 1488360 - RNA, 19 nt, Artificial Sequence
  Description of Artificial Sequence: Synthetic oligonucleotide
  Sense strand starting at position 3242 of SEQ ID NO: 1244433
uuuccuuccugggaagacu

SEQ ID NO: 1488361 - RNA, 19 nt, Artificial Sequence
  Description of Artificial Sequence: Synthetic oligonucleotide
  Antisense strand to SEQ ID NO: 1488360
agucuucccaggaaggaaa

SEQ ID NO: 1488362 - RNA, 19 nt, Artificial Sequence
  Description of Artificial Sequence: Synthetic oligonucleotide
  Sense strand starting at position 3251 of SEQ ID NO: 1244433
ugggaagacuguccuuaac

SEQ ID NO: 1488363 - RNA, 19 nt, Artificial Sequence
  Description of Artificial Sequence: Synthetic oligonucleotide
  Antisense strand to SEQ ID NO: 1488362
guuaaggacagucuuccca

SEQ ID NO: 1488364 - RNA, 19 nt, Artificial Sequence
  Description of Artificial Sequence: Synthetic oligonucleotide
  Sense strand starting at position 3253 of SEQ ID NO: 1244433
ggaagacuguccuuaacug

SEQ ID NO: 1488365 - RNA, 19 nt, Artificial Sequence
  Description of Artificial Sequence: Synthetic oligonucleotide
  Antisense strand to SEQ ID NO: 1488364
caguuaaggacagucuucc

SEQ ID NO: 1488366 - RNA, 19 nt, Artificial Sequence
  Description of Artificial Sequence: Synthetic oligonucleotide
  Sense strand starting at position 3356 of SEQ ID NO: 1244433
aggccacgcuuuguguaaa

SEQ ID NO: 1488367 - RNA, 19 nt, Artificial Sequence
  Description of Artificial Sequence: Synthetic oligonucleotide
  Antisense strand to SEQ ID NO: 1488366
uuuacacaaagcguggccu

SEQ ID NO: 1488368 - RNA, 19 nt, Artificial Sequence
  Description of Artificial Sequence: Synthetic oligonucleotide
  Sense strand starting at position 496 of SEQ ID NO: 1244434
ggcauaugugcugggaaau

SEQ ID NO: 1488369 - RNA, 19 nt, Artificial Sequence
  Description of Artificial Sequence: Synthetic oligonucleotide
  Antisense strand to SEQ ID NO: 1488368
auuucccagcacauaugcc

SEQ ID NO: 1488370 - RNA, 19 nt, Artificial Sequence
  Description of Artificial Sequence: Synthetic oligonucleotide
  Sense strand starting at position 583 of SEQ ID NO: 1244434
cuacuaaaugccuaggcua

SEQ ID NO: 1488371 - RNA, 19 nt, Artificial Sequence
  Description of Artificial Sequence: Synthetic oligonucleotide
  Antisense strand to SEQ ID NO: 1488370
uagccuaggcauuuaguag

SEQ ID NO: 1488372 - RNA, 19 nt, Artificial Sequence
  Description of Artificial Sequence: Synthetic oligonucleotide
  Sense strand starting at position 585 of SEQ ID NO: 1244434
acuaaaugccuaggcuaua

SEQ ID NO: 1488373 - RNA, 19 nt, Artificial Sequence
  Description of Artificial Sequence: Synthetic oligonucleotide
  Antisense strand to SEQ ID NO: 1488372
uauagccuaggcauuuagu

SEQ ID NO: 1488374 - RNA, 19 nt, Artificial Sequence
  Description of Artificial Sequence: Synthetic oligonucleotide
  Sense strand starting at position 586 of SEQ ID NO: 1244434
cuaaaugccuaggcuauau

SEQ ID NO: 1488375 - RNA, 19 nt, Artificial Sequence
  Description of Artificial Sequence: Synthetic oligonucleotide
  Antisense strand to SEQ ID NO: 1488374
auauagccuaggcauuuag

SEQ ID NO: 1488376 - RNA, 19 nt, Artificial Sequence
  Description of Artificial Sequence: Synthetic oligonucleotide
  Sense strand starting at position 597 of SEQ ID NO: 1244434
ggcuauaugguguacauua

SEQ ID NO: 1488377 - RNA, 19 nt, Artificial Sequence
  Description of Artificial Sequence: Synthetic oligonucleotide
  Antisense strand to SEQ ID NO: 1488376
uaauguacaccauauagcc

SEQ ID NO: 1488378 - RNA, 19 nt, Artificial Sequence
  Description of Artificial Sequence: Synthetic oligonucleotide
  Sense strand starting at position 599 of SEQ ID NO: 1244434
cuauaugguguacauuaca

SEQ ID NO: 1488379 - RNA, 19 nt, Artificial Sequence
  Description of Artificial Sequence: Synthetic oligonucleotide
  Antisense strand to SEQ ID NO: 1488378
uguaauguacaccauauag

SEQ ID NO: 1488380 - RNA, 19 nt, Artificial Sequence
  Description of Artificial Sequence: Synthetic oligonucleotide
  Sense strand starting at position 607 of SEQ ID NO: 1244434
uguacauuacaguaacaug

SEQ ID NO: 1488381 - RNA, 19 nt, Artificial Sequence
  Description of Artificial Sequence: Synthetic oligonucleotide
  Antisense strand to SEQ ID NO: 1488380
cauguuacuguaauguaca

SEQ ID NO: 1488382 - RNA, 19 nt, Artificial Sequence
  Description of Artificial Sequence: Synthetic oligonucleotide
  Sense strand starting at position 663 of SEQ ID NO: 1244434
cauguuacugaguacugca

SEQ ID NO: 1488383 - RNA, 19 nt, Artificial Sequence
  Description of Artificial Sequence: Synthetic oligonucleotide
  Antisense strand to SEQ ID NO: 1488382
ugcaguacucaguaacaug

SEQ ID NO: 1488384 - RNA, 19 nt, Artificial Sequence
  Description of Artificial Sequence: Synthetic oligonucleotide
  Sense strand starting at position 796 of SEQ ID NO: 1244434
uggucuuuauaccuuuaua

SEQ ID NO: 1488385 - RNA, 19 nt, Artificial Sequence
  Description of Artificial Sequence: Synthetic oligonucleotide
  Antisense strand to SEQ ID NO: 1488384
uauaaagguauaaagacca

SEQ ID NO: 1488386 - RNA, 19 nt, Artificial Sequence
  Description of Artificial Sequence: Synthetic oligonucleotide
  Sense strand starting at position 824 of SEQ ID NO: 1244434
ccaccaauacugcgaauaa

SEQ ID NO: 1488387 - RNA, 19 nt, Artificial Sequence
  Description of Artificial Sequence: Synthetic oligonucleotide
  Antisense strand to SEQ ID NO: 1488386
uuauucgcaguauuggugg

SEQ ID NO: 1488388 - RNA, 19 nt, Artificial Sequence
  Description of Artificial Sequence: Synthetic oligonucleotide
  Sense strand starting at position 1007 of SEQ ID NO: 1244434
uaagcuguggcuuacagaa

SEQ ID NO: 1488389 - RNA, 19 nt, Artificial Sequence
  Description of Artificial Sequence: Synthetic oligonucleotide
  Antisense strand to SEQ ID NO: 1488388
uucuguaagccacagcuua

SEQ ID NO: 1488390 - RNA, 19 nt, Artificial Sequence
  Description of Artificial Sequence: Synthetic oligonucleotide
  Sense strand starting at position 1220 of SEQ ID NO: 1244434
aggcaaagauguucgaaga

SEQ ID NO: 1488391 - RNA, 19 nt, Artificial Sequence
  Description of Artificial Sequence: Synthetic oligonucleotide
  Antisense strand to SEQ ID NO: 1488390
ucuucgaacaucuuugccu

SEQ ID NO: 1488392 - RNA, 19 nt, Artificial Sequence
  Description of Artificial Sequence: Synthetic oligonucleotide
  Sense strand starting at position 1272 of SEQ ID NO: 1244434
auggauuauuuggagcaau

SEQ ID NO: 1488393 - RNA, 19 nt, Artificial Sequence
  Description of Artificial Sequence: Synthetic oligonucleotide
  Antisense strand to SEQ ID NO: 1488392
auugcuccaaauaauccau

SEQ ID NO: 1488394 - RNA, 19 nt, Artificial Sequence
  Description of Artificial Sequence: Synthetic oligonucleotide
  Sense strand starting at position 1334 of SEQ ID NO: 1244434
agguuuauaaggugaguuu

SEQ ID NO: 1488395 - RNA, 19 nt, Artificial Sequence
  Description of Artificial Sequence: Synthetic oligonucleotide
  Antisense strand to SEQ ID NO: 1488394
aaacucaccuuauaaaccu

SEQ ID NO: 1488396 - RNA, 19 nt, Artificial Sequence
  Description of Artificial Sequence: Synthetic oligonucleotide
  Sense strand starting at position 1335 of SEQ ID NO: 1244434
gguuuauaaggugaguuua

SEQ ID NO: 1488397 - RNA, 19 nt, Artificial Sequence
  Description of Artificial Sequence: Synthetic oligonucleotide
  Antisense strand to SEQ ID NO: 1488396
uaaacucaccuuauaaacc

SEQ ID NO: 1488398 - RNA, 19 nt, Artificial Sequence
  Description of Artificial Sequence: Synthetic oligonucleotide
  Sense strand starting at position 1414 of SEQ ID NO: 1244434
ucugaugaguuuccucacu

SEQ ID NO: 1488399 - RNA, 19 nt, Artificial Sequence
  Description of Artificial Sequence: Synthetic oligonucleotide
  Antisense strand to SEQ ID NO: 1488398
agugaggaaacucaucaga

SEQ ID NO: 1488400 - RNA, 19 nt, Artificial Sequence
  Description of Artificial Sequence: Synthetic oligonucleotide
  Sense strand starting at position 1416 of SEQ ID NO: 1244434
ugaugaguuuccucacuga

SEQ ID NO: 1488401 - RNA, 19 nt, Artificial Sequence
  Description of Artificial Sequence: Synthetic oligonucleotide
  Antisense strand to SEQ ID NO: 1488400
ucagugaggaaacucauca

SEQ ID NO: 1488402 - RNA, 19 nt, Artificial Sequence
  Description of Artificial Sequence: Synthetic oligonucleotide
  Sense strand starting at position 1420 of SEQ ID NO: 1244434
gaguuuccucacugagggu

SEQ ID NO: 1488403 - RNA, 19 nt, Artificial Sequence
  Description of Artificial Sequence: Synthetic oligonucleotide
  Antisense strand to SEQ ID NO: 1488402
acccucagugaggaaacuc

SEQ ID NO: 1488404 - RNA, 19 nt, Artificial Sequence
  Description of Artificial Sequence: Synthetic oligonucleotide
  Sense strand starting at position 1465 of SEQ ID NO: 1244434
cguuuauugcuagucacgu

SEQ ID NO: 1488405 - RNA, 19 nt, Artificial Sequence
  Description of Artificial Sequence: Synthetic oligonucleotide
  Antisense strand to SEQ ID NO: 1488404
acgugacuagcaauaaacg

SEQ ID NO: 1488406 - RNA, 19 nt, Artificial Sequence
  Description of Artificial Sequence: Synthetic oligonucleotide
  Sense strand starting at position 1491 of SEQ ID NO: 1244434
acaacacgucuauaaguaa

SEQ ID NO: 1488407 - RNA, 19 nt, Artificial Sequence
  Description of Artificial Sequence: Synthetic oligonucleotide
  Antisense strand to SEQ ID NO: 1488406
uuacuuauagacguguugu

SEQ ID NO: 1488408 - RNA, 19 nt, Artificial Sequence
  Description of Artificial Sequence: Synthetic oligonucleotide
  Sense strand starting at position 1504 of SEQ ID NO: 1244434
aaguaacguucccuuugaa

SEQ ID NO: 1488409 - RNA, 19 nt, Artificial Sequence
  Description of Artificial Sequence: Synthetic oligonucleotide
  Antisense strand to SEQ ID NO: 1488408
uucaaagggaacguuacuu

SEQ ID NO: 1488410 - RNA, 19 nt, Artificial Sequence
  Description of Artificial Sequence: Synthetic oligonucleotide
  Sense strand starting at position 1587 of SEQ ID NO: 1244434
ccaggaauggccugaagca

SEQ ID NO: 1488411 - RNA, 19 nt, Artificial Sequence
  Description of Artificial Sequence: Synthetic oligonucleotide
  Antisense strand to SEQ ID NO: 1488410
ugcuucaggccauuccugg

SEQ ID NO: 1488412 - RNA, 19 nt, Artificial Sequence
  Description of Artificial Sequence: Synthetic oligonucleotide
  Sense strand starting at position 1677 of SEQ ID NO: 1244434
gcacccacccuugguaaau

SEQ ID NO: 1488413 - RNA, 19 nt, Artificial Sequence
  Description of Artificial Sequence: Synthetic oligonucleotide
  Antisense strand to SEQ ID NO: 1488412
auuuaccaagggugggugc

SEQ ID NO: 1488414 - RNA, 19 nt, Artificial Sequence
  Description of Artificial Sequence: Synthetic oligonucleotide
  Sense strand starting at position 1728 of SEQ ID NO: 1244434
ccuagugacuuagccaaua

SEQ ID NO: 1488415 - RNA, 19 nt, Artificial Sequence
  Description of Artificial Sequence: Synthetic oligonucleotide
  Antisense strand to SEQ ID NO: 1488414
uauuggcuaagucacuagg

SEQ ID NO: 1488416 - RNA, 19 nt, Artificial Sequence
  Description of Artificial Sequence: Synthetic oligonucleotide
  Sense strand starting at position 1826 of SEQ ID NO: 1244434
ggaauuggacuccgaggau

SEQ ID NO: 1488417 - RNA, 19 nt, Artificial Sequence
  Description of Artificial Sequence: Synthetic oligonucleotide
  Antisense strand to SEQ ID NO: 1488416
auccucggaguccaauucc

SEQ ID NO: 1488418 - RNA, 19 nt, Artificial Sequence
  Description of Artificial Sequence: Synthetic oligonucleotide
  Sense strand starting at position 2043 of SEQ ID NO: 1244434
gggaauuugcgcugcauuc

SEQ ID NO: 1488419 - RNA, 19 nt, Artificial Sequence
  Description of Artificial Sequence: Synthetic oligonucleotide
  Antisense strand to SEQ ID NO: 1488418
gaaugcagcgcaaauuccc

SEQ ID NO: 1488420 - RNA, 19 nt, Artificial Sequence
  Description of Artificial Sequence: Synthetic oligonucleotide
  Sense strand starting at position 2103 of SEQ ID NO: 1244434
agcgacucuuucccaggaa

SEQ ID NO: 1488421 - RNA, 19 nt, Artificial Sequence
  Description of Artificial Sequence: Synthetic oligonucleotide
  Antisense strand to SEQ ID NO: 1488420
uuccugggaaagagucgcu

SEQ ID NO: 1488422 - RNA, 19 nt, Artificial Sequence
  Description of Artificial Sequence: Synthetic oligonucleotide
  Sense strand starting at position 2387 of SEQ ID NO: 1244434
ccguuauuggcugccguua

SEQ ID NO: 1488423 - RNA, 19 nt, Artificial Sequence
  Description of Artificial Sequence: Synthetic oligonucleotide
  Antisense strand to SEQ ID NO: 1488422
uaacggcagccaauaacgg

SEQ ID NO: 1488424 - RNA, 19 nt, Artificial Sequence
  Description of Artificial Sequence: Synthetic oligonucleotide
  Sense strand starting at position 2388 of SEQ ID NO: 1244434
cguuauuggcugccguuaa

SEQ ID NO: 1488425 - RNA, 19 nt, Artificial Sequence
  Description of Artificial Sequence: Synthetic oligonucleotide
  Antisense strand to SEQ ID NO: 1488424
uuaacggcagccaauaacg

SEQ ID NO: 1488426 - RNA, 19 nt, Artificial Sequence
  Description of Artificial Sequence: Synthetic oligonucleotide
  Sense strand starting at position 2401 of SEQ ID NO: 1244434
cguuaaggaccguuacguu

SEQ ID NO: 1488427 - RNA, 19 nt, Artificial Sequence
  Description of Artificial Sequence: Synthetic oligonucleotide
  Antisense strand to SEQ ID NO: 1488426
aacguaacgguccuuaacg

SEQ ID NO: 1488428 - RNA, 19 nt, Artificial Sequence
  Description of Artificial Sequence: Synthetic oligonucleotide
  Sense strand starting at position 2505 of SEQ ID NO: 1244434
ccgcaagaagccuaguuga

SEQ ID NO: 1488429 - RNA, 19 nt, Artificial Sequence
  Description of Artificial Sequence: Synthetic oligonucleotide
  Antisense strand to SEQ ID NO: 1488428
ucaacuaggcuucuugcgg

SEQ ID NO: 1488430 - RNA, 19 nt, Artificial Sequence
  Description of Artificial Sequence: Synthetic oligonucleotide
  Sense strand starting at position 2994 of SEQ ID NO: 1244434
acuccuggccucuaaggau

SEQ ID NO: 1488431 - RNA, 19 nt, Artificial Sequence
  Description of Artificial Sequence: Synthetic oligonucleotide
  Antisense strand to SEQ ID NO: 1488430
auccuuagaggccaggagu

SEQ ID NO: 1488432 - RNA, 19 nt, Artificial Sequence
  Description of Artificial Sequence: Synthetic oligonucleotide
  Sense strand starting at position 3523 of SEQ ID NO: 1244434
cccugagagguugguaaau

SEQ ID NO: 1488433 - RNA, 19 nt, Artificial Sequence
  Description of Artificial Sequence: Synthetic oligonucleotide
  Antisense strand to SEQ ID NO: 1488432
auuuaccaaccucucaggg

SEQ ID NO: 1488434 - RNA, 19 nt, Artificial Sequence
  Description of Artificial Sequence: Synthetic oligonucleotide
  Sense strand starting at position 3565 of SEQ ID NO: 1244434
guggcaaaucgguauacaa

SEQ ID NO: 1488435 - RNA, 19 nt, Artificial Sequence
  Description of Artificial Sequence: Synthetic oligonucleotide
  Antisense strand to SEQ ID NO: 1488434
uuguauaccgauuugccac

SEQ ID NO: 1488436 - RNA, 19 nt, Artificial Sequence
  Description of Artificial Sequence: Synthetic oligonucleotide
  Sense strand starting at position 3567 of SEQ ID NO: 1244434
ggcaaaucgguauacaaau

SEQ ID NO: 1488437 - RNA, 19 nt, Artificial Sequence
  Description of Artificial Sequence: Synthetic oligonucleotide
  Antisense strand to SEQ ID NO: 1488436
auuuguauaccgauuugcc

SEQ ID NO: 1488438 - RNA, 19 nt, Artificial Sequence
  Description of Artificial Sequence: Synthetic oligonucleotide
  Sense strand starting at position 3826 of SEQ ID NO: 1244434
ugguucccauucuuggaaa

SEQ ID NO: 1488439 - RNA, 19 nt, Artificial Sequence
  Description of Artificial Sequence: Synthetic oligonucleotide
  Antisense strand to SEQ ID NO: 1488438
uuuccaagaaugggaacca

SEQ ID NO: 1488440 - RNA, 19 nt, Artificial Sequence
  Description of Artificial Sequence: Synthetic oligonucleotide
  Sense strand starting at position 3828 of SEQ ID NO: 1244434
guucccauucuuggaaauu

SEQ ID NO: 1488441 - RNA, 19 nt, Artificial Sequence
  Description of Artificial Sequence: Synthetic oligonucleotide
  Antisense strand to SEQ ID NO: 1488440
aauuuccaagaaugggaac

SEQ ID NO: 1488442 - RNA, 19 nt, Artificial Sequence
  Description of Artificial Sequence: Synthetic oligonucleotide
  Sense strand starting at position 3919 of SEQ ID NO: 1244434
gggaaaugaucuuugccuu

SEQ ID NO: 1488443 - RNA, 19 nt, Artificial Sequence
  Description of Artificial Sequence: Synthetic oligonucleotide
  Antisense strand to SEQ ID NO: 1488442
aaggcaaagaucauuuccc

SEQ ID NO: 1488444 - RNA, 19 nt, Artificial Sequence
  Description of Artificial Sequence: Synthetic oligonucleotide
  Sense strand starting at position 3920 of SEQ ID NO: 1244434
ggaaaugaucuuugccuuu

SEQ ID NO: 1488445 - RNA, 19 nt, Artificial Sequence
  Description of Artificial Sequence: Synthetic oligonucleotide
  Antisense strand to SEQ ID NO: 1488444
aaaggcaaagaucauuucc

SEQ ID NO: 1488446 - RNA, 19 nt, Artificial Sequence
  Description of Artificial Sequence: Synthetic oligonucleotide
  Sense strand starting at position 3926 of SEQ ID NO: 1244434
gaucuuugccuuugggaaa

SEQ ID NO: 1488447 - RNA, 19 nt, Artificial Sequence
  Description of Artificial Sequence: Synthetic oligonucleotide
  Antisense strand to SEQ ID NO: 1488446
uuucccaaaggcaaagauc

SEQ ID NO: 1488448 - RNA, 19 nt, Artificial Sequence
  Description of Artificial Sequence: Synthetic oligonucleotide
  Sense strand starting at position 2416 of SEQ ID NO: 1244435
cuccuuucuccuggagcaa

SEQ ID NO: 1488449 - RNA, 19 nt, Artificial Sequence
  Description of Artificial Sequence: Synthetic oligonucleotide
  Antisense strand to SEQ ID NO: 1488448
uugcuccaggagaaaggag

SEQ ID NO: 1488450 - RNA, 19 nt, Artificial Sequence
  Description of Artificial Sequence: Synthetic oligonucleotide
  Sense strand starting at position 2557 of SEQ ID NO: 1244435
gcuggaggguuucucacua

SEQ ID NO: 1488451 - RNA, 19 nt, Artificial Sequence
  Description of Artificial Sequence: Synthetic oligonucleotide
  Antisense strand to SEQ ID NO: 1488450
uagugagaaacccuccagc

SEQ ID NO: 1488452 - RNA, 19 nt, Artificial Sequence
  Description of Artificial Sequence: Synthetic oligonucleotide
  Sense strand starting at position 2639 of SEQ ID NO: 1244435
ugcaguucggagcaagaaa

SEQ ID NO: 1488453 - RNA, 19 nt, Artificial Sequence
  Description of Artificial Sequence: Synthetic oligonucleotide
  Antisense strand to SEQ ID NO: 1488452
uuucuugcuccgaacugca

SEQ ID NO: 1488454 - RNA, 19 nt, Artificial Sequence
  Description of Artificial Sequence: Synthetic oligonucleotide
  Sense strand starting at position 2834 of SEQ ID NO: 1244435
ugauguaauucuuaggaag

SEQ ID NO: 1488455 - RNA, 19 nt, Artificial Sequence
  Description of Artificial Sequence: Synthetic oligonucleotide
  Antisense strand to SEQ ID NO: 1488454
cuuccuaagaauuacauca

SEQ ID NO: 1488456 - RNA, 19 nt, Artificial Sequence
  Description of Artificial Sequence: Synthetic oligonucleotide
  Sense strand starting at position 2836 of SEQ ID NO: 1244435
auguaauucuuaggaagca

SEQ ID NO: 1488457 - RNA, 19 nt, Artificial Sequence
  Description of Artificial Sequence: Synthetic oligonucleotide
  Antisense strand to SEQ ID NO: 1488456
ugcuuccuaagaauuacau

SEQ ID NO: 1488458 - RNA, 19 nt, Artificial Sequence
  Description of Artificial Sequence: Synthetic oligonucleotide
  Sense strand starting at position 3287 of SEQ ID NO: 1244435
ccuucugccucagguaaau

SEQ ID NO: 1488459 - RNA, 19 nt, Artificial Sequence
  Description of Artificial Sequence: Synthetic oligonucleotide
  Antisense strand to SEQ ID NO: 1488458
auuuaccugaggcagaagg

SEQ ID NO: 1488460 - RNA, 19 nt, Artificial Sequence
  Description of Artificial Sequence: Synthetic oligonucleotide
  Sense strand starting at position 3389 of SEQ ID NO: 1244435
gguccacccugauauaacu

SEQ ID NO: 1488461 - RNA, 19 nt, Artificial Sequence
  Description of Artificial Sequence: Synthetic oligonucleotide
  Antisense strand to SEQ ID NO: 1488460
aguuauaucaggguggacc

SEQ ID NO: 1488462 - RNA, 19 nt, Artificial Sequence
  Description of Artificial Sequence: Synthetic oligonucleotide
  Sense strand starting at position 3397 of SEQ ID NO: 1244435
cugauauaacucggacaag

SEQ ID NO: 1488463 - RNA, 19 nt, Artificial Sequence
  Description of Artificial Sequence: Synthetic oligonucleotide
  Antisense strand to SEQ ID NO: 1488462
cuuguccgaguuauaucag

SEQ ID NO: 1488464 - RNA, 19 nt, Artificial Sequence
  Description of Artificial Sequence: Synthetic oligonucleotide
  Sense strand starting at position 3398 of SEQ ID NO: 1244435
ugauauaacucggacaagu

SEQ ID NO: 1488465 - RNA, 19 nt, Artificial Sequence
  Description of Artificial Sequence: Synthetic oligonucleotide
  Antisense strand to SEQ ID NO: 1488464
acuuguccgaguuauauca

SEQ ID NO: 1488466 - RNA, 19 nt, Artificial Sequence
  Description of Artificial Sequence: Synthetic oligonucleotide
  Sense strand starting at position 3430 of SEQ ID NO: 1244435
uuucgcauuagugacguaa

SEQ ID NO: 1488467 - RNA, 19 nt, Artificial Sequence
  Description of Artificial Sequence: Synthetic oligonucleotide
  Antisense strand to SEQ ID NO: 1488466
uuacgucacuaaugcgaaa

SEQ ID NO: 1488468 - RNA, 19 nt, Artificial Sequence
  Description of Artificial Sequence: Synthetic oligonucleotide
  Sense strand starting at position 3434 of SEQ ID NO: 1244435
gcauuagugacguaacuau

SEQ ID NO: 1488469 - RNA, 19 nt, Artificial Sequence
  Description of Artificial Sequence: Synthetic oligonucleotide
  Antisense strand to SEQ ID NO: 1488468
auaguuacgucacuaaugc

SEQ ID NO: 1488470 - RNA, 19 nt, Artificial Sequence
  Description of Artificial Sequence: Synthetic oligonucleotide
  Sense strand starting at position 3441 of SEQ ID NO: 1244435
ugacguaacuauuaauaga

SEQ ID NO: 1488471 - RNA, 19 nt, Artificial Sequence
  Description of Artificial Sequence: Synthetic oligonucleotide
  Antisense strand to SEQ ID NO: 1488470
ucuauuaauaguuacguca

SEQ ID NO: 1488472 - RNA, 19 nt, Artificial Sequence
  Description of Artificial Sequence: Synthetic oligonucleotide
  Sense strand starting at position 3470 of SEQ ID NO: 1244435
agcccuaccuuucugugau

SEQ ID NO: 1488473 - RNA, 19 nt, Artificial Sequence
  Description of Artificial Sequence: Synthetic oligonucleotide
  Antisense strand to SEQ ID NO: 1488472
aucacagaaagguagggcu

SEQ ID NO: 1488474 - RNA, 19 nt, Artificial Sequence
  Description of Artificial Sequence: Synthetic oligonucleotide
  Sense strand starting at position 3471 of SEQ ID NO: 1244435
gcccuaccuuucugugauu

SEQ ID NO: 1488475 - RNA, 19 nt, Artificial Sequence
  Description of Artificial Sequence: Synthetic oligonucleotide
  Antisense strand to SEQ ID NO: 1488474
aaucacagaaagguagggc

SEQ ID NO: 1488476 - RNA, 19 nt, Artificial Sequence
  Description of Artificial Sequence: Synthetic oligonucleotide
  Sense strand starting at position 3523 of SEQ ID NO: 1244435
agaagcaguuucucuuuga

SEQ ID NO: 1488477 - RNA, 19 nt, Artificial Sequence
  Description of Artificial Sequence: Synthetic oligonucleotide
  Antisense strand to SEQ ID NO: 1488476
ucaaagagaaacugcuucu

SEQ ID NO: 1488478 - RNA, 19 nt, Artificial Sequence
  Description of Artificial Sequence: Synthetic oligonucleotide
  Sense strand starting at position 3524 of SEQ ID NO: 1244435
gaagcaguuucucuuugau

SEQ ID NO: 1488479 - RNA, 19 nt, Artificial Sequence
  Description of Artificial Sequence: Synthetic oligonucleotide
  Antisense strand to SEQ ID NO: 1488478
aucaaagagaaacugcuuc

SEQ ID NO: 1488480 - RNA, 19 nt, Artificial Sequence
  Description of Artificial Sequence: Synthetic oligonucleotide
  Sense strand starting at position 3528 of SEQ ID NO: 1244435
caguuucucuuugauggga

SEQ ID NO: 1488481 - RNA, 19 nt, Artificial Sequence
  Description of Artificial Sequence: Synthetic oligonucleotide
  Antisense strand to SEQ ID NO: 1488480
ucccaucaaagagaaacug

SEQ ID NO: 1488482 - RNA, 19 nt, Artificial Sequence
  Description of Artificial Sequence: Synthetic oligonucleotide
  Sense strand starting at position 3531 of SEQ ID NO: 1244435
uuucucuuugaugggagau

SEQ ID NO: 1488483 - RNA, 19 nt, Artificial Sequence
  Description of Artificial Sequence: Synthetic oligonucleotide
  Antisense strand to SEQ ID NO: 1488482
aucucccaucaaagagaaa

SEQ ID NO: 1488484 - RNA, 19 nt, Artificial Sequence
  Description of Artificial Sequence: Synthetic oligonucleotide
  Sense strand starting at position 3532 of SEQ ID NO: 1244435
uucucuuugaugggagaug

SEQ ID NO: 1488485 - RNA, 19 nt, Artificial Sequence
  Description of Artificial Sequence: Synthetic oligonucleotide
  Antisense strand to SEQ ID NO: 1488484
caucucccaucaaagagaa

SEQ ID NO: 1488486 - RNA, 19 nt, Artificial Sequence
  Description of Artificial Sequence: Synthetic oligonucleotide
  Sense strand starting at position 3558 of SEQ ID NO: 1244435
aagggacaccuccgguuaa

SEQ ID NO: 1488487 - RNA, 19 nt, Artificial Sequence
  Description of Artificial Sequence: Synthetic oligonucleotide
  Antisense strand to SEQ ID NO: 1488486
uuaaccggaggugucccuu

SEQ ID NO: 1488488 - RNA, 19 nt, Artificial Sequence
  Description of Artificial Sequence: Synthetic oligonucleotide
  Sense strand starting at position 3559 of SEQ ID NO: 1244435
agggacaccuccgguuaau

SEQ ID NO: 1488489 - RNA, 19 nt, Artificial Sequence
  Description of Artificial Sequence: Synthetic oligonucleotide
  Antisense strand to SEQ ID NO: 1488488
auuaaccggaggugucccu

SEQ ID NO: 1488490 - RNA, 19 nt, Artificial Sequence
  Description of Artificial Sequence: Synthetic oligonucleotide
  Sense strand starting at position 3630 of SEQ ID NO: 1244435
cuuuguggugaaugugauu

SEQ ID NO: 1488491 - RNA, 19 nt, Artificial Sequence
  Description of Artificial Sequence: Synthetic oligonucleotide
  Antisense strand to SEQ ID NO: 1488490
aaucacauucaccacaaag

SEQ ID NO: 1488492 - RNA, 19 nt, Artificial Sequence
  Description of Artificial Sequence: Synthetic oligonucleotide
  Sense strand starting at position 3635 of SEQ ID NO: 1244435
uggugaaugugauuggaau

SEQ ID NO: 1488493 - RNA, 19 nt, Artificial Sequence
  Description of Artificial Sequence: Synthetic oligonucleotide
  Antisense strand to SEQ ID NO: 1488492
auuccaaucacauucacca

SEQ ID NO: 1488494 - RNA, 19 nt, Artificial Sequence
  Description of Artificial Sequence: Synthetic oligonucleotide
  Sense strand starting at position 3636 of SEQ ID NO: 1244435
ggugaaugugauuggaauc

SEQ ID NO: 1488495 - RNA, 19 nt, Artificial Sequence
  Description of Artificial Sequence: Synthetic oligonucleotide
  Antisense strand to SEQ ID NO: 1488494
gauuccaaucacauucacc

SEQ ID NO: 1488496 - RNA, 19 nt, Artificial Sequence
  Description of Artificial Sequence: Synthetic oligonucleotide
  Sense strand starting at position 3637 of SEQ ID NO: 1244435
gugaaugugauuggaaucu

SEQ ID NO: 1488497 - RNA, 19 nt, Artificial Sequence
  Description of Artificial Sequence: Synthetic oligonucleotide
  Antisense strand to SEQ ID NO: 1488496
agauuccaaucacauucac

SEQ ID NO: 1488498 - RNA, 19 nt, Artificial Sequence
  Description of Artificial Sequence: Synthetic oligonucleotide
  Sense strand starting at position 3693 of SEQ ID NO: 1244435
ucaaguauuugccagucuu

SEQ ID NO: 1488499 - RNA, 19 nt, Artificial Sequence
  Description of Artificial Sequence: Synthetic oligonucleotide
  Antisense strand to SEQ ID NO: 1488498
aagacuggcaaauacuuga

SEQ ID NO: 1488500 - RNA, 19 nt, Artificial Sequence
  Description of Artificial Sequence: Synthetic oligonucleotide
  Sense strand starting at position 3703 of SEQ ID NO: 1244435
gccagucuuccauggagug

SEQ ID NO: 1488501 - RNA, 19 nt, Artificial Sequence
  Description of Artificial Sequence: Synthetic oligonucleotide
  Antisense strand to SEQ ID NO: 1488500
cacuccauggaagacuggc

SEQ ID NO: 1488502 - RNA, 19 nt, Artificial Sequence
  Description of Artificial Sequence: Synthetic oligonucleotide
  Sense strand starting at position 3733 of SEQ ID NO: 1244435
gucccauugugacaaccua

SEQ ID NO: 1488503 - RNA, 19 nt, Artificial Sequence
  Description of Artificial Sequence: Synthetic oligonucleotide
  Antisense strand to SEQ ID NO: 1488502
uagguugucacaaugggac

SEQ ID NO: 1488504 - RNA, 19 nt, Artificial Sequence
  Description of Artificial Sequence: Synthetic oligonucleotide
  Sense strand starting at position 3819 of SEQ ID NO: 1244435
aguuuaucaucugucuaag

SEQ ID NO: 1488505 - RNA, 19 nt, Artificial Sequence
  Description of Artificial Sequence: Synthetic oligonucleotide
  Antisense strand to SEQ ID NO: 1488504
cuuagacagaugauaaacu

SEQ ID NO: 1488506 - RNA, 19 nt, Artificial Sequence
  Description of Artificial Sequence: Synthetic oligonucleotide
  Sense strand starting at position 3821 of SEQ ID NO: 1244435
uuuaucaucugucuaagga

SEQ ID NO: 1488507 - RNA, 19 nt, Artificial Sequence
  Description of Artificial Sequence: Synthetic oligonucleotide
  Antisense strand to SEQ ID NO: 1488506
uccuuagacagaugauaaa

SEQ ID NO: 1488508 - RNA, 19 nt, Artificial Sequence
  Description of Artificial Sequence: Synthetic oligonucleotide
  Sense strand starting at position 3825 of SEQ ID NO: 1244435
ucaucugucuaaggaagaa

SEQ ID NO: 1488509 - RNA, 19 nt, Artificial Sequence
  Description of Artificial Sequence: Synthetic oligonucleotide
  Antisense strand to SEQ ID NO: 1488508
uucuuccuuagacagauga

SEQ ID NO: 1488510 - RNA, 19 nt, Artificial Sequence
  Description of Artificial Sequence: Synthetic oligonucleotide
  Sense strand starting at position 3895 of SEQ ID NO: 1244435
ugggcaguuuccgcugaaa

SEQ ID NO: 1488511 - RNA, 19 nt, Artificial Sequence
  Description of Artificial Sequence: Synthetic oligonucleotide
  Antisense strand to SEQ ID NO: 1488510
uuucagcggaaacugccca

SEQ ID NO: 1488512 - RNA, 19 nt, Artificial Sequence
  Description of Artificial Sequence: Synthetic oligonucleotide
  Sense strand starting at position 3897 of SEQ ID NO: 1244435
ggcaguuuccgcugaaagc

SEQ ID NO: 1488513 - RNA, 19 nt, Artificial Sequence
  Description of Artificial Sequence: Synthetic oligonucleotide
  Antisense strand to SEQ ID NO: 1488512
gcuuucagcggaaacugcc

SEQ ID NO: 1488514 - RNA, 19 nt, Artificial Sequence
  Description of Artificial Sequence: Synthetic oligonucleotide
  Sense strand starting at position 3908 of SEQ ID NO: 1244435
cugaaagcguuucccucaa

SEQ ID NO: 1488515 - RNA, 19 nt, Artificial Sequence
  Description of Artificial Sequence: Synthetic oligonucleotide
  Antisense strand to SEQ ID NO: 1488514
uugagggaaacgcuuucag

SEQ ID NO: 1488516 - RNA, 19 nt, Artificial Sequence
  Description of Artificial Sequence: Synthetic oligonucleotide
  Sense strand starting at position 3910 of SEQ ID NO: 1244435
gaaagcguuucccucaauu

SEQ ID NO: 1488517 - RNA, 19 nt, Artificial Sequence
  Description of Artificial Sequence: Synthetic oligonucleotide
  Antisense strand to SEQ ID NO: 1488516
aauugagggaaacgcuuuc

SEQ ID NO: 1488518 - RNA, 19 nt, Artificial Sequence
  Description of Artificial Sequence: Synthetic oligonucleotide
  Sense strand starting at position 3947 of SEQ ID NO: 1244435
gaauuagacuaucaaggga

SEQ ID NO: 1488519 - RNA, 19 nt, Artificial Sequence
  Description of Artificial Sequence: Synthetic oligonucleotide
  Antisense strand to SEQ ID NO: 1488518
ucccuugauagucuaauuc

SEQ ID NO: 1488520 - RNA, 19 nt, Artificial Sequence
  Description of Artificial Sequence: Synthetic oligonucleotide
  Sense strand starting at position 3975 of SEQ ID NO: 1244435
aggagaucuugcuuugaug

SEQ ID NO: 1488521 - RNA, 19 nt, Artificial Sequence
  Description of Artificial Sequence: Synthetic oligonucleotide
  Antisense strand to SEQ ID NO: 1488520
caucaaagcaagaucuccu

SEQ ID NO: 1488522 - RNA, 19 nt, Artificial Sequence
  Description of Artificial Sequence: Synthetic oligonucleotide
  Sense strand starting at position 3977 of SEQ ID NO: 1244435
gagaucuugcuuugaugga

SEQ ID NO: 1488523 - RNA, 19 nt, Artificial Sequence
  Description of Artificial Sequence: Synthetic oligonucleotide
  Antisense strand to SEQ ID NO: 1488522
uccaucaaagcaagaucuc

SEQ ID NO: 1488524 - RNA, 19 nt, Artificial Sequence
  Description of Artificial Sequence: Synthetic oligonucleotide
  Sense strand starting at position 3978 of SEQ ID NO: 1244435
agaucuugcuuugauggau

SEQ ID NO: 1488525 - RNA, 19 nt, Artificial Sequence
  Description of Artificial Sequence: Synthetic oligonucleotide
  Antisense strand to SEQ ID NO: 1488524
auccaucaaagcaagaucu

SEQ ID NO: 1488526 - RNA, 19 nt, Artificial Sequence
  Description of Artificial Sequence: Synthetic oligonucleotide
  Sense strand starting at position 3981 of SEQ ID NO: 1244435
ucuugcuuugauggauacu

SEQ ID NO: 1488527 - RNA, 19 nt, Artificial Sequence
  Description of Artificial Sequence: Synthetic oligonucleotide
  Antisense strand to SEQ ID NO: 1488526
aguauccaucaaagcaaga

SEQ ID NO: 1488528 - RNA, 19 nt, Artificial Sequence
  Description of Artificial Sequence: Synthetic oligonucleotide
  Sense strand starting at position 953 of SEQ ID NO: 1244436
aaguuaugccucugaacag

SEQ ID NO: 1488529 - RNA, 19 nt, Artificial Sequence
  Description of Artificial Sequence: Synthetic oligonucleotide
  Antisense strand to SEQ ID NO: 1488528
cuguucagaggcauaacuu

SEQ ID NO: 1488530 - RNA, 19 nt, Artificial Sequence
  Description of Artificial Sequence: Synthetic oligonucleotide
  Sense strand starting at position 998 of SEQ ID NO: 1244436
cugggaucaugucuaucca

SEQ ID NO: 1488531 - RNA, 19 nt, Artificial Sequence
  Description of Artificial Sequence: Synthetic oligonucleotide
  Antisense strand to SEQ ID NO: 1488530
uggauagacaugaucccag

SEQ ID NO: 1488532 - RNA, 19 nt, Artificial Sequence
  Description of Artificial Sequence: Synthetic oligonucleotide
  Sense strand starting at position 1030 of SEQ ID NO: 1244436
auuguauuccuaugcagga

SEQ ID NO: 1488533 - RNA, 19 nt, Artificial Sequence
  Description of Artificial Sequence: Synthetic oligonucleotide
  Antisense strand to SEQ ID NO: 1488532
uccugcauaggaauacaau

SEQ ID NO: 1488534 - RNA, 19 nt, Artificial Sequence
  Description of Artificial Sequence: Synthetic oligonucleotide
  Sense strand starting at position 1089 of SEQ ID NO: 1244436
ccaauagaguuagcagagu

SEQ ID NO: 1488535 - RNA, 19 nt, Artificial Sequence
  Description of Artificial Sequence: Synthetic oligonucleotide
  Antisense strand to SEQ ID NO: 1488534
acucugcuaacucuauugg

SEQ ID NO: 1488536 - RNA, 19 nt, Artificial Sequence
  Description of Artificial Sequence: Synthetic oligonucleotide
  Sense strand starting at position 1219 of SEQ ID NO: 1244436
uuucuaugcgaccaccaaa

SEQ ID NO: 1488537 - RNA, 19 nt, Artificial Sequence
  Description of Artificial Sequence: Synthetic oligonucleotide
  Antisense strand to SEQ ID NO: 1488536
uuugguggucgcauagaaa

SEQ ID NO: 1488538 - RNA, 19 nt, Artificial Sequence
  Description of Artificial Sequence: Synthetic oligonucleotide
  Sense strand starting at position 1248 of SEQ ID NO: 1244436
gaaaguguucucuaucagg

SEQ ID NO: 1488539 - RNA, 19 nt, Artificial Sequence
  Description of Artificial Sequence: Synthetic oligonucleotide
  Antisense strand to SEQ ID NO: 1488538
ccugauagagaacacuuuc

SEQ ID NO: 1488540 - RNA, 19 nt, Artificial Sequence
  Description of Artificial Sequence: Synthetic oligonucleotide
  Sense strand starting at position 1263 of SEQ ID NO: 1244436
caggcuuuaggcugaaaug

SEQ ID NO: 1488541 - RNA, 19 nt, Artificial Sequence
  Description of Artificial Sequence: Synthetic oligonucleotide
  Antisense strand to SEQ ID NO: 1488540
cauuucagccuaaagccug

SEQ ID NO: 1488542 - RNA, 19 nt, Artificial Sequence
  Description of Artificial Sequence: Synthetic oligonucleotide
  Sense strand starting at position 1329 of SEQ ID NO: 1244436
gcgugaaucagagaugcca

SEQ ID NO: 1488543 - RNA, 19 nt, Artificial Sequence
  Description of Artificial Sequence: Synthetic oligonucleotide
  Antisense strand to SEQ ID NO: 1488542
uggcaucucugauucacgc

SEQ ID NO: 1488544 - RNA, 19 nt, Artificial Sequence
  Description of Artificial Sequence: Synthetic oligonucleotide
  Sense strand starting at position 1364 of SEQ ID NO: 1244436
gaggcaagauucuuagcga

SEQ ID NO: 1488545 - RNA, 19 nt, Artificial Sequence
  Description of Artificial Sequence: Synthetic oligonucleotide
  Antisense strand to SEQ ID NO: 1488544
ucgcuaagaaucuugccuc

SEQ ID NO: 1488546 - RNA, 19 nt, Artificial Sequence
  Description of Artificial Sequence: Synthetic oligonucleotide
  Sense strand starting at position 1373 of SEQ ID NO: 1244436
uucuuagcgagcuaucaag

SEQ ID NO: 1488547 - RNA, 19 nt, Artificial Sequence
  Description of Artificial Sequence: Synthetic oligonucleotide
  Antisense strand to SEQ ID NO: 1488546
cuugauagcucgcuaagaa

SEQ ID NO: 1488548 - RNA, 19 nt, Artificial Sequence
  Description of Artificial Sequence: Synthetic oligonucleotide
  Sense strand starting at position 1379 of SEQ ID NO: 1244436
gcgagcuaucaagaaaguc

SEQ ID NO: 1488549 - RNA, 19 nt, Artificial Sequence
  Description of Artificial Sequence: Synthetic oligonucleotide
  Antisense strand to SEQ ID NO: 1488548
gacuuucuugauagcucgc

SEQ ID NO: 1488550 - RNA, 19 nt, Artificial Sequence
  Description of Artificial Sequence: Synthetic oligonucleotide
  Sense strand starting at position 1579 of SEQ ID NO: 1244436
ccgcgaguuccgaagcaaa

SEQ ID NO: 1488551 - RNA, 19 nt, Artificial Sequence
  Description of Artificial Sequence: Synthetic oligonucleotide
  Antisense strand to SEQ ID NO: 1488550
uuugcuucggaacucgcgg

SEQ ID NO: 1488552 - RNA, 19 nt, Artificial Sequence
  Description of Artificial Sequence: Synthetic oligonucleotide
  Sense strand starting at position 1662 of SEQ ID NO: 1244436
ucggaaauaugccuuuaca

SEQ ID NO: 1488553 - RNA, 19 nt, Artificial Sequence
  Description of Artificial Sequence: Synthetic oligonucleotide
  Antisense strand to SEQ ID NO: 1488552
uguaaaggcauauuuccga

SEQ ID NO: 1488554 - RNA, 19 nt, Artificial Sequence
  Description of Artificial Sequence: Synthetic oligonucleotide
  Sense strand starting at position 1765 of SEQ ID NO: 1244436
ucuuucugaagcugugaga

SEQ ID NO: 1488555 - RNA, 19 nt, Artificial Sequence
  Description of Artificial Sequence: Synthetic oligonucleotide
  Antisense strand to SEQ ID NO: 1488554
ucucacagcuucagaaaga

SEQ ID NO: 1488556 - RNA, 19 nt, Artificial Sequence
  Description of Artificial Sequence: Synthetic oligonucleotide
  Sense strand starting at position 1794 of SEQ ID NO: 1244436
cgagcuccgcgcucagaaa

SEQ ID NO: 1488557 - RNA, 19 nt, Artificial Sequence
  Description of Artificial Sequence: Synthetic oligonucleotide
  Antisense strand to SEQ ID NO: 1488556
uuucugagcgcggagcucg

SEQ ID NO: 1488558 - RNA, 19 nt, Artificial Sequence
  Description of Artificial Sequence: Synthetic oligonucleotide
  Sense strand starting at position 2044 of SEQ ID NO: 1244436
gcgcuuucucucgcgagaa

SEQ ID NO: 1488559 - RNA, 19 nt, Artificial Sequence
  Description of Artificial Sequence: Synthetic oligonucleotide
  Antisense strand to SEQ ID NO: 1488558
uucucgcgagagaaagcgc

SEQ ID NO: 1488560 - RNA, 19 nt, Artificial Sequence
  Description of Artificial Sequence: Synthetic oligonucleotide
  Sense strand starting at position 2048 of SEQ ID NO: 1244436
uuucucucgcgagaaugaa

SEQ ID NO: 1488561 - RNA, 19 nt, Artificial Sequence
  Description of Artificial Sequence: Synthetic oligonucleotide
  Antisense strand to SEQ ID NO: 1488560
uucauucucgcgagagaaa

SEQ ID NO: 1488562 - RNA, 19 nt, Artificial Sequence
  Description of Artificial Sequence: Synthetic oligonucleotide
  Sense strand starting at position 2330 of SEQ ID NO: 1244436
ggucuagggaguggucgaa

SEQ ID NO: 1488563 - RNA, 19 nt, Artificial Sequence
  Description of Artificial Sequence: Synthetic oligonucleotide
  Antisense strand to SEQ ID NO: 1488562
uucgaccacucccuagacc

SEQ ID NO: 1488564 - RNA, 19 nt, Artificial Sequence
  Description of Artificial Sequence: Synthetic oligonucleotide
  Sense strand starting at position 2334 of SEQ ID NO: 1244436
uagggaguggucgaauaua

SEQ ID NO: 1488565 - RNA, 19 nt, Artificial Sequence
  Description of Artificial Sequence: Synthetic oligonucleotide
  Antisense strand to SEQ ID NO: 1488564
uauauucgaccacucccua

SEQ ID NO: 1488566 - RNA, 19 nt, Artificial Sequence
  Description of Artificial Sequence: Synthetic oligonucleotide
  Sense strand starting at position 2404 of SEQ ID NO: 1244436
cauccauggccuuguggaa

SEQ ID NO: 1488567 - RNA, 19 nt, Artificial Sequence
  Description of Artificial Sequence: Synthetic oligonucleotide
  Antisense strand to SEQ ID NO: 1488566
uuccacaaggccauggaug

SEQ ID NO: 1488568 - RNA, 19 nt, Artificial Sequence
  Description of Artificial Sequence: Synthetic oligonucleotide
  Sense strand starting at position 2416 of SEQ ID NO: 1244436
uguggaacgaucugccaaa

SEQ ID NO: 1488569 - RNA, 19 nt, Artificial Sequence
  Description of Artificial Sequence: Synthetic oligonucleotide
  Antisense strand to SEQ ID NO: 1488568
uuuggcagaucguuccaca

SEQ ID NO: 1488570 - RNA, 19 nt, Artificial Sequence
  Description of Artificial Sequence: Synthetic oligonucleotide
  Sense strand starting at position 2523 of SEQ ID NO: 1244436
ucuagagaucuccagucuu

SEQ ID NO: 1488571 - RNA, 19 nt, Artificial Sequence
  Description of Artificial Sequence: Synthetic oligonucleotide
  Antisense strand to SEQ ID NO: 1488570
aagacuggagaucucuaga

SEQ ID NO: 1488572 - RNA, 19 nt, Artificial Sequence
  Description of Artificial Sequence: Synthetic oligonucleotide
  Sense strand starting at position 2634 of SEQ ID NO: 1244436
guuugaugaaggugaaguu

SEQ ID NO: 1488573 - RNA, 19 nt, Artificial Sequence
  Description of Artificial Sequence: Synthetic oligonucleotide
  Antisense strand to SEQ ID NO: 1488572
aacuucaccuucaucaaac

SEQ ID NO: 1488574 - RNA, 19 nt, Artificial Sequence
  Description of Artificial Sequence: Synthetic oligonucleotide
  Sense strand starting at position 2691 of SEQ ID NO: 1244436
ccgggagaaauguauguuu

SEQ ID NO: 1488575 - RNA, 19 nt, Artificial Sequence
  Description of Artificial Sequence: Synthetic oligonucleotide
  Antisense strand to SEQ ID NO: 1488574
aaacauacauuucucccgg

SEQ ID NO: 1488576 - RNA, 19 nt, Artificial Sequence
  Description of Artificial Sequence: Synthetic oligonucleotide
  Sense strand starting at position 2693 of SEQ ID NO: 1244436
gggagaaauguauguuucu

SEQ ID NO: 1488577 - RNA, 19 nt, Artificial Sequence
  Description of Artificial Sequence: Synthetic oligonucleotide
  Antisense strand to SEQ ID NO: 1488576
agaaacauacauuucuccc

SEQ ID NO: 1488578 - RNA, 19 nt, Artificial Sequence
  Description of Artificial Sequence: Synthetic oligonucleotide
  Sense strand starting at position 2710 of SEQ ID NO: 1244436
cucagauaagcauggcaga

SEQ ID NO: 1488579 - RNA, 19 nt, Artificial Sequence
  Description of Artificial Sequence: Synthetic oligonucleotide
  Antisense strand to SEQ ID NO: 1488578
ucugccaugcuuaucugag

SEQ ID NO: 1488580 - RNA, 19 nt, Artificial Sequence
  Description of Artificial Sequence: Synthetic oligonucleotide
  Sense strand starting at position 2711 of SEQ ID NO: 1244436
ucagauaagcauggcagau

SEQ ID NO: 1488581 - RNA, 19 nt, Artificial Sequence
  Description of Artificial Sequence: Synthetic oligonucleotide
  Antisense strand to SEQ ID NO: 1488580
aucugccaugcuuaucuga

SEQ ID NO: 1488582 - RNA, 19 nt, Artificial Sequence
  Description of Artificial Sequence: Synthetic oligonucleotide
  Sense strand starting at position 2812 of SEQ ID NO: 1244436
aaauguacccagugugaca

SEQ ID NO: 1488583 - RNA, 19 nt, Artificial Sequence
  Description of Artificial Sequence: Synthetic oligonucleotide
  Antisense strand to SEQ ID NO: 1488582
ugucacacuggguacauuu

SEQ ID NO: 1488584 - RNA, 19 nt, Artificial Sequence
  Description of Artificial Sequence: Synthetic oligonucleotide
  Sense strand starting at position 2827 of SEQ ID NO: 1244436
gacaaagugccucaguuua

SEQ ID NO: 1488585 - RNA, 19 nt, Artificial Sequence
  Description of Artificial Sequence: Synthetic oligonucleotide
  Antisense strand to SEQ ID NO: 1488584
uaaacugaggcacuuuguc

SEQ ID NO: 1488586 - RNA, 19 nt, Artificial Sequence
  Description of Artificial Sequence: Synthetic oligonucleotide
  Sense strand starting at position 2829 of SEQ ID NO: 1244436
caaagugccucaguuuaga

SEQ ID NO: 1488587 - RNA, 19 nt, Artificial Sequence
  Description of Artificial Sequence: Synthetic oligonucleotide
  Antisense strand to SEQ ID NO: 1488586
ucuaaacugaggcacuuug

SEQ ID NO: 1488588 - RNA, 19 nt, Artificial Sequence
  Description of Artificial Sequence: Synthetic oligonucleotide
  Sense strand starting at position 3020 of SEQ ID NO: 1244436
ccucuaacucuugggcuaa

SEQ ID NO: 1488589 - RNA, 19 nt, Artificial Sequence
  Description of Artificial Sequence: Synthetic oligonucleotide
  Antisense strand to SEQ ID NO: 1488588
uuagcccaagaguuagagg

SEQ ID NO: 1488590 - RNA, 19 nt, Artificial Sequence
  Description of Artificial Sequence: Synthetic oligonucleotide
  Sense strand starting at position 3022 of SEQ ID NO: 1244436
ucuaacucuugggcuaaau

SEQ ID NO: 1488591 - RNA, 19 nt, Artificial Sequence
  Description of Artificial Sequence: Synthetic oligonucleotide
  Antisense strand to SEQ ID NO: 1488590
auuuagcccaagaguuaga

SEQ ID NO: 1488592 - RNA, 19 nt, Artificial Sequence
  Description of Artificial Sequence: Synthetic oligonucleotide
  Sense strand starting at position 3234 of SEQ ID NO: 1244436
auaacuuacuuugugauag

SEQ ID NO: 1488593 - RNA, 19 nt, Artificial Sequence
  Description of Artificial Sequence: Synthetic oligonucleotide
  Antisense strand to SEQ ID NO: 1488592
cuaucacaaaguaaguuau

SEQ ID NO: 1488594 - RNA, 19 nt, Artificial Sequence
  Description of Artificial Sequence: Synthetic oligonucleotide
  Sense strand starting at position 3242 of SEQ ID NO: 1244436
cuuugugauaggugguaag

SEQ ID NO: 1488595 - RNA, 19 nt, Artificial Sequence
  Description of Artificial Sequence: Synthetic oligonucleotide
  Antisense strand to SEQ ID NO: 1488594
cuuaccaccuaucacaaag

SEQ ID NO: 1488596 - RNA, 19 nt, Artificial Sequence
  Description of Artificial Sequence: Synthetic oligonucleotide
  Sense strand starting at position 3268 of SEQ ID NO: 1244436
acauuaaacucagaaggga

SEQ ID NO: 1488597 - RNA, 19 nt, Artificial Sequence
  Description of Artificial Sequence: Synthetic oligonucleotide
  Antisense strand to SEQ ID NO: 1488596
ucccuucugaguuuaaugu

SEQ ID NO: 1488598 - RNA, 19 nt, Artificial Sequence
  Description of Artificial Sequence: Synthetic oligonucleotide
  Sense strand starting at position 3319 of SEQ ID NO: 1244436
aguggucuguguaugugaa

SEQ ID NO: 1488599 - RNA, 19 nt, Artificial Sequence
  Description of Artificial Sequence: Synthetic oligonucleotide
  Antisense strand to SEQ ID NO: 1488598
uucacauacacagaccacu

SEQ ID NO: 1488600 - RNA, 19 nt, Artificial Sequence
  Description of Artificial Sequence: Synthetic oligonucleotide
  Sense strand starting at position 3715 of SEQ ID NO: 1244436
cgaucaugcaguuaacuag

SEQ ID NO: 1488601 - RNA, 19 nt, Artificial Sequence
  Description of Artificial Sequence: Synthetic oligonucleotide
  Antisense strand to SEQ ID NO: 1488600
cuaguuaacugcaugaucg

SEQ ID NO: 1488602 - RNA, 19 nt, Artificial Sequence
  Description of Artificial Sequence: Synthetic oligonucleotide
  Sense strand starting at position 3761 of SEQ ID NO: 1244436
agagcauucucaguagcaa

SEQ ID NO: 1488603 - RNA, 19 nt, Artificial Sequence
  Description of Artificial Sequence: Synthetic oligonucleotide
  Antisense strand to SEQ ID NO: 1488602
uugcuacugagaaugcucu

SEQ ID NO: 1488604 - RNA, 19 nt, Artificial Sequence
  Description of Artificial Sequence: Synthetic oligonucleotide
  Sense strand starting at position 3762 of SEQ ID NO: 1244436
gagcauucucaguagcaag

SEQ ID NO: 1488605 - RNA, 19 nt, Artificial Sequence
  Description of Artificial Sequence: Synthetic oligonucleotide
  Antisense strand to SEQ ID NO: 1488604
cuugcuacugagaaugcuc

SEQ ID NO: 1488606 - RNA, 19 nt, Artificial Sequence
  Description of Artificial Sequence: Synthetic oligonucleotide
  Sense strand starting at position 3815 of SEQ ID NO: 1244436
agucuaucgcaguuauugu

SEQ ID NO: 1488607 - RNA, 19 nt, Artificial Sequence
  Description of Artificial Sequence: Synthetic oligonucleotide
  Antisense strand to SEQ ID NO: 1488606
acaauaacugcgauagacu

SEQ ID NO: 1488608 - RNA, 19 nt, Artificial Sequence
  Description of Artificial Sequence: Synthetic oligonucleotide
  Sense strand starting at position 91 of SEQ ID NO: 1244437
gaggaauucugagucaucg

SEQ ID NO: 1488609 - RNA, 19 nt, Artificial Sequence
  Description of Artificial Sequence: Synthetic oligonucleotide
  Antisense strand to SEQ ID NO: 1488608
cgaugacucagaauuccuc

SEQ ID NO: 1488610 - RNA, 19 nt, Artificial Sequence
  Description of Artificial Sequence: Synthetic oligonucleotide
  Sense strand starting at position 93 of SEQ ID NO: 1244437
ggaauucugagucaucggu

SEQ ID NO: 1488611 - RNA, 19 nt, Artificial Sequence
  Description of Artificial Sequence: Synthetic oligonucleotide
  Antisense strand to SEQ ID NO: 1488610
accgaugacucagaauucc

SEQ ID NO: 1488612 - RNA, 19 nt, Artificial Sequence
  Description of Artificial Sequence: Synthetic oligonucleotide
  Sense strand starting at position 280 of SEQ ID NO: 1244437
ucucuauggcuuuacaaag

SEQ ID NO: 1488613 - RNA, 19 nt, Artificial Sequence
  Description of Artificial Sequence: Synthetic oligonucleotide
  Antisense strand to SEQ ID NO: 1488612
cuuuguaaagccauagaga

SEQ ID NO: 1488614 - RNA, 19 nt, Artificial Sequence
  Description of Artificial Sequence: Synthetic oligonucleotide
  Sense strand starting at position 307 of SEQ ID NO: 1244437
uuaugucacuuaucuggau

SEQ ID NO: 1488615 - RNA, 19 nt, Artificial Sequence
  Description of Artificial Sequence: Synthetic oligonucleotide
  Antisense strand to SEQ ID NO: 1488614
auccagauaagugacauaa

SEQ ID NO: 1488616 - RNA, 19 nt, Artificial Sequence
  Description of Artificial Sequence: Synthetic oligonucleotide
  Sense strand starting at position 729 of SEQ ID NO: 1244437
uuugccugacccugaaaga

SEQ ID NO: 1488617 - RNA, 19 nt, Artificial Sequence
  Description of Artificial Sequence: Synthetic oligonucleotide
  Antisense strand to SEQ ID NO: 1488616
ucuuucagggucaggcaaa

SEQ ID NO: 1488618 - RNA, 19 nt, Artificial Sequence
  Description of Artificial Sequence: Synthetic oligonucleotide
  Sense strand starting at position 912 of SEQ ID NO: 1244437
augcacucaucccucgaaa

SEQ ID NO: 1488619 - RNA, 19 nt, Artificial Sequence
  Description of Artificial Sequence: Synthetic oligonucleotide
  Antisense strand to SEQ ID NO: 1488618
uuucgagggaugagugcau

SEQ ID NO: 1488620 - RNA, 19 nt, Artificial Sequence
  Description of Artificial Sequence: Synthetic oligonucleotide
  Sense strand starting at position 932 of SEQ ID NO: 1244437
cugagaucaucuccuuuga

SEQ ID NO: 1488621 - RNA, 19 nt, Artificial Sequence
  Description of Artificial Sequence: Synthetic oligonucleotide
  Antisense strand to SEQ ID NO: 1488620
ucaaaggagaugaucucag

SEQ ID NO: 1488622 - RNA, 19 nt, Artificial Sequence
  Description of Artificial Sequence: Synthetic oligonucleotide
  Sense strand starting at position 987 of SEQ ID NO: 1244437
gucuuuagaagacagugua

SEQ ID NO: 1488623 - RNA, 19 nt, Artificial Sequence
  Description of Artificial Sequence: Synthetic oligonucleotide
  Antisense strand to SEQ ID NO: 1488622
uacacugucuucuaaagac

SEQ ID NO: 1488624 - RNA, 19 nt, Artificial Sequence
  Description of Artificial Sequence: Synthetic oligonucleotide
  Sense strand starting at position 1004 of SEQ ID NO: 1244437
uagugaauauaguccaugu

SEQ ID NO: 1488625 - RNA, 19 nt, Artificial Sequence
  Description of Artificial Sequence: Synthetic oligonucleotide
  Antisense strand to SEQ ID NO: 1488624
acauggacuauauucacua

SEQ ID NO: 1488626 - RNA, 19 nt, Artificial Sequence
  Description of Artificial Sequence: Synthetic oligonucleotide
  Sense strand starting at position 1006 of SEQ ID NO: 1244437
gugaauauaguccauguaa

SEQ ID NO: 1488627 - RNA, 19 nt, Artificial Sequence
  Description of Artificial Sequence: Synthetic oligonucleotide
  Antisense strand to SEQ ID NO: 1488626
uuacauggacuauauucac

SEQ ID NO: 1488628 - RNA, 19 nt, Artificial Sequence
  Description of Artificial Sequence: Synthetic oligonucleotide
  Sense strand starting at position 1008 of SEQ ID NO: 1244437
gaauauaguccauguaaga

SEQ ID NO: 1488629 - RNA, 19 nt, Artificial Sequence
  Description of Artificial Sequence: Synthetic oligonucleotide
  Antisense strand to SEQ ID NO: 1488628
ucuuacauggacuauauuc

SEQ ID NO: 1488630 - RNA, 19 nt, Artificial Sequence
  Description of Artificial Sequence: Synthetic oligonucleotide
  Sense strand starting at position 1405 of SEQ ID NO: 1244437
uuauguguccuggaucaag

SEQ ID NO: 1488631 - RNA, 19 nt, Artificial Sequence
  Description of Artificial Sequence: Synthetic oligonucleotide
  Antisense strand to SEQ ID NO: 1488630
cuugauccaggacacauaa

SEQ ID NO: 1488632 - RNA, 19 nt, Artificial Sequence
  Description of Artificial Sequence: Synthetic oligonucleotide
  Sense strand starting at position 1408 of SEQ ID NO: 1244437
uguguccuggaucaaguua

SEQ ID NO: 1488633 - RNA, 19 nt, Artificial Sequence
  Description of Artificial Sequence: Synthetic oligonucleotide
  Antisense strand to SEQ ID NO: 1488632
uaacuugauccaggacaca

SEQ ID NO: 1488634 - RNA, 19 nt, Artificial Sequence
  Description of Artificial Sequence: Synthetic oligonucleotide
  Sense strand starting at position 1704 of SEQ ID NO: 1244437
uucucucuguaggcagaaa

SEQ ID NO: 1488635 - RNA, 19 nt, Artificial Sequence
  Description of Artificial Sequence: Synthetic oligonucleotide
  Antisense strand to SEQ ID NO: 1488634
uuucugccuacagagagaa

SEQ ID NO: 1488636 - RNA, 19 nt, Artificial Sequence
  Description of Artificial Sequence: Synthetic oligonucleotide
  Sense strand starting at position 1735 of SEQ ID NO: 1244437
uucugagccuucucaaaga

SEQ ID NO: 1488637 - RNA, 19 nt, Artificial Sequence
  Description of Artificial Sequence: Synthetic oligonucleotide
  Antisense strand to SEQ ID NO: 1488636
ucuuugagaaggcucagaa

SEQ ID NO: 1488638 - RNA, 19 nt, Artificial Sequence
  Description of Artificial Sequence: Synthetic oligonucleotide
  Sense strand starting at position 1871 of SEQ ID NO: 1244437
ccuugagaacuucgggacu

SEQ ID NO: 1488639 - RNA, 19 nt, Artificial Sequence
  Description of Artificial Sequence: Synthetic oligonucleotide
  Antisense strand to SEQ ID NO: 1488638
agucccgaaguucucaagg

SEQ ID NO: 1488640 - RNA, 19 nt, Artificial Sequence
  Description of Artificial Sequence: Synthetic oligonucleotide
  Sense strand starting at position 1943 of SEQ ID NO: 1244437
gaaugaggcugaguucucu

SEQ ID NO: 1488641 - RNA, 19 nt, Artificial Sequence
  Description of Artificial Sequence: Synthetic oligonucleotide
  Antisense strand to SEQ ID NO: 1488640
agagaacucagccucauuc

SEQ ID NO: 1488642 - RNA, 19 nt, Artificial Sequence
  Description of Artificial Sequence: Synthetic oligonucleotide
  Sense strand starting at position 2037 of SEQ ID NO: 1244437
ccaugccauccagagaguu

SEQ ID NO: 1488643 - RNA, 19 nt, Artificial Sequence
  Description of Artificial Sequence: Synthetic oligonucleotide
  Antisense strand to SEQ ID NO: 1488642
aacucucuggauggcaugg

SEQ ID NO: 1488644 - RNA, 19 nt, Artificial Sequence
  Description of Artificial Sequence: Synthetic oligonucleotide
  Sense strand starting at position 2118 of SEQ ID NO: 1244437
gcuuguguacaguuagcua

SEQ ID NO: 1488645 - RNA, 19 nt, Artificial Sequence
  Description of Artificial Sequence: Synthetic oligonucleotide
  Antisense strand to SEQ ID NO: 1488644
uagcuaacuguacacaagc

SEQ ID NO: 1488646 - RNA, 19 nt, Artificial Sequence
  Description of Artificial Sequence: Synthetic oligonucleotide
  Sense strand starting at position 2122 of SEQ ID NO: 1244437
guguacaguuagcuaauuu

SEQ ID NO: 1488647 - RNA, 19 nt, Artificial Sequence
  Description of Artificial Sequence: Synthetic oligonucleotide
  Antisense strand to SEQ ID NO: 1488646
aaauuagcuaacuguacac

SEQ ID NO: 1488648 - RNA, 19 nt, Artificial Sequence
  Description of Artificial Sequence: Synthetic oligonucleotide
  Sense strand starting at position 2356 of SEQ ID NO: 1244437
cagggagcucucugguuaa

SEQ ID NO: 1488649 - RNA, 19 nt, Artificial Sequence
  Description of Artificial Sequence: Synthetic oligonucleotide
  Antisense strand to SEQ ID NO: 1488648
uuaaccagagagcucccug

SEQ ID NO: 1488650 - RNA, 19 nt, Artificial Sequence
  Description of Artificial Sequence: Synthetic oligonucleotide
  Sense strand starting at position 2471 of SEQ ID NO: 1244437
ccagaaggccagugauauu

SEQ ID NO: 1488651 - RNA, 19 nt, Artificial Sequence
  Description of Artificial Sequence: Synthetic oligonucleotide
  Antisense strand to SEQ ID NO: 1488650
aauaucacuggccuucugg

SEQ ID NO: 1488652 - RNA, 19 nt, Artificial Sequence
  Description of Artificial Sequence: Synthetic oligonucleotide
  Sense strand starting at position 2482 of SEQ ID NO: 1244437
gugauauuagaugaugcca

SEQ ID NO: 1488653 - RNA, 19 nt, Artificial Sequence
  Description of Artificial Sequence: Synthetic oligonucleotide
  Antisense strand to SEQ ID NO: 1488652
uggcaucaucuaauaucac

SEQ ID NO: 1488654 - RNA, 19 nt, Artificial Sequence
  Description of Artificial Sequence: Synthetic oligonucleotide
  Sense strand starting at position 2490 of SEQ ID NO: 1244437
agaugaugccauuauucca

SEQ ID NO: 1488655 - RNA, 19 nt, Artificial Sequence
  Description of Artificial Sequence: Synthetic oligonucleotide
  Antisense strand to SEQ ID NO: 1488654
uggaauaauggcaucaucu

SEQ ID NO: 1488656 - RNA, 19 nt, Artificial Sequence
  Description of Artificial Sequence: Synthetic oligonucleotide
  Sense strand starting at position 2609 of SEQ ID NO: 1244437
auccuuuagcacuagguaa

SEQ ID NO: 1488657 - RNA, 19 nt, Artificial Sequence
  Description of Artificial Sequence: Synthetic oligonucleotide
  Antisense strand to SEQ ID NO: 1488656
uuaccuagugcuaaaggau

SEQ ID NO: 1488658 - RNA, 19 nt, Artificial Sequence
  Description of Artificial Sequence: Synthetic oligonucleotide
  Sense strand starting at position 2622 of SEQ ID NO: 1244437
agguaagcuuugguggaau

SEQ ID NO: 1488659 - RNA, 19 nt, Artificial Sequence
  Description of Artificial Sequence: Synthetic oligonucleotide
  Antisense strand to SEQ ID NO: 1488658
auuccaccaaagcuuaccu

SEQ ID NO: 1488660 - RNA, 19 nt, Artificial Sequence
  Description of Artificial Sequence: Synthetic oligonucleotide
  Sense strand starting at position 3291 of SEQ ID NO: 1244437
aucagagcucaaggaucuu

SEQ ID NO: 1488661 - RNA, 19 nt, Artificial Sequence
  Description of Artificial Sequence: Synthetic oligonucleotide
  Antisense strand to SEQ ID NO: 1488660
aagauccuugagcucugau

SEQ ID NO: 1488662 - RNA, 19 nt, Artificial Sequence
  Description of Artificial Sequence: Synthetic oligonucleotide
  Sense strand starting at position 3297 of SEQ ID NO: 1244437
gcucaaggaucuuuguuga

SEQ ID NO: 1488663 - RNA, 19 nt, Artificial Sequence
  Description of Artificial Sequence: Synthetic oligonucleotide
  Antisense strand to SEQ ID NO: 1488662
ucaacaaagauccuugagc

SEQ ID NO: 1488664 - RNA, 19 nt, Artificial Sequence
  Description of Artificial Sequence: Synthetic oligonucleotide
  Sense strand starting at position 3300 of SEQ ID NO: 1244437
caaggaucuuuguugagug

SEQ ID NO: 1488665 - RNA, 19 nt, Artificial Sequence
  Description of Artificial Sequence: Synthetic oligonucleotide
  Antisense strand to SEQ ID NO: 1488664
cacucaacaaagauccuug

SEQ ID NO: 1488666 - RNA, 19 nt, Artificial Sequence
  Description of Artificial Sequence: Synthetic oligonucleotide
  Sense strand starting at position 3302 of SEQ ID NO: 1244437
aggaucuuuguugagugaa

SEQ ID NO: 1488667 - RNA, 19 nt, Artificial Sequence
  Description of Artificial Sequence: Synthetic oligonucleotide
  Antisense strand to SEQ ID NO: 1488666
uucacucaacaaagauccu

SEQ ID NO: 1488668 - RNA, 19 nt, Artificial Sequence
  Description of Artificial Sequence: Synthetic oligonucleotide
  Sense strand starting at position 3304 of SEQ ID NO: 1244437
gaucuuuguugagugaaug

SEQ ID NO: 1488669 - RNA, 19 nt, Artificial Sequence
  Description of Artificial Sequence: Synthetic oligonucleotide
  Antisense strand to SEQ ID NO: 1488668
cauucacucaacaaagauc

SEQ ID NO: 1488670 - RNA, 19 nt, Artificial Sequence
  Description of Artificial Sequence: Synthetic oligonucleotide
  Sense strand starting at position 3315 of SEQ ID NO: 1244437
agugaauguguggaugaau

SEQ ID NO: 1488671 - RNA, 19 nt, Artificial Sequence
  Description of Artificial Sequence: Synthetic oligonucleotide
  Antisense strand to SEQ ID NO: 1488670
auucauccacacauucacu

SEQ ID NO: 1488672 - RNA, 19 nt, Artificial Sequence
  Description of Artificial Sequence: Synthetic oligonucleotide
  Sense strand starting at position 3348 of SEQ ID NO: 1244437
aguaaacuggaaugaguuu

SEQ ID NO: 1488673 - RNA, 19 nt, Artificial Sequence
  Description of Artificial Sequence: Synthetic oligonucleotide
  Antisense strand to SEQ ID NO: 1488672
aaacucauuccaguuuacu

SEQ ID NO: 1488674 - RNA, 19 nt, Artificial Sequence
  Description of Artificial Sequence: Synthetic oligonucleotide
  Sense strand starting at position 3601 of SEQ ID NO: 1244437
uauaguacagagugauauc

SEQ ID NO: 1488675 - RNA, 19 nt, Artificial Sequence
  Description of Artificial Sequence: Synthetic oligonucleotide
  Antisense strand to SEQ ID NO: 1488674
gauaucacucuguacuaua

SEQ ID NO: 1488676 - RNA, 19 nt, Artificial Sequence
  Description of Artificial Sequence: Synthetic oligonucleotide
  Sense strand starting at position 3608 of SEQ ID NO: 1244437
cagagugauaucuguagug

SEQ ID NO: 1488677 - RNA, 19 nt, Artificial Sequence
  Description of Artificial Sequence: Synthetic oligonucleotide
  Antisense strand to SEQ ID NO: 1488676
cacuacagauaucacucug

SEQ ID NO: 1488678 - RNA, 19 nt, Artificial Sequence
  Description of Artificial Sequence: Synthetic oligonucleotide
  Sense strand starting at position 3610 of SEQ ID NO: 1244437
gagugauaucuguagugau

SEQ ID NO: 1488679 - RNA, 19 nt, Artificial Sequence
  Description of Artificial Sequence: Synthetic oligonucleotide
  Antisense strand to SEQ ID NO: 1488678
aucacuacagauaucacuc

SEQ ID NO: 1488680 - RNA, 19 nt, Artificial Sequence
  Description of Artificial Sequence: Synthetic oligonucleotide
  Sense strand starting at position 3719 of SEQ ID NO: 1244437
ugauuaggaguuugcuaca

SEQ ID NO: 1488681 - RNA, 19 nt, Artificial Sequence
  Description of Artificial Sequence: Synthetic oligonucleotide
  Antisense strand to SEQ ID NO: 1488680
uguagcaaacuccuaauca

SEQ ID NO: 1488682 - RNA, 19 nt, Artificial Sequence
  Description of Artificial Sequence: Synthetic oligonucleotide
  Sense strand starting at position 3724 of SEQ ID NO: 1244437
aggaguuugcuacacucua

SEQ ID NO: 1488683 - RNA, 19 nt, Artificial Sequence
  Description of Artificial Sequence: Synthetic oligonucleotide
  Antisense strand to SEQ ID NO: 1488682
uagaguguagcaaacuccu

SEQ ID NO: 1488684 - RNA, 19 nt, Artificial Sequence
  Description of Artificial Sequence: Synthetic oligonucleotide
  Sense strand starting at position 3769 of SEQ ID NO: 1244437
uggcuauaccugcagcaaa

SEQ ID NO: 1488685 - RNA, 19 nt, Artificial Sequence
  Description of Artificial Sequence: Synthetic oligonucleotide
  Antisense strand to SEQ ID NO: 1488684
uuugcugcagguauagcca

SEQ ID NO: 1488686 - RNA, 19 nt, Artificial Sequence
  Description of Artificial Sequence: Synthetic oligonucleotide
  Sense strand starting at position 3889 of SEQ ID NO: 1244437
caaagcacuucguugauuu

SEQ ID NO: 1488687 - RNA, 19 nt, Artificial Sequence
  Description of Artificial Sequence: Synthetic oligonucleotide
  Antisense strand to SEQ ID NO: 1488686
aaaucaacgaagugcuuug

SEQ ID NO: 1488688 - RNA, 19 nt, Artificial Sequence
  Description of Artificial Sequence: Synthetic oligonucleotide
  Sense strand starting at position 105 of SEQ ID NO: 1244438
ccugaaugcuaauguggaa

SEQ ID NO: 1488689 - RNA, 19 nt, Artificial Sequence
  Description of Artificial Sequence: Synthetic oligonucleotide
  Antisense strand to SEQ ID NO: 1488688
uuccacauuagcauucagg

SEQ ID NO: 1488690 - RNA, 19 nt, Artificial Sequence
  Description of Artificial Sequence: Synthetic oligonucleotide
  Sense strand starting at position 338 of SEQ ID NO: 1244438
ugucguaucuggagucgca

SEQ ID NO: 1488691 - RNA, 19 nt, Artificial Sequence
  Description of Artificial Sequence: Synthetic oligonucleotide
  Antisense strand to SEQ ID NO: 1488690
ugcgacuccagauacgaca

SEQ ID NO: 1488692 - RNA, 19 nt, Artificial Sequence
  Description of Artificial Sequence: Synthetic oligonucleotide
  Sense strand starting at position 352 of SEQ ID NO: 1244438
ucgcaguucucgcgguuga

SEQ ID NO: 1488693 - RNA, 19 nt, Artificial Sequence
  Description of Artificial Sequence: Synthetic oligonucleotide
  Antisense strand to SEQ ID NO: 1488692
ucaaccgcgagaacugcga

SEQ ID NO: 1488694 - RNA, 19 nt, Artificial Sequence
  Description of Artificial Sequence: Synthetic oligonucleotide
  Sense strand starting at position 353 of SEQ ID NO: 1244438
cgcaguucucgcgguugaa

SEQ ID NO: 1488695 - RNA, 19 nt, Artificial Sequence
  Description of Artificial Sequence: Synthetic oligonucleotide
  Antisense strand to SEQ ID NO: 1488694
uucaaccgcgagaacugcg

SEQ ID NO: 1488696 - RNA, 19 nt, Artificial Sequence
  Description of Artificial Sequence: Synthetic oligonucleotide
  Sense strand starting at position 354 of SEQ ID NO: 1244438
gcaguucucgcgguugaag

SEQ ID NO: 1488697 - RNA, 19 nt, Artificial Sequence
  Description of Artificial Sequence: Synthetic oligonucleotide
  Antisense strand to SEQ ID NO: 1488696
cuucaaccgcgagaacugc

SEQ ID NO: 1488698 - RNA, 19 nt, Artificial Sequence
  Description of Artificial Sequence: Synthetic oligonucleotide
  Sense strand starting at position 719 of SEQ ID NO: 1244438
gggcugugguccguggaaa

SEQ ID NO: 1488699 - RNA, 19 nt, Artificial Sequence
  Description of Artificial Sequence: Synthetic oligonucleotide
  Antisense strand to SEQ ID NO: 1488698
uuuccacggaccacagccc

SEQ ID NO: 1488700 - RNA, 19 nt, Artificial Sequence
  Description of Artificial Sequence: Synthetic oligonucleotide
  Sense strand starting at position 810 of SEQ ID NO: 1244438
cggcgcuugaagcgugaaa

SEQ ID NO: 1488701 - RNA, 19 nt, Artificial Sequence
  Description of Artificial Sequence: Synthetic oligonucleotide
  Antisense strand to SEQ ID NO: 1488700
uuucacgcuucaagcgccg

SEQ ID NO: 1488702 - RNA, 19 nt, Artificial Sequence
  Description of Artificial Sequence: Synthetic oligonucleotide
  Sense strand starting at position 1524 of SEQ ID NO: 1244438
gcgccaugaagcuguccau

SEQ ID NO: 1488703 - RNA, 19 nt, Artificial Sequence
  Description of Artificial Sequence: Synthetic oligonucleotide
  Antisense strand to SEQ ID NO: 1488702
auggacagcuucauggcgc

SEQ ID NO: 1488704 - RNA, 19 nt, Artificial Sequence
  Description of Artificial Sequence: Synthetic oligonucleotide
  Sense strand starting at position 1527 of SEQ ID NO: 1244438
ccaugaagcuguccauguu

SEQ ID NO: 1488705 - RNA, 19 nt, Artificial Sequence
  Description of Artificial Sequence: Synthetic oligonucleotide
  Antisense strand to SEQ ID NO: 1488704
aacauggacagcuucaugg

SEQ ID NO: 1488706 - RNA, 19 nt, Artificial Sequence
  Description of Artificial Sequence: Synthetic oligonucleotide
  Sense strand starting at position 1528 of SEQ ID NO: 1244438
caugaagcuguccauguua

SEQ ID NO: 1488707 - RNA, 19 nt, Artificial Sequence
  Description of Artificial Sequence: Synthetic oligonucleotide
  Antisense strand to SEQ ID NO: 1488706
uaacauggacagcuucaug

SEQ ID NO: 1488708 - RNA, 19 nt, Artificial Sequence
  Description of Artificial Sequence: Synthetic oligonucleotide
  Sense strand starting at position 3164 of SEQ ID NO: 1244438
gaacaagguuccuguggga

SEQ ID NO: 1488709 - RNA, 19 nt, Artificial Sequence
  Description of Artificial Sequence: Synthetic oligonucleotide
  Antisense strand to SEQ ID NO: 1488708
ucccacaggaaccuuguuc

SEQ ID NO: 1488710 - RNA, 19 nt, Artificial Sequence
  Description of Artificial Sequence: Synthetic oligonucleotide
  Sense strand starting at position 3167 of SEQ ID NO: 1244438
caagguuccugugggaaau

SEQ ID NO: 1488711 - RNA, 19 nt, Artificial Sequence
  Description of Artificial Sequence: Synthetic oligonucleotide
  Antisense strand to SEQ ID NO: 1488710
auuucccacaggaaccuug

SEQ ID NO: 1488712 - RNA, 19 nt, Artificial Sequence
  Description of Artificial Sequence: Synthetic oligonucleotide
  Sense strand starting at position 3168 of SEQ ID NO: 1244438
aagguuccugugggaaauc

SEQ ID NO: 1488713 - RNA, 19 nt, Artificial Sequence
  Description of Artificial Sequence: Synthetic oligonucleotide
  Antisense strand to SEQ ID NO: 1488712
gauuucccacaggaaccuu

SEQ ID NO: 1488714 - RNA, 19 nt, Artificial Sequence
  Description of Artificial Sequence: Synthetic oligonucleotide
  Sense strand starting at position 3169 of SEQ ID NO: 1244438
agguuccugugggaaauca

SEQ ID NO: 1488715 - RNA, 19 nt, Artificial Sequence
  Description of Artificial Sequence: Synthetic oligonucleotide
  Antisense strand to SEQ ID NO: 1488714
ugauuucccacaggaaccu

SEQ ID NO: 1488716 - RNA, 19 nt, Artificial Sequence
  Description of Artificial Sequence: Synthetic oligonucleotide
  Sense strand starting at position 3180 of SEQ ID NO: 1244438
ggaaaucaguacuggagca

SEQ ID NO: 1488717 - RNA, 19 nt, Artificial Sequence
  Description of Artificial Sequence: Synthetic oligonucleotide
  Antisense strand to SEQ ID NO: 1488716
ugcuccaguacugauuucc

SEQ ID NO: 1488718 - RNA, 19 nt, Artificial Sequence
  Description of Artificial Sequence: Synthetic oligonucleotide
  Sense strand starting at position 3363 of SEQ ID NO: 1244438
ggaaacaggucuuacguuu

SEQ ID NO: 1488719 - RNA, 19 nt, Artificial Sequence
  Description of Artificial Sequence: Synthetic oligonucleotide
  Antisense strand to SEQ ID NO: 1488718
aaacguaagaccuguuucc

SEQ ID NO: 1488720 - RNA, 19 nt, Artificial Sequence
  Description of Artificial Sequence: Synthetic oligonucleotide
  Sense strand starting at position 3370 of SEQ ID NO: 1244438
ggucuuacguuucaggaca

SEQ ID NO: 1488721 - RNA, 19 nt, Artificial Sequence
  Description of Artificial Sequence: Synthetic oligonucleotide
  Antisense strand to SEQ ID NO: 1488720
uguccugaaacguaagacc

SEQ ID NO: 1488722 - RNA, 19 nt, Artificial Sequence
  Description of Artificial Sequence: Synthetic oligonucleotide
  Sense strand starting at position 3634 of SEQ ID NO: 1244438
ccgaguuaccugggcucuu

SEQ ID NO: 1488723 - RNA, 19 nt, Artificial Sequence
  Description of Artificial Sequence: Synthetic oligonucleotide
  Antisense strand to SEQ ID NO: 1488722
aagagcccagguaacucgg

SEQ ID NO: 1488724 - RNA, 19 nt, Artificial Sequence
  Description of Artificial Sequence: Synthetic oligonucleotide
  Sense strand starting at position 3690 of SEQ ID NO: 1244438
cgcgcauucgaugggugua

SEQ ID NO: 1488725 - RNA, 19 nt, Artificial Sequence
  Description of Artificial Sequence: Synthetic oligonucleotide
  Antisense strand to SEQ ID NO: 1488724
uacacccaucgaaugcgcg

SEQ ID NO: 1488726 - RNA, 19 nt, Artificial Sequence
  Description of Artificial Sequence: Synthetic oligonucleotide
  Sense strand starting at position 3691 of SEQ ID NO: 1244438
gcgcauucgauggguguaa

SEQ ID NO: 1488727 - RNA, 19 nt, Artificial Sequence
  Description of Artificial Sequence: Synthetic oligonucleotide
  Antisense strand to SEQ ID NO: 1488726
uuacacccaucgaaugcgc

SEQ ID NO: 1488728 - RNA, 19 nt, Artificial Sequence
  Description of Artificial Sequence: Synthetic oligonucleotide
  Sense strand starting at position 3776 of SEQ ID NO: 1244438
gggacauucucagagggag

SEQ ID NO: 1488729 - RNA, 19 nt, Artificial Sequence
  Description of Artificial Sequence: Synthetic oligonucleotide
  Antisense strand to SEQ ID NO: 1488728
cucccucugagaauguccc

SEQ ID NO: 1488730 - RNA, 19 nt, Artificial Sequence
  Description of Artificial Sequence: Synthetic oligonucleotide
  Sense strand starting at position 3907 of SEQ ID NO: 1244438
gcucucugcucacucagaa

SEQ ID NO: 1488731 - RNA, 19 nt, Artificial Sequence
  Description of Artificial Sequence: Synthetic oligonucleotide
  Antisense strand to SEQ ID NO: 1488730
uucugagugagcagagagc

SEQ ID NO: 1488732 - RNA, 19 nt, Artificial Sequence
  Description of Artificial Sequence: Synthetic oligonucleotide
  Sense strand starting at position 3945 of SEQ ID NO: 1244438
cgccgucgggucaguuuaa

SEQ ID NO: 1488733 - RNA, 19 nt, Artificial Sequence
  Description of Artificial Sequence: Synthetic oligonucleotide
  Antisense strand to SEQ ID NO: 1488732
uuaaacugacccgacggcg

SEQ ID NO: 1488734 - RNA, 19 nt, Artificial Sequence
  Description of Artificial Sequence: Synthetic oligonucleotide
  Sense strand starting at position 3946 of SEQ ID NO: 1244438
gccgucgggucaguuuaaa

SEQ ID NO: 1488735 - RNA, 19 nt, Artificial Sequence
  Description of Artificial Sequence: Synthetic oligonucleotide
  Antisense strand to SEQ ID NO: 1488734
uuuaaacugacccgacggc

SEQ ID NO: 1488736 - RNA, 19 nt, Artificial Sequence
  Description of Artificial Sequence: Synthetic oligonucleotide
  Sense strand starting at position 257 of SEQ ID NO: 1244439
cgaagagguucuuacugca

SEQ ID NO: 1488737 - RNA, 19 nt, Artificial Sequence
  Description of Artificial Sequence: Synthetic oligonucleotide
  Antisense strand to SEQ ID NO: 1488736
ugcaguaagaaccucuucg

SEQ ID NO: 1488738 - RNA, 19 nt, Artificial Sequence
  Description of Artificial Sequence: Synthetic oligonucleotide
  Sense strand starting at position 311 of SEQ ID NO: 1244439
cuggucucgccgcauucaa

SEQ ID NO: 1488739 - RNA, 19 nt, Artificial Sequence
  Description of Artificial Sequence: Synthetic oligonucleotide
  Antisense strand to SEQ ID NO: 1488738
uugaaugcggcgagaccag

SEQ ID NO: 1488740 - RNA, 19 nt, Artificial Sequence
  Description of Artificial Sequence: Synthetic oligonucleotide
  Sense strand starting at position 333 of SEQ ID NO: 1244439
gaggcuuaugaucaguacu

SEQ ID NO: 1488741 - RNA, 19 nt, Artificial Sequence
  Description of Artificial Sequence: Synthetic oligonucleotide
  Antisense strand to SEQ ID NO: 1488740
aguacugaucauaagccuc

SEQ ID NO: 1488742 - RNA, 19 nt, Artificial Sequence
  Description of Artificial Sequence: Synthetic oligonucleotide
  Sense strand starting at position 335 of SEQ ID NO: 1244439
ggcuuaugaucaguacuuu

SEQ ID NO: 1488743 - RNA, 19 nt, Artificial Sequence
  Description of Artificial Sequence: Synthetic oligonucleotide
  Antisense strand to SEQ ID NO: 1488742
aaaguacugaucauaagcc

SEQ ID NO: 1488744 - RNA, 19 nt, Artificial Sequence
  Description of Artificial Sequence: Synthetic oligonucleotide
  Sense strand starting at position 995 of SEQ ID NO: 1244439
agcccaugcccucacagau

SEQ ID NO: 1488745 - RNA, 19 nt, Artificial Sequence
  Description of Artificial Sequence: Synthetic oligonucleotide
  Antisense strand to SEQ ID NO: 1488744
aucugugagggcaugggcu

SEQ ID NO: 1488746 - RNA, 19 nt, Artificial Sequence
  Description of Artificial Sequence: Synthetic oligonucleotide
  Sense strand starting at position 1010 of SEQ ID NO: 1244439
agauuuggcucucgaguug

SEQ ID NO: 1488747 - RNA, 19 nt, Artificial Sequence
  Description of Artificial Sequence: Synthetic oligonucleotide
  Antisense strand to SEQ ID NO: 1488746
caacucgagagccaaaucu

SEQ ID NO: 1488748 - RNA, 19 nt, Artificial Sequence
  Description of Artificial Sequence: Synthetic oligonucleotide
  Sense strand starting at position 2329 of SEQ ID NO: 1244439
ggcgguuucuaccacccua

SEQ ID NO: 1488749 - RNA, 19 nt, Artificial Sequence
  Description of Artificial Sequence: Synthetic oligonucleotide
  Antisense strand to SEQ ID NO: 1488748
uagggugguagaaaccgcc

SEQ ID NO: 1488750 - RNA, 19 nt, Artificial Sequence
  Description of Artificial Sequence: Synthetic oligonucleotide
  Sense strand starting at position 2657 of SEQ ID NO: 1244439
caugucuucucuuggguau

SEQ ID NO: 1488751 - RNA, 19 nt, Artificial Sequence
  Description of Artificial Sequence: Synthetic oligonucleotide
  Antisense strand to SEQ ID NO: 1488750
auacccaagagaagacaug

SEQ ID NO: 1488752 - RNA, 19 nt, Artificial Sequence
  Description of Artificial Sequence: Synthetic oligonucleotide
  Sense strand starting at position 2669 of SEQ ID NO: 1244439
uggguaucuucccaggaca

SEQ ID NO: 1488753 - RNA, 19 nt, Artificial Sequence
  Description of Artificial Sequence: Synthetic oligonucleotide
  Antisense strand to SEQ ID NO: 1488752
uguccugggaagauaccca

SEQ ID NO: 1488754 - RNA, 19 nt, Artificial Sequence
  Description of Artificial Sequence: Synthetic oligonucleotide
  Sense strand starting at position 2711 of SEQ ID NO: 1244439
acuuguuucuggguuccau

SEQ ID NO: 1488755 - RNA, 19 nt, Artificial Sequence
  Description of Artificial Sequence: Synthetic oligonucleotide
  Antisense strand to SEQ ID NO: 1488754
auggaacccagaaacaagu

SEQ ID NO: 1488756 - RNA, 19 nt, Artificial Sequence
  Description of Artificial Sequence: Synthetic oligonucleotide
  Sense strand starting at position 2726 of SEQ ID NO: 1244439
ccaugcuucccagguguga

SEQ ID NO: 1488757 - RNA, 19 nt, Artificial Sequence
  Description of Artificial Sequence: Synthetic oligonucleotide
  Antisense strand to SEQ ID NO: 1488756
ucacaccugggaagcaugg

SEQ ID NO: 1488758 - RNA, 19 nt, Artificial Sequence
  Description of Artificial Sequence: Synthetic oligonucleotide
  Sense strand starting at position 2728 of SEQ ID NO: 1244439
augcuucccaggugugaug

SEQ ID NO: 1488759 - RNA, 19 nt, Artificial Sequence
  Description of Artificial Sequence: Synthetic oligonucleotide
  Antisense strand to SEQ ID NO: 1488758
caucacaccugggaagcau

SEQ ID NO: 1488760 - RNA, 19 nt, Artificial Sequence
  Description of Artificial Sequence: Synthetic oligonucleotide
  Sense strand starting at position 2746 of SEQ ID NO: 1244439
ggugaaugcugagugucag

SEQ ID NO: 1488761 - RNA, 19 nt, Artificial Sequence
  Description of Artificial Sequence: Synthetic oligonucleotide
  Antisense strand to SEQ ID NO: 1488760
cugacacucagcauucacc

SEQ ID NO: 1488762 - RNA, 19 nt, Artificial Sequence
  Description of Artificial Sequence: Synthetic oligonucleotide
  Sense strand starting at position 2781 of SEQ ID NO: 1244439
gaugcaaaguauugucacu

SEQ ID NO: 1488763 - RNA, 19 nt, Artificial Sequence
  Description of Artificial Sequence: Synthetic oligonucleotide
  Antisense strand to SEQ ID NO: 1488762
agugacaauacuuugcauc

SEQ ID NO: 1488764 - RNA, 19 nt, Artificial Sequence
  Description of Artificial Sequence: Synthetic oligonucleotide
  Sense strand starting at position 2786 of SEQ ID NO: 1244439
aaaguauugucacugggug

SEQ ID NO: 1488765 - RNA, 19 nt, Artificial Sequence
  Description of Artificial Sequence: Synthetic oligonucleotide
  Antisense strand to SEQ ID NO: 1488764
cacccagugacaauacuuu

SEQ ID NO: 1488766 - RNA, 19 nt, Artificial Sequence
  Description of Artificial Sequence: Synthetic oligonucleotide
  Sense strand starting at position 2787 of SEQ ID NO: 1244439
aaguauugucacugggugu

SEQ ID NO: 1488767 - RNA, 19 nt, Artificial Sequence
  Description of Artificial Sequence: Synthetic oligonucleotide
  Antisense strand to SEQ ID NO: 1488766
acacccagugacaauacuu

SEQ ID NO: 1488768 - RNA, 19 nt, Artificial Sequence
  Description of Artificial Sequence: Synthetic oligonucleotide
  Sense strand starting at position 2954 of SEQ ID NO: 1244439
ggcugaaucuggccuccau

SEQ ID NO: 1488769 - RNA, 19 nt, Artificial Sequence
  Description of Artificial Sequence: Synthetic oligonucleotide
  Antisense strand to SEQ ID NO: 1488768
auggaggccagauucagcc

SEQ ID NO: 1488770 - RNA, 19 nt, Artificial Sequence
  Description of Artificial Sequence: Synthetic oligonucleotide
  Sense strand starting at position 3198 of SEQ ID NO: 1244439
gugagucaauacucccaau

SEQ ID NO: 1488771 - RNA, 19 nt, Artificial Sequence
  Description of Artificial Sequence: Synthetic oligonucleotide
  Antisense strand to SEQ ID NO: 1488770
auugggaguauugacucac

SEQ ID NO: 1488772 - RNA, 19 nt, Artificial Sequence
  Description of Artificial Sequence: Synthetic oligonucleotide
  Sense strand starting at position 3243 of SEQ ID NO: 1244439
agaguccugucucucuaga

SEQ ID NO: 1488773 - RNA, 19 nt, Artificial Sequence
  Description of Artificial Sequence: Synthetic oligonucleotide
  Antisense strand to SEQ ID NO: 1488772
ucuagagagacaggacucu

SEQ ID NO: 1488774 - RNA, 19 nt, Artificial Sequence
  Description of Artificial Sequence: Synthetic oligonucleotide
  Sense strand starting at position 3259 of SEQ ID NO: 1244439
agagaacccugacacagau

SEQ ID NO: 1488775 - RNA, 19 nt, Artificial Sequence
  Description of Artificial Sequence: Synthetic oligonucleotide
  Antisense strand to SEQ ID NO: 1488774
aucugugucaggguucucu

SEQ ID NO: 1488776 - RNA, 19 nt, Artificial Sequence
  Description of Artificial Sequence: Synthetic oligonucleotide
  Sense strand starting at position 3279 of SEQ ID NO: 1244439
ucaggugaggccuggucua

SEQ ID NO: 1488777 - RNA, 19 nt, Artificial Sequence
  Description of Artificial Sequence: Synthetic oligonucleotide
  Antisense strand to SEQ ID NO: 1488776
uagaccaggccucaccuga

SEQ ID NO: 1488778 - RNA, 19 nt, Artificial Sequence
  Description of Artificial Sequence: Synthetic oligonucleotide
  Sense strand starting at position 3557 of SEQ ID NO: 1244439
ggacacugaucccuacacu

SEQ ID NO: 1488779 - RNA, 19 nt, Artificial Sequence
  Description of Artificial Sequence: Synthetic oligonucleotide
  Antisense strand to SEQ ID NO: 1488778
aguguagggaucagugucc

SEQ ID NO: 1488780 - RNA, 19 nt, Artificial Sequence
  Description of Artificial Sequence: Synthetic oligonucleotide
  Sense strand starting at position 61 of SEQ ID NO: 1244440
acaccauguucuuuaaggu

SEQ ID NO: 1488781 - RNA, 19 nt, Artificial Sequence
  Description of Artificial Sequence: Synthetic oligonucleotide
  Antisense strand to SEQ ID NO: 1488780
accuuaaagaacauggugu

SEQ ID NO: 1488782 - RNA, 19 nt, Artificial Sequence
  Description of Artificial Sequence: Synthetic oligonucleotide
  Sense strand starting at position 78 of SEQ ID NO: 1244440
gugggagccuacugauuuc

SEQ ID NO: 1488783 - RNA, 19 nt, Artificial Sequence
  Description of Artificial Sequence: Synthetic oligonucleotide
  Antisense strand to SEQ ID NO: 1488782
gaaaucaguaggcucccac

SEQ ID NO: 1488784 - RNA, 19 nt, Artificial Sequence
  Description of Artificial Sequence: Synthetic oligonucleotide
  Sense strand starting at position 196 of SEQ ID NO: 1244440
ggcuuccuauuacauagua

SEQ ID NO: 1488785 - RNA, 19 nt, Artificial Sequence
  Description of Artificial Sequence: Synthetic oligonucleotide
  Antisense strand to SEQ ID NO: 1488784
uacuauguaauaggaagcc

SEQ ID NO: 1488786 - RNA, 19 nt, Artificial Sequence
  Description of Artificial Sequence: Synthetic oligonucleotide
  Sense strand starting at position 232 of SEQ ID NO: 1244440
gcaggauguuugucgggca

SEQ ID NO: 1488787 - RNA, 19 nt, Artificial Sequence
  Description of Artificial Sequence: Synthetic oligonucleotide
  Antisense strand to SEQ ID NO: 1488786
ugcccgacaaacauccugc

SEQ ID NO: 1488788 - RNA, 19 nt, Artificial Sequence
  Description of Artificial Sequence: Synthetic oligonucleotide
  Sense strand starting at position 233 of SEQ ID NO: 1244440
caggauguuugucgggcau

SEQ ID NO: 1488789 - RNA, 19 nt, Artificial Sequence
  Description of Artificial Sequence: Synthetic oligonucleotide
  Antisense strand to SEQ ID NO: 1488788
augcccgacaaacauccug

SEQ ID NO: 1488790 - RNA, 19 nt, Artificial Sequence
  Description of Artificial Sequence: Synthetic oligonucleotide
  Sense strand starting at position 237 of SEQ ID NO: 1244440
auguuugucgggcaucuau

SEQ ID NO: 1488791 - RNA, 19 nt, Artificial Sequence
  Description of Artificial Sequence: Synthetic oligonucleotide
  Antisense strand to SEQ ID NO: 1488790
auagaugcccgacaaacau

SEQ ID NO: 1488792 - RNA, 19 nt, Artificial Sequence
  Description of Artificial Sequence: Synthetic oligonucleotide
  Sense strand starting at position 252 of SEQ ID NO: 1244440
cuauacugauggucuccaa

SEQ ID NO: 1488793 - RNA, 19 nt, Artificial Sequence
  Description of Artificial Sequence: Synthetic oligonucleotide
  Antisense strand to SEQ ID NO: 1488792
uuggagaccaucaguauag

SEQ ID NO: 1488794 - RNA, 19 nt, Artificial Sequence
  Description of Artificial Sequence: Synthetic oligonucleotide
  Sense strand starting at position 306 of SEQ ID NO: 1244440
gggaguggaguaugauuca

SEQ ID NO: 1488795 - RNA, 19 nt, Artificial Sequence
  Description of Artificial Sequence: Synthetic oligonucleotide
  Antisense strand to SEQ ID NO: 1488794
ugaaucauacuccacuccc

SEQ ID NO: 1488796 - RNA, 19 nt, Artificial Sequence
  Description of Artificial Sequence: Synthetic oligonucleotide
  Sense strand starting at position 336 of SEQ ID NO: 1244440
agugaagaguaauggaaua

SEQ ID NO: 1488797 - RNA, 19 nt, Artificial Sequence
  Description of Artificial Sequence: Synthetic oligonucleotide
  Antisense strand to SEQ ID NO: 1488796
uauuccauuacucuucacu

SEQ ID NO: 1488798 - RNA, 19 nt, Artificial Sequence
  Description of Artificial Sequence: Synthetic oligonucleotide
  Sense strand starting at position 363 of SEQ ID NO: 1244440
ggugguauguuauaacuaa

SEQ ID NO: 1488799 - RNA, 19 nt, Artificial Sequence
  Description of Artificial Sequence: Synthetic oligonucleotide
  Antisense strand to SEQ ID NO: 1488798
uuaguuauaacauaccacc

SEQ ID NO: 1488800 - RNA, 19 nt, Artificial Sequence
  Description of Artificial Sequence: Synthetic oligonucleotide
  Sense strand starting at position 470 of SEQ ID NO: 1244440
gcgcgaucucgacucugca

SEQ ID NO: 1488801 - RNA, 19 nt, Artificial Sequence
  Description of Artificial Sequence: Synthetic oligonucleotide
  Antisense strand to SEQ ID NO: 1488800
ugcagagucgagaucgcgc

SEQ ID NO: 1488802 - RNA, 19 nt, Artificial Sequence
  Description of Artificial Sequence: Synthetic oligonucleotide
  Sense strand starting at position 471 of SEQ ID NO: 1244440
cgcgaucucgacucugcaa

SEQ ID NO: 1488803 - RNA, 19 nt, Artificial Sequence
  Description of Artificial Sequence: Synthetic oligonucleotide
  Antisense strand to SEQ ID NO: 1488802
uugcagagucgagaucgcg

SEQ ID NO: 1488804 - RNA, 19 nt, Artificial Sequence
  Description of Artificial Sequence: Synthetic oligonucleotide
  Sense strand starting at position 736 of SEQ ID NO: 1244440
caaccaucacgguagcaau

SEQ ID NO: 1488805 - RNA, 19 nt, Artificial Sequence
  Description of Artificial Sequence: Synthetic oligonucleotide
  Antisense strand to SEQ ID NO: 1488804
auugcuaccgugaugguug

SEQ ID NO: 1488806 - RNA, 19 nt, Artificial Sequence
  Description of Artificial Sequence: Synthetic oligonucleotide
  Sense strand starting at position 775 of SEQ ID NO: 1244440
ccgcaaagcuaggaagaua

SEQ ID NO: 1488807 - RNA, 19 nt, Artificial Sequence
  Description of Artificial Sequence: Synthetic oligonucleotide
  Antisense strand to SEQ ID NO: 1488806
uaucuuccuagcuuugcgg

SEQ ID NO: 1488808 - RNA, 19 nt, Artificial Sequence
  Description of Artificial Sequence: Synthetic oligonucleotide
  Sense strand starting at position 861 of SEQ ID NO: 1244440
ugcacugucacuugaggga

SEQ ID NO: 1488809 - RNA, 19 nt, Artificial Sequence
  Description of Artificial Sequence: Synthetic oligonucleotide
  Antisense strand to SEQ ID NO: 1488808
ucccucaagugacagugca

SEQ ID NO: 1488810 - RNA, 19 nt, Artificial Sequence
  Description of Artificial Sequence: Synthetic oligonucleotide
  Sense strand starting at position 891 of SEQ ID NO: 1244440
ggcggaucaucuuggaaac

SEQ ID NO: 1488811 - RNA, 19 nt, Artificial Sequence
  Description of Artificial Sequence: Synthetic oligonucleotide
  Antisense strand to SEQ ID NO: 1488810
guuuccaagaugauccgcc

SEQ ID NO: 1488812 - RNA, 19 nt, Artificial Sequence
  Description of Artificial Sequence: Synthetic oligonucleotide
  Sense strand starting at position 946 of SEQ ID NO: 1244440
cgaggcugccugggauuaa

SEQ ID NO: 1488813 - RNA, 19 nt, Artificial Sequence
  Description of Artificial Sequence: Synthetic oligonucleotide
  Antisense strand to SEQ ID NO: 1488812
uuaaucccaggcagccucg

SEQ ID NO: 1488814 - RNA, 19 nt, Artificial Sequence
  Description of Artificial Sequence: Synthetic oligonucleotide
  Sense strand starting at position 950 of SEQ ID NO: 1244440
gcugccugggauuaacauu

SEQ ID NO: 1488815 - RNA, 19 nt, Artificial Sequence
  Description of Artificial Sequence: Synthetic oligonucleotide
  Antisense strand to SEQ ID NO: 1488814
aauguuaaucccaggcagc

SEQ ID NO: 1488816 - RNA, 19 nt, Artificial Sequence
  Description of Artificial Sequence: Synthetic oligonucleotide
  Sense strand starting at position 958 of SEQ ID NO: 1244440
ggauuaacauucucguucu

SEQ ID NO: 1488817 - RNA, 19 nt, Artificial Sequence
  Description of Artificial Sequence: Synthetic oligonucleotide
  Antisense strand to SEQ ID NO: 1488816
agaacgagaauguuaaucc

SEQ ID NO: 1488818 - RNA, 19 nt, Artificial Sequence
  Description of Artificial Sequence: Synthetic oligonucleotide
  Sense strand starting at position 2355 of SEQ ID NO: 1244440
uggccuuaguuccuguuaa

SEQ ID NO: 1488819 - RNA, 19 nt, Artificial Sequence
  Description of Artificial Sequence: Synthetic oligonucleotide
  Antisense strand to SEQ ID NO: 1488818
uuaacaggaacuaaggcca

SEQ ID NO: 1488820 - RNA, 19 nt, Artificial Sequence
  Description of Artificial Sequence: Synthetic oligonucleotide
  Sense strand starting at position 2356 of SEQ ID NO: 1244440
ggccuuaguuccuguuaag

SEQ ID NO: 1488821 - RNA, 19 nt, Artificial Sequence
  Description of Artificial Sequence: Synthetic oligonucleotide
  Antisense strand to SEQ ID NO: 1488820
cuuaacaggaacuaaggcc

SEQ ID NO: 1488822 - RNA, 19 nt, Artificial Sequence
  Description of Artificial Sequence: Synthetic oligonucleotide
  Sense strand starting at position 2359 of SEQ ID NO: 1244440
cuuaguuccuguuaaguag

SEQ ID NO: 1488823 - RNA, 19 nt, Artificial Sequence
  Description of Artificial Sequence: Synthetic oligonucleotide
  Antisense strand to SEQ ID NO: 1488822
cuacuuaacaggaacuaag

SEQ ID NO: 1488824 - RNA, 19 nt, Artificial Sequence
  Description of Artificial Sequence: Synthetic oligonucleotide
  Sense strand starting at position 3231 of SEQ ID NO: 1244440
uggccucuuuaauggugaa

SEQ ID NO: 1488825 - RNA, 19 nt, Artificial Sequence
  Description of Artificial Sequence: Synthetic oligonucleotide
  Antisense strand to SEQ ID NO: 1488824
uucaccauuaaagaggcca

SEQ ID NO: 1488826 - RNA, 19 nt, Artificial Sequence
  Description of Artificial Sequence: Synthetic oligonucleotide
  Sense strand starting at position 3234 of SEQ ID NO: 1244440
ccucuuuaauggugaacua

SEQ ID NO: 1488827 - RNA, 19 nt, Artificial Sequence
  Description of Artificial Sequence: Synthetic oligonucleotide
  Antisense strand to SEQ ID NO: 1488826
uaguucaccauuaaagagg

SEQ ID NO: 1488828 - RNA, 19 nt, Artificial Sequence
  Description of Artificial Sequence: Synthetic oligonucleotide
  Sense strand starting at position 3235 of SEQ ID NO: 1244440
cucuuuaauggugaacuau

SEQ ID NO: 1488829 - RNA, 19 nt, Artificial Sequence
  Description of Artificial Sequence: Synthetic oligonucleotide
  Antisense strand to SEQ ID NO: 1488828
auaguucaccauuaaagag

SEQ ID NO: 1488830 - RNA, 19 nt, Artificial Sequence
  Description of Artificial Sequence: Synthetic oligonucleotide
  Sense strand starting at position 3243 of SEQ ID NO: 1244440
uggugaacuaucuguggcu

SEQ ID NO: 1488831 - RNA, 19 nt, Artificial Sequence
  Description of Artificial Sequence: Synthetic oligonucleotide
  Antisense strand to SEQ ID NO: 1488830
agccacagauaguucacca

SEQ ID NO: 1488832 - RNA, 19 nt, Artificial Sequence
  Description of Artificial Sequence: Synthetic oligonucleotide
  Sense strand starting at position 3245 of SEQ ID NO: 1244440
gugaacuaucuguggcucu

SEQ ID NO: 1488833 - RNA, 19 nt, Artificial Sequence
  Description of Artificial Sequence: Synthetic oligonucleotide
  Antisense strand to SEQ ID NO: 1488832
agagccacagauaguucac

SEQ ID NO: 1488834 - RNA, 19 nt, Artificial Sequence
  Description of Artificial Sequence: Synthetic oligonucleotide
  Sense strand starting at position 3260 of SEQ ID NO: 1244440
cucucucaguucuguagau

SEQ ID NO: 1488835 - RNA, 19 nt, Artificial Sequence
  Description of Artificial Sequence: Synthetic oligonucleotide
  Antisense strand to SEQ ID NO: 1488834
aucuacagaacugagagag

SEQ ID NO: 1488836 - RNA, 19 nt, Artificial Sequence
  Description of Artificial Sequence: Synthetic oligonucleotide
  Sense strand starting at position 3261 of SEQ ID NO: 1244440
ucucucaguucuguagaua

SEQ ID NO: 1488837 - RNA, 19 nt, Artificial Sequence
  Description of Artificial Sequence: Synthetic oligonucleotide
  Antisense strand to SEQ ID NO: 1488836
uaucuacagaacugagaga

SEQ ID NO: 1488838 - RNA, 19 nt, Artificial Sequence
  Description of Artificial Sequence: Synthetic oligonucleotide
  Sense strand starting at position 3262 of SEQ ID NO: 1244440
cucucaguucuguagauac

SEQ ID NO: 1488839 - RNA, 19 nt, Artificial Sequence
  Description of Artificial Sequence: Synthetic oligonucleotide
  Antisense strand to SEQ ID NO: 1488838
guaucuacagaacugagag

SEQ ID NO: 1488840 - RNA, 19 nt, Artificial Sequence
  Description of Artificial Sequence: Synthetic oligonucleotide
  Sense strand starting at position 3273 of SEQ ID NO: 1244440
guagauaccuugcaaauug

SEQ ID NO: 1488841 - RNA, 19 nt, Artificial Sequence
  Description of Artificial Sequence: Synthetic oligonucleotide
  Antisense strand to SEQ ID NO: 1488840
caauuugcaagguaucuac

SEQ ID NO: 1488842 - RNA, 19 nt, Artificial Sequence
  Description of Artificial Sequence: Synthetic oligonucleotide
  Sense strand starting at position 3284 of SEQ ID NO: 1244440
gcaaauugaggagguauau

SEQ ID NO: 1488843 - RNA, 19 nt, Artificial Sequence
  Description of Artificial Sequence: Synthetic oligonucleotide
  Antisense strand to SEQ ID NO: 1488842
auauaccuccucaauuugc

SEQ ID NO: 1488844 - RNA, 19 nt, Artificial Sequence
  Description of Artificial Sequence: Synthetic oligonucleotide
  Sense strand starting at position 3687 of SEQ ID NO: 1244440
ggugacgugugccuaugau

SEQ ID NO: 1488845 - RNA, 19 nt, Artificial Sequence
  Description of Artificial Sequence: Synthetic oligonucleotide
  Antisense strand to SEQ ID NO: 1488844
aucauaggcacacgucacc

SEQ ID NO: 1488846 - RNA, 19 nt, Artificial Sequence
  Description of Artificial Sequence: Synthetic oligonucleotide
  Sense strand starting at position 3912 of SEQ ID NO: 1244440
auagaaauuucucagauag

SEQ ID NO: 1488847 - RNA, 19 nt, Artificial Sequence
  Description of Artificial Sequence: Synthetic oligonucleotide
  Antisense strand to SEQ ID NO: 1488846
cuaucugagaaauuucuau

SEQ ID NO: 1488848 - RNA, 19 nt, Artificial Sequence
  Description of Artificial Sequence: Synthetic oligonucleotide
  Sense strand starting at position 3950 of SEQ ID NO: 1244440
cugaauguaguauguugua

SEQ ID NO: 1488849 - RNA, 19 nt, Artificial Sequence
  Description of Artificial Sequence: Synthetic oligonucleotide
  Antisense strand to SEQ ID NO: 1488848
uacaacauacuacauucag

SEQ ID NO: 1488850 - RNA, 19 nt, Artificial Sequence
  Description of Artificial Sequence: Synthetic oligonucleotide
  Sense strand starting at position 3953 of SEQ ID NO: 1244440
aauguaguauguuguaaug

SEQ ID NO: 1488851 - RNA, 19 nt, Artificial Sequence
  Description of Artificial Sequence: Synthetic oligonucleotide
  Antisense strand to SEQ ID NO: 1488850
cauuacaacauacuacauu

SEQ ID NO: 1488852 - RNA, 19 nt, Artificial Sequence
  Description of Artificial Sequence: Synthetic oligonucleotide
  Sense strand starting at position 3955 of SEQ ID NO: 1244440
uguaguauguuguaaugga

SEQ ID NO: 1488853 - RNA, 19 nt, Artificial Sequence
  Description of Artificial Sequence: Synthetic oligonucleotide
  Antisense strand to SEQ ID NO: 1488852
uccauuacaacauacuaca

SEQ ID NO: 1488854 - RNA, 19 nt, Artificial Sequence
  Description of Artificial Sequence: Synthetic oligonucleotide
  Sense strand starting at position 3963 of SEQ ID NO: 1244440
guuguaauggaccaguacu

SEQ ID NO: 1488855 - RNA, 19 nt, Artificial Sequence
  Description of Artificial Sequence: Synthetic oligonucleotide
  Antisense strand to SEQ ID NO: 1488854
aguacugguccauuacaac

SEQ ID NO: 1488856 - RNA, 19 nt, Artificial Sequence
  Description of Artificial Sequence: Synthetic oligonucleotide
  Sense strand starting at position 3973 of SEQ ID NO: 1244440
accaguacuguccagcaga

SEQ ID NO: 1488857 - RNA, 19 nt, Artificial Sequence
  Description of Artificial Sequence: Synthetic oligonucleotide
  Antisense strand to SEQ ID NO: 1488856
ucugcuggacaguacuggu

SEQ ID NO: 1488858 - RNA, 19 nt, Artificial Sequence
  Description of Artificial Sequence: Synthetic oligonucleotide
  Sense strand starting at position 3976 of SEQ ID NO: 1244440
aguacuguccagcagaaac

SEQ ID NO: 1488859 - RNA, 19 nt, Artificial Sequence
  Description of Artificial Sequence: Synthetic oligonucleotide
  Antisense strand to SEQ ID NO: 1488858
guuucugcuggacaguacu

SEQ ID NO: 1488860 - RNA, 19 nt, Artificial Sequence
  Description of Artificial Sequence: Synthetic oligonucleotide
  Sense strand starting at position 266 of SEQ ID NO: 1244441
agucgacguuuccuaaguu

SEQ ID NO: 1488861 - RNA, 19 nt, Artificial Sequence
  Description of Artificial Sequence: Synthetic oligonucleotide
  Antisense strand to SEQ ID NO: 1488860
aacuuaggaaacgucgacu

SEQ ID NO: 1488862 - RNA, 19 nt, Artificial Sequence
  Description of Artificial Sequence: Synthetic oligonucleotide
  Sense strand starting at position 267 of SEQ ID NO: 1244441
gucgacguuuccuaaguuu

SEQ ID NO: 1488863 - RNA, 19 nt, Artificial Sequence
  Description of Artificial Sequence: Synthetic oligonucleotide
  Antisense strand to SEQ ID NO: 1488862
aaacuuaggaaacgucgac

SEQ ID NO: 1488864 - RNA, 19 nt, Artificial Sequence
  Description of Artificial Sequence: Synthetic oligonucleotide
  Sense strand starting at position 278 of SEQ ID NO: 1244441
cuaaguuucuccugggcca

SEQ ID NO: 1488865 - RNA, 19 nt, Artificial Sequence
  Description of Artificial Sequence: Synthetic oligonucleotide
  Antisense strand to SEQ ID NO: 1488864
uggcccaggagaaacuuag

SEQ ID NO: 1488866 - RNA, 19 nt, Artificial Sequence
  Description of Artificial Sequence: Synthetic oligonucleotide
  Sense strand starting at position 279 of SEQ ID NO: 1244441
uaaguuucuccugggccau

SEQ ID NO: 1488867 - RNA, 19 nt, Artificial Sequence
  Description of Artificial Sequence: Synthetic oligonucleotide
  Antisense strand to SEQ ID NO: 1488866
auggcccaggagaaacuua

SEQ ID NO: 1488868 - RNA, 19 nt, Artificial Sequence
  Description of Artificial Sequence: Synthetic oligonucleotide
  Sense strand starting at position 311 of SEQ ID NO: 1244441
ucaucuccagguugggaaa

SEQ ID NO: 1488869 - RNA, 19 nt, Artificial Sequence
  Description of Artificial Sequence: Synthetic oligonucleotide
  Antisense strand to SEQ ID NO: 1488868
uuucccaaccuggagauga

SEQ ID NO: 1488870 - RNA, 19 nt, Artificial Sequence
  Description of Artificial Sequence: Synthetic oligonucleotide
  Sense strand starting at position 314 of SEQ ID NO: 1244441
ucuccagguugggaaacau

SEQ ID NO: 1488871 - RNA, 19 nt, Artificial Sequence
  Description of Artificial Sequence: Synthetic oligonucleotide
  Antisense strand to SEQ ID NO: 1488870
auguuucccaaccuggaga

SEQ ID NO: 1488872 - RNA, 19 nt, Artificial Sequence
  Description of Artificial Sequence: Synthetic oligonucleotide
  Sense strand starting at position 378 of SEQ ID NO: 1244441
agagaacagccuugcaaau

SEQ ID NO: 1488873 - RNA, 19 nt, Artificial Sequence
  Description of Artificial Sequence: Synthetic oligonucleotide
  Antisense strand to SEQ ID NO: 1488872
auuugcaaggcuguucucu

SEQ ID NO: 1488874 - RNA, 19 nt, Artificial Sequence
  Description of Artificial Sequence: Synthetic oligonucleotide
  Sense strand starting at position 417 of SEQ ID NO: 1244441
gacccauuuguuugugugu

SEQ ID NO: 1488875 - RNA, 19 nt, Artificial Sequence
  Description of Artificial Sequence: Synthetic oligonucleotide
  Antisense strand to SEQ ID NO: 1488874
acacacaaacaaauggguc

SEQ ID NO: 1488876 - RNA, 19 nt, Artificial Sequence
  Description of Artificial Sequence: Synthetic oligonucleotide
  Sense strand starting at position 596 of SEQ ID NO: 1244441
ggagaccuauucuagacaa

SEQ ID NO: 1488877 - RNA, 19 nt, Artificial Sequence
  Description of Artificial Sequence: Synthetic oligonucleotide
  Antisense strand to SEQ ID NO: 1488876
uugucuagaauaggucucc

SEQ ID NO: 1488878 - RNA, 19 nt, Artificial Sequence
  Description of Artificial Sequence: Synthetic oligonucleotide
  Sense strand starting at position 735 of SEQ ID NO: 1244441
guccaauggucaguuaguu

SEQ ID NO: 1488879 - RNA, 19 nt, Artificial Sequence
  Description of Artificial Sequence: Synthetic oligonucleotide
  Antisense strand to SEQ ID NO: 1488878
aacuaacugaccauuggac

SEQ ID NO: 1488880 - RNA, 19 nt, Artificial Sequence
  Description of Artificial Sequence: Synthetic oligonucleotide
  Sense strand starting at position 881 of SEQ ID NO: 1244441
gacgcagucucgcucuaua

SEQ ID NO: 1488881 - RNA, 19 nt, Artificial Sequence
  Description of Artificial Sequence: Synthetic oligonucleotide
  Antisense strand to SEQ ID NO: 1488880
uauagagcgagacugcguc

SEQ ID NO: 1488882 - RNA, 19 nt, Artificial Sequence
  Description of Artificial Sequence: Synthetic oligonucleotide
  Sense strand starting at position 1257 of SEQ ID NO: 1244441
ccggcaaguuacuguguuu

SEQ ID NO: 1488883 - RNA, 19 nt, Artificial Sequence
  Description of Artificial Sequence: Synthetic oligonucleotide
  Antisense strand to SEQ ID NO: 1488882
aaacacaguaacuugccgg

SEQ ID NO: 1488884 - RNA, 19 nt, Artificial Sequence
  Description of Artificial Sequence: Synthetic oligonucleotide
  Sense strand starting at position 1300 of SEQ ID NO: 1244441
ggagggagcucuguaacgu

SEQ ID NO: 1488885 - RNA, 19 nt, Artificial Sequence
  Description of Artificial Sequence: Synthetic oligonucleotide
  Antisense strand to SEQ ID NO: 1488884
acguuacagagcucccucc

SEQ ID NO: 1488886 - RNA, 19 nt, Artificial Sequence
  Description of Artificial Sequence: Synthetic oligonucleotide
  Sense strand starting at position 1341 of SEQ ID NO: 1244441
cuuagugacucaugacaag

SEQ ID NO: 1488887 - RNA, 19 nt, Artificial Sequence
  Description of Artificial Sequence: Synthetic oligonucleotide
  Antisense strand to SEQ ID NO: 1488886
cuugucaugagucacuaag

SEQ ID NO: 1488888 - RNA, 19 nt, Artificial Sequence
  Description of Artificial Sequence: Synthetic oligonucleotide
  Sense strand starting at position 1399 of SEQ ID NO: 1244441
gagggagauuaggauaaga

SEQ ID NO: 1488889 - RNA, 19 nt, Artificial Sequence
  Description of Artificial Sequence: Synthetic oligonucleotide
  Antisense strand to SEQ ID NO: 1488888
ucuuauccuaaucucccuc

SEQ ID NO: 1488890 - RNA, 19 nt, Artificial Sequence
  Description of Artificial Sequence: Synthetic oligonucleotide
  Sense strand starting at position 1450 of SEQ ID NO: 1244441
cugggagucccuggaauua

SEQ ID NO: 1488891 - RNA, 19 nt, Artificial Sequence
  Description of Artificial Sequence: Synthetic oligonucleotide
  Antisense strand to SEQ ID NO: 1488890
uaauuccagggacucccag

SEQ ID NO: 1488892 - RNA, 19 nt, Artificial Sequence
  Description of Artificial Sequence: Synthetic oligonucleotide
  Sense strand starting at position 1513 of SEQ ID NO: 1244441
gcgguuucucuucgccaca

SEQ ID NO: 1488893 - RNA, 19 nt, Artificial Sequence
  Description of Artificial Sequence: Synthetic oligonucleotide
  Antisense strand to SEQ ID NO: 1488892
uguggcgaagagaaaccgc

SEQ ID NO: 1488894 - RNA, 19 nt, Artificial Sequence
  Description of Artificial Sequence: Synthetic oligonucleotide
  Sense strand starting at position 1515 of SEQ ID NO: 1244441
gguuucucuucgccacagu

SEQ ID NO: 1488895 - RNA, 19 nt, Artificial Sequence
  Description of Artificial Sequence: Synthetic oligonucleotide
  Antisense strand to SEQ ID NO: 1488894
acuguggcgaagagaaacc

SEQ ID NO: 1488896 - RNA, 19 nt, Artificial Sequence
  Description of Artificial Sequence: Synthetic oligonucleotide
  Sense strand starting at position 1531 of SEQ ID NO: 1244441
aguccauucucccugcuua

SEQ ID NO: 1488897 - RNA, 19 nt, Artificial Sequence
  Description of Artificial Sequence: Synthetic oligonucleotide
  Antisense strand to SEQ ID NO: 1488896
uaagcagggagaauggacu

SEQ ID NO: 1488898 - RNA, 19 nt, Artificial Sequence
  Description of Artificial Sequence: Synthetic oligonucleotide
  Sense strand starting at position 1747 of SEQ ID NO: 1244441
cggcaaaucugcugccuca

SEQ ID NO: 1488899 - RNA, 19 nt, Artificial Sequence
  Description of Artificial Sequence: Synthetic oligonucleotide
  Antisense strand to SEQ ID NO: 1488898
ugaggcagcagauuugccg

SEQ ID NO: 1488900 - RNA, 19 nt, Artificial Sequence
  Description of Artificial Sequence: Synthetic oligonucleotide
  Sense strand starting at position 1981 of SEQ ID NO: 1244441
cccggugccucgcucaaua

SEQ ID NO: 1488901 - RNA, 19 nt, Artificial Sequence
  Description of Artificial Sequence: Synthetic oligonucleotide
  Antisense strand to SEQ ID NO: 1488900
uauugagcgaggcaccggg

SEQ ID NO: 1488902 - RNA, 19 nt, Artificial Sequence
  Description of Artificial Sequence: Synthetic oligonucleotide
  Sense strand starting at position 2728 of SEQ ID NO: 1244441
cggagaaucucuugaagcg

SEQ ID NO: 1488903 - RNA, 19 nt, Artificial Sequence
  Description of Artificial Sequence: Synthetic oligonucleotide
  Antisense strand to SEQ ID NO: 1488902
cgcuucaagagauucuccg

SEQ ID NO: 1488904 - RNA, 19 nt, Artificial Sequence
  Description of Artificial Sequence: Synthetic oligonucleotide
  Sense strand starting at position 2758 of SEQ ID NO: 1244441
guuagaaugaacugaguug

SEQ ID NO: 1488905 - RNA, 19 nt, Artificial Sequence
  Description of Artificial Sequence: Synthetic oligonucleotide
  Antisense strand to SEQ ID NO: 1488904
caacucaguucauucuaac

SEQ ID NO: 1488906 - RNA, 19 nt, Artificial Sequence
  Description of Artificial Sequence: Synthetic oligonucleotide
  Sense strand starting at position 2868 of SEQ ID NO: 1244441
ggaguuggauaccaggaaa

SEQ ID NO: 1488907 - RNA, 19 nt, Artificial Sequence
  Description of Artificial Sequence: Synthetic oligonucleotide
  Antisense strand to SEQ ID NO: 1488906
uuuccugguauccaacucc

SEQ ID NO: 1488908 - RNA, 19 nt, Artificial Sequence
  Description of Artificial Sequence: Synthetic oligonucleotide
  Sense strand starting at position 2920 of SEQ ID NO: 1244441
ucacaauuacugugacagu

SEQ ID NO: 1488909 - RNA, 19 nt, Artificial Sequence
  Description of Artificial Sequence: Synthetic oligonucleotide
  Antisense strand to SEQ ID NO: 1488908
acugucacaguaauuguga

SEQ ID NO: 1488910 - RNA, 19 nt, Artificial Sequence
  Description of Artificial Sequence: Synthetic oligonucleotide
  Sense strand starting at position 2990 of SEQ ID NO: 1244441
guauuaguuugcucagggu

SEQ ID NO: 1488911 - RNA, 19 nt, Artificial Sequence
  Description of Artificial Sequence: Synthetic oligonucleotide
  Antisense strand to SEQ ID NO: 1488910
acccugagcaaacuaauac

SEQ ID NO: 1488912 - RNA, 19 nt, Artificial Sequence
  Description of Artificial Sequence: Synthetic oligonucleotide
  Sense strand starting at position 3143 of SEQ ID NO: 1244441
aaauuaguguccuugagaa

SEQ ID NO: 1488913 - RNA, 19 nt, Artificial Sequence
  Description of Artificial Sequence: Synthetic oligonucleotide
  Antisense strand to SEQ ID NO: 1488912
uucucaaggacacuaauuu

SEQ ID NO: 1488914 - RNA, 19 nt, Artificial Sequence
  Description of Artificial Sequence: Synthetic oligonucleotide
  Sense strand starting at position 3145 of SEQ ID NO: 1244441
auuaguguccuugagaauu

SEQ ID NO: 1488915 - RNA, 19 nt, Artificial Sequence
  Description of Artificial Sequence: Synthetic oligonucleotide
  Antisense strand to SEQ ID NO: 1488914
aauucucaaggacacuaau

SEQ ID NO: 1488916 - RNA, 19 nt, Artificial Sequence
  Description of Artificial Sequence: Synthetic oligonucleotide
  Sense strand starting at position 3552 of SEQ ID NO: 1244441
uugggucagaggugaaaug

SEQ ID NO: 1488917 - RNA, 19 nt, Artificial Sequence
  Description of Artificial Sequence: Synthetic oligonucleotide
  Antisense strand to SEQ ID NO: 1488916
cauuucaccucugacccaa

SEQ ID NO: 1488918 - RNA, 19 nt, Artificial Sequence
  Description of Artificial Sequence: Synthetic oligonucleotide
  Sense strand starting at position 3563 of SEQ ID NO: 1244441
gugaaaugauagggaguca

SEQ ID NO: 1488919 - RNA, 19 nt, Artificial Sequence
  Description of Artificial Sequence: Synthetic oligonucleotide
  Antisense strand to SEQ ID NO: 1488918
ugacucccuaucauuucac

SEQ ID NO: 1488920 - RNA, 19 nt, Artificial Sequence
  Description of Artificial Sequence: Synthetic oligonucleotide
  Sense strand starting at position 3978 of SEQ ID NO: 1244441
gcaagauggguucaguuaa

SEQ ID NO: 1488921 - RNA, 19 nt, Artificial Sequence
  Description of Artificial Sequence: Synthetic oligonucleotide
  Antisense strand to SEQ ID NO: 1488920
uuaacugaacccaucuugc

SEQ ID NO: 1488922 - RNA, 19 nt, Artificial Sequence
  Description of Artificial Sequence: Synthetic oligonucleotide
  Sense strand starting at position 15 of SEQ ID NO: 1244442
ggccuuucuccggguguuu

SEQ ID NO: 1488923 - RNA, 19 nt, Artificial Sequence
  Description of Artificial Sequence: Synthetic oligonucleotide
  Antisense strand to SEQ ID NO: 1488922
aaacacccggagaaaggcc

SEQ ID NO: 1488924 - RNA, 19 nt, Artificial Sequence
  Description of Artificial Sequence: Synthetic oligonucleotide
  Sense strand starting at position 74 of SEQ ID NO: 1244442
ugagguccuuccuucugau

SEQ ID NO: 1488925 - RNA, 19 nt, Artificial Sequence
  Description of Artificial Sequence: Synthetic oligonucleotide
  Antisense strand to SEQ ID NO: 1488924
aucagaaggaaggaccuca

SEQ ID NO: 1488926 - RNA, 19 nt, Artificial Sequence
  Description of Artificial Sequence: Synthetic oligonucleotide
  Sense strand starting at position 118 of SEQ ID NO: 1244442
uuaagauggcacuguuuaa

SEQ ID NO: 1488927 - RNA, 19 nt, Artificial Sequence
  Description of Artificial Sequence: Synthetic oligonucleotide
  Antisense strand to SEQ ID NO: 1488926
uuaaacagugccaucuuaa

SEQ ID NO: 1488928 - RNA, 19 nt, Artificial Sequence
  Description of Artificial Sequence: Synthetic oligonucleotide
  Sense strand starting at position 122 of SEQ ID NO: 1244442
gauggcacuguuuaaaucu

SEQ ID NO: 1488929 - RNA, 19 nt, Artificial Sequence
  Description of Artificial Sequence: Synthetic oligonucleotide
  Antisense strand to SEQ ID NO: 1488928
agauuuaaacagugccauc

SEQ ID NO: 1488930 - RNA, 19 nt, Artificial Sequence
  Description of Artificial Sequence: Synthetic oligonucleotide
  Sense strand starting at position 132 of SEQ ID NO: 1244442
uuuaaaucuguccggcaca

SEQ ID NO: 1488931 - RNA, 19 nt, Artificial Sequence
  Description of Artificial Sequence: Synthetic oligonucleotide
  Antisense strand to SEQ ID NO: 1488930
ugugccggacagauuuaaa

SEQ ID NO: 1488932 - RNA, 19 nt, Artificial Sequence
  Description of Artificial Sequence: Synthetic oligonucleotide
  Sense strand starting at position 133 of SEQ ID NO: 1244442
uuaaaucuguccggcacau

SEQ ID NO: 1488933 - RNA, 19 nt, Artificial Sequence
  Description of Artificial Sequence: Synthetic oligonucleotide
  Antisense strand to SEQ ID NO: 1488932
augugccggacagauuuaa

SEQ ID NO: 1488934 - RNA, 19 nt, Artificial Sequence
  Description of Artificial Sequence: Synthetic oligonucleotide
  Sense strand starting at position 222 of SEQ ID NO: 1244442
uuguuugauuucugcgacu

SEQ ID NO: 1488935 - RNA, 19 nt, Artificial Sequence
  Description of Artificial Sequence: Synthetic oligonucleotide
  Antisense strand to SEQ ID NO: 1488934
agucgcagaaaucaaacaa

SEQ ID NO: 1488936 - RNA, 19 nt, Artificial Sequence
  Description of Artificial Sequence: Synthetic oligonucleotide
  Sense strand starting at position 224 of SEQ ID NO: 1244442
guuugauuucugcgacuuc

SEQ ID NO: 1488937 - RNA, 19 nt, Artificial Sequence
  Description of Artificial Sequence: Synthetic oligonucleotide
  Antisense strand to SEQ ID NO: 1488936
gaagucgcagaaaucaaac

SEQ ID NO: 1488938 - RNA, 19 nt, Artificial Sequence
  Description of Artificial Sequence: Synthetic oligonucleotide
  Sense strand starting at position 296 of SEQ ID NO: 1244442
cugaguuggugacugagaa

SEQ ID NO: 1488939 - RNA, 19 nt, Artificial Sequence
  Description of Artificial Sequence: Synthetic oligonucleotide
  Antisense strand to SEQ ID NO: 1488938
uucucagucaccaacucag

SEQ ID NO: 1488940 - RNA, 19 nt, Artificial Sequence
  Description of Artificial Sequence: Synthetic oligonucleotide
  Sense strand starting at position 297 of SEQ ID NO: 1244442
ugaguuggugacugagaaa

SEQ ID NO: 1488941 - RNA, 19 nt, Artificial Sequence
  Description of Artificial Sequence: Synthetic oligonucleotide
  Antisense strand to SEQ ID NO: 1488940
uuucucagucaccaacuca

SEQ ID NO: 1488942 - RNA, 19 nt, Artificial Sequence
  Description of Artificial Sequence: Synthetic oligonucleotide
  Sense strand starting at position 309 of SEQ ID NO: 1244442
ugagaaaccucagggauuu

SEQ ID NO: 1488943 - RNA, 19 nt, Artificial Sequence
  Description of Artificial Sequence: Synthetic oligonucleotide
  Antisense strand to SEQ ID NO: 1488942
aaaucccugagguuucuca

SEQ ID NO: 1488944 - RNA, 19 nt, Artificial Sequence
  Description of Artificial Sequence: Synthetic oligonucleotide
  Sense strand starting at position 339 of SEQ ID NO: 1244442
ggacuugggucacucagaa

SEQ ID NO: 1488945 - RNA, 19 nt, Artificial Sequence
  Description of Artificial Sequence: Synthetic oligonucleotide
  Antisense strand to SEQ ID NO: 1488944
uucugagugacccaagucc

SEQ ID NO: 1488946 - RNA, 19 nt, Artificial Sequence
  Description of Artificial Sequence: Synthetic oligonucleotide
  Sense strand starting at position 403 of SEQ ID NO: 1244442
uggagauccugagaggaca

SEQ ID NO: 1488947 - RNA, 19 nt, Artificial Sequence
  Description of Artificial Sequence: Synthetic oligonucleotide
  Antisense strand to SEQ ID NO: 1488946
uguccucucaggaucucca

SEQ ID NO: 1488948 - RNA, 19 nt, Artificial Sequence
  Description of Artificial Sequence: Synthetic oligonucleotide
  Sense strand starting at position 438 of SEQ ID NO: 1244442
cgggaagaaaccugcuuaa

SEQ ID NO: 1488949 - RNA, 19 nt, Artificial Sequence
  Description of Artificial Sequence: Synthetic oligonucleotide
  Antisense strand to SEQ ID NO: 1488948
uuaagcagguuucuucccg

SEQ ID NO: 1488950 - RNA, 19 nt, Artificial Sequence
  Description of Artificial Sequence: Synthetic oligonucleotide
  Sense strand starting at position 583 of SEQ ID NO: 1244442
gugcaaaguuacugaggau

SEQ ID NO: 1488951 - RNA, 19 nt, Artificial Sequence
  Description of Artificial Sequence: Synthetic oligonucleotide
  Antisense strand to SEQ ID NO: 1488950
auccucaguaacuuugcac

SEQ ID NO: 1488952 - RNA, 19 nt, Artificial Sequence
  Description of Artificial Sequence: Synthetic oligonucleotide
  Sense strand starting at position 584 of SEQ ID NO: 1244442
ugcaaaguuacugaggauu

SEQ ID NO: 1488953 - RNA, 19 nt, Artificial Sequence
  Description of Artificial Sequence: Synthetic oligonucleotide
  Antisense strand to SEQ ID NO: 1488952
aauccucaguaacuuugca

SEQ ID NO: 1488954 - RNA, 19 nt, Artificial Sequence
  Description of Artificial Sequence: Synthetic oligonucleotide
  Sense strand starting at position 1049 of SEQ ID NO: 1244442
gaucuugcucugcagcaga

SEQ ID NO: 1488955 - RNA, 19 nt, Artificial Sequence
  Description of Artificial Sequence: Synthetic oligonucleotide
  Antisense strand to SEQ ID NO: 1488954
ucugcugcagagcaagauc

SEQ ID NO: 1488956 - RNA, 19 nt, Artificial Sequence
  Description of Artificial Sequence: Synthetic oligonucleotide
  Sense strand starting at position 1079 of SEQ ID NO: 1244442
guuggucuggcuggaggaa

SEQ ID NO: 1488957 - RNA, 19 nt, Artificial Sequence
  Description of Artificial Sequence: Synthetic oligonucleotide
  Antisense strand to SEQ ID NO: 1488956
uuccuccagccagaccaac

SEQ ID NO: 1488958 - RNA, 19 nt, Artificial Sequence
  Description of Artificial Sequence: Synthetic oligonucleotide
  Sense strand starting at position 1080 of SEQ ID NO: 1244442
uuggucuggcuggaggaau

SEQ ID NO: 1488959 - RNA, 19 nt, Artificial Sequence
  Description of Artificial Sequence: Synthetic oligonucleotide
  Antisense strand to SEQ ID NO: 1488958
auuccuccagccagaccaa

SEQ ID NO: 1488960 - RNA, 19 nt, Artificial Sequence
  Description of Artificial Sequence: Synthetic oligonucleotide
  Sense strand starting at position 1081 of SEQ ID NO: 1244442
uggucuggcuggaggaauu

SEQ ID NO: 1488961 - RNA, 19 nt, Artificial Sequence
  Description of Artificial Sequence: Synthetic oligonucleotide
  Antisense strand to SEQ ID NO: 1488960
aauuccuccagccagacca

SEQ ID NO: 1488962 - RNA, 19 nt, Artificial Sequence
  Description of Artificial Sequence: Synthetic oligonucleotide
  Sense strand starting at position 1430 of SEQ ID NO: 1244442
ugcaaaguuugcccgaguu

SEQ ID NO: 1488963 - RNA, 19 nt, Artificial Sequence
  Description of Artificial Sequence: Synthetic oligonucleotide
  Antisense strand to SEQ ID NO: 1488962
aacucgggcaaacuuugca

SEQ ID NO: 1488964 - RNA, 19 nt, Artificial Sequence
  Description of Artificial Sequence: Synthetic oligonucleotide
  Sense strand starting at position 2352 of SEQ ID NO: 1244442
gcguccgggagauagaauu

SEQ ID NO: 1488965 - RNA, 19 nt, Artificial Sequence
  Description of Artificial Sequence: Synthetic oligonucleotide
  Antisense strand to SEQ ID NO: 1488964
aauucuaucucccggacgc

SEQ ID NO: 1488966 - RNA, 19 nt, Artificial Sequence
  Description of Artificial Sequence: Synthetic oligonucleotide
  Sense strand starting at position 2540 of SEQ ID NO: 1244442
gcguuucuuagauguccgu

SEQ ID NO: 1488967 - RNA, 19 nt, Artificial Sequence
  Description of Artificial Sequence: Synthetic oligonucleotide
  Antisense strand to SEQ ID NO: 1488966
acggacaucuaagaaacgc

SEQ ID NO: 1488968 - RNA, 19 nt, Artificial Sequence
  Description of Artificial Sequence: Synthetic oligonucleotide
  Sense strand starting at position 2542 of SEQ ID NO: 1244442
guuucuuagauguccgugu

SEQ ID NO: 1488969 - RNA, 19 nt, Artificial Sequence
  Description of Artificial Sequence: Synthetic oligonucleotide
  Antisense strand to SEQ ID NO: 1488968
acacggacaucuaagaaac

SEQ ID NO: 1488970 - RNA, 19 nt, Artificial Sequence
  Description of Artificial Sequence: Synthetic oligonucleotide
  Sense strand starting at position 2546 of SEQ ID NO: 1244442
cuuagauguccgugugcua

SEQ ID NO: 1488971 - RNA, 19 nt, Artificial Sequence
  Description of Artificial Sequence: Synthetic oligonucleotide
  Antisense strand to SEQ ID NO: 1488970
uagcacacggacaucuaag

SEQ ID NO: 1488972 - RNA, 19 nt, Artificial Sequence
  Description of Artificial Sequence: Synthetic oligonucleotide
  Sense strand starting at position 2547 of SEQ ID NO: 1244442
uuagauguccgugugcuau

SEQ ID NO: 1488973 - RNA, 19 nt, Artificial Sequence
  Description of Artificial Sequence: Synthetic oligonucleotide
  Antisense strand to SEQ ID NO: 1488972
auagcacacggacaucuaa

SEQ ID NO: 1488974 - RNA, 19 nt, Artificial Sequence
  Description of Artificial Sequence: Synthetic oligonucleotide
  Sense strand starting at position 3171 of SEQ ID NO: 1244442
gggcuaucagagcggucaa

SEQ ID NO: 1488975 - RNA, 19 nt, Artificial Sequence
  Description of Artificial Sequence: Synthetic oligonucleotide
  Antisense strand to SEQ ID NO: 1488974
uugaccgcucugauagccc

SEQ ID NO: 1488976 - RNA, 19 nt, Artificial Sequence
  Description of Artificial Sequence: Synthetic oligonucleotide
  Sense strand starting at position 3172 of SEQ ID NO: 1244442
ggcuaucagagcggucaaa

SEQ ID NO: 1488977 - RNA, 19 nt, Artificial Sequence
  Description of Artificial Sequence: Synthetic oligonucleotide
  Antisense strand to SEQ ID NO: 1488976
uuugaccgcucugauagcc

SEQ ID NO: 1488978 - RNA, 19 nt, Artificial Sequence
  Description of Artificial Sequence: Synthetic oligonucleotide
  Sense strand starting at position 3183 of SEQ ID NO: 1244442
cggucaaagccucggaaau

SEQ ID NO: 1488979 - RNA, 19 nt, Artificial Sequence
  Description of Artificial Sequence: Synthetic oligonucleotide
  Antisense strand to SEQ ID NO: 1488978
auuuccgaggcuuugaccg

SEQ ID NO: 1488980 - RNA, 19 nt, Artificial Sequence
  Description of Artificial Sequence: Synthetic oligonucleotide
  Sense strand starting at position 3184 of SEQ ID NO: 1244442
ggucaaagccucggaaauc

SEQ ID NO: 1488981 - RNA, 19 nt, Artificial Sequence
  Description of Artificial Sequence: Synthetic oligonucleotide
  Antisense strand to SEQ ID NO: 1488980
gauuuccgaggcuuugacc

SEQ ID NO: 1488982 - RNA, 19 nt, Artificial Sequence
  Description of Artificial Sequence: Synthetic oligonucleotide
  Sense strand starting at position 3800 of SEQ ID NO: 1244442
acgcgccucgggagaaauu

SEQ ID NO: 1488983 - RNA, 19 nt, Artificial Sequence
  Description of Artificial Sequence: Synthetic oligonucleotide
  Antisense strand to SEQ ID NO: 1488982
aauuucucccgaggcgcgu

SEQ ID NO: 1488984 - RNA, 19 nt, Artificial Sequence
  Description of Artificial Sequence: Synthetic oligonucleotide
  Sense strand starting at position 3801 of SEQ ID NO: 1244442
cgcgccucgggagaaauua

SEQ ID NO: 1488985 - RNA, 19 nt, Artificial Sequence
  Description of Artificial Sequence: Synthetic oligonucleotide
  Antisense strand to SEQ ID NO: 1488984
uaauuucucccgaggcgcg

SEQ ID NO: 1488986 - RNA, 19 nt, Artificial Sequence
  Description of Artificial Sequence: Synthetic oligonucleotide
  Sense strand starting at position 65 of SEQ ID NO: 1244443
guaagacaaugcucgcaga

SEQ ID NO: 1488987 - RNA, 19 nt, Artificial Sequence
  Description of Artificial Sequence: Synthetic oligonucleotide
  Antisense strand to SEQ ID NO: 1488986
ucugcgagcauugucuuac

SEQ ID NO: 1488988 - RNA, 19 nt, Artificial Sequence
  Description of Artificial Sequence: Synthetic oligonucleotide
  Sense strand starting at position 66 of SEQ ID NO: 1244443
uaagacaaugcucgcagaa

SEQ ID NO: 1488989 - RNA, 19 nt, Artificial Sequence
  Description of Artificial Sequence: Synthetic oligonucleotide
  Antisense strand to SEQ ID NO: 1488988
uucugcgagcauugucuua

SEQ ID NO: 1488990 - RNA, 19 nt, Artificial Sequence
  Description of Artificial Sequence: Synthetic oligonucleotide
  Sense strand starting at position 150 of SEQ ID NO: 1244443
cggugaaguaggugcaaau

SEQ ID NO: 1488991 - RNA, 19 nt, Artificial Sequence
  Description of Artificial Sequence: Synthetic oligonucleotide
  Antisense strand to SEQ ID NO: 1488990
auuugcaccuacuucaccg

SEQ ID NO: 1488992 - RNA, 19 nt, Artificial Sequence
  Description of Artificial Sequence: Synthetic oligonucleotide
  Sense strand starting at position 211 of SEQ ID NO: 1244443
ggucucuuuagggagugua

SEQ ID NO: 1488993 - RNA, 19 nt, Artificial Sequence
  Description of Artificial Sequence: Synthetic oligonucleotide
  Antisense strand to SEQ ID NO: 1488992
uacacucccuaaagagacc

SEQ ID NO: 1488994 - RNA, 19 nt, Artificial Sequence
  Description of Artificial Sequence: Synthetic oligonucleotide
  Sense strand starting at position 251 of SEQ ID NO: 1244443
caggaauggcuccauguua

SEQ ID NO: 1488995 - RNA, 19 nt, Artificial Sequence
  Description of Artificial Sequence: Synthetic oligonucleotide
  Antisense strand to SEQ ID NO: 1488994
uaacauggagccauuccug

SEQ ID NO: 1488996 - RNA, 19 nt, Artificial Sequence
  Description of Artificial Sequence: Synthetic oligonucleotide
  Sense strand starting at position 629 of SEQ ID NO: 1244443
ggcggagcucauuauguaa

SEQ ID NO: 1488997 - RNA, 19 nt, Artificial Sequence
  Description of Artificial Sequence: Synthetic oligonucleotide
  Antisense strand to SEQ ID NO: 1488996
uuacauaaugagcuccgcc

SEQ ID NO: 1488998 - RNA, 19 nt, Artificial Sequence
  Description of Artificial Sequence: Synthetic oligonucleotide
  Sense strand starting at position 632 of SEQ ID NO: 1244443
ggagcucauuauguaacga

SEQ ID NO: 1488999 - RNA, 19 nt, Artificial Sequence
  Description of Artificial Sequence: Synthetic oligonucleotide
  Antisense strand to SEQ ID NO: 1488998
ucguuacauaaugagcucc

SEQ ID NO: 1489000 - RNA, 19 nt, Artificial Sequence
  Description of Artificial Sequence: Synthetic oligonucleotide
  Sense strand starting at position 845 of SEQ ID NO: 1244443
gugagauccgaacgauucu

SEQ ID NO: 1489001 - RNA, 19 nt, Artificial Sequence
  Description of Artificial Sequence: Synthetic oligonucleotide
  Antisense strand to SEQ ID NO: 1489000
agaaucguucggaucucac

SEQ ID NO: 1489002 - RNA, 19 nt, Artificial Sequence
  Description of Artificial Sequence: Synthetic oligonucleotide
  Sense strand starting at position 892 of SEQ ID NO: 1244443
gcgccacucuucucagauu

SEQ ID NO: 1489003 - RNA, 19 nt, Artificial Sequence
  Description of Artificial Sequence: Synthetic oligonucleotide
  Antisense strand to SEQ ID NO: 1489002
aaucugagaagaguggcgc

SEQ ID NO: 1489004 - RNA, 19 nt, Artificial Sequence
  Description of Artificial Sequence: Synthetic oligonucleotide
  Sense strand starting at position 1161 of SEQ ID NO: 1244443
gcauuuccagcccgaacaa

SEQ ID NO: 1489005 - RNA, 19 nt, Artificial Sequence
  Description of Artificial Sequence: Synthetic oligonucleotide
  Antisense strand to SEQ ID NO: 1489004
uuguucgggcuggaaaugc

SEQ ID NO: 1489006 - RNA, 19 nt, Artificial Sequence
  Description of Artificial Sequence: Synthetic oligonucleotide
  Sense strand starting at position 1377 of SEQ ID NO: 1244443
ccagcugagagcggucauu

SEQ ID NO: 1489007 - RNA, 19 nt, Artificial Sequence
  Description of Artificial Sequence: Synthetic oligonucleotide
  Antisense strand to SEQ ID NO: 1489006
aaugaccgcucucagcugg

SEQ ID NO: 1489008 - RNA, 19 nt, Artificial Sequence
  Description of Artificial Sequence: Synthetic oligonucleotide
  Sense strand starting at position 1575 of SEQ ID NO: 1244443
ucugcuuugcaugggaaga

SEQ ID NO: 1489009 - RNA, 19 nt, Artificial Sequence
  Description of Artificial Sequence: Synthetic oligonucleotide
  Antisense strand to SEQ ID NO: 1489008
ucuucccaugcaaagcaga

SEQ ID NO: 1489010 - RNA, 19 nt, Artificial Sequence
  Description of Artificial Sequence: Synthetic oligonucleotide
  Sense strand starting at position 1626 of SEQ ID NO: 1244443
aguaguucuggcuagaagg

SEQ ID NO: 1489011 - RNA, 19 nt, Artificial Sequence
  Description of Artificial Sequence: Synthetic oligonucleotide
  Antisense strand to SEQ ID NO: 1489010
ccuucuagccagaacuacu

SEQ ID NO: 1489012 - RNA, 19 nt, Artificial Sequence
  Description of Artificial Sequence: Synthetic oligonucleotide
  Sense strand starting at position 1628 of SEQ ID NO: 1244443
uaguucuggcuagaaggua

SEQ ID NO: 1489013 - RNA, 19 nt, Artificial Sequence
  Description of Artificial Sequence: Synthetic oligonucleotide
  Antisense strand to SEQ ID NO: 1489012
uaccuucuagccagaacua

SEQ ID NO: 1489014 - RNA, 19 nt, Artificial Sequence
  Description of Artificial Sequence: Synthetic oligonucleotide
  Sense strand starting at position 1836 of SEQ ID NO: 1244443
acguucccucggcaguaau

SEQ ID NO: 1489015 - RNA, 19 nt, Artificial Sequence
  Description of Artificial Sequence: Synthetic oligonucleotide
  Antisense strand to SEQ ID NO: 1489014
auuacugccgagggaacgu

SEQ ID NO: 1489016 - RNA, 19 nt, Artificial Sequence
  Description of Artificial Sequence: Synthetic oligonucleotide
  Sense strand starting at position 1839 of SEQ ID NO: 1244443
uucccucggcaguaauauu

SEQ ID NO: 1489017 - RNA, 19 nt, Artificial Sequence
  Description of Artificial Sequence: Synthetic oligonucleotide
  Antisense strand to SEQ ID NO: 1489016
aauauuacugccgagggaa

SEQ ID NO: 1489018 - RNA, 19 nt, Artificial Sequence
  Description of Artificial Sequence: Synthetic oligonucleotide
  Sense strand starting at position 1888 of SEQ ID NO: 1244443
cgagccuuucccugggaca

SEQ ID NO: 1489019 - RNA, 19 nt, Artificial Sequence
  Description of Artificial Sequence: Synthetic oligonucleotide
  Antisense strand to SEQ ID NO: 1489018
ugucccagggaaaggcucg

SEQ ID NO: 1489020 - RNA, 19 nt, Artificial Sequence
  Description of Artificial Sequence: Synthetic oligonucleotide
  Sense strand starting at position 1890 of SEQ ID NO: 1244443
agccuuucccugggacaga

SEQ ID NO: 1489021 - RNA, 19 nt, Artificial Sequence
  Description of Artificial Sequence: Synthetic oligonucleotide
  Antisense strand to SEQ ID NO: 1489020
ucugucccagggaaaggcu

SEQ ID NO: 1489022 - RNA, 19 nt, Artificial Sequence
  Description of Artificial Sequence: Synthetic oligonucleotide
  Sense strand starting at position 2072 of SEQ ID NO: 1244443
uuuguaguccaccgacaaa

SEQ ID NO: 1489023 - RNA, 19 nt, Artificial Sequence
  Description of Artificial Sequence: Synthetic oligonucleotide
  Antisense strand to SEQ ID NO: 1489022
uuugucgguggacuacaaa

SEQ ID NO: 1489024 - RNA, 19 nt, Artificial Sequence
  Description of Artificial Sequence: Synthetic oligonucleotide
  Sense strand starting at position 2191 of SEQ ID NO: 1244443
aggguggcguguuuagaaa

SEQ ID NO: 1489025 - RNA, 19 nt, Artificial Sequence
  Description of Artificial Sequence: Synthetic oligonucleotide
  Antisense strand to SEQ ID NO: 1489024
uuucuaaacacgccacccu

SEQ ID NO: 1489026 - RNA, 19 nt, Artificial Sequence
  Description of Artificial Sequence: Synthetic oligonucleotide
  Sense strand starting at position 2255 of SEQ ID NO: 1244443
gcuuguuugcugucuggga

SEQ ID NO: 1489027 - RNA, 19 nt, Artificial Sequence
  Description of Artificial Sequence: Synthetic oligonucleotide
  Antisense strand to SEQ ID NO: 1489026
ucccagacagcaaacaagc

SEQ ID NO: 1489028 - RNA, 19 nt, Artificial Sequence
  Description of Artificial Sequence: Synthetic oligonucleotide
  Sense strand starting at position 2257 of SEQ ID NO: 1244443
uuguuugcugucugggaga

SEQ ID NO: 1489029 - RNA, 19 nt, Artificial Sequence
  Description of Artificial Sequence: Synthetic oligonucleotide
  Antisense strand to SEQ ID NO: 1489028
ucucccagacagcaaacaa

SEQ ID NO: 1489030 - RNA, 19 nt, Artificial Sequence
  Description of Artificial Sequence: Synthetic oligonucleotide
  Sense strand starting at position 2259 of SEQ ID NO: 1244443
guuugcugucugggagauc

SEQ ID NO: 1489031 - RNA, 19 nt, Artificial Sequence
  Description of Artificial Sequence: Synthetic oligonucleotide
  Antisense strand to SEQ ID NO: 1489030
gaucucccagacagcaaac

SEQ ID NO: 1489032 - RNA, 19 nt, Artificial Sequence
  Description of Artificial Sequence: Synthetic oligonucleotide
  Sense strand starting at position 2262 of SEQ ID NO: 1244443
ugcugucugggagaucaaa

SEQ ID NO: 1489033 - RNA, 19 nt, Artificial Sequence
  Description of Artificial Sequence: Synthetic oligonucleotide
  Antisense strand to SEQ ID NO: 1489032
uuugaucucccagacagca

SEQ ID NO: 1489034 - RNA, 19 nt, Artificial Sequence
  Description of Artificial Sequence: Synthetic oligonucleotide
  Sense strand starting at position 2339 of SEQ ID NO: 1244443
ugaccucguccugagguua

SEQ ID NO: 1489035 - RNA, 19 nt, Artificial Sequence
  Description of Artificial Sequence: Synthetic oligonucleotide
  Antisense strand to SEQ ID NO: 1489034
uaaccucaggacgagguca

SEQ ID NO: 1489036 - RNA, 19 nt, Artificial Sequence
  Description of Artificial Sequence: Synthetic oligonucleotide
  Sense strand starting at position 2526 of SEQ ID NO: 1244443
guagggaugucuguaggga

SEQ ID NO: 1489037 - RNA, 19 nt, Artificial Sequence
  Description of Artificial Sequence: Synthetic oligonucleotide
  Antisense strand to SEQ ID NO: 1489036
ucccuacagacaucccuac

SEQ ID NO: 1489038 - RNA, 19 nt, Artificial Sequence
  Description of Artificial Sequence: Synthetic oligonucleotide
  Sense strand starting at position 2528 of SEQ ID NO: 1244443
agggaugucuguagggacu

SEQ ID NO: 1489039 - RNA, 19 nt, Artificial Sequence
  Description of Artificial Sequence: Synthetic oligonucleotide
  Antisense strand to SEQ ID NO: 1489038
agucccuacagacaucccu

SEQ ID NO: 1489040 - RNA, 19 nt, Artificial Sequence
  Description of Artificial Sequence: Synthetic oligonucleotide
  Sense strand starting at position 2596 of SEQ ID NO: 1244443
gugagucauuucccuuugu

SEQ ID NO: 1489041 - RNA, 19 nt, Artificial Sequence
  Description of Artificial Sequence: Synthetic oligonucleotide
  Antisense strand to SEQ ID NO: 1489040
acaaagggaaaugacucac

SEQ ID NO: 1489042 - RNA, 19 nt, Artificial Sequence
  Description of Artificial Sequence: Synthetic oligonucleotide
  Sense strand starting at position 2604 of SEQ ID NO: 1244443
uuucccuuugucugggaaa

SEQ ID NO: 1489043 - RNA, 19 nt, Artificial Sequence
  Description of Artificial Sequence: Synthetic oligonucleotide
  Antisense strand to SEQ ID NO: 1489042
uuucccagacaaagggaaa

SEQ ID NO: 1489044 - RNA, 19 nt, Artificial Sequence
  Description of Artificial Sequence: Synthetic oligonucleotide
  Sense strand starting at position 2606 of SEQ ID NO: 1244443
ucccuuugucugggaaaua

SEQ ID NO: 1489045 - RNA, 19 nt, Artificial Sequence
  Description of Artificial Sequence: Synthetic oligonucleotide
  Antisense strand to SEQ ID NO: 1489044
uauuucccagacaaaggga

SEQ ID NO: 1489046 - RNA, 19 nt, Artificial Sequence
  Description of Artificial Sequence: Synthetic oligonucleotide
  Sense strand starting at position 2651 of SEQ ID NO: 1244443
gugaaagugcuuugagguc

SEQ ID NO: 1489047 - RNA, 19 nt, Artificial Sequence
  Description of Artificial Sequence: Synthetic oligonucleotide
  Antisense strand to SEQ ID NO: 1489046
gaccucaaagcacuuucac

SEQ ID NO: 1489048 - RNA, 19 nt, Artificial Sequence
  Description of Artificial Sequence: Synthetic oligonucleotide
  Sense strand starting at position 2727 of SEQ ID NO: 1244443
cucggugcuggaggauaaa

SEQ ID NO: 1489049 - RNA, 19 nt, Artificial Sequence
  Description of Artificial Sequence: Synthetic oligonucleotide
  Antisense strand to SEQ ID NO: 1489048
uuuauccuccagcaccgag

SEQ ID NO: 1489050 - RNA, 19 nt, Artificial Sequence
  Description of Artificial Sequence: Synthetic oligonucleotide
  Sense strand starting at position 2782 of SEQ ID NO: 1244443
acauguagaucaucuuaag

SEQ ID NO: 1489051 - RNA, 19 nt, Artificial Sequence
  Description of Artificial Sequence: Synthetic oligonucleotide
  Antisense strand to SEQ ID NO: 1489050
cuuaagaugaucuacaugu

SEQ ID NO: 1489052 - RNA, 19 nt, Artificial Sequence
  Description of Artificial Sequence: Synthetic oligonucleotide
  Sense strand starting at position 3279 of SEQ ID NO: 1244443
gcaacugucccaugaguaa

SEQ ID NO: 1489053 - RNA, 19 nt, Artificial Sequence
  Description of Artificial Sequence: Synthetic oligonucleotide
  Antisense strand to SEQ ID NO: 1489052
uuacucaugggacaguugc

SEQ ID NO: 1489054 - RNA, 19 nt, Artificial Sequence
  Description of Artificial Sequence: Synthetic oligonucleotide
  Sense strand starting at position 3282 of SEQ ID NO: 1244443
acugucccaugaguaauaa

SEQ ID NO: 1489055 - RNA, 19 nt, Artificial Sequence
  Description of Artificial Sequence: Synthetic oligonucleotide
  Antisense strand to SEQ ID NO: 1489054
uuauuacucaugggacagu

SEQ ID NO: 1489056 - RNA, 19 nt, Artificial Sequence
  Description of Artificial Sequence: Synthetic oligonucleotide
  Sense strand starting at position 3286 of SEQ ID NO: 1244443
ucccaugaguaauaacaga

SEQ ID NO: 1489057 - RNA, 19 nt, Artificial Sequence
  Description of Artificial Sequence: Synthetic oligonucleotide
  Antisense strand to SEQ ID NO: 1489056
ucuguuauuacucauggga

SEQ ID NO: 1489058 - RNA, 19 nt, Artificial Sequence
  Description of Artificial Sequence: Synthetic oligonucleotide
  Sense strand starting at position 3354 of SEQ ID NO: 1244443
gauggaagcuucuuaggca

SEQ ID NO: 1489059 - RNA, 19 nt, Artificial Sequence
  Description of Artificial Sequence: Synthetic oligonucleotide
  Antisense strand to SEQ ID NO: 1489058
ugccuaagaagcuuccauc

SEQ ID NO: 1489060 - RNA, 19 nt, Artificial Sequence
  Description of Artificial Sequence: Synthetic oligonucleotide
  Sense strand starting at position 3430 of SEQ ID NO: 1244443
agugcuucuagagaggguu

SEQ ID NO: 1489061 - RNA, 19 nt, Artificial Sequence
  Description of Artificial Sequence: Synthetic oligonucleotide
  Antisense strand to SEQ ID NO: 1489060
aacccucucuagaagcacu

SEQ ID NO: 1489062 - RNA, 19 nt, Artificial Sequence
  Description of Artificial Sequence: Synthetic oligonucleotide
  Sense strand starting at position 3498 of SEQ ID NO: 1244443
gauggaugccugggaaaca

SEQ ID NO: 1489063 - RNA, 19 nt, Artificial Sequence
  Description of Artificial Sequence: Synthetic oligonucleotide
  Antisense strand to SEQ ID NO: 1489062
uguuucccaggcauccauc

SEQ ID NO: 1489064 - RNA, 19 nt, Artificial Sequence
  Description of Artificial Sequence: Synthetic oligonucleotide
  Sense strand starting at position 3499 of SEQ ID NO: 1244443
auggaugccugggaaacau

SEQ ID NO: 1489065 - RNA, 19 nt, Artificial Sequence
  Description of Artificial Sequence: Synthetic oligonucleotide
  Antisense strand to SEQ ID NO: 1489064
auguuucccaggcauccau

SEQ ID NO: 1489066 - RNA, 19 nt, Artificial Sequence
  Description of Artificial Sequence: Synthetic oligonucleotide
  Sense strand starting at position 79 of SEQ ID NO: 1244445
uugggauuguuucugauau

SEQ ID NO: 1489067 - RNA, 19 nt, Artificial Sequence
  Description of Artificial Sequence: Synthetic oligonucleotide
  Antisense strand to SEQ ID NO: 1489066
auaucagaaacaaucccaa

SEQ ID NO: 1489068 - RNA, 19 nt, Artificial Sequence
  Description of Artificial Sequence: Synthetic oligonucleotide
  Sense strand starting at position 91 of SEQ ID NO: 1244445
cugauauauaacugugggu

SEQ ID NO: 1489069 - RNA, 19 nt, Artificial Sequence
  Description of Artificial Sequence: Synthetic oligonucleotide
  Antisense strand to SEQ ID NO: 1489068
acccacaguuauauaucag

SEQ ID NO: 1489070 - RNA, 19 nt, Artificial Sequence
  Description of Artificial Sequence: Synthetic oligonucleotide
  Sense strand starting at position 93 of SEQ ID NO: 1244445
gauauauaacuguggguuu

SEQ ID NO: 1489071 - RNA, 19 nt, Artificial Sequence
  Description of Artificial Sequence: Synthetic oligonucleotide
  Antisense strand to SEQ ID NO: 1489070
aaacccacaguuauauauc

SEQ ID NO: 1489072 - RNA, 19 nt, Artificial Sequence
  Description of Artificial Sequence: Synthetic oligonucleotide
  Sense strand starting at position 194 of SEQ ID NO: 1244445
ccacgauuauaacugagca

SEQ ID NO: 1489073 - RNA, 19 nt, Artificial Sequence
  Description of Artificial Sequence: Synthetic oligonucleotide
  Antisense strand to SEQ ID NO: 1489072
ugcucaguuauaaucgugg

SEQ ID NO: 1489074 - RNA, 19 nt, Artificial Sequence
  Description of Artificial Sequence: Synthetic oligonucleotide
  Sense strand starting at position 273 of SEQ ID NO: 1244445
gugaucuuagcucaugguu

SEQ ID NO: 1489075 - RNA, 19 nt, Artificial Sequence
  Description of Artificial Sequence: Synthetic oligonucleotide
  Antisense strand to SEQ ID NO: 1489074
aaccaugagcuaagaucac

SEQ ID NO: 1489076 - RNA, 19 nt, Artificial Sequence
  Description of Artificial Sequence: Synthetic oligonucleotide
  Sense strand starting at position 278 of SEQ ID NO: 1244445
cuuagcucaugguuaacaa

SEQ ID NO: 1489077 - RNA, 19 nt, Artificial Sequence
  Description of Artificial Sequence: Synthetic oligonucleotide
  Antisense strand to SEQ ID NO: 1489076
uuguuaaccaugagcuaag

SEQ ID NO: 1489078 - RNA, 19 nt, Artificial Sequence
  Description of Artificial Sequence: Synthetic oligonucleotide
  Sense strand starting at position 279 of SEQ ID NO: 1244445
uuagcucaugguuaacaaa

SEQ ID NO: 1489079 - RNA, 19 nt, Artificial Sequence
  Description of Artificial Sequence: Synthetic oligonucleotide
  Antisense strand to SEQ ID NO: 1489078
uuuguuaaccaugagcuaa

SEQ ID NO: 1489080 - RNA, 19 nt, Artificial Sequence
  Description of Artificial Sequence: Synthetic oligonucleotide
  Sense strand starting at position 412 of SEQ ID NO: 1244445
gaccguguauuuguuuaaa

SEQ ID NO: 1489081 - RNA, 19 nt, Artificial Sequence
  Description of Artificial Sequence: Synthetic oligonucleotide
  Antisense strand to SEQ ID NO: 1489080
uuuaaacaaauacacgguc

SEQ ID NO: 1489082 - RNA, 19 nt, Artificial Sequence
  Description of Artificial Sequence: Synthetic oligonucleotide
  Sense strand starting at position 414 of SEQ ID NO: 1244445
ccguguauuuguuuaaagg

SEQ ID NO: 1489083 - RNA, 19 nt, Artificial Sequence
  Description of Artificial Sequence: Synthetic oligonucleotide
  Antisense strand to SEQ ID NO: 1489082
ccuuuaaacaaauacacgg

SEQ ID NO: 1489084 - RNA, 19 nt, Artificial Sequence
  Description of Artificial Sequence: Synthetic oligonucleotide
  Sense strand starting at position 415 of SEQ ID NO: 1244445
cguguauuuguuuaaaggu

SEQ ID NO: 1489085 - RNA, 19 nt, Artificial Sequence
  Description of Artificial Sequence: Synthetic oligonucleotide
  Antisense strand to SEQ ID NO: 1489084
accuuuaaacaaauacacg

SEQ ID NO: 1489086 - RNA, 19 nt, Artificial Sequence
  Description of Artificial Sequence: Synthetic oligonucleotide
  Sense strand starting at position 557 of SEQ ID NO: 1244445
agguaucagagucacaagu

SEQ ID NO: 1489087 - RNA, 19 nt, Artificial Sequence
  Description of Artificial Sequence: Synthetic oligonucleotide
  Antisense strand to SEQ ID NO: 1489086
acuugugacucugauaccu

SEQ ID NO: 1489088 - RNA, 19 nt, Artificial Sequence
  Description of Artificial Sequence: Synthetic oligonucleotide
  Sense strand starting at position 828 of SEQ ID NO: 1244445
ugucauaagcuuuaugaac

SEQ ID NO: 1489089 - RNA, 19 nt, Artificial Sequence
  Description of Artificial Sequence: Synthetic oligonucleotide
  Antisense strand to SEQ ID NO: 1489088
guucauaaagcuuaugaca

SEQ ID NO: 1489090 - RNA, 19 nt, Artificial Sequence
  Description of Artificial Sequence: Synthetic oligonucleotide
  Sense strand starting at position 865 of SEQ ID NO: 1244445
gcuucucagugaucucaaa

SEQ ID NO: 1489091 - RNA, 19 nt, Artificial Sequence
  Description of Artificial Sequence: Synthetic oligonucleotide
  Antisense strand to SEQ ID NO: 1489090
uuugagaucacugagaagc

SEQ ID NO: 1489092 - RNA, 19 nt, Artificial Sequence
  Description of Artificial Sequence: Synthetic oligonucleotide
  Sense strand starting at position 886 of SEQ ID NO: 1244445
ucuaacaugccguaagauu

SEQ ID NO: 1489093 - RNA, 19 nt, Artificial Sequence
  Description of Artificial Sequence: Synthetic oligonucleotide
  Antisense strand to SEQ ID NO: 1489092
aaucuuacggcauguuaga

SEQ ID NO: 1489094 - RNA, 19 nt, Artificial Sequence
  Description of Artificial Sequence: Synthetic oligonucleotide
  Sense strand starting at position 943 of SEQ ID NO: 1244445
gccaaacucgaauaccauu

SEQ ID NO: 1489095 - RNA, 19 nt, Artificial Sequence
  Description of Artificial Sequence: Synthetic oligonucleotide
  Antisense strand to SEQ ID NO: 1489094
aaugguauucgaguuuggc

SEQ ID NO: 1489096 - RNA, 19 nt, Artificial Sequence
  Description of Artificial Sequence: Synthetic oligonucleotide
  Sense strand starting at position 1048 of SEQ ID NO: 1244445
acauguguaguggaaaguu

SEQ ID NO: 1489097 - RNA, 19 nt, Artificial Sequence
  Description of Artificial Sequence: Synthetic oligonucleotide
  Antisense strand to SEQ ID NO: 1489096
aacuuuccacuacacaugu

SEQ ID NO: 1489098 - RNA, 19 nt, Artificial Sequence
  Description of Artificial Sequence: Synthetic oligonucleotide
  Sense strand starting at position 1057 of SEQ ID NO: 1244445
guggaaaguuuaguucaug

SEQ ID NO: 1489099 - RNA, 19 nt, Artificial Sequence
  Description of Artificial Sequence: Synthetic oligonucleotide
  Antisense strand to SEQ ID NO: 1489098
caugaacuaaacuuuccac

SEQ ID NO: 1489100 - RNA, 19 nt, Artificial Sequence
  Description of Artificial Sequence: Synthetic oligonucleotide
  Sense strand starting at position 1150 of SEQ ID NO: 1244445
ccuacuguguacuuacaca

SEQ ID NO: 1489101 - RNA, 19 nt, Artificial Sequence
  Description of Artificial Sequence: Synthetic oligonucleotide
  Antisense strand to SEQ ID NO: 1489100
uguguaaguacacaguagg

SEQ ID NO: 1489102 - RNA, 19 nt, Artificial Sequence
  Description of Artificial Sequence: Synthetic oligonucleotide
  Sense strand starting at position 1252 of SEQ ID NO: 1244445
cgcauuacacuuuauuaag

SEQ ID NO: 1489103 - RNA, 19 nt, Artificial Sequence
  Description of Artificial Sequence: Synthetic oligonucleotide
  Antisense strand to SEQ ID NO: 1489102
cuuaauaaaguguaaugcg

SEQ ID NO: 1489104 - RNA, 19 nt, Artificial Sequence
  Description of Artificial Sequence: Synthetic oligonucleotide
  Sense strand starting at position 1487 of SEQ ID NO: 1244445
ggcuucucagaacaauauu

SEQ ID NO: 1489105 - RNA, 19 nt, Artificial Sequence
  Description of Artificial Sequence: Synthetic oligonucleotide
  Antisense strand to SEQ ID NO: 1489104
aauauuguucugagaagcc

SEQ ID NO: 1489106 - RNA, 19 nt, Artificial Sequence
  Description of Artificial Sequence: Synthetic oligonucleotide
  Sense strand starting at position 1528 of SEQ ID NO: 1244445
ggaaucaggacuugagcuu

SEQ ID NO: 1489107 - RNA, 19 nt, Artificial Sequence
  Description of Artificial Sequence: Synthetic oligonucleotide
  Antisense strand to SEQ ID NO: 1489106
aagcucaaguccugauucc

SEQ ID NO: 1489108 - RNA, 19 nt, Artificial Sequence
  Description of Artificial Sequence: Synthetic oligonucleotide
  Sense strand starting at position 1793 of SEQ ID NO: 1244445
aucuauguuccucaggacu

SEQ ID NO: 1489109 - RNA, 19 nt, Artificial Sequence
  Description of Artificial Sequence: Synthetic oligonucleotide
  Antisense strand to SEQ ID NO: 1489108
aguccugaggaacauagau

SEQ ID NO: 1489110 - RNA, 19 nt, Artificial Sequence
  Description of Artificial Sequence: Synthetic oligonucleotide
  Sense strand starting at position 1887 of SEQ ID NO: 1244445
gauacagucgccguaguuu

SEQ ID NO: 1489111 - RNA, 19 nt, Artificial Sequence
  Description of Artificial Sequence: Synthetic oligonucleotide
  Antisense strand to SEQ ID NO: 1489110
aaacuacggcgacuguauc

SEQ ID NO: 1489112 - RNA, 19 nt, Artificial Sequence
  Description of Artificial Sequence: Synthetic oligonucleotide
  Sense strand starting at position 2015 of SEQ ID NO: 1244445
cgaugucgucacguaaacu

SEQ ID NO: 1489113 - RNA, 19 nt, Artificial Sequence
  Description of Artificial Sequence: Synthetic oligonucleotide
  Antisense strand to SEQ ID NO: 1489112
aguuuacgugacgacaucg

SEQ ID NO: 1489114 - RNA, 19 nt, Artificial Sequence
  Description of Artificial Sequence: Synthetic oligonucleotide
  Sense strand starting at position 2087 of SEQ ID NO: 1244445
gagucacuucuaugguacu

SEQ ID NO: 1489115 - RNA, 19 nt, Artificial Sequence
  Description of Artificial Sequence: Synthetic oligonucleotide
  Antisense strand to SEQ ID NO: 1489114
aguaccauagaagugacuc

SEQ ID NO: 1489116 - RNA, 19 nt, Artificial Sequence
  Description of Artificial Sequence: Synthetic oligonucleotide
  Sense strand starting at position 2173 of SEQ ID NO: 1244445
aaggaaugacaacguucua

SEQ ID NO: 1489117 - RNA, 19 nt, Artificial Sequence
  Description of Artificial Sequence: Synthetic oligonucleotide
  Antisense strand to SEQ ID NO: 1489116
uagaacguugucauuccuu

SEQ ID NO: 1489118 - RNA, 19 nt, Artificial Sequence
  Description of Artificial Sequence: Synthetic oligonucleotide
  Sense strand starting at position 2308 of SEQ ID NO: 1244445
agugaagcgaguuaucuga

SEQ ID NO: 1489119 - RNA, 19 nt, Artificial Sequence
  Description of Artificial Sequence: Synthetic oligonucleotide
  Antisense strand to SEQ ID NO: 1489118
ucagauaacucgcuucacu

SEQ ID NO: 1489120 - RNA, 19 nt, Artificial Sequence
  Description of Artificial Sequence: Synthetic oligonucleotide
  Sense strand starting at position 2310 of SEQ ID NO: 1244445
ugaagcgaguuaucugaau

SEQ ID NO: 1489121 - RNA, 19 nt, Artificial Sequence
  Description of Artificial Sequence: Synthetic oligonucleotide
  Antisense strand to SEQ ID NO: 1489120
auucagauaacucgcuuca

SEQ ID NO: 1489122 - RNA, 19 nt, Artificial Sequence
  Description of Artificial Sequence: Synthetic oligonucleotide
  Sense strand starting at position 2827 of SEQ ID NO: 1244445
ggccauuggguauaggaau

SEQ ID NO: 1489123 - RNA, 19 nt, Artificial Sequence
  Description of Artificial Sequence: Synthetic oligonucleotide
  Antisense strand to SEQ ID NO: 1489122
auuccuauacccaauggcc

SEQ ID NO: 1489124 - RNA, 19 nt, Artificial Sequence
  Description of Artificial Sequence: Synthetic oligonucleotide
  Sense strand starting at position 3163 of SEQ ID NO: 1244445
gugccuggcccauauauga

SEQ ID NO: 1489125 - RNA, 19 nt, Artificial Sequence
  Description of Artificial Sequence: Synthetic oligonucleotide
  Antisense strand to SEQ ID NO: 1489124
ucauauaugggccaggcac

SEQ ID NO: 1489126 - RNA, 19 nt, Artificial Sequence
  Description of Artificial Sequence: Synthetic oligonucleotide
  Sense strand starting at position 3334 of SEQ ID NO: 1244445
ucaguuugugucguguauu

SEQ ID NO: 1489127 - RNA, 19 nt, Artificial Sequence
  Description of Artificial Sequence: Synthetic oligonucleotide
  Antisense strand to SEQ ID NO: 1489126
aauacacgacacaaacuga

SEQ ID NO: 1489128 - RNA, 19 nt, Artificial Sequence
  Description of Artificial Sequence: Synthetic oligonucleotide
  Sense strand starting at position 3367 of SEQ ID NO: 1244445
guaaacauuuaggauuguu

SEQ ID NO: 1489129 - RNA, 19 nt, Artificial Sequence
  Description of Artificial Sequence: Synthetic oligonucleotide
  Antisense strand to SEQ ID NO: 1489128
aacaauccuaaauguuuac

SEQ ID NO: 1489130 - RNA, 19 nt, Artificial Sequence
  Description of Artificial Sequence: Synthetic oligonucleotide
  Sense strand starting at position 3372 of SEQ ID NO: 1244445
cauuuaggauuguuacguu

SEQ ID NO: 1489131 - RNA, 19 nt, Artificial Sequence
  Description of Artificial Sequence: Synthetic oligonucleotide
  Antisense strand to SEQ ID NO: 1489130
aacguaacaauccuaaaug

SEQ ID NO: 1489132 - RNA, 19 nt, Artificial Sequence
  Description of Artificial Sequence: Synthetic oligonucleotide
  Sense strand starting at position 3382 of SEQ ID NO: 1244445
uguuacguucucuugcauu

SEQ ID NO: 1489133 - RNA, 19 nt, Artificial Sequence
  Description of Artificial Sequence: Synthetic oligonucleotide
  Antisense strand to SEQ ID NO: 1489132
aaugcaagagaacguaaca

SEQ ID NO: 1489134 - RNA, 19 nt, Artificial Sequence
  Description of Artificial Sequence: Synthetic oligonucleotide
  Sense strand starting at position 3656 of SEQ ID NO: 1244445
ucauuaaagugacuaugau

SEQ ID NO: 1489135 - RNA, 19 nt, Artificial Sequence
  Description of Artificial Sequence: Synthetic oligonucleotide
  Antisense strand to SEQ ID NO: 1489134
aucauagucacuuuaauga

SEQ ID NO: 1489136 - RNA, 19 nt, Artificial Sequence
  Description of Artificial Sequence: Synthetic oligonucleotide
  Sense strand starting at position 3854 of SEQ ID NO: 1244445
uugguuuauugaccauacu

SEQ ID NO: 1489137 - RNA, 19 nt, Artificial Sequence
  Description of Artificial Sequence: Synthetic oligonucleotide
  Antisense strand to SEQ ID NO: 1489136
aguauggucaauaaaccaa

SEQ ID NO: 1489138 - RNA, 19 nt, Artificial Sequence
  Description of Artificial Sequence: Synthetic oligonucleotide
  Sense strand starting at position 3855 of SEQ ID NO: 1244445
ugguuuauugaccauacuu

SEQ ID NO: 1489139 - RNA, 19 nt, Artificial Sequence
  Description of Artificial Sequence: Synthetic oligonucleotide
  Antisense strand to SEQ ID NO: 1489138
aaguauggucaauaaacca

SEQ ID NO: 1489140 - RNA, 19 nt, Artificial Sequence
  Description of Artificial Sequence: Synthetic oligonucleotide
  Sense strand starting at position 3857 of SEQ ID NO: 1244445
guuuauugaccauacuucu

SEQ ID NO: 1489141 - RNA, 19 nt, Artificial Sequence
  Description of Artificial Sequence: Synthetic oligonucleotide
  Antisense strand to SEQ ID NO: 1489140
agaaguauggucaauaaac

SEQ ID NO: 1489142 - RNA, 19 nt, Artificial Sequence
  Description of Artificial Sequence: Synthetic oligonucleotide
  Sense strand starting at position 3956 of SEQ ID NO: 1244445
uaccacuuuguguauagua

SEQ ID NO: 1489143 - RNA, 19 nt, Artificial Sequence
  Description of Artificial Sequence: Synthetic oligonucleotide
  Antisense strand to SEQ ID NO: 1489142
uacuauacacaaaguggua

SEQ ID NO: 1489144 - RNA, 19 nt, Artificial Sequence
  Description of Artificial Sequence: Synthetic oligonucleotide
  Sense strand starting at position 3963 of SEQ ID NO: 1244445
uuguguauaguauaagaag

SEQ ID NO: 1489145 - RNA, 19 nt, Artificial Sequence
  Description of Artificial Sequence: Synthetic oligonucleotide
  Antisense strand to SEQ ID NO: 1489144
cuucuuauacuauacacaa

SEQ ID NO: 1489146 - RNA, 19 nt, Artificial Sequence
  Description of Artificial Sequence: Synthetic oligonucleotide
  Sense strand starting at position 712 of SEQ ID NO: 1244446
ccgcgcuugcuaucuaaga

SEQ ID NO: 1489147 - RNA, 19 nt, Artificial Sequence
  Description of Artificial Sequence: Synthetic oligonucleotide
  Antisense strand to SEQ ID NO: 1489146
ucuuagauagcaagcgcgg

SEQ ID NO: 1489148 - RNA, 19 nt, Artificial Sequence
  Description of Artificial Sequence: Synthetic oligonucleotide
  Sense strand starting at position 713 of SEQ ID NO: 1244446
cgcgcuugcuaucuaagau

SEQ ID NO: 1489149 - RNA, 19 nt, Artificial Sequence
  Description of Artificial Sequence: Synthetic oligonucleotide
  Antisense strand to SEQ ID NO: 1489148
aucuuagauagcaagcgcg

SEQ ID NO: 1489150 - RNA, 19 nt, Artificial Sequence
  Description of Artificial Sequence: Synthetic oligonucleotide
  Sense strand starting at position 714 of SEQ ID NO: 1244446
gcgcuugcuaucuaagauc

SEQ ID NO: 1489151 - RNA, 19 nt, Artificial Sequence
  Description of Artificial Sequence: Synthetic oligonucleotide
  Antisense strand to SEQ ID NO: 1489150
gaucuuagauagcaagcgc

SEQ ID NO: 1489152 - RNA, 19 nt, Artificial Sequence
  Description of Artificial Sequence: Synthetic oligonucleotide
  Sense strand starting at position 873 of SEQ ID NO: 1244446
gccaucugucauggguauu

SEQ ID NO: 1489153 - RNA, 19 nt, Artificial Sequence
  Description of Artificial Sequence: Synthetic oligonucleotide
  Antisense strand to SEQ ID NO: 1489152
aauacccaugacagauggc

SEQ ID NO: 1489154 - RNA, 19 nt, Artificial Sequence
  Description of Artificial Sequence: Synthetic oligonucleotide
  Sense strand starting at position 876 of SEQ ID NO: 1244446
aucugucauggguauuauu

SEQ ID NO: 1489155 - RNA, 19 nt, Artificial Sequence
  Description of Artificial Sequence: Synthetic oligonucleotide
  Antisense strand to SEQ ID NO: 1489154
aauaauacccaugacagau

SEQ ID NO: 1489156 - RNA, 19 nt, Artificial Sequence
  Description of Artificial Sequence: Synthetic oligonucleotide
  Sense strand starting at position 960 of SEQ ID NO: 1244446
cgaacuguguccuugucau

SEQ ID NO: 1489157 - RNA, 19 nt, Artificial Sequence
  Description of Artificial Sequence: Synthetic oligonucleotide
  Antisense strand to SEQ ID NO: 1489156
augacaaggacacaguucg

SEQ ID NO: 1489158 - RNA, 19 nt, Artificial Sequence
  Description of Artificial Sequence: Synthetic oligonucleotide
  Sense strand starting at position 964 of SEQ ID NO: 1244446
cuguguccuugucaucaau

SEQ ID NO: 1489159 - RNA, 19 nt, Artificial Sequence
  Description of Artificial Sequence: Synthetic oligonucleotide
  Antisense strand to SEQ ID NO: 1489158
auugaugacaaggacacag

SEQ ID NO: 1489160 - RNA, 19 nt, Artificial Sequence
  Description of Artificial Sequence: Synthetic oligonucleotide
  Sense strand starting at position 966 of SEQ ID NO: 1244446
guguccuugucaucaauga

SEQ ID NO: 1489161 - RNA, 19 nt, Artificial Sequence
  Description of Artificial Sequence: Synthetic oligonucleotide
  Antisense strand to SEQ ID NO: 1489160
ucauugaugacaaggacac

SEQ ID NO: 1489162 - RNA, 19 nt, Artificial Sequence
  Description of Artificial Sequence: Synthetic oligonucleotide
  Sense strand starting at position 1006 of SEQ ID NO: 1244446
ucuugucccuugucaggau

SEQ ID NO: 1489163 - RNA, 19 nt, Artificial Sequence
  Description of Artificial Sequence: Synthetic oligonucleotide
  Antisense strand to SEQ ID NO: 1489162
auccugacaagggacaaga

SEQ ID NO: 1489164 - RNA, 19 nt, Artificial Sequence
  Description of Artificial Sequence: Synthetic oligonucleotide
  Sense strand starting at position 1009 of SEQ ID NO: 1244446
ugucccuugucaggauaau

SEQ ID NO: 1489165 - RNA, 19 nt, Artificial Sequence
  Description of Artificial Sequence: Synthetic oligonucleotide
  Antisense strand to SEQ ID NO: 1489164
auuauccugacaagggaca

SEQ ID NO: 1489166 - RNA, 19 nt, Artificial Sequence
  Description of Artificial Sequence: Synthetic oligonucleotide
  Sense strand starting at position 1010 of SEQ ID NO: 1244446
gucccuugucaggauaauu

SEQ ID NO: 1489167 - RNA, 19 nt, Artificial Sequence
  Description of Artificial Sequence: Synthetic oligonucleotide
  Antisense strand to SEQ ID NO: 1489166
aauuauccugacaagggac

SEQ ID NO: 1489168 - RNA, 19 nt, Artificial Sequence
  Description of Artificial Sequence: Synthetic oligonucleotide
  Sense strand starting at position 1018 of SEQ ID NO: 1244446
ucaggauaauucguucuac

SEQ ID NO: 1489169 - RNA, 19 nt, Artificial Sequence
  Description of Artificial Sequence: Synthetic oligonucleotide
  Antisense strand to SEQ ID NO: 1489168
guagaacgaauuauccuga

SEQ ID NO: 1489170 - RNA, 19 nt, Artificial Sequence
  Description of Artificial Sequence: Synthetic oligonucleotide
  Sense strand starting at position 1022 of SEQ ID NO: 1244446
gauaauucguucuacgaac

SEQ ID NO: 1489171 - RNA, 19 nt, Artificial Sequence
  Description of Artificial Sequence: Synthetic oligonucleotide
  Antisense strand to SEQ ID NO: 1489170
guucguagaacgaauuauc

SEQ ID NO: 1489172 - RNA, 19 nt, Artificial Sequence
  Description of Artificial Sequence: Synthetic oligonucleotide
  Sense strand starting at position 1093 of SEQ ID NO: 1244446
gugaguagggccugaugga

SEQ ID NO: 1489173 - RNA, 19 nt, Artificial Sequence
  Description of Artificial Sequence: Synthetic oligonucleotide
  Antisense strand to SEQ ID NO: 1489172
uccaucaggcccuacucac

SEQ ID NO: 1489174 - RNA, 19 nt, Artificial Sequence
  Description of Artificial Sequence: Synthetic oligonucleotide
  Sense strand starting at position 1474 of SEQ ID NO: 1244446
uggccacuuuauccugaaa

SEQ ID NO: 1489175 - RNA, 19 nt, Artificial Sequence
  Description of Artificial Sequence: Synthetic oligonucleotide
  Antisense strand to SEQ ID NO: 1489174
uuucaggauaaaguggcca

SEQ ID NO: 1489176 - RNA, 19 nt, Artificial Sequence
  Description of Artificial Sequence: Synthetic oligonucleotide
  Sense strand starting at position 1476 of SEQ ID NO: 1244446
gccacuuuauccugaaaga

SEQ ID NO: 1489177 - RNA, 19 nt, Artificial Sequence
  Description of Artificial Sequence: Synthetic oligonucleotide
  Antisense strand to SEQ ID NO: 1489176
ucuuucaggauaaaguggc

SEQ ID NO: 1489178 - RNA, 19 nt, Artificial Sequence
  Description of Artificial Sequence: Synthetic oligonucleotide
  Sense strand starting at position 2246 of SEQ ID NO: 1244446
aagggaugcucugaaauac

SEQ ID NO: 1489179 - RNA, 19 nt, Artificial Sequence
  Description of Artificial Sequence: Synthetic oligonucleotide
  Antisense strand to SEQ ID NO: 1489178
guauuucagagcaucccuu

SEQ ID NO: 1489180 - RNA, 19 nt, Artificial Sequence
  Description of Artificial Sequence: Synthetic oligonucleotide
  Sense strand starting at position 2256 of SEQ ID NO: 1244446
cugaaauacugggaagcau

SEQ ID NO: 1489181 - RNA, 19 nt, Artificial Sequence
  Description of Artificial Sequence: Synthetic oligonucleotide
  Antisense strand to SEQ ID NO: 1489180
augcuucccaguauuucag

SEQ ID NO: 1489182 - RNA, 19 nt, Artificial Sequence
  Description of Artificial Sequence: Synthetic oligonucleotide
  Sense strand starting at position 2268 of SEQ ID NO: 1244446
gaagcaucuaacgaggagu

SEQ ID NO: 1489183 - RNA, 19 nt, Artificial Sequence
  Description of Artificial Sequence: Synthetic oligonucleotide
  Antisense strand to SEQ ID NO: 1489182
acuccucguuagaugcuuc

SEQ ID NO: 1489184 - RNA, 19 nt, Artificial Sequence
  Description of Artificial Sequence: Synthetic oligonucleotide
  Sense strand starting at position 2271 of SEQ ID NO: 1244446
gcaucuaacgaggagucaa

SEQ ID NO: 1489185 - RNA, 19 nt, Artificial Sequence
  Description of Artificial Sequence: Synthetic oligonucleotide
  Antisense strand to SEQ ID NO: 1489184
uugacuccucguuagaugc

SEQ ID NO: 1489186 - RNA, 19 nt, Artificial Sequence
  Description of Artificial Sequence: Synthetic oligonucleotide
  Sense strand starting at position 2279 of SEQ ID NO: 1244446
cgaggagucaaggguccua

SEQ ID NO: 1489187 - RNA, 19 nt, Artificial Sequence
  Description of Artificial Sequence: Synthetic oligonucleotide
  Antisense strand to SEQ ID NO: 1489186
uaggacccuugacuccucg

SEQ ID NO: 1489188 - RNA, 19 nt, Artificial Sequence
  Description of Artificial Sequence: Synthetic oligonucleotide
  Sense strand starting at position 2676 of SEQ ID NO: 1244446
gauugcuuucgucugugca

SEQ ID NO: 1489189 - RNA, 19 nt, Artificial Sequence
  Description of Artificial Sequence: Synthetic oligonucleotide
  Antisense strand to SEQ ID NO: 1489188
ugcacagacgaaagcaauc

SEQ ID NO: 1489190 - RNA, 19 nt, Artificial Sequence
  Description of Artificial Sequence: Synthetic oligonucleotide
  Sense strand starting at position 2703 of SEQ ID NO: 1244446
ggaacaaucccucgaggac

SEQ ID NO: 1489191 - RNA, 19 nt, Artificial Sequence
  Description of Artificial Sequence: Synthetic oligonucleotide
  Antisense strand to SEQ ID NO: 1489190
guccucgagggauuguucc

SEQ ID NO: 1489192 - RNA, 19 nt, Artificial Sequence
  Description of Artificial Sequence: Synthetic oligonucleotide
  Sense strand starting at position 2729 of SEQ ID NO: 1244446
ugaaaugaaucuguuaacu

SEQ ID NO: 1489193 - RNA, 19 nt, Artificial Sequence
  Description of Artificial Sequence: Synthetic oligonucleotide
  Antisense strand to SEQ ID NO: 1489192
aguuaacagauucauuuca

SEQ ID NO: 1489194 - RNA, 19 nt, Artificial Sequence
  Description of Artificial Sequence: Synthetic oligonucleotide
  Sense strand starting at position 2740 of SEQ ID NO: 1244446
uguuaacugguuuguguaa

SEQ ID NO: 1489195 - RNA, 19 nt, Artificial Sequence
  Description of Artificial Sequence: Synthetic oligonucleotide
  Antisense strand to SEQ ID NO: 1489194
uuacacaaaccaguuaaca

SEQ ID NO: 1489196 - RNA, 19 nt, Artificial Sequence
  Description of Artificial Sequence: Synthetic oligonucleotide
  Sense strand starting at position 2752 of SEQ ID NO: 1244446
uguguaagucuagcucguu

SEQ ID NO: 1489197 - RNA, 19 nt, Artificial Sequence
  Description of Artificial Sequence: Synthetic oligonucleotide
  Antisense strand to SEQ ID NO: 1489196
aacgagcuagacuuacaca

SEQ ID NO: 1489198 - RNA, 19 nt, Artificial Sequence
  Description of Artificial Sequence: Synthetic oligonucleotide
  Sense strand starting at position 2753 of SEQ ID NO: 1244446
guguaagucuagcucguua

SEQ ID NO: 1489199 - RNA, 19 nt, Artificial Sequence
  Description of Artificial Sequence: Synthetic oligonucleotide
  Antisense strand to SEQ ID NO: 1489198
uaacgagcuagacuuacac

SEQ ID NO: 1489200 - RNA, 19 nt, Artificial Sequence
  Description of Artificial Sequence: Synthetic oligonucleotide
  Sense strand starting at position 2755 of SEQ ID NO: 1244446
guaagucuagcucguuaag

SEQ ID NO: 1489201 - RNA, 19 nt, Artificial Sequence
  Description of Artificial Sequence: Synthetic oligonucleotide
  Antisense strand to SEQ ID NO: 1489200
cuuaacgagcuagacuuac

SEQ ID NO: 1489202 - RNA, 19 nt, Artificial Sequence
  Description of Artificial Sequence: Synthetic oligonucleotide
  Sense strand starting at position 2757 of SEQ ID NO: 1244446
aagucuagcucguuaagag

SEQ ID NO: 1489203 - RNA, 19 nt, Artificial Sequence
  Description of Artificial Sequence: Synthetic oligonucleotide
  Antisense strand to SEQ ID NO: 1489202
cucuuaacgagcuagacuu

SEQ ID NO: 1489204 - RNA, 19 nt, Artificial Sequence
  Description of Artificial Sequence: Synthetic oligonucleotide
  Sense strand starting at position 2758 of SEQ ID NO: 1244446
agucuagcucguuaagaga

SEQ ID NO: 1489205 - RNA, 19 nt, Artificial Sequence
  Description of Artificial Sequence: Synthetic oligonucleotide
  Antisense strand to SEQ ID NO: 1489204
ucucuuaacgagcuagacu

SEQ ID NO: 1489206 - RNA, 19 nt, Artificial Sequence
  Description of Artificial Sequence: Synthetic oligonucleotide
  Sense strand starting at position 2784 of SEQ ID NO: 1244446
acacuagaguuggcuugaa

SEQ ID NO: 1489207 - RNA, 19 nt, Artificial Sequence
  Description of Artificial Sequence: Synthetic oligonucleotide
  Antisense strand to SEQ ID NO: 1489206
uucaagccaacucuagugu

SEQ ID NO: 1489208 - RNA, 19 nt, Artificial Sequence
  Description of Artificial Sequence: Synthetic oligonucleotide
  Sense strand starting at position 2788 of SEQ ID NO: 1244446
uagaguuggcuugaaacau

SEQ ID NO: 1489209 - RNA, 19 nt, Artificial Sequence
  Description of Artificial Sequence: Synthetic oligonucleotide
  Antisense strand to SEQ ID NO: 1489208
auguuucaagccaacucua

SEQ ID NO: 1489210 - RNA, 19 nt, Artificial Sequence
  Description of Artificial Sequence: Synthetic oligonucleotide
  Sense strand starting at position 2796 of SEQ ID NO: 1244446
gcuugaaacaugggagcuu

SEQ ID NO: 1489211 - RNA, 19 nt, Artificial Sequence
  Description of Artificial Sequence: Synthetic oligonucleotide
  Antisense strand to SEQ ID NO: 1489210
aagcucccauguuucaagc

SEQ ID NO: 1489212 - RNA, 19 nt, Artificial Sequence
  Description of Artificial Sequence: Synthetic oligonucleotide
  Sense strand starting at position 2807 of SEQ ID NO: 1244446
gggagcuucaagugugguu

SEQ ID NO: 1489213 - RNA, 19 nt, Artificial Sequence
  Description of Artificial Sequence: Synthetic oligonucleotide
  Antisense strand to SEQ ID NO: 1489212
aaccacacuugaagcuccc

SEQ ID NO: 1489214 - RNA, 19 nt, Artificial Sequence
  Description of Artificial Sequence: Synthetic oligonucleotide
  Sense strand starting at position 2866 of SEQ ID NO: 1244446
gacuguccucaggacuuua

SEQ ID NO: 1489215 - RNA, 19 nt, Artificial Sequence
  Description of Artificial Sequence: Synthetic oligonucleotide
  Antisense strand to SEQ ID NO: 1489214
uaaaguccugaggacaguc

SEQ ID NO: 1489216 - RNA, 19 nt, Artificial Sequence
  Description of Artificial Sequence: Synthetic oligonucleotide
  Sense strand starting at position 3035 of SEQ ID NO: 1244446
gagaaauccugucgcuacu

SEQ ID NO: 1489217 - RNA, 19 nt, Artificial Sequence
  Description of Artificial Sequence: Synthetic oligonucleotide
  Antisense strand to SEQ ID NO: 1489216
aguagcgacaggauuucuc

SEQ ID NO: 1489218 - RNA, 19 nt, Artificial Sequence
  Description of Artificial Sequence: Synthetic oligonucleotide
  Sense strand starting at position 3235 of SEQ ID NO: 1244446
caugcugaacugugauaca

SEQ ID NO: 1489219 - RNA, 19 nt, Artificial Sequence
  Description of Artificial Sequence: Synthetic oligonucleotide
  Antisense strand to SEQ ID NO: 1489218
uguaucacaguucagcaug

SEQ ID NO: 1489220 - RNA, 19 nt, Artificial Sequence
  Description of Artificial Sequence: Synthetic oligonucleotide
  Sense strand starting at position 3238 of SEQ ID NO: 1244446
gcugaacugugauacauuu

SEQ ID NO: 1489221 - RNA, 19 nt, Artificial Sequence
  Description of Artificial Sequence: Synthetic oligonucleotide
  Antisense strand to SEQ ID NO: 1489220
aaauguaucacaguucagc

SEQ ID NO: 1489222 - RNA, 19 nt, Artificial Sequence
  Description of Artificial Sequence: Synthetic oligonucleotide
  Sense strand starting at position 3273 of SEQ ID NO: 1244446
uguggaugucaugaaacuu

SEQ ID NO: 1489223 - RNA, 19 nt, Artificial Sequence
  Description of Artificial Sequence: Synthetic oligonucleotide
  Antisense strand to SEQ ID NO: 1489222
aaguuucaugacauccaca

SEQ ID NO: 1489224 - RNA, 19 nt, Artificial Sequence
  Description of Artificial Sequence: Synthetic oligonucleotide
  Sense strand starting at position 3647 of SEQ ID NO: 1244446
ggcccaucucgccauuguu

SEQ ID NO: 1489225 - RNA, 19 nt, Artificial Sequence
  Description of Artificial Sequence: Synthetic oligonucleotide
  Antisense strand to SEQ ID NO: 1489224
aacaauggcgagaugggcc

SEQ ID NO: 1489226 - RNA, 19 nt, Artificial Sequence
  Description of Artificial Sequence: Synthetic oligonucleotide
  Sense strand starting at position 327 of SEQ ID NO: 1244447
auuagcuagguguaauguu

SEQ ID NO: 1489227 - RNA, 19 nt, Artificial Sequence
  Description of Artificial Sequence: Synthetic oligonucleotide
  Antisense strand to SEQ ID NO: 1489226
aacauuacaccuagcuaau

SEQ ID NO: 1489228 - RNA, 19 nt, Artificial Sequence
  Description of Artificial Sequence: Synthetic oligonucleotide
  Sense strand starting at position 341 of SEQ ID NO: 1244447
auguuacaugcuuguaguu

SEQ ID NO: 1489229 - RNA, 19 nt, Artificial Sequence
  Description of Artificial Sequence: Synthetic oligonucleotide
  Antisense strand to SEQ ID NO: 1489228
aacuacaagcauguaacau

SEQ ID NO: 1489230 - RNA, 19 nt, Artificial Sequence
  Description of Artificial Sequence: Synthetic oligonucleotide
  Sense strand starting at position 500 of SEQ ID NO: 1244447
cugccauuuggcuguauga

SEQ ID NO: 1489231 - RNA, 19 nt, Artificial Sequence
  Description of Artificial Sequence: Synthetic oligonucleotide
  Antisense strand to SEQ ID NO: 1489230
ucauacagccaaauggcag

SEQ ID NO: 1489232 - RNA, 19 nt, Artificial Sequence
  Description of Artificial Sequence: Synthetic oligonucleotide
  Sense strand starting at position 532 of SEQ ID NO: 1244447
gcugaaccuccagaauguu

SEQ ID NO: 1489233 - RNA, 19 nt, Artificial Sequence
  Description of Artificial Sequence: Synthetic oligonucleotide
  Antisense strand to SEQ ID NO: 1489232
aacauucuggagguucagc

SEQ ID NO: 1489234 - RNA, 19 nt, Artificial Sequence
  Description of Artificial Sequence: Synthetic oligonucleotide
  Sense strand starting at position 612 of SEQ ID NO: 1244447
aucauauguccuggccagu

SEQ ID NO: 1489235 - RNA, 19 nt, Artificial Sequence
  Description of Artificial Sequence: Synthetic oligonucleotide
  Antisense strand to SEQ ID NO: 1489234
acuggccaggacauaugau

SEQ ID NO: 1489236 - RNA, 19 nt, Artificial Sequence
  Description of Artificial Sequence: Synthetic oligonucleotide
  Sense strand starting at position 618 of SEQ ID NO: 1244447
uguccuggccaguaaggaa

SEQ ID NO: 1489237 - RNA, 19 nt, Artificial Sequence
  Description of Artificial Sequence: Synthetic oligonucleotide
  Antisense strand to SEQ ID NO: 1489236
uuccuuacuggccaggaca

SEQ ID NO: 1489238 - RNA, 19 nt, Artificial Sequence
  Description of Artificial Sequence: Synthetic oligonucleotide
  Sense strand starting at position 709 of SEQ ID NO: 1244447
gucucuauacuggaaucuu

SEQ ID NO: 1489239 - RNA, 19 nt, Artificial Sequence
  Description of Artificial Sequence: Synthetic oligonucleotide
  Antisense strand to SEQ ID NO: 1489238
aagauuccaguauagagac

SEQ ID NO: 1489240 - RNA, 19 nt, Artificial Sequence
  Description of Artificial Sequence: Synthetic oligonucleotide
  Sense strand starting at position 718 of SEQ ID NO: 1244447
cuggaaucuuugguuccaa

SEQ ID NO: 1489241 - RNA, 19 nt, Artificial Sequence
  Description of Artificial Sequence: Synthetic oligonucleotide
  Antisense strand to SEQ ID NO: 1489240
uuggaaccaaagauuccag

SEQ ID NO: 1489242 - RNA, 19 nt, Artificial Sequence
  Description of Artificial Sequence: Synthetic oligonucleotide
  Sense strand starting at position 719 of SEQ ID NO: 1244447
uggaaucuuugguuccaau

SEQ ID NO: 1489243 - RNA, 19 nt, Artificial Sequence
  Description of Artificial Sequence: Synthetic oligonucleotide
  Antisense strand to SEQ ID NO: 1489242
auuggaaccaaagauucca

SEQ ID NO: 1489244 - RNA, 19 nt, Artificial Sequence
  Description of Artificial Sequence: Synthetic oligonucleotide
  Sense strand starting at position 806 of SEQ ID NO: 1244447
cgacacuccucacugauga

SEQ ID NO: 1489245 - RNA, 19 nt, Artificial Sequence
  Description of Artificial Sequence: Synthetic oligonucleotide
  Antisense strand to SEQ ID NO: 1489244
ucaucagugaggagugucg

SEQ ID NO: 1489246 - RNA, 19 nt, Artificial Sequence
  Description of Artificial Sequence: Synthetic oligonucleotide
  Sense strand starting at position 915 of SEQ ID NO: 1244447
gcuagaaugugacuuacug

SEQ ID NO: 1489247 - RNA, 19 nt, Artificial Sequence
  Description of Artificial Sequence: Synthetic oligonucleotide
  Antisense strand to SEQ ID NO: 1489246
caguaagucacauucuagc

SEQ ID NO: 1489248 - RNA, 19 nt, Artificial Sequence
  Description of Artificial Sequence: Synthetic oligonucleotide
  Sense strand starting at position 919 of SEQ ID NO: 1244447
gaaugugacuuacuguaag

SEQ ID NO: 1489249 - RNA, 19 nt, Artificial Sequence
  Description of Artificial Sequence: Synthetic oligonucleotide
  Antisense strand to SEQ ID NO: 1489248
cuuacaguaagucacauuc

SEQ ID NO: 1489250 - RNA, 19 nt, Artificial Sequence
  Description of Artificial Sequence: Synthetic oligonucleotide
  Sense strand starting at position 925 of SEQ ID NO: 1244447
gacuuacuguaagaagaag

SEQ ID NO: 1489251 - RNA, 19 nt, Artificial Sequence
  Description of Artificial Sequence: Synthetic oligonucleotide
  Antisense strand to SEQ ID NO: 1489250
cuucuucuuacaguaaguc

SEQ ID NO: 1489252 - RNA, 19 nt, Artificial Sequence
  Description of Artificial Sequence: Synthetic oligonucleotide
  Sense strand starting at position 943 of SEQ ID NO: 1244447
gggcaucgcuuuccauuau

SEQ ID NO: 1489253 - RNA, 19 nt, Artificial Sequence
  Description of Artificial Sequence: Synthetic oligonucleotide
  Antisense strand to SEQ ID NO: 1489252
auaauggaaagcgaugccc

SEQ ID NO: 1489254 - RNA, 19 nt, Artificial Sequence
  Description of Artificial Sequence: Synthetic oligonucleotide
  Sense strand starting at position 1128 of SEQ ID NO: 1244447
ggaguuaccgagugacaca

SEQ ID NO: 1489255 - RNA, 19 nt, Artificial Sequence
  Description of Artificial Sequence: Synthetic oligonucleotide
  Antisense strand to SEQ ID NO: 1489254
ugugucacucgguaacucc

SEQ ID NO: 1489256 - RNA, 19 nt, Artificial Sequence
  Description of Artificial Sequence: Synthetic oligonucleotide
  Sense strand starting at position 1168 of SEQ ID NO: 1244447
ccuaauuaguacccguuaa

SEQ ID NO: 1489257 - RNA, 19 nt, Artificial Sequence
  Description of Artificial Sequence: Synthetic oligonucleotide
  Antisense strand to SEQ ID NO: 1489256
uuaacggguacuaauuagg

SEQ ID NO: 1489258 - RNA, 19 nt, Artificial Sequence
  Description of Artificial Sequence: Synthetic oligonucleotide
  Sense strand starting at position 1178 of SEQ ID NO: 1244447
acccguuaacccugaggaa

SEQ ID NO: 1489259 - RNA, 19 nt, Artificial Sequence
  Description of Artificial Sequence: Synthetic oligonucleotide
  Antisense strand to SEQ ID NO: 1489258
uuccucaggguuaacgggu

SEQ ID NO: 1489260 - RNA, 19 nt, Artificial Sequence
  Description of Artificial Sequence: Synthetic oligonucleotide
  Sense strand starting at position 1179 of SEQ ID NO: 1244447
cccguuaacccugaggaaa

SEQ ID NO: 1489261 - RNA, 19 nt, Artificial Sequence
  Description of Artificial Sequence: Synthetic oligonucleotide
  Antisense strand to SEQ ID NO: 1489260
uuuccucaggguuaacggg

SEQ ID NO: 1489262 - RNA, 19 nt, Artificial Sequence
  Description of Artificial Sequence: Synthetic oligonucleotide
  Sense strand starting at position 1259 of SEQ ID NO: 1244447
ucaggucccuccuaagaga

SEQ ID NO: 1489263 - RNA, 19 nt, Artificial Sequence
  Description of Artificial Sequence: Synthetic oligonucleotide
  Antisense strand to SEQ ID NO: 1489262
ucucuuaggagggaccuga

SEQ ID NO: 1489264 - RNA, 19 nt, Artificial Sequence
  Description of Artificial Sequence: Synthetic oligonucleotide
  Sense strand starting at position 1363 of SEQ ID NO: 1244447
gggcgccuucuguccaauu

SEQ ID NO: 1489265 - RNA, 19 nt, Artificial Sequence
  Description of Artificial Sequence: Synthetic oligonucleotide
  Antisense strand to SEQ ID NO: 1489264
aauuggacagaaggcgccc

SEQ ID NO: 1489266 - RNA, 19 nt, Artificial Sequence
  Description of Artificial Sequence: Synthetic oligonucleotide
  Sense strand starting at position 1395 of SEQ ID NO: 1244447
ugaccauauugagaaaucu

SEQ ID NO: 1489267 - RNA, 19 nt, Artificial Sequence
  Description of Artificial Sequence: Synthetic oligonucleotide
  Antisense strand to SEQ ID NO: 1489266
agauuucucaauaugguca

SEQ ID NO: 1489268 - RNA, 19 nt, Artificial Sequence
  Description of Artificial Sequence: Synthetic oligonucleotide
  Sense strand starting at position 2095 of SEQ ID NO: 1244447
gccgguugcgcuaggcaaa

SEQ ID NO: 1489269 - RNA, 19 nt, Artificial Sequence
  Description of Artificial Sequence: Synthetic oligonucleotide
  Antisense strand to SEQ ID NO: 1489268
uuugccuagcgcaaccggc

SEQ ID NO: 1489270 - RNA, 19 nt, Artificial Sequence
  Description of Artificial Sequence: Synthetic oligonucleotide
  Sense strand starting at position 2116 of SEQ ID NO: 1244447
ggaggaggguucuauuuau

SEQ ID NO: 1489271 - RNA, 19 nt, Artificial Sequence
  Description of Artificial Sequence: Synthetic oligonucleotide
  Antisense strand to SEQ ID NO: 1489270
auaaauagaacccuccucc

SEQ ID NO: 1489272 - RNA, 19 nt, Artificial Sequence
  Description of Artificial Sequence: Synthetic oligonucleotide
  Sense strand starting at position 2123 of SEQ ID NO: 1244447
gguucuauuuauuaugaag

SEQ ID NO: 1489273 - RNA, 19 nt, Artificial Sequence
  Description of Artificial Sequence: Synthetic oligonucleotide
  Antisense strand to SEQ ID NO: 1489272
cuucauaauaaauagaacc

SEQ ID NO: 1489274 - RNA, 19 nt, Artificial Sequence
  Description of Artificial Sequence: Synthetic oligonucleotide
  Sense strand starting at position 2239 of SEQ ID NO: 1244447
ggcugaaaguuugugacaa

SEQ ID NO: 1489275 - RNA, 19 nt, Artificial Sequence
  Description of Artificial Sequence: Synthetic oligonucleotide
  Antisense strand to SEQ ID NO: 1489274
uugucacaaacuuucagcc

SEQ ID NO: 1489276 - RNA, 19 nt, Artificial Sequence
  Description of Artificial Sequence: Synthetic oligonucleotide
  Sense strand starting at position 2324 of SEQ ID NO: 1244447
ggaugaucgcuugagccga

SEQ ID NO: 1489277 - RNA, 19 nt, Artificial Sequence
  Description of Artificial Sequence: Synthetic oligonucleotide
  Antisense strand to SEQ ID NO: 1489276
ucggcucaagcgaucaucc

SEQ ID NO: 1489278 - RNA, 19 nt, Artificial Sequence
  Description of Artificial Sequence: Synthetic oligonucleotide
  Sense strand starting at position 2494 of SEQ ID NO: 1244447
ccaguaggccgagaucaua

SEQ ID NO: 1489279 - RNA, 19 nt, Artificial Sequence
  Description of Artificial Sequence: Synthetic oligonucleotide
  Antisense strand to SEQ ID NO: 1489278
uaugaucucggccuacugg

SEQ ID NO: 1489280 - RNA, 19 nt, Artificial Sequence
  Description of Artificial Sequence: Synthetic oligonucleotide
  Sense strand starting at position 2641 of SEQ ID NO: 1244447
cucuguuaacuaggccauu

SEQ ID NO: 1489281 - RNA, 19 nt, Artificial Sequence
  Description of Artificial Sequence: Synthetic oligonucleotide
  Antisense strand to SEQ ID NO: 1489280
aauggccuaguuaacagag

SEQ ID NO: 1489282 - RNA, 19 nt, Artificial Sequence
  Description of Artificial Sequence: Synthetic oligonucleotide
  Sense strand starting at position 2712 of SEQ ID NO: 1244447
cgggacagcuuucugaaau

SEQ ID NO: 1489283 - RNA, 19 nt, Artificial Sequence
  Description of Artificial Sequence: Synthetic oligonucleotide
  Antisense strand to SEQ ID NO: 1489282
auuucagaaagcugucccg

SEQ ID NO: 1489284 - RNA, 19 nt, Artificial Sequence
  Description of Artificial Sequence: Synthetic oligonucleotide
  Sense strand starting at position 2723 of SEQ ID NO: 1244447
ucugaaauguaaucagcgu

SEQ ID NO: 1489285 - RNA, 19 nt, Artificial Sequence
  Description of Artificial Sequence: Synthetic oligonucleotide
  Antisense strand to SEQ ID NO: 1489284
acgcugauuacauuucaga

SEQ ID NO: 1489286 - RNA, 19 nt, Artificial Sequence
  Description of Artificial Sequence: Synthetic oligonucleotide
  Sense strand starting at position 2724 of SEQ ID NO: 1244447
cugaaauguaaucagcguu

SEQ ID NO: 1489287 - RNA, 19 nt, Artificial Sequence
  Description of Artificial Sequence: Synthetic oligonucleotide
  Antisense strand to SEQ ID NO: 1489286
aacgcugauuacauuucag

SEQ ID NO: 1489288 - RNA, 19 nt, Artificial Sequence
  Description of Artificial Sequence: Synthetic oligonucleotide
  Sense strand starting at position 2876 of SEQ ID NO: 1244447
cgagacccgucccuagaaa

SEQ ID NO: 1489289 - RNA, 19 nt, Artificial Sequence
  Description of Artificial Sequence: Synthetic oligonucleotide
  Antisense strand to SEQ ID NO: 1489288
uuucuagggacgggucucg

SEQ ID NO: 1489290 - RNA, 19 nt, Artificial Sequence
  Description of Artificial Sequence: Synthetic oligonucleotide
  Sense strand starting at position 3232 of SEQ ID NO: 1244447
ggauuuccuugaguucggu

SEQ ID NO: 1489291 - RNA, 19 nt, Artificial Sequence
  Description of Artificial Sequence: Synthetic oligonucleotide
  Antisense strand to SEQ ID NO: 1489290
accgaacucaaggaaaucc

SEQ ID NO: 1489292 - RNA, 19 nt, Artificial Sequence
  Description of Artificial Sequence: Synthetic oligonucleotide
  Sense strand starting at position 3238 of SEQ ID NO: 1244447
ccuugaguucggugucuag

SEQ ID NO: 1489293 - RNA, 19 nt, Artificial Sequence
  Description of Artificial Sequence: Synthetic oligonucleotide
  Antisense strand to SEQ ID NO: 1489292
cuagacaccgaacucaagg

SEQ ID NO: 1489294 - RNA, 19 nt, Artificial Sequence
  Description of Artificial Sequence: Synthetic oligonucleotide
  Sense strand starting at position 3286 of SEQ ID NO: 1244447
augaaugcuccagggauag

SEQ ID NO: 1489295 - RNA, 19 nt, Artificial Sequence
  Description of Artificial Sequence: Synthetic oligonucleotide
  Antisense strand to SEQ ID NO: 1489294
cuaucccuggagcauucau

SEQ ID NO: 1489296 - RNA, 19 nt, Artificial Sequence
  Description of Artificial Sequence: Synthetic oligonucleotide
  Sense strand starting at position 3307 of SEQ ID NO: 1244447
accuguaucaggugaguaa

SEQ ID NO: 1489297 - RNA, 19 nt, Artificial Sequence
  Description of Artificial Sequence: Synthetic oligonucleotide
  Antisense strand to SEQ ID NO: 1489296
uuacucaccugauacaggu

SEQ ID NO: 1489298 - RNA, 19 nt, Artificial Sequence
  Description of Artificial Sequence: Synthetic oligonucleotide
  Sense strand starting at position 3488 of SEQ ID NO: 1244447
agcacaauccugugugauc

SEQ ID NO: 1489299 - RNA, 19 nt, Artificial Sequence
  Description of Artificial Sequence: Synthetic oligonucleotide
  Antisense strand to SEQ ID NO: 1489298
gaucacacaggauugugcu

SEQ ID NO: 1489300 - RNA, 19 nt, Artificial Sequence
  Description of Artificial Sequence: Synthetic oligonucleotide
  Sense strand starting at position 3489 of SEQ ID NO: 1244447
gcacaauccugugugaucu

SEQ ID NO: 1489301 - RNA, 19 nt, Artificial Sequence
  Description of Artificial Sequence: Synthetic oligonucleotide
  Antisense strand to SEQ ID NO: 1489300
agaucacacaggauugugc

SEQ ID NO: 1489302 - RNA, 19 nt, Artificial Sequence
  Description of Artificial Sequence: Synthetic oligonucleotide
  Sense strand starting at position 3856 of SEQ ID NO: 1244447
guauaacaggguugccaaa

SEQ ID NO: 1489303 - RNA, 19 nt, Artificial Sequence
  Description of Artificial Sequence: Synthetic oligonucleotide
  Antisense strand to SEQ ID NO: 1489302
uuuggcaacccuguuauac

SEQ ID NO: 1489304 - RNA, 19 nt, Artificial Sequence
  Description of Artificial Sequence: Synthetic oligonucleotide
  Sense strand starting at position 3858 of SEQ ID NO: 1244447
auaacaggguugccaaauu

SEQ ID NO: 1489305 - RNA, 19 nt, Artificial Sequence
  Description of Artificial Sequence: Synthetic oligonucleotide
  Antisense strand to SEQ ID NO: 1489304
aauuuggcaacccuguuau

SEQ ID NO: 1489306 - RNA, 19 nt, Artificial Sequence
  Description of Artificial Sequence: Synthetic oligonucleotide
  Sense strand starting at position 59 of SEQ ID NO: 1244448
aguggaagccagcagauua

SEQ ID NO: 1489307 - RNA, 19 nt, Artificial Sequence
  Description of Artificial Sequence: Synthetic oligonucleotide
  Antisense strand to SEQ ID NO: 1489306
uaaucugcuggcuuccacu

SEQ ID NO: 1489308 - RNA, 19 nt, Artificial Sequence
  Description of Artificial Sequence: Synthetic oligonucleotide
  Sense strand starting at position 111 of SEQ ID NO: 1244448
uugccuugugcuuggaaac

SEQ ID NO: 1489309 - RNA, 19 nt, Artificial Sequence
  Description of Artificial Sequence: Synthetic oligonucleotide
  Antisense strand to SEQ ID NO: 1489308
guuuccaagcacaaggcaa

SEQ ID NO: 1489310 - RNA, 19 nt, Artificial Sequence
  Description of Artificial Sequence: Synthetic oligonucleotide
  Sense strand starting at position 213 of SEQ ID NO: 1244448
ugguuuccacguuaauaca

SEQ ID NO: 1489311 - RNA, 19 nt, Artificial Sequence
  Description of Artificial Sequence: Synthetic oligonucleotide
  Antisense strand to SEQ ID NO: 1489310
uguauuaacguggaaacca

SEQ ID NO: 1489312 - RNA, 19 nt, Artificial Sequence
  Description of Artificial Sequence: Synthetic oligonucleotide
  Sense strand starting at position 242 of SEQ ID NO: 1244448
gauauaugguguccagacu

SEQ ID NO: 1489313 - RNA, 19 nt, Artificial Sequence
  Description of Artificial Sequence: Synthetic oligonucleotide
  Antisense strand to SEQ ID NO: 1489312
agucuggacaccauauauc

SEQ ID NO: 1489314 - RNA, 19 nt, Artificial Sequence
  Description of Artificial Sequence: Synthetic oligonucleotide
  Sense strand starting at position 268 of SEQ ID NO: 1244448
ccgagcgcugccuauaaau

SEQ ID NO: 1489315 - RNA, 19 nt, Artificial Sequence
  Description of Artificial Sequence: Synthetic oligonucleotide
  Antisense strand to SEQ ID NO: 1489314
auuuauaggcagcgcucgg

SEQ ID NO: 1489316 - RNA, 19 nt, Artificial Sequence
  Description of Artificial Sequence: Synthetic oligonucleotide
  Sense strand starting at position 270 of SEQ ID NO: 1244448
gagcgcugccuauaaauga

SEQ ID NO: 1489317 - RNA, 19 nt, Artificial Sequence
  Description of Artificial Sequence: Synthetic oligonucleotide
  Antisense strand to SEQ ID NO: 1489316
ucauuuauaggcagcgcuc

SEQ ID NO: 1489318 - RNA, 19 nt, Artificial Sequence
  Description of Artificial Sequence: Synthetic oligonucleotide
  Sense strand starting at position 325 of SEQ ID NO: 1244448
cagaaaguaccagggcauu

SEQ ID NO: 1489319 - RNA, 19 nt, Artificial Sequence
  Description of Artificial Sequence: Synthetic oligonucleotide
  Antisense strand to SEQ ID NO: 1489318
aaugcccugguacuuucug

SEQ ID NO: 1489320 - RNA, 19 nt, Artificial Sequence
  Description of Artificial Sequence: Synthetic oligonucleotide
  Sense strand starting at position 366 of SEQ ID NO: 1244448
uuaggcauccgcuguagaa

SEQ ID NO: 1489321 - RNA, 19 nt, Artificial Sequence
  Description of Artificial Sequence: Synthetic oligonucleotide
  Antisense strand to SEQ ID NO: 1489320
uucuacagcggaugccuaa

SEQ ID NO: 1489322 - RNA, 19 nt, Artificial Sequence
  Description of Artificial Sequence: Synthetic oligonucleotide
  Sense strand starting at position 368 of SEQ ID NO: 1244448
aggcauccgcuguagaaga

SEQ ID NO: 1489323 - RNA, 19 nt, Artificial Sequence
  Description of Artificial Sequence: Synthetic oligonucleotide
  Antisense strand to SEQ ID NO: 1489322
ucuucuacagcggaugccu

SEQ ID NO: 1489324 - RNA, 19 nt, Artificial Sequence
  Description of Artificial Sequence: Synthetic oligonucleotide
  Sense strand starting at position 393 of SEQ ID NO: 1244448
cacacugggcucugugaaa

SEQ ID NO: 1489325 - RNA, 19 nt, Artificial Sequence
  Description of Artificial Sequence: Synthetic oligonucleotide
  Antisense strand to SEQ ID NO: 1489324
uuucacagagcccagugug

SEQ ID NO: 1489326 - RNA, 19 nt, Artificial Sequence
  Description of Artificial Sequence: Synthetic oligonucleotide
  Sense strand starting at position 428 of SEQ ID NO: 1244448
ccugguguugauggagaca

SEQ ID NO: 1489327 - RNA, 19 nt, Artificial Sequence
  Description of Artificial Sequence: Synthetic oligonucleotide
  Antisense strand to SEQ ID NO: 1489326
ugucuccaucaacaccagg

SEQ ID NO: 1489328 - RNA, 19 nt, Artificial Sequence
  Description of Artificial Sequence: Synthetic oligonucleotide
  Sense strand starting at position 502 of SEQ ID NO: 1244448
ugaggcaucuuucugaugu

SEQ ID NO: 1489329 - RNA, 19 nt, Artificial Sequence
  Description of Artificial Sequence: Synthetic oligonucleotide
  Antisense strand to SEQ ID NO: 1489328
acaucagaaagaugccuca

SEQ ID NO: 1489330 - RNA, 19 nt, Artificial Sequence
  Description of Artificial Sequence: Synthetic oligonucleotide
  Sense strand starting at position 523 of SEQ ID NO: 1244448
gaagaaaugucacuuguua

SEQ ID NO: 1489331 - RNA, 19 nt, Artificial Sequence
  Description of Artificial Sequence: Synthetic oligonucleotide
  Antisense strand to SEQ ID NO: 1489330
uaacaagugacauuucuuc

SEQ ID NO: 1489332 - RNA, 19 nt, Artificial Sequence
  Description of Artificial Sequence: Synthetic oligonucleotide
  Sense strand starting at position 527 of SEQ ID NO: 1244448
aaaugucacuuguuagaga

SEQ ID NO: 1489333 - RNA, 19 nt, Artificial Sequence
  Description of Artificial Sequence: Synthetic oligonucleotide
  Antisense strand to SEQ ID NO: 1489332
ucucuaacaagugacauuu

SEQ ID NO: 1489334 - RNA, 19 nt, Artificial Sequence
  Description of Artificial Sequence: Synthetic oligonucleotide
  Sense strand starting at position 534 of SEQ ID NO: 1244448
acuuguuagagacaguagu

SEQ ID NO: 1489335 - RNA, 19 nt, Artificial Sequence
  Description of Artificial Sequence: Synthetic oligonucleotide
  Antisense strand to SEQ ID NO: 1489334
acuacugucucuaacaagu

SEQ ID NO: 1489336 - RNA, 19 nt, Artificial Sequence
  Description of Artificial Sequence: Synthetic oligonucleotide
  Sense strand starting at position 654 of SEQ ID NO: 1244448
gggcaaguuuccucaucug

SEQ ID NO: 1489337 - RNA, 19 nt, Artificial Sequence
  Description of Artificial Sequence: Synthetic oligonucleotide
  Antisense strand to SEQ ID NO: 1489336
cagaugaggaaacuugccc

SEQ ID NO: 1489338 - RNA, 19 nt, Artificial Sequence
  Description of Artificial Sequence: Synthetic oligonucleotide
  Sense strand starting at position 886 of SEQ ID NO: 1244448
caaccaagaucugugugua

SEQ ID NO: 1489339 - RNA, 19 nt, Artificial Sequence
  Description of Artificial Sequence: Synthetic oligonucleotide
  Antisense strand to SEQ ID NO: 1489338
uacacacagaucuugguug

SEQ ID NO: 1489340 - RNA, 19 nt, Artificial Sequence
  Description of Artificial Sequence: Synthetic oligonucleotide
  Sense strand starting at position 887 of SEQ ID NO: 1244448
aaccaagaucuguguguaa

SEQ ID NO: 1489341 - RNA, 19 nt, Artificial Sequence
  Description of Artificial Sequence: Synthetic oligonucleotide
  Antisense strand to SEQ ID NO: 1489340
uuacacacagaucuugguu

SEQ ID NO: 1489342 - RNA, 19 nt, Artificial Sequence
  Description of Artificial Sequence: Synthetic oligonucleotide
  Sense strand starting at position 889 of SEQ ID NO: 1244448
ccaagaucuguguguaaac

SEQ ID NO: 1489343 - RNA, 19 nt, Artificial Sequence
  Description of Artificial Sequence: Synthetic oligonucleotide
  Antisense strand to SEQ ID NO: 1489342
guuuacacacagaucuugg

SEQ ID NO: 1489344 - RNA, 19 nt, Artificial Sequence
  Description of Artificial Sequence: Synthetic oligonucleotide
  Sense strand starting at position 891 of SEQ ID NO: 1244448
aagaucuguguguaaacgu

SEQ ID NO: 1489345 - RNA, 19 nt, Artificial Sequence
  Description of Artificial Sequence: Synthetic oligonucleotide
  Antisense strand to SEQ ID NO: 1489344
acguuuacacacagaucuu

SEQ ID NO: 1489346 - RNA, 19 nt, Artificial Sequence
  Description of Artificial Sequence: Synthetic oligonucleotide
  Sense strand starting at position 930 of SEQ ID NO: 1244448
ucuauccauccuggacaga

SEQ ID NO: 1489347 - RNA, 19 nt, Artificial Sequence
  Description of Artificial Sequence: Synthetic oligonucleotide
  Antisense strand to SEQ ID NO: 1489346
ucuguccaggauggauaga

SEQ ID NO: 1489348 - RNA, 19 nt, Artificial Sequence
  Description of Artificial Sequence: Synthetic oligonucleotide
  Sense strand starting at position 1252 of SEQ ID NO: 1244448
acgacuugaggccaaauau

SEQ ID NO: 1489349 - RNA, 19 nt, Artificial Sequence
  Description of Artificial Sequence: Synthetic oligonucleotide
  Antisense strand to SEQ ID NO: 1489348
auauuuggccucaagucgu

SEQ ID NO: 1489350 - RNA, 19 nt, Artificial Sequence
  Description of Artificial Sequence: Synthetic oligonucleotide
  Sense strand starting at position 1290 of SEQ ID NO: 1244448
gcuuuaaaugcagaguuag

SEQ ID NO: 1489351 - RNA, 19 nt, Artificial Sequence
  Description of Artificial Sequence: Synthetic oligonucleotide
  Antisense strand to SEQ ID NO: 1489350
cuaacucugcauuuaaagc

SEQ ID NO: 1489352 - RNA, 19 nt, Artificial Sequence
  Description of Artificial Sequence: Synthetic oligonucleotide
  Sense strand starting at position 1298 of SEQ ID NO: 1244448
ugcagaguuagguauauua

SEQ ID NO: 1489353 - RNA, 19 nt, Artificial Sequence
  Description of Artificial Sequence: Synthetic oligonucleotide
  Antisense strand to SEQ ID NO: 1489352
uaauauaccuaacucugca

SEQ ID NO: 1489354 - RNA, 19 nt, Artificial Sequence
  Description of Artificial Sequence: Synthetic oligonucleotide
  Sense strand starting at position 2210 of SEQ ID NO: 1244448
aggccugugucguuagaca

SEQ ID NO: 1489355 - RNA, 19 nt, Artificial Sequence
  Description of Artificial Sequence: Synthetic oligonucleotide
  Antisense strand to SEQ ID NO: 1489354
ugucuaacgacacaggccu

SEQ ID NO: 1489356 - RNA, 19 nt, Artificial Sequence
  Description of Artificial Sequence: Synthetic oligonucleotide
  Sense strand starting at position 2241 of SEQ ID NO: 1244448
aacugugucgagugugaac

SEQ ID NO: 1489357 - RNA, 19 nt, Artificial Sequence
  Description of Artificial Sequence: Synthetic oligonucleotide
  Antisense strand to SEQ ID NO: 1489356
guucacacucgacacaguu

SEQ ID NO: 1489358 - RNA, 19 nt, Artificial Sequence
  Description of Artificial Sequence: Synthetic oligonucleotide
  Sense strand starting at position 2275 of SEQ ID NO: 1244448
ccugccauccuggaacuua

SEQ ID NO: 1489359 - RNA, 19 nt, Artificial Sequence
  Description of Artificial Sequence: Synthetic oligonucleotide
  Antisense strand to SEQ ID NO: 1489358
uaaguuccaggauggcagg

SEQ ID NO: 1489360 - RNA, 19 nt, Artificial Sequence
  Description of Artificial Sequence: Synthetic oligonucleotide
  Sense strand starting at position 2372 of SEQ ID NO: 1244448
cagcaaaugucugcggaga

SEQ ID NO: 1489361 - RNA, 19 nt, Artificial Sequence
  Description of Artificial Sequence: Synthetic oligonucleotide
  Antisense strand to SEQ ID NO: 1489360
ucuccgcagacauuugcug

SEQ ID NO: 1489362 - RNA, 19 nt, Artificial Sequence
  Description of Artificial Sequence: Synthetic oligonucleotide
  Sense strand starting at position 2435 of SEQ ID NO: 1244448
aacugaugauucucaggua

SEQ ID NO: 1489363 - RNA, 19 nt, Artificial Sequence
  Description of Artificial Sequence: Synthetic oligonucleotide
  Antisense strand to SEQ ID NO: 1489362
uaccugagaaucaucaguu

SEQ ID NO: 1489364 - RNA, 19 nt, Artificial Sequence
  Description of Artificial Sequence: Synthetic oligonucleotide
  Sense strand starting at position 2436 of SEQ ID NO: 1244448
acugaugauucucagguaa

SEQ ID NO: 1489365 - RNA, 19 nt, Artificial Sequence
  Description of Artificial Sequence: Synthetic oligonucleotide
  Antisense strand to SEQ ID NO: 1489364
uuaccugagaaucaucagu

SEQ ID NO: 1489366 - RNA, 19 nt, Artificial Sequence
  Description of Artificial Sequence: Synthetic oligonucleotide
  Sense strand starting at position 2686 of SEQ ID NO: 1244448
acaggagucuuccuauguu

SEQ ID NO: 1489367 - RNA, 19 nt, Artificial Sequence
  Description of Artificial Sequence: Synthetic oligonucleotide
  Antisense strand to SEQ ID NO: 1489366
aacauaggaagacuccugu

SEQ ID NO: 1489368 - RNA, 19 nt, Artificial Sequence
  Description of Artificial Sequence: Synthetic oligonucleotide
  Sense strand starting at position 2695 of SEQ ID NO: 1244448
uuccuauguugggcucaaa

SEQ ID NO: 1489369 - RNA, 19 nt, Artificial Sequence
  Description of Artificial Sequence: Synthetic oligonucleotide
  Antisense strand to SEQ ID NO: 1489368
uuugagcccaacauaggaa

SEQ ID NO: 1489370 - RNA, 19 nt, Artificial Sequence
  Description of Artificial Sequence: Synthetic oligonucleotide
  Sense strand starting at position 2698 of SEQ ID NO: 1244448
cuauguugggcucaaacga

SEQ ID NO: 1489371 - RNA, 19 nt, Artificial Sequence
  Description of Artificial Sequence: Synthetic oligonucleotide
  Antisense strand to SEQ ID NO: 1489370
ucguuugagcccaacauag

SEQ ID NO: 1489372 - RNA, 19 nt, Artificial Sequence
  Description of Artificial Sequence: Synthetic oligonucleotide
  Sense strand starting at position 2866 of SEQ ID NO: 1244448
ccagguaauaagcguaguu

SEQ ID NO: 1489373 - RNA, 19 nt, Artificial Sequence
  Description of Artificial Sequence: Synthetic oligonucleotide
  Antisense strand to SEQ ID NO: 1489372
aacuacgcuuauuaccugg

SEQ ID NO: 1489374 - RNA, 19 nt, Artificial Sequence
  Description of Artificial Sequence: Synthetic oligonucleotide
  Sense strand starting at position 2876 of SEQ ID NO: 1244448
agcguaguuccugauaggu

SEQ ID NO: 1489375 - RNA, 19 nt, Artificial Sequence
  Description of Artificial Sequence: Synthetic oligonucleotide
  Antisense strand to SEQ ID NO: 1489374
accuaucaggaacuacgcu

SEQ ID NO: 1489376 - RNA, 19 nt, Artificial Sequence
  Description of Artificial Sequence: Synthetic oligonucleotide
  Sense strand starting at position 2962 of SEQ ID NO: 1244448
ucauuacguccauguuuac

SEQ ID NO: 1489377 - RNA, 19 nt, Artificial Sequence
  Description of Artificial Sequence: Synthetic oligonucleotide
  Antisense strand to SEQ ID NO: 1489376
guaaacauggacguaauga

SEQ ID NO: 1489378 - RNA, 19 nt, Artificial Sequence
  Description of Artificial Sequence: Synthetic oligonucleotide
  Sense strand starting at position 2965 of SEQ ID NO: 1244448
uuacguccauguuuacuua

SEQ ID NO: 1489379 - RNA, 19 nt, Artificial Sequence
  Description of Artificial Sequence: Synthetic oligonucleotide
  Antisense strand to SEQ ID NO: 1489378
uaaguaaacauggacguaa

SEQ ID NO: 1489380 - RNA, 19 nt, Artificial Sequence
  Description of Artificial Sequence: Synthetic oligonucleotide
  Sense strand starting at position 3034 of SEQ ID NO: 1244448
uccuguguuugcuuaggau

SEQ ID NO: 1489381 - RNA, 19 nt, Artificial Sequence
  Description of Artificial Sequence: Synthetic oligonucleotide
  Antisense strand to SEQ ID NO: 1489380
auccuaagcaaacacagga

SEQ ID NO: 1489382 - RNA, 19 nt, Artificial Sequence
  Description of Artificial Sequence: Synthetic oligonucleotide
  Sense strand starting at position 3116 of SEQ ID NO: 1244448
ugaaguauucuaugguaua

SEQ ID NO: 1489383 - RNA, 19 nt, Artificial Sequence
  Description of Artificial Sequence: Synthetic oligonucleotide
  Antisense strand to SEQ ID NO: 1489382
uauaccauagaauacuuca

SEQ ID NO: 1489384 - RNA, 19 nt, Artificial Sequence
  Description of Artificial Sequence: Synthetic oligonucleotide
  Sense strand starting at position 3950 of SEQ ID NO: 1244448
ggaagaagugagugcugau

SEQ ID NO: 1489385 - RNA, 19 nt, Artificial Sequence
  Description of Artificial Sequence: Synthetic oligonucleotide
  Antisense strand to SEQ ID NO: 1489384
aucagcacucacuucuucc

SEQ ID NO: 1489386 - RNA, 19 nt, Artificial Sequence
  Description of Artificial Sequence: Synthetic oligonucleotide
  Sense strand starting at position 1440 of SEQ ID NO: 1244449
gcgggagaacgcucugcuu

SEQ ID NO: 1489387 - RNA, 19 nt, Artificial Sequence
  Description of Artificial Sequence: Synthetic oligonucleotide
  Antisense strand to SEQ ID NO: 1489386
aagcagagcguucucccgc

SEQ ID NO: 1489388 - RNA, 19 nt, Artificial Sequence
  Description of Artificial Sequence: Synthetic oligonucleotide
  Sense strand starting at position 2111 of SEQ ID NO: 1244449
gccagcuccgagcaaaguu

SEQ ID NO: 1489389 - RNA, 19 nt, Artificial Sequence
  Description of Artificial Sequence: Synthetic oligonucleotide
  Antisense strand to SEQ ID NO: 1489388
aacuuugcucggagcuggc

SEQ ID NO: 1489390 - RNA, 19 nt, Artificial Sequence
  Description of Artificial Sequence: Synthetic oligonucleotide
  Sense strand starting at position 2648 of SEQ ID NO: 1244449
cggauaucaccgugcguga

SEQ ID NO: 1489391 - RNA, 19 nt, Artificial Sequence
  Description of Artificial Sequence: Synthetic oligonucleotide
  Antisense strand to SEQ ID NO: 1489390
ucacgcacggugauauccg

SEQ ID NO: 1489392 - RNA, 19 nt, Artificial Sequence
  Description of Artificial Sequence: Synthetic oligonucleotide
  Sense strand starting at position 2688 of SEQ ID NO: 1244449
cuucguucuagccaaggga

SEQ ID NO: 1489393 - RNA, 19 nt, Artificial Sequence
  Description of Artificial Sequence: Synthetic oligonucleotide
  Antisense strand to SEQ ID NO: 1489392
ucccuuggcuagaacgaag

SEQ ID NO: 1489394 - RNA, 19 nt, Artificial Sequence
  Description of Artificial Sequence: Synthetic oligonucleotide
  Sense strand starting at position 2872 of SEQ ID NO: 1244449
ggugcaaagcccuguaaua

SEQ ID NO: 1489395 - RNA, 19 nt, Artificial Sequence
  Description of Artificial Sequence: Synthetic oligonucleotide
  Antisense strand to SEQ ID NO: 1489394
uauuacagggcuuugcacc

SEQ ID NO: 1489396 - RNA, 19 nt, Artificial Sequence
  Description of Artificial Sequence: Synthetic oligonucleotide
  Sense strand starting at position 2882 of SEQ ID NO: 1244449
ccuguaauagcucauggga

SEQ ID NO: 1489397 - RNA, 19 nt, Artificial Sequence
  Description of Artificial Sequence: Synthetic oligonucleotide
  Antisense strand to SEQ ID NO: 1489396
ucccaugagcuauuacagg

SEQ ID NO: 1489398 - RNA, 19 nt, Artificial Sequence
  Description of Artificial Sequence: Synthetic oligonucleotide
  Sense strand starting at position 2909 of SEQ ID NO: 1244449
gcagcuuugcuguuguauu

SEQ ID NO: 1489399 - RNA, 19 nt, Artificial Sequence
  Description of Artificial Sequence: Synthetic oligonucleotide
  Antisense strand to SEQ ID NO: 1489398
aauacaacagcaaagcugc

SEQ ID NO: 1489400 - RNA, 19 nt, Artificial Sequence
  Description of Artificial Sequence: Synthetic oligonucleotide
  Sense strand starting at position 2969 of SEQ ID NO: 1244449
ugaagaaacucgcacaaga

SEQ ID NO: 1489401 - RNA, 19 nt, Artificial Sequence
  Description of Artificial Sequence: Synthetic oligonucleotide
  Antisense strand to SEQ ID NO: 1489400
ucuugugcgaguuucuuca

SEQ ID NO: 1489402 - RNA, 19 nt, Artificial Sequence
  Description of Artificial Sequence: Synthetic oligonucleotide
  Sense strand starting at position 3051 of SEQ ID NO: 1244449
ucgucaaaugcauaaccuu

SEQ ID NO: 1489403 - RNA, 19 nt, Artificial Sequence
  Description of Artificial Sequence: Synthetic oligonucleotide
  Antisense strand to SEQ ID NO: 1489402
aagguuaugcauuugacga

SEQ ID NO: 1489404 - RNA, 19 nt, Artificial Sequence
  Description of Artificial Sequence: Synthetic oligonucleotide
  Sense strand starting at position 3060 of SEQ ID NO: 1244449
gcauaaccuugccgaauga

SEQ ID NO: 1489405 - RNA, 19 nt, Artificial Sequence
  Description of Artificial Sequence: Synthetic oligonucleotide
  Antisense strand to SEQ ID NO: 1489404
ucauucggcaagguuaugc

SEQ ID NO: 1489406 - RNA, 19 nt, Artificial Sequence
  Description of Artificial Sequence: Synthetic oligonucleotide
  Sense strand starting at position 3070 of SEQ ID NO: 1244449
gccgaaugauggugucaug

SEQ ID NO: 1489407 - RNA, 19 nt, Artificial Sequence
  Description of Artificial Sequence: Synthetic oligonucleotide
  Antisense strand to SEQ ID NO: 1489406
caugacaccaucauucggc

SEQ ID NO: 1489408 - RNA, 19 nt, Artificial Sequence
  Description of Artificial Sequence: Synthetic oligonucleotide
  Sense strand starting at position 3161 of SEQ ID NO: 1244449
gacagcauccuuuggucau

SEQ ID NO: 1489409 - RNA, 19 nt, Artificial Sequence
  Description of Artificial Sequence: Synthetic oligonucleotide
  Antisense strand to SEQ ID NO: 1489408
augaccaaaggaugcuguc

SEQ ID NO: 1489410 - RNA, 19 nt, Artificial Sequence
  Description of Artificial Sequence: Synthetic oligonucleotide
  Sense strand starting at position 3192 of SEQ ID NO: 1244449
gccagagagcucugggaaa

SEQ ID NO: 1489411 - RNA, 19 nt, Artificial Sequence
  Description of Artificial Sequence: Synthetic oligonucleotide
  Antisense strand to SEQ ID NO: 1489410
uuucccagagcucucuggc

SEQ ID NO: 1489412 - RNA, 19 nt, Artificial Sequence
  Description of Artificial Sequence: Synthetic oligonucleotide
  Sense strand starting at position 3224 of SEQ ID NO: 1244449
ccgagaguuuggaacggaa

SEQ ID NO: 1489413 - RNA, 19 nt, Artificial Sequence
  Description of Artificial Sequence: Synthetic oligonucleotide
  Antisense strand to SEQ ID NO: 1489412
uuccguuccaaacucucgg

SEQ ID NO: 1489414 - RNA, 19 nt, Artificial Sequence
  Description of Artificial Sequence: Synthetic oligonucleotide
  Sense strand starting at position 3226 of SEQ ID NO: 1244449
gagaguuuggaacggaauc

SEQ ID NO: 1489415 - RNA, 19 nt, Artificial Sequence
  Description of Artificial Sequence: Synthetic oligonucleotide
  Antisense strand to SEQ ID NO: 1489414
gauuccguuccaaacucuc

SEQ ID NO: 1489416 - RNA, 19 nt, Artificial Sequence
  Description of Artificial Sequence: Synthetic oligonucleotide
  Sense strand starting at position 3236 of SEQ ID NO: 1244449
aacggaaucucugcucguu

SEQ ID NO: 1489417 - RNA, 19 nt, Artificial Sequence
  Description of Artificial Sequence: Synthetic oligonucleotide
  Antisense strand to SEQ ID NO: 1489416
aacgagcagagauuccguu

SEQ ID NO: 1489418 - RNA, 19 nt, Artificial Sequence
  Description of Artificial Sequence: Synthetic oligonucleotide
  Sense strand starting at position 3238 of SEQ ID NO: 1244449
cggaaucucugcucguuua

SEQ ID NO: 1489419 - RNA, 19 nt, Artificial Sequence
  Description of Artificial Sequence: Synthetic oligonucleotide
  Antisense strand to SEQ ID NO: 1489418
uaaacgagcagagauuccg

SEQ ID NO: 1489420 - RNA, 19 nt, Artificial Sequence
  Description of Artificial Sequence: Synthetic oligonucleotide
  Sense strand starting at position 3239 of SEQ ID NO: 1244449
ggaaucucugcucguuuau

SEQ ID NO: 1489421 - RNA, 19 nt, Artificial Sequence
  Description of Artificial Sequence: Synthetic oligonucleotide
  Antisense strand to SEQ ID NO: 1489420
auaaacgagcagagauucc

SEQ ID NO: 1489422 - RNA, 19 nt, Artificial Sequence
  Description of Artificial Sequence: Synthetic oligonucleotide
  Sense strand starting at position 3245 of SEQ ID NO: 1244449
ucugcucguuuauuuguua

SEQ ID NO: 1489423 - RNA, 19 nt, Artificial Sequence
  Description of Artificial Sequence: Synthetic oligonucleotide
  Antisense strand to SEQ ID NO: 1489422
uaacaaauaaacgagcaga

SEQ ID NO: 1489424 - RNA, 19 nt, Artificial Sequence
  Description of Artificial Sequence: Synthetic oligonucleotide
  Sense strand starting at position 3248 of SEQ ID NO: 1244449
gcucguuuauuuguuacuu

SEQ ID NO: 1489425 - RNA, 19 nt, Artificial Sequence
  Description of Artificial Sequence: Synthetic oligonucleotide
  Antisense strand to SEQ ID NO: 1489424
aaguaacaaauaaacgagc

SEQ ID NO: 1489426 - RNA, 19 nt, Artificial Sequence
  Description of Artificial Sequence: Synthetic oligonucleotide
  Sense strand starting at position 3256 of SEQ ID NO: 1244449
auuuguuacuuguagaugu

SEQ ID NO: 1489427 - RNA, 19 nt, Artificial Sequence
  Description of Artificial Sequence: Synthetic oligonucleotide
  Antisense strand to SEQ ID NO: 1489426
acaucuacaaguaacaaau

SEQ ID NO: 1489428 - RNA, 19 nt, Artificial Sequence
  Description of Artificial Sequence: Synthetic oligonucleotide
  Sense strand starting at position 3267 of SEQ ID NO: 1244449
guagaugugugguccagua

SEQ ID NO: 1489429 - RNA, 19 nt, Artificial Sequence
  Description of Artificial Sequence: Synthetic oligonucleotide
  Antisense strand to SEQ ID NO: 1489428
uacuggaccacacaucuac

SEQ ID NO: 1489430 - RNA, 19 nt, Artificial Sequence
  Description of Artificial Sequence: Synthetic oligonucleotide
  Sense strand starting at position 3269 of SEQ ID NO: 1244449
agaugugugguccaguaau

SEQ ID NO: 1489431 - RNA, 19 nt, Artificial Sequence
  Description of Artificial Sequence: Synthetic oligonucleotide
  Antisense strand to SEQ ID NO: 1489430
auuacuggaccacacaucu

SEQ ID NO: 1489432 - RNA, 19 nt, Artificial Sequence
  Description of Artificial Sequence: Synthetic oligonucleotide
  Sense strand starting at position 3282 of SEQ ID NO: 1244449
aguaauagacccggaugaa

SEQ ID NO: 1489433 - RNA, 19 nt, Artificial Sequence
  Description of Artificial Sequence: Synthetic oligonucleotide
  Antisense strand to SEQ ID NO: 1489432
uucauccgggucuauuacu

SEQ ID NO: 1489434 - RNA, 19 nt, Artificial Sequence
  Description of Artificial Sequence: Synthetic oligonucleotide
  Sense strand starting at position 3339 of SEQ ID NO: 1244449
cugcauuagcuccauuaag

SEQ ID NO: 1489435 - RNA, 19 nt, Artificial Sequence
  Description of Artificial Sequence: Synthetic oligonucleotide
  Antisense strand to SEQ ID NO: 1489434
cuuaauggagcuaaugcag

SEQ ID NO: 1489436 - RNA, 19 nt, Artificial Sequence
  Description of Artificial Sequence: Synthetic oligonucleotide
  Sense strand starting at position 3358 of SEQ ID NO: 1244449
ugccucaguuugucuuauu

SEQ ID NO: 1489437 - RNA, 19 nt, Artificial Sequence
  Description of Artificial Sequence: Synthetic oligonucleotide
  Antisense strand to SEQ ID NO: 1489436
aauaagacaaacugaggca

SEQ ID NO: 1489438 - RNA, 19 nt, Artificial Sequence
  Description of Artificial Sequence: Synthetic oligonucleotide
  Sense strand starting at position 3363 of SEQ ID NO: 1244449
caguuugucuuauuggcau

SEQ ID NO: 1489439 - RNA, 19 nt, Artificial Sequence
  Description of Artificial Sequence: Synthetic oligonucleotide
  Antisense strand to SEQ ID NO: 1489438
augccaauaagacaaacug

SEQ ID NO: 1489440 - RNA, 19 nt, Artificial Sequence
  Description of Artificial Sequence: Synthetic oligonucleotide
  Sense strand starting at position 3626 of SEQ ID NO: 1244449
acuguuuauuuaugccuua

SEQ ID NO: 1489441 - RNA, 19 nt, Artificial Sequence
  Description of Artificial Sequence: Synthetic oligonucleotide
  Antisense strand to SEQ ID NO: 1489440
uaaggcauaaauaaacagu

SEQ ID NO: 1489442 - RNA, 19 nt, Artificial Sequence
  Description of Artificial Sequence: Synthetic oligonucleotide
  Sense strand starting at position 3752 of SEQ ID NO: 1244449
cauggugaccugugaaauc

SEQ ID NO: 1489443 - RNA, 19 nt, Artificial Sequence
  Description of Artificial Sequence: Synthetic oligonucleotide
  Antisense strand to SEQ ID NO: 1489442
gauuucacaggucaccaug

SEQ ID NO: 1489444 - RNA, 19 nt, Artificial Sequence
  Description of Artificial Sequence: Synthetic oligonucleotide
  Sense strand starting at position 3763 of SEQ ID NO: 1244449
gugaaaucgcaaugguaua

SEQ ID NO: 1489445 - RNA, 19 nt, Artificial Sequence
  Description of Artificial Sequence: Synthetic oligonucleotide
  Antisense strand to SEQ ID NO: 1489444
uauaccauugcgauuucac

SEQ ID NO: 1489446 - RNA, 19 nt, Artificial Sequence
  Description of Artificial Sequence: Synthetic oligonucleotide
  Sense strand starting at position 3768 of SEQ ID NO: 1244449
aucgcaaugguauacugaa

SEQ ID NO: 1489447 - RNA, 19 nt, Artificial Sequence
  Description of Artificial Sequence: Synthetic oligonucleotide
  Antisense strand to SEQ ID NO: 1489446
uucaguauaccauugcgau

SEQ ID NO: 1489448 - RNA, 19 nt, Artificial Sequence
  Description of Artificial Sequence: Synthetic oligonucleotide
  Sense strand starting at position 3793 of SEQ ID NO: 1244449
cauagcucuuaggaggaaa

SEQ ID NO: 1489449 - RNA, 19 nt, Artificial Sequence
  Description of Artificial Sequence: Synthetic oligonucleotide
  Antisense strand to SEQ ID NO: 1489448
uuuccuccuaagagcuaug

SEQ ID NO: 1489450 - RNA, 19 nt, Artificial Sequence
  Description of Artificial Sequence: Synthetic oligonucleotide
  Sense strand starting at position 3846 of SEQ ID NO: 1244449
gccucugcugugugacuau

SEQ ID NO: 1489451 - RNA, 19 nt, Artificial Sequence
  Description of Artificial Sequence: Synthetic oligonucleotide
  Antisense strand to SEQ ID NO: 1489450
auagucacacagcagaggc

SEQ ID NO: 1489452 - RNA, 19 nt, Artificial Sequence
  Description of Artificial Sequence: Synthetic oligonucleotide
  Sense strand starting at position 3853 of SEQ ID NO: 1244449
cugugugacuauggaaagu

SEQ ID NO: 1489453 - RNA, 19 nt, Artificial Sequence
  Description of Artificial Sequence: Synthetic oligonucleotide
  Antisense strand to SEQ ID NO: 1489452
acuuuccauagucacacag

SEQ ID NO: 1489454 - RNA, 19 nt, Artificial Sequence
  Description of Artificial Sequence: Synthetic oligonucleotide
  Sense strand starting at position 3866 of SEQ ID NO: 1244449
gaaagucuaugccuugguu

SEQ ID NO: 1489455 - RNA, 19 nt, Artificial Sequence
  Description of Artificial Sequence: Synthetic oligonucleotide
  Antisense strand to SEQ ID NO: 1489454
aaccaaggcauagacuuuc

SEQ ID NO: 1489456 - RNA, 19 nt, Artificial Sequence
  Description of Artificial Sequence: Synthetic oligonucleotide
  Sense strand starting at position 3889 of SEQ ID NO: 1244449
ccaucuguacaagggagau

SEQ ID NO: 1489457 - RNA, 19 nt, Artificial Sequence
  Description of Artificial Sequence: Synthetic oligonucleotide
  Antisense strand to SEQ ID NO: 1489456
aucucccuuguacagaugg

SEQ ID NO: 1489458 - RNA, 19 nt, Artificial Sequence
  Description of Artificial Sequence: Synthetic oligonucleotide
  Sense strand starting at position 3932 of SEQ ID NO: 1244449
ugagcaucacgugaguuga

SEQ ID NO: 1489459 - RNA, 19 nt, Artificial Sequence
  Description of Artificial Sequence: Synthetic oligonucleotide
  Antisense strand to SEQ ID NO: 1489458
ucaacucacgugaugcuca

SEQ ID NO: 1489460 - RNA, 19 nt, Artificial Sequence
  Description of Artificial Sequence: Synthetic oligonucleotide
  Sense strand starting at position 3946 of SEQ ID NO: 1244449
guugacacauuugaauauu

SEQ ID NO: 1489461 - RNA, 19 nt, Artificial Sequence
  Description of Artificial Sequence: Synthetic oligonucleotide
  Antisense strand to SEQ ID NO: 1489460
aauauucaaaugugucaac

SEQ ID NO: 1489462 - RNA, 19 nt, Artificial Sequence
  Description of Artificial Sequence: Synthetic oligonucleotide
  Sense strand starting at position 3961 of SEQ ID NO: 1244449
uauuauagcugaugggaua

SEQ ID NO: 1489463 - RNA, 19 nt, Artificial Sequence
  Description of Artificial Sequence: Synthetic oligonucleotide
  Antisense strand to SEQ ID NO: 1489462
uaucccaucagcuauaaua

SEQ ID NO: 1489464 - RNA, 19 nt, Artificial Sequence
  Description of Artificial Sequence: Synthetic oligonucleotide
  Sense strand starting at position 3962 of SEQ ID NO: 1244449
auuauagcugaugggauau

SEQ ID NO: 1489465 - RNA, 19 nt, Artificial Sequence
  Description of Artificial Sequence: Synthetic oligonucleotide
  Antisense strand to SEQ ID NO: 1489464
auaucccaucagcuauaau

SEQ ID NO: 1489466 - RNA, 19 nt, Artificial Sequence
  Description of Artificial Sequence: Synthetic oligonucleotide
  Sense strand starting at position 80 of SEQ ID NO: 1244450
guaguagucuaaccucaug

SEQ ID NO: 1489467 - RNA, 19 nt, Artificial Sequence
  Description of Artificial Sequence: Synthetic oligonucleotide
  Antisense strand to SEQ ID NO: 1489466
caugagguuagacuacuac

SEQ ID NO: 1489468 - RNA, 19 nt, Artificial Sequence
  Description of Artificial Sequence: Synthetic oligonucleotide
  Sense strand starting at position 83 of SEQ ID NO: 1244450
guagucuaaccucauggau

SEQ ID NO: 1489469 - RNA, 19 nt, Artificial Sequence
  Description of Artificial Sequence: Synthetic oligonucleotide
  Antisense strand to SEQ ID NO: 1489468
auccaugagguuagacuac

SEQ ID NO: 1489470 - RNA, 19 nt, Artificial Sequence
  Description of Artificial Sequence: Synthetic oligonucleotide
  Sense strand starting at position 324 of SEQ ID NO: 1244450
ggcggagucgugagcgaac

SEQ ID NO: 1489471 - RNA, 19 nt, Artificial Sequence
  Description of Artificial Sequence: Synthetic oligonucleotide
  Antisense strand to SEQ ID NO: 1489470
guucgcucacgacuccgcc

SEQ ID NO: 1489472 - RNA, 19 nt, Artificial Sequence
  Description of Artificial Sequence: Synthetic oligonucleotide
  Sense strand starting at position 1042 of SEQ ID NO: 1244450
gcguuuagugguggaaaug

SEQ ID NO: 1489473 - RNA, 19 nt, Artificial Sequence
  Description of Artificial Sequence: Synthetic oligonucleotide
  Antisense strand to SEQ ID NO: 1489472
cauuuccaccacuaaacgc

SEQ ID NO: 1489474 - RNA, 19 nt, Artificial Sequence
  Description of Artificial Sequence: Synthetic oligonucleotide
  Sense strand starting at position 1043 of SEQ ID NO: 1244450
cguuuagugguggaaauga

SEQ ID NO: 1489475 - RNA, 19 nt, Artificial Sequence
  Description of Artificial Sequence: Synthetic oligonucleotide
  Antisense strand to SEQ ID NO: 1489474
ucauuuccaccacuaaacg

SEQ ID NO: 1489476 - RNA, 19 nt, Artificial Sequence
  Description of Artificial Sequence: Synthetic oligonucleotide
  Sense strand starting at position 1052 of SEQ ID NO: 1244450
guggaaaugacccgugaga

SEQ ID NO: 1489477 - RNA, 19 nt, Artificial Sequence
  Description of Artificial Sequence: Synthetic oligonucleotide
  Antisense strand to SEQ ID NO: 1489476
ucucacgggucauuuccac

SEQ ID NO: 1489478 - RNA, 19 nt, Artificial Sequence
  Description of Artificial Sequence: Synthetic oligonucleotide
  Sense strand starting at position 1054 of SEQ ID NO: 1244450
ggaaaugacccgugagaug

SEQ ID NO: 1489479 - RNA, 19 nt, Artificial Sequence
  Description of Artificial Sequence: Synthetic oligonucleotide
  Antisense strand to SEQ ID NO: 1489478
caucucacgggucauuucc

SEQ ID NO: 1489480 - RNA, 19 nt, Artificial Sequence
  Description of Artificial Sequence: Synthetic oligonucleotide
  Sense strand starting at position 1239 of SEQ ID NO: 1244450
ugaguuacaccucgaggga

SEQ ID NO: 1489481 - RNA, 19 nt, Artificial Sequence
  Description of Artificial Sequence: Synthetic oligonucleotide
  Antisense strand to SEQ ID NO: 1489480
ucccucgagguguaacuca

SEQ ID NO: 1489482 - RNA, 19 nt, Artificial Sequence
  Description of Artificial Sequence: Synthetic oligonucleotide
  Sense strand starting at position 1240 of SEQ ID NO: 1244450
gaguuacaccucgagggau

SEQ ID NO: 1489483 - RNA, 19 nt, Artificial Sequence
  Description of Artificial Sequence: Synthetic oligonucleotide
  Antisense strand to SEQ ID NO: 1489482
aucccucgagguguaacuc

SEQ ID NO: 1489484 - RNA, 19 nt, Artificial Sequence
  Description of Artificial Sequence: Synthetic oligonucleotide
  Sense strand starting at position 1479 of SEQ ID NO: 1244450
gcccgagcucuagaaugaa

SEQ ID NO: 1489485 - RNA, 19 nt, Artificial Sequence
  Description of Artificial Sequence: Synthetic oligonucleotide
  Antisense strand to SEQ ID NO: 1489484
uucauucuagagcucgggc

SEQ ID NO: 1489486 - RNA, 19 nt, Artificial Sequence
  Description of Artificial Sequence: Synthetic oligonucleotide
  Sense strand starting at position 1897 of SEQ ID NO: 1244450
gggcuucuccuccauugaa

SEQ ID NO: 1489487 - RNA, 19 nt, Artificial Sequence
  Description of Artificial Sequence: Synthetic oligonucleotide
  Antisense strand to SEQ ID NO: 1489486
uucaauggaggagaagccc

SEQ ID NO: 1489488 - RNA, 19 nt, Artificial Sequence
  Description of Artificial Sequence: Synthetic oligonucleotide
  Sense strand starting at position 1982 of SEQ ID NO: 1244450
gggcucacucaguauaucu

SEQ ID NO: 1489489 - RNA, 19 nt, Artificial Sequence
  Description of Artificial Sequence: Synthetic oligonucleotide
  Antisense strand to SEQ ID NO: 1489488
agauauacugagugagccc

SEQ ID NO: 1489490 - RNA, 19 nt, Artificial Sequence
  Description of Artificial Sequence: Synthetic oligonucleotide
  Sense strand starting at position 2022 of SEQ ID NO: 1244450
ugguuaaccgagcgauucu

SEQ ID NO: 1489491 - RNA, 19 nt, Artificial Sequence
  Description of Artificial Sequence: Synthetic oligonucleotide
  Antisense strand to SEQ ID NO: 1489490
agaaucgcucgguuaacca

SEQ ID NO: 1489492 - RNA, 19 nt, Artificial Sequence
  Description of Artificial Sequence: Synthetic oligonucleotide
  Sense strand starting at position 2295 of SEQ ID NO: 1244450
agcagauuccacuggcgau

SEQ ID NO: 1489493 - RNA, 19 nt, Artificial Sequence
  Description of Artificial Sequence: Synthetic oligonucleotide
  Antisense strand to SEQ ID NO: 1489492
aucgccaguggaaucugcu

SEQ ID NO: 1489494 - RNA, 19 nt, Artificial Sequence
  Description of Artificial Sequence: Synthetic oligonucleotide
  Sense strand starting at position 2296 of SEQ ID NO: 1244450
gcagauuccacuggcgauu

SEQ ID NO: 1489495 - RNA, 19 nt, Artificial Sequence
  Description of Artificial Sequence: Synthetic oligonucleotide
  Antisense strand to SEQ ID NO: 1489494
aaucgccaguggaaucugc

SEQ ID NO: 1489496 - RNA, 19 nt, Artificial Sequence
  Description of Artificial Sequence: Synthetic oligonucleotide
  Sense strand starting at position 2569 of SEQ ID NO: 1244450
cuuccuuuccacgaaggga

SEQ ID NO: 1489497 - RNA, 19 nt, Artificial Sequence
  Description of Artificial Sequence: Synthetic oligonucleotide
  Antisense strand to SEQ ID NO: 1489496
ucccuucguggaaaggaag

SEQ ID NO: 1489498 - RNA, 19 nt, Artificial Sequence
  Description of Artificial Sequence: Synthetic oligonucleotide
  Sense strand starting at position 2639 of SEQ ID NO: 1244450
ggguuuaaaucauuguuuc

SEQ ID NO: 1489499 - RNA, 19 nt, Artificial Sequence
  Description of Artificial Sequence: Synthetic oligonucleotide
  Antisense strand to SEQ ID NO: 1489498
gaaacaaugauuuaaaccc

SEQ ID NO: 1489500 - RNA, 19 nt, Artificial Sequence
  Description of Artificial Sequence: Synthetic oligonucleotide
  Sense strand starting at position 2640 of SEQ ID NO: 1244450
gguuuaaaucauuguuucu

SEQ ID NO: 1489501 - RNA, 19 nt, Artificial Sequence
  Description of Artificial Sequence: Synthetic oligonucleotide
  Antisense strand to SEQ ID NO: 1489500
agaaacaaugauuuaaacc

SEQ ID NO: 1489502 - RNA, 19 nt, Artificial Sequence
  Description of Artificial Sequence: Synthetic oligonucleotide
  Sense strand starting at position 2647 of SEQ ID NO: 1244450
aucauuguuucuuuguagu

SEQ ID NO: 1489503 - RNA, 19 nt, Artificial Sequence
  Description of Artificial Sequence: Synthetic oligonucleotide
  Antisense strand to SEQ ID NO: 1489502
acuacaaagaaacaaugau

SEQ ID NO: 1489504 - RNA, 19 nt, Artificial Sequence
  Description of Artificial Sequence: Synthetic oligonucleotide
  Sense strand starting at position 2723 of SEQ ID NO: 1244450
aauuaaacucugcagguga

SEQ ID NO: 1489505 - RNA, 19 nt, Artificial Sequence
  Description of Artificial Sequence: Synthetic oligonucleotide
  Antisense strand to SEQ ID NO: 1489504
ucaccugcagaguuuaauu

SEQ ID NO: 1489506 - RNA, 19 nt, Artificial Sequence
  Description of Artificial Sequence: Synthetic oligonucleotide
  Sense strand starting at position 2819 of SEQ ID NO: 1244450
guuauuaaguggguuuguu

SEQ ID NO: 1489507 - RNA, 19 nt, Artificial Sequence
  Description of Artificial Sequence: Synthetic oligonucleotide
  Antisense strand to SEQ ID NO: 1489506
aacaaacccacuuaauaac

SEQ ID NO: 1489508 - RNA, 19 nt, Artificial Sequence
  Description of Artificial Sequence: Synthetic oligonucleotide
  Sense strand starting at position 2876 of SEQ ID NO: 1244450
aagaaauauucuguagcgu

SEQ ID NO: 1489509 - RNA, 19 nt, Artificial Sequence
  Description of Artificial Sequence: Synthetic oligonucleotide
  Antisense strand to SEQ ID NO: 1489508
acgcuacagaauauuucuu

SEQ ID NO: 1489510 - RNA, 19 nt, Artificial Sequence
  Description of Artificial Sequence: Synthetic oligonucleotide
  Sense strand starting at position 2877 of SEQ ID NO: 1244450
agaaauauucuguagcguu

SEQ ID NO: 1489511 - RNA, 19 nt, Artificial Sequence
  Description of Artificial Sequence: Synthetic oligonucleotide
  Antisense strand to SEQ ID NO: 1489510
aacgcuacagaauauuucu

SEQ ID NO: 1489512 - RNA, 19 nt, Artificial Sequence
  Description of Artificial Sequence: Synthetic oligonucleotide
  Sense strand starting at position 2958 of SEQ ID NO: 1244450
auguuagagccaugauagu

SEQ ID NO: 1489513 - RNA, 19 nt, Artificial Sequence
  Description of Artificial Sequence: Synthetic oligonucleotide
  Antisense strand to SEQ ID NO: 1489512
acuaucauggcucuaacau

SEQ ID NO: 1489514 - RNA, 19 nt, Artificial Sequence
  Description of Artificial Sequence: Synthetic oligonucleotide
  Sense strand starting at position 2967 of SEQ ID NO: 1244450
ccaugauagugguuacuca

SEQ ID NO: 1489515 - RNA, 19 nt, Artificial Sequence
  Description of Artificial Sequence: Synthetic oligonucleotide
  Antisense strand to SEQ ID NO: 1489514
ugaguaaccacuaucaugg

SEQ ID NO: 1489516 - RNA, 19 nt, Artificial Sequence
  Description of Artificial Sequence: Synthetic oligonucleotide
  Sense strand starting at position 2971 of SEQ ID NO: 1244450
gauagugguuacucaggaa

SEQ ID NO: 1489517 - RNA, 19 nt, Artificial Sequence
  Description of Artificial Sequence: Synthetic oligonucleotide
  Antisense strand to SEQ ID NO: 1489516
uuccugaguaaccacuauc

SEQ ID NO: 1489518 - RNA, 19 nt, Artificial Sequence
  Description of Artificial Sequence: Synthetic oligonucleotide
  Sense strand starting at position 3013 of SEQ ID NO: 1244450
gacacagguuacucugaua

SEQ ID NO: 1489519 - RNA, 19 nt, Artificial Sequence
  Description of Artificial Sequence: Synthetic oligonucleotide
  Antisense strand to SEQ ID NO: 1489518
uaucagaguaaccuguguc

SEQ ID NO: 1489520 - RNA, 19 nt, Artificial Sequence
  Description of Artificial Sequence: Synthetic oligonucleotide
  Sense strand starting at position 3046 of SEQ ID NO: 1244450
gggcuagguggugauuaca

SEQ ID NO: 1489521 - RNA, 19 nt, Artificial Sequence
  Description of Artificial Sequence: Synthetic oligonucleotide
  Antisense strand to SEQ ID NO: 1489520
uguaaucaccaccuagccc

SEQ ID NO: 1489522 - RNA, 19 nt, Artificial Sequence
  Description of Artificial Sequence: Synthetic oligonucleotide
  Sense strand starting at position 3049 of SEQ ID NO: 1244450
cuagguggugauuacauau

SEQ ID NO: 1489523 - RNA, 19 nt, Artificial Sequence
  Description of Artificial Sequence: Synthetic oligonucleotide
  Antisense strand to SEQ ID NO: 1489522
auauguaaucaccaccuag

SEQ ID NO: 1489524 - RNA, 19 nt, Artificial Sequence
  Description of Artificial Sequence: Synthetic oligonucleotide
  Sense strand starting at position 3117 of SEQ ID NO: 1244450
uuucccaauguauguuaua

SEQ ID NO: 1489525 - RNA, 19 nt, Artificial Sequence
  Description of Artificial Sequence: Synthetic oligonucleotide
  Antisense strand to SEQ ID NO: 1489524
uauaacauacauugggaaa

SEQ ID NO: 1489526 - RNA, 19 nt, Artificial Sequence
  Description of Artificial Sequence: Synthetic oligonucleotide
  Sense strand starting at position 3222 of SEQ ID NO: 1244450
acauucguauuguuguaga

SEQ ID NO: 1489527 - RNA, 19 nt, Artificial Sequence
  Description of Artificial Sequence: Synthetic oligonucleotide
  Antisense strand to SEQ ID NO: 1489526
ucuacaacaauacgaaugu

SEQ ID NO: 1489528 - RNA, 19 nt, Artificial Sequence
  Description of Artificial Sequence: Synthetic oligonucleotide
  Sense strand starting at position 3227 of SEQ ID NO: 1244450
cguauuguuguagaaccau

SEQ ID NO: 1489529 - RNA, 19 nt, Artificial Sequence
  Description of Artificial Sequence: Synthetic oligonucleotide
  Antisense strand to SEQ ID NO: 1489528
augguucuacaacaauacg

SEQ ID NO: 1489530 - RNA, 19 nt, Artificial Sequence
  Description of Artificial Sequence: Synthetic oligonucleotide
  Sense strand starting at position 3233 of SEQ ID NO: 1244450
guuguagaaccaugaccau

SEQ ID NO: 1489531 - RNA, 19 nt, Artificial Sequence
  Description of Artificial Sequence: Synthetic oligonucleotide
  Antisense strand to SEQ ID NO: 1489530
auggucaugguucuacaac

SEQ ID NO: 1489532 - RNA, 19 nt, Artificial Sequence
  Description of Artificial Sequence: Synthetic oligonucleotide
  Sense strand starting at position 3458 of SEQ ID NO: 1244450
aguagcauacaucagaauu

SEQ ID NO: 1489533 - RNA, 19 nt, Artificial Sequence
  Description of Artificial Sequence: Synthetic oligonucleotide
  Antisense strand to SEQ ID NO: 1489532
aauucugauguaugcuacu

SEQ ID NO: 1489534 - RNA, 19 nt, Artificial Sequence
  Description of Artificial Sequence: Synthetic oligonucleotide
  Sense strand starting at position 3555 of SEQ ID NO: 1244450
uggacuguuuccucaaugu

SEQ ID NO: 1489535 - RNA, 19 nt, Artificial Sequence
  Description of Artificial Sequence: Synthetic oligonucleotide
  Antisense strand to SEQ ID NO: 1489534
acauugaggaaacagucca

SEQ ID NO: 1489536 - RNA, 19 nt, Artificial Sequence
  Description of Artificial Sequence: Synthetic oligonucleotide
  Sense strand starting at position 3559 of SEQ ID NO: 1244450
cuguuuccucaauguaugu

SEQ ID NO: 1489537 - RNA, 19 nt, Artificial Sequence
  Description of Artificial Sequence: Synthetic oligonucleotide
  Antisense strand to SEQ ID NO: 1489536
acauacauugaggaaacag

SEQ ID NO: 1489538 - RNA, 19 nt, Artificial Sequence
  Description of Artificial Sequence: Synthetic oligonucleotide
  Sense strand starting at position 3714 of SEQ ID NO: 1244450
gcugguuuccaauaacaaa

SEQ ID NO: 1489539 - RNA, 19 nt, Artificial Sequence
  Description of Artificial Sequence: Synthetic oligonucleotide
  Antisense strand to SEQ ID NO: 1489538
uuuguuauuggaaaccagc

SEQ ID NO: 1489540 - RNA, 19 nt, Artificial Sequence
  Description of Artificial Sequence: Synthetic oligonucleotide
  Sense strand starting at position 3766 of SEQ ID NO: 1244450
uggcauguucuauacagua

SEQ ID NO: 1489541 - RNA, 19 nt, Artificial Sequence
  Description of Artificial Sequence: Synthetic oligonucleotide
  Antisense strand to SEQ ID NO: 1489540
uacuguauagaacaugcca

SEQ ID NO: 1489542 - RNA, 19 nt, Artificial Sequence
  Description of Artificial Sequence: Synthetic oligonucleotide
  Sense strand starting at position 3771 of SEQ ID NO: 1244450
uguucuauacaguaaggau

SEQ ID NO: 1489543 - RNA, 19 nt, Artificial Sequence
  Description of Artificial Sequence: Synthetic oligonucleotide
  Antisense strand to SEQ ID NO: 1489542
auccuuacuguauagaaca

SEQ ID NO: 1489544 - RNA, 19 nt, Artificial Sequence
  Description of Artificial Sequence: Synthetic oligonucleotide
  Sense strand starting at position 3786 of SEQ ID NO: 1244450
ggauuuguguugccuuguu

SEQ ID NO: 1489545 - RNA, 19 nt, Artificial Sequence
  Description of Artificial Sequence: Synthetic oligonucleotide
  Antisense strand to SEQ ID NO: 1489544
aacaaggcaacacaaaucc

SEQ ID NO: 1489546 - RNA, 19 nt, Artificial Sequence
  Description of Artificial Sequence: Synthetic oligonucleotide
  Sense strand starting at position 290 of SEQ ID NO: 1244451
gaaacuccgccucaagaga

SEQ ID NO: 1489547 - RNA, 19 nt, Artificial Sequence
  Description of Artificial Sequence: Synthetic oligonucleotide
  Antisense strand to SEQ ID NO: 1489546
ucucuugaggcggaguuuc

SEQ ID NO: 1489548 - RNA, 19 nt, Artificial Sequence
  Description of Artificial Sequence: Synthetic oligonucleotide
  Sense strand starting at position 895 of SEQ ID NO: 1244451
gaggcuaaucaccgacuca

SEQ ID NO: 1489549 - RNA, 19 nt, Artificial Sequence
  Description of Artificial Sequence: Synthetic oligonucleotide
  Antisense strand to SEQ ID NO: 1489548
ugagucggugauuagccuc

SEQ ID NO: 1489550 - RNA, 19 nt, Artificial Sequence
  Description of Artificial Sequence: Synthetic oligonucleotide
  Sense strand starting at position 1088 of SEQ ID NO: 1244451
aaaccuuuaucgguugaga

SEQ ID NO: 1489551 - RNA, 19 nt, Artificial Sequence
  Description of Artificial Sequence: Synthetic oligonucleotide
  Antisense strand to SEQ ID NO: 1489550
ucucaaccgauaaagguuu

SEQ ID NO: 1489552 - RNA, 19 nt, Artificial Sequence
  Description of Artificial Sequence: Synthetic oligonucleotide
  Sense strand starting at position 1090 of SEQ ID NO: 1244451
accuuuaucgguugagacc

SEQ ID NO: 1489553 - RNA, 19 nt, Artificial Sequence
  Description of Artificial Sequence: Synthetic oligonucleotide
  Antisense strand to SEQ ID NO: 1489552
ggucucaaccgauaaaggu

SEQ ID NO: 1489554 - RNA, 19 nt, Artificial Sequence
  Description of Artificial Sequence: Synthetic oligonucleotide
  Sense strand starting at position 1091 of SEQ ID NO: 1244451
ccuuuaucgguugagaccu

SEQ ID NO: 1489555 - RNA, 19 nt, Artificial Sequence
  Description of Artificial Sequence: Synthetic oligonucleotide
  Antisense strand to SEQ ID NO: 1489554
aggucucaaccgauaaagg

SEQ ID NO: 1489556 - RNA, 19 nt, Artificial Sequence
  Description of Artificial Sequence: Synthetic oligonucleotide
  Sense strand starting at position 1115 of SEQ ID NO: 1244451
agucacuucugguuaacaa

SEQ ID NO: 1489557 - RNA, 19 nt, Artificial Sequence
  Description of Artificial Sequence: Synthetic oligonucleotide
  Antisense strand to SEQ ID NO: 1489556
uuguuaaccagaagugacu

SEQ ID NO: 1489558 - RNA, 19 nt, Artificial Sequence
  Description of Artificial Sequence: Synthetic oligonucleotide
  Sense strand starting at position 1116 of SEQ ID NO: 1244451
gucacuucugguuaacaag

SEQ ID NO: 1489559 - RNA, 19 nt, Artificial Sequence
  Description of Artificial Sequence: Synthetic oligonucleotide
  Antisense strand to SEQ ID NO: 1489558
cuuguuaaccagaagugac

SEQ ID NO: 1489560 - RNA, 19 nt, Artificial Sequence
  Description of Artificial Sequence: Synthetic oligonucleotide
  Sense strand starting at position 1171 of SEQ ID NO: 1244451
agguaucucguacauaaag

SEQ ID NO: 1489561 - RNA, 19 nt, Artificial Sequence
  Description of Artificial Sequence: Synthetic oligonucleotide
  Antisense strand to SEQ ID NO: 1489560
cuuuauguacgagauaccu

SEQ ID NO: 1489562 - RNA, 19 nt, Artificial Sequence
  Description of Artificial Sequence: Synthetic oligonucleotide
  Sense strand starting at position 1180 of SEQ ID NO: 1244451
guacauaaagcgcgugaau

SEQ ID NO: 1489563 - RNA, 19 nt, Artificial Sequence
  Description of Artificial Sequence: Synthetic oligonucleotide
  Antisense strand to SEQ ID NO: 1489562
auucacgcgcuuuauguac

SEQ ID NO: 1489564 - RNA, 19 nt, Artificial Sequence
  Description of Artificial Sequence: Synthetic oligonucleotide
  Sense strand starting at position 1182 of SEQ ID NO: 1244451
acauaaagcgcgugaauuu

SEQ ID NO: 1489565 - RNA, 19 nt, Artificial Sequence
  Description of Artificial Sequence: Synthetic oligonucleotide
  Antisense strand to SEQ ID NO: 1489564
aaauucacgcgcuuuaugu

SEQ ID NO: 1489566 - RNA, 19 nt, Artificial Sequence
  Description of Artificial Sequence: Synthetic oligonucleotide
  Sense strand starting at position 1261 of SEQ ID NO: 1244451
uugaaugcacagcgauaaa

SEQ ID NO: 1489567 - RNA, 19 nt, Artificial Sequence
  Description of Artificial Sequence: Synthetic oligonucleotide
  Antisense strand to SEQ ID NO: 1489566
uuuaucgcugugcauucaa

SEQ ID NO: 1489568 - RNA, 19 nt, Artificial Sequence
  Description of Artificial Sequence: Synthetic oligonucleotide
  Sense strand starting at position 1281 of SEQ ID NO: 1244451
caggaauagucuccugaga

SEQ ID NO: 1489569 - RNA, 19 nt, Artificial Sequence
  Description of Artificial Sequence: Synthetic oligonucleotide
  Antisense strand to SEQ ID NO: 1489568
ucucaggagacuauuccug

SEQ ID NO: 1489570 - RNA, 19 nt, Artificial Sequence
  Description of Artificial Sequence: Synthetic oligonucleotide
  Sense strand starting at position 1286 of SEQ ID NO: 1244451
auagucuccugagauaaua

SEQ ID NO: 1489571 - RNA, 19 nt, Artificial Sequence
  Description of Artificial Sequence: Synthetic oligonucleotide
  Antisense strand to SEQ ID NO: 1489570
uauuaucucaggagacuau

SEQ ID NO: 1489572 - RNA, 19 nt, Artificial Sequence
  Description of Artificial Sequence: Synthetic oligonucleotide
  Sense strand starting at position 1294 of SEQ ID NO: 1244451
cugagauaauacguugaau

SEQ ID NO: 1489573 - RNA, 19 nt, Artificial Sequence
  Description of Artificial Sequence: Synthetic oligonucleotide
  Antisense strand to SEQ ID NO: 1489572
auucaacguauuaucucag

SEQ ID NO: 1489574 - RNA, 19 nt, Artificial Sequence
  Description of Artificial Sequence: Synthetic oligonucleotide
  Sense strand starting at position 1296 of SEQ ID NO: 1244451
gagauaauacguugaauaa

SEQ ID NO: 1489575 - RNA, 19 nt, Artificial Sequence
  Description of Artificial Sequence: Synthetic oligonucleotide
  Antisense strand to SEQ ID NO: 1489574
uuauucaacguauuaucuc

SEQ ID NO: 1489576 - RNA, 19 nt, Artificial Sequence
  Description of Artificial Sequence: Synthetic oligonucleotide
  Sense strand starting at position 1347 of SEQ ID NO: 1244451
ccgcgaugcagagcuuaau

SEQ ID NO: 1489577 - RNA, 19 nt, Artificial Sequence
  Description of Artificial Sequence: Synthetic oligonucleotide
  Antisense strand to SEQ ID NO: 1489576
auuaagcucugcaucgcgg

SEQ ID NO: 1489578 - RNA, 19 nt, Artificial Sequence
  Description of Artificial Sequence: Synthetic oligonucleotide
  Sense strand starting at position 1359 of SEQ ID NO: 1244451
gcuuaauacggcuggaaua

SEQ ID NO: 1489579 - RNA, 19 nt, Artificial Sequence
  Description of Artificial Sequence: Synthetic oligonucleotide
  Antisense strand to SEQ ID NO: 1489578
uauuccagccguauuaagc

SEQ ID NO: 1489580 - RNA, 19 nt, Artificial Sequence
  Description of Artificial Sequence: Synthetic oligonucleotide
  Sense strand starting at position 1360 of SEQ ID NO: 1244451
cuuaauacggcuggaauaa

SEQ ID NO: 1489581 - RNA, 19 nt, Artificial Sequence
  Description of Artificial Sequence: Synthetic oligonucleotide
  Antisense strand to SEQ ID NO: 1489580
uuauuccagccguauuaag

SEQ ID NO: 1489582 - RNA, 19 nt, Artificial Sequence
  Description of Artificial Sequence: Synthetic oligonucleotide
  Sense strand starting at position 1498 of SEQ ID NO: 1244451
ggguuugugacugguggca

SEQ ID NO: 1489583 - RNA, 19 nt, Artificial Sequence
  Description of Artificial Sequence: Synthetic oligonucleotide
  Antisense strand to SEQ ID NO: 1489582
ugccaccagucacaaaccc

SEQ ID NO: 1489584 - RNA, 19 nt, Artificial Sequence
  Description of Artificial Sequence: Synthetic oligonucleotide
  Sense strand starting at position 1630 of SEQ ID NO: 1244451
agcagacaagccugaagua

SEQ ID NO: 1489585 - RNA, 19 nt, Artificial Sequence
  Description of Artificial Sequence: Synthetic oligonucleotide
  Antisense strand to SEQ ID NO: 1489584
uacuucaggcuugucugcu

SEQ ID NO: 1489586 - RNA, 19 nt, Artificial Sequence
  Description of Artificial Sequence: Synthetic oligonucleotide
  Sense strand starting at position 1631 of SEQ ID NO: 1244451
gcagacaagccugaaguaa

SEQ ID NO: 1489587 - RNA, 19 nt, Artificial Sequence
  Description of Artificial Sequence: Synthetic oligonucleotide
  Antisense strand to SEQ ID NO: 1489586
uuacuucaggcuugucugc

SEQ ID NO: 1489588 - RNA, 19 nt, Artificial Sequence
  Description of Artificial Sequence: Synthetic oligonucleotide
  Sense strand starting at position 1659 of SEQ ID NO: 1244451
cgcaguucucaacccgcaa

SEQ ID NO: 1489589 - RNA, 19 nt, Artificial Sequence
  Description of Artificial Sequence: Synthetic oligonucleotide
  Antisense strand to SEQ ID NO: 1489588
uugcggguugagaacugcg

SEQ ID NO: 1489590 - RNA, 19 nt, Artificial Sequence
  Description of Artificial Sequence: Synthetic oligonucleotide
  Sense strand starting at position 2144 of SEQ ID NO: 1244451
ugggaacucgugcgggauu

SEQ ID NO: 1489591 - RNA, 19 nt, Artificial Sequence
  Description of Artificial Sequence: Synthetic oligonucleotide
  Antisense strand to SEQ ID NO: 1489590
aaucccgcacgaguuccca

SEQ ID NO: 1489592 - RNA, 19 nt, Artificial Sequence
  Description of Artificial Sequence: Synthetic oligonucleotide
  Sense strand starting at position 2146 of SEQ ID NO: 1244451
ggaacucgugcgggauuua

SEQ ID NO: 1489593 - RNA, 19 nt, Artificial Sequence
  Description of Artificial Sequence: Synthetic oligonucleotide
  Antisense strand to SEQ ID NO: 1489592
uaaaucccgcacgaguucc

SEQ ID NO: 1489594 - RNA, 19 nt, Artificial Sequence
  Description of Artificial Sequence: Synthetic oligonucleotide
  Sense strand starting at position 2158 of SEQ ID NO: 1244451
ggauuuaggucccaguaag

SEQ ID NO: 1489595 - RNA, 19 nt, Artificial Sequence
  Description of Artificial Sequence: Synthetic oligonucleotide
  Antisense strand to SEQ ID NO: 1489594
cuuacugggaccuaaaucc

SEQ ID NO: 1489596 - RNA, 19 nt, Artificial Sequence
  Description of Artificial Sequence: Synthetic oligonucleotide
  Sense strand starting at position 2995 of SEQ ID NO: 1244451
cuuaauaaguuuccguuau

SEQ ID NO: 1489597 - RNA, 19 nt, Artificial Sequence
  Description of Artificial Sequence: Synthetic oligonucleotide
  Antisense strand to SEQ ID NO: 1489596
auaacggaaacuuauuaag

SEQ ID NO: 1489598 - RNA, 19 nt, Artificial Sequence
  Description of Artificial Sequence: Synthetic oligonucleotide
  Sense strand starting at position 2999 of SEQ ID NO: 1244451
auaaguuuccguuauaccu

SEQ ID NO: 1489599 - RNA, 19 nt, Artificial Sequence
  Description of Artificial Sequence: Synthetic oligonucleotide
  Antisense strand to SEQ ID NO: 1489598
agguauaacggaaacuuau

SEQ ID NO: 1489600 - RNA, 19 nt, Artificial Sequence
  Description of Artificial Sequence: Synthetic oligonucleotide
  Sense strand starting at position 3006 of SEQ ID NO: 1244451
uccguuauaccucaaguug

SEQ ID NO: 1489601 - RNA, 19 nt, Artificial Sequence
  Description of Artificial Sequence: Synthetic oligonucleotide
  Antisense strand to SEQ ID NO: 1489600
caacuugagguauaacgga

SEQ ID NO: 1489602 - RNA, 19 nt, Artificial Sequence
  Description of Artificial Sequence: Synthetic oligonucleotide
  Sense strand starting at position 3024 of SEQ ID NO: 1244451
ggaguuaucgccuguguaa

SEQ ID NO: 1489603 - RNA, 19 nt, Artificial Sequence
  Description of Artificial Sequence: Synthetic oligonucleotide
  Antisense strand to SEQ ID NO: 1489602
uuacacaggcgauaacucc

SEQ ID NO: 1489604 - RNA, 19 nt, Artificial Sequence
  Description of Artificial Sequence: Synthetic oligonucleotide
  Sense strand starting at position 3061 of SEQ ID NO: 1244451
uuaaauacaguuugagagu

SEQ ID NO: 1489605 - RNA, 19 nt, Artificial Sequence
  Description of Artificial Sequence: Synthetic oligonucleotide
  Antisense strand to SEQ ID NO: 1489604
acucucaaacuguauuuaa

SEQ ID NO: 1489606 - RNA, 19 nt, Artificial Sequence
  Description of Artificial Sequence: Synthetic oligonucleotide
  Sense strand starting at position 3064 of SEQ ID NO: 1244451
aauacaguuugagaguuaa

SEQ ID NO: 1489607 - RNA, 19 nt, Artificial Sequence
  Description of Artificial Sequence: Synthetic oligonucleotide
  Antisense strand to SEQ ID NO: 1489606
uuaacucucaaacuguauu

SEQ ID NO: 1489608 - RNA, 19 nt, Artificial Sequence
  Description of Artificial Sequence: Synthetic oligonucleotide
  Sense strand starting at position 3297 of SEQ ID NO: 1244451
ccauauauaguaugcguaa

SEQ ID NO: 1489609 - RNA, 19 nt, Artificial Sequence
  Description of Artificial Sequence: Synthetic oligonucleotide
  Antisense strand to SEQ ID NO: 1489608
uuacgcauacuauauaugg

SEQ ID NO: 1489610 - RNA, 19 nt, Artificial Sequence
  Description of Artificial Sequence: Synthetic oligonucleotide
  Sense strand starting at position 3298 of SEQ ID NO: 1244451
cauauauaguaugcguaau

SEQ ID NO: 1489611 - RNA, 19 nt, Artificial Sequence
  Description of Artificial Sequence: Synthetic oligonucleotide
  Antisense strand to SEQ ID NO: 1489610
auuacgcauacuauauaug

SEQ ID NO: 1489612 - RNA, 19 nt, Artificial Sequence
  Description of Artificial Sequence: Synthetic oligonucleotide
  Sense strand starting at position 3300 of SEQ ID NO: 1244451
uauauaguaugcguaauca

SEQ ID NO: 1489613 - RNA, 19 nt, Artificial Sequence
  Description of Artificial Sequence: Synthetic oligonucleotide
  Antisense strand to SEQ ID NO: 1489612
ugauuacgcauacuauaua

SEQ ID NO: 1489614 - RNA, 19 nt, Artificial Sequence
  Description of Artificial Sequence: Synthetic oligonucleotide
  Sense strand starting at position 3304 of SEQ ID NO: 1244451
uaguaugcguaaucaguau

SEQ ID NO: 1489615 - RNA, 19 nt, Artificial Sequence
  Description of Artificial Sequence: Synthetic oligonucleotide
  Antisense strand to SEQ ID NO: 1489614
auacugauuacgcauacua

SEQ ID NO: 1489616 - RNA, 19 nt, Artificial Sequence
  Description of Artificial Sequence: Synthetic oligonucleotide
  Sense strand starting at position 3308 of SEQ ID NO: 1244451
augcguaaucaguauauag

SEQ ID NO: 1489617 - RNA, 19 nt, Artificial Sequence
  Description of Artificial Sequence: Synthetic oligonucleotide
  Antisense strand to SEQ ID NO: 1489616
cuauauacugauuacgcau

SEQ ID NO: 1489618 - RNA, 19 nt, Artificial Sequence
  Description of Artificial Sequence: Synthetic oligonucleotide
  Sense strand starting at position 3310 of SEQ ID NO: 1244451
gcguaaucaguauauagaa

SEQ ID NO: 1489619 - RNA, 19 nt, Artificial Sequence
  Description of Artificial Sequence: Synthetic oligonucleotide
  Antisense strand to SEQ ID NO: 1489618
uucuauauacugauuacgc

SEQ ID NO: 1489620 - RNA, 19 nt, Artificial Sequence
  Description of Artificial Sequence: Synthetic oligonucleotide
  Sense strand starting at position 3702 of SEQ ID NO: 1244451
cuaagccuauuugaaugau

SEQ ID NO: 1489621 - RNA, 19 nt, Artificial Sequence
  Description of Artificial Sequence: Synthetic oligonucleotide
  Antisense strand to SEQ ID NO: 1489620
aucauucaaauaggcuuag

SEQ ID NO: 1489622 - RNA, 19 nt, Artificial Sequence
  Description of Artificial Sequence: Synthetic oligonucleotide
  Sense strand starting at position 3735 of SEQ ID NO: 1244451
gguauauagcaguauuaga

SEQ ID NO: 1489623 - RNA, 19 nt, Artificial Sequence
  Description of Artificial Sequence: Synthetic oligonucleotide
  Antisense strand to SEQ ID NO: 1489622
ucuaauacugcuauauacc

SEQ ID NO: 1489624 - RNA, 19 nt, Artificial Sequence
  Description of Artificial Sequence: Synthetic oligonucleotide
  Sense strand starting at position 3740 of SEQ ID NO: 1244451
auagcaguauuagaccaaa

SEQ ID NO: 1489625 - RNA, 19 nt, Artificial Sequence
  Description of Artificial Sequence: Synthetic oligonucleotide
  Antisense strand to SEQ ID NO: 1489624
uuuggucuaauacugcuau

SEQ ID NO: 1489626 - RNA, 19 nt, Artificial Sequence
  Description of Artificial Sequence: Synthetic oligonucleotide
  Sense strand starting at position 464 of SEQ ID NO: 1244452
gcuacacagcaguauagaa

SEQ ID NO: 1489627 - RNA, 19 nt, Artificial Sequence
  Description of Artificial Sequence: Synthetic oligonucleotide
  Antisense strand to SEQ ID NO: 1489626
uucuauacugcuguguagc

SEQ ID NO: 1489628 - RNA, 19 nt, Artificial Sequence
  Description of Artificial Sequence: Synthetic oligonucleotide
  Sense strand starting at position 471 of SEQ ID NO: 1244452
agcaguauagaauguuauu

SEQ ID NO: 1489629 - RNA, 19 nt, Artificial Sequence
  Description of Artificial Sequence: Synthetic oligonucleotide
  Antisense strand to SEQ ID NO: 1489628
aauaacauucuauacugcu

SEQ ID NO: 1489630 - RNA, 19 nt, Artificial Sequence
  Description of Artificial Sequence: Synthetic oligonucleotide
  Sense strand starting at position 502 of SEQ ID NO: 1244452
gcugcacauuugguaauua

SEQ ID NO: 1489631 - RNA, 19 nt, Artificial Sequence
  Description of Artificial Sequence: Synthetic oligonucleotide
  Antisense strand to SEQ ID NO: 1489630
uaauuaccaaaugugcagc

SEQ ID NO: 1489632 - RNA, 19 nt, Artificial Sequence
  Description of Artificial Sequence: Synthetic oligonucleotide
  Sense strand starting at position 855 of SEQ ID NO: 1244452
guagacuccugcccuauuu

SEQ ID NO: 1489633 - RNA, 19 nt, Artificial Sequence
  Description of Artificial Sequence: Synthetic oligonucleotide
  Antisense strand to SEQ ID NO: 1489632
aaauagggcaggagucuac

SEQ ID NO: 1489634 - RNA, 19 nt, Artificial Sequence
  Description of Artificial Sequence: Synthetic oligonucleotide
  Sense strand starting at position 885 of SEQ ID NO: 1244452
gaagcauugcuagcgucuu

SEQ ID NO: 1489635 - RNA, 19 nt, Artificial Sequence
  Description of Artificial Sequence: Synthetic oligonucleotide
  Antisense strand to SEQ ID NO: 1489634
aagacgcuagcaaugcuuc

SEQ ID NO: 1489636 - RNA, 19 nt, Artificial Sequence
  Description of Artificial Sequence: Synthetic oligonucleotide
  Sense strand starting at position 887 of SEQ ID NO: 1244452
agcauugcuagcgucuuau

SEQ ID NO: 1489637 - RNA, 19 nt, Artificial Sequence
  Description of Artificial Sequence: Synthetic oligonucleotide
  Antisense strand to SEQ ID NO: 1489636
auaagacgcuagcaaugcu

SEQ ID NO: 1489638 - RNA, 19 nt, Artificial Sequence
  Description of Artificial Sequence: Synthetic oligonucleotide
  Sense strand starting at position 911 of SEQ ID NO: 1244452
uuaaaucacuucucgguaa

SEQ ID NO: 1489639 - RNA, 19 nt, Artificial Sequence
  Description of Artificial Sequence: Synthetic oligonucleotide
  Antisense strand to SEQ ID NO: 1489638
uuaccgagaagugauuuaa

SEQ ID NO: 1489640 - RNA, 19 nt, Artificial Sequence
  Description of Artificial Sequence: Synthetic oligonucleotide
  Sense strand starting at position 915 of SEQ ID NO: 1244452
aucacuucucgguaacaag

SEQ ID NO: 1489641 - RNA, 19 nt, Artificial Sequence
  Description of Artificial Sequence: Synthetic oligonucleotide
  Antisense strand to SEQ ID NO: 1489640
cuuguuaccgagaagugau

SEQ ID NO: 1489642 - RNA, 19 nt, Artificial Sequence
  Description of Artificial Sequence: Synthetic oligonucleotide
  Sense strand starting at position 996 of SEQ ID NO: 1244452
uuaagagaaucuguguauu

SEQ ID NO: 1489643 - RNA, 19 nt, Artificial Sequence
  Description of Artificial Sequence: Synthetic oligonucleotide
  Antisense strand to SEQ ID NO: 1489642
aauacacagauucucuuaa

SEQ ID NO: 1489644 - RNA, 19 nt, Artificial Sequence
  Description of Artificial Sequence: Synthetic oligonucleotide
  Sense strand starting at position 998 of SEQ ID NO: 1244452
aagagaaucuguguauuac

SEQ ID NO: 1489645 - RNA, 19 nt, Artificial Sequence
  Description of Artificial Sequence: Synthetic oligonucleotide
  Antisense strand to SEQ ID NO: 1489644
guaauacacagauucucuu

SEQ ID NO: 1489646 - RNA, 19 nt, Artificial Sequence
  Description of Artificial Sequence: Synthetic oligonucleotide
  Sense strand starting at position 1049 of SEQ ID NO: 1244452
acggcaaguguguaauacu

SEQ ID NO: 1489647 - RNA, 19 nt, Artificial Sequence
  Description of Artificial Sequence: Synthetic oligonucleotide
  Antisense strand to SEQ ID NO: 1489646
aguauuacacacuugccgu

SEQ ID NO: 1489648 - RNA, 19 nt, Artificial Sequence
  Description of Artificial Sequence: Synthetic oligonucleotide
  Sense strand starting at position 1058 of SEQ ID NO: 1244452
guguaauacuuucuggauc

SEQ ID NO: 1489649 - RNA, 19 nt, Artificial Sequence
  Description of Artificial Sequence: Synthetic oligonucleotide
  Antisense strand to SEQ ID NO: 1489648
gauccagaaaguauuacac

SEQ ID NO: 1489650 - RNA, 19 nt, Artificial Sequence
  Description of Artificial Sequence: Synthetic oligonucleotide
  Sense strand starting at position 1090 of SEQ ID NO: 1244452
caugcugucggcuaaucaa

SEQ ID NO: 1489651 - RNA, 19 nt, Artificial Sequence
  Description of Artificial Sequence: Synthetic oligonucleotide
  Antisense strand to SEQ ID NO: 1489650
uugauuagccgacagcaug

SEQ ID NO: 1489652 - RNA, 19 nt, Artificial Sequence
  Description of Artificial Sequence: Synthetic oligonucleotide
  Sense strand starting at position 1298 of SEQ ID NO: 1244452
cagguuucucucgacgaaa

SEQ ID NO: 1489653 - RNA, 19 nt, Artificial Sequence
  Description of Artificial Sequence: Synthetic oligonucleotide
  Antisense strand to SEQ ID NO: 1489652
uuucgucgagagaaaccug

SEQ ID NO: 1489654 - RNA, 19 nt, Artificial Sequence
  Description of Artificial Sequence: Synthetic oligonucleotide
  Sense strand starting at position 1300 of SEQ ID NO: 1244452
gguuucucucgacgaaacu

SEQ ID NO: 1489655 - RNA, 19 nt, Artificial Sequence
  Description of Artificial Sequence: Synthetic oligonucleotide
  Antisense strand to SEQ ID NO: 1489654
aguuucgucgagagaaacc

SEQ ID NO: 1489656 - RNA, 19 nt, Artificial Sequence
  Description of Artificial Sequence: Synthetic oligonucleotide
  Sense strand starting at position 1301 of SEQ ID NO: 1244452
guuucucucgacgaaacua

SEQ ID NO: 1489657 - RNA, 19 nt, Artificial Sequence
  Description of Artificial Sequence: Synthetic oligonucleotide
  Antisense strand to SEQ ID NO: 1489656
uaguuucgucgagagaaac

SEQ ID NO: 1489658 - RNA, 19 nt, Artificial Sequence
  Description of Artificial Sequence: Synthetic oligonucleotide
  Sense strand starting at position 1378 of SEQ ID NO: 1244452
gagcacucauccgucacua

SEQ ID NO: 1489659 - RNA, 19 nt, Artificial Sequence
  Description of Artificial Sequence: Synthetic oligonucleotide
  Antisense strand to SEQ ID NO: 1489658
uagugacggaugagugcuc

SEQ ID NO: 1489660 - RNA, 19 nt, Artificial Sequence
  Description of Artificial Sequence: Synthetic oligonucleotide
  Sense strand starting at position 1382 of SEQ ID NO: 1244452
acucauccgucacuaguau

SEQ ID NO: 1489661 - RNA, 19 nt, Artificial Sequence
  Description of Artificial Sequence: Synthetic oligonucleotide
  Antisense strand to SEQ ID NO: 1489660
auacuagugacggaugagu

SEQ ID NO: 1489662 - RNA, 19 nt, Artificial Sequence
  Description of Artificial Sequence: Synthetic oligonucleotide
  Sense strand starting at position 1383 of SEQ ID NO: 1244452
cucauccgucacuaguauu

SEQ ID NO: 1489663 - RNA, 19 nt, Artificial Sequence
  Description of Artificial Sequence: Synthetic oligonucleotide
  Antisense strand to SEQ ID NO: 1489662
aauacuagugacggaugag

SEQ ID NO: 1489664 - RNA, 19 nt, Artificial Sequence
  Description of Artificial Sequence: Synthetic oligonucleotide
  Sense strand starting at position 1497 of SEQ ID NO: 1244452
cggagucaauccgcuggaa

SEQ ID NO: 1489665 - RNA, 19 nt, Artificial Sequence
  Description of Artificial Sequence: Synthetic oligonucleotide
  Antisense strand to SEQ ID NO: 1489664
uuccagcggauugacuccg

SEQ ID NO: 1489666 - RNA, 19 nt, Artificial Sequence
  Description of Artificial Sequence: Synthetic oligonucleotide
  Sense strand starting at position 1595 of SEQ ID NO: 1244452
caagaucggccuggcauua

SEQ ID NO: 1489667 - RNA, 19 nt, Artificial Sequence
  Description of Artificial Sequence: Synthetic oligonucleotide
  Antisense strand to SEQ ID NO: 1489666
uaaugccaggccgaucuug

SEQ ID NO: 1489668 - RNA, 19 nt, Artificial Sequence
  Description of Artificial Sequence: Synthetic oligonucleotide
  Sense strand starting at position 1777 of SEQ ID NO: 1244452
cgaagaagcugguuucuca

SEQ ID NO: 1489669 - RNA, 19 nt, Artificial Sequence
  Description of Artificial Sequence: Synthetic oligonucleotide
  Antisense strand to SEQ ID NO: 1489668
ugagaaaccagcuucuucg

SEQ ID NO: 1489670 - RNA, 19 nt, Artificial Sequence
  Description of Artificial Sequence: Synthetic oligonucleotide
  Sense strand starting at position 2761 of SEQ ID NO: 1244452
uuuaaauuguggucaggac

SEQ ID NO: 1489671 - RNA, 19 nt, Artificial Sequence
  Description of Artificial Sequence: Synthetic oligonucleotide
  Antisense strand to SEQ ID NO: 1489670
guccugaccacaauuuaaa

SEQ ID NO: 1489672 - RNA, 19 nt, Artificial Sequence
  Description of Artificial Sequence: Synthetic oligonucleotide
  Sense strand starting at position 2784 of SEQ ID NO: 1244452
ccguuugcaccucugcaau

SEQ ID NO: 1489673 - RNA, 19 nt, Artificial Sequence
  Description of Artificial Sequence: Synthetic oligonucleotide
  Antisense strand to SEQ ID NO: 1489672
auugcagaggugcaaacgg

SEQ ID NO: 1489674 - RNA, 19 nt, Artificial Sequence
  Description of Artificial Sequence: Synthetic oligonucleotide
  Sense strand starting at position 2860 of SEQ ID NO: 1244452
cgucuugugagauagagau

SEQ ID NO: 1489675 - RNA, 19 nt, Artificial Sequence
  Description of Artificial Sequence: Synthetic oligonucleotide
  Antisense strand to SEQ ID NO: 1489674
aucucuaucucacaagacg

SEQ ID NO: 1489676 - RNA, 19 nt, Artificial Sequence
  Description of Artificial Sequence: Synthetic oligonucleotide
  Sense strand starting at position 2873 of SEQ ID NO: 1244452
agagaugauuucuauucua

SEQ ID NO: 1489677 - RNA, 19 nt, Artificial Sequence
  Description of Artificial Sequence: Synthetic oligonucleotide
  Antisense strand to SEQ ID NO: 1489676
uagaauagaaaucaucucu

SEQ ID NO: 1489678 - RNA, 19 nt, Artificial Sequence
  Description of Artificial Sequence: Synthetic oligonucleotide
  Sense strand starting at position 2878 of SEQ ID NO: 1244452
ugauuucuauucuagagag

SEQ ID NO: 1489679 - RNA, 19 nt, Artificial Sequence
  Description of Artificial Sequence: Synthetic oligonucleotide
  Antisense strand to SEQ ID NO: 1489678
cucucuagaauagaaauca

SEQ ID NO: 1489680 - RNA, 19 nt, Artificial Sequence
  Description of Artificial Sequence: Synthetic oligonucleotide
  Sense strand starting at position 2958 of SEQ ID NO: 1244452
gguuauuaguaaguaaugu

SEQ ID NO: 1489681 - RNA, 19 nt, Artificial Sequence
  Description of Artificial Sequence: Synthetic oligonucleotide
  Antisense strand to SEQ ID NO: 1489680
acauuacuuacuaauaacc

SEQ ID NO: 1489682 - RNA, 19 nt, Artificial Sequence
  Description of Artificial Sequence: Synthetic oligonucleotide
  Sense strand starting at position 3051 of SEQ ID NO: 1244452
gggagauauuuauauguug

SEQ ID NO: 1489683 - RNA, 19 nt, Artificial Sequence
  Description of Artificial Sequence: Synthetic oligonucleotide
  Antisense strand to SEQ ID NO: 1489682
caacauauaaauaucuccc

SEQ ID NO: 1489684 - RNA, 19 nt, Artificial Sequence
  Description of Artificial Sequence: Synthetic oligonucleotide
  Sense strand starting at position 3110 of SEQ ID NO: 1244452
agaugcuaauaguccuaua

SEQ ID NO: 1489685 - RNA, 19 nt, Artificial Sequence
  Description of Artificial Sequence: Synthetic oligonucleotide
  Antisense strand to SEQ ID NO: 1489684
uauaggacuauuagcaucu

SEQ ID NO: 1489686 - RNA, 19 nt, Artificial Sequence
  Description of Artificial Sequence: Synthetic oligonucleotide
  Sense strand starting at position 3121 of SEQ ID NO: 1244452
guccuauaacuagaauugu

SEQ ID NO: 1489687 - RNA, 19 nt, Artificial Sequence
  Description of Artificial Sequence: Synthetic oligonucleotide
  Antisense strand to SEQ ID NO: 1489686
acaauucuaguuauaggac

SEQ ID NO: 1489688 - RNA, 19 nt, Artificial Sequence
  Description of Artificial Sequence: Synthetic oligonucleotide
  Sense strand starting at position 3300 of SEQ ID NO: 1244452
cugagauauuaugcacaca

SEQ ID NO: 1489689 - RNA, 19 nt, Artificial Sequence
  Description of Artificial Sequence: Synthetic oligonucleotide
  Antisense strand to SEQ ID NO: 1489688
ugugugcauaauaucucag

SEQ ID NO: 1489690 - RNA, 19 nt, Artificial Sequence
  Description of Artificial Sequence: Synthetic oligonucleotide
  Sense strand starting at position 3360 of SEQ ID NO: 1244452
cuuuguaaauacguguaca

SEQ ID NO: 1489691 - RNA, 19 nt, Artificial Sequence
  Description of Artificial Sequence: Synthetic oligonucleotide
  Antisense strand to SEQ ID NO: 1489690
uguacacguauuuacaaag

SEQ ID NO: 1489692 - RNA, 19 nt, Artificial Sequence
  Description of Artificial Sequence: Synthetic oligonucleotide
  Sense strand starting at position 3363 of SEQ ID NO: 1244452
uguaaauacguguacaaag

SEQ ID NO: 1489693 - RNA, 19 nt, Artificial Sequence
  Description of Artificial Sequence: Synthetic oligonucleotide
  Antisense strand to SEQ ID NO: 1489692
cuuuguacacguauuuaca

SEQ ID NO: 1489694 - RNA, 19 nt, Artificial Sequence
  Description of Artificial Sequence: Synthetic oligonucleotide
  Sense strand starting at position 3373 of SEQ ID NO: 1244452
uguacaaagcauuguaauu

SEQ ID NO: 1489695 - RNA, 19 nt, Artificial Sequence
  Description of Artificial Sequence: Synthetic oligonucleotide
  Antisense strand to SEQ ID NO: 1489694
aauuacaaugcuuuguaca

SEQ ID NO: 1489696 - RNA, 19 nt, Artificial Sequence
  Description of Artificial Sequence: Synthetic oligonucleotide
  Sense strand starting at position 3713 of SEQ ID NO: 1244452
gaagacuuggcucagguca

SEQ ID NO: 1489697 - RNA, 19 nt, Artificial Sequence
  Description of Artificial Sequence: Synthetic oligonucleotide
  Antisense strand to SEQ ID NO: 1489696
ugaccugagccaagucuuc

SEQ ID NO: 1489698 - RNA, 19 nt, Artificial Sequence
  Description of Artificial Sequence: Synthetic oligonucleotide
  Sense strand starting at position 3882 of SEQ ID NO: 1244452
auguuagacuugucuagau

SEQ ID NO: 1489699 - RNA, 19 nt, Artificial Sequence
  Description of Artificial Sequence: Synthetic oligonucleotide
  Antisense strand to SEQ ID NO: 1489698
aucuagacaagucuaacau

SEQ ID NO: 1489700 - RNA, 19 nt, Artificial Sequence
  Description of Artificial Sequence: Synthetic oligonucleotide
  Sense strand starting at position 3884 of SEQ ID NO: 1244452
guuagacuugucuagauga

SEQ ID NO: 1489701 - RNA, 19 nt, Artificial Sequence
  Description of Artificial Sequence: Synthetic oligonucleotide
  Antisense strand to SEQ ID NO: 1489700
ucaucuagacaagucuaac

SEQ ID NO: 1489702 - RNA, 19 nt, Artificial Sequence
  Description of Artificial Sequence: Synthetic oligonucleotide
  Sense strand starting at position 3894 of SEQ ID NO: 1244452
ucuagaugaaauggucuga

SEQ ID NO: 1489703 - RNA, 19 nt, Artificial Sequence
  Description of Artificial Sequence: Synthetic oligonucleotide
  Antisense strand to SEQ ID NO: 1489702
ucagaccauuucaucuaga

SEQ ID NO: 1489704 - RNA, 19 nt, Artificial Sequence
  Description of Artificial Sequence: Synthetic oligonucleotide
  Sense strand starting at position 3908 of SEQ ID NO: 1244452
ucugaaauaccagaccgua

SEQ ID NO: 1489705 - RNA, 19 nt, Artificial Sequence
  Description of Artificial Sequence: Synthetic oligonucleotide
  Antisense strand to SEQ ID NO: 1489704
uacggucugguauuucaga

SEQ ID NO: 1489706 - RNA, 19 nt, Artificial Sequence
  Description of Artificial Sequence: Synthetic oligonucleotide
  Sense strand starting at position 92 of SEQ ID NO: 1244453
ugcaauaaucaauguagaa

SEQ ID NO: 1489707 - RNA, 19 nt, Artificial Sequence
  Description of Artificial Sequence: Synthetic oligonucleotide
  Antisense strand to SEQ ID NO: 1489706
uucuacauugauuauugca

SEQ ID NO: 1489708 - RNA, 19 nt, Artificial Sequence
  Description of Artificial Sequence: Synthetic oligonucleotide
  Sense strand starting at position 446 of SEQ ID NO: 1244453
aucacauaucaguggaugu

SEQ ID NO: 1489709 - RNA, 19 nt, Artificial Sequence
  Description of Artificial Sequence: Synthetic oligonucleotide
  Antisense strand to SEQ ID NO: 1489708
acauccacugauaugugau

SEQ ID NO: 1489710 - RNA, 19 nt, Artificial Sequence
  Description of Artificial Sequence: Synthetic oligonucleotide
  Sense strand starting at position 567 of SEQ ID NO: 1244453
aaaguagagugaucuggca

SEQ ID NO: 1489711 - RNA, 19 nt, Artificial Sequence
  Description of Artificial Sequence: Synthetic oligonucleotide
  Antisense strand to SEQ ID NO: 1489710
ugccagaucacucuacuuu

SEQ ID NO: 1489712 - RNA, 19 nt, Artificial Sequence
  Description of Artificial Sequence: Synthetic oligonucleotide
  Sense strand starting at position 569 of SEQ ID NO: 1244453
aguagagugaucuggcaga

SEQ ID NO: 1489713 - RNA, 19 nt, Artificial Sequence
  Description of Artificial Sequence: Synthetic oligonucleotide
  Antisense strand to SEQ ID NO: 1489712
ucugccagaucacucuacu

SEQ ID NO: 1489714 - RNA, 19 nt, Artificial Sequence
  Description of Artificial Sequence: Synthetic oligonucleotide
  Sense strand starting at position 574 of SEQ ID NO: 1244453
agugaucuggcagacauua

SEQ ID NO: 1489715 - RNA, 19 nt, Artificial Sequence
  Description of Artificial Sequence: Synthetic oligonucleotide
  Antisense strand to SEQ ID NO: 1489714
uaaugucugccagaucacu

SEQ ID NO: 1489716 - RNA, 19 nt, Artificial Sequence
  Description of Artificial Sequence: Synthetic oligonucleotide
  Sense strand starting at position 690 of SEQ ID NO: 1244453
cagaaauguuuggccugga

SEQ ID NO: 1489717 - RNA, 19 nt, Artificial Sequence
  Description of Artificial Sequence: Synthetic oligonucleotide
  Antisense strand to SEQ ID NO: 1489716
uccaggccaaacauuucug

SEQ ID NO: 1489718 - RNA, 19 nt, Artificial Sequence
  Description of Artificial Sequence: Synthetic oligonucleotide
  Sense strand starting at position 691 of SEQ ID NO: 1244453
agaaauguuuggccuggau

SEQ ID NO: 1489719 - RNA, 19 nt, Artificial Sequence
  Description of Artificial Sequence: Synthetic oligonucleotide
  Antisense strand to SEQ ID NO: 1489718
auccaggccaaacauuucu

SEQ ID NO: 1489720 - RNA, 19 nt, Artificial Sequence
  Description of Artificial Sequence: Synthetic oligonucleotide
  Sense strand starting at position 695 of SEQ ID NO: 1244453
auguuuggccuggauguaa

SEQ ID NO: 1489721 - RNA, 19 nt, Artificial Sequence
  Description of Artificial Sequence: Synthetic oligonucleotide
  Antisense strand to SEQ ID NO: 1489720
uuacauccaggccaaacau

SEQ ID NO: 1489722 - RNA, 19 nt, Artificial Sequence
  Description of Artificial Sequence: Synthetic oligonucleotide
  Sense strand starting at position 767 of SEQ ID NO: 1244453
agaccuaugcucuaaacgu

SEQ ID NO: 1489723 - RNA, 19 nt, Artificial Sequence
  Description of Artificial Sequence: Synthetic oligonucleotide
  Antisense strand to SEQ ID NO: 1489722
acguuuagagcauaggucu

SEQ ID NO: 1489724 - RNA, 19 nt, Artificial Sequence
  Description of Artificial Sequence: Synthetic oligonucleotide
  Sense strand starting at position 804 of SEQ ID NO: 1244453
ggguaugauaacgguauua

SEQ ID NO: 1489725 - RNA, 19 nt, Artificial Sequence
  Description of Artificial Sequence: Synthetic oligonucleotide
  Antisense strand to SEQ ID NO: 1489724
uaauaccguuaucauaccc

SEQ ID NO: 1489726 - RNA, 19 nt, Artificial Sequence
  Description of Artificial Sequence: Synthetic oligonucleotide
  Sense strand starting at position 806 of SEQ ID NO: 1244453
guaugauaacgguauuauu

SEQ ID NO: 1489727 - RNA, 19 nt, Artificial Sequence
  Description of Artificial Sequence: Synthetic oligonucleotide
  Antisense strand to SEQ ID NO: 1489726
aauaauaccguuaucauac

SEQ ID NO: 1489728 - RNA, 19 nt, Artificial Sequence
  Description of Artificial Sequence: Synthetic oligonucleotide
  Sense strand starting at position 817 of SEQ ID NO: 1244453
guauuauugcuaggaagag

SEQ ID NO: 1489729 - RNA, 19 nt, Artificial Sequence
  Description of Artificial Sequence: Synthetic oligonucleotide
  Antisense strand to SEQ ID NO: 1489728
cucuuccuagcaauaauac

SEQ ID NO: 1489730 - RNA, 19 nt, Artificial Sequence
  Description of Artificial Sequence: Synthetic oligonucleotide
  Sense strand starting at position 1783 of SEQ ID NO: 1244453
ucuguagagguuuauguca

SEQ ID NO: 1489731 - RNA, 19 nt, Artificial Sequence
  Description of Artificial Sequence: Synthetic oligonucleotide
  Antisense strand to SEQ ID NO: 1489730
ugacauaaaccucuacaga

SEQ ID NO: 1489732 - RNA, 19 nt, Artificial Sequence
  Description of Artificial Sequence: Synthetic oligonucleotide
  Sense strand starting at position 1876 of SEQ ID NO: 1244453
cucaguuucggugaaagga

SEQ ID NO: 1489733 - RNA, 19 nt, Artificial Sequence
  Description of Artificial Sequence: Synthetic oligonucleotide
  Antisense strand to SEQ ID NO: 1489732
uccuuucaccgaaacugag

SEQ ID NO: 1489734 - RNA, 19 nt, Artificial Sequence
  Description of Artificial Sequence: Synthetic oligonucleotide
  Sense strand starting at position 1993 of SEQ ID NO: 1244453
gcacguuuaccguugcuca

SEQ ID NO: 1489735 - RNA, 19 nt, Artificial Sequence
  Description of Artificial Sequence: Synthetic oligonucleotide
  Antisense strand to SEQ ID NO: 1489734
ugagcaacgguaaacgugc

SEQ ID NO: 1489736 - RNA, 19 nt, Artificial Sequence
  Description of Artificial Sequence: Synthetic oligonucleotide
  Sense strand starting at position 2168 of SEQ ID NO: 1244453
uagggagaguaagucuuaa

SEQ ID NO: 1489737 - RNA, 19 nt, Artificial Sequence
  Description of Artificial Sequence: Synthetic oligonucleotide
  Antisense strand to SEQ ID NO: 1489736
uuaagacuuacucucccua

SEQ ID NO: 1489738 - RNA, 19 nt, Artificial Sequence
  Description of Artificial Sequence: Synthetic oligonucleotide
  Sense strand starting at position 2191 of SEQ ID NO: 1244453
uuuccuucucagggaauca

SEQ ID NO: 1489739 - RNA, 19 nt, Artificial Sequence
  Description of Artificial Sequence: Synthetic oligonucleotide
  Antisense strand to SEQ ID NO: 1489738
ugauucccugagaaggaaa

SEQ ID NO: 1489740 - RNA, 19 nt, Artificial Sequence
  Description of Artificial Sequence: Synthetic oligonucleotide
  Sense strand starting at position 2226 of SEQ ID NO: 1244453
gaguguugauucuuaaauu

SEQ ID NO: 1489741 - RNA, 19 nt, Artificial Sequence
  Description of Artificial Sequence: Synthetic oligonucleotide
  Antisense strand to SEQ ID NO: 1489740
aauuuaagaaucaacacuc

SEQ ID NO: 1489742 - RNA, 19 nt, Artificial Sequence
  Description of Artificial Sequence: Synthetic oligonucleotide
  Sense strand starting at position 2293 of SEQ ID NO: 1244453
uuccaugucccaugggaca

SEQ ID NO: 1489743 - RNA, 19 nt, Artificial Sequence
  Description of Artificial Sequence: Synthetic oligonucleotide
  Antisense strand to SEQ ID NO: 1489742
ugucccaugggacauggaa

SEQ ID NO: 1489744 - RNA, 19 nt, Artificial Sequence
  Description of Artificial Sequence: Synthetic oligonucleotide
  Sense strand starting at position 2344 of SEQ ID NO: 1244453
ggcggauugcauggaaaga

SEQ ID NO: 1489745 - RNA, 19 nt, Artificial Sequence
  Description of Artificial Sequence: Synthetic oligonucleotide
  Antisense strand to SEQ ID NO: 1489744
ucuuuccaugcaauccgcc

SEQ ID NO: 1489746 - RNA, 19 nt, Artificial Sequence
  Description of Artificial Sequence: Synthetic oligonucleotide
  Sense strand starting at position 2345 of SEQ ID NO: 1244453
gcggauugcauggaaagaa

SEQ ID NO: 1489747 - RNA, 19 nt, Artificial Sequence
  Description of Artificial Sequence: Synthetic oligonucleotide
  Antisense strand to SEQ ID NO: 1489746
uucuuuccaugcaauccgc

SEQ ID NO: 1489748 - RNA, 19 nt, Artificial Sequence
  Description of Artificial Sequence: Synthetic oligonucleotide
  Sense strand starting at position 2433 of SEQ ID NO: 1244453
cugauaaacaucggugaga

SEQ ID NO: 1489749 - RNA, 19 nt, Artificial Sequence
  Description of Artificial Sequence: Synthetic oligonucleotide
  Antisense strand to SEQ ID NO: 1489748
ucucaccgauguuuaucag

SEQ ID NO: 1489750 - RNA, 19 nt, Artificial Sequence
  Description of Artificial Sequence: Synthetic oligonucleotide
  Sense strand starting at position 2434 of SEQ ID NO: 1244453
ugauaaacaucggugagac

SEQ ID NO: 1489751 - RNA, 19 nt, Artificial Sequence
  Description of Artificial Sequence: Synthetic oligonucleotide
  Antisense strand to SEQ ID NO: 1489750
gucucaccgauguuuauca

SEQ ID NO: 1489752 - RNA, 19 nt, Artificial Sequence
  Description of Artificial Sequence: Synthetic oligonucleotide
  Sense strand starting at position 2444 of SEQ ID NO: 1244453
cggugagaccaacaugagu

SEQ ID NO: 1489753 - RNA, 19 nt, Artificial Sequence
  Description of Artificial Sequence: Synthetic oligonucleotide
  Antisense strand to SEQ ID NO: 1489752
acucauguuggucucaccg

SEQ ID NO: 1489754 - RNA, 19 nt, Artificial Sequence
  Description of Artificial Sequence: Synthetic oligonucleotide
  Sense strand starting at position 2503 of SEQ ID NO: 1244453
ccagauaauucucuggucu

SEQ ID NO: 1489755 - RNA, 19 nt, Artificial Sequence
  Description of Artificial Sequence: Synthetic oligonucleotide
  Antisense strand to SEQ ID NO: 1489754
agaccagagaauuaucugg

SEQ ID NO: 1489756 - RNA, 19 nt, Artificial Sequence
  Description of Artificial Sequence: Synthetic oligonucleotide
  Sense strand starting at position 2632 of SEQ ID NO: 1244453
accucuaaggaauguguuu

SEQ ID NO: 1489757 - RNA, 19 nt, Artificial Sequence
  Description of Artificial Sequence: Synthetic oligonucleotide
  Antisense strand to SEQ ID NO: 1489756
aaacacauuccuuagaggu

SEQ ID NO: 1489758 - RNA, 19 nt, Artificial Sequence
  Description of Artificial Sequence: Synthetic oligonucleotide
  Sense strand starting at position 2662 of SEQ ID NO: 1244453
ggcagagguggguaaaguu

SEQ ID NO: 1489759 - RNA, 19 nt, Artificial Sequence
  Description of Artificial Sequence: Synthetic oligonucleotide
  Antisense strand to SEQ ID NO: 1489758
aacuuuacccaccucugcc

SEQ ID NO: 1489760 - RNA, 19 nt, Artificial Sequence
  Description of Artificial Sequence: Synthetic oligonucleotide
  Sense strand starting at position 2722 of SEQ ID NO: 1244453
ggcgguguucugucagucu

SEQ ID NO: 1489761 - RNA, 19 nt, Artificial Sequence
  Description of Artificial Sequence: Synthetic oligonucleotide
  Antisense strand to SEQ ID NO: 1489760
agacugacagaacaccgcc

SEQ ID NO: 1489762 - RNA, 19 nt, Artificial Sequence
  Description of Artificial Sequence: Synthetic oligonucleotide
  Sense strand starting at position 2943 of SEQ ID NO: 1244453
cguccacacugauugaaca

SEQ ID NO: 1489763 - RNA, 19 nt, Artificial Sequence
  Description of Artificial Sequence: Synthetic oligonucleotide
  Antisense strand to SEQ ID NO: 1489762
uguucaaucaguguggacg

SEQ ID NO: 1489764 - RNA, 19 nt, Artificial Sequence
  Description of Artificial Sequence: Synthetic oligonucleotide
  Sense strand starting at position 2972 of SEQ ID NO: 1244453
gcacaacucccagaaguca

SEQ ID NO: 1489765 - RNA, 19 nt, Artificial Sequence
  Description of Artificial Sequence: Synthetic oligonucleotide
  Antisense strand to SEQ ID NO: 1489764
ugacuucugggaguugugc

SEQ ID NO: 1489766 - RNA, 19 nt, Artificial Sequence
  Description of Artificial Sequence: Synthetic oligonucleotide
  Sense strand starting at position 2987 of SEQ ID NO: 1244453
gucaucuuucucgcucgau

SEQ ID NO: 1489767 - RNA, 19 nt, Artificial Sequence
  Description of Artificial Sequence: Synthetic oligonucleotide
  Antisense strand to SEQ ID NO: 1489766
aucgagcgagaaagaugac

SEQ ID NO: 1489768 - RNA, 19 nt, Artificial Sequence
  Description of Artificial Sequence: Synthetic oligonucleotide
  Sense strand starting at position 3092 of SEQ ID NO: 1244453
gggaaacuauugguauuac

SEQ ID NO: 1489769 - RNA, 19 nt, Artificial Sequence
  Description of Artificial Sequence: Synthetic oligonucleotide
  Antisense strand to SEQ ID NO: 1489768
guaauaccaauaguuuccc

SEQ ID NO: 1489770 - RNA, 19 nt, Artificial Sequence
  Description of Artificial Sequence: Synthetic oligonucleotide
  Sense strand starting at position 3444 of SEQ ID NO: 1244453
ucuauaaagcaaugacagu

SEQ ID NO: 1489771 - RNA, 19 nt, Artificial Sequence
  Description of Artificial Sequence: Synthetic oligonucleotide
  Antisense strand to SEQ ID NO: 1489770
acugucauugcuuuauaga

SEQ ID NO: 1489772 - RNA, 19 nt, Artificial Sequence
  Description of Artificial Sequence: Synthetic oligonucleotide
  Sense strand starting at position 3473 of SEQ ID NO: 1244453
caagaaggaccuuggcaau

SEQ ID NO: 1489773 - RNA, 19 nt, Artificial Sequence
  Description of Artificial Sequence: Synthetic oligonucleotide
  Antisense strand to SEQ ID NO: 1489772
auugccaagguccuucuug

SEQ ID NO: 1489774 - RNA, 19 nt, Artificial Sequence
  Description of Artificial Sequence: Synthetic oligonucleotide
  Sense strand starting at position 3483 of SEQ ID NO: 1244453
cuuggcaaugucuacagaa

SEQ ID NO: 1489775 - RNA, 19 nt, Artificial Sequence
  Description of Artificial Sequence: Synthetic oligonucleotide
  Antisense strand to SEQ ID NO: 1489774
uucuguagacauugccaag

SEQ ID NO: 1489776 - RNA, 19 nt, Artificial Sequence
  Description of Artificial Sequence: Synthetic oligonucleotide
  Sense strand starting at position 3485 of SEQ ID NO: 1244453
uggcaaugucuacagaagu

SEQ ID NO: 1489777 - RNA, 19 nt, Artificial Sequence
  Description of Artificial Sequence: Synthetic oligonucleotide
  Antisense strand to SEQ ID NO: 1489776
acuucuguagacauugcca

SEQ ID NO: 1489778 - RNA, 19 nt, Artificial Sequence
  Description of Artificial Sequence: Synthetic oligonucleotide
  Sense strand starting at position 3501 of SEQ ID NO: 1244453
agucaauaauguccauuau

SEQ ID NO: 1489779 - RNA, 19 nt, Artificial Sequence
  Description of Artificial Sequence: Synthetic oligonucleotide
  Antisense strand to SEQ ID NO: 1489778
auaauggacauuauugacu

SEQ ID NO: 1489780 - RNA, 19 nt, Artificial Sequence
  Description of Artificial Sequence: Synthetic oligonucleotide
  Sense strand starting at position 3502 of SEQ ID NO: 1244453
gucaauaauguccauuauu

SEQ ID NO: 1489781 - RNA, 19 nt, Artificial Sequence
  Description of Artificial Sequence: Synthetic oligonucleotide
  Antisense strand to SEQ ID NO: 1489780
aauaauggacauuauugac

SEQ ID NO: 1489782 - RNA, 19 nt, Artificial Sequence
  Description of Artificial Sequence: Synthetic oligonucleotide
  Sense strand starting at position 3569 of SEQ ID NO: 1244453
agagauagaugugcaacaa

SEQ ID NO: 1489783 - RNA, 19 nt, Artificial Sequence
  Description of Artificial Sequence: Synthetic oligonucleotide
  Antisense strand to SEQ ID NO: 1489782
uuguugcacaucuaucucu

SEQ ID NO: 1489784 - RNA, 19 nt, Artificial Sequence
  Description of Artificial Sequence: Synthetic oligonucleotide
  Sense strand starting at position 3895 of SEQ ID NO: 1244453
ugcgacaauguuuaucaua

SEQ ID NO: 1489785 - RNA, 19 nt, Artificial Sequence
  Description of Artificial Sequence: Synthetic oligonucleotide
  Antisense strand to SEQ ID NO: 1489784
uaugauaaacauugucgca

SEQ ID NO: 1489786 - RNA, 19 nt, Artificial Sequence
  Description of Artificial Sequence: Synthetic oligonucleotide
  Sense strand starting at position 39 of SEQ ID NO: 1244454
aacaaaggauucucguauu

SEQ ID NO: 1489787 - RNA, 19 nt, Artificial Sequence
  Description of Artificial Sequence: Synthetic oligonucleotide
  Antisense strand to SEQ ID NO: 1489786
aauacgagaauccuuuguu

SEQ ID NO: 1489788 - RNA, 19 nt, Artificial Sequence
  Description of Artificial Sequence: Synthetic oligonucleotide
  Sense strand starting at position 68 of SEQ ID NO: 1244454
aaguacuggccaugcauau

SEQ ID NO: 1489789 - RNA, 19 nt, Artificial Sequence
  Description of Artificial Sequence: Synthetic oligonucleotide
  Antisense strand to SEQ ID NO: 1489788
auaugcauggccaguacuu

SEQ ID NO: 1489790 - RNA, 19 nt, Artificial Sequence
  Description of Artificial Sequence: Synthetic oligonucleotide
  Sense strand starting at position 153 of SEQ ID NO: 1244454
ucuugccucugagugguua

SEQ ID NO: 1489791 - RNA, 19 nt, Artificial Sequence
  Description of Artificial Sequence: Synthetic oligonucleotide
  Antisense strand to SEQ ID NO: 1489790
uaaccacucagaggcaaga

SEQ ID NO: 1489792 - RNA, 19 nt, Artificial Sequence
  Description of Artificial Sequence: Synthetic oligonucleotide
  Sense strand starting at position 157 of SEQ ID NO: 1244454
gccucugagugguuaguga

SEQ ID NO: 1489793 - RNA, 19 nt, Artificial Sequence
  Description of Artificial Sequence: Synthetic oligonucleotide
  Antisense strand to SEQ ID NO: 1489792
ucacuaaccacucagaggc

SEQ ID NO: 1489794 - RNA, 19 nt, Artificial Sequence
  Description of Artificial Sequence: Synthetic oligonucleotide
  Sense strand starting at position 259 of SEQ ID NO: 1244454
acugcuucgggauggauga

SEQ ID NO: 1489795 - RNA, 19 nt, Artificial Sequence
  Description of Artificial Sequence: Synthetic oligonucleotide
  Antisense strand to SEQ ID NO: 1489794
ucauccaucccgaagcagu

SEQ ID NO: 1489796 - RNA, 19 nt, Artificial Sequence
  Description of Artificial Sequence: Synthetic oligonucleotide
  Sense strand starting at position 557 of SEQ ID NO: 1244454
cuggaugugcuuuauuauc

SEQ ID NO: 1489797 - RNA, 19 nt, Artificial Sequence
  Description of Artificial Sequence: Synthetic oligonucleotide
  Antisense strand to SEQ ID NO: 1489796
gauaauaaagcacauccag

SEQ ID NO: 1489798 - RNA, 19 nt, Artificial Sequence
  Description of Artificial Sequence: Synthetic oligonucleotide
  Sense strand starting at position 559 of SEQ ID NO: 1244454
ggaugugcuuuauuaucac

SEQ ID NO: 1489799 - RNA, 19 nt, Artificial Sequence
  Description of Artificial Sequence: Synthetic oligonucleotide
  Antisense strand to SEQ ID NO: 1489798
gugauaauaaagcacaucc

SEQ ID NO: 1489800 - RNA, 19 nt, Artificial Sequence
  Description of Artificial Sequence: Synthetic oligonucleotide
  Sense strand starting at position 563 of SEQ ID NO: 1244454
gugcuuuauuaucacagag

SEQ ID NO: 1489801 - RNA, 19 nt, Artificial Sequence
  Description of Artificial Sequence: Synthetic oligonucleotide
  Antisense strand to SEQ ID NO: 1489800
cucugugauaauaaagcac

SEQ ID NO: 1489802 - RNA, 19 nt, Artificial Sequence
  Description of Artificial Sequence: Synthetic oligonucleotide
  Sense strand starting at position 565 of SEQ ID NO: 1244454
gcuuuauuaucacagagac

SEQ ID NO: 1489803 - RNA, 19 nt, Artificial Sequence
  Description of Artificial Sequence: Synthetic oligonucleotide
  Antisense strand to SEQ ID NO: 1489802
gucucugugauaauaaagc

SEQ ID NO: 1489804 - RNA, 19 nt, Artificial Sequence
  Description of Artificial Sequence: Synthetic oligonucleotide
  Sense strand starting at position 648 of SEQ ID NO: 1244454
acgagaaguugacagcaaa

SEQ ID NO: 1489805 - RNA, 19 nt, Artificial Sequence
  Description of Artificial Sequence: Synthetic oligonucleotide
  Antisense strand to SEQ ID NO: 1489804
uuugcugucaacuucucgu

SEQ ID NO: 1489806 - RNA, 19 nt, Artificial Sequence
  Description of Artificial Sequence: Synthetic oligonucleotide
  Sense strand starting at position 1016 of SEQ ID NO: 1244454
cagguuucucccggaaaga

SEQ ID NO: 1489807 - RNA, 19 nt, Artificial Sequence
  Description of Artificial Sequence: Synthetic oligonucleotide
  Antisense strand to SEQ ID NO: 1489806
ucuuuccgggagaaaccug

SEQ ID NO: 1489808 - RNA, 19 nt, Artificial Sequence
  Description of Artificial Sequence: Synthetic oligonucleotide
  Sense strand starting at position 2261 of SEQ ID NO: 1244454
gugacugcuugggcgagaa

SEQ ID NO: 1489809 - RNA, 19 nt, Artificial Sequence
  Description of Artificial Sequence: Synthetic oligonucleotide
  Antisense strand to SEQ ID NO: 1489808
uucucgcccaagcagucac

SEQ ID NO: 1489810 - RNA, 19 nt, Artificial Sequence
  Description of Artificial Sequence: Synthetic oligonucleotide
  Sense strand starting at position 2294 of SEQ ID NO: 1244454
gccgcacucucccuggaaa

SEQ ID NO: 1489811 - RNA, 19 nt, Artificial Sequence
  Description of Artificial Sequence: Synthetic oligonucleotide
  Antisense strand to SEQ ID NO: 1489810
uuuccagggagagugcggc

SEQ ID NO: 1489812 - RNA, 19 nt, Artificial Sequence
  Description of Artificial Sequence: Synthetic oligonucleotide
  Sense strand starting at position 2682 of SEQ ID NO: 1244454
caggucucagugugggauu

SEQ ID NO: 1489813 - RNA, 19 nt, Artificial Sequence
  Description of Artificial Sequence: Synthetic oligonucleotide
  Antisense strand to SEQ ID NO: 1489812
aaucccacacugagaccug

SEQ ID NO: 1489814 - RNA, 19 nt, Artificial Sequence
  Description of Artificial Sequence: Synthetic oligonucleotide
  Sense strand starting at position 2683 of SEQ ID NO: 1244454
aggucucagugugggauuu

SEQ ID NO: 1489815 - RNA, 19 nt, Artificial Sequence
  Description of Artificial Sequence: Synthetic oligonucleotide
  Antisense strand to SEQ ID NO: 1489814
aaaucccacacugagaccu

SEQ ID NO: 1489816 - RNA, 19 nt, Artificial Sequence
  Description of Artificial Sequence: Synthetic oligonucleotide
  Sense strand starting at position 2826 of SEQ ID NO: 1244454
ucaugucaagucuauggau

SEQ ID NO: 1489817 - RNA, 19 nt, Artificial Sequence
  Description of Artificial Sequence: Synthetic oligonucleotide
  Antisense strand to SEQ ID NO: 1489816
auccauagacuugacauga

SEQ ID NO: 1489818 - RNA, 19 nt, Artificial Sequence
  Description of Artificial Sequence: Synthetic oligonucleotide
  Sense strand starting at position 2828 of SEQ ID NO: 1244454
augucaagucuauggauag

SEQ ID NO: 1489819 - RNA, 19 nt, Artificial Sequence
  Description of Artificial Sequence: Synthetic oligonucleotide
  Antisense strand to SEQ ID NO: 1489818
cuauccauagacuugacau

SEQ ID NO: 1489820 - RNA, 19 nt, Artificial Sequence
  Description of Artificial Sequence: Synthetic oligonucleotide
  Sense strand starting at position 2829 of SEQ ID NO: 1244454
ugucaagucuauggauagu

SEQ ID NO: 1489821 - RNA, 19 nt, Artificial Sequence
  Description of Artificial Sequence: Synthetic oligonucleotide
  Antisense strand to SEQ ID NO: 1489820
acuauccauagacuugaca

SEQ ID NO: 1489822 - RNA, 19 nt, Artificial Sequence
  Description of Artificial Sequence: Synthetic oligonucleotide
  Sense strand starting at position 2835 of SEQ ID NO: 1244454
gucuauggauaguugagaa

SEQ ID NO: 1489823 - RNA, 19 nt, Artificial Sequence
  Description of Artificial Sequence: Synthetic oligonucleotide
  Antisense strand to SEQ ID NO: 1489822
uucucaacuauccauagac

SEQ ID NO: 1489824 - RNA, 19 nt, Artificial Sequence
  Description of Artificial Sequence: Synthetic oligonucleotide
  Sense strand starting at position 2839 of SEQ ID NO: 1244454
auggauaguugagaacauu

SEQ ID NO: 1489825 - RNA, 19 nt, Artificial Sequence
  Description of Artificial Sequence: Synthetic oligonucleotide
  Antisense strand to SEQ ID NO: 1489824
aauguucucaacuauccau

SEQ ID NO: 1489826 - RNA, 19 nt, Artificial Sequence
  Description of Artificial Sequence: Synthetic oligonucleotide
  Sense strand starting at position 2848 of SEQ ID NO: 1244454
ugagaacauuucuagagau

SEQ ID NO: 1489827 - RNA, 19 nt, Artificial Sequence
  Description of Artificial Sequence: Synthetic oligonucleotide
  Antisense strand to SEQ ID NO: 1489826
aucucuagaaauguucuca

SEQ ID NO: 1489828 - RNA, 19 nt, Artificial Sequence
  Description of Artificial Sequence: Synthetic oligonucleotide
  Sense strand starting at position 3425 of SEQ ID NO: 1244454
cgccgcuucggaggauauu

SEQ ID NO: 1489829 - RNA, 19 nt, Artificial Sequence
  Description of Artificial Sequence: Synthetic oligonucleotide
  Antisense strand to SEQ ID NO: 1489828
aauauccuccgaagcggcg

SEQ ID NO: 1489830 - RNA, 19 nt, Artificial Sequence
  Description of Artificial Sequence: Synthetic oligonucleotide
  Sense strand starting at position 3426 of SEQ ID NO: 1244454
gccgcuucggaggauauuu

SEQ ID NO: 1489831 - RNA, 19 nt, Artificial Sequence
  Description of Artificial Sequence: Synthetic oligonucleotide
  Antisense strand to SEQ ID NO: 1489830
aaauauccuccgaagcggc

SEQ ID NO: 1489832 - RNA, 19 nt, Artificial Sequence
  Description of Artificial Sequence: Synthetic oligonucleotide
  Sense strand starting at position 3435 of SEQ ID NO: 1244454
gaggauauuuccugugcau

SEQ ID NO: 1489833 - RNA, 19 nt, Artificial Sequence
  Description of Artificial Sequence: Synthetic oligonucleotide
  Antisense strand to SEQ ID NO: 1489832
augcacaggaaauauccuc

SEQ ID NO: 1489834 - RNA, 19 nt, Artificial Sequence
  Description of Artificial Sequence: Synthetic oligonucleotide
  Sense strand starting at position 3437 of SEQ ID NO: 1244454
ggauauuuccugugcaucc

SEQ ID NO: 1489835 - RNA, 19 nt, Artificial Sequence
  Description of Artificial Sequence: Synthetic oligonucleotide
  Antisense strand to SEQ ID NO: 1489834
ggaugcacaggaaauaucc

SEQ ID NO: 1489836 - RNA, 19 nt, Artificial Sequence
  Description of Artificial Sequence: Synthetic oligonucleotide
  Sense strand starting at position 3579 of SEQ ID NO: 1244454
ggacgcuuugcgggagcua

SEQ ID NO: 1489837 - RNA, 19 nt, Artificial Sequence
  Description of Artificial Sequence: Synthetic oligonucleotide
  Antisense strand to SEQ ID NO: 1489836
uagcucccgcaaagcgucc

SEQ ID NO: 1489838 - RNA, 19 nt, Artificial Sequence
  Description of Artificial Sequence: Synthetic oligonucleotide
  Sense strand starting at position 3580 of SEQ ID NO: 1244454
gacgcuuugcgggagcuaa

SEQ ID NO: 1489839 - RNA, 19 nt, Artificial Sequence
  Description of Artificial Sequence: Synthetic oligonucleotide
  Antisense strand to SEQ ID NO: 1489838
uuagcucccgcaaagcguc

SEQ ID NO: 1489840 - RNA, 19 nt, Artificial Sequence
  Description of Artificial Sequence: Synthetic oligonucleotide
  Sense strand starting at position 3582 of SEQ ID NO: 1244454
cgcuuugcgggagcuaauu

SEQ ID NO: 1489841 - RNA, 19 nt, Artificial Sequence
  Description of Artificial Sequence: Synthetic oligonucleotide
  Antisense strand to SEQ ID NO: 1489840
aauuagcucccgcaaagcg

SEQ ID NO: 1489842 - RNA, 19 nt, Artificial Sequence
  Description of Artificial Sequence: Synthetic oligonucleotide
  Sense strand starting at position 3696 of SEQ ID NO: 1244454
aggguuccagcuuggugaa

SEQ ID NO: 1489843 - RNA, 19 nt, Artificial Sequence
  Description of Artificial Sequence: Synthetic oligonucleotide
  Antisense strand to SEQ ID NO: 1489842
uucaccaagcuggaacccu

SEQ ID NO: 1489844 - RNA, 19 nt, Artificial Sequence
  Description of Artificial Sequence: Synthetic oligonucleotide
  Sense strand starting at position 3697 of SEQ ID NO: 1244454
ggguuccagcuuggugaaa

SEQ ID NO: 1489845 - RNA, 19 nt, Artificial Sequence
  Description of Artificial Sequence: Synthetic oligonucleotide
  Antisense strand to SEQ ID NO: 1489844
uuucaccaagcuggaaccc

SEQ ID NO: 1489846 - RNA, 19 nt, Artificial Sequence
  Description of Artificial Sequence: Synthetic oligonucleotide
  Sense strand starting at position 3698 of SEQ ID NO: 1244454
gguuccagcuuggugaaau

SEQ ID NO: 1489847 - RNA, 19 nt, Artificial Sequence
  Description of Artificial Sequence: Synthetic oligonucleotide
  Antisense strand to SEQ ID NO: 1489846
auuucaccaagcuggaacc

SEQ ID NO: 1489848 - RNA, 19 nt, Artificial Sequence
  Description of Artificial Sequence: Synthetic oligonucleotide
  Sense strand starting at position 3699 of SEQ ID NO: 1244454
guuccagcuuggugaaaug

SEQ ID NO: 1489849 - RNA, 19 nt, Artificial Sequence
  Description of Artificial Sequence: Synthetic oligonucleotide
  Antisense strand to SEQ ID NO: 1489848
cauuucaccaagcuggaac

SEQ ID NO: 1489850 - RNA, 19 nt, Artificial Sequence
  Description of Artificial Sequence: Synthetic oligonucleotide
  Sense strand starting at position 3709 of SEQ ID NO: 1244454
ggugaaauguuaccauaua

SEQ ID NO: 1489851 - RNA, 19 nt, Artificial Sequence
  Description of Artificial Sequence: Synthetic oligonucleotide
  Antisense strand to SEQ ID NO: 1489850
uauaugguaacauuucacc

SEQ ID NO: 1489852 - RNA, 19 nt, Artificial Sequence
  Description of Artificial Sequence: Synthetic oligonucleotide
  Sense strand starting at position 3710 of SEQ ID NO: 1244454
gugaaauguuaccauauaa

SEQ ID NO: 1489853 - RNA, 19 nt, Artificial Sequence
  Description of Artificial Sequence: Synthetic oligonucleotide
  Antisense strand to SEQ ID NO: 1489852
uuauaugguaacauuucac

SEQ ID NO: 1489854 - RNA, 19 nt, Artificial Sequence
  Description of Artificial Sequence: Synthetic oligonucleotide
  Sense strand starting at position 3809 of SEQ ID NO: 1244454
ugguauugcuaaugacaca

SEQ ID NO: 1489855 - RNA, 19 nt, Artificial Sequence
  Description of Artificial Sequence: Synthetic oligonucleotide
  Antisense strand to SEQ ID NO: 1489854
ugugucauuagcaauacca

SEQ ID NO: 1489856 - RNA, 19 nt, Artificial Sequence
  Description of Artificial Sequence: Synthetic oligonucleotide
  Sense strand starting at position 3816 of SEQ ID NO: 1244454
gcuaaugacacagguaaga

SEQ ID NO: 1489857 - RNA, 19 nt, Artificial Sequence
  Description of Artificial Sequence: Synthetic oligonucleotide
  Antisense strand to SEQ ID NO: 1489856
ucuuaccugugucauuagc

SEQ ID NO: 1489858 - RNA, 19 nt, Artificial Sequence
  Description of Artificial Sequence: Synthetic oligonucleotide
  Sense strand starting at position 3864 of SEQ ID NO: 1244454
cuagaauccuacugcaaag

SEQ ID NO: 1489859 - RNA, 19 nt, Artificial Sequence
  Description of Artificial Sequence: Synthetic oligonucleotide
  Antisense strand to SEQ ID NO: 1489858
cuuugcaguaggauucuag

SEQ ID NO: 1489860 - RNA, 19 nt, Artificial Sequence
  Description of Artificial Sequence: Synthetic oligonucleotide
  Sense strand starting at position 3893 of SEQ ID NO: 1244454
ccuuaauucucaggagacu

SEQ ID NO: 1489861 - RNA, 19 nt, Artificial Sequence
  Description of Artificial Sequence: Synthetic oligonucleotide
  Antisense strand to SEQ ID NO: 1489860
agucuccugagaauuaagg

SEQ ID NO: 1489862 - RNA, 19 nt, Artificial Sequence
  Description of Artificial Sequence: Synthetic oligonucleotide
  Sense strand starting at position 3917 of SEQ ID NO: 1244454
gcugaaagucugugccacu

SEQ ID NO: 1489863 - RNA, 19 nt, Artificial Sequence
  Description of Artificial Sequence: Synthetic oligonucleotide
  Antisense strand to SEQ ID NO: 1489862
aguggcacagacuuucagc

SEQ ID NO: 1489864 - RNA, 19 nt, Artificial Sequence
  Description of Artificial Sequence: Synthetic oligonucleotide
  Sense strand starting at position 3920 of SEQ ID NO: 1244454
gaaagucugugccacugua

SEQ ID NO: 1489865 - RNA, 19 nt, Artificial Sequence
  Description of Artificial Sequence: Synthetic oligonucleotide
  Antisense strand to SEQ ID NO: 1489864
uacaguggcacagacuuuc

SEQ ID NO: 1489866 - RNA, 19 nt, Artificial Sequence
  Description of Artificial Sequence: Synthetic oligonucleotide
  Sense strand starting at position 16 of SEQ ID NO: 1244455
auucucaagcacgaauaua

SEQ ID NO: 1489867 - RNA, 19 nt, Artificial Sequence
  Description of Artificial Sequence: Synthetic oligonucleotide
  Antisense strand to SEQ ID NO: 1489866
uauauucgugcuugagaau

SEQ ID NO: 1489868 - RNA, 19 nt, Artificial Sequence
  Description of Artificial Sequence: Synthetic oligonucleotide
  Sense strand starting at position 24 of SEQ ID NO: 1244455
gcacgaauauaguuuaggu

SEQ ID NO: 1489869 - RNA, 19 nt, Artificial Sequence
  Description of Artificial Sequence: Synthetic oligonucleotide
  Antisense strand to SEQ ID NO: 1489868
accuaaacuauauucgugc

SEQ ID NO: 1489870 - RNA, 19 nt, Artificial Sequence
  Description of Artificial Sequence: Synthetic oligonucleotide
  Sense strand starting at position 33 of SEQ ID NO: 1244455
uaguuuagguuuggcaaga

SEQ ID NO: 1489871 - RNA, 19 nt, Artificial Sequence
  Description of Artificial Sequence: Synthetic oligonucleotide
  Antisense strand to SEQ ID NO: 1489870
ucuugccaaaccuaaacua

SEQ ID NO: 1489872 - RNA, 19 nt, Artificial Sequence
  Description of Artificial Sequence: Synthetic oligonucleotide
  Sense strand starting at position 84 of SEQ ID NO: 1244455
ccaggauggccaugggaau

SEQ ID NO: 1489873 - RNA, 19 nt, Artificial Sequence
  Description of Artificial Sequence: Synthetic oligonucleotide
  Antisense strand to SEQ ID NO: 1489872
auucccauggccauccugg

SEQ ID NO: 1489874 - RNA, 19 nt, Artificial Sequence
  Description of Artificial Sequence: Synthetic oligonucleotide
  Sense strand starting at position 136 of SEQ ID NO: 1244455
gaugacaugccacgauguu

SEQ ID NO: 1489875 - RNA, 19 nt, Artificial Sequence
  Description of Artificial Sequence: Synthetic oligonucleotide
  Antisense strand to SEQ ID NO: 1489874
aacaucguggcaugucauc

SEQ ID NO: 1489876 - RNA, 19 nt, Artificial Sequence
  Description of Artificial Sequence: Synthetic oligonucleotide
  Sense strand starting at position 137 of SEQ ID NO: 1244455
augacaugccacgauguua

SEQ ID NO: 1489877 - RNA, 19 nt, Artificial Sequence
  Description of Artificial Sequence: Synthetic oligonucleotide
  Antisense strand to SEQ ID NO: 1489876
uaacaucguggcaugucau

SEQ ID NO: 1489878 - RNA, 19 nt, Artificial Sequence
  Description of Artificial Sequence: Synthetic oligonucleotide
  Sense strand starting at position 145 of SEQ ID NO: 1244455
ccacgauguuacuugcauu

SEQ ID NO: 1489879 - RNA, 19 nt, Artificial Sequence
  Description of Artificial Sequence: Synthetic oligonucleotide
  Antisense strand to SEQ ID NO: 1489878
aaugcaaguaacaucgugg

SEQ ID NO: 1489880 - RNA, 19 nt, Artificial Sequence
  Description of Artificial Sequence: Synthetic oligonucleotide
  Sense strand starting at position 153 of SEQ ID NO: 1244455
uuacuugcauucugaggua

SEQ ID NO: 1489881 - RNA, 19 nt, Artificial Sequence
  Description of Artificial Sequence: Synthetic oligonucleotide
  Antisense strand to SEQ ID NO: 1489880
uaccucagaaugcaaguaa

SEQ ID NO: 1489882 - RNA, 19 nt, Artificial Sequence
  Description of Artificial Sequence: Synthetic oligonucleotide
  Sense strand starting at position 156 of SEQ ID NO: 1244455
cuugcauucugagguagga

SEQ ID NO: 1489883 - RNA, 19 nt, Artificial Sequence
  Description of Artificial Sequence: Synthetic oligonucleotide
  Antisense strand to SEQ ID NO: 1489882
uccuaccucagaaugcaag

SEQ ID NO: 1489884 - RNA, 19 nt, Artificial Sequence
  Description of Artificial Sequence: Synthetic oligonucleotide
  Sense strand starting at position 158 of SEQ ID NO: 1244455
ugcauucugagguaggagu

SEQ ID NO: 1489885 - RNA, 19 nt, Artificial Sequence
  Description of Artificial Sequence: Synthetic oligonucleotide
  Antisense strand to SEQ ID NO: 1489884
acuccuaccucagaaugca

SEQ ID NO: 1489886 - RNA, 19 nt, Artificial Sequence
  Description of Artificial Sequence: Synthetic oligonucleotide
  Sense strand starting at position 171 of SEQ ID NO: 1244455
aggaguucuuauucccauu

SEQ ID NO: 1489887 - RNA, 19 nt, Artificial Sequence
  Description of Artificial Sequence: Synthetic oligonucleotide
  Antisense strand to SEQ ID NO: 1489886
aaugggaauaagaacuccu

SEQ ID NO: 1489888 - RNA, 19 nt, Artificial Sequence
  Description of Artificial Sequence: Synthetic oligonucleotide
  Sense strand starting at position 397 of SEQ ID NO: 1244455
cugggagauuccuggaggu

SEQ ID NO: 1489889 - RNA, 19 nt, Artificial Sequence
  Description of Artificial Sequence: Synthetic oligonucleotide
  Antisense strand to SEQ ID NO: 1489888
accuccaggaaucucccag

SEQ ID NO: 1489890 - RNA, 19 nt, Artificial Sequence
  Description of Artificial Sequence: Synthetic oligonucleotide
  Sense strand starting at position 558 of SEQ ID NO: 1244455
uggauuugguggugacacu

SEQ ID NO: 1489891 - RNA, 19 nt, Artificial Sequence
  Description of Artificial Sequence: Synthetic oligonucleotide
  Antisense strand to SEQ ID NO: 1489890
agugucaccaccaaaucca

SEQ ID NO: 1489892 - RNA, 19 nt, Artificial Sequence
  Description of Artificial Sequence: Synthetic oligonucleotide
  Sense strand starting at position 782 of SEQ ID NO: 1244455
gguacuugcuccugagggu

SEQ ID NO: 1489893 - RNA, 19 nt, Artificial Sequence
  Description of Artificial Sequence: Synthetic oligonucleotide
  Antisense strand to SEQ ID NO: 1489892
acccucaggagcaaguacc

SEQ ID NO: 1489894 - RNA, 19 nt, Artificial Sequence
  Description of Artificial Sequence: Synthetic oligonucleotide
  Sense strand starting at position 2303 of SEQ ID NO: 1244455
gccgguaccuccggaguua

SEQ ID NO: 1489895 - RNA, 19 nt, Artificial Sequence
  Description of Artificial Sequence: Synthetic oligonucleotide
  Antisense strand to SEQ ID NO: 1489894
uaacuccggagguaccggc

SEQ ID NO: 1489896 - RNA, 19 nt, Artificial Sequence
  Description of Artificial Sequence: Synthetic oligonucleotide
  Sense strand starting at position 2304 of SEQ ID NO: 1244455
ccgguaccuccggaguuaa

SEQ ID NO: 1489897 - RNA, 19 nt, Artificial Sequence
  Description of Artificial Sequence: Synthetic oligonucleotide
  Antisense strand to SEQ ID NO: 1489896
uuaacuccggagguaccgg

SEQ ID NO: 1489898 - RNA, 19 nt, Artificial Sequence
  Description of Artificial Sequence: Synthetic oligonucleotide
  Sense strand starting at position 2398 of SEQ ID NO: 1244455
cggaguagcucuuggagag

SEQ ID NO: 1489899 - RNA, 19 nt, Artificial Sequence
  Description of Artificial Sequence: Synthetic oligonucleotide
  Antisense strand to SEQ ID NO: 1489898
cucuccaagagcuacuccg

SEQ ID NO: 1489900 - RNA, 19 nt, Artificial Sequence
  Description of Artificial Sequence: Synthetic oligonucleotide
  Sense strand starting at position 2679 of SEQ ID NO: 1244455
ugagauaaucccuggaccu

SEQ ID NO: 1489901 - RNA, 19 nt, Artificial Sequence
  Description of Artificial Sequence: Synthetic oligonucleotide
  Antisense strand to SEQ ID NO: 1489900
agguccagggauuaucuca

SEQ ID NO: 1489902 - RNA, 19 nt, Artificial Sequence
  Description of Artificial Sequence: Synthetic oligonucleotide
  Sense strand starting at position 2708 of SEQ ID NO: 1244455
gccacugugacaggaagua

SEQ ID NO: 1489903 - RNA, 19 nt, Artificial Sequence
  Description of Artificial Sequence: Synthetic oligonucleotide
  Antisense strand to SEQ ID NO: 1489902
uacuuccugucacaguggc

SEQ ID NO: 1489904 - RNA, 19 nt, Artificial Sequence
  Description of Artificial Sequence: Synthetic oligonucleotide
  Sense strand starting at position 2948 of SEQ ID NO: 1244455
acacgacccugaucugaga

SEQ ID NO: 1489905 - RNA, 19 nt, Artificial Sequence
  Description of Artificial Sequence: Synthetic oligonucleotide
  Antisense strand to SEQ ID NO: 1489904
ucucagaucagggucgugu

SEQ ID NO: 1489906 - RNA, 19 nt, Artificial Sequence
  Description of Artificial Sequence: Synthetic oligonucleotide
  Sense strand starting at position 2950 of SEQ ID NO: 1244455
acgacccugaucugagauu

SEQ ID NO: 1489907 - RNA, 19 nt, Artificial Sequence
  Description of Artificial Sequence: Synthetic oligonucleotide
  Antisense strand to SEQ ID NO: 1489906
aaucucagaucagggucgu

SEQ ID NO: 1489908 - RNA, 19 nt, Artificial Sequence
  Description of Artificial Sequence: Synthetic oligonucleotide
  Sense strand starting at position 2959 of SEQ ID NO: 1244455
aucugagauucccaaagau

SEQ ID NO: 1489909 - RNA, 19 nt, Artificial Sequence
  Description of Artificial Sequence: Synthetic oligonucleotide
  Antisense strand to SEQ ID NO: 1489908
aucuuugggaaucucagau

SEQ ID NO: 1489910 - RNA, 19 nt, Artificial Sequence
  Description of Artificial Sequence: Synthetic oligonucleotide
  Sense strand starting at position 3015 of SEQ ID NO: 1244455
aggucucccuccuggaauu

SEQ ID NO: 1489911 - RNA, 19 nt, Artificial Sequence
  Description of Artificial Sequence: Synthetic oligonucleotide
  Antisense strand to SEQ ID NO: 1489910
aauuccaggagggagaccu

SEQ ID NO: 1489912 - RNA, 19 nt, Artificial Sequence
  Description of Artificial Sequence: Synthetic oligonucleotide
  Sense strand starting at position 3039 of SEQ ID NO: 1244455
gucccuuuagucuguagaa

SEQ ID NO: 1489913 - RNA, 19 nt, Artificial Sequence
  Description of Artificial Sequence: Synthetic oligonucleotide
  Antisense strand to SEQ ID NO: 1489912
uucuacagacuaaagggac

SEQ ID NO: 1489914 - RNA, 19 nt, Artificial Sequence
  Description of Artificial Sequence: Synthetic oligonucleotide
  Sense strand starting at position 3040 of SEQ ID NO: 1244455
ucccuuuagucuguagaaa

SEQ ID NO: 1489915 - RNA, 19 nt, Artificial Sequence
  Description of Artificial Sequence: Synthetic oligonucleotide
  Antisense strand to SEQ ID NO: 1489914
uuucuacagacuaaaggga

SEQ ID NO: 1489916 - RNA, 19 nt, Artificial Sequence
  Description of Artificial Sequence: Synthetic oligonucleotide
  Sense strand starting at position 3274 of SEQ ID NO: 1244455
gcagaugaaucuuaauauc

SEQ ID NO: 1489917 - RNA, 19 nt, Artificial Sequence
  Description of Artificial Sequence: Synthetic oligonucleotide
  Antisense strand to SEQ ID NO: 1489916
gauauuaagauucaucugc

SEQ ID NO: 1489918 - RNA, 19 nt, Artificial Sequence
  Description of Artificial Sequence: Synthetic oligonucleotide
  Sense strand starting at position 3438 of SEQ ID NO: 1244455
gugcaugucuagucaaaga

SEQ ID NO: 1489919 - RNA, 19 nt, Artificial Sequence
  Description of Artificial Sequence: Synthetic oligonucleotide
  Antisense strand to SEQ ID NO: 1489918
ucuuugacuagacaugcac

SEQ ID NO: 1489920 - RNA, 19 nt, Artificial Sequence
  Description of Artificial Sequence: Synthetic oligonucleotide
  Sense strand starting at position 3490 of SEQ ID NO: 1244455
aucuuuguuuggccucuaa

SEQ ID NO: 1489921 - RNA, 19 nt, Artificial Sequence
  Description of Artificial Sequence: Synthetic oligonucleotide
  Antisense strand to SEQ ID NO: 1489920
uuagaggccaaacaaagau

SEQ ID NO: 1489922 - RNA, 19 nt, Artificial Sequence
  Description of Artificial Sequence: Synthetic oligonucleotide
  Sense strand starting at position 3620 of SEQ ID NO: 1244455
agguccugucccuaggaga

SEQ ID NO: 1489923 - RNA, 19 nt, Artificial Sequence
  Description of Artificial Sequence: Synthetic oligonucleotide
  Antisense strand to SEQ ID NO: 1489922
ucuccuagggacaggaccu

SEQ ID NO: 1489924 - RNA, 19 nt, Artificial Sequence
  Description of Artificial Sequence: Synthetic oligonucleotide
  Sense strand starting at position 3685 of SEQ ID NO: 1244455
cccagauucuguuccagac

SEQ ID NO: 1489925 - RNA, 19 nt, Artificial Sequence
  Description of Artificial Sequence: Synthetic oligonucleotide
  Antisense strand to SEQ ID NO: 1489924
gucuggaacagaaucuggg

SEQ ID NO: 1489926 - RNA, 19 nt, Artificial Sequence
  Description of Artificial Sequence: Synthetic oligonucleotide
  Sense strand starting at position 3753 of SEQ ID NO: 1244455
ccugaucuguucuugcaag

SEQ ID NO: 1489927 - RNA, 19 nt, Artificial Sequence
  Description of Artificial Sequence: Synthetic oligonucleotide
  Antisense strand to SEQ ID NO: 1489926
cuugcaagaacagaucagg

SEQ ID NO: 1489928 - RNA, 19 nt, Artificial Sequence
  Description of Artificial Sequence: Synthetic oligonucleotide
  Sense strand starting at position 3754 of SEQ ID NO: 1244455
cugaucuguucuugcaaga

SEQ ID NO: 1489929 - RNA, 19 nt, Artificial Sequence
  Description of Artificial Sequence: Synthetic oligonucleotide
  Antisense strand to SEQ ID NO: 1489928
ucuugcaagaacagaucag

SEQ ID NO: 1489930 - RNA, 19 nt, Artificial Sequence
  Description of Artificial Sequence: Synthetic oligonucleotide
  Sense strand starting at position 3759 of SEQ ID NO: 1244455
cuguucuugcaagaaccaa

SEQ ID NO: 1489931 - RNA, 19 nt, Artificial Sequence
  Description of Artificial Sequence: Synthetic oligonucleotide
  Antisense strand to SEQ ID NO: 1489930
uugguucuugcaagaacag

SEQ ID NO: 1489932 - RNA, 19 nt, Artificial Sequence
  Description of Artificial Sequence: Synthetic oligonucleotide
  Sense strand starting at position 3826 of SEQ ID NO: 1244455
gucguaggagugcaguaaa

SEQ ID NO: 1489933 - RNA, 19 nt, Artificial Sequence
  Description of Artificial Sequence: Synthetic oligonucleotide
  Antisense strand to SEQ ID NO: 1489932
uuuacugcacuccuacgac

SEQ ID NO: 1489934 - RNA, 19 nt, Artificial Sequence
  Description of Artificial Sequence: Synthetic oligonucleotide
  Sense strand starting at position 242 of SEQ ID NO: 1244456
ugagcuucuccggaaguua

SEQ ID NO: 1489935 - RNA, 19 nt, Artificial Sequence
  Description of Artificial Sequence: Synthetic oligonucleotide
  Antisense strand to SEQ ID NO: 1489934
uaacuuccggagaagcuca

SEQ ID NO: 1489936 - RNA, 19 nt, Artificial Sequence
  Description of Artificial Sequence: Synthetic oligonucleotide
  Sense strand starting at position 501 of SEQ ID NO: 1244456
ggagaaugugugggaucag

SEQ ID NO: 1489937 - RNA, 19 nt, Artificial Sequence
  Description of Artificial Sequence: Synthetic oligonucleotide
  Antisense strand to SEQ ID NO: 1489936
cugaucccacacauucucc

SEQ ID NO: 1489938 - RNA, 19 nt, Artificial Sequence
  Description of Artificial Sequence: Synthetic oligonucleotide
  Sense strand starting at position 608 of SEQ ID NO: 1244456
cugguaaauuaggcgauua

SEQ ID NO: 1489939 - RNA, 19 nt, Artificial Sequence
  Description of Artificial Sequence: Synthetic oligonucleotide
  Antisense strand to SEQ ID NO: 1489938
uaaucgccuaauuuaccag

SEQ ID NO: 1489940 - RNA, 19 nt, Artificial Sequence
  Description of Artificial Sequence: Synthetic oligonucleotide
  Sense strand starting at position 609 of SEQ ID NO: 1244456
ugguaaauuaggcgauuaa

SEQ ID NO: 1489941 - RNA, 19 nt, Artificial Sequence
  Description of Artificial Sequence: Synthetic oligonucleotide
  Antisense strand to SEQ ID NO: 1489940
uuaaucgccuaauuuacca

SEQ ID NO: 1489942 - RNA, 19 nt, Artificial Sequence
  Description of Artificial Sequence: Synthetic oligonucleotide
  Sense strand starting at position 610 of SEQ ID NO: 1244456
gguaaauuaggcgauuaau

SEQ ID NO: 1489943 - RNA, 19 nt, Artificial Sequence
  Description of Artificial Sequence: Synthetic oligonucleotide
  Antisense strand to SEQ ID NO: 1489942
auuaaucgccuaauuuacc

SEQ ID NO: 1489944 - RNA, 19 nt, Artificial Sequence
  Description of Artificial Sequence: Synthetic oligonucleotide
  Sense strand starting at position 620 of SEQ ID NO: 1244456
gcgauuaaugaaugauucu

SEQ ID NO: 1489945 - RNA, 19 nt, Artificial Sequence
  Description of Artificial Sequence: Synthetic oligonucleotide
  Antisense strand to SEQ ID NO: 1489944
agaaucauucauuaaucgc

SEQ ID NO: 1489946 - RNA, 19 nt, Artificial Sequence
  Description of Artificial Sequence: Synthetic oligonucleotide
  Sense strand starting at position 1106 of SEQ ID NO: 1244456
cucacagcauucuuagaag

SEQ ID NO: 1489947 - RNA, 19 nt, Artificial Sequence
  Description of Artificial Sequence: Synthetic oligonucleotide
  Antisense strand to SEQ ID NO: 1489946
cuucuaagaaugcugugag

SEQ ID NO: 1489948 - RNA, 19 nt, Artificial Sequence
  Description of Artificial Sequence: Synthetic oligonucleotide
  Sense strand starting at position 1127 of SEQ ID NO: 1244456
cagauuuggcucuggguuu

SEQ ID NO: 1489949 - RNA, 19 nt, Artificial Sequence
  Description of Artificial Sequence: Synthetic oligonucleotide
  Antisense strand to SEQ ID NO: 1489948
aaacccagagccaaaucug

SEQ ID NO: 1489950 - RNA, 19 nt, Artificial Sequence
  Description of Artificial Sequence: Synthetic oligonucleotide
  Sense strand starting at position 1184 of SEQ ID NO: 1244456
ucuauuuagccaggcuaca

SEQ ID NO: 1489951 - RNA, 19 nt, Artificial Sequence
  Description of Artificial Sequence: Synthetic oligonucleotide
  Antisense strand to SEQ ID NO: 1489950
uguagccuggcuaaauaga

SEQ ID NO: 1489952 - RNA, 19 nt, Artificial Sequence
  Description of Artificial Sequence: Synthetic oligonucleotide
  Sense strand starting at position 2720 of SEQ ID NO: 1244456
agcucuaacucuuuccgga

SEQ ID NO: 1489953 - RNA, 19 nt, Artificial Sequence
  Description of Artificial Sequence: Synthetic oligonucleotide
  Antisense strand to SEQ ID NO: 1489952
uccggaaagaguuagagcu

SEQ ID NO: 1489954 - RNA, 19 nt, Artificial Sequence
  Description of Artificial Sequence: Synthetic oligonucleotide
  Sense strand starting at position 2722 of SEQ ID NO: 1244456
cucuaacucuuuccggaaa

SEQ ID NO: 1489955 - RNA, 19 nt, Artificial Sequence
  Description of Artificial Sequence: Synthetic oligonucleotide
  Antisense strand to SEQ ID NO: 1489954
uuuccggaaagaguuagag

SEQ ID NO: 1489956 - RNA, 19 nt, Artificial Sequence
  Description of Artificial Sequence: Synthetic oligonucleotide
  Sense strand starting at position 2735 of SEQ ID NO: 1244456
cggaaauccuguuucucag

SEQ ID NO: 1489957 - RNA, 19 nt, Artificial Sequence
  Description of Artificial Sequence: Synthetic oligonucleotide
  Antisense strand to SEQ ID NO: 1489956
cugagaaacaggauuuccg

SEQ ID NO: 1489958 - RNA, 19 nt, Artificial Sequence
  Description of Artificial Sequence: Synthetic oligonucleotide
  Sense strand starting at position 2808 of SEQ ID NO: 1244456
acauaugagcaaugguaug

SEQ ID NO: 1489959 - RNA, 19 nt, Artificial Sequence
  Description of Artificial Sequence: Synthetic oligonucleotide
  Antisense strand to SEQ ID NO: 1489958
cauaccauugcucauaugu

SEQ ID NO: 1489960 - RNA, 19 nt, Artificial Sequence
  Description of Artificial Sequence: Synthetic oligonucleotide
  Sense strand starting at position 2813 of SEQ ID NO: 1244456
ugagcaaugguaugugaga

SEQ ID NO: 1489961 - RNA, 19 nt, Artificial Sequence
  Description of Artificial Sequence: Synthetic oligonucleotide
  Antisense strand to SEQ ID NO: 1489960
ucucacauaccauugcuca

SEQ ID NO: 1489962 - RNA, 19 nt, Artificial Sequence
  Description of Artificial Sequence: Synthetic oligonucleotide
  Sense strand starting at position 2844 of SEQ ID NO: 1244456
gucugcauaugguuaauuu

SEQ ID NO: 1489963 - RNA, 19 nt, Artificial Sequence
  Description of Artificial Sequence: Synthetic oligonucleotide
  Antisense strand to SEQ ID NO: 1489962
aaauuaaccauaugcagac

SEQ ID NO: 1489964 - RNA, 19 nt, Artificial Sequence
  Description of Artificial Sequence: Synthetic oligonucleotide
  Sense strand starting at position 2957 of SEQ ID NO: 1244456
gaugccuugugauuggauu

SEQ ID NO: 1489965 - RNA, 19 nt, Artificial Sequence
  Description of Artificial Sequence: Synthetic oligonucleotide
  Antisense strand to SEQ ID NO: 1489964
aauccaaucacaaggcauc

SEQ ID NO: 1489966 - RNA, 19 nt, Artificial Sequence
  Description of Artificial Sequence: Synthetic oligonucleotide
  Sense strand starting at position 2958 of SEQ ID NO: 1244456
augccuugugauuggauua

SEQ ID NO: 1489967 - RNA, 19 nt, Artificial Sequence
  Description of Artificial Sequence: Synthetic oligonucleotide
  Antisense strand to SEQ ID NO: 1489966
uaauccaaucacaaggcau

SEQ ID NO: 1489968 - RNA, 19 nt, Artificial Sequence
  Description of Artificial Sequence: Synthetic oligonucleotide
  Sense strand starting at position 2959 of SEQ ID NO: 1244456
ugccuugugauuggauuaa

SEQ ID NO: 1489969 - RNA, 19 nt, Artificial Sequence
  Description of Artificial Sequence: Synthetic oligonucleotide
  Antisense strand to SEQ ID NO: 1489968
uuaauccaaucacaaggca

SEQ ID NO: 1489970 - RNA, 19 nt, Artificial Sequence
  Description of Artificial Sequence: Synthetic oligonucleotide
  Sense strand starting at position 3010 of SEQ ID NO: 1244456
ccgcaauagcugguuguua

SEQ ID NO: 1489971 - RNA, 19 nt, Artificial Sequence
  Description of Artificial Sequence: Synthetic oligonucleotide
  Antisense strand to SEQ ID NO: 1489970
uaacaaccagcuauugcgg

SEQ ID NO: 1489972 - RNA, 19 nt, Artificial Sequence
  Description of Artificial Sequence: Synthetic oligonucleotide
  Sense strand starting at position 3012 of SEQ ID NO: 1244456
gcaauagcugguuguuaaa

SEQ ID NO: 1489973 - RNA, 19 nt, Artificial Sequence
  Description of Artificial Sequence: Synthetic oligonucleotide
  Antisense strand to SEQ ID NO: 1489972
uuuaacaaccagcuauugc

SEQ ID NO: 1489974 - RNA, 19 nt, Artificial Sequence
  Description of Artificial Sequence: Synthetic oligonucleotide
  Sense strand starting at position 3181 of SEQ ID NO: 1244456
ucucuuugcuggucuuaag

SEQ ID NO: 1489975 - RNA, 19 nt, Artificial Sequence
  Description of Artificial Sequence: Synthetic oligonucleotide
  Antisense strand to SEQ ID NO: 1489974
cuuaagaccagcaaagaga

SEQ ID NO: 1489976 - RNA, 19 nt, Artificial Sequence
  Description of Artificial Sequence: Synthetic oligonucleotide
  Sense strand starting at position 3237 of SEQ ID NO: 1244456
cugggauuagcgggugauu

SEQ ID NO: 1489977 - RNA, 19 nt, Artificial Sequence
  Description of Artificial Sequence: Synthetic oligonucleotide
  Antisense strand to SEQ ID NO: 1489976
aaucacccgcuaaucccag

SEQ ID NO: 1489978 - RNA, 19 nt, Artificial Sequence
  Description of Artificial Sequence: Synthetic oligonucleotide
  Sense strand starting at position 3245 of SEQ ID NO: 1244456
agcgggugauugguggaaa

SEQ ID NO: 1489979 - RNA, 19 nt, Artificial Sequence
  Description of Artificial Sequence: Synthetic oligonucleotide
  Antisense strand to SEQ ID NO: 1489978
uuuccaccaaucacccgcu

SEQ ID NO: 1489980 - RNA, 19 nt, Artificial Sequence
  Description of Artificial Sequence: Synthetic oligonucleotide
  Sense strand starting at position 3247 of SEQ ID NO: 1244456
cgggugauugguggaaaga

SEQ ID NO: 1489981 - RNA, 19 nt, Artificial Sequence
  Description of Artificial Sequence: Synthetic oligonucleotide
  Antisense strand to SEQ ID NO: 1489980
ucuuuccaccaaucacccg

SEQ ID NO: 1489982 - RNA, 19 nt, Artificial Sequence
  Description of Artificial Sequence: Synthetic oligonucleotide
  Sense strand starting at position 3285 of SEQ ID NO: 1244456
ccuuaaucaugucugguua

SEQ ID NO: 1489983 - RNA, 19 nt, Artificial Sequence
  Description of Artificial Sequence: Synthetic oligonucleotide
  Antisense strand to SEQ ID NO: 1489982
uaaccagacaugauuaagg

SEQ ID NO: 1489984 - RNA, 19 nt, Artificial Sequence
  Description of Artificial Sequence: Synthetic oligonucleotide
  Sense strand starting at position 3286 of SEQ ID NO: 1244456
cuuaaucaugucugguuau

SEQ ID NO: 1489985 - RNA, 19 nt, Artificial Sequence
  Description of Artificial Sequence: Synthetic oligonucleotide
  Antisense strand to SEQ ID NO: 1489984
auaaccagacaugauuaag

SEQ ID NO: 1489986 - RNA, 19 nt, Artificial Sequence
  Description of Artificial Sequence: Synthetic oligonucleotide
  Sense strand starting at position 3296 of SEQ ID NO: 1244456
ucugguuaucuccaagguu

SEQ ID NO: 1489987 - RNA, 19 nt, Artificial Sequence
  Description of Artificial Sequence: Synthetic oligonucleotide
  Antisense strand to SEQ ID NO: 1489986
aaccuuggagauaaccaga

SEQ ID NO: 1489988 - RNA, 19 nt, Artificial Sequence
  Description of Artificial Sequence: Synthetic oligonucleotide
  Sense strand starting at position 3299 of SEQ ID NO: 1244456
gguuaucuccaagguucuu

SEQ ID NO: 1489989 - RNA, 19 nt, Artificial Sequence
  Description of Artificial Sequence: Synthetic oligonucleotide
  Antisense strand to SEQ ID NO: 1489988
aagaaccuuggagauaacc

SEQ ID NO: 1489990 - RNA, 19 nt, Artificial Sequence
  Description of Artificial Sequence: Synthetic oligonucleotide
  Sense strand starting at position 3331 of SEQ ID NO: 1244456
ugcaaauuugguggcguua

SEQ ID NO: 1489991 - RNA, 19 nt, Artificial Sequence
  Description of Artificial Sequence: Synthetic oligonucleotide
  Antisense strand to SEQ ID NO: 1489990
uaacgccaccaaauuugca

SEQ ID NO: 1489992 - RNA, 19 nt, Artificial Sequence
  Description of Artificial Sequence: Synthetic oligonucleotide
  Sense strand starting at position 3402 of SEQ ID NO: 1244456
ugcggauugcugucagcca

SEQ ID NO: 1489993 - RNA, 19 nt, Artificial Sequence
  Description of Artificial Sequence: Synthetic oligonucleotide
  Antisense strand to SEQ ID NO: 1489992
uggcugacagcaauccgca

SEQ ID NO: 1489994 - RNA, 19 nt, Artificial Sequence
  Description of Artificial Sequence: Synthetic oligonucleotide
  Sense strand starting at position 3522 of SEQ ID NO: 1244456
gucuguuaaucacugguuu

SEQ ID NO: 1489995 - RNA, 19 nt, Artificial Sequence
  Description of Artificial Sequence: Synthetic oligonucleotide
  Antisense strand to SEQ ID NO: 1489994
aaaccagugauuaacagac

SEQ ID NO: 1489996 - RNA, 19 nt, Artificial Sequence
  Description of Artificial Sequence: Synthetic oligonucleotide
  Sense strand starting at position 3523 of SEQ ID NO: 1244456
ucuguuaaucacugguuua

SEQ ID NO: 1489997 - RNA, 19 nt, Artificial Sequence
  Description of Artificial Sequence: Synthetic oligonucleotide
  Antisense strand to SEQ ID NO: 1489996
uaaaccagugauuaacaga

SEQ ID NO: 1489998 - RNA, 19 nt, Artificial Sequence
  Description of Artificial Sequence: Synthetic oligonucleotide
  Sense strand starting at position 3579 of SEQ ID NO: 1244456
ccuugugaucucugcacaa

SEQ ID NO: 1489999 - RNA, 19 nt, Artificial Sequence
  Description of Artificial Sequence: Synthetic oligonucleotide
  Antisense strand to SEQ ID NO: 1489998
uugugcagagaucacaagg

SEQ ID NO: 1490000 - RNA, 19 nt, Artificial Sequence
  Description of Artificial Sequence: Synthetic oligonucleotide
  Sense strand starting at position 3634 of SEQ ID NO: 1244456
gccugacguccucaacaga

SEQ ID NO: 1490001 - RNA, 19 nt, Artificial Sequence
  Description of Artificial Sequence: Synthetic oligonucleotide
  Antisense strand to SEQ ID NO: 1490000
ucuguugaggacgucaggc

SEQ ID NO: 1490002 - RNA, 19 nt, Artificial Sequence
  Description of Artificial Sequence: Synthetic oligonucleotide
  Sense strand starting at position 3664 of SEQ ID NO: 1244456
gagcuuucuggccaucaga

SEQ ID NO: 1490003 - RNA, 19 nt, Artificial Sequence
  Description of Artificial Sequence: Synthetic oligonucleotide
  Antisense strand to SEQ ID NO: 1490002
ucugauggccagaaagcuc

SEQ ID NO: 1490004 - RNA, 19 nt, Artificial Sequence
  Description of Artificial Sequence: Synthetic oligonucleotide
  Sense strand starting at position 3667 of SEQ ID NO: 1244456
cuuucuggccaucagaauu

SEQ ID NO: 1490005 - RNA, 19 nt, Artificial Sequence
  Description of Artificial Sequence: Synthetic oligonucleotide
  Antisense strand to SEQ ID NO: 1490004
aauucugauggccagaaag

SEQ ID NO: 1490006 - RNA, 19 nt, Artificial Sequence
  Description of Artificial Sequence: Synthetic oligonucleotide
  Sense strand starting at position 3809 of SEQ ID NO: 1244456
ccaaaugcucacugaugga

SEQ ID NO: 1490007 - RNA, 19 nt, Artificial Sequence
  Description of Artificial Sequence: Synthetic oligonucleotide
  Antisense strand to SEQ ID NO: 1490006
uccaucagugagcauuugg

SEQ ID NO: 1490008 - RNA, 19 nt, Artificial Sequence
  Description of Artificial Sequence: Synthetic oligonucleotide
  Sense strand starting at position 3872 of SEQ ID NO: 1244456
cuccauuguucuuuggaca

SEQ ID NO: 1490009 - RNA, 19 nt, Artificial Sequence
  Description of Artificial Sequence: Synthetic oligonucleotide
  Antisense strand to SEQ ID NO: 1490008
uguccaaagaacaauggag

SEQ ID NO: 1490010 - RNA, 19 nt, Artificial Sequence
  Description of Artificial Sequence: Synthetic oligonucleotide
  Sense strand starting at position 3873 of SEQ ID NO: 1244456
uccauuguucuuuggacau

SEQ ID NO: 1490011 - RNA, 19 nt, Artificial Sequence
  Description of Artificial Sequence: Synthetic oligonucleotide
  Antisense strand to SEQ ID NO: 1490010
auguccaaagaacaaugga

SEQ ID NO: 1490012 - RNA, 19 nt, Artificial Sequence
  Description of Artificial Sequence: Synthetic oligonucleotide
  Sense strand starting at position 3898 of SEQ ID NO: 1244456
caaagaugucaucgagcuu

SEQ ID NO: 1490013 - RNA, 19 nt, Artificial Sequence
  Description of Artificial Sequence: Synthetic oligonucleotide
  Antisense strand to SEQ ID NO: 1490012
aagcucgaugacaucuuug

SEQ ID NO: 1490014 - RNA, 19 nt, Artificial Sequence
  Description of Artificial Sequence: Synthetic oligonucleotide
  Sense strand starting at position 406 of SEQ ID NO: 1244457
uguacaaguuuacuggaaa

SEQ ID NO: 1490015 - RNA, 19 nt, Artificial Sequence
  Description of Artificial Sequence: Synthetic oligonucleotide
  Antisense strand to SEQ ID NO: 1490014
uuuccaguaaacuuguaca

SEQ ID NO: 1490016 - RNA, 19 nt, Artificial Sequence
  Description of Artificial Sequence: Synthetic oligonucleotide
  Sense strand starting at position 454 of SEQ ID NO: 1244457
ucauauuacuauugaagga

SEQ ID NO: 1490017 - RNA, 19 nt, Artificial Sequence
  Description of Artificial Sequence: Synthetic oligonucleotide
  Antisense strand to SEQ ID NO: 1490016
uccuucaauaguaauauga

SEQ ID NO: 1490018 - RNA, 19 nt, Artificial Sequence
  Description of Artificial Sequence: Synthetic oligonucleotide
  Sense strand starting at position 759 of SEQ ID NO: 1244457
auugcuugagguugagagu

SEQ ID NO: 1490019 - RNA, 19 nt, Artificial Sequence
  Description of Artificial Sequence: Synthetic oligonucleotide
  Antisense strand to SEQ ID NO: 1490018
acucucaaccucaagcaau

SEQ ID NO: 1490020 - RNA, 19 nt, Artificial Sequence
  Description of Artificial Sequence: Synthetic oligonucleotide
  Sense strand starting at position 760 of SEQ ID NO: 1244457
uugcuugagguugagaguu

SEQ ID NO: 1490021 - RNA, 19 nt, Artificial Sequence
  Description of Artificial Sequence: Synthetic oligonucleotide
  Antisense strand to SEQ ID NO: 1490020
aacucucaaccucaagcaa

SEQ ID NO: 1490022 - RNA, 19 nt, Artificial Sequence
  Description of Artificial Sequence: Synthetic oligonucleotide
  Sense strand starting at position 1018 of SEQ ID NO: 1244457
ugaggcauuuaagauccua

SEQ ID NO: 1490023 - RNA, 19 nt, Artificial Sequence
  Description of Artificial Sequence: Synthetic oligonucleotide
  Antisense strand to SEQ ID NO: 1490022
uaggaucuuaaaugccuca

SEQ ID NO: 1490024 - RNA, 19 nt, Artificial Sequence
  Description of Artificial Sequence: Synthetic oligonucleotide
  Sense strand starting at position 1026 of SEQ ID NO: 1244457
uuaagauccuaucuaguag

SEQ ID NO: 1490025 - RNA, 19 nt, Artificial Sequence
  Description of Artificial Sequence: Synthetic oligonucleotide
  Antisense strand to SEQ ID NO: 1490024
cuacuagauaggaucuuaa

SEQ ID NO: 1490026 - RNA, 19 nt, Artificial Sequence
  Description of Artificial Sequence: Synthetic oligonucleotide
  Sense strand starting at position 1086 of SEQ ID NO: 1244457
agaacaaacuaugagguuu

SEQ ID NO: 1490027 - RNA, 19 nt, Artificial Sequence
  Description of Artificial Sequence: Synthetic oligonucleotide
  Antisense strand to SEQ ID NO: 1490026
aaaccucauaguuuguucu

SEQ ID NO: 1490028 - RNA, 19 nt, Artificial Sequence
  Description of Artificial Sequence: Synthetic oligonucleotide
  Sense strand starting at position 1101 of SEQ ID NO: 1244457
guuuaagaguuauugcagu

SEQ ID NO: 1490029 - RNA, 19 nt, Artificial Sequence
  Description of Artificial Sequence: Synthetic oligonucleotide
  Antisense strand to SEQ ID NO: 1490028
acugcaauaacucuuaaac

SEQ ID NO: 1490030 - RNA, 19 nt, Artificial Sequence
  Description of Artificial Sequence: Synthetic oligonucleotide
  Sense strand starting at position 1109 of SEQ ID NO: 1244457
guuauugcagucuauccaa

SEQ ID NO: 1490031 - RNA, 19 nt, Artificial Sequence
  Description of Artificial Sequence: Synthetic oligonucleotide
  Antisense strand to SEQ ID NO: 1490030
uuggauagacugcaauaac

SEQ ID NO: 1490032 - RNA, 19 nt, Artificial Sequence
  Description of Artificial Sequence: Synthetic oligonucleotide
  Sense strand starting at position 1135 of SEQ ID NO: 1244457
guguccuccugauauuucu

SEQ ID NO: 1490033 - RNA, 19 nt, Artificial Sequence
  Description of Artificial Sequence: Synthetic oligonucleotide
  Antisense strand to SEQ ID NO: 1490032
agaaauaucaggaggacac

SEQ ID NO: 1490034 - RNA, 19 nt, Artificial Sequence
  Description of Artificial Sequence: Synthetic oligonucleotide
  Sense strand starting at position 1170 of SEQ ID NO: 1244457
ugugcaaaucgucaauaga

SEQ ID NO: 1490035 - RNA, 19 nt, Artificial Sequence
  Description of Artificial Sequence: Synthetic oligonucleotide
  Antisense strand to SEQ ID NO: 1490034
ucuauugacgauuugcaca

SEQ ID NO: 1490036 - RNA, 19 nt, Artificial Sequence
  Description of Artificial Sequence: Synthetic oligonucleotide
  Sense strand starting at position 1242 of SEQ ID NO: 1244457
agcuguauucugcacguua

SEQ ID NO: 1490037 - RNA, 19 nt, Artificial Sequence
  Description of Artificial Sequence: Synthetic oligonucleotide
  Antisense strand to SEQ ID NO: 1490036
uaacgugcagaauacagcu

SEQ ID NO: 1490038 - RNA, 19 nt, Artificial Sequence
  Description of Artificial Sequence: Synthetic oligonucleotide
  Sense strand starting at position 1244 of SEQ ID NO: 1244457
cuguauucugcacguuaga

SEQ ID NO: 1490039 - RNA, 19 nt, Artificial Sequence
  Description of Artificial Sequence: Synthetic oligonucleotide
  Antisense strand to SEQ ID NO: 1490038
ucuaacgugcagaauacag

SEQ ID NO: 1490040 - RNA, 19 nt, Artificial Sequence
  Description of Artificial Sequence: Synthetic oligonucleotide
  Sense strand starting at position 1442 of SEQ ID NO: 1244457
uggguuauuccacgggaca

SEQ ID NO: 1490041 - RNA, 19 nt, Artificial Sequence
  Description of Artificial Sequence: Synthetic oligonucleotide
  Antisense strand to SEQ ID NO: 1490040
ugucccguggaauaaccca

SEQ ID NO: 1490042 - RNA, 19 nt, Artificial Sequence
  Description of Artificial Sequence: Synthetic oligonucleotide
  Sense strand starting at position 1443 of SEQ ID NO: 1244457
ggguuauuccacgggacag

SEQ ID NO: 1490043 - RNA, 19 nt, Artificial Sequence
  Description of Artificial Sequence: Synthetic oligonucleotide
  Antisense strand to SEQ ID NO: 1490042
cugucccguggaauaaccc

SEQ ID NO: 1490044 - RNA, 19 nt, Artificial Sequence
  Description of Artificial Sequence: Synthetic oligonucleotide
  Sense strand starting at position 2272 of SEQ ID NO: 1244457
agagccuguggguguaaau

SEQ ID NO: 1490045 - RNA, 19 nt, Artificial Sequence
  Description of Artificial Sequence: Synthetic oligonucleotide
  Antisense strand to SEQ ID NO: 1490044
auuuacacccacaggcucu

SEQ ID NO: 1490046 - RNA, 19 nt, Artificial Sequence
  Description of Artificial Sequence: Synthetic oligonucleotide
  Sense strand starting at position 2282 of SEQ ID NO: 1244457
gguguaaauuguguguaac

SEQ ID NO: 1490047 - RNA, 19 nt, Artificial Sequence
  Description of Artificial Sequence: Synthetic oligonucleotide
  Antisense strand to SEQ ID NO: 1490046
guuacacacaauuuacacc

SEQ ID NO: 1490048 - RNA, 19 nt, Artificial Sequence
  Description of Artificial Sequence: Synthetic oligonucleotide
  Sense strand starting at position 2283 of SEQ ID NO: 1244457
guguaaauuguguguaacu

SEQ ID NO: 1490049 - RNA, 19 nt, Artificial Sequence
  Description of Artificial Sequence: Synthetic oligonucleotide
  Antisense strand to SEQ ID NO: 1490048
aguuacacacaauuuacac

SEQ ID NO: 1490050 - RNA, 19 nt, Artificial Sequence
  Description of Artificial Sequence: Synthetic oligonucleotide
  Sense strand starting at position 2284 of SEQ ID NO: 1244457
uguaaauuguguguaacug

SEQ ID NO: 1490051 - RNA, 19 nt, Artificial Sequence
  Description of Artificial Sequence: Synthetic oligonucleotide
  Antisense strand to SEQ ID NO: 1490050
caguuacacacaauuuaca

SEQ ID NO: 1490052 - RNA, 19 nt, Artificial Sequence
  Description of Artificial Sequence: Synthetic oligonucleotide
  Sense strand starting at position 2317 of SEQ ID NO: 1244457
cugaaagugcuguguuaca

SEQ ID NO: 1490053 - RNA, 19 nt, Artificial Sequence
  Description of Artificial Sequence: Synthetic oligonucleotide
  Antisense strand to SEQ ID NO: 1490052
uguaacacagcacuuucag

SEQ ID NO: 1490054 - RNA, 19 nt, Artificial Sequence
  Description of Artificial Sequence: Synthetic oligonucleotide
  Sense strand starting at position 2385 of SEQ ID NO: 1244457
ggauuacugaacugagucu

SEQ ID NO: 1490055 - RNA, 19 nt, Artificial Sequence
  Description of Artificial Sequence: Synthetic oligonucleotide
  Antisense strand to SEQ ID NO: 1490054
agacucaguucaguaaucc

SEQ ID NO: 1490056 - RNA, 19 nt, Artificial Sequence
  Description of Artificial Sequence: Synthetic oligonucleotide
  Sense strand starting at position 2644 of SEQ ID NO: 1244457
gcaguuucuuccucuuuau

SEQ ID NO: 1490057 - RNA, 19 nt, Artificial Sequence
  Description of Artificial Sequence: Synthetic oligonucleotide
  Antisense strand to SEQ ID NO: 1490056
auaaagaggaagaaacugc

SEQ ID NO: 1490058 - RNA, 19 nt, Artificial Sequence
  Description of Artificial Sequence: Synthetic oligonucleotide
  Sense strand starting at position 2720 of SEQ ID NO: 1244457
ggauaaauuuccuacagaa

SEQ ID NO: 1490059 - RNA, 19 nt, Artificial Sequence
  Description of Artificial Sequence: Synthetic oligonucleotide
  Antisense strand to SEQ ID NO: 1490058
uucuguaggaaauuuaucc

SEQ ID NO: 1490060 - RNA, 19 nt, Artificial Sequence
  Description of Artificial Sequence: Synthetic oligonucleotide
  Sense strand starting at position 2745 of SEQ ID NO: 1244457
uauugugcggccugauaag

SEQ ID NO: 1490061 - RNA, 19 nt, Artificial Sequence
  Description of Artificial Sequence: Synthetic oligonucleotide
  Antisense strand to SEQ ID NO: 1490060
cuuaucaggccgcacaaua

SEQ ID NO: 1490062 - RNA, 19 nt, Artificial Sequence
  Description of Artificial Sequence: Synthetic oligonucleotide
  Sense strand starting at position 2806 of SEQ ID NO: 1244457
guacaucuaguuuaacaag

SEQ ID NO: 1490063 - RNA, 19 nt, Artificial Sequence
  Description of Artificial Sequence: Synthetic oligonucleotide
  Antisense strand to SEQ ID NO: 1490062
cuuguuaaacuagauguac

SEQ ID NO: 1490064 - RNA, 19 nt, Artificial Sequence
  Description of Artificial Sequence: Synthetic oligonucleotide
  Sense strand starting at position 2835 of SEQ ID NO: 1244457
caagguuguuuggcaguua

SEQ ID NO: 1490065 - RNA, 19 nt, Artificial Sequence
  Description of Artificial Sequence: Synthetic oligonucleotide
  Antisense strand to SEQ ID NO: 1490064
uaacugccaaacaaccuug

SEQ ID NO: 1490066 - RNA, 19 nt, Artificial Sequence
  Description of Artificial Sequence: Synthetic oligonucleotide
  Sense strand starting at position 2927 of SEQ ID NO: 1244457
agcagaggucucuauaucu

SEQ ID NO: 1490067 - RNA, 19 nt, Artificial Sequence
  Description of Artificial Sequence: Synthetic oligonucleotide
  Antisense strand to SEQ ID NO: 1490066
agauauagagaccucugcu

SEQ ID NO: 1490068 - RNA, 19 nt, Artificial Sequence
  Description of Artificial Sequence: Synthetic oligonucleotide
  Sense strand starting at position 2940 of SEQ ID NO: 1244457
auaucuuaacauggaggua

SEQ ID NO: 1490069 - RNA, 19 nt, Artificial Sequence
  Description of Artificial Sequence: Synthetic oligonucleotide
  Antisense strand to SEQ ID NO: 1490068
uaccuccauguuaagauau

SEQ ID NO: 1490070 - RNA, 19 nt, Artificial Sequence
  Description of Artificial Sequence: Synthetic oligonucleotide
  Sense strand starting at position 2988 of SEQ ID NO: 1244457
augaguuuccuccaaguua

SEQ ID NO: 1490071 - RNA, 19 nt, Artificial Sequence
  Description of Artificial Sequence: Synthetic oligonucleotide
  Antisense strand to SEQ ID NO: 1490070
uaacuuggaggaaacucau

SEQ ID NO: 1490072 - RNA, 19 nt, Artificial Sequence
  Description of Artificial Sequence: Synthetic oligonucleotide
  Sense strand starting at position 3040 of SEQ ID NO: 1244457
cugaaaguauaaggagaaa

SEQ ID NO: 1490073 - RNA, 19 nt, Artificial Sequence
  Description of Artificial Sequence: Synthetic oligonucleotide
  Antisense strand to SEQ ID NO: 1490072
uuucuccuuauacuuucag

SEQ ID NO: 1490074 - RNA, 19 nt, Artificial Sequence
  Description of Artificial Sequence: Synthetic oligonucleotide
  Sense strand starting at position 3311 of SEQ ID NO: 1244457
agcaguguucuguggaaac

SEQ ID NO: 1490075 - RNA, 19 nt, Artificial Sequence
  Description of Artificial Sequence: Synthetic oligonucleotide
  Antisense strand to SEQ ID NO: 1490074
guuuccacagaacacugcu

SEQ ID NO: 1490076 - RNA, 19 nt, Artificial Sequence
  Description of Artificial Sequence: Synthetic oligonucleotide
  Sense strand starting at position 3350 of SEQ ID NO: 1244457
caagguucucgguggagca

SEQ ID NO: 1490077 - RNA, 19 nt, Artificial Sequence
  Description of Artificial Sequence: Synthetic oligonucleotide
  Antisense strand to SEQ ID NO: 1490076
ugcuccaccgagaaccuug

SEQ ID NO: 1490078 - RNA, 19 nt, Artificial Sequence
  Description of Artificial Sequence: Synthetic oligonucleotide
  Sense strand starting at position 3351 of SEQ ID NO: 1244457
aagguucucgguggagcaa

SEQ ID NO: 1490079 - RNA, 19 nt, Artificial Sequence
  Description of Artificial Sequence: Synthetic oligonucleotide
  Antisense strand to SEQ ID NO: 1490078
uugcuccaccgagaaccuu

SEQ ID NO: 1490080 - RNA, 19 nt, Artificial Sequence
  Description of Artificial Sequence: Synthetic oligonucleotide
  Sense strand starting at position 3495 of SEQ ID NO: 1244457
uggguugaaguguaucuuu

SEQ ID NO: 1490081 - RNA, 19 nt, Artificial Sequence
  Description of Artificial Sequence: Synthetic oligonucleotide
  Antisense strand to SEQ ID NO: 1490080
aaagauacacuucaaccca

SEQ ID NO: 1490082 - RNA, 19 nt, Artificial Sequence
  Description of Artificial Sequence: Synthetic oligonucleotide
  Sense strand starting at position 3498 of SEQ ID NO: 1244457
guugaaguguaucuuucca

SEQ ID NO: 1490083 - RNA, 19 nt, Artificial Sequence
  Description of Artificial Sequence: Synthetic oligonucleotide
  Antisense strand to SEQ ID NO: 1490082
uggaaagauacacuucaac

SEQ ID NO: 1490084 - RNA, 19 nt, Artificial Sequence
  Description of Artificial Sequence: Synthetic oligonucleotide
  Sense strand starting at position 3500 of SEQ ID NO: 1244457
ugaaguguaucuuuccaaa

SEQ ID NO: 1490085 - RNA, 19 nt, Artificial Sequence
  Description of Artificial Sequence: Synthetic oligonucleotide
  Antisense strand to SEQ ID NO: 1490084
uuuggaaagauacacuuca

SEQ ID NO: 1490086 - RNA, 19 nt, Artificial Sequence
  Description of Artificial Sequence: Synthetic oligonucleotide
  Sense strand starting at position 3611 of SEQ ID NO: 1244457
uguacuagaauauggugaa

SEQ ID NO: 1490087 - RNA, 19 nt, Artificial Sequence
  Description of Artificial Sequence: Synthetic oligonucleotide
  Antisense strand to SEQ ID NO: 1490086
uucaccauauucuaguaca

SEQ ID NO: 1490088 - RNA, 19 nt, Artificial Sequence
  Description of Artificial Sequence: Synthetic oligonucleotide
  Sense strand starting at position 3645 of SEQ ID NO: 1244457
uggcauccuuaugaggaga

SEQ ID NO: 1490089 - RNA, 19 nt, Artificial Sequence
  Description of Artificial Sequence: Synthetic oligonucleotide
  Antisense strand to SEQ ID NO: 1490088
ucuccucauaaggaugcca

SEQ ID NO: 1490090 - RNA, 19 nt, Artificial Sequence
  Description of Artificial Sequence: Synthetic oligonucleotide
  Sense strand starting at position 3786 of SEQ ID NO: 1244457
ugacgaucaccagaagcua

SEQ ID NO: 1490091 - RNA, 19 nt, Artificial Sequence
  Description of Artificial Sequence: Synthetic oligonucleotide
  Antisense strand to SEQ ID NO: 1490090
uagcuucuggugaucguca

SEQ ID NO: 1490092 - RNA, 19 nt, Artificial Sequence
  Description of Artificial Sequence: Synthetic oligonucleotide
  Sense strand starting at position 3905 of SEQ ID NO: 1244457
aaauuucuguugugucaag

SEQ ID NO: 1490093 - RNA, 19 nt, Artificial Sequence
  Description of Artificial Sequence: Synthetic oligonucleotide
  Antisense strand to SEQ ID NO: 1490092
cuugacacaacagaaauuu

SEQ ID NO: 1490094 - RNA, 19 nt, Artificial Sequence
  Description of Artificial Sequence: Synthetic oligonucleotide
  Sense strand starting at position 134 of SEQ ID NO: 1244458
gugaauaagcuugagguaa

SEQ ID NO: 1490095 - RNA, 19 nt, Artificial Sequence
  Description of Artificial Sequence: Synthetic oligonucleotide
  Antisense strand to SEQ ID NO: 1490094
uuaccucaagcuuauucac

SEQ ID NO: 1490096 - RNA, 19 nt, Artificial Sequence
  Description of Artificial Sequence: Synthetic oligonucleotide
  Sense strand starting at position 160 of SEQ ID NO: 1244458
aggugugggauacauguua

SEQ ID NO: 1490097 - RNA, 19 nt, Artificial Sequence
  Description of Artificial Sequence: Synthetic oligonucleotide
  Antisense strand to SEQ ID NO: 1490096
uaacauguaucccacaccu

SEQ ID NO: 1490098 - RNA, 19 nt, Artificial Sequence
  Description of Artificial Sequence: Synthetic oligonucleotide
  Sense strand starting at position 321 of SEQ ID NO: 1244458
acugaaagaguuggucaaa

SEQ ID NO: 1490099 - RNA, 19 nt, Artificial Sequence
  Description of Artificial Sequence: Synthetic oligonucleotide
  Antisense strand to SEQ ID NO: 1490098
uuugaccaacucuuucagu

SEQ ID NO: 1490100 - RNA, 19 nt, Artificial Sequence
  Description of Artificial Sequence: Synthetic oligonucleotide
  Sense strand starting at position 342 of SEQ ID NO: 1244458
auuggucuggaaugaaugu

SEQ ID NO: 1490101 - RNA, 19 nt, Artificial Sequence
  Description of Artificial Sequence: Synthetic oligonucleotide
  Antisense strand to SEQ ID NO: 1490100
acauucauuccagaccaau

SEQ ID NO: 1490102 - RNA, 19 nt, Artificial Sequence
  Description of Artificial Sequence: Synthetic oligonucleotide
  Sense strand starting at position 348 of SEQ ID NO: 1244458
cuggaaugaaugugaacuu

SEQ ID NO: 1490103 - RNA, 19 nt, Artificial Sequence
  Description of Artificial Sequence: Synthetic oligonucleotide
  Antisense strand to SEQ ID NO: 1490102
aaguucacauucauuccag

SEQ ID NO: 1490104 - RNA, 19 nt, Artificial Sequence
  Description of Artificial Sequence: Synthetic oligonucleotide
  Sense strand starting at position 376 of SEQ ID NO: 1244458
cagguaaagaugugugaga

SEQ ID NO: 1490105 - RNA, 19 nt, Artificial Sequence
  Description of Artificial Sequence: Synthetic oligonucleotide
  Antisense strand to SEQ ID NO: 1490104
ucucacacaucuuuaccug

SEQ ID NO: 1490106 - RNA, 19 nt, Artificial Sequence
  Description of Artificial Sequence: Synthetic oligonucleotide
  Sense strand starting at position 377 of SEQ ID NO: 1244458
agguaaagaugugugagau

SEQ ID NO: 1490107 - RNA, 19 nt, Artificial Sequence
  Description of Artificial Sequence: Synthetic oligonucleotide
  Antisense strand to SEQ ID NO: 1490106
aucucacacaucuuuaccu

SEQ ID NO: 1490108 - RNA, 19 nt, Artificial Sequence
  Description of Artificial Sequence: Synthetic oligonucleotide
  Sense strand starting at position 378 of SEQ ID NO: 1244458
gguaaagaugugugagauu

SEQ ID NO: 1490109 - RNA, 19 nt, Artificial Sequence
  Description of Artificial Sequence: Synthetic oligonucleotide
  Antisense strand to SEQ ID NO: 1490108
aaucucacacaucuuuacc

SEQ ID NO: 1490110 - RNA, 19 nt, Artificial Sequence
  Description of Artificial Sequence: Synthetic oligonucleotide
  Sense strand starting at position 405 of SEQ ID NO: 1244458
uuauuaauguaccuggaag

SEQ ID NO: 1490111 - RNA, 19 nt, Artificial Sequence
  Description of Artificial Sequence: Synthetic oligonucleotide
  Antisense strand to SEQ ID NO: 1490110
cuuccagguacauuaauaa

SEQ ID NO: 1490112 - RNA, 19 nt, Artificial Sequence
  Description of Artificial Sequence: Synthetic oligonucleotide
  Sense strand starting at position 421 of SEQ ID NO: 1244458
aagaauuugugucaaagaa

SEQ ID NO: 1490113 - RNA, 19 nt, Artificial Sequence
  Description of Artificial Sequence: Synthetic oligonucleotide
  Antisense strand to SEQ ID NO: 1490112
uucuuugacacaaauucuu

SEQ ID NO: 1490114 - RNA, 19 nt, Artificial Sequence
  Description of Artificial Sequence: Synthetic oligonucleotide
  Sense strand starting at position 444 of SEQ ID NO: 1244458
uagacagguccacgauaug

SEQ ID NO: 1490115 - RNA, 19 nt, Artificial Sequence
  Description of Artificial Sequence: Synthetic oligonucleotide
  Antisense strand to SEQ ID NO: 1490114
cauaucguggaccugucua

SEQ ID NO: 1490116 - RNA, 19 nt, Artificial Sequence
  Description of Artificial Sequence: Synthetic oligonucleotide
  Sense strand starting at position 482 of SEQ ID NO: 1244458
guuggaacuguccaaaguu

SEQ ID NO: 1490117 - RNA, 19 nt, Artificial Sequence
  Description of Artificial Sequence: Synthetic oligonucleotide
  Antisense strand to SEQ ID NO: 1490116
aacuuuggacaguuccaac

SEQ ID NO: 1490118 - RNA, 19 nt, Artificial Sequence
  Description of Artificial Sequence: Synthetic oligonucleotide
  Sense strand starting at position 513 of SEQ ID NO: 1244458
gguugagaaccucgagacu

SEQ ID NO: 1490119 - RNA, 19 nt, Artificial Sequence
  Description of Artificial Sequence: Synthetic oligonucleotide
  Antisense strand to SEQ ID NO: 1490118
agucucgagguucucaacc

SEQ ID NO: 1490120 - RNA, 19 nt, Artificial Sequence
  Description of Artificial Sequence: Synthetic oligonucleotide
  Sense strand starting at position 624 of SEQ ID NO: 1244458
ugucaagaaguuuaauguu

SEQ ID NO: 1490121 - RNA, 19 nt, Artificial Sequence
  Description of Artificial Sequence: Synthetic oligonucleotide
  Antisense strand to SEQ ID NO: 1490120
aacauuaaacuucuugaca

SEQ ID NO: 1490122 - RNA, 19 nt, Artificial Sequence
  Description of Artificial Sequence: Synthetic oligonucleotide
  Sense strand starting at position 753 of SEQ ID NO: 1244458
gguuaugcagaucaguaaa

SEQ ID NO: 1490123 - RNA, 19 nt, Artificial Sequence
  Description of Artificial Sequence: Synthetic oligonucleotide
  Antisense strand to SEQ ID NO: 1490122
uuuacugaucugcauaacc

SEQ ID NO: 1490124 - RNA, 19 nt, Artificial Sequence
  Description of Artificial Sequence: Synthetic oligonucleotide
  Sense strand starting at position 764 of SEQ ID NO: 1244458
ucaguaaagugguuauaag

SEQ ID NO: 1490125 - RNA, 19 nt, Artificial Sequence
  Description of Artificial Sequence: Synthetic oligonucleotide
  Antisense strand to SEQ ID NO: 1490124
cuuauaaccacuuuacuga

SEQ ID NO: 1490126 - RNA, 19 nt, Artificial Sequence
  Description of Artificial Sequence: Synthetic oligonucleotide
  Sense strand starting at position 772 of SEQ ID NO: 1244458
gugguuauaagacagguuu

SEQ ID NO: 1490127 - RNA, 19 nt, Artificial Sequence
  Description of Artificial Sequence: Synthetic oligonucleotide
  Antisense strand to SEQ ID NO: 1490126
aaaccugucuuauaaccac

SEQ ID NO: 1490128 - RNA, 19 nt, Artificial Sequence
  Description of Artificial Sequence: Synthetic oligonucleotide
  Sense strand starting at position 774 of SEQ ID NO: 1244458
gguuauaagacagguuuaa

SEQ ID NO: 1490129 - RNA, 19 nt, Artificial Sequence
  Description of Artificial Sequence: Synthetic oligonucleotide
  Antisense strand to SEQ ID NO: 1490128
uuaaaccugucuuauaacc

SEQ ID NO: 1490130 - RNA, 19 nt, Artificial Sequence
  Description of Artificial Sequence: Synthetic oligonucleotide
  Sense strand starting at position 818 of SEQ ID NO: 1244458
gaugguaauguagacaagu

SEQ ID NO: 1490131 - RNA, 19 nt, Artificial Sequence
  Description of Artificial Sequence: Synthetic oligonucleotide
  Antisense strand to SEQ ID NO: 1490130
acuugucuacauuaccauc

SEQ ID NO: 1490132 - RNA, 19 nt, Artificial Sequence
  Description of Artificial Sequence: Synthetic oligonucleotide
  Sense strand starting at position 820 of SEQ ID NO: 1244458
ugguaauguagacaaguuu

SEQ ID NO: 1490133 - RNA, 19 nt, Artificial Sequence
  Description of Artificial Sequence: Synthetic oligonucleotide
  Antisense strand to SEQ ID NO: 1490132
aaacuugucuacauuacca

SEQ ID NO: 1490134 - RNA, 19 nt, Artificial Sequence
  Description of Artificial Sequence: Synthetic oligonucleotide
  Sense strand starting at position 1097 of SEQ ID NO: 1244458
uguuccagugauuaaacua

SEQ ID NO: 1490135 - RNA, 19 nt, Artificial Sequence
  Description of Artificial Sequence: Synthetic oligonucleotide
  Antisense strand to SEQ ID NO: 1490134
uaguuuaaucacuggaaca

SEQ ID NO: 1490136 - RNA, 19 nt, Artificial Sequence
  Description of Artificial Sequence: Synthetic oligonucleotide
  Sense strand starting at position 1794 of SEQ ID NO: 1244458
cguggugucgucuucaaca

SEQ ID NO: 1490137 - RNA, 19 nt, Artificial Sequence
  Description of Artificial Sequence: Synthetic oligonucleotide
  Antisense strand to SEQ ID NO: 1490136
uguugaagacgacaccacg

SEQ ID NO: 1490138 - RNA, 19 nt, Artificial Sequence
  Description of Artificial Sequence: Synthetic oligonucleotide
  Sense strand starting at position 1844 of SEQ ID NO: 1244458
ggucgucuuguucuguaga

SEQ ID NO: 1490139 - RNA, 19 nt, Artificial Sequence
  Description of Artificial Sequence: Synthetic oligonucleotide
  Antisense strand to SEQ ID NO: 1490138
ucuacagaacaagacgacc

SEQ ID NO: 1490140 - RNA, 19 nt, Artificial Sequence
  Description of Artificial Sequence: Synthetic oligonucleotide
  Sense strand starting at position 2076 of SEQ ID NO: 1244458
uuugcuauaggaugggaua

SEQ ID NO: 1490141 - RNA, 19 nt, Artificial Sequence
  Description of Artificial Sequence: Synthetic oligonucleotide
  Antisense strand to SEQ ID NO: 1490140
uaucccauccuauagcaaa

SEQ ID NO: 1490142 - RNA, 19 nt, Artificial Sequence
  Description of Artificial Sequence: Synthetic oligonucleotide
  Sense strand starting at position 2093 of SEQ ID NO: 1244458
uaccuuaugcaugagaguu

SEQ ID NO: 1490143 - RNA, 19 nt, Artificial Sequence
  Description of Artificial Sequence: Synthetic oligonucleotide
  Antisense strand to SEQ ID NO: 1490142
aacucucaugcauaaggua

SEQ ID NO: 1490144 - RNA, 19 nt, Artificial Sequence
  Description of Artificial Sequence: Synthetic oligonucleotide
  Sense strand starting at position 2386 of SEQ ID NO: 1244458
ccaacauggugauuauuau

SEQ ID NO: 1490145 - RNA, 19 nt, Artificial Sequence
  Description of Artificial Sequence: Synthetic oligonucleotide
  Antisense strand to SEQ ID NO: 1490144
auaauaaucaccauguugg

SEQ ID NO: 1490146 - RNA, 19 nt, Artificial Sequence
  Description of Artificial Sequence: Synthetic oligonucleotide
  Sense strand starting at position 2657 of SEQ ID NO: 1244458
gggugguaaguggauauga

SEQ ID NO: 1490147 - RNA, 19 nt, Artificial Sequence
  Description of Artificial Sequence: Synthetic oligonucleotide
  Antisense strand to SEQ ID NO: 1490146
ucauauccacuuaccaccc

SEQ ID NO: 1490148 - RNA, 19 nt, Artificial Sequence
  Description of Artificial Sequence: Synthetic oligonucleotide
  Sense strand starting at position 2659 of SEQ ID NO: 1244458
gugguaaguggauaugagu

SEQ ID NO: 1490149 - RNA, 19 nt, Artificial Sequence
  Description of Artificial Sequence: Synthetic oligonucleotide
  Antisense strand to SEQ ID NO: 1490148
acucauauccacuuaccac

SEQ ID NO: 1490150 - RNA, 19 nt, Artificial Sequence
  Description of Artificial Sequence: Synthetic oligonucleotide
  Sense strand starting at position 2665 of SEQ ID NO: 1244458
aguggauaugaguauuguu

SEQ ID NO: 1490151 - RNA, 19 nt, Artificial Sequence
  Description of Artificial Sequence: Synthetic oligonucleotide
  Antisense strand to SEQ ID NO: 1490150
aacaauacucauauccacu

SEQ ID NO: 1490152 - RNA, 19 nt, Artificial Sequence
  Description of Artificial Sequence: Synthetic oligonucleotide
  Sense strand starting at position 2763 of SEQ ID NO: 1244458
gugauuucagaguguugca

SEQ ID NO: 1490153 - RNA, 19 nt, Artificial Sequence
  Description of Artificial Sequence: Synthetic oligonucleotide
  Antisense strand to SEQ ID NO: 1490152
ugcaacacucugaaaucac

SEQ ID NO: 1490154 - RNA, 19 nt, Artificial Sequence
  Description of Artificial Sequence: Synthetic oligonucleotide
  Sense strand starting at position 2794 of SEQ ID NO: 1244458
cugggaaaguaguuuauag

SEQ ID NO: 1490155 - RNA, 19 nt, Artificial Sequence
  Description of Artificial Sequence: Synthetic oligonucleotide
  Antisense strand to SEQ ID NO: 1490154
cuauaaacuacuuucccag

SEQ ID NO: 1490156 - RNA, 19 nt, Artificial Sequence
  Description of Artificial Sequence: Synthetic oligonucleotide
  Sense strand starting at position 2796 of SEQ ID NO: 1244458
gggaaaguaguuuauaguu

SEQ ID NO: 1490157 - RNA, 19 nt, Artificial Sequence
  Description of Artificial Sequence: Synthetic oligonucleotide
  Antisense strand to SEQ ID NO: 1490156
aacuauaaacuacuuuccc

SEQ ID NO: 1490158 - RNA, 19 nt, Artificial Sequence
  Description of Artificial Sequence: Synthetic oligonucleotide
  Sense strand starting at position 3047 of SEQ ID NO: 1244458
uaaggaaagucucuuuaug

SEQ ID NO: 1490159 - RNA, 19 nt, Artificial Sequence
  Description of Artificial Sequence: Synthetic oligonucleotide
  Antisense strand to SEQ ID NO: 1490158
cauaaagagacuuuccuua

SEQ ID NO: 1490160 - RNA, 19 nt, Artificial Sequence
  Description of Artificial Sequence: Synthetic oligonucleotide
  Sense strand starting at position 3239 of SEQ ID NO: 1244458
aagaguccgcaacauagaa

SEQ ID NO: 1490161 - RNA, 19 nt, Artificial Sequence
  Description of Artificial Sequence: Synthetic oligonucleotide
  Antisense strand to SEQ ID NO: 1490160
uucuauguugcggacucuu

SEQ ID NO: 1490162 - RNA, 19 nt, Artificial Sequence
  Description of Artificial Sequence: Synthetic oligonucleotide
  Sense strand starting at position 3251 of SEQ ID NO: 1244458
cauagaaguuuauuguuga

SEQ ID NO: 1490163 - RNA, 19 nt, Artificial Sequence
  Description of Artificial Sequence: Synthetic oligonucleotide
  Antisense strand to SEQ ID NO: 1490162
ucaacaauaaacuucuaug

SEQ ID NO: 1490164 - RNA, 19 nt, Artificial Sequence
  Description of Artificial Sequence: Synthetic oligonucleotide
  Sense strand starting at position 3318 of SEQ ID NO: 1244458
auuggauucuuacugugga

SEQ ID NO: 1490165 - RNA, 19 nt, Artificial Sequence
  Description of Artificial Sequence: Synthetic oligonucleotide
  Antisense strand to SEQ ID NO: 1490164
uccacaguaagaauccaau

SEQ ID NO: 1490166 - RNA, 19 nt, Artificial Sequence
  Description of Artificial Sequence: Synthetic oligonucleotide
  Sense strand starting at position 3412 of SEQ ID NO: 1244458
uagggaaugcauugacauu

SEQ ID NO: 1490167 - RNA, 19 nt, Artificial Sequence
  Description of Artificial Sequence: Synthetic oligonucleotide
  Antisense strand to SEQ ID NO: 1490166
aaugucaaugcauucccua

SEQ ID NO: 1490168 - RNA, 19 nt, Artificial Sequence
  Description of Artificial Sequence: Synthetic oligonucleotide
  Sense strand starting at position 3471 of SEQ ID NO: 1244458
uaaagaugugacugagggu

SEQ ID NO: 1490169 - RNA, 19 nt, Artificial Sequence
  Description of Artificial Sequence: Synthetic oligonucleotide
  Antisense strand to SEQ ID NO: 1490168
acccucagucacaucuuua

SEQ ID NO: 1490170 - RNA, 19 nt, Artificial Sequence
  Description of Artificial Sequence: Synthetic oligonucleotide
  Sense strand starting at position 3699 of SEQ ID NO: 1244458
guggcaauguuucucauuu

SEQ ID NO: 1490171 - RNA, 19 nt, Artificial Sequence
  Description of Artificial Sequence: Synthetic oligonucleotide
  Antisense strand to SEQ ID NO: 1490170
aaaugagaaacauugccac

SEQ ID NO: 1490172 - RNA, 19 nt, Artificial Sequence
  Description of Artificial Sequence: Synthetic oligonucleotide
  Sense strand starting at position 3700 of SEQ ID NO: 1244458
uggcaauguuucucauuuc

SEQ ID NO: 1490173 - RNA, 19 nt, Artificial Sequence
  Description of Artificial Sequence: Synthetic oligonucleotide
  Antisense strand to SEQ ID NO: 1490172
gaaaugagaaacauugcca

SEQ ID NO: 1490174 - RNA, 19 nt, Artificial Sequence
  Description of Artificial Sequence: Synthetic oligonucleotide
  Sense strand starting at position 485 of SEQ ID NO: 1244459
aauaaugucugguuugauu

SEQ ID NO: 1490175 - RNA, 19 nt, Artificial Sequence
  Description of Artificial Sequence: Synthetic oligonucleotide
  Antisense strand to SEQ ID NO: 1490174
aaucaaaccagacauuauu

SEQ ID NO: 1490176 - RNA, 19 nt, Artificial Sequence
  Description of Artificial Sequence: Synthetic oligonucleotide
  Sense strand starting at position 493 of SEQ ID NO: 1244459
cugguuugauuaucccuaa

SEQ ID NO: 1490177 - RNA, 19 nt, Artificial Sequence
  Description of Artificial Sequence: Synthetic oligonucleotide
  Antisense strand to SEQ ID NO: 1490176
uuagggauaaucaaaccag

SEQ ID NO: 1490178 - RNA, 19 nt, Artificial Sequence
  Description of Artificial Sequence: Synthetic oligonucleotide
  Sense strand starting at position 494 of SEQ ID NO: 1244459
ugguuugauuaucccuaau

SEQ ID NO: 1490179 - RNA, 19 nt, Artificial Sequence
  Description of Artificial Sequence: Synthetic oligonucleotide
  Antisense strand to SEQ ID NO: 1490178
auuagggauaaucaaacca

SEQ ID NO: 1490180 - RNA, 19 nt, Artificial Sequence
  Description of Artificial Sequence: Synthetic oligonucleotide
  Sense strand starting at position 587 of SEQ ID NO: 1244459
gaccaagauugggaaggua

SEQ ID NO: 1490181 - RNA, 19 nt, Artificial Sequence
  Description of Artificial Sequence: Synthetic oligonucleotide
  Antisense strand to SEQ ID NO: 1490180
uaccuucccaaucuugguc

SEQ ID NO: 1490182 - RNA, 19 nt, Artificial Sequence
  Description of Artificial Sequence: Synthetic oligonucleotide
  Sense strand starting at position 648 of SEQ ID NO: 1244459
gccuaauaagggugauuaa

SEQ ID NO: 1490183 - RNA, 19 nt, Artificial Sequence
  Description of Artificial Sequence: Synthetic oligonucleotide
  Antisense strand to SEQ ID NO: 1490182
uuaaucacccuuauuaggc

SEQ ID NO: 1490184 - RNA, 19 nt, Artificial Sequence
  Description of Artificial Sequence: Synthetic oligonucleotide
  Sense strand starting at position 690 of SEQ ID NO: 1244459
acacaugaauagugauuua

SEQ ID NO: 1490185 - RNA, 19 nt, Artificial Sequence
  Description of Artificial Sequence: Synthetic oligonucleotide
  Antisense strand to SEQ ID NO: 1490184
uaaaucacuauucaugugu

SEQ ID NO: 1490186 - RNA, 19 nt, Artificial Sequence
  Description of Artificial Sequence: Synthetic oligonucleotide
  Sense strand starting at position 716 of SEQ ID NO: 1244459
ggaagcaugagcuauugua

SEQ ID NO: 1490187 - RNA, 19 nt, Artificial Sequence
  Description of Artificial Sequence: Synthetic oligonucleotide
  Antisense strand to SEQ ID NO: 1490186
uacaauagcucaugcuucc

SEQ ID NO: 1490188 - RNA, 19 nt, Artificial Sequence
  Description of Artificial Sequence: Synthetic oligonucleotide
  Sense strand starting at position 760 of SEQ ID NO: 1244459
gggcacuuauuauuccuaa

SEQ ID NO: 1490189 - RNA, 19 nt, Artificial Sequence
  Description of Artificial Sequence: Synthetic oligonucleotide
  Antisense strand to SEQ ID NO: 1490188
uuaggaauaauaagugccc

SEQ ID NO: 1490190 - RNA, 19 nt, Artificial Sequence
  Description of Artificial Sequence: Synthetic oligonucleotide
  Sense strand starting at position 822 of SEQ ID NO: 1244459
ucugcucaucaggacauau

SEQ ID NO: 1490191 - RNA, 19 nt, Artificial Sequence
  Description of Artificial Sequence: Synthetic oligonucleotide
  Antisense strand to SEQ ID NO: 1490190
auauguccugaugagcaga

SEQ ID NO: 1490192 - RNA, 19 nt, Artificial Sequence
  Description of Artificial Sequence: Synthetic oligonucleotide
  Sense strand starting at position 833 of SEQ ID NO: 1244459
ggacauaugcccuauaucc

SEQ ID NO: 1490193 - RNA, 19 nt, Artificial Sequence
  Description of Artificial Sequence: Synthetic oligonucleotide
  Antisense strand to SEQ ID NO: 1490192
ggauauagggcauaugucc

SEQ ID NO: 1490194 - RNA, 19 nt, Artificial Sequence
  Description of Artificial Sequence: Synthetic oligonucleotide
  Sense strand starting at position 877 of SEQ ID NO: 1244459
gcagcaaugaguugaaagu

SEQ ID NO: 1490195 - RNA, 19 nt, Artificial Sequence
  Description of Artificial Sequence: Synthetic oligonucleotide
  Antisense strand to SEQ ID NO: 1490194
acuuucaacucauugcugc

SEQ ID NO: 1490196 - RNA, 19 nt, Artificial Sequence
  Description of Artificial Sequence: Synthetic oligonucleotide
  Sense strand starting at position 883 of SEQ ID NO: 1244459
augaguugaaagugguaau

SEQ ID NO: 1490197 - RNA, 19 nt, Artificial Sequence
  Description of Artificial Sequence: Synthetic oligonucleotide
  Antisense strand to SEQ ID NO: 1490196
auuaccacuuucaacucau

SEQ ID NO: 1490198 - RNA, 19 nt, Artificial Sequence
  Description of Artificial Sequence: Synthetic oligonucleotide
  Sense strand starting at position 884 of SEQ ID NO: 1244459
ugaguugaaagugguaauu

SEQ ID NO: 1490199 - RNA, 19 nt, Artificial Sequence
  Description of Artificial Sequence: Synthetic oligonucleotide
  Antisense strand to SEQ ID NO: 1490198
aauuaccacuuucaacuca

SEQ ID NO: 1490200 - RNA, 19 nt, Artificial Sequence
  Description of Artificial Sequence: Synthetic oligonucleotide
  Sense strand starting at position 886 of SEQ ID NO: 1244459
aguugaaagugguaauuuc

SEQ ID NO: 1490201 - RNA, 19 nt, Artificial Sequence
  Description of Artificial Sequence: Synthetic oligonucleotide
  Antisense strand to SEQ ID NO: 1490200
gaaauuaccacuuucaacu

SEQ ID NO: 1490202 - RNA, 19 nt, Artificial Sequence
  Description of Artificial Sequence: Synthetic oligonucleotide
  Sense strand starting at position 1035 of SEQ ID NO: 1244459
uggugacuacgguauccaa

SEQ ID NO: 1490203 - RNA, 19 nt, Artificial Sequence
  Description of Artificial Sequence: Synthetic oligonucleotide
  Antisense strand to SEQ ID NO: 1490202
uuggauaccguagucacca

SEQ ID NO: 1490204 - RNA, 19 nt, Artificial Sequence
  Description of Artificial Sequence: Synthetic oligonucleotide
  Sense strand starting at position 2048 of SEQ ID NO: 1244459
aguuacuguguguagugau

SEQ ID NO: 1490205 - RNA, 19 nt, Artificial Sequence
  Description of Artificial Sequence: Synthetic oligonucleotide
  Antisense strand to SEQ ID NO: 1490204
aucacuacacacaguaacu

SEQ ID NO: 1490206 - RNA, 19 nt, Artificial Sequence
  Description of Artificial Sequence: Synthetic oligonucleotide
  Sense strand starting at position 2104 of SEQ ID NO: 1244459
uguguauacaccugaguuu

SEQ ID NO: 1490207 - RNA, 19 nt, Artificial Sequence
  Description of Artificial Sequence: Synthetic oligonucleotide
  Antisense strand to SEQ ID NO: 1490206
aaacucagguguauacaca

SEQ ID NO: 1490208 - RNA, 19 nt, Artificial Sequence
  Description of Artificial Sequence: Synthetic oligonucleotide
  Sense strand starting at position 2105 of SEQ ID NO: 1244459
guguauacaccugaguuua

SEQ ID NO: 1490209 - RNA, 19 nt, Artificial Sequence
  Description of Artificial Sequence: Synthetic oligonucleotide
  Antisense strand to SEQ ID NO: 1490208
uaaacucagguguauacac

SEQ ID NO: 1490210 - RNA, 19 nt, Artificial Sequence
  Description of Artificial Sequence: Synthetic oligonucleotide
  Sense strand starting at position 2107 of SEQ ID NO: 1244459
guauacaccugaguuuauu

SEQ ID NO: 1490211 - RNA, 19 nt, Artificial Sequence
  Description of Artificial Sequence: Synthetic oligonucleotide
  Antisense strand to SEQ ID NO: 1490210
aauaaacucagguguauac

SEQ ID NO: 1490212 - RNA, 19 nt, Artificial Sequence
  Description of Artificial Sequence: Synthetic oligonucleotide
  Sense strand starting at position 2152 of SEQ ID NO: 1244459
gggaaacaucccuguaggu

SEQ ID NO: 1490213 - RNA, 19 nt, Artificial Sequence
  Description of Artificial Sequence: Synthetic oligonucleotide
  Antisense strand to SEQ ID NO: 1490212
accuacagggauguuuccc

SEQ ID NO: 1490214 - RNA, 19 nt, Artificial Sequence
  Description of Artificial Sequence: Synthetic oligonucleotide
  Sense strand starting at position 2154 of SEQ ID NO: 1244459
gaaacaucccuguagguca

SEQ ID NO: 1490215 - RNA, 19 nt, Artificial Sequence
  Description of Artificial Sequence: Synthetic oligonucleotide
  Antisense strand to SEQ ID NO: 1490214
ugaccuacagggauguuuc

SEQ ID NO: 1490216 - RNA, 19 nt, Artificial Sequence
  Description of Artificial Sequence: Synthetic oligonucleotide
  Sense strand starting at position 2217 of SEQ ID NO: 1244459
gugagcaaucucugaauca

SEQ ID NO: 1490217 - RNA, 19 nt, Artificial Sequence
  Description of Artificial Sequence: Synthetic oligonucleotide
  Antisense strand to SEQ ID NO: 1490216
ugauucagagauugcucac

SEQ ID NO: 1490218 - RNA, 19 nt, Artificial Sequence
  Description of Artificial Sequence: Synthetic oligonucleotide
  Sense strand starting at position 2267 of SEQ ID NO: 1244459
ccacuaaacgccuagaaau

SEQ ID NO: 1490219 - RNA, 19 nt, Artificial Sequence
  Description of Artificial Sequence: Synthetic oligonucleotide
  Antisense strand to SEQ ID NO: 1490218
auuucuaggcguuuagugg

SEQ ID NO: 1490220 - RNA, 19 nt, Artificial Sequence
  Description of Artificial Sequence: Synthetic oligonucleotide
  Sense strand starting at position 2305 of SEQ ID NO: 1244459
ugucaugucccauggucua

SEQ ID NO: 1490221 - RNA, 19 nt, Artificial Sequence
  Description of Artificial Sequence: Synthetic oligonucleotide
  Antisense strand to SEQ ID NO: 1490220
uagaccaugggacaugaca

SEQ ID NO: 1490222 - RNA, 19 nt, Artificial Sequence
  Description of Artificial Sequence: Synthetic oligonucleotide
  Sense strand starting at position 2601 of SEQ ID NO: 1244459
gguaacauguaucuacacu

SEQ ID NO: 1490223 - RNA, 19 nt, Artificial Sequence
  Description of Artificial Sequence: Synthetic oligonucleotide
  Antisense strand to SEQ ID NO: 1490222
aguguagauacauguuacc

SEQ ID NO: 1490224 - RNA, 19 nt, Artificial Sequence
  Description of Artificial Sequence: Synthetic oligonucleotide
  Sense strand starting at position 2613 of SEQ ID NO: 1244459
cuacacugugucggaagau

SEQ ID NO: 1490225 - RNA, 19 nt, Artificial Sequence
  Description of Artificial Sequence: Synthetic oligonucleotide
  Antisense strand to SEQ ID NO: 1490224
aucuuccgacacaguguag

SEQ ID NO: 1490226 - RNA, 19 nt, Artificial Sequence
  Description of Artificial Sequence: Synthetic oligonucleotide
  Sense strand starting at position 2774 of SEQ ID NO: 1244459
uuggcaagcccucaaguau

SEQ ID NO: 1490227 - RNA, 19 nt, Artificial Sequence
  Description of Artificial Sequence: Synthetic oligonucleotide
  Antisense strand to SEQ ID NO: 1490226
auacuugagggcuugccaa

SEQ ID NO: 1490228 - RNA, 19 nt, Artificial Sequence
  Description of Artificial Sequence: Synthetic oligonucleotide
  Sense strand starting at position 2887 of SEQ ID NO: 1244459
cuuaguaaacugugagguu

SEQ ID NO: 1490229 - RNA, 19 nt, Artificial Sequence
  Description of Artificial Sequence: Synthetic oligonucleotide
  Antisense strand to SEQ ID NO: 1490228
aaccucacaguuuacuaag

SEQ ID NO: 1490230 - RNA, 19 nt, Artificial Sequence
  Description of Artificial Sequence: Synthetic oligonucleotide
  Sense strand starting at position 2900 of SEQ ID NO: 1244459
gagguuuacaucuguaggu

SEQ ID NO: 1490231 - RNA, 19 nt, Artificial Sequence
  Description of Artificial Sequence: Synthetic oligonucleotide
  Antisense strand to SEQ ID NO: 1490230
accuacagauguaaaccuc

SEQ ID NO: 1490232 - RNA, 19 nt, Artificial Sequence
  Description of Artificial Sequence: Synthetic oligonucleotide
  Sense strand starting at position 2902 of SEQ ID NO: 1244459
gguuuacaucuguaggugu

SEQ ID NO: 1490233 - RNA, 19 nt, Artificial Sequence
  Description of Artificial Sequence: Synthetic oligonucleotide
  Antisense strand to SEQ ID NO: 1490232
acaccuacagauguaaacc

SEQ ID NO: 1490234 - RNA, 19 nt, Artificial Sequence
  Description of Artificial Sequence: Synthetic oligonucleotide
  Sense strand starting at position 2904 of SEQ ID NO: 1244459
uuuacaucuguagguguga

SEQ ID NO: 1490235 - RNA, 19 nt, Artificial Sequence
  Description of Artificial Sequence: Synthetic oligonucleotide
  Antisense strand to SEQ ID NO: 1490234
ucacaccuacagauguaaa

SEQ ID NO: 1490236 - RNA, 19 nt, Artificial Sequence
  Description of Artificial Sequence: Synthetic oligonucleotide
  Sense strand starting at position 2905 of SEQ ID NO: 1244459
uuacaucuguaggugugaa

SEQ ID NO: 1490237 - RNA, 19 nt, Artificial Sequence
  Description of Artificial Sequence: Synthetic oligonucleotide
  Antisense strand to SEQ ID NO: 1490236
uucacaccuacagauguaa

SEQ ID NO: 1490238 - RNA, 19 nt, Artificial Sequence
  Description of Artificial Sequence: Synthetic oligonucleotide
  Sense strand starting at position 3454 of SEQ ID NO: 1244459
gagucaaauccagguauau

SEQ ID NO: 1490239 - RNA, 19 nt, Artificial Sequence
  Description of Artificial Sequence: Synthetic oligonucleotide
  Antisense strand to SEQ ID NO: 1490238
auauaccuggauuugacuc

SEQ ID NO: 1490240 - RNA, 19 nt, Artificial Sequence
  Description of Artificial Sequence: Synthetic oligonucleotide
  Sense strand starting at position 3545 of SEQ ID NO: 1244459
cuuguugauucuuccuuua

SEQ ID NO: 1490241 - RNA, 19 nt, Artificial Sequence
  Description of Artificial Sequence: Synthetic oligonucleotide
  Antisense strand to SEQ ID NO: 1490240
uaaaggaagaaucaacaag

SEQ ID NO: 1490242 - RNA, 19 nt, Artificial Sequence
  Description of Artificial Sequence: Synthetic oligonucleotide
  Sense strand starting at position 3689 of SEQ ID NO: 1244459
uccgucuuguacucuaaga

SEQ ID NO: 1490243 - RNA, 19 nt, Artificial Sequence
  Description of Artificial Sequence: Synthetic oligonucleotide
  Antisense strand to SEQ ID NO: 1490242
ucuuagaguacaagacgga

SEQ ID NO: 1490244 - RNA, 19 nt, Artificial Sequence
  Description of Artificial Sequence: Synthetic oligonucleotide
  Sense strand starting at position 3691 of SEQ ID NO: 1244459
cgucuuguacucuaagacu

SEQ ID NO: 1490245 - RNA, 19 nt, Artificial Sequence
  Description of Artificial Sequence: Synthetic oligonucleotide
  Antisense strand to SEQ ID NO: 1490244
agucuuagaguacaagacg

SEQ ID NO: 1490246 - RNA, 19 nt, Artificial Sequence
  Description of Artificial Sequence: Synthetic oligonucleotide
  Sense strand starting at position 3726 of SEQ ID NO: 1244459
cgaucagcugcuuagucaa

SEQ ID NO: 1490247 - RNA, 19 nt, Artificial Sequence
  Description of Artificial Sequence: Synthetic oligonucleotide
  Antisense strand to SEQ ID NO: 1490246
uugacuaagcagcugaucg

SEQ ID NO: 1490248 - RNA, 19 nt, Artificial Sequence
  Description of Artificial Sequence: Synthetic oligonucleotide
  Sense strand starting at position 3740 of SEQ ID NO: 1244459
gucaaauccguguuguucu

SEQ ID NO: 1490249 - RNA, 19 nt, Artificial Sequence
  Description of Artificial Sequence: Synthetic oligonucleotide
  Antisense strand to SEQ ID NO: 1490248
agaacaacacggauuugac

SEQ ID NO: 1490250 - RNA, 19 nt, Artificial Sequence
  Description of Artificial Sequence: Synthetic oligonucleotide
  Sense strand starting at position 3816 of SEQ ID NO: 1244459
gcucaugugacugaguucu

SEQ ID NO: 1490251 - RNA, 19 nt, Artificial Sequence
  Description of Artificial Sequence: Synthetic oligonucleotide
  Antisense strand to SEQ ID NO: 1490250
agaacucagucacaugagc

SEQ ID NO: 1490252 - RNA, 19 nt, Artificial Sequence
  Description of Artificial Sequence: Synthetic oligonucleotide
  Sense strand starting at position 3887 of SEQ ID NO: 1244459
gugccaguuggaugcaaau

SEQ ID NO: 1490253 - RNA, 19 nt, Artificial Sequence
  Description of Artificial Sequence: Synthetic oligonucleotide
  Antisense strand to SEQ ID NO: 1490252
auuugcauccaacuggcac

SEQ ID NO: 1490254 - RNA, 19 nt, Artificial Sequence
  Description of Artificial Sequence: Synthetic oligonucleotide
  Sense strand starting at position 44 of SEQ ID NO: 1244460
cccaguagcaaaggugaau

SEQ ID NO: 1490255 - RNA, 19 nt, Artificial Sequence
  Description of Artificial Sequence: Synthetic oligonucleotide
  Antisense strand to SEQ ID NO: 1490254
auucaccuuugcuacuggg

SEQ ID NO: 1490256 - RNA, 19 nt, Artificial Sequence
  Description of Artificial Sequence: Synthetic oligonucleotide
  Sense strand starting at position 138 of SEQ ID NO: 1244460
uggcuuagcugaccagaua

SEQ ID NO: 1490257 - RNA, 19 nt, Artificial Sequence
  Description of Artificial Sequence: Synthetic oligonucleotide
  Antisense strand to SEQ ID NO: 1490256
uaucuggucagcuaagcca

SEQ ID NO: 1490258 - RNA, 19 nt, Artificial Sequence
  Description of Artificial Sequence: Synthetic oligonucleotide
  Sense strand starting at position 139 of SEQ ID NO: 1244460
ggcuuagcugaccagauaa

SEQ ID NO: 1490259 - RNA, 19 nt, Artificial Sequence
  Description of Artificial Sequence: Synthetic oligonucleotide
  Antisense strand to SEQ ID NO: 1490258
uuaucuggucagcuaagcc

SEQ ID NO: 1490260 - RNA, 19 nt, Artificial Sequence
  Description of Artificial Sequence: Synthetic oligonucleotide
  Sense strand starting at position 177 of SEQ ID NO: 1244460
ugguaccuguguucagaga

SEQ ID NO: 1490261 - RNA, 19 nt, Artificial Sequence
  Description of Artificial Sequence: Synthetic oligonucleotide
  Antisense strand to SEQ ID NO: 1490260
ucucugaacacagguacca

SEQ ID NO: 1490262 - RNA, 19 nt, Artificial Sequence
  Description of Artificial Sequence: Synthetic oligonucleotide
  Sense strand starting at position 273 of SEQ ID NO: 1244460
cuaguucugccugagguau

SEQ ID NO: 1490263 - RNA, 19 nt, Artificial Sequence
  Description of Artificial Sequence: Synthetic oligonucleotide
  Antisense strand to SEQ ID NO: 1490262
auaccucaggcagaacuag

SEQ ID NO: 1490264 - RNA, 19 nt, Artificial Sequence
  Description of Artificial Sequence: Synthetic oligonucleotide
  Sense strand starting at position 307 of SEQ ID NO: 1244460
gguaaucuguggguggcau

SEQ ID NO: 1490265 - RNA, 19 nt, Artificial Sequence
  Description of Artificial Sequence: Synthetic oligonucleotide
  Antisense strand to SEQ ID NO: 1490264
augccacccacagauuacc

SEQ ID NO: 1490266 - RNA, 19 nt, Artificial Sequence
  Description of Artificial Sequence: Synthetic oligonucleotide
  Sense strand starting at position 420 of SEQ ID NO: 1244460
ugauuucuguuuccugcau

SEQ ID NO: 1490267 - RNA, 19 nt, Artificial Sequence
  Description of Artificial Sequence: Synthetic oligonucleotide
  Antisense strand to SEQ ID NO: 1490266
augcaggaaacagaaauca

SEQ ID NO: 1490268 - RNA, 19 nt, Artificial Sequence
  Description of Artificial Sequence: Synthetic oligonucleotide
  Sense strand starting at position 424 of SEQ ID NO: 1244460
uucuguuuccugcauggau

SEQ ID NO: 1490269 - RNA, 19 nt, Artificial Sequence
  Description of Artificial Sequence: Synthetic oligonucleotide
  Antisense strand to SEQ ID NO: 1490268
auccaugcaggaaacagaa

SEQ ID NO: 1490270 - RNA, 19 nt, Artificial Sequence
  Description of Artificial Sequence: Synthetic oligonucleotide
  Sense strand starting at position 483 of SEQ ID NO: 1244460
gaaugaauacuaugcaguu

SEQ ID NO: 1490271 - RNA, 19 nt, Artificial Sequence
  Description of Artificial Sequence: Synthetic oligonucleotide
  Antisense strand to SEQ ID NO: 1490270
aacugcauaguauucauuc

SEQ ID NO: 1490272 - RNA, 19 nt, Artificial Sequence
  Description of Artificial Sequence: Synthetic oligonucleotide
  Sense strand starting at position 732 of SEQ ID NO: 1244460
auacacaagcugugucaga

SEQ ID NO: 1490273 - RNA, 19 nt, Artificial Sequence
  Description of Artificial Sequence: Synthetic oligonucleotide
  Antisense strand to SEQ ID NO: 1490272
ucugacacagcuuguguau

SEQ ID NO: 1490274 - RNA, 19 nt, Artificial Sequence
  Description of Artificial Sequence: Synthetic oligonucleotide
  Sense strand starting at position 747 of SEQ ID NO: 1244460
cagagaguccggcagauau

SEQ ID NO: 1490275 - RNA, 19 nt, Artificial Sequence
  Description of Artificial Sequence: Synthetic oligonucleotide
  Antisense strand to SEQ ID NO: 1490274
auaucugccggacucucug

SEQ ID NO: 1490276 - RNA, 19 nt, Artificial Sequence
  Description of Artificial Sequence: Synthetic oligonucleotide
  Sense strand starting at position 749 of SEQ ID NO: 1244460
gagaguccggcagauauua

SEQ ID NO: 1490277 - RNA, 19 nt, Artificial Sequence
  Description of Artificial Sequence: Synthetic oligonucleotide
  Antisense strand to SEQ ID NO: 1490276
uaauaucugccggacucuc

SEQ ID NO: 1490278 - RNA, 19 nt, Artificial Sequence
  Description of Artificial Sequence: Synthetic oligonucleotide
  Sense strand starting at position 823 of SEQ ID NO: 1244460
gcuaguaaauuucugcuaa

SEQ ID NO: 1490279 - RNA, 19 nt, Artificial Sequence
  Description of Artificial Sequence: Synthetic oligonucleotide
  Antisense strand to SEQ ID NO: 1490278
uuagcagaaauuuacuagc

SEQ ID NO: 1490280 - RNA, 19 nt, Artificial Sequence
  Description of Artificial Sequence: Synthetic oligonucleotide
  Sense strand starting at position 899 of SEQ ID NO: 1244460
uguccaaagugauaauuuc

SEQ ID NO: 1490281 - RNA, 19 nt, Artificial Sequence
  Description of Artificial Sequence: Synthetic oligonucleotide
  Antisense strand to SEQ ID NO: 1490280
gaaauuaucacuuuggaca

SEQ ID NO: 1490282 - RNA, 19 nt, Artificial Sequence
  Description of Artificial Sequence: Synthetic oligonucleotide
  Sense strand starting at position 936 of SEQ ID NO: 1244460
uuacaagauuucugguaga

SEQ ID NO: 1490283 - RNA, 19 nt, Artificial Sequence
  Description of Artificial Sequence: Synthetic oligonucleotide
  Antisense strand to SEQ ID NO: 1490282
ucuaccagaaaucuuguaa

SEQ ID NO: 1490284 - RNA, 19 nt, Artificial Sequence
  Description of Artificial Sequence: Synthetic oligonucleotide
  Sense strand starting at position 939 of SEQ ID NO: 1244460
caagauuucugguagagga

SEQ ID NO: 1490285 - RNA, 19 nt, Artificial Sequence
  Description of Artificial Sequence: Synthetic oligonucleotide
  Antisense strand to SEQ ID NO: 1490284
uccucuaccagaaaucuug

SEQ ID NO: 1490286 - RNA, 19 nt, Artificial Sequence
  Description of Artificial Sequence: Synthetic oligonucleotide
  Sense strand starting at position 952 of SEQ ID NO: 1244460
agaggaauuucuggcucaa

SEQ ID NO: 1490287 - RNA, 19 nt, Artificial Sequence
  Description of Artificial Sequence: Synthetic oligonucleotide
  Antisense strand to SEQ ID NO: 1490286
uugagccagaaauuccucu

SEQ ID NO: 1490288 - RNA, 19 nt, Artificial Sequence
  Description of Artificial Sequence: Synthetic oligonucleotide
  Sense strand starting at position 982 of SEQ ID NO: 1244460
gagcuucuugaagggcaau

SEQ ID NO: 1490289 - RNA, 19 nt, Artificial Sequence
  Description of Artificial Sequence: Synthetic oligonucleotide
  Antisense strand to SEQ ID NO: 1490288
auugcccuucaagaagcuc

SEQ ID NO: 1490290 - RNA, 19 nt, Artificial Sequence
  Description of Artificial Sequence: Synthetic oligonucleotide
  Sense strand starting at position 988 of SEQ ID NO: 1244460
cuugaagggcaaugacauu

SEQ ID NO: 1490291 - RNA, 19 nt, Artificial Sequence
  Description of Artificial Sequence: Synthetic oligonucleotide
  Antisense strand to SEQ ID NO: 1490290
aaugucauugcccuucaag

SEQ ID NO: 1490292 - RNA, 19 nt, Artificial Sequence
  Description of Artificial Sequence: Synthetic oligonucleotide
  Sense strand starting at position 1029 of SEQ ID NO: 1244460
cccacuuggucauuacagu

SEQ ID NO: 1490293 - RNA, 19 nt, Artificial Sequence
  Description of Artificial Sequence: Synthetic oligonucleotide
  Antisense strand to SEQ ID NO: 1490292
acuguaaugaccaaguggg

SEQ ID NO: 1490294 - RNA, 19 nt, Artificial Sequence
  Description of Artificial Sequence: Synthetic oligonucleotide
  Sense strand starting at position 1030 of SEQ ID NO: 1244460
ccacuuggucauuacagua

SEQ ID NO: 1490295 - RNA, 19 nt, Artificial Sequence
  Description of Artificial Sequence: Synthetic oligonucleotide
  Antisense strand to SEQ ID NO: 1490294
uacuguaaugaccaagugg

SEQ ID NO: 1490296 - RNA, 19 nt, Artificial Sequence
  Description of Artificial Sequence: Synthetic oligonucleotide
  Sense strand starting at position 2035 of SEQ ID NO: 1244460
gaauuauuagcgcaguuag

SEQ ID NO: 1490297 - RNA, 19 nt, Artificial Sequence
  Description of Artificial Sequence: Synthetic oligonucleotide
  Antisense strand to SEQ ID NO: 1490296
cuaacugcgcuaauaauuc

SEQ ID NO: 1490298 - RNA, 19 nt, Artificial Sequence
  Description of Artificial Sequence: Synthetic oligonucleotide
  Sense strand starting at position 2055 of SEQ ID NO: 1244460
guguguuauagucugccuu

SEQ ID NO: 1490299 - RNA, 19 nt, Artificial Sequence
  Description of Artificial Sequence: Synthetic oligonucleotide
  Antisense strand to SEQ ID NO: 1490298
aaggcagacuauaacacac

SEQ ID NO: 1490300 - RNA, 19 nt, Artificial Sequence
  Description of Artificial Sequence: Synthetic oligonucleotide
  Sense strand starting at position 2251 of SEQ ID NO: 1244460
ugucaaagaaguuagcgau

SEQ ID NO: 1490301 - RNA, 19 nt, Artificial Sequence
  Description of Artificial Sequence: Synthetic oligonucleotide
  Antisense strand to SEQ ID NO: 1490300
aucgcuaacuucuuugaca

SEQ ID NO: 1490302 - RNA, 19 nt, Artificial Sequence
  Description of Artificial Sequence: Synthetic oligonucleotide
  Sense strand starting at position 2259 of SEQ ID NO: 1244460
aaguuagcgaucugugaag

SEQ ID NO: 1490303 - RNA, 19 nt, Artificial Sequence
  Description of Artificial Sequence: Synthetic oligonucleotide
  Antisense strand to SEQ ID NO: 1490302
cuucacagaucgcuaacuu

SEQ ID NO: 1490304 - RNA, 19 nt, Artificial Sequence
  Description of Artificial Sequence: Synthetic oligonucleotide
  Sense strand starting at position 2266 of SEQ ID NO: 1244460
cgaucugugaaguaaagau

SEQ ID NO: 1490305 - RNA, 19 nt, Artificial Sequence
  Description of Artificial Sequence: Synthetic oligonucleotide
  Antisense strand to SEQ ID NO: 1490304
aucuuuacuucacagaucg

SEQ ID NO: 1490306 - RNA, 19 nt, Artificial Sequence
  Description of Artificial Sequence: Synthetic oligonucleotide
  Sense strand starting at position 2276 of SEQ ID NO: 1244460
aguaaagaugguuguccuu

SEQ ID NO: 1490307 - RNA, 19 nt, Artificial Sequence
  Description of Artificial Sequence: Synthetic oligonucleotide
  Antisense strand to SEQ ID NO: 1490306
aaggacaaccaucuuuacu

SEQ ID NO: 1490308 - RNA, 19 nt, Artificial Sequence
  Description of Artificial Sequence: Synthetic oligonucleotide
  Sense strand starting at position 2449 of SEQ ID NO: 1244460
uagcaucuguucucaagga

SEQ ID NO: 1490309 - RNA, 19 nt, Artificial Sequence
  Description of Artificial Sequence: Synthetic oligonucleotide
  Antisense strand to SEQ ID NO: 1490308
uccuugagaacagaugcua

SEQ ID NO: 1490310 - RNA, 19 nt, Artificial Sequence
  Description of Artificial Sequence: Synthetic oligonucleotide
  Sense strand starting at position 2453 of SEQ ID NO: 1244460
aucuguucucaaggaccuu

SEQ ID NO: 1490311 - RNA, 19 nt, Artificial Sequence
  Description of Artificial Sequence: Synthetic oligonucleotide
  Antisense strand to SEQ ID NO: 1490310
aagguccuugagaacagau

SEQ ID NO: 1490312 - RNA, 19 nt, Artificial Sequence
  Description of Artificial Sequence: Synthetic oligonucleotide
  Sense strand starting at position 2507 of SEQ ID NO: 1244460
uuuauuacacaugguaaga

SEQ ID NO: 1490313 - RNA, 19 nt, Artificial Sequence
  Description of Artificial Sequence: Synthetic oligonucleotide
  Antisense strand to SEQ ID NO: 1490312
ucuuaccauguguaauaaa

SEQ ID NO: 1490314 - RNA, 19 nt, Artificial Sequence
  Description of Artificial Sequence: Synthetic oligonucleotide
  Sense strand starting at position 2578 of SEQ ID NO: 1244460
gugcaaaggauguaucaua

SEQ ID NO: 1490315 - RNA, 19 nt, Artificial Sequence
  Description of Artificial Sequence: Synthetic oligonucleotide
  Antisense strand to SEQ ID NO: 1490314
uaugauacauccuuugcac

SEQ ID NO: 1490316 - RNA, 19 nt, Artificial Sequence
  Description of Artificial Sequence: Synthetic oligonucleotide
  Sense strand starting at position 2597 of SEQ ID NO: 1244460
guaggaaugcagugaacaa

SEQ ID NO: 1490317 - RNA, 19 nt, Artificial Sequence
  Description of Artificial Sequence: Synthetic oligonucleotide
  Antisense strand to SEQ ID NO: 1490316
uuguucacugcauuccuac

SEQ ID NO: 1490318 - RNA, 19 nt, Artificial Sequence
  Description of Artificial Sequence: Synthetic oligonucleotide
  Sense strand starting at position 2744 of SEQ ID NO: 1244460
gaacuuacuccacaggugu

SEQ ID NO: 1490319 - RNA, 19 nt, Artificial Sequence
  Description of Artificial Sequence: Synthetic oligonucleotide
  Antisense strand to SEQ ID NO: 1490318
acaccuguggaguaaguuc

SEQ ID NO: 1490320 - RNA, 19 nt, Artificial Sequence
  Description of Artificial Sequence: Synthetic oligonucleotide
  Sense strand starting at position 3095 of SEQ ID NO: 1244460
guaggaacauucccuuaag

SEQ ID NO: 1490321 - RNA, 19 nt, Artificial Sequence
  Description of Artificial Sequence: Synthetic oligonucleotide
  Antisense strand to SEQ ID NO: 1490320
cuuaagggaauguuccuac

SEQ ID NO: 1490322 - RNA, 19 nt, Artificial Sequence
  Description of Artificial Sequence: Synthetic oligonucleotide
  Sense strand starting at position 3434 of SEQ ID NO: 1244460
ugcuaacaugucugaccaa

SEQ ID NO: 1490323 - RNA, 19 nt, Artificial Sequence
  Description of Artificial Sequence: Synthetic oligonucleotide
  Antisense strand to SEQ ID NO: 1490322
uuggucagacauguuagca

SEQ ID NO: 1490324 - RNA, 19 nt, Artificial Sequence
  Description of Artificial Sequence: Synthetic oligonucleotide
  Sense strand starting at position 3474 of SEQ ID NO: 1244460
accuaaguaguuugcaaga

SEQ ID NO: 1490325 - RNA, 19 nt, Artificial Sequence
  Description of Artificial Sequence: Synthetic oligonucleotide
  Antisense strand to SEQ ID NO: 1490324
ucuugcaaacuacuuaggu

SEQ ID NO: 1490326 - RNA, 19 nt, Artificial Sequence
  Description of Artificial Sequence: Synthetic oligonucleotide
  Sense strand starting at position 3479 of SEQ ID NO: 1244460
aguaguuugcaagauguuu

SEQ ID NO: 1490327 - RNA, 19 nt, Artificial Sequence
  Description of Artificial Sequence: Synthetic oligonucleotide
  Antisense strand to SEQ ID NO: 1490326
aaacaucuugcaaacuacu

SEQ ID NO: 1490328 - RNA, 19 nt, Artificial Sequence
  Description of Artificial Sequence: Synthetic oligonucleotide
  Sense strand starting at position 3818 of SEQ ID NO: 1244460
uuauguuuaugucuuccaa

SEQ ID NO: 1490329 - RNA, 19 nt, Artificial Sequence
  Description of Artificial Sequence: Synthetic oligonucleotide
  Antisense strand to SEQ ID NO: 1490328
uuggaagacauaaacauaa

SEQ ID NO: 1490330 - RNA, 19 nt, Artificial Sequence
  Description of Artificial Sequence: Synthetic oligonucleotide
  Sense strand starting at position 3885 of SEQ ID NO: 1244460
cucaauuauugaguugaac

SEQ ID NO: 1490331 - RNA, 19 nt, Artificial Sequence
  Description of Artificial Sequence: Synthetic oligonucleotide
  Antisense strand to SEQ ID NO: 1490330
guucaacucaauaauugag

SEQ ID NO: 1490332 - RNA, 19 nt, Artificial Sequence
  Description of Artificial Sequence: Synthetic oligonucleotide
  Sense strand starting at position 3975 of SEQ ID NO: 1244460
uacgucugaccuuguugaa

SEQ ID NO: 1490333 - RNA, 19 nt, Artificial Sequence
  Description of Artificial Sequence: Synthetic oligonucleotide
  Antisense strand to SEQ ID NO: 1490332
uucaacaaggucagacgua

SEQ ID NO: 1490334 - RNA, 19 nt, Artificial Sequence
  Description of Artificial Sequence: Synthetic oligonucleotide
  Sense strand starting at position 166 of SEQ ID NO: 1244461
aucuguggaugguugauaa

SEQ ID NO: 1490335 - RNA, 19 nt, Artificial Sequence
  Description of Artificial Sequence: Synthetic oligonucleotide
  Antisense strand to SEQ ID NO: 1490334
uuaucaaccauccacagau

SEQ ID NO: 1490336 - RNA, 19 nt, Artificial Sequence
  Description of Artificial Sequence: Synthetic oligonucleotide
  Sense strand starting at position 182 of SEQ ID NO: 1244461
uaaauuagucuguauguug

SEQ ID NO: 1490337 - RNA, 19 nt, Artificial Sequence
  Description of Artificial Sequence: Synthetic oligonucleotide
  Antisense strand to SEQ ID NO: 1490336
caacauacagacuaauuua

SEQ ID NO: 1490338 - RNA, 19 nt, Artificial Sequence
  Description of Artificial Sequence: Synthetic oligonucleotide
  Sense strand starting at position 194 of SEQ ID NO: 1244461
uauguugguggaugagaga

SEQ ID NO: 1490339 - RNA, 19 nt, Artificial Sequence
  Description of Artificial Sequence: Synthetic oligonucleotide
  Antisense strand to SEQ ID NO: 1490338
ucucucauccaccaacaua

SEQ ID NO: 1490340 - RNA, 19 nt, Artificial Sequence
  Description of Artificial Sequence: Synthetic oligonucleotide
  Sense strand starting at position 442 of SEQ ID NO: 1244461
uuuaauugaugaguuaggu

SEQ ID NO: 1490341 - RNA, 19 nt, Artificial Sequence
  Description of Artificial Sequence: Synthetic oligonucleotide
  Antisense strand to SEQ ID NO: 1490340
accuaacucaucaauuaaa

SEQ ID NO: 1490342 - RNA, 19 nt, Artificial Sequence
  Description of Artificial Sequence: Synthetic oligonucleotide
  Sense strand starting at position 539 of SEQ ID NO: 1244461
uguacacugucauuaugaa

SEQ ID NO: 1490343 - RNA, 19 nt, Artificial Sequence
  Description of Artificial Sequence: Synthetic oligonucleotide
  Antisense strand to SEQ ID NO: 1490342
uucauaaugacaguguaca

SEQ ID NO: 1490344 - RNA, 19 nt, Artificial Sequence
  Description of Artificial Sequence: Synthetic oligonucleotide
  Sense strand starting at position 540 of SEQ ID NO: 1244461
guacacugucauuaugaau

SEQ ID NO: 1490345 - RNA, 19 nt, Artificial Sequence
  Description of Artificial Sequence: Synthetic oligonucleotide
  Antisense strand to SEQ ID NO: 1490344
auucauaaugacaguguac

SEQ ID NO: 1490346 - RNA, 19 nt, Artificial Sequence
  Description of Artificial Sequence: Synthetic oligonucleotide
  Sense strand starting at position 630 of SEQ ID NO: 1244461
gcuggaucagcugauacaa

SEQ ID NO: 1490347 - RNA, 19 nt, Artificial Sequence
  Description of Artificial Sequence: Synthetic oligonucleotide
  Antisense strand to SEQ ID NO: 1490346
uuguaucagcugauccagc

SEQ ID NO: 1490348 - RNA, 19 nt, Artificial Sequence
  Description of Artificial Sequence: Synthetic oligonucleotide
  Sense strand starting at position 732 of SEQ ID NO: 1244461
ggaugugugcuagaugaga

SEQ ID NO: 1490349 - RNA, 19 nt, Artificial Sequence
  Description of Artificial Sequence: Synthetic oligonucleotide
  Antisense strand to SEQ ID NO: 1490348
ucucaucuagcacacaucc

SEQ ID NO: 1490350 - RNA, 19 nt, Artificial Sequence
  Description of Artificial Sequence: Synthetic oligonucleotide
  Sense strand starting at position 749 of SEQ ID NO: 1244461
gagacacuucuagguuuaa

SEQ ID NO: 1490351 - RNA, 19 nt, Artificial Sequence
  Description of Artificial Sequence: Synthetic oligonucleotide
  Antisense strand to SEQ ID NO: 1490350
uuaaaccuagaagugucuc

SEQ ID NO: 1490352 - RNA, 19 nt, Artificial Sequence
  Description of Artificial Sequence: Synthetic oligonucleotide
  Sense strand starting at position 750 of SEQ ID NO: 1244461
agacacuucuagguuuaaa

SEQ ID NO: 1490353 - RNA, 19 nt, Artificial Sequence
  Description of Artificial Sequence: Synthetic oligonucleotide
  Antisense strand to SEQ ID NO: 1490352
uuuaaaccuagaagugucu

SEQ ID NO: 1490354 - RNA, 19 nt, Artificial Sequence
  Description of Artificial Sequence: Synthetic oligonucleotide
  Sense strand starting at position 762 of SEQ ID NO: 1244461
guuuaaacuggauauaguc

SEQ ID NO: 1490355 - RNA, 19 nt, Artificial Sequence
  Description of Artificial Sequence: Synthetic oligonucleotide
  Antisense strand to SEQ ID NO: 1490354
gacuauauccaguuuaaac

SEQ ID NO: 1490356 - RNA, 19 nt, Artificial Sequence
  Description of Artificial Sequence: Synthetic oligonucleotide
  Sense strand starting at position 807 of SEQ ID NO: 1244461
agucaaguacauugaagaa

SEQ ID NO: 1490357 - RNA, 19 nt, Artificial Sequence
  Description of Artificial Sequence: Synthetic oligonucleotide
  Antisense strand to SEQ ID NO: 1490356
uucuucaauguacuugacu

SEQ ID NO: 1490358 - RNA, 19 nt, Artificial Sequence
  Description of Artificial Sequence: Synthetic oligonucleotide
  Sense strand starting at position 1011 of SEQ ID NO: 1244461
ggugaaggauauuccuagu

SEQ ID NO: 1490359 - RNA, 19 nt, Artificial Sequence
  Description of Artificial Sequence: Synthetic oligonucleotide
  Antisense strand to SEQ ID NO: 1490358
acuaggaauauccuucacc

SEQ ID NO: 1490360 - RNA, 19 nt, Artificial Sequence
  Description of Artificial Sequence: Synthetic oligonucleotide
  Sense strand starting at position 1073 of SEQ ID NO: 1244461
ucuuaaaguguuuaucuag

SEQ ID NO: 1490361 - RNA, 19 nt, Artificial Sequence
  Description of Artificial Sequence: Synthetic oligonucleotide
  Antisense strand to SEQ ID NO: 1490360
cuagauaaacacuuuaaga

SEQ ID NO: 1490362 - RNA, 19 nt, Artificial Sequence
  Description of Artificial Sequence: Synthetic oligonucleotide
  Sense strand starting at position 1076 of SEQ ID NO: 1244461
uaaaguguuuaucuaggag

SEQ ID NO: 1490363 - RNA, 19 nt, Artificial Sequence
  Description of Artificial Sequence: Synthetic oligonucleotide
  Antisense strand to SEQ ID NO: 1490362
cuccuagauaaacacuuua

SEQ ID NO: 1490364 - RNA, 19 nt, Artificial Sequence
  Description of Artificial Sequence: Synthetic oligonucleotide
  Sense strand starting at position 1215 of SEQ ID NO: 1244461
gggcuuuagguauaccaua

SEQ ID NO: 1490365 - RNA, 19 nt, Artificial Sequence
  Description of Artificial Sequence: Synthetic oligonucleotide
  Antisense strand to SEQ ID NO: 1490364
uaugguauaccuaaagccc

SEQ ID NO: 1490366 - RNA, 19 nt, Artificial Sequence
  Description of Artificial Sequence: Synthetic oligonucleotide
  Sense strand starting at position 1314 of SEQ ID NO: 1244461
ggguauucugaggauggcu

SEQ ID NO: 1490367 - RNA, 19 nt, Artificial Sequence
  Description of Artificial Sequence: Synthetic oligonucleotide
  Antisense strand to SEQ ID NO: 1490366
agccauccucagaauaccc

SEQ ID NO: 1490368 - RNA, 19 nt, Artificial Sequence
  Description of Artificial Sequence: Synthetic oligonucleotide
  Sense strand starting at position 1322 of SEQ ID NO: 1244461
ugaggauggcucugauaau

SEQ ID NO: 1490369 - RNA, 19 nt, Artificial Sequence
  Description of Artificial Sequence: Synthetic oligonucleotide
  Antisense strand to SEQ ID NO: 1490368
auuaucagagccauccuca

SEQ ID NO: 1490370 - RNA, 19 nt, Artificial Sequence
  Description of Artificial Sequence: Synthetic oligonucleotide
  Sense strand starting at position 1415 of SEQ ID NO: 1244461
gauuaaucugaauguugga

SEQ ID NO: 1490371 - RNA, 19 nt, Artificial Sequence
  Description of Artificial Sequence: Synthetic oligonucleotide
  Antisense strand to SEQ ID NO: 1490370
uccaacauucagauuaauc

SEQ ID NO: 1490372 - RNA, 19 nt, Artificial Sequence
  Description of Artificial Sequence: Synthetic oligonucleotide
  Sense strand starting at position 2219 of SEQ ID NO: 1244461
aaggaauaauguguaauuc

SEQ ID NO: 1490373 - RNA, 19 nt, Artificial Sequence
  Description of Artificial Sequence: Synthetic oligonucleotide
  Antisense strand to SEQ ID NO: 1490372
gaauuacacauuauuccuu

SEQ ID NO: 1490374 - RNA, 19 nt, Artificial Sequence
  Description of Artificial Sequence: Synthetic oligonucleotide
  Sense strand starting at position 2327 of SEQ ID NO: 1244461
agauacaugcaguauaagu

SEQ ID NO: 1490375 - RNA, 19 nt, Artificial Sequence
  Description of Artificial Sequence: Synthetic oligonucleotide
  Antisense strand to SEQ ID NO: 1490374
acuuauacugcauguaucu

SEQ ID NO: 1490376 - RNA, 19 nt, Artificial Sequence
  Description of Artificial Sequence: Synthetic oligonucleotide
  Sense strand starting at position 2404 of SEQ ID NO: 1244461
uugauaugaugaucuaucu

SEQ ID NO: 1490377 - RNA, 19 nt, Artificial Sequence
  Description of Artificial Sequence: Synthetic oligonucleotide
  Antisense strand to SEQ ID NO: 1490376
agauagaucaucauaucaa

SEQ ID NO: 1490378 - RNA, 19 nt, Artificial Sequence
  Description of Artificial Sequence: Synthetic oligonucleotide
  Sense strand starting at position 2550 of SEQ ID NO: 1244461
uccagaguuccuuaagacu

SEQ ID NO: 1490379 - RNA, 19 nt, Artificial Sequence
  Description of Artificial Sequence: Synthetic oligonucleotide
  Antisense strand to SEQ ID NO: 1490378
agucuuaaggaacucugga

SEQ ID NO: 1490380 - RNA, 19 nt, Artificial Sequence
  Description of Artificial Sequence: Synthetic oligonucleotide
  Sense strand starting at position 2660 of SEQ ID NO: 1244461
agaaauguugccuauuauu

SEQ ID NO: 1490381 - RNA, 19 nt, Artificial Sequence
  Description of Artificial Sequence: Synthetic oligonucleotide
  Antisense strand to SEQ ID NO: 1490380
aauaauaggcaacauuucu

SEQ ID NO: 1490382 - RNA, 19 nt, Artificial Sequence
  Description of Artificial Sequence: Synthetic oligonucleotide
  Sense strand starting at position 2896 of SEQ ID NO: 1244461
auugaaaguuuacuggaua

SEQ ID NO: 1490383 - RNA, 19 nt, Artificial Sequence
  Description of Artificial Sequence: Synthetic oligonucleotide
  Antisense strand to SEQ ID NO: 1490382
uauccaguaaacuuucaau

SEQ ID NO: 1490384 - RNA, 19 nt, Artificial Sequence
  Description of Artificial Sequence: Synthetic oligonucleotide
  Sense strand starting at position 3060 of SEQ ID NO: 1244461
gauaguaauguuggaauga

SEQ ID NO: 1490385 - RNA, 19 nt, Artificial Sequence
  Description of Artificial Sequence: Synthetic oligonucleotide
  Antisense strand to SEQ ID NO: 1490384
ucauuccaacauuacuauc

SEQ ID NO: 1490386 - RNA, 19 nt, Artificial Sequence
  Description of Artificial Sequence: Synthetic oligonucleotide
  Sense strand starting at position 3218 of SEQ ID NO: 1244461
ggcacauugagauaacugu

SEQ ID NO: 1490387 - RNA, 19 nt, Artificial Sequence
  Description of Artificial Sequence: Synthetic oligonucleotide
  Antisense strand to SEQ ID NO: 1490386
acaguuaucucaaugugcc

SEQ ID NO: 1490388 - RNA, 19 nt, Artificial Sequence
  Description of Artificial Sequence: Synthetic oligonucleotide
  Sense strand starting at position 3224 of SEQ ID NO: 1244461
uugagauaacuguguaauu

SEQ ID NO: 1490389 - RNA, 19 nt, Artificial Sequence
  Description of Artificial Sequence: Synthetic oligonucleotide
  Antisense strand to SEQ ID NO: 1490388
aauuacacaguuaucucaa

SEQ ID NO: 1490390 - RNA, 19 nt, Artificial Sequence
  Description of Artificial Sequence: Synthetic oligonucleotide
  Sense strand starting at position 3225 of SEQ ID NO: 1244461
ugagauaacuguguaauua

SEQ ID NO: 1490391 - RNA, 19 nt, Artificial Sequence
  Description of Artificial Sequence: Synthetic oligonucleotide
  Antisense strand to SEQ ID NO: 1490390
uaauuacacaguuaucuca

SEQ ID NO: 1490392 - RNA, 19 nt, Artificial Sequence
  Description of Artificial Sequence: Synthetic oligonucleotide
  Sense strand starting at position 3238 of SEQ ID NO: 1244461
uaauuaauuucggaggacu

SEQ ID NO: 1490393 - RNA, 19 nt, Artificial Sequence
  Description of Artificial Sequence: Synthetic oligonucleotide
  Antisense strand to SEQ ID NO: 1490392
aguccuccgaaauuaauua

SEQ ID NO: 1490394 - RNA, 19 nt, Artificial Sequence
  Description of Artificial Sequence: Synthetic oligonucleotide
  Sense strand starting at position 3249 of SEQ ID NO: 1244461
ggaggacuaguucgaacaa

SEQ ID NO: 1490395 - RNA, 19 nt, Artificial Sequence
  Description of Artificial Sequence: Synthetic oligonucleotide
  Antisense strand to SEQ ID NO: 1490394
uuguucgaacuaguccucc

SEQ ID NO: 1490396 - RNA, 19 nt, Artificial Sequence
  Description of Artificial Sequence: Synthetic oligonucleotide
  Sense strand starting at position 3343 of SEQ ID NO: 1244461
aagccuaauguguauagaa

SEQ ID NO: 1490397 - RNA, 19 nt, Artificial Sequence
  Description of Artificial Sequence: Synthetic oligonucleotide
  Antisense strand to SEQ ID NO: 1490396
uucuauacacauuaggcuu

SEQ ID NO: 1490398 - RNA, 19 nt, Artificial Sequence
  Description of Artificial Sequence: Synthetic oligonucleotide
  Sense strand starting at position 3345 of SEQ ID NO: 1244461
gccuaauguguauagaaua

SEQ ID NO: 1490399 - RNA, 19 nt, Artificial Sequence
  Description of Artificial Sequence: Synthetic oligonucleotide
  Antisense strand to SEQ ID NO: 1490398
uauucuauacacauuaggc

SEQ ID NO: 1490400 - RNA, 19 nt, Artificial Sequence
  Description of Artificial Sequence: Synthetic oligonucleotide
  Sense strand starting at position 3460 of SEQ ID NO: 1244461
agaguaagaucucuuccaa

SEQ ID NO: 1490401 - RNA, 19 nt, Artificial Sequence
  Description of Artificial Sequence: Synthetic oligonucleotide
  Antisense strand to SEQ ID NO: 1490400
uuggaagagaucuuacucu

SEQ ID NO: 1490402 - RNA, 19 nt, Artificial Sequence
  Description of Artificial Sequence: Synthetic oligonucleotide
  Sense strand starting at position 3510 of SEQ ID NO: 1244461
cuaagcaaauagguaaaua

SEQ ID NO: 1490403 - RNA, 19 nt, Artificial Sequence
  Description of Artificial Sequence: Synthetic oligonucleotide
  Antisense strand to SEQ ID NO: 1490402
uauuuaccuauuugcuuag

SEQ ID NO: 1490404 - RNA, 19 nt, Artificial Sequence
  Description of Artificial Sequence: Synthetic oligonucleotide
  Sense strand starting at position 3550 of SEQ ID NO: 1244461
ggagacuaguacccugaau

SEQ ID NO: 1490405 - RNA, 19 nt, Artificial Sequence
  Description of Artificial Sequence: Synthetic oligonucleotide
  Antisense strand to SEQ ID NO: 1490404
auucaggguacuagucucc

SEQ ID NO: 1490406 - RNA, 19 nt, Artificial Sequence
  Description of Artificial Sequence: Synthetic oligonucleotide
  Sense strand starting at position 3552 of SEQ ID NO: 1244461
agacuaguacccugaauug

SEQ ID NO: 1490407 - RNA, 19 nt, Artificial Sequence
  Description of Artificial Sequence: Synthetic oligonucleotide
  Antisense strand to SEQ ID NO: 1490406
caauucaggguacuagucu

SEQ ID NO: 1490408 - RNA, 19 nt, Artificial Sequence
  Description of Artificial Sequence: Synthetic oligonucleotide
  Sense strand starting at position 3848 of SEQ ID NO: 1244461
auggaaauccugcagucaa

SEQ ID NO: 1490409 - RNA, 19 nt, Artificial Sequence
  Description of Artificial Sequence: Synthetic oligonucleotide
  Antisense strand to SEQ ID NO: 1490408
uugacugcaggauuuccau

SEQ ID NO: 1490410 - RNA, 19 nt, Artificial Sequence
  Description of Artificial Sequence: Synthetic oligonucleotide
  Sense strand starting at position 3895 of SEQ ID NO: 1244461
auuagucaggcugaauagu

SEQ ID NO: 1490411 - RNA, 19 nt, Artificial Sequence
  Description of Artificial Sequence: Synthetic oligonucleotide
  Antisense strand to SEQ ID NO: 1490410
acuauucagccugacuaau

SEQ ID NO: 1490412 - RNA, 19 nt, Artificial Sequence
  Description of Artificial Sequence: Synthetic oligonucleotide
  Sense strand starting at position 3912 of SEQ ID NO: 1244461
guaguauugaacuagcaga

SEQ ID NO: 1490413 - RNA, 19 nt, Artificial Sequence
  Description of Artificial Sequence: Synthetic oligonucleotide
  Antisense strand to SEQ ID NO: 1490412
ucugcuaguucaauacuac

SEQ ID NO: 1490414 - RNA, 19 nt, Artificial Sequence
  Description of Artificial Sequence: Synthetic oligonucleotide
  Sense strand starting at position 314 of SEQ ID NO: 1244462
ugcauuuauguuugagagu

SEQ ID NO: 1490415 - RNA, 19 nt, Artificial Sequence
  Description of Artificial Sequence: Synthetic oligonucleotide
  Antisense strand to SEQ ID NO: 1490414
acucucaaacauaaaugca

SEQ ID NO: 1490416 - RNA, 19 nt, Artificial Sequence
  Description of Artificial Sequence: Synthetic oligonucleotide
  Sense strand starting at position 401 of SEQ ID NO: 1244462
auaggauggucuuuccaag

SEQ ID NO: 1490417 - RNA, 19 nt, Artificial Sequence
  Description of Artificial Sequence: Synthetic oligonucleotide
  Antisense strand to SEQ ID NO: 1490416
cuuggaaagaccauccuau

SEQ ID NO: 1490418 - RNA, 19 nt, Artificial Sequence
  Description of Artificial Sequence: Synthetic oligonucleotide
  Sense strand starting at position 424 of SEQ ID NO: 1244462
aggucugacuuccuacaga

SEQ ID NO: 1490419 - RNA, 19 nt, Artificial Sequence
  Description of Artificial Sequence: Synthetic oligonucleotide
  Antisense strand to SEQ ID NO: 1490418
ucuguaggaagucagaccu

SEQ ID NO: 1490420 - RNA, 19 nt, Artificial Sequence
  Description of Artificial Sequence: Synthetic oligonucleotide
  Sense strand starting at position 515 of SEQ ID NO: 1244462
agaggaaucuuguuggcau

SEQ ID NO: 1490421 - RNA, 19 nt, Artificial Sequence
  Description of Artificial Sequence: Synthetic oligonucleotide
  Antisense strand to SEQ ID NO: 1490420
augccaacaagauuccucu

SEQ ID NO: 1490422 - RNA, 19 nt, Artificial Sequence
  Description of Artificial Sequence: Synthetic oligonucleotide
  Sense strand starting at position 526 of SEQ ID NO: 1244462
guuggcauuucugcaugaa

SEQ ID NO: 1490423 - RNA, 19 nt, Artificial Sequence
  Description of Artificial Sequence: Synthetic oligonucleotide
  Antisense strand to SEQ ID NO: 1490422
uucaugcagaaaugccaac

SEQ ID NO: 1490424 - RNA, 19 nt, Artificial Sequence
  Description of Artificial Sequence: Synthetic oligonucleotide
  Sense strand starting at position 563 of SEQ ID NO: 1244462
gagugacuauaugucaaca

SEQ ID NO: 1490425 - RNA, 19 nt, Artificial Sequence
  Description of Artificial Sequence: Synthetic oligonucleotide
  Antisense strand to SEQ ID NO: 1490424
uguugacauauagucacuc

SEQ ID NO: 1490426 - RNA, 19 nt, Artificial Sequence
  Description of Artificial Sequence: Synthetic oligonucleotide
  Sense strand starting at position 663 of SEQ ID NO: 1244462
aagugucuucucuaaagag

SEQ ID NO: 1490427 - RNA, 19 nt, Artificial Sequence
  Description of Artificial Sequence: Synthetic oligonucleotide
  Antisense strand to SEQ ID NO: 1490426
cucuuuagagaagacacuu

SEQ ID NO: 1490428 - RNA, 19 nt, Artificial Sequence
  Description of Artificial Sequence: Synthetic oligonucleotide
  Sense strand starting at position 672 of SEQ ID NO: 1244462
cucuaaagagcuugaagau

SEQ ID NO: 1490429 - RNA, 19 nt, Artificial Sequence
  Description of Artificial Sequence: Synthetic oligonucleotide
  Antisense strand to SEQ ID NO: 1490428
aucuucaagcucuuuagag

SEQ ID NO: 1490430 - RNA, 19 nt, Artificial Sequence
  Description of Artificial Sequence: Synthetic oligonucleotide
  Sense strand starting at position 710 of SEQ ID NO: 1244462
ccaaaccucugggucauaa

SEQ ID NO: 1490431 - RNA, 19 nt, Artificial Sequence
  Description of Artificial Sequence: Synthetic oligonucleotide
  Antisense strand to SEQ ID NO: 1490430
uuaugacccagagguuugg

SEQ ID NO: 1490432 - RNA, 19 nt, Artificial Sequence
  Description of Artificial Sequence: Synthetic oligonucleotide
  Sense strand starting at position 712 of SEQ ID NO: 1244462
aaaccucugggucauaagu

SEQ ID NO: 1490433 - RNA, 19 nt, Artificial Sequence
  Description of Artificial Sequence: Synthetic oligonucleotide
  Antisense strand to SEQ ID NO: 1490432
acuuaugacccagagguuu

SEQ ID NO: 1490434 - RNA, 19 nt, Artificial Sequence
  Description of Artificial Sequence: Synthetic oligonucleotide
  Sense strand starting at position 808 of SEQ ID NO: 1244462
uaugaucaagcagguuuaa

SEQ ID NO: 1490435 - RNA, 19 nt, Artificial Sequence
  Description of Artificial Sequence: Synthetic oligonucleotide
  Antisense strand to SEQ ID NO: 1490434
uuaaaccugcuugaucaua

SEQ ID NO: 1490436 - RNA, 19 nt, Artificial Sequence
  Description of Artificial Sequence: Synthetic oligonucleotide
  Sense strand starting at position 849 of SEQ ID NO: 1244462
gguaguaguguuagcauga

SEQ ID NO: 1490437 - RNA, 19 nt, Artificial Sequence
  Description of Artificial Sequence: Synthetic oligonucleotide
  Antisense strand to SEQ ID NO: 1490436
ucaugcuaacacuacuacc

SEQ ID NO: 1490438 - RNA, 19 nt, Artificial Sequence
  Description of Artificial Sequence: Synthetic oligonucleotide
  Sense strand starting at position 854 of SEQ ID NO: 1244462
uaguguuagcaugacauua

SEQ ID NO: 1490439 - RNA, 19 nt, Artificial Sequence
  Description of Artificial Sequence: Synthetic oligonucleotide
  Antisense strand to SEQ ID NO: 1490438
uaaugucaugcuaacacua

SEQ ID NO: 1490440 - RNA, 19 nt, Artificial Sequence
  Description of Artificial Sequence: Synthetic oligonucleotide
  Sense strand starting at position 939 of SEQ ID NO: 1244462
gguagauaugcucauccug

SEQ ID NO: 1490441 - RNA, 19 nt, Artificial Sequence
  Description of Artificial Sequence: Synthetic oligonucleotide
  Antisense strand to SEQ ID NO: 1490440
caggaugagcauaucuacc

SEQ ID NO: 1490442 - RNA, 19 nt, Artificial Sequence
  Description of Artificial Sequence: Synthetic oligonucleotide
  Sense strand starting at position 941 of SEQ ID NO: 1244462
uagauaugcucauccugag

SEQ ID NO: 1490443 - RNA, 19 nt, Artificial Sequence
  Description of Artificial Sequence: Synthetic oligonucleotide
  Antisense strand to SEQ ID NO: 1490442
cucaggaugagcauaucua

SEQ ID NO: 1490444 - RNA, 19 nt, Artificial Sequence
  Description of Artificial Sequence: Synthetic oligonucleotide
  Sense strand starting at position 1006 of SEQ ID NO: 1244462
auguguggagaaggauauu

SEQ ID NO: 1490445 - RNA, 19 nt, Artificial Sequence
  Description of Artificial Sequence: Synthetic oligonucleotide
  Antisense strand to SEQ ID NO: 1490444
aauauccuucuccacacau

SEQ ID NO: 1490446 - RNA, 19 nt, Artificial Sequence
  Description of Artificial Sequence: Synthetic oligonucleotide
  Sense strand starting at position 1331 of SEQ ID NO: 1244462
uucugacaauacguacaua

SEQ ID NO: 1490447 - RNA, 19 nt, Artificial Sequence
  Description of Artificial Sequence: Synthetic oligonucleotide
  Antisense strand to SEQ ID NO: 1490446
uauguacguauugucagaa

SEQ ID NO: 1490448 - RNA, 19 nt, Artificial Sequence
  Description of Artificial Sequence: Synthetic oligonucleotide
  Sense strand starting at position 1415 of SEQ ID NO: 1244462
gaaugauguggguguugga

SEQ ID NO: 1490449 - RNA, 19 nt, Artificial Sequence
  Description of Artificial Sequence: Synthetic oligonucleotide
  Antisense strand to SEQ ID NO: 1490448
uccaacacccacaucauuc

SEQ ID NO: 1490450 - RNA, 19 nt, Artificial Sequence
  Description of Artificial Sequence: Synthetic oligonucleotide
  Sense strand starting at position 1982 of SEQ ID NO: 1244462
ucugguuaucuccauccau

SEQ ID NO: 1490451 - RNA, 19 nt, Artificial Sequence
  Description of Artificial Sequence: Synthetic oligonucleotide
  Antisense strand to SEQ ID NO: 1490450
auggauggagauaaccaga

SEQ ID NO: 1490452 - RNA, 19 nt, Artificial Sequence
  Description of Artificial Sequence: Synthetic oligonucleotide
  Sense strand starting at position 2143 of SEQ ID NO: 1244462
aggucauuauaggcacaaa

SEQ ID NO: 1490453 - RNA, 19 nt, Artificial Sequence
  Description of Artificial Sequence: Synthetic oligonucleotide
  Antisense strand to SEQ ID NO: 1490452
uuugugccuauaaugaccu

SEQ ID NO: 1490454 - RNA, 19 nt, Artificial Sequence
  Description of Artificial Sequence: Synthetic oligonucleotide
  Sense strand starting at position 2268 of SEQ ID NO: 1244462
uccaauagucuugaagugu

SEQ ID NO: 1490455 - RNA, 19 nt, Artificial Sequence
  Description of Artificial Sequence: Synthetic oligonucleotide
  Antisense strand to SEQ ID NO: 1490454
acacuucaagacuauugga

SEQ ID NO: 1490456 - RNA, 19 nt, Artificial Sequence
  Description of Artificial Sequence: Synthetic oligonucleotide
  Sense strand starting at position 2276 of SEQ ID NO: 1244462
ucuugaaguguuuaaaguu

SEQ ID NO: 1490457 - RNA, 19 nt, Artificial Sequence
  Description of Artificial Sequence: Synthetic oligonucleotide
  Antisense strand to SEQ ID NO: 1490456
aacuuuaaacacuucaaga

SEQ ID NO: 1490458 - RNA, 19 nt, Artificial Sequence
  Description of Artificial Sequence: Synthetic oligonucleotide
  Sense strand starting at position 2508 of SEQ ID NO: 1244462
ugauuagucagugaaguga

SEQ ID NO: 1490459 - RNA, 19 nt, Artificial Sequence
  Description of Artificial Sequence: Synthetic oligonucleotide
  Antisense strand to SEQ ID NO: 1490458
ucacuucacugacuaauca

SEQ ID NO: 1490460 - RNA, 19 nt, Artificial Sequence
  Description of Artificial Sequence: Synthetic oligonucleotide
  Sense strand starting at position 2682 of SEQ ID NO: 1244462
uugagagaugcugauguuu

SEQ ID NO: 1490461 - RNA, 19 nt, Artificial Sequence
  Description of Artificial Sequence: Synthetic oligonucleotide
  Antisense strand to SEQ ID NO: 1490460
aaacaucagcaucucucaa

SEQ ID NO: 1490462 - RNA, 19 nt, Artificial Sequence
  Description of Artificial Sequence: Synthetic oligonucleotide
  Sense strand starting at position 2706 of SEQ ID NO: 1244462
ucuauugaucccgaacucu

SEQ ID NO: 1490463 - RNA, 19 nt, Artificial Sequence
  Description of Artificial Sequence: Synthetic oligonucleotide
  Antisense strand to SEQ ID NO: 1490462
agaguucgggaucaauaga

SEQ ID NO: 1490464 - RNA, 19 nt, Artificial Sequence
  Description of Artificial Sequence: Synthetic oligonucleotide
  Sense strand starting at position 2778 of SEQ ID NO: 1244462
acuuguguucuuuaagacu

SEQ ID NO: 1490465 - RNA, 19 nt, Artificial Sequence
  Description of Artificial Sequence: Synthetic oligonucleotide
  Antisense strand to SEQ ID NO: 1490464
agucuuaaagaacacaagu

SEQ ID NO: 1490466 - RNA, 19 nt, Artificial Sequence
  Description of Artificial Sequence: Synthetic oligonucleotide
  Sense strand starting at position 2994 of SEQ ID NO: 1244462
ucuauugaggcauaaagua

SEQ ID NO: 1490467 - RNA, 19 nt, Artificial Sequence
  Description of Artificial Sequence: Synthetic oligonucleotide
  Antisense strand to SEQ ID NO: 1490466
uacuuuaugccucaauaga

SEQ ID NO: 1490468 - RNA, 19 nt, Artificial Sequence
  Description of Artificial Sequence: Synthetic oligonucleotide
  Sense strand starting at position 3210 of SEQ ID NO: 1244462
aggagacacuugcucuauu

SEQ ID NO: 1490469 - RNA, 19 nt, Artificial Sequence
  Description of Artificial Sequence: Synthetic oligonucleotide
  Antisense strand to SEQ ID NO: 1490468
aauagagcaagugucuccu

SEQ ID NO: 1490470 - RNA, 19 nt, Artificial Sequence
  Description of Artificial Sequence: Synthetic oligonucleotide
  Sense strand starting at position 3211 of SEQ ID NO: 1244462
ggagacacuugcucuauua

SEQ ID NO: 1490471 - RNA, 19 nt, Artificial Sequence
  Description of Artificial Sequence: Synthetic oligonucleotide
  Antisense strand to SEQ ID NO: 1490470
uaauagagcaagugucucc

SEQ ID NO: 1490472 - RNA, 19 nt, Artificial Sequence
  Description of Artificial Sequence: Synthetic oligonucleotide
  Sense strand starting at position 3213 of SEQ ID NO: 1244462
agacacuugcucuauuaag

SEQ ID NO: 1490473 - RNA, 19 nt, Artificial Sequence
  Description of Artificial Sequence: Synthetic oligonucleotide
  Antisense strand to SEQ ID NO: 1490472
cuuaauagagcaagugucu

SEQ ID NO: 1490474 - RNA, 19 nt, Artificial Sequence
  Description of Artificial Sequence: Synthetic oligonucleotide
  Sense strand starting at position 3350 of SEQ ID NO: 1244462
ugcauuaugcaauaaauga

SEQ ID NO: 1490475 - RNA, 19 nt, Artificial Sequence
  Description of Artificial Sequence: Synthetic oligonucleotide
  Antisense strand to SEQ ID NO: 1490474
ucauuuauugcauaaugca

SEQ ID NO: 1490476 - RNA, 19 nt, Artificial Sequence
  Description of Artificial Sequence: Synthetic oligonucleotide
  Sense strand starting at position 3599 of SEQ ID NO: 1244462
guuagauaaccauggcuaa

SEQ ID NO: 1490477 - RNA, 19 nt, Artificial Sequence
  Description of Artificial Sequence: Synthetic oligonucleotide
  Antisense strand to SEQ ID NO: 1490476
uuagccaugguuaucuaac

SEQ ID NO: 1490478 - RNA, 19 nt, Artificial Sequence
  Description of Artificial Sequence: Synthetic oligonucleotide
  Sense strand starting at position 3600 of SEQ ID NO: 1244462
uuagauaaccauggcuaau

SEQ ID NO: 1490479 - RNA, 19 nt, Artificial Sequence
  Description of Artificial Sequence: Synthetic oligonucleotide
  Antisense strand to SEQ ID NO: 1490478
auuagccaugguuaucuaa

SEQ ID NO: 1490480 - RNA, 19 nt, Artificial Sequence
  Description of Artificial Sequence: Synthetic oligonucleotide
  Sense strand starting at position 3722 of SEQ ID NO: 1244462
agggaaaggucauucuugu

SEQ ID NO: 1490481 - RNA, 19 nt, Artificial Sequence
  Description of Artificial Sequence: Synthetic oligonucleotide
  Antisense strand to SEQ ID NO: 1490480
acaagaaugaccuuucccu

SEQ ID NO: 1490482 - RNA, 19 nt, Artificial Sequence
  Description of Artificial Sequence: Synthetic oligonucleotide
  Sense strand starting at position 3732 of SEQ ID NO: 1244462
cauucuuguguuuaaggaa

SEQ ID NO: 1490483 - RNA, 19 nt, Artificial Sequence
  Description of Artificial Sequence: Synthetic oligonucleotide
  Antisense strand to SEQ ID NO: 1490482
uuccuuaaacacaagaaug

SEQ ID NO: 1490484 - RNA, 19 nt, Artificial Sequence
  Description of Artificial Sequence: Synthetic oligonucleotide
  Sense strand starting at position 3808 of SEQ ID NO: 1244462
ugcaauggccaguaaugaa

SEQ ID NO: 1490485 - RNA, 19 nt, Artificial Sequence
  Description of Artificial Sequence: Synthetic oligonucleotide
  Antisense strand to SEQ ID NO: 1490484
uucauuacuggccauugca

SEQ ID NO: 1490486 - RNA, 19 nt, Artificial Sequence
  Description of Artificial Sequence: Synthetic oligonucleotide
  Sense strand starting at position 3842 of SEQ ID NO: 1244462
ggcugugcauauuuagcaa

SEQ ID NO: 1490487 - RNA, 19 nt, Artificial Sequence
  Description of Artificial Sequence: Synthetic oligonucleotide
  Antisense strand to SEQ ID NO: 1490486
uugcuaaauaugcacagcc

SEQ ID NO: 1490488 - RNA, 19 nt, Artificial Sequence
  Description of Artificial Sequence: Synthetic oligonucleotide
  Sense strand starting at position 3845 of SEQ ID NO: 1244462
ugugcauauuuagcaacua

SEQ ID NO: 1490489 - RNA, 19 nt, Artificial Sequence
  Description of Artificial Sequence: Synthetic oligonucleotide
  Antisense strand to SEQ ID NO: 1490488
uaguugcuaaauaugcaca

SEQ ID NO: 1490490 - RNA, 19 nt, Artificial Sequence
  Description of Artificial Sequence: Synthetic oligonucleotide
  Sense strand starting at position 3941 of SEQ ID NO: 1244462
agugucacucaagauacau

SEQ ID NO: 1490491 - RNA, 19 nt, Artificial Sequence
  Description of Artificial Sequence: Synthetic oligonucleotide
  Antisense strand to SEQ ID NO: 1490490
auguaucuugagugacacu

SEQ ID NO: 1490492 - RNA, 19 nt, Artificial Sequence
  Description of Artificial Sequence: Synthetic oligonucleotide
  Sense strand starting at position 3956 of SEQ ID NO: 1244462
acauuaugugaauagccuu

SEQ ID NO: 1490493 - RNA, 19 nt, Artificial Sequence
  Description of Artificial Sequence: Synthetic oligonucleotide
  Antisense strand to SEQ ID NO: 1490492
aaggcuauucacauaaugu

SEQ ID NO: 1490494 - RNA, 19 nt, Artificial Sequence
  Description of Artificial Sequence: Synthetic oligonucleotide
  Sense strand starting at position 25 of SEQ ID NO: 1244463
agguuaagcuguuuagauc

SEQ ID NO: 1490495 - RNA, 19 nt, Artificial Sequence
  Description of Artificial Sequence: Synthetic oligonucleotide
  Antisense strand to SEQ ID NO: 1490494
gaucuaaacagcuuaaccu

SEQ ID NO: 1490496 - RNA, 19 nt, Artificial Sequence
  Description of Artificial Sequence: Synthetic oligonucleotide
  Sense strand starting at position 26 of SEQ ID NO: 1244463
gguuaagcuguuuagaucu

SEQ ID NO: 1490497 - RNA, 19 nt, Artificial Sequence
  Description of Artificial Sequence: Synthetic oligonucleotide
  Antisense strand to SEQ ID NO: 1490496
agaucuaaacagcuuaacc

SEQ ID NO: 1490498 - RNA, 19 nt, Artificial Sequence
  Description of Artificial Sequence: Synthetic oligonucleotide
  Sense strand starting at position 33 of SEQ ID NO: 1244463
cuguuuagaucuuauuuag

SEQ ID NO: 1490499 - RNA, 19 nt, Artificial Sequence
  Description of Artificial Sequence: Synthetic oligonucleotide
  Antisense strand to SEQ ID NO: 1490498
cuaaauaagaucuaaacag

SEQ ID NO: 1490500 - RNA, 19 nt, Artificial Sequence
  Description of Artificial Sequence: Synthetic oligonucleotide
  Sense strand starting at position 654 of SEQ ID NO: 1244463
ugagacccugugcgaaaua

SEQ ID NO: 1490501 - RNA, 19 nt, Artificial Sequence
  Description of Artificial Sequence: Synthetic oligonucleotide
  Antisense strand to SEQ ID NO: 1490500
uauuucgcacagggucuca

SEQ ID NO: 1490502 - RNA, 19 nt, Artificial Sequence
  Description of Artificial Sequence: Synthetic oligonucleotide
  Sense strand starting at position 769 of SEQ ID NO: 1244463
gugauaauuuaagaaugug

SEQ ID NO: 1490503 - RNA, 19 nt, Artificial Sequence
  Description of Artificial Sequence: Synthetic oligonucleotide
  Antisense strand to SEQ ID NO: 1490502
cacauucuuaaauuaucac

SEQ ID NO: 1490504 - RNA, 19 nt, Artificial Sequence
  Description of Artificial Sequence: Synthetic oligonucleotide
  Sense strand starting at position 859 of SEQ ID NO: 1244463
ggaagucuuagccagguca

SEQ ID NO: 1490505 - RNA, 19 nt, Artificial Sequence
  Description of Artificial Sequence: Synthetic oligonucleotide
  Antisense strand to SEQ ID NO: 1490504
ugaccuggcuaagacuucc

SEQ ID NO: 1490506 - RNA, 19 nt, Artificial Sequence
  Description of Artificial Sequence: Synthetic oligonucleotide
  Sense strand starting at position 1032 of SEQ ID NO: 1244463
auguaauagcuccaagugu

SEQ ID NO: 1490507 - RNA, 19 nt, Artificial Sequence
  Description of Artificial Sequence: Synthetic oligonucleotide
  Antisense strand to SEQ ID NO: 1490506
acacuuggagcuauuacau

SEQ ID NO: 1490508 - RNA, 19 nt, Artificial Sequence
  Description of Artificial Sequence: Synthetic oligonucleotide
  Sense strand starting at position 1041 of SEQ ID NO: 1244463
cuccaaguguuaucaucag

SEQ ID NO: 1490509 - RNA, 19 nt, Artificial Sequence
  Description of Artificial Sequence: Synthetic oligonucleotide
  Antisense strand to SEQ ID NO: 1490508
cugaugauaacacuuggag

SEQ ID NO: 1490510 - RNA, 19 nt, Artificial Sequence
  Description of Artificial Sequence: Synthetic oligonucleotide
  Sense strand starting at position 1082 of SEQ ID NO: 1244463
gaugaaugacucugcucag

SEQ ID NO: 1490511 - RNA, 19 nt, Artificial Sequence
  Description of Artificial Sequence: Synthetic oligonucleotide
  Antisense strand to SEQ ID NO: 1490510
cugagcagagucauucauc

SEQ ID NO: 1490512 - RNA, 19 nt, Artificial Sequence
  Description of Artificial Sequence: Synthetic oligonucleotide
  Sense strand starting at position 1204 of SEQ ID NO: 1244463
cuauuagcugaugagcaua

SEQ ID NO: 1490513 - RNA, 19 nt, Artificial Sequence
  Description of Artificial Sequence: Synthetic oligonucleotide
  Antisense strand to SEQ ID NO: 1490512
uaugcucaucagcuaauag

SEQ ID NO: 1490514 - RNA, 19 nt, Artificial Sequence
  Description of Artificial Sequence: Synthetic oligonucleotide
  Sense strand starting at position 1743 of SEQ ID NO: 1244463
cugcauguucuguaacaac

SEQ ID NO: 1490515 - RNA, 19 nt, Artificial Sequence
  Description of Artificial Sequence: Synthetic oligonucleotide
  Antisense strand to SEQ ID NO: 1490514
guuguuacagaacaugcag

SEQ ID NO: 1490516 - RNA, 19 nt, Artificial Sequence
  Description of Artificial Sequence: Synthetic oligonucleotide
  Sense strand starting at position 2063 of SEQ ID NO: 1244463
uggagauauuucugugaca

SEQ ID NO: 1490517 - RNA, 19 nt, Artificial Sequence
  Description of Artificial Sequence: Synthetic oligonucleotide
  Antisense strand to SEQ ID NO: 1490516
ugucacagaaauaucucca

SEQ ID NO: 1490518 - RNA, 19 nt, Artificial Sequence
  Description of Artificial Sequence: Synthetic oligonucleotide
  Sense strand starting at position 2066 of SEQ ID NO: 1244463
agauauuucugugacacuu

SEQ ID NO: 1490519 - RNA, 19 nt, Artificial Sequence
  Description of Artificial Sequence: Synthetic oligonucleotide
  Antisense strand to SEQ ID NO: 1490518
aagugucacagaaauaucu

SEQ ID NO: 1490520 - RNA, 19 nt, Artificial Sequence
  Description of Artificial Sequence: Synthetic oligonucleotide
  Sense strand starting at position 2327 of SEQ ID NO: 1244463
cuccucugucaguaucuua

SEQ ID NO: 1490521 - RNA, 19 nt, Artificial Sequence
  Description of Artificial Sequence: Synthetic oligonucleotide
  Antisense strand to SEQ ID NO: 1490520
uaagauacugacagaggag

SEQ ID NO: 1490522 - RNA, 19 nt, Artificial Sequence
  Description of Artificial Sequence: Synthetic oligonucleotide
  Sense strand starting at position 2330 of SEQ ID NO: 1244463
cucugucaguaucuuacau

SEQ ID NO: 1490523 - RNA, 19 nt, Artificial Sequence
  Description of Artificial Sequence: Synthetic oligonucleotide
  Antisense strand to SEQ ID NO: 1490522
auguaagauacugacagag

SEQ ID NO: 1490524 - RNA, 19 nt, Artificial Sequence
  Description of Artificial Sequence: Synthetic oligonucleotide
  Sense strand starting at position 2348 of SEQ ID NO: 1244463
uguugauauuccucaggga

SEQ ID NO: 1490525 - RNA, 19 nt, Artificial Sequence
  Description of Artificial Sequence: Synthetic oligonucleotide
  Antisense strand to SEQ ID NO: 1490524
ucccugaggaauaucaaca

SEQ ID NO: 1490526 - RNA, 19 nt, Artificial Sequence
  Description of Artificial Sequence: Synthetic oligonucleotide
  Sense strand starting at position 2397 of SEQ ID NO: 1244463
ucugcauaauggccaauaa

SEQ ID NO: 1490527 - RNA, 19 nt, Artificial Sequence
  Description of Artificial Sequence: Synthetic oligonucleotide
  Antisense strand to SEQ ID NO: 1490526
uuauuggccauuaugcaga

SEQ ID NO: 1490528 - RNA, 19 nt, Artificial Sequence
  Description of Artificial Sequence: Synthetic oligonucleotide
  Sense strand starting at position 2398 of SEQ ID NO: 1244463
cugcauaauggccaauaaa

SEQ ID NO: 1490529 - RNA, 19 nt, Artificial Sequence
  Description of Artificial Sequence: Synthetic oligonucleotide
  Antisense strand to SEQ ID NO: 1490528
uuuauuggccauuaugcag

SEQ ID NO: 1490530 - RNA, 19 nt, Artificial Sequence
  Description of Artificial Sequence: Synthetic oligonucleotide
  Sense strand starting at position 2433 of SEQ ID NO: 1244463
uggcuuuaauugccauuua

SEQ ID NO: 1490531 - RNA, 19 nt, Artificial Sequence
  Description of Artificial Sequence: Synthetic oligonucleotide
  Antisense strand to SEQ ID NO: 1490530
uaaauggcaauuaaagcca

SEQ ID NO: 1490532 - RNA, 19 nt, Artificial Sequence
  Description of Artificial Sequence: Synthetic oligonucleotide
  Sense strand starting at position 2729 of SEQ ID NO: 1244463
gaguaagacucugucaaag

SEQ ID NO: 1490533 - RNA, 19 nt, Artificial Sequence
  Description of Artificial Sequence: Synthetic oligonucleotide
  Antisense strand to SEQ ID NO: 1490532
cuuugacagagucuuacuc

SEQ ID NO: 1490534 - RNA, 19 nt, Artificial Sequence
  Description of Artificial Sequence: Synthetic oligonucleotide
  Sense strand starting at position 2965 of SEQ ID NO: 1244463
ucagguguagcguucucua

SEQ ID NO: 1490535 - RNA, 19 nt, Artificial Sequence
  Description of Artificial Sequence: Synthetic oligonucleotide
  Antisense strand to SEQ ID NO: 1490534
uagagaacgcuacaccuga

SEQ ID NO: 1490536 - RNA, 19 nt, Artificial Sequence
  Description of Artificial Sequence: Synthetic oligonucleotide
  Sense strand starting at position 2967 of SEQ ID NO: 1244463
agguguagcguucucuagu

SEQ ID NO: 1490537 - RNA, 19 nt, Artificial Sequence
  Description of Artificial Sequence: Synthetic oligonucleotide
  Antisense strand to SEQ ID NO: 1490536
acuagagaacgcuacaccu

SEQ ID NO: 1490538 - RNA, 19 nt, Artificial Sequence
  Description of Artificial Sequence: Synthetic oligonucleotide
  Sense strand starting at position 2975 of SEQ ID NO: 1244463
cguucucuaguauacagaa

SEQ ID NO: 1490539 - RNA, 19 nt, Artificial Sequence
  Description of Artificial Sequence: Synthetic oligonucleotide
  Antisense strand to SEQ ID NO: 1490538
uucuguauacuagagaacg

SEQ ID NO: 1490540 - RNA, 19 nt, Artificial Sequence
  Description of Artificial Sequence: Synthetic oligonucleotide
  Sense strand starting at position 2990 of SEQ ID NO: 1244463
agaacuuaguauccugagu

SEQ ID NO: 1490541 - RNA, 19 nt, Artificial Sequence
  Description of Artificial Sequence: Synthetic oligonucleotide
  Antisense strand to SEQ ID NO: 1490540
acucaggauacuaaguucu

SEQ ID NO: 1490542 - RNA, 19 nt, Artificial Sequence
  Description of Artificial Sequence: Synthetic oligonucleotide
  Sense strand starting at position 2995 of SEQ ID NO: 1244463
uuaguauccugagucucaa

SEQ ID NO: 1490543 - RNA, 19 nt, Artificial Sequence
  Description of Artificial Sequence: Synthetic oligonucleotide
  Antisense strand to SEQ ID NO: 1490542
uugagacucaggauacuaa

SEQ ID NO: 1490544 - RNA, 19 nt, Artificial Sequence
  Description of Artificial Sequence: Synthetic oligonucleotide
  Sense strand starting at position 3014 of SEQ ID NO: 1244463
ugauuaacaucucuuggau

SEQ ID NO: 1490545 - RNA, 19 nt, Artificial Sequence
  Description of Artificial Sequence: Synthetic oligonucleotide
  Antisense strand to SEQ ID NO: 1490544
auccaagagauguuaauca

SEQ ID NO: 1490546 - RNA, 19 nt, Artificial Sequence
  Description of Artificial Sequence: Synthetic oligonucleotide
  Sense strand starting at position 3017 of SEQ ID NO: 1244463
uuaacaucucuuggaugga

SEQ ID NO: 1490547 - RNA, 19 nt, Artificial Sequence
  Description of Artificial Sequence: Synthetic oligonucleotide
  Antisense strand to SEQ ID NO: 1490546
uccauccaagagauguuaa

SEQ ID NO: 1490548 - RNA, 19 nt, Artificial Sequence
  Description of Artificial Sequence: Synthetic oligonucleotide
  Sense strand starting at position 3040 of SEQ ID NO: 1244463
aggcaucuuuggcuugaca

SEQ ID NO: 1490549 - RNA, 19 nt, Artificial Sequence
  Description of Artificial Sequence: Synthetic oligonucleotide
  Antisense strand to SEQ ID NO: 1490548
ugucaagccaaagaugccu

SEQ ID NO: 1490550 - RNA, 19 nt, Artificial Sequence
  Description of Artificial Sequence: Synthetic oligonucleotide
  Sense strand starting at position 3042 of SEQ ID NO: 1244463
gcaucuuuggcuugacaga

SEQ ID NO: 1490551 - RNA, 19 nt, Artificial Sequence
  Description of Artificial Sequence: Synthetic oligonucleotide
  Antisense strand to SEQ ID NO: 1490550
ucugucaagccaaagaugc

SEQ ID NO: 1490552 - RNA, 19 nt, Artificial Sequence
  Description of Artificial Sequence: Synthetic oligonucleotide
  Sense strand starting at position 3043 of SEQ ID NO: 1244463
caucuuuggcuugacagau

SEQ ID NO: 1490553 - RNA, 19 nt, Artificial Sequence
  Description of Artificial Sequence: Synthetic oligonucleotide
  Antisense strand to SEQ ID NO: 1490552
aucugucaagccaaagaug

SEQ ID NO: 1490554 - RNA, 19 nt, Artificial Sequence
  Description of Artificial Sequence: Synthetic oligonucleotide
  Sense strand starting at position 3116 of SEQ ID NO: 1244463
cucucucauguuuggugaa

SEQ ID NO: 1490555 - RNA, 19 nt, Artificial Sequence
  Description of Artificial Sequence: Synthetic oligonucleotide
  Antisense strand to SEQ ID NO: 1490554
uucaccaaacaugagagag

SEQ ID NO: 1490556 - RNA, 19 nt, Artificial Sequence
  Description of Artificial Sequence: Synthetic oligonucleotide
  Sense strand starting at position 3118 of SEQ ID NO: 1244463
cucucauguuuggugaaug

SEQ ID NO: 1490557 - RNA, 19 nt, Artificial Sequence
  Description of Artificial Sequence: Synthetic oligonucleotide
  Antisense strand to SEQ ID NO: 1490556
cauucaccaaacaugagag

SEQ ID NO: 1490558 - RNA, 19 nt, Artificial Sequence
  Description of Artificial Sequence: Synthetic oligonucleotide
  Sense strand starting at position 3445 of SEQ ID NO: 1244463
guggauuaucauuguucuu

SEQ ID NO: 1490559 - RNA, 19 nt, Artificial Sequence
  Description of Artificial Sequence: Synthetic oligonucleotide
  Antisense strand to SEQ ID NO: 1490558
aagaacaaugauaauccac

SEQ ID NO: 1490560 - RNA, 19 nt, Artificial Sequence
  Description of Artificial Sequence: Synthetic oligonucleotide
  Sense strand starting at position 3447 of SEQ ID NO: 1244463
ggauuaucauuguucuuaa

SEQ ID NO: 1490561 - RNA, 19 nt, Artificial Sequence
  Description of Artificial Sequence: Synthetic oligonucleotide
  Antisense strand to SEQ ID NO: 1490560
uuaagaacaaugauaaucc

SEQ ID NO: 1490562 - RNA, 19 nt, Artificial Sequence
  Description of Artificial Sequence: Synthetic oligonucleotide
  Sense strand starting at position 3572 of SEQ ID NO: 1244463
ucagcaaugcuggacuuau

SEQ ID NO: 1490563 - RNA, 19 nt, Artificial Sequence
  Description of Artificial Sequence: Synthetic oligonucleotide
  Antisense strand to SEQ ID NO: 1490562
auaaguccagcauugcuga

SEQ ID NO: 1490564 - RNA, 19 nt, Artificial Sequence
  Description of Artificial Sequence: Synthetic oligonucleotide
  Sense strand starting at position 3581 of SEQ ID NO: 1244463
cuggacuuauacgucauaa

SEQ ID NO: 1490565 - RNA, 19 nt, Artificial Sequence
  Description of Artificial Sequence: Synthetic oligonucleotide
  Antisense strand to SEQ ID NO: 1490564
uuaugacguauaaguccag

SEQ ID NO: 1490566 - RNA, 19 nt, Artificial Sequence
  Description of Artificial Sequence: Synthetic oligonucleotide
  Sense strand starting at position 3583 of SEQ ID NO: 1244463
ggacuuauacgucauaauu

SEQ ID NO: 1490567 - RNA, 19 nt, Artificial Sequence
  Description of Artificial Sequence: Synthetic oligonucleotide
  Antisense strand to SEQ ID NO: 1490566
aauuaugacguauaagucc

SEQ ID NO: 1490568 - RNA, 19 nt, Artificial Sequence
  Description of Artificial Sequence: Synthetic oligonucleotide
  Sense strand starting at position 3708 of SEQ ID NO: 1244463
auguaacuugcucagcuaa

SEQ ID NO: 1490569 - RNA, 19 nt, Artificial Sequence
  Description of Artificial Sequence: Synthetic oligonucleotide
  Antisense strand to SEQ ID NO: 1490568
uuagcugagcaaguuacau

SEQ ID NO: 1490570 - RNA, 19 nt, Artificial Sequence
  Description of Artificial Sequence: Synthetic oligonucleotide
  Sense strand starting at position 3923 of SEQ ID NO: 1244463
ccagauauugcugauguuu

SEQ ID NO: 1490571 - RNA, 19 nt, Artificial Sequence
  Description of Artificial Sequence: Synthetic oligonucleotide
  Antisense strand to SEQ ID NO: 1490570
aaacaucagcaauaucugg

SEQ ID NO: 1490572 - RNA, 19 nt, Artificial Sequence
  Description of Artificial Sequence: Synthetic oligonucleotide
  Sense strand starting at position 3976 of SEQ ID NO: 1244463
cgugcauuccuccaacuua

SEQ ID NO: 1490573 - RNA, 19 nt, Artificial Sequence
  Description of Artificial Sequence: Synthetic oligonucleotide
  Antisense strand to SEQ ID NO: 1490572
uaaguuggaggaaugcacg

SEQ ID NO: 1490574 - RNA, 19 nt, Artificial Sequence
  Description of Artificial Sequence: Synthetic oligonucleotide
  Sense strand starting at position 571 of SEQ ID NO: 1244464
gugaacacuugcucaggaa

SEQ ID NO: 1490575 - RNA, 19 nt, Artificial Sequence
  Description of Artificial Sequence: Synthetic oligonucleotide
  Antisense strand to SEQ ID NO: 1490574
uuccugagcaaguguucac

SEQ ID NO: 1490576 - RNA, 19 nt, Artificial Sequence
  Description of Artificial Sequence: Synthetic oligonucleotide
  Sense strand starting at position 643 of SEQ ID NO: 1244464
gacugagaugucugggucu

SEQ ID NO: 1490577 - RNA, 19 nt, Artificial Sequence
  Description of Artificial Sequence: Synthetic oligonucleotide
  Antisense strand to SEQ ID NO: 1490576
agacccagacaucucaguc

SEQ ID NO: 1490578 - RNA, 19 nt, Artificial Sequence
  Description of Artificial Sequence: Synthetic oligonucleotide
  Sense strand starting at position 645 of SEQ ID NO: 1244464
cugagaugucugggucuua

SEQ ID NO: 1490579 - RNA, 19 nt, Artificial Sequence
  Description of Artificial Sequence: Synthetic oligonucleotide
  Antisense strand to SEQ ID NO: 1490578
uaagacccagacaucucag

SEQ ID NO: 1490580 - RNA, 19 nt, Artificial Sequence
  Description of Artificial Sequence: Synthetic oligonucleotide
  Sense strand starting at position 646 of SEQ ID NO: 1244464
ugagaugucugggucuuau

SEQ ID NO: 1490581 - RNA, 19 nt, Artificial Sequence
  Description of Artificial Sequence: Synthetic oligonucleotide
  Antisense strand to SEQ ID NO: 1490580
auaagacccagacaucuca

SEQ ID NO: 1490582 - RNA, 19 nt, Artificial Sequence
  Description of Artificial Sequence: Synthetic oligonucleotide
  Sense strand starting at position 655 of SEQ ID NO: 1244464
ugggucuuauuauugacau

SEQ ID NO: 1490583 - RNA, 19 nt, Artificial Sequence
  Description of Artificial Sequence: Synthetic oligonucleotide
  Antisense strand to SEQ ID NO: 1490582
augucaauaauaagaccca

SEQ ID NO: 1490584 - RNA, 19 nt, Artificial Sequence
  Description of Artificial Sequence: Synthetic oligonucleotide
  Sense strand starting at position 659 of SEQ ID NO: 1244464
ucuuauuauugacaugaga

SEQ ID NO: 1490585 - RNA, 19 nt, Artificial Sequence
  Description of Artificial Sequence: Synthetic oligonucleotide
  Antisense strand to SEQ ID NO: 1490584
ucucaugucaauaauaaga

SEQ ID NO: 1490586 - RNA, 19 nt, Artificial Sequence
  Description of Artificial Sequence: Synthetic oligonucleotide
  Sense strand starting at position 724 of SEQ ID NO: 1244464
acaugauaaacuggugguu

SEQ ID NO: 1490587 - RNA, 19 nt, Artificial Sequence
  Description of Artificial Sequence: Synthetic oligonucleotide
  Antisense strand to SEQ ID NO: 1490586
aaccaccaguuuaucaugu

SEQ ID NO: 1490588 - RNA, 19 nt, Artificial Sequence
  Description of Artificial Sequence: Synthetic oligonucleotide
  Sense strand starting at position 727 of SEQ ID NO: 1244464
ugauaaacuggugguuuaa

SEQ ID NO: 1490589 - RNA, 19 nt, Artificial Sequence
  Description of Artificial Sequence: Synthetic oligonucleotide
  Antisense strand to SEQ ID NO: 1490588
uuaaaccaccaguuuauca

SEQ ID NO: 1490590 - RNA, 19 nt, Artificial Sequence
  Description of Artificial Sequence: Synthetic oligonucleotide
  Sense strand starting at position 729 of SEQ ID NO: 1244464
auaaacuggugguuuaaca

SEQ ID NO: 1490591 - RNA, 19 nt, Artificial Sequence
  Description of Artificial Sequence: Synthetic oligonucleotide
  Antisense strand to SEQ ID NO: 1490590
uguuaaaccaccaguuuau

SEQ ID NO: 1490592 - RNA, 19 nt, Artificial Sequence
  Description of Artificial Sequence: Synthetic oligonucleotide
  Sense strand starting at position 737 of SEQ ID NO: 1244464
gugguuuaacaaugaagac

SEQ ID NO: 1490593 - RNA, 19 nt, Artificial Sequence
  Description of Artificial Sequence: Synthetic oligonucleotide
  Antisense strand to SEQ ID NO: 1490592
gucuucauuguuaaaccac

SEQ ID NO: 1490594 - RNA, 19 nt, Artificial Sequence
  Description of Artificial Sequence: Synthetic oligonucleotide
  Sense strand starting at position 1014 of SEQ ID NO: 1244464
ucccaaguauuacugucau

SEQ ID NO: 1490595 - RNA, 19 nt, Artificial Sequence
  Description of Artificial Sequence: Synthetic oligonucleotide
  Antisense strand to SEQ ID NO: 1490594
augacaguaauacuuggga

SEQ ID NO: 1490596 - RNA, 19 nt, Artificial Sequence
  Description of Artificial Sequence: Synthetic oligonucleotide
  Sense strand starting at position 1658 of SEQ ID NO: 1244464
ggaggaagcucucuagauc

SEQ ID NO: 1490597 - RNA, 19 nt, Artificial Sequence
  Description of Artificial Sequence: Synthetic oligonucleotide
  Antisense strand to SEQ ID NO: 1490596
gaucuagagagcuuccucc

SEQ ID NO: 1490598 - RNA, 19 nt, Artificial Sequence
  Description of Artificial Sequence: Synthetic oligonucleotide
  Sense strand starting at position 1661 of SEQ ID NO: 1244464
ggaagcucucuagauccga

SEQ ID NO: 1490599 - RNA, 19 nt, Artificial Sequence
  Description of Artificial Sequence: Synthetic oligonucleotide
  Antisense strand to SEQ ID NO: 1490598
ucggaucuagagagcuucc

SEQ ID NO: 1490600 - RNA, 19 nt, Artificial Sequence
  Description of Artificial Sequence: Synthetic oligonucleotide
  Sense strand starting at position 1743 of SEQ ID NO: 1244464
cugcauguucugcagcaau

SEQ ID NO: 1490601 - RNA, 19 nt, Artificial Sequence
  Description of Artificial Sequence: Synthetic oligonucleotide
  Antisense strand to SEQ ID NO: 1490600
auugcugcagaacaugcag

SEQ ID NO: 1490602 - RNA, 19 nt, Artificial Sequence
  Description of Artificial Sequence: Synthetic oligonucleotide
  Sense strand starting at position 1763 of SEQ ID NO: 1244464
ugggcauugugacugagga

SEQ ID NO: 1490603 - RNA, 19 nt, Artificial Sequence
  Description of Artificial Sequence: Synthetic oligonucleotide
  Antisense strand to SEQ ID NO: 1490602
uccucagucacaaugccca

SEQ ID NO: 1490604 - RNA, 19 nt, Artificial Sequence
  Description of Artificial Sequence: Synthetic oligonucleotide
  Sense strand starting at position 1764 of SEQ ID NO: 1244464
gggcauugugacugaggaa

SEQ ID NO: 1490605 - RNA, 19 nt, Artificial Sequence
  Description of Artificial Sequence: Synthetic oligonucleotide
  Antisense strand to SEQ ID NO: 1490604
uuccucagucacaaugccc

SEQ ID NO: 1490606 - RNA, 19 nt, Artificial Sequence
  Description of Artificial Sequence: Synthetic oligonucleotide
  Sense strand starting at position 2007 of SEQ ID NO: 1244464
ucuccaguaucuuuaagag

SEQ ID NO: 1490607 - RNA, 19 nt, Artificial Sequence
  Description of Artificial Sequence: Synthetic oligonucleotide
  Antisense strand to SEQ ID NO: 1490606
cucuuaaagauacuggaga

SEQ ID NO: 1490608 - RNA, 19 nt, Artificial Sequence
  Description of Artificial Sequence: Synthetic oligonucleotide
  Sense strand starting at position 2173 of SEQ ID NO: 1244464
agaaaugugccacaucaca

SEQ ID NO: 1490609 - RNA, 19 nt, Artificial Sequence
  Description of Artificial Sequence: Synthetic oligonucleotide
  Antisense strand to SEQ ID NO: 1490608
ugugauguggcacauuucu

SEQ ID NO: 1490610 - RNA, 19 nt, Artificial Sequence
  Description of Artificial Sequence: Synthetic oligonucleotide
  Sense strand starting at position 2299 of SEQ ID NO: 1244464
ucacacugguuuccugaca

SEQ ID NO: 1490611 - RNA, 19 nt, Artificial Sequence
  Description of Artificial Sequence: Synthetic oligonucleotide
  Antisense strand to SEQ ID NO: 1490610
ugucaggaaaccaguguga

SEQ ID NO: 1490612 - RNA, 19 nt, Artificial Sequence
  Description of Artificial Sequence: Synthetic oligonucleotide
  Sense strand starting at position 2345 of SEQ ID NO: 1244464
guaaaugguuucuucucua

SEQ ID NO: 1490613 - RNA, 19 nt, Artificial Sequence
  Description of Artificial Sequence: Synthetic oligonucleotide
  Antisense strand to SEQ ID NO: 1490612
uagagaagaaaccauuuac

SEQ ID NO: 1490614 - RNA, 19 nt, Artificial Sequence
  Description of Artificial Sequence: Synthetic oligonucleotide
  Sense strand starting at position 2350 of SEQ ID NO: 1244464
ugguuucuucucuaacagu

SEQ ID NO: 1490615 - RNA, 19 nt, Artificial Sequence
  Description of Artificial Sequence: Synthetic oligonucleotide
  Antisense strand to SEQ ID NO: 1490614
acuguuagagaagaaacca

SEQ ID NO: 1490616 - RNA, 19 nt, Artificial Sequence
  Description of Artificial Sequence: Synthetic oligonucleotide
  Sense strand starting at position 2454 of SEQ ID NO: 1244464
ccgugacacugauuaccau

SEQ ID NO: 1490617 - RNA, 19 nt, Artificial Sequence
  Description of Artificial Sequence: Synthetic oligonucleotide
  Antisense strand to SEQ ID NO: 1490616
augguaaucagugucacgg

SEQ ID NO: 1490618 - RNA, 19 nt, Artificial Sequence
  Description of Artificial Sequence: Synthetic oligonucleotide
  Sense strand starting at position 2472 of SEQ ID NO: 1244464
ucugaacuuccuggguaaa

SEQ ID NO: 1490619 - RNA, 19 nt, Artificial Sequence
  Description of Artificial Sequence: Synthetic oligonucleotide
  Antisense strand to SEQ ID NO: 1490618
uuuacccaggaaguucaga

SEQ ID NO: 1490620 - RNA, 19 nt, Artificial Sequence
  Description of Artificial Sequence: Synthetic oligonucleotide
  Sense strand starting at position 2484 of SEQ ID NO: 1244464
ggguaaaccuaucaucauu

SEQ ID NO: 1490621 - RNA, 19 nt, Artificial Sequence
  Description of Artificial Sequence: Synthetic oligonucleotide
  Antisense strand to SEQ ID NO: 1490620
aaugaugauagguuuaccc

SEQ ID NO: 1490622 - RNA, 19 nt, Artificial Sequence
  Description of Artificial Sequence: Synthetic oligonucleotide
  Sense strand starting at position 2514 of SEQ ID NO: 1244464
agcaguugcuuccugauua

SEQ ID NO: 1490623 - RNA, 19 nt, Artificial Sequence
  Description of Artificial Sequence: Synthetic oligonucleotide
  Antisense strand to SEQ ID NO: 1490622
uaaucaggaagcaacugcu

SEQ ID NO: 1490624 - RNA, 19 nt, Artificial Sequence
  Description of Artificial Sequence: Synthetic oligonucleotide
  Sense strand starting at position 2526 of SEQ ID NO: 1244464
cugauuaucucccuaugga

SEQ ID NO: 1490625 - RNA, 19 nt, Artificial Sequence
  Description of Artificial Sequence: Synthetic oligonucleotide
  Antisense strand to SEQ ID NO: 1490624
uccauagggagauaaucag

SEQ ID NO: 1490626 - RNA, 19 nt, Artificial Sequence
  Description of Artificial Sequence: Synthetic oligonucleotide
  Sense strand starting at position 2574 of SEQ ID NO: 1244464
agaugaaacucguuaucuc

SEQ ID NO: 1490627 - RNA, 19 nt, Artificial Sequence
  Description of Artificial Sequence: Synthetic oligonucleotide
  Antisense strand to SEQ ID NO: 1490626
gagauaacgaguuucaucu

SEQ ID NO: 1490628 - RNA, 19 nt, Artificial Sequence
  Description of Artificial Sequence: Synthetic oligonucleotide
  Sense strand starting at position 2575 of SEQ ID NO: 1244464
gaugaaacucguuaucuca

SEQ ID NO: 1490629 - RNA, 19 nt, Artificial Sequence
  Description of Artificial Sequence: Synthetic oligonucleotide
  Antisense strand to SEQ ID NO: 1490628
ugagauaacgaguuucauc

SEQ ID NO: 1490630 - RNA, 19 nt, Artificial Sequence
  Description of Artificial Sequence: Synthetic oligonucleotide
  Sense strand starting at position 2659 of SEQ ID NO: 1244464
gucagaaaccugggaguuu

SEQ ID NO: 1490631 - RNA, 19 nt, Artificial Sequence
  Description of Artificial Sequence: Synthetic oligonucleotide
  Antisense strand to SEQ ID NO: 1490630
aaacucccagguuucugac

SEQ ID NO: 1490632 - RNA, 19 nt, Artificial Sequence
  Description of Artificial Sequence: Synthetic oligonucleotide
  Sense strand starting at position 2816 of SEQ ID NO: 1244464
ucuggacuauuggaauagu

SEQ ID NO: 1490633 - RNA, 19 nt, Artificial Sequence
  Description of Artificial Sequence: Synthetic oligonucleotide
  Antisense strand to SEQ ID NO: 1490632
acuauuccaauaguccaga

SEQ ID NO: 1490634 - RNA, 19 nt, Artificial Sequence
  Description of Artificial Sequence: Synthetic oligonucleotide
  Sense strand starting at position 2825 of SEQ ID NO: 1244464
uuggaauagucucuuacuu

SEQ ID NO: 1490635 - RNA, 19 nt, Artificial Sequence
  Description of Artificial Sequence: Synthetic oligonucleotide
  Antisense strand to SEQ ID NO: 1490634
aaguaagagacuauuccaa

SEQ ID NO: 1490636 - RNA, 19 nt, Artificial Sequence
  Description of Artificial Sequence: Synthetic oligonucleotide
  Sense strand starting at position 3248 of SEQ ID NO: 1244464
ugcucagaguccuuaugga

SEQ ID NO: 1490637 - RNA, 19 nt, Artificial Sequence
  Description of Artificial Sequence: Synthetic oligonucleotide
  Antisense strand to SEQ ID NO: 1490636
uccauaaggacucugagca

SEQ ID NO: 1490638 - RNA, 19 nt, Artificial Sequence
  Description of Artificial Sequence: Synthetic oligonucleotide
  Sense strand starting at position 3370 of SEQ ID NO: 1244464
ugacucuugcaucagcauu

SEQ ID NO: 1490639 - RNA, 19 nt, Artificial Sequence
  Description of Artificial Sequence: Synthetic oligonucleotide
  Antisense strand to SEQ ID NO: 1490638
aaugcugaugcaagaguca

SEQ ID NO: 1490640 - RNA, 19 nt, Artificial Sequence
  Description of Artificial Sequence: Synthetic oligonucleotide
  Sense strand starting at position 3456 of SEQ ID NO: 1244464
cuguuccuucuguguaaca

SEQ ID NO: 1490641 - RNA, 19 nt, Artificial Sequence
  Description of Artificial Sequence: Synthetic oligonucleotide
  Antisense strand to SEQ ID NO: 1490640
uguuacacagaaggaacag

SEQ ID NO: 1490642 - RNA, 19 nt, Artificial Sequence
  Description of Artificial Sequence: Synthetic oligonucleotide
  Sense strand starting at position 3457 of SEQ ID NO: 1244464
uguuccuucuguguaacau

SEQ ID NO: 1490643 - RNA, 19 nt, Artificial Sequence
  Description of Artificial Sequence: Synthetic oligonucleotide
  Antisense strand to SEQ ID NO: 1490642
auguuacacagaaggaaca

SEQ ID NO: 1490644 - RNA, 19 nt, Artificial Sequence
  Description of Artificial Sequence: Synthetic oligonucleotide
  Sense strand starting at position 3458 of SEQ ID NO: 1244464
guuccuucuguguaacauc

SEQ ID NO: 1490645 - RNA, 19 nt, Artificial Sequence
  Description of Artificial Sequence: Synthetic oligonucleotide
  Antisense strand to SEQ ID NO: 1490644
gauguuacacagaaggaac

SEQ ID NO: 1490646 - RNA, 19 nt, Artificial Sequence
  Description of Artificial Sequence: Synthetic oligonucleotide
  Sense strand starting at position 3844 of SEQ ID NO: 1244464
gcagguuuacuacauguca

SEQ ID NO: 1490647 - RNA, 19 nt, Artificial Sequence
  Description of Artificial Sequence: Synthetic oligonucleotide
  Antisense strand to SEQ ID NO: 1490646
ugacauguaguaaaccugc

SEQ ID NO: 1490648 - RNA, 19 nt, Artificial Sequence
  Description of Artificial Sequence: Synthetic oligonucleotide
  Sense strand starting at position 3923 of SEQ ID NO: 1244464
guacucauccagcagcauu

SEQ ID NO: 1490649 - RNA, 19 nt, Artificial Sequence
  Description of Artificial Sequence: Synthetic oligonucleotide
  Antisense strand to SEQ ID NO: 1490648
aaugcugcuggaugaguac

SEQ ID NO: 1490650 - RNA, 19 nt, Artificial Sequence
  Description of Artificial Sequence: Synthetic oligonucleotide
  Sense strand starting at position 3946 of SEQ ID NO: 1244464
gaccuugauugcuuguuua

SEQ ID NO: 1490651 - RNA, 19 nt, Artificial Sequence
  Description of Artificial Sequence: Synthetic oligonucleotide
  Antisense strand to SEQ ID NO: 1490650
uaaacaagcaaucaagguc

SEQ ID NO: 1490652 - RNA, 19 nt, Artificial Sequence
  Description of Artificial Sequence: Synthetic oligonucleotide
  Sense strand starting at position 3956 of SEQ ID NO: 1244464
gcuuguuuauagcugaguu

SEQ ID NO: 1490653 - RNA, 19 nt, Artificial Sequence
  Description of Artificial Sequence: Synthetic oligonucleotide
  Antisense strand to SEQ ID NO: 1490652
aacucagcuauaaacaagc

SEQ ID NO: 1490654 - RNA, 19 nt, Artificial Sequence
  Description of Artificial Sequence: Synthetic oligonucleotide
  Sense strand starting at position 7 of SEQ ID NO: 1244465
cugaguugaccuugggaga

SEQ ID NO: 1490655 - RNA, 19 nt, Artificial Sequence
  Description of Artificial Sequence: Synthetic oligonucleotide
  Antisense strand to SEQ ID NO: 1490654
ucucccaaggucaacucag

SEQ ID NO: 1490656 - RNA, 19 nt, Artificial Sequence
  Description of Artificial Sequence: Synthetic oligonucleotide
  Sense strand starting at position 8 of SEQ ID NO: 1244465
ugaguugaccuugggagaa

SEQ ID NO: 1490657 - RNA, 19 nt, Artificial Sequence
  Description of Artificial Sequence: Synthetic oligonucleotide
  Antisense strand to SEQ ID NO: 1490656
uucucccaaggucaacuca

SEQ ID NO: 1490658 - RNA, 19 nt, Artificial Sequence
  Description of Artificial Sequence: Synthetic oligonucleotide
  Sense strand starting at position 31 of SEQ ID NO: 1244465
ggaagagugugguuaacug

SEQ ID NO: 1490659 - RNA, 19 nt, Artificial Sequence
  Description of Artificial Sequence: Synthetic oligonucleotide
  Antisense strand to SEQ ID NO: 1490658
caguuaaccacacucuucc

SEQ ID NO: 1490660 - RNA, 19 nt, Artificial Sequence
  Description of Artificial Sequence: Synthetic oligonucleotide
  Sense strand starting at position 40 of SEQ ID NO: 1244465
ugguuaacuguggacauca

SEQ ID NO: 1490661 - RNA, 19 nt, Artificial Sequence
  Description of Artificial Sequence: Synthetic oligonucleotide
  Antisense strand to SEQ ID NO: 1490660
ugauguccacaguuaacca

SEQ ID NO: 1490662 - RNA, 19 nt, Artificial Sequence
  Description of Artificial Sequence: Synthetic oligonucleotide
  Sense strand starting at position 45 of SEQ ID NO: 1244465
aacuguggacaucaguuau

SEQ ID NO: 1490663 - RNA, 19 nt, Artificial Sequence
  Description of Artificial Sequence: Synthetic oligonucleotide
  Antisense strand to SEQ ID NO: 1490662
auaacugauguccacaguu

SEQ ID NO: 1490664 - RNA, 19 nt, Artificial Sequence
  Description of Artificial Sequence: Synthetic oligonucleotide
  Sense strand starting at position 154 of SEQ ID NO: 1244465
auauaaugguacccuauga

SEQ ID NO: 1490665 - RNA, 19 nt, Artificial Sequence
  Description of Artificial Sequence: Synthetic oligonucleotide
  Antisense strand to SEQ ID NO: 1490664
ucauaggguaccauuauau

SEQ ID NO: 1490666 - RNA, 19 nt, Artificial Sequence
  Description of Artificial Sequence: Synthetic oligonucleotide
  Sense strand starting at position 158 of SEQ ID NO: 1244465
aaugguacccuaugaagau

SEQ ID NO: 1490667 - RNA, 19 nt, Artificial Sequence
  Description of Artificial Sequence: Synthetic oligonucleotide
  Antisense strand to SEQ ID NO: 1490666
aucuucauaggguaccauu

SEQ ID NO: 1490668 - RNA, 19 nt, Artificial Sequence
  Description of Artificial Sequence: Synthetic oligonucleotide
  Sense strand starting at position 173 of SEQ ID NO: 1244465
agauuaaucugauuauggu

SEQ ID NO: 1490669 - RNA, 19 nt, Artificial Sequence
  Description of Artificial Sequence: Synthetic oligonucleotide
  Antisense strand to SEQ ID NO: 1490668
accauaaucagauuaaucu

SEQ ID NO: 1490670 - RNA, 19 nt, Artificial Sequence
  Description of Artificial Sequence: Synthetic oligonucleotide
  Sense strand starting at position 183 of SEQ ID NO: 1244465
gauuaugguguacagaguu

SEQ ID NO: 1490671 - RNA, 19 nt, Artificial Sequence
  Description of Artificial Sequence: Synthetic oligonucleotide
  Antisense strand to SEQ ID NO: 1490670
aacucuguacaccauaauc

SEQ ID NO: 1490672 - RNA, 19 nt, Artificial Sequence
  Description of Artificial Sequence: Synthetic oligonucleotide
  Sense strand starting at position 619 of SEQ ID NO: 1244465
ggauccgagugaucaggau

SEQ ID NO: 1490673 - RNA, 19 nt, Artificial Sequence
  Description of Artificial Sequence: Synthetic oligonucleotide
  Antisense strand to SEQ ID NO: 1490672
auccugaucacucggaucc

SEQ ID NO: 1490674 - RNA, 19 nt, Artificial Sequence
  Description of Artificial Sequence: Synthetic oligonucleotide
  Sense strand starting at position 878 of SEQ ID NO: 1244465
ugacauuggccugaugaug

SEQ ID NO: 1490675 - RNA, 19 nt, Artificial Sequence
  Description of Artificial Sequence: Synthetic oligonucleotide
  Antisense strand to SEQ ID NO: 1490674
caucaucaggccaauguca

SEQ ID NO: 1490676 - RNA, 19 nt, Artificial Sequence
  Description of Artificial Sequence: Synthetic oligonucleotide
  Sense strand starting at position 1140 of SEQ ID NO: 1244465
gggauucaacauuggaguu

SEQ ID NO: 1490677 - RNA, 19 nt, Artificial Sequence
  Description of Artificial Sequence: Synthetic oligonucleotide
  Antisense strand to SEQ ID NO: 1490676
aacuccaauguugaauccc

SEQ ID NO: 1490678 - RNA, 19 nt, Artificial Sequence
  Description of Artificial Sequence: Synthetic oligonucleotide
  Sense strand starting at position 1343 of SEQ ID NO: 1244465
ucguguaagagauaaucag

SEQ ID NO: 1490679 - RNA, 19 nt, Artificial Sequence
  Description of Artificial Sequence: Synthetic oligonucleotide
  Antisense strand to SEQ ID NO: 1490678
cugauuaucucuuacacga

SEQ ID NO: 1490680 - RNA, 19 nt, Artificial Sequence
  Description of Artificial Sequence: Synthetic oligonucleotide
  Sense strand starting at position 1373 of SEQ ID NO: 1244465
aaaugaguccugugagacc

SEQ ID NO: 1490681 - RNA, 19 nt, Artificial Sequence
  Description of Artificial Sequence: Synthetic oligonucleotide
  Antisense strand to SEQ ID NO: 1490680
ggucucacaggacucauuu

SEQ ID NO: 1490682 - RNA, 19 nt, Artificial Sequence
  Description of Artificial Sequence: Synthetic oligonucleotide
  Sense strand starting at position 1586 of SEQ ID NO: 1244465
cagggcucaugaucagaau

SEQ ID NO: 1490683 - RNA, 19 nt, Artificial Sequence
  Description of Artificial Sequence: Synthetic oligonucleotide
  Antisense strand to SEQ ID NO: 1490682
auucugaucaugagcccug

SEQ ID NO: 1490684 - RNA, 19 nt, Artificial Sequence
  Description of Artificial Sequence: Synthetic oligonucleotide
  Sense strand starting at position 1592 of SEQ ID NO: 1244465
ucaugaucagaauguaaug

SEQ ID NO: 1490685 - RNA, 19 nt, Artificial Sequence
  Description of Artificial Sequence: Synthetic oligonucleotide
  Antisense strand to SEQ ID NO: 1490684
cauuacauucugaucauga

SEQ ID NO: 1490686 - RNA, 19 nt, Artificial Sequence
  Description of Artificial Sequence: Synthetic oligonucleotide
  Sense strand starting at position 1745 of SEQ ID NO: 1244465
guauguuugccagcaucuu

SEQ ID NO: 1490687 - RNA, 19 nt, Artificial Sequence
  Description of Artificial Sequence: Synthetic oligonucleotide
  Antisense strand to SEQ ID NO: 1490686
aagaugcuggcaaacauac

SEQ ID NO: 1490688 - RNA, 19 nt, Artificial Sequence
  Description of Artificial Sequence: Synthetic oligonucleotide
  Sense strand starting at position 1799 of SEQ ID NO: 1244465
gggagagguuggcuagaaa

SEQ ID NO: 1490689 - RNA, 19 nt, Artificial Sequence
  Description of Artificial Sequence: Synthetic oligonucleotide
  Antisense strand to SEQ ID NO: 1490688
uuucuagccaaccucuccc

SEQ ID NO: 1490690 - RNA, 19 nt, Artificial Sequence
  Description of Artificial Sequence: Synthetic oligonucleotide
  Sense strand starting at position 2008 of SEQ ID NO: 1244465
uaggaagaaaguuggguua

SEQ ID NO: 1490691 - RNA, 19 nt, Artificial Sequence
  Description of Artificial Sequence: Synthetic oligonucleotide
  Antisense strand to SEQ ID NO: 1490690
uaacccaacuuucuuccua

SEQ ID NO: 1490692 - RNA, 19 nt, Artificial Sequence
  Description of Artificial Sequence: Synthetic oligonucleotide
  Sense strand starting at position 2011 of SEQ ID NO: 1244465
gaagaaaguuggguuaauu

SEQ ID NO: 1490693 - RNA, 19 nt, Artificial Sequence
  Description of Artificial Sequence: Synthetic oligonucleotide
  Antisense strand to SEQ ID NO: 1490692
aauuaacccaacuuucuuc

SEQ ID NO: 1490694 - RNA, 19 nt, Artificial Sequence
  Description of Artificial Sequence: Synthetic oligonucleotide
  Sense strand starting at position 2314 of SEQ ID NO: 1244465
ggcuuugcucugguagugu

SEQ ID NO: 1490695 - RNA, 19 nt, Artificial Sequence
  Description of Artificial Sequence: Synthetic oligonucleotide
  Antisense strand to SEQ ID NO: 1490694
acacuaccagagcaaagcc

SEQ ID NO: 1490696 - RNA, 19 nt, Artificial Sequence
  Description of Artificial Sequence: Synthetic oligonucleotide
  Sense strand starting at position 2336 of SEQ ID NO: 1244465
uguagaaacuaugacauuu

SEQ ID NO: 1490697 - RNA, 19 nt, Artificial Sequence
  Description of Artificial Sequence: Synthetic oligonucleotide
  Antisense strand to SEQ ID NO: 1490696
aaaugucauaguuucuaca

SEQ ID NO: 1490698 - RNA, 19 nt, Artificial Sequence
  Description of Artificial Sequence: Synthetic oligonucleotide
  Sense strand starting at position 2376 of SEQ ID NO: 1244465
gucaaaugagcccauugua

SEQ ID NO: 1490699 - RNA, 19 nt, Artificial Sequence
  Description of Artificial Sequence: Synthetic oligonucleotide
  Antisense strand to SEQ ID NO: 1490698
uacaaugggcucauuugac

SEQ ID NO: 1490700 - RNA, 19 nt, Artificial Sequence
  Description of Artificial Sequence: Synthetic oligonucleotide
  Sense strand starting at position 2457 of SEQ ID NO: 1244465
uggaaaucauuaucacugu

SEQ ID NO: 1490701 - RNA, 19 nt, Artificial Sequence
  Description of Artificial Sequence: Synthetic oligonucleotide
  Antisense strand to SEQ ID NO: 1490700
acagugauaaugauuucca

SEQ ID NO: 1490702 - RNA, 19 nt, Artificial Sequence
  Description of Artificial Sequence: Synthetic oligonucleotide
  Sense strand starting at position 2745 of SEQ ID NO: 1244465
agagaauaggcuugcuaaa

SEQ ID NO: 1490703 - RNA, 19 nt, Artificial Sequence
  Description of Artificial Sequence: Synthetic oligonucleotide
  Antisense strand to SEQ ID NO: 1490702
uuuagcaagccuauucucu

SEQ ID NO: 1490704 - RNA, 19 nt, Artificial Sequence
  Description of Artificial Sequence: Synthetic oligonucleotide
  Sense strand starting at position 2850 of SEQ ID NO: 1244465
cugaauguccuggaucuua

SEQ ID NO: 1490705 - RNA, 19 nt, Artificial Sequence
  Description of Artificial Sequence: Synthetic oligonucleotide
  Antisense strand to SEQ ID NO: 1490704
uaagauccaggacauucag

SEQ ID NO: 1490706 - RNA, 19 nt, Artificial Sequence
  Description of Artificial Sequence: Synthetic oligonucleotide
  Sense strand starting at position 3041 of SEQ ID NO: 1244465
caggucucaccuuagaugu

SEQ ID NO: 1490707 - RNA, 19 nt, Artificial Sequence
  Description of Artificial Sequence: Synthetic oligonucleotide
  Antisense strand to SEQ ID NO: 1490706
acaucuaaggugagaccug

SEQ ID NO: 1490708 - RNA, 19 nt, Artificial Sequence
  Description of Artificial Sequence: Synthetic oligonucleotide
  Sense strand starting at position 3069 of SEQ ID NO: 1244465
ugggaagucuuucccaacu

SEQ ID NO: 1490709 - RNA, 19 nt, Artificial Sequence
  Description of Artificial Sequence: Synthetic oligonucleotide
  Antisense strand to SEQ ID NO: 1490708
aguugggaaagacuuccca

SEQ ID NO: 1490710 - RNA, 19 nt, Artificial Sequence
  Description of Artificial Sequence: Synthetic oligonucleotide
  Sense strand starting at position 3286 of SEQ ID NO: 1244465
cacagaugcucaguaugaa

SEQ ID NO: 1490711 - RNA, 19 nt, Artificial Sequence
  Description of Artificial Sequence: Synthetic oligonucleotide
  Antisense strand to SEQ ID NO: 1490710
uucauacugagcaucugug

SEQ ID NO: 1490712 - RNA, 19 nt, Artificial Sequence
  Description of Artificial Sequence: Synthetic oligonucleotide
  Sense strand starting at position 3287 of SEQ ID NO: 1244465
acagaugcucaguaugaau

SEQ ID NO: 1490713 - RNA, 19 nt, Artificial Sequence
  Description of Artificial Sequence: Synthetic oligonucleotide
  Antisense strand to SEQ ID NO: 1490712
auucauacugagcaucugu

SEQ ID NO: 1490714 - RNA, 19 nt, Artificial Sequence
  Description of Artificial Sequence: Synthetic oligonucleotide
  Sense strand starting at position 3387 of SEQ ID NO: 1244465
gcauaagaauuagccugaa

SEQ ID NO: 1490715 - RNA, 19 nt, Artificial Sequence
  Description of Artificial Sequence: Synthetic oligonucleotide
  Antisense strand to SEQ ID NO: 1490714
uucaggcuaauucuuaugc

SEQ ID NO: 1490716 - RNA, 19 nt, Artificial Sequence
  Description of Artificial Sequence: Synthetic oligonucleotide
  Sense strand starting at position 3753 of SEQ ID NO: 1244465
guagcuuugaguuaaugga

SEQ ID NO: 1490717 - RNA, 19 nt, Artificial Sequence
  Description of Artificial Sequence: Synthetic oligonucleotide
  Antisense strand to SEQ ID NO: 1490716
uccauuaacucaaagcuac

SEQ ID NO: 1490718 - RNA, 19 nt, Artificial Sequence
  Description of Artificial Sequence: Synthetic oligonucleotide
  Sense strand starting at position 3768 of SEQ ID NO: 1244465
uggaguccuggccauagga

SEQ ID NO: 1490719 - RNA, 19 nt, Artificial Sequence
  Description of Artificial Sequence: Synthetic oligonucleotide
  Antisense strand to SEQ ID NO: 1490718
uccuauggccaggacucca

SEQ ID NO: 1490720 - RNA, 19 nt, Artificial Sequence
  Description of Artificial Sequence: Synthetic oligonucleotide
  Sense strand starting at position 3770 of SEQ ID NO: 1244465
gaguccuggccauaggaau

SEQ ID NO: 1490721 - RNA, 19 nt, Artificial Sequence
  Description of Artificial Sequence: Synthetic oligonucleotide
  Antisense strand to SEQ ID NO: 1490720
auuccuauggccaggacuc

SEQ ID NO: 1490722 - RNA, 19 nt, Artificial Sequence
  Description of Artificial Sequence: Synthetic oligonucleotide
  Sense strand starting at position 3805 of SEQ ID NO: 1244465
cgguuacagagagauaagu

SEQ ID NO: 1490723 - RNA, 19 nt, Artificial Sequence
  Description of Artificial Sequence: Synthetic oligonucleotide
  Antisense strand to SEQ ID NO: 1490722
acuuaucucucuguaaccg

SEQ ID NO: 1490724 - RNA, 19 nt, Artificial Sequence
  Description of Artificial Sequence: Synthetic oligonucleotide
  Sense strand starting at position 3807 of SEQ ID NO: 1244465
guuacagagagauaagugu

SEQ ID NO: 1490725 - RNA, 19 nt, Artificial Sequence
  Description of Artificial Sequence: Synthetic oligonucleotide
  Antisense strand to SEQ ID NO: 1490724
acacuuaucucucuguaac

SEQ ID NO: 1490726 - RNA, 19 nt, Artificial Sequence
  Description of Artificial Sequence: Synthetic oligonucleotide
  Sense strand starting at position 3814 of SEQ ID NO: 1244465
agagauaaguguuccaaac

SEQ ID NO: 1490727 - RNA, 19 nt, Artificial Sequence
  Description of Artificial Sequence: Synthetic oligonucleotide
  Antisense strand to SEQ ID NO: 1490726
guuuggaacacuuaucucu

SEQ ID NO: 1490728 - RNA, 19 nt, Artificial Sequence
  Description of Artificial Sequence: Synthetic oligonucleotide
  Sense strand starting at position 3885 of SEQ ID NO: 1244465
gugauuaacccacggaauc

SEQ ID NO: 1490729 - RNA, 19 nt, Artificial Sequence
  Description of Artificial Sequence: Synthetic oligonucleotide
  Antisense strand to SEQ ID NO: 1490728
gauuccguggguuaaucac

SEQ ID NO: 1490730 - RNA, 19 nt, Artificial Sequence
  Description of Artificial Sequence: Synthetic oligonucleotide
  Sense strand starting at position 3886 of SEQ ID NO: 1244465
ugauuaacccacggaauca

SEQ ID NO: 1490731 - RNA, 19 nt, Artificial Sequence
  Description of Artificial Sequence: Synthetic oligonucleotide
  Antisense strand to SEQ ID NO: 1490730
ugauuccguggguuaauca

SEQ ID NO: 1490732 - RNA, 19 nt, Artificial Sequence
  Description of Artificial Sequence: Synthetic oligonucleotide
  Sense strand starting at position 3965 of SEQ ID NO: 1244465
cuuaguuacguacacuaaa

SEQ ID NO: 1490733 - RNA, 19 nt, Artificial Sequence
  Description of Artificial Sequence: Synthetic oligonucleotide
  Antisense strand to SEQ ID NO: 1490732
uuuaguguacguaacuaag

SEQ ID NO: 1490734 - RNA, 19 nt, Artificial Sequence
  Description of Artificial Sequence: Synthetic oligonucleotide
  Sense strand starting at position 82 of SEQ ID NO: 1244466
gaaaucauggcugguuuaa

SEQ ID NO: 1490735 - RNA, 19 nt, Artificial Sequence
  Description of Artificial Sequence: Synthetic oligonucleotide
  Antisense strand to SEQ ID NO: 1490734
uuaaaccagccaugauuuc

SEQ ID NO: 1490736 - RNA, 19 nt, Artificial Sequence
  Description of Artificial Sequence: Synthetic oligonucleotide
  Sense strand starting at position 84 of SEQ ID NO: 1244466
aaucauggcugguuuaacu

SEQ ID NO: 1490737 - RNA, 19 nt, Artificial Sequence
  Description of Artificial Sequence: Synthetic oligonucleotide
  Antisense strand to SEQ ID NO: 1490736
aguuaaaccagccaugauu

SEQ ID NO: 1490738 - RNA, 19 nt, Artificial Sequence
  Description of Artificial Sequence: Synthetic oligonucleotide
  Sense strand starting at position 164 of SEQ ID NO: 1244466
cagggugacuccucaccau

SEQ ID NO: 1490739 - RNA, 19 nt, Artificial Sequence
  Description of Artificial Sequence: Synthetic oligonucleotide
  Antisense strand to SEQ ID NO: 1490738
auggugaggagucacccug

SEQ ID NO: 1490740 - RNA, 19 nt, Artificial Sequence
  Description of Artificial Sequence: Synthetic oligonucleotide
  Sense strand starting at position 167 of SEQ ID NO: 1244466
ggugacuccucaccauaug

SEQ ID NO: 1490741 - RNA, 19 nt, Artificial Sequence
  Description of Artificial Sequence: Synthetic oligonucleotide
  Antisense strand to SEQ ID NO: 1490740
cauauggugaggagucacc

SEQ ID NO: 1490742 - RNA, 19 nt, Artificial Sequence
  Description of Artificial Sequence: Synthetic oligonucleotide
  Sense strand starting at position 168 of SEQ ID NO: 1244466
gugacuccucaccauauga

SEQ ID NO: 1490743 - RNA, 19 nt, Artificial Sequence
  Description of Artificial Sequence: Synthetic oligonucleotide
  Antisense strand to SEQ ID NO: 1490742
ucauauggugaggagucac

SEQ ID NO: 1490744 - RNA, 19 nt, Artificial Sequence
  Description of Artificial Sequence: Synthetic oligonucleotide
  Sense strand starting at position 203 of SEQ ID NO: 1244466
uggauuaucucagcaagga

SEQ ID NO: 1490745 - RNA, 19 nt, Artificial Sequence
  Description of Artificial Sequence: Synthetic oligonucleotide
  Antisense strand to SEQ ID NO: 1490744
uccuugcugagauaaucca

SEQ ID NO: 1490746 - RNA, 19 nt, Artificial Sequence
  Description of Artificial Sequence: Synthetic oligonucleotide
  Sense strand starting at position 260 of SEQ ID NO: 1244466
cauauugaguagucuugga

SEQ ID NO: 1490747 - RNA, 19 nt, Artificial Sequence
  Description of Artificial Sequence: Synthetic oligonucleotide
  Antisense strand to SEQ ID NO: 1490746
uccaagacuacucaauaug

SEQ ID NO: 1490748 - RNA, 19 nt, Artificial Sequence
  Description of Artificial Sequence: Synthetic oligonucleotide
  Sense strand starting at position 446 of SEQ ID NO: 1244466
gguaucaggugcuccagaa

SEQ ID NO: 1490749 - RNA, 19 nt, Artificial Sequence
  Description of Artificial Sequence: Synthetic oligonucleotide
  Antisense strand to SEQ ID NO: 1490748
uucuggagcaccugauacc

SEQ ID NO: 1490750 - RNA, 19 nt, Artificial Sequence
  Description of Artificial Sequence: Synthetic oligonucleotide
  Sense strand starting at position 450 of SEQ ID NO: 1244466
ucaggugcuccagaauuac

SEQ ID NO: 1490751 - RNA, 19 nt, Artificial Sequence
  Description of Artificial Sequence: Synthetic oligonucleotide
  Antisense strand to SEQ ID NO: 1490750
guaauucuggagcaccuga

SEQ ID NO: 1490752 - RNA, 19 nt, Artificial Sequence
  Description of Artificial Sequence: Synthetic oligonucleotide
  Sense strand starting at position 456 of SEQ ID NO: 1244466
gcuccagaauuacuagaga

SEQ ID NO: 1490753 - RNA, 19 nt, Artificial Sequence
  Description of Artificial Sequence: Synthetic oligonucleotide
  Antisense strand to SEQ ID NO: 1490752
ucucuaguaauucuggagc

SEQ ID NO: 1490754 - RNA, 19 nt, Artificial Sequence
  Description of Artificial Sequence: Synthetic oligonucleotide
  Sense strand starting at position 524 of SEQ ID NO: 1244466
ccuuguuuaaugggaauag

SEQ ID NO: 1490755 - RNA, 19 nt, Artificial Sequence
  Description of Artificial Sequence: Synthetic oligonucleotide
  Antisense strand to SEQ ID NO: 1490754
cuauucccauuaaacaagg

SEQ ID NO: 1490756 - RNA, 19 nt, Artificial Sequence
  Description of Artificial Sequence: Synthetic oligonucleotide
  Sense strand starting at position 740 of SEQ ID NO: 1244466
aagagucauuccuucugga

SEQ ID NO: 1490757 - RNA, 19 nt, Artificial Sequence
  Description of Artificial Sequence: Synthetic oligonucleotide
  Antisense strand to SEQ ID NO: 1490756
uccagaaggaaugacucuu

SEQ ID NO: 1490758 - RNA, 19 nt, Artificial Sequence
  Description of Artificial Sequence: Synthetic oligonucleotide
  Sense strand starting at position 1073 of SEQ ID NO: 1244466
cugugagcauccuccagau

SEQ ID NO: 1490759 - RNA, 19 nt, Artificial Sequence
  Description of Artificial Sequence: Synthetic oligonucleotide
  Antisense strand to SEQ ID NO: 1490758
aucuggaggaugcucacag

SEQ ID NO: 1490760 - RNA, 19 nt, Artificial Sequence
  Description of Artificial Sequence: Synthetic oligonucleotide
  Sense strand starting at position 1113 of SEQ ID NO: 1244466
ucugaagcuguagaugauu

SEQ ID NO: 1490761 - RNA, 19 nt, Artificial Sequence
  Description of Artificial Sequence: Synthetic oligonucleotide
  Antisense strand to SEQ ID NO: 1490760
aaucaucuacagcuucaga

SEQ ID NO: 1490762 - RNA, 19 nt, Artificial Sequence
  Description of Artificial Sequence: Synthetic oligonucleotide
  Sense strand starting at position 1130 of SEQ ID NO: 1244466
uuggguucagcaugggauu

SEQ ID NO: 1490763 - RNA, 19 nt, Artificial Sequence
  Description of Artificial Sequence: Synthetic oligonucleotide
  Antisense strand to SEQ ID NO: 1490762
aaucccaugcugaacccaa

SEQ ID NO: 1490764 - RNA, 19 nt, Artificial Sequence
  Description of Artificial Sequence: Synthetic oligonucleotide
  Sense strand starting at position 1145 of SEQ ID NO: 1244466
gauugaugacaguguugaa

SEQ ID NO: 1490765 - RNA, 19 nt, Artificial Sequence
  Description of Artificial Sequence: Synthetic oligonucleotide
  Antisense strand to SEQ ID NO: 1490764
uucaacacugucaucaauc

SEQ ID NO: 1490766 - RNA, 19 nt, Artificial Sequence
  Description of Artificial Sequence: Synthetic oligonucleotide
  Sense strand starting at position 1175 of SEQ ID NO: 1244466
cuuuauccuugucugaaag

SEQ ID NO: 1490767 - RNA, 19 nt, Artificial Sequence
  Description of Artificial Sequence: Synthetic oligonucleotide
  Antisense strand to SEQ ID NO: 1490766
cuuucagacaaggauaaag

SEQ ID NO: 1490768 - RNA, 19 nt, Artificial Sequence
  Description of Artificial Sequence: Synthetic oligonucleotide
  Sense strand starting at position 1185 of SEQ ID NO: 1244466
gucugaaagcuugguugaa

SEQ ID NO: 1490769 - RNA, 19 nt, Artificial Sequence
  Description of Artificial Sequence: Synthetic oligonucleotide
  Antisense strand to SEQ ID NO: 1490768
uucaaccaagcuuucagac

SEQ ID NO: 1490770 - RNA, 19 nt, Artificial Sequence
  Description of Artificial Sequence: Synthetic oligonucleotide
  Sense strand starting at position 1186 of SEQ ID NO: 1244466
ucugaaagcuugguugaac

SEQ ID NO: 1490771 - RNA, 19 nt, Artificial Sequence
  Description of Artificial Sequence: Synthetic oligonucleotide
  Antisense strand to SEQ ID NO: 1490770
guucaaccaagcuuucaga

SEQ ID NO: 1490772 - RNA, 19 nt, Artificial Sequence
  Description of Artificial Sequence: Synthetic oligonucleotide
  Sense strand starting at position 1207 of SEQ ID NO: 1244466
agucgcauauaguuaaaga

SEQ ID NO: 1490773 - RNA, 19 nt, Artificial Sequence
  Description of Artificial Sequence: Synthetic oligonucleotide
  Antisense strand to SEQ ID NO: 1490772
ucuuuaacuauaugcgacu

SEQ ID NO: 1490774 - RNA, 19 nt, Artificial Sequence
  Description of Artificial Sequence: Synthetic oligonucleotide
  Sense strand starting at position 1208 of SEQ ID NO: 1244466
gucgcauauaguuaaagau

SEQ ID NO: 1490775 - RNA, 19 nt, Artificial Sequence
  Description of Artificial Sequence: Synthetic oligonucleotide
  Antisense strand to SEQ ID NO: 1490774
aucuuuaacuauaugcgac

SEQ ID NO: 1490776 - RNA, 19 nt, Artificial Sequence
  Description of Artificial Sequence: Synthetic oligonucleotide
  Sense strand starting at position 1457 of SEQ ID NO: 1244466
aguagaagugauugaucac

SEQ ID NO: 1490777 - RNA, 19 nt, Artificial Sequence
  Description of Artificial Sequence: Synthetic oligonucleotide
  Antisense strand to SEQ ID NO: 1490776
gugaucaaucacuucuacu

SEQ ID NO: 1490778 - RNA, 19 nt, Artificial Sequence
  Description of Artificial Sequence: Synthetic oligonucleotide
  Sense strand starting at position 1460 of SEQ ID NO: 1244466
agaagugauugaucacauu

SEQ ID NO: 1490779 - RNA, 19 nt, Artificial Sequence
  Description of Artificial Sequence: Synthetic oligonucleotide
  Antisense strand to SEQ ID NO: 1490778
aaugugaucaaucacuucu

SEQ ID NO: 1490780 - RNA, 19 nt, Artificial Sequence
  Description of Artificial Sequence: Synthetic oligonucleotide
  Sense strand starting at position 1616 of SEQ ID NO: 1244466
uggccaggaaucggucaua

SEQ ID NO: 1490781 - RNA, 19 nt, Artificial Sequence
  Description of Artificial Sequence: Synthetic oligonucleotide
  Antisense strand to SEQ ID NO: 1490780
uaugaccgauuccuggcca

SEQ ID NO: 1490782 - RNA, 19 nt, Artificial Sequence
  Description of Artificial Sequence: Synthetic oligonucleotide
  Sense strand starting at position 1986 of SEQ ID NO: 1244466
agauucuggcugcaugagu

SEQ ID NO: 1490783 - RNA, 19 nt, Artificial Sequence
  Description of Artificial Sequence: Synthetic oligonucleotide
  Antisense strand to SEQ ID NO: 1490782
acucaugcagccagaaucu

SEQ ID NO: 1490784 - RNA, 19 nt, Artificial Sequence
  Description of Artificial Sequence: Synthetic oligonucleotide
  Sense strand starting at position 2110 of SEQ ID NO: 1244466
guucccucuguacaaguaa

SEQ ID NO: 1490785 - RNA, 19 nt, Artificial Sequence
  Description of Artificial Sequence: Synthetic oligonucleotide
  Antisense strand to SEQ ID NO: 1490784
uuacuuguacagagggaac

SEQ ID NO: 1490786 - RNA, 19 nt, Artificial Sequence
  Description of Artificial Sequence: Synthetic oligonucleotide
  Sense strand starting at position 2164 of SEQ ID NO: 1244466
uuacucugucgcuacauuu

SEQ ID NO: 1490787 - RNA, 19 nt, Artificial Sequence
  Description of Artificial Sequence: Synthetic oligonucleotide
  Antisense strand to SEQ ID NO: 1490786
aaauguagcgacagaguaa

SEQ ID NO: 1490788 - RNA, 19 nt, Artificial Sequence
  Description of Artificial Sequence: Synthetic oligonucleotide
  Sense strand starting at position 2192 of SEQ ID NO: 1244466
acuuuauuugcaggcguaa

SEQ ID NO: 1490789 - RNA, 19 nt, Artificial Sequence
  Description of Artificial Sequence: Synthetic oligonucleotide
  Antisense strand to SEQ ID NO: 1490788
uuacgccugcaaauaaagu

SEQ ID NO: 1490790 - RNA, 19 nt, Artificial Sequence
  Description of Artificial Sequence: Synthetic oligonucleotide
  Sense strand starting at position 2267 of SEQ ID NO: 1244466
agaaccuauuuguaaagau

SEQ ID NO: 1490791 - RNA, 19 nt, Artificial Sequence
  Description of Artificial Sequence: Synthetic oligonucleotide
  Antisense strand to SEQ ID NO: 1490790
aucuuuacaaauagguucu

SEQ ID NO: 1490792 - RNA, 19 nt, Artificial Sequence
  Description of Artificial Sequence: Synthetic oligonucleotide
  Sense strand starting at position 2324 of SEQ ID NO: 1244466
guacuucugguuugaacau

SEQ ID NO: 1490793 - RNA, 19 nt, Artificial Sequence
  Description of Artificial Sequence: Synthetic oligonucleotide
  Antisense strand to SEQ ID NO: 1490792
auguucaaaccagaaguac

SEQ ID NO: 1490794 - RNA, 19 nt, Artificial Sequence
  Description of Artificial Sequence: Synthetic oligonucleotide
  Sense strand starting at position 2335 of SEQ ID NO: 1244466
uugaacauggccgaguaaa

SEQ ID NO: 1490795 - RNA, 19 nt, Artificial Sequence
  Description of Artificial Sequence: Synthetic oligonucleotide
  Antisense strand to SEQ ID NO: 1490794
uuuacucggccauguucaa

SEQ ID NO: 1490796 - RNA, 19 nt, Artificial Sequence
  Description of Artificial Sequence: Synthetic oligonucleotide
  Sense strand starting at position 2528 of SEQ ID NO: 1244466
ggaaauccaugacuguaua

SEQ ID NO: 1490797 - RNA, 19 nt, Artificial Sequence
  Description of Artificial Sequence: Synthetic oligonucleotide
  Antisense strand to SEQ ID NO: 1490796
uauacagucauggauuucc

SEQ ID NO: 1490798 - RNA, 19 nt, Artificial Sequence
  Description of Artificial Sequence: Synthetic oligonucleotide
  Sense strand starting at position 2632 of SEQ ID NO: 1244466
guuugcaauaauggguaua

SEQ ID NO: 1490799 - RNA, 19 nt, Artificial Sequence
  Description of Artificial Sequence: Synthetic oligonucleotide
  Antisense strand to SEQ ID NO: 1490798
uauacccauuauugcaaac

SEQ ID NO: 1490800 - RNA, 19 nt, Artificial Sequence
  Description of Artificial Sequence: Synthetic oligonucleotide
  Sense strand starting at position 2644 of SEQ ID NO: 1244466
ggguauaugguguaaagua

SEQ ID NO: 1490801 - RNA, 19 nt, Artificial Sequence
  Description of Artificial Sequence: Synthetic oligonucleotide
  Antisense strand to SEQ ID NO: 1490800
uacuuuacaccauauaccc

SEQ ID NO: 1490802 - RNA, 19 nt, Artificial Sequence
  Description of Artificial Sequence: Synthetic oligonucleotide
  Sense strand starting at position 2665 of SEQ ID NO: 1244466
gcaccauaauccucuguga

SEQ ID NO: 1490803 - RNA, 19 nt, Artificial Sequence
  Description of Artificial Sequence: Synthetic oligonucleotide
  Antisense strand to SEQ ID NO: 1490802
ucacagaggauuauggugc

SEQ ID NO: 1490804 - RNA, 19 nt, Artificial Sequence
  Description of Artificial Sequence: Synthetic oligonucleotide
  Sense strand starting at position 2803 of SEQ ID NO: 1244466
cuauuuaccugucugcauu

SEQ ID NO: 1490805 - RNA, 19 nt, Artificial Sequence
  Description of Artificial Sequence: Synthetic oligonucleotide
  Antisense strand to SEQ ID NO: 1490804
aaugcagacagguaaauag

SEQ ID NO: 1490806 - RNA, 19 nt, Artificial Sequence
  Description of Artificial Sequence: Synthetic oligonucleotide
  Sense strand starting at position 2890 of SEQ ID NO: 1244466
ucugaaacaugucuuagac

SEQ ID NO: 1490807 - RNA, 19 nt, Artificial Sequence
  Description of Artificial Sequence: Synthetic oligonucleotide
  Antisense strand to SEQ ID NO: 1490806
gucuaagacauguuucaga

SEQ ID NO: 1490808 - RNA, 19 nt, Artificial Sequence
  Description of Artificial Sequence: Synthetic oligonucleotide
  Sense strand starting at position 2922 of SEQ ID NO: 1244466
gcaucuugugaauaucuag

SEQ ID NO: 1490809 - RNA, 19 nt, Artificial Sequence
  Description of Artificial Sequence: Synthetic oligonucleotide
  Antisense strand to SEQ ID NO: 1490808
cuagauauucacaagaugc

SEQ ID NO: 1490810 - RNA, 19 nt, Artificial Sequence
  Description of Artificial Sequence: Synthetic oligonucleotide
  Sense strand starting at position 2925 of SEQ ID NO: 1244466
ucuugugaauaucuaguuu

SEQ ID NO: 1490811 - RNA, 19 nt, Artificial Sequence
  Description of Artificial Sequence: Synthetic oligonucleotide
  Antisense strand to SEQ ID NO: 1490810
aaacuagauauucacaaga

SEQ ID NO: 1490812 - RNA, 19 nt, Artificial Sequence
  Description of Artificial Sequence: Synthetic oligonucleotide
  Sense strand starting at position 2931 of SEQ ID NO: 1244466
gaauaucuaguuuggcaaa

SEQ ID NO: 1490813 - RNA, 19 nt, Artificial Sequence
  Description of Artificial Sequence: Synthetic oligonucleotide
  Antisense strand to SEQ ID NO: 1490812
uuugccaaacuagauauuc

SEQ ID NO: 1490814 - RNA, 19 nt, Artificial Sequence
  Description of Artificial Sequence: Synthetic oligonucleotide
  Sense strand starting at position 251 of SEQ ID NO: 1244467
gucaacauccagcaggauu

SEQ ID NO: 1490815 - RNA, 19 nt, Artificial Sequence
  Description of Artificial Sequence: Synthetic oligonucleotide
  Antisense strand to SEQ ID NO: 1490814
aauccugcuggauguugac

SEQ ID NO: 1490816 - RNA, 19 nt, Artificial Sequence
  Description of Artificial Sequence: Synthetic oligonucleotide
  Sense strand starting at position 438 of SEQ ID NO: 1244467
uucugaucugcagggaauc

SEQ ID NO: 1490817 - RNA, 19 nt, Artificial Sequence
  Description of Artificial Sequence: Synthetic oligonucleotide
  Antisense strand to SEQ ID NO: 1490816
gauucccugcagaucagaa

SEQ ID NO: 1490818 - RNA, 19 nt, Artificial Sequence
  Description of Artificial Sequence: Synthetic oligonucleotide
  Sense strand starting at position 504 of SEQ ID NO: 1244467
cugugauugaccgacugga

SEQ ID NO: 1490819 - RNA, 19 nt, Artificial Sequence
  Description of Artificial Sequence: Synthetic oligonucleotide
  Antisense strand to SEQ ID NO: 1490818
uccagucggucaaucacag

SEQ ID NO: 1490820 - RNA, 19 nt, Artificial Sequence
  Description of Artificial Sequence: Synthetic oligonucleotide
  Sense strand starting at position 517 of SEQ ID NO: 1244467
acuggacauucuuuguaga

SEQ ID NO: 1490821 - RNA, 19 nt, Artificial Sequence
  Description of Artificial Sequence: Synthetic oligonucleotide
  Antisense strand to SEQ ID NO: 1490820
ucuacaaagaauguccagu

SEQ ID NO: 1490822 - RNA, 19 nt, Artificial Sequence
  Description of Artificial Sequence: Synthetic oligonucleotide
  Sense strand starting at position 518 of SEQ ID NO: 1244467
cuggacauucuuuguagaa

SEQ ID NO: 1490823 - RNA, 19 nt, Artificial Sequence
  Description of Artificial Sequence: Synthetic oligonucleotide
  Antisense strand to SEQ ID NO: 1490822
uucuacaaagaauguccag

SEQ ID NO: 1490824 - RNA, 19 nt, Artificial Sequence
  Description of Artificial Sequence: Synthetic oligonucleotide
  Sense strand starting at position 519 of SEQ ID NO: 1244467
uggacauucuuuguagaau

SEQ ID NO: 1490825 - RNA, 19 nt, Artificial Sequence
  Description of Artificial Sequence: Synthetic oligonucleotide
  Antisense strand to SEQ ID NO: 1490824
auucuacaaagaaugucca

SEQ ID NO: 1490826 - RNA, 19 nt, Artificial Sequence
  Description of Artificial Sequence: Synthetic oligonucleotide
  Sense strand starting at position 683 of SEQ ID NO: 1244467
caucaugugguauauauga

SEQ ID NO: 1490827 - RNA, 19 nt, Artificial Sequence
  Description of Artificial Sequence: Synthetic oligonucleotide
  Antisense strand to SEQ ID NO: 1490826
ucauauauaccacaugaug

SEQ ID NO: 1490828 - RNA, 19 nt, Artificial Sequence
  Description of Artificial Sequence: Synthetic oligonucleotide
  Sense strand starting at position 771 of SEQ ID NO: 1244467
ccaccaaugccuuggaaga

SEQ ID NO: 1490829 - RNA, 19 nt, Artificial Sequence
  Description of Artificial Sequence: Synthetic oligonucleotide
  Antisense strand to SEQ ID NO: 1490828
ucuuccaaggcauuggugg

SEQ ID NO: 1490830 - RNA, 19 nt, Artificial Sequence
  Description of Artificial Sequence: Synthetic oligonucleotide
  Sense strand starting at position 782 of SEQ ID NO: 1244467
uuggaagacuguccagauc

SEQ ID NO: 1490831 - RNA, 19 nt, Artificial Sequence
  Description of Artificial Sequence: Synthetic oligonucleotide
  Antisense strand to SEQ ID NO: 1490830
gaucuggacagucuuccaa

SEQ ID NO: 1490832 - RNA, 19 nt, Artificial Sequence
  Description of Artificial Sequence: Synthetic oligonucleotide
  Sense strand starting at position 831 of SEQ ID NO: 1244467
ugaauaaauuauguagggu

SEQ ID NO: 1490833 - RNA, 19 nt, Artificial Sequence
  Description of Artificial Sequence: Synthetic oligonucleotide
  Antisense strand to SEQ ID NO: 1490832
acccuacauaauuuauuca

SEQ ID NO: 1490834 - RNA, 19 nt, Artificial Sequence
  Description of Artificial Sequence: Synthetic oligonucleotide
  Sense strand starting at position 847 of SEQ ID NO: 1244467
gguuuccuaguaggacaaa

SEQ ID NO: 1490835 - RNA, 19 nt, Artificial Sequence
  Description of Artificial Sequence: Synthetic oligonucleotide
  Antisense strand to SEQ ID NO: 1490834
uuuguccuacuaggaaacc

SEQ ID NO: 1490836 - RNA, 19 nt, Artificial Sequence
  Description of Artificial Sequence: Synthetic oligonucleotide
  Sense strand starting at position 928 of SEQ ID NO: 1244467
gguuacugucuucauggga

SEQ ID NO: 1490837 - RNA, 19 nt, Artificial Sequence
  Description of Artificial Sequence: Synthetic oligonucleotide
  Antisense strand to SEQ ID NO: 1490836
ucccaugaagacaguaacc

SEQ ID NO: 1490838 - RNA, 19 nt, Artificial Sequence
  Description of Artificial Sequence: Synthetic oligonucleotide
  Sense strand starting at position 1079 of SEQ ID NO: 1244467
ucagcauaggguugauaac

SEQ ID NO: 1490839 - RNA, 19 nt, Artificial Sequence
  Description of Artificial Sequence: Synthetic oligonucleotide
  Antisense strand to SEQ ID NO: 1490838
guuaucaacccuaugcuga

SEQ ID NO: 1490840 - RNA, 19 nt, Artificial Sequence
  Description of Artificial Sequence: Synthetic oligonucleotide
  Sense strand starting at position 1088 of SEQ ID NO: 1244467
gguugauaacaguguugaa

SEQ ID NO: 1490841 - RNA, 19 nt, Artificial Sequence
  Description of Artificial Sequence: Synthetic oligonucleotide
  Antisense strand to SEQ ID NO: 1490840
uucaacacuguuaucaacc

SEQ ID NO: 1490842 - RNA, 19 nt, Artificial Sequence
  Description of Artificial Sequence: Synthetic oligonucleotide
  Sense strand starting at position 1117 of SEQ ID NO: 1244467
ccuuuauccuugucugaag

SEQ ID NO: 1490843 - RNA, 19 nt, Artificial Sequence
  Description of Artificial Sequence: Synthetic oligonucleotide
  Antisense strand to SEQ ID NO: 1490842
cuucagacaaggauaaagg

SEQ ID NO: 1490844 - RNA, 19 nt, Artificial Sequence
  Description of Artificial Sequence: Synthetic oligonucleotide
  Sense strand starting at position 1147 of SEQ ID NO: 1244467
cccagucucauguaguuga

SEQ ID NO: 1490845 - RNA, 19 nt, Artificial Sequence
  Description of Artificial Sequence: Synthetic oligonucleotide
  Antisense strand to SEQ ID NO: 1490844
ucaacuacaugagacuggg

SEQ ID NO: 1490846 - RNA, 19 nt, Artificial Sequence
  Description of Artificial Sequence: Synthetic oligonucleotide
  Sense strand starting at position 1150 of SEQ ID NO: 1244467
agucucauguaguugaaga

SEQ ID NO: 1490847 - RNA, 19 nt, Artificial Sequence
  Description of Artificial Sequence: Synthetic oligonucleotide
  Antisense strand to SEQ ID NO: 1490846
ucuucaacuacaugagacu

SEQ ID NO: 1490848 - RNA, 19 nt, Artificial Sequence
  Description of Artificial Sequence: Synthetic oligonucleotide
  Sense strand starting at position 1152 of SEQ ID NO: 1244467
ucucauguaguugaagaua

SEQ ID NO: 1490849 - RNA, 19 nt, Artificial Sequence
  Description of Artificial Sequence: Synthetic oligonucleotide
  Antisense strand to SEQ ID NO: 1490848
uaucuucaacuacaugaga

SEQ ID NO: 1490850 - RNA, 19 nt, Artificial Sequence
  Description of Artificial Sequence: Synthetic oligonucleotide
  Sense strand starting at position 1243 of SEQ ID NO: 1244467
acugaacggauucguagaa

SEQ ID NO: 1490851 - RNA, 19 nt, Artificial Sequence
  Description of Artificial Sequence: Synthetic oligonucleotide
  Antisense strand to SEQ ID NO: 1490850
uucuacgaauccguucagu

SEQ ID NO: 1490852 - RNA, 19 nt, Artificial Sequence
  Description of Artificial Sequence: Synthetic oligonucleotide
  Sense strand starting at position 1281 of SEQ ID NO: 1244467
guaggcagugaugaugaga

SEQ ID NO: 1490853 - RNA, 19 nt, Artificial Sequence
  Description of Artificial Sequence: Synthetic oligonucleotide
  Antisense strand to SEQ ID NO: 1490852
ucucaucaucacugccuac

SEQ ID NO: 1490854 - RNA, 19 nt, Artificial Sequence
  Description of Artificial Sequence: Synthetic oligonucleotide
  Sense strand starting at position 1308 of SEQ ID NO: 1244467
ugugccugccaugaugaaa

SEQ ID NO: 1490855 - RNA, 19 nt, Artificial Sequence
  Description of Artificial Sequence: Synthetic oligonucleotide
  Antisense strand to SEQ ID NO: 1490854
uuucaucauggcaggcaca

SEQ ID NO: 1490856 - RNA, 19 nt, Artificial Sequence
  Description of Artificial Sequence: Synthetic oligonucleotide
  Sense strand starting at position 1403 of SEQ ID NO: 1244467
agaagugauugaccucauu

SEQ ID NO: 1490857 - RNA, 19 nt, Artificial Sequence
  Description of Artificial Sequence: Synthetic oligonucleotide
  Antisense strand to SEQ ID NO: 1490856
aaugaggucaaucacuucu

SEQ ID NO: 1490858 - RNA, 19 nt, Artificial Sequence
  Description of Artificial Sequence: Synthetic oligonucleotide
  Sense strand starting at position 1688 of SEQ ID NO: 1244467
ccaacauugcaggaacagu

SEQ ID NO: 1490859 - RNA, 19 nt, Artificial Sequence
  Description of Artificial Sequence: Synthetic oligonucleotide
  Antisense strand to SEQ ID NO: 1490858
acuguuccugcaauguugg

SEQ ID NO: 1490860 - RNA, 19 nt, Artificial Sequence
  Description of Artificial Sequence: Synthetic oligonucleotide
  Sense strand starting at position 1940 of SEQ ID NO: 1244467
ccaugaguuucuguaagga

SEQ ID NO: 1490861 - RNA, 19 nt, Artificial Sequence
  Description of Artificial Sequence: Synthetic oligonucleotide
  Antisense strand to SEQ ID NO: 1490860
uccuuacagaaacucaugg

SEQ ID NO: 1490862 - RNA, 19 nt, Artificial Sequence
  Description of Artificial Sequence: Synthetic oligonucleotide
  Sense strand starting at position 2202 of SEQ ID NO: 1244467
guuaauaaaguguauugca

SEQ ID NO: 1490863 - RNA, 19 nt, Artificial Sequence
  Description of Artificial Sequence: Synthetic oligonucleotide
  Antisense strand to SEQ ID NO: 1490862
ugcaauacacuuuauuaac

SEQ ID NO: 1490864 - RNA, 19 nt, Artificial Sequence
  Description of Artificial Sequence: Synthetic oligonucleotide
  Sense strand starting at position 2356 of SEQ ID NO: 1244467
uguucuguaccuuaaauau

SEQ ID NO: 1490865 - RNA, 19 nt, Artificial Sequence
  Description of Artificial Sequence: Synthetic oligonucleotide
  Antisense strand to SEQ ID NO: 1490864
auauuuaagguacagaaca

SEQ ID NO: 1490866 - RNA, 19 nt, Artificial Sequence
  Description of Artificial Sequence: Synthetic oligonucleotide
  Sense strand starting at position 2405 of SEQ ID NO: 1244467
aggcuuccucuaugaauau

SEQ ID NO: 1490867 - RNA, 19 nt, Artificial Sequence
  Description of Artificial Sequence: Synthetic oligonucleotide
  Antisense strand to SEQ ID NO: 1490866
auauucauagaggaagccu

SEQ ID NO: 1490868 - RNA, 19 nt, Artificial Sequence
  Description of Artificial Sequence: Synthetic oligonucleotide
  Sense strand starting at position 2423 of SEQ ID NO: 1244467
uaguuagauuuagaugaag

SEQ ID NO: 1490869 - RNA, 19 nt, Artificial Sequence
  Description of Artificial Sequence: Synthetic oligonucleotide
  Antisense strand to SEQ ID NO: 1490868
cuucaucuaaaucuaacua

SEQ ID NO: 1490870 - RNA, 19 nt, Artificial Sequence
  Description of Artificial Sequence: Synthetic oligonucleotide
  Sense strand starting at position 2446 of SEQ ID NO: 1244467
ccuauugcucucugaggga

SEQ ID NO: 1490871 - RNA, 19 nt, Artificial Sequence
  Description of Artificial Sequence: Synthetic oligonucleotide
  Antisense strand to SEQ ID NO: 1490870
ucccucagagagcaauagg

SEQ ID NO: 1490872 - RNA, 19 nt, Artificial Sequence
  Description of Artificial Sequence: Synthetic oligonucleotide
  Sense strand starting at position 2450 of SEQ ID NO: 1244467
uugcucucugagggaucau

SEQ ID NO: 1490873 - RNA, 19 nt, Artificial Sequence
  Description of Artificial Sequence: Synthetic oligonucleotide
  Antisense strand to SEQ ID NO: 1490872
augaucccucagagagcaa

SEQ ID NO: 1490874 - RNA, 19 nt, Artificial Sequence
  Description of Artificial Sequence: Synthetic oligonucleotide
  Sense strand starting at position 2591 of SEQ ID NO: 1244467
gggugcaucaucugagauc

SEQ ID NO: 1490875 - RNA, 19 nt, Artificial Sequence
  Description of Artificial Sequence: Synthetic oligonucleotide
  Antisense strand to SEQ ID NO: 1490874
gaucucagaugaugcaccc

SEQ ID NO: 1490876 - RNA, 19 nt, Artificial Sequence
  Description of Artificial Sequence: Synthetic oligonucleotide
  Sense strand starting at position 2909 of SEQ ID NO: 1244467
agguauucaugauugugga

SEQ ID NO: 1490877 - RNA, 19 nt, Artificial Sequence
  Description of Artificial Sequence: Synthetic oligonucleotide
  Antisense strand to SEQ ID NO: 1490876
uccacaaucaugaauaccu

SEQ ID NO: 1490878 - RNA, 19 nt, Artificial Sequence
  Description of Artificial Sequence: Synthetic oligonucleotide
  Sense strand starting at position 2910 of SEQ ID NO: 1244467
gguauucaugauuguggau

SEQ ID NO: 1490879 - RNA, 19 nt, Artificial Sequence
  Description of Artificial Sequence: Synthetic oligonucleotide
  Antisense strand to SEQ ID NO: 1490878
auccacaaucaugaauacc

SEQ ID NO: 1490880 - RNA, 19 nt, Artificial Sequence
  Description of Artificial Sequence: Synthetic oligonucleotide
  Sense strand starting at position 2966 of SEQ ID NO: 1244467
gggaccacacucugaagua

SEQ ID NO: 1490881 - RNA, 19 nt, Artificial Sequence
  Description of Artificial Sequence: Synthetic oligonucleotide
  Antisense strand to SEQ ID NO: 1490880
uacuucagagugugguccc

SEQ ID NO: 1490882 - RNA, 19 nt, Artificial Sequence
  Description of Artificial Sequence: Synthetic oligonucleotide
  Sense strand starting at position 3257 of SEQ ID NO: 1244467
gaaggcauguacuuggaaa

SEQ ID NO: 1490883 - RNA, 19 nt, Artificial Sequence
  Description of Artificial Sequence: Synthetic oligonucleotide
  Antisense strand to SEQ ID NO: 1490882
uuuccaaguacaugccuuc

SEQ ID NO: 1490884 - RNA, 19 nt, Artificial Sequence
  Description of Artificial Sequence: Synthetic oligonucleotide
  Sense strand starting at position 3643 of SEQ ID NO: 1244467
gucucuauugcccauggaa

SEQ ID NO: 1490885 - RNA, 19 nt, Artificial Sequence
  Description of Artificial Sequence: Synthetic oligonucleotide
  Antisense strand to SEQ ID NO: 1490884
uuccaugggcaauagagac

SEQ ID NO: 1490886 - RNA, 19 nt, Artificial Sequence
  Description of Artificial Sequence: Synthetic oligonucleotide
  Sense strand starting at position 3645 of SEQ ID NO: 1244467
cucuauugcccauggaaua

SEQ ID NO: 1490887 - RNA, 19 nt, Artificial Sequence
  Description of Artificial Sequence: Synthetic oligonucleotide
  Antisense strand to SEQ ID NO: 1490886
uauuccaugggcaauagag

SEQ ID NO: 1490888 - RNA, 19 nt, Artificial Sequence
  Description of Artificial Sequence: Synthetic oligonucleotide
  Sense strand starting at position 3646 of SEQ ID NO: 1244467
ucuauugcccauggaauaa

SEQ ID NO: 1490889 - RNA, 19 nt, Artificial Sequence
  Description of Artificial Sequence: Synthetic oligonucleotide
  Antisense strand to SEQ ID NO: 1490888
uuauuccaugggcaauaga

SEQ ID NO: 1490890 - RNA, 19 nt, Artificial Sequence
  Description of Artificial Sequence: Synthetic oligonucleotide
  Sense strand starting at position 3749 of SEQ ID NO: 1244467
aacagugaugauugccuga

SEQ ID NO: 1490891 - RNA, 19 nt, Artificial Sequence
  Description of Artificial Sequence: Synthetic oligonucleotide
  Antisense strand to SEQ ID NO: 1490890
ucaggcaaucaucacuguu

SEQ ID NO: 1490892 - RNA, 19 nt, Artificial Sequence
  Description of Artificial Sequence: Synthetic oligonucleotide
  Sense strand starting at position 3842 of SEQ ID NO: 1244467
gacugauaugacugccuag

SEQ ID NO: 1490893 - RNA, 19 nt, Artificial Sequence
  Description of Artificial Sequence: Synthetic oligonucleotide
  Antisense strand to SEQ ID NO: 1490892
cuaggcagucauaucaguc

SEQ ID NO: 1490894 - RNA, 19 nt, Artificial Sequence
  Description of Artificial Sequence: Synthetic oligonucleotide
  Sense strand starting at position 9 of SEQ ID NO: 1244468
guuagaaggaggugucacu

SEQ ID NO: 1490895 - RNA, 19 nt, Artificial Sequence
  Description of Artificial Sequence: Synthetic oligonucleotide
  Antisense strand to SEQ ID NO: 1490894
agugacaccuccuucuaac

SEQ ID NO: 1490896 - RNA, 19 nt, Artificial Sequence
  Description of Artificial Sequence: Synthetic oligonucleotide
  Sense strand starting at position 36 of SEQ ID NO: 1244468
cugcauuuaugggugugua

SEQ ID NO: 1490897 - RNA, 19 nt, Artificial Sequence
  Description of Artificial Sequence: Synthetic oligonucleotide
  Antisense strand to SEQ ID NO: 1490896
uacacacccauaaaugcag

SEQ ID NO: 1490898 - RNA, 19 nt, Artificial Sequence
  Description of Artificial Sequence: Synthetic oligonucleotide
  Sense strand starting at position 37 of SEQ ID NO: 1244468
ugcauuuauggguguguau

SEQ ID NO: 1490899 - RNA, 19 nt, Artificial Sequence
  Description of Artificial Sequence: Synthetic oligonucleotide
  Antisense strand to SEQ ID NO: 1490898
auacacacccauaaaugca

SEQ ID NO: 1490900 - RNA, 19 nt, Artificial Sequence
  Description of Artificial Sequence: Synthetic oligonucleotide
  Sense strand starting at position 101 of SEQ ID NO: 1244468
gaauguuguauuggguauu

SEQ ID NO: 1490901 - RNA, 19 nt, Artificial Sequence
  Description of Artificial Sequence: Synthetic oligonucleotide
  Antisense strand to SEQ ID NO: 1490900
aauacccaauacaacauuc

SEQ ID NO: 1490902 - RNA, 19 nt, Artificial Sequence
  Description of Artificial Sequence: Synthetic oligonucleotide
  Sense strand starting at position 104 of SEQ ID NO: 1244468
uguuguauuggguauucua

SEQ ID NO: 1490903 - RNA, 19 nt, Artificial Sequence
  Description of Artificial Sequence: Synthetic oligonucleotide
  Antisense strand to SEQ ID NO: 1490902
uagaauacccaauacaaca

SEQ ID NO: 1490904 - RNA, 19 nt, Artificial Sequence
  Description of Artificial Sequence: Synthetic oligonucleotide
  Sense strand starting at position 107 of SEQ ID NO: 1244468
uguauuggguauucuacaa

SEQ ID NO: 1490905 - RNA, 19 nt, Artificial Sequence
  Description of Artificial Sequence: Synthetic oligonucleotide
  Antisense strand to SEQ ID NO: 1490904
uuguagaauacccaauaca

SEQ ID NO: 1490906 - RNA, 19 nt, Artificial Sequence
  Description of Artificial Sequence: Synthetic oligonucleotide
  Sense strand starting at position 334 of SEQ ID NO: 1244468
cugaucguccuaugggauu

SEQ ID NO: 1490907 - RNA, 19 nt, Artificial Sequence
  Description of Artificial Sequence: Synthetic oligonucleotide
  Antisense strand to SEQ ID NO: 1490906
aaucccauaggacgaucag

SEQ ID NO: 1490908 - RNA, 19 nt, Artificial Sequence
  Description of Artificial Sequence: Synthetic oligonucleotide
  Sense strand starting at position 358 of SEQ ID NO: 1244468
gugguauuaaagcgaggga

SEQ ID NO: 1490909 - RNA, 19 nt, Artificial Sequence
  Description of Artificial Sequence: Synthetic oligonucleotide
  Antisense strand to SEQ ID NO: 1490908
ucccucgcuuuaauaccac

SEQ ID NO: 1490910 - RNA, 19 nt, Artificial Sequence
  Description of Artificial Sequence: Synthetic oligonucleotide
  Sense strand starting at position 359 of SEQ ID NO: 1244468
ugguauuaaagcgagggaa

SEQ ID NO: 1490911 - RNA, 19 nt, Artificial Sequence
  Description of Artificial Sequence: Synthetic oligonucleotide
  Antisense strand to SEQ ID NO: 1490910
uucccucgcuuuaauacca

SEQ ID NO: 1490912 - RNA, 19 nt, Artificial Sequence
  Description of Artificial Sequence: Synthetic oligonucleotide
  Sense strand starting at position 361 of SEQ ID NO: 1244468
guauuaaagcgagggaacu

SEQ ID NO: 1490913 - RNA, 19 nt, Artificial Sequence
  Description of Artificial Sequence: Synthetic oligonucleotide
  Antisense strand to SEQ ID NO: 1490912
aguucccucgcuuuaauac

SEQ ID NO: 1490914 - RNA, 19 nt, Artificial Sequence
  Description of Artificial Sequence: Synthetic oligonucleotide
  Sense strand starting at position 401 of SEQ ID NO: 1244468
ugaacaguagcaugaaaug

SEQ ID NO: 1490915 - RNA, 19 nt, Artificial Sequence
  Description of Artificial Sequence: Synthetic oligonucleotide
  Antisense strand to SEQ ID NO: 1490914
cauuucaugcuacuguuca

SEQ ID NO: 1490916 - RNA, 19 nt, Artificial Sequence
  Description of Artificial Sequence: Synthetic oligonucleotide
  Sense strand starting at position 497 of SEQ ID NO: 1244468
gaaacuuugcagugauauu

SEQ ID NO: 1490917 - RNA, 19 nt, Artificial Sequence
  Description of Artificial Sequence: Synthetic oligonucleotide
  Antisense strand to SEQ ID NO: 1490916
aauaucacugcaaaguuuc

SEQ ID NO: 1490918 - RNA, 19 nt, Artificial Sequence
  Description of Artificial Sequence: Synthetic oligonucleotide
  Sense strand starting at position 509 of SEQ ID NO: 1244468
ugauauucuugguuaccua

SEQ ID NO: 1490919 - RNA, 19 nt, Artificial Sequence
  Description of Artificial Sequence: Synthetic oligonucleotide
  Antisense strand to SEQ ID NO: 1490918
uagguaaccaagaauauca

SEQ ID NO: 1490920 - RNA, 19 nt, Artificial Sequence
  Description of Artificial Sequence: Synthetic oligonucleotide
  Sense strand starting at position 542 of SEQ ID NO: 1244468
ggcccuuuccuguaggaca

SEQ ID NO: 1490921 - RNA, 19 nt, Artificial Sequence
  Description of Artificial Sequence: Synthetic oligonucleotide
  Antisense strand to SEQ ID NO: 1490920
uguccuacaggaaagggcc

SEQ ID NO: 1490922 - RNA, 19 nt, Artificial Sequence
  Description of Artificial Sequence: Synthetic oligonucleotide
  Sense strand starting at position 544 of SEQ ID NO: 1244468
cccuuuccuguaggacauu

SEQ ID NO: 1490923 - RNA, 19 nt, Artificial Sequence
  Description of Artificial Sequence: Synthetic oligonucleotide
  Antisense strand to SEQ ID NO: 1490922
aauguccuacaggaaaggg

SEQ ID NO: 1490924 - RNA, 19 nt, Artificial Sequence
  Description of Artificial Sequence: Synthetic oligonucleotide
  Sense strand starting at position 719 of SEQ ID NO: 1244468
ugugguauacuauauauga

SEQ ID NO: 1490925 - RNA, 19 nt, Artificial Sequence
  Description of Artificial Sequence: Synthetic oligonucleotide
  Antisense strand to SEQ ID NO: 1490924
ucauauauaguauaccaca

SEQ ID NO: 1490926 - RNA, 19 nt, Artificial Sequence
  Description of Artificial Sequence: Synthetic oligonucleotide
  Sense strand starting at position 760 of SEQ ID NO: 1244468
accuuuauagcaugugauu

SEQ ID NO: 1490927 - RNA, 19 nt, Artificial Sequence
  Description of Artificial Sequence: Synthetic oligonucleotide
  Antisense strand to SEQ ID NO: 1490926
aaucacaugcuauaaaggu

SEQ ID NO: 1490928 - RNA, 19 nt, Artificial Sequence
  Description of Artificial Sequence: Synthetic oligonucleotide
  Sense strand starting at position 769 of SEQ ID NO: 1244468
gcaugugauuugcuugagu

SEQ ID NO: 1490929 - RNA, 19 nt, Artificial Sequence
  Description of Artificial Sequence: Synthetic oligonucleotide
  Antisense strand to SEQ ID NO: 1490928
acucaagcaaaucacaugc

SEQ ID NO: 1490930 - RNA, 19 nt, Artificial Sequence
  Description of Artificial Sequence: Synthetic oligonucleotide
  Sense strand starting at position 772 of SEQ ID NO: 1244468
ugugauuugcuugagugca

SEQ ID NO: 1490931 - RNA, 19 nt, Artificial Sequence
  Description of Artificial Sequence: Synthetic oligonucleotide
  Antisense strand to SEQ ID NO: 1490930
ugcacucaagcaaaucaca

SEQ ID NO: 1490932 - RNA, 19 nt, Artificial Sequence
  Description of Artificial Sequence: Synthetic oligonucleotide
  Sense strand starting at position 774 of SEQ ID NO: 1244468
ugauuugcuugagugcaga

SEQ ID NO: 1490933 - RNA, 19 nt, Artificial Sequence
  Description of Artificial Sequence: Synthetic oligonucleotide
  Antisense strand to SEQ ID NO: 1490932
ucugcacucaagcaaauca

SEQ ID NO: 1490934 - RNA, 19 nt, Artificial Sequence
  Description of Artificial Sequence: Synthetic oligonucleotide
  Sense strand starting at position 821 of SEQ ID NO: 1244468
ccuagaagauuguuuggau

SEQ ID NO: 1490935 - RNA, 19 nt, Artificial Sequence
  Description of Artificial Sequence: Synthetic oligonucleotide
  Antisense strand to SEQ ID NO: 1490934
auccaaacaaucuucuagg

SEQ ID NO: 1490936 - RNA, 19 nt, Artificial Sequence
  Description of Artificial Sequence: Synthetic oligonucleotide
  Sense strand starting at position 822 of SEQ ID NO: 1244468
cuagaagauuguuuggauc

SEQ ID NO: 1490937 - RNA, 19 nt, Artificial Sequence
  Description of Artificial Sequence: Synthetic oligonucleotide
  Antisense strand to SEQ ID NO: 1490936
gauccaaacaaucuucuag

SEQ ID NO: 1490938 - RNA, 19 nt, Artificial Sequence
  Description of Artificial Sequence: Synthetic oligonucleotide
  Sense strand starting at position 888 of SEQ ID NO: 1244468
uauauaggguuuccuugua

SEQ ID NO: 1490939 - RNA, 19 nt, Artificial Sequence
  Description of Artificial Sequence: Synthetic oligonucleotide
  Antisense strand to SEQ ID NO: 1490938
uacaaggaaacccuauaua

SEQ ID NO: 1490940 - RNA, 19 nt, Artificial Sequence
  Description of Artificial Sequence: Synthetic oligonucleotide
  Sense strand starting at position 961 of SEQ ID NO: 1244468
aaacaagguuuguugguua

SEQ ID NO: 1490941 - RNA, 19 nt, Artificial Sequence
  Description of Artificial Sequence: Synthetic oligonucleotide
  Antisense strand to SEQ ID NO: 1490940
uaaccaacaaaccuuguuu

SEQ ID NO: 1490942 - RNA, 19 nt, Artificial Sequence
  Description of Artificial Sequence: Synthetic oligonucleotide
  Sense strand starting at position 976 of SEQ ID NO: 1244468
guuacuaucuucucgggaa

SEQ ID NO: 1490943 - RNA, 19 nt, Artificial Sequence
  Description of Artificial Sequence: Synthetic oligonucleotide
  Antisense strand to SEQ ID NO: 1490942
uucccgagaagauaguaac

SEQ ID NO: 1490944 - RNA, 19 nt, Artificial Sequence
  Description of Artificial Sequence: Synthetic oligonucleotide
  Sense strand starting at position 2412 of SEQ ID NO: 1244468
uguggugaaccuuaaauau

SEQ ID NO: 1490945 - RNA, 19 nt, Artificial Sequence
  Description of Artificial Sequence: Synthetic oligonucleotide
  Antisense strand to SEQ ID NO: 1490944
auauuuaagguucaccaca

SEQ ID NO: 1490946 - RNA, 19 nt, Artificial Sequence
  Description of Artificial Sequence: Synthetic oligonucleotide
  Sense strand starting at position 2954 of SEQ ID NO: 1244468
ugugauauugauuggcaua

SEQ ID NO: 1490947 - RNA, 19 nt, Artificial Sequence
  Description of Artificial Sequence: Synthetic oligonucleotide
  Antisense strand to SEQ ID NO: 1490946
uaugccaaucaauaucaca

SEQ ID NO: 1490948 - RNA, 19 nt, Artificial Sequence
  Description of Artificial Sequence: Synthetic oligonucleotide
  Sense strand starting at position 2955 of SEQ ID NO: 1244468
gugauauugauuggcauau

SEQ ID NO: 1490949 - RNA, 19 nt, Artificial Sequence
  Description of Artificial Sequence: Synthetic oligonucleotide
  Antisense strand to SEQ ID NO: 1490948
auaugccaaucaauaucac

SEQ ID NO: 1490950 - RNA, 19 nt, Artificial Sequence
  Description of Artificial Sequence: Synthetic oligonucleotide
  Sense strand starting at position 2956 of SEQ ID NO: 1244468
ugauauugauuggcauaug

SEQ ID NO: 1490951 - RNA, 19 nt, Artificial Sequence
  Description of Artificial Sequence: Synthetic oligonucleotide
  Antisense strand to SEQ ID NO: 1490950
cauaugccaaucaauauca

SEQ ID NO: 1490952 - RNA, 19 nt, Artificial Sequence
  Description of Artificial Sequence: Synthetic oligonucleotide
  Sense strand starting at position 2959 of SEQ ID NO: 1244468
uauugauuggcauaugcuu

SEQ ID NO: 1490953 - RNA, 19 nt, Artificial Sequence
  Description of Artificial Sequence: Synthetic oligonucleotide
  Antisense strand to SEQ ID NO: 1490952
aagcauaugccaaucaaua

SEQ ID NO: 1490954 - RNA, 19 nt, Artificial Sequence
  Description of Artificial Sequence: Synthetic oligonucleotide
  Sense strand starting at position 3238 of SEQ ID NO: 1244468
gaaacuguugccuagguuu

SEQ ID NO: 1490955 - RNA, 19 nt, Artificial Sequence
  Description of Artificial Sequence: Synthetic oligonucleotide
  Antisense strand to SEQ ID NO: 1490954
aaaccuaggcaacaguuuc

SEQ ID NO: 1490956 - RNA, 19 nt, Artificial Sequence
  Description of Artificial Sequence: Synthetic oligonucleotide
  Sense strand starting at position 3287 of SEQ ID NO: 1244468
gaagguaugccaggaauca

SEQ ID NO: 1490957 - RNA, 19 nt, Artificial Sequence
  Description of Artificial Sequence: Synthetic oligonucleotide
  Antisense strand to SEQ ID NO: 1490956
ugauuccuggcauaccuuc

SEQ ID NO: 1490958 - RNA, 19 nt, Artificial Sequence
  Description of Artificial Sequence: Synthetic oligonucleotide
  Sense strand starting at position 3319 of SEQ ID NO: 1244468
caugauucugaaugucaga

SEQ ID NO: 1490959 - RNA, 19 nt, Artificial Sequence
  Description of Artificial Sequence: Synthetic oligonucleotide
  Antisense strand to SEQ ID NO: 1490958
ucugacauucagaaucaug

SEQ ID NO: 1490960 - RNA, 19 nt, Artificial Sequence
  Description of Artificial Sequence: Synthetic oligonucleotide
  Sense strand starting at position 3586 of SEQ ID NO: 1244468
agacacuggucuucuacuu

SEQ ID NO: 1490961 - RNA, 19 nt, Artificial Sequence
  Description of Artificial Sequence: Synthetic oligonucleotide
  Antisense strand to SEQ ID NO: 1490960
aaguagaagaccagugucu

SEQ ID NO: 1490962 - RNA, 19 nt, Artificial Sequence
  Description of Artificial Sequence: Synthetic oligonucleotide
  Sense strand starting at position 3664 of SEQ ID NO: 1244468
gaaggcauguacuuggaaa

SEQ ID NO: 1490963 - RNA, 19 nt, Artificial Sequence
  Description of Artificial Sequence: Synthetic oligonucleotide
  Antisense strand to SEQ ID NO: 1490962
uuuccaaguacaugccuuc

SEQ ID NO: 1490964 - RNA, 19 nt, Artificial Sequence
  Description of Artificial Sequence: Synthetic oligonucleotide
  Sense strand starting at position 3726 of SEQ ID NO: 1244468
ugucuuuauugacuagaga

SEQ ID NO: 1490965 - RNA, 19 nt, Artificial Sequence
  Description of Artificial Sequence: Synthetic oligonucleotide
  Antisense strand to SEQ ID NO: 1490964
ucucuagucaauaaagaca

SEQ ID NO: 1490966 - RNA, 19 nt, Artificial Sequence
  Description of Artificial Sequence: Synthetic oligonucleotide
  Sense strand starting at position 3753 of SEQ ID NO: 1244468
gcuugagcuuccuuaagag

SEQ ID NO: 1490967 - RNA, 19 nt, Artificial Sequence
  Description of Artificial Sequence: Synthetic oligonucleotide
  Antisense strand to SEQ ID NO: 1490966
cucuuaaggaagcucaagc

SEQ ID NO: 1490968 - RNA, 19 nt, Artificial Sequence
  Description of Artificial Sequence: Synthetic oligonucleotide
  Sense strand starting at position 3823 of SEQ ID NO: 1244468
ugauaacucuaacagaaag

SEQ ID NO: 1490969 - RNA, 19 nt, Artificial Sequence
  Description of Artificial Sequence: Synthetic oligonucleotide
  Antisense strand to SEQ ID NO: 1490968
cuuucuguuagaguuauca

SEQ ID NO: 1490970 - RNA, 19 nt, Artificial Sequence
  Description of Artificial Sequence: Synthetic oligonucleotide
  Sense strand starting at position 3846 of SEQ ID NO: 1244468
gcaugaugauugccugaac

SEQ ID NO: 1490971 - RNA, 19 nt, Artificial Sequence
  Description of Artificial Sequence: Synthetic oligonucleotide
  Antisense strand to SEQ ID NO: 1490970
guucaggcaaucaucaugc

SEQ ID NO: 1490972 - RNA, 19 nt, Artificial Sequence
  Description of Artificial Sequence: Synthetic oligonucleotide
  Sense strand starting at position 3912 of SEQ ID NO: 1244468
cagaaaucagagugcugua

SEQ ID NO: 1490973 - RNA, 19 nt, Artificial Sequence
  Description of Artificial Sequence: Synthetic oligonucleotide
  Antisense strand to SEQ ID NO: 1490972
uacagcacucugauuucug

SEQ ID NO: 1490974 - RNA, 19 nt, Artificial Sequence
  Description of Artificial Sequence: Synthetic oligonucleotide
  Sense strand starting at position 228 of SEQ ID NO: 1244469
cgagauaacuuucuaaauu

SEQ ID NO: 1490975 - RNA, 19 nt, Artificial Sequence
  Description of Artificial Sequence: Synthetic oligonucleotide
  Antisense strand to SEQ ID NO: 1490974
aauuuagaaaguuaucucg

SEQ ID NO: 1490976 - RNA, 19 nt, Artificial Sequence
  Description of Artificial Sequence: Synthetic oligonucleotide
  Sense strand starting at position 291 of SEQ ID NO: 1244469
guaacugucccagaguuaa

SEQ ID NO: 1490977 - RNA, 19 nt, Artificial Sequence
  Description of Artificial Sequence: Synthetic oligonucleotide
  Antisense strand to SEQ ID NO: 1490976
uuaacucugggacaguuac

SEQ ID NO: 1490978 - RNA, 19 nt, Artificial Sequence
  Description of Artificial Sequence: Synthetic oligonucleotide
  Sense strand starting at position 352 of SEQ ID NO: 1244469
cgaagaccucucuagguuu

SEQ ID NO: 1490979 - RNA, 19 nt, Artificial Sequence
  Description of Artificial Sequence: Synthetic oligonucleotide
  Antisense strand to SEQ ID NO: 1490978
aaaccuagagaggucuucg

SEQ ID NO: 1490980 - RNA, 19 nt, Artificial Sequence
  Description of Artificial Sequence: Synthetic oligonucleotide
  Sense strand starting at position 423 of SEQ ID NO: 1244469
gccucuaaacuuggaguca

SEQ ID NO: 1490981 - RNA, 19 nt, Artificial Sequence
  Description of Artificial Sequence: Synthetic oligonucleotide
  Antisense strand to SEQ ID NO: 1490980
ugacuccaaguuuagaggc

SEQ ID NO: 1490982 - RNA, 19 nt, Artificial Sequence
  Description of Artificial Sequence: Synthetic oligonucleotide
  Sense strand starting at position 910 of SEQ ID NO: 1244469
cguggaagugcuuaacaca

SEQ ID NO: 1490983 - RNA, 19 nt, Artificial Sequence
  Description of Artificial Sequence: Synthetic oligonucleotide
  Antisense strand to SEQ ID NO: 1490982
uguguuaagcacuuccacg

SEQ ID NO: 1490984 - RNA, 19 nt, Artificial Sequence
  Description of Artificial Sequence: Synthetic oligonucleotide
  Sense strand starting at position 941 of SEQ ID NO: 1244469
gcacuagguccucaagaaa

SEQ ID NO: 1490985 - RNA, 19 nt, Artificial Sequence
  Description of Artificial Sequence: Synthetic oligonucleotide
  Antisense strand to SEQ ID NO: 1490984
uuucuugaggaccuagugc

SEQ ID NO: 1490986 - RNA, 19 nt, Artificial Sequence
  Description of Artificial Sequence: Synthetic oligonucleotide
  Sense strand starting at position 972 of SEQ ID NO: 1244469
cugauuuguuaugcuuuau

SEQ ID NO: 1490987 - RNA, 19 nt, Artificial Sequence
  Description of Artificial Sequence: Synthetic oligonucleotide
  Antisense strand to SEQ ID NO: 1490986
auaaagcauaacaaaucag

SEQ ID NO: 1490988 - RNA, 19 nt, Artificial Sequence
  Description of Artificial Sequence: Synthetic oligonucleotide
  Sense strand starting at position 1991 of SEQ ID NO: 1244469
ugugguuccauaggaucuu

SEQ ID NO: 1490989 - RNA, 19 nt, Artificial Sequence
  Description of Artificial Sequence: Synthetic oligonucleotide
  Antisense strand to SEQ ID NO: 1490988
aagauccuauggaaccaca

SEQ ID NO: 1490990 - RNA, 19 nt, Artificial Sequence
  Description of Artificial Sequence: Synthetic oligonucleotide
  Sense strand starting at position 2090 of SEQ ID NO: 1244469
ucaggauugaguugauuaa

SEQ ID NO: 1490991 - RNA, 19 nt, Artificial Sequence
  Description of Artificial Sequence: Synthetic oligonucleotide
  Antisense strand to SEQ ID NO: 1490990
uuaaucaacucaauccuga

SEQ ID NO: 1490992 - RNA, 19 nt, Artificial Sequence
  Description of Artificial Sequence: Synthetic oligonucleotide
  Sense strand starting at position 2094 of SEQ ID NO: 1244469
gauugaguugauuaaguug

SEQ ID NO: 1490993 - RNA, 19 nt, Artificial Sequence
  Description of Artificial Sequence: Synthetic oligonucleotide
  Antisense strand to SEQ ID NO: 1490992
caacuuaaucaacucaauc

SEQ ID NO: 1490994 - RNA, 19 nt, Artificial Sequence
  Description of Artificial Sequence: Synthetic oligonucleotide
  Sense strand starting at position 2097 of SEQ ID NO: 1244469
ugaguugauuaaguugagu

SEQ ID NO: 1490995 - RNA, 19 nt, Artificial Sequence
  Description of Artificial Sequence: Synthetic oligonucleotide
  Antisense strand to SEQ ID NO: 1490994
acucaacuuaaucaacuca

SEQ ID NO: 1490996 - RNA, 19 nt, Artificial Sequence
  Description of Artificial Sequence: Synthetic oligonucleotide
  Sense strand starting at position 2099 of SEQ ID NO: 1244469
aguugauuaaguugaguug

SEQ ID NO: 1490997 - RNA, 19 nt, Artificial Sequence
  Description of Artificial Sequence: Synthetic oligonucleotide
  Antisense strand to SEQ ID NO: 1490996
caacucaacuuaaucaacu

SEQ ID NO: 1490998 - RNA, 19 nt, Artificial Sequence
  Description of Artificial Sequence: Synthetic oligonucleotide
  Sense strand starting at position 2122 of SEQ ID NO: 1244469
gugucaauccgagauguag

SEQ ID NO: 1490999 - RNA, 19 nt, Artificial Sequence
  Description of Artificial Sequence: Synthetic oligonucleotide
  Antisense strand to SEQ ID NO: 1490998
cuacaucucggauugacac

SEQ ID NO: 1491000 - RNA, 19 nt, Artificial Sequence
  Description of Artificial Sequence: Synthetic oligonucleotide
  Sense strand starting at position 2131 of SEQ ID NO: 1244469
cgagauguagcuuaggaaa

SEQ ID NO: 1491001 - RNA, 19 nt, Artificial Sequence
  Description of Artificial Sequence: Synthetic oligonucleotide
  Antisense strand to SEQ ID NO: 1491000
uuuccuaagcuacaucucg

SEQ ID NO: 1491002 - RNA, 19 nt, Artificial Sequence
  Description of Artificial Sequence: Synthetic oligonucleotide
  Sense strand starting at position 2162 of SEQ ID NO: 1244469
gaggaaguuccauauguuu

SEQ ID NO: 1491003 - RNA, 19 nt, Artificial Sequence
  Description of Artificial Sequence: Synthetic oligonucleotide
  Antisense strand to SEQ ID NO: 1491002
aaacauauggaacuuccuc

SEQ ID NO: 1491004 - RNA, 19 nt, Artificial Sequence
  Description of Artificial Sequence: Synthetic oligonucleotide
  Sense strand starting at position 2323 of SEQ ID NO: 1244469
ugccuugugaaccauaggu

SEQ ID NO: 1491005 - RNA, 19 nt, Artificial Sequence
  Description of Artificial Sequence: Synthetic oligonucleotide
  Antisense strand to SEQ ID NO: 1491004
accuaugguucacaaggca

SEQ ID NO: 1491006 - RNA, 19 nt, Artificial Sequence
  Description of Artificial Sequence: Synthetic oligonucleotide
  Sense strand starting at position 2343 of SEQ ID NO: 1244469
ccauaaagcuaguugaauc

SEQ ID NO: 1491007 - RNA, 19 nt, Artificial Sequence
  Description of Artificial Sequence: Synthetic oligonucleotide
  Antisense strand to SEQ ID NO: 1491006
gauucaacuagcuuuaugg

SEQ ID NO: 1491008 - RNA, 19 nt, Artificial Sequence
  Description of Artificial Sequence: Synthetic oligonucleotide
  Sense strand starting at position 2476 of SEQ ID NO: 1244469
acagaugcuucuuuauggu

SEQ ID NO: 1491009 - RNA, 19 nt, Artificial Sequence
  Description of Artificial Sequence: Synthetic oligonucleotide
  Antisense strand to SEQ ID NO: 1491008
accauaaagaagcaucugu

SEQ ID NO: 1491010 - RNA, 19 nt, Artificial Sequence
  Description of Artificial Sequence: Synthetic oligonucleotide
  Sense strand starting at position 2485 of SEQ ID NO: 1244469
ucuuuauggugggaauuug

SEQ ID NO: 1491011 - RNA, 19 nt, Artificial Sequence
  Description of Artificial Sequence: Synthetic oligonucleotide
  Antisense strand to SEQ ID NO: 1491010
caaauucccaccauaaaga

SEQ ID NO: 1491012 - RNA, 19 nt, Artificial Sequence
  Description of Artificial Sequence: Synthetic oligonucleotide
  Sense strand starting at position 2493 of SEQ ID NO: 1244469
gugggaauuugagaggaug

SEQ ID NO: 1491013 - RNA, 19 nt, Artificial Sequence
  Description of Artificial Sequence: Synthetic oligonucleotide
  Antisense strand to SEQ ID NO: 1491012
cauccucucaaauucccac

SEQ ID NO: 1491014 - RNA, 19 nt, Artificial Sequence
  Description of Artificial Sequence: Synthetic oligonucleotide
  Sense strand starting at position 2507 of SEQ ID NO: 1244469
ggauguuuauugcuggaga

SEQ ID NO: 1491015 - RNA, 19 nt, Artificial Sequence
  Description of Artificial Sequence: Synthetic oligonucleotide
  Antisense strand to SEQ ID NO: 1491014
ucuccagcaauaaacaucc

SEQ ID NO: 1491016 - RNA, 19 nt, Artificial Sequence
  Description of Artificial Sequence: Synthetic oligonucleotide
  Sense strand starting at position 2510 of SEQ ID NO: 1244469
uguuuauugcuggagaaag

SEQ ID NO: 1491017 - RNA, 19 nt, Artificial Sequence
  Description of Artificial Sequence: Synthetic oligonucleotide
  Antisense strand to SEQ ID NO: 1491016
cuuucuccagcaauaaaca

SEQ ID NO: 1491018 - RNA, 19 nt, Artificial Sequence
  Description of Artificial Sequence: Synthetic oligonucleotide
  Sense strand starting at position 2522 of SEQ ID NO: 1244469
gagaaagagaggugugcau

SEQ ID NO: 1491019 - RNA, 19 nt, Artificial Sequence
  Description of Artificial Sequence: Synthetic oligonucleotide
  Antisense strand to SEQ ID NO: 1491018
augcacaccucucuuucuc

SEQ ID NO: 1491020 - RNA, 19 nt, Artificial Sequence
  Description of Artificial Sequence: Synthetic oligonucleotide
  Sense strand starting at position 2524 of SEQ ID NO: 1244469
gaaagagaggugugcauua

SEQ ID NO: 1491021 - RNA, 19 nt, Artificial Sequence
  Description of Artificial Sequence: Synthetic oligonucleotide
  Antisense strand to SEQ ID NO: 1491020
uaaugcacaccucucuuuc

SEQ ID NO: 1491022 - RNA, 19 nt, Artificial Sequence
  Description of Artificial Sequence: Synthetic oligonucleotide
  Sense strand starting at position 2526 of SEQ ID NO: 1244469
aagagaggugugcauuaga

SEQ ID NO: 1491023 - RNA, 19 nt, Artificial Sequence
  Description of Artificial Sequence: Synthetic oligonucleotide
  Antisense strand to SEQ ID NO: 1491022
ucuaaugcacaccucucuu

SEQ ID NO: 1491024 - RNA, 19 nt, Artificial Sequence
  Description of Artificial Sequence: Synthetic oligonucleotide
  Sense strand starting at position 2529 of SEQ ID NO: 1244469
agaggugugcauuagaaga

SEQ ID NO: 1491025 - RNA, 19 nt, Artificial Sequence
  Description of Artificial Sequence: Synthetic oligonucleotide
  Antisense strand to SEQ ID NO: 1491024
ucuucuaaugcacaccucu

SEQ ID NO: 1491026 - RNA, 19 nt, Artificial Sequence
  Description of Artificial Sequence: Synthetic oligonucleotide
  Sense strand starting at position 2593 of SEQ ID NO: 1244469
cagauaaucuugguuguag

SEQ ID NO: 1491027 - RNA, 19 nt, Artificial Sequence
  Description of Artificial Sequence: Synthetic oligonucleotide
  Antisense strand to SEQ ID NO: 1491026
cuacaaccaagauuaucug

SEQ ID NO: 1491028 - RNA, 19 nt, Artificial Sequence
  Description of Artificial Sequence: Synthetic oligonucleotide
  Sense strand starting at position 2621 of SEQ ID NO: 1244469
gaugauuaguguuucucaa

SEQ ID NO: 1491029 - RNA, 19 nt, Artificial Sequence
  Description of Artificial Sequence: Synthetic oligonucleotide
  Antisense strand to SEQ ID NO: 1491028
uugagaaacacuaaucauc

SEQ ID NO: 1491030 - RNA, 19 nt, Artificial Sequence
  Description of Artificial Sequence: Synthetic oligonucleotide
  Sense strand starting at position 2623 of SEQ ID NO: 1244469
ugauuaguguuucucaaau

SEQ ID NO: 1491031 - RNA, 19 nt, Artificial Sequence
  Description of Artificial Sequence: Synthetic oligonucleotide
  Antisense strand to SEQ ID NO: 1491030
auuugagaaacacuaauca

SEQ ID NO: 1491032 - RNA, 19 nt, Artificial Sequence
  Description of Artificial Sequence: Synthetic oligonucleotide
  Sense strand starting at position 2635 of SEQ ID NO: 1244469
cucaaauguuucccuguaa

SEQ ID NO: 1491033 - RNA, 19 nt, Artificial Sequence
  Description of Artificial Sequence: Synthetic oligonucleotide
  Antisense strand to SEQ ID NO: 1491032
uuacagggaaacauuugag

SEQ ID NO: 1491034 - RNA, 19 nt, Artificial Sequence
  Description of Artificial Sequence: Synthetic oligonucleotide
  Sense strand starting at position 2636 of SEQ ID NO: 1244469
ucaaauguuucccuguaag

SEQ ID NO: 1491035 - RNA, 19 nt, Artificial Sequence
  Description of Artificial Sequence: Synthetic oligonucleotide
  Antisense strand to SEQ ID NO: 1491034
cuuacagggaaacauuuga

SEQ ID NO: 1491036 - RNA, 19 nt, Artificial Sequence
  Description of Artificial Sequence: Synthetic oligonucleotide
  Sense strand starting at position 2793 of SEQ ID NO: 1244469
cucgacaaucuuugggaga

SEQ ID NO: 1491037 - RNA, 19 nt, Artificial Sequence
  Description of Artificial Sequence: Synthetic oligonucleotide
  Antisense strand to SEQ ID NO: 1491036
ucucccaaagauugucgag

SEQ ID NO: 1491038 - RNA, 19 nt, Artificial Sequence
  Description of Artificial Sequence: Synthetic oligonucleotide
  Sense strand starting at position 2798 of SEQ ID NO: 1244469
caaucuuugggagagcuuu

SEQ ID NO: 1491039 - RNA, 19 nt, Artificial Sequence
  Description of Artificial Sequence: Synthetic oligonucleotide
  Antisense strand to SEQ ID NO: 1491038
aaagcucucccaaagauug

SEQ ID NO: 1491040 - RNA, 19 nt, Artificial Sequence
  Description of Artificial Sequence: Synthetic oligonucleotide
  Sense strand starting at position 3331 of SEQ ID NO: 1244469
gagacaugauucuuuagua

SEQ ID NO: 1491041 - RNA, 19 nt, Artificial Sequence
  Description of Artificial Sequence: Synthetic oligonucleotide
  Antisense strand to SEQ ID NO: 1491040
uacuaaagaaucaugucuc

SEQ ID NO: 1491042 - RNA, 19 nt, Artificial Sequence
  Description of Artificial Sequence: Synthetic oligonucleotide
  Sense strand starting at position 3332 of SEQ ID NO: 1244469
agacaugauucuuuaguaa

SEQ ID NO: 1491043 - RNA, 19 nt, Artificial Sequence
  Description of Artificial Sequence: Synthetic oligonucleotide
  Antisense strand to SEQ ID NO: 1491042
uuacuaaagaaucaugucu

SEQ ID NO: 1491044 - RNA, 19 nt, Artificial Sequence
  Description of Artificial Sequence: Synthetic oligonucleotide
  Sense strand starting at position 3335 of SEQ ID NO: 1244469
caugauucuuuaguaagug

SEQ ID NO: 1491045 - RNA, 19 nt, Artificial Sequence
  Description of Artificial Sequence: Synthetic oligonucleotide
  Antisense strand to SEQ ID NO: 1491044
cacuuacuaaagaaucaug

SEQ ID NO: 1491046 - RNA, 19 nt, Artificial Sequence
  Description of Artificial Sequence: Synthetic oligonucleotide
  Sense strand starting at position 3339 of SEQ ID NO: 1244469
auucuuuaguaagugaaag

SEQ ID NO: 1491047 - RNA, 19 nt, Artificial Sequence
  Description of Artificial Sequence: Synthetic oligonucleotide
  Antisense strand to SEQ ID NO: 1491046
cuuucacuuacuaaagaau

SEQ ID NO: 1491048 - RNA, 19 nt, Artificial Sequence
  Description of Artificial Sequence: Synthetic oligonucleotide
  Sense strand starting at position 3868 of SEQ ID NO: 1244469
ggguuagaaugggcuuauc

SEQ ID NO: 1491049 - RNA, 19 nt, Artificial Sequence
  Description of Artificial Sequence: Synthetic oligonucleotide
  Antisense strand to SEQ ID NO: 1491048
gauaagcccauucuaaccc

SEQ ID NO: 1491050 - RNA, 19 nt, Artificial Sequence
  Description of Artificial Sequence: Synthetic oligonucleotide
  Sense strand starting at position 3871 of SEQ ID NO: 1244469
uuagaaugggcuuauccca

SEQ ID NO: 1491051 - RNA, 19 nt, Artificial Sequence
  Description of Artificial Sequence: Synthetic oligonucleotide
  Antisense strand to SEQ ID NO: 1491050
ugggauaagcccauucuaa

SEQ ID NO: 1491052 - RNA, 19 nt, Artificial Sequence
  Description of Artificial Sequence: Synthetic oligonucleotide
  Sense strand starting at position 3930 of SEQ ID NO: 1244469
acacccuuccuggagcauu

SEQ ID NO: 1491053 - RNA, 19 nt, Artificial Sequence
  Description of Artificial Sequence: Synthetic oligonucleotide
  Antisense strand to SEQ ID NO: 1491052
aaugcuccaggaagggugu

SEQ ID NO: 1491054 - RNA, 19 nt, Artificial Sequence
  Description of Artificial Sequence: Synthetic oligonucleotide
  Sense strand starting at position 22 of SEQ ID NO: 1244470
ucaacauguuauguuagaa

SEQ ID NO: 1491055 - RNA, 19 nt, Artificial Sequence
  Description of Artificial Sequence: Synthetic oligonucleotide
  Antisense strand to SEQ ID NO: 1491054
uucuaacauaacauguuga

SEQ ID NO: 1491056 - RNA, 19 nt, Artificial Sequence
  Description of Artificial Sequence: Synthetic oligonucleotide
  Sense strand starting at position 69 of SEQ ID NO: 1244470
ccagaauauuauguacagu

SEQ ID NO: 1491057 - RNA, 19 nt, Artificial Sequence
  Description of Artificial Sequence: Synthetic oligonucleotide
  Antisense strand to SEQ ID NO: 1491056
acuguacauaauauucugg

SEQ ID NO: 1491058 - RNA, 19 nt, Artificial Sequence
  Description of Artificial Sequence: Synthetic oligonucleotide
  Sense strand starting at position 254 of SEQ ID NO: 1244470
gaaggcaaguuauugguaa

SEQ ID NO: 1491059 - RNA, 19 nt, Artificial Sequence
  Description of Artificial Sequence: Synthetic oligonucleotide
  Antisense strand to SEQ ID NO: 1491058
uuaccaauaacuugccuuc

SEQ ID NO: 1491060 - RNA, 19 nt, Artificial Sequence
  Description of Artificial Sequence: Synthetic oligonucleotide
  Sense strand starting at position 256 of SEQ ID NO: 1244470
aggcaaguuauugguaacu

SEQ ID NO: 1491061 - RNA, 19 nt, Artificial Sequence
  Description of Artificial Sequence: Synthetic oligonucleotide
  Antisense strand to SEQ ID NO: 1491060
aguuaccaauaacuugccu

SEQ ID NO: 1491062 - RNA, 19 nt, Artificial Sequence
  Description of Artificial Sequence: Synthetic oligonucleotide
  Sense strand starting at position 268 of SEQ ID NO: 1244470
gguaacuucugguucuuga

SEQ ID NO: 1491063 - RNA, 19 nt, Artificial Sequence
  Description of Artificial Sequence: Synthetic oligonucleotide
  Antisense strand to SEQ ID NO: 1491062
ucaagaaccagaaguuacc

SEQ ID NO: 1491064 - RNA, 19 nt, Artificial Sequence
  Description of Artificial Sequence: Synthetic oligonucleotide
  Sense strand starting at position 278 of SEQ ID NO: 1244470
gguucuugaaucgaguagu

SEQ ID NO: 1491065 - RNA, 19 nt, Artificial Sequence
  Description of Artificial Sequence: Synthetic oligonucleotide
  Antisense strand to SEQ ID NO: 1491064
acuacucgauucaagaacc

SEQ ID NO: 1491066 - RNA, 19 nt, Artificial Sequence
  Description of Artificial Sequence: Synthetic oligonucleotide
  Sense strand starting at position 281 of SEQ ID NO: 1244470
ucuugaaucgaguagugua

SEQ ID NO: 1491067 - RNA, 19 nt, Artificial Sequence
  Description of Artificial Sequence: Synthetic oligonucleotide
  Antisense strand to SEQ ID NO: 1491066
uacacuacucgauucaaga

SEQ ID NO: 1491068 - RNA, 19 nt, Artificial Sequence
  Description of Artificial Sequence: Synthetic oligonucleotide
  Sense strand starting at position 286 of SEQ ID NO: 1244470
aaucgaguaguguauacau

SEQ ID NO: 1491069 - RNA, 19 nt, Artificial Sequence
  Description of Artificial Sequence: Synthetic oligonucleotide
  Antisense strand to SEQ ID NO: 1491068
auguauacacuacucgauu

SEQ ID NO: 1491070 - RNA, 19 nt, Artificial Sequence
  Description of Artificial Sequence: Synthetic oligonucleotide
  Sense strand starting at position 288 of SEQ ID NO: 1244470
ucgaguaguguauacauga

SEQ ID NO: 1491071 - RNA, 19 nt, Artificial Sequence
  Description of Artificial Sequence: Synthetic oligonucleotide
  Antisense strand to SEQ ID NO: 1491070
ucauguauacacuacucga

SEQ ID NO: 1491072 - RNA, 19 nt, Artificial Sequence
  Description of Artificial Sequence: Synthetic oligonucleotide
  Sense strand starting at position 293 of SEQ ID NO: 1244470
uaguguauacaugagcauu

SEQ ID NO: 1491073 - RNA, 19 nt, Artificial Sequence
  Description of Artificial Sequence: Synthetic oligonucleotide
  Antisense strand to SEQ ID NO: 1491072
aaugcucauguauacacua

SEQ ID NO: 1491074 - RNA, 19 nt, Artificial Sequence
  Description of Artificial Sequence: Synthetic oligonucleotide
  Sense strand starting at position 344 of SEQ ID NO: 1244470
ugcauugcccaugaucuuu

SEQ ID NO: 1491075 - RNA, 19 nt, Artificial Sequence
  Description of Artificial Sequence: Synthetic oligonucleotide
  Antisense strand to SEQ ID NO: 1491074
aaagaucaugggcaaugca

SEQ ID NO: 1491076 - RNA, 19 nt, Artificial Sequence
  Description of Artificial Sequence: Synthetic oligonucleotide
  Sense strand starting at position 619 of SEQ ID NO: 1244470
gguggcuuacucgaaguca

SEQ ID NO: 1491077 - RNA, 19 nt, Artificial Sequence
  Description of Artificial Sequence: Synthetic oligonucleotide
  Antisense strand to SEQ ID NO: 1491076
ugacuucgaguaagccacc

SEQ ID NO: 1491078 - RNA, 19 nt, Artificial Sequence
  Description of Artificial Sequence: Synthetic oligonucleotide
  Sense strand starting at position 632 of SEQ ID NO: 1244470
aagucaucaguuuggucaa

SEQ ID NO: 1491079 - RNA, 19 nt, Artificial Sequence
  Description of Artificial Sequence: Synthetic oligonucleotide
  Antisense strand to SEQ ID NO: 1491078
uugaccaaacugaugacuu

SEQ ID NO: 1491080 - RNA, 19 nt, Artificial Sequence
  Description of Artificial Sequence: Synthetic oligonucleotide
  Sense strand starting at position 635 of SEQ ID NO: 1244470
ucaucaguuuggucaauga

SEQ ID NO: 1491081 - RNA, 19 nt, Artificial Sequence
  Description of Artificial Sequence: Synthetic oligonucleotide
  Antisense strand to SEQ ID NO: 1491080
ucauugaccaaacugauga

SEQ ID NO: 1491082 - RNA, 19 nt, Artificial Sequence
  Description of Artificial Sequence: Synthetic oligonucleotide
  Sense strand starting at position 729 of SEQ ID NO: 1244470
aggaaauauugggaagaga

SEQ ID NO: 1491083 - RNA, 19 nt, Artificial Sequence
  Description of Artificial Sequence: Synthetic oligonucleotide
  Antisense strand to SEQ ID NO: 1491082
ucucuucccaauauuuccu

SEQ ID NO: 1491084 - RNA, 19 nt, Artificial Sequence
  Description of Artificial Sequence: Synthetic oligonucleotide
  Sense strand starting at position 844 of SEQ ID NO: 1244470
gggccaugugaacaauucu

SEQ ID NO: 1491085 - RNA, 19 nt, Artificial Sequence
  Description of Artificial Sequence: Synthetic oligonucleotide
  Antisense strand to SEQ ID NO: 1491084
agaauuguucacauggccc

SEQ ID NO: 1491086 - RNA, 19 nt, Artificial Sequence
  Description of Artificial Sequence: Synthetic oligonucleotide
  Sense strand starting at position 850 of SEQ ID NO: 1244470
ugugaacaauucucauugu

SEQ ID NO: 1491087 - RNA, 19 nt, Artificial Sequence
  Description of Artificial Sequence: Synthetic oligonucleotide
  Antisense strand to SEQ ID NO: 1491086
acaaugagaauuguucaca

SEQ ID NO: 1491088 - RNA, 19 nt, Artificial Sequence
  Description of Artificial Sequence: Synthetic oligonucleotide
  Sense strand starting at position 864 of SEQ ID NO: 1244470
auuguugcgaguguguuaa

SEQ ID NO: 1491089 - RNA, 19 nt, Artificial Sequence
  Description of Artificial Sequence: Synthetic oligonucleotide
  Antisense strand to SEQ ID NO: 1491088
uuaacacacucgcaacaau

SEQ ID NO: 1491090 - RNA, 19 nt, Artificial Sequence
  Description of Artificial Sequence: Synthetic oligonucleotide
  Sense strand starting at position 2115 of SEQ ID NO: 1244470
gagcauccuuauguguaga

SEQ ID NO: 1491091 - RNA, 19 nt, Artificial Sequence
  Description of Artificial Sequence: Synthetic oligonucleotide
  Antisense strand to SEQ ID NO: 1491090
ucuacacauaaggaugcuc

SEQ ID NO: 1491092 - RNA, 19 nt, Artificial Sequence
  Description of Artificial Sequence: Synthetic oligonucleotide
  Sense strand starting at position 2120 of SEQ ID NO: 1244470
uccuuauguguagaccauu

SEQ ID NO: 1491093 - RNA, 19 nt, Artificial Sequence
  Description of Artificial Sequence: Synthetic oligonucleotide
  Antisense strand to SEQ ID NO: 1491092
aauggucuacacauaagga

SEQ ID NO: 1491094 - RNA, 19 nt, Artificial Sequence
  Description of Artificial Sequence: Synthetic oligonucleotide
  Sense strand starting at position 2123 of SEQ ID NO: 1244470
uuauguguagaccauuaua

SEQ ID NO: 1491095 - RNA, 19 nt, Artificial Sequence
  Description of Artificial Sequence: Synthetic oligonucleotide
  Antisense strand to SEQ ID NO: 1491094
uauaauggucuacacauaa

SEQ ID NO: 1491096 - RNA, 19 nt, Artificial Sequence
  Description of Artificial Sequence: Synthetic oligonucleotide
  Sense strand starting at position 2126 of SEQ ID NO: 1244470
uguguagaccauuauacua

SEQ ID NO: 1491097 - RNA, 19 nt, Artificial Sequence
  Description of Artificial Sequence: Synthetic oligonucleotide
  Antisense strand to SEQ ID NO: 1491096
uaguauaauggucuacaca

SEQ ID NO: 1491098 - RNA, 19 nt, Artificial Sequence
  Description of Artificial Sequence: Synthetic oligonucleotide
  Sense strand starting at position 2206 of SEQ ID NO: 1244470
uaacgccauccagaaguau

SEQ ID NO: 1491099 - RNA, 19 nt, Artificial Sequence
  Description of Artificial Sequence: Synthetic oligonucleotide
  Antisense strand to SEQ ID NO: 1491098
auacuucuggauggcguua

SEQ ID NO: 1491100 - RNA, 19 nt, Artificial Sequence
  Description of Artificial Sequence: Synthetic oligonucleotide
  Sense strand starting at position 2247 of SEQ ID NO: 1244470
ucauauaguggugggaaga

SEQ ID NO: 1491101 - RNA, 19 nt, Artificial Sequence
  Description of Artificial Sequence: Synthetic oligonucleotide
  Antisense strand to SEQ ID NO: 1491100
ucuucccaccacuauauga

SEQ ID NO: 1491102 - RNA, 19 nt, Artificial Sequence
  Description of Artificial Sequence: Synthetic oligonucleotide
  Sense strand starting at position 2368 of SEQ ID NO: 1244470
gggaauuuguaagguagaa

SEQ ID NO: 1491103 - RNA, 19 nt, Artificial Sequence
  Description of Artificial Sequence: Synthetic oligonucleotide
  Antisense strand to SEQ ID NO: 1491102
uucuaccuuacaaauuccc

SEQ ID NO: 1491104 - RNA, 19 nt, Artificial Sequence
  Description of Artificial Sequence: Synthetic oligonucleotide
  Sense strand starting at position 2462 of SEQ ID NO: 1244470
uggaauaaucaauggcaau

SEQ ID NO: 1491105 - RNA, 19 nt, Artificial Sequence
  Description of Artificial Sequence: Synthetic oligonucleotide
  Antisense strand to SEQ ID NO: 1491104
auugccauugauuauucca

SEQ ID NO: 1491106 - RNA, 19 nt, Artificial Sequence
  Description of Artificial Sequence: Synthetic oligonucleotide
  Sense strand starting at position 2479 of SEQ ID NO: 1244470
auuacucaccugugugaau

SEQ ID NO: 1491107 - RNA, 19 nt, Artificial Sequence
  Description of Artificial Sequence: Synthetic oligonucleotide
  Antisense strand to SEQ ID NO: 1491106
auucacacaggugaguaau

SEQ ID NO: 1491108 - RNA, 19 nt, Artificial Sequence
  Description of Artificial Sequence: Synthetic oligonucleotide
  Sense strand starting at position 2488 of SEQ ID NO: 1244470
cugugugaauucucuuaau

SEQ ID NO: 1491109 - RNA, 19 nt, Artificial Sequence
  Description of Artificial Sequence: Synthetic oligonucleotide
  Antisense strand to SEQ ID NO: 1491108
auuaagagaauucacacag

SEQ ID NO: 1491110 - RNA, 19 nt, Artificial Sequence
  Description of Artificial Sequence: Synthetic oligonucleotide
  Sense strand starting at position 2532 of SEQ ID NO: 1244470
guaauaagauucuuugcca

SEQ ID NO: 1491111 - RNA, 19 nt, Artificial Sequence
  Description of Artificial Sequence: Synthetic oligonucleotide
  Antisense strand to SEQ ID NO: 1491110
uggcaaagaaucuuauuac

SEQ ID NO: 1491112 - RNA, 19 nt, Artificial Sequence
  Description of Artificial Sequence: Synthetic oligonucleotide
  Sense strand starting at position 2641 of SEQ ID NO: 1244470
agccuauaucuggaucuca

SEQ ID NO: 1491113 - RNA, 19 nt, Artificial Sequence
  Description of Artificial Sequence: Synthetic oligonucleotide
  Antisense strand to SEQ ID NO: 1491112
ugagauccagauauaggcu

SEQ ID NO: 1491114 - RNA, 19 nt, Artificial Sequence
  Description of Artificial Sequence: Synthetic oligonucleotide
  Sense strand starting at position 2664 of SEQ ID NO: 1244470
uuauuugugcccugcagua

SEQ ID NO: 1491115 - RNA, 19 nt, Artificial Sequence
  Description of Artificial Sequence: Synthetic oligonucleotide
  Antisense strand to SEQ ID NO: 1491114
uacugcagggcacaaauaa

SEQ ID NO: 1491116 - RNA, 19 nt, Artificial Sequence
  Description of Artificial Sequence: Synthetic oligonucleotide
  Sense strand starting at position 2795 of SEQ ID NO: 1244470
gccugagacauccaguagu

SEQ ID NO: 1491117 - RNA, 19 nt, Artificial Sequence
  Description of Artificial Sequence: Synthetic oligonucleotide
  Antisense strand to SEQ ID NO: 1491116
acuacuggaugucucaggc

SEQ ID NO: 1491118 - RNA, 19 nt, Artificial Sequence
  Description of Artificial Sequence: Synthetic oligonucleotide
  Sense strand starting at position 2842 of SEQ ID NO: 1244470
uuaugagugaggcauaugu

SEQ ID NO: 1491119 - RNA, 19 nt, Artificial Sequence
  Description of Artificial Sequence: Synthetic oligonucleotide
  Antisense strand to SEQ ID NO: 1491118
acauaugccucacucauaa

SEQ ID NO: 1491120 - RNA, 19 nt, Artificial Sequence
  Description of Artificial Sequence: Synthetic oligonucleotide
  Sense strand starting at position 2858 of SEQ ID NO: 1244470
ugugguggugcugagacaa

SEQ ID NO: 1491121 - RNA, 19 nt, Artificial Sequence
  Description of Artificial Sequence: Synthetic oligonucleotide
  Antisense strand to SEQ ID NO: 1491120
uugucucagcaccaccaca

SEQ ID NO: 1491122 - RNA, 19 nt, Artificial Sequence
  Description of Artificial Sequence: Synthetic oligonucleotide
  Sense strand starting at position 2947 of SEQ ID NO: 1244470
agagcuucugaaugaaaca

SEQ ID NO: 1491123 - RNA, 19 nt, Artificial Sequence
  Description of Artificial Sequence: Synthetic oligonucleotide
  Antisense strand to SEQ ID NO: 1491122
uguuucauucagaagcucu

SEQ ID NO: 1491124 - RNA, 19 nt, Artificial Sequence
  Description of Artificial Sequence: Synthetic oligonucleotide
  Sense strand starting at position 3250 of SEQ ID NO: 1244470
ggugaaacuccggaucugu

SEQ ID NO: 1491125 - RNA, 19 nt, Artificial Sequence
  Description of Artificial Sequence: Synthetic oligonucleotide
  Antisense strand to SEQ ID NO: 1491124
acagauccggaguuucacc

SEQ ID NO: 1491126 - RNA, 19 nt, Artificial Sequence
  Description of Artificial Sequence: Synthetic oligonucleotide
  Sense strand starting at position 3943 of SEQ ID NO: 1244470
uacacagcuguccaugaga

SEQ ID NO: 1491127 - RNA, 19 nt, Artificial Sequence
  Description of Artificial Sequence: Synthetic oligonucleotide
  Antisense strand to SEQ ID NO: 1491126
ucucauggacagcugugua

SEQ ID NO: 1491128 - RNA, 19 nt, Artificial Sequence
  Description of Artificial Sequence: Synthetic oligonucleotide
  Sense strand starting at position 3971 of SEQ ID NO: 1244470
cucagaugugaucauauuc

SEQ ID NO: 1491129 - RNA, 19 nt, Artificial Sequence
  Description of Artificial Sequence: Synthetic oligonucleotide
  Antisense strand to SEQ ID NO: 1491128
gaauaugaucacaucugag

SEQ ID NO: 1491130 - RNA, 19 nt, Artificial Sequence
  Description of Artificial Sequence: Synthetic oligonucleotide
  Sense strand starting at position 3976 of SEQ ID NO: 1244470
augugaucauauuccucau

SEQ ID NO: 1491131 - RNA, 19 nt, Artificial Sequence
  Description of Artificial Sequence: Synthetic oligonucleotide
  Antisense strand to SEQ ID NO: 1491130
augaggaauaugaucacau

SEQ ID NO: 1491132 - RNA, 19 nt, Artificial Sequence
  Description of Artificial Sequence: Synthetic oligonucleotide
  Sense strand starting at position 3979 of SEQ ID NO: 1244470
ugaucauauuccucauugu

SEQ ID NO: 1491133 - RNA, 19 nt, Artificial Sequence
  Description of Artificial Sequence: Synthetic oligonucleotide
  Antisense strand to SEQ ID NO: 1491132
acaaugaggaauaugauca

SEQ ID NO: 1491134 - RNA, 19 nt, Artificial Sequence
  Description of Artificial Sequence: Synthetic oligonucleotide
  Sense strand starting at position 50 of SEQ ID NO: 1244471
aguuuccucuucucagaca

SEQ ID NO: 1491135 - RNA, 19 nt, Artificial Sequence
  Description of Artificial Sequence: Synthetic oligonucleotide
  Antisense strand to SEQ ID NO: 1491134
ugucugagaagaggaaacu

SEQ ID NO: 1491136 - RNA, 19 nt, Artificial Sequence
  Description of Artificial Sequence: Synthetic oligonucleotide
  Sense strand starting at position 151 of SEQ ID NO: 1244471
cgcauucugauugaagaga

SEQ ID NO: 1491137 - RNA, 19 nt, Artificial Sequence
  Description of Artificial Sequence: Synthetic oligonucleotide
  Antisense strand to SEQ ID NO: 1491136
ucucuucaaucagaaugcg

SEQ ID NO: 1491138 - RNA, 19 nt, Artificial Sequence
  Description of Artificial Sequence: Synthetic oligonucleotide
  Sense strand starting at position 193 of SEQ ID NO: 1244471
gcccacuaggcuggauaau

SEQ ID NO: 1491139 - RNA, 19 nt, Artificial Sequence
  Description of Artificial Sequence: Synthetic oligonucleotide
  Antisense strand to SEQ ID NO: 1491138
auuauccagccuagugggc

SEQ ID NO: 1491140 - RNA, 19 nt, Artificial Sequence
  Description of Artificial Sequence: Synthetic oligonucleotide
  Sense strand starting at position 366 of SEQ ID NO: 1244471
aagugagggcucugaagga

SEQ ID NO: 1491141 - RNA, 19 nt, Artificial Sequence
  Description of Artificial Sequence: Synthetic oligonucleotide
  Antisense strand to SEQ ID NO: 1491140
uccuucagagcccucacuu

SEQ ID NO: 1491142 - RNA, 19 nt, Artificial Sequence
  Description of Artificial Sequence: Synthetic oligonucleotide
  Sense strand starting at position 370 of SEQ ID NO: 1244471
gagggcucugaaggacuua

SEQ ID NO: 1491143 - RNA, 19 nt, Artificial Sequence
  Description of Artificial Sequence: Synthetic oligonucleotide
  Antisense strand to SEQ ID NO: 1491142
uaaguccuucagagcccuc

SEQ ID NO: 1491144 - RNA, 19 nt, Artificial Sequence
  Description of Artificial Sequence: Synthetic oligonucleotide
  Sense strand starting at position 416 of SEQ ID NO: 1244471
ucccaagucugaccugaaa

SEQ ID NO: 1491145 - RNA, 19 nt, Artificial Sequence
  Description of Artificial Sequence: Synthetic oligonucleotide
  Antisense strand to SEQ ID NO: 1491144
uuucaggucagacuuggga

SEQ ID NO: 1491146 - RNA, 19 nt, Artificial Sequence
  Description of Artificial Sequence: Synthetic oligonucleotide
  Sense strand starting at position 644 of SEQ ID NO: 1244471
cucagaagcuucuuccuga

SEQ ID NO: 1491147 - RNA, 19 nt, Artificial Sequence
  Description of Artificial Sequence: Synthetic oligonucleotide
  Antisense strand to SEQ ID NO: 1491146
ucaggaagaagcuucugag

SEQ ID NO: 1491148 - RNA, 19 nt, Artificial Sequence
  Description of Artificial Sequence: Synthetic oligonucleotide
  Sense strand starting at position 645 of SEQ ID NO: 1244471
ucagaagcuucuuccugaa

SEQ ID NO: 1491149 - RNA, 19 nt, Artificial Sequence
  Description of Artificial Sequence: Synthetic oligonucleotide
  Antisense strand to SEQ ID NO: 1491148
uucaggaagaagcuucuga

SEQ ID NO: 1491150 - RNA, 19 nt, Artificial Sequence
  Description of Artificial Sequence: Synthetic oligonucleotide
  Sense strand starting at position 870 of SEQ ID NO: 1244471
cgacuaggucuacaggagu

SEQ ID NO: 1491151 - RNA, 19 nt, Artificial Sequence
  Description of Artificial Sequence: Synthetic oligonucleotide
  Antisense strand to SEQ ID NO: 1491150
acuccuguagaccuagucg

SEQ ID NO: 1491152 - RNA, 19 nt, Artificial Sequence
  Description of Artificial Sequence: Synthetic oligonucleotide
  Sense strand starting at position 980 of SEQ ID NO: 1244471
gcagcaacucuguuguguu

SEQ ID NO: 1491153 - RNA, 19 nt, Artificial Sequence
  Description of Artificial Sequence: Synthetic oligonucleotide
  Antisense strand to SEQ ID NO: 1491152
aacacaacagaguugcugc

SEQ ID NO: 1491154 - RNA, 19 nt, Artificial Sequence
  Description of Artificial Sequence: Synthetic oligonucleotide
  Sense strand starting at position 2156 of SEQ ID NO: 1244471
gauggucagaucggaugau

SEQ ID NO: 1491155 - RNA, 19 nt, Artificial Sequence
  Description of Artificial Sequence: Synthetic oligonucleotide
  Antisense strand to SEQ ID NO: 1491154
aucauccgaucugaccauc

SEQ ID NO: 1491156 - RNA, 19 nt, Artificial Sequence
  Description of Artificial Sequence: Synthetic oligonucleotide
  Sense strand starting at position 2258 of SEQ ID NO: 1244471
gagacucggacuuguaagu

SEQ ID NO: 1491157 - RNA, 19 nt, Artificial Sequence
  Description of Artificial Sequence: Synthetic oligonucleotide
  Antisense strand to SEQ ID NO: 1491156
acuuacaaguccgagucuc

SEQ ID NO: 1491158 - RNA, 19 nt, Artificial Sequence
  Description of Artificial Sequence: Synthetic oligonucleotide
  Sense strand starting at position 2264 of SEQ ID NO: 1244471
cggacuuguaaguaacuuu

SEQ ID NO: 1491159 - RNA, 19 nt, Artificial Sequence
  Description of Artificial Sequence: Synthetic oligonucleotide
  Antisense strand to SEQ ID NO: 1491158
aaaguuacuuacaaguccg

SEQ ID NO: 1491160 - RNA, 19 nt, Artificial Sequence
  Description of Artificial Sequence: Synthetic oligonucleotide
  Sense strand starting at position 2299 of SEQ ID NO: 1244471
gguccuagacuggaucgaa

SEQ ID NO: 1491161 - RNA, 19 nt, Artificial Sequence
  Description of Artificial Sequence: Synthetic oligonucleotide
  Antisense strand to SEQ ID NO: 1491160
uucgauccagucuaggacc

SEQ ID NO: 1491162 - RNA, 19 nt, Artificial Sequence
  Description of Artificial Sequence: Synthetic oligonucleotide
  Sense strand starting at position 2455 of SEQ ID NO: 1244471
acaacauuggcugggauga

SEQ ID NO: 1491163 - RNA, 19 nt, Artificial Sequence
  Description of Artificial Sequence: Synthetic oligonucleotide
  Antisense strand to SEQ ID NO: 1491162
ucaucccagccaauguugu

SEQ ID NO: 1491164 - RNA, 19 nt, Artificial Sequence
  Description of Artificial Sequence: Synthetic oligonucleotide
  Sense strand starting at position 2576 of SEQ ID NO: 1244471
gugagaagaggcuacguau

SEQ ID NO: 1491165 - RNA, 19 nt, Artificial Sequence
  Description of Artificial Sequence: Synthetic oligonucleotide
  Antisense strand to SEQ ID NO: 1491164
auacguagccucuucucac

SEQ ID NO: 1491166 - RNA, 19 nt, Artificial Sequence
  Description of Artificial Sequence: Synthetic oligonucleotide
  Sense strand starting at position 2579 of SEQ ID NO: 1244471
agaagaggcuacguaucau

SEQ ID NO: 1491167 - RNA, 19 nt, Artificial Sequence
  Description of Artificial Sequence: Synthetic oligonucleotide
  Antisense strand to SEQ ID NO: 1491166
augauacguagccucuucu

SEQ ID NO: 1491168 - RNA, 19 nt, Artificial Sequence
  Description of Artificial Sequence: Synthetic oligonucleotide
  Sense strand starting at position 2600 of SEQ ID NO: 1244471
auuccuccaucaguaguaa

SEQ ID NO: 1491169 - RNA, 19 nt, Artificial Sequence
  Description of Artificial Sequence: Synthetic oligonucleotide
  Antisense strand to SEQ ID NO: 1491168
uuacuacugauggaggaau

SEQ ID NO: 1491170 - RNA, 19 nt, Artificial Sequence
  Description of Artificial Sequence: Synthetic oligonucleotide
  Sense strand starting at position 2717 of SEQ ID NO: 1244471
gacuuuacugccugguaga

SEQ ID NO: 1491171 - RNA, 19 nt, Artificial Sequence
  Description of Artificial Sequence: Synthetic oligonucleotide
  Antisense strand to SEQ ID NO: 1491170
ucuaccaggcaguaaaguc

SEQ ID NO: 1491172 - RNA, 19 nt, Artificial Sequence
  Description of Artificial Sequence: Synthetic oligonucleotide
  Sense strand starting at position 3029 of SEQ ID NO: 1244471
cuggaauagcaaggucaga

SEQ ID NO: 1491173 - RNA, 19 nt, Artificial Sequence
  Description of Artificial Sequence: Synthetic oligonucleotide
  Antisense strand to SEQ ID NO: 1491172
ucugaccuugcuauuccag

SEQ ID NO: 1491174 - RNA, 19 nt, Artificial Sequence
  Description of Artificial Sequence: Synthetic oligonucleotide
  Sense strand starting at position 3198 of SEQ ID NO: 1244471
aggaaacaguugucacaca

SEQ ID NO: 1491175 - RNA, 19 nt, Artificial Sequence
  Description of Artificial Sequence: Synthetic oligonucleotide
  Antisense strand to SEQ ID NO: 1491174
ugugugacaacuguuuccu

SEQ ID NO: 1491176 - RNA, 19 nt, Artificial Sequence
  Description of Artificial Sequence: Synthetic oligonucleotide
  Sense strand starting at position 3331 of SEQ ID NO: 1244471
ggcucauuccaagaucgaa

SEQ ID NO: 1491177 - RNA, 19 nt, Artificial Sequence
  Description of Artificial Sequence: Synthetic oligonucleotide
  Antisense strand to SEQ ID NO: 1491176
uucgaucuuggaaugagcc

SEQ ID NO: 1491178 - RNA, 19 nt, Artificial Sequence
  Description of Artificial Sequence: Synthetic oligonucleotide
  Sense strand starting at position 3334 of SEQ ID NO: 1244471
ucauuccaagaucgaaaua

SEQ ID NO: 1491179 - RNA, 19 nt, Artificial Sequence
  Description of Artificial Sequence: Synthetic oligonucleotide
  Antisense strand to SEQ ID NO: 1491178
uauuucgaucuuggaauga

SEQ ID NO: 1491180 - RNA, 19 nt, Artificial Sequence
  Description of Artificial Sequence: Synthetic oligonucleotide
  Sense strand starting at position 3345 of SEQ ID NO: 1244471
ucgaaauaaucaucugagu

SEQ ID NO: 1491181 - RNA, 19 nt, Artificial Sequence
  Description of Artificial Sequence: Synthetic oligonucleotide
  Antisense strand to SEQ ID NO: 1491180
acucagaugauuauuucga

SEQ ID NO: 1491182 - RNA, 19 nt, Artificial Sequence
  Description of Artificial Sequence: Synthetic oligonucleotide
  Sense strand starting at position 3353 of SEQ ID NO: 1244471
aucaucugagucugaaaua

SEQ ID NO: 1491183 - RNA, 19 nt, Artificial Sequence
  Description of Artificial Sequence: Synthetic oligonucleotide
  Antisense strand to SEQ ID NO: 1491182
uauuucagacucagaugau

SEQ ID NO: 1491184 - RNA, 19 nt, Artificial Sequence
  Description of Artificial Sequence: Synthetic oligonucleotide
  Sense strand starting at position 3379 of SEQ ID NO: 1244471
cuauguccuguggaaguuu

SEQ ID NO: 1491185 - RNA, 19 nt, Artificial Sequence
  Description of Artificial Sequence: Synthetic oligonucleotide
  Antisense strand to SEQ ID NO: 1491184
aaacuuccacaggacauag

SEQ ID NO: 1491186 - RNA, 19 nt, Artificial Sequence
  Description of Artificial Sequence: Synthetic oligonucleotide
  Sense strand starting at position 3428 of SEQ ID NO: 1244471
agucaucuuucugcagaca

SEQ ID NO: 1491187 - RNA, 19 nt, Artificial Sequence
  Description of Artificial Sequence: Synthetic oligonucleotide
  Antisense strand to SEQ ID NO: 1491186
ugucugcagaaagaugacu

SEQ ID NO: 1491188 - RNA, 19 nt, Artificial Sequence
  Description of Artificial Sequence: Synthetic oligonucleotide
  Sense strand starting at position 3429 of SEQ ID NO: 1244471
gucaucuuucugcagacau

SEQ ID NO: 1491189 - RNA, 19 nt, Artificial Sequence
  Description of Artificial Sequence: Synthetic oligonucleotide
  Antisense strand to SEQ ID NO: 1491188
augucugcagaaagaugac

SEQ ID NO: 1491190 - RNA, 19 nt, Artificial Sequence
  Description of Artificial Sequence: Synthetic oligonucleotide
  Sense strand starting at position 3488 of SEQ ID NO: 1244471
gcauuaaggcaagaaaggu

SEQ ID NO: 1491191 - RNA, 19 nt, Artificial Sequence
  Description of Artificial Sequence: Synthetic oligonucleotide
  Antisense strand to SEQ ID NO: 1491190
accuuucuugccuuaaugc

SEQ ID NO: 1491192 - RNA, 19 nt, Artificial Sequence
  Description of Artificial Sequence: Synthetic oligonucleotide
  Sense strand starting at position 3497 of SEQ ID NO: 1244471
caagaaaggugucucuguu

SEQ ID NO: 1491193 - RNA, 19 nt, Artificial Sequence
  Description of Artificial Sequence: Synthetic oligonucleotide
  Antisense strand to SEQ ID NO: 1491192
aacagagacaccuuucuug

SEQ ID NO: 1491194 - RNA, 19 nt, Artificial Sequence
  Description of Artificial Sequence: Synthetic oligonucleotide
  Sense strand starting at position 3582 of SEQ ID NO: 1244471
gaucgaucccucuggaucu

SEQ ID NO: 1491195 - RNA, 19 nt, Artificial Sequence
  Description of Artificial Sequence: Synthetic oligonucleotide
  Antisense strand to SEQ ID NO: 1491194
agauccagagggaucgauc

SEQ ID NO: 1491196 - RNA, 19 nt, Artificial Sequence
  Description of Artificial Sequence: Synthetic oligonucleotide
  Sense strand starting at position 3612 of SEQ ID NO: 1244471
cugacaucucuaugaaguu

SEQ ID NO: 1491197 - RNA, 19 nt, Artificial Sequence
  Description of Artificial Sequence: Synthetic oligonucleotide
  Antisense strand to SEQ ID NO: 1491196
aacuucauagagaugucag

SEQ ID NO: 1491198 - RNA, 19 nt, Artificial Sequence
  Description of Artificial Sequence: Synthetic oligonucleotide
  Sense strand starting at position 3661 of SEQ ID NO: 1244471
uaagguucugacuaaugca

SEQ ID NO: 1491199 - RNA, 19 nt, Artificial Sequence
  Description of Artificial Sequence: Synthetic oligonucleotide
  Antisense strand to SEQ ID NO: 1491198
ugcauuagucagaaccuua

SEQ ID NO: 1491200 - RNA, 19 nt, Artificial Sequence
  Description of Artificial Sequence: Synthetic oligonucleotide
  Sense strand starting at position 3668 of SEQ ID NO: 1244471
cugacuaaugcagagucua

SEQ ID NO: 1491201 - RNA, 19 nt, Artificial Sequence
  Description of Artificial Sequence: Synthetic oligonucleotide
  Antisense strand to SEQ ID NO: 1491200
uagacucugcauuagucag

SEQ ID NO: 1491202 - RNA, 19 nt, Artificial Sequence
  Description of Artificial Sequence: Synthetic oligonucleotide
  Sense strand starting at position 3724 of SEQ ID NO: 1244471
acuccuguuaucgaggauu

SEQ ID NO: 1491203 - RNA, 19 nt, Artificial Sequence
  Description of Artificial Sequence: Synthetic oligonucleotide
  Antisense strand to SEQ ID NO: 1491202
aauccucgauaacaggagu

SEQ ID NO: 1491204 - RNA, 19 nt, Artificial Sequence
  Description of Artificial Sequence: Synthetic oligonucleotide
  Sense strand starting at position 3791 of SEQ ID NO: 1244471
ugguaaauugcagaucacu

SEQ ID NO: 1491205 - RNA, 19 nt, Artificial Sequence
  Description of Artificial Sequence: Synthetic oligonucleotide
  Antisense strand to SEQ ID NO: 1491204
agugaucugcaauuuacca

SEQ ID NO: 1491206 - RNA, 19 nt, Artificial Sequence
  Description of Artificial Sequence: Synthetic oligonucleotide
  Sense strand starting at position 3814 of SEQ ID NO: 1244471
gcuuuauuuagcgggaguc

SEQ ID NO: 1491207 - RNA, 19 nt, Artificial Sequence
  Description of Artificial Sequence: Synthetic oligonucleotide
  Antisense strand to SEQ ID NO: 1491206
gacucccgcuaaauaaagc

SEQ ID NO: 1491208 - RNA, 19 nt, Artificial Sequence
  Description of Artificial Sequence: Synthetic oligonucleotide
  Sense strand starting at position 3824 of SEQ ID NO: 1244471
gcgggagucccuguuguca

SEQ ID NO: 1491209 - RNA, 19 nt, Artificial Sequence
  Description of Artificial Sequence: Synthetic oligonucleotide
  Antisense strand to SEQ ID NO: 1491208
ugacaacagggacucccgc

SEQ ID NO: 1491210 - RNA, 19 nt, Artificial Sequence
  Description of Artificial Sequence: Synthetic oligonucleotide
  Sense strand starting at position 3902 of SEQ ID NO: 1244471
ugugaauagcccuaagcac

SEQ ID NO: 1491211 - RNA, 19 nt, Artificial Sequence
  Description of Artificial Sequence: Synthetic oligonucleotide
  Antisense strand to SEQ ID NO: 1491210
gugcuuagggcuauucaca

SEQ ID NO: 1491212 - RNA, 19 nt, Artificial Sequence
  Description of Artificial Sequence: Synthetic oligonucleotide
  Sense strand starting at position 3932 of SEQ ID NO: 1244471
agugacagcucucuuauuu

SEQ ID NO: 1491213 - RNA, 19 nt, Artificial Sequence
  Description of Artificial Sequence: Synthetic oligonucleotide
  Antisense strand to SEQ ID NO: 1491212
aaauaagagagcugucacu

SEQ ID NO: 1491214 - RNA, 19 nt, Artificial Sequence
  Description of Artificial Sequence: Synthetic oligonucleotide
  Sense strand starting at position 3 of SEQ ID NO: 1244472
ugugauguugcccaggagu

SEQ ID NO: 1491215 - RNA, 19 nt, Artificial Sequence
  Description of Artificial Sequence: Synthetic oligonucleotide
  Antisense strand to SEQ ID NO: 1491214
acuccugggcaacaucaca

SEQ ID NO: 1491216 - RNA, 19 nt, Artificial Sequence
  Description of Artificial Sequence: Synthetic oligonucleotide
  Sense strand starting at position 5 of SEQ ID NO: 1244472
ugauguugcccaggaguga

SEQ ID NO: 1491217 - RNA, 19 nt, Artificial Sequence
  Description of Artificial Sequence: Synthetic oligonucleotide
  Antisense strand to SEQ ID NO: 1491216
ucacuccugggcaacauca

SEQ ID NO: 1491218 - RNA, 19 nt, Artificial Sequence
  Description of Artificial Sequence: Synthetic oligonucleotide
  Sense strand starting at position 974 of SEQ ID NO: 1244472
gcgagaccuccucaaucca

SEQ ID NO: 1491219 - RNA, 19 nt, Artificial Sequence
  Description of Artificial Sequence: Synthetic oligonucleotide
  Antisense strand to SEQ ID NO: 1491218
uggauugaggaggucucgc

SEQ ID NO: 1491220 - RNA, 19 nt, Artificial Sequence
  Description of Artificial Sequence: Synthetic oligonucleotide
  Sense strand starting at position 1034 of SEQ ID NO: 1244472
cucagagacuucucugcca

SEQ ID NO: 1491221 - RNA, 19 nt, Artificial Sequence
  Description of Artificial Sequence: Synthetic oligonucleotide
  Antisense strand to SEQ ID NO: 1491220
uggcagagaagucucugag

SEQ ID NO: 1491222 - RNA, 19 nt, Artificial Sequence
  Description of Artificial Sequence: Synthetic oligonucleotide
  Sense strand starting at position 1036 of SEQ ID NO: 1244472
cagagacuucucugccaug

SEQ ID NO: 1491223 - RNA, 19 nt, Artificial Sequence
  Description of Artificial Sequence: Synthetic oligonucleotide
  Antisense strand to SEQ ID NO: 1491222
cauggcagagaagucucug

SEQ ID NO: 1491224 - RNA, 19 nt, Artificial Sequence
  Description of Artificial Sequence: Synthetic oligonucleotide
  Sense strand starting at position 1098 of SEQ ID NO: 1244472
auuaucuagugcuuggaga

SEQ ID NO: 1491225 - RNA, 19 nt, Artificial Sequence
  Description of Artificial Sequence: Synthetic oligonucleotide
  Antisense strand to SEQ ID NO: 1491224
ucuccaagcacuagauaau

SEQ ID NO: 1491226 - RNA, 19 nt, Artificial Sequence
  Description of Artificial Sequence: Synthetic oligonucleotide
  Sense strand starting at position 1099 of SEQ ID NO: 1244472
uuaucuagugcuuggagaa

SEQ ID NO: 1491227 - RNA, 19 nt, Artificial Sequence
  Description of Artificial Sequence: Synthetic oligonucleotide
  Antisense strand to SEQ ID NO: 1491226
uucuccaagcacuagauaa

SEQ ID NO: 1491228 - RNA, 19 nt, Artificial Sequence
  Description of Artificial Sequence: Synthetic oligonucleotide
  Sense strand starting at position 1100 of SEQ ID NO: 1244472
uaucuagugcuuggagaaa

SEQ ID NO: 1491229 - RNA, 19 nt, Artificial Sequence
  Description of Artificial Sequence: Synthetic oligonucleotide
  Antisense strand to SEQ ID NO: 1491228
uuucuccaagcacuagaua

SEQ ID NO: 1491230 - RNA, 19 nt, Artificial Sequence
  Description of Artificial Sequence: Synthetic oligonucleotide
  Sense strand starting at position 1399 of SEQ ID NO: 1244472
gcuccaccgggagaucaau

SEQ ID NO: 1491231 - RNA, 19 nt, Artificial Sequence
  Description of Artificial Sequence: Synthetic oligonucleotide
  Antisense strand to SEQ ID NO: 1491230
auugaucucccgguggagc

SEQ ID NO: 1491232 - RNA, 19 nt, Artificial Sequence
  Description of Artificial Sequence: Synthetic oligonucleotide
  Sense strand starting at position 1426 of SEQ ID NO: 1244472
aggcucugcaugugugaga

SEQ ID NO: 1491233 - RNA, 19 nt, Artificial Sequence
  Description of Artificial Sequence: Synthetic oligonucleotide
  Antisense strand to SEQ ID NO: 1491232
ucucacacaugcagagccu

SEQ ID NO: 1491234 - RNA, 19 nt, Artificial Sequence
  Description of Artificial Sequence: Synthetic oligonucleotide
  Sense strand starting at position 1758 of SEQ ID NO: 1244472
aggugaagggucuagguga

SEQ ID NO: 1491235 - RNA, 19 nt, Artificial Sequence
  Description of Artificial Sequence: Synthetic oligonucleotide
  Antisense strand to SEQ ID NO: 1491234
ucaccuagacccuucaccu

SEQ ID NO: 1491236 - RNA, 19 nt, Artificial Sequence
  Description of Artificial Sequence: Synthetic oligonucleotide
  Sense strand starting at position 2204 of SEQ ID NO: 1244472
ccagauagaucagaggacu

SEQ ID NO: 1491237 - RNA, 19 nt, Artificial Sequence
  Description of Artificial Sequence: Synthetic oligonucleotide
  Antisense strand to SEQ ID NO: 1491236
aguccucugaucuaucugg

SEQ ID NO: 1491238 - RNA, 19 nt, Artificial Sequence
  Description of Artificial Sequence: Synthetic oligonucleotide
  Sense strand starting at position 2378 of SEQ ID NO: 1244472
aaaguaucagguugauggu

SEQ ID NO: 1491239 - RNA, 19 nt, Artificial Sequence
  Description of Artificial Sequence: Synthetic oligonucleotide
  Antisense strand to SEQ ID NO: 1491238
accaucaaccugauacuuu

SEQ ID NO: 1491240 - RNA, 19 nt, Artificial Sequence
  Description of Artificial Sequence: Synthetic oligonucleotide
  Sense strand starting at position 2548 of SEQ ID NO: 1244472
gaaagugcuuguguguaug

SEQ ID NO: 1491241 - RNA, 19 nt, Artificial Sequence
  Description of Artificial Sequence: Synthetic oligonucleotide
  Antisense strand to SEQ ID NO: 1491240
cauacacacaagcacuuuc

SEQ ID NO: 1491242 - RNA, 19 nt, Artificial Sequence
  Description of Artificial Sequence: Synthetic oligonucleotide
  Sense strand starting at position 2550 of SEQ ID NO: 1244472
aagugcuuguguguaugaa

SEQ ID NO: 1491243 - RNA, 19 nt, Artificial Sequence
  Description of Artificial Sequence: Synthetic oligonucleotide
  Antisense strand to SEQ ID NO: 1491242
uucauacacacaagcacuu

SEQ ID NO: 1491244 - RNA, 19 nt, Artificial Sequence
  Description of Artificial Sequence: Synthetic oligonucleotide
  Sense strand starting at position 2551 of SEQ ID NO: 1244472
agugcuuguguguaugaag

SEQ ID NO: 1491245 - RNA, 19 nt, Artificial Sequence
  Description of Artificial Sequence: Synthetic oligonucleotide
  Antisense strand to SEQ ID NO: 1491244
cuucauacacacaagcacu

SEQ ID NO: 1491246 - RNA, 19 nt, Artificial Sequence
  Description of Artificial Sequence: Synthetic oligonucleotide
  Sense strand starting at position 2753 of SEQ ID NO: 1244472
guggcauagaccuacaguu

SEQ ID NO: 1491247 - RNA, 19 nt, Artificial Sequence
  Description of Artificial Sequence: Synthetic oligonucleotide
  Antisense strand to SEQ ID NO: 1491246
aacuguaggucuaugccac

SEQ ID NO: 1491248 - RNA, 19 nt, Artificial Sequence
  Description of Artificial Sequence: Synthetic oligonucleotide
  Sense strand starting at position 2813 of SEQ ID NO: 1244472
ucaggugaaggaugugauu

SEQ ID NO: 1491249 - RNA, 19 nt, Artificial Sequence
  Description of Artificial Sequence: Synthetic oligonucleotide
  Antisense strand to SEQ ID NO: 1491248
aaucacauccuucaccuga

SEQ ID NO: 1491250 - RNA, 19 nt, Artificial Sequence
  Description of Artificial Sequence: Synthetic oligonucleotide
  Sense strand starting at position 2816 of SEQ ID NO: 1244472
ggugaaggaugugauucaa

SEQ ID NO: 1491251 - RNA, 19 nt, Artificial Sequence
  Description of Artificial Sequence: Synthetic oligonucleotide
  Antisense strand to SEQ ID NO: 1491250
uugaaucacauccuucacc

SEQ ID NO: 1491252 - RNA, 19 nt, Artificial Sequence
  Description of Artificial Sequence: Synthetic oligonucleotide
  Sense strand starting at position 3095 of SEQ ID NO: 1244472
gccacuucccagugauuga

SEQ ID NO: 1491253 - RNA, 19 nt, Artificial Sequence
  Description of Artificial Sequence: Synthetic oligonucleotide
  Antisense strand to SEQ ID NO: 1491252
ucaaucacugggaaguggc

SEQ ID NO: 1491254 - RNA, 19 nt, Artificial Sequence
  Description of Artificial Sequence: Synthetic oligonucleotide
  Sense strand starting at position 3099 of SEQ ID NO: 1244472
cuucccagugauugaacau

SEQ ID NO: 1491255 - RNA, 19 nt, Artificial Sequence
  Description of Artificial Sequence: Synthetic oligonucleotide
  Antisense strand to SEQ ID NO: 1491254
auguucaaucacugggaag

SEQ ID NO: 1491256 - RNA, 19 nt, Artificial Sequence
  Description of Artificial Sequence: Synthetic oligonucleotide
  Sense strand starting at position 3110 of SEQ ID NO: 1244472
uugaacaucccugggcaua

SEQ ID NO: 1491257 - RNA, 19 nt, Artificial Sequence
  Description of Artificial Sequence: Synthetic oligonucleotide
  Antisense strand to SEQ ID NO: 1491256
uaugcccagggauguucaa

SEQ ID NO: 1491258 - RNA, 19 nt, Artificial Sequence
  Description of Artificial Sequence: Synthetic oligonucleotide
  Sense strand starting at position 3188 of SEQ ID NO: 1244472
gcaggucaucccugccaga

SEQ ID NO: 1491259 - RNA, 19 nt, Artificial Sequence
  Description of Artificial Sequence: Synthetic oligonucleotide
  Antisense strand to SEQ ID NO: 1491258
ucuggcagggaugaccugc

SEQ ID NO: 1491260 - RNA, 19 nt, Artificial Sequence
  Description of Artificial Sequence: Synthetic oligonucleotide
  Sense strand starting at position 3303 of SEQ ID NO: 1244472
cagaaugugcuccagucaa

SEQ ID NO: 1491261 - RNA, 19 nt, Artificial Sequence
  Description of Artificial Sequence: Synthetic oligonucleotide
  Antisense strand to SEQ ID NO: 1491260
uugacuggagcacauucug

SEQ ID NO: 1491262 - RNA, 19 nt, Artificial Sequence
  Description of Artificial Sequence: Synthetic oligonucleotide
  Sense strand starting at position 3307 of SEQ ID NO: 1244472
augugcuccagucaaggau

SEQ ID NO: 1491263 - RNA, 19 nt, Artificial Sequence
  Description of Artificial Sequence: Synthetic oligonucleotide
  Antisense strand to SEQ ID NO: 1491262
auccuugacuggagcacau

SEQ ID NO: 1491264 - RNA, 19 nt, Artificial Sequence
  Description of Artificial Sequence: Synthetic oligonucleotide
  Sense strand starting at position 3326 of SEQ ID NO: 1244472
gaugguggacucugaguua

SEQ ID NO: 1491265 - RNA, 19 nt, Artificial Sequence
  Description of Artificial Sequence: Synthetic oligonucleotide
  Antisense strand to SEQ ID NO: 1491264
uaacucagaguccaccauc

SEQ ID NO: 1491266 - RNA, 19 nt, Artificial Sequence
  Description of Artificial Sequence: Synthetic oligonucleotide
  Sense strand starting at position 3331 of SEQ ID NO: 1244472
uggacucugaguuaagcau

SEQ ID NO: 1491267 - RNA, 19 nt, Artificial Sequence
  Description of Artificial Sequence: Synthetic oligonucleotide
  Antisense strand to SEQ ID NO: 1491266
augcuuaacucagagucca

SEQ ID NO: 1491268 - RNA, 19 nt, Artificial Sequence
  Description of Artificial Sequence: Synthetic oligonucleotide
  Sense strand starting at position 3351 of SEQ ID NO: 1244472
ccgucuccuuuauuaggaa

SEQ ID NO: 1491269 - RNA, 19 nt, Artificial Sequence
  Description of Artificial Sequence: Synthetic oligonucleotide
  Antisense strand to SEQ ID NO: 1491268
uuccuaauaaaggagacgg

SEQ ID NO: 1491270 - RNA, 19 nt, Artificial Sequence
  Description of Artificial Sequence: Synthetic oligonucleotide
  Sense strand starting at position 3513 of SEQ ID NO: 1244472
ccuuuaauagggcaagcau

SEQ ID NO: 1491271 - RNA, 19 nt, Artificial Sequence
  Description of Artificial Sequence: Synthetic oligonucleotide
  Antisense strand to SEQ ID NO: 1491270
augcuugcccuauuaaagg

SEQ ID NO: 1491272 - RNA, 19 nt, Artificial Sequence
  Description of Artificial Sequence: Synthetic oligonucleotide
  Sense strand starting at position 3538 of SEQ ID NO: 1244472
gaugccauuugugggaaca

SEQ ID NO: 1491273 - RNA, 19 nt, Artificial Sequence
  Description of Artificial Sequence: Synthetic oligonucleotide
  Antisense strand to SEQ ID NO: 1491272
uguucccacaaauggcauc

SEQ ID NO: 1491274 - RNA, 19 nt, Artificial Sequence
  Description of Artificial Sequence: Synthetic oligonucleotide
  Sense strand starting at position 3598 of SEQ ID NO: 1244472
ugaggaaagucagaugaca

SEQ ID NO: 1491275 - RNA, 19 nt, Artificial Sequence
  Description of Artificial Sequence: Synthetic oligonucleotide
  Antisense strand to SEQ ID NO: 1491274
ugucaucugacuuuccuca

SEQ ID NO: 1491276 - RNA, 19 nt, Artificial Sequence
  Description of Artificial Sequence: Synthetic oligonucleotide
  Sense strand starting at position 3624 of SEQ ID NO: 1244472
cccugagaguaaguuuaga

SEQ ID NO: 1491277 - RNA, 19 nt, Artificial Sequence
  Description of Artificial Sequence: Synthetic oligonucleotide
  Antisense strand to SEQ ID NO: 1491276
ucuaaacuuacucucaggg

SEQ ID NO: 1491278 - RNA, 19 nt, Artificial Sequence
  Description of Artificial Sequence: Synthetic oligonucleotide
  Sense strand starting at position 3644 of SEQ ID NO: 1244472
ggaggacaaccguguaaac

SEQ ID NO: 1491279 - RNA, 19 nt, Artificial Sequence
  Description of Artificial Sequence: Synthetic oligonucleotide
  Antisense strand to SEQ ID NO: 1491278
guuuacacgguuguccucc

SEQ ID NO: 1491280 - RNA, 19 nt, Artificial Sequence
  Description of Artificial Sequence: Synthetic oligonucleotide
  Sense strand starting at position 3846 of SEQ ID NO: 1244472
agcagagggcuugguucaa

SEQ ID NO: 1491281 - RNA, 19 nt, Artificial Sequence
  Description of Artificial Sequence: Synthetic oligonucleotide
  Antisense strand to SEQ ID NO: 1491280
uugaaccaagcccucugcu

SEQ ID NO: 1491282 - RNA, 19 nt, Artificial Sequence
  Description of Artificial Sequence: Synthetic oligonucleotide
  Sense strand starting at position 3919 of SEQ ID NO: 1244472
ucugcuccuucucugugaa

SEQ ID NO: 1491283 - RNA, 19 nt, Artificial Sequence
  Description of Artificial Sequence: Synthetic oligonucleotide
  Antisense strand to SEQ ID NO: 1491282
uucacagagaaggagcaga

SEQ ID NO: 1491284 - RNA, 19 nt, Artificial Sequence
  Description of Artificial Sequence: Synthetic oligonucleotide
  Sense strand starting at position 3920 of SEQ ID NO: 1244472
cugcuccuucucugugaaa

SEQ ID NO: 1491285 - RNA, 19 nt, Artificial Sequence
  Description of Artificial Sequence: Synthetic oligonucleotide
  Antisense strand to SEQ ID NO: 1491284
uuucacagagaaggagcag

SEQ ID NO: 1491286 - RNA, 19 nt, Artificial Sequence
  Description of Artificial Sequence: Synthetic oligonucleotide
  Sense strand starting at position 3921 of SEQ ID NO: 1244472
ugcuccuucucugugaaau

SEQ ID NO: 1491287 - RNA, 19 nt, Artificial Sequence
  Description of Artificial Sequence: Synthetic oligonucleotide
  Antisense strand to SEQ ID NO: 1491286
auuucacagagaaggagca

SEQ ID NO: 1491288 - RNA, 19 nt, Artificial Sequence
  Description of Artificial Sequence: Synthetic oligonucleotide
  Sense strand starting at position 3942 of SEQ ID NO: 1244472
guacaauguggucagcagu

SEQ ID NO: 1491289 - RNA, 19 nt, Artificial Sequence
  Description of Artificial Sequence: Synthetic oligonucleotide
  Antisense strand to SEQ ID NO: 1491288
acugcugaccacauuguac

SEQ ID NO: 1491290 - RNA, 19 nt, Artificial Sequence
  Description of Artificial Sequence: Synthetic oligonucleotide
  Sense strand starting at position 3945 of SEQ ID NO: 1244472
caauguggucagcaguaaa

SEQ ID NO: 1491291 - RNA, 19 nt, Artificial Sequence
  Description of Artificial Sequence: Synthetic oligonucleotide
  Antisense strand to SEQ ID NO: 1491290
uuuacugcugaccacauug

SEQ ID NO: 1491292 - RNA, 19 nt, Artificial Sequence
  Description of Artificial Sequence: Synthetic oligonucleotide
  Sense strand starting at position 3948 of SEQ ID NO: 1244472
uguggucagcaguaaagga

SEQ ID NO: 1491293 - RNA, 19 nt, Artificial Sequence
  Description of Artificial Sequence: Synthetic oligonucleotide
  Antisense strand to SEQ ID NO: 1491292
uccuuuacugcugaccaca

SEQ ID NO: 1491294 - RNA, 19 nt, Artificial Sequence
  Description of Artificial Sequence: Synthetic oligonucleotide
  Sense strand starting at position 90 of SEQ ID NO: 1244473
aguccugucucagcucaau

SEQ ID NO: 1491295 - RNA, 19 nt, Artificial Sequence
  Description of Artificial Sequence: Synthetic oligonucleotide
  Antisense strand to SEQ ID NO: 1491294
auugagcugagacaggacu

SEQ ID NO: 1491296 - RNA, 19 nt, Artificial Sequence
  Description of Artificial Sequence: Synthetic oligonucleotide
  Sense strand starting at position 102 of SEQ ID NO: 1244473
gcucaaucagaagaucuuu

SEQ ID NO: 1491297 - RNA, 19 nt, Artificial Sequence
  Description of Artificial Sequence: Synthetic oligonucleotide
  Antisense strand to SEQ ID NO: 1491296
aaagaucuucugauugagc

SEQ ID NO: 1491298 - RNA, 19 nt, Artificial Sequence
  Description of Artificial Sequence: Synthetic oligonucleotide
  Sense strand starting at position 124 of SEQ ID NO: 1244473
aguauuguuuaugcaacaa

SEQ ID NO: 1491299 - RNA, 19 nt, Artificial Sequence
  Description of Artificial Sequence: Synthetic oligonucleotide
  Antisense strand to SEQ ID NO: 1491298
uuguugcauaaacaauacu

SEQ ID NO: 1491300 - RNA, 19 nt, Artificial Sequence
  Description of Artificial Sequence: Synthetic oligonucleotide
  Sense strand starting at position 146 of SEQ ID NO: 1244473
cuacaaagugaauguuuga

SEQ ID NO: 1491301 - RNA, 19 nt, Artificial Sequence
  Description of Artificial Sequence: Synthetic oligonucleotide
  Antisense strand to SEQ ID NO: 1491300
ucaaacauucacuuuguag

SEQ ID NO: 1491302 - RNA, 19 nt, Artificial Sequence
  Description of Artificial Sequence: Synthetic oligonucleotide
  Sense strand starting at position 149 of SEQ ID NO: 1244473
caaagugaauguuugagaa

SEQ ID NO: 1491303 - RNA, 19 nt, Artificial Sequence
  Description of Artificial Sequence: Synthetic oligonucleotide
  Antisense strand to SEQ ID NO: 1491302
uucucaaacauucacuuug

SEQ ID NO: 1491304 - RNA, 19 nt, Artificial Sequence
  Description of Artificial Sequence: Synthetic oligonucleotide
  Sense strand starting at position 151 of SEQ ID NO: 1244473
aagugaauguuugagaaau

SEQ ID NO: 1491305 - RNA, 19 nt, Artificial Sequence
  Description of Artificial Sequence: Synthetic oligonucleotide
  Antisense strand to SEQ ID NO: 1491304
auuucucaaacauucacuu

SEQ ID NO: 1491306 - RNA, 19 nt, Artificial Sequence
  Description of Artificial Sequence: Synthetic oligonucleotide
  Sense strand starting at position 338 of SEQ ID NO: 1244473
ggcacugcuuagguugaaa

SEQ ID NO: 1491307 - RNA, 19 nt, Artificial Sequence
  Description of Artificial Sequence: Synthetic oligonucleotide
  Antisense strand to SEQ ID NO: 1491306
uuucaaccuaagcagugcc

SEQ ID NO: 1491308 - RNA, 19 nt, Artificial Sequence
  Description of Artificial Sequence: Synthetic oligonucleotide
  Sense strand starting at position 340 of SEQ ID NO: 1244473
cacugcuuagguugaaaua

SEQ ID NO: 1491309 - RNA, 19 nt, Artificial Sequence
  Description of Artificial Sequence: Synthetic oligonucleotide
  Antisense strand to SEQ ID NO: 1491308
uauuucaaccuaagcagug

SEQ ID NO: 1491310 - RNA, 19 nt, Artificial Sequence
  Description of Artificial Sequence: Synthetic oligonucleotide
  Sense strand starting at position 341 of SEQ ID NO: 1244473
acugcuuagguugaaauaa

SEQ ID NO: 1491311 - RNA, 19 nt, Artificial Sequence
  Description of Artificial Sequence: Synthetic oligonucleotide
  Antisense strand to SEQ ID NO: 1491310
uuauuucaaccuaagcagu

SEQ ID NO: 1491312 - RNA, 19 nt, Artificial Sequence
  Description of Artificial Sequence: Synthetic oligonucleotide
  Sense strand starting at position 412 of SEQ ID NO: 1244473
gcguuuccacauugaugga

SEQ ID NO: 1491313 - RNA, 19 nt, Artificial Sequence
  Description of Artificial Sequence: Synthetic oligonucleotide
  Antisense strand to SEQ ID NO: 1491312
uccaucaauguggaaacgc

SEQ ID NO: 1491314 - RNA, 19 nt, Artificial Sequence
  Description of Artificial Sequence: Synthetic oligonucleotide
  Sense strand starting at position 425 of SEQ ID NO: 1244473
gauggacuccugugaugcu

SEQ ID NO: 1491315 - RNA, 19 nt, Artificial Sequence
  Description of Artificial Sequence: Synthetic oligonucleotide
  Antisense strand to SEQ ID NO: 1491314
agcaucacaggaguccauc

SEQ ID NO: 1491316 - RNA, 19 nt, Artificial Sequence
  Description of Artificial Sequence: Synthetic oligonucleotide
  Sense strand starting at position 456 of SEQ ID NO: 1244473
gucccugguuuacuuaaua

SEQ ID NO: 1491317 - RNA, 19 nt, Artificial Sequence
  Description of Artificial Sequence: Synthetic oligonucleotide
  Antisense strand to SEQ ID NO: 1491316
uauuaaguaaaccagggac

SEQ ID NO: 1491318 - RNA, 19 nt, Artificial Sequence
  Description of Artificial Sequence: Synthetic oligonucleotide
  Sense strand starting at position 461 of SEQ ID NO: 1244473
ugguuuacuuaauagcuca

SEQ ID NO: 1491319 - RNA, 19 nt, Artificial Sequence
  Description of Artificial Sequence: Synthetic oligonucleotide
  Antisense strand to SEQ ID NO: 1491318
ugagcuauuaaguaaacca

SEQ ID NO: 1491320 - RNA, 19 nt, Artificial Sequence
  Description of Artificial Sequence: Synthetic oligonucleotide
  Sense strand starting at position 469 of SEQ ID NO: 1244473
uuaauagcucaggauacga

SEQ ID NO: 1491321 - RNA, 19 nt, Artificial Sequence
  Description of Artificial Sequence: Synthetic oligonucleotide
  Antisense strand to SEQ ID NO: 1491320
ucguauccugagcuauuaa

SEQ ID NO: 1491322 - RNA, 19 nt, Artificial Sequence
  Description of Artificial Sequence: Synthetic oligonucleotide
  Sense strand starting at position 535 of SEQ ID NO: 1244473
ggccaaguguuagcuccuu

SEQ ID NO: 1491323 - RNA, 19 nt, Artificial Sequence
  Description of Artificial Sequence: Synthetic oligonucleotide
  Antisense strand to SEQ ID NO: 1491322
aaggagcuaacacuuggcc

SEQ ID NO: 1491324 - RNA, 19 nt, Artificial Sequence
  Description of Artificial Sequence: Synthetic oligonucleotide
  Sense strand starting at position 580 of SEQ ID NO: 1244473
ccaccuggaugaugacaaa

SEQ ID NO: 1491325 - RNA, 19 nt, Artificial Sequence
  Description of Artificial Sequence: Synthetic oligonucleotide
  Antisense strand to SEQ ID NO: 1491324
uuugucaucauccaggugg

SEQ ID NO: 1491326 - RNA, 19 nt, Artificial Sequence
  Description of Artificial Sequence: Synthetic oligonucleotide
  Sense strand starting at position 835 of SEQ ID NO: 1244473
gagugagugcacuguugga

SEQ ID NO: 1491327 - RNA, 19 nt, Artificial Sequence
  Description of Artificial Sequence: Synthetic oligonucleotide
  Antisense strand to SEQ ID NO: 1491326
uccaacagugcacucacuc

SEQ ID NO: 1491328 - RNA, 19 nt, Artificial Sequence
  Description of Artificial Sequence: Synthetic oligonucleotide
  Sense strand starting at position 1048 of SEQ ID NO: 1244473
gguuccugcucuccaucaa

SEQ ID NO: 1491329 - RNA, 19 nt, Artificial Sequence
  Description of Artificial Sequence: Synthetic oligonucleotide
  Antisense strand to SEQ ID NO: 1491328
uugauggagagcaggaacc

SEQ ID NO: 1491330 - RNA, 19 nt, Artificial Sequence
  Description of Artificial Sequence: Synthetic oligonucleotide
  Sense strand starting at position 2025 of SEQ ID NO: 1244473
gcuuuauacccaggaggac

SEQ ID NO: 1491331 - RNA, 19 nt, Artificial Sequence
  Description of Artificial Sequence: Synthetic oligonucleotide
  Antisense strand to SEQ ID NO: 1491330
guccuccuggguauaaagc

SEQ ID NO: 1491332 - RNA, 19 nt, Artificial Sequence
  Description of Artificial Sequence: Synthetic oligonucleotide
  Sense strand starting at position 2047 of SEQ ID NO: 1244473
gugauuuacagcugcggga

SEQ ID NO: 1491333 - RNA, 19 nt, Artificial Sequence
  Description of Artificial Sequence: Synthetic oligonucleotide
  Antisense strand to SEQ ID NO: 1491332
ucccgcagcuguaaaucac

SEQ ID NO: 1491334 - RNA, 19 nt, Artificial Sequence
  Description of Artificial Sequence: Synthetic oligonucleotide
  Sense strand starting at position 2060 of SEQ ID NO: 1244473
gcgggaguuuggcuccaua

SEQ ID NO: 1491335 - RNA, 19 nt, Artificial Sequence
  Description of Artificial Sequence: Synthetic oligonucleotide
  Antisense strand to SEQ ID NO: 1491334
uauggagccaaacucccgc

SEQ ID NO: 1491336 - RNA, 19 nt, Artificial Sequence
  Description of Artificial Sequence: Synthetic oligonucleotide
  Sense strand starting at position 2063 of SEQ ID NO: 1244473
ggaguuuggcuccauaaag

SEQ ID NO: 1491337 - RNA, 19 nt, Artificial Sequence
  Description of Artificial Sequence: Synthetic oligonucleotide
  Antisense strand to SEQ ID NO: 1491336
cuuuauggagccaaacucc

SEQ ID NO: 1491338 - RNA, 19 nt, Artificial Sequence
  Description of Artificial Sequence: Synthetic oligonucleotide
  Sense strand starting at position 2106 of SEQ ID NO: 1244473
aucuuucuccaaggugaau

SEQ ID NO: 1491339 - RNA, 19 nt, Artificial Sequence
  Description of Artificial Sequence: Synthetic oligonucleotide
  Antisense strand to SEQ ID NO: 1491338
auucaccuuggagaaagau

SEQ ID NO: 1491340 - RNA, 19 nt, Artificial Sequence
  Description of Artificial Sequence: Synthetic oligonucleotide
  Sense strand starting at position 2439 of SEQ ID NO: 1244473
gguccucgcagugauccaa

SEQ ID NO: 1491341 - RNA, 19 nt, Artificial Sequence
  Description of Artificial Sequence: Synthetic oligonucleotide
  Antisense strand to SEQ ID NO: 1491340
uuggaucacugcgaggacc

SEQ ID NO: 1491342 - RNA, 19 nt, Artificial Sequence
  Description of Artificial Sequence: Synthetic oligonucleotide
  Sense strand starting at position 2794 of SEQ ID NO: 1244473
ggcucuagugaggacagau

SEQ ID NO: 1491343 - RNA, 19 nt, Artificial Sequence
  Description of Artificial Sequence: Synthetic oligonucleotide
  Antisense strand to SEQ ID NO: 1491342
aucuguccucacuagagcc

SEQ ID NO: 1491344 - RNA, 19 nt, Artificial Sequence
  Description of Artificial Sequence: Synthetic oligonucleotide
  Sense strand starting at position 2804 of SEQ ID NO: 1244473
aggacagaucucugacugu

SEQ ID NO: 1491345 - RNA, 19 nt, Artificial Sequence
  Description of Artificial Sequence: Synthetic oligonucleotide
  Antisense strand to SEQ ID NO: 1491344
acagucagagaucuguccu

SEQ ID NO: 1491346 - RNA, 19 nt, Artificial Sequence
  Description of Artificial Sequence: Synthetic oligonucleotide
  Sense strand starting at position 2891 of SEQ ID NO: 1244473
gugggucacccucguguau

SEQ ID NO: 1491347 - RNA, 19 nt, Artificial Sequence
  Description of Artificial Sequence: Synthetic oligonucleotide
  Antisense strand to SEQ ID NO: 1491346
auacacgagggugacccac

SEQ ID NO: 1491348 - RNA, 19 nt, Artificial Sequence
  Description of Artificial Sequence: Synthetic oligonucleotide
  Sense strand starting at position 2893 of SEQ ID NO: 1244473
gggucacccucguguauug

SEQ ID NO: 1491349 - RNA, 19 nt, Artificial Sequence
  Description of Artificial Sequence: Synthetic oligonucleotide
  Antisense strand to SEQ ID NO: 1491348
caauacacgagggugaccc

SEQ ID NO: 1491350 - RNA, 19 nt, Artificial Sequence
  Description of Artificial Sequence: Synthetic oligonucleotide
  Sense strand starting at position 3008 of SEQ ID NO: 1244473
gggugagcguuucagaugu

SEQ ID NO: 1491351 - RNA, 19 nt, Artificial Sequence
  Description of Artificial Sequence: Synthetic oligonucleotide
  Antisense strand to SEQ ID NO: 1491350
acaucugaaacgcucaccc

SEQ ID NO: 1491352 - RNA, 19 nt, Artificial Sequence
  Description of Artificial Sequence: Synthetic oligonucleotide
  Sense strand starting at position 3010 of SEQ ID NO: 1244473
gugagcguuucagaugucu

SEQ ID NO: 1491353 - RNA, 19 nt, Artificial Sequence
  Description of Artificial Sequence: Synthetic oligonucleotide
  Antisense strand to SEQ ID NO: 1491352
agacaucugaaacgcucac

SEQ ID NO: 1491354 - RNA, 19 nt, Artificial Sequence
  Description of Artificial Sequence: Synthetic oligonucleotide
  Sense strand starting at position 3015 of SEQ ID NO: 1244473
cguuucagaugucuuggua

SEQ ID NO: 1491355 - RNA, 19 nt, Artificial Sequence
  Description of Artificial Sequence: Synthetic oligonucleotide
  Antisense strand to SEQ ID NO: 1491354
uaccaagacaucugaaacg

SEQ ID NO: 1491356 - RNA, 19 nt, Artificial Sequence
  Description of Artificial Sequence: Synthetic oligonucleotide
  Sense strand starting at position 3681 of SEQ ID NO: 1244473
uagugagacucggagagaa

SEQ ID NO: 1491357 - RNA, 19 nt, Artificial Sequence
  Description of Artificial Sequence: Synthetic oligonucleotide
  Antisense strand to SEQ ID NO: 1491356
uucucuccgagucucacua

SEQ ID NO: 1491358 - RNA, 19 nt, Artificial Sequence
  Description of Artificial Sequence: Synthetic oligonucleotide
  Sense strand starting at position 3881 of SEQ ID NO: 1244473
cgccaaaugucacugauuc

SEQ ID NO: 1491359 - RNA, 19 nt, Artificial Sequence
  Description of Artificial Sequence: Synthetic oligonucleotide
  Antisense strand to SEQ ID NO: 1491358
gaaucagugacauuuggcg

SEQ ID NO: 1491360 - RNA, 19 nt, Artificial Sequence
  Description of Artificial Sequence: Synthetic oligonucleotide
  Sense strand starting at position 14 of SEQ ID NO: 1244474
uccugaaacuccuccagga

SEQ ID NO: 1491361 - RNA, 19 nt, Artificial Sequence
  Description of Artificial Sequence: Synthetic oligonucleotide
  Antisense strand to SEQ ID NO: 1491360
uccuggaggaguuucagga

SEQ ID NO: 1491362 - RNA, 19 nt, Artificial Sequence
  Description of Artificial Sequence: Synthetic oligonucleotide
  Sense strand starting at position 91 of SEQ ID NO: 1244474
cccagugauugcccacuga

SEQ ID NO: 1491363 - RNA, 19 nt, Artificial Sequence
  Description of Artificial Sequence: Synthetic oligonucleotide
  Antisense strand to SEQ ID NO: 1491362
ucagugggcaaucacuggg

SEQ ID NO: 1491364 - RNA, 19 nt, Artificial Sequence
  Description of Artificial Sequence: Synthetic oligonucleotide
  Sense strand starting at position 194 of SEQ ID NO: 1244474
ggagacucccgaugaucuu

SEQ ID NO: 1491365 - RNA, 19 nt, Artificial Sequence
  Description of Artificial Sequence: Synthetic oligonucleotide
  Antisense strand to SEQ ID NO: 1491364
aagaucaucgggagucucc

SEQ ID NO: 1491366 - RNA, 19 nt, Artificial Sequence
  Description of Artificial Sequence: Synthetic oligonucleotide
  Sense strand starting at position 195 of SEQ ID NO: 1244474
gagacucccgaugaucuuu

SEQ ID NO: 1491367 - RNA, 19 nt, Artificial Sequence
  Description of Artificial Sequence: Synthetic oligonucleotide
  Antisense strand to SEQ ID NO: 1491366
aaagaucaucgggagucuc

SEQ ID NO: 1491368 - RNA, 19 nt, Artificial Sequence
  Description of Artificial Sequence: Synthetic oligonucleotide
  Sense strand starting at position 200 of SEQ ID NO: 1244474
ucccgaugaucuuuaucuu

SEQ ID NO: 1491369 - RNA, 19 nt, Artificial Sequence
  Description of Artificial Sequence: Synthetic oligonucleotide
  Antisense strand to SEQ ID NO: 1491368
aagauaaagaucaucggga

SEQ ID NO: 1491370 - RNA, 19 nt, Artificial Sequence
  Description of Artificial Sequence: Synthetic oligonucleotide
  Sense strand starting at position 201 of SEQ ID NO: 1244474
cccgaugaucuuuaucuuu

SEQ ID NO: 1491371 - RNA, 19 nt, Artificial Sequence
  Description of Artificial Sequence: Synthetic oligonucleotide
  Antisense strand to SEQ ID NO: 1491370
aaagauaaagaucaucggg

SEQ ID NO: 1491372 - RNA, 19 nt, Artificial Sequence
  Description of Artificial Sequence: Synthetic oligonucleotide
  Sense strand starting at position 271 of SEQ ID NO: 1244474
gucucccugcuccauauau

SEQ ID NO: 1491373 - RNA, 19 nt, Artificial Sequence
  Description of Artificial Sequence: Synthetic oligonucleotide
  Antisense strand to SEQ ID NO: 1491372
auauauggagcagggagac

SEQ ID NO: 1491374 - RNA, 19 nt, Artificial Sequence
  Description of Artificial Sequence: Synthetic oligonucleotide
  Sense strand starting at position 357 of SEQ ID NO: 1244474
guagauuaaugaucaagug

SEQ ID NO: 1491375 - RNA, 19 nt, Artificial Sequence
  Description of Artificial Sequence: Synthetic oligonucleotide
  Antisense strand to SEQ ID NO: 1491374
cacuugaucauuaaucuac

SEQ ID NO: 1491376 - RNA, 19 nt, Artificial Sequence
  Description of Artificial Sequence: Synthetic oligonucleotide
  Sense strand starting at position 365 of SEQ ID NO: 1244474
augaucaagugcucagauu

SEQ ID NO: 1491377 - RNA, 19 nt, Artificial Sequence
  Description of Artificial Sequence: Synthetic oligonucleotide
  Antisense strand to SEQ ID NO: 1491376
aaucugagcacuugaucau

SEQ ID NO: 1491378 - RNA, 19 nt, Artificial Sequence
  Description of Artificial Sequence: Synthetic oligonucleotide
  Sense strand starting at position 366 of SEQ ID NO: 1244474
ugaucaagugcucagauuc

SEQ ID NO: 1491379 - RNA, 19 nt, Artificial Sequence
  Description of Artificial Sequence: Synthetic oligonucleotide
  Antisense strand to SEQ ID NO: 1491378
gaaucugagcacuugauca

SEQ ID NO: 1491380 - RNA, 19 nt, Artificial Sequence
  Description of Artificial Sequence: Synthetic oligonucleotide
  Sense strand starting at position 394 of SEQ ID NO: 1244474
uuaccucugucaucuuaga

SEQ ID NO: 1491381 - RNA, 19 nt, Artificial Sequence
  Description of Artificial Sequence: Synthetic oligonucleotide
  Antisense strand to SEQ ID NO: 1491380
ucuaagaugacagagguaa

SEQ ID NO: 1491382 - RNA, 19 nt, Artificial Sequence
  Description of Artificial Sequence: Synthetic oligonucleotide
  Sense strand starting at position 442 of SEQ ID NO: 1244474
gacucugugccugaguguu

SEQ ID NO: 1491383 - RNA, 19 nt, Artificial Sequence
  Description of Artificial Sequence: Synthetic oligonucleotide
  Antisense strand to SEQ ID NO: 1491382
aacacucaggcacagaguc

SEQ ID NO: 1491384 - RNA, 19 nt, Artificial Sequence
  Description of Artificial Sequence: Synthetic oligonucleotide
  Sense strand starting at position 489 of SEQ ID NO: 1244474
ggaauaguagcuggugcau

SEQ ID NO: 1491385 - RNA, 19 nt, Artificial Sequence
  Description of Artificial Sequence: Synthetic oligonucleotide
  Antisense strand to SEQ ID NO: 1491384
augcaccagcuacuauucc

SEQ ID NO: 1491386 - RNA, 19 nt, Artificial Sequence
  Description of Artificial Sequence: Synthetic oligonucleotide
  Sense strand starting at position 770 of SEQ ID NO: 1244474
cugugaucgccacagugaa

SEQ ID NO: 1491387 - RNA, 19 nt, Artificial Sequence
  Description of Artificial Sequence: Synthetic oligonucleotide
  Antisense strand to SEQ ID NO: 1491386
uucacuguggcgaucacag

SEQ ID NO: 1491388 - RNA, 19 nt, Artificial Sequence
  Description of Artificial Sequence: Synthetic oligonucleotide
  Sense strand starting at position 918 of SEQ ID NO: 1244474
gagaguaaugccggcaaug

SEQ ID NO: 1491389 - RNA, 19 nt, Artificial Sequence
  Description of Artificial Sequence: Synthetic oligonucleotide
  Antisense strand to SEQ ID NO: 1491388
cauugccggcauuacucuc

SEQ ID NO: 1491390 - RNA, 19 nt, Artificial Sequence
  Description of Artificial Sequence: Synthetic oligonucleotide
  Sense strand starting at position 959 of SEQ ID NO: 1244474
guuggcuaucucugcauuu

SEQ ID NO: 1491391 - RNA, 19 nt, Artificial Sequence
  Description of Artificial Sequence: Synthetic oligonucleotide
  Antisense strand to SEQ ID NO: 1491390
aaaugcagagauagccaac

SEQ ID NO: 1491392 - RNA, 19 nt, Artificial Sequence
  Description of Artificial Sequence: Synthetic oligonucleotide
  Sense strand starting at position 1007 of SEQ ID NO: 1244474
cugggaagggucgggauua

SEQ ID NO: 1491393 - RNA, 19 nt, Artificial Sequence
  Description of Artificial Sequence: Synthetic oligonucleotide
  Antisense strand to SEQ ID NO: 1491392
uaaucccgacccuucccag

SEQ ID NO: 1491394 - RNA, 19 nt, Artificial Sequence
  Description of Artificial Sequence: Synthetic oligonucleotide
  Sense strand starting at position 1112 of SEQ ID NO: 1244474
gggucuuugcccugacagu

SEQ ID NO: 1491395 - RNA, 19 nt, Artificial Sequence
  Description of Artificial Sequence: Synthetic oligonucleotide
  Antisense strand to SEQ ID NO: 1491394
acugucagggcaaagaccc

SEQ ID NO: 1491396 - RNA, 19 nt, Artificial Sequence
  Description of Artificial Sequence: Synthetic oligonucleotide
  Sense strand starting at position 1113 of SEQ ID NO: 1244474
ggucuuugcccugacagua

SEQ ID NO: 1491397 - RNA, 19 nt, Artificial Sequence
  Description of Artificial Sequence: Synthetic oligonucleotide
  Antisense strand to SEQ ID NO: 1491396
uacugucagggcaaagacc

SEQ ID NO: 1491398 - RNA, 19 nt, Artificial Sequence
  Description of Artificial Sequence: Synthetic oligonucleotide
  Sense strand starting at position 1581 of SEQ ID NO: 1244474
gcgcuuucugcugugugga

SEQ ID NO: 1491399 - RNA, 19 nt, Artificial Sequence
  Description of Artificial Sequence: Synthetic oligonucleotide
  Antisense strand to SEQ ID NO: 1491398
uccacacagcagaaagcgc

SEQ ID NO: 1491400 - RNA, 19 nt, Artificial Sequence
  Description of Artificial Sequence: Synthetic oligonucleotide
  Sense strand starting at position 1739 of SEQ ID NO: 1244474
cccgcuuucccguuccaau

SEQ ID NO: 1491401 - RNA, 19 nt, Artificial Sequence
  Description of Artificial Sequence: Synthetic oligonucleotide
  Antisense strand to SEQ ID NO: 1491400
auuggaacgggaaagcggg

SEQ ID NO: 1491402 - RNA, 19 nt, Artificial Sequence
  Description of Artificial Sequence: Synthetic oligonucleotide
  Sense strand starting at position 2008 of SEQ ID NO: 1244474
uucuguugacuuuggaaau

SEQ ID NO: 1491403 - RNA, 19 nt, Artificial Sequence
  Description of Artificial Sequence: Synthetic oligonucleotide
  Antisense strand to SEQ ID NO: 1491402
auuuccaaagucaacagaa

SEQ ID NO: 1491404 - RNA, 19 nt, Artificial Sequence
  Description of Artificial Sequence: Synthetic oligonucleotide
  Sense strand starting at position 2193 of SEQ ID NO: 1244474
uucuuagguccgcaguaaa

SEQ ID NO: 1491405 - RNA, 19 nt, Artificial Sequence
  Description of Artificial Sequence: Synthetic oligonucleotide
  Antisense strand to SEQ ID NO: 1491404
uuuacugcggaccuaagaa

SEQ ID NO: 1491406 - RNA, 19 nt, Artificial Sequence
  Description of Artificial Sequence: Synthetic oligonucleotide
  Sense strand starting at position 2205 of SEQ ID NO: 1244474
caguaaagagcuugcggaa

SEQ ID NO: 1491407 - RNA, 19 nt, Artificial Sequence
  Description of Artificial Sequence: Synthetic oligonucleotide
  Antisense strand to SEQ ID NO: 1491406
uuccgcaagcucuuuacug

SEQ ID NO: 1491408 - RNA, 19 nt, Artificial Sequence
  Description of Artificial Sequence: Synthetic oligonucleotide
  Sense strand starting at position 2342 of SEQ ID NO: 1244474
cuguguuucccuuaaguca

SEQ ID NO: 1491409 - RNA, 19 nt, Artificial Sequence
  Description of Artificial Sequence: Synthetic oligonucleotide
  Antisense strand to SEQ ID NO: 1491408
ugacuuaagggaaacacag

SEQ ID NO: 1491410 - RNA, 19 nt, Artificial Sequence
  Description of Artificial Sequence: Synthetic oligonucleotide
  Sense strand starting at position 2478 of SEQ ID NO: 1244474
ggcacacuuuccucaaagu

SEQ ID NO: 1491411 - RNA, 19 nt, Artificial Sequence
  Description of Artificial Sequence: Synthetic oligonucleotide
  Antisense strand to SEQ ID NO: 1491410
acuuugaggaaagugugcc

SEQ ID NO: 1491412 - RNA, 19 nt, Artificial Sequence
  Description of Artificial Sequence: Synthetic oligonucleotide
  Sense strand starting at position 2684 of SEQ ID NO: 1244474
ucuauacccuuuguagagu

SEQ ID NO: 1491413 - RNA, 19 nt, Artificial Sequence
  Description of Artificial Sequence: Synthetic oligonucleotide
  Antisense strand to SEQ ID NO: 1491412
acucuacaaaggguauaga

SEQ ID NO: 1491414 - RNA, 19 nt, Artificial Sequence
  Description of Artificial Sequence: Synthetic oligonucleotide
  Sense strand starting at position 2701 of SEQ ID NO: 1244474
guagaaacccuagggcuua

SEQ ID NO: 1491415 - RNA, 19 nt, Artificial Sequence
  Description of Artificial Sequence: Synthetic oligonucleotide
  Antisense strand to SEQ ID NO: 1491414
uaagcccuaggguuucuac

SEQ ID NO: 1491416 - RNA, 19 nt, Artificial Sequence
  Description of Artificial Sequence: Synthetic oligonucleotide
  Sense strand starting at position 2797 of SEQ ID NO: 1244474
uuagaacugccuuguuuau

SEQ ID NO: 1491417 - RNA, 19 nt, Artificial Sequence
  Description of Artificial Sequence: Synthetic oligonucleotide
  Antisense strand to SEQ ID NO: 1491416
auaaacaaggcaguucuaa

SEQ ID NO: 1491418 - RNA, 19 nt, Artificial Sequence
  Description of Artificial Sequence: Synthetic oligonucleotide
  Sense strand starting at position 2799 of SEQ ID NO: 1244474
agaacugccuuguuuauau

SEQ ID NO: 1491419 - RNA, 19 nt, Artificial Sequence
  Description of Artificial Sequence: Synthetic oligonucleotide
  Antisense strand to SEQ ID NO: 1491418
auauaaacaaggcaguucu

SEQ ID NO: 1491420 - RNA, 19 nt, Artificial Sequence
  Description of Artificial Sequence: Synthetic oligonucleotide
  Sense strand starting at position 3108 of SEQ ID NO: 1244474
agccuauaucuauguuaua

SEQ ID NO: 1491421 - RNA, 19 nt, Artificial Sequence
  Description of Artificial Sequence: Synthetic oligonucleotide
  Antisense strand to SEQ ID NO: 1491420
uauaacauagauauaggcu

SEQ ID NO: 1491422 - RNA, 19 nt, Artificial Sequence
  Description of Artificial Sequence: Synthetic oligonucleotide
  Sense strand starting at position 3124 of SEQ ID NO: 1244474
auaaacuuguguuccugua

SEQ ID NO: 1491423 - RNA, 19 nt, Artificial Sequence
  Description of Artificial Sequence: Synthetic oligonucleotide
  Antisense strand to SEQ ID NO: 1491422
uacaggaacacaaguuuau

SEQ ID NO: 1491424 - RNA, 19 nt, Artificial Sequence
  Description of Artificial Sequence: Synthetic oligonucleotide
  Sense strand starting at position 3295 of SEQ ID NO: 1244474
gacauuagacuaggucacu

SEQ ID NO: 1491425 - RNA, 19 nt, Artificial Sequence
  Description of Artificial Sequence: Synthetic oligonucleotide
  Antisense strand to SEQ ID NO: 1491424
agugaccuagucuaauguc

SEQ ID NO: 1491426 - RNA, 19 nt, Artificial Sequence
  Description of Artificial Sequence: Synthetic oligonucleotide
  Sense strand starting at position 3304 of SEQ ID NO: 1244474
cuaggucacugcuuccuaa

SEQ ID NO: 1491427 - RNA, 19 nt, Artificial Sequence
  Description of Artificial Sequence: Synthetic oligonucleotide
  Antisense strand to SEQ ID NO: 1491426
uuaggaagcagugaccuag

SEQ ID NO: 1491428 - RNA, 19 nt, Artificial Sequence
  Description of Artificial Sequence: Synthetic oligonucleotide
  Sense strand starting at position 3307 of SEQ ID NO: 1244474
ggucacugcuuccuaaacu

SEQ ID NO: 1491429 - RNA, 19 nt, Artificial Sequence
  Description of Artificial Sequence: Synthetic oligonucleotide
  Antisense strand to SEQ ID NO: 1491428
aguuuaggaagcagugacc

SEQ ID NO: 1491430 - RNA, 19 nt, Artificial Sequence
  Description of Artificial Sequence: Synthetic oligonucleotide
  Sense strand starting at position 3609 of SEQ ID NO: 1244474
gugaucuaucugcacucca

SEQ ID NO: 1491431 - RNA, 19 nt, Artificial Sequence
  Description of Artificial Sequence: Synthetic oligonucleotide
  Antisense strand to SEQ ID NO: 1491430
uggagugcagauagaucac

SEQ ID NO: 1491432 - RNA, 19 nt, Artificial Sequence
  Description of Artificial Sequence: Synthetic oligonucleotide
  Sense strand starting at position 3675 of SEQ ID NO: 1244474
agauuauauguauaugcca

SEQ ID NO: 1491433 - RNA, 19 nt, Artificial Sequence
  Description of Artificial Sequence: Synthetic oligonucleotide
  Antisense strand to SEQ ID NO: 1491432
uggcauauacauauaaucu

SEQ ID NO: 1491434 - RNA, 19 nt, Artificial Sequence
  Description of Artificial Sequence: Synthetic oligonucleotide
  Sense strand starting at position 3684 of SEQ ID NO: 1244474
guauaugccaccuggagau

SEQ ID NO: 1491435 - RNA, 19 nt, Artificial Sequence
  Description of Artificial Sequence: Synthetic oligonucleotide
  Antisense strand to SEQ ID NO: 1491434
aucuccagguggcauauac

SEQ ID NO: 1491436 - RNA, 19 nt, Artificial Sequence
  Description of Artificial Sequence: Synthetic oligonucleotide
  Sense strand starting at position 3753 of SEQ ID NO: 1244474
gcuagucugucauuuggau

SEQ ID NO: 1491437 - RNA, 19 nt, Artificial Sequence
  Description of Artificial Sequence: Synthetic oligonucleotide
  Antisense strand to SEQ ID NO: 1491436
auccaaaugacagacuagc

SEQ ID NO: 1491438 - RNA, 19 nt, Artificial Sequence
  Description of Artificial Sequence: Synthetic oligonucleotide
  Sense strand starting at position 3835 of SEQ ID NO: 1244474
ccaagauccucuccuguga

SEQ ID NO: 1491439 - RNA, 19 nt, Artificial Sequence
  Description of Artificial Sequence: Synthetic oligonucleotide
  Antisense strand to SEQ ID NO: 1491438
ucacaggagaggaucuugg

SEQ ID NO: 1491440 - RNA, 19 nt, Artificial Sequence
  Description of Artificial Sequence: Synthetic oligonucleotide
  Sense strand starting at position 40 of SEQ ID NO: 1244475
ggcuguagucacuaaagaa

SEQ ID NO: 1491441 - RNA, 19 nt, Artificial Sequence
  Description of Artificial Sequence: Synthetic oligonucleotide
  Antisense strand to SEQ ID NO: 1491440
uucuuuagugacuacagcc

SEQ ID NO: 1491442 - RNA, 19 nt, Artificial Sequence
  Description of Artificial Sequence: Synthetic oligonucleotide
  Sense strand starting at position 50 of SEQ ID NO: 1244475
acuaaagaauggcaucaau

SEQ ID NO: 1491443 - RNA, 19 nt, Artificial Sequence
  Description of Artificial Sequence: Synthetic oligonucleotide
  Antisense strand to SEQ ID NO: 1491442
auugaugccauucuuuagu

SEQ ID NO: 1491444 - RNA, 19 nt, Artificial Sequence
  Description of Artificial Sequence: Synthetic oligonucleotide
  Sense strand starting at position 59 of SEQ ID NO: 1244475
uggcaucaaucucagaaac

SEQ ID NO: 1491445 - RNA, 19 nt, Artificial Sequence
  Description of Artificial Sequence: Synthetic oligonucleotide
  Antisense strand to SEQ ID NO: 1491444
guuucugagauugaugcca

SEQ ID NO: 1491446 - RNA, 19 nt, Artificial Sequence
  Description of Artificial Sequence: Synthetic oligonucleotide
  Sense strand starting at position 88 of SEQ ID NO: 1244475
gggucaauuuaggaagaag

SEQ ID NO: 1491447 - RNA, 19 nt, Artificial Sequence
  Description of Artificial Sequence: Synthetic oligonucleotide
  Antisense strand to SEQ ID NO: 1491446
cuucuuccuaaauugaccc

SEQ ID NO: 1491448 - RNA, 19 nt, Artificial Sequence
  Description of Artificial Sequence: Synthetic oligonucleotide
  Sense strand starting at position 96 of SEQ ID NO: 1244475
uuaggaagaagcuguuuau

SEQ ID NO: 1491449 - RNA, 19 nt, Artificial Sequence
  Description of Artificial Sequence: Synthetic oligonucleotide
  Antisense strand to SEQ ID NO: 1491448
auaaacagcuucuuccuaa

SEQ ID NO: 1491450 - RNA, 19 nt, Artificial Sequence
  Description of Artificial Sequence: Synthetic oligonucleotide
  Sense strand starting at position 99 of SEQ ID NO: 1244475
ggaagaagcuguuuauucu

SEQ ID NO: 1491451 - RNA, 19 nt, Artificial Sequence
  Description of Artificial Sequence: Synthetic oligonucleotide
  Antisense strand to SEQ ID NO: 1491450
agaauaaacagcuucuucc

SEQ ID NO: 1491452 - RNA, 19 nt, Artificial Sequence
  Description of Artificial Sequence: Synthetic oligonucleotide
  Sense strand starting at position 168 of SEQ ID NO: 1244475
cucauaguucagcgagguu

SEQ ID NO: 1491453 - RNA, 19 nt, Artificial Sequence
  Description of Artificial Sequence: Synthetic oligonucleotide
  Antisense strand to SEQ ID NO: 1491452
aaccucgcugaacuaugag

SEQ ID NO: 1491454 - RNA, 19 nt, Artificial Sequence
  Description of Artificial Sequence: Synthetic oligonucleotide
  Sense strand starting at position 171 of SEQ ID NO: 1244475
auaguucagcgagguuaga

SEQ ID NO: 1491455 - RNA, 19 nt, Artificial Sequence
  Description of Artificial Sequence: Synthetic oligonucleotide
  Antisense strand to SEQ ID NO: 1491454
ucuaaccucgcugaacuau

SEQ ID NO: 1491456 - RNA, 19 nt, Artificial Sequence
  Description of Artificial Sequence: Synthetic oligonucleotide
  Sense strand starting at position 214 of SEQ ID NO: 1244475
cauccaggguuugagagaa

SEQ ID NO: 1491457 - RNA, 19 nt, Artificial Sequence
  Description of Artificial Sequence: Synthetic oligonucleotide
  Antisense strand to SEQ ID NO: 1491456
uucucucaaacccuggaug

SEQ ID NO: 1491458 - RNA, 19 nt, Artificial Sequence
  Description of Artificial Sequence: Synthetic oligonucleotide
  Sense strand starting at position 244 of SEQ ID NO: 1244475
aacucucagugaucuggau

SEQ ID NO: 1491459 - RNA, 19 nt, Artificial Sequence
  Description of Artificial Sequence: Synthetic oligonucleotide
  Antisense strand to SEQ ID NO: 1491458
auccagaucacugagaguu

SEQ ID NO: 1491460 - RNA, 19 nt, Artificial Sequence
  Description of Artificial Sequence: Synthetic oligonucleotide
  Sense strand starting at position 246 of SEQ ID NO: 1244475
cucucagugaucuggauag

SEQ ID NO: 1491461 - RNA, 19 nt, Artificial Sequence
  Description of Artificial Sequence: Synthetic oligonucleotide
  Antisense strand to SEQ ID NO: 1491460
cuauccagaucacugagag

SEQ ID NO: 1491462 - RNA, 19 nt, Artificial Sequence
  Description of Artificial Sequence: Synthetic oligonucleotide
  Sense strand starting at position 331 of SEQ ID NO: 1244475
guauauuccucccugauug

SEQ ID NO: 1491463 - RNA, 19 nt, Artificial Sequence
  Description of Artificial Sequence: Synthetic oligonucleotide
  Antisense strand to SEQ ID NO: 1491462
caaucagggaggaauauac

SEQ ID NO: 1491464 - RNA, 19 nt, Artificial Sequence
  Description of Artificial Sequence: Synthetic oligonucleotide
  Sense strand starting at position 394 of SEQ ID NO: 1244475
caccaauaacgugaguaug

SEQ ID NO: 1491465 - RNA, 19 nt, Artificial Sequence
  Description of Artificial Sequence: Synthetic oligonucleotide
  Antisense strand to SEQ ID NO: 1491464
cauacucacguuauuggug

SEQ ID NO: 1491466 - RNA, 19 nt, Artificial Sequence
  Description of Artificial Sequence: Synthetic oligonucleotide
  Sense strand starting at position 1455 of SEQ ID NO: 1244475
gaggguucgagaugacaga

SEQ ID NO: 1491467 - RNA, 19 nt, Artificial Sequence
  Description of Artificial Sequence: Synthetic oligonucleotide
  Antisense strand to SEQ ID NO: 1491466
ucugucaucucgaacccuc

SEQ ID NO: 1491468 - RNA, 19 nt, Artificial Sequence
  Description of Artificial Sequence: Synthetic oligonucleotide
  Sense strand starting at position 1526 of SEQ ID NO: 1244475
aguggauuggccugaacag

SEQ ID NO: 1491469 - RNA, 19 nt, Artificial Sequence
  Description of Artificial Sequence: Synthetic oligonucleotide
  Antisense strand to SEQ ID NO: 1491468
cuguucaggccaauccacu

SEQ ID NO: 1491470 - RNA, 19 nt, Artificial Sequence
  Description of Artificial Sequence: Synthetic oligonucleotide
  Sense strand starting at position 1590 of SEQ ID NO: 1244475
gcugcaguuugagcaaaga

SEQ ID NO: 1491471 - RNA, 19 nt, Artificial Sequence
  Description of Artificial Sequence: Synthetic oligonucleotide
  Antisense strand to SEQ ID NO: 1491470
ucuuugcucaaacugcagc

SEQ ID NO: 1491472 - RNA, 19 nt, Artificial Sequence
  Description of Artificial Sequence: Synthetic oligonucleotide
  Sense strand starting at position 1607 of SEQ ID NO: 1244475
gaggguaugggucgcgaga

SEQ ID NO: 1491473 - RNA, 19 nt, Artificial Sequence
  Description of Artificial Sequence: Synthetic oligonucleotide
  Antisense strand to SEQ ID NO: 1491472
ucucgcgacccauacccuc

SEQ ID NO: 1491474 - RNA, 19 nt, Artificial Sequence
  Description of Artificial Sequence: Synthetic oligonucleotide
  Sense strand starting at position 1610 of SEQ ID NO: 1244475
gguaugggucgcgagaaau

SEQ ID NO: 1491475 - RNA, 19 nt, Artificial Sequence
  Description of Artificial Sequence: Synthetic oligonucleotide
  Antisense strand to SEQ ID NO: 1491474
auuucucgcgacccauacc

SEQ ID NO: 1491476 - RNA, 19 nt, Artificial Sequence
  Description of Artificial Sequence: Synthetic oligonucleotide
  Sense strand starting at position 1713 of SEQ ID NO: 1244475
gaggaaacugagugcguuu

SEQ ID NO: 1491477 - RNA, 19 nt, Artificial Sequence
  Description of Artificial Sequence: Synthetic oligonucleotide
  Antisense strand to SEQ ID NO: 1491476
aaacgcacucaguuuccuc

SEQ ID NO: 1491478 - RNA, 19 nt, Artificial Sequence
  Description of Artificial Sequence: Synthetic oligonucleotide
  Sense strand starting at position 1740 of SEQ ID NO: 1244475
gggcuugucucaccgaagu

SEQ ID NO: 1491479 - RNA, 19 nt, Artificial Sequence
  Description of Artificial Sequence: Synthetic oligonucleotide
  Antisense strand to SEQ ID NO: 1491478
acuucggugagacaagccc

SEQ ID NO: 1491480 - RNA, 19 nt, Artificial Sequence
  Description of Artificial Sequence: Synthetic oligonucleotide
  Sense strand starting at position 1742 of SEQ ID NO: 1244475
gcuugucucaccgaagucu

SEQ ID NO: 1491481 - RNA, 19 nt, Artificial Sequence
  Description of Artificial Sequence: Synthetic oligonucleotide
  Antisense strand to SEQ ID NO: 1491480
agacuucggugagacaagc

SEQ ID NO: 1491482 - RNA, 19 nt, Artificial Sequence
  Description of Artificial Sequence: Synthetic oligonucleotide
  Sense strand starting at position 2615 of SEQ ID NO: 1244475
aagggaacugugugguuca

SEQ ID NO: 1491483 - RNA, 19 nt, Artificial Sequence
  Description of Artificial Sequence: Synthetic oligonucleotide
  Antisense strand to SEQ ID NO: 1491482
ugaaccacacaguucccuu

SEQ ID NO: 1491484 - RNA, 19 nt, Artificial Sequence
  Description of Artificial Sequence: Synthetic oligonucleotide
  Sense strand starting at position 2662 of SEQ ID NO: 1244475
aagugacuccgcuggagaa

SEQ ID NO: 1491485 - RNA, 19 nt, Artificial Sequence
  Description of Artificial Sequence: Synthetic oligonucleotide
  Antisense strand to SEQ ID NO: 1491484
uucuccagcggagucacuu

SEQ ID NO: 1491486 - RNA, 19 nt, Artificial Sequence
  Description of Artificial Sequence: Synthetic oligonucleotide
  Sense strand starting at position 2663 of SEQ ID NO: 1244475
agugacuccgcuggagaaa

SEQ ID NO: 1491487 - RNA, 19 nt, Artificial Sequence
  Description of Artificial Sequence: Synthetic oligonucleotide
  Antisense strand to SEQ ID NO: 1491486
uuucuccagcggagucacu

SEQ ID NO: 1491488 - RNA, 19 nt, Artificial Sequence
  Description of Artificial Sequence: Synthetic oligonucleotide
  Sense strand starting at position 2664 of SEQ ID NO: 1244475
gugacuccgcuggagaaau

SEQ ID NO: 1491489 - RNA, 19 nt, Artificial Sequence
  Description of Artificial Sequence: Synthetic oligonucleotide
  Antisense strand to SEQ ID NO: 1491488
auuucuccagcggagucac

SEQ ID NO: 1491490 - RNA, 19 nt, Artificial Sequence
  Description of Artificial Sequence: Synthetic oligonucleotide
  Sense strand starting at position 2745 of SEQ ID NO: 1244475
agaccucaccuuugagaac

SEQ ID NO: 1491491 - RNA, 19 nt, Artificial Sequence
  Description of Artificial Sequence: Synthetic oligonucleotide
  Antisense strand to SEQ ID NO: 1491490
guucucaaaggugaggucu

SEQ ID NO: 1491492 - RNA, 19 nt, Artificial Sequence
  Description of Artificial Sequence: Synthetic oligonucleotide
  Sense strand starting at position 2783 of SEQ ID NO: 1244475
cucccagagcuugguguua

SEQ ID NO: 1491493 - RNA, 19 nt, Artificial Sequence
  Description of Artificial Sequence: Synthetic oligonucleotide
  Antisense strand to SEQ ID NO: 1491492
uaacaccaagcucugggag

SEQ ID NO: 1491494 - RNA, 19 nt, Artificial Sequence
  Description of Artificial Sequence: Synthetic oligonucleotide
  Sense strand starting at position 3015 of SEQ ID NO: 1244475
cccacugcuguuuggaaua

SEQ ID NO: 1491495 - RNA, 19 nt, Artificial Sequence
  Description of Artificial Sequence: Synthetic oligonucleotide
  Antisense strand to SEQ ID NO: 1491494
uauuccaaacagcaguggg

SEQ ID NO: 1491496 - RNA, 19 nt, Artificial Sequence
  Description of Artificial Sequence: Synthetic oligonucleotide
  Sense strand starting at position 3020 of SEQ ID NO: 1244475
ugcuguuuggaauacugua

SEQ ID NO: 1491497 - RNA, 19 nt, Artificial Sequence
  Description of Artificial Sequence: Synthetic oligonucleotide
  Antisense strand to SEQ ID NO: 1491496
uacaguauuccaaacagca

SEQ ID NO: 1491498 - RNA, 19 nt, Artificial Sequence
  Description of Artificial Sequence: Synthetic oligonucleotide
  Sense strand starting at position 3025 of SEQ ID NO: 1244475
uuuggaauacuguauuguu

SEQ ID NO: 1491499 - RNA, 19 nt, Artificial Sequence
  Description of Artificial Sequence: Synthetic oligonucleotide
  Antisense strand to SEQ ID NO: 1491498
aacaauacaguauuccaaa

SEQ ID NO: 1491500 - RNA, 19 nt, Artificial Sequence
  Description of Artificial Sequence: Synthetic oligonucleotide
  Sense strand starting at position 3055 of SEQ ID NO: 1244475
ccuguuuccucugccgaca

SEQ ID NO: 1491501 - RNA, 19 nt, Artificial Sequence
  Description of Artificial Sequence: Synthetic oligonucleotide
  Antisense strand to SEQ ID NO: 1491500
ugucggcagaggaaacagg

SEQ ID NO: 1491502 - RNA, 19 nt, Artificial Sequence
  Description of Artificial Sequence: Synthetic oligonucleotide
  Sense strand starting at position 3089 of SEQ ID NO: 1244475
cagcucacuggugauagua

SEQ ID NO: 1491503 - RNA, 19 nt, Artificial Sequence
  Description of Artificial Sequence: Synthetic oligonucleotide
  Antisense strand to SEQ ID NO: 1491502
uacuaucaccagugagcug

SEQ ID NO: 1491504 - RNA, 19 nt, Artificial Sequence
  Description of Artificial Sequence: Synthetic oligonucleotide
  Sense strand starting at position 3246 of SEQ ID NO: 1244475
cagggaggucucuguaaac

SEQ ID NO: 1491505 - RNA, 19 nt, Artificial Sequence
  Description of Artificial Sequence: Synthetic oligonucleotide
  Antisense strand to SEQ ID NO: 1491504
guuuacagagaccucccug

SEQ ID NO: 1491506 - RNA, 19 nt, Artificial Sequence
  Description of Artificial Sequence: Synthetic oligonucleotide
  Sense strand starting at position 3354 of SEQ ID NO: 1244475
cagucauagccaggcagau

SEQ ID NO: 1491507 - RNA, 19 nt, Artificial Sequence
  Description of Artificial Sequence: Synthetic oligonucleotide
  Antisense strand to SEQ ID NO: 1491506
aucugccuggcuaugacug

SEQ ID NO: 1491508 - RNA, 19 nt, Artificial Sequence
  Description of Artificial Sequence: Synthetic oligonucleotide
  Sense strand starting at position 3466 of SEQ ID NO: 1244475
cgagauuccaggugcuguu

SEQ ID NO: 1491509 - RNA, 19 nt, Artificial Sequence
  Description of Artificial Sequence: Synthetic oligonucleotide
  Antisense strand to SEQ ID NO: 1491508
aacagcaccuggaaucucg

SEQ ID NO: 1491510 - RNA, 19 nt, Artificial Sequence
  Description of Artificial Sequence: Synthetic oligonucleotide
  Sense strand starting at position 3801 of SEQ ID NO: 1244475
cacugucaggaccaguauu

SEQ ID NO: 1491511 - RNA, 19 nt, Artificial Sequence
  Description of Artificial Sequence: Synthetic oligonucleotide
  Antisense strand to SEQ ID NO: 1491510
aauacugguccugacagug

SEQ ID NO: 1491512 - RNA, 19 nt, Artificial Sequence
  Description of Artificial Sequence: Synthetic oligonucleotide
  Sense strand starting at position 3873 of SEQ ID NO: 1244475
gcagguaauuaagaacaga

SEQ ID NO: 1491513 - RNA, 19 nt, Artificial Sequence
  Description of Artificial Sequence: Synthetic oligonucleotide
  Antisense strand to SEQ ID NO: 1491512
ucuguucuuaauuaccugc

SEQ ID NO: 1491514 - RNA, 19 nt, Artificial Sequence
  Description of Artificial Sequence: Synthetic oligonucleotide
  Sense strand starting at position 3955 of SEQ ID NO: 1244475
gcuuuaagaucuccgugua

SEQ ID NO: 1491515 - RNA, 19 nt, Artificial Sequence
  Description of Artificial Sequence: Synthetic oligonucleotide
  Antisense strand to SEQ ID NO: 1491514
uacacggagaucuuaaagc

SEQ ID NO: 1491516 - RNA, 19 nt, Artificial Sequence
  Description of Artificial Sequence: Synthetic oligonucleotide
  Sense strand starting at position 3956 of SEQ ID NO: 1244475
cuuuaagaucuccguguaa

SEQ ID NO: 1491517 - RNA, 19 nt, Artificial Sequence
  Description of Artificial Sequence: Synthetic oligonucleotide
  Antisense strand to SEQ ID NO: 1491516
uuacacggagaucuuaaag

SEQ ID NO: 1491518 - RNA, 19 nt, Artificial Sequence
  Description of Artificial Sequence: Synthetic oligonucleotide
  Sense strand starting at position 3958 of SEQ ID NO: 1244475
uuaagaucuccguguaaac

SEQ ID NO: 1491519 - RNA, 19 nt, Artificial Sequence
  Description of Artificial Sequence: Synthetic oligonucleotide
  Antisense strand to SEQ ID NO: 1491518
guuuacacggagaucuuaa

SEQ ID NO: 1491520 - RNA, 19 nt, Artificial Sequence
  Description of Artificial Sequence: Synthetic oligonucleotide
  Sense strand starting at position 271 of SEQ ID NO: 1244476
cagggugauggcugcaaga

SEQ ID NO: 1491521 - RNA, 19 nt, Artificial Sequence
  Description of Artificial Sequence: Synthetic oligonucleotide
  Antisense strand to SEQ ID NO: 1491520
ucuugcagccaucacccug

SEQ ID NO: 1491522 - RNA, 19 nt, Artificial Sequence
  Description of Artificial Sequence: Synthetic oligonucleotide
  Sense strand starting at position 315 of SEQ ID NO: 1244476
uggaccugcucgcuuugaa

SEQ ID NO: 1491523 - RNA, 19 nt, Artificial Sequence
  Description of Artificial Sequence: Synthetic oligonucleotide
  Antisense strand to SEQ ID NO: 1491522
uucaaagcgagcaggucca

SEQ ID NO: 1491524 - RNA, 19 nt, Artificial Sequence
  Description of Artificial Sequence: Synthetic oligonucleotide
  Sense strand starting at position 318 of SEQ ID NO: 1244476
accugcucgcuuugaagau

SEQ ID NO: 1491525 - RNA, 19 nt, Artificial Sequence
  Description of Artificial Sequence: Synthetic oligonucleotide
  Antisense strand to SEQ ID NO: 1491524
aucuucaaagcgagcaggu

SEQ ID NO: 1491526 - RNA, 19 nt, Artificial Sequence
  Description of Artificial Sequence: Synthetic oligonucleotide
  Sense strand starting at position 322 of SEQ ID NO: 1244476
gcucgcuuugaagaugcaa

SEQ ID NO: 1491527 - RNA, 19 nt, Artificial Sequence
  Description of Artificial Sequence: Synthetic oligonucleotide
  Antisense strand to SEQ ID NO: 1491526
uugcaucuucaaagcgagc

SEQ ID NO: 1491528 - RNA, 19 nt, Artificial Sequence
  Description of Artificial Sequence: Synthetic oligonucleotide
  Sense strand starting at position 372 of SEQ ID NO: 1244476
uccuguugaggccaaauca

SEQ ID NO: 1491529 - RNA, 19 nt, Artificial Sequence
  Description of Artificial Sequence: Synthetic oligonucleotide
  Antisense strand to SEQ ID NO: 1491528
ugauuuggccucaacagga

SEQ ID NO: 1491530 - RNA, 19 nt, Artificial Sequence
  Description of Artificial Sequence: Synthetic oligonucleotide
  Sense strand starting at position 393 of SEQ ID NO: 1244476
agccauucugguuggcaga

SEQ ID NO: 1491531 - RNA, 19 nt, Artificial Sequence
  Description of Artificial Sequence: Synthetic oligonucleotide
  Antisense strand to SEQ ID NO: 1491530
ucugccaaccagaauggcu

SEQ ID NO: 1491532 - RNA, 19 nt, Artificial Sequence
  Description of Artificial Sequence: Synthetic oligonucleotide
  Sense strand starting at position 396 of SEQ ID NO: 1244476
cauucugguuggcagacau

SEQ ID NO: 1491533 - RNA, 19 nt, Artificial Sequence
  Description of Artificial Sequence: Synthetic oligonucleotide
  Antisense strand to SEQ ID NO: 1491532
augucugccaaccagaaug

SEQ ID NO: 1491534 - RNA, 19 nt, Artificial Sequence
  Description of Artificial Sequence: Synthetic oligonucleotide
  Sense strand starting at position 639 of SEQ ID NO: 1244476
ggaucuccauccugaggaa

SEQ ID NO: 1491535 - RNA, 19 nt, Artificial Sequence
  Description of Artificial Sequence: Synthetic oligonucleotide
  Antisense strand to SEQ ID NO: 1491534
uuccucaggauggagaucc

SEQ ID NO: 1491536 - RNA, 19 nt, Artificial Sequence
  Description of Artificial Sequence: Synthetic oligonucleotide
  Sense strand starting at position 651 of SEQ ID NO: 1244476
ugaggaaggccuugagguu

SEQ ID NO: 1491537 - RNA, 19 nt, Artificial Sequence
  Description of Artificial Sequence: Synthetic oligonucleotide
  Antisense strand to SEQ ID NO: 1491536
aaccucaaggccuuccuca

SEQ ID NO: 1491538 - RNA, 19 nt, Artificial Sequence
  Description of Artificial Sequence: Synthetic oligonucleotide
  Sense strand starting at position 917 of SEQ ID NO: 1244476
ccgggauggugccuuugaa

SEQ ID NO: 1491539 - RNA, 19 nt, Artificial Sequence
  Description of Artificial Sequence: Synthetic oligonucleotide
  Antisense strand to SEQ ID NO: 1491538
uucaaaggcaccaucccgg

SEQ ID NO: 1491540 - RNA, 19 nt, Artificial Sequence
  Description of Artificial Sequence: Synthetic oligonucleotide
  Sense strand starting at position 1013 of SEQ ID NO: 1244476
acaugugacucuccaggaa

SEQ ID NO: 1491541 - RNA, 19 nt, Artificial Sequence
  Description of Artificial Sequence: Synthetic oligonucleotide
  Antisense strand to SEQ ID NO: 1491540
uuccuggagagucacaugu

SEQ ID NO: 1491542 - RNA, 19 nt, Artificial Sequence
  Description of Artificial Sequence: Synthetic oligonucleotide
  Sense strand starting at position 1179 of SEQ ID NO: 1244476
auggaagucauggguauga

SEQ ID NO: 1491543 - RNA, 19 nt, Artificial Sequence
  Description of Artificial Sequence: Synthetic oligonucleotide
  Antisense strand to SEQ ID NO: 1491542
ucauacccaugacuuccau

SEQ ID NO: 1491544 - RNA, 19 nt, Artificial Sequence
  Description of Artificial Sequence: Synthetic oligonucleotide
  Sense strand starting at position 1200 of SEQ ID NO: 1244476
cggugugauucacaagaag

SEQ ID NO: 1491545 - RNA, 19 nt, Artificial Sequence
  Description of Artificial Sequence: Synthetic oligonucleotide
  Antisense strand to SEQ ID NO: 1491544
cuucuugugaaucacaccg

SEQ ID NO: 1491546 - RNA, 19 nt, Artificial Sequence
  Description of Artificial Sequence: Synthetic oligonucleotide
  Sense strand starting at position 1319 of SEQ ID NO: 1244476
ccaguaugcgagaggugua

SEQ ID NO: 1491547 - RNA, 19 nt, Artificial Sequence
  Description of Artificial Sequence: Synthetic oligonucleotide
  Antisense strand to SEQ ID NO: 1491546
uacaccucucgcauacugg

SEQ ID NO: 1491548 - RNA, 19 nt, Artificial Sequence
  Description of Artificial Sequence: Synthetic oligonucleotide
  Sense strand starting at position 1320 of SEQ ID NO: 1244476
caguaugcgagagguguaa

SEQ ID NO: 1491549 - RNA, 19 nt, Artificial Sequence
  Description of Artificial Sequence: Synthetic oligonucleotide
  Antisense strand to SEQ ID NO: 1491548
uuacaccucucgcauacug

SEQ ID NO: 1491550 - RNA, 19 nt, Artificial Sequence
  Description of Artificial Sequence: Synthetic oligonucleotide
  Sense strand starting at position 1332 of SEQ ID NO: 1244476
gguguaacccuguaagcuc

SEQ ID NO: 1491551 - RNA, 19 nt, Artificial Sequence
  Description of Artificial Sequence: Synthetic oligonucleotide
  Antisense strand to SEQ ID NO: 1491550
gagcuuacaggguuacacc

SEQ ID NO: 1491552 - RNA, 19 nt, Artificial Sequence
  Description of Artificial Sequence: Synthetic oligonucleotide
  Sense strand starting at position 1473 of SEQ ID NO: 1244476
cucucaucccagcgugaau

SEQ ID NO: 1491553 - RNA, 19 nt, Artificial Sequence
  Description of Artificial Sequence: Synthetic oligonucleotide
  Antisense strand to SEQ ID NO: 1491552
auucacgcugggaugagag

SEQ ID NO: 1491554 - RNA, 19 nt, Artificial Sequence
  Description of Artificial Sequence: Synthetic oligonucleotide
  Sense strand starting at position 1486 of SEQ ID NO: 1244476
gugaauguccuauaggcag

SEQ ID NO: 1491555 - RNA, 19 nt, Artificial Sequence
  Description of Artificial Sequence: Synthetic oligonucleotide
  Antisense strand to SEQ ID NO: 1491554
cugccuauaggacauucac

SEQ ID NO: 1491556 - RNA, 19 nt, Artificial Sequence
  Description of Artificial Sequence: Synthetic oligonucleotide
  Sense strand starting at position 1521 of SEQ ID NO: 1244476
ugcucuaucuacccaggau

SEQ ID NO: 1491557 - RNA, 19 nt, Artificial Sequence
  Description of Artificial Sequence: Synthetic oligonucleotide
  Antisense strand to SEQ ID NO: 1491556
auccuggguagauagagca

SEQ ID NO: 1491558 - RNA, 19 nt, Artificial Sequence
  Description of Artificial Sequence: Synthetic oligonucleotide
  Sense strand starting at position 1651 of SEQ ID NO: 1244476
cucggcagauacugagaaa

SEQ ID NO: 1491559 - RNA, 19 nt, Artificial Sequence
  Description of Artificial Sequence: Synthetic oligonucleotide
  Antisense strand to SEQ ID NO: 1491558
uuucucaguaucugccgag

SEQ ID NO: 1491560 - RNA, 19 nt, Artificial Sequence
  Description of Artificial Sequence: Synthetic oligonucleotide
  Sense strand starting at position 2464 of SEQ ID NO: 1244476
ccgccaggaucgguugaau

SEQ ID NO: 1491561 - RNA, 19 nt, Artificial Sequence
  Description of Artificial Sequence: Synthetic oligonucleotide
  Antisense strand to SEQ ID NO: 1491560
auucaaccgauccuggcgg

SEQ ID NO: 1491562 - RNA, 19 nt, Artificial Sequence
  Description of Artificial Sequence: Synthetic oligonucleotide
  Sense strand starting at position 2493 of SEQ ID NO: 1244476
gcgagcgaguccuugguuu

SEQ ID NO: 1491563 - RNA, 19 nt, Artificial Sequence
  Description of Artificial Sequence: Synthetic oligonucleotide
  Antisense strand to SEQ ID NO: 1491562
aaaccaaggacucgcucgc

SEQ ID NO: 1491564 - RNA, 19 nt, Artificial Sequence
  Description of Artificial Sequence: Synthetic oligonucleotide
  Sense strand starting at position 3034 of SEQ ID NO: 1244476
cggccagcccguguagauu

SEQ ID NO: 1491565 - RNA, 19 nt, Artificial Sequence
  Description of Artificial Sequence: Synthetic oligonucleotide
  Antisense strand to SEQ ID NO: 1491564
aaucuacacgggcuggccg

SEQ ID NO: 1491566 - RNA, 19 nt, Artificial Sequence
  Description of Artificial Sequence: Synthetic oligonucleotide
  Sense strand starting at position 3303 of SEQ ID NO: 1244476
ugaagcuuugugugucuca

SEQ ID NO: 1491567 - RNA, 19 nt, Artificial Sequence
  Description of Artificial Sequence: Synthetic oligonucleotide
  Antisense strand to SEQ ID NO: 1491566
ugagacacacaaagcuuca

SEQ ID NO: 1491568 - RNA, 19 nt, Artificial Sequence
  Description of Artificial Sequence: Synthetic oligonucleotide
  Sense strand starting at position 3304 of SEQ ID NO: 1244476
gaagcuuugugugucucaa

SEQ ID NO: 1491569 - RNA, 19 nt, Artificial Sequence
  Description of Artificial Sequence: Synthetic oligonucleotide
  Antisense strand to SEQ ID NO: 1491568
uugagacacacaaagcuuc

SEQ ID NO: 1491570 - RNA, 19 nt, Artificial Sequence
  Description of Artificial Sequence: Synthetic oligonucleotide
  Sense strand starting at position 3350 of SEQ ID NO: 1244476
acguuucaggcagaggaaa

SEQ ID NO: 1491571 - RNA, 19 nt, Artificial Sequence
  Description of Artificial Sequence: Synthetic oligonucleotide
  Antisense strand to SEQ ID NO: 1491570
uuuccucugccugaaacgu

SEQ ID NO: 1491572 - RNA, 19 nt, Artificial Sequence
  Description of Artificial Sequence: Synthetic oligonucleotide
  Sense strand starting at position 3551 of SEQ ID NO: 1244476
agcgaagauucaucagagu

SEQ ID NO: 1491573 - RNA, 19 nt, Artificial Sequence
  Description of Artificial Sequence: Synthetic oligonucleotide
  Antisense strand to SEQ ID NO: 1491572
acucugaugaaucuucgcu

SEQ ID NO: 1491574 - RNA, 19 nt, Artificial Sequence
  Description of Artificial Sequence: Synthetic oligonucleotide
  Sense strand starting at position 3665 of SEQ ID NO: 1244476
gggcuacugccagggagaa

SEQ ID NO: 1491575 - RNA, 19 nt, Artificial Sequence
  Description of Artificial Sequence: Synthetic oligonucleotide
  Antisense strand to SEQ ID NO: 1491574
uucucccuggcaguagccc

SEQ ID NO: 1491576 - RNA, 19 nt, Artificial Sequence
  Description of Artificial Sequence: Synthetic oligonucleotide
  Sense strand starting at position 3683 of SEQ ID NO: 1244476
agccaugauucuugggaca

SEQ ID NO: 1491577 - RNA, 19 nt, Artificial Sequence
  Description of Artificial Sequence: Synthetic oligonucleotide
  Antisense strand to SEQ ID NO: 1491576
ugucccaagaaucauggcu

SEQ ID NO: 1491578 - RNA, 19 nt, Artificial Sequence
  Description of Artificial Sequence: Synthetic oligonucleotide
  Sense strand starting at position 3685 of SEQ ID NO: 1244476
ccaugauucuugggacaag

SEQ ID NO: 1491579 - RNA, 19 nt, Artificial Sequence
  Description of Artificial Sequence: Synthetic oligonucleotide
  Antisense strand to SEQ ID NO: 1491578
cuugucccaagaaucaugg

SEQ ID NO: 1491580 - RNA, 19 nt, Artificial Sequence
  Description of Artificial Sequence: Synthetic oligonucleotide
  Sense strand starting at position 3686 of SEQ ID NO: 1244476
caugauucuugggacaaga

SEQ ID NO: 1491581 - RNA, 19 nt, Artificial Sequence
  Description of Artificial Sequence: Synthetic oligonucleotide
  Antisense strand to SEQ ID NO: 1491580
ucuugucccaagaaucaug

SEQ ID NO: 1491582 - RNA, 19 nt, Artificial Sequence
  Description of Artificial Sequence: Synthetic oligonucleotide
  Sense strand starting at position 3697 of SEQ ID NO: 1244476
ggacaagagugcugaagca

SEQ ID NO: 1491583 - RNA, 19 nt, Artificial Sequence
  Description of Artificial Sequence: Synthetic oligonucleotide
  Antisense strand to SEQ ID NO: 1491582
ugcuucagcacucuugucc

SEQ ID NO: 1491584 - RNA, 19 nt, Artificial Sequence
  Description of Artificial Sequence: Synthetic oligonucleotide
  Sense strand starting at position 3775 of SEQ ID NO: 1244476
ugagaagucuugccuuccu

SEQ ID NO: 1491585 - RNA, 19 nt, Artificial Sequence
  Description of Artificial Sequence: Synthetic oligonucleotide
  Antisense strand to SEQ ID NO: 1491584
aggaaggcaagacuucuca

SEQ ID NO: 1491586 - RNA, 19 nt, Artificial Sequence
  Description of Artificial Sequence: Synthetic oligonucleotide
  Sense strand starting at position 3840 of SEQ ID NO: 1244476
gagguaacacucugggcau

SEQ ID NO: 1491587 - RNA, 19 nt, Artificial Sequence
  Description of Artificial Sequence: Synthetic oligonucleotide
  Antisense strand to SEQ ID NO: 1491586
augcccagaguguuaccuc

SEQ ID NO: 1491588 - RNA, 19 nt, Artificial Sequence
  Description of Artificial Sequence: Synthetic oligonucleotide
  Sense strand starting at position 3843 of SEQ ID NO: 1244476
guaacacucugggcauguu

SEQ ID NO: 1491589 - RNA, 19 nt, Artificial Sequence
  Description of Artificial Sequence: Synthetic oligonucleotide
  Antisense strand to SEQ ID NO: 1491588
aacaugcccagaguguuac

SEQ ID NO: 1491590 - RNA, 19 nt, Artificial Sequence
  Description of Artificial Sequence: Synthetic oligonucleotide
  Sense strand starting at position 3868 of SEQ ID NO: 1244476
cggaguccacuguguguau

SEQ ID NO: 1491591 - RNA, 19 nt, Artificial Sequence
  Description of Artificial Sequence: Synthetic oligonucleotide
  Antisense strand to SEQ ID NO: 1491590
auacacacaguggacuccg

SEQ ID NO: 1491592 - RNA, 19 nt, Artificial Sequence
  Description of Artificial Sequence: Synthetic oligonucleotide
  Sense strand starting at position 3869 of SEQ ID NO: 1244476
ggaguccacuguguguaua

SEQ ID NO: 1491593 - RNA, 19 nt, Artificial Sequence
  Description of Artificial Sequence: Synthetic oligonucleotide
  Antisense strand to SEQ ID NO: 1491592
uauacacacaguggacucc

SEQ ID NO: 1491594 - RNA, 19 nt, Artificial Sequence
  Description of Artificial Sequence: Synthetic oligonucleotide
  Sense strand starting at position 3870 of SEQ ID NO: 1244476
gaguccacuguguguauau

SEQ ID NO: 1491595 - RNA, 19 nt, Artificial Sequence
  Description of Artificial Sequence: Synthetic oligonucleotide
  Antisense strand to SEQ ID NO: 1491594
auauacacacaguggacuc

SEQ ID NO: 1491596 - RNA, 19 nt, Artificial Sequence
  Description of Artificial Sequence: Synthetic oligonucleotide
  Sense strand starting at position 3871 of SEQ ID NO: 1244476
aguccacuguguguauauu

SEQ ID NO: 1491597 - RNA, 19 nt, Artificial Sequence
  Description of Artificial Sequence: Synthetic oligonucleotide
  Antisense strand to SEQ ID NO: 1491596
aauauacacacaguggacu

SEQ ID NO: 1491598 - RNA, 19 nt, Artificial Sequence
  Description of Artificial Sequence: Synthetic oligonucleotide
  Sense strand starting at position 3872 of SEQ ID NO: 1244476
guccacuguguguauauuu

SEQ ID NO: 1491599 - RNA, 19 nt, Artificial Sequence
  Description of Artificial Sequence: Synthetic oligonucleotide
  Antisense strand to SEQ ID NO: 1491598
aaauauacacacaguggac

SEQ ID NO: 1491600 - RNA, 19 nt, Artificial Sequence
  Description of Artificial Sequence: Synthetic oligonucleotide
  Sense strand starting at position 186 of SEQ ID NO: 1244477
augucaaauuaguuucuga

SEQ ID NO: 1491601 - RNA, 19 nt, Artificial Sequence
  Description of Artificial Sequence: Synthetic oligonucleotide
  Antisense strand to SEQ ID NO: 1491600
ucagaaacuaauuugacau

SEQ ID NO: 1491602 - RNA, 19 nt, Artificial Sequence
  Description of Artificial Sequence: Synthetic oligonucleotide
  Sense strand starting at position 385 of SEQ ID NO: 1244477
aguucugguucggaaccau

SEQ ID NO: 1491603 - RNA, 19 nt, Artificial Sequence
  Description of Artificial Sequence: Synthetic oligonucleotide
  Antisense strand to SEQ ID NO: 1491602
augguuccgaaccagaacu

SEQ ID NO: 1491604 - RNA, 19 nt, Artificial Sequence
  Description of Artificial Sequence: Synthetic oligonucleotide
  Sense strand starting at position 744 of SEQ ID NO: 1244477
ugucuuggcucccgagaca

SEQ ID NO: 1491605 - RNA, 19 nt, Artificial Sequence
  Description of Artificial Sequence: Synthetic oligonucleotide
  Antisense strand to SEQ ID NO: 1491604
ugucucgggagccaagaca

SEQ ID NO: 1491606 - RNA, 19 nt, Artificial Sequence
  Description of Artificial Sequence: Synthetic oligonucleotide
  Sense strand starting at position 910 of SEQ ID NO: 1244477
agguauucagaaugugaga

SEQ ID NO: 1491607 - RNA, 19 nt, Artificial Sequence
  Description of Artificial Sequence: Synthetic oligonucleotide
  Antisense strand to SEQ ID NO: 1491606
ucucacauucugaauaccu

SEQ ID NO: 1491608 - RNA, 19 nt, Artificial Sequence
  Description of Artificial Sequence: Synthetic oligonucleotide
  Sense strand starting at position 1415 of SEQ ID NO: 1244477
ggacucacccgaugacgua

SEQ ID NO: 1491609 - RNA, 19 nt, Artificial Sequence
  Description of Artificial Sequence: Synthetic oligonucleotide
  Antisense strand to SEQ ID NO: 1491608
uacgucaucgggugagucc

SEQ ID NO: 1491610 - RNA, 19 nt, Artificial Sequence
  Description of Artificial Sequence: Synthetic oligonucleotide
  Sense strand starting at position 1448 of SEQ ID NO: 1244477
gcuggaucagucggaagau

SEQ ID NO: 1491611 - RNA, 19 nt, Artificial Sequence
  Description of Artificial Sequence: Synthetic oligonucleotide
  Antisense strand to SEQ ID NO: 1491610
aucuuccgacugauccagc

SEQ ID NO: 1491612 - RNA, 19 nt, Artificial Sequence
  Description of Artificial Sequence: Synthetic oligonucleotide
  Sense strand starting at position 1449 of SEQ ID NO: 1244477
cuggaucagucggaagaua

SEQ ID NO: 1491613 - RNA, 19 nt, Artificial Sequence
  Description of Artificial Sequence: Synthetic oligonucleotide
  Antisense strand to SEQ ID NO: 1491612
uaucuuccgacugauccag

SEQ ID NO: 1491614 - RNA, 19 nt, Artificial Sequence
  Description of Artificial Sequence: Synthetic oligonucleotide
  Sense strand starting at position 1505 of SEQ ID NO: 1244477
gggugucauacucgaagag

SEQ ID NO: 1491615 - RNA, 19 nt, Artificial Sequence
  Description of Artificial Sequence: Synthetic oligonucleotide
  Antisense strand to SEQ ID NO: 1491614
cucuucgaguaugacaccc

SEQ ID NO: 1491616 - RNA, 19 nt, Artificial Sequence
  Description of Artificial Sequence: Synthetic oligonucleotide
  Sense strand starting at position 1746 of SEQ ID NO: 1244477
gagagaaucccugggugau

SEQ ID NO: 1491617 - RNA, 19 nt, Artificial Sequence
  Description of Artificial Sequence: Synthetic oligonucleotide
  Antisense strand to SEQ ID NO: 1491616
aucacccagggauucucuc

SEQ ID NO: 1491618 - RNA, 19 nt, Artificial Sequence
  Description of Artificial Sequence: Synthetic oligonucleotide
  Sense strand starting at position 1747 of SEQ ID NO: 1244477
agagaaucccugggugauc

SEQ ID NO: 1491619 - RNA, 19 nt, Artificial Sequence
  Description of Artificial Sequence: Synthetic oligonucleotide
  Antisense strand to SEQ ID NO: 1491618
gaucacccagggauucucu

SEQ ID NO: 1491620 - RNA, 19 nt, Artificial Sequence
  Description of Artificial Sequence: Synthetic oligonucleotide
  Sense strand starting at position 1748 of SEQ ID NO: 1244477
gagaaucccugggugauca

SEQ ID NO: 1491621 - RNA, 19 nt, Artificial Sequence
  Description of Artificial Sequence: Synthetic oligonucleotide
  Antisense strand to SEQ ID NO: 1491620
ugaucacccagggauucuc

SEQ ID NO: 1491622 - RNA, 19 nt, Artificial Sequence
  Description of Artificial Sequence: Synthetic oligonucleotide
  Sense strand starting at position 1927 of SEQ ID NO: 1244477
aggaguuguuggcaggaaa

SEQ ID NO: 1491623 - RNA, 19 nt, Artificial Sequence
  Description of Artificial Sequence: Synthetic oligonucleotide
  Antisense strand to SEQ ID NO: 1491622
uuuccugccaacaacuccu

SEQ ID NO: 1491624 - RNA, 19 nt, Artificial Sequence
  Description of Artificial Sequence: Synthetic oligonucleotide
  Sense strand starting at position 1972 of SEQ ID NO: 1244477
agauaaagcucucagucga

SEQ ID NO: 1491625 - RNA, 19 nt, Artificial Sequence
  Description of Artificial Sequence: Synthetic oligonucleotide
  Antisense strand to SEQ ID NO: 1491624
ucgacugagagcuuuaucu

SEQ ID NO: 1491626 - RNA, 19 nt, Artificial Sequence
  Description of Artificial Sequence: Synthetic oligonucleotide
  Sense strand starting at position 1983 of SEQ ID NO: 1244477
ucagucgacuccucaaguu

SEQ ID NO: 1491627 - RNA, 19 nt, Artificial Sequence
  Description of Artificial Sequence: Synthetic oligonucleotide
  Antisense strand to SEQ ID NO: 1491626
aacuugaggagucgacuga

SEQ ID NO: 1491628 - RNA, 19 nt, Artificial Sequence
  Description of Artificial Sequence: Synthetic oligonucleotide
  Sense strand starting at position 2054 of SEQ ID NO: 1244477
gcuggagucuccucagauu

SEQ ID NO: 1491629 - RNA, 19 nt, Artificial Sequence
  Description of Artificial Sequence: Synthetic oligonucleotide
  Antisense strand to SEQ ID NO: 1491628
aaucugaggagacuccagc

SEQ ID NO: 1491630 - RNA, 19 nt, Artificial Sequence
  Description of Artificial Sequence: Synthetic oligonucleotide
  Sense strand starting at position 2755 of SEQ ID NO: 1244477
agagaaaugaguugcccaa

SEQ ID NO: 1491631 - RNA, 19 nt, Artificial Sequence
  Description of Artificial Sequence: Synthetic oligonucleotide
  Antisense strand to SEQ ID NO: 1491630
uugggcaacucauuucucu

SEQ ID NO: 1491632 - RNA, 19 nt, Artificial Sequence
  Description of Artificial Sequence: Synthetic oligonucleotide
  Sense strand starting at position 2877 of SEQ ID NO: 1244477
ggagucuucuugcuggcga

SEQ ID NO: 1491633 - RNA, 19 nt, Artificial Sequence
  Description of Artificial Sequence: Synthetic oligonucleotide
  Antisense strand to SEQ ID NO: 1491632
ucgccagcaagaagacucc

SEQ ID NO: 1491634 - RNA, 19 nt, Artificial Sequence
  Description of Artificial Sequence: Synthetic oligonucleotide
  Sense strand starting at position 3013 of SEQ ID NO: 1244477
gucagucucuccuugucaa

SEQ ID NO: 1491635 - RNA, 19 nt, Artificial Sequence
  Description of Artificial Sequence: Synthetic oligonucleotide
  Antisense strand to SEQ ID NO: 1491634
uugacaaggagagacugac

SEQ ID NO: 1491636 - RNA, 19 nt, Artificial Sequence
  Description of Artificial Sequence: Synthetic oligonucleotide
  Sense strand starting at position 3016 of SEQ ID NO: 1244477
agucucuccuugucaagua

SEQ ID NO: 1491637 - RNA, 19 nt, Artificial Sequence
  Description of Artificial Sequence: Synthetic oligonucleotide
  Antisense strand to SEQ ID NO: 1491636
uacuugacaaggagagacu

SEQ ID NO: 1491638 - RNA, 19 nt, Artificial Sequence
  Description of Artificial Sequence: Synthetic oligonucleotide
  Sense strand starting at position 3051 of SEQ ID NO: 1244477
cgcggaguuucugcuaauc

SEQ ID NO: 1491639 - RNA, 19 nt, Artificial Sequence
  Description of Artificial Sequence: Synthetic oligonucleotide
  Antisense strand to SEQ ID NO: 1491638
gauuagcagaaacuccgcg

SEQ ID NO: 1491640 - RNA, 19 nt, Artificial Sequence
  Description of Artificial Sequence: Synthetic oligonucleotide
  Sense strand starting at position 3053 of SEQ ID NO: 1244477
cggaguuucugcuaaucca

SEQ ID NO: 1491641 - RNA, 19 nt, Artificial Sequence
  Description of Artificial Sequence: Synthetic oligonucleotide
  Antisense strand to SEQ ID NO: 1491640
uggauuagcagaaacuccg

SEQ ID NO: 1491642 - RNA, 19 nt, Artificial Sequence
  Description of Artificial Sequence: Synthetic oligonucleotide
  Sense strand starting at position 3061 of SEQ ID NO: 1244477
cugcuaauccagugggugu

SEQ ID NO: 1491643 - RNA, 19 nt, Artificial Sequence
  Description of Artificial Sequence: Synthetic oligonucleotide
  Antisense strand to SEQ ID NO: 1491642
acacccacuggauuagcag

SEQ ID NO: 1491644 - RNA, 19 nt, Artificial Sequence
  Description of Artificial Sequence: Synthetic oligonucleotide
  Sense strand starting at position 3215 of SEQ ID NO: 1244477
ggacacagcugcuugugau

SEQ ID NO: 1491645 - RNA, 19 nt, Artificial Sequence
  Description of Artificial Sequence: Synthetic oligonucleotide
  Antisense strand to SEQ ID NO: 1491644
aucacaagcagcugugucc

SEQ ID NO: 1491646 - RNA, 19 nt, Artificial Sequence
  Description of Artificial Sequence: Synthetic oligonucleotide
  Sense strand starting at position 3300 of SEQ ID NO: 1244477
ugauaugcguucuagagag

SEQ ID NO: 1491647 - RNA, 19 nt, Artificial Sequence
  Description of Artificial Sequence: Synthetic oligonucleotide
  Antisense strand to SEQ ID NO: 1491646
cucucuagaacgcauauca

SEQ ID NO: 1491648 - RNA, 19 nt, Artificial Sequence
  Description of Artificial Sequence: Synthetic oligonucleotide
  Sense strand starting at position 3717 of SEQ ID NO: 1244477
gaaggaagaucaggaaguu

SEQ ID NO: 1491649 - RNA, 19 nt, Artificial Sequence
  Description of Artificial Sequence: Synthetic oligonucleotide
  Antisense strand to SEQ ID NO: 1491648
aacuuccugaucuuccuuc

SEQ ID NO: 1491650 - RNA, 19 nt, Artificial Sequence
  Description of Artificial Sequence: Synthetic oligonucleotide
  Sense strand starting at position 3852 of SEQ ID NO: 1244477
acagacuugcuuggacaga

SEQ ID NO: 1491651 - RNA, 19 nt, Artificial Sequence
  Description of Artificial Sequence: Synthetic oligonucleotide
  Antisense strand to SEQ ID NO: 1491650
ucuguccaagcaagucugu

SEQ ID NO: 1491652 - RNA, 19 nt, Artificial Sequence
  Description of Artificial Sequence: Synthetic oligonucleotide
  Sense strand starting at position 3853 of SEQ ID NO: 1244477
cagacuugcuuggacagau

SEQ ID NO: 1491653 - RNA, 19 nt, Artificial Sequence
  Description of Artificial Sequence: Synthetic oligonucleotide
  Antisense strand to SEQ ID NO: 1491652
aucuguccaagcaagucug

SEQ ID NO: 1491654 - RNA, 19 nt, Artificial Sequence
  Description of Artificial Sequence: Synthetic oligonucleotide
  Sense strand starting at position 3857 of SEQ ID NO: 1244477
cuugcuuggacagauugau

SEQ ID NO: 1491655 - RNA, 19 nt, Artificial Sequence
  Description of Artificial Sequence: Synthetic oligonucleotide
  Antisense strand to SEQ ID NO: 1491654
aucaaucuguccaagcaag

SEQ ID NO: 1491656 - RNA, 19 nt, Artificial Sequence
  Description of Artificial Sequence: Synthetic oligonucleotide
  Sense strand starting at position 3970 of SEQ ID NO: 1244477
gggaucuuaucauauccac

SEQ ID NO: 1491657 - RNA, 19 nt, Artificial Sequence
  Description of Artificial Sequence: Synthetic oligonucleotide
  Antisense strand to SEQ ID NO: 1491656
guggauaugauaagauccc

SEQ ID NO: 1491658 - RNA, 19 nt, Artificial Sequence
  Description of Artificial Sequence: Synthetic oligonucleotide
  Sense strand starting at position 118 of SEQ ID NO: 1244478
ucauacuuguacuuaguua

SEQ ID NO: 1491659 - RNA, 19 nt, Artificial Sequence
  Description of Artificial Sequence: Synthetic oligonucleotide
  Antisense strand to SEQ ID NO: 1491658
uaacuaaguacaaguauga

SEQ ID NO: 1491660 - RNA, 19 nt, Artificial Sequence
  Description of Artificial Sequence: Synthetic oligonucleotide
  Sense strand starting at position 132 of SEQ ID NO: 1244478
aguuaaauauguccugcuu

SEQ ID NO: 1491661 - RNA, 19 nt, Artificial Sequence
  Description of Artificial Sequence: Synthetic oligonucleotide
  Antisense strand to SEQ ID NO: 1491660
aagcaggacauauuuaacu

SEQ ID NO: 1491662 - RNA, 19 nt, Artificial Sequence
  Description of Artificial Sequence: Synthetic oligonucleotide
  Sense strand starting at position 234 of SEQ ID NO: 1244478
ccacccucgucucagauuu

SEQ ID NO: 1491663 - RNA, 19 nt, Artificial Sequence
  Description of Artificial Sequence: Synthetic oligonucleotide
  Antisense strand to SEQ ID NO: 1491662
aaaucugagacgagggugg

SEQ ID NO: 1491664 - RNA, 19 nt, Artificial Sequence
  Description of Artificial Sequence: Synthetic oligonucleotide
  Sense strand starting at position 256 of SEQ ID NO: 1244478
cauccaggacugcgagaau

SEQ ID NO: 1491665 - RNA, 19 nt, Artificial Sequence
  Description of Artificial Sequence: Synthetic oligonucleotide
  Antisense strand to SEQ ID NO: 1491664
auucucgcaguccuggaug

SEQ ID NO: 1491666 - RNA, 19 nt, Artificial Sequence
  Description of Artificial Sequence: Synthetic oligonucleotide
  Sense strand starting at position 430 of SEQ ID NO: 1244478
caauaauuacacuguggga

SEQ ID NO: 1491667 - RNA, 19 nt, Artificial Sequence
  Description of Artificial Sequence: Synthetic oligonucleotide
  Antisense strand to SEQ ID NO: 1491666
ucccacaguguaauuauug

SEQ ID NO: 1491668 - RNA, 19 nt, Artificial Sequence
  Description of Artificial Sequence: Synthetic oligonucleotide
  Sense strand starting at position 887 of SEQ ID NO: 1244478
cgagcugggugcagagaua

SEQ ID NO: 1491669 - RNA, 19 nt, Artificial Sequence
  Description of Artificial Sequence: Synthetic oligonucleotide
  Antisense strand to SEQ ID NO: 1491668
uaucucugcacccagcucg

SEQ ID NO: 1491670 - RNA, 19 nt, Artificial Sequence
  Description of Artificial Sequence: Synthetic oligonucleotide
  Sense strand starting at position 961 of SEQ ID NO: 1244478
gcaaguugaccggaaggga

SEQ ID NO: 1491671 - RNA, 19 nt, Artificial Sequence
  Description of Artificial Sequence: Synthetic oligonucleotide
  Antisense strand to SEQ ID NO: 1491670
ucccuuccggucaacuugc

SEQ ID NO: 1491672 - RNA, 19 nt, Artificial Sequence
  Description of Artificial Sequence: Synthetic oligonucleotide
  Sense strand starting at position 1027 of SEQ ID NO: 1244478
agugacacccugugauuau

SEQ ID NO: 1491673 - RNA, 19 nt, Artificial Sequence
  Description of Artificial Sequence: Synthetic oligonucleotide
  Antisense strand to SEQ ID NO: 1491672
auaaucacagggugucacu

SEQ ID NO: 1491674 - RNA, 19 nt, Artificial Sequence
  Description of Artificial Sequence: Synthetic oligonucleotide
  Sense strand starting at position 1193 of SEQ ID NO: 1244478
gggaaagccugauaaaucg

SEQ ID NO: 1491675 - RNA, 19 nt, Artificial Sequence
  Description of Artificial Sequence: Synthetic oligonucleotide
  Antisense strand to SEQ ID NO: 1491674
cgauuuaucaggcuuuccc

SEQ ID NO: 1491676 - RNA, 19 nt, Artificial Sequence
  Description of Artificial Sequence: Synthetic oligonucleotide
  Sense strand starting at position 1521 of SEQ ID NO: 1244478
cuuguucuuggcgaugaca

SEQ ID NO: 1491677 - RNA, 19 nt, Artificial Sequence
  Description of Artificial Sequence: Synthetic oligonucleotide
  Antisense strand to SEQ ID NO: 1491676
ugucaucgccaagaacaag

SEQ ID NO: 1491678 - RNA, 19 nt, Artificial Sequence
  Description of Artificial Sequence: Synthetic oligonucleotide
  Sense strand starting at position 1523 of SEQ ID NO: 1244478
uguucuuggcgaugacaua

SEQ ID NO: 1491679 - RNA, 19 nt, Artificial Sequence
  Description of Artificial Sequence: Synthetic oligonucleotide
  Antisense strand to SEQ ID NO: 1491678
uaugucaucgccaagaaca

SEQ ID NO: 1491680 - RNA, 19 nt, Artificial Sequence
  Description of Artificial Sequence: Synthetic oligonucleotide
  Sense strand starting at position 1546 of SEQ ID NO: 1244478
ucggucuuguagucgaaca

SEQ ID NO: 1491681 - RNA, 19 nt, Artificial Sequence
  Description of Artificial Sequence: Synthetic oligonucleotide
  Antisense strand to SEQ ID NO: 1491680
uguucgacuacaagaccga

SEQ ID NO: 1491682 - RNA, 19 nt, Artificial Sequence
  Description of Artificial Sequence: Synthetic oligonucleotide
  Sense strand starting at position 1777 of SEQ ID NO: 1244478
uauugacgcgguugagaaa

SEQ ID NO: 1491683 - RNA, 19 nt, Artificial Sequence
  Description of Artificial Sequence: Synthetic oligonucleotide
  Antisense strand to SEQ ID NO: 1491682
uuucucaaccgcgucaaua

SEQ ID NO: 1491684 - RNA, 19 nt, Artificial Sequence
  Description of Artificial Sequence: Synthetic oligonucleotide
  Sense strand starting at position 2185 of SEQ ID NO: 1244478
ggacuacaggcgugauaau

SEQ ID NO: 1491685 - RNA, 19 nt, Artificial Sequence
  Description of Artificial Sequence: Synthetic oligonucleotide
  Antisense strand to SEQ ID NO: 1491684
auuaucacgccuguagucc

SEQ ID NO: 1491686 - RNA, 19 nt, Artificial Sequence
  Description of Artificial Sequence: Synthetic oligonucleotide
  Sense strand starting at position 2186 of SEQ ID NO: 1244478
gacuacaggcgugauaauu

SEQ ID NO: 1491687 - RNA, 19 nt, Artificial Sequence
  Description of Artificial Sequence: Synthetic oligonucleotide
  Antisense strand to SEQ ID NO: 1491686
aauuaucacgccuguaguc

SEQ ID NO: 1491688 - RNA, 19 nt, Artificial Sequence
  Description of Artificial Sequence: Synthetic oligonucleotide
  Sense strand starting at position 2335 of SEQ ID NO: 1244478
cgggaagagcuccguuuaa

SEQ ID NO: 1491689 - RNA, 19 nt, Artificial Sequence
  Description of Artificial Sequence: Synthetic oligonucleotide
  Antisense strand to SEQ ID NO: 1491688
uuaaacggagcucuucccg

SEQ ID NO: 1491690 - RNA, 19 nt, Artificial Sequence
  Description of Artificial Sequence: Synthetic oligonucleotide
  Sense strand starting at position 2339 of SEQ ID NO: 1244478
aagagcuccguuuaaagca

SEQ ID NO: 1491691 - RNA, 19 nt, Artificial Sequence
  Description of Artificial Sequence: Synthetic oligonucleotide
  Antisense strand to SEQ ID NO: 1491690
ugcuuuaaacggagcucuu

SEQ ID NO: 1491692 - RNA, 19 nt, Artificial Sequence
  Description of Artificial Sequence: Synthetic oligonucleotide
  Sense strand starting at position 2385 of SEQ ID NO: 1244478
cccaaaggguucuuccuau

SEQ ID NO: 1491693 - RNA, 19 nt, Artificial Sequence
  Description of Artificial Sequence: Synthetic oligonucleotide
  Antisense strand to SEQ ID NO: 1491692
auaggaagaacccuuuggg

SEQ ID NO: 1491694 - RNA, 19 nt, Artificial Sequence
  Description of Artificial Sequence: Synthetic oligonucleotide
  Sense strand starting at position 2478 of SEQ ID NO: 1244478
gucuccugccagggagaua

SEQ ID NO: 1491695 - RNA, 19 nt, Artificial Sequence
  Description of Artificial Sequence: Synthetic oligonucleotide
  Antisense strand to SEQ ID NO: 1491694
uaucucccuggcaggagac

SEQ ID NO: 1491696 - RNA, 19 nt, Artificial Sequence
  Description of Artificial Sequence: Synthetic oligonucleotide
  Sense strand starting at position 2603 of SEQ ID NO: 1244478
cgacuaaugcgcguuucua

SEQ ID NO: 1491697 - RNA, 19 nt, Artificial Sequence
  Description of Artificial Sequence: Synthetic oligonucleotide
  Antisense strand to SEQ ID NO: 1491696
uagaaacgcgcauuagucg

SEQ ID NO: 1491698 - RNA, 19 nt, Artificial Sequence
  Description of Artificial Sequence: Synthetic oligonucleotide
  Sense strand starting at position 2604 of SEQ ID NO: 1244478
gacuaaugcgcguuucuac

SEQ ID NO: 1491699 - RNA, 19 nt, Artificial Sequence
  Description of Artificial Sequence: Synthetic oligonucleotide
  Antisense strand to SEQ ID NO: 1491698
guagaaacgcgcauuaguc

SEQ ID NO: 1491700 - RNA, 19 nt, Artificial Sequence
  Description of Artificial Sequence: Synthetic oligonucleotide
  Sense strand starting at position 2820 of SEQ ID NO: 1244478
uguaccaacuguuuggaau

SEQ ID NO: 1491701 - RNA, 19 nt, Artificial Sequence
  Description of Artificial Sequence: Synthetic oligonucleotide
  Antisense strand to SEQ ID NO: 1491700
auuccaaacaguugguaca

SEQ ID NO: 1491702 - RNA, 19 nt, Artificial Sequence
  Description of Artificial Sequence: Synthetic oligonucleotide
  Sense strand starting at position 3150 of SEQ ID NO: 1244478
ucaucagugugauucuaaa

SEQ ID NO: 1491703 - RNA, 19 nt, Artificial Sequence
  Description of Artificial Sequence: Synthetic oligonucleotide
  Antisense strand to SEQ ID NO: 1491702
uuuagaaucacacugauga

SEQ ID NO: 1491704 - RNA, 19 nt, Artificial Sequence
  Description of Artificial Sequence: Synthetic oligonucleotide
  Sense strand starting at position 3207 of SEQ ID NO: 1244478
ugggaaucauguggaagaa

SEQ ID NO: 1491705 - RNA, 19 nt, Artificial Sequence
  Description of Artificial Sequence: Synthetic oligonucleotide
  Antisense strand to SEQ ID NO: 1491704
uucuuccacaugauuccca

SEQ ID NO: 1491706 - RNA, 19 nt, Artificial Sequence
  Description of Artificial Sequence: Synthetic oligonucleotide
  Sense strand starting at position 3319 of SEQ ID NO: 1244478
uugggaaagcguggaucuu

SEQ ID NO: 1491707 - RNA, 19 nt, Artificial Sequence
  Description of Artificial Sequence: Synthetic oligonucleotide
  Antisense strand to SEQ ID NO: 1491706
aagauccacgcuuucccaa

SEQ ID NO: 1491708 - RNA, 19 nt, Artificial Sequence
  Description of Artificial Sequence: Synthetic oligonucleotide
  Sense strand starting at position 3320 of SEQ ID NO: 1244478
ugggaaagcguggaucuuu

SEQ ID NO: 1491709 - RNA, 19 nt, Artificial Sequence
  Description of Artificial Sequence: Synthetic oligonucleotide
  Antisense strand to SEQ ID NO: 1491708
aaagauccacgcuuuccca

SEQ ID NO: 1491710 - RNA, 19 nt, Artificial Sequence
  Description of Artificial Sequence: Synthetic oligonucleotide
  Sense strand starting at position 3474 of SEQ ID NO: 1244478
gucacuauccaguaggauc

SEQ ID NO: 1491711 - RNA, 19 nt, Artificial Sequence
  Description of Artificial Sequence: Synthetic oligonucleotide
  Antisense strand to SEQ ID NO: 1491710
gauccuacuggauagugac

SEQ ID NO: 1491712 - RNA, 19 nt, Artificial Sequence
  Description of Artificial Sequence: Synthetic oligonucleotide
  Sense strand starting at position 3485 of SEQ ID NO: 1244478
guaggaucucguugacuua

SEQ ID NO: 1491713 - RNA, 19 nt, Artificial Sequence
  Description of Artificial Sequence: Synthetic oligonucleotide
  Antisense strand to SEQ ID NO: 1491712
uaagucaacgagauccuac

SEQ ID NO: 1491714 - RNA, 19 nt, Artificial Sequence
  Description of Artificial Sequence: Synthetic oligonucleotide
  Sense strand starting at position 3506 of SEQ ID NO: 1244478
gacugugucccaugcuaag

SEQ ID NO: 1491715 - RNA, 19 nt, Artificial Sequence
  Description of Artificial Sequence: Synthetic oligonucleotide
  Antisense strand to SEQ ID NO: 1491714
cuuagcaugggacacaguc

SEQ ID NO: 1491716 - RNA, 19 nt, Artificial Sequence
  Description of Artificial Sequence: Synthetic oligonucleotide
  Sense strand starting at position 3547 of SEQ ID NO: 1244478
ggaccaugccuuuggacau

SEQ ID NO: 1491717 - RNA, 19 nt, Artificial Sequence
  Description of Artificial Sequence: Synthetic oligonucleotide
  Antisense strand to SEQ ID NO: 1491716
auguccaaaggcauggucc

SEQ ID NO: 1491718 - RNA, 19 nt, Artificial Sequence
  Description of Artificial Sequence: Synthetic oligonucleotide
  Sense strand starting at position 3578 of SEQ ID NO: 1244478
cugugccugccacauaaua

SEQ ID NO: 1491719 - RNA, 19 nt, Artificial Sequence
  Description of Artificial Sequence: Synthetic oligonucleotide
  Antisense strand to SEQ ID NO: 1491718
uauuauguggcaggcacag

SEQ ID NO: 1491720 - RNA, 19 nt, Artificial Sequence
  Description of Artificial Sequence: Synthetic oligonucleotide
  Sense strand starting at position 3586 of SEQ ID NO: 1244478
gccacauaauaguucuaga

SEQ ID NO: 1491721 - RNA, 19 nt, Artificial Sequence
  Description of Artificial Sequence: Synthetic oligonucleotide
  Antisense strand to SEQ ID NO: 1491720
ucuagaacuauuauguggc

SEQ ID NO: 1491722 - RNA, 19 nt, Artificial Sequence
  Description of Artificial Sequence: Synthetic oligonucleotide
  Sense strand starting at position 3684 of SEQ ID NO: 1244478
cccagucaugacugcgaau

SEQ ID NO: 1491723 - RNA, 19 nt, Artificial Sequence
  Description of Artificial Sequence: Synthetic oligonucleotide
  Antisense strand to SEQ ID NO: 1491722
auucgcagucaugacuggg

SEQ ID NO: 1491724 - RNA, 19 nt, Artificial Sequence
  Description of Artificial Sequence: Synthetic oligonucleotide
  Sense strand starting at position 3686 of SEQ ID NO: 1244478
cagucaugacugcgaauuu

SEQ ID NO: 1491725 - RNA, 19 nt, Artificial Sequence
  Description of Artificial Sequence: Synthetic oligonucleotide
  Antisense strand to SEQ ID NO: 1491724
aaauucgcagucaugacug

SEQ ID NO: 1491726 - RNA, 19 nt, Artificial Sequence
  Description of Artificial Sequence: Synthetic oligonucleotide
  Sense strand starting at position 3886 of SEQ ID NO: 1244478
acaggagucgccugaauug

SEQ ID NO: 1491727 - RNA, 19 nt, Artificial Sequence
  Description of Artificial Sequence: Synthetic oligonucleotide
  Antisense strand to SEQ ID NO: 1491726
caauucaggcgacuccugu

SEQ ID NO: 1491728 - RNA, 19 nt, Artificial Sequence
  Description of Artificial Sequence: Synthetic oligonucleotide
  Sense strand starting at position 3904 of SEQ ID NO: 1244478
gcaucugcccuggagaaga

SEQ ID NO: 1491729 - RNA, 19 nt, Artificial Sequence
  Description of Artificial Sequence: Synthetic oligonucleotide
  Antisense strand to SEQ ID NO: 1491728
ucuucuccagggcagaugc

SEQ ID NO: 1491730 - RNA, 19 nt, Artificial Sequence
  Description of Artificial Sequence: Synthetic oligonucleotide
  Sense strand starting at position 3914 of SEQ ID NO: 1244478
uggagaagagcuugcccau

SEQ ID NO: 1491731 - RNA, 19 nt, Artificial Sequence
  Description of Artificial Sequence: Synthetic oligonucleotide
  Antisense strand to SEQ ID NO: 1491730
augggcaagcucuucucca

SEQ ID NO: 1491732 - RNA, 19 nt, Artificial Sequence
  Description of Artificial Sequence: Synthetic oligonucleotide
  Sense strand starting at position 3917 of SEQ ID NO: 1244478
agaagagcuugcccaucaa

SEQ ID NO: 1491733 - RNA, 19 nt, Artificial Sequence
  Description of Artificial Sequence: Synthetic oligonucleotide
  Antisense strand to SEQ ID NO: 1491732
uugaugggcaagcucuucu

SEQ ID NO: 1491734 - RNA, 19 nt, Artificial Sequence
  Description of Artificial Sequence: Synthetic oligonucleotide
  Sense strand starting at position 3946 of SEQ ID NO: 1244478
ggacaacaugagugucaca

SEQ ID NO: 1491735 - RNA, 19 nt, Artificial Sequence
  Description of Artificial Sequence: Synthetic oligonucleotide
  Antisense strand to SEQ ID NO: 1491734
ugugacacucauguugucc

SEQ ID NO: 1491736 - RNA, 19 nt, Artificial Sequence
  Description of Artificial Sequence: Synthetic oligonucleotide
  Sense strand starting at position 3951 of SEQ ID NO: 1244478
acaugagugucacagagau

SEQ ID NO: 1491737 - RNA, 19 nt, Artificial Sequence
  Description of Artificial Sequence: Synthetic oligonucleotide
  Antisense strand to SEQ ID NO: 1491736
aucucugugacacucaugu

SEQ ID NO: 1491738 - RNA, 19 nt, Artificial Sequence
  Description of Artificial Sequence: Synthetic oligonucleotide
  Sense strand starting at position 44 of SEQ ID NO: 1244479
cagcccuuugucugggaaa

SEQ ID NO: 1491739 - RNA, 19 nt, Artificial Sequence
  Description of Artificial Sequence: Synthetic oligonucleotide
  Antisense strand to SEQ ID NO: 1491738
uuucccagacaaagggcug

SEQ ID NO: 1491740 - RNA, 19 nt, Artificial Sequence
  Description of Artificial Sequence: Synthetic oligonucleotide
  Sense strand starting at position 88 of SEQ ID NO: 1244479
ggagaaaucacgcaagcac

SEQ ID NO: 1491741 - RNA, 19 nt, Artificial Sequence
  Description of Artificial Sequence: Synthetic oligonucleotide
  Antisense strand to SEQ ID NO: 1491740
gugcuugcgugauuucucc

SEQ ID NO: 1491742 - RNA, 19 nt, Artificial Sequence
  Description of Artificial Sequence: Synthetic oligonucleotide
  Sense strand starting at position 245 of SEQ ID NO: 1244479
gcuggucagucuccaaaca

SEQ ID NO: 1491743 - RNA, 19 nt, Artificial Sequence
  Description of Artificial Sequence: Synthetic oligonucleotide
  Antisense strand to SEQ ID NO: 1491742
uguuuggagacugaccagc

SEQ ID NO: 1491744 - RNA, 19 nt, Artificial Sequence
  Description of Artificial Sequence: Synthetic oligonucleotide
  Sense strand starting at position 466 of SEQ ID NO: 1244479
gccagucccucucuaaaga

SEQ ID NO: 1491745 - RNA, 19 nt, Artificial Sequence
  Description of Artificial Sequence: Synthetic oligonucleotide
  Antisense strand to SEQ ID NO: 1491744
ucuuuagagagggacuggc

SEQ ID NO: 1491746 - RNA, 19 nt, Artificial Sequence
  Description of Artificial Sequence: Synthetic oligonucleotide
  Sense strand starting at position 536 of SEQ ID NO: 1244479
gugucuccauuccugaaga

SEQ ID NO: 1491747 - RNA, 19 nt, Artificial Sequence
  Description of Artificial Sequence: Synthetic oligonucleotide
  Antisense strand to SEQ ID NO: 1491746
ucuucaggaauggagacac

SEQ ID NO: 1491748 - RNA, 19 nt, Artificial Sequence
  Description of Artificial Sequence: Synthetic oligonucleotide
  Sense strand starting at position 538 of SEQ ID NO: 1244479
gucuccauuccugaagaac

SEQ ID NO: 1491749 - RNA, 19 nt, Artificial Sequence
  Description of Artificial Sequence: Synthetic oligonucleotide
  Antisense strand to SEQ ID NO: 1491748
guucuucaggaauggagac

SEQ ID NO: 1491750 - RNA, 19 nt, Artificial Sequence
  Description of Artificial Sequence: Synthetic oligonucleotide
  Sense strand starting at position 546 of SEQ ID NO: 1244479
uccugaagaacuugauggu

SEQ ID NO: 1491751 - RNA, 19 nt, Artificial Sequence
  Description of Artificial Sequence: Synthetic oligonucleotide
  Antisense strand to SEQ ID NO: 1491750
accaucaaguucuucagga

SEQ ID NO: 1491752 - RNA, 19 nt, Artificial Sequence
  Description of Artificial Sequence: Synthetic oligonucleotide
  Sense strand starting at position 552 of SEQ ID NO: 1244479
agaacuugauggugggaua

SEQ ID NO: 1491753 - RNA, 19 nt, Artificial Sequence
  Description of Artificial Sequence: Synthetic oligonucleotide
  Antisense strand to SEQ ID NO: 1491752
uaucccaccaucaaguucu

SEQ ID NO: 1491754 - RNA, 19 nt, Artificial Sequence
  Description of Artificial Sequence: Synthetic oligonucleotide
  Sense strand starting at position 726 of SEQ ID NO: 1244479
gcggaaaugagaugcuaga

SEQ ID NO: 1491755 - RNA, 19 nt, Artificial Sequence
  Description of Artificial Sequence: Synthetic oligonucleotide
  Antisense strand to SEQ ID NO: 1491754
ucuagcaucucauuuccgc

SEQ ID NO: 1491756 - RNA, 19 nt, Artificial Sequence
  Description of Artificial Sequence: Synthetic oligonucleotide
  Sense strand starting at position 749 of SEQ ID NO: 1244479
agccuugaucccuaaagca

SEQ ID NO: 1491757 - RNA, 19 nt, Artificial Sequence
  Description of Artificial Sequence: Synthetic oligonucleotide
  Antisense strand to SEQ ID NO: 1491756
ugcuuuagggaucaaggcu

SEQ ID NO: 1491758 - RNA, 19 nt, Artificial Sequence
  Description of Artificial Sequence: Synthetic oligonucleotide
  Sense strand starting at position 857 of SEQ ID NO: 1244479
gcacaaggcugagcugaua

SEQ ID NO: 1491759 - RNA, 19 nt, Artificial Sequence
  Description of Artificial Sequence: Synthetic oligonucleotide
  Antisense strand to SEQ ID NO: 1491758
uaucagcucagccuugugc

SEQ ID NO: 1491760 - RNA, 19 nt, Artificial Sequence
  Description of Artificial Sequence: Synthetic oligonucleotide
  Sense strand starting at position 877 of SEQ ID NO: 1244479
ccugguguucuugggcaau

SEQ ID NO: 1491761 - RNA, 19 nt, Artificial Sequence
  Description of Artificial Sequence: Synthetic oligonucleotide
  Antisense strand to SEQ ID NO: 1491760
auugcccaagaacaccagg

SEQ ID NO: 1491762 - RNA, 19 nt, Artificial Sequence
  Description of Artificial Sequence: Synthetic oligonucleotide
  Sense strand starting at position 879 of SEQ ID NO: 1244479
ugguguucuugggcaauau

SEQ ID NO: 1491763 - RNA, 19 nt, Artificial Sequence
  Description of Artificial Sequence: Synthetic oligonucleotide
  Antisense strand to SEQ ID NO: 1491762
auauugcccaagaacacca

SEQ ID NO: 1491764 - RNA, 19 nt, Artificial Sequence
  Description of Artificial Sequence: Synthetic oligonucleotide
  Sense strand starting at position 880 of SEQ ID NO: 1244479
gguguucuugggcaauauc

SEQ ID NO: 1491765 - RNA, 19 nt, Artificial Sequence
  Description of Artificial Sequence: Synthetic oligonucleotide
  Antisense strand to SEQ ID NO: 1491764
gauauugcccaagaacacc

SEQ ID NO: 1491766 - RNA, 19 nt, Artificial Sequence
  Description of Artificial Sequence: Synthetic oligonucleotide
  Sense strand starting at position 888 of SEQ ID NO: 1244479
ugggcaauaucaggacaga

SEQ ID NO: 1491767 - RNA, 19 nt, Artificial Sequence
  Description of Artificial Sequence: Synthetic oligonucleotide
  Antisense strand to SEQ ID NO: 1491766
ucuguccugauauugccca

SEQ ID NO: 1491768 - RNA, 19 nt, Artificial Sequence
  Description of Artificial Sequence: Synthetic oligonucleotide
  Sense strand starting at position 989 of SEQ ID NO: 1244479
aaugguugcugacuucuua

SEQ ID NO: 1491769 - RNA, 19 nt, Artificial Sequence
  Description of Artificial Sequence: Synthetic oligonucleotide
  Antisense strand to SEQ ID NO: 1491768
uaagaagucagcaaccauu

SEQ ID NO: 1491770 - RNA, 19 nt, Artificial Sequence
  Description of Artificial Sequence: Synthetic oligonucleotide
  Sense strand starting at position 1099 of SEQ ID NO: 1244479
cagcacuagcugugaguau

SEQ ID NO: 1491771 - RNA, 19 nt, Artificial Sequence
  Description of Artificial Sequence: Synthetic oligonucleotide
  Antisense strand to SEQ ID NO: 1491770
auacucacagcuagugcug

SEQ ID NO: 1491772 - RNA, 19 nt, Artificial Sequence
  Description of Artificial Sequence: Synthetic oligonucleotide
  Sense strand starting at position 1103 of SEQ ID NO: 1244479
acuagcugugaguaugaga

SEQ ID NO: 1491773 - RNA, 19 nt, Artificial Sequence
  Description of Artificial Sequence: Synthetic oligonucleotide
  Antisense strand to SEQ ID NO: 1491772
ucucauacucacagcuagu

SEQ ID NO: 1491774 - RNA, 19 nt, Artificial Sequence
  Description of Artificial Sequence: Synthetic oligonucleotide
  Sense strand starting at position 1110 of SEQ ID NO: 1244479
gugaguaugagaugcacau

SEQ ID NO: 1491775 - RNA, 19 nt, Artificial Sequence
  Description of Artificial Sequence: Synthetic oligonucleotide
  Antisense strand to SEQ ID NO: 1491774
augugcaucucauacucac

SEQ ID NO: 1491776 - RNA, 19 nt, Artificial Sequence
  Description of Artificial Sequence: Synthetic oligonucleotide
  Sense strand starting at position 1147 of SEQ ID NO: 1244479
aguugcuuagggugagaau

SEQ ID NO: 1491777 - RNA, 19 nt, Artificial Sequence
  Description of Artificial Sequence: Synthetic oligonucleotide
  Antisense strand to SEQ ID NO: 1491776
auucucacccuaagcaacu

SEQ ID NO: 1491778 - RNA, 19 nt, Artificial Sequence
  Description of Artificial Sequence: Synthetic oligonucleotide
  Sense strand starting at position 1148 of SEQ ID NO: 1244479
guugcuuagggugagaaua

SEQ ID NO: 1491779 - RNA, 19 nt, Artificial Sequence
  Description of Artificial Sequence: Synthetic oligonucleotide
  Antisense strand to SEQ ID NO: 1491778
uauucucacccuaagcaac

SEQ ID NO: 1491780 - RNA, 19 nt, Artificial Sequence
  Description of Artificial Sequence: Synthetic oligonucleotide
  Sense strand starting at position 1164 of SEQ ID NO: 1244479
auaagacgaucugucaaua

SEQ ID NO: 1491781 - RNA, 19 nt, Artificial Sequence
  Description of Artificial Sequence: Synthetic oligonucleotide
  Antisense strand to SEQ ID NO: 1491780
uauugacagaucgucuuau

SEQ ID NO: 1491782 - RNA, 19 nt, Artificial Sequence
  Description of Artificial Sequence: Synthetic oligonucleotide
  Sense strand starting at position 1169 of SEQ ID NO: 1244479
acgaucugucaauagaguu

SEQ ID NO: 1491783 - RNA, 19 nt, Artificial Sequence
  Description of Artificial Sequence: Synthetic oligonucleotide
  Antisense strand to SEQ ID NO: 1491782
aacucuauugacagaucgu

SEQ ID NO: 1491784 - RNA, 19 nt, Artificial Sequence
  Description of Artificial Sequence: Synthetic oligonucleotide
  Sense strand starting at position 1182 of SEQ ID NO: 1244479
agaguuagcagcuguguca

SEQ ID NO: 1491785 - RNA, 19 nt, Artificial Sequence
  Description of Artificial Sequence: Synthetic oligonucleotide
  Antisense strand to SEQ ID NO: 1491784
ugacacagcugcuaacucu

SEQ ID NO: 1491786 - RNA, 19 nt, Artificial Sequence
  Description of Artificial Sequence: Synthetic oligonucleotide
  Sense strand starting at position 1228 of SEQ ID NO: 1244479
agcucaaauccuuauggac

SEQ ID NO: 1491787 - RNA, 19 nt, Artificial Sequence
  Description of Artificial Sequence: Synthetic oligonucleotide
  Antisense strand to SEQ ID NO: 1491786
guccauaaggauuugagcu

SEQ ID NO: 1491788 - RNA, 19 nt, Artificial Sequence
  Description of Artificial Sequence: Synthetic oligonucleotide
  Sense strand starting at position 1236 of SEQ ID NO: 1244479
uccuuauggacgugaggaa

SEQ ID NO: 1491789 - RNA, 19 nt, Artificial Sequence
  Description of Artificial Sequence: Synthetic oligonucleotide
  Antisense strand to SEQ ID NO: 1491788
uuccucacguccauaagga

SEQ ID NO: 1491790 - RNA, 19 nt, Artificial Sequence
  Description of Artificial Sequence: Synthetic oligonucleotide
  Sense strand starting at position 1260 of SEQ ID NO: 1244479
gggauucuccucugagaca

SEQ ID NO: 1491791 - RNA, 19 nt, Artificial Sequence
  Description of Artificial Sequence: Synthetic oligonucleotide
  Antisense strand to SEQ ID NO: 1491790
ugucucagaggagaauccc

SEQ ID NO: 1491792 - RNA, 19 nt, Artificial Sequence
  Description of Artificial Sequence: Synthetic oligonucleotide
  Sense strand starting at position 1261 of SEQ ID NO: 1244479
ggauucuccucugagacac

SEQ ID NO: 1491793 - RNA, 19 nt, Artificial Sequence
  Description of Artificial Sequence: Synthetic oligonucleotide
  Antisense strand to SEQ ID NO: 1491792
gugucucagaggagaaucc

SEQ ID NO: 1491794 - RNA, 19 nt, Artificial Sequence
  Description of Artificial Sequence: Synthetic oligonucleotide
  Sense strand starting at position 1382 of SEQ ID NO: 1244479
ugcucuguuugcucacaca

SEQ ID NO: 1491795 - RNA, 19 nt, Artificial Sequence
  Description of Artificial Sequence: Synthetic oligonucleotide
  Antisense strand to SEQ ID NO: 1491794
ugugugagcaaacagagca

SEQ ID NO: 1491796 - RNA, 19 nt, Artificial Sequence
  Description of Artificial Sequence: Synthetic oligonucleotide
  Sense strand starting at position 1878 of SEQ ID NO: 1244479
cccggccucgccuuuauaa

SEQ ID NO: 1491797 - RNA, 19 nt, Artificial Sequence
  Description of Artificial Sequence: Synthetic oligonucleotide
  Antisense strand to SEQ ID NO: 1491796
uuauaaaggcgaggccggg

SEQ ID NO: 1491798 - RNA, 19 nt, Artificial Sequence
  Description of Artificial Sequence: Synthetic oligonucleotide
  Sense strand starting at position 1880 of SEQ ID NO: 1244479
cggccucgccuuuauaaau

SEQ ID NO: 1491799 - RNA, 19 nt, Artificial Sequence
  Description of Artificial Sequence: Synthetic oligonucleotide
  Antisense strand to SEQ ID NO: 1491798
auuuauaaaggcgaggccg

SEQ ID NO: 1491800 - RNA, 19 nt, Artificial Sequence
  Description of Artificial Sequence: Synthetic oligonucleotide
  Sense strand starting at position 2498 of SEQ ID NO: 1244479
gugggcucggugugggaua

SEQ ID NO: 1491801 - RNA, 19 nt, Artificial Sequence
  Description of Artificial Sequence: Synthetic oligonucleotide
  Antisense strand to SEQ ID NO: 1491800
uaucccacaccgagcccac

SEQ ID NO: 1491802 - RNA, 19 nt, Artificial Sequence
  Description of Artificial Sequence: Synthetic oligonucleotide
  Sense strand starting at position 2835 of SEQ ID NO: 1244479
ugccaaauccugugacgcu

SEQ ID NO: 1491803 - RNA, 19 nt, Artificial Sequence
  Description of Artificial Sequence: Synthetic oligonucleotide
  Antisense strand to SEQ ID NO: 1491802
agcgucacaggauuuggca

SEQ ID NO: 1491804 - RNA, 19 nt, Artificial Sequence
  Description of Artificial Sequence: Synthetic oligonucleotide
  Sense strand starting at position 2907 of SEQ ID NO: 1244479
cuguuacacagcuguggaa

SEQ ID NO: 1491805 - RNA, 19 nt, Artificial Sequence
  Description of Artificial Sequence: Synthetic oligonucleotide
  Antisense strand to SEQ ID NO: 1491804
uuccacagcuguguaacag

SEQ ID NO: 1491806 - RNA, 19 nt, Artificial Sequence
  Description of Artificial Sequence: Synthetic oligonucleotide
  Sense strand starting at position 2909 of SEQ ID NO: 1244479
guuacacagcuguggaaau

SEQ ID NO: 1491807 - RNA, 19 nt, Artificial Sequence
  Description of Artificial Sequence: Synthetic oligonucleotide
  Antisense strand to SEQ ID NO: 1491806
auuuccacagcuguguaac

SEQ ID NO: 1491808 - RNA, 19 nt, Artificial Sequence
  Description of Artificial Sequence: Synthetic oligonucleotide
  Sense strand starting at position 3043 of SEQ ID NO: 1244479
gugcgcaaugcacaucaaa

SEQ ID NO: 1491809 - RNA, 19 nt, Artificial Sequence
  Description of Artificial Sequence: Synthetic oligonucleotide
  Antisense strand to SEQ ID NO: 1491808
uuugaugugcauugcgcac

SEQ ID NO: 1491810 - RNA, 19 nt, Artificial Sequence
  Description of Artificial Sequence: Synthetic oligonucleotide
  Sense strand starting at position 3431 of SEQ ID NO: 1244479
cguuaauaacuuuacauug

SEQ ID NO: 1491811 - RNA, 19 nt, Artificial Sequence
  Description of Artificial Sequence: Synthetic oligonucleotide
  Antisense strand to SEQ ID NO: 1491810
caauguaaaguuauuaacg

SEQ ID NO: 1491812 - RNA, 19 nt, Artificial Sequence
  Description of Artificial Sequence: Synthetic oligonucleotide
  Sense strand starting at position 3461 of SEQ ID NO: 1244479
uugaaauauucuguaugca

SEQ ID NO: 1491813 - RNA, 19 nt, Artificial Sequence
  Description of Artificial Sequence: Synthetic oligonucleotide
  Antisense strand to SEQ ID NO: 1491812
ugcauacagaauauuucaa

SEQ ID NO: 1491814 - RNA, 19 nt, Artificial Sequence
  Description of Artificial Sequence: Synthetic oligonucleotide
  Sense strand starting at position 3462 of SEQ ID NO: 1244479
ugaaauauucuguaugcau

SEQ ID NO: 1491815 - RNA, 19 nt, Artificial Sequence
  Description of Artificial Sequence: Synthetic oligonucleotide
  Antisense strand to SEQ ID NO: 1491814
augcauacagaauauuuca

SEQ ID NO: 1491816 - RNA, 19 nt, Artificial Sequence
  Description of Artificial Sequence: Synthetic oligonucleotide
  Sense strand starting at position 3470 of SEQ ID NO: 1244479
ucuguaugcauauguugga

SEQ ID NO: 1491817 - RNA, 19 nt, Artificial Sequence
  Description of Artificial Sequence: Synthetic oligonucleotide
  Antisense strand to SEQ ID NO: 1491816
uccaacauaugcauacaga

SEQ ID NO: 1491818 - RNA, 19 nt, Artificial Sequence
  Description of Artificial Sequence: Synthetic oligonucleotide
  Sense strand starting at position 8 of SEQ ID NO: 1244480
uugugaaacuguguccuaa

SEQ ID NO: 1491819 - RNA, 19 nt, Artificial Sequence
  Description of Artificial Sequence: Synthetic oligonucleotide
  Antisense strand to SEQ ID NO: 1491818
uuaggacacaguuucacaa

SEQ ID NO: 1491820 - RNA, 19 nt, Artificial Sequence
  Description of Artificial Sequence: Synthetic oligonucleotide
  Sense strand starting at position 143 of SEQ ID NO: 1244480
uccugauuaugagacugga

SEQ ID NO: 1491821 - RNA, 19 nt, Artificial Sequence
  Description of Artificial Sequence: Synthetic oligonucleotide
  Antisense strand to SEQ ID NO: 1491820
uccagucucauaaucagga

SEQ ID NO: 1491822 - RNA, 19 nt, Artificial Sequence
  Description of Artificial Sequence: Synthetic oligonucleotide
  Sense strand starting at position 239 of SEQ ID NO: 1244480
ugacauuaucacugguaug

SEQ ID NO: 1491823 - RNA, 19 nt, Artificial Sequence
  Description of Artificial Sequence: Synthetic oligonucleotide
  Antisense strand to SEQ ID NO: 1491822
cauaccagugauaauguca

SEQ ID NO: 1491824 - RNA, 19 nt, Artificial Sequence
  Description of Artificial Sequence: Synthetic oligonucleotide
  Sense strand starting at position 390 of SEQ ID NO: 1244480
cuccaagacugugugcuua

SEQ ID NO: 1491825 - RNA, 19 nt, Artificial Sequence
  Description of Artificial Sequence: Synthetic oligonucleotide
  Antisense strand to SEQ ID NO: 1491824
uaagcacacagucuuggag

SEQ ID NO: 1491826 - RNA, 19 nt, Artificial Sequence
  Description of Artificial Sequence: Synthetic oligonucleotide
  Sense strand starting at position 392 of SEQ ID NO: 1244480
ccaagacugugugcuuaaa

SEQ ID NO: 1491827 - RNA, 19 nt, Artificial Sequence
  Description of Artificial Sequence: Synthetic oligonucleotide
  Antisense strand to SEQ ID NO: 1491826
uuuaagcacacagucuugg

SEQ ID NO: 1491828 - RNA, 19 nt, Artificial Sequence
  Description of Artificial Sequence: Synthetic oligonucleotide
  Sense strand starting at position 400 of SEQ ID NO: 1244480
gugugcuuaaaggagagau

SEQ ID NO: 1491829 - RNA, 19 nt, Artificial Sequence
  Description of Artificial Sequence: Synthetic oligonucleotide
  Antisense strand to SEQ ID NO: 1491828
aucucuccuuuaagcacac

SEQ ID NO: 1491830 - RNA, 19 nt, Artificial Sequence
  Description of Artificial Sequence: Synthetic oligonucleotide
  Sense strand starting at position 447 of SEQ ID NO: 1244480
cggacugccacuuaaggaa

SEQ ID NO: 1491831 - RNA, 19 nt, Artificial Sequence
  Description of Artificial Sequence: Synthetic oligonucleotide
  Antisense strand to SEQ ID NO: 1491830
uuccuuaaguggcaguccg

SEQ ID NO: 1491832 - RNA, 19 nt, Artificial Sequence
  Description of Artificial Sequence: Synthetic oligonucleotide
  Sense strand starting at position 602 of SEQ ID NO: 1244480
cccucuucccaaggaguuu

SEQ ID NO: 1491833 - RNA, 19 nt, Artificial Sequence
  Description of Artificial Sequence: Synthetic oligonucleotide
  Antisense strand to SEQ ID NO: 1491832
aaacuccuugggaagaggg

SEQ ID NO: 1491834 - RNA, 19 nt, Artificial Sequence
  Description of Artificial Sequence: Synthetic oligonucleotide
  Sense strand starting at position 613 of SEQ ID NO: 1244480
aggaguuucuugcuaaguc

SEQ ID NO: 1491835 - RNA, 19 nt, Artificial Sequence
  Description of Artificial Sequence: Synthetic oligonucleotide
  Antisense strand to SEQ ID NO: 1491834
gacuuagcaagaaacuccu

SEQ ID NO: 1491836 - RNA, 19 nt, Artificial Sequence
  Description of Artificial Sequence: Synthetic oligonucleotide
  Sense strand starting at position 621 of SEQ ID NO: 1244480
cuugcuaagucacugaaga

SEQ ID NO: 1491837 - RNA, 19 nt, Artificial Sequence
  Description of Artificial Sequence: Synthetic oligonucleotide
  Antisense strand to SEQ ID NO: 1491836
ucuucagugacuuagcaag

SEQ ID NO: 1491838 - RNA, 19 nt, Artificial Sequence
  Description of Artificial Sequence: Synthetic oligonucleotide
  Sense strand starting at position 622 of SEQ ID NO: 1244480
uugcuaagucacugaagaa

SEQ ID NO: 1491839 - RNA, 19 nt, Artificial Sequence
  Description of Artificial Sequence: Synthetic oligonucleotide
  Antisense strand to SEQ ID NO: 1491838
uucuucagugacuuagcaa

SEQ ID NO: 1491840 - RNA, 19 nt, Artificial Sequence
  Description of Artificial Sequence: Synthetic oligonucleotide
  Sense strand starting at position 635 of SEQ ID NO: 1244480
gaagaaagguagcauaaca

SEQ ID NO: 1491841 - RNA, 19 nt, Artificial Sequence
  Description of Artificial Sequence: Synthetic oligonucleotide
  Antisense strand to SEQ ID NO: 1491840
uguuaugcuaccuuucuuc

SEQ ID NO: 1491842 - RNA, 19 nt, Artificial Sequence
  Description of Artificial Sequence: Synthetic oligonucleotide
  Sense strand starting at position 707 of SEQ ID NO: 1244480
cucuacugcuacguuuaga

SEQ ID NO: 1491843 - RNA, 19 nt, Artificial Sequence
  Description of Artificial Sequence: Synthetic oligonucleotide
  Antisense strand to SEQ ID NO: 1491842
ucuaaacguagcaguagag

SEQ ID NO: 1491844 - RNA, 19 nt, Artificial Sequence
  Description of Artificial Sequence: Synthetic oligonucleotide
  Sense strand starting at position 766 of SEQ ID NO: 1244480
ucucaugugggaggcuaaa

SEQ ID NO: 1491845 - RNA, 19 nt, Artificial Sequence
  Description of Artificial Sequence: Synthetic oligonucleotide
  Antisense strand to SEQ ID NO: 1491844
uuuagccucccacaugaga

SEQ ID NO: 1491846 - RNA, 19 nt, Artificial Sequence
  Description of Artificial Sequence: Synthetic oligonucleotide
  Sense strand starting at position 1091 of SEQ ID NO: 1244480
ccuggaaggcccuaugagu

SEQ ID NO: 1491847 - RNA, 19 nt, Artificial Sequence
  Description of Artificial Sequence: Synthetic oligonucleotide
  Antisense strand to SEQ ID NO: 1491846
acucauagggccuuccagg

SEQ ID NO: 1491848 - RNA, 19 nt, Artificial Sequence
  Description of Artificial Sequence: Synthetic oligonucleotide
  Sense strand starting at position 2219 of SEQ ID NO: 1244480
uucuguuaaccuugggaga

SEQ ID NO: 1491849 - RNA, 19 nt, Artificial Sequence
  Description of Artificial Sequence: Synthetic oligonucleotide
  Antisense strand to SEQ ID NO: 1491848
ucucccaagguuaacagaa

SEQ ID NO: 1491850 - RNA, 19 nt, Artificial Sequence
  Description of Artificial Sequence: Synthetic oligonucleotide
  Sense strand starting at position 2420 of SEQ ID NO: 1244480
uccggccuccgagaugauu

SEQ ID NO: 1491851 - RNA, 19 nt, Artificial Sequence
  Description of Artificial Sequence: Synthetic oligonucleotide
  Antisense strand to SEQ ID NO: 1491850
aaucaucucggaggccgga

SEQ ID NO: 1491852 - RNA, 19 nt, Artificial Sequence
  Description of Artificial Sequence: Synthetic oligonucleotide
  Sense strand starting at position 2489 of SEQ ID NO: 1244480
ggaggagcuguugagguua

SEQ ID NO: 1491853 - RNA, 19 nt, Artificial Sequence
  Description of Artificial Sequence: Synthetic oligonucleotide
  Antisense strand to SEQ ID NO: 1491852
uaaccucaacagcuccucc

SEQ ID NO: 1491854 - RNA, 19 nt, Artificial Sequence
  Description of Artificial Sequence: Synthetic oligonucleotide
  Sense strand starting at position 2522 of SEQ ID NO: 1244480
ugcugucauugucuugauu

SEQ ID NO: 1491855 - RNA, 19 nt, Artificial Sequence
  Description of Artificial Sequence: Synthetic oligonucleotide
  Antisense strand to SEQ ID NO: 1491854
aaucaagacaaugacagca

SEQ ID NO: 1491856 - RNA, 19 nt, Artificial Sequence
  Description of Artificial Sequence: Synthetic oligonucleotide
  Sense strand starting at position 2525 of SEQ ID NO: 1244480
ugucauugucuugauuugu

SEQ ID NO: 1491857 - RNA, 19 nt, Artificial Sequence
  Description of Artificial Sequence: Synthetic oligonucleotide
  Antisense strand to SEQ ID NO: 1491856
acaaaucaagacaaugaca

SEQ ID NO: 1491858 - RNA, 19 nt, Artificial Sequence
  Description of Artificial Sequence: Synthetic oligonucleotide
  Sense strand starting at position 2551 of SEQ ID NO: 1244480
auucuuaauugggaggacu

SEQ ID NO: 1491859 - RNA, 19 nt, Artificial Sequence
  Description of Artificial Sequence: Synthetic oligonucleotide
  Antisense strand to SEQ ID NO: 1491858
aguccucccaauuaagaau

SEQ ID NO: 1491860 - RNA, 19 nt, Artificial Sequence
  Description of Artificial Sequence: Synthetic oligonucleotide
  Sense strand starting at position 2588 of SEQ ID NO: 1244480
agcuauucuucuccuuagu

SEQ ID NO: 1491861 - RNA, 19 nt, Artificial Sequence
  Description of Artificial Sequence: Synthetic oligonucleotide
  Antisense strand to SEQ ID NO: 1491860
acuaaggagaagaauagcu

SEQ ID NO: 1491862 - RNA, 19 nt, Artificial Sequence
  Description of Artificial Sequence: Synthetic oligonucleotide
  Sense strand starting at position 2662 of SEQ ID NO: 1244480
cuggaacuguaucccuaua

SEQ ID NO: 1491863 - RNA, 19 nt, Artificial Sequence
  Description of Artificial Sequence: Synthetic oligonucleotide
  Antisense strand to SEQ ID NO: 1491862
uauagggauacaguuccag

SEQ ID NO: 1491864 - RNA, 19 nt, Artificial Sequence
  Description of Artificial Sequence: Synthetic oligonucleotide
  Sense strand starting at position 2664 of SEQ ID NO: 1244480
ggaacuguaucccuauaag

SEQ ID NO: 1491865 - RNA, 19 nt, Artificial Sequence
  Description of Artificial Sequence: Synthetic oligonucleotide
  Antisense strand to SEQ ID NO: 1491864
cuuauagggauacaguucc

SEQ ID NO: 1491866 - RNA, 19 nt, Artificial Sequence
  Description of Artificial Sequence: Synthetic oligonucleotide
  Sense strand starting at position 2674 of SEQ ID NO: 1244480
cccuauaagggaugucugu

SEQ ID NO: 1491867 - RNA, 19 nt, Artificial Sequence
  Description of Artificial Sequence: Synthetic oligonucleotide
  Antisense strand to SEQ ID NO: 1491866
acagacaucccuuauaggg

SEQ ID NO: 1491868 - RNA, 19 nt, Artificial Sequence
  Description of Artificial Sequence: Synthetic oligonucleotide
  Sense strand starting at position 2717 of SEQ ID NO: 1244480
aaauauugaugacaagagu

SEQ ID NO: 1491869 - RNA, 19 nt, Artificial Sequence
  Description of Artificial Sequence: Synthetic oligonucleotide
  Antisense strand to SEQ ID NO: 1491868
acucuugucaucaauauuu

SEQ ID NO: 1491870 - RNA, 19 nt, Artificial Sequence
  Description of Artificial Sequence: Synthetic oligonucleotide
  Sense strand starting at position 3351 of SEQ ID NO: 1244480
agguuuaaaugagauuauc

SEQ ID NO: 1491871 - RNA, 19 nt, Artificial Sequence
  Description of Artificial Sequence: Synthetic oligonucleotide
  Antisense strand to SEQ ID NO: 1491870
gauaaucucauuuaaaccu

SEQ ID NO: 1491872 - RNA, 19 nt, Artificial Sequence
  Description of Artificial Sequence: Synthetic oligonucleotide
  Sense strand starting at position 3382 of SEQ ID NO: 1244480
uguauuguccaaggaagcu

SEQ ID NO: 1491873 - RNA, 19 nt, Artificial Sequence
  Description of Artificial Sequence: Synthetic oligonucleotide
  Antisense strand to SEQ ID NO: 1491872
agcuuccuuggacaauaca

SEQ ID NO: 1491874 - RNA, 19 nt, Artificial Sequence
  Description of Artificial Sequence: Synthetic oligonucleotide
  Sense strand starting at position 3419 of SEQ ID NO: 1244480
uaagcuuauguguacugau

SEQ ID NO: 1491875 - RNA, 19 nt, Artificial Sequence
  Description of Artificial Sequence: Synthetic oligonucleotide
  Antisense strand to SEQ ID NO: 1491874
aucaguacacauaagcuua

SEQ ID NO: 1491876 - RNA, 19 nt, Artificial Sequence
  Description of Artificial Sequence: Synthetic oligonucleotide
  Sense strand starting at position 3445 of SEQ ID NO: 1244480
cgucacuuuauguagguaa

SEQ ID NO: 1491877 - RNA, 19 nt, Artificial Sequence
  Description of Artificial Sequence: Synthetic oligonucleotide
  Antisense strand to SEQ ID NO: 1491876
uuaccuacauaaagugacg

SEQ ID NO: 1491878 - RNA, 19 nt, Artificial Sequence
  Description of Artificial Sequence: Synthetic oligonucleotide
  Sense strand starting at position 3447 of SEQ ID NO: 1244480
ucacuuuauguagguaaau

SEQ ID NO: 1491879 - RNA, 19 nt, Artificial Sequence
  Description of Artificial Sequence: Synthetic oligonucleotide
  Antisense strand to SEQ ID NO: 1491878
auuuaccuacauaaaguga

SEQ ID NO: 1491880 - RNA, 19 nt, Artificial Sequence
  Description of Artificial Sequence: Synthetic oligonucleotide
  Sense strand starting at position 3510 of SEQ ID NO: 1244480
gagacaacuuagguguaaa

SEQ ID NO: 1491881 - RNA, 19 nt, Artificial Sequence
  Description of Artificial Sequence: Synthetic oligonucleotide
  Antisense strand to SEQ ID NO: 1491880
uuuacaccuaaguugucuc

SEQ ID NO: 1491882 - RNA, 19 nt, Artificial Sequence
  Description of Artificial Sequence: Synthetic oligonucleotide
  Sense strand starting at position 3586 of SEQ ID NO: 1244480
uggccucaguuucucaaua

SEQ ID NO: 1491883 - RNA, 19 nt, Artificial Sequence
  Description of Artificial Sequence: Synthetic oligonucleotide
  Antisense strand to SEQ ID NO: 1491882
uauugagaaacugaggcca

SEQ ID NO: 1491884 - RNA, 19 nt, Artificial Sequence
  Description of Artificial Sequence: Synthetic oligonucleotide
  Sense strand starting at position 3587 of SEQ ID NO: 1244480
ggccucaguuucucaauaa

SEQ ID NO: 1491885 - RNA, 19 nt, Artificial Sequence
  Description of Artificial Sequence: Synthetic oligonucleotide
  Antisense strand to SEQ ID NO: 1491884
uuauugagaaacugaggcc

SEQ ID NO: 1491886 - RNA, 19 nt, Artificial Sequence
  Description of Artificial Sequence: Synthetic oligonucleotide
  Sense strand starting at position 3632 of SEQ ID NO: 1244480
uugugagaauuacagagga

SEQ ID NO: 1491887 - RNA, 19 nt, Artificial Sequence
  Description of Artificial Sequence: Synthetic oligonucleotide
  Antisense strand to SEQ ID NO: 1491886
uccucuguaauucucacaa

SEQ ID NO: 1491888 - RNA, 19 nt, Artificial Sequence
  Description of Artificial Sequence: Synthetic oligonucleotide
  Sense strand starting at position 3657 of SEQ ID NO: 1244480
gccuguguaaaguaucuua

SEQ ID NO: 1491889 - RNA, 19 nt, Artificial Sequence
  Description of Artificial Sequence: Synthetic oligonucleotide
  Antisense strand to SEQ ID NO: 1491888
uaagauacuuuacacaggc

SEQ ID NO: 1491890 - RNA, 19 nt, Artificial Sequence
  Description of Artificial Sequence: Synthetic oligonucleotide
  Sense strand starting at position 3660 of SEQ ID NO: 1244480
uguguaaaguaucuuaguu

SEQ ID NO: 1491891 - RNA, 19 nt, Artificial Sequence
  Description of Artificial Sequence: Synthetic oligonucleotide
  Antisense strand to SEQ ID NO: 1491890
aacuaagauacuuuacaca

SEQ ID NO: 1491892 - RNA, 19 nt, Artificial Sequence
  Description of Artificial Sequence: Synthetic oligonucleotide
  Sense strand starting at position 3664 of SEQ ID NO: 1244480
uaaaguaucuuaguuucgu

SEQ ID NO: 1491893 - RNA, 19 nt, Artificial Sequence
  Description of Artificial Sequence: Synthetic oligonucleotide
  Antisense strand to SEQ ID NO: 1491892
acgaaacuaagauacuuua

SEQ ID NO: 1491894 - RNA, 19 nt, Artificial Sequence
  Description of Artificial Sequence: Synthetic oligonucleotide
  Sense strand starting at position 3700 of SEQ ID NO: 1244480
ucauguaaacauuacuguu

SEQ ID NO: 1491895 - RNA, 19 nt, Artificial Sequence
  Description of Artificial Sequence: Synthetic oligonucleotide
  Antisense strand to SEQ ID NO: 1491894
aacaguaauguuuacauga

SEQ ID NO: 1491896 - RNA, 19 nt, Artificial Sequence
  Description of Artificial Sequence: Synthetic oligonucleotide
  Sense strand starting at position 3708 of SEQ ID NO: 1244480
acauuacuguugcuugaua

SEQ ID NO: 1491897 - RNA, 19 nt, Artificial Sequence
  Description of Artificial Sequence: Synthetic oligonucleotide
  Antisense strand to SEQ ID NO: 1491896
uaucaagcaacaguaaugu

SEQ ID NO: 1491898 - RNA, 19 nt, Artificial Sequence
  Description of Artificial Sequence: Synthetic oligonucleotide
  Sense strand starting at position 276 of SEQ ID NO: 1244481
gggcaugugaccugcacaa

SEQ ID NO: 1491899 - RNA, 19 nt, Artificial Sequence
  Description of Artificial Sequence: Synthetic oligonucleotide
  Antisense strand to SEQ ID NO: 1491898
uugugcaggucacaugccc

SEQ ID NO: 1491900 - RNA, 19 nt, Artificial Sequence
  Description of Artificial Sequence: Synthetic oligonucleotide
  Sense strand starting at position 474 of SEQ ID NO: 1244481
auuccaaagucaguucuaa

SEQ ID NO: 1491901 - RNA, 19 nt, Artificial Sequence
  Description of Artificial Sequence: Synthetic oligonucleotide
  Antisense strand to SEQ ID NO: 1491900
uuagaacugacuuuggaau

SEQ ID NO: 1491902 - RNA, 19 nt, Artificial Sequence
  Description of Artificial Sequence: Synthetic oligonucleotide
  Sense strand starting at position 567 of SEQ ID NO: 1244481
gcuuuaugcucccaguaau

SEQ ID NO: 1491903 - RNA, 19 nt, Artificial Sequence
  Description of Artificial Sequence: Synthetic oligonucleotide
  Antisense strand to SEQ ID NO: 1491902
auuacugggagcauaaagc

SEQ ID NO: 1491904 - RNA, 19 nt, Artificial Sequence
  Description of Artificial Sequence: Synthetic oligonucleotide
  Sense strand starting at position 581 of SEQ ID NO: 1244481
guaauaacaccuuggacca

SEQ ID NO: 1491905 - RNA, 19 nt, Artificial Sequence
  Description of Artificial Sequence: Synthetic oligonucleotide
  Antisense strand to SEQ ID NO: 1491904
ugguccaagguguuauuac

SEQ ID NO: 1491906 - RNA, 19 nt, Artificial Sequence
  Description of Artificial Sequence: Synthetic oligonucleotide
  Sense strand starting at position 768 of SEQ ID NO: 1244481
ggacaaagaucucgggaag

SEQ ID NO: 1491907 - RNA, 19 nt, Artificial Sequence
  Description of Artificial Sequence: Synthetic oligonucleotide
  Antisense strand to SEQ ID NO: 1491906
cuucccgagaucuuugucc

SEQ ID NO: 1491908 - RNA, 19 nt, Artificial Sequence
  Description of Artificial Sequence: Synthetic oligonucleotide
  Sense strand starting at position 791 of SEQ ID NO: 1244481
ggguaacacuuccacaaua

SEQ ID NO: 1491909 - RNA, 19 nt, Artificial Sequence
  Description of Artificial Sequence: Synthetic oligonucleotide
  Antisense strand to SEQ ID NO: 1491908
uauuguggaaguguuaccc

SEQ ID NO: 1491910 - RNA, 19 nt, Artificial Sequence
  Description of Artificial Sequence: Synthetic oligonucleotide
  Sense strand starting at position 865 of SEQ ID NO: 1244481
gagcgauuaugggcagaca

SEQ ID NO: 1491911 - RNA, 19 nt, Artificial Sequence
  Description of Artificial Sequence: Synthetic oligonucleotide
  Antisense strand to SEQ ID NO: 1491910
ugucugcccauaaucgcuc

SEQ ID NO: 1491912 - RNA, 19 nt, Artificial Sequence
  Description of Artificial Sequence: Synthetic oligonucleotide
  Sense strand starting at position 1067 of SEQ ID NO: 1244481
ugggaaauauugcgauaaa

SEQ ID NO: 1491913 - RNA, 19 nt, Artificial Sequence
  Description of Artificial Sequence: Synthetic oligonucleotide
  Antisense strand to SEQ ID NO: 1491912
uuuaucgcaauauuuccca

SEQ ID NO: 1491914 - RNA, 19 nt, Artificial Sequence
  Description of Artificial Sequence: Synthetic oligonucleotide
  Sense strand starting at position 1068 of SEQ ID NO: 1244481
gggaaauauugcgauaaau

SEQ ID NO: 1491915 - RNA, 19 nt, Artificial Sequence
  Description of Artificial Sequence: Synthetic oligonucleotide
  Antisense strand to SEQ ID NO: 1491914
auuuaucgcaauauuuccc

SEQ ID NO: 1491916 - RNA, 19 nt, Artificial Sequence
  Description of Artificial Sequence: Synthetic oligonucleotide
  Sense strand starting at position 1996 of SEQ ID NO: 1244481
ggagaaaccuacgguaaga

SEQ ID NO: 1491917 - RNA, 19 nt, Artificial Sequence
  Description of Artificial Sequence: Synthetic oligonucleotide
  Antisense strand to SEQ ID NO: 1491916
ucuuaccguagguuucucc

SEQ ID NO: 1491918 - RNA, 19 nt, Artificial Sequence
  Description of Artificial Sequence: Synthetic oligonucleotide
  Sense strand starting at position 2299 of SEQ ID NO: 1244481
gauggauucucuuauguua

SEQ ID NO: 1491919 - RNA, 19 nt, Artificial Sequence
  Description of Artificial Sequence: Synthetic oligonucleotide
  Antisense strand to SEQ ID NO: 1491918
uaacauaagagaauccauc

SEQ ID NO: 1491920 - RNA, 19 nt, Artificial Sequence
  Description of Artificial Sequence: Synthetic oligonucleotide
  Sense strand starting at position 2312 of SEQ ID NO: 1244481
auguuaccuuccgcaguua

SEQ ID NO: 1491921 - RNA, 19 nt, Artificial Sequence
  Description of Artificial Sequence: Synthetic oligonucleotide
  Antisense strand to SEQ ID NO: 1491920
uaacugcggaagguaacau

SEQ ID NO: 1491922 - RNA, 19 nt, Artificial Sequence
  Description of Artificial Sequence: Synthetic oligonucleotide
  Sense strand starting at position 2768 of SEQ ID NO: 1244481
ggcgugcucgggcagagaa

SEQ ID NO: 1491923 - RNA, 19 nt, Artificial Sequence
  Description of Artificial Sequence: Synthetic oligonucleotide
  Antisense strand to SEQ ID NO: 1491922
uucucugcccgagcacgcc

SEQ ID NO: 1491924 - RNA, 19 nt, Artificial Sequence
  Description of Artificial Sequence: Synthetic oligonucleotide
  Sense strand starting at position 2821 of SEQ ID NO: 1244481
ccgggucugggacacaaua

SEQ ID NO: 1491925 - RNA, 19 nt, Artificial Sequence
  Description of Artificial Sequence: Synthetic oligonucleotide
  Antisense strand to SEQ ID NO: 1491924
uauugugucccagacccgg

SEQ ID NO: 1491926 - RNA, 19 nt, Artificial Sequence
  Description of Artificial Sequence: Synthetic oligonucleotide
  Sense strand starting at position 2832 of SEQ ID NO: 1244481
acacaauaauccggccgaa

SEQ ID NO: 1491927 - RNA, 19 nt, Artificial Sequence
  Description of Artificial Sequence: Synthetic oligonucleotide
  Antisense strand to SEQ ID NO: 1491926
uucggccggauuauugugu

SEQ ID NO: 1491928 - RNA, 19 nt, Artificial Sequence
  Description of Artificial Sequence: Synthetic oligonucleotide
  Sense strand starting at position 3159 of SEQ ID NO: 1244481
gcgaaucgauacugcguua

SEQ ID NO: 1491929 - RNA, 19 nt, Artificial Sequence
  Description of Artificial Sequence: Synthetic oligonucleotide
  Antisense strand to SEQ ID NO: 1491928
uaacgcaguaucgauucgc

SEQ ID NO: 1491930 - RNA, 19 nt, Artificial Sequence
  Description of Artificial Sequence: Synthetic oligonucleotide
  Sense strand starting at position 3205 of SEQ ID NO: 1244481
ggucgauucccucauucgu

SEQ ID NO: 1491931 - RNA, 19 nt, Artificial Sequence
  Description of Artificial Sequence: Synthetic oligonucleotide
  Antisense strand to SEQ ID NO: 1491930
acgaaugagggaaucgacc

SEQ ID NO: 1491932 - RNA, 19 nt, Artificial Sequence
  Description of Artificial Sequence: Synthetic oligonucleotide
  Sense strand starting at position 3207 of SEQ ID NO: 1244481
ucgauucccucauucguua

SEQ ID NO: 1491933 - RNA, 19 nt, Artificial Sequence
  Description of Artificial Sequence: Synthetic oligonucleotide
  Antisense strand to SEQ ID NO: 1491932
uaacgaaugagggaaucga

SEQ ID NO: 1491934 - RNA, 19 nt, Artificial Sequence
  Description of Artificial Sequence: Synthetic oligonucleotide
  Sense strand starting at position 3263 of SEQ ID NO: 1244481
uccagagagcucgauuauc

SEQ ID NO: 1491935 - RNA, 19 nt, Artificial Sequence
  Description of Artificial Sequence: Synthetic oligonucleotide
  Antisense strand to SEQ ID NO: 1491934
gauaaucgagcucucugga

SEQ ID NO: 1491936 - RNA, 19 nt, Artificial Sequence
  Description of Artificial Sequence: Synthetic oligonucleotide
  Sense strand starting at position 3316 of SEQ ID NO: 1244481
gugggaggcucgaguuaga

SEQ ID NO: 1491937 - RNA, 19 nt, Artificial Sequence
  Description of Artificial Sequence: Synthetic oligonucleotide
  Antisense strand to SEQ ID NO: 1491936
ucuaacucgagccucccac

SEQ ID NO: 1491938 - RNA, 19 nt, Artificial Sequence
  Description of Artificial Sequence: Synthetic oligonucleotide
  Sense strand starting at position 3319 of SEQ ID NO: 1244481
ggaggcucgaguuagaaau

SEQ ID NO: 1491939 - RNA, 19 nt, Artificial Sequence
  Description of Artificial Sequence: Synthetic oligonucleotide
  Antisense strand to SEQ ID NO: 1491938
auuucuaacucgagccucc

SEQ ID NO: 1491940 - RNA, 19 nt, Artificial Sequence
  Description of Artificial Sequence: Synthetic oligonucleotide
  Sense strand starting at position 3321 of SEQ ID NO: 1244481
aggcucgaguuagaaauua

SEQ ID NO: 1491941 - RNA, 19 nt, Artificial Sequence
  Description of Artificial Sequence: Synthetic oligonucleotide
  Antisense strand to SEQ ID NO: 1491940
uaauuucuaacucgagccu

SEQ ID NO: 1491942 - RNA, 19 nt, Artificial Sequence
  Description of Artificial Sequence: Synthetic oligonucleotide
  Sense strand starting at position 3329 of SEQ ID NO: 1244481
guuagaaauuaggauagga

SEQ ID NO: 1491943 - RNA, 19 nt, Artificial Sequence
  Description of Artificial Sequence: Synthetic oligonucleotide
  Antisense strand to SEQ ID NO: 1491942
uccuauccuaauuucuaac

SEQ ID NO: 1491944 - RNA, 19 nt, Artificial Sequence
  Description of Artificial Sequence: Synthetic oligonucleotide
  Sense strand starting at position 3342 of SEQ ID NO: 1244481
auaggaaucuucgcccagu

SEQ ID NO: 1491945 - RNA, 19 nt, Artificial Sequence
  Description of Artificial Sequence: Synthetic oligonucleotide
  Antisense strand to SEQ ID NO: 1491944
acugggcgaagauuccuau

SEQ ID NO: 1491946 - RNA, 19 nt, Artificial Sequence
  Description of Artificial Sequence: Synthetic oligonucleotide
  Sense strand starting at position 3343 of SEQ ID NO: 1244481
uaggaaucuucgcccaguu

SEQ ID NO: 1491947 - RNA, 19 nt, Artificial Sequence
  Description of Artificial Sequence: Synthetic oligonucleotide
  Antisense strand to SEQ ID NO: 1491946
aacugggcgaagauuccua

SEQ ID NO: 1491948 - RNA, 19 nt, Artificial Sequence
  Description of Artificial Sequence: Synthetic oligonucleotide
  Sense strand starting at position 3566 of SEQ ID NO: 1244481
gagggagugguccgagaac

SEQ ID NO: 1491949 - RNA, 19 nt, Artificial Sequence
  Description of Artificial Sequence: Synthetic oligonucleotide
  Antisense strand to SEQ ID NO: 1491948
guucucggaccacucccuc

SEQ ID NO: 1491950 - RNA, 19 nt, Artificial Sequence
  Description of Artificial Sequence: Synthetic oligonucleotide
  Sense strand starting at position 3636 of SEQ ID NO: 1244481
ggcggagaggcgaguaguu

SEQ ID NO: 1491951 - RNA, 19 nt, Artificial Sequence
  Description of Artificial Sequence: Synthetic oligonucleotide
  Antisense strand to SEQ ID NO: 1491950
aacuacucgccucuccgcc

SEQ ID NO: 1491952 - RNA, 19 nt, Artificial Sequence
  Description of Artificial Sequence: Synthetic oligonucleotide
  Sense strand starting at position 3696 of SEQ ID NO: 1244481
gcaaaugugucgccggcau

SEQ ID NO: 1491953 - RNA, 19 nt, Artificial Sequence
  Description of Artificial Sequence: Synthetic oligonucleotide
  Antisense strand to SEQ ID NO: 1491952
augccggcgacacauuugc

SEQ ID NO: 1491954 - RNA, 19 nt, Artificial Sequence
  Description of Artificial Sequence: Synthetic oligonucleotide
  Sense strand starting at position 3945 of SEQ ID NO: 1244481
ccaugaauccuggagggcu

SEQ ID NO: 1491955 - RNA, 19 nt, Artificial Sequence
  Description of Artificial Sequence: Synthetic oligonucleotide
  Antisense strand to SEQ ID NO: 1491954
agcccuccaggauucaugg

SEQ ID NO: 1491956 - RNA, 19 nt, Artificial Sequence
  Description of Artificial Sequence: Synthetic oligonucleotide
  Sense strand starting at position 274 of SEQ ID NO: 1244482
ccuguucuagacugugaac

SEQ ID NO: 1491957 - RNA, 19 nt, Artificial Sequence
  Description of Artificial Sequence: Synthetic oligonucleotide
  Antisense strand to SEQ ID NO: 1491956
guucacagucuagaacagg

SEQ ID NO: 1491958 - RNA, 19 nt, Artificial Sequence
  Description of Artificial Sequence: Synthetic oligonucleotide
  Sense strand starting at position 276 of SEQ ID NO: 1244482
uguucuagacugugaacuu

SEQ ID NO: 1491959 - RNA, 19 nt, Artificial Sequence
  Description of Artificial Sequence: Synthetic oligonucleotide
  Antisense strand to SEQ ID NO: 1491958
aaguucacagucuagaaca

SEQ ID NO: 1491960 - RNA, 19 nt, Artificial Sequence
  Description of Artificial Sequence: Synthetic oligonucleotide
  Sense strand starting at position 286 of SEQ ID NO: 1244482
ugugaacuucuugaucauc

SEQ ID NO: 1491961 - RNA, 19 nt, Artificial Sequence
  Description of Artificial Sequence: Synthetic oligonucleotide
  Antisense strand to SEQ ID NO: 1491960
gaugaucaagaaguucaca

SEQ ID NO: 1491962 - RNA, 19 nt, Artificial Sequence
  Description of Artificial Sequence: Synthetic oligonucleotide
  Sense strand starting at position 351 of SEQ ID NO: 1244482
uugagugaguaauccauca

SEQ ID NO: 1491963 - RNA, 19 nt, Artificial Sequence
  Description of Artificial Sequence: Synthetic oligonucleotide
  Antisense strand to SEQ ID NO: 1491962
ugauggauuacucacucaa

SEQ ID NO: 1491964 - RNA, 19 nt, Artificial Sequence
  Description of Artificial Sequence: Synthetic oligonucleotide
  Sense strand starting at position 433 of SEQ ID NO: 1244482
uguguucuggauuauguaa

SEQ ID NO: 1491965 - RNA, 19 nt, Artificial Sequence
  Description of Artificial Sequence: Synthetic oligonucleotide
  Antisense strand to SEQ ID NO: 1491964
uuacauaauccagaacaca

SEQ ID NO: 1491966 - RNA, 19 nt, Artificial Sequence
  Description of Artificial Sequence: Synthetic oligonucleotide
  Sense strand starting at position 605 of SEQ ID NO: 1244482
uuucuugaccuuggcaaua

SEQ ID NO: 1491967 - RNA, 19 nt, Artificial Sequence
  Description of Artificial Sequence: Synthetic oligonucleotide
  Antisense strand to SEQ ID NO: 1491966
uauugccaaggucaagaaa

SEQ ID NO: 1491968 - RNA, 19 nt, Artificial Sequence
  Description of Artificial Sequence: Synthetic oligonucleotide
  Sense strand starting at position 610 of SEQ ID NO: 1244482
ugaccuuggcaauauuaca

SEQ ID NO: 1491969 - RNA, 19 nt, Artificial Sequence
  Description of Artificial Sequence: Synthetic oligonucleotide
  Antisense strand to SEQ ID NO: 1491968
uguaauauugccaagguca

SEQ ID NO: 1491970 - RNA, 19 nt, Artificial Sequence
  Description of Artificial Sequence: Synthetic oligonucleotide
  Sense strand starting at position 778 of SEQ ID NO: 1244482
ucauuccugcaaugagaca

SEQ ID NO: 1491971 - RNA, 19 nt, Artificial Sequence
  Description of Artificial Sequence: Synthetic oligonucleotide
  Antisense strand to SEQ ID NO: 1491970
ugucucauugcaggaauga

SEQ ID NO: 1491972 - RNA, 19 nt, Artificial Sequence
  Description of Artificial Sequence: Synthetic oligonucleotide
  Sense strand starting at position 813 of SEQ ID NO: 1244482
cuguuuaacaggugagcaa

SEQ ID NO: 1491973 - RNA, 19 nt, Artificial Sequence
  Description of Artificial Sequence: Synthetic oligonucleotide
  Antisense strand to SEQ ID NO: 1491972
uugcucaccuguuaaacag

SEQ ID NO: 1491974 - RNA, 19 nt, Artificial Sequence
  Description of Artificial Sequence: Synthetic oligonucleotide
  Sense strand starting at position 919 of SEQ ID NO: 1244482
gcaaccacauguuugacau

SEQ ID NO: 1491975 - RNA, 19 nt, Artificial Sequence
  Description of Artificial Sequence: Synthetic oligonucleotide
  Antisense strand to SEQ ID NO: 1491974
augucaaacaugugguugc

SEQ ID NO: 1491976 - RNA, 19 nt, Artificial Sequence
  Description of Artificial Sequence: Synthetic oligonucleotide
  Sense strand starting at position 1089 of SEQ ID NO: 1244482
auaauauccugguccugua

SEQ ID NO: 1491977 - RNA, 19 nt, Artificial Sequence
  Description of Artificial Sequence: Synthetic oligonucleotide
  Antisense strand to SEQ ID NO: 1491976
uacaggaccaggauauuau

SEQ ID NO: 1491978 - RNA, 19 nt, Artificial Sequence
  Description of Artificial Sequence: Synthetic oligonucleotide
  Sense strand starting at position 1191 of SEQ ID NO: 1244482
gaugacaagccuuggauga

SEQ ID NO: 1491979 - RNA, 19 nt, Artificial Sequence
  Description of Artificial Sequence: Synthetic oligonucleotide
  Antisense strand to SEQ ID NO: 1491978
ucauccaaggcuugucauc

SEQ ID NO: 1491980 - RNA, 19 nt, Artificial Sequence
  Description of Artificial Sequence: Synthetic oligonucleotide
  Sense strand starting at position 1240 of SEQ ID NO: 1244482
auggcuaccugauuccaaa

SEQ ID NO: 1491981 - RNA, 19 nt, Artificial Sequence
  Description of Artificial Sequence: Synthetic oligonucleotide
  Antisense strand to SEQ ID NO: 1491980
uuuggaaucagguagccau

SEQ ID NO: 1491982 - RNA, 19 nt, Artificial Sequence
  Description of Artificial Sequence: Synthetic oligonucleotide
  Sense strand starting at position 1291 of SEQ ID NO: 1244482
cuuuacuccugccugaaga

SEQ ID NO: 1491983 - RNA, 19 nt, Artificial Sequence
  Description of Artificial Sequence: Synthetic oligonucleotide
  Antisense strand to SEQ ID NO: 1491982
ucuucaggcaggaguaaag

SEQ ID NO: 1491984 - RNA, 19 nt, Artificial Sequence
  Description of Artificial Sequence: Synthetic oligonucleotide
  Sense strand starting at position 1292 of SEQ ID NO: 1244482
uuuacuccugccugaagau

SEQ ID NO: 1491985 - RNA, 19 nt, Artificial Sequence
  Description of Artificial Sequence: Synthetic oligonucleotide
  Antisense strand to SEQ ID NO: 1491984
aucuucaggcaggaguaaa

SEQ ID NO: 1491986 - RNA, 19 nt, Artificial Sequence
  Description of Artificial Sequence: Synthetic oligonucleotide
  Sense strand starting at position 1293 of SEQ ID NO: 1244482
uuacuccugccugaagauu

SEQ ID NO: 1491987 - RNA, 19 nt, Artificial Sequence
  Description of Artificial Sequence: Synthetic oligonucleotide
  Antisense strand to SEQ ID NO: 1491986
aaucuucaggcaggaguaa

SEQ ID NO: 1491988 - RNA, 19 nt, Artificial Sequence
  Description of Artificial Sequence: Synthetic oligonucleotide
  Sense strand starting at position 2407 of SEQ ID NO: 1244482
guuugagugucucucauuu

SEQ ID NO: 1491989 - RNA, 19 nt, Artificial Sequence
  Description of Artificial Sequence: Synthetic oligonucleotide
  Antisense strand to SEQ ID NO: 1491988
aaaugagagacacucaaac

SEQ ID NO: 1491990 - RNA, 19 nt, Artificial Sequence
  Description of Artificial Sequence: Synthetic oligonucleotide
  Sense strand starting at position 2442 of SEQ ID NO: 1244482
uagagaaagucucuuuggu

SEQ ID NO: 1491991 - RNA, 19 nt, Artificial Sequence
  Description of Artificial Sequence: Synthetic oligonucleotide
  Antisense strand to SEQ ID NO: 1491990
accaaagagacuuucucua

SEQ ID NO: 1491992 - RNA, 19 nt, Artificial Sequence
  Description of Artificial Sequence: Synthetic oligonucleotide
  Sense strand starting at position 2444 of SEQ ID NO: 1244482
gagaaagucucuuugguag

SEQ ID NO: 1491993 - RNA, 19 nt, Artificial Sequence
  Description of Artificial Sequence: Synthetic oligonucleotide
  Antisense strand to SEQ ID NO: 1491992
cuaccaaagagacuuucuc

SEQ ID NO: 1491994 - RNA, 19 nt, Artificial Sequence
  Description of Artificial Sequence: Synthetic oligonucleotide
  Sense strand starting at position 2450 of SEQ ID NO: 1244482
gucucuuugguagacauga

SEQ ID NO: 1491995 - RNA, 19 nt, Artificial Sequence
  Description of Artificial Sequence: Synthetic oligonucleotide
  Antisense strand to SEQ ID NO: 1491994
ucaugucuaccaaagagac

SEQ ID NO: 1491996 - RNA, 19 nt, Artificial Sequence
  Description of Artificial Sequence: Synthetic oligonucleotide
  Sense strand starting at position 2512 of SEQ ID NO: 1244482
ggucaaaugccagaagugu

SEQ ID NO: 1491997 - RNA, 19 nt, Artificial Sequence
  Description of Artificial Sequence: Synthetic oligonucleotide
  Antisense strand to SEQ ID NO: 1491996
acacuucuggcauuugacc

SEQ ID NO: 1491998 - RNA, 19 nt, Artificial Sequence
  Description of Artificial Sequence: Synthetic oligonucleotide
  Sense strand starting at position 2786 of SEQ ID NO: 1244482
uuugaagucccuugaguaa

SEQ ID NO: 1491999 - RNA, 19 nt, Artificial Sequence
  Description of Artificial Sequence: Synthetic oligonucleotide
  Antisense strand to SEQ ID NO: 1491998
uuacucaagggacuucaaa

SEQ ID NO: 1492000 - RNA, 19 nt, Artificial Sequence
  Description of Artificial Sequence: Synthetic oligonucleotide
  Sense strand starting at position 2828 of SEQ ID NO: 1244482
uguacuaccugacuuugaa

SEQ ID NO: 1492001 - RNA, 19 nt, Artificial Sequence
  Description of Artificial Sequence: Synthetic oligonucleotide
  Antisense strand to SEQ ID NO: 1492000
uucaaagucagguaguaca

SEQ ID NO: 1492002 - RNA, 19 nt, Artificial Sequence
  Description of Artificial Sequence: Synthetic oligonucleotide
  Sense strand starting at position 2894 of SEQ ID NO: 1244482
gccaauaaacucuggaaac

SEQ ID NO: 1492003 - RNA, 19 nt, Artificial Sequence
  Description of Artificial Sequence: Synthetic oligonucleotide
  Antisense strand to SEQ ID NO: 1492002
guuuccagaguuuauuggc

SEQ ID NO: 1492004 - RNA, 19 nt, Artificial Sequence
  Description of Artificial Sequence: Synthetic oligonucleotide
  Sense strand starting at position 2907 of SEQ ID NO: 1244482
ggaaacucauguuuccuaa

SEQ ID NO: 1492005 - RNA, 19 nt, Artificial Sequence
  Description of Artificial Sequence: Synthetic oligonucleotide
  Antisense strand to SEQ ID NO: 1492004
uuaggaaacaugaguuucc

SEQ ID NO: 1492006 - RNA, 19 nt, Artificial Sequence
  Description of Artificial Sequence: Synthetic oligonucleotide
  Sense strand starting at position 2972 of SEQ ID NO: 1244482
gugguuggacaaggaauaa

SEQ ID NO: 1492007 - RNA, 19 nt, Artificial Sequence
  Description of Artificial Sequence: Synthetic oligonucleotide
  Antisense strand to SEQ ID NO: 1492006
uuauuccuuguccaaccac

SEQ ID NO: 1492008 - RNA, 19 nt, Artificial Sequence
  Description of Artificial Sequence: Synthetic oligonucleotide
  Sense strand starting at position 3124 of SEQ ID NO: 1244482
ucaggcaaaugaucacauu

SEQ ID NO: 1492009 - RNA, 19 nt, Artificial Sequence
  Description of Artificial Sequence: Synthetic oligonucleotide
  Antisense strand to SEQ ID NO: 1492008
aaugugaucauuugccuga

SEQ ID NO: 1492010 - RNA, 19 nt, Artificial Sequence
  Description of Artificial Sequence: Synthetic oligonucleotide
  Sense strand starting at position 3214 of SEQ ID NO: 1244482
gcuuuauagguguggaaag

SEQ ID NO: 1492011 - RNA, 19 nt, Artificial Sequence
  Description of Artificial Sequence: Synthetic oligonucleotide
  Antisense strand to SEQ ID NO: 1492010
cuuuccacaccuauaaagc

SEQ ID NO: 1492012 - RNA, 19 nt, Artificial Sequence
  Description of Artificial Sequence: Synthetic oligonucleotide
  Sense strand starting at position 3385 of SEQ ID NO: 1244482
aacuauuggcuaugaagua

SEQ ID NO: 1492013 - RNA, 19 nt, Artificial Sequence
  Description of Artificial Sequence: Synthetic oligonucleotide
  Antisense strand to SEQ ID NO: 1492012
uacuucauagccaauaguu

SEQ ID NO: 1492014 - RNA, 19 nt, Artificial Sequence
  Description of Artificial Sequence: Synthetic oligonucleotide
  Sense strand starting at position 3434 of SEQ ID NO: 1244482
aagguuugauuugauaaag

SEQ ID NO: 1492015 - RNA, 19 nt, Artificial Sequence
  Description of Artificial Sequence: Synthetic oligonucleotide
  Antisense strand to SEQ ID NO: 1492014
cuuuaucaaaucaaaccuu

SEQ ID NO: 1492016 - RNA, 19 nt, Artificial Sequence
  Description of Artificial Sequence: Synthetic oligonucleotide
  Sense strand starting at position 3452 of SEQ ID NO: 1244482
gcuuuauuacuauauggca

SEQ ID NO: 1492017 - RNA, 19 nt, Artificial Sequence
  Description of Artificial Sequence: Synthetic oligonucleotide
  Antisense strand to SEQ ID NO: 1492016
ugccauauaguaauaaagc

SEQ ID NO: 1492018 - RNA, 19 nt, Artificial Sequence
  Description of Artificial Sequence: Synthetic oligonucleotide
  Sense strand starting at position 3562 of SEQ ID NO: 1244482
aaguguguugccuaauaaa

SEQ ID NO: 1492019 - RNA, 19 nt, Artificial Sequence
  Description of Artificial Sequence: Synthetic oligonucleotide
  Antisense strand to SEQ ID NO: 1492018
uuuauuaggcaacacacuu

SEQ ID NO: 1492020 - RNA, 19 nt, Artificial Sequence
  Description of Artificial Sequence: Synthetic oligonucleotide
  Sense strand starting at position 3606 of SEQ ID NO: 1244482
ugaauaugcugagauuuac

SEQ ID NO: 1492021 - RNA, 19 nt, Artificial Sequence
  Description of Artificial Sequence: Synthetic oligonucleotide
  Antisense strand to SEQ ID NO: 1492020
guaaaucucagcauauuca

SEQ ID NO: 1492022 - RNA, 19 nt, Artificial Sequence
  Description of Artificial Sequence: Synthetic oligonucleotide
  Sense strand starting at position 3719 of SEQ ID NO: 1244482
gaaggccuguucuugagaa

SEQ ID NO: 1492023 - RNA, 19 nt, Artificial Sequence
  Description of Artificial Sequence: Synthetic oligonucleotide
  Antisense strand to SEQ ID NO: 1492022
uucucaagaacaggccuuc

SEQ ID NO: 1492024 - RNA, 19 nt, Artificial Sequence
  Description of Artificial Sequence: Synthetic oligonucleotide
  Sense strand starting at position 3721 of SEQ ID NO: 1244482
aggccuguucuugagaagu

SEQ ID NO: 1492025 - RNA, 19 nt, Artificial Sequence
  Description of Artificial Sequence: Synthetic oligonucleotide
  Antisense strand to SEQ ID NO: 1492024
acuucucaagaacaggccu

SEQ ID NO: 1492026 - RNA, 19 nt, Artificial Sequence
  Description of Artificial Sequence: Synthetic oligonucleotide
  Sense strand starting at position 3731 of SEQ ID NO: 1244482
uugagaaguugccuuaaua

SEQ ID NO: 1492027 - RNA, 19 nt, Artificial Sequence
  Description of Artificial Sequence: Synthetic oligonucleotide
  Antisense strand to SEQ ID NO: 1492026
uauuaaggcaacuucucaa

SEQ ID NO: 1492028 - RNA, 19 nt, Artificial Sequence
  Description of Artificial Sequence: Synthetic oligonucleotide
  Sense strand starting at position 3825 of SEQ ID NO: 1244482
cauggaaauguugguuaaa

SEQ ID NO: 1492029 - RNA, 19 nt, Artificial Sequence
  Description of Artificial Sequence: Synthetic oligonucleotide
  Antisense strand to SEQ ID NO: 1492028
uuuaaccaacauuuccaug

SEQ ID NO: 1492030 - RNA, 19 nt, Artificial Sequence
  Description of Artificial Sequence: Synthetic oligonucleotide
  Sense strand starting at position 3858 of SEQ ID NO: 1244482
guuguaaauacaugguuua

SEQ ID NO: 1492031 - RNA, 19 nt, Artificial Sequence
  Description of Artificial Sequence: Synthetic oligonucleotide
  Antisense strand to SEQ ID NO: 1492030
uaaaccauguauuuacaac

SEQ ID NO: 1492032 - RNA, 19 nt, Artificial Sequence
  Description of Artificial Sequence: Synthetic oligonucleotide
  Sense strand starting at position 3865 of SEQ ID NO: 1244482
auacaugguuuagcugaaa

SEQ ID NO: 1492033 - RNA, 19 nt, Artificial Sequence
  Description of Artificial Sequence: Synthetic oligonucleotide
  Antisense strand to SEQ ID NO: 1492032
uuucagcuaaaccauguau

SEQ ID NO: 1492034 - RNA, 19 nt, Artificial Sequence
  Description of Artificial Sequence: Synthetic oligonucleotide
  Sense strand starting at position 3945 of SEQ ID NO: 1244482
gcuccugaauauucuuaga

SEQ ID NO: 1492035 - RNA, 19 nt, Artificial Sequence
  Description of Artificial Sequence: Synthetic oligonucleotide
  Antisense strand to SEQ ID NO: 1492034
ucuaagaauauucaggagc

SEQ ID NO: 1492036 - RNA, 19 nt, Artificial Sequence
  Description of Artificial Sequence: Synthetic oligonucleotide
  Sense strand starting at position 160 of SEQ ID NO: 1244483
ugugaacuucuugaucauc

SEQ ID NO: 1492037 - RNA, 19 nt, Artificial Sequence
  Description of Artificial Sequence: Synthetic oligonucleotide
  Antisense strand to SEQ ID NO: 1492036
gaugaucaagaaguucaca

SEQ ID NO: 1492038 - RNA, 19 nt, Artificial Sequence
  Description of Artificial Sequence: Synthetic oligonucleotide
  Sense strand starting at position 225 of SEQ ID NO: 1244483
uugagugaguaauccauca

SEQ ID NO: 1492039 - RNA, 19 nt, Artificial Sequence
  Description of Artificial Sequence: Synthetic oligonucleotide
  Antisense strand to SEQ ID NO: 1492038
ugauggauuacucacucaa

SEQ ID NO: 1492040 - RNA, 19 nt, Artificial Sequence
  Description of Artificial Sequence: Synthetic oligonucleotide
  Sense strand starting at position 307 of SEQ ID NO: 1244483
uguguucuggauuauguaa

SEQ ID NO: 1492041 - RNA, 19 nt, Artificial Sequence
  Description of Artificial Sequence: Synthetic oligonucleotide
  Antisense strand to SEQ ID NO: 1492040
uuacauaauccagaacaca

SEQ ID NO: 1492042 - RNA, 19 nt, Artificial Sequence
  Description of Artificial Sequence: Synthetic oligonucleotide
  Sense strand starting at position 479 of SEQ ID NO: 1244483
uuucuugaccuuggcaaua

SEQ ID NO: 1492043 - RNA, 19 nt, Artificial Sequence
  Description of Artificial Sequence: Synthetic oligonucleotide
  Antisense strand to SEQ ID NO: 1492042
uauugccaaggucaagaaa

SEQ ID NO: 1492044 - RNA, 19 nt, Artificial Sequence
  Description of Artificial Sequence: Synthetic oligonucleotide
  Sense strand starting at position 484 of SEQ ID NO: 1244483
ugaccuuggcaauauuaca

SEQ ID NO: 1492045 - RNA, 19 nt, Artificial Sequence
  Description of Artificial Sequence: Synthetic oligonucleotide
  Antisense strand to SEQ ID NO: 1492044
uguaauauugccaagguca

SEQ ID NO: 1492046 - RNA, 19 nt, Artificial Sequence
  Description of Artificial Sequence: Synthetic oligonucleotide
  Sense strand starting at position 652 of SEQ ID NO: 1244483
ucauuccugcaaugagaca

SEQ ID NO: 1492047 - RNA, 19 nt, Artificial Sequence
  Description of Artificial Sequence: Synthetic oligonucleotide
  Antisense strand to SEQ ID NO: 1492046
ugucucauugcaggaauga

SEQ ID NO: 1492048 - RNA, 19 nt, Artificial Sequence
  Description of Artificial Sequence: Synthetic oligonucleotide
  Sense strand starting at position 793 of SEQ ID NO: 1244483
gcaaccacauguuugacau

SEQ ID NO: 1492049 - RNA, 19 nt, Artificial Sequence
  Description of Artificial Sequence: Synthetic oligonucleotide
  Antisense strand to SEQ ID NO: 1492048
augucaaacaugugguugc

SEQ ID NO: 1492050 - RNA, 19 nt, Artificial Sequence
  Description of Artificial Sequence: Synthetic oligonucleotide
  Sense strand starting at position 963 of SEQ ID NO: 1244483
auaauauccugguccugua

SEQ ID NO: 1492051 - RNA, 19 nt, Artificial Sequence
  Description of Artificial Sequence: Synthetic oligonucleotide
  Antisense strand to SEQ ID NO: 1492050
uacaggaccaggauauuau

SEQ ID NO: 1492052 - RNA, 19 nt, Artificial Sequence
  Description of Artificial Sequence: Synthetic oligonucleotide
  Sense strand starting at position 1065 of SEQ ID NO: 1244483
gaugacaagccuuggauga

SEQ ID NO: 1492053 - RNA, 19 nt, Artificial Sequence
  Description of Artificial Sequence: Synthetic oligonucleotide
  Antisense strand to SEQ ID NO: 1492052
ucauccaaggcuugucauc

SEQ ID NO: 1492054 - RNA, 19 nt, Artificial Sequence
  Description of Artificial Sequence: Synthetic oligonucleotide
  Sense strand starting at position 1114 of SEQ ID NO: 1244483
auggcuaccugauuccaaa

SEQ ID NO: 1492055 - RNA, 19 nt, Artificial Sequence
  Description of Artificial Sequence: Synthetic oligonucleotide
  Antisense strand to SEQ ID NO: 1492054
uuuggaaucagguagccau

SEQ ID NO: 1492056 - RNA, 19 nt, Artificial Sequence
  Description of Artificial Sequence: Synthetic oligonucleotide
  Sense strand starting at position 1165 of SEQ ID NO: 1244483
cuuuacuccugccugaaga

SEQ ID NO: 1492057 - RNA, 19 nt, Artificial Sequence
  Description of Artificial Sequence: Synthetic oligonucleotide
  Antisense strand to SEQ ID NO: 1492056
ucuucaggcaggaguaaag

SEQ ID NO: 1492058 - RNA, 19 nt, Artificial Sequence
  Description of Artificial Sequence: Synthetic oligonucleotide
  Sense strand starting at position 1166 of SEQ ID NO: 1244483
uuuacuccugccugaagau

SEQ ID NO: 1492059 - RNA, 19 nt, Artificial Sequence
  Description of Artificial Sequence: Synthetic oligonucleotide
  Antisense strand to SEQ ID NO: 1492058
aucuucaggcaggaguaaa

SEQ ID NO: 1492060 - RNA, 19 nt, Artificial Sequence
  Description of Artificial Sequence: Synthetic oligonucleotide
  Sense strand starting at position 1167 of SEQ ID NO: 1244483
uuacuccugccugaagauu

SEQ ID NO: 1492061 - RNA, 19 nt, Artificial Sequence
  Description of Artificial Sequence: Synthetic oligonucleotide
  Antisense strand to SEQ ID NO: 1492060
aaucuucaggcaggaguaa

SEQ ID NO: 1492062 - RNA, 19 nt, Artificial Sequence
  Description of Artificial Sequence: Synthetic oligonucleotide
  Sense strand starting at position 2281 of SEQ ID NO: 1244483
guuugagugucucucauuu

SEQ ID NO: 1492063 - RNA, 19 nt, Artificial Sequence
  Description of Artificial Sequence: Synthetic oligonucleotide
  Antisense strand to SEQ ID NO: 1492062
aaaugagagacacucaaac

SEQ ID NO: 1492064 - RNA, 19 nt, Artificial Sequence
  Description of Artificial Sequence: Synthetic oligonucleotide
  Sense strand starting at position 2316 of SEQ ID NO: 1244483
uagagaaagucucuuuggu

SEQ ID NO: 1492065 - RNA, 19 nt, Artificial Sequence
  Description of Artificial Sequence: Synthetic oligonucleotide
  Antisense strand to SEQ ID NO: 1492064
accaaagagacuuucucua

SEQ ID NO: 1492066 - RNA, 19 nt, Artificial Sequence
  Description of Artificial Sequence: Synthetic oligonucleotide
  Sense strand starting at position 2318 of SEQ ID NO: 1244483
gagaaagucucuuugguag

SEQ ID NO: 1492067 - RNA, 19 nt, Artificial Sequence
  Description of Artificial Sequence: Synthetic oligonucleotide
  Antisense strand to SEQ ID NO: 1492066
cuaccaaagagacuuucuc

SEQ ID NO: 1492068 - RNA, 19 nt, Artificial Sequence
  Description of Artificial Sequence: Synthetic oligonucleotide
  Sense strand starting at position 2324 of SEQ ID NO: 1244483
gucucuuugguagacauga

SEQ ID NO: 1492069 - RNA, 19 nt, Artificial Sequence
  Description of Artificial Sequence: Synthetic oligonucleotide
  Antisense strand to SEQ ID NO: 1492068
ucaugucuaccaaagagac

SEQ ID NO: 1492070 - RNA, 19 nt, Artificial Sequence
  Description of Artificial Sequence: Synthetic oligonucleotide
  Sense strand starting at position 2386 of SEQ ID NO: 1244483
ggucaaaugccagaagugu

SEQ ID NO: 1492071 - RNA, 19 nt, Artificial Sequence
  Description of Artificial Sequence: Synthetic oligonucleotide
  Antisense strand to SEQ ID NO: 1492070
acacuucuggcauuugacc

SEQ ID NO: 1492072 - RNA, 19 nt, Artificial Sequence
  Description of Artificial Sequence: Synthetic oligonucleotide
  Sense strand starting at position 2660 of SEQ ID NO: 1244483
uuugaagucccuugaguaa

SEQ ID NO: 1492073 - RNA, 19 nt, Artificial Sequence
  Description of Artificial Sequence: Synthetic oligonucleotide
  Antisense strand to SEQ ID NO: 1492072
uuacucaagggacuucaaa

SEQ ID NO: 1492074 - RNA, 19 nt, Artificial Sequence
  Description of Artificial Sequence: Synthetic oligonucleotide
  Sense strand starting at position 2702 of SEQ ID NO: 1244483
uguacuaccugacuuugaa

SEQ ID NO: 1492075 - RNA, 19 nt, Artificial Sequence
  Description of Artificial Sequence: Synthetic oligonucleotide
  Antisense strand to SEQ ID NO: 1492074
uucaaagucagguaguaca

SEQ ID NO: 1492076 - RNA, 19 nt, Artificial Sequence
  Description of Artificial Sequence: Synthetic oligonucleotide
  Sense strand starting at position 2768 of SEQ ID NO: 1244483
gccaauaaacucuggaaac

SEQ ID NO: 1492077 - RNA, 19 nt, Artificial Sequence
  Description of Artificial Sequence: Synthetic oligonucleotide
  Antisense strand to SEQ ID NO: 1492076
guuuccagaguuuauuggc

SEQ ID NO: 1492078 - RNA, 19 nt, Artificial Sequence
  Description of Artificial Sequence: Synthetic oligonucleotide
  Sense strand starting at position 2781 of SEQ ID NO: 1244483
ggaaacucauguuuccuaa

SEQ ID NO: 1492079 - RNA, 19 nt, Artificial Sequence
  Description of Artificial Sequence: Synthetic oligonucleotide
  Antisense strand to SEQ ID NO: 1492078
uuaggaaacaugaguuucc

SEQ ID NO: 1492080 - RNA, 19 nt, Artificial Sequence
  Description of Artificial Sequence: Synthetic oligonucleotide
  Sense strand starting at position 2846 of SEQ ID NO: 1244483
gugguuggacaaggaauaa

SEQ ID NO: 1492081 - RNA, 19 nt, Artificial Sequence
  Description of Artificial Sequence: Synthetic oligonucleotide
  Antisense strand to SEQ ID NO: 1492080
uuauuccuuguccaaccac

SEQ ID NO: 1492082 - RNA, 19 nt, Artificial Sequence
  Description of Artificial Sequence: Synthetic oligonucleotide
  Sense strand starting at position 2998 of SEQ ID NO: 1244483
ucaggcaaaugaucacauu

SEQ ID NO: 1492083 - RNA, 19 nt, Artificial Sequence
  Description of Artificial Sequence: Synthetic oligonucleotide
  Antisense strand to SEQ ID NO: 1492082
aaugugaucauuugccuga

SEQ ID NO: 1492084 - RNA, 19 nt, Artificial Sequence
  Description of Artificial Sequence: Synthetic oligonucleotide
  Sense strand starting at position 3088 of SEQ ID NO: 1244483
gcuuuauagguguggaaag

SEQ ID NO: 1492085 - RNA, 19 nt, Artificial Sequence
  Description of Artificial Sequence: Synthetic oligonucleotide
  Antisense strand to SEQ ID NO: 1492084
cuuuccacaccuauaaagc

SEQ ID NO: 1492086 - RNA, 19 nt, Artificial Sequence
  Description of Artificial Sequence: Synthetic oligonucleotide
  Sense strand starting at position 3259 of SEQ ID NO: 1244483
aacuauuggcuaugaagua

SEQ ID NO: 1492087 - RNA, 19 nt, Artificial Sequence
  Description of Artificial Sequence: Synthetic oligonucleotide
  Antisense strand to SEQ ID NO: 1492086
uacuucauagccaauaguu

SEQ ID NO: 1492088 - RNA, 19 nt, Artificial Sequence
  Description of Artificial Sequence: Synthetic oligonucleotide
  Sense strand starting at position 3308 of SEQ ID NO: 1244483
aagguuugauuugauaaag

SEQ ID NO: 1492089 - RNA, 19 nt, Artificial Sequence
  Description of Artificial Sequence: Synthetic oligonucleotide
  Antisense strand to SEQ ID NO: 1492088
cuuuaucaaaucaaaccuu

SEQ ID NO: 1492090 - RNA, 19 nt, Artificial Sequence
  Description of Artificial Sequence: Synthetic oligonucleotide
  Sense strand starting at position 3326 of SEQ ID NO: 1244483
gcuuuauuacuauauggca

SEQ ID NO: 1492091 - RNA, 19 nt, Artificial Sequence
  Description of Artificial Sequence: Synthetic oligonucleotide
  Antisense strand to SEQ ID NO: 1492090
ugccauauaguaauaaagc

SEQ ID NO: 1492092 - RNA, 19 nt, Artificial Sequence
  Description of Artificial Sequence: Synthetic oligonucleotide
  Sense strand starting at position 3436 of SEQ ID NO: 1244483
aaguguguugccuaauaaa

SEQ ID NO: 1492093 - RNA, 19 nt, Artificial Sequence
  Description of Artificial Sequence: Synthetic oligonucleotide
  Antisense strand to SEQ ID NO: 1492092
uuuauuaggcaacacacuu

SEQ ID NO: 1492094 - RNA, 19 nt, Artificial Sequence
  Description of Artificial Sequence: Synthetic oligonucleotide
  Sense strand starting at position 3480 of SEQ ID NO: 1244483
ugaauaugcugagauuuac

SEQ ID NO: 1492095 - RNA, 19 nt, Artificial Sequence
  Description of Artificial Sequence: Synthetic oligonucleotide
  Antisense strand to SEQ ID NO: 1492094
guaaaucucagcauauuca

SEQ ID NO: 1492096 - RNA, 19 nt, Artificial Sequence
  Description of Artificial Sequence: Synthetic oligonucleotide
  Sense strand starting at position 3593 of SEQ ID NO: 1244483
gaaggccuguucuugagaa

SEQ ID NO: 1492097 - RNA, 19 nt, Artificial Sequence
  Description of Artificial Sequence: Synthetic oligonucleotide
  Antisense strand to SEQ ID NO: 1492096
uucucaagaacaggccuuc

SEQ ID NO: 1492098 - RNA, 19 nt, Artificial Sequence
  Description of Artificial Sequence: Synthetic oligonucleotide
  Sense strand starting at position 3595 of SEQ ID NO: 1244483
aggccuguucuugagaagu

SEQ ID NO: 1492099 - RNA, 19 nt, Artificial Sequence
  Description of Artificial Sequence: Synthetic oligonucleotide
  Antisense strand to SEQ ID NO: 1492098
acuucucaagaacaggccu

SEQ ID NO: 1492100 - RNA, 19 nt, Artificial Sequence
  Description of Artificial Sequence: Synthetic oligonucleotide
  Sense strand starting at position 3605 of SEQ ID NO: 1244483
uugagaaguugccuuaaua

SEQ ID NO: 1492101 - RNA, 19 nt, Artificial Sequence
  Description of Artificial Sequence: Synthetic oligonucleotide
  Antisense strand to SEQ ID NO: 1492100
uauuaaggcaacuucucaa

SEQ ID NO: 1492102 - RNA, 19 nt, Artificial Sequence
  Description of Artificial Sequence: Synthetic oligonucleotide
  Sense strand starting at position 3699 of SEQ ID NO: 1244483
cauggaaauguugguuaaa

SEQ ID NO: 1492103 - RNA, 19 nt, Artificial Sequence
  Description of Artificial Sequence: Synthetic oligonucleotide
  Antisense strand to SEQ ID NO: 1492102
uuuaaccaacauuuccaug

SEQ ID NO: 1492104 - RNA, 19 nt, Artificial Sequence
  Description of Artificial Sequence: Synthetic oligonucleotide
  Sense strand starting at position 3732 of SEQ ID NO: 1244483
guuguaaauacaugguuua

SEQ ID NO: 1492105 - RNA, 19 nt, Artificial Sequence
  Description of Artificial Sequence: Synthetic oligonucleotide
  Antisense strand to SEQ ID NO: 1492104
uaaaccauguauuuacaac

SEQ ID NO: 1492106 - RNA, 19 nt, Artificial Sequence
  Description of Artificial Sequence: Synthetic oligonucleotide
  Sense strand starting at position 3739 of SEQ ID NO: 1244483
auacaugguuuagcugaaa

SEQ ID NO: 1492107 - RNA, 19 nt, Artificial Sequence
  Description of Artificial Sequence: Synthetic oligonucleotide
  Antisense strand to SEQ ID NO: 1492106
uuucagcuaaaccauguau

SEQ ID NO: 1492108 - RNA, 19 nt, Artificial Sequence
  Description of Artificial Sequence: Synthetic oligonucleotide
  Sense strand starting at position 3819 of SEQ ID NO: 1244483
gcuccugaauauucuuaga

SEQ ID NO: 1492109 - RNA, 19 nt, Artificial Sequence
  Description of Artificial Sequence: Synthetic oligonucleotide
  Antisense strand to SEQ ID NO: 1492108
ucuaagaauauucaggagc

SEQ ID NO: 1492110 - RNA, 19 nt, Artificial Sequence
  Description of Artificial Sequence: Synthetic oligonucleotide
  Sense strand starting at position 3872 of SEQ ID NO: 1244483
aguguuucccaguggagga

SEQ ID NO: 1492111 - RNA, 19 nt, Artificial Sequence
  Description of Artificial Sequence: Synthetic oligonucleotide
  Antisense strand to SEQ ID NO: 1492110
uccuccacugggaaacacu

SEQ ID NO: 1492112 - RNA, 19 nt, Artificial Sequence
  Description of Artificial Sequence: Synthetic oligonucleotide
  Sense strand starting at position 3895 of SEQ ID NO: 1244483
ccauuagggaaauguuuga

SEQ ID NO: 1492113 - RNA, 19 nt, Artificial Sequence
  Description of Artificial Sequence: Synthetic oligonucleotide
  Antisense strand to SEQ ID NO: 1492112
ucaaacauuucccuaaugg

SEQ ID NO: 1492114 - RNA, 19 nt, Artificial Sequence
  Description of Artificial Sequence: Synthetic oligonucleotide
  Sense strand starting at position 3902 of SEQ ID NO: 1244483
ggaaauguuugaccucacu

SEQ ID NO: 1492115 - RNA, 19 nt, Artificial Sequence
  Description of Artificial Sequence: Synthetic oligonucleotide
  Antisense strand to SEQ ID NO: 1492114
agugaggucaaacauuucc

SEQ ID NO: 1492116 - RNA, 19 nt, Artificial Sequence
  Description of Artificial Sequence: Synthetic oligonucleotide
  Sense strand starting at position 21 of SEQ ID NO: 1244484
ggccaucugugcuuaccau

SEQ ID NO: 1492117 - RNA, 19 nt, Artificial Sequence
  Description of Artificial Sequence: Synthetic oligonucleotide
  Antisense strand to SEQ ID NO: 1492116
augguaagcacagauggcc

SEQ ID NO: 1492118 - RNA, 19 nt, Artificial Sequence
  Description of Artificial Sequence: Synthetic oligonucleotide
  Sense strand starting at position 55 of SEQ ID NO: 1244484
cgaugagguagucacccau

SEQ ID NO: 1492119 - RNA, 19 nt, Artificial Sequence
  Description of Artificial Sequence: Synthetic oligonucleotide
  Antisense strand to SEQ ID NO: 1492118
augggugacuaccucaucg

SEQ ID NO: 1492120 - RNA, 19 nt, Artificial Sequence
  Description of Artificial Sequence: Synthetic oligonucleotide
  Sense strand starting at position 104 of SEQ ID NO: 1244484
gccguaaugcaccauguca

SEQ ID NO: 1492121 - RNA, 19 nt, Artificial Sequence
  Description of Artificial Sequence: Synthetic oligonucleotide
  Antisense strand to SEQ ID NO: 1492120
ugacauggugcauuacggc

SEQ ID NO: 1492122 - RNA, 19 nt, Artificial Sequence
  Description of Artificial Sequence: Synthetic oligonucleotide
  Sense strand starting at position 106 of SEQ ID NO: 1244484
cguaaugcaccaugucaua

SEQ ID NO: 1492123 - RNA, 19 nt, Artificial Sequence
  Description of Artificial Sequence: Synthetic oligonucleotide
  Antisense strand to SEQ ID NO: 1492122
uaugacauggugcauuacg

SEQ ID NO: 1492124 - RNA, 19 nt, Artificial Sequence
  Description of Artificial Sequence: Synthetic oligonucleotide
  Sense strand starting at position 118 of SEQ ID NO: 1244484
ugucauagcuguggagaca

SEQ ID NO: 1492125 - RNA, 19 nt, Artificial Sequence
  Description of Artificial Sequence: Synthetic oligonucleotide
  Antisense strand to SEQ ID NO: 1492124
ugucuccacagcuaugaca

SEQ ID NO: 1492126 - RNA, 19 nt, Artificial Sequence
  Description of Artificial Sequence: Synthetic oligonucleotide
  Sense strand starting at position 223 of SEQ ID NO: 1244484
uaggaagcgcucugagaag

SEQ ID NO: 1492127 - RNA, 19 nt, Artificial Sequence
  Description of Artificial Sequence: Synthetic oligonucleotide
  Antisense strand to SEQ ID NO: 1492126
cuucucagagcgcuuccua

SEQ ID NO: 1492128 - RNA, 19 nt, Artificial Sequence
  Description of Artificial Sequence: Synthetic oligonucleotide
  Sense strand starting at position 263 of SEQ ID NO: 1244484
cugggauucggaggaugua

SEQ ID NO: 1492129 - RNA, 19 nt, Artificial Sequence
  Description of Artificial Sequence: Synthetic oligonucleotide
  Antisense strand to SEQ ID NO: 1492128
uacauccuccgaaucccag

SEQ ID NO: 1492130 - RNA, 19 nt, Artificial Sequence
  Description of Artificial Sequence: Synthetic oligonucleotide
  Sense strand starting at position 517 of SEQ ID NO: 1244484
aggguuggauccuagacua

SEQ ID NO: 1492131 - RNA, 19 nt, Artificial Sequence
  Description of Artificial Sequence: Synthetic oligonucleotide
  Antisense strand to SEQ ID NO: 1492130
uagucuaggauccaacccu

SEQ ID NO: 1492132 - RNA, 19 nt, Artificial Sequence
  Description of Artificial Sequence: Synthetic oligonucleotide
  Sense strand starting at position 527 of SEQ ID NO: 1244484
ccuagacuaccuugagaca

SEQ ID NO: 1492133 - RNA, 19 nt, Artificial Sequence
  Description of Artificial Sequence: Synthetic oligonucleotide
  Antisense strand to SEQ ID NO: 1492132
ugucucaagguagucuagg

SEQ ID NO: 1492134 - RNA, 19 nt, Artificial Sequence
  Description of Artificial Sequence: Synthetic oligonucleotide
  Sense strand starting at position 601 of SEQ ID NO: 1244484
gggaaucacuggcccugaa

SEQ ID NO: 1492135 - RNA, 19 nt, Artificial Sequence
  Description of Artificial Sequence: Synthetic oligonucleotide
  Antisense strand to SEQ ID NO: 1492134
uucagggccagugauuccc

SEQ ID NO: 1492136 - RNA, 19 nt, Artificial Sequence
  Description of Artificial Sequence: Synthetic oligonucleotide
  Sense strand starting at position 964 of SEQ ID NO: 1244484
ggcagacaugcuggguaaa

SEQ ID NO: 1492137 - RNA, 19 nt, Artificial Sequence
  Description of Artificial Sequence: Synthetic oligonucleotide
  Antisense strand to SEQ ID NO: 1492136
uuuacccagcaugucugcc

SEQ ID NO: 1492138 - RNA, 19 nt, Artificial Sequence
  Description of Artificial Sequence: Synthetic oligonucleotide
  Sense strand starting at position 1090 of SEQ ID NO: 1244484
gucaaaguccacugacaca

SEQ ID NO: 1492139 - RNA, 19 nt, Artificial Sequence
  Description of Artificial Sequence: Synthetic oligonucleotide
  Antisense strand to SEQ ID NO: 1492138
ugugucaguggacuuugac

SEQ ID NO: 1492140 - RNA, 19 nt, Artificial Sequence
  Description of Artificial Sequence: Synthetic oligonucleotide
  Sense strand starting at position 1193 of SEQ ID NO: 1244484
ggcgcuugcuuccuggauu

SEQ ID NO: 1492141 - RNA, 19 nt, Artificial Sequence
  Description of Artificial Sequence: Synthetic oligonucleotide
  Antisense strand to SEQ ID NO: 1492140
aauccaggaagcaagcgcc

SEQ ID NO: 1492142 - RNA, 19 nt, Artificial Sequence
  Description of Artificial Sequence: Synthetic oligonucleotide
  Sense strand starting at position 1196 of SEQ ID NO: 1244484
gcuugcuuccuggauucca

SEQ ID NO: 1492143 - RNA, 19 nt, Artificial Sequence
  Description of Artificial Sequence: Synthetic oligonucleotide
  Antisense strand to SEQ ID NO: 1492142
uggaauccaggaagcaagc

SEQ ID NO: 1492144 - RNA, 19 nt, Artificial Sequence
  Description of Artificial Sequence: Synthetic oligonucleotide
  Sense strand starting at position 1241 of SEQ ID NO: 1244484
gguagcaaauuaucaguaa

SEQ ID NO: 1492145 - RNA, 19 nt, Artificial Sequence
  Description of Artificial Sequence: Synthetic oligonucleotide
  Antisense strand to SEQ ID NO: 1492144
uuacugauaauuugcuacc

SEQ ID NO: 1492146 - RNA, 19 nt, Artificial Sequence
  Description of Artificial Sequence: Synthetic oligonucleotide
  Sense strand starting at position 1242 of SEQ ID NO: 1244484
guagcaaauuaucaguaac

SEQ ID NO: 1492147 - RNA, 19 nt, Artificial Sequence
  Description of Artificial Sequence: Synthetic oligonucleotide
  Antisense strand to SEQ ID NO: 1492146
guuacugauaauuugcuac

SEQ ID NO: 1492148 - RNA, 19 nt, Artificial Sequence
  Description of Artificial Sequence: Synthetic oligonucleotide
  Sense strand starting at position 1245 of SEQ ID NO: 1244484
gcaaauuaucaguaacggu

SEQ ID NO: 1492149 - RNA, 19 nt, Artificial Sequence
  Description of Artificial Sequence: Synthetic oligonucleotide
  Antisense strand to SEQ ID NO: 1492148
accguuacugauaauuugc

SEQ ID NO: 1492150 - RNA, 19 nt, Artificial Sequence
  Description of Artificial Sequence: Synthetic oligonucleotide
  Sense strand starting at position 1279 of SEQ ID NO: 1244484
uguugacaacccgaaacuu

SEQ ID NO: 1492151 - RNA, 19 nt, Artificial Sequence
  Description of Artificial Sequence: Synthetic oligonucleotide
  Antisense strand to SEQ ID NO: 1492150
aaguuucggguugucaaca

SEQ ID NO: 1492152 - RNA, 19 nt, Artificial Sequence
  Description of Artificial Sequence: Synthetic oligonucleotide
  Sense strand starting at position 2467 of SEQ ID NO: 1244484
ugcagaaacguuuaauaga

SEQ ID NO: 1492153 - RNA, 19 nt, Artificial Sequence
  Description of Artificial Sequence: Synthetic oligonucleotide
  Antisense strand to SEQ ID NO: 1492152
ucuauuaaacguuucugca

SEQ ID NO: 1492154 - RNA, 19 nt, Artificial Sequence
  Description of Artificial Sequence: Synthetic oligonucleotide
  Sense strand starting at position 2545 of SEQ ID NO: 1244484
cagagaggauucuauaaag

SEQ ID NO: 1492155 - RNA, 19 nt, Artificial Sequence
  Description of Artificial Sequence: Synthetic oligonucleotide
  Antisense strand to SEQ ID NO: 1492154
cuuuauagaauccucucug

SEQ ID NO: 1492156 - RNA, 19 nt, Artificial Sequence
  Description of Artificial Sequence: Synthetic oligonucleotide
  Sense strand starting at position 2666 of SEQ ID NO: 1244484
gcugaaauaacccgaguuc

SEQ ID NO: 1492157 - RNA, 19 nt, Artificial Sequence
  Description of Artificial Sequence: Synthetic oligonucleotide
  Antisense strand to SEQ ID NO: 1492156
gaacucggguuauuucagc

SEQ ID NO: 1492158 - RNA, 19 nt, Artificial Sequence
  Description of Artificial Sequence: Synthetic oligonucleotide
  Sense strand starting at position 2678 of SEQ ID NO: 1244484
cgaguuccguucucacaga

SEQ ID NO: 1492159 - RNA, 19 nt, Artificial Sequence
  Description of Artificial Sequence: Synthetic oligonucleotide
  Antisense strand to SEQ ID NO: 1492158
ucugugagaacggaacucg

SEQ ID NO: 1492160 - RNA, 19 nt, Artificial Sequence
  Description of Artificial Sequence: Synthetic oligonucleotide
  Sense strand starting at position 2679 of SEQ ID NO: 1244484
gaguuccguucucacagaa

SEQ ID NO: 1492161 - RNA, 19 nt, Artificial Sequence
  Description of Artificial Sequence: Synthetic oligonucleotide
  Antisense strand to SEQ ID NO: 1492160
uucugugagaacggaacuc

SEQ ID NO: 1492162 - RNA, 19 nt, Artificial Sequence
  Description of Artificial Sequence: Synthetic oligonucleotide
  Sense strand starting at position 2683 of SEQ ID NO: 1244484
uccguucucacagaaaggu

SEQ ID NO: 1492163 - RNA, 19 nt, Artificial Sequence
  Description of Artificial Sequence: Synthetic oligonucleotide
  Antisense strand to SEQ ID NO: 1492162
accuuucugugagaacgga

SEQ ID NO: 1492164 - RNA, 19 nt, Artificial Sequence
  Description of Artificial Sequence: Synthetic oligonucleotide
  Sense strand starting at position 2789 of SEQ ID NO: 1244484
gggcuuccucaaggacaaa

SEQ ID NO: 1492165 - RNA, 19 nt, Artificial Sequence
  Description of Artificial Sequence: Synthetic oligonucleotide
  Antisense strand to SEQ ID NO: 1492164
uuuguccuugaggaagccc

SEQ ID NO: 1492166 - RNA, 19 nt, Artificial Sequence
  Description of Artificial Sequence: Synthetic oligonucleotide
  Sense strand starting at position 2844 of SEQ ID NO: 1244484
agaguucguucucccuaga

SEQ ID NO: 1492167 - RNA, 19 nt, Artificial Sequence
  Description of Artificial Sequence: Synthetic oligonucleotide
  Antisense strand to SEQ ID NO: 1492166
ucuagggagaacgaacucu

SEQ ID NO: 1492168 - RNA, 19 nt, Artificial Sequence
  Description of Artificial Sequence: Synthetic oligonucleotide
  Sense strand starting at position 2922 of SEQ ID NO: 1244484
cuucaucgagcacgugauu

SEQ ID NO: 1492169 - RNA, 19 nt, Artificial Sequence
  Description of Artificial Sequence: Synthetic oligonucleotide
  Antisense strand to SEQ ID NO: 1492168
aaucacgugcucgaugaag

SEQ ID NO: 1492170 - RNA, 19 nt, Artificial Sequence
  Description of Artificial Sequence: Synthetic oligonucleotide
  Sense strand starting at position 2931 of SEQ ID NO: 1244484
gcacgugauuacgucacuu

SEQ ID NO: 1492171 - RNA, 19 nt, Artificial Sequence
  Description of Artificial Sequence: Synthetic oligonucleotide
  Antisense strand to SEQ ID NO: 1492170
aagugacguaaucacgugc

SEQ ID NO: 1492172 - RNA, 19 nt, Artificial Sequence
  Description of Artificial Sequence: Synthetic oligonucleotide
  Sense strand starting at position 2933 of SEQ ID NO: 1244484
acgugauuacgucacuuuc

SEQ ID NO: 1492173 - RNA, 19 nt, Artificial Sequence
  Description of Artificial Sequence: Synthetic oligonucleotide
  Antisense strand to SEQ ID NO: 1492172
gaaagugacguaaucacgu

SEQ ID NO: 1492174 - RNA, 19 nt, Artificial Sequence
  Description of Artificial Sequence: Synthetic oligonucleotide
  Sense strand starting at position 2935 of SEQ ID NO: 1244484
gugauuacgucacuuucuu

SEQ ID NO: 1492175 - RNA, 19 nt, Artificial Sequence
  Description of Artificial Sequence: Synthetic oligonucleotide
  Antisense strand to SEQ ID NO: 1492174
aagaaagugacguaaucac

SEQ ID NO: 1492176 - RNA, 19 nt, Artificial Sequence
  Description of Artificial Sequence: Synthetic oligonucleotide
  Sense strand starting at position 3104 of SEQ ID NO: 1244484
gggagucgccagugagaaa

SEQ ID NO: 1492177 - RNA, 19 nt, Artificial Sequence
  Description of Artificial Sequence: Synthetic oligonucleotide
  Antisense strand to SEQ ID NO: 1492176
uuucucacuggcgacuccc

SEQ ID NO: 1492178 - RNA, 19 nt, Artificial Sequence
  Description of Artificial Sequence: Synthetic oligonucleotide
  Sense strand starting at position 3361 of SEQ ID NO: 1244484
cuagcucggucuccucaaa

SEQ ID NO: 1492179 - RNA, 19 nt, Artificial Sequence
  Description of Artificial Sequence: Synthetic oligonucleotide
  Antisense strand to SEQ ID NO: 1492178
uuugaggagaccgagcuag

SEQ ID NO: 1492180 - RNA, 19 nt, Artificial Sequence
  Description of Artificial Sequence: Synthetic oligonucleotide
  Sense strand starting at position 3460 of SEQ ID NO: 1244484
agggaugagucacuagcaa

SEQ ID NO: 1492181 - RNA, 19 nt, Artificial Sequence
  Description of Artificial Sequence: Synthetic oligonucleotide
  Antisense strand to SEQ ID NO: 1492180
uugcuagugacucaucccu

SEQ ID NO: 1492182 - RNA, 19 nt, Artificial Sequence
  Description of Artificial Sequence: Synthetic oligonucleotide
  Sense strand starting at position 3583 of SEQ ID NO: 1244484
aaagcaugugucugacgga

SEQ ID NO: 1492183 - RNA, 19 nt, Artificial Sequence
  Description of Artificial Sequence: Synthetic oligonucleotide
  Antisense strand to SEQ ID NO: 1492182
uccgucagacacaugcuuu

SEQ ID NO: 1492184 - RNA, 19 nt, Artificial Sequence
  Description of Artificial Sequence: Synthetic oligonucleotide
  Sense strand starting at position 3632 of SEQ ID NO: 1244484
acagauacgcacugauaag

SEQ ID NO: 1492185 - RNA, 19 nt, Artificial Sequence
  Description of Artificial Sequence: Synthetic oligonucleotide
  Antisense strand to SEQ ID NO: 1492184
cuuaucagugcguaucugu

SEQ ID NO: 1492186 - RNA, 19 nt, Artificial Sequence
  Description of Artificial Sequence: Synthetic oligonucleotide
  Sense strand starting at position 3899 of SEQ ID NO: 1244484
ggcacaguuuguuuaagcu

SEQ ID NO: 1492187 - RNA, 19 nt, Artificial Sequence
  Description of Artificial Sequence: Synthetic oligonucleotide
  Antisense strand to SEQ ID NO: 1492186
agcuuaaacaaacugugcc

SEQ ID NO: 1492188 - RNA, 19 nt, Artificial Sequence
  Description of Artificial Sequence: Synthetic oligonucleotide
  Sense strand starting at position 3908 of SEQ ID NO: 1244484
uguuuaagcuuucccaaag

SEQ ID NO: 1492189 - RNA, 19 nt, Artificial Sequence
  Description of Artificial Sequence: Synthetic oligonucleotide
  Antisense strand to SEQ ID NO: 1492188
cuuugggaaagcuuaaaca

SEQ ID NO: 1492190 - RNA, 19 nt, Artificial Sequence
  Description of Artificial Sequence: Synthetic oligonucleotide
  Sense strand starting at position 3909 of SEQ ID NO: 1244484
guuuaagcuuucccaaagu

SEQ ID NO: 1492191 - RNA, 19 nt, Artificial Sequence
  Description of Artificial Sequence: Synthetic oligonucleotide
  Antisense strand to SEQ ID NO: 1492190
acuuugggaaagcuuaaac

SEQ ID NO: 1492192 - RNA, 19 nt, Artificial Sequence
  Description of Artificial Sequence: Synthetic oligonucleotide
  Sense strand starting at position 3948 of SEQ ID NO: 1244484
gcacacagauucugucuga

SEQ ID NO: 1492193 - RNA, 19 nt, Artificial Sequence
  Description of Artificial Sequence: Synthetic oligonucleotide
  Antisense strand to SEQ ID NO: 1492192
ucagacagaaucugugugc

SEQ ID NO: 1492194 - RNA, 19 nt, Artificial Sequence
  Description of Artificial Sequence: Synthetic oligonucleotide
  Sense strand starting at position 3953 of SEQ ID NO: 1244484
cagauucugucugaccaga

SEQ ID NO: 1492195 - RNA, 19 nt, Artificial Sequence
  Description of Artificial Sequence: Synthetic oligonucleotide
  Antisense strand to SEQ ID NO: 1492194
ucuggucagacagaaucug

SEQ ID NO: 1492196 - RNA, 19 nt, Artificial Sequence
  Description of Artificial Sequence: Synthetic oligonucleotide
  Sense strand starting at position 259 of SEQ ID NO: 1244485
ggccaucugugcuuaccau

SEQ ID NO: 1492197 - RNA, 19 nt, Artificial Sequence
  Description of Artificial Sequence: Synthetic oligonucleotide
  Antisense strand to SEQ ID NO: 1492196
augguaagcacagauggcc

SEQ ID NO: 1492198 - RNA, 19 nt, Artificial Sequence
  Description of Artificial Sequence: Synthetic oligonucleotide
  Sense strand starting at position 293 of SEQ ID NO: 1244485
cgaugagguagucacccau

SEQ ID NO: 1492199 - RNA, 19 nt, Artificial Sequence
  Description of Artificial Sequence: Synthetic oligonucleotide
  Antisense strand to SEQ ID NO: 1492198
augggugacuaccucaucg

SEQ ID NO: 1492200 - RNA, 19 nt, Artificial Sequence
  Description of Artificial Sequence: Synthetic oligonucleotide
  Sense strand starting at position 342 of SEQ ID NO: 1244485
gccguaaugcaccauguca

SEQ ID NO: 1492201 - RNA, 19 nt, Artificial Sequence
  Description of Artificial Sequence: Synthetic oligonucleotide
  Antisense strand to SEQ ID NO: 1492200
ugacauggugcauuacggc

SEQ ID NO: 1492202 - RNA, 19 nt, Artificial Sequence
  Description of Artificial Sequence: Synthetic oligonucleotide
  Sense strand starting at position 344 of SEQ ID NO: 1244485
cguaaugcaccaugucaua

SEQ ID NO: 1492203 - RNA, 19 nt, Artificial Sequence
  Description of Artificial Sequence: Synthetic oligonucleotide
  Antisense strand to SEQ ID NO: 1492202
uaugacauggugcauuacg

SEQ ID NO: 1492204 - RNA, 19 nt, Artificial Sequence
  Description of Artificial Sequence: Synthetic oligonucleotide
  Sense strand starting at position 356 of SEQ ID NO: 1244485
ugucauagcuguggagaca

SEQ ID NO: 1492205 - RNA, 19 nt, Artificial Sequence
  Description of Artificial Sequence: Synthetic oligonucleotide
  Antisense strand to SEQ ID NO: 1492204
ugucuccacagcuaugaca

SEQ ID NO: 1492206 - RNA, 19 nt, Artificial Sequence
  Description of Artificial Sequence: Synthetic oligonucleotide
  Sense strand starting at position 461 of SEQ ID NO: 1244485
uaggaagcgcucugagaag

SEQ ID NO: 1492207 - RNA, 19 nt, Artificial Sequence
  Description of Artificial Sequence: Synthetic oligonucleotide
  Antisense strand to SEQ ID NO: 1492206
cuucucagagcgcuuccua

SEQ ID NO: 1492208 - RNA, 19 nt, Artificial Sequence
  Description of Artificial Sequence: Synthetic oligonucleotide
  Sense strand starting at position 501 of SEQ ID NO: 1244485
cugggauucggaggaugua

SEQ ID NO: 1492209 - RNA, 19 nt, Artificial Sequence
  Description of Artificial Sequence: Synthetic oligonucleotide
  Antisense strand to SEQ ID NO: 1492208
uacauccuccgaaucccag

SEQ ID NO: 1492210 - RNA, 19 nt, Artificial Sequence
  Description of Artificial Sequence: Synthetic oligonucleotide
  Sense strand starting at position 755 of SEQ ID NO: 1244485
aggguuggauccuagacua

SEQ ID NO: 1492211 - RNA, 19 nt, Artificial Sequence
  Description of Artificial Sequence: Synthetic oligonucleotide
  Antisense strand to SEQ ID NO: 1492210
uagucuaggauccaacccu

SEQ ID NO: 1492212 - RNA, 19 nt, Artificial Sequence
  Description of Artificial Sequence: Synthetic oligonucleotide
  Sense strand starting at position 765 of SEQ ID NO: 1244485
ccuagacuaccuugagaca

SEQ ID NO: 1492213 - RNA, 19 nt, Artificial Sequence
  Description of Artificial Sequence: Synthetic oligonucleotide
  Antisense strand to SEQ ID NO: 1492212
ugucucaagguagucuagg

SEQ ID NO: 1492214 - RNA, 19 nt, Artificial Sequence
  Description of Artificial Sequence: Synthetic oligonucleotide
  Sense strand starting at position 839 of SEQ ID NO: 1244485
gggaaucacuggcccugaa

SEQ ID NO: 1492215 - RNA, 19 nt, Artificial Sequence
  Description of Artificial Sequence: Synthetic oligonucleotide
  Antisense strand to SEQ ID NO: 1492214
uucagggccagugauuccc

SEQ ID NO: 1492216 - RNA, 19 nt, Artificial Sequence
  Description of Artificial Sequence: Synthetic oligonucleotide
  Sense strand starting at position 1202 of SEQ ID NO: 1244485
ggcagacaugcuggguaaa

SEQ ID NO: 1492217 - RNA, 19 nt, Artificial Sequence
  Description of Artificial Sequence: Synthetic oligonucleotide
  Antisense strand to SEQ ID NO: 1492216
uuuacccagcaugucugcc

SEQ ID NO: 1492218 - RNA, 19 nt, Artificial Sequence
  Description of Artificial Sequence: Synthetic oligonucleotide
  Sense strand starting at position 1328 of SEQ ID NO: 1244485
gucaaaguccacugacaca

SEQ ID NO: 1492219 - RNA, 19 nt, Artificial Sequence
  Description of Artificial Sequence: Synthetic oligonucleotide
  Antisense strand to SEQ ID NO: 1492218
ugugucaguggacuuugac

SEQ ID NO: 1492220 - RNA, 19 nt, Artificial Sequence
  Description of Artificial Sequence: Synthetic oligonucleotide
  Sense strand starting at position 1431 of SEQ ID NO: 1244485
ggcgcuugcuuccuggauu

SEQ ID NO: 1492221 - RNA, 19 nt, Artificial Sequence
  Description of Artificial Sequence: Synthetic oligonucleotide
  Antisense strand to SEQ ID NO: 1492220
aauccaggaagcaagcgcc

SEQ ID NO: 1492222 - RNA, 19 nt, Artificial Sequence
  Description of Artificial Sequence: Synthetic oligonucleotide
  Sense strand starting at position 1434 of SEQ ID NO: 1244485
gcuugcuuccuggauucca

SEQ ID NO: 1492223 - RNA, 19 nt, Artificial Sequence
  Description of Artificial Sequence: Synthetic oligonucleotide
  Antisense strand to SEQ ID NO: 1492222
uggaauccaggaagcaagc

SEQ ID NO: 1492224 - RNA, 19 nt, Artificial Sequence
  Description of Artificial Sequence: Synthetic oligonucleotide
  Sense strand starting at position 1479 of SEQ ID NO: 1244485
gguagcaaauuaucaguaa

SEQ ID NO: 1492225 - RNA, 19 nt, Artificial Sequence
  Description of Artificial Sequence: Synthetic oligonucleotide
  Antisense strand to SEQ ID NO: 1492224
uuacugauaauuugcuacc

SEQ ID NO: 1492226 - RNA, 19 nt, Artificial Sequence
  Description of Artificial Sequence: Synthetic oligonucleotide
  Sense strand starting at position 1480 of SEQ ID NO: 1244485
guagcaaauuaucaguaac

SEQ ID NO: 1492227 - RNA, 19 nt, Artificial Sequence
  Description of Artificial Sequence: Synthetic oligonucleotide
  Antisense strand to SEQ ID NO: 1492226
guuacugauaauuugcuac

SEQ ID NO: 1492228 - RNA, 19 nt, Artificial Sequence
  Description of Artificial Sequence: Synthetic oligonucleotide
  Sense strand starting at position 1483 of SEQ ID NO: 1244485
gcaaauuaucaguaacggu

SEQ ID NO: 1492229 - RNA, 19 nt, Artificial Sequence
  Description of Artificial Sequence: Synthetic oligonucleotide
  Antisense strand to SEQ ID NO: 1492228
accguuacugauaauuugc

SEQ ID NO: 1492230 - RNA, 19 nt, Artificial Sequence
  Description of Artificial Sequence: Synthetic oligonucleotide
  Sense strand starting at position 1517 of SEQ ID NO: 1244485
uguugacaacccgaaacuu

SEQ ID NO: 1492231 - RNA, 19 nt, Artificial Sequence
  Description of Artificial Sequence: Synthetic oligonucleotide
  Antisense strand to SEQ ID NO: 1492230
aaguuucggguugucaaca

SEQ ID NO: 1492232 - RNA, 19 nt, Artificial Sequence
  Description of Artificial Sequence: Synthetic oligonucleotide
  Sense strand starting at position 2705 of SEQ ID NO: 1244485
ugcagaaacguuuaauaga

SEQ ID NO: 1492233 - RNA, 19 nt, Artificial Sequence
  Description of Artificial Sequence: Synthetic oligonucleotide
  Antisense strand to SEQ ID NO: 1492232
ucuauuaaacguuucugca

SEQ ID NO: 1492234 - RNA, 19 nt, Artificial Sequence
  Description of Artificial Sequence: Synthetic oligonucleotide
  Sense strand starting at position 2783 of SEQ ID NO: 1244485
cagagaggauucuauaaag

SEQ ID NO: 1492235 - RNA, 19 nt, Artificial Sequence
  Description of Artificial Sequence: Synthetic oligonucleotide
  Antisense strand to SEQ ID NO: 1492234
cuuuauagaauccucucug

SEQ ID NO: 1492236 - RNA, 19 nt, Artificial Sequence
  Description of Artificial Sequence: Synthetic oligonucleotide
  Sense strand starting at position 2904 of SEQ ID NO: 1244485
gcugaaauaacccgaguuc

SEQ ID NO: 1492237 - RNA, 19 nt, Artificial Sequence
  Description of Artificial Sequence: Synthetic oligonucleotide
  Antisense strand to SEQ ID NO: 1492236
gaacucggguuauuucagc

SEQ ID NO: 1492238 - RNA, 19 nt, Artificial Sequence
  Description of Artificial Sequence: Synthetic oligonucleotide
  Sense strand starting at position 2916 of SEQ ID NO: 1244485
cgaguuccguucucacaga

SEQ ID NO: 1492239 - RNA, 19 nt, Artificial Sequence
  Description of Artificial Sequence: Synthetic oligonucleotide
  Antisense strand to SEQ ID NO: 1492238
ucugugagaacggaacucg

SEQ ID NO: 1492240 - RNA, 19 nt, Artificial Sequence
  Description of Artificial Sequence: Synthetic oligonucleotide
  Sense strand starting at position 2917 of SEQ ID NO: 1244485
gaguuccguucucacagaa

SEQ ID NO: 1492241 - RNA, 19 nt, Artificial Sequence
  Description of Artificial Sequence: Synthetic oligonucleotide
  Antisense strand to SEQ ID NO: 1492240
uucugugagaacggaacuc

SEQ ID NO: 1492242 - RNA, 19 nt, Artificial Sequence
  Description of Artificial Sequence: Synthetic oligonucleotide
  Sense strand starting at position 2921 of SEQ ID NO: 1244485
uccguucucacagaaaggu

SEQ ID NO: 1492243 - RNA, 19 nt, Artificial Sequence
  Description of Artificial Sequence: Synthetic oligonucleotide
  Antisense strand to SEQ ID NO: 1492242
accuuucugugagaacgga

SEQ ID NO: 1492244 - RNA, 19 nt, Artificial Sequence
  Description of Artificial Sequence: Synthetic oligonucleotide
  Sense strand starting at position 3027 of SEQ ID NO: 1244485
gggcuuccucaaggacaaa

SEQ ID NO: 1492245 - RNA, 19 nt, Artificial Sequence
  Description of Artificial Sequence: Synthetic oligonucleotide
  Antisense strand to SEQ ID NO: 1492244
uuuguccuugaggaagccc

SEQ ID NO: 1492246 - RNA, 19 nt, Artificial Sequence
  Description of Artificial Sequence: Synthetic oligonucleotide
  Sense strand starting at position 3082 of SEQ ID NO: 1244485
agaguucguucucccuaga

SEQ ID NO: 1492247 - RNA, 19 nt, Artificial Sequence
  Description of Artificial Sequence: Synthetic oligonucleotide
  Antisense strand to SEQ ID NO: 1492246
ucuagggagaacgaacucu

SEQ ID NO: 1492248 - RNA, 19 nt, Artificial Sequence
  Description of Artificial Sequence: Synthetic oligonucleotide
  Sense strand starting at position 3160 of SEQ ID NO: 1244485
cuucaucgagcacgugauu

SEQ ID NO: 1492249 - RNA, 19 nt, Artificial Sequence
  Description of Artificial Sequence: Synthetic oligonucleotide
  Antisense strand to SEQ ID NO: 1492248
aaucacgugcucgaugaag

SEQ ID NO: 1492250 - RNA, 19 nt, Artificial Sequence
  Description of Artificial Sequence: Synthetic oligonucleotide
  Sense strand starting at position 3169 of SEQ ID NO: 1244485
gcacgugauuacgucacuu

SEQ ID NO: 1492251 - RNA, 19 nt, Artificial Sequence
  Description of Artificial Sequence: Synthetic oligonucleotide
  Antisense strand to SEQ ID NO: 1492250
aagugacguaaucacgugc

SEQ ID NO: 1492252 - RNA, 19 nt, Artificial Sequence
  Description of Artificial Sequence: Synthetic oligonucleotide
  Sense strand starting at position 3171 of SEQ ID NO: 1244485
acgugauuacgucacuuuc

SEQ ID NO: 1492253 - RNA, 19 nt, Artificial Sequence
  Description of Artificial Sequence: Synthetic oligonucleotide
  Antisense strand to SEQ ID NO: 1492252
gaaagugacguaaucacgu

SEQ ID NO: 1492254 - RNA, 19 nt, Artificial Sequence
  Description of Artificial Sequence: Synthetic oligonucleotide
  Sense strand starting at position 3173 of SEQ ID NO: 1244485
gugauuacgucacuuucuu

SEQ ID NO: 1492255 - RNA, 19 nt, Artificial Sequence
  Description of Artificial Sequence: Synthetic oligonucleotide
  Antisense strand to SEQ ID NO: 1492254
aagaaagugacguaaucac

SEQ ID NO: 1492256 - RNA, 19 nt, Artificial Sequence
  Description of Artificial Sequence: Synthetic oligonucleotide
  Sense strand starting at position 3342 of SEQ ID NO: 1244485
gggagucgccagugagaaa

SEQ ID NO: 1492257 - RNA, 19 nt, Artificial Sequence
  Description of Artificial Sequence: Synthetic oligonucleotide
  Antisense strand to SEQ ID NO: 1492256
uuucucacuggcgacuccc

SEQ ID NO: 1492258 - RNA, 19 nt, Artificial Sequence
  Description of Artificial Sequence: Synthetic oligonucleotide
  Sense strand starting at position 3599 of SEQ ID NO: 1244485
cuagcucggucuccucaaa

SEQ ID NO: 1492259 - RNA, 19 nt, Artificial Sequence
  Description of Artificial Sequence: Synthetic oligonucleotide
  Antisense strand to SEQ ID NO: 1492258
uuugaggagaccgagcuag

SEQ ID NO: 1492260 - RNA, 19 nt, Artificial Sequence
  Description of Artificial Sequence: Synthetic oligonucleotide
  Sense strand starting at position 3698 of SEQ ID NO: 1244485
agggaugagucacuagcaa

SEQ ID NO: 1492261 - RNA, 19 nt, Artificial Sequence
  Description of Artificial Sequence: Synthetic oligonucleotide
  Antisense strand to SEQ ID NO: 1492260
uugcuagugacucaucccu

SEQ ID NO: 1492262 - RNA, 19 nt, Artificial Sequence
  Description of Artificial Sequence: Synthetic oligonucleotide
  Sense strand starting at position 3821 of SEQ ID NO: 1244485
aaagcaugugucugacgga

SEQ ID NO: 1492263 - RNA, 19 nt, Artificial Sequence
  Description of Artificial Sequence: Synthetic oligonucleotide
  Antisense strand to SEQ ID NO: 1492262
uccgucagacacaugcuuu

SEQ ID NO: 1492264 - RNA, 19 nt, Artificial Sequence
  Description of Artificial Sequence: Synthetic oligonucleotide
  Sense strand starting at position 3824 of SEQ ID NO: 1244485
gcaugugucugacggagau

SEQ ID NO: 1492265 - RNA, 19 nt, Artificial Sequence
  Description of Artificial Sequence: Synthetic oligonucleotide
  Antisense strand to SEQ ID NO: 1492264
aucuccgucagacacaugc

SEQ ID NO: 1492266 - RNA, 19 nt, Artificial Sequence
  Description of Artificial Sequence: Synthetic oligonucleotide
  Sense strand starting at position 3870 of SEQ ID NO: 1244485
acagauacgcacugauaag

SEQ ID NO: 1492267 - RNA, 19 nt, Artificial Sequence
  Description of Artificial Sequence: Synthetic oligonucleotide
  Antisense strand to SEQ ID NO: 1492266
cuuaucagugcguaucugu

SEQ ID NO: 1492268 - RNA, 19 nt, Artificial Sequence
  Description of Artificial Sequence: Synthetic oligonucleotide
  Sense strand starting at position 142 of SEQ ID NO: 1244486
gauccuauuccagagcugu

SEQ ID NO: 1492269 - RNA, 19 nt, Artificial Sequence
  Description of Artificial Sequence: Synthetic oligonucleotide
  Antisense strand to SEQ ID NO: 1492268
acagcucuggaauaggauc

SEQ ID NO: 1492270 - RNA, 19 nt, Artificial Sequence
  Description of Artificial Sequence: Synthetic oligonucleotide
  Sense strand starting at position 489 of SEQ ID NO: 1244486
gauucuuauugauggguuu

SEQ ID NO: 1492271 - RNA, 19 nt, Artificial Sequence
  Description of Artificial Sequence: Synthetic oligonucleotide
  Antisense strand to SEQ ID NO: 1492270
aaacccaucaauaagaauc

SEQ ID NO: 1492272 - RNA, 19 nt, Artificial Sequence
  Description of Artificial Sequence: Synthetic oligonucleotide
  Sense strand starting at position 490 of SEQ ID NO: 1244486
auucuuauugauggguuua

SEQ ID NO: 1492273 - RNA, 19 nt, Artificial Sequence
  Description of Artificial Sequence: Synthetic oligonucleotide
  Antisense strand to SEQ ID NO: 1492272
uaaacccaucaauaagaau

SEQ ID NO: 1492274 - RNA, 19 nt, Artificial Sequence
  Description of Artificial Sequence: Synthetic oligonucleotide
  Sense strand starting at position 492 of SEQ ID NO: 1244486
ucuuauugauggguuuauu

SEQ ID NO: 1492275 - RNA, 19 nt, Artificial Sequence
  Description of Artificial Sequence: Synthetic oligonucleotide
  Antisense strand to SEQ ID NO: 1492274
aauaaacccaucaauaaga

SEQ ID NO: 1492276 - RNA, 19 nt, Artificial Sequence
  Description of Artificial Sequence: Synthetic oligonucleotide
  Sense strand starting at position 503 of SEQ ID NO: 1244486
gguuuauugcuuucugccu

SEQ ID NO: 1492277 - RNA, 19 nt, Artificial Sequence
  Description of Artificial Sequence: Synthetic oligonucleotide
  Antisense strand to SEQ ID NO: 1492276
aggcagaaagcaauaaacc

SEQ ID NO: 1492278 - RNA, 19 nt, Artificial Sequence
  Description of Artificial Sequence: Synthetic oligonucleotide
  Sense strand starting at position 613 of SEQ ID NO: 1244486
cgcagugcugauggagaau

SEQ ID NO: 1492279 - RNA, 19 nt, Artificial Sequence
  Description of Artificial Sequence: Synthetic oligonucleotide
  Antisense strand to SEQ ID NO: 1492278
auucuccaucagcacugcg

SEQ ID NO: 1492280 - RNA, 19 nt, Artificial Sequence
  Description of Artificial Sequence: Synthetic oligonucleotide
  Sense strand starting at position 682 of SEQ ID NO: 1244486
gggccugucucagagacuu

SEQ ID NO: 1492281 - RNA, 19 nt, Artificial Sequence
  Description of Artificial Sequence: Synthetic oligonucleotide
  Antisense strand to SEQ ID NO: 1492280
aagucucugagacaggccc

SEQ ID NO: 1492282 - RNA, 19 nt, Artificial Sequence
  Description of Artificial Sequence: Synthetic oligonucleotide
  Sense strand starting at position 899 of SEQ ID NO: 1244486
ggacgagaucagugucccu

SEQ ID NO: 1492283 - RNA, 19 nt, Artificial Sequence
  Description of Artificial Sequence: Synthetic oligonucleotide
  Antisense strand to SEQ ID NO: 1492282
agggacacugaucucgucc

SEQ ID NO: 1492284 - RNA, 19 nt, Artificial Sequence
  Description of Artificial Sequence: Synthetic oligonucleotide
  Sense strand starting at position 1075 of SEQ ID NO: 1244486
gcacaugcugccggaaagu

SEQ ID NO: 1492285 - RNA, 19 nt, Artificial Sequence
  Description of Artificial Sequence: Synthetic oligonucleotide
  Antisense strand to SEQ ID NO: 1492284
acuuuccggcagcaugugc

SEQ ID NO: 1492286 - RNA, 19 nt, Artificial Sequence
  Description of Artificial Sequence: Synthetic oligonucleotide
  Sense strand starting at position 1085 of SEQ ID NO: 1244486
ccggaaaguucuggaagga

SEQ ID NO: 1492287 - RNA, 19 nt, Artificial Sequence
  Description of Artificial Sequence: Synthetic oligonucleotide
  Antisense strand to SEQ ID NO: 1492286
uccuuccagaacuuuccgg

SEQ ID NO: 1492288 - RNA, 19 nt, Artificial Sequence
  Description of Artificial Sequence: Synthetic oligonucleotide
  Sense strand starting at position 1241 of SEQ ID NO: 1244486
ccgagcuucaggcgugaga

SEQ ID NO: 1492289 - RNA, 19 nt, Artificial Sequence
  Description of Artificial Sequence: Synthetic oligonucleotide
  Antisense strand to SEQ ID NO: 1492288
ucucacgccugaagcucgg

SEQ ID NO: 1492290 - RNA, 19 nt, Artificial Sequence
  Description of Artificial Sequence: Synthetic oligonucleotide
  Sense strand starting at position 1243 of SEQ ID NO: 1244486
gagcuucaggcgugagagu

SEQ ID NO: 1492291 - RNA, 19 nt, Artificial Sequence
  Description of Artificial Sequence: Synthetic oligonucleotide
  Antisense strand to SEQ ID NO: 1492290
acucucacgccugaagcuc

SEQ ID NO: 1492292 - RNA, 19 nt, Artificial Sequence
  Description of Artificial Sequence: Synthetic oligonucleotide
  Sense strand starting at position 1250 of SEQ ID NO: 1244486
aggcgugagagugaucaga

SEQ ID NO: 1492293 - RNA, 19 nt, Artificial Sequence
  Description of Artificial Sequence: Synthetic oligonucleotide
  Antisense strand to SEQ ID NO: 1492292
ucugaucacucucacgccu

SEQ ID NO: 1492294 - RNA, 19 nt, Artificial Sequence
  Description of Artificial Sequence: Synthetic oligonucleotide
  Sense strand starting at position 1252 of SEQ ID NO: 1244486
gcgugagagugaucagaaa

SEQ ID NO: 1492295 - RNA, 19 nt, Artificial Sequence
  Description of Artificial Sequence: Synthetic oligonucleotide
  Antisense strand to SEQ ID NO: 1492294
uuucugaucacucucacgc

SEQ ID NO: 1492296 - RNA, 19 nt, Artificial Sequence
  Description of Artificial Sequence: Synthetic oligonucleotide
  Sense strand starting at position 1572 of SEQ ID NO: 1244486
agaugccauccauguggaa

SEQ ID NO: 1492297 - RNA, 19 nt, Artificial Sequence
  Description of Artificial Sequence: Synthetic oligonucleotide
  Antisense strand to SEQ ID NO: 1492296
uuccacauggauggcaucu

SEQ ID NO: 1492298 - RNA, 19 nt, Artificial Sequence
  Description of Artificial Sequence: Synthetic oligonucleotide
  Sense strand starting at position 1872 of SEQ ID NO: 1244486
ggaaguggcugccaggaaa

SEQ ID NO: 1492299 - RNA, 19 nt, Artificial Sequence
  Description of Artificial Sequence: Synthetic oligonucleotide
  Antisense strand to SEQ ID NO: 1492298
uuuccuggcagccacuucc

SEQ ID NO: 1492300 - RNA, 19 nt, Artificial Sequence
  Description of Artificial Sequence: Synthetic oligonucleotide
  Sense strand starting at position 2009 of SEQ ID NO: 1244486
gcugauuaggcgucucagu

SEQ ID NO: 1492301 - RNA, 19 nt, Artificial Sequence
  Description of Artificial Sequence: Synthetic oligonucleotide
  Antisense strand to SEQ ID NO: 1492300
acugagacgccuaaucagc

SEQ ID NO: 1492302 - RNA, 19 nt, Artificial Sequence
  Description of Artificial Sequence: Synthetic oligonucleotide
  Sense strand starting at position 2026 of SEQ ID NO: 1244486
gugccacccuaaugagauu

SEQ ID NO: 1492303 - RNA, 19 nt, Artificial Sequence
  Description of Artificial Sequence: Synthetic oligonucleotide
  Antisense strand to SEQ ID NO: 1492302
aaucucauuaggguggcac

SEQ ID NO: 1492304 - RNA, 19 nt, Artificial Sequence
  Description of Artificial Sequence: Synthetic oligonucleotide
  Sense strand starting at position 2158 of SEQ ID NO: 1244486
agagaagugugacccugaa

SEQ ID NO: 1492305 - RNA, 19 nt, Artificial Sequence
  Description of Artificial Sequence: Synthetic oligonucleotide
  Antisense strand to SEQ ID NO: 1492304
uucagggucacacuucucu

SEQ ID NO: 1492306 - RNA, 19 nt, Artificial Sequence
  Description of Artificial Sequence: Synthetic oligonucleotide
  Sense strand starting at position 2196 of SEQ ID NO: 1244486
gcccaucuuccagauggaa

SEQ ID NO: 1492307 - RNA, 19 nt, Artificial Sequence
  Description of Artificial Sequence: Synthetic oligonucleotide
  Antisense strand to SEQ ID NO: 1492306
uuccaucuggaagaugggc

SEQ ID NO: 1492308 - RNA, 19 nt, Artificial Sequence
  Description of Artificial Sequence: Synthetic oligonucleotide
  Sense strand starting at position 2452 of SEQ ID NO: 1244486
ggacaauguugaguuccuu

SEQ ID NO: 1492309 - RNA, 19 nt, Artificial Sequence
  Description of Artificial Sequence: Synthetic oligonucleotide
  Antisense strand to SEQ ID NO: 1492308
aaggaacucaacauugucc

SEQ ID NO: 1492310 - RNA, 19 nt, Artificial Sequence
  Description of Artificial Sequence: Synthetic oligonucleotide
  Sense strand starting at position 2924 of SEQ ID NO: 1244486
ccuugcuauuuauggcaaa

SEQ ID NO: 1492311 - RNA, 19 nt, Artificial Sequence
  Description of Artificial Sequence: Synthetic oligonucleotide
  Antisense strand to SEQ ID NO: 1492310
uuugccauaaauagcaagg

SEQ ID NO: 1492312 - RNA, 19 nt, Artificial Sequence
  Description of Artificial Sequence: Synthetic oligonucleotide
  Sense strand starting at position 3489 of SEQ ID NO: 1244486
ugcaguggcucacuucuua

SEQ ID NO: 1492313 - RNA, 19 nt, Artificial Sequence
  Description of Artificial Sequence: Synthetic oligonucleotide
  Antisense strand to SEQ ID NO: 1492312
uaagaagugagccacugca

SEQ ID NO: 1492314 - RNA, 19 nt, Artificial Sequence
  Description of Artificial Sequence: Synthetic oligonucleotide
  Sense strand starting at position 66 of SEQ ID NO: 1244487
ugugauguuucuguaauua

SEQ ID NO: 1492315 - RNA, 19 nt, Artificial Sequence
  Description of Artificial Sequence: Synthetic oligonucleotide
  Antisense strand to SEQ ID NO: 1492314
uaauuacagaaacaucaca

SEQ ID NO: 1492316 - RNA, 19 nt, Artificial Sequence
  Description of Artificial Sequence: Synthetic oligonucleotide
  Sense strand starting at position 128 of SEQ ID NO: 1244487
ccaggaggcuuuccuacau

SEQ ID NO: 1492317 - RNA, 19 nt, Artificial Sequence
  Description of Artificial Sequence: Synthetic oligonucleotide
  Antisense strand to SEQ ID NO: 1492316
auguaggaaagccuccugg

SEQ ID NO: 1492318 - RNA, 19 nt, Artificial Sequence
  Description of Artificial Sequence: Synthetic oligonucleotide
  Sense strand starting at position 439 of SEQ ID NO: 1244487
gggcgauccugaccuagca

SEQ ID NO: 1492319 - RNA, 19 nt, Artificial Sequence
  Description of Artificial Sequence: Synthetic oligonucleotide
  Antisense strand to SEQ ID NO: 1492318
ugcuaggucaggaucgccc

SEQ ID NO: 1492320 - RNA, 19 nt, Artificial Sequence
  Description of Artificial Sequence: Synthetic oligonucleotide
  Sense strand starting at position 1752 of SEQ ID NO: 1244487
ccuuccuuuccagaguugu

SEQ ID NO: 1492321 - RNA, 19 nt, Artificial Sequence
  Description of Artificial Sequence: Synthetic oligonucleotide
  Antisense strand to SEQ ID NO: 1492320
acaacucuggaaaggaagg

SEQ ID NO: 1492322 - RNA, 19 nt, Artificial Sequence
  Description of Artificial Sequence: Synthetic oligonucleotide
  Sense strand starting at position 1758 of SEQ ID NO: 1244487
uuuccagaguugucuaggu

SEQ ID NO: 1492323 - RNA, 19 nt, Artificial Sequence
  Description of Artificial Sequence: Synthetic oligonucleotide
  Antisense strand to SEQ ID NO: 1492322
accuagacaacucuggaaa

SEQ ID NO: 1492324 - RNA, 19 nt, Artificial Sequence
  Description of Artificial Sequence: Synthetic oligonucleotide
  Sense strand starting at position 1760 of SEQ ID NO: 1244487
uccagaguugucuagguag

SEQ ID NO: 1492325 - RNA, 19 nt, Artificial Sequence
  Description of Artificial Sequence: Synthetic oligonucleotide
  Antisense strand to SEQ ID NO: 1492324
cuaccuagacaacucugga

SEQ ID NO: 1492326 - RNA, 19 nt, Artificial Sequence
  Description of Artificial Sequence: Synthetic oligonucleotide
  Sense strand starting at position 1762 of SEQ ID NO: 1244487
cagaguugucuagguagcu

SEQ ID NO: 1492327 - RNA, 19 nt, Artificial Sequence
  Description of Artificial Sequence: Synthetic oligonucleotide
  Antisense strand to SEQ ID NO: 1492326
agcuaccuagacaacucug

SEQ ID NO: 1492328 - RNA, 19 nt, Artificial Sequence
  Description of Artificial Sequence: Synthetic oligonucleotide
  Sense strand starting at position 1763 of SEQ ID NO: 1244487
agaguugucuagguagcuu

SEQ ID NO: 1492329 - RNA, 19 nt, Artificial Sequence
  Description of Artificial Sequence: Synthetic oligonucleotide
  Antisense strand to SEQ ID NO: 1492328
aagcuaccuagacaacucu

SEQ ID NO: 1492330 - RNA, 19 nt, Artificial Sequence
  Description of Artificial Sequence: Synthetic oligonucleotide
  Sense strand starting at position 1824 of SEQ ID NO: 1244487
cugucaugaucguuaccua

SEQ ID NO: 1492331 - RNA, 19 nt, Artificial Sequence
  Description of Artificial Sequence: Synthetic oligonucleotide
  Antisense strand to SEQ ID NO: 1492330
uagguaacgaucaugacag

SEQ ID NO: 1492332 - RNA, 19 nt, Artificial Sequence
  Description of Artificial Sequence: Synthetic oligonucleotide
  Sense strand starting at position 1825 of SEQ ID NO: 1244487
ugucaugaucguuaccuau

SEQ ID NO: 1492333 - RNA, 19 nt, Artificial Sequence
  Description of Artificial Sequence: Synthetic oligonucleotide
  Antisense strand to SEQ ID NO: 1492332
auagguaacgaucaugaca

SEQ ID NO: 1492334 - RNA, 19 nt, Artificial Sequence
  Description of Artificial Sequence: Synthetic oligonucleotide
  Sense strand starting at position 2114 of SEQ ID NO: 1244487
agcucaucugaccgaacau

SEQ ID NO: 1492335 - RNA, 19 nt, Artificial Sequence
  Description of Artificial Sequence: Synthetic oligonucleotide
  Antisense strand to SEQ ID NO: 1492334
auguucggucagaugagcu

SEQ ID NO: 1492336 - RNA, 19 nt, Artificial Sequence
  Description of Artificial Sequence: Synthetic oligonucleotide
  Sense strand starting at position 2212 of SEQ ID NO: 1244487
ggugaagugucucugggag

SEQ ID NO: 1492337 - RNA, 19 nt, Artificial Sequence
  Description of Artificial Sequence: Synthetic oligonucleotide
  Antisense strand to SEQ ID NO: 1492336
cucccagagacacuucacc

SEQ ID NO: 1492338 - RNA, 19 nt, Artificial Sequence
  Description of Artificial Sequence: Synthetic oligonucleotide
  Sense strand starting at position 2258 of SEQ ID NO: 1244487
ccagcuucucuuggagaaa

SEQ ID NO: 1492339 - RNA, 19 nt, Artificial Sequence
  Description of Artificial Sequence: Synthetic oligonucleotide
  Antisense strand to SEQ ID NO: 1492338
uuucuccaagagaagcugg

SEQ ID NO: 1492340 - RNA, 19 nt, Artificial Sequence
  Description of Artificial Sequence: Synthetic oligonucleotide
  Sense strand starting at position 2362 of SEQ ID NO: 1244487
cggugacauuagccuaaua

SEQ ID NO: 1492341 - RNA, 19 nt, Artificial Sequence
  Description of Artificial Sequence: Synthetic oligonucleotide
  Antisense strand to SEQ ID NO: 1492340
uauuaggcuaaugucaccg

SEQ ID NO: 1492342 - RNA, 19 nt, Artificial Sequence
  Description of Artificial Sequence: Synthetic oligonucleotide
  Sense strand starting at position 2364 of SEQ ID NO: 1244487
gugacauuagccuaauacg

SEQ ID NO: 1492343 - RNA, 19 nt, Artificial Sequence
  Description of Artificial Sequence: Synthetic oligonucleotide
  Antisense strand to SEQ ID NO: 1492342
cguauuaggcuaaugucac

SEQ ID NO: 1492344 - RNA, 19 nt, Artificial Sequence
  Description of Artificial Sequence: Synthetic oligonucleotide
  Sense strand starting at position 2373 of SEQ ID NO: 1244487
gccuaauacguguuaggcu

SEQ ID NO: 1492345 - RNA, 19 nt, Artificial Sequence
  Description of Artificial Sequence: Synthetic oligonucleotide
  Antisense strand to SEQ ID NO: 1492344
agccuaacacguauuaggc

SEQ ID NO: 1492346 - RNA, 19 nt, Artificial Sequence
  Description of Artificial Sequence: Synthetic oligonucleotide
  Sense strand starting at position 2380 of SEQ ID NO: 1244487
acguguuaggcuuuaugcu

SEQ ID NO: 1492347 - RNA, 19 nt, Artificial Sequence
  Description of Artificial Sequence: Synthetic oligonucleotide
  Antisense strand to SEQ ID NO: 1492346
agcauaaagccuaacacgu

SEQ ID NO: 1492348 - RNA, 19 nt, Artificial Sequence
  Description of Artificial Sequence: Synthetic oligonucleotide
  Sense strand starting at position 2387 of SEQ ID NO: 1244487
aggcuuuaugcugggaaca

SEQ ID NO: 1492349 - RNA, 19 nt, Artificial Sequence
  Description of Artificial Sequence: Synthetic oligonucleotide
  Antisense strand to SEQ ID NO: 1492348
uguucccagcauaaagccu

SEQ ID NO: 1492350 - RNA, 19 nt, Artificial Sequence
  Description of Artificial Sequence: Synthetic oligonucleotide
  Sense strand starting at position 2388 of SEQ ID NO: 1244487
ggcuuuaugcugggaacag

SEQ ID NO: 1492351 - RNA, 19 nt, Artificial Sequence
  Description of Artificial Sequence: Synthetic oligonucleotide
  Antisense strand to SEQ ID NO: 1492350
cuguucccagcauaaagcc

SEQ ID NO: 1492352 - RNA, 19 nt, Artificial Sequence
  Description of Artificial Sequence: Synthetic oligonucleotide
  Sense strand starting at position 2493 of SEQ ID NO: 1244487
gcuauaacugaaugugauu

SEQ ID NO: 1492353 - RNA, 19 nt, Artificial Sequence
  Description of Artificial Sequence: Synthetic oligonucleotide
  Antisense strand to SEQ ID NO: 1492352
aaucacauucaguuauagc

SEQ ID NO: 1492354 - RNA, 19 nt, Artificial Sequence
  Description of Artificial Sequence: Synthetic oligonucleotide
  Sense strand starting at position 2498 of SEQ ID NO: 1244487
aacugaaugugauuguaau

SEQ ID NO: 1492355 - RNA, 19 nt, Artificial Sequence
  Description of Artificial Sequence: Synthetic oligonucleotide
  Antisense strand to SEQ ID NO: 1492354
auuacaaucacauucaguu

SEQ ID NO: 1492356 - RNA, 19 nt, Artificial Sequence
  Description of Artificial Sequence: Synthetic oligonucleotide
  Sense strand starting at position 2499 of SEQ ID NO: 1244487
acugaaugugauuguaaua

SEQ ID NO: 1492357 - RNA, 19 nt, Artificial Sequence
  Description of Artificial Sequence: Synthetic oligonucleotide
  Antisense strand to SEQ ID NO: 1492356
uauuacaaucacauucagu

SEQ ID NO: 1492358 - RNA, 19 nt, Artificial Sequence
  Description of Artificial Sequence: Synthetic oligonucleotide
  Sense strand starting at position 2551 of SEQ ID NO: 1244487
gggccucuuagcuggauga

SEQ ID NO: 1492359 - RNA, 19 nt, Artificial Sequence
  Description of Artificial Sequence: Synthetic oligonucleotide
  Antisense strand to SEQ ID NO: 1492358
ucauccagcuaagaggccc

SEQ ID NO: 1492360 - RNA, 19 nt, Artificial Sequence
  Description of Artificial Sequence: Synthetic oligonucleotide
  Sense strand starting at position 2552 of SEQ ID NO: 1244487
ggccucuuagcuggaugaa

SEQ ID NO: 1492361 - RNA, 19 nt, Artificial Sequence
  Description of Artificial Sequence: Synthetic oligonucleotide
  Antisense strand to SEQ ID NO: 1492360
uucauccagcuaagaggcc

SEQ ID NO: 1492362 - RNA, 19 nt, Artificial Sequence
  Description of Artificial Sequence: Synthetic oligonucleotide
  Sense strand starting at position 2553 of SEQ ID NO: 1244487
gccucuuagcuggaugaau

SEQ ID NO: 1492363 - RNA, 19 nt, Artificial Sequence
  Description of Artificial Sequence: Synthetic oligonucleotide
  Antisense strand to SEQ ID NO: 1492362
auucauccagcuaagaggc

SEQ ID NO: 1492364 - RNA, 19 nt, Artificial Sequence
  Description of Artificial Sequence: Synthetic oligonucleotide
  Sense strand starting at position 2555 of SEQ ID NO: 1244487
cucuuagcuggaugaauaa

SEQ ID NO: 1492365 - RNA, 19 nt, Artificial Sequence
  Description of Artificial Sequence: Synthetic oligonucleotide
  Antisense strand to SEQ ID NO: 1492364
uuauucauccagcuaagag

SEQ ID NO: 1492366 - RNA, 19 nt, Artificial Sequence
  Description of Artificial Sequence: Synthetic oligonucleotide
  Sense strand starting at position 2864 of SEQ ID NO: 1244487
uuuccaaguagcugggaua

SEQ ID NO: 1492367 - RNA, 19 nt, Artificial Sequence
  Description of Artificial Sequence: Synthetic oligonucleotide
  Antisense strand to SEQ ID NO: 1492366
uaucccagcuacuuggaaa

SEQ ID NO: 1492368 - RNA, 19 nt, Artificial Sequence
  Description of Artificial Sequence: Synthetic oligonucleotide
  Sense strand starting at position 3084 of SEQ ID NO: 1244487
ucacaagucgauugacuuu

SEQ ID NO: 1492369 - RNA, 19 nt, Artificial Sequence
  Description of Artificial Sequence: Synthetic oligonucleotide
  Antisense strand to SEQ ID NO: 1492368
aaagucaaucgacuuguga

SEQ ID NO: 1492370 - RNA, 19 nt, Artificial Sequence
  Description of Artificial Sequence: Synthetic oligonucleotide
  Sense strand starting at position 3208 of SEQ ID NO: 1244487
aucucuucugucuggauca

SEQ ID NO: 1492371 - RNA, 19 nt, Artificial Sequence
  Description of Artificial Sequence: Synthetic oligonucleotide
  Antisense strand to SEQ ID NO: 1492370
ugauccagacagaagagau

SEQ ID NO: 1492372 - RNA, 19 nt, Artificial Sequence
  Description of Artificial Sequence: Synthetic oligonucleotide
  Sense strand starting at position 3210 of SEQ ID NO: 1244487
cucuucugucuggaucauu

SEQ ID NO: 1492373 - RNA, 19 nt, Artificial Sequence
  Description of Artificial Sequence: Synthetic oligonucleotide
  Antisense strand to SEQ ID NO: 1492372
aaugauccagacagaagag

SEQ ID NO: 1492374 - RNA, 19 nt, Artificial Sequence
  Description of Artificial Sequence: Synthetic oligonucleotide
  Sense strand starting at position 3345 of SEQ ID NO: 1244487
cuuagaucuccuggucuua

SEQ ID NO: 1492375 - RNA, 19 nt, Artificial Sequence
  Description of Artificial Sequence: Synthetic oligonucleotide
  Antisense strand to SEQ ID NO: 1492374
uaagaccaggagaucuaag

SEQ ID NO: 1492376 - RNA, 19 nt, Artificial Sequence
  Description of Artificial Sequence: Synthetic oligonucleotide
  Sense strand starting at position 3388 of SEQ ID NO: 1244487
ugucauccagacugggaau

SEQ ID NO: 1492377 - RNA, 19 nt, Artificial Sequence
  Description of Artificial Sequence: Synthetic oligonucleotide
  Antisense strand to SEQ ID NO: 1492376
auucccagucuggaugaca

SEQ ID NO: 1492378 - RNA, 19 nt, Artificial Sequence
  Description of Artificial Sequence: Synthetic oligonucleotide
  Sense strand starting at position 3455 of SEQ ID NO: 1244487
cagguaccucgucgaggaa

SEQ ID NO: 1492379 - RNA, 19 nt, Artificial Sequence
  Description of Artificial Sequence: Synthetic oligonucleotide
  Antisense strand to SEQ ID NO: 1492378
uuccucgacgagguaccug

SEQ ID NO: 1492380 - RNA, 19 nt, Artificial Sequence
  Description of Artificial Sequence: Synthetic oligonucleotide
  Sense strand starting at position 3456 of SEQ ID NO: 1244487
agguaccucgucgaggaaa

SEQ ID NO: 1492381 - RNA, 19 nt, Artificial Sequence
  Description of Artificial Sequence: Synthetic oligonucleotide
  Antisense strand to SEQ ID NO: 1492380
uuuccucgacgagguaccu

SEQ ID NO: 1492382 - RNA, 19 nt, Artificial Sequence
  Description of Artificial Sequence: Synthetic oligonucleotide
  Sense strand starting at position 3473 of SEQ ID NO: 1244487
aagggauuggcugaaagcu

SEQ ID NO: 1492383 - RNA, 19 nt, Artificial Sequence
  Description of Artificial Sequence: Synthetic oligonucleotide
  Antisense strand to SEQ ID NO: 1492382
agcuuucagccaaucccuu

SEQ ID NO: 1492384 - RNA, 19 nt, Artificial Sequence
  Description of Artificial Sequence: Synthetic oligonucleotide
  Sense strand starting at position 3482 of SEQ ID NO: 1244487
gcugaaagcuaccuggaca

SEQ ID NO: 1492385 - RNA, 19 nt, Artificial Sequence
  Description of Artificial Sequence: Synthetic oligonucleotide
  Antisense strand to SEQ ID NO: 1492384
uguccagguagcuuucagc

SEQ ID NO: 1492386 - RNA, 19 nt, Artificial Sequence
  Description of Artificial Sequence: Synthetic oligonucleotide
  Sense strand starting at position 3526 of SEQ ID NO: 1244487
agcugaugguagcucuuau

SEQ ID NO: 1492387 - RNA, 19 nt, Artificial Sequence
  Description of Artificial Sequence: Synthetic oligonucleotide
  Antisense strand to SEQ ID NO: 1492386
auaagagcuaccaucagcu

SEQ ID NO: 1492388 - RNA, 19 nt, Artificial Sequence
  Description of Artificial Sequence: Synthetic oligonucleotide
  Sense strand starting at position 3765 of SEQ ID NO: 1244487
uagcaauuaggacgugauu

SEQ ID NO: 1492389 - RNA, 19 nt, Artificial Sequence
  Description of Artificial Sequence: Synthetic oligonucleotide
  Antisense strand to SEQ ID NO: 1492388
aaucacguccuaauugcua

SEQ ID NO: 1492390 - RNA, 19 nt, Artificial Sequence
  Description of Artificial Sequence: Synthetic oligonucleotide
  Sense strand starting at position 3767 of SEQ ID NO: 1244487
gcaauuaggacgugauuga

SEQ ID NO: 1492391 - RNA, 19 nt, Artificial Sequence
  Description of Artificial Sequence: Synthetic oligonucleotide
  Antisense strand to SEQ ID NO: 1492390
ucaaucacguccuaauugc

SEQ ID NO: 1492392 - RNA, 19 nt, Artificial Sequence
  Description of Artificial Sequence: Synthetic oligonucleotide
  Sense strand starting at position 3771 of SEQ ID NO: 1244487
uuaggacgugauugaugau

SEQ ID NO: 1492393 - RNA, 19 nt, Artificial Sequence
  Description of Artificial Sequence: Synthetic oligonucleotide
  Antisense strand to SEQ ID NO: 1492392
aucaucaaucacguccuaa

SEQ ID NO: 1492394 - RNA, 19 nt, Artificial Sequence
  Description of Artificial Sequence: Synthetic oligonucleotide
  Sense strand starting at position 266 of SEQ ID NO: 1244488
gcuggauccuggcaggaga

SEQ ID NO: 1492395 - RNA, 19 nt, Artificial Sequence
  Description of Artificial Sequence: Synthetic oligonucleotide
  Antisense strand to SEQ ID NO: 1492394
ucuccugccaggauccagc

SEQ ID NO: 1492396 - RNA, 19 nt, Artificial Sequence
  Description of Artificial Sequence: Synthetic oligonucleotide
  Sense strand starting at position 464 of SEQ ID NO: 1244488
gugucauccucuccucauc

SEQ ID NO: 1492397 - RNA, 19 nt, Artificial Sequence
  Description of Artificial Sequence: Synthetic oligonucleotide
  Antisense strand to SEQ ID NO: 1492396
gaugaggagaggaugacac

SEQ ID NO: 1492398 - RNA, 19 nt, Artificial Sequence
  Description of Artificial Sequence: Synthetic oligonucleotide
  Sense strand starting at position 769 of SEQ ID NO: 1244488
gugucuuaaugcccaucca

SEQ ID NO: 1492399 - RNA, 19 nt, Artificial Sequence
  Description of Artificial Sequence: Synthetic oligonucleotide
  Antisense strand to SEQ ID NO: 1492398
uggaugggcauuaagacac

SEQ ID NO: 1492400 - RNA, 19 nt, Artificial Sequence
  Description of Artificial Sequence: Synthetic oligonucleotide
  Sense strand starting at position 1014 of SEQ ID NO: 1244488
cccucacagcugugauguu

SEQ ID NO: 1492401 - RNA, 19 nt, Artificial Sequence
  Description of Artificial Sequence: Synthetic oligonucleotide
  Antisense strand to SEQ ID NO: 1492400
aacaucacagcugugaggg

SEQ ID NO: 1492402 - RNA, 19 nt, Artificial Sequence
  Description of Artificial Sequence: Synthetic oligonucleotide
  Sense strand starting at position 1024 of SEQ ID NO: 1244488
ugugauguuucuguaauua

SEQ ID NO: 1492403 - RNA, 19 nt, Artificial Sequence
  Description of Artificial Sequence: Synthetic oligonucleotide
  Antisense strand to SEQ ID NO: 1492402
uaauuacagaaacaucaca

SEQ ID NO: 1492404 - RNA, 19 nt, Artificial Sequence
  Description of Artificial Sequence: Synthetic oligonucleotide
  Sense strand starting at position 1034 of SEQ ID NO: 1244488
cuguaauuagggugcaguu

SEQ ID NO: 1492405 - RNA, 19 nt, Artificial Sequence
  Description of Artificial Sequence: Synthetic oligonucleotide
  Antisense strand to SEQ ID NO: 1492404
aacugcacccuaauuacag

SEQ ID NO: 1492406 - RNA, 19 nt, Artificial Sequence
  Description of Artificial Sequence: Synthetic oligonucleotide
  Sense strand starting at position 1086 of SEQ ID NO: 1244488
ccaggaggcuuuccuacau

SEQ ID NO: 1492407 - RNA, 19 nt, Artificial Sequence
  Description of Artificial Sequence: Synthetic oligonucleotide
  Antisense strand to SEQ ID NO: 1492406
auguaggaaagccuccugg

SEQ ID NO: 1492408 - RNA, 19 nt, Artificial Sequence
  Description of Artificial Sequence: Synthetic oligonucleotide
  Sense strand starting at position 1142 of SEQ ID NO: 1244488
gcagacaaguccugaggaa

SEQ ID NO: 1492409 - RNA, 19 nt, Artificial Sequence
  Description of Artificial Sequence: Synthetic oligonucleotide
  Antisense strand to SEQ ID NO: 1492408
uuccucaggacuugucugc

SEQ ID NO: 1492410 - RNA, 19 nt, Artificial Sequence
  Description of Artificial Sequence: Synthetic oligonucleotide
  Sense strand starting at position 1397 of SEQ ID NO: 1244488
gggcgauccugaccuagca

SEQ ID NO: 1492411 - RNA, 19 nt, Artificial Sequence
  Description of Artificial Sequence: Synthetic oligonucleotide
  Antisense strand to SEQ ID NO: 1492410
ugcuaggucaggaucgccc

SEQ ID NO: 1492412 - RNA, 19 nt, Artificial Sequence
  Description of Artificial Sequence: Synthetic oligonucleotide
  Sense strand starting at position 2710 of SEQ ID NO: 1244488
ccuuccuuuccagaguugu

SEQ ID NO: 1492413 - RNA, 19 nt, Artificial Sequence
  Description of Artificial Sequence: Synthetic oligonucleotide
  Antisense strand to SEQ ID NO: 1492412
acaacucuggaaaggaagg

SEQ ID NO: 1492414 - RNA, 19 nt, Artificial Sequence
  Description of Artificial Sequence: Synthetic oligonucleotide
  Sense strand starting at position 2716 of SEQ ID NO: 1244488
uuuccagaguugucuaggu

SEQ ID NO: 1492415 - RNA, 19 nt, Artificial Sequence
  Description of Artificial Sequence: Synthetic oligonucleotide
  Antisense strand to SEQ ID NO: 1492414
accuagacaacucuggaaa

SEQ ID NO: 1492416 - RNA, 19 nt, Artificial Sequence
  Description of Artificial Sequence: Synthetic oligonucleotide
  Sense strand starting at position 2718 of SEQ ID NO: 1244488
uccagaguugucuagguag

SEQ ID NO: 1492417 - RNA, 19 nt, Artificial Sequence
  Description of Artificial Sequence: Synthetic oligonucleotide
  Antisense strand to SEQ ID NO: 1492416
cuaccuagacaacucugga

SEQ ID NO: 1492418 - RNA, 19 nt, Artificial Sequence
  Description of Artificial Sequence: Synthetic oligonucleotide
  Sense strand starting at position 2720 of SEQ ID NO: 1244488
cagaguugucuagguagcu

SEQ ID NO: 1492419 - RNA, 19 nt, Artificial Sequence
  Description of Artificial Sequence: Synthetic oligonucleotide
  Antisense strand to SEQ ID NO: 1492418
agcuaccuagacaacucug

SEQ ID NO: 1492420 - RNA, 19 nt, Artificial Sequence
  Description of Artificial Sequence: Synthetic oligonucleotide
  Sense strand starting at position 2721 of SEQ ID NO: 1244488
agaguugucuagguagcuu

SEQ ID NO: 1492421 - RNA, 19 nt, Artificial Sequence
  Description of Artificial Sequence: Synthetic oligonucleotide
  Antisense strand to SEQ ID NO: 1492420
aagcuaccuagacaacucu

SEQ ID NO: 1492422 - RNA, 19 nt, Artificial Sequence
  Description of Artificial Sequence: Synthetic oligonucleotide
  Sense strand starting at position 2782 of SEQ ID NO: 1244488
cugucaugaucguuaccua

SEQ ID NO: 1492423 - RNA, 19 nt, Artificial Sequence
  Description of Artificial Sequence: Synthetic oligonucleotide
  Antisense strand to SEQ ID NO: 1492422
uagguaacgaucaugacag

SEQ ID NO: 1492424 - RNA, 19 nt, Artificial Sequence
  Description of Artificial Sequence: Synthetic oligonucleotide
  Sense strand starting at position 2783 of SEQ ID NO: 1244488
ugucaugaucguuaccuau

SEQ ID NO: 1492425 - RNA, 19 nt, Artificial Sequence
  Description of Artificial Sequence: Synthetic oligonucleotide
  Antisense strand to SEQ ID NO: 1492424
auagguaacgaucaugaca

SEQ ID NO: 1492426 - RNA, 19 nt, Artificial Sequence
  Description of Artificial Sequence: Synthetic oligonucleotide
  Sense strand starting at position 3029 of SEQ ID NO: 1244488
gcagcuaucguccaugcca

SEQ ID NO: 1492427 - RNA, 19 nt, Artificial Sequence
  Description of Artificial Sequence: Synthetic oligonucleotide
  Antisense strand to SEQ ID NO: 1492426
uggcauggacgauagcugc

SEQ ID NO: 1492428 - RNA, 19 nt, Artificial Sequence
  Description of Artificial Sequence: Synthetic oligonucleotide
  Sense strand starting at position 3072 of SEQ ID NO: 1244488
agcucaucugaccgaacau

SEQ ID NO: 1492429 - RNA, 19 nt, Artificial Sequence
  Description of Artificial Sequence: Synthetic oligonucleotide
  Antisense strand to SEQ ID NO: 1492428
auguucggucagaugagcu

SEQ ID NO: 1492430 - RNA, 19 nt, Artificial Sequence
  Description of Artificial Sequence: Synthetic oligonucleotide
  Sense strand starting at position 3170 of SEQ ID NO: 1244488
ggugaagugucucugggag

SEQ ID NO: 1492431 - RNA, 19 nt, Artificial Sequence
  Description of Artificial Sequence: Synthetic oligonucleotide
  Antisense strand to SEQ ID NO: 1492430
cucccagagacacuucacc

SEQ ID NO: 1492432 - RNA, 19 nt, Artificial Sequence
  Description of Artificial Sequence: Synthetic oligonucleotide
  Sense strand starting at position 3215 of SEQ ID NO: 1244488
cccagcuucucuuggagaa

SEQ ID NO: 1492433 - RNA, 19 nt, Artificial Sequence
  Description of Artificial Sequence: Synthetic oligonucleotide
  Antisense strand to SEQ ID NO: 1492432
uucuccaagagaagcuggg

SEQ ID NO: 1492434 - RNA, 19 nt, Artificial Sequence
  Description of Artificial Sequence: Synthetic oligonucleotide
  Sense strand starting at position 3216 of SEQ ID NO: 1244488
ccagcuucucuuggagaaa

SEQ ID NO: 1492435 - RNA, 19 nt, Artificial Sequence
  Description of Artificial Sequence: Synthetic oligonucleotide
  Antisense strand to SEQ ID NO: 1492434
uuucuccaagagaagcugg

SEQ ID NO: 1492436 - RNA, 19 nt, Artificial Sequence
  Description of Artificial Sequence: Synthetic oligonucleotide
  Sense strand starting at position 3309 of SEQ ID NO: 1244488
cuuucuuugcucggugaca

SEQ ID NO: 1492437 - RNA, 19 nt, Artificial Sequence
  Description of Artificial Sequence: Synthetic oligonucleotide
  Antisense strand to SEQ ID NO: 1492436
ugucaccgagcaaagaaag

SEQ ID NO: 1492438 - RNA, 19 nt, Artificial Sequence
  Description of Artificial Sequence: Synthetic oligonucleotide
  Sense strand starting at position 3310 of SEQ ID NO: 1244488
uuucuuugcucggugacau

SEQ ID NO: 1492439 - RNA, 19 nt, Artificial Sequence
  Description of Artificial Sequence: Synthetic oligonucleotide
  Antisense strand to SEQ ID NO: 1492438
augucaccgagcaaagaaa

SEQ ID NO: 1492440 - RNA, 19 nt, Artificial Sequence
  Description of Artificial Sequence: Synthetic oligonucleotide
  Sense strand starting at position 3311 of SEQ ID NO: 1244488
uucuuugcucggugacauu

SEQ ID NO: 1492441 - RNA, 19 nt, Artificial Sequence
  Description of Artificial Sequence: Synthetic oligonucleotide
  Antisense strand to SEQ ID NO: 1492440
aaugucaccgagcaaagaa

SEQ ID NO: 1492442 - RNA, 19 nt, Artificial Sequence
  Description of Artificial Sequence: Synthetic oligonucleotide
  Sense strand starting at position 3320 of SEQ ID NO: 1244488
cggugacauuagccuaaua

SEQ ID NO: 1492443 - RNA, 19 nt, Artificial Sequence
  Description of Artificial Sequence: Synthetic oligonucleotide
  Antisense strand to SEQ ID NO: 1492442
uauuaggcuaaugucaccg

SEQ ID NO: 1492444 - RNA, 19 nt, Artificial Sequence
  Description of Artificial Sequence: Synthetic oligonucleotide
  Sense strand starting at position 3322 of SEQ ID NO: 1244488
gugacauuagccuaauacg

SEQ ID NO: 1492445 - RNA, 19 nt, Artificial Sequence
  Description of Artificial Sequence: Synthetic oligonucleotide
  Antisense strand to SEQ ID NO: 1492444
cguauuaggcuaaugucac

SEQ ID NO: 1492446 - RNA, 19 nt, Artificial Sequence
  Description of Artificial Sequence: Synthetic oligonucleotide
  Sense strand starting at position 3331 of SEQ ID NO: 1244488
gccuaauacguguuaggcu

SEQ ID NO: 1492447 - RNA, 19 nt, Artificial Sequence
  Description of Artificial Sequence: Synthetic oligonucleotide
  Antisense strand to SEQ ID NO: 1492446
agccuaacacguauuaggc

SEQ ID NO: 1492448 - RNA, 19 nt, Artificial Sequence
  Description of Artificial Sequence: Synthetic oligonucleotide
  Sense strand starting at position 3338 of SEQ ID NO: 1244488
acguguuaggcuuuaugcu

SEQ ID NO: 1492449 - RNA, 19 nt, Artificial Sequence
  Description of Artificial Sequence: Synthetic oligonucleotide
  Antisense strand to SEQ ID NO: 1492448
agcauaaagccuaacacgu

SEQ ID NO: 1492450 - RNA, 19 nt, Artificial Sequence
  Description of Artificial Sequence: Synthetic oligonucleotide
  Sense strand starting at position 3345 of SEQ ID NO: 1244488
aggcuuuaugcugggaaca

SEQ ID NO: 1492451 - RNA, 19 nt, Artificial Sequence
  Description of Artificial Sequence: Synthetic oligonucleotide
  Antisense strand to SEQ ID NO: 1492450
uguucccagcauaaagccu

SEQ ID NO: 1492452 - RNA, 19 nt, Artificial Sequence
  Description of Artificial Sequence: Synthetic oligonucleotide
  Sense strand starting at position 3346 of SEQ ID NO: 1244488
ggcuuuaugcugggaacag

SEQ ID NO: 1492453 - RNA, 19 nt, Artificial Sequence
  Description of Artificial Sequence: Synthetic oligonucleotide
  Antisense strand to SEQ ID NO: 1492452
cuguucccagcauaaagcc

SEQ ID NO: 1492454 - RNA, 19 nt, Artificial Sequence
  Description of Artificial Sequence: Synthetic oligonucleotide
  Sense strand starting at position 3451 of SEQ ID NO: 1244488
gcuauaacugaaugugauu

SEQ ID NO: 1492455 - RNA, 19 nt, Artificial Sequence
  Description of Artificial Sequence: Synthetic oligonucleotide
  Antisense strand to SEQ ID NO: 1492454
aaucacauucaguuauagc

SEQ ID NO: 1492456 - RNA, 19 nt, Artificial Sequence
  Description of Artificial Sequence: Synthetic oligonucleotide
  Sense strand starting at position 3454 of SEQ ID NO: 1244488
auaacugaaugugauugua

SEQ ID NO: 1492457 - RNA, 19 nt, Artificial Sequence
  Description of Artificial Sequence: Synthetic oligonucleotide
  Antisense strand to SEQ ID NO: 1492456
uacaaucacauucaguuau

SEQ ID NO: 1492458 - RNA, 19 nt, Artificial Sequence
  Description of Artificial Sequence: Synthetic oligonucleotide
  Sense strand starting at position 3456 of SEQ ID NO: 1244488
aacugaaugugauuguaau

SEQ ID NO: 1492459 - RNA, 19 nt, Artificial Sequence
  Description of Artificial Sequence: Synthetic oligonucleotide
  Antisense strand to SEQ ID NO: 1492458
auuacaaucacauucaguu

SEQ ID NO: 1492460 - RNA, 19 nt, Artificial Sequence
  Description of Artificial Sequence: Synthetic oligonucleotide
  Sense strand starting at position 3457 of SEQ ID NO: 1244488
acugaaugugauuguaaua

SEQ ID NO: 1492461 - RNA, 19 nt, Artificial Sequence
  Description of Artificial Sequence: Synthetic oligonucleotide
  Antisense strand to SEQ ID NO: 1492460
uauuacaaucacauucagu

SEQ ID NO: 1492462 - RNA, 19 nt, Artificial Sequence
  Description of Artificial Sequence: Synthetic oligonucleotide
  Sense strand starting at position 3462 of SEQ ID NO: 1244488
augugauuguaauacagac

SEQ ID NO: 1492463 - RNA, 19 nt, Artificial Sequence
  Description of Artificial Sequence: Synthetic oligonucleotide
  Antisense strand to SEQ ID NO: 1492462
gucuguauuacaaucacau

SEQ ID NO: 1492464 - RNA, 19 nt, Artificial Sequence
  Description of Artificial Sequence: Synthetic oligonucleotide
  Sense strand starting at position 3509 of SEQ ID NO: 1244488
gggccucuuagcuggauga

SEQ ID NO: 1492465 - RNA, 19 nt, Artificial Sequence
  Description of Artificial Sequence: Synthetic oligonucleotide
  Antisense strand to SEQ ID NO: 1492464
ucauccagcuaagaggccc

SEQ ID NO: 1492466 - RNA, 19 nt, Artificial Sequence
  Description of Artificial Sequence: Synthetic oligonucleotide
  Sense strand starting at position 3510 of SEQ ID NO: 1244488
ggccucuuagcuggaugaa

SEQ ID NO: 1492467 - RNA, 19 nt, Artificial Sequence
  Description of Artificial Sequence: Synthetic oligonucleotide
  Antisense strand to SEQ ID NO: 1492466
uucauccagcuaagaggcc

SEQ ID NO: 1492468 - RNA, 19 nt, Artificial Sequence
  Description of Artificial Sequence: Synthetic oligonucleotide
  Sense strand starting at position 3511 of SEQ ID NO: 1244488
gccucuuagcuggaugaau

SEQ ID NO: 1492469 - RNA, 19 nt, Artificial Sequence
  Description of Artificial Sequence: Synthetic oligonucleotide
  Antisense strand to SEQ ID NO: 1492468
auucauccagcuaagaggc

SEQ ID NO: 1492470 - RNA, 19 nt, Artificial Sequence
  Description of Artificial Sequence: Synthetic oligonucleotide
  Sense strand starting at position 3513 of SEQ ID NO: 1244488
cucuuagcuggaugaauaa

SEQ ID NO: 1492471 - RNA, 19 nt, Artificial Sequence
  Description of Artificial Sequence: Synthetic oligonucleotide
  Antisense strand to SEQ ID NO: 1492470
uuauucauccagcuaagag

SEQ ID NO: 1492472 - RNA, 19 nt, Artificial Sequence
  Description of Artificial Sequence: Synthetic oligonucleotide
  Sense strand starting at position 3822 of SEQ ID NO: 1244488
uuuccaaguagcugggaua

SEQ ID NO: 1492473 - RNA, 19 nt, Artificial Sequence
  Description of Artificial Sequence: Synthetic oligonucleotide
  Antisense strand to SEQ ID NO: 1492472
uaucccagcuacuuggaaa

SEQ ID NO: 1492474 - RNA, 19 nt, Artificial Sequence
  Description of Artificial Sequence: Synthetic oligonucleotide
  Sense strand starting at position 44 of SEQ ID NO: 1244489
gugucauccucuccucauc

SEQ ID NO: 1492475 - RNA, 19 nt, Artificial Sequence
  Description of Artificial Sequence: Synthetic oligonucleotide
  Antisense strand to SEQ ID NO: 1492474
gaugaggagaggaugacac

SEQ ID NO: 1492476 - RNA, 19 nt, Artificial Sequence
  Description of Artificial Sequence: Synthetic oligonucleotide
  Sense strand starting at position 349 of SEQ ID NO: 1244489
gugucuuaaugcccaucca

SEQ ID NO: 1492477 - RNA, 19 nt, Artificial Sequence
  Description of Artificial Sequence: Synthetic oligonucleotide
  Antisense strand to SEQ ID NO: 1492476
uggaugggcauuaagacac

SEQ ID NO: 1492478 - RNA, 19 nt, Artificial Sequence
  Description of Artificial Sequence: Synthetic oligonucleotide
  Sense strand starting at position 594 of SEQ ID NO: 1244489
cccucacagcugugauguu

SEQ ID NO: 1492479 - RNA, 19 nt, Artificial Sequence
  Description of Artificial Sequence: Synthetic oligonucleotide
  Antisense strand to SEQ ID NO: 1492478
aacaucacagcugugaggg

SEQ ID NO: 1492480 - RNA, 19 nt, Artificial Sequence
  Description of Artificial Sequence: Synthetic oligonucleotide
  Sense strand starting at position 604 of SEQ ID NO: 1244489
ugugauguuucuguaauua

SEQ ID NO: 1492481 - RNA, 19 nt, Artificial Sequence
  Description of Artificial Sequence: Synthetic oligonucleotide
  Antisense strand to SEQ ID NO: 1492480
uaauuacagaaacaucaca

SEQ ID NO: 1492482 - RNA, 19 nt, Artificial Sequence
  Description of Artificial Sequence: Synthetic oligonucleotide
  Sense strand starting at position 614 of SEQ ID NO: 1244489
cuguaauuagggugcaguu

SEQ ID NO: 1492483 - RNA, 19 nt, Artificial Sequence
  Description of Artificial Sequence: Synthetic oligonucleotide
  Antisense strand to SEQ ID NO: 1492482
aacugcacccuaauuacag

SEQ ID NO: 1492484 - RNA, 19 nt, Artificial Sequence
  Description of Artificial Sequence: Synthetic oligonucleotide
  Sense strand starting at position 666 of SEQ ID NO: 1244489
ccaggaggcuuuccuacau

SEQ ID NO: 1492485 - RNA, 19 nt, Artificial Sequence
  Description of Artificial Sequence: Synthetic oligonucleotide
  Antisense strand to SEQ ID NO: 1492484
auguaggaaagccuccugg

SEQ ID NO: 1492486 - RNA, 19 nt, Artificial Sequence
  Description of Artificial Sequence: Synthetic oligonucleotide
  Sense strand starting at position 977 of SEQ ID NO: 1244489
gggcgauccugaccuagca

SEQ ID NO: 1492487 - RNA, 19 nt, Artificial Sequence
  Description of Artificial Sequence: Synthetic oligonucleotide
  Antisense strand to SEQ ID NO: 1492486
ugcuaggucaggaucgccc

SEQ ID NO: 1492488 - RNA, 19 nt, Artificial Sequence
  Description of Artificial Sequence: Synthetic oligonucleotide
  Sense strand starting at position 2290 of SEQ ID NO: 1244489
ccuuccuuuccagaguugu

SEQ ID NO: 1492489 - RNA, 19 nt, Artificial Sequence
  Description of Artificial Sequence: Synthetic oligonucleotide
  Antisense strand to SEQ ID NO: 1492488
acaacucuggaaaggaagg

SEQ ID NO: 1492490 - RNA, 19 nt, Artificial Sequence
  Description of Artificial Sequence: Synthetic oligonucleotide
  Sense strand starting at position 2296 of SEQ ID NO: 1244489
uuuccagaguugucuaggu

SEQ ID NO: 1492491 - RNA, 19 nt, Artificial Sequence
  Description of Artificial Sequence: Synthetic oligonucleotide
  Antisense strand to SEQ ID NO: 1492490
accuagacaacucuggaaa

SEQ ID NO: 1492492 - RNA, 19 nt, Artificial Sequence
  Description of Artificial Sequence: Synthetic oligonucleotide
  Sense strand starting at position 2298 of SEQ ID NO: 1244489
uccagaguugucuagguag

SEQ ID NO: 1492493 - RNA, 19 nt, Artificial Sequence
  Description of Artificial Sequence: Synthetic oligonucleotide
  Antisense strand to SEQ ID NO: 1492492
cuaccuagacaacucugga

SEQ ID NO: 1492494 - RNA, 19 nt, Artificial Sequence
  Description of Artificial Sequence: Synthetic oligonucleotide
  Sense strand starting at position 2300 of SEQ ID NO: 1244489
cagaguugucuagguagcu

SEQ ID NO: 1492495 - RNA, 19 nt, Artificial Sequence
  Description of Artificial Sequence: Synthetic oligonucleotide
  Antisense strand to SEQ ID NO: 1492494
agcuaccuagacaacucug

SEQ ID NO: 1492496 - RNA, 19 nt, Artificial Sequence
  Description of Artificial Sequence: Synthetic oligonucleotide
  Sense strand starting at position 2301 of SEQ ID NO: 1244489
agaguugucuagguagcuu

SEQ ID NO: 1492497 - RNA, 19 nt, Artificial Sequence
  Description of Artificial Sequence: Synthetic oligonucleotide
  Antisense strand to SEQ ID NO: 1492496
aagcuaccuagacaacucu

SEQ ID NO: 1492498 - RNA, 19 nt, Artificial Sequence
  Description of Artificial Sequence: Synthetic oligonucleotide
  Sense strand starting at position 2362 of SEQ ID NO: 1244489
cugucaugaucguuaccua

SEQ ID NO: 1492499 - RNA, 19 nt, Artificial Sequence
  Description of Artificial Sequence: Synthetic oligonucleotide
  Antisense strand to SEQ ID NO: 1492498
uagguaacgaucaugacag

SEQ ID NO: 1492500 - RNA, 19 nt, Artificial Sequence
  Description of Artificial Sequence: Synthetic oligonucleotide
  Sense strand starting at position 2363 of SEQ ID NO: 1244489
ugucaugaucguuaccuau

SEQ ID NO: 1492501 - RNA, 19 nt, Artificial Sequence
  Description of Artificial Sequence: Synthetic oligonucleotide
  Antisense strand to SEQ ID NO: 1492500
auagguaacgaucaugaca

SEQ ID NO: 1492502 - RNA, 19 nt, Artificial Sequence
  Description of Artificial Sequence: Synthetic oligonucleotide
  Sense strand starting at position 2652 of SEQ ID NO: 1244489
agcucaucugaccgaacau

SEQ ID NO: 1492503 - RNA, 19 nt, Artificial Sequence
  Description of Artificial Sequence: Synthetic oligonucleotide
  Antisense strand to SEQ ID NO: 1492502
auguucggucagaugagcu

SEQ ID NO: 1492504 - RNA, 19 nt, Artificial Sequence
  Description of Artificial Sequence: Synthetic oligonucleotide
  Sense strand starting at position 2750 of SEQ ID NO: 1244489
ggugaagugucucugggag

SEQ ID NO: 1492505 - RNA, 19 nt, Artificial Sequence
  Description of Artificial Sequence: Synthetic oligonucleotide
  Antisense strand to SEQ ID NO: 1492504
cucccagagacacuucacc

SEQ ID NO: 1492506 - RNA, 19 nt, Artificial Sequence
  Description of Artificial Sequence: Synthetic oligonucleotide
  Sense strand starting at position 2796 of SEQ ID NO: 1244489
ccagcuucucuuggagaaa

SEQ ID NO: 1492507 - RNA, 19 nt, Artificial Sequence
  Description of Artificial Sequence: Synthetic oligonucleotide
  Antisense strand to SEQ ID NO: 1492506
uuucuccaagagaagcugg

SEQ ID NO: 1492508 - RNA, 19 nt, Artificial Sequence
  Description of Artificial Sequence: Synthetic oligonucleotide
  Sense strand starting at position 2889 of SEQ ID NO: 1244489
cuuucuuugcucggugaca

SEQ ID NO: 1492509 - RNA, 19 nt, Artificial Sequence
  Description of Artificial Sequence: Synthetic oligonucleotide
  Antisense strand to SEQ ID NO: 1492508
ugucaccgagcaaagaaag

SEQ ID NO: 1492510 - RNA, 19 nt, Artificial Sequence
  Description of Artificial Sequence: Synthetic oligonucleotide
  Sense strand starting at position 2890 of SEQ ID NO: 1244489
uuucuuugcucggugacau

SEQ ID NO: 1492511 - RNA, 19 nt, Artificial Sequence
  Description of Artificial Sequence: Synthetic oligonucleotide
  Antisense strand to SEQ ID NO: 1492510
augucaccgagcaaagaaa

SEQ ID NO: 1492512 - RNA, 19 nt, Artificial Sequence
  Description of Artificial Sequence: Synthetic oligonucleotide
  Sense strand starting at position 2891 of SEQ ID NO: 1244489
uucuuugcucggugacauu

SEQ ID NO: 1492513 - RNA, 19 nt, Artificial Sequence
  Description of Artificial Sequence: Synthetic oligonucleotide
  Antisense strand to SEQ ID NO: 1492512
aaugucaccgagcaaagaa

SEQ ID NO: 1492514 - RNA, 19 nt, Artificial Sequence
  Description of Artificial Sequence: Synthetic oligonucleotide
  Sense strand starting at position 2900 of SEQ ID NO: 1244489
cggugacauuagccuaaua

SEQ ID NO: 1492515 - RNA, 19 nt, Artificial Sequence
  Description of Artificial Sequence: Synthetic oligonucleotide
  Antisense strand to SEQ ID NO: 1492514
uauuaggcuaaugucaccg

SEQ ID NO: 1492516 - RNA, 19 nt, Artificial Sequence
  Description of Artificial Sequence: Synthetic oligonucleotide
  Sense strand starting at position 2902 of SEQ ID NO: 1244489
gugacauuagccuaauacg

SEQ ID NO: 1492517 - RNA, 19 nt, Artificial Sequence
  Description of Artificial Sequence: Synthetic oligonucleotide
  Antisense strand to SEQ ID NO: 1492516
cguauuaggcuaaugucac

SEQ ID NO: 1492518 - RNA, 19 nt, Artificial Sequence
  Description of Artificial Sequence: Synthetic oligonucleotide
  Sense strand starting at position 2911 of SEQ ID NO: 1244489
gccuaauacguguuaggcu

SEQ ID NO: 1492519 - RNA, 19 nt, Artificial Sequence
  Description of Artificial Sequence: Synthetic oligonucleotide
  Antisense strand to SEQ ID NO: 1492518
agccuaacacguauuaggc

SEQ ID NO: 1492520 - RNA, 19 nt, Artificial Sequence
  Description of Artificial Sequence: Synthetic oligonucleotide
  Sense strand starting at position 2918 of SEQ ID NO: 1244489
acguguuaggcuuuaugcu

SEQ ID NO: 1492521 - RNA, 19 nt, Artificial Sequence
  Description of Artificial Sequence: Synthetic oligonucleotide
  Antisense strand to SEQ ID NO: 1492520
agcauaaagccuaacacgu

SEQ ID NO: 1492522 - RNA, 19 nt, Artificial Sequence
  Description of Artificial Sequence: Synthetic oligonucleotide
  Sense strand starting at position 2925 of SEQ ID NO: 1244489
aggcuuuaugcugggaaca

SEQ ID NO: 1492523 - RNA, 19 nt, Artificial Sequence
  Description of Artificial Sequence: Synthetic oligonucleotide
  Antisense strand to SEQ ID NO: 1492522
uguucccagcauaaagccu

SEQ ID NO: 1492524 - RNA, 19 nt, Artificial Sequence
  Description of Artificial Sequence: Synthetic oligonucleotide
  Sense strand starting at position 2926 of SEQ ID NO: 1244489
ggcuuuaugcugggaacag

SEQ ID NO: 1492525 - RNA, 19 nt, Artificial Sequence
  Description of Artificial Sequence: Synthetic oligonucleotide
  Antisense strand to SEQ ID NO: 1492524
cuguucccagcauaaagcc

SEQ ID NO: 1492526 - RNA, 19 nt, Artificial Sequence
  Description of Artificial Sequence: Synthetic oligonucleotide
  Sense strand starting at position 3031 of SEQ ID NO: 1244489
gcuauaacugaaugugauu

SEQ ID NO: 1492527 - RNA, 19 nt, Artificial Sequence
  Description of Artificial Sequence: Synthetic oligonucleotide
  Antisense strand to SEQ ID NO: 1492526
aaucacauucaguuauagc

SEQ ID NO: 1492528 - RNA, 19 nt, Artificial Sequence
  Description of Artificial Sequence: Synthetic oligonucleotide
  Sense strand starting at position 3036 of SEQ ID NO: 1244489
aacugaaugugauuguaau

SEQ ID NO: 1492529 - RNA, 19 nt, Artificial Sequence
  Description of Artificial Sequence: Synthetic oligonucleotide
  Antisense strand to SEQ ID NO: 1492528
auuacaaucacauucaguu

SEQ ID NO: 1492530 - RNA, 19 nt, Artificial Sequence
  Description of Artificial Sequence: Synthetic oligonucleotide
  Sense strand starting at position 3037 of SEQ ID NO: 1244489
acugaaugugauuguaaua

SEQ ID NO: 1492531 - RNA, 19 nt, Artificial Sequence
  Description of Artificial Sequence: Synthetic oligonucleotide
  Antisense strand to SEQ ID NO: 1492530
uauuacaaucacauucagu

SEQ ID NO: 1492532 - RNA, 19 nt, Artificial Sequence
  Description of Artificial Sequence: Synthetic oligonucleotide
  Sense strand starting at position 3089 of SEQ ID NO: 1244489
gggccucuuagcuggauga

SEQ ID NO: 1492533 - RNA, 19 nt, Artificial Sequence
  Description of Artificial Sequence: Synthetic oligonucleotide
  Antisense strand to SEQ ID NO: 1492532
ucauccagcuaagaggccc

SEQ ID NO: 1492534 - RNA, 19 nt, Artificial Sequence
  Description of Artificial Sequence: Synthetic oligonucleotide
  Sense strand starting at position 3090 of SEQ ID NO: 1244489
ggccucuuagcuggaugaa

SEQ ID NO: 1492535 - RNA, 19 nt, Artificial Sequence
  Description of Artificial Sequence: Synthetic oligonucleotide
  Antisense strand to SEQ ID NO: 1492534
uucauccagcuaagaggcc

SEQ ID NO: 1492536 - RNA, 19 nt, Artificial Sequence
  Description of Artificial Sequence: Synthetic oligonucleotide
  Sense strand starting at position 3091 of SEQ ID NO: 1244489
gccucuuagcuggaugaau

SEQ ID NO: 1492537 - RNA, 19 nt, Artificial Sequence
  Description of Artificial Sequence: Synthetic oligonucleotide
  Antisense strand to SEQ ID NO: 1492536
auucauccagcuaagaggc

SEQ ID NO: 1492538 - RNA, 19 nt, Artificial Sequence
  Description of Artificial Sequence: Synthetic oligonucleotide
  Sense strand starting at position 3093 of SEQ ID NO: 1244489
cucuuagcuggaugaauaa

SEQ ID NO: 1492539 - RNA, 19 nt, Artificial Sequence
  Description of Artificial Sequence: Synthetic oligonucleotide
  Antisense strand to SEQ ID NO: 1492538
uuauucauccagcuaagag

SEQ ID NO: 1492540 - RNA, 19 nt, Artificial Sequence
  Description of Artificial Sequence: Synthetic oligonucleotide
  Sense strand starting at position 3402 of SEQ ID NO: 1244489
uuuccaaguagcugggaua

SEQ ID NO: 1492541 - RNA, 19 nt, Artificial Sequence
  Description of Artificial Sequence: Synthetic oligonucleotide
  Antisense strand to SEQ ID NO: 1492540
uaucccagcuacuuggaaa

SEQ ID NO: 1492542 - RNA, 19 nt, Artificial Sequence
  Description of Artificial Sequence: Synthetic oligonucleotide
  Sense strand starting at position 3622 of SEQ ID NO: 1244489
ucacaagucgauugacuuu

SEQ ID NO: 1492543 - RNA, 19 nt, Artificial Sequence
  Description of Artificial Sequence: Synthetic oligonucleotide
  Antisense strand to SEQ ID NO: 1492542
aaagucaaucgacuuguga

SEQ ID NO: 1492544 - RNA, 19 nt, Artificial Sequence
  Description of Artificial Sequence: Synthetic oligonucleotide
  Sense strand starting at position 3746 of SEQ ID NO: 1244489
aucucuucugucuggauca

SEQ ID NO: 1492545 - RNA, 19 nt, Artificial Sequence
  Description of Artificial Sequence: Synthetic oligonucleotide
  Antisense strand to SEQ ID NO: 1492544
ugauccagacagaagagau

SEQ ID NO: 1492546 - RNA, 19 nt, Artificial Sequence
  Description of Artificial Sequence: Synthetic oligonucleotide
  Sense strand starting at position 3748 of SEQ ID NO: 1244489
cucuucugucuggaucauu

SEQ ID NO: 1492547 - RNA, 19 nt, Artificial Sequence
  Description of Artificial Sequence: Synthetic oligonucleotide
  Antisense strand to SEQ ID NO: 1492546
aaugauccagacagaagag

SEQ ID NO: 1492548 - RNA, 19 nt, Artificial Sequence
  Description of Artificial Sequence: Synthetic oligonucleotide
  Sense strand starting at position 3800 of SEQ ID NO: 1244489
gucucagcugcuuagucau

SEQ ID NO: 1492549 - RNA, 19 nt, Artificial Sequence
  Description of Artificial Sequence: Synthetic oligonucleotide
  Antisense strand to SEQ ID NO: 1492548
augacuaagcagcugagac

SEQ ID NO: 1492550 - RNA, 19 nt, Artificial Sequence
  Description of Artificial Sequence: Synthetic oligonucleotide
  Sense strand starting at position 3883 of SEQ ID NO: 1244489
cuuagaucuccuggucuua

SEQ ID NO: 1492551 - RNA, 19 nt, Artificial Sequence
  Description of Artificial Sequence: Synthetic oligonucleotide
  Antisense strand to SEQ ID NO: 1492550
uaagaccaggagaucuaag

SEQ ID NO: 1492552 - RNA, 19 nt, Artificial Sequence
  Description of Artificial Sequence: Synthetic oligonucleotide
  Sense strand starting at position 3926 of SEQ ID NO: 1244489
ugucauccagacugggaau

SEQ ID NO: 1492553 - RNA, 19 nt, Artificial Sequence
  Description of Artificial Sequence: Synthetic oligonucleotide
  Antisense strand to SEQ ID NO: 1492552
auucccagucuggaugaca

SEQ ID NO: 1492554 - RNA, 19 nt, Artificial Sequence
  Description of Artificial Sequence: Synthetic oligonucleotide
  Sense strand starting at position 119 of SEQ ID NO: 1244490
ccaucaguccagcaggaua

SEQ ID NO: 1492555 - RNA, 19 nt, Artificial Sequence
  Description of Artificial Sequence: Synthetic oligonucleotide
  Antisense strand to SEQ ID NO: 1492554
uauccugcuggacugaugg

SEQ ID NO: 1492556 - RNA, 19 nt, Artificial Sequence
  Description of Artificial Sequence: Synthetic oligonucleotide
  Sense strand starting at position 121 of SEQ ID NO: 1244490
aucaguccagcaggauaau

SEQ ID NO: 1492557 - RNA, 19 nt, Artificial Sequence
  Description of Artificial Sequence: Synthetic oligonucleotide
  Antisense strand to SEQ ID NO: 1492556
auuauccugcuggacugau

SEQ ID NO: 1492558 - RNA, 19 nt, Artificial Sequence
  Description of Artificial Sequence: Synthetic oligonucleotide
  Sense strand starting at position 122 of SEQ ID NO: 1244490
ucaguccagcaggauaauu

SEQ ID NO: 1492559 - RNA, 19 nt, Artificial Sequence
  Description of Artificial Sequence: Synthetic oligonucleotide
  Antisense strand to SEQ ID NO: 1492558
aauuauccugcuggacuga

SEQ ID NO: 1492560 - RNA, 19 nt, Artificial Sequence
  Description of Artificial Sequence: Synthetic oligonucleotide
  Sense strand starting at position 124 of SEQ ID NO: 1244490
aguccagcaggauaauuau

SEQ ID NO: 1492561 - RNA, 19 nt, Artificial Sequence
  Description of Artificial Sequence: Synthetic oligonucleotide
  Antisense strand to SEQ ID NO: 1492560
auaauuauccugcuggacu

SEQ ID NO: 1492562 - RNA, 19 nt, Artificial Sequence
  Description of Artificial Sequence: Synthetic oligonucleotide
  Sense strand starting at position 284 of SEQ ID NO: 1244490
aggcuugacucaccagcua

SEQ ID NO: 1492563 - RNA, 19 nt, Artificial Sequence
  Description of Artificial Sequence: Synthetic oligonucleotide
  Antisense strand to SEQ ID NO: 1492562
uagcuggugagucaagccu

SEQ ID NO: 1492564 - RNA, 19 nt, Artificial Sequence
  Description of Artificial Sequence: Synthetic oligonucleotide
  Sense strand starting at position 324 of SEQ ID NO: 1244490
uccaaagagcugugcaauu

SEQ ID NO: 1492565 - RNA, 19 nt, Artificial Sequence
  Description of Artificial Sequence: Synthetic oligonucleotide
  Antisense strand to SEQ ID NO: 1492564
aauugcacagcucuuugga

SEQ ID NO: 1492566 - RNA, 19 nt, Artificial Sequence
  Description of Artificial Sequence: Synthetic oligonucleotide
  Sense strand starting at position 337 of SEQ ID NO: 1244490
gcaauuugccugcaaccca

SEQ ID NO: 1492567 - RNA, 19 nt, Artificial Sequence
  Description of Artificial Sequence: Synthetic oligonucleotide
  Antisense strand to SEQ ID NO: 1492566
uggguugcaggcaaauugc

SEQ ID NO: 1492568 - RNA, 19 nt, Artificial Sequence
  Description of Artificial Sequence: Synthetic oligonucleotide
  Sense strand starting at position 608 of SEQ ID NO: 1244490
uguagccucacaggugaau

SEQ ID NO: 1492569 - RNA, 19 nt, Artificial Sequence
  Description of Artificial Sequence: Synthetic oligonucleotide
  Antisense strand to SEQ ID NO: 1492568
auucaccugugaggcuaca

SEQ ID NO: 1492570 - RNA, 19 nt, Artificial Sequence
  Description of Artificial Sequence: Synthetic oligonucleotide
  Sense strand starting at position 857 of SEQ ID NO: 1244490
acagcaaugcacugaaauc

SEQ ID NO: 1492571 - RNA, 19 nt, Artificial Sequence
  Description of Artificial Sequence: Synthetic oligonucleotide
  Antisense strand to SEQ ID NO: 1492570
gauuucagugcauugcugu

SEQ ID NO: 1492572 - RNA, 19 nt, Artificial Sequence
  Description of Artificial Sequence: Synthetic oligonucleotide
  Sense strand starting at position 1034 of SEQ ID NO: 1244490
guggcaugcgccucuaauu

SEQ ID NO: 1492573 - RNA, 19 nt, Artificial Sequence
  Description of Artificial Sequence: Synthetic oligonucleotide
  Antisense strand to SEQ ID NO: 1492572
aauuagaggcgcaugccac

SEQ ID NO: 1492574 - RNA, 19 nt, Artificial Sequence
  Description of Artificial Sequence: Synthetic oligonucleotide
  Sense strand starting at position 1282 of SEQ ID NO: 1244490
uagacuagucaagaguagu

SEQ ID NO: 1492575 - RNA, 19 nt, Artificial Sequence
  Description of Artificial Sequence: Synthetic oligonucleotide
  Antisense strand to SEQ ID NO: 1492574
acuacucuugacuagucua

SEQ ID NO: 1492576 - RNA, 19 nt, Artificial Sequence
  Description of Artificial Sequence: Synthetic oligonucleotide
  Sense strand starting at position 1292 of SEQ ID NO: 1244490
aagaguagucgugagaaca

SEQ ID NO: 1492577 - RNA, 19 nt, Artificial Sequence
  Description of Artificial Sequence: Synthetic oligonucleotide
  Antisense strand to SEQ ID NO: 1492576
uguucucacgacuacucuu

SEQ ID NO: 1492578 - RNA, 19 nt, Artificial Sequence
  Description of Artificial Sequence: Synthetic oligonucleotide
  Sense strand starting at position 1385 of SEQ ID NO: 1244490
caaggaaacgugugcuacu

SEQ ID NO: 1492579 - RNA, 19 nt, Artificial Sequence
  Description of Artificial Sequence: Synthetic oligonucleotide
  Antisense strand to SEQ ID NO: 1492578
aguagcacacguuuccuug

SEQ ID NO: 1492580 - RNA, 19 nt, Artificial Sequence
  Description of Artificial Sequence: Synthetic oligonucleotide
  Sense strand starting at position 1386 of SEQ ID NO: 1244490
aaggaaacgugugcuacuu

SEQ ID NO: 1492581 - RNA, 19 nt, Artificial Sequence
  Description of Artificial Sequence: Synthetic oligonucleotide
  Antisense strand to SEQ ID NO: 1492580
aaguagcacacguuuccuu

SEQ ID NO: 1492582 - RNA, 19 nt, Artificial Sequence
  Description of Artificial Sequence: Synthetic oligonucleotide
  Sense strand starting at position 1418 of SEQ ID NO: 1244490
accagaacuuggcuuagau

SEQ ID NO: 1492583 - RNA, 19 nt, Artificial Sequence
  Description of Artificial Sequence: Synthetic oligonucleotide
  Antisense strand to SEQ ID NO: 1492582
aucuaagccaaguucuggu

SEQ ID NO: 1492584 - RNA, 19 nt, Artificial Sequence
  Description of Artificial Sequence: Synthetic oligonucleotide
  Sense strand starting at position 1464 of SEQ ID NO: 1244490
ggauaaacuuuaguucuca

SEQ ID NO: 1492585 - RNA, 19 nt, Artificial Sequence
  Description of Artificial Sequence: Synthetic oligonucleotide
  Antisense strand to SEQ ID NO: 1492584
ugagaacuaaaguuuaucc

SEQ ID NO: 1492586 - RNA, 19 nt, Artificial Sequence
  Description of Artificial Sequence: Synthetic oligonucleotide
  Sense strand starting at position 1493 of SEQ ID NO: 1244490
uuuccuuaauuguuagaag

SEQ ID NO: 1492587 - RNA, 19 nt, Artificial Sequence
  Description of Artificial Sequence: Synthetic oligonucleotide
  Antisense strand to SEQ ID NO: 1492586
cuucuaacaauuaaggaaa

SEQ ID NO: 1492588 - RNA, 19 nt, Artificial Sequence
  Description of Artificial Sequence: Synthetic oligonucleotide
  Sense strand starting at position 1523 of SEQ ID NO: 1244490
agcaauuuaaugugcguuu

SEQ ID NO: 1492589 - RNA, 19 nt, Artificial Sequence
  Description of Artificial Sequence: Synthetic oligonucleotide
  Antisense strand to SEQ ID NO: 1492588
aaacgcacauuaaauugcu

SEQ ID NO: 1492590 - RNA, 19 nt, Artificial Sequence
  Description of Artificial Sequence: Synthetic oligonucleotide
  Sense strand starting at position 1574 of SEQ ID NO: 1244490
guagaaacaucuguuacag

SEQ ID NO: 1492591 - RNA, 19 nt, Artificial Sequence
  Description of Artificial Sequence: Synthetic oligonucleotide
  Antisense strand to SEQ ID NO: 1492590
cuguaacagauguuucuac

SEQ ID NO: 1492592 - RNA, 19 nt, Artificial Sequence
  Description of Artificial Sequence: Synthetic oligonucleotide
  Sense strand starting at position 1583 of SEQ ID NO: 1244490
ucuguuacaguggaaacau

SEQ ID NO: 1492593 - RNA, 19 nt, Artificial Sequence
  Description of Artificial Sequence: Synthetic oligonucleotide
  Antisense strand to SEQ ID NO: 1492592
auguuuccacuguaacaga

SEQ ID NO: 1492594 - RNA, 19 nt, Artificial Sequence
  Description of Artificial Sequence: Synthetic oligonucleotide
  Sense strand starting at position 1653 of SEQ ID NO: 1244490
gaaacauguugauuccaga

SEQ ID NO: 1492595 - RNA, 19 nt, Artificial Sequence
  Description of Artificial Sequence: Synthetic oligonucleotide
  Antisense strand to SEQ ID NO: 1492594
ucuggaaucaacauguuuc

SEQ ID NO: 1492596 - RNA, 19 nt, Artificial Sequence
  Description of Artificial Sequence: Synthetic oligonucleotide
  Sense strand starting at position 1675 of SEQ ID NO: 1244490
uucgaugcucauggaguua

SEQ ID NO: 1492597 - RNA, 19 nt, Artificial Sequence
  Description of Artificial Sequence: Synthetic oligonucleotide
  Antisense strand to SEQ ID NO: 1492596
uaacuccaugagcaucgaa

SEQ ID NO: 1492598 - RNA, 19 nt, Artificial Sequence
  Description of Artificial Sequence: Synthetic oligonucleotide
  Sense strand starting at position 1690 of SEQ ID NO: 1244490
guuaaagugauguggaaac

SEQ ID NO: 1492599 - RNA, 19 nt, Artificial Sequence
  Description of Artificial Sequence: Synthetic oligonucleotide
  Antisense strand to SEQ ID NO: 1492598
guuuccacaucacuuuaac

SEQ ID NO: 1492600 - RNA, 19 nt, Artificial Sequence
  Description of Artificial Sequence: Synthetic oligonucleotide
  Sense strand starting at position 1831 of SEQ ID NO: 1244490
ccaugacucgcucagcaga

SEQ ID NO: 1492601 - RNA, 19 nt, Artificial Sequence
  Description of Artificial Sequence: Synthetic oligonucleotide
  Antisense strand to SEQ ID NO: 1492600
ucugcugagcgagucaugg

SEQ ID NO: 1492602 - RNA, 19 nt, Artificial Sequence
  Description of Artificial Sequence: Synthetic oligonucleotide
  Sense strand starting at position 1861 of SEQ ID NO: 1244490
acaagucaccguugagaaa

SEQ ID NO: 1492603 - RNA, 19 nt, Artificial Sequence
  Description of Artificial Sequence: Synthetic oligonucleotide
  Antisense strand to SEQ ID NO: 1492602
uuucucaacggugacuugu

SEQ ID NO: 1492604 - RNA, 19 nt, Artificial Sequence
  Description of Artificial Sequence: Synthetic oligonucleotide
  Sense strand starting at position 1896 of SEQ ID NO: 1244490
cagaaauugcucuggucac

SEQ ID NO: 1492605 - RNA, 19 nt, Artificial Sequence
  Description of Artificial Sequence: Synthetic oligonucleotide
  Antisense strand to SEQ ID NO: 1492604
gugaccagagcaauuucug

SEQ ID NO: 1492606 - RNA, 19 nt, Artificial Sequence
  Description of Artificial Sequence: Synthetic oligonucleotide
  Sense strand starting at position 2065 of SEQ ID NO: 1244490
uguuuaguuucuuuaggga

SEQ ID NO: 1492607 - RNA, 19 nt, Artificial Sequence
  Description of Artificial Sequence: Synthetic oligonucleotide
  Antisense strand to SEQ ID NO: 1492606
ucccuaaagaaacuaaaca

SEQ ID NO: 1492608 - RNA, 19 nt, Artificial Sequence
  Description of Artificial Sequence: Synthetic oligonucleotide
  Sense strand starting at position 2100 of SEQ ID NO: 1244490
ugacauuugccuuggcguu

SEQ ID NO: 1492609 - RNA, 19 nt, Artificial Sequence
  Description of Artificial Sequence: Synthetic oligonucleotide
  Antisense strand to SEQ ID NO: 1492608
aacgccaaggcaaauguca

SEQ ID NO: 1492610 - RNA, 19 nt, Artificial Sequence
  Description of Artificial Sequence: Synthetic oligonucleotide
  Sense strand starting at position 2235 of SEQ ID NO: 1244490
ccagaaagaucucucugcu

SEQ ID NO: 1492611 - RNA, 19 nt, Artificial Sequence
  Description of Artificial Sequence: Synthetic oligonucleotide
  Antisense strand to SEQ ID NO: 1492610
agcagagagaucuuucugg

SEQ ID NO: 1492612 - RNA, 19 nt, Artificial Sequence
  Description of Artificial Sequence: Synthetic oligonucleotide
  Sense strand starting at position 2876 of SEQ ID NO: 1244490
gcgauaaggagugacaugu

SEQ ID NO: 1492613 - RNA, 19 nt, Artificial Sequence
  Description of Artificial Sequence: Synthetic oligonucleotide
  Antisense strand to SEQ ID NO: 1492612
acaugucacuccuuaucgc

SEQ ID NO: 1492614 - RNA, 19 nt, Artificial Sequence
  Description of Artificial Sequence: Synthetic oligonucleotide
  Sense strand starting at position 2886 of SEQ ID NO: 1244490
gugacauguuaaccaaaua

SEQ ID NO: 1492615 - RNA, 19 nt, Artificial Sequence
  Description of Artificial Sequence: Synthetic oligonucleotide
  Antisense strand to SEQ ID NO: 1492614
uauuugguuaacaugucac

SEQ ID NO: 1492616 - RNA, 19 nt, Artificial Sequence
  Description of Artificial Sequence: Synthetic oligonucleotide
  Sense strand starting at position 2903 of SEQ ID NO: 1244490
uaucguacccuuuagaaga

SEQ ID NO: 1492617 - RNA, 19 nt, Artificial Sequence
  Description of Artificial Sequence: Synthetic oligonucleotide
  Antisense strand to SEQ ID NO: 1492616
ucuucuaaaggguacgaua

SEQ ID NO: 1492618 - RNA, 19 nt, Artificial Sequence
  Description of Artificial Sequence: Synthetic oligonucleotide
  Sense strand starting at position 3691 of SEQ ID NO: 1244490
acuagaaucugauccuuug

SEQ ID NO: 1492619 - RNA, 19 nt, Artificial Sequence
  Description of Artificial Sequence: Synthetic oligonucleotide
  Antisense strand to SEQ ID NO: 1492618
caaaggaucagauucuagu

SEQ ID NO: 1492620 - RNA, 19 nt, Artificial Sequence
  Description of Artificial Sequence: Synthetic oligonucleotide
  Sense strand starting at position 3694 of SEQ ID NO: 1244490
agaaucugauccuuugcau

SEQ ID NO: 1492621 - RNA, 19 nt, Artificial Sequence
  Description of Artificial Sequence: Synthetic oligonucleotide
  Antisense strand to SEQ ID NO: 1492620
augcaaaggaucagauucu

SEQ ID NO: 1492622 - RNA, 19 nt, Artificial Sequence
  Description of Artificial Sequence: Synthetic oligonucleotide
  Sense strand starting at position 3734 of SEQ ID NO: 1244490
guuacagucauagagucaa

SEQ ID NO: 1492623 - RNA, 19 nt, Artificial Sequence
  Description of Artificial Sequence: Synthetic oligonucleotide
  Antisense strand to SEQ ID NO: 1492622
uugacucuaugacuguaac

SEQ ID NO: 1492624 - RNA, 19 nt, Artificial Sequence
  Description of Artificial Sequence: Synthetic oligonucleotide
  Sense strand starting at position 3745 of SEQ ID NO: 1244490
agagucaaacguuauggga

SEQ ID NO: 1492625 - RNA, 19 nt, Artificial Sequence
  Description of Artificial Sequence: Synthetic oligonucleotide
  Antisense strand to SEQ ID NO: 1492624
ucccauaacguuugacucu

SEQ ID NO: 1492626 - RNA, 19 nt, Artificial Sequence
  Description of Artificial Sequence: Synthetic oligonucleotide
  Sense strand starting at position 3779 of SEQ ID NO: 1244490
gcaaaccauguggauauua

SEQ ID NO: 1492627 - RNA, 19 nt, Artificial Sequence
  Description of Artificial Sequence: Synthetic oligonucleotide
  Antisense strand to SEQ ID NO: 1492626
uaauauccacaugguuugc

SEQ ID NO: 1492628 - RNA, 19 nt, Artificial Sequence
  Description of Artificial Sequence: Synthetic oligonucleotide
  Sense strand starting at position 3841 of SEQ ID NO: 1244490
guuucuuuauagucuguaa

SEQ ID NO: 1492629 - RNA, 19 nt, Artificial Sequence
  Description of Artificial Sequence: Synthetic oligonucleotide
  Antisense strand to SEQ ID NO: 1492628
uuacagacuauaaagaaac

SEQ ID NO: 1492630 - RNA, 19 nt, Artificial Sequence
  Description of Artificial Sequence: Synthetic oligonucleotide
  Sense strand starting at position 3952 of SEQ ID NO: 1244490
aaggacuuccaguagcuau

SEQ ID NO: 1492631 - RNA, 19 nt, Artificial Sequence
  Description of Artificial Sequence: Synthetic oligonucleotide
  Antisense strand to SEQ ID NO: 1492630
auagcuacuggaaguccuu

SEQ ID NO: 1492632 - RNA, 19 nt, Artificial Sequence
  Description of Artificial Sequence: Synthetic oligonucleotide
  Sense strand starting at position 3963 of SEQ ID NO: 1244490
guagcuauuuggucgcaaa

SEQ ID NO: 1492633 - RNA, 19 nt, Artificial Sequence
  Description of Artificial Sequence: Synthetic oligonucleotide
  Antisense strand to SEQ ID NO: 1492632
uuugcgaccaaauagcuac

SEQ ID NO: 1492634 - RNA, 19 nt, Artificial Sequence
  Description of Artificial Sequence: Synthetic oligonucleotide
  Sense strand starting at position 221 of SEQ ID NO: 1244491
cucugauauugggcugaga

SEQ ID NO: 1492635 - RNA, 19 nt, Artificial Sequence
  Description of Artificial Sequence: Synthetic oligonucleotide
  Antisense strand to SEQ ID NO: 1492634
ucucagcccaauaucagag

SEQ ID NO: 1492636 - RNA, 19 nt, Artificial Sequence
  Description of Artificial Sequence: Synthetic oligonucleotide
  Sense strand starting at position 223 of SEQ ID NO: 1244491
cugauauugggcugagaua

SEQ ID NO: 1492637 - RNA, 19 nt, Artificial Sequence
  Description of Artificial Sequence: Synthetic oligonucleotide
  Antisense strand to SEQ ID NO: 1492636
uaucucagcccaauaucag

SEQ ID NO: 1492638 - RNA, 19 nt, Artificial Sequence
  Description of Artificial Sequence: Synthetic oligonucleotide
  Sense strand starting at position 264 of SEQ ID NO: 1244491
cucaauuaugcagaguaau

SEQ ID NO: 1492639 - RNA, 19 nt, Artificial Sequence
  Description of Artificial Sequence: Synthetic oligonucleotide
  Antisense strand to SEQ ID NO: 1492638
auuacucugcauaauugag

SEQ ID NO: 1492640 - RNA, 19 nt, Artificial Sequence
  Description of Artificial Sequence: Synthetic oligonucleotide
  Sense strand starting at position 267 of SEQ ID NO: 1244491
aauuaugcagaguaauguu

SEQ ID NO: 1492641 - RNA, 19 nt, Artificial Sequence
  Description of Artificial Sequence: Synthetic oligonucleotide
  Antisense strand to SEQ ID NO: 1492640
aacauuacucugcauaauu

SEQ ID NO: 1492642 - RNA, 19 nt, Artificial Sequence
  Description of Artificial Sequence: Synthetic oligonucleotide
  Sense strand starting at position 295 of SEQ ID NO: 1244491
cagauaggguuaucuguga

SEQ ID NO: 1492643 - RNA, 19 nt, Artificial Sequence
  Description of Artificial Sequence: Synthetic oligonucleotide
  Antisense strand to SEQ ID NO: 1492642
ucacagauaacccuaucug

SEQ ID NO: 1492644 - RNA, 19 nt, Artificial Sequence
  Description of Artificial Sequence: Synthetic oligonucleotide
  Sense strand starting at position 299 of SEQ ID NO: 1244491
uaggguuaucugugauaaa

SEQ ID NO: 1492645 - RNA, 19 nt, Artificial Sequence
  Description of Artificial Sequence: Synthetic oligonucleotide
  Antisense strand to SEQ ID NO: 1492644
uuuaucacagauaacccua

SEQ ID NO: 1492646 - RNA, 19 nt, Artificial Sequence
  Description of Artificial Sequence: Synthetic oligonucleotide
  Sense strand starting at position 464 of SEQ ID NO: 1244491
ggagguuuagugggagaga

SEQ ID NO: 1492647 - RNA, 19 nt, Artificial Sequence
  Description of Artificial Sequence: Synthetic oligonucleotide
  Antisense strand to SEQ ID NO: 1492646
ucucucccacuaaaccucc

SEQ ID NO: 1492648 - RNA, 19 nt, Artificial Sequence
  Description of Artificial Sequence: Synthetic oligonucleotide
  Sense strand starting at position 492 of SEQ ID NO: 1244491
aggagauuguuauaaggag

SEQ ID NO: 1492649 - RNA, 19 nt, Artificial Sequence
  Description of Artificial Sequence: Synthetic oligonucleotide
  Antisense strand to SEQ ID NO: 1492648
cuccuuauaacaaucuccu

SEQ ID NO: 1492650 - RNA, 19 nt, Artificial Sequence
  Description of Artificial Sequence: Synthetic oligonucleotide
  Sense strand starting at position 510 of SEQ ID NO: 1244491
gcagcuauuaugggcuaga

SEQ ID NO: 1492651 - RNA, 19 nt, Artificial Sequence
  Description of Artificial Sequence: Synthetic oligonucleotide
  Antisense strand to SEQ ID NO: 1492650
ucuagcccauaauagcugc

SEQ ID NO: 1492652 - RNA, 19 nt, Artificial Sequence
  Description of Artificial Sequence: Synthetic oligonucleotide
  Sense strand starting at position 511 of SEQ ID NO: 1244491
cagcuauuaugggcuagaa

SEQ ID NO: 1492653 - RNA, 19 nt, Artificial Sequence
  Description of Artificial Sequence: Synthetic oligonucleotide
  Antisense strand to SEQ ID NO: 1492652
uucuagcccauaauagcug

SEQ ID NO: 1492654 - RNA, 19 nt, Artificial Sequence
  Description of Artificial Sequence: Synthetic oligonucleotide
  Sense strand starting at position 513 of SEQ ID NO: 1244491
gcuauuaugggcuagaaau

SEQ ID NO: 1492655 - RNA, 19 nt, Artificial Sequence
  Description of Artificial Sequence: Synthetic oligonucleotide
  Antisense strand to SEQ ID NO: 1492654
auuucuagcccauaauagc

SEQ ID NO: 1492656 - RNA, 19 nt, Artificial Sequence
  Description of Artificial Sequence: Synthetic oligonucleotide
  Sense strand starting at position 661 of SEQ ID NO: 1244491
uugacagauugcuuaugga

SEQ ID NO: 1492657 - RNA, 19 nt, Artificial Sequence
  Description of Artificial Sequence: Synthetic oligonucleotide
  Antisense strand to SEQ ID NO: 1492656
uccauaagcaaucugucaa

SEQ ID NO: 1492658 - RNA, 19 nt, Artificial Sequence
  Description of Artificial Sequence: Synthetic oligonucleotide
  Sense strand starting at position 668 of SEQ ID NO: 1244491
auugcuuauggagguguau

SEQ ID NO: 1492659 - RNA, 19 nt, Artificial Sequence
  Description of Artificial Sequence: Synthetic oligonucleotide
  Antisense strand to SEQ ID NO: 1492658
auacaccuccauaagcaau

SEQ ID NO: 1492660 - RNA, 19 nt, Artificial Sequence
  Description of Artificial Sequence: Synthetic oligonucleotide
  Sense strand starting at position 670 of SEQ ID NO: 1244491
ugcuuauggagguguauga

SEQ ID NO: 1492661 - RNA, 19 nt, Artificial Sequence
  Description of Artificial Sequence: Synthetic oligonucleotide
  Antisense strand to SEQ ID NO: 1492660
ucauacaccuccauaagca

SEQ ID NO: 1492662 - RNA, 19 nt, Artificial Sequence
  Description of Artificial Sequence: Synthetic oligonucleotide
  Sense strand starting at position 674 of SEQ ID NO: 1244491
uauggagguguaugaagaa

SEQ ID NO: 1492663 - RNA, 19 nt, Artificial Sequence
  Description of Artificial Sequence: Synthetic oligonucleotide
  Antisense strand to SEQ ID NO: 1492662
uucuucauacaccuccaua

SEQ ID NO: 1492664 - RNA, 19 nt, Artificial Sequence
  Description of Artificial Sequence: Synthetic oligonucleotide
  Sense strand starting at position 681 of SEQ ID NO: 1244491
guguaugaagaagaguuua

SEQ ID NO: 1492665 - RNA, 19 nt, Artificial Sequence
  Description of Artificial Sequence: Synthetic oligonucleotide
  Antisense strand to SEQ ID NO: 1492664
uaaacucuucuucauacac

SEQ ID NO: 1492666 - RNA, 19 nt, Artificial Sequence
  Description of Artificial Sequence: Synthetic oligonucleotide
  Sense strand starting at position 694 of SEQ ID NO: 1244491
aguuuagaauuacuugagu

SEQ ID NO: 1492667 - RNA, 19 nt, Artificial Sequence
  Description of Artificial Sequence: Synthetic oligonucleotide
  Antisense strand to SEQ ID NO: 1492666
acucaaguaauucuaaacu

SEQ ID NO: 1492668 - RNA, 19 nt, Artificial Sequence
  Description of Artificial Sequence: Synthetic oligonucleotide
  Sense strand starting at position 699 of SEQ ID NO: 1244491
agaauuacuugagugucua

SEQ ID NO: 1492669 - RNA, 19 nt, Artificial Sequence
  Description of Artificial Sequence: Synthetic oligonucleotide
  Antisense strand to SEQ ID NO: 1492668
uagacacucaaguaauucu

SEQ ID NO: 1492670 - RNA, 19 nt, Artificial Sequence
  Description of Artificial Sequence: Synthetic oligonucleotide
  Sense strand starting at position 700 of SEQ ID NO: 1244491
gaauuacuugagugucuag

SEQ ID NO: 1492671 - RNA, 19 nt, Artificial Sequence
  Description of Artificial Sequence: Synthetic oligonucleotide
  Antisense strand to SEQ ID NO: 1492670
cuagacacucaaguaauuc

SEQ ID NO: 1492672 - RNA, 19 nt, Artificial Sequence
  Description of Artificial Sequence: Synthetic oligonucleotide
  Sense strand starting at position 721 of SEQ ID NO: 1244491
ugcagaacugaaugguuau

SEQ ID NO: 1492673 - RNA, 19 nt, Artificial Sequence
  Description of Artificial Sequence: Synthetic oligonucleotide
  Antisense strand to SEQ ID NO: 1492672
auaaccauucaguucugca

SEQ ID NO: 1492674 - RNA, 19 nt, Artificial Sequence
  Description of Artificial Sequence: Synthetic oligonucleotide
  Sense strand starting at position 722 of SEQ ID NO: 1244491
gcagaacugaaugguuauc

SEQ ID NO: 1492675 - RNA, 19 nt, Artificial Sequence
  Description of Artificial Sequence: Synthetic oligonucleotide
  Antisense strand to SEQ ID NO: 1492674
gauaaccauucaguucugc

SEQ ID NO: 1492676 - RNA, 19 nt, Artificial Sequence
  Description of Artificial Sequence: Synthetic oligonucleotide
  Sense strand starting at position 727 of SEQ ID NO: 1244491
acugaaugguuaucagauu

SEQ ID NO: 1492677 - RNA, 19 nt, Artificial Sequence
  Description of Artificial Sequence: Synthetic oligonucleotide
  Antisense strand to SEQ ID NO: 1492676
aaucugauaaccauucagu

SEQ ID NO: 1492678 - RNA, 19 nt, Artificial Sequence
  Description of Artificial Sequence: Synthetic oligonucleotide
  Sense strand starting at position 921 of SEQ ID NO: 1244491
ugagcucuccucugacuga

SEQ ID NO: 1492679 - RNA, 19 nt, Artificial Sequence
  Description of Artificial Sequence: Synthetic oligonucleotide
  Antisense strand to SEQ ID NO: 1492678
ucagucagaggagagcuca

SEQ ID NO: 1492680 - RNA, 19 nt, Artificial Sequence
  Description of Artificial Sequence: Synthetic oligonucleotide
  Sense strand starting at position 1142 of SEQ ID NO: 1244491
ucaauaagagcucgguaaa

SEQ ID NO: 1492681 - RNA, 19 nt, Artificial Sequence
  Description of Artificial Sequence: Synthetic oligonucleotide
  Antisense strand to SEQ ID NO: 1492680
uuuaccgagcucuuauuga

SEQ ID NO: 1492682 - RNA, 19 nt, Artificial Sequence
  Description of Artificial Sequence: Synthetic oligonucleotide
  Sense strand starting at position 1143 of SEQ ID NO: 1244491
caauaagagcucgguaaau

SEQ ID NO: 1492683 - RNA, 19 nt, Artificial Sequence
  Description of Artificial Sequence: Synthetic oligonucleotide
  Antisense strand to SEQ ID NO: 1492682
auuuaccgagcucuuauug

SEQ ID NO: 1492684 - RNA, 19 nt, Artificial Sequence
  Description of Artificial Sequence: Synthetic oligonucleotide
  Sense strand starting at position 1145 of SEQ ID NO: 1244491
auaagagcucgguaaaugu

SEQ ID NO: 1492685 - RNA, 19 nt, Artificial Sequence
  Description of Artificial Sequence: Synthetic oligonucleotide
  Antisense strand to SEQ ID NO: 1492684
acauuuaccgagcucuuau

SEQ ID NO: 1492686 - RNA, 19 nt, Artificial Sequence
  Description of Artificial Sequence: Synthetic oligonucleotide
  Sense strand starting at position 1155 of SEQ ID NO: 1244491
gguaaauguuuauuguuga

SEQ ID NO: 1492687 - RNA, 19 nt, Artificial Sequence
  Description of Artificial Sequence: Synthetic oligonucleotide
  Antisense strand to SEQ ID NO: 1492686
ucaacaauaaacauuuacc

SEQ ID NO: 1492688 - RNA, 19 nt, Artificial Sequence
  Description of Artificial Sequence: Synthetic oligonucleotide
  Sense strand starting at position 1168 of SEQ ID NO: 1244491
uguugaaugcgucauucag

SEQ ID NO: 1492689 - RNA, 19 nt, Artificial Sequence
  Description of Artificial Sequence: Synthetic oligonucleotide
  Antisense strand to SEQ ID NO: 1492688
cugaaugacgcauucaaca

SEQ ID NO: 1492690 - RNA, 19 nt, Artificial Sequence
  Description of Artificial Sequence: Synthetic oligonucleotide
  Sense strand starting at position 1338 of SEQ ID NO: 1244491
ggagaaacucauggccgau

SEQ ID NO: 1492691 - RNA, 19 nt, Artificial Sequence
  Description of Artificial Sequence: Synthetic oligonucleotide
  Antisense strand to SEQ ID NO: 1492690
aucggccaugaguuucucc

SEQ ID NO: 1492692 - RNA, 19 nt, Artificial Sequence
  Description of Artificial Sequence: Synthetic oligonucleotide
  Sense strand starting at position 1340 of SEQ ID NO: 1244491
agaaacucauggccgauaa

SEQ ID NO: 1492693 - RNA, 19 nt, Artificial Sequence
  Description of Artificial Sequence: Synthetic oligonucleotide
  Antisense strand to SEQ ID NO: 1492692
uuaucggccaugaguuucu

SEQ ID NO: 1492694 - RNA, 19 nt, Artificial Sequence
  Description of Artificial Sequence: Synthetic oligonucleotide
  Sense strand starting at position 1341 of SEQ ID NO: 1244491
gaaacucauggccgauaaa

SEQ ID NO: 1492695 - RNA, 19 nt, Artificial Sequence
  Description of Artificial Sequence: Synthetic oligonucleotide
  Antisense strand to SEQ ID NO: 1492694
uuuaucggccaugaguuuc

SEQ ID NO: 1492696 - RNA, 19 nt, Artificial Sequence
  Description of Artificial Sequence: Synthetic oligonucleotide
  Sense strand starting at position 2099 of SEQ ID NO: 1244491
ggacaucuucgcuguagga

SEQ ID NO: 1492697 - RNA, 19 nt, Artificial Sequence
  Description of Artificial Sequence: Synthetic oligonucleotide
  Antisense strand to SEQ ID NO: 1492696
uccuacagcgaagaugucc

SEQ ID NO: 1492698 - RNA, 19 nt, Artificial Sequence
  Description of Artificial Sequence: Synthetic oligonucleotide
  Sense strand starting at position 2101 of SEQ ID NO: 1244491
acaucuucgcuguaggaau

SEQ ID NO: 1492699 - RNA, 19 nt, Artificial Sequence
  Description of Artificial Sequence: Synthetic oligonucleotide
  Antisense strand to SEQ ID NO: 1492698
auuccuacagcgaagaugu

SEQ ID NO: 1492700 - RNA, 19 nt, Artificial Sequence
  Description of Artificial Sequence: Synthetic oligonucleotide
  Sense strand starting at position 2508 of SEQ ID NO: 1244491
ugucauccuuggccugaga

SEQ ID NO: 1492701 - RNA, 19 nt, Artificial Sequence
  Description of Artificial Sequence: Synthetic oligonucleotide
  Antisense strand to SEQ ID NO: 1492700
ucucaggccaaggaugaca

SEQ ID NO: 1492702 - RNA, 19 nt, Artificial Sequence
  Description of Artificial Sequence: Synthetic oligonucleotide
  Sense strand starting at position 2510 of SEQ ID NO: 1244491
ucauccuuggccugagacu

SEQ ID NO: 1492703 - RNA, 19 nt, Artificial Sequence
  Description of Artificial Sequence: Synthetic oligonucleotide
  Antisense strand to SEQ ID NO: 1492702
agucucaggccaaggauga

SEQ ID NO: 1492704 - RNA, 19 nt, Artificial Sequence
  Description of Artificial Sequence: Synthetic oligonucleotide
  Sense strand starting at position 2699 of SEQ ID NO: 1244491
auaguaggcucaucauagu

SEQ ID NO: 1492705 - RNA, 19 nt, Artificial Sequence
  Description of Artificial Sequence: Synthetic oligonucleotide
  Antisense strand to SEQ ID NO: 1492704
acuaugaugagccuacuau

SEQ ID NO: 1492706 - RNA, 19 nt, Artificial Sequence
  Description of Artificial Sequence: Synthetic oligonucleotide
  Sense strand starting at position 3246 of SEQ ID NO: 1244491
uaaacugugguaugaauga

SEQ ID NO: 1492707 - RNA, 19 nt, Artificial Sequence
  Description of Artificial Sequence: Synthetic oligonucleotide
  Antisense strand to SEQ ID NO: 1492706
ucauucauaccacaguuua

SEQ ID NO: 1492708 - RNA, 19 nt, Artificial Sequence
  Description of Artificial Sequence: Synthetic oligonucleotide
  Sense strand starting at position 3354 of SEQ ID NO: 1244491
cgcuaauaccucuauguuu

SEQ ID NO: 1492709 - RNA, 19 nt, Artificial Sequence
  Description of Artificial Sequence: Synthetic oligonucleotide
  Antisense strand to SEQ ID NO: 1492708
aaacauagagguauuagcg

SEQ ID NO: 1492710 - RNA, 19 nt, Artificial Sequence
  Description of Artificial Sequence: Synthetic oligonucleotide
  Sense strand starting at position 3774 of SEQ ID NO: 1244491
acauuaacccaauagcguu

SEQ ID NO: 1492711 - RNA, 19 nt, Artificial Sequence
  Description of Artificial Sequence: Synthetic oligonucleotide
  Antisense strand to SEQ ID NO: 1492710
aacgcuauuggguuaaugu

SEQ ID NO: 1492712 - RNA, 19 nt, Artificial Sequence
  Description of Artificial Sequence: Synthetic oligonucleotide
  Sense strand starting at position 3974 of SEQ ID NO: 1244491
guggcuuccaaaugugaug

SEQ ID NO: 1492713 - RNA, 19 nt, Artificial Sequence
  Description of Artificial Sequence: Synthetic oligonucleotide
  Antisense strand to SEQ ID NO: 1492712
caucacauuuggaagccac

SEQ ID NO: 1492714 - RNA, 19 nt, Artificial Sequence
  Description of Artificial Sequence: Synthetic oligonucleotide
  Sense strand starting at position 40 of SEQ ID NO: 1244492
uguaauguuguauguugua

SEQ ID NO: 1492715 - RNA, 19 nt, Artificial Sequence
  Description of Artificial Sequence: Synthetic oligonucleotide
  Antisense strand to SEQ ID NO: 1492714
uacaacauacaacauuaca

SEQ ID NO: 1492716 - RNA, 19 nt, Artificial Sequence
  Description of Artificial Sequence: Synthetic oligonucleotide
  Sense strand starting at position 138 of SEQ ID NO: 1244492
agcagaauguuagucaaca

SEQ ID NO: 1492717 - RNA, 19 nt, Artificial Sequence
  Description of Artificial Sequence: Synthetic oligonucleotide
  Antisense strand to SEQ ID NO: 1492716
uguugacuaacauucugcu

SEQ ID NO: 1492718 - RNA, 19 nt, Artificial Sequence
  Description of Artificial Sequence: Synthetic oligonucleotide
  Sense strand starting at position 139 of SEQ ID NO: 1244492
gcagaauguuagucaacaa

SEQ ID NO: 1492719 - RNA, 19 nt, Artificial Sequence
  Description of Artificial Sequence: Synthetic oligonucleotide
  Antisense strand to SEQ ID NO: 1492718
uuguugacuaacauucugc

SEQ ID NO: 1492720 - RNA, 19 nt, Artificial Sequence
  Description of Artificial Sequence: Synthetic oligonucleotide
  Sense strand starting at position 296 of SEQ ID NO: 1244492
ccuagaugggucugcaaag

SEQ ID NO: 1492721 - RNA, 19 nt, Artificial Sequence
  Description of Artificial Sequence: Synthetic oligonucleotide
  Antisense strand to SEQ ID NO: 1492720
cuuugcagacccaucuagg

SEQ ID NO: 1492722 - RNA, 19 nt, Artificial Sequence
  Description of Artificial Sequence: Synthetic oligonucleotide
  Sense strand starting at position 419 of SEQ ID NO: 1244492
ccaucuugaucugaggauu

SEQ ID NO: 1492723 - RNA, 19 nt, Artificial Sequence
  Description of Artificial Sequence: Synthetic oligonucleotide
  Antisense strand to SEQ ID NO: 1492722
aauccucagaucaagaugg

SEQ ID NO: 1492724 - RNA, 19 nt, Artificial Sequence
  Description of Artificial Sequence: Synthetic oligonucleotide
  Sense strand starting at position 537 of SEQ ID NO: 1244492
guaauagucuucuuccugu

SEQ ID NO: 1492725 - RNA, 19 nt, Artificial Sequence
  Description of Artificial Sequence: Synthetic oligonucleotide
  Antisense strand to SEQ ID NO: 1492724
acaggaagaagacuauuac

SEQ ID NO: 1492726 - RNA, 19 nt, Artificial Sequence
  Description of Artificial Sequence: Synthetic oligonucleotide
  Sense strand starting at position 849 of SEQ ID NO: 1244492
augaaagcucagugacaga

SEQ ID NO: 1492727 - RNA, 19 nt, Artificial Sequence
  Description of Artificial Sequence: Synthetic oligonucleotide
  Antisense strand to SEQ ID NO: 1492726
ucugucacugagcuuucau

SEQ ID NO: 1492728 - RNA, 19 nt, Artificial Sequence
  Description of Artificial Sequence: Synthetic oligonucleotide
  Sense strand starting at position 915 of SEQ ID NO: 1244492
aucaauacuggcuggauca

SEQ ID NO: 1492729 - RNA, 19 nt, Artificial Sequence
  Description of Artificial Sequence: Synthetic oligonucleotide
  Antisense strand to SEQ ID NO: 1492728
ugauccagccaguauugau

SEQ ID NO: 1492730 - RNA, 19 nt, Artificial Sequence
  Description of Artificial Sequence: Synthetic oligonucleotide
  Sense strand starting at position 926 of SEQ ID NO: 1244492
cuggaucagugagugaaua

SEQ ID NO: 1492731 - RNA, 19 nt, Artificial Sequence
  Description of Artificial Sequence: Synthetic oligonucleotide
  Antisense strand to SEQ ID NO: 1492730
uauucacucacugauccag

SEQ ID NO: 1492732 - RNA, 19 nt, Artificial Sequence
  Description of Artificial Sequence: Synthetic oligonucleotide
  Sense strand starting at position 927 of SEQ ID NO: 1244492
uggaucagugagugaauaa

SEQ ID NO: 1492733 - RNA, 19 nt, Artificial Sequence
  Description of Artificial Sequence: Synthetic oligonucleotide
  Antisense strand to SEQ ID NO: 1492732
uuauucacucacugaucca

SEQ ID NO: 1492734 - RNA, 19 nt, Artificial Sequence
  Description of Artificial Sequence: Synthetic oligonucleotide
  Sense strand starting at position 947 of SEQ ID NO: 1244492
ugcacaugugaguaaggaa

SEQ ID NO: 1492735 - RNA, 19 nt, Artificial Sequence
  Description of Artificial Sequence: Synthetic oligonucleotide
  Antisense strand to SEQ ID NO: 1492734
uuccuuacucacaugugca

SEQ ID NO: 1492736 - RNA, 19 nt, Artificial Sequence
  Description of Artificial Sequence: Synthetic oligonucleotide
  Sense strand starting at position 972 of SEQ ID NO: 1244492
gagcgaaagaacuggauua

SEQ ID NO: 1492737 - RNA, 19 nt, Artificial Sequence
  Description of Artificial Sequence: Synthetic oligonucleotide
  Antisense strand to SEQ ID NO: 1492736
uaauccaguucuuucgcuc

SEQ ID NO: 1492738 - RNA, 19 nt, Artificial Sequence
  Description of Artificial Sequence: Synthetic oligonucleotide
  Sense strand starting at position 1067 of SEQ ID NO: 1244492
agaggaagcuuugauagaa

SEQ ID NO: 1492739 - RNA, 19 nt, Artificial Sequence
  Description of Artificial Sequence: Synthetic oligonucleotide
  Antisense strand to SEQ ID NO: 1492738
uucuaucaaagcuuccucu

SEQ ID NO: 1492740 - RNA, 19 nt, Artificial Sequence
  Description of Artificial Sequence: Synthetic oligonucleotide
  Sense strand starting at position 1094 of SEQ ID NO: 1244492
gcaagagagguuggaaauu

SEQ ID NO: 1492741 - RNA, 19 nt, Artificial Sequence
  Description of Artificial Sequence: Synthetic oligonucleotide
  Antisense strand to SEQ ID NO: 1492740
aauuuccaaccucucuugc

SEQ ID NO: 1492742 - RNA, 19 nt, Artificial Sequence
  Description of Artificial Sequence: Synthetic oligonucleotide
  Sense strand starting at position 1985 of SEQ ID NO: 1244492
gaccuauagagccggguaa

SEQ ID NO: 1492743 - RNA, 19 nt, Artificial Sequence
  Description of Artificial Sequence: Synthetic oligonucleotide
  Antisense strand to SEQ ID NO: 1492742
uuacccggcucuauagguc

SEQ ID NO: 1492744 - RNA, 19 nt, Artificial Sequence
  Description of Artificial Sequence: Synthetic oligonucleotide
  Sense strand starting at position 1987 of SEQ ID NO: 1244492
ccuauagagccggguaagu

SEQ ID NO: 1492745 - RNA, 19 nt, Artificial Sequence
  Description of Artificial Sequence: Synthetic oligonucleotide
  Antisense strand to SEQ ID NO: 1492744
acuuacccggcucuauagg

SEQ ID NO: 1492746 - RNA, 19 nt, Artificial Sequence
  Description of Artificial Sequence: Synthetic oligonucleotide
  Sense strand starting at position 2078 of SEQ ID NO: 1244492
ccgcgaagugccucuuuau

SEQ ID NO: 1492747 - RNA, 19 nt, Artificial Sequence
  Description of Artificial Sequence: Synthetic oligonucleotide
  Antisense strand to SEQ ID NO: 1492746
auaaagaggcacuucgcgg

SEQ ID NO: 1492748 - RNA, 19 nt, Artificial Sequence
  Description of Artificial Sequence: Synthetic oligonucleotide
  Sense strand starting at position 2079 of SEQ ID NO: 1244492
cgcgaagugccucuuuauc

SEQ ID NO: 1492749 - RNA, 19 nt, Artificial Sequence
  Description of Artificial Sequence: Synthetic oligonucleotide
  Antisense strand to SEQ ID NO: 1492748
gauaaagaggcacuucgcg

SEQ ID NO: 1492750 - RNA, 19 nt, Artificial Sequence
  Description of Artificial Sequence: Synthetic oligonucleotide
  Sense strand starting at position 2419 of SEQ ID NO: 1244492
uucugaaauucgcuuuacu

SEQ ID NO: 1492751 - RNA, 19 nt, Artificial Sequence
  Description of Artificial Sequence: Synthetic oligonucleotide
  Antisense strand to SEQ ID NO: 1492750
aguaaagcgaauuucagaa

SEQ ID NO: 1492752 - RNA, 19 nt, Artificial Sequence
  Description of Artificial Sequence: Synthetic oligonucleotide
  Sense strand starting at position 2630 of SEQ ID NO: 1244492
gcuuccuccugacugagau

SEQ ID NO: 1492753 - RNA, 19 nt, Artificial Sequence
  Description of Artificial Sequence: Synthetic oligonucleotide
  Antisense strand to SEQ ID NO: 1492752
aucucagucaggaggaagc

SEQ ID NO: 1492754 - RNA, 19 nt, Artificial Sequence
  Description of Artificial Sequence: Synthetic oligonucleotide
  Sense strand starting at position 2631 of SEQ ID NO: 1244492
cuuccuccugacugagaua

SEQ ID NO: 1492755 - RNA, 19 nt, Artificial Sequence
  Description of Artificial Sequence: Synthetic oligonucleotide
  Antisense strand to SEQ ID NO: 1492754
uaucucagucaggaggaag

SEQ ID NO: 1492756 - RNA, 19 nt, Artificial Sequence
  Description of Artificial Sequence: Synthetic oligonucleotide
  Sense strand starting at position 2659 of SEQ ID NO: 1244492
augugaauaaaggguuaua

SEQ ID NO: 1492757 - RNA, 19 nt, Artificial Sequence
  Description of Artificial Sequence: Synthetic oligonucleotide
  Antisense strand to SEQ ID NO: 1492756
uauaacccuuuauucacau

SEQ ID NO: 1492758 - RNA, 19 nt, Artificial Sequence
  Description of Artificial Sequence: Synthetic oligonucleotide
  Sense strand starting at position 2670 of SEQ ID NO: 1244492
ggguuauaauauggaugag

SEQ ID NO: 1492759 - RNA, 19 nt, Artificial Sequence
  Description of Artificial Sequence: Synthetic oligonucleotide
  Antisense strand to SEQ ID NO: 1492758
cucauccauauuauaaccc

SEQ ID NO: 1492760 - RNA, 19 nt, Artificial Sequence
  Description of Artificial Sequence: Synthetic oligonucleotide
  Sense strand starting at position 2673 of SEQ ID NO: 1244492
uuauaauauggaugaguac

SEQ ID NO: 1492761 - RNA, 19 nt, Artificial Sequence
  Description of Artificial Sequence: Synthetic oligonucleotide
  Antisense strand to SEQ ID NO: 1492760
guacucauccauauuauaa

SEQ ID NO: 1492762 - RNA, 19 nt, Artificial Sequence
  Description of Artificial Sequence: Synthetic oligonucleotide
  Sense strand starting at position 2682 of SEQ ID NO: 1244492
ggaugaguacuguggugga

SEQ ID NO: 1492763 - RNA, 19 nt, Artificial Sequence
  Description of Artificial Sequence: Synthetic oligonucleotide
  Antisense strand to SEQ ID NO: 1492762
uccaccacaguacucaucc

SEQ ID NO: 1492764 - RNA, 19 nt, Artificial Sequence
  Description of Artificial Sequence: Synthetic oligonucleotide
  Sense strand starting at position 2727 of SEQ ID NO: 1244492
gaaggaugcugucuuagaa

SEQ ID NO: 1492765 - RNA, 19 nt, Artificial Sequence
  Description of Artificial Sequence: Synthetic oligonucleotide
  Antisense strand to SEQ ID NO: 1492764
uucuaagacagcauccuuc

SEQ ID NO: 1492766 - RNA, 19 nt, Artificial Sequence
  Description of Artificial Sequence: Synthetic oligonucleotide
  Sense strand starting at position 2799 of SEQ ID NO: 1244492
agacgaaugguauguacaa

SEQ ID NO: 1492767 - RNA, 19 nt, Artificial Sequence
  Description of Artificial Sequence: Synthetic oligonucleotide
  Antisense strand to SEQ ID NO: 1492766
uuguacauaccauucgucu

SEQ ID NO: 1492768 - RNA, 19 nt, Artificial Sequence
  Description of Artificial Sequence: Synthetic oligonucleotide
  Sense strand starting at position 2800 of SEQ ID NO: 1244492
gacgaaugguauguacaaa

SEQ ID NO: 1492769 - RNA, 19 nt, Artificial Sequence
  Description of Artificial Sequence: Synthetic oligonucleotide
  Antisense strand to SEQ ID NO: 1492768
uuuguacauaccauucguc

SEQ ID NO: 1492770 - RNA, 19 nt, Artificial Sequence
  Description of Artificial Sequence: Synthetic oligonucleotide
  Sense strand starting at position 2864 of SEQ ID NO: 1244492
ugagcuguggaguagugau

SEQ ID NO: 1492771 - RNA, 19 nt, Artificial Sequence
  Description of Artificial Sequence: Synthetic oligonucleotide
  Antisense strand to SEQ ID NO: 1492770
aucacuacuccacagcuca

SEQ ID NO: 1492772 - RNA, 19 nt, Artificial Sequence
  Description of Artificial Sequence: Synthetic oligonucleotide
  Sense strand starting at position 2897 of SEQ ID NO: 1244492
ggagaagaguuuagacgau

SEQ ID NO: 1492773 - RNA, 19 nt, Artificial Sequence
  Description of Artificial Sequence: Synthetic oligonucleotide
  Antisense strand to SEQ ID NO: 1492772
aucgucuaaacucuucucc

SEQ ID NO: 1492774 - RNA, 19 nt, Artificial Sequence
  Description of Artificial Sequence: Synthetic oligonucleotide
  Sense strand starting at position 3241 of SEQ ID NO: 1244492
uuuguagccagguguuaug

SEQ ID NO: 1492775 - RNA, 19 nt, Artificial Sequence
  Description of Artificial Sequence: Synthetic oligonucleotide
  Antisense strand to SEQ ID NO: 1492774
cauaacaccuggcuacaaa

SEQ ID NO: 1492776 - RNA, 19 nt, Artificial Sequence
  Description of Artificial Sequence: Synthetic oligonucleotide
  Sense strand starting at position 3248 of SEQ ID NO: 1244492
ccagguguuauguaauaug

SEQ ID NO: 1492777 - RNA, 19 nt, Artificial Sequence
  Description of Artificial Sequence: Synthetic oligonucleotide
  Antisense strand to SEQ ID NO: 1492776
cauauuacauaacaccugg

SEQ ID NO: 1492778 - RNA, 19 nt, Artificial Sequence
  Description of Artificial Sequence: Synthetic oligonucleotide
  Sense strand starting at position 3269 of SEQ ID NO: 1244492
gaaauagacugagagguuc

SEQ ID NO: 1492779 - RNA, 19 nt, Artificial Sequence
  Description of Artificial Sequence: Synthetic oligonucleotide
  Antisense strand to SEQ ID NO: 1492778
gaaccucucagucuauuuc

SEQ ID NO: 1492780 - RNA, 19 nt, Artificial Sequence
  Description of Artificial Sequence: Synthetic oligonucleotide
  Sense strand starting at position 3284 of SEQ ID NO: 1244492
guuccaagauuugcucagu

SEQ ID NO: 1492781 - RNA, 19 nt, Artificial Sequence
  Description of Artificial Sequence: Synthetic oligonucleotide
  Antisense strand to SEQ ID NO: 1492780
acugagcaaaucuuggaac

SEQ ID NO: 1492782 - RNA, 19 nt, Artificial Sequence
  Description of Artificial Sequence: Synthetic oligonucleotide
  Sense strand starting at position 3520 of SEQ ID NO: 1244492
augcacuaucucugugacu

SEQ ID NO: 1492783 - RNA, 19 nt, Artificial Sequence
  Description of Artificial Sequence: Synthetic oligonucleotide
  Antisense strand to SEQ ID NO: 1492782
agucacagagauagugcau

SEQ ID NO: 1492784 - RNA, 19 nt, Artificial Sequence
  Description of Artificial Sequence: Synthetic oligonucleotide
  Sense strand starting at position 3522 of SEQ ID NO: 1244492
gcacuaucucugugacuga

SEQ ID NO: 1492785 - RNA, 19 nt, Artificial Sequence
  Description of Artificial Sequence: Synthetic oligonucleotide
  Antisense strand to SEQ ID NO: 1492784
ucagucacagagauagugc

SEQ ID NO: 1492786 - RNA, 19 nt, Artificial Sequence
  Description of Artificial Sequence: Synthetic oligonucleotide
  Sense strand starting at position 3616 of SEQ ID NO: 1244492
ggaagugcucaguaggcau

SEQ ID NO: 1492787 - RNA, 19 nt, Artificial Sequence
  Description of Artificial Sequence: Synthetic oligonucleotide
  Antisense strand to SEQ ID NO: 1492786
augccuacugagcacuucc

SEQ ID NO: 1492788 - RNA, 19 nt, Artificial Sequence
  Description of Artificial Sequence: Synthetic oligonucleotide
  Sense strand starting at position 3678 of SEQ ID NO: 1244492
cugacuuaccacuguuacu

SEQ ID NO: 1492789 - RNA, 19 nt, Artificial Sequence
  Description of Artificial Sequence: Synthetic oligonucleotide
  Antisense strand to SEQ ID NO: 1492788
aguaacagugguaagucag

SEQ ID NO: 1492790 - RNA, 19 nt, Artificial Sequence
  Description of Artificial Sequence: Synthetic oligonucleotide
  Sense strand starting at position 3750 of SEQ ID NO: 1244492
cagagccauuucugaagga

SEQ ID NO: 1492791 - RNA, 19 nt, Artificial Sequence
  Description of Artificial Sequence: Synthetic oligonucleotide
  Antisense strand to SEQ ID NO: 1492790
uccuucagaaauggcucug

SEQ ID NO: 1492792 - RNA, 19 nt, Artificial Sequence
  Description of Artificial Sequence: Synthetic oligonucleotide
  Sense strand starting at position 3905 of SEQ ID NO: 1244492
ugcuuuaucugagaacaaa

SEQ ID NO: 1492793 - RNA, 19 nt, Artificial Sequence
  Description of Artificial Sequence: Synthetic oligonucleotide
  Antisense strand to SEQ ID NO: 1492792
uuuguucucagauaaagca

SEQ ID NO: 1492794 - RNA, 19 nt, Artificial Sequence
  Description of Artificial Sequence: Synthetic oligonucleotide
  Sense strand starting at position 187 of SEQ ID NO: 1244493
ugaguuaucucccugcaug

SEQ ID NO: 1492795 - RNA, 19 nt, Artificial Sequence
  Description of Artificial Sequence: Synthetic oligonucleotide
  Antisense strand to SEQ ID NO: 1492794
caugcagggagauaacuca

SEQ ID NO: 1492796 - RNA, 19 nt, Artificial Sequence
  Description of Artificial Sequence: Synthetic oligonucleotide
  Sense strand starting at position 188 of SEQ ID NO: 1244493
gaguuaucucccugcaugu

SEQ ID NO: 1492797 - RNA, 19 nt, Artificial Sequence
  Description of Artificial Sequence: Synthetic oligonucleotide
  Antisense strand to SEQ ID NO: 1492796
acaugcagggagauaacuc

SEQ ID NO: 1492798 - RNA, 19 nt, Artificial Sequence
  Description of Artificial Sequence: Synthetic oligonucleotide
  Sense strand starting at position 544 of SEQ ID NO: 1244493
gugugagucacagagcaga

SEQ ID NO: 1492799 - RNA, 19 nt, Artificial Sequence
  Description of Artificial Sequence: Synthetic oligonucleotide
  Antisense strand to SEQ ID NO: 1492798
ucugcucugugacucacac

SEQ ID NO: 1492800 - RNA, 19 nt, Artificial Sequence
  Description of Artificial Sequence: Synthetic oligonucleotide
  Sense strand starting at position 709 of SEQ ID NO: 1244493
gugcaucuuccugagugua

SEQ ID NO: 1492801 - RNA, 19 nt, Artificial Sequence
  Description of Artificial Sequence: Synthetic oligonucleotide
  Antisense strand to SEQ ID NO: 1492800
uacacucaggaagaugcac

SEQ ID NO: 1492802 - RNA, 19 nt, Artificial Sequence
  Description of Artificial Sequence: Synthetic oligonucleotide
  Sense strand starting at position 711 of SEQ ID NO: 1244493
gcaucuuccugaguguaaa

SEQ ID NO: 1492803 - RNA, 19 nt, Artificial Sequence
  Description of Artificial Sequence: Synthetic oligonucleotide
  Antisense strand to SEQ ID NO: 1492802
uuuacacucaggaagaugc

SEQ ID NO: 1492804 - RNA, 19 nt, Artificial Sequence
  Description of Artificial Sequence: Synthetic oligonucleotide
  Sense strand starting at position 714 of SEQ ID NO: 1244493
ucuuccugaguguaaauga

SEQ ID NO: 1492805 - RNA, 19 nt, Artificial Sequence
  Description of Artificial Sequence: Synthetic oligonucleotide
  Antisense strand to SEQ ID NO: 1492804
ucauuuacacucaggaaga

SEQ ID NO: 1492806 - RNA, 19 nt, Artificial Sequence
  Description of Artificial Sequence: Synthetic oligonucleotide
  Sense strand starting at position 721 of SEQ ID NO: 1244493
gaguguaaaugaucucucu

SEQ ID NO: 1492807 - RNA, 19 nt, Artificial Sequence
  Description of Artificial Sequence: Synthetic oligonucleotide
  Antisense strand to SEQ ID NO: 1492806
agagagaucauuuacacuc

SEQ ID NO: 1492808 - RNA, 19 nt, Artificial Sequence
  Description of Artificial Sequence: Synthetic oligonucleotide
  Sense strand starting at position 763 of SEQ ID NO: 1244493
gggaaaugcugccucucau

SEQ ID NO: 1492809 - RNA, 19 nt, Artificial Sequence
  Description of Artificial Sequence: Synthetic oligonucleotide
  Antisense strand to SEQ ID NO: 1492808
augagaggcagcauuuccc

SEQ ID NO: 1492810 - RNA, 19 nt, Artificial Sequence
  Description of Artificial Sequence: Synthetic oligonucleotide
  Sense strand starting at position 914 of SEQ ID NO: 1244493
aaaguaaagccuuguuguu

SEQ ID NO: 1492811 - RNA, 19 nt, Artificial Sequence
  Description of Artificial Sequence: Synthetic oligonucleotide
  Antisense strand to SEQ ID NO: 1492810
aacaacaaggcuuuacuuu

SEQ ID NO: 1492812 - RNA, 19 nt, Artificial Sequence
  Description of Artificial Sequence: Synthetic oligonucleotide
  Sense strand starting at position 1056 of SEQ ID NO: 1244493
gagugcuucugggucuuga

SEQ ID NO: 1492813 - RNA, 19 nt, Artificial Sequence
  Description of Artificial Sequence: Synthetic oligonucleotide
  Antisense strand to SEQ ID NO: 1492812
ucaagacccagaagcacuc

SEQ ID NO: 1492814 - RNA, 19 nt, Artificial Sequence
  Description of Artificial Sequence: Synthetic oligonucleotide
  Sense strand starting at position 1095 of SEQ ID NO: 1244493
gugagcaagaaauaugcuu

SEQ ID NO: 1492815 - RNA, 19 nt, Artificial Sequence
  Description of Artificial Sequence: Synthetic oligonucleotide
  Antisense strand to SEQ ID NO: 1492814
aagcauauuucuugcucac

SEQ ID NO: 1492816 - RNA, 19 nt, Artificial Sequence
  Description of Artificial Sequence: Synthetic oligonucleotide
  Sense strand starting at position 1229 of SEQ ID NO: 1244493
ggcugaacuggucaaagcu

SEQ ID NO: 1492817 - RNA, 19 nt, Artificial Sequence
  Description of Artificial Sequence: Synthetic oligonucleotide
  Antisense strand to SEQ ID NO: 1492816
agcuuugaccaguucagcc

SEQ ID NO: 1492818 - RNA, 19 nt, Artificial Sequence
  Description of Artificial Sequence: Synthetic oligonucleotide
  Sense strand starting at position 1387 of SEQ ID NO: 1244493
accugcuucgcuggaaaga

SEQ ID NO: 1492819 - RNA, 19 nt, Artificial Sequence
  Description of Artificial Sequence: Synthetic oligonucleotide
  Antisense strand to SEQ ID NO: 1492818
ucuuuccagcgaagcaggu

SEQ ID NO: 1492820 - RNA, 19 nt, Artificial Sequence
  Description of Artificial Sequence: Synthetic oligonucleotide
  Sense strand starting at position 1388 of SEQ ID NO: 1244493
ccugcuucgcuggaaagaa

SEQ ID NO: 1492821 - RNA, 19 nt, Artificial Sequence
  Description of Artificial Sequence: Synthetic oligonucleotide
  Antisense strand to SEQ ID NO: 1492820
uucuuuccagcgaagcagg

SEQ ID NO: 1492822 - RNA, 19 nt, Artificial Sequence
  Description of Artificial Sequence: Synthetic oligonucleotide
  Sense strand starting at position 1407 of SEQ ID NO: 1244493
ugacuaaugguucagagug

SEQ ID NO: 1492823 - RNA, 19 nt, Artificial Sequence
  Description of Artificial Sequence: Synthetic oligonucleotide
  Antisense strand to SEQ ID NO: 1492822
cacucugaaccauuaguca

SEQ ID NO: 1492824 - RNA, 19 nt, Artificial Sequence
  Description of Artificial Sequence: Synthetic oligonucleotide
  Sense strand starting at position 1422 of SEQ ID NO: 1244493
aguggaauucuaggcagca

SEQ ID NO: 1492825 - RNA, 19 nt, Artificial Sequence
  Description of Artificial Sequence: Synthetic oligonucleotide
  Antisense strand to SEQ ID NO: 1492824
ugcugccuagaauuccacu

SEQ ID NO: 1492826 - RNA, 19 nt, Artificial Sequence
  Description of Artificial Sequence: Synthetic oligonucleotide
  Sense strand starting at position 1424 of SEQ ID NO: 1244493
uggaauucuaggcagcaga

SEQ ID NO: 1492827 - RNA, 19 nt, Artificial Sequence
  Description of Artificial Sequence: Synthetic oligonucleotide
  Antisense strand to SEQ ID NO: 1492826
ucugcugccuagaauucca

SEQ ID NO: 1492828 - RNA, 19 nt, Artificial Sequence
  Description of Artificial Sequence: Synthetic oligonucleotide
  Sense strand starting at position 1477 of SEQ ID NO: 1244493
gagacaugauagucccuuu

SEQ ID NO: 1492829 - RNA, 19 nt, Artificial Sequence
  Description of Artificial Sequence: Synthetic oligonucleotide
  Antisense strand to SEQ ID NO: 1492828
aaagggacuaucaugucuc

SEQ ID NO: 1492830 - RNA, 19 nt, Artificial Sequence
  Description of Artificial Sequence: Synthetic oligonucleotide
  Sense strand starting at position 1641 of SEQ ID NO: 1244493
gucagagucucccuugaug

SEQ ID NO: 1492831 - RNA, 19 nt, Artificial Sequence
  Description of Artificial Sequence: Synthetic oligonucleotide
  Antisense strand to SEQ ID NO: 1492830
caucaagggagacucugac

SEQ ID NO: 1492832 - RNA, 19 nt, Artificial Sequence
  Description of Artificial Sequence: Synthetic oligonucleotide
  Sense strand starting at position 1741 of SEQ ID NO: 1244493
gcuuucugcuacccaguaa

SEQ ID NO: 1492833 - RNA, 19 nt, Artificial Sequence
  Description of Artificial Sequence: Synthetic oligonucleotide
  Antisense strand to SEQ ID NO: 1492832
uuacuggguagcagaaagc

SEQ ID NO: 1492834 - RNA, 19 nt, Artificial Sequence
  Description of Artificial Sequence: Synthetic oligonucleotide
  Sense strand starting at position 1892 of SEQ ID NO: 1244493
cgaauagccucagcuguua

SEQ ID NO: 1492835 - RNA, 19 nt, Artificial Sequence
  Description of Artificial Sequence: Synthetic oligonucleotide
  Antisense strand to SEQ ID NO: 1492834
uaacagcugaggcuauucg

SEQ ID NO: 1492836 - RNA, 19 nt, Artificial Sequence
  Description of Artificial Sequence: Synthetic oligonucleotide
  Sense strand starting at position 1935 of SEQ ID NO: 1244493
gaggcuuuaugguaauuua

SEQ ID NO: 1492837 - RNA, 19 nt, Artificial Sequence
  Description of Artificial Sequence: Synthetic oligonucleotide
  Antisense strand to SEQ ID NO: 1492836
uaaauuaccauaaagccuc

SEQ ID NO: 1492838 - RNA, 19 nt, Artificial Sequence
  Description of Artificial Sequence: Synthetic oligonucleotide
  Sense strand starting at position 1938 of SEQ ID NO: 1244493
gcuuuaugguaauuuacuc

SEQ ID NO: 1492839 - RNA, 19 nt, Artificial Sequence
  Description of Artificial Sequence: Synthetic oligonucleotide
  Antisense strand to SEQ ID NO: 1492838
gaguaaauuaccauaaagc

SEQ ID NO: 1492840 - RNA, 19 nt, Artificial Sequence
  Description of Artificial Sequence: Synthetic oligonucleotide
  Sense strand starting at position 1986 of SEQ ID NO: 1244493
gcgcucuguggucagggaa

SEQ ID NO: 1492841 - RNA, 19 nt, Artificial Sequence
  Description of Artificial Sequence: Synthetic oligonucleotide
  Antisense strand to SEQ ID NO: 1492840
uucccugaccacagagcgc

SEQ ID NO: 1492842 - RNA, 19 nt, Artificial Sequence
  Description of Artificial Sequence: Synthetic oligonucleotide
  Sense strand starting at position 1987 of SEQ ID NO: 1244493
cgcucuguggucagggaau

SEQ ID NO: 1492843 - RNA, 19 nt, Artificial Sequence
  Description of Artificial Sequence: Synthetic oligonucleotide
  Antisense strand to SEQ ID NO: 1492842
auucccugaccacagagcg

SEQ ID NO: 1492844 - RNA, 19 nt, Artificial Sequence
  Description of Artificial Sequence: Synthetic oligonucleotide
  Sense strand starting at position 1989 of SEQ ID NO: 1244493
cucuguggucagggaauga

SEQ ID NO: 1492845 - RNA, 19 nt, Artificial Sequence
  Description of Artificial Sequence: Synthetic oligonucleotide
  Antisense strand to SEQ ID NO: 1492844
ucauucccugaccacagag

SEQ ID NO: 1492846 - RNA, 19 nt, Artificial Sequence
  Description of Artificial Sequence: Synthetic oligonucleotide
  Sense strand starting at position 2239 of SEQ ID NO: 1244493
agcugacucggguaacguu

SEQ ID NO: 1492847 - RNA, 19 nt, Artificial Sequence
  Description of Artificial Sequence: Synthetic oligonucleotide
  Antisense strand to SEQ ID NO: 1492846
aacguuacccgagucagcu

SEQ ID NO: 1492848 - RNA, 19 nt, Artificial Sequence
  Description of Artificial Sequence: Synthetic oligonucleotide
  Sense strand starting at position 2305 of SEQ ID NO: 1244493
uaaggaugagugugccaga

SEQ ID NO: 1492849 - RNA, 19 nt, Artificial Sequence
  Description of Artificial Sequence: Synthetic oligonucleotide
  Antisense strand to SEQ ID NO: 1492848
ucuggcacacucauccuua

SEQ ID NO: 1492850 - RNA, 19 nt, Artificial Sequence
  Description of Artificial Sequence: Synthetic oligonucleotide
  Sense strand starting at position 2310 of SEQ ID NO: 1244493
augagugugccagagucuu

SEQ ID NO: 1492851 - RNA, 19 nt, Artificial Sequence
  Description of Artificial Sequence: Synthetic oligonucleotide
  Antisense strand to SEQ ID NO: 1492850
aagacucuggcacacucau

SEQ ID NO: 1492852 - RNA, 19 nt, Artificial Sequence
  Description of Artificial Sequence: Synthetic oligonucleotide
  Sense strand starting at position 2979 of SEQ ID NO: 1244493
aaguuuauucucugguaga

SEQ ID NO: 1492853 - RNA, 19 nt, Artificial Sequence
  Description of Artificial Sequence: Synthetic oligonucleotide
  Antisense strand to SEQ ID NO: 1492852
ucuaccagagaauaaacuu

SEQ ID NO: 1492854 - RNA, 19 nt, Artificial Sequence
  Description of Artificial Sequence: Synthetic oligonucleotide
  Sense strand starting at position 3163 of SEQ ID NO: 1244493
cagguuucccuugagugga

SEQ ID NO: 1492855 - RNA, 19 nt, Artificial Sequence
  Description of Artificial Sequence: Synthetic oligonucleotide
  Antisense strand to SEQ ID NO: 1492854
uccacucaagggaaaccug

SEQ ID NO: 1492856 - RNA, 19 nt, Artificial Sequence
  Description of Artificial Sequence: Synthetic oligonucleotide
  Sense strand starting at position 3165 of SEQ ID NO: 1244493
gguuucccuugaguggaau

SEQ ID NO: 1492857 - RNA, 19 nt, Artificial Sequence
  Description of Artificial Sequence: Synthetic oligonucleotide
  Antisense strand to SEQ ID NO: 1492856
auuccacucaagggaaacc

SEQ ID NO: 1492858 - RNA, 19 nt, Artificial Sequence
  Description of Artificial Sequence: Synthetic oligonucleotide
  Sense strand starting at position 3208 of SEQ ID NO: 1244493
agguuaccuucugcacaga

SEQ ID NO: 1492859 - RNA, 19 nt, Artificial Sequence
  Description of Artificial Sequence: Synthetic oligonucleotide
  Antisense strand to SEQ ID NO: 1492858
ucugugcagaagguaaccu

SEQ ID NO: 1492860 - RNA, 19 nt, Artificial Sequence
  Description of Artificial Sequence: Synthetic oligonucleotide
  Sense strand starting at position 3209 of SEQ ID NO: 1244493
gguuaccuucugcacagaa

SEQ ID NO: 1492861 - RNA, 19 nt, Artificial Sequence
  Description of Artificial Sequence: Synthetic oligonucleotide
  Antisense strand to SEQ ID NO: 1492860
uucugugcagaagguaacc

SEQ ID NO: 1492862 - RNA, 19 nt, Artificial Sequence
  Description of Artificial Sequence: Synthetic oligonucleotide
  Sense strand starting at position 3280 of SEQ ID NO: 1244493
ccucuacucugucugcuua

SEQ ID NO: 1492863 - RNA, 19 nt, Artificial Sequence
  Description of Artificial Sequence: Synthetic oligonucleotide
  Antisense strand to SEQ ID NO: 1492862
uaagcagacagaguagagg

SEQ ID NO: 1492864 - RNA, 19 nt, Artificial Sequence
  Description of Artificial Sequence: Synthetic oligonucleotide
  Sense strand starting at position 3430 of SEQ ID NO: 1244493
aaguuagaaugucacaaug

SEQ ID NO: 1492865 - RNA, 19 nt, Artificial Sequence
  Description of Artificial Sequence: Synthetic oligonucleotide
  Antisense strand to SEQ ID NO: 1492864
cauugugacauucuaacuu

SEQ ID NO: 1492866 - RNA, 19 nt, Artificial Sequence
  Description of Artificial Sequence: Synthetic oligonucleotide
  Sense strand starting at position 3498 of SEQ ID NO: 1244493
uccaguucccuagauccau

SEQ ID NO: 1492867 - RNA, 19 nt, Artificial Sequence
  Description of Artificial Sequence: Synthetic oligonucleotide
  Antisense strand to SEQ ID NO: 1492866
auggaucuagggaacugga

SEQ ID NO: 1492868 - RNA, 19 nt, Artificial Sequence
  Description of Artificial Sequence: Synthetic oligonucleotide
  Sense strand starting at position 3520 of SEQ ID NO: 1244493
uccuuucaggagggugaaa

SEQ ID NO: 1492869 - RNA, 19 nt, Artificial Sequence
  Description of Artificial Sequence: Synthetic oligonucleotide
  Antisense strand to SEQ ID NO: 1492868
uuucacccuccugaaagga

SEQ ID NO: 1492870 - RNA, 19 nt, Artificial Sequence
  Description of Artificial Sequence: Synthetic oligonucleotide
  Sense strand starting at position 3561 of SEQ ID NO: 1244493
aagugugaccugcaccaaa

SEQ ID NO: 1492871 - RNA, 19 nt, Artificial Sequence
  Description of Artificial Sequence: Synthetic oligonucleotide
  Antisense strand to SEQ ID NO: 1492870
uuuggugcaggucacacuu

SEQ ID NO: 1492872 - RNA, 19 nt, Artificial Sequence
  Description of Artificial Sequence: Synthetic oligonucleotide
  Sense strand starting at position 3636 of SEQ ID NO: 1244493
guaagacggugcuucucaa

SEQ ID NO: 1492873 - RNA, 19 nt, Artificial Sequence
  Description of Artificial Sequence: Synthetic oligonucleotide
  Antisense strand to SEQ ID NO: 1492872
uugagaagcaccgucuuac

SEQ ID NO: 1492874 - RNA, 19 nt, Artificial Sequence
  Description of Artificial Sequence: Synthetic oligonucleotide
  Sense strand starting at position 153 of SEQ ID NO: 1244494
gacgguguggcugagagua

SEQ ID NO: 1492875 - RNA, 19 nt, Artificial Sequence
  Description of Artificial Sequence: Synthetic oligonucleotide
  Antisense strand to SEQ ID NO: 1492874
uacucucagccacaccguc

SEQ ID NO: 1492876 - RNA, 19 nt, Artificial Sequence
  Description of Artificial Sequence: Synthetic oligonucleotide
  Sense strand starting at position 365 of SEQ ID NO: 1244494
uuuggaaugcacugucuuu

SEQ ID NO: 1492877 - RNA, 19 nt, Artificial Sequence
  Description of Artificial Sequence: Synthetic oligonucleotide
  Antisense strand to SEQ ID NO: 1492876
aaagacagugcauuccaaa

SEQ ID NO: 1492878 - RNA, 19 nt, Artificial Sequence
  Description of Artificial Sequence: Synthetic oligonucleotide
  Sense strand starting at position 376 of SEQ ID NO: 1244494
cugucuuugacaugagcag

SEQ ID NO: 1492879 - RNA, 19 nt, Artificial Sequence
  Description of Artificial Sequence: Synthetic oligonucleotide
  Antisense strand to SEQ ID NO: 1492878
cugcucaugucaaagacag

SEQ ID NO: 1492880 - RNA, 19 nt, Artificial Sequence
  Description of Artificial Sequence: Synthetic oligonucleotide
  Sense strand starting at position 467 of SEQ ID NO: 1244494
uguucugcccugggaucaa

SEQ ID NO: 1492881 - RNA, 19 nt, Artificial Sequence
  Description of Artificial Sequence: Synthetic oligonucleotide
  Antisense strand to SEQ ID NO: 1492880
uugaucccagggcagaaca

SEQ ID NO: 1492882 - RNA, 19 nt, Artificial Sequence
  Description of Artificial Sequence: Synthetic oligonucleotide
  Sense strand starting at position 539 of SEQ ID NO: 1244494
uggccuuacucugcagauu

SEQ ID NO: 1492883 - RNA, 19 nt, Artificial Sequence
  Description of Artificial Sequence: Synthetic oligonucleotide
  Antisense strand to SEQ ID NO: 1492882
aaucugcagaguaaggcca

SEQ ID NO: 1492884 - RNA, 19 nt, Artificial Sequence
  Description of Artificial Sequence: Synthetic oligonucleotide
  Sense strand starting at position 540 of SEQ ID NO: 1244494
ggccuuacucugcagauua

SEQ ID NO: 1492885 - RNA, 19 nt, Artificial Sequence
  Description of Artificial Sequence: Synthetic oligonucleotide
  Antisense strand to SEQ ID NO: 1492884
uaaucugcagaguaaggcc

SEQ ID NO: 1492886 - RNA, 19 nt, Artificial Sequence
  Description of Artificial Sequence: Synthetic oligonucleotide
  Sense strand starting at position 1053 of SEQ ID NO: 1244494
guggcuuuacugugugaca

SEQ ID NO: 1492887 - RNA, 19 nt, Artificial Sequence
  Description of Artificial Sequence: Synthetic oligonucleotide
  Antisense strand to SEQ ID NO: 1492886
ugucacacaguaaagccac

SEQ ID NO: 1492888 - RNA, 19 nt, Artificial Sequence
  Description of Artificial Sequence: Synthetic oligonucleotide
  Sense strand starting at position 1054 of SEQ ID NO: 1244494
uggcuuuacugugugacau

SEQ ID NO: 1492889 - RNA, 19 nt, Artificial Sequence
  Description of Artificial Sequence: Synthetic oligonucleotide
  Antisense strand to SEQ ID NO: 1492888
augucacacaguaaagcca

SEQ ID NO: 1492890 - RNA, 19 nt, Artificial Sequence
  Description of Artificial Sequence: Synthetic oligonucleotide
  Sense strand starting at position 1055 of SEQ ID NO: 1244494
ggcuuuacugugugacaug

SEQ ID NO: 1492891 - RNA, 19 nt, Artificial Sequence
  Description of Artificial Sequence: Synthetic oligonucleotide
  Antisense strand to SEQ ID NO: 1492890
caugucacacaguaaagcc

SEQ ID NO: 1492892 - RNA, 19 nt, Artificial Sequence
  Description of Artificial Sequence: Synthetic oligonucleotide
  Sense strand starting at position 1060 of SEQ ID NO: 1244494
uacugugugacauggcaga

SEQ ID NO: 1492893 - RNA, 19 nt, Artificial Sequence
  Description of Artificial Sequence: Synthetic oligonucleotide
  Antisense strand to SEQ ID NO: 1492892
ucugccaugucacacagua

SEQ ID NO: 1492894 - RNA, 19 nt, Artificial Sequence
  Description of Artificial Sequence: Synthetic oligonucleotide
  Sense strand starting at position 1191 of SEQ ID NO: 1244494
gguucuugugaggguagga

SEQ ID NO: 1492895 - RNA, 19 nt, Artificial Sequence
  Description of Artificial Sequence: Synthetic oligonucleotide
  Antisense strand to SEQ ID NO: 1492894
uccuacccucacaagaacc

SEQ ID NO: 1492896 - RNA, 19 nt, Artificial Sequence
  Description of Artificial Sequence: Synthetic oligonucleotide
  Sense strand starting at position 1402 of SEQ ID NO: 1244494
cucaccaagcagugagaua

SEQ ID NO: 1492897 - RNA, 19 nt, Artificial Sequence
  Description of Artificial Sequence: Synthetic oligonucleotide
  Antisense strand to SEQ ID NO: 1492896
uaucucacugcuuggugag

SEQ ID NO: 1492898 - RNA, 19 nt, Artificial Sequence
  Description of Artificial Sequence: Synthetic oligonucleotide
  Sense strand starting at position 1460 of SEQ ID NO: 1244494
uccaguagagcggauugaa

SEQ ID NO: 1492899 - RNA, 19 nt, Artificial Sequence
  Description of Artificial Sequence: Synthetic oligonucleotide
  Antisense strand to SEQ ID NO: 1492898
uucaauccgcucuacugga

SEQ ID NO: 1492900 - RNA, 19 nt, Artificial Sequence
  Description of Artificial Sequence: Synthetic oligonucleotide
  Sense strand starting at position 1540 of SEQ ID NO: 1244494
cgggucauaacgcagaagu

SEQ ID NO: 1492901 - RNA, 19 nt, Artificial Sequence
  Description of Artificial Sequence: Synthetic oligonucleotide
  Antisense strand to SEQ ID NO: 1492900
acuucugcguuaugacccg

SEQ ID NO: 1492902 - RNA, 19 nt, Artificial Sequence
  Description of Artificial Sequence: Synthetic oligonucleotide
  Sense strand starting at position 1542 of SEQ ID NO: 1244494
ggucauaacgcagaagucu

SEQ ID NO: 1492903 - RNA, 19 nt, Artificial Sequence
  Description of Artificial Sequence: Synthetic oligonucleotide
  Antisense strand to SEQ ID NO: 1492902
agacuucugcguuaugacc

SEQ ID NO: 1492904 - RNA, 19 nt, Artificial Sequence
  Description of Artificial Sequence: Synthetic oligonucleotide
  Sense strand starting at position 1634 of SEQ ID NO: 1244494
aaaguuacccucugggaac

SEQ ID NO: 1492905 - RNA, 19 nt, Artificial Sequence
  Description of Artificial Sequence: Synthetic oligonucleotide
  Antisense strand to SEQ ID NO: 1492904
guucccagaggguaacuuu

SEQ ID NO: 1492906 - RNA, 19 nt, Artificial Sequence
  Description of Artificial Sequence: Synthetic oligonucleotide
  Sense strand starting at position 1735 of SEQ ID NO: 1244494
ccuaaugagcugugucaug

SEQ ID NO: 1492907 - RNA, 19 nt, Artificial Sequence
  Description of Artificial Sequence: Synthetic oligonucleotide
  Antisense strand to SEQ ID NO: 1492906
caugacacagcucauuagg

SEQ ID NO: 1492908 - RNA, 19 nt, Artificial Sequence
  Description of Artificial Sequence: Synthetic oligonucleotide
  Sense strand starting at position 1770 of SEQ ID NO: 1244494
gcagaaaugugccuggaug

SEQ ID NO: 1492909 - RNA, 19 nt, Artificial Sequence
  Description of Artificial Sequence: Synthetic oligonucleotide
  Antisense strand to SEQ ID NO: 1492908
cauccaggcacauuucugc

SEQ ID NO: 1492910 - RNA, 19 nt, Artificial Sequence
  Description of Artificial Sequence: Synthetic oligonucleotide
  Sense strand starting at position 1915 of SEQ ID NO: 1244494
agcugagauaaaugugaag

SEQ ID NO: 1492911 - RNA, 19 nt, Artificial Sequence
  Description of Artificial Sequence: Synthetic oligonucleotide
  Antisense strand to SEQ ID NO: 1492910
cuucacauuuaucucagcu

SEQ ID NO: 1492912 - RNA, 19 nt, Artificial Sequence
  Description of Artificial Sequence: Synthetic oligonucleotide
  Sense strand starting at position 1918 of SEQ ID NO: 1244494
ugagauaaaugugaagaga

SEQ ID NO: 1492913 - RNA, 19 nt, Artificial Sequence
  Description of Artificial Sequence: Synthetic oligonucleotide
  Antisense strand to SEQ ID NO: 1492912
ucucuucacauuuaucuca

SEQ ID NO: 1492914 - RNA, 19 nt, Artificial Sequence
  Description of Artificial Sequence: Synthetic oligonucleotide
  Sense strand starting at position 2014 of SEQ ID NO: 1244494
ggacaaucuugagugcaca

SEQ ID NO: 1492915 - RNA, 19 nt, Artificial Sequence
  Description of Artificial Sequence: Synthetic oligonucleotide
  Antisense strand to SEQ ID NO: 1492914
ugugcacucaagauugucc

SEQ ID NO: 1492916 - RNA, 19 nt, Artificial Sequence
  Description of Artificial Sequence: Synthetic oligonucleotide
  Sense strand starting at position 2171 of SEQ ID NO: 1244494
caacuuagguguccagcaa

SEQ ID NO: 1492917 - RNA, 19 nt, Artificial Sequence
  Description of Artificial Sequence: Synthetic oligonucleotide
  Antisense strand to SEQ ID NO: 1492916
uugcuggacaccuaaguug

SEQ ID NO: 1492918 - RNA, 19 nt, Artificial Sequence
  Description of Artificial Sequence: Synthetic oligonucleotide
  Sense strand starting at position 2175 of SEQ ID NO: 1244494
uuagguguccagcaaccaa

SEQ ID NO: 1492919 - RNA, 19 nt, Artificial Sequence
  Description of Artificial Sequence: Synthetic oligonucleotide
  Antisense strand to SEQ ID NO: 1492918
uugguugcuggacaccuaa

SEQ ID NO: 1492920 - RNA, 19 nt, Artificial Sequence
  Description of Artificial Sequence: Synthetic oligonucleotide
  Sense strand starting at position 2908 of SEQ ID NO: 1244494
ggcguaguuccaguuacuu

SEQ ID NO: 1492921 - RNA, 19 nt, Artificial Sequence
  Description of Artificial Sequence: Synthetic oligonucleotide
  Antisense strand to SEQ ID NO: 1492920
aaguaacuggaacuacgcc

SEQ ID NO: 1492922 - RNA, 19 nt, Artificial Sequence
  Description of Artificial Sequence: Synthetic oligonucleotide
  Sense strand starting at position 2959 of SEQ ID NO: 1244494
agguguucgaggcuguagu

SEQ ID NO: 1492923 - RNA, 19 nt, Artificial Sequence
  Description of Artificial Sequence: Synthetic oligonucleotide
  Antisense strand to SEQ ID NO: 1492922
acuacagccucgaacaccu

SEQ ID NO: 1492924 - RNA, 19 nt, Artificial Sequence
  Description of Artificial Sequence: Synthetic oligonucleotide
  Sense strand starting at position 3101 of SEQ ID NO: 1244494
ggugucucuccacaugcaa

SEQ ID NO: 1492925 - RNA, 19 nt, Artificial Sequence
  Description of Artificial Sequence: Synthetic oligonucleotide
  Antisense strand to SEQ ID NO: 1492924
uugcauguggagagacacc

SEQ ID NO: 1492926 - RNA, 19 nt, Artificial Sequence
  Description of Artificial Sequence: Synthetic oligonucleotide
  Sense strand starting at position 3157 of SEQ ID NO: 1244494
uguaaaguugugcucgcuu

SEQ ID NO: 1492927 - RNA, 19 nt, Artificial Sequence
  Description of Artificial Sequence: Synthetic oligonucleotide
  Antisense strand to SEQ ID NO: 1492926
aagcgagcacaacuuuaca

SEQ ID NO: 1492928 - RNA, 19 nt, Artificial Sequence
  Description of Artificial Sequence: Synthetic oligonucleotide
  Sense strand starting at position 3162 of SEQ ID NO: 1244494
aguugugcucgcuucagca

SEQ ID NO: 1492929 - RNA, 19 nt, Artificial Sequence
  Description of Artificial Sequence: Synthetic oligonucleotide
  Antisense strand to SEQ ID NO: 1492928
ugcugaagcgagcacaacu

SEQ ID NO: 1492930 - RNA, 19 nt, Artificial Sequence
  Description of Artificial Sequence: Synthetic oligonucleotide
  Sense strand starting at position 3346 of SEQ ID NO: 1244494
aggaauaccuaagguagau

SEQ ID NO: 1492931 - RNA, 19 nt, Artificial Sequence
  Description of Artificial Sequence: Synthetic oligonucleotide
  Antisense strand to SEQ ID NO: 1492930
aucuaccuuagguauuccu

SEQ ID NO: 1492932 - RNA, 19 nt, Artificial Sequence
  Description of Artificial Sequence: Synthetic oligonucleotide
  Sense strand starting at position 3506 of SEQ ID NO: 1244494
aaguguaaaguccaucaga

SEQ ID NO: 1492933 - RNA, 19 nt, Artificial Sequence
  Description of Artificial Sequence: Synthetic oligonucleotide
  Antisense strand to SEQ ID NO: 1492932
ucugauggacuuuacacuu

SEQ ID NO: 1492934 - RNA, 19 nt, Artificial Sequence
  Description of Artificial Sequence: Synthetic oligonucleotide
  Sense strand starting at position 3509 of SEQ ID NO: 1244494
uguaaaguccaucagagcu

SEQ ID NO: 1492935 - RNA, 19 nt, Artificial Sequence
  Description of Artificial Sequence: Synthetic oligonucleotide
  Antisense strand to SEQ ID NO: 1492934
agcucugauggacuuuaca

SEQ ID NO: 1492936 - RNA, 19 nt, Artificial Sequence
  Description of Artificial Sequence: Synthetic oligonucleotide
  Sense strand starting at position 3515 of SEQ ID NO: 1244494
guccaucagagcugugauc

SEQ ID NO: 1492937 - RNA, 19 nt, Artificial Sequence
  Description of Artificial Sequence: Synthetic oligonucleotide
  Antisense strand to SEQ ID NO: 1492936
gaucacagcucugauggac

SEQ ID NO: 1492938 - RNA, 19 nt, Artificial Sequence
  Description of Artificial Sequence: Synthetic oligonucleotide
  Sense strand starting at position 3517 of SEQ ID NO: 1244494
ccaucagagcugugaucuu

SEQ ID NO: 1492939 - RNA, 19 nt, Artificial Sequence
  Description of Artificial Sequence: Synthetic oligonucleotide
  Antisense strand to SEQ ID NO: 1492938
aagaucacagcucugaugg

SEQ ID NO: 1492940 - RNA, 19 nt, Artificial Sequence
  Description of Artificial Sequence: Synthetic oligonucleotide
  Sense strand starting at position 3529 of SEQ ID NO: 1244494
ugaucuuucccauaauggu

SEQ ID NO: 1492941 - RNA, 19 nt, Artificial Sequence
  Description of Artificial Sequence: Synthetic oligonucleotide
  Antisense strand to SEQ ID NO: 1492940
accauuaugggaaagauca

SEQ ID NO: 1492942 - RNA, 19 nt, Artificial Sequence
  Description of Artificial Sequence: Synthetic oligonucleotide
  Sense strand starting at position 3557 of SEQ ID NO: 1244494
ucuauugcauuuggaaaua

SEQ ID NO: 1492943 - RNA, 19 nt, Artificial Sequence
  Description of Artificial Sequence: Synthetic oligonucleotide
  Antisense strand to SEQ ID NO: 1492942
uauuuccaaaugcaauaga

SEQ ID NO: 1492944 - RNA, 19 nt, Artificial Sequence
  Description of Artificial Sequence: Synthetic oligonucleotide
  Sense strand starting at position 3589 of SEQ ID NO: 1244494
caaagagcgcuuugaucuc

SEQ ID NO: 1492945 - RNA, 19 nt, Artificial Sequence
  Description of Artificial Sequence: Synthetic oligonucleotide
  Antisense strand to SEQ ID NO: 1492944
gagaucaaagcgcucuuug

SEQ ID NO: 1492946 - RNA, 19 nt, Artificial Sequence
  Description of Artificial Sequence: Synthetic oligonucleotide
  Sense strand starting at position 3775 of SEQ ID NO: 1244494
cccucagacgucuaucagu

SEQ ID NO: 1492947 - RNA, 19 nt, Artificial Sequence
  Description of Artificial Sequence: Synthetic oligonucleotide
  Antisense strand to SEQ ID NO: 1492946
acugauagacgucugaggg

SEQ ID NO: 1492948 - RNA, 19 nt, Artificial Sequence
  Description of Artificial Sequence: Synthetic oligonucleotide
  Sense strand starting at position 3780 of SEQ ID NO: 1244494
agacgucuaucaguauaaa

SEQ ID NO: 1492949 - RNA, 19 nt, Artificial Sequence
  Description of Artificial Sequence: Synthetic oligonucleotide
  Antisense strand to SEQ ID NO: 1492948
uuuauacugauagacgucu

SEQ ID NO: 1492950 - RNA, 19 nt, Artificial Sequence
  Description of Artificial Sequence: Synthetic oligonucleotide
  Sense strand starting at position 3781 of SEQ ID NO: 1244494
gacgucuaucaguauaaag

SEQ ID NO: 1492951 - RNA, 19 nt, Artificial Sequence
  Description of Artificial Sequence: Synthetic oligonucleotide
  Antisense strand to SEQ ID NO: 1492950
cuuuauacugauagacguc

SEQ ID NO: 1492952 - RNA, 19 nt, Artificial Sequence
  Description of Artificial Sequence: Synthetic oligonucleotide
  Sense strand starting at position 3905 of SEQ ID NO: 1244494
gggcuaagcagauguuaaa

SEQ ID NO: 1492953 - RNA, 19 nt, Artificial Sequence
  Description of Artificial Sequence: Synthetic oligonucleotide
  Antisense strand to SEQ ID NO: 1492952
uuuaacaucugcuuagccc

SEQ ID NO: 1492954 - RNA, 19 nt, Artificial Sequence
  Description of Artificial Sequence: Synthetic oligonucleotide
  Sense strand starting at position 367 of SEQ ID NO: 1244495
gaucuaagucucugagggu

SEQ ID NO: 1492955 - RNA, 19 nt, Artificial Sequence
  Description of Artificial Sequence: Synthetic oligonucleotide
  Antisense strand to SEQ ID NO: 1492954
acccucagagacuuagauc

SEQ ID NO: 1492956 - RNA, 19 nt, Artificial Sequence
  Description of Artificial Sequence: Synthetic oligonucleotide
  Sense strand starting at position 374 of SEQ ID NO: 1244495
gucucugaggguugagaag

SEQ ID NO: 1492957 - RNA, 19 nt, Artificial Sequence
  Description of Artificial Sequence: Synthetic oligonucleotide
  Antisense strand to SEQ ID NO: 1492956
cuucucaacccucagagac

SEQ ID NO: 1492958 - RNA, 19 nt, Artificial Sequence
  Description of Artificial Sequence: Synthetic oligonucleotide
  Sense strand starting at position 383 of SEQ ID NO: 1244495
gguugagaaguucgaucac

SEQ ID NO: 1492959 - RNA, 19 nt, Artificial Sequence
  Description of Artificial Sequence: Synthetic oligonucleotide
  Antisense strand to SEQ ID NO: 1492958
gugaucgaacuucucaacc

SEQ ID NO: 1492960 - RNA, 19 nt, Artificial Sequence
  Description of Artificial Sequence: Synthetic oligonucleotide
  Sense strand starting at position 437 of SEQ ID NO: 1244495
cuugcagaaagcugguuua

SEQ ID NO: 1492961 - RNA, 19 nt, Artificial Sequence
  Description of Artificial Sequence: Synthetic oligonucleotide
  Antisense strand to SEQ ID NO: 1492960
uaaaccagcuuucugcaag

SEQ ID NO: 1492962 - RNA, 19 nt, Artificial Sequence
  Description of Artificial Sequence: Synthetic oligonucleotide
  Sense strand starting at position 440 of SEQ ID NO: 1244495
gcagaaagcugguuuaacu

SEQ ID NO: 1492963 - RNA, 19 nt, Artificial Sequence
  Description of Artificial Sequence: Synthetic oligonucleotide
  Antisense strand to SEQ ID NO: 1492962
aguuaaaccagcuuucugc

SEQ ID NO: 1492964 - RNA, 19 nt, Artificial Sequence
  Description of Artificial Sequence: Synthetic oligonucleotide
  Sense strand starting at position 448 of SEQ ID NO: 1244495
cugguuuaacuccagagca

SEQ ID NO: 1492965 - RNA, 19 nt, Artificial Sequence
  Description of Artificial Sequence: Synthetic oligonucleotide
  Antisense strand to SEQ ID NO: 1492964
ugcucuggaguuaaaccag

SEQ ID NO: 1492966 - RNA, 19 nt, Artificial Sequence
  Description of Artificial Sequence: Synthetic oligonucleotide
  Sense strand starting at position 559 of SEQ ID NO: 1244495
ggaugucuccuguacccuu

SEQ ID NO: 1492967 - RNA, 19 nt, Artificial Sequence
  Description of Artificial Sequence: Synthetic oligonucleotide
  Antisense strand to SEQ ID NO: 1492966
aaggguacaggagacaucc

SEQ ID NO: 1492968 - RNA, 19 nt, Artificial Sequence
  Description of Artificial Sequence: Synthetic oligonucleotide
  Sense strand starting at position 696 of SEQ ID NO: 1244495
ccaaguucccauuaggugu

SEQ ID NO: 1492969 - RNA, 19 nt, Artificial Sequence
  Description of Artificial Sequence: Synthetic oligonucleotide
  Antisense strand to SEQ ID NO: 1492968
acaccuaaugggaacuugg

SEQ ID NO: 1492970 - RNA, 19 nt, Artificial Sequence
  Description of Artificial Sequence: Synthetic oligonucleotide
  Sense strand starting at position 756 of SEQ ID NO: 1244495
gcuggucgccuccuauauu

SEQ ID NO: 1492971 - RNA, 19 nt, Artificial Sequence
  Description of Artificial Sequence: Synthetic oligonucleotide
  Antisense strand to SEQ ID NO: 1492970
aauauaggaggcgaccagc

SEQ ID NO: 1492972 - RNA, 19 nt, Artificial Sequence
  Description of Artificial Sequence: Synthetic oligonucleotide
  Sense strand starting at position 1180 of SEQ ID NO: 1244495
cagucauucuggucaagac

SEQ ID NO: 1492973 - RNA, 19 nt, Artificial Sequence
  Description of Artificial Sequence: Synthetic oligonucleotide
  Antisense strand to SEQ ID NO: 1492972
gucuugaccagaaugacug

SEQ ID NO: 1492974 - RNA, 19 nt, Artificial Sequence
  Description of Artificial Sequence: Synthetic oligonucleotide
  Sense strand starting at position 1181 of SEQ ID NO: 1244495
agucauucuggucaagaca

SEQ ID NO: 1492975 - RNA, 19 nt, Artificial Sequence
  Description of Artificial Sequence: Synthetic oligonucleotide
  Antisense strand to SEQ ID NO: 1492974
ugucuugaccagaaugacu

SEQ ID NO: 1492976 - RNA, 19 nt, Artificial Sequence
  Description of Artificial Sequence: Synthetic oligonucleotide
  Sense strand starting at position 1817 of SEQ ID NO: 1244495
ccgaaaguagcccaucaga

SEQ ID NO: 1492977 - RNA, 19 nt, Artificial Sequence
  Description of Artificial Sequence: Synthetic oligonucleotide
  Antisense strand to SEQ ID NO: 1492976
ucugaugggcuacuuucgg

SEQ ID NO: 1492978 - RNA, 19 nt, Artificial Sequence
  Description of Artificial Sequence: Synthetic oligonucleotide
  Sense strand starting at position 1825 of SEQ ID NO: 1244495
agcccaucagauuggaagu

SEQ ID NO: 1492979 - RNA, 19 nt, Artificial Sequence
  Description of Artificial Sequence: Synthetic oligonucleotide
  Antisense strand to SEQ ID NO: 1492978
acuuccaaucugaugggcu

SEQ ID NO: 1492980 - RNA, 19 nt, Artificial Sequence
  Description of Artificial Sequence: Synthetic oligonucleotide
  Sense strand starting at position 1877 of SEQ ID NO: 1244495
ccaggauggccgcagagau

SEQ ID NO: 1492981 - RNA, 19 nt, Artificial Sequence
  Description of Artificial Sequence: Synthetic oligonucleotide
  Antisense strand to SEQ ID NO: 1492980
aucucugcggccauccugg

SEQ ID NO: 1492982 - RNA, 19 nt, Artificial Sequence
  Description of Artificial Sequence: Synthetic oligonucleotide
  Sense strand starting at position 2091 of SEQ ID NO: 1244495
gcuaguggucuccacuaag

SEQ ID NO: 1492983 - RNA, 19 nt, Artificial Sequence
  Description of Artificial Sequence: Synthetic oligonucleotide
  Antisense strand to SEQ ID NO: 1492982
cuuaguggagaccacuagc

SEQ ID NO: 1492984 - RNA, 19 nt, Artificial Sequence
  Description of Artificial Sequence: Synthetic oligonucleotide
  Sense strand starting at position 2203 of SEQ ID NO: 1244495
acgcuugcacauugaauaa

SEQ ID NO: 1492985 - RNA, 19 nt, Artificial Sequence
  Description of Artificial Sequence: Synthetic oligonucleotide
  Antisense strand to SEQ ID NO: 1492984
uuauucaaugugcaagcgu

SEQ ID NO: 1492986 - RNA, 19 nt, Artificial Sequence
  Description of Artificial Sequence: Synthetic oligonucleotide
  Sense strand starting at position 2287 of SEQ ID NO: 1244495
gcucaagacuugucuacuu

SEQ ID NO: 1492987 - RNA, 19 nt, Artificial Sequence
  Description of Artificial Sequence: Synthetic oligonucleotide
  Antisense strand to SEQ ID NO: 1492986
aaguagacaagucuugagc

SEQ ID NO: 1492988 - RNA, 19 nt, Artificial Sequence
  Description of Artificial Sequence: Synthetic oligonucleotide
  Sense strand starting at position 2370 of SEQ ID NO: 1244495
aaggaauggcgcugcaagu

SEQ ID NO: 1492989 - RNA, 19 nt, Artificial Sequence
  Description of Artificial Sequence: Synthetic oligonucleotide
  Antisense strand to SEQ ID NO: 1492988
acuugcagcgccauuccuu

SEQ ID NO: 1492990 - RNA, 19 nt, Artificial Sequence
  Description of Artificial Sequence: Synthetic oligonucleotide
  Sense strand starting at position 2403 of SEQ ID NO: 1244495
ugagaugggugguccuuga

SEQ ID NO: 1492991 - RNA, 19 nt, Artificial Sequence
  Description of Artificial Sequence: Synthetic oligonucleotide
  Antisense strand to SEQ ID NO: 1492990
ucaaggaccacccaucuca

SEQ ID NO: 1492992 - RNA, 19 nt, Artificial Sequence
  Description of Artificial Sequence: Synthetic oligonucleotide
  Sense strand starting at position 2521 of SEQ ID NO: 1244495
cgaagcacuuccucugaca

SEQ ID NO: 1492993 - RNA, 19 nt, Artificial Sequence
  Description of Artificial Sequence: Synthetic oligonucleotide
  Antisense strand to SEQ ID NO: 1492992
ugucagaggaagugcuucg

SEQ ID NO: 1492994 - RNA, 19 nt, Artificial Sequence
  Description of Artificial Sequence: Synthetic oligonucleotide
  Sense strand starting at position 2633 of SEQ ID NO: 1244495
agccaauaguggcugugaa

SEQ ID NO: 1492995 - RNA, 19 nt, Artificial Sequence
  Description of Artificial Sequence: Synthetic oligonucleotide
  Antisense strand to SEQ ID NO: 1492994
uucacagccacuauuggcu

SEQ ID NO: 1492996 - RNA, 19 nt, Artificial Sequence
  Description of Artificial Sequence: Synthetic oligonucleotide
  Sense strand starting at position 2634 of SEQ ID NO: 1244495
gccaauaguggcugugaag

SEQ ID NO: 1492997 - RNA, 19 nt, Artificial Sequence
  Description of Artificial Sequence: Synthetic oligonucleotide
  Antisense strand to SEQ ID NO: 1492996
cuucacagccacuauuggc

SEQ ID NO: 1492998 - RNA, 19 nt, Artificial Sequence
  Description of Artificial Sequence: Synthetic oligonucleotide
  Sense strand starting at position 2705 of SEQ ID NO: 1244495
gccuacguggugucuagua

SEQ ID NO: 1492999 - RNA, 19 nt, Artificial Sequence
  Description of Artificial Sequence: Synthetic oligonucleotide
  Antisense strand to SEQ ID NO: 1492998
uacuagacaccacguaggc

SEQ ID NO: 1493000 - RNA, 19 nt, Artificial Sequence
  Description of Artificial Sequence: Synthetic oligonucleotide
  Sense strand starting at position 2717 of SEQ ID NO: 1244495
ucuaguacuuuccuccaga

SEQ ID NO: 1493001 - RNA, 19 nt, Artificial Sequence
  Description of Artificial Sequence: Synthetic oligonucleotide
  Antisense strand to SEQ ID NO: 1493000
ucuggaggaaaguacuaga

SEQ ID NO: 1493002 - RNA, 19 nt, Artificial Sequence
  Description of Artificial Sequence: Synthetic oligonucleotide
  Sense strand starting at position 2718 of SEQ ID NO: 1244495
cuaguacuuuccuccagag

SEQ ID NO: 1493003 - RNA, 19 nt, Artificial Sequence
  Description of Artificial Sequence: Synthetic oligonucleotide
  Antisense strand to SEQ ID NO: 1493002
cucuggaggaaaguacuag

SEQ ID NO: 1493004 - RNA, 19 nt, Artificial Sequence
  Description of Artificial Sequence: Synthetic oligonucleotide
  Sense strand starting at position 2919 of SEQ ID NO: 1244495
gacggaacgucaucugucu

SEQ ID NO: 1493005 - RNA, 19 nt, Artificial Sequence
  Description of Artificial Sequence: Synthetic oligonucleotide
  Antisense strand to SEQ ID NO: 1493004
agacagaugacguuccguc

SEQ ID NO: 1493006 - RNA, 19 nt, Artificial Sequence
  Description of Artificial Sequence: Synthetic oligonucleotide
  Sense strand starting at position 2978 of SEQ ID NO: 1244495
cauggcaagugaucgauaa

SEQ ID NO: 1493007 - RNA, 19 nt, Artificial Sequence
  Description of Artificial Sequence: Synthetic oligonucleotide
  Antisense strand to SEQ ID NO: 1493006
uuaucgaucacuugccaug

SEQ ID NO: 1493008 - RNA, 19 nt, Artificial Sequence
  Description of Artificial Sequence: Synthetic oligonucleotide
  Sense strand starting at position 2979 of SEQ ID NO: 1244495
auggcaagugaucgauaaa

SEQ ID NO: 1493009 - RNA, 19 nt, Artificial Sequence
  Description of Artificial Sequence: Synthetic oligonucleotide
  Antisense strand to SEQ ID NO: 1493008
uuuaucgaucacuugccau

SEQ ID NO: 1493010 - RNA, 19 nt, Artificial Sequence
  Description of Artificial Sequence: Synthetic oligonucleotide
  Sense strand starting at position 2980 of SEQ ID NO: 1244495
uggcaagugaucgauaaac

SEQ ID NO: 1493011 - RNA, 19 nt, Artificial Sequence
  Description of Artificial Sequence: Synthetic oligonucleotide
  Antisense strand to SEQ ID NO: 1493010
guuuaucgaucacuugcca

SEQ ID NO: 1493012 - RNA, 19 nt, Artificial Sequence
  Description of Artificial Sequence: Synthetic oligonucleotide
  Sense strand starting at position 2982 of SEQ ID NO: 1244495
gcaagugaucgauaaacau

SEQ ID NO: 1493013 - RNA, 19 nt, Artificial Sequence
  Description of Artificial Sequence: Synthetic oligonucleotide
  Antisense strand to SEQ ID NO: 1493012
auguuuaucgaucacuugc

SEQ ID NO: 1493014 - RNA, 19 nt, Artificial Sequence
  Description of Artificial Sequence: Synthetic oligonucleotide
  Sense strand starting at position 3070 of SEQ ID NO: 1244495
ugggaauucugauucucua

SEQ ID NO: 1493015 - RNA, 19 nt, Artificial Sequence
  Description of Artificial Sequence: Synthetic oligonucleotide
  Antisense strand to SEQ ID NO: 1493014
uagagaaucagaauuccca

SEQ ID NO: 1493016 - RNA, 19 nt, Artificial Sequence
  Description of Artificial Sequence: Synthetic oligonucleotide
  Sense strand starting at position 3091 of SEQ ID NO: 1244495
agagaugaguaguccuaga

SEQ ID NO: 1493017 - RNA, 19 nt, Artificial Sequence
  Description of Artificial Sequence: Synthetic oligonucleotide
  Antisense strand to SEQ ID NO: 1493016
ucuaggacuacucaucucu

SEQ ID NO: 1493018 - RNA, 19 nt, Artificial Sequence
  Description of Artificial Sequence: Synthetic oligonucleotide
  Sense strand starting at position 3122 of SEQ ID NO: 1244495
gcacgauuugcaggcaaua

SEQ ID NO: 1493019 - RNA, 19 nt, Artificial Sequence
  Description of Artificial Sequence: Synthetic oligonucleotide
  Antisense strand to SEQ ID NO: 1493018
uauugccugcaaaucgugc

SEQ ID NO: 1493020 - RNA, 19 nt, Artificial Sequence
  Description of Artificial Sequence: Synthetic oligonucleotide
  Sense strand starting at position 3224 of SEQ ID NO: 1244495
ccuggaaacguggguagua

SEQ ID NO: 1493021 - RNA, 19 nt, Artificial Sequence
  Description of Artificial Sequence: Synthetic oligonucleotide
  Antisense strand to SEQ ID NO: 1493020
uacuacccacguuuccagg

SEQ ID NO: 1493022 - RNA, 19 nt, Artificial Sequence
  Description of Artificial Sequence: Synthetic oligonucleotide
  Sense strand starting at position 3308 of SEQ ID NO: 1244495
ggccuaagcuuuccugaac

SEQ ID NO: 1493023 - RNA, 19 nt, Artificial Sequence
  Description of Artificial Sequence: Synthetic oligonucleotide
  Antisense strand to SEQ ID NO: 1493022
guucaggaaagcuuaggcc

SEQ ID NO: 1493024 - RNA, 19 nt, Artificial Sequence
  Description of Artificial Sequence: Synthetic oligonucleotide
  Sense strand starting at position 3309 of SEQ ID NO: 1244495
gccuaagcuuuccugaaca

SEQ ID NO: 1493025 - RNA, 19 nt, Artificial Sequence
  Description of Artificial Sequence: Synthetic oligonucleotide
  Antisense strand to SEQ ID NO: 1493024
uguucaggaaagcuuaggc

SEQ ID NO: 1493026 - RNA, 19 nt, Artificial Sequence
  Description of Artificial Sequence: Synthetic oligonucleotide
  Sense strand starting at position 3365 of SEQ ID NO: 1244495
cugagacaagaucguguua

SEQ ID NO: 1493027 - RNA, 19 nt, Artificial Sequence
  Description of Artificial Sequence: Synthetic oligonucleotide
  Antisense strand to SEQ ID NO: 1493026
uaacacgaucuugucucag

SEQ ID NO: 1493028 - RNA, 19 nt, Artificial Sequence
  Description of Artificial Sequence: Synthetic oligonucleotide
  Sense strand starting at position 3639 of SEQ ID NO: 1244495
uggccuuaucucguuugca

SEQ ID NO: 1493029 - RNA, 19 nt, Artificial Sequence
  Description of Artificial Sequence: Synthetic oligonucleotide
  Antisense strand to SEQ ID NO: 1493028
ugcaaacgagauaaggcca

SEQ ID NO: 1493030 - RNA, 19 nt, Artificial Sequence
  Description of Artificial Sequence: Synthetic oligonucleotide
  Sense strand starting at position 3641 of SEQ ID NO: 1244495
gccuuaucucguuugcaga

SEQ ID NO: 1493031 - RNA, 19 nt, Artificial Sequence
  Description of Artificial Sequence: Synthetic oligonucleotide
  Antisense strand to SEQ ID NO: 1493030
ucugcaaacgagauaaggc

SEQ ID NO: 1493032 - RNA, 19 nt, Artificial Sequence
  Description of Artificial Sequence: Synthetic oligonucleotide
  Sense strand starting at position 3643 of SEQ ID NO: 1244495
cuuaucucguuugcagaua

SEQ ID NO: 1493033 - RNA, 19 nt, Artificial Sequence
  Description of Artificial Sequence: Synthetic oligonucleotide
  Antisense strand to SEQ ID NO: 1493032
uaucugcaaacgagauaag

SEQ ID NO: 1493034 - RNA, 19 nt, Artificial Sequence
  Description of Artificial Sequence: Synthetic oligonucleotide
  Sense strand starting at position 4 of SEQ ID NO: 1244496
gagcacagucuuuagaauu

SEQ ID NO: 1493035 - RNA, 19 nt, Artificial Sequence
  Description of Artificial Sequence: Synthetic oligonucleotide
  Antisense strand to SEQ ID NO: 1493034
aauucuaaagacugugcuc

SEQ ID NO: 1493036 - RNA, 19 nt, Artificial Sequence
  Description of Artificial Sequence: Synthetic oligonucleotide
  Sense strand starting at position 143 of SEQ ID NO: 1244496
gguuguguugaggauugag

SEQ ID NO: 1493037 - RNA, 19 nt, Artificial Sequence
  Description of Artificial Sequence: Synthetic oligonucleotide
  Antisense strand to SEQ ID NO: 1493036
cucaauccucaacacaacc

SEQ ID NO: 1493038 - RNA, 19 nt, Artificial Sequence
  Description of Artificial Sequence: Synthetic oligonucleotide
  Sense strand starting at position 146 of SEQ ID NO: 1244496
uguguugaggauugagaua

SEQ ID NO: 1493039 - RNA, 19 nt, Artificial Sequence
  Description of Artificial Sequence: Synthetic oligonucleotide
  Antisense strand to SEQ ID NO: 1493038
uaucucaauccucaacaca

SEQ ID NO: 1493040 - RNA, 19 nt, Artificial Sequence
  Description of Artificial Sequence: Synthetic oligonucleotide
  Sense strand starting at position 160 of SEQ ID NO: 1244496
agauaauguacguaaagca

SEQ ID NO: 1493041 - RNA, 19 nt, Artificial Sequence
  Description of Artificial Sequence: Synthetic oligonucleotide
  Antisense strand to SEQ ID NO: 1493040
ugcuuuacguacauuaucu

SEQ ID NO: 1493042 - RNA, 19 nt, Artificial Sequence
  Description of Artificial Sequence: Synthetic oligonucleotide
  Sense strand starting at position 453 of SEQ ID NO: 1244496
cuuguauauccugaacugu

SEQ ID NO: 1493043 - RNA, 19 nt, Artificial Sequence
  Description of Artificial Sequence: Synthetic oligonucleotide
  Antisense strand to SEQ ID NO: 1493042
acaguucaggauauacaag

SEQ ID NO: 1493044 - RNA, 19 nt, Artificial Sequence
  Description of Artificial Sequence: Synthetic oligonucleotide
  Sense strand starting at position 527 of SEQ ID NO: 1244496
uuuccuaggauguaucgaa

SEQ ID NO: 1493045 - RNA, 19 nt, Artificial Sequence
  Description of Artificial Sequence: Synthetic oligonucleotide
  Antisense strand to SEQ ID NO: 1493044
uucgauacauccuaggaaa

SEQ ID NO: 1493046 - RNA, 19 nt, Artificial Sequence
  Description of Artificial Sequence: Synthetic oligonucleotide
  Sense strand starting at position 531 of SEQ ID NO: 1244496
cuaggauguaucgaaguug

SEQ ID NO: 1493047 - RNA, 19 nt, Artificial Sequence
  Description of Artificial Sequence: Synthetic oligonucleotide
  Antisense strand to SEQ ID NO: 1493046
caacuucgauacauccuag

SEQ ID NO: 1493048 - RNA, 19 nt, Artificial Sequence
  Description of Artificial Sequence: Synthetic oligonucleotide
  Sense strand starting at position 720 of SEQ ID NO: 1244496
ccaggaacauaauagauuu

SEQ ID NO: 1493049 - RNA, 19 nt, Artificial Sequence
  Description of Artificial Sequence: Synthetic oligonucleotide
  Antisense strand to SEQ ID NO: 1493048
aaaucuauuauguuccugg

SEQ ID NO: 1493050 - RNA, 19 nt, Artificial Sequence
  Description of Artificial Sequence: Synthetic oligonucleotide
  Sense strand starting at position 939 of SEQ ID NO: 1244496
uugauucugcaagaaccua

SEQ ID NO: 1493051 - RNA, 19 nt, Artificial Sequence
  Description of Artificial Sequence: Synthetic oligonucleotide
  Antisense strand to SEQ ID NO: 1493050
uagguucuugcagaaucaa

SEQ ID NO: 1493052 - RNA, 19 nt, Artificial Sequence
  Description of Artificial Sequence: Synthetic oligonucleotide
  Sense strand starting at position 1054 of SEQ ID NO: 1244496
uaaauaagucacuguugga

SEQ ID NO: 1493053 - RNA, 19 nt, Artificial Sequence
  Description of Artificial Sequence: Synthetic oligonucleotide
  Antisense strand to SEQ ID NO: 1493052
uccaacagugacuuauuua

SEQ ID NO: 1493054 - RNA, 19 nt, Artificial Sequence
  Description of Artificial Sequence: Synthetic oligonucleotide
  Sense strand starting at position 1064 of SEQ ID NO: 1244496
acuguuggacccugaaaug

SEQ ID NO: 1493055 - RNA, 19 nt, Artificial Sequence
  Description of Artificial Sequence: Synthetic oligonucleotide
  Antisense strand to SEQ ID NO: 1493054
cauuucaggguccaacagu

SEQ ID NO: 1493056 - RNA, 19 nt, Artificial Sequence
  Description of Artificial Sequence: Synthetic oligonucleotide
  Sense strand starting at position 1083 of SEQ ID NO: 1244496
cuggguauucaguacaggu

SEQ ID NO: 1493057 - RNA, 19 nt, Artificial Sequence
  Description of Artificial Sequence: Synthetic oligonucleotide
  Antisense strand to SEQ ID NO: 1493056
accuguacugaauacccag

SEQ ID NO: 1493058 - RNA, 19 nt, Artificial Sequence
  Description of Artificial Sequence: Synthetic oligonucleotide
  Sense strand starting at position 1093 of SEQ ID NO: 1244496
aguacaggucucuacacau

SEQ ID NO: 1493059 - RNA, 19 nt, Artificial Sequence
  Description of Artificial Sequence: Synthetic oligonucleotide
  Antisense strand to SEQ ID NO: 1493058
auguguagagaccuguacu

SEQ ID NO: 1493060 - RNA, 19 nt, Artificial Sequence
  Description of Artificial Sequence: Synthetic oligonucleotide
  Sense strand starting at position 1128 of SEQ ID NO: 1244496
cucuuaagucaugggauac

SEQ ID NO: 1493061 - RNA, 19 nt, Artificial Sequence
  Description of Artificial Sequence: Synthetic oligonucleotide
  Antisense strand to SEQ ID NO: 1493060
guaucccaugacuuaagag

SEQ ID NO: 1493062 - RNA, 19 nt, Artificial Sequence
  Description of Artificial Sequence: Synthetic oligonucleotide
  Sense strand starting at position 1309 of SEQ ID NO: 1244496
gugcuaccaccucaaagau

SEQ ID NO: 1493063 - RNA, 19 nt, Artificial Sequence
  Description of Artificial Sequence: Synthetic oligonucleotide
  Antisense strand to SEQ ID NO: 1493062
aucuuugaggugguagcac

SEQ ID NO: 1493064 - RNA, 19 nt, Artificial Sequence
  Description of Artificial Sequence: Synthetic oligonucleotide
  Sense strand starting at position 1393 of SEQ ID NO: 1244496
gcguguacuggcuuucacu

SEQ ID NO: 1493065 - RNA, 19 nt, Artificial Sequence
  Description of Artificial Sequence: Synthetic oligonucleotide
  Antisense strand to SEQ ID NO: 1493064
agugaaagccaguacacgc

SEQ ID NO: 1493066 - RNA, 19 nt, Artificial Sequence
  Description of Artificial Sequence: Synthetic oligonucleotide
  Sense strand starting at position 1485 of SEQ ID NO: 1244496
guaaacuuucugcaugaua

SEQ ID NO: 1493067 - RNA, 19 nt, Artificial Sequence
  Description of Artificial Sequence: Synthetic oligonucleotide
  Antisense strand to SEQ ID NO: 1493066
uaucaugcagaaaguuuac

SEQ ID NO: 1493068 - RNA, 19 nt, Artificial Sequence
  Description of Artificial Sequence: Synthetic oligonucleotide
  Sense strand starting at position 1493 of SEQ ID NO: 1244496
ucugcaugauaucugaaac

SEQ ID NO: 1493069 - RNA, 19 nt, Artificial Sequence
  Description of Artificial Sequence: Synthetic oligonucleotide
  Antisense strand to SEQ ID NO: 1493068
guuucagauaucaugcaga

SEQ ID NO: 1493070 - RNA, 19 nt, Artificial Sequence
  Description of Artificial Sequence: Synthetic oligonucleotide
  Sense strand starting at position 2372 of SEQ ID NO: 1244496
cuuagccuuccagaaauga

SEQ ID NO: 1493071 - RNA, 19 nt, Artificial Sequence
  Description of Artificial Sequence: Synthetic oligonucleotide
  Antisense strand to SEQ ID NO: 1493070
ucauuucuggaaggcuaag

SEQ ID NO: 1493072 - RNA, 19 nt, Artificial Sequence
  Description of Artificial Sequence: Synthetic oligonucleotide
  Sense strand starting at position 2421 of SEQ ID NO: 1244496
uuagauuuauugccgccaa

SEQ ID NO: 1493073 - RNA, 19 nt, Artificial Sequence
  Description of Artificial Sequence: Synthetic oligonucleotide
  Antisense strand to SEQ ID NO: 1493072
uuggcggcaauaaaucuaa

SEQ ID NO: 1493074 - RNA, 19 nt, Artificial Sequence
  Description of Artificial Sequence: Synthetic oligonucleotide
  Sense strand starting at position 2425 of SEQ ID NO: 1244496
auuuauugccgccaauuau

SEQ ID NO: 1493075 - RNA, 19 nt, Artificial Sequence
  Description of Artificial Sequence: Synthetic oligonucleotide
  Antisense strand to SEQ ID NO: 1493074
auaauuggcggcaauaaau

SEQ ID NO: 1493076 - RNA, 19 nt, Artificial Sequence
  Description of Artificial Sequence: Synthetic oligonucleotide
  Sense strand starting at position 2629 of SEQ ID NO: 1244496
cagcgauaugaauacagua

SEQ ID NO: 1493077 - RNA, 19 nt, Artificial Sequence
  Description of Artificial Sequence: Synthetic oligonucleotide
  Antisense strand to SEQ ID NO: 1493076
uacuguauucauaucgcug

SEQ ID NO: 1493078 - RNA, 19 nt, Artificial Sequence
  Description of Artificial Sequence: Synthetic oligonucleotide
  Sense strand starting at position 2631 of SEQ ID NO: 1244496
gcgauaugaauacaguacu

SEQ ID NO: 1493079 - RNA, 19 nt, Artificial Sequence
  Description of Artificial Sequence: Synthetic oligonucleotide
  Antisense strand to SEQ ID NO: 1493078
aguacuguauucauaucgc

SEQ ID NO: 1493080 - RNA, 19 nt, Artificial Sequence
  Description of Artificial Sequence: Synthetic oligonucleotide
  Sense strand starting at position 2749 of SEQ ID NO: 1244496
uaccuuaagguuuguaaag

SEQ ID NO: 1493081 - RNA, 19 nt, Artificial Sequence
  Description of Artificial Sequence: Synthetic oligonucleotide
  Antisense strand to SEQ ID NO: 1493080
cuuuacaaaccuuaaggua

SEQ ID NO: 1493082 - RNA, 19 nt, Artificial Sequence
  Description of Artificial Sequence: Synthetic oligonucleotide
  Sense strand starting at position 2808 of SEQ ID NO: 1244496
cugacacagccuuauugaa

SEQ ID NO: 1493083 - RNA, 19 nt, Artificial Sequence
  Description of Artificial Sequence: Synthetic oligonucleotide
  Antisense strand to SEQ ID NO: 1493082
uucaauaaggcugugucag

SEQ ID NO: 1493084 - RNA, 19 nt, Artificial Sequence
  Description of Artificial Sequence: Synthetic oligonucleotide
  Sense strand starting at position 2878 of SEQ ID NO: 1244496
gggcuaaauagcugggaau

SEQ ID NO: 1493085 - RNA, 19 nt, Artificial Sequence
  Description of Artificial Sequence: Synthetic oligonucleotide
  Antisense strand to SEQ ID NO: 1493084
auucccagcuauuuagccc

SEQ ID NO: 1493086 - RNA, 19 nt, Artificial Sequence
  Description of Artificial Sequence: Synthetic oligonucleotide
  Sense strand starting at position 2879 of SEQ ID NO: 1244496
ggcuaaauagcugggaaua

SEQ ID NO: 1493087 - RNA, 19 nt, Artificial Sequence
  Description of Artificial Sequence: Synthetic oligonucleotide
  Antisense strand to SEQ ID NO: 1493086
uauucccagcuauuuagcc

SEQ ID NO: 1493088 - RNA, 19 nt, Artificial Sequence
  Description of Artificial Sequence: Synthetic oligonucleotide
  Sense strand starting at position 2880 of SEQ ID NO: 1244496
gcuaaauagcugggaauag

SEQ ID NO: 1493089 - RNA, 19 nt, Artificial Sequence
  Description of Artificial Sequence: Synthetic oligonucleotide
  Antisense strand to SEQ ID NO: 1493088
cuauucccagcuauuuagc

SEQ ID NO: 1493090 - RNA, 19 nt, Artificial Sequence
  Description of Artificial Sequence: Synthetic oligonucleotide
  Sense strand starting at position 2916 of SEQ ID NO: 1244496
ccuagaggcccuuauguua

SEQ ID NO: 1493091 - RNA, 19 nt, Artificial Sequence
  Description of Artificial Sequence: Synthetic oligonucleotide
  Antisense strand to SEQ ID NO: 1493090
uaacauaagggccucuagg

SEQ ID NO: 1493092 - RNA, 19 nt, Artificial Sequence
  Description of Artificial Sequence: Synthetic oligonucleotide
  Sense strand starting at position 3111 of SEQ ID NO: 1244496
agacauaguuuauccauau

SEQ ID NO: 1493093 - RNA, 19 nt, Artificial Sequence
  Description of Artificial Sequence: Synthetic oligonucleotide
  Antisense strand to SEQ ID NO: 1493092
auauggauaaacuaugucu

SEQ ID NO: 1493094 - RNA, 19 nt, Artificial Sequence
  Description of Artificial Sequence: Synthetic oligonucleotide
  Sense strand starting at position 3187 of SEQ ID NO: 1244496
uucuuaagugaauagcaaa

SEQ ID NO: 1493095 - RNA, 19 nt, Artificial Sequence
  Description of Artificial Sequence: Synthetic oligonucleotide
  Antisense strand to SEQ ID NO: 1493094
uuugcuauucacuuaagaa

SEQ ID NO: 1493096 - RNA, 19 nt, Artificial Sequence
  Description of Artificial Sequence: Synthetic oligonucleotide
  Sense strand starting at position 3267 of SEQ ID NO: 1244496
uagggaucuuugguuacaa

SEQ ID NO: 1493097 - RNA, 19 nt, Artificial Sequence
  Description of Artificial Sequence: Synthetic oligonucleotide
  Antisense strand to SEQ ID NO: 1493096
uuguaaccaaagaucccua

SEQ ID NO: 1493098 - RNA, 19 nt, Artificial Sequence
  Description of Artificial Sequence: Synthetic oligonucleotide
  Sense strand starting at position 3268 of SEQ ID NO: 1244496
agggaucuuugguuacaag

SEQ ID NO: 1493099 - RNA, 19 nt, Artificial Sequence
  Description of Artificial Sequence: Synthetic oligonucleotide
  Antisense strand to SEQ ID NO: 1493098
cuuguaaccaaagaucccu

SEQ ID NO: 1493100 - RNA, 19 nt, Artificial Sequence
  Description of Artificial Sequence: Synthetic oligonucleotide
  Sense strand starting at position 3318 of SEQ ID NO: 1244496
aacggaauuuauuagaagu

SEQ ID NO: 1493101 - RNA, 19 nt, Artificial Sequence
  Description of Artificial Sequence: Synthetic oligonucleotide
  Antisense strand to SEQ ID NO: 1493100
acuucuaauaaauuccguu

SEQ ID NO: 1493102 - RNA, 19 nt, Artificial Sequence
  Description of Artificial Sequence: Synthetic oligonucleotide
  Sense strand starting at position 3328 of SEQ ID NO: 1244496
auuagaaguguauggagua

SEQ ID NO: 1493103 - RNA, 19 nt, Artificial Sequence
  Description of Artificial Sequence: Synthetic oligonucleotide
  Antisense strand to SEQ ID NO: 1493102
uacuccauacacuucuaau

SEQ ID NO: 1493104 - RNA, 19 nt, Artificial Sequence
  Description of Artificial Sequence: Synthetic oligonucleotide
  Sense strand starting at position 3467 of SEQ ID NO: 1244496
ccaauuucuguuugugacu

SEQ ID NO: 1493105 - RNA, 19 nt, Artificial Sequence
  Description of Artificial Sequence: Synthetic oligonucleotide
  Antisense strand to SEQ ID NO: 1493104
agucacaaacagaaauugg

SEQ ID NO: 1493106 - RNA, 19 nt, Artificial Sequence
  Description of Artificial Sequence: Synthetic oligonucleotide
  Sense strand starting at position 3565 of SEQ ID NO: 1244496
aaggcaggaugucuugauu

SEQ ID NO: 1493107 - RNA, 19 nt, Artificial Sequence
  Description of Artificial Sequence: Synthetic oligonucleotide
  Antisense strand to SEQ ID NO: 1493106
aaucaagacauccugccuu

SEQ ID NO: 1493108 - RNA, 19 nt, Artificial Sequence
  Description of Artificial Sequence: Synthetic oligonucleotide
  Sense strand starting at position 3568 of SEQ ID NO: 1244496
gcaggaugucuugauugau

SEQ ID NO: 1493109 - RNA, 19 nt, Artificial Sequence
  Description of Artificial Sequence: Synthetic oligonucleotide
  Antisense strand to SEQ ID NO: 1493108
aucaaucaagacauccugc

SEQ ID NO: 1493110 - RNA, 19 nt, Artificial Sequence
  Description of Artificial Sequence: Synthetic oligonucleotide
  Sense strand starting at position 3582 of SEQ ID NO: 1244496
uugauagucccauggaagu

SEQ ID NO: 1493111 - RNA, 19 nt, Artificial Sequence
  Description of Artificial Sequence: Synthetic oligonucleotide
  Antisense strand to SEQ ID NO: 1493110
acuuccaugggacuaucaa

SEQ ID NO: 1493112 - RNA, 19 nt, Artificial Sequence
  Description of Artificial Sequence: Synthetic oligonucleotide
  Sense strand starting at position 3617 of SEQ ID NO: 1244496
aaacguauggcauaagaac

SEQ ID NO: 1493113 - RNA, 19 nt, Artificial Sequence
  Description of Artificial Sequence: Synthetic oligonucleotide
  Antisense strand to SEQ ID NO: 1493112
guucuuaugccauacguuu

SEQ ID NO: 1493114 - RNA, 19 nt, Artificial Sequence
  Description of Artificial Sequence: Synthetic oligonucleotide
  Sense strand starting at position 338 of SEQ ID NO: 1244497
gcaugagaaucaguuucuu

SEQ ID NO: 1493115 - RNA, 19 nt, Artificial Sequence
  Description of Artificial Sequence: Synthetic oligonucleotide
  Antisense strand to SEQ ID NO: 1493114
aagaaacugauucucaugc

SEQ ID NO: 1493116 - RNA, 19 nt, Artificial Sequence
  Description of Artificial Sequence: Synthetic oligonucleotide
  Sense strand starting at position 454 of SEQ ID NO: 1244497
cccaaaguacucugggaga

SEQ ID NO: 1493117 - RNA, 19 nt, Artificial Sequence
  Description of Artificial Sequence: Synthetic oligonucleotide
  Antisense strand to SEQ ID NO: 1493116
ucucccagaguacuuuggg

SEQ ID NO: 1493118 - RNA, 19 nt, Artificial Sequence
  Description of Artificial Sequence: Synthetic oligonucleotide
  Sense strand starting at position 1214 of SEQ ID NO: 1244497
uauuuagauuucuggugau

SEQ ID NO: 1493119 - RNA, 19 nt, Artificial Sequence
  Description of Artificial Sequence: Synthetic oligonucleotide
  Antisense strand to SEQ ID NO: 1493118
aucaccagaaaucuaaaua

SEQ ID NO: 1493120 - RNA, 19 nt, Artificial Sequence
  Description of Artificial Sequence: Synthetic oligonucleotide
  Sense strand starting at position 1227 of SEQ ID NO: 1244497
ggugauucgccuucgugga

SEQ ID NO: 1493121 - RNA, 19 nt, Artificial Sequence
  Description of Artificial Sequence: Synthetic oligonucleotide
  Antisense strand to SEQ ID NO: 1493120
uccacgaaggcgaaucacc

SEQ ID NO: 1493122 - RNA, 19 nt, Artificial Sequence
  Description of Artificial Sequence: Synthetic oligonucleotide
  Sense strand starting at position 1260 of SEQ ID NO: 1244497
ccacucaaguaguuacuau

SEQ ID NO: 1493123 - RNA, 19 nt, Artificial Sequence
  Description of Artificial Sequence: Synthetic oligonucleotide
  Antisense strand to SEQ ID NO: 1493122
auaguaacuacuugagugg

SEQ ID NO: 1493124 - RNA, 19 nt, Artificial Sequence
  Description of Artificial Sequence: Synthetic oligonucleotide
  Sense strand starting at position 1305 of SEQ ID NO: 1244497
cuguaaagcgcuuaucacu

SEQ ID NO: 1493125 - RNA, 19 nt, Artificial Sequence
  Description of Artificial Sequence: Synthetic oligonucleotide
  Antisense strand to SEQ ID NO: 1493124
agugauaagcgcuuuacag

SEQ ID NO: 1493126 - RNA, 19 nt, Artificial Sequence
  Description of Artificial Sequence: Synthetic oligonucleotide
  Sense strand starting at position 1311 of SEQ ID NO: 1244497
agcgcuuaucacuauugga

SEQ ID NO: 1493127 - RNA, 19 nt, Artificial Sequence
  Description of Artificial Sequence: Synthetic oligonucleotide
  Antisense strand to SEQ ID NO: 1493126
uccaauagugauaagcgcu

SEQ ID NO: 1493128 - RNA, 19 nt, Artificial Sequence
  Description of Artificial Sequence: Synthetic oligonucleotide
  Sense strand starting at position 1398 of SEQ ID NO: 1244497
cuucguuuccauugaauua

SEQ ID NO: 1493129 - RNA, 19 nt, Artificial Sequence
  Description of Artificial Sequence: Synthetic oligonucleotide
  Antisense strand to SEQ ID NO: 1493128
uaauucaauggaaacgaag

SEQ ID NO: 1493130 - RNA, 19 nt, Artificial Sequence
  Description of Artificial Sequence: Synthetic oligonucleotide
  Sense strand starting at position 1427 of SEQ ID NO: 1244497
gaacaauaccagggcuuga

SEQ ID NO: 1493131 - RNA, 19 nt, Artificial Sequence
  Description of Artificial Sequence: Synthetic oligonucleotide
  Antisense strand to SEQ ID NO: 1493130
ucaagcccugguauuguuc

SEQ ID NO: 1493132 - RNA, 19 nt, Artificial Sequence
  Description of Artificial Sequence: Synthetic oligonucleotide
  Sense strand starting at position 1463 of SEQ ID NO: 1244497
aaacuuguggaaugacuua

SEQ ID NO: 1493133 - RNA, 19 nt, Artificial Sequence
  Description of Artificial Sequence: Synthetic oligonucleotide
  Antisense strand to SEQ ID NO: 1493132
uaagucauuccacaaguuu

SEQ ID NO: 1493134 - RNA, 19 nt, Artificial Sequence
  Description of Artificial Sequence: Synthetic oligonucleotide
  Sense strand starting at position 1525 of SEQ ID NO: 1244497
ucaggacagucuuccugaa

SEQ ID NO: 1493135 - RNA, 19 nt, Artificial Sequence
  Description of Artificial Sequence: Synthetic oligonucleotide
  Antisense strand to SEQ ID NO: 1493134
uucaggaagacuguccuga

SEQ ID NO: 1493136 - RNA, 19 nt, Artificial Sequence
  Description of Artificial Sequence: Synthetic oligonucleotide
  Sense strand starting at position 1529 of SEQ ID NO: 1244497
gacagucuuccugaaggca

SEQ ID NO: 1493137 - RNA, 19 nt, Artificial Sequence
  Description of Artificial Sequence: Synthetic oligonucleotide
  Antisense strand to SEQ ID NO: 1493136
ugccuucaggaagacuguc

SEQ ID NO: 1493138 - RNA, 19 nt, Artificial Sequence
  Description of Artificial Sequence: Synthetic oligonucleotide
  Sense strand starting at position 1574 of SEQ ID NO: 1244497
cgucuaucauucccaguaa

SEQ ID NO: 1493139 - RNA, 19 nt, Artificial Sequence
  Description of Artificial Sequence: Synthetic oligonucleotide
  Antisense strand to SEQ ID NO: 1493138
uuacugggaaugauagacg

SEQ ID NO: 1493140 - RNA, 19 nt, Artificial Sequence
  Description of Artificial Sequence: Synthetic oligonucleotide
  Sense strand starting at position 1630 of SEQ ID NO: 1244497
gcaugagggcuguauucca

SEQ ID NO: 1493141 - RNA, 19 nt, Artificial Sequence
  Description of Artificial Sequence: Synthetic oligonucleotide
  Antisense strand to SEQ ID NO: 1493140
uggaauacagcccucaugc

SEQ ID NO: 1493142 - RNA, 19 nt, Artificial Sequence
  Description of Artificial Sequence: Synthetic oligonucleotide
  Sense strand starting at position 1637 of SEQ ID NO: 1244497
ggcuguauuccaugaccag

SEQ ID NO: 1493143 - RNA, 19 nt, Artificial Sequence
  Description of Artificial Sequence: Synthetic oligonucleotide
  Antisense strand to SEQ ID NO: 1493142
cuggucauggaauacagcc

SEQ ID NO: 1493144 - RNA, 19 nt, Artificial Sequence
  Description of Artificial Sequence: Synthetic oligonucleotide
  Sense strand starting at position 1653 of SEQ ID NO: 1244497
cagcauggugccugauaua

SEQ ID NO: 1493145 - RNA, 19 nt, Artificial Sequence
  Description of Artificial Sequence: Synthetic oligonucleotide
  Antisense strand to SEQ ID NO: 1493144
uauaucaggcaccaugcug

SEQ ID NO: 1493146 - RNA, 19 nt, Artificial Sequence
  Description of Artificial Sequence: Synthetic oligonucleotide
  Sense strand starting at position 1658 of SEQ ID NO: 1244497
uggugccugauauaaagua

SEQ ID NO: 1493147 - RNA, 19 nt, Artificial Sequence
  Description of Artificial Sequence: Synthetic oligonucleotide
  Antisense strand to SEQ ID NO: 1493146
uacuuuauaucaggcacca

SEQ ID NO: 1493148 - RNA, 19 nt, Artificial Sequence
  Description of Artificial Sequence: Synthetic oligonucleotide
  Sense strand starting at position 1681 of SEQ ID NO: 1244497
gccggcagucuuucuguua

SEQ ID NO: 1493149 - RNA, 19 nt, Artificial Sequence
  Description of Artificial Sequence: Synthetic oligonucleotide
  Antisense strand to SEQ ID NO: 1493148
uaacagaaagacugccggc

SEQ ID NO: 1493150 - RNA, 19 nt, Artificial Sequence
  Description of Artificial Sequence: Synthetic oligonucleotide
  Sense strand starting at position 1865 of SEQ ID NO: 1244497
gaccaagcuugggcuagau

SEQ ID NO: 1493151 - RNA, 19 nt, Artificial Sequence
  Description of Artificial Sequence: Synthetic oligonucleotide
  Antisense strand to SEQ ID NO: 1493150
aucuagcccaagcuugguc

SEQ ID NO: 1493152 - RNA, 19 nt, Artificial Sequence
  Description of Artificial Sequence: Synthetic oligonucleotide
  Sense strand starting at position 1867 of SEQ ID NO: 1244497
ccaagcuugggcuagauga

SEQ ID NO: 1493153 - RNA, 19 nt, Artificial Sequence
  Description of Artificial Sequence: Synthetic oligonucleotide
  Antisense strand to SEQ ID NO: 1493152
ucaucuagcccaagcuugg

SEQ ID NO: 1493154 - RNA, 19 nt, Artificial Sequence
  Description of Artificial Sequence: Synthetic oligonucleotide
  Sense strand starting at position 1929 of SEQ ID NO: 1244497
acuauacucacguggaaga

SEQ ID NO: 1493155 - RNA, 19 nt, Artificial Sequence
  Description of Artificial Sequence: Synthetic oligonucleotide
  Antisense strand to SEQ ID NO: 1493154
ucuuccacgugaguauagu

SEQ ID NO: 1493156 - RNA, 19 nt, Artificial Sequence
  Description of Artificial Sequence: Synthetic oligonucleotide
  Sense strand starting at position 1930 of SEQ ID NO: 1244497
cuauacucacguggaagau

SEQ ID NO: 1493157 - RNA, 19 nt, Artificial Sequence
  Description of Artificial Sequence: Synthetic oligonucleotide
  Antisense strand to SEQ ID NO: 1493156
aucuuccacgugaguauag

SEQ ID NO: 1493158 - RNA, 19 nt, Artificial Sequence
  Description of Artificial Sequence: Synthetic oligonucleotide
  Sense strand starting at position 2078 of SEQ ID NO: 1244497
ggccgaauucuagguucuu

SEQ ID NO: 1493159 - RNA, 19 nt, Artificial Sequence
  Description of Artificial Sequence: Synthetic oligonucleotide
  Antisense strand to SEQ ID NO: 1493158
aagaaccuagaauucggcc

SEQ ID NO: 1493160 - RNA, 19 nt, Artificial Sequence
  Description of Artificial Sequence: Synthetic oligonucleotide
  Sense strand starting at position 2079 of SEQ ID NO: 1244497
gccgaauucuagguucuug

SEQ ID NO: 1493161 - RNA, 19 nt, Artificial Sequence
  Description of Artificial Sequence: Synthetic oligonucleotide
  Antisense strand to SEQ ID NO: 1493160
caagaaccuagaauucggc

SEQ ID NO: 1493162 - RNA, 19 nt, Artificial Sequence
  Description of Artificial Sequence: Synthetic oligonucleotide
  Sense strand starting at position 2144 of SEQ ID NO: 1244497
ugaacugacguuugugaaa

SEQ ID NO: 1493163 - RNA, 19 nt, Artificial Sequence
  Description of Artificial Sequence: Synthetic oligonucleotide
  Antisense strand to SEQ ID NO: 1493162
uuucacaaacgucaguuca

SEQ ID NO: 1493164 - RNA, 19 nt, Artificial Sequence
  Description of Artificial Sequence: Synthetic oligonucleotide
  Sense strand starting at position 2211 of SEQ ID NO: 1244497
guuaguuaaggccauaaag

SEQ ID NO: 1493165 - RNA, 19 nt, Artificial Sequence
  Description of Artificial Sequence: Synthetic oligonucleotide
  Antisense strand to SEQ ID NO: 1493164
cuuuauggccuuaacuaac

SEQ ID NO: 1493166 - RNA, 19 nt, Artificial Sequence
  Description of Artificial Sequence: Synthetic oligonucleotide
  Sense strand starting at position 2213 of SEQ ID NO: 1244497
uaguuaaggccauaaagca

SEQ ID NO: 1493167 - RNA, 19 nt, Artificial Sequence
  Description of Artificial Sequence: Synthetic oligonucleotide
  Antisense strand to SEQ ID NO: 1493166
ugcuuuauggccuuaacua

SEQ ID NO: 1493168 - RNA, 19 nt, Artificial Sequence
  Description of Artificial Sequence: Synthetic oligonucleotide
  Sense strand starting at position 2272 of SEQ ID NO: 1244497
ccuucucugcuuggcaaga

SEQ ID NO: 1493169 - RNA, 19 nt, Artificial Sequence
  Description of Artificial Sequence: Synthetic oligonucleotide
  Antisense strand to SEQ ID NO: 1493168
ucuugccaagcagagaagg

SEQ ID NO: 1493170 - RNA, 19 nt, Artificial Sequence
  Description of Artificial Sequence: Synthetic oligonucleotide
  Sense strand starting at position 2273 of SEQ ID NO: 1244497
cuucucugcuuggcaagau

SEQ ID NO: 1493171 - RNA, 19 nt, Artificial Sequence
  Description of Artificial Sequence: Synthetic oligonucleotide
  Antisense strand to SEQ ID NO: 1493170
aucuugccaagcagagaag

SEQ ID NO: 1493172 - RNA, 19 nt, Artificial Sequence
  Description of Artificial Sequence: Synthetic oligonucleotide
  Sense strand starting at position 2338 of SEQ ID NO: 1244497
guuugaguuccugagcucu

SEQ ID NO: 1493173 - RNA, 19 nt, Artificial Sequence
  Description of Artificial Sequence: Synthetic oligonucleotide
  Antisense strand to SEQ ID NO: 1493172
agagcucaggaacucaaac

SEQ ID NO: 1493174 - RNA, 19 nt, Artificial Sequence
  Description of Artificial Sequence: Synthetic oligonucleotide
  Sense strand starting at position 2524 of SEQ ID NO: 1244497
gaaaccaugucgcuacaga

SEQ ID NO: 1493175 - RNA, 19 nt, Artificial Sequence
  Description of Artificial Sequence: Synthetic oligonucleotide
  Antisense strand to SEQ ID NO: 1493174
ucuguagcgacaugguuuc

SEQ ID NO: 1493176 - RNA, 19 nt, Artificial Sequence
  Description of Artificial Sequence: Synthetic oligonucleotide
  Sense strand starting at position 2525 of SEQ ID NO: 1244497
aaaccaugucgcuacagaa

SEQ ID NO: 1493177 - RNA, 19 nt, Artificial Sequence
  Description of Artificial Sequence: Synthetic oligonucleotide
  Antisense strand to SEQ ID NO: 1493176
uucuguagcgacaugguuu

SEQ ID NO: 1493178 - RNA, 19 nt, Artificial Sequence
  Description of Artificial Sequence: Synthetic oligonucleotide
  Sense strand starting at position 3004 of SEQ ID NO: 1244497
gaaccaggcuucgucuuaa

SEQ ID NO: 1493179 - RNA, 19 nt, Artificial Sequence
  Description of Artificial Sequence: Synthetic oligonucleotide
  Antisense strand to SEQ ID NO: 1493178
uuaagacgaagccugguuc

SEQ ID NO: 1493180 - RNA, 19 nt, Artificial Sequence
  Description of Artificial Sequence: Synthetic oligonucleotide
  Sense strand starting at position 3274 of SEQ ID NO: 1244497
ccgugagugcugcuauuac

SEQ ID NO: 1493181 - RNA, 19 nt, Artificial Sequence
  Description of Artificial Sequence: Synthetic oligonucleotide
  Antisense strand to SEQ ID NO: 1493180
guaauagcagcacucacgg

SEQ ID NO: 1493182 - RNA, 19 nt, Artificial Sequence
  Description of Artificial Sequence: Synthetic oligonucleotide
  Sense strand starting at position 3284 of SEQ ID NO: 1244497
ugcuauuacgucucuuguu

SEQ ID NO: 1493183 - RNA, 19 nt, Artificial Sequence
  Description of Artificial Sequence: Synthetic oligonucleotide
  Antisense strand to SEQ ID NO: 1493182
aacaagagacguaauagca

SEQ ID NO: 1493184 - RNA, 19 nt, Artificial Sequence
  Description of Artificial Sequence: Synthetic oligonucleotide
  Sense strand starting at position 3437 of SEQ ID NO: 1244497
gcgaauguuuauucccuca

SEQ ID NO: 1493185 - RNA, 19 nt, Artificial Sequence
  Description of Artificial Sequence: Synthetic oligonucleotide
  Antisense strand to SEQ ID NO: 1493184
ugagggaauaaacauucgc

SEQ ID NO: 1493186 - RNA, 19 nt, Artificial Sequence
  Description of Artificial Sequence: Synthetic oligonucleotide
  Sense strand starting at position 3466 of SEQ ID NO: 1244497
gcccgcugugagccuuaaa

SEQ ID NO: 1493187 - RNA, 19 nt, Artificial Sequence
  Description of Artificial Sequence: Synthetic oligonucleotide
  Antisense strand to SEQ ID NO: 1493186
uuuaaggcucacagcgggc

SEQ ID NO: 1493188 - RNA, 19 nt, Artificial Sequence
  Description of Artificial Sequence: Synthetic oligonucleotide
  Sense strand starting at position 3469 of SEQ ID NO: 1244497
cgcugugagccuuaaacug

SEQ ID NO: 1493189 - RNA, 19 nt, Artificial Sequence
  Description of Artificial Sequence: Synthetic oligonucleotide
  Antisense strand to SEQ ID NO: 1493188
caguuuaaggcucacagcg

SEQ ID NO: 1493190 - RNA, 19 nt, Artificial Sequence
  Description of Artificial Sequence: Synthetic oligonucleotide
  Sense strand starting at position 3506 of SEQ ID NO: 1244497
ggguuuaauccugguggga

SEQ ID NO: 1493191 - RNA, 19 nt, Artificial Sequence
  Description of Artificial Sequence: Synthetic oligonucleotide
  Antisense strand to SEQ ID NO: 1493190
ucccaccaggauuaaaccc

SEQ ID NO: 1493192 - RNA, 19 nt, Artificial Sequence
  Description of Artificial Sequence: Synthetic oligonucleotide
  Sense strand starting at position 3560 of SEQ ID NO: 1244497
guggguuccuggagaagac

SEQ ID NO: 1493193 - RNA, 19 nt, Artificial Sequence
  Description of Artificial Sequence: Synthetic oligonucleotide
  Antisense strand to SEQ ID NO: 1493192
gucuucuccaggaacccac

SEQ ID NO: 1493194 - RNA, 19 nt, Artificial Sequence
  Description of Artificial Sequence: Synthetic oligonucleotide
  Sense strand starting at position 33 of SEQ ID NO: 1244498
gggagucagugagguaagu

SEQ ID NO: 1493195 - RNA, 19 nt, Artificial Sequence
  Description of Artificial Sequence: Synthetic oligonucleotide
  Antisense strand to SEQ ID NO: 1493194
acuuaccucacugacuccc

SEQ ID NO: 1493196 - RNA, 19 nt, Artificial Sequence
  Description of Artificial Sequence: Synthetic oligonucleotide
  Sense strand starting at position 35 of SEQ ID NO: 1244498
gagucagugagguaaguga

SEQ ID NO: 1493197 - RNA, 19 nt, Artificial Sequence
  Description of Artificial Sequence: Synthetic oligonucleotide
  Antisense strand to SEQ ID NO: 1493196
ucacuuaccucacugacuc

SEQ ID NO: 1493198 - RNA, 19 nt, Artificial Sequence
  Description of Artificial Sequence: Synthetic oligonucleotide
  Sense strand starting at position 60 of SEQ ID NO: 1244498
uuuggaugcucagaacucu

SEQ ID NO: 1493199 - RNA, 19 nt, Artificial Sequence
  Description of Artificial Sequence: Synthetic oligonucleotide
  Antisense strand to SEQ ID NO: 1493198
agaguucugagcauccaaa

SEQ ID NO: 1493200 - RNA, 19 nt, Artificial Sequence
  Description of Artificial Sequence: Synthetic oligonucleotide
  Sense strand starting at position 143 of SEQ ID NO: 1244498
uugcccuuauuuggucaaa

SEQ ID NO: 1493201 - RNA, 19 nt, Artificial Sequence
  Description of Artificial Sequence: Synthetic oligonucleotide
  Antisense strand to SEQ ID NO: 1493200
uuugaccaaauaagggcaa

SEQ ID NO: 1493202 - RNA, 19 nt, Artificial Sequence
  Description of Artificial Sequence: Synthetic oligonucleotide
  Sense strand starting at position 201 of SEQ ID NO: 1244498
ccaaguaaccuagaguuua

SEQ ID NO: 1493203 - RNA, 19 nt, Artificial Sequence
  Description of Artificial Sequence: Synthetic oligonucleotide
  Antisense strand to SEQ ID NO: 1493202
uaaacucuagguuacuugg

SEQ ID NO: 1493204 - RNA, 19 nt, Artificial Sequence
  Description of Artificial Sequence: Synthetic oligonucleotide
  Sense strand starting at position 212 of SEQ ID NO: 1244498
agaguuuagcuccagguau

SEQ ID NO: 1493205 - RNA, 19 nt, Artificial Sequence
  Description of Artificial Sequence: Synthetic oligonucleotide
  Antisense strand to SEQ ID NO: 1493204
auaccuggagcuaaacucu

SEQ ID NO: 1493206 - RNA, 19 nt, Artificial Sequence
  Description of Artificial Sequence: Synthetic oligonucleotide
  Sense strand starting at position 214 of SEQ ID NO: 1244498
aguuuagcuccagguaucu

SEQ ID NO: 1493207 - RNA, 19 nt, Artificial Sequence
  Description of Artificial Sequence: Synthetic oligonucleotide
  Antisense strand to SEQ ID NO: 1493206
agauaccuggagcuaaacu

SEQ ID NO: 1493208 - RNA, 19 nt, Artificial Sequence
  Description of Artificial Sequence: Synthetic oligonucleotide
  Sense strand starting at position 223 of SEQ ID NO: 1244498
ccagguaucucugcucuga

SEQ ID NO: 1493209 - RNA, 19 nt, Artificial Sequence
  Description of Artificial Sequence: Synthetic oligonucleotide
  Antisense strand to SEQ ID NO: 1493208
ucagagcagagauaccugg

SEQ ID NO: 1493210 - RNA, 19 nt, Artificial Sequence
  Description of Artificial Sequence: Synthetic oligonucleotide
  Sense strand starting at position 225 of SEQ ID NO: 1244498
agguaucucugcucugaga

SEQ ID NO: 1493211 - RNA, 19 nt, Artificial Sequence
  Description of Artificial Sequence: Synthetic oligonucleotide
  Antisense strand to SEQ ID NO: 1493210
ucucagagcagagauaccu

SEQ ID NO: 1493212 - RNA, 19 nt, Artificial Sequence
  Description of Artificial Sequence: Synthetic oligonucleotide
  Sense strand starting at position 227 of SEQ ID NO: 1244498
guaucucugcucugagaug

SEQ ID NO: 1493213 - RNA, 19 nt, Artificial Sequence
  Description of Artificial Sequence: Synthetic oligonucleotide
  Antisense strand to SEQ ID NO: 1493212
caucucagagcagagauac

SEQ ID NO: 1493214 - RNA, 19 nt, Artificial Sequence
  Description of Artificial Sequence: Synthetic oligonucleotide
  Sense strand starting at position 228 of SEQ ID NO: 1244498
uaucucugcucugagauga

SEQ ID NO: 1493215 - RNA, 19 nt, Artificial Sequence
  Description of Artificial Sequence: Synthetic oligonucleotide
  Antisense strand to SEQ ID NO: 1493214
ucaucucagagcagagaua

SEQ ID NO: 1493216 - RNA, 19 nt, Artificial Sequence
  Description of Artificial Sequence: Synthetic oligonucleotide
  Sense strand starting at position 232 of SEQ ID NO: 1244498
ucugcucugagaugaggaa

SEQ ID NO: 1493217 - RNA, 19 nt, Artificial Sequence
  Description of Artificial Sequence: Synthetic oligonucleotide
  Antisense strand to SEQ ID NO: 1493216
uuccucaucucagagcaga

SEQ ID NO: 1493218 - RNA, 19 nt, Artificial Sequence
  Description of Artificial Sequence: Synthetic oligonucleotide
  Sense strand starting at position 490 of SEQ ID NO: 1244498
gcgguaguaaaccaauaua

SEQ ID NO: 1493219 - RNA, 19 nt, Artificial Sequence
  Description of Artificial Sequence: Synthetic oligonucleotide
  Antisense strand to SEQ ID NO: 1493218
uauauugguuuacuaccgc

SEQ ID NO: 1493220 - RNA, 19 nt, Artificial Sequence
  Description of Artificial Sequence: Synthetic oligonucleotide
  Sense strand starting at position 512 of SEQ ID NO: 1244498
ucgcuuaugcugucucaga

SEQ ID NO: 1493221 - RNA, 19 nt, Artificial Sequence
  Description of Artificial Sequence: Synthetic oligonucleotide
  Antisense strand to SEQ ID NO: 1493220
ucugagacagcauaagcga

SEQ ID NO: 1493222 - RNA, 19 nt, Artificial Sequence
  Description of Artificial Sequence: Synthetic oligonucleotide
  Sense strand starting at position 513 of SEQ ID NO: 1244498
cgcuuaugcugucucagaa

SEQ ID NO: 1493223 - RNA, 19 nt, Artificial Sequence
  Description of Artificial Sequence: Synthetic oligonucleotide
  Antisense strand to SEQ ID NO: 1493222
uucugagacagcauaagcg

SEQ ID NO: 1493224 - RNA, 19 nt, Artificial Sequence
  Description of Artificial Sequence: Synthetic oligonucleotide
  Sense strand starting at position 661 of SEQ ID NO: 1244498
gcccucucuaacggaguua

SEQ ID NO: 1493225 - RNA, 19 nt, Artificial Sequence
  Description of Artificial Sequence: Synthetic oligonucleotide
  Antisense strand to SEQ ID NO: 1493224
uaacuccguuagagagggc

SEQ ID NO: 1493226 - RNA, 19 nt, Artificial Sequence
  Description of Artificial Sequence: Synthetic oligonucleotide
  Sense strand starting at position 1167 of SEQ ID NO: 1244498
cucgcaguaccgugauguu

SEQ ID NO: 1493227 - RNA, 19 nt, Artificial Sequence
  Description of Artificial Sequence: Synthetic oligonucleotide
  Antisense strand to SEQ ID NO: 1493226
aacaucacgguacugcgag

SEQ ID NO: 1493228 - RNA, 19 nt, Artificial Sequence
  Description of Artificial Sequence: Synthetic oligonucleotide
  Sense strand starting at position 1177 of SEQ ID NO: 1244498
cgugauguugacgaacguu

SEQ ID NO: 1493229 - RNA, 19 nt, Artificial Sequence
  Description of Artificial Sequence: Synthetic oligonucleotide
  Antisense strand to SEQ ID NO: 1493228
aacguucgucaacaucacg

SEQ ID NO: 1493230 - RNA, 19 nt, Artificial Sequence
  Description of Artificial Sequence: Synthetic oligonucleotide
  Sense strand starting at position 1269 of SEQ ID NO: 1244498
ccgccaugagguugucgau

SEQ ID NO: 1493231 - RNA, 19 nt, Artificial Sequence
  Description of Artificial Sequence: Synthetic oligonucleotide
  Antisense strand to SEQ ID NO: 1493230
aucgacaaccucauggcgg

SEQ ID NO: 1493232 - RNA, 19 nt, Artificial Sequence
  Description of Artificial Sequence: Synthetic oligonucleotide
  Sense strand starting at position 1621 of SEQ ID NO: 1244498
uuugcagaguucgauggaa

SEQ ID NO: 1493233 - RNA, 19 nt, Artificial Sequence
  Description of Artificial Sequence: Synthetic oligonucleotide
  Antisense strand to SEQ ID NO: 1493232
uuccaucgaacucugcaaa

SEQ ID NO: 1493234 - RNA, 19 nt, Artificial Sequence
  Description of Artificial Sequence: Synthetic oligonucleotide
  Sense strand starting at position 1623 of SEQ ID NO: 1244498
ugcagaguucgauggaaag

SEQ ID NO: 1493235 - RNA, 19 nt, Artificial Sequence
  Description of Artificial Sequence: Synthetic oligonucleotide
  Antisense strand to SEQ ID NO: 1493234
cuuuccaucgaacucugca

SEQ ID NO: 1493236 - RNA, 19 nt, Artificial Sequence
  Description of Artificial Sequence: Synthetic oligonucleotide
  Sense strand starting at position 1625 of SEQ ID NO: 1244498
cagaguucgauggaaagca

SEQ ID NO: 1493237 - RNA, 19 nt, Artificial Sequence
  Description of Artificial Sequence: Synthetic oligonucleotide
  Antisense strand to SEQ ID NO: 1493236
ugcuuuccaucgaacucug

SEQ ID NO: 1493238 - RNA, 19 nt, Artificial Sequence
  Description of Artificial Sequence: Synthetic oligonucleotide
  Sense strand starting at position 2113 of SEQ ID NO: 1244498
caaagaagaguuuggccaa

SEQ ID NO: 1493239 - RNA, 19 nt, Artificial Sequence
  Description of Artificial Sequence: Synthetic oligonucleotide
  Antisense strand to SEQ ID NO: 1493238
uuggccaaacucuucuuug

SEQ ID NO: 1493240 - RNA, 19 nt, Artificial Sequence
  Description of Artificial Sequence: Synthetic oligonucleotide
  Sense strand starting at position 2114 of SEQ ID NO: 1244498
aaagaagaguuuggccaaa

SEQ ID NO: 1493241 - RNA, 19 nt, Artificial Sequence
  Description of Artificial Sequence: Synthetic oligonucleotide
  Antisense strand to SEQ ID NO: 1493240
uuuggccaaacucuucuuu

SEQ ID NO: 1493242 - RNA, 19 nt, Artificial Sequence
  Description of Artificial Sequence: Synthetic oligonucleotide
  Sense strand starting at position 2116 of SEQ ID NO: 1244498
agaagaguuuggccaaauc

SEQ ID NO: 1493243 - RNA, 19 nt, Artificial Sequence
  Description of Artificial Sequence: Synthetic oligonucleotide
  Antisense strand to SEQ ID NO: 1493242
gauuuggccaaacucuucu

SEQ ID NO: 1493244 - RNA, 19 nt, Artificial Sequence
  Description of Artificial Sequence: Synthetic oligonucleotide
  Sense strand starting at position 2222 of SEQ ID NO: 1244498
ggcccauucucagucuaga

SEQ ID NO: 1493245 - RNA, 19 nt, Artificial Sequence
  Description of Artificial Sequence: Synthetic oligonucleotide
  Antisense strand to SEQ ID NO: 1493244
ucuagacugagaaugggcc

SEQ ID NO: 1493246 - RNA, 19 nt, Artificial Sequence
  Description of Artificial Sequence: Synthetic oligonucleotide
  Sense strand starting at position 2310 of SEQ ID NO: 1244498
gcaggcaaugucuggauca

SEQ ID NO: 1493247 - RNA, 19 nt, Artificial Sequence
  Description of Artificial Sequence: Synthetic oligonucleotide
  Antisense strand to SEQ ID NO: 1493246
ugauccagacauugccugc

SEQ ID NO: 1493248 - RNA, 19 nt, Artificial Sequence
  Description of Artificial Sequence: Synthetic oligonucleotide
  Sense strand starting at position 2413 of SEQ ID NO: 1244498
gcggaagaauacucaaguu

SEQ ID NO: 1493249 - RNA, 19 nt, Artificial Sequence
  Description of Artificial Sequence: Synthetic oligonucleotide
  Antisense strand to SEQ ID NO: 1493248
aacuugaguauucuuccgc

SEQ ID NO: 1493250 - RNA, 19 nt, Artificial Sequence
  Description of Artificial Sequence: Synthetic oligonucleotide
  Sense strand starting at position 2481 of SEQ ID NO: 1244498
uuggguuucuucgcaguca

SEQ ID NO: 1493251 - RNA, 19 nt, Artificial Sequence
  Description of Artificial Sequence: Synthetic oligonucleotide
  Antisense strand to SEQ ID NO: 1493250
ugacugcgaagaaacccaa

SEQ ID NO: 1493252 - RNA, 19 nt, Artificial Sequence
  Description of Artificial Sequence: Synthetic oligonucleotide
  Sense strand starting at position 3392 of SEQ ID NO: 1244498
agugcugucccagcguuau

SEQ ID NO: 1493253 - RNA, 19 nt, Artificial Sequence
  Description of Artificial Sequence: Synthetic oligonucleotide
  Antisense strand to SEQ ID NO: 1493252
auaacgcugggacagcacu

SEQ ID NO: 1493254 - RNA, 19 nt, Artificial Sequence
  Description of Artificial Sequence: Synthetic oligonucleotide
  Sense strand starting at position 3394 of SEQ ID NO: 1244498
ugcugucccagcguuauca

SEQ ID NO: 1493255 - RNA, 19 nt, Artificial Sequence
  Description of Artificial Sequence: Synthetic oligonucleotide
  Antisense strand to SEQ ID NO: 1493254
ugauaacgcugggacagca

SEQ ID NO: 1493256 - RNA, 19 nt, Artificial Sequence
  Description of Artificial Sequence: Synthetic oligonucleotide
  Sense strand starting at position 3429 of SEQ ID NO: 1244498
gccgaaagggccugucuaa

SEQ ID NO: 1493257 - RNA, 19 nt, Artificial Sequence
  Description of Artificial Sequence: Synthetic oligonucleotide
  Antisense strand to SEQ ID NO: 1493256
uuagacaggcccuuucggc

SEQ ID NO: 1493258 - RNA, 19 nt, Artificial Sequence
  Description of Artificial Sequence: Synthetic oligonucleotide
  Sense strand starting at position 3522 of SEQ ID NO: 1244498
ggccguuaugaggacccua

SEQ ID NO: 1493259 - RNA, 19 nt, Artificial Sequence
  Description of Artificial Sequence: Synthetic oligonucleotide
  Antisense strand to SEQ ID NO: 1493258
uaggguccucauaacggcc

SEQ ID NO: 1493260 - RNA, 19 nt, Artificial Sequence
  Description of Artificial Sequence: Synthetic oligonucleotide
  Sense strand starting at position 3612 of SEQ ID NO: 1244498
cagcgaucugagcaugugu

SEQ ID NO: 1493261 - RNA, 19 nt, Artificial Sequence
  Description of Artificial Sequence: Synthetic oligonucleotide
  Antisense strand to SEQ ID NO: 1493260
acacaugcucagaucgcug

SEQ ID NO: 1493262 - RNA, 19 nt, Artificial Sequence
  Description of Artificial Sequence: Synthetic oligonucleotide
  Sense strand starting at position 3625 of SEQ ID NO: 1244498
auguguggacgucaaucuu

SEQ ID NO: 1493263 - RNA, 19 nt, Artificial Sequence
  Description of Artificial Sequence: Synthetic oligonucleotide
  Antisense strand to SEQ ID NO: 1493262
aagauugacguccacacau

SEQ ID NO: 1493264 - RNA, 19 nt, Artificial Sequence
  Description of Artificial Sequence: Synthetic oligonucleotide
  Sense strand starting at position 3797 of SEQ ID NO: 1244498
cucccaaaggguggaauua

SEQ ID NO: 1493265 - RNA, 19 nt, Artificial Sequence
  Description of Artificial Sequence: Synthetic oligonucleotide
  Antisense strand to SEQ ID NO: 1493264
uaauuccacccuuugggag

SEQ ID NO: 1493266 - RNA, 19 nt, Artificial Sequence
  Description of Artificial Sequence: Synthetic oligonucleotide
  Sense strand starting at position 3820 of SEQ ID NO: 1244498
agggacuguuauugggaga

SEQ ID NO: 1493267 - RNA, 19 nt, Artificial Sequence
  Description of Artificial Sequence: Synthetic oligonucleotide
  Antisense strand to SEQ ID NO: 1493266
ucucccaauaacagucccu

SEQ ID NO: 1493268 - RNA, 19 nt, Artificial Sequence
  Description of Artificial Sequence: Synthetic oligonucleotide
  Sense strand starting at position 3823 of SEQ ID NO: 1244498
gacuguuauugggagacag

SEQ ID NO: 1493269 - RNA, 19 nt, Artificial Sequence
  Description of Artificial Sequence: Synthetic oligonucleotide
  Antisense strand to SEQ ID NO: 1493268
cugucucccaauaacaguc

SEQ ID NO: 1493270 - RNA, 19 nt, Artificial Sequence
  Description of Artificial Sequence: Synthetic oligonucleotide
  Sense strand starting at position 3849 of SEQ ID NO: 1244498
gggauaguaguugaccuuu

SEQ ID NO: 1493271 - RNA, 19 nt, Artificial Sequence
  Description of Artificial Sequence: Synthetic oligonucleotide
  Antisense strand to SEQ ID NO: 1493270
aaaggucaacuacuauccc

SEQ ID NO: 1493272 - RNA, 19 nt, Artificial Sequence
  Description of Artificial Sequence: Synthetic oligonucleotide
  Sense strand starting at position 3855 of SEQ ID NO: 1244498
guaguugaccuuugguaag

SEQ ID NO: 1493273 - RNA, 19 nt, Artificial Sequence
  Description of Artificial Sequence: Synthetic oligonucleotide
  Antisense strand to SEQ ID NO: 1493272
cuuaccaaaggucaacuac

SEQ ID NO: 1493274 - RNA, 19 nt, Artificial Sequence
  Description of Artificial Sequence: Synthetic oligonucleotide
  Sense strand starting at position 94 of SEQ ID NO: 1244499
uugaaugaaugagagauga

SEQ ID NO: 1493275 - RNA, 19 nt, Artificial Sequence
  Description of Artificial Sequence: Synthetic oligonucleotide
  Antisense strand to SEQ ID NO: 1493274
ucaucucucauucauucaa

SEQ ID NO: 1493276 - RNA, 19 nt, Artificial Sequence
  Description of Artificial Sequence: Synthetic oligonucleotide
  Sense strand starting at position 166 of SEQ ID NO: 1244499
agcaauuagagauauucgu

SEQ ID NO: 1493277 - RNA, 19 nt, Artificial Sequence
  Description of Artificial Sequence: Synthetic oligonucleotide
  Antisense strand to SEQ ID NO: 1493276
acgaauaucucuaauugcu

SEQ ID NO: 1493278 - RNA, 19 nt, Artificial Sequence
  Description of Artificial Sequence: Synthetic oligonucleotide
  Sense strand starting at position 624 of SEQ ID NO: 1244499
gaccacaaugucuggcuaa

SEQ ID NO: 1493279 - RNA, 19 nt, Artificial Sequence
  Description of Artificial Sequence: Synthetic oligonucleotide
  Antisense strand to SEQ ID NO: 1493278
uuagccagacauugugguc

SEQ ID NO: 1493280 - RNA, 19 nt, Artificial Sequence
  Description of Artificial Sequence: Synthetic oligonucleotide
  Sense strand starting at position 662 of SEQ ID NO: 1244499
gaaggcaucuugucauguu

SEQ ID NO: 1493281 - RNA, 19 nt, Artificial Sequence
  Description of Artificial Sequence: Synthetic oligonucleotide
  Antisense strand to SEQ ID NO: 1493280
aacaugacaagaugccuuc

SEQ ID NO: 1493282 - RNA, 19 nt, Artificial Sequence
  Description of Artificial Sequence: Synthetic oligonucleotide
  Sense strand starting at position 713 of SEQ ID NO: 1244499
ugaucuuucuaccuuggca

SEQ ID NO: 1493283 - RNA, 19 nt, Artificial Sequence
  Description of Artificial Sequence: Synthetic oligonucleotide
  Antisense strand to SEQ ID NO: 1493282
ugccaagguagaaagauca

SEQ ID NO: 1493284 - RNA, 19 nt, Artificial Sequence
  Description of Artificial Sequence: Synthetic oligonucleotide
  Sense strand starting at position 715 of SEQ ID NO: 1244499
aucuuucuaccuuggcaga

SEQ ID NO: 1493285 - RNA, 19 nt, Artificial Sequence
  Description of Artificial Sequence: Synthetic oligonucleotide
  Antisense strand to SEQ ID NO: 1493284
ucugccaagguagaaagau

SEQ ID NO: 1493286 - RNA, 19 nt, Artificial Sequence
  Description of Artificial Sequence: Synthetic oligonucleotide
  Sense strand starting at position 790 of SEQ ID NO: 1244499
uauggaaaccuggguuuau

SEQ ID NO: 1493287 - RNA, 19 nt, Artificial Sequence
  Description of Artificial Sequence: Synthetic oligonucleotide
  Antisense strand to SEQ ID NO: 1493286
auaaacccagguuuccaua

SEQ ID NO: 1493288 - RNA, 19 nt, Artificial Sequence
  Description of Artificial Sequence: Synthetic oligonucleotide
  Sense strand starting at position 791 of SEQ ID NO: 1244499
auggaaaccuggguuuaua

SEQ ID NO: 1493289 - RNA, 19 nt, Artificial Sequence
  Description of Artificial Sequence: Synthetic oligonucleotide
  Antisense strand to SEQ ID NO: 1493288
uauaaacccagguuuccau

SEQ ID NO: 1493290 - RNA, 19 nt, Artificial Sequence
  Description of Artificial Sequence: Synthetic oligonucleotide
  Sense strand starting at position 834 of SEQ ID NO: 1244499
ugcucuuacucuccuggaa

SEQ ID NO: 1493291 - RNA, 19 nt, Artificial Sequence
  Description of Artificial Sequence: Synthetic oligonucleotide
  Antisense strand to SEQ ID NO: 1493290
uuccaggagaguaagagca

SEQ ID NO: 1493292 - RNA, 19 nt, Artificial Sequence
  Description of Artificial Sequence: Synthetic oligonucleotide
  Sense strand starting at position 837 of SEQ ID NO: 1244499
ucuuacucuccuggaagga

SEQ ID NO: 1493293 - RNA, 19 nt, Artificial Sequence
  Description of Artificial Sequence: Synthetic oligonucleotide
  Antisense strand to SEQ ID NO: 1493292
uccuuccaggagaguaaga

SEQ ID NO: 1493294 - RNA, 19 nt, Artificial Sequence
  Description of Artificial Sequence: Synthetic oligonucleotide
  Sense strand starting at position 970 of SEQ ID NO: 1244499
ccugcucccugaguaaaua

SEQ ID NO: 1493295 - RNA, 19 nt, Artificial Sequence
  Description of Artificial Sequence: Synthetic oligonucleotide
  Antisense strand to SEQ ID NO: 1493294
uauuuacucagggagcagg

SEQ ID NO: 1493296 - RNA, 19 nt, Artificial Sequence
  Description of Artificial Sequence: Synthetic oligonucleotide
  Sense strand starting at position 971 of SEQ ID NO: 1244499
cugcucccugaguaaauaa

SEQ ID NO: 1493297 - RNA, 19 nt, Artificial Sequence
  Description of Artificial Sequence: Synthetic oligonucleotide
  Antisense strand to SEQ ID NO: 1493296
uuauuuacucagggagcag

SEQ ID NO: 1493298 - RNA, 19 nt, Artificial Sequence
  Description of Artificial Sequence: Synthetic oligonucleotide
  Sense strand starting at position 1047 of SEQ ID NO: 1244499
uggaaugcaaagugguaua

SEQ ID NO: 1493299 - RNA, 19 nt, Artificial Sequence
  Description of Artificial Sequence: Synthetic oligonucleotide
  Antisense strand to SEQ ID NO: 1493298
uauaccacuuugcauucca

SEQ ID NO: 1493300 - RNA, 19 nt, Artificial Sequence
  Description of Artificial Sequence: Synthetic oligonucleotide
  Sense strand starting at position 1052 of SEQ ID NO: 1244499
ugcaaagugguauaauagu

SEQ ID NO: 1493301 - RNA, 19 nt, Artificial Sequence
  Description of Artificial Sequence: Synthetic oligonucleotide
  Antisense strand to SEQ ID NO: 1493300
acuauuauaccacuuugca

SEQ ID NO: 1493302 - RNA, 19 nt, Artificial Sequence
  Description of Artificial Sequence: Synthetic oligonucleotide
  Sense strand starting at position 1078 of SEQ ID NO: 1244499
acaagcuuguggucaaaca

SEQ ID NO: 1493303 - RNA, 19 nt, Artificial Sequence
  Description of Artificial Sequence: Synthetic oligonucleotide
  Antisense strand to SEQ ID NO: 1493302
uguuugaccacaagcuugu

SEQ ID NO: 1493304 - RNA, 19 nt, Artificial Sequence
  Description of Artificial Sequence: Synthetic oligonucleotide
  Sense strand starting at position 1200 of SEQ ID NO: 1244499
uaucucaaagggugugaua

SEQ ID NO: 1493305 - RNA, 19 nt, Artificial Sequence
  Description of Artificial Sequence: Synthetic oligonucleotide
  Antisense strand to SEQ ID NO: 1493304
uaucacacccuuugagaua

SEQ ID NO: 1493306 - RNA, 19 nt, Artificial Sequence
  Description of Artificial Sequence: Synthetic oligonucleotide
  Sense strand starting at position 1202 of SEQ ID NO: 1244499
ucucaaagggugugauaaa

SEQ ID NO: 1493307 - RNA, 19 nt, Artificial Sequence
  Description of Artificial Sequence: Synthetic oligonucleotide
  Antisense strand to SEQ ID NO: 1493306
uuuaucacacccuuugaga

SEQ ID NO: 1493308 - RNA, 19 nt, Artificial Sequence
  Description of Artificial Sequence: Synthetic oligonucleotide
  Sense strand starting at position 1279 of SEQ ID NO: 1244499
ugcccacuaugguccaaau

SEQ ID NO: 1493309 - RNA, 19 nt, Artificial Sequence
  Description of Artificial Sequence: Synthetic oligonucleotide
  Antisense strand to SEQ ID NO: 1493308
auuuggaccauagugggca

SEQ ID NO: 1493310 - RNA, 19 nt, Artificial Sequence
  Description of Artificial Sequence: Synthetic oligonucleotide
  Sense strand starting at position 1290 of SEQ ID NO: 1244499
guccaaaucgaauguacca

SEQ ID NO: 1493311 - RNA, 19 nt, Artificial Sequence
  Description of Artificial Sequence: Synthetic oligonucleotide
  Antisense strand to SEQ ID NO: 1493310
ugguacauucgauuuggac

SEQ ID NO: 1493312 - RNA, 19 nt, Artificial Sequence
  Description of Artificial Sequence: Synthetic oligonucleotide
  Sense strand starting at position 1505 of SEQ ID NO: 1244499
gucugauuucugugccauu

SEQ ID NO: 1493313 - RNA, 19 nt, Artificial Sequence
  Description of Artificial Sequence: Synthetic oligonucleotide
  Antisense strand to SEQ ID NO: 1493312
aauggcacagaaaucagac

SEQ ID NO: 1493314 - RNA, 19 nt, Artificial Sequence
  Description of Artificial Sequence: Synthetic oligonucleotide
  Sense strand starting at position 1516 of SEQ ID NO: 1244499
gugccauuccuagacauug

SEQ ID NO: 1493315 - RNA, 19 nt, Artificial Sequence
  Description of Artificial Sequence: Synthetic oligonucleotide
  Antisense strand to SEQ ID NO: 1493314
caaugucuaggaauggcac

SEQ ID NO: 1493316 - RNA, 19 nt, Artificial Sequence
  Description of Artificial Sequence: Synthetic oligonucleotide
  Sense strand starting at position 1526 of SEQ ID NO: 1244499
uagacauuguggcccgaau

SEQ ID NO: 1493317 - RNA, 19 nt, Artificial Sequence
  Description of Artificial Sequence: Synthetic oligonucleotide
  Antisense strand to SEQ ID NO: 1493316
auucgggccacaaugucua

SEQ ID NO: 1493318 - RNA, 19 nt, Artificial Sequence
  Description of Artificial Sequence: Synthetic oligonucleotide
  Sense strand starting at position 1766 of SEQ ID NO: 1244499
gcuagacucauguagauug

SEQ ID NO: 1493319 - RNA, 19 nt, Artificial Sequence
  Description of Artificial Sequence: Synthetic oligonucleotide
  Antisense strand to SEQ ID NO: 1493318
caaucuacaugagucuagc

SEQ ID NO: 1493320 - RNA, 19 nt, Artificial Sequence
  Description of Artificial Sequence: Synthetic oligonucleotide
  Sense strand starting at position 2293 of SEQ ID NO: 1244499
gcaccacccugguuaaaga

SEQ ID NO: 1493321 - RNA, 19 nt, Artificial Sequence
  Description of Artificial Sequence: Synthetic oligonucleotide
  Antisense strand to SEQ ID NO: 1493320
ucuuuaaccaggguggugc

SEQ ID NO: 1493322 - RNA, 19 nt, Artificial Sequence
  Description of Artificial Sequence: Synthetic oligonucleotide
  Sense strand starting at position 2335 of SEQ ID NO: 1244499
gccgcaguagcuucuuaau

SEQ ID NO: 1493323 - RNA, 19 nt, Artificial Sequence
  Description of Artificial Sequence: Synthetic oligonucleotide
  Antisense strand to SEQ ID NO: 1493322
auuaagaagcuacugcggc

SEQ ID NO: 1493324 - RNA, 19 nt, Artificial Sequence
  Description of Artificial Sequence: Synthetic oligonucleotide
  Sense strand starting at position 2456 of SEQ ID NO: 1244499
ucccaauuaccuuggguaa

SEQ ID NO: 1493325 - RNA, 19 nt, Artificial Sequence
  Description of Artificial Sequence: Synthetic oligonucleotide
  Antisense strand to SEQ ID NO: 1493324
uuacccaagguaauuggga

SEQ ID NO: 1493326 - RNA, 19 nt, Artificial Sequence
  Description of Artificial Sequence: Synthetic oligonucleotide
  Sense strand starting at position 2457 of SEQ ID NO: 1244499
cccaauuaccuuggguaaa

SEQ ID NO: 1493327 - RNA, 19 nt, Artificial Sequence
  Description of Artificial Sequence: Synthetic oligonucleotide
  Antisense strand to SEQ ID NO: 1493326
uuuacccaagguaauuggg

SEQ ID NO: 1493328 - RNA, 19 nt, Artificial Sequence
  Description of Artificial Sequence: Synthetic oligonucleotide
  Sense strand starting at position 2735 of SEQ ID NO: 1244499
gcgcuaacugcguuuguuu

SEQ ID NO: 1493329 - RNA, 19 nt, Artificial Sequence
  Description of Artificial Sequence: Synthetic oligonucleotide
  Antisense strand to SEQ ID NO: 1493328
aaacaaacgcaguuagcgc

SEQ ID NO: 1493330 - RNA, 19 nt, Artificial Sequence
  Description of Artificial Sequence: Synthetic oligonucleotide
  Sense strand starting at position 2753 of SEQ ID NO: 1244499
uguucuucuguuuaaugaa

SEQ ID NO: 1493331 - RNA, 19 nt, Artificial Sequence
  Description of Artificial Sequence: Synthetic oligonucleotide
  Antisense strand to SEQ ID NO: 1493330
uucauuaaacagaagaaca

SEQ ID NO: 1493332 - RNA, 19 nt, Artificial Sequence
  Description of Artificial Sequence: Synthetic oligonucleotide
  Sense strand starting at position 2799 of SEQ ID NO: 1244499
ugacaaauccagggcugua

SEQ ID NO: 1493333 - RNA, 19 nt, Artificial Sequence
  Description of Artificial Sequence: Synthetic oligonucleotide
  Antisense strand to SEQ ID NO: 1493332
uacagcccuggauuuguca

SEQ ID NO: 1493334 - RNA, 19 nt, Artificial Sequence
  Description of Artificial Sequence: Synthetic oligonucleotide
  Sense strand starting at position 2825 of SEQ ID NO: 1244499
caguaugguucugcacuga

SEQ ID NO: 1493335 - RNA, 19 nt, Artificial Sequence
  Description of Artificial Sequence: Synthetic oligonucleotide
  Antisense strand to SEQ ID NO: 1493334
ucagugcagaaccauacug

SEQ ID NO: 1493336 - RNA, 19 nt, Artificial Sequence
  Description of Artificial Sequence: Synthetic oligonucleotide
  Sense strand starting at position 2829 of SEQ ID NO: 1244499
augguucugcacugagauc

SEQ ID NO: 1493337 - RNA, 19 nt, Artificial Sequence
  Description of Artificial Sequence: Synthetic oligonucleotide
  Antisense strand to SEQ ID NO: 1493336
gaucucagugcagaaccau

SEQ ID NO: 1493338 - RNA, 19 nt, Artificial Sequence
  Description of Artificial Sequence: Synthetic oligonucleotide
  Sense strand starting at position 3060 of SEQ ID NO: 1244499
uaagaaguagccugggauu

SEQ ID NO: 1493339 - RNA, 19 nt, Artificial Sequence
  Description of Artificial Sequence: Synthetic oligonucleotide
  Antisense strand to SEQ ID NO: 1493338
aaucccaggcuacuucuua

SEQ ID NO: 1493340 - RNA, 19 nt, Artificial Sequence
  Description of Artificial Sequence: Synthetic oligonucleotide
  Sense strand starting at position 3223 of SEQ ID NO: 1244499
auggcaaauucuuccaguu

SEQ ID NO: 1493341 - RNA, 19 nt, Artificial Sequence
  Description of Artificial Sequence: Synthetic oligonucleotide
  Antisense strand to SEQ ID NO: 1493340
aacuggaagaauuugccau

SEQ ID NO: 1493342 - RNA, 19 nt, Artificial Sequence
  Description of Artificial Sequence: Synthetic oligonucleotide
  Sense strand starting at position 3342 of SEQ ID NO: 1244499
ccggaaauccagugcuaau

SEQ ID NO: 1493343 - RNA, 19 nt, Artificial Sequence
  Description of Artificial Sequence: Synthetic oligonucleotide
  Antisense strand to SEQ ID NO: 1493342
auuagcacuggauuuccgg

SEQ ID NO: 1493344 - RNA, 19 nt, Artificial Sequence
  Description of Artificial Sequence: Synthetic oligonucleotide
  Sense strand starting at position 3479 of SEQ ID NO: 1244499
gauggacauuuaggauuaa

SEQ ID NO: 1493345 - RNA, 19 nt, Artificial Sequence
  Description of Artificial Sequence: Synthetic oligonucleotide
  Antisense strand to SEQ ID NO: 1493344
uuaauccuaaauguccauc

SEQ ID NO: 1493346 - RNA, 19 nt, Artificial Sequence
  Description of Artificial Sequence: Synthetic oligonucleotide
  Sense strand starting at position 3872 of SEQ ID NO: 1244499
ggccucauccuauauuaug

SEQ ID NO: 1493347 - RNA, 19 nt, Artificial Sequence
  Description of Artificial Sequence: Synthetic oligonucleotide
  Antisense strand to SEQ ID NO: 1493346
cauaauauaggaugaggcc

SEQ ID NO: 1493348 - RNA, 19 nt, Artificial Sequence
  Description of Artificial Sequence: Synthetic oligonucleotide
  Sense strand starting at position 3971 of SEQ ID NO: 1244499
ugcuguuaauaguugacau

SEQ ID NO: 1493349 - RNA, 19 nt, Artificial Sequence
  Description of Artificial Sequence: Synthetic oligonucleotide
  Antisense strand to SEQ ID NO: 1493348
augucaacuauuaacagca

SEQ ID NO: 1493350 - RNA, 19 nt, Artificial Sequence
  Description of Artificial Sequence: Synthetic oligonucleotide
  Sense strand starting at position 3973 of SEQ ID NO: 1244499
cuguuaauaguugacauau

SEQ ID NO: 1493351 - RNA, 19 nt, Artificial Sequence
  Description of Artificial Sequence: Synthetic oligonucleotide
  Antisense strand to SEQ ID NO: 1493350
auaugucaacuauuaacag

SEQ ID NO: 1493352 - RNA, 19 nt, Artificial Sequence
  Description of Artificial Sequence: Synthetic oligonucleotide
  Sense strand starting at position 3982 of SEQ ID NO: 1244499
guugacauauugcuacauu

SEQ ID NO: 1493353 - RNA, 19 nt, Artificial Sequence
  Description of Artificial Sequence: Synthetic oligonucleotide
  Antisense strand to SEQ ID NO: 1493352
aauguagcaauaugucaac

SEQ ID NO: 1493354 - RNA, 19 nt, Artificial Sequence
  Description of Artificial Sequence: Synthetic oligonucleotide
  Sense strand starting at position 1 of SEQ ID NO: 1244500
ggacguagaagucaucuga

SEQ ID NO: 1493355 - RNA, 19 nt, Artificial Sequence
  Description of Artificial Sequence: Synthetic oligonucleotide
  Antisense strand to SEQ ID NO: 1493354
ucagaugacuucuacgucc

SEQ ID NO: 1493356 - RNA, 19 nt, Artificial Sequence
  Description of Artificial Sequence: Synthetic oligonucleotide
  Sense strand starting at position 20 of SEQ ID NO: 1244500
cuucgucacccagagauga

SEQ ID NO: 1493357 - RNA, 19 nt, Artificial Sequence
  Description of Artificial Sequence: Synthetic oligonucleotide
  Antisense strand to SEQ ID NO: 1493356
ucaucucugggugacgaag

SEQ ID NO: 1493358 - RNA, 19 nt, Artificial Sequence
  Description of Artificial Sequence: Synthetic oligonucleotide
  Sense strand starting at position 30 of SEQ ID NO: 1244500
cagagaugagcaggucuuu

SEQ ID NO: 1493359 - RNA, 19 nt, Artificial Sequence
  Description of Artificial Sequence: Synthetic oligonucleotide
  Antisense strand to SEQ ID NO: 1493358
aaagaccugcucaucucug

SEQ ID NO: 1493360 - RNA, 19 nt, Artificial Sequence
  Description of Artificial Sequence: Synthetic oligonucleotide
  Sense strand starting at position 117 of SEQ ID NO: 1244500
uggguucaccaacgugaaa

SEQ ID NO: 1493361 - RNA, 19 nt, Artificial Sequence
  Description of Artificial Sequence: Synthetic oligonucleotide
  Antisense strand to SEQ ID NO: 1493360
uuucacguuggugaaccca

SEQ ID NO: 1493362 - RNA, 19 nt, Artificial Sequence
  Description of Artificial Sequence: Synthetic oligonucleotide
  Sense strand starting at position 154 of SEQ ID NO: 1244500
gcgccauccugcccugauu

SEQ ID NO: 1493363 - RNA, 19 nt, Artificial Sequence
  Description of Artificial Sequence: Synthetic oligonucleotide
  Antisense strand to SEQ ID NO: 1493362
aaucagggcaggauggcgc

SEQ ID NO: 1493364 - RNA, 19 nt, Artificial Sequence
  Description of Artificial Sequence: Synthetic oligonucleotide
  Sense strand starting at position 288 of SEQ ID NO: 1244500
cccagaucucuguacuaga

SEQ ID NO: 1493365 - RNA, 19 nt, Artificial Sequence
  Description of Artificial Sequence: Synthetic oligonucleotide
  Antisense strand to SEQ ID NO: 1493364
ucuaguacagagaucuggg

SEQ ID NO: 1493366 - RNA, 19 nt, Artificial Sequence
  Description of Artificial Sequence: Synthetic oligonucleotide
  Sense strand starting at position 291 of SEQ ID NO: 1244500
agaucucuguacuagaugu

SEQ ID NO: 1493367 - RNA, 19 nt, Artificial Sequence
  Description of Artificial Sequence: Synthetic oligonucleotide
  Antisense strand to SEQ ID NO: 1493366
acaucuaguacagagaucu

SEQ ID NO: 1493368 - RNA, 19 nt, Artificial Sequence
  Description of Artificial Sequence: Synthetic oligonucleotide
  Sense strand starting at position 325 of SEQ ID NO: 1244500
caaaucucacccgaggagu

SEQ ID NO: 1493369 - RNA, 19 nt, Artificial Sequence
  Description of Artificial Sequence: Synthetic oligonucleotide
  Antisense strand to SEQ ID NO: 1493368
acuccucgggugagauuug

SEQ ID NO: 1493370 - RNA, 19 nt, Artificial Sequence
  Description of Artificial Sequence: Synthetic oligonucleotide
  Sense strand starting at position 418 of SEQ ID NO: 1244500
gaucaaguguaagacucaa

SEQ ID NO: 1493371 - RNA, 19 nt, Artificial Sequence
  Description of Artificial Sequence: Synthetic oligonucleotide
  Antisense strand to SEQ ID NO: 1493370
uugagucuuacacuugauc

SEQ ID NO: 1493372 - RNA, 19 nt, Artificial Sequence
  Description of Artificial Sequence: Synthetic oligonucleotide
  Sense strand starting at position 1119 of SEQ ID NO: 1244500
gucagcauguucuuggcaa

SEQ ID NO: 1493373 - RNA, 19 nt, Artificial Sequence
  Description of Artificial Sequence: Synthetic oligonucleotide
  Antisense strand to SEQ ID NO: 1493372
uugccaagaacaugcugac

SEQ ID NO: 1493374 - RNA, 19 nt, Artificial Sequence
  Description of Artificial Sequence: Synthetic oligonucleotide
  Sense strand starting at position 1121 of SEQ ID NO: 1244500
cagcauguucuuggcaaau

SEQ ID NO: 1493375 - RNA, 19 nt, Artificial Sequence
  Description of Artificial Sequence: Synthetic oligonucleotide
  Antisense strand to SEQ ID NO: 1493374
auuugccaagaacaugcug

SEQ ID NO: 1493376 - RNA, 19 nt, Artificial Sequence
  Description of Artificial Sequence: Synthetic oligonucleotide
  Sense strand starting at position 1226 of SEQ ID NO: 1244500
ggcccuuugaaauguguaa

SEQ ID NO: 1493377 - RNA, 19 nt, Artificial Sequence
  Description of Artificial Sequence: Synthetic oligonucleotide
  Antisense strand to SEQ ID NO: 1493376
uuacacauuucaaagggcc

SEQ ID NO: 1493378 - RNA, 19 nt, Artificial Sequence
  Description of Artificial Sequence: Synthetic oligonucleotide
  Sense strand starting at position 1272 of SEQ ID NO: 1244500
augccugaguguuacuaag

SEQ ID NO: 1493379 - RNA, 19 nt, Artificial Sequence
  Description of Artificial Sequence: Synthetic oligonucleotide
  Antisense strand to SEQ ID NO: 1493378
cuuaguaacacucaggcau

SEQ ID NO: 1493380 - RNA, 19 nt, Artificial Sequence
  Description of Artificial Sequence: Synthetic oligonucleotide
  Sense strand starting at position 1274 of SEQ ID NO: 1244500
gccugaguguuacuaagga

SEQ ID NO: 1493381 - RNA, 19 nt, Artificial Sequence
  Description of Artificial Sequence: Synthetic oligonucleotide
  Antisense strand to SEQ ID NO: 1493380
uccuuaguaacacucaggc

SEQ ID NO: 1493382 - RNA, 19 nt, Artificial Sequence
  Description of Artificial Sequence: Synthetic oligonucleotide
  Sense strand starting at position 1316 of SEQ ID NO: 1244500
ggaugugagaaacgcucua

SEQ ID NO: 1493383 - RNA, 19 nt, Artificial Sequence
  Description of Artificial Sequence: Synthetic oligonucleotide
  Antisense strand to SEQ ID NO: 1493382
uagagcguuucucacaucc

SEQ ID NO: 1493384 - RNA, 19 nt, Artificial Sequence
  Description of Artificial Sequence: Synthetic oligonucleotide
  Sense strand starting at position 1321 of SEQ ID NO: 1244500
ugagaaacgcucuauacac

SEQ ID NO: 1493385 - RNA, 19 nt, Artificial Sequence
  Description of Artificial Sequence: Synthetic oligonucleotide
  Antisense strand to SEQ ID NO: 1493384
guguauagagcguuucuca

SEQ ID NO: 1493386 - RNA, 19 nt, Artificial Sequence
  Description of Artificial Sequence: Synthetic oligonucleotide
  Sense strand starting at position 1395 of SEQ ID NO: 1244500
cucugaacucuccgacacu

SEQ ID NO: 1493387 - RNA, 19 nt, Artificial Sequence
  Description of Artificial Sequence: Synthetic oligonucleotide
  Antisense strand to SEQ ID NO: 1493386
agugucggagaguucagag

SEQ ID NO: 1493388 - RNA, 19 nt, Artificial Sequence
  Description of Artificial Sequence: Synthetic oligonucleotide
  Sense strand starting at position 1426 of SEQ ID NO: 1244500
ccgaaaccaugauauaaac

SEQ ID NO: 1493389 - RNA, 19 nt, Artificial Sequence
  Description of Artificial Sequence: Synthetic oligonucleotide
  Antisense strand to SEQ ID NO: 1493388
guuuauaucaugguuucgg

SEQ ID NO: 1493390 - RNA, 19 nt, Artificial Sequence
  Description of Artificial Sequence: Synthetic oligonucleotide
  Sense strand starting at position 1988 of SEQ ID NO: 1244500
gcgcgaacuuuauugacaa

SEQ ID NO: 1493391 - RNA, 19 nt, Artificial Sequence
  Description of Artificial Sequence: Synthetic oligonucleotide
  Antisense strand to SEQ ID NO: 1493390
uugucaauaaaguucgcgc

SEQ ID NO: 1493392 - RNA, 19 nt, Artificial Sequence
  Description of Artificial Sequence: Synthetic oligonucleotide
  Sense strand starting at position 2183 of SEQ ID NO: 1244500
gccugcauuccugcaguca

SEQ ID NO: 1493393 - RNA, 19 nt, Artificial Sequence
  Description of Artificial Sequence: Synthetic oligonucleotide
  Antisense strand to SEQ ID NO: 1493392
ugacugcaggaaugcaggc

SEQ ID NO: 1493394 - RNA, 19 nt, Artificial Sequence
  Description of Artificial Sequence: Synthetic oligonucleotide
  Sense strand starting at position 2561 of SEQ ID NO: 1244500
aaguguugccauuacagac

SEQ ID NO: 1493395 - RNA, 19 nt, Artificial Sequence
  Description of Artificial Sequence: Synthetic oligonucleotide
  Antisense strand to SEQ ID NO: 1493394
gucuguaauggcaacacuu

SEQ ID NO: 1493396 - RNA, 19 nt, Artificial Sequence
  Description of Artificial Sequence: Synthetic oligonucleotide
  Sense strand starting at position 2597 of SEQ ID NO: 1244500
accacuggcugucaagauu

SEQ ID NO: 1493397 - RNA, 19 nt, Artificial Sequence
  Description of Artificial Sequence: Synthetic oligonucleotide
  Antisense strand to SEQ ID NO: 1493396
aaucuugacagccaguggu

SEQ ID NO: 1493398 - RNA, 19 nt, Artificial Sequence
  Description of Artificial Sequence: Synthetic oligonucleotide
  Sense strand starting at position 2935 of SEQ ID NO: 1244500
acuucucacugauaaguga

SEQ ID NO: 1493399 - RNA, 19 nt, Artificial Sequence
  Description of Artificial Sequence: Synthetic oligonucleotide
  Antisense strand to SEQ ID NO: 1493398
ucacuuaucagugagaagu

SEQ ID NO: 1493400 - RNA, 19 nt, Artificial Sequence
  Description of Artificial Sequence: Synthetic oligonucleotide
  Sense strand starting at position 2942 of SEQ ID NO: 1244500
acugauaagugagggaauu

SEQ ID NO: 1493401 - RNA, 19 nt, Artificial Sequence
  Description of Artificial Sequence: Synthetic oligonucleotide
  Antisense strand to SEQ ID NO: 1493400
aauucccucacuuaucagu

SEQ ID NO: 1493402 - RNA, 19 nt, Artificial Sequence
  Description of Artificial Sequence: Synthetic oligonucleotide
  Sense strand starting at position 2955 of SEQ ID NO: 1244500
ggaauuacuguuugaggcu

SEQ ID NO: 1493403 - RNA, 19 nt, Artificial Sequence
  Description of Artificial Sequence: Synthetic oligonucleotide
  Antisense strand to SEQ ID NO: 1493402
agccucaaacaguaauucc

SEQ ID NO: 1493404 - RNA, 19 nt, Artificial Sequence
  Description of Artificial Sequence: Synthetic oligonucleotide
  Sense strand starting at position 2972 of SEQ ID NO: 1244500
cucuaauugauaggguguu

SEQ ID NO: 1493405 - RNA, 19 nt, Artificial Sequence
  Description of Artificial Sequence: Synthetic oligonucleotide
  Antisense strand to SEQ ID NO: 1493404
aacacccuaucaauuagag

SEQ ID NO: 1493406 - RNA, 19 nt, Artificial Sequence
  Description of Artificial Sequence: Synthetic oligonucleotide
  Sense strand starting at position 2982 of SEQ ID NO: 1244500
uaggguguucuuuagacuu

SEQ ID NO: 1493407 - RNA, 19 nt, Artificial Sequence
  Description of Artificial Sequence: Synthetic oligonucleotide
  Antisense strand to SEQ ID NO: 1493406
aagucuaaagaacacccua

SEQ ID NO: 1493408 - RNA, 19 nt, Artificial Sequence
  Description of Artificial Sequence: Synthetic oligonucleotide
  Sense strand starting at position 3061 of SEQ ID NO: 1244500
ccugguuaacgcugacuca

SEQ ID NO: 1493409 - RNA, 19 nt, Artificial Sequence
  Description of Artificial Sequence: Synthetic oligonucleotide
  Antisense strand to SEQ ID NO: 1493408
ugagucagcguuaaccagg

SEQ ID NO: 1493410 - RNA, 19 nt, Artificial Sequence
  Description of Artificial Sequence: Synthetic oligonucleotide
  Sense strand starting at position 3064 of SEQ ID NO: 1244500
gguuaacgcugacucacua

SEQ ID NO: 1493411 - RNA, 19 nt, Artificial Sequence
  Description of Artificial Sequence: Synthetic oligonucleotide
  Antisense strand to SEQ ID NO: 1493410
uagugagucagcguuaacc

SEQ ID NO: 1493412 - RNA, 19 nt, Artificial Sequence
  Description of Artificial Sequence: Synthetic oligonucleotide
  Sense strand starting at position 3182 of SEQ ID NO: 1244500
uaagcaaaucugugugaga

SEQ ID NO: 1493413 - RNA, 19 nt, Artificial Sequence
  Description of Artificial Sequence: Synthetic oligonucleotide
  Antisense strand to SEQ ID NO: 1493412
ucucacacagauuugcuua

SEQ ID NO: 1493414 - RNA, 19 nt, Artificial Sequence
  Description of Artificial Sequence: Synthetic oligonucleotide
  Sense strand starting at position 3183 of SEQ ID NO: 1244500
aagcaaaucugugugagau

SEQ ID NO: 1493415 - RNA, 19 nt, Artificial Sequence
  Description of Artificial Sequence: Synthetic oligonucleotide
  Antisense strand to SEQ ID NO: 1493414
aucucacacagauuugcuu

SEQ ID NO: 1493416 - RNA, 19 nt, Artificial Sequence
  Description of Artificial Sequence: Synthetic oligonucleotide
  Sense strand starting at position 3184 of SEQ ID NO: 1244500
agcaaaucugugugagaug

SEQ ID NO: 1493417 - RNA, 19 nt, Artificial Sequence
  Description of Artificial Sequence: Synthetic oligonucleotide
  Antisense strand to SEQ ID NO: 1493416
caucucacacagauuugcu

SEQ ID NO: 1493418 - RNA, 19 nt, Artificial Sequence
  Description of Artificial Sequence: Synthetic oligonucleotide
  Sense strand starting at position 3185 of SEQ ID NO: 1244500
gcaaaucugugugagauga

SEQ ID NO: 1493419 - RNA, 19 nt, Artificial Sequence
  Description of Artificial Sequence: Synthetic oligonucleotide
  Antisense strand to SEQ ID NO: 1493418
ucaucucacacagauuugc

SEQ ID NO: 1493420 - RNA, 19 nt, Artificial Sequence
  Description of Artificial Sequence: Synthetic oligonucleotide
  Sense strand starting at position 3187 of SEQ ID NO: 1244500
aaaucugugugagaugaac

SEQ ID NO: 1493421 - RNA, 19 nt, Artificial Sequence
  Description of Artificial Sequence: Synthetic oligonucleotide
  Antisense strand to SEQ ID NO: 1493420
guucaucucacacagauuu

SEQ ID NO: 1493422 - RNA, 19 nt, Artificial Sequence
  Description of Artificial Sequence: Synthetic oligonucleotide
  Sense strand starting at position 3193 of SEQ ID NO: 1244500
gugugagaugaacagucuu

SEQ ID NO: 1493423 - RNA, 19 nt, Artificial Sequence
  Description of Artificial Sequence: Synthetic oligonucleotide
  Antisense strand to SEQ ID NO: 1493422
aagacuguucaucucacac

SEQ ID NO: 1493424 - RNA, 19 nt, Artificial Sequence
  Description of Artificial Sequence: Synthetic oligonucleotide
  Sense strand starting at position 3218 of SEQ ID NO: 1244500
uccugauaugcccaaguac

SEQ ID NO: 1493425 - RNA, 19 nt, Artificial Sequence
  Description of Artificial Sequence: Synthetic oligonucleotide
  Antisense strand to SEQ ID NO: 1493424
guacuugggcauaucagga

SEQ ID NO: 1493426 - RNA, 19 nt, Artificial Sequence
  Description of Artificial Sequence: Synthetic oligonucleotide
  Sense strand starting at position 3682 of SEQ ID NO: 1244500
agaggugaucucugaucug

SEQ ID NO: 1493427 - RNA, 19 nt, Artificial Sequence
  Description of Artificial Sequence: Synthetic oligonucleotide
  Antisense strand to SEQ ID NO: 1493426
cagaucagagaucaccucu

SEQ ID NO: 1493428 - RNA, 19 nt, Artificial Sequence
  Description of Artificial Sequence: Synthetic oligonucleotide
  Sense strand starting at position 3685 of SEQ ID NO: 1244500
ggugaucucugaucuguaa

SEQ ID NO: 1493429 - RNA, 19 nt, Artificial Sequence
  Description of Artificial Sequence: Synthetic oligonucleotide
  Antisense strand to SEQ ID NO: 1493428
uuacagaucagagaucacc

SEQ ID NO: 1493430 - RNA, 19 nt, Artificial Sequence
  Description of Artificial Sequence: Synthetic oligonucleotide
  Sense strand starting at position 3689 of SEQ ID NO: 1244500
aucucugaucuguaauaug

SEQ ID NO: 1493431 - RNA, 19 nt, Artificial Sequence
  Description of Artificial Sequence: Synthetic oligonucleotide
  Antisense strand to SEQ ID NO: 1493430
cauauuacagaucagagau

SEQ ID NO: 1493432 - RNA, 19 nt, Artificial Sequence
  Description of Artificial Sequence: Synthetic oligonucleotide
  Sense strand starting at position 3777 of SEQ ID NO: 1244500
ugccguguugugagguuaa

SEQ ID NO: 1493433 - RNA, 19 nt, Artificial Sequence
  Description of Artificial Sequence: Synthetic oligonucleotide
  Antisense strand to SEQ ID NO: 1493432
uuaaccucacaacacggca

SEQ ID NO: 1493434 - RNA, 19 nt, Artificial Sequence
  Description of Artificial Sequence: Synthetic oligonucleotide
  Sense strand starting at position 123 of SEQ ID NO: 1244501
gagagaaccuaugacugaa

SEQ ID NO: 1493435 - RNA, 19 nt, Artificial Sequence
  Description of Artificial Sequence: Synthetic oligonucleotide
  Antisense strand to SEQ ID NO: 1493434
uucagucauagguucucuc

SEQ ID NO: 1493436 - RNA, 19 nt, Artificial Sequence
  Description of Artificial Sequence: Synthetic oligonucleotide
  Sense strand starting at position 167 of SEQ ID NO: 1244501
aguccugugguaugaaaug

SEQ ID NO: 1493437 - RNA, 19 nt, Artificial Sequence
  Description of Artificial Sequence: Synthetic oligonucleotide
  Antisense strand to SEQ ID NO: 1493436
cauuucauaccacaggacu

SEQ ID NO: 1493438 - RNA, 19 nt, Artificial Sequence
  Description of Artificial Sequence: Synthetic oligonucleotide
  Sense strand starting at position 227 of SEQ ID NO: 1244501
ggcagcuaccaucaagagu

SEQ ID NO: 1493439 - RNA, 19 nt, Artificial Sequence
  Description of Artificial Sequence: Synthetic oligonucleotide
  Antisense strand to SEQ ID NO: 1493438
acucuugaugguagcugcc

SEQ ID NO: 1493440 - RNA, 19 nt, Artificial Sequence
  Description of Artificial Sequence: Synthetic oligonucleotide
  Sense strand starting at position 240 of SEQ ID NO: 1244501
aagagugucacaugggcua

SEQ ID NO: 1493441 - RNA, 19 nt, Artificial Sequence
  Description of Artificial Sequence: Synthetic oligonucleotide
  Antisense strand to SEQ ID NO: 1493440
uagcccaugugacacucuu

SEQ ID NO: 1493442 - RNA, 19 nt, Artificial Sequence
  Description of Artificial Sequence: Synthetic oligonucleotide
  Sense strand starting at position 586 of SEQ ID NO: 1244501
ugcuuuauagcuuggaaag

SEQ ID NO: 1493443 - RNA, 19 nt, Artificial Sequence
  Description of Artificial Sequence: Synthetic oligonucleotide
  Antisense strand to SEQ ID NO: 1493442
cuuuccaagcuauaaagca

SEQ ID NO: 1493444 - RNA, 19 nt, Artificial Sequence
  Description of Artificial Sequence: Synthetic oligonucleotide
  Sense strand starting at position 978 of SEQ ID NO: 1244501
aaguaaggugucugggaca

SEQ ID NO: 1493445 - RNA, 19 nt, Artificial Sequence
  Description of Artificial Sequence: Synthetic oligonucleotide
  Antisense strand to SEQ ID NO: 1493444
ugucccagacaccuuacuu

SEQ ID NO: 1493446 - RNA, 19 nt, Artificial Sequence
  Description of Artificial Sequence: Synthetic oligonucleotide
  Sense strand starting at position 1017 of SEQ ID NO: 1244501
aaugcaugggcuugaaauc

SEQ ID NO: 1493447 - RNA, 19 nt, Artificial Sequence
  Description of Artificial Sequence: Synthetic oligonucleotide
  Antisense strand to SEQ ID NO: 1493446
gauuucaagcccaugcauu

SEQ ID NO: 1493448 - RNA, 19 nt, Artificial Sequence
  Description of Artificial Sequence: Synthetic oligonucleotide
  Sense strand starting at position 1107 of SEQ ID NO: 1244501
ugagguuagauuggugcaa

SEQ ID NO: 1493449 - RNA, 19 nt, Artificial Sequence
  Description of Artificial Sequence: Synthetic oligonucleotide
  Antisense strand to SEQ ID NO: 1493448
uugcaccaaucuaaccuca

SEQ ID NO: 1493450 - RNA, 19 nt, Artificial Sequence
  Description of Artificial Sequence: Synthetic oligonucleotide
  Sense strand starting at position 1108 of SEQ ID NO: 1244501
gagguuagauuggugcaau

SEQ ID NO: 1493451 - RNA, 19 nt, Artificial Sequence
  Description of Artificial Sequence: Synthetic oligonucleotide
  Antisense strand to SEQ ID NO: 1493450
auugcaccaaucuaaccuc

SEQ ID NO: 1493452 - RNA, 19 nt, Artificial Sequence
  Description of Artificial Sequence: Synthetic oligonucleotide
  Sense strand starting at position 1111 of SEQ ID NO: 1244501
guuagauuggugcaauuau

SEQ ID NO: 1493453 - RNA, 19 nt, Artificial Sequence
  Description of Artificial Sequence: Synthetic oligonucleotide
  Antisense strand to SEQ ID NO: 1493452
auaauugcaccaaucuaac

SEQ ID NO: 1493454 - RNA, 19 nt, Artificial Sequence
  Description of Artificial Sequence: Synthetic oligonucleotide
  Sense strand starting at position 1120 of SEQ ID NO: 1244501
gugcaauuaugguuugaaa

SEQ ID NO: 1493455 - RNA, 19 nt, Artificial Sequence
  Description of Artificial Sequence: Synthetic oligonucleotide
  Antisense strand to SEQ ID NO: 1493454
uuucaaaccauaauugcac

SEQ ID NO: 1493456 - RNA, 19 nt, Artificial Sequence
  Description of Artificial Sequence: Synthetic oligonucleotide
  Sense strand starting at position 1257 of SEQ ID NO: 1244501
ugaagcauauuacuacaga

SEQ ID NO: 1493457 - RNA, 19 nt, Artificial Sequence
  Description of Artificial Sequence: Synthetic oligonucleotide
  Antisense strand to SEQ ID NO: 1493456
ucuguaguaauaugcuuca

SEQ ID NO: 1493458 - RNA, 19 nt, Artificial Sequence
  Description of Artificial Sequence: Synthetic oligonucleotide
  Sense strand starting at position 1312 of SEQ ID NO: 1244501
cgagauugcaguuauuaag

SEQ ID NO: 1493459 - RNA, 19 nt, Artificial Sequence
  Description of Artificial Sequence: Synthetic oligonucleotide
  Antisense strand to SEQ ID NO: 1493458
cuuaauaacugcaaucucg

SEQ ID NO: 1493460 - RNA, 19 nt, Artificial Sequence
  Description of Artificial Sequence: Synthetic oligonucleotide
  Sense strand starting at position 1319 of SEQ ID NO: 1244501
gcaguuauuaagugguaga

SEQ ID NO: 1493461 - RNA, 19 nt, Artificial Sequence
  Description of Artificial Sequence: Synthetic oligonucleotide
  Antisense strand to SEQ ID NO: 1493460
ucuaccacuuaauaacugc

SEQ ID NO: 1493462 - RNA, 19 nt, Artificial Sequence
  Description of Artificial Sequence: Synthetic oligonucleotide
  Sense strand starting at position 1402 of SEQ ID NO: 1244501
gucaacaucguguauuaag

SEQ ID NO: 1493463 - RNA, 19 nt, Artificial Sequence
  Description of Artificial Sequence: Synthetic oligonucleotide
  Antisense strand to SEQ ID NO: 1493462
cuuaauacacgauguugac

SEQ ID NO: 1493464 - RNA, 19 nt, Artificial Sequence
  Description of Artificial Sequence: Synthetic oligonucleotide
  Sense strand starting at position 1411 of SEQ ID NO: 1244501
guguauuaagaacgacaug

SEQ ID NO: 1493465 - RNA, 19 nt, Artificial Sequence
  Description of Artificial Sequence: Synthetic oligonucleotide
  Antisense strand to SEQ ID NO: 1493464
caugucguucuuaauacac

SEQ ID NO: 1493466 - RNA, 19 nt, Artificial Sequence
  Description of Artificial Sequence: Synthetic oligonucleotide
  Sense strand starting at position 1422 of SEQ ID NO: 1244501
acgacaugcuucuuaugga

SEQ ID NO: 1493467 - RNA, 19 nt, Artificial Sequence
  Description of Artificial Sequence: Synthetic oligonucleotide
  Antisense strand to SEQ ID NO: 1493466
uccauaagaagcaugucgu

SEQ ID NO: 1493468 - RNA, 19 nt, Artificial Sequence
  Description of Artificial Sequence: Synthetic oligonucleotide
  Sense strand starting at position 1520 of SEQ ID NO: 1244501
gacagugagcucuggaaua

SEQ ID NO: 1493469 - RNA, 19 nt, Artificial Sequence
  Description of Artificial Sequence: Synthetic oligonucleotide
  Antisense strand to SEQ ID NO: 1493468
uauuccagagcucacuguc

SEQ ID NO: 1493470 - RNA, 19 nt, Artificial Sequence
  Description of Artificial Sequence: Synthetic oligonucleotide
  Sense strand starting at position 1522 of SEQ ID NO: 1244501
cagugagcucuggaauaac

SEQ ID NO: 1493471 - RNA, 19 nt, Artificial Sequence
  Description of Artificial Sequence: Synthetic oligonucleotide
  Antisense strand to SEQ ID NO: 1493470
guuauuccagagcucacug

SEQ ID NO: 1493472 - RNA, 19 nt, Artificial Sequence
  Description of Artificial Sequence: Synthetic oligonucleotide
  Sense strand starting at position 1702 of SEQ ID NO: 1244501
gaucucguccagugcauuu

SEQ ID NO: 1493473 - RNA, 19 nt, Artificial Sequence
  Description of Artificial Sequence: Synthetic oligonucleotide
  Antisense strand to SEQ ID NO: 1493472
aaaugcacuggacgagauc

SEQ ID NO: 1493474 - RNA, 19 nt, Artificial Sequence
  Description of Artificial Sequence: Synthetic oligonucleotide
  Sense strand starting at position 2066 of SEQ ID NO: 1244501
uuccuauugguguggaaga

SEQ ID NO: 1493475 - RNA, 19 nt, Artificial Sequence
  Description of Artificial Sequence: Synthetic oligonucleotide
  Antisense strand to SEQ ID NO: 1493474
ucuuccacaccaauaggaa

SEQ ID NO: 1493476 - RNA, 19 nt, Artificial Sequence
  Description of Artificial Sequence: Synthetic oligonucleotide
  Sense strand starting at position 2375 of SEQ ID NO: 1244501
gcaaguucauggcugauga

SEQ ID NO: 1493477 - RNA, 19 nt, Artificial Sequence
  Description of Artificial Sequence: Synthetic oligonucleotide
  Antisense strand to SEQ ID NO: 1493476
ucaucagccaugaacuugc

SEQ ID NO: 1493478 - RNA, 19 nt, Artificial Sequence
  Description of Artificial Sequence: Synthetic oligonucleotide
  Sense strand starting at position 2403 of SEQ ID NO: 1244501
guggaacucuggaggaagu

SEQ ID NO: 1493479 - RNA, 19 nt, Artificial Sequence
  Description of Artificial Sequence: Synthetic oligonucleotide
  Antisense strand to SEQ ID NO: 1493478
acuuccuccagaguuccac

SEQ ID NO: 1493480 - RNA, 19 nt, Artificial Sequence
  Description of Artificial Sequence: Synthetic oligonucleotide
  Sense strand starting at position 2413 of SEQ ID NO: 1244501
ggaggaagucguggugaaa

SEQ ID NO: 1493481 - RNA, 19 nt, Artificial Sequence
  Description of Artificial Sequence: Synthetic oligonucleotide
  Antisense strand to SEQ ID NO: 1493480
uuucaccacgacuuccucc

SEQ ID NO: 1493482 - RNA, 19 nt, Artificial Sequence
  Description of Artificial Sequence: Synthetic oligonucleotide
  Sense strand starting at position 2416 of SEQ ID NO: 1244501
ggaagucguggugaaauca

SEQ ID NO: 1493483 - RNA, 19 nt, Artificial Sequence
  Description of Artificial Sequence: Synthetic oligonucleotide
  Antisense strand to SEQ ID NO: 1493482
ugauuucaccacgacuucc

SEQ ID NO: 1493484 - RNA, 19 nt, Artificial Sequence
  Description of Artificial Sequence: Synthetic oligonucleotide
  Sense strand starting at position 2494 of SEQ ID NO: 1244501
ugcaaacguccucagaguu

SEQ ID NO: 1493485 - RNA, 19 nt, Artificial Sequence
  Description of Artificial Sequence: Synthetic oligonucleotide
  Antisense strand to SEQ ID NO: 1493484
aacucugaggacguuugca

SEQ ID NO: 1493486 - RNA, 19 nt, Artificial Sequence
  Description of Artificial Sequence: Synthetic oligonucleotide
  Sense strand starting at position 2507 of SEQ ID NO: 1244501
agaguugugagacguugau

SEQ ID NO: 1493487 - RNA, 19 nt, Artificial Sequence
  Description of Artificial Sequence: Synthetic oligonucleotide
  Antisense strand to SEQ ID NO: 1493486
aucaacgucucacaacucu

SEQ ID NO: 1493488 - RNA, 19 nt, Artificial Sequence
  Description of Artificial Sequence: Synthetic oligonucleotide
  Sense strand starting at position 2539 of SEQ ID NO: 1244501
gagaaccaucugugcugaa

SEQ ID NO: 1493489 - RNA, 19 nt, Artificial Sequence
  Description of Artificial Sequence: Synthetic oligonucleotide
  Antisense strand to SEQ ID NO: 1493488
uucagcacagaugguucuc

SEQ ID NO: 1493490 - RNA, 19 nt, Artificial Sequence
  Description of Artificial Sequence: Synthetic oligonucleotide
  Sense strand starting at position 2540 of SEQ ID NO: 1244501
agaaccaucugugcugaaa

SEQ ID NO: 1493491 - RNA, 19 nt, Artificial Sequence
  Description of Artificial Sequence: Synthetic oligonucleotide
  Antisense strand to SEQ ID NO: 1493490
uuucagcacagaugguucu

SEQ ID NO: 1493492 - RNA, 19 nt, Artificial Sequence
  Description of Artificial Sequence: Synthetic oligonucleotide
  Sense strand starting at position 2596 of SEQ ID NO: 1244501
ucaugcaccgagugagaaa

SEQ ID NO: 1493493 - RNA, 19 nt, Artificial Sequence
  Description of Artificial Sequence: Synthetic oligonucleotide
  Antisense strand to SEQ ID NO: 1493492
uuucucacucggugcauga

SEQ ID NO: 1493494 - RNA, 19 nt, Artificial Sequence
  Description of Artificial Sequence: Synthetic oligonucleotide
  Sense strand starting at position 2706 of SEQ ID NO: 1244501
cguuaaacuuuggcucaga

SEQ ID NO: 1493495 - RNA, 19 nt, Artificial Sequence
  Description of Artificial Sequence: Synthetic oligonucleotide
  Antisense strand to SEQ ID NO: 1493494
ucugagccaaaguuuaacg

SEQ ID NO: 1493496 - RNA, 19 nt, Artificial Sequence
  Description of Artificial Sequence: Synthetic oligonucleotide
  Sense strand starting at position 2707 of SEQ ID NO: 1244501
guuaaacuuuggcucagau

SEQ ID NO: 1493497 - RNA, 19 nt, Artificial Sequence
  Description of Artificial Sequence: Synthetic oligonucleotide
  Antisense strand to SEQ ID NO: 1493496
aucugagccaaaguuuaac

SEQ ID NO: 1493498 - RNA, 19 nt, Artificial Sequence
  Description of Artificial Sequence: Synthetic oligonucleotide
  Sense strand starting at position 3387 of SEQ ID NO: 1244501
ccaccuauucgggagccaa

SEQ ID NO: 1493499 - RNA, 19 nt, Artificial Sequence
  Description of Artificial Sequence: Synthetic oligonucleotide
  Antisense strand to SEQ ID NO: 1493498
uuggcucccgaauaggugg

SEQ ID NO: 1493500 - RNA, 19 nt, Artificial Sequence
  Description of Artificial Sequence: Synthetic oligonucleotide
  Sense strand starting at position 3571 of SEQ ID NO: 1244501
ccaugaacacgagaugucu

SEQ ID NO: 1493501 - RNA, 19 nt, Artificial Sequence
  Description of Artificial Sequence: Synthetic oligonucleotide
  Antisense strand to SEQ ID NO: 1493500
agacaucucguguucaugg

SEQ ID NO: 1493502 - RNA, 19 nt, Artificial Sequence
  Description of Artificial Sequence: Synthetic oligonucleotide
  Sense strand starting at position 3723 of SEQ ID NO: 1244501
uccuuauugguguacagaa

SEQ ID NO: 1493503 - RNA, 19 nt, Artificial Sequence
  Description of Artificial Sequence: Synthetic oligonucleotide
  Antisense strand to SEQ ID NO: 1493502
uucuguacaccaauaagga

SEQ ID NO: 1493504 - RNA, 19 nt, Artificial Sequence
  Description of Artificial Sequence: Synthetic oligonucleotide
  Sense strand starting at position 3725 of SEQ ID NO: 1244501
cuuauugguguacagaaau

SEQ ID NO: 1493505 - RNA, 19 nt, Artificial Sequence
  Description of Artificial Sequence: Synthetic oligonucleotide
  Antisense strand to SEQ ID NO: 1493504
auuucuguacaccaauaag

SEQ ID NO: 1493506 - RNA, 19 nt, Artificial Sequence
  Description of Artificial Sequence: Synthetic oligonucleotide
  Sense strand starting at position 3783 of SEQ ID NO: 1244501
cugaauguaucaguuauaa

SEQ ID NO: 1493507 - RNA, 19 nt, Artificial Sequence
  Description of Artificial Sequence: Synthetic oligonucleotide
  Antisense strand to SEQ ID NO: 1493506
uuauaacugauacauucag

SEQ ID NO: 1493508 - RNA, 19 nt, Artificial Sequence
  Description of Artificial Sequence: Synthetic oligonucleotide
  Sense strand starting at position 3829 of SEQ ID NO: 1244501
uucuauauacuagguauca

SEQ ID NO: 1493509 - RNA, 19 nt, Artificial Sequence
  Description of Artificial Sequence: Synthetic oligonucleotide
  Antisense strand to SEQ ID NO: 1493508
ugauaccuaguauauagaa

SEQ ID NO: 1493510 - RNA, 19 nt, Artificial Sequence
  Description of Artificial Sequence: Synthetic oligonucleotide
  Sense strand starting at position 3830 of SEQ ID NO: 1244501
ucuauauacuagguaucau

SEQ ID NO: 1493511 - RNA, 19 nt, Artificial Sequence
  Description of Artificial Sequence: Synthetic oligonucleotide
  Antisense strand to SEQ ID NO: 1493510
augauaccuaguauauaga

SEQ ID NO: 1493512 - RNA, 19 nt, Artificial Sequence
  Description of Artificial Sequence: Synthetic oligonucleotide
  Sense strand starting at position 3946 of SEQ ID NO: 1244501
uguaacuuacugugagauu

SEQ ID NO: 1493513 - RNA, 19 nt, Artificial Sequence
  Description of Artificial Sequence: Synthetic oligonucleotide
  Antisense strand to SEQ ID NO: 1493512
aaucucacaguaaguuaca

SEQ ID NO: 1493514 - RNA, 19 nt, Artificial Sequence
  Description of Artificial Sequence: Synthetic oligonucleotide
  Sense strand starting at position 76 of SEQ ID NO: 1244502
gagagaaccuaugacugaa

SEQ ID NO: 1493515 - RNA, 19 nt, Artificial Sequence
  Description of Artificial Sequence: Synthetic oligonucleotide
  Antisense strand to SEQ ID NO: 1493514
uucagucauagguucucuc

SEQ ID NO: 1493516 - RNA, 19 nt, Artificial Sequence
  Description of Artificial Sequence: Synthetic oligonucleotide
  Sense strand starting at position 120 of SEQ ID NO: 1244502
aguccugugguaugaaaug

SEQ ID NO: 1493517 - RNA, 19 nt, Artificial Sequence
  Description of Artificial Sequence: Synthetic oligonucleotide
  Antisense strand to SEQ ID NO: 1493516
cauuucauaccacaggacu

SEQ ID NO: 1493518 - RNA, 19 nt, Artificial Sequence
  Description of Artificial Sequence: Synthetic oligonucleotide
  Sense strand starting at position 180 of SEQ ID NO: 1244502
ggcagcuaccaucaagagu

SEQ ID NO: 1493519 - RNA, 19 nt, Artificial Sequence
  Description of Artificial Sequence: Synthetic oligonucleotide
  Antisense strand to SEQ ID NO: 1493518
acucuugaugguagcugcc

SEQ ID NO: 1493520 - RNA, 19 nt, Artificial Sequence
  Description of Artificial Sequence: Synthetic oligonucleotide
  Sense strand starting at position 193 of SEQ ID NO: 1244502
aagagugucacaugggcua

SEQ ID NO: 1493521 - RNA, 19 nt, Artificial Sequence
  Description of Artificial Sequence: Synthetic oligonucleotide
  Antisense strand to SEQ ID NO: 1493520
uagcccaugugacacucuu

SEQ ID NO: 1493522 - RNA, 19 nt, Artificial Sequence
  Description of Artificial Sequence: Synthetic oligonucleotide
  Sense strand starting at position 539 of SEQ ID NO: 1244502
ugcuuuauagcuuggaaag

SEQ ID NO: 1493523 - RNA, 19 nt, Artificial Sequence
  Description of Artificial Sequence: Synthetic oligonucleotide
  Antisense strand to SEQ ID NO: 1493522
cuuuccaagcuauaaagca

SEQ ID NO: 1493524 - RNA, 19 nt, Artificial Sequence
  Description of Artificial Sequence: Synthetic oligonucleotide
  Sense strand starting at position 931 of SEQ ID NO: 1244502
aaguaaggugucugggaca

SEQ ID NO: 1493525 - RNA, 19 nt, Artificial Sequence
  Description of Artificial Sequence: Synthetic oligonucleotide
  Antisense strand to SEQ ID NO: 1493524
ugucccagacaccuuacuu

SEQ ID NO: 1493526 - RNA, 19 nt, Artificial Sequence
  Description of Artificial Sequence: Synthetic oligonucleotide
  Sense strand starting at position 970 of SEQ ID NO: 1244502
aaugcaugggcuugaaauc

SEQ ID NO: 1493527 - RNA, 19 nt, Artificial Sequence
  Description of Artificial Sequence: Synthetic oligonucleotide
  Antisense strand to SEQ ID NO: 1493526
gauuucaagcccaugcauu

SEQ ID NO: 1493528 - RNA, 19 nt, Artificial Sequence
  Description of Artificial Sequence: Synthetic oligonucleotide
  Sense strand starting at position 1060 of SEQ ID NO: 1244502
ugagguuagauuggugcaa

SEQ ID NO: 1493529 - RNA, 19 nt, Artificial Sequence
  Description of Artificial Sequence: Synthetic oligonucleotide
  Antisense strand to SEQ ID NO: 1493528
uugcaccaaucuaaccuca

SEQ ID NO: 1493530 - RNA, 19 nt, Artificial Sequence
  Description of Artificial Sequence: Synthetic oligonucleotide
  Sense strand starting at position 1061 of SEQ ID NO: 1244502
gagguuagauuggugcaau

SEQ ID NO: 1493531 - RNA, 19 nt, Artificial Sequence
  Description of Artificial Sequence: Synthetic oligonucleotide
  Antisense strand to SEQ ID NO: 1493530
auugcaccaaucuaaccuc

SEQ ID NO: 1493532 - RNA, 19 nt, Artificial Sequence
  Description of Artificial Sequence: Synthetic oligonucleotide
  Sense strand starting at position 1064 of SEQ ID NO: 1244502
guuagauuggugcaauuau

SEQ ID NO: 1493533 - RNA, 19 nt, Artificial Sequence
  Description of Artificial Sequence: Synthetic oligonucleotide
  Antisense strand to SEQ ID NO: 1493532
auaauugcaccaaucuaac

SEQ ID NO: 1493534 - RNA, 19 nt, Artificial Sequence
  Description of Artificial Sequence: Synthetic oligonucleotide
  Sense strand starting at position 1073 of SEQ ID NO: 1244502
gugcaauuaugguuugaaa

SEQ ID NO: 1493535 - RNA, 19 nt, Artificial Sequence
  Description of Artificial Sequence: Synthetic oligonucleotide
  Antisense strand to SEQ ID NO: 1493534
uuucaaaccauaauugcac

SEQ ID NO: 1493536 - RNA, 19 nt, Artificial Sequence
  Description of Artificial Sequence: Synthetic oligonucleotide
  Sense strand starting at position 1210 of SEQ ID NO: 1244502
ugaagcauauuacuacaga

SEQ ID NO: 1493537 - RNA, 19 nt, Artificial Sequence
  Description of Artificial Sequence: Synthetic oligonucleotide
  Antisense strand to SEQ ID NO: 1493536
ucuguaguaauaugcuuca

SEQ ID NO: 1493538 - RNA, 19 nt, Artificial Sequence
  Description of Artificial Sequence: Synthetic oligonucleotide
  Sense strand starting at position 1265 of SEQ ID NO: 1244502
cgagauugcaguuauuaag

SEQ ID NO: 1493539 - RNA, 19 nt, Artificial Sequence
  Description of Artificial Sequence: Synthetic oligonucleotide
  Antisense strand to SEQ ID NO: 1493538
cuuaauaacugcaaucucg

SEQ ID NO: 1493540 - RNA, 19 nt, Artificial Sequence
  Description of Artificial Sequence: Synthetic oligonucleotide
  Sense strand starting at position 1272 of SEQ ID NO: 1244502
gcaguuauuaagugguaga

SEQ ID NO: 1493541 - RNA, 19 nt, Artificial Sequence
  Description of Artificial Sequence: Synthetic oligonucleotide
  Antisense strand to SEQ ID NO: 1493540
ucuaccacuuaauaacugc

SEQ ID NO: 1493542 - RNA, 19 nt, Artificial Sequence
  Description of Artificial Sequence: Synthetic oligonucleotide
  Sense strand starting at position 1355 of SEQ ID NO: 1244502
gucaacaucguguauuaag

SEQ ID NO: 1493543 - RNA, 19 nt, Artificial Sequence
  Description of Artificial Sequence: Synthetic oligonucleotide
  Antisense strand to SEQ ID NO: 1493542
cuuaauacacgauguugac

SEQ ID NO: 1493544 - RNA, 19 nt, Artificial Sequence
  Description of Artificial Sequence: Synthetic oligonucleotide
  Sense strand starting at position 1364 of SEQ ID NO: 1244502
guguauuaagaacgacaug

SEQ ID NO: 1493545 - RNA, 19 nt, Artificial Sequence
  Description of Artificial Sequence: Synthetic oligonucleotide
  Antisense strand to SEQ ID NO: 1493544
caugucguucuuaauacac

SEQ ID NO: 1493546 - RNA, 19 nt, Artificial Sequence
  Description of Artificial Sequence: Synthetic oligonucleotide
  Sense strand starting at position 1375 of SEQ ID NO: 1244502
acgacaugcuucuuaugga

SEQ ID NO: 1493547 - RNA, 19 nt, Artificial Sequence
  Description of Artificial Sequence: Synthetic oligonucleotide
  Antisense strand to SEQ ID NO: 1493546
uccauaagaagcaugucgu

SEQ ID NO: 1493548 - RNA, 19 nt, Artificial Sequence
  Description of Artificial Sequence: Synthetic oligonucleotide
  Sense strand starting at position 1473 of SEQ ID NO: 1244502
gacagugagcucuggaaua

SEQ ID NO: 1493549 - RNA, 19 nt, Artificial Sequence
  Description of Artificial Sequence: Synthetic oligonucleotide
  Antisense strand to SEQ ID NO: 1493548
uauuccagagcucacuguc

SEQ ID NO: 1493550 - RNA, 19 nt, Artificial Sequence
  Description of Artificial Sequence: Synthetic oligonucleotide
  Sense strand starting at position 1475 of SEQ ID NO: 1244502
cagugagcucuggaauaac

SEQ ID NO: 1493551 - RNA, 19 nt, Artificial Sequence
  Description of Artificial Sequence: Synthetic oligonucleotide
  Antisense strand to SEQ ID NO: 1493550
guuauuccagagcucacug

SEQ ID NO: 1493552 - RNA, 19 nt, Artificial Sequence
  Description of Artificial Sequence: Synthetic oligonucleotide
  Sense strand starting at position 1655 of SEQ ID NO: 1244502
gaucucguccagugcauuu

SEQ ID NO: 1493553 - RNA, 19 nt, Artificial Sequence
  Description of Artificial Sequence: Synthetic oligonucleotide
  Antisense strand to SEQ ID NO: 1493552
aaaugcacuggacgagauc

SEQ ID NO: 1493554 - RNA, 19 nt, Artificial Sequence
  Description of Artificial Sequence: Synthetic oligonucleotide
  Sense strand starting at position 2019 of SEQ ID NO: 1244502
uuccuauugguguggaaga

SEQ ID NO: 1493555 - RNA, 19 nt, Artificial Sequence
  Description of Artificial Sequence: Synthetic oligonucleotide
  Antisense strand to SEQ ID NO: 1493554
ucuuccacaccaauaggaa

SEQ ID NO: 1493556 - RNA, 19 nt, Artificial Sequence
  Description of Artificial Sequence: Synthetic oligonucleotide
  Sense strand starting at position 2328 of SEQ ID NO: 1244502
gcaaguucauggcugauga

SEQ ID NO: 1493557 - RNA, 19 nt, Artificial Sequence
  Description of Artificial Sequence: Synthetic oligonucleotide
  Antisense strand to SEQ ID NO: 1493556
ucaucagccaugaacuugc

SEQ ID NO: 1493558 - RNA, 19 nt, Artificial Sequence
  Description of Artificial Sequence: Synthetic oligonucleotide
  Sense strand starting at position 2356 of SEQ ID NO: 1244502
guggaacucuggaggaagu

SEQ ID NO: 1493559 - RNA, 19 nt, Artificial Sequence
  Description of Artificial Sequence: Synthetic oligonucleotide
  Antisense strand to SEQ ID NO: 1493558
acuuccuccagaguuccac

SEQ ID NO: 1493560 - RNA, 19 nt, Artificial Sequence
  Description of Artificial Sequence: Synthetic oligonucleotide
  Sense strand starting at position 2366 of SEQ ID NO: 1244502
ggaggaagucguggugaaa

SEQ ID NO: 1493561 - RNA, 19 nt, Artificial Sequence
  Description of Artificial Sequence: Synthetic oligonucleotide
  Antisense strand to SEQ ID NO: 1493560
uuucaccacgacuuccucc

SEQ ID NO: 1493562 - RNA, 19 nt, Artificial Sequence
  Description of Artificial Sequence: Synthetic oligonucleotide
  Sense strand starting at position 2369 of SEQ ID NO: 1244502
ggaagucguggugaaauca

SEQ ID NO: 1493563 - RNA, 19 nt, Artificial Sequence
  Description of Artificial Sequence: Synthetic oligonucleotide
  Antisense strand to SEQ ID NO: 1493562
ugauuucaccacgacuucc

SEQ ID NO: 1493564 - RNA, 19 nt, Artificial Sequence
  Description of Artificial Sequence: Synthetic oligonucleotide
  Sense strand starting at position 2447 of SEQ ID NO: 1244502
ugcaaacguccucagaguu

SEQ ID NO: 1493565 - RNA, 19 nt, Artificial Sequence
  Description of Artificial Sequence: Synthetic oligonucleotide
  Antisense strand to SEQ ID NO: 1493564
aacucugaggacguuugca

SEQ ID NO: 1493566 - RNA, 19 nt, Artificial Sequence
  Description of Artificial Sequence: Synthetic oligonucleotide
  Sense strand starting at position 2460 of SEQ ID NO: 1244502
agaguugugagacguugau

SEQ ID NO: 1493567 - RNA, 19 nt, Artificial Sequence
  Description of Artificial Sequence: Synthetic oligonucleotide
  Antisense strand to SEQ ID NO: 1493566
aucaacgucucacaacucu

SEQ ID NO: 1493568 - RNA, 19 nt, Artificial Sequence
  Description of Artificial Sequence: Synthetic oligonucleotide
  Sense strand starting at position 2492 of SEQ ID NO: 1244502
gagaaccaucugugcugaa

SEQ ID NO: 1493569 - RNA, 19 nt, Artificial Sequence
  Description of Artificial Sequence: Synthetic oligonucleotide
  Antisense strand to SEQ ID NO: 1493568
uucagcacagaugguucuc

SEQ ID NO: 1493570 - RNA, 19 nt, Artificial Sequence
  Description of Artificial Sequence: Synthetic oligonucleotide
  Sense strand starting at position 2493 of SEQ ID NO: 1244502
agaaccaucugugcugaaa

SEQ ID NO: 1493571 - RNA, 19 nt, Artificial Sequence
  Description of Artificial Sequence: Synthetic oligonucleotide
  Antisense strand to SEQ ID NO: 1493570
uuucagcacagaugguucu

SEQ ID NO: 1493572 - RNA, 19 nt, Artificial Sequence
  Description of Artificial Sequence: Synthetic oligonucleotide
  Sense strand starting at position 2549 of SEQ ID NO: 1244502
ucaugcaccgagugagaaa

SEQ ID NO: 1493573 - RNA, 19 nt, Artificial Sequence
  Description of Artificial Sequence: Synthetic oligonucleotide
  Antisense strand to SEQ ID NO: 1493572
uuucucacucggugcauga

SEQ ID NO: 1493574 - RNA, 19 nt, Artificial Sequence
  Description of Artificial Sequence: Synthetic oligonucleotide
  Sense strand starting at position 2659 of SEQ ID NO: 1244502
cguuaaacuuuggcucaga

SEQ ID NO: 1493575 - RNA, 19 nt, Artificial Sequence
  Description of Artificial Sequence: Synthetic oligonucleotide
  Antisense strand to SEQ ID NO: 1493574
ucugagccaaaguuuaacg

SEQ ID NO: 1493576 - RNA, 19 nt, Artificial Sequence
  Description of Artificial Sequence: Synthetic oligonucleotide
  Sense strand starting at position 2660 of SEQ ID NO: 1244502
guuaaacuuuggcucagau

SEQ ID NO: 1493577 - RNA, 19 nt, Artificial Sequence
  Description of Artificial Sequence: Synthetic oligonucleotide
  Antisense strand to SEQ ID NO: 1493576
aucugagccaaaguuuaac

SEQ ID NO: 1493578 - RNA, 19 nt, Artificial Sequence
  Description of Artificial Sequence: Synthetic oligonucleotide
  Sense strand starting at position 3340 of SEQ ID NO: 1244502
ccaccuauucgggagccaa

SEQ ID NO: 1493579 - RNA, 19 nt, Artificial Sequence
  Description of Artificial Sequence: Synthetic oligonucleotide
  Antisense strand to SEQ ID NO: 1493578
uuggcucccgaauaggugg

SEQ ID NO: 1493580 - RNA, 19 nt, Artificial Sequence
  Description of Artificial Sequence: Synthetic oligonucleotide
  Sense strand starting at position 3524 of SEQ ID NO: 1244502
ccaugaacacgagaugucu

SEQ ID NO: 1493581 - RNA, 19 nt, Artificial Sequence
  Description of Artificial Sequence: Synthetic oligonucleotide
  Antisense strand to SEQ ID NO: 1493580
agacaucucguguucaugg

SEQ ID NO: 1493582 - RNA, 19 nt, Artificial Sequence
  Description of Artificial Sequence: Synthetic oligonucleotide
  Sense strand starting at position 3676 of SEQ ID NO: 1244502
uccuuauugguguacagaa

SEQ ID NO: 1493583 - RNA, 19 nt, Artificial Sequence
  Description of Artificial Sequence: Synthetic oligonucleotide
  Antisense strand to SEQ ID NO: 1493582
uucuguacaccaauaagga

SEQ ID NO: 1493584 - RNA, 19 nt, Artificial Sequence
  Description of Artificial Sequence: Synthetic oligonucleotide
  Sense strand starting at position 3678 of SEQ ID NO: 1244502
cuuauugguguacagaaau

SEQ ID NO: 1493585 - RNA, 19 nt, Artificial Sequence
  Description of Artificial Sequence: Synthetic oligonucleotide
  Antisense strand to SEQ ID NO: 1493584
auuucuguacaccaauaag

SEQ ID NO: 1493586 - RNA, 19 nt, Artificial Sequence
  Description of Artificial Sequence: Synthetic oligonucleotide
  Sense strand starting at position 3736 of SEQ ID NO: 1244502
cugaauguaucaguuauaa

SEQ ID NO: 1493587 - RNA, 19 nt, Artificial Sequence
  Description of Artificial Sequence: Synthetic oligonucleotide
  Antisense strand to SEQ ID NO: 1493586
uuauaacugauacauucag

SEQ ID NO: 1493588 - RNA, 19 nt, Artificial Sequence
  Description of Artificial Sequence: Synthetic oligonucleotide
  Sense strand starting at position 3782 of SEQ ID NO: 1244502
uucuauauacuagguauca

SEQ ID NO: 1493589 - RNA, 19 nt, Artificial Sequence
  Description of Artificial Sequence: Synthetic oligonucleotide
  Antisense strand to SEQ ID NO: 1493588
ugauaccuaguauauagaa

SEQ ID NO: 1493590 - RNA, 19 nt, Artificial Sequence
  Description of Artificial Sequence: Synthetic oligonucleotide
  Sense strand starting at position 3783 of SEQ ID NO: 1244502
ucuauauacuagguaucau

SEQ ID NO: 1493591 - RNA, 19 nt, Artificial Sequence
  Description of Artificial Sequence: Synthetic oligonucleotide
  Antisense strand to SEQ ID NO: 1493590
augauaccuaguauauaga

SEQ ID NO: 1493592 - RNA, 19 nt, Artificial Sequence
  Description of Artificial Sequence: Synthetic oligonucleotide
  Sense strand starting at position 3899 of SEQ ID NO: 1244502
uguaacuuacugugagauu

SEQ ID NO: 1493593 - RNA, 19 nt, Artificial Sequence
  Description of Artificial Sequence: Synthetic oligonucleotide
  Antisense strand to SEQ ID NO: 1493592
aaucucacaguaaguuaca

SEQ ID NO: 1493594 - RNA, 19 nt, Artificial Sequence
  Description of Artificial Sequence: Synthetic oligonucleotide
  Sense strand starting at position 484 of SEQ ID NO: 1244503
cccguuauuucggcaguca

SEQ ID NO: 1493595 - RNA, 19 nt, Artificial Sequence
  Description of Artificial Sequence: Synthetic oligonucleotide
  Antisense strand to SEQ ID NO: 1493594
ugacugccgaaauaacggg

SEQ ID NO: 1493596 - RNA, 19 nt, Artificial Sequence
  Description of Artificial Sequence: Synthetic oligonucleotide
  Sense strand starting at position 485 of SEQ ID NO: 1244503
ccguuauuucggcagucag

SEQ ID NO: 1493597 - RNA, 19 nt, Artificial Sequence
  Description of Artificial Sequence: Synthetic oligonucleotide
  Antisense strand to SEQ ID NO: 1493596
cugacugccgaaauaacgg

SEQ ID NO: 1493598 - RNA, 19 nt, Artificial Sequence
  Description of Artificial Sequence: Synthetic oligonucleotide
  Sense strand starting at position 824 of SEQ ID NO: 1244503
gcgguuucuccgucaccca

SEQ ID NO: 1493599 - RNA, 19 nt, Artificial Sequence
  Description of Artificial Sequence: Synthetic oligonucleotide
  Antisense strand to SEQ ID NO: 1493598
ugggugacggagaaaccgc

SEQ ID NO: 1493600 - RNA, 19 nt, Artificial Sequence
  Description of Artificial Sequence: Synthetic oligonucleotide
  Sense strand starting at position 2108 of SEQ ID NO: 1244503
cuggcauucgucuggagga

SEQ ID NO: 1493601 - RNA, 19 nt, Artificial Sequence
  Description of Artificial Sequence: Synthetic oligonucleotide
  Antisense strand to SEQ ID NO: 1493600
uccuccagacgaaugccag

SEQ ID NO: 1493602 - RNA, 19 nt, Artificial Sequence
  Description of Artificial Sequence: Synthetic oligonucleotide
  Sense strand starting at position 2261 of SEQ ID NO: 1244503
gguguuugugugcaaacua

SEQ ID NO: 1493603 - RNA, 19 nt, Artificial Sequence
  Description of Artificial Sequence: Synthetic oligonucleotide
  Antisense strand to SEQ ID NO: 1493602
uaguuugcacacaaacacc

SEQ ID NO: 1493604 - RNA, 19 nt, Artificial Sequence
  Description of Artificial Sequence: Synthetic oligonucleotide
  Sense strand starting at position 2436 of SEQ ID NO: 1244503
ggaguccucaggcaugaac

SEQ ID NO: 1493605 - RNA, 19 nt, Artificial Sequence
  Description of Artificial Sequence: Synthetic oligonucleotide
  Antisense strand to SEQ ID NO: 1493604
guucaugccugaggacucc

SEQ ID NO: 1493606 - RNA, 19 nt, Artificial Sequence
  Description of Artificial Sequence: Synthetic oligonucleotide
  Sense strand starting at position 2506 of SEQ ID NO: 1244503
gcaguauuccuagggaugu

SEQ ID NO: 1493607 - RNA, 19 nt, Artificial Sequence
  Description of Artificial Sequence: Synthetic oligonucleotide
  Antisense strand to SEQ ID NO: 1493606
acaucccuaggaauacugc

SEQ ID NO: 1493608 - RNA, 19 nt, Artificial Sequence
  Description of Artificial Sequence: Synthetic oligonucleotide
  Sense strand starting at position 2510 of SEQ ID NO: 1244503
uauuccuagggauguugua

SEQ ID NO: 1493609 - RNA, 19 nt, Artificial Sequence
  Description of Artificial Sequence: Synthetic oligonucleotide
  Antisense strand to SEQ ID NO: 1493608
uacaacaucccuaggaaua

SEQ ID NO: 1493610 - RNA, 19 nt, Artificial Sequence
  Description of Artificial Sequence: Synthetic oligonucleotide
  Sense strand starting at position 2569 of SEQ ID NO: 1244503
gccaccauauugguaaaga

SEQ ID NO: 1493611 - RNA, 19 nt, Artificial Sequence
  Description of Artificial Sequence: Synthetic oligonucleotide
  Antisense strand to SEQ ID NO: 1493610
ucuuuaccaauaugguggc

SEQ ID NO: 1493612 - RNA, 19 nt, Artificial Sequence
  Description of Artificial Sequence: Synthetic oligonucleotide
  Sense strand starting at position 2632 of SEQ ID NO: 1244503
ggaugacugugguuccuaa

SEQ ID NO: 1493613 - RNA, 19 nt, Artificial Sequence
  Description of Artificial Sequence: Synthetic oligonucleotide
  Antisense strand to SEQ ID NO: 1493612
uuaggaaccacagucaucc

SEQ ID NO: 1493614 - RNA, 19 nt, Artificial Sequence
  Description of Artificial Sequence: Synthetic oligonucleotide
  Sense strand starting at position 2761 of SEQ ID NO: 1244503
ucaccacugucccugagau

SEQ ID NO: 1493615 - RNA, 19 nt, Artificial Sequence
  Description of Artificial Sequence: Synthetic oligonucleotide
  Antisense strand to SEQ ID NO: 1493614
aucucagggacagugguga

SEQ ID NO: 1493616 - RNA, 19 nt, Artificial Sequence
  Description of Artificial Sequence: Synthetic oligonucleotide
  Sense strand starting at position 2763 of SEQ ID NO: 1244503
accacugucccugagaucu

SEQ ID NO: 1493617 - RNA, 19 nt, Artificial Sequence
  Description of Artificial Sequence: Synthetic oligonucleotide
  Antisense strand to SEQ ID NO: 1493616
agaucucagggacaguggu

SEQ ID NO: 1493618 - RNA, 19 nt, Artificial Sequence
  Description of Artificial Sequence: Synthetic oligonucleotide
  Sense strand starting at position 2807 of SEQ ID NO: 1244503
gagaguuuguaauccugac

SEQ ID NO: 1493619 - RNA, 19 nt, Artificial Sequence
  Description of Artificial Sequence: Synthetic oligonucleotide
  Antisense strand to SEQ ID NO: 1493618
gucaggauuacaaacucuc

SEQ ID NO: 1493620 - RNA, 19 nt, Artificial Sequence
  Description of Artificial Sequence: Synthetic oligonucleotide
  Sense strand starting at position 2811 of SEQ ID NO: 1244503
guuuguaauccugacaacg

SEQ ID NO: 1493621 - RNA, 19 nt, Artificial Sequence
  Description of Artificial Sequence: Synthetic oligonucleotide
  Antisense strand to SEQ ID NO: 1493620
cguugucaggauuacaaac

SEQ ID NO: 1493622 - RNA, 19 nt, Artificial Sequence
  Description of Artificial Sequence: Synthetic oligonucleotide
  Sense strand starting at position 2904 of SEQ ID NO: 1244503
cauugcauccugggagcaa

SEQ ID NO: 1493623 - RNA, 19 nt, Artificial Sequence
  Description of Artificial Sequence: Synthetic oligonucleotide
  Antisense strand to SEQ ID NO: 1493622
uugcucccaggaugcaaug

SEQ ID NO: 1493624 - RNA, 19 nt, Artificial Sequence
  Description of Artificial Sequence: Synthetic oligonucleotide
  Sense strand starting at position 2908 of SEQ ID NO: 1244503
gcauccugggagcaagaau

SEQ ID NO: 1493625 - RNA, 19 nt, Artificial Sequence
  Description of Artificial Sequence: Synthetic oligonucleotide
  Antisense strand to SEQ ID NO: 1493624
auucuugcucccaggaugc

SEQ ID NO: 1493626 - RNA, 19 nt, Artificial Sequence
  Description of Artificial Sequence: Synthetic oligonucleotide
  Sense strand starting at position 2915 of SEQ ID NO: 1244503
gggagcaagaaucgcgaua

SEQ ID NO: 1493627 - RNA, 19 nt, Artificial Sequence
  Description of Artificial Sequence: Synthetic oligonucleotide
  Antisense strand to SEQ ID NO: 1493626
uaucgcgauucuugcuccc

SEQ ID NO: 1493628 - RNA, 19 nt, Artificial Sequence
  Description of Artificial Sequence: Synthetic oligonucleotide
  Sense strand starting at position 2920 of SEQ ID NO: 1244503
caagaaucgcgauaggucu

SEQ ID NO: 1493629 - RNA, 19 nt, Artificial Sequence
  Description of Artificial Sequence: Synthetic oligonucleotide
  Antisense strand to SEQ ID NO: 1493628
agaccuaucgcgauucuug

SEQ ID NO: 1493630 - RNA, 19 nt, Artificial Sequence
  Description of Artificial Sequence: Synthetic oligonucleotide
  Sense strand starting at position 2926 of SEQ ID NO: 1244503
ucgcgauaggucugaugga

SEQ ID NO: 1493631 - RNA, 19 nt, Artificial Sequence
  Description of Artificial Sequence: Synthetic oligonucleotide
  Antisense strand to SEQ ID NO: 1493630
uccaucagaccuaucgcga

SEQ ID NO: 1493632 - RNA, 19 nt, Artificial Sequence
  Description of Artificial Sequence: Synthetic oligonucleotide
  Sense strand starting at position 2934 of SEQ ID NO: 1244503
ggucugauggauuguggga

SEQ ID NO: 1493633 - RNA, 19 nt, Artificial Sequence
  Description of Artificial Sequence: Synthetic oligonucleotide
  Antisense strand to SEQ ID NO: 1493632
ucccacaauccaucagacc

SEQ ID NO: 1493634 - RNA, 19 nt, Artificial Sequence
  Description of Artificial Sequence: Synthetic oligonucleotide
  Sense strand starting at position 2970 of SEQ ID NO: 1244503
gugcgaugcacucuauggu

SEQ ID NO: 1493635 - RNA, 19 nt, Artificial Sequence
  Description of Artificial Sequence: Synthetic oligonucleotide
  Antisense strand to SEQ ID NO: 1493634
accauagagugcaucgcac

SEQ ID NO: 1493636 - RNA, 19 nt, Artificial Sequence
  Description of Artificial Sequence: Synthetic oligonucleotide
  Sense strand starting at position 2971 of SEQ ID NO: 1244503
ugcgaugcacucuauggua

SEQ ID NO: 1493637 - RNA, 19 nt, Artificial Sequence
  Description of Artificial Sequence: Synthetic oligonucleotide
  Antisense strand to SEQ ID NO: 1493636
uaccauagagugcaucgca

SEQ ID NO: 1493638 - RNA, 19 nt, Artificial Sequence
  Description of Artificial Sequence: Synthetic oligonucleotide
  Sense strand starting at position 2978 of SEQ ID NO: 1244503
cacucuaugguaggauaga

SEQ ID NO: 1493639 - RNA, 19 nt, Artificial Sequence
  Description of Artificial Sequence: Synthetic oligonucleotide
  Antisense strand to SEQ ID NO: 1493638
ucuauccuaccauagagug

SEQ ID NO: 1493640 - RNA, 19 nt, Artificial Sequence
  Description of Artificial Sequence: Synthetic oligonucleotide
  Sense strand starting at position 3138 of SEQ ID NO: 1244503
ugguauugccgucagagau

SEQ ID NO: 1493641 - RNA, 19 nt, Artificial Sequence
  Description of Artificial Sequence: Synthetic oligonucleotide
  Antisense strand to SEQ ID NO: 1493640
aucucugacggcaauacca

SEQ ID NO: 1493642 - RNA, 19 nt, Artificial Sequence
  Description of Artificial Sequence: Synthetic oligonucleotide
  Sense strand starting at position 3209 of SEQ ID NO: 1244503
uguaucguugugcuugaca

SEQ ID NO: 1493643 - RNA, 19 nt, Artificial Sequence
  Description of Artificial Sequence: Synthetic oligonucleotide
  Antisense strand to SEQ ID NO: 1493642
ugucaagcacaacgauaca

SEQ ID NO: 1493644 - RNA, 19 nt, Artificial Sequence
  Description of Artificial Sequence: Synthetic oligonucleotide
  Sense strand starting at position 3212 of SEQ ID NO: 1244503
aucguugugcuugacacua

SEQ ID NO: 1493645 - RNA, 19 nt, Artificial Sequence
  Description of Artificial Sequence: Synthetic oligonucleotide
  Antisense strand to SEQ ID NO: 1493644
uagugucaagcacaacgau

SEQ ID NO: 1493646 - RNA, 19 nt, Artificial Sequence
  Description of Artificial Sequence: Synthetic oligonucleotide
  Sense strand starting at position 3289 of SEQ ID NO: 1244503
gacacagcauucucagagu

SEQ ID NO: 1493647 - RNA, 19 nt, Artificial Sequence
  Description of Artificial Sequence: Synthetic oligonucleotide
  Antisense strand to SEQ ID NO: 1493646
acucugagaaugcuguguc

SEQ ID NO: 1493648 - RNA, 19 nt, Artificial Sequence
  Description of Artificial Sequence: Synthetic oligonucleotide
  Sense strand starting at position 3298 of SEQ ID NO: 1244503
uucucagagucgucaaacu

SEQ ID NO: 1493649 - RNA, 19 nt, Artificial Sequence
  Description of Artificial Sequence: Synthetic oligonucleotide
  Antisense strand to SEQ ID NO: 1493648
aguuugacgacucugagaa

SEQ ID NO: 1493650 - RNA, 19 nt, Artificial Sequence
  Description of Artificial Sequence: Synthetic oligonucleotide
  Sense strand starting at position 3374 of SEQ ID NO: 1244503
cgcagugauuugccuaggu

SEQ ID NO: 1493651 - RNA, 19 nt, Artificial Sequence
  Description of Artificial Sequence: Synthetic oligonucleotide
  Antisense strand to SEQ ID NO: 1493650
accuaggcaaaucacugcg

SEQ ID NO: 1493652 - RNA, 19 nt, Artificial Sequence
  Description of Artificial Sequence: Synthetic oligonucleotide
  Sense strand starting at position 3467 of SEQ ID NO: 1244503
gucgacugugucuaaggaa

SEQ ID NO: 1493653 - RNA, 19 nt, Artificial Sequence
  Description of Artificial Sequence: Synthetic oligonucleotide
  Antisense strand to SEQ ID NO: 1493652
uuccuuagacacagucgac

SEQ ID NO: 1493654 - RNA, 19 nt, Artificial Sequence
  Description of Artificial Sequence: Synthetic oligonucleotide
  Sense strand starting at position 3507 of SEQ ID NO: 1244503
caguaaggaggaugaguua

SEQ ID NO: 1493655 - RNA, 19 nt, Artificial Sequence
  Description of Artificial Sequence: Synthetic oligonucleotide
  Antisense strand to SEQ ID NO: 1493654
uaacucauccuccuuacug

SEQ ID NO: 1493656 - RNA, 19 nt, Artificial Sequence
  Description of Artificial Sequence: Synthetic oligonucleotide
  Sense strand starting at position 3595 of SEQ ID NO: 1244503
cccucuuggugccuggaaa

SEQ ID NO: 1493657 - RNA, 19 nt, Artificial Sequence
  Description of Artificial Sequence: Synthetic oligonucleotide
  Antisense strand to SEQ ID NO: 1493656
uuuccaggcaccaagaggg

SEQ ID NO: 1493658 - RNA, 19 nt, Artificial Sequence
  Description of Artificial Sequence: Synthetic oligonucleotide
  Sense strand starting at position 3747 of SEQ ID NO: 1244503
ugagcuagauuguuuguau

SEQ ID NO: 1493659 - RNA, 19 nt, Artificial Sequence
  Description of Artificial Sequence: Synthetic oligonucleotide
  Antisense strand to SEQ ID NO: 1493658
auacaaacaaucuagcuca

SEQ ID NO: 1493660 - RNA, 19 nt, Artificial Sequence
  Description of Artificial Sequence: Synthetic oligonucleotide
  Sense strand starting at position 3748 of SEQ ID NO: 1244503
gagcuagauuguuuguaug

SEQ ID NO: 1493661 - RNA, 19 nt, Artificial Sequence
  Description of Artificial Sequence: Synthetic oligonucleotide
  Antisense strand to SEQ ID NO: 1493660
cauacaaacaaucuagcuc

SEQ ID NO: 1493662 - RNA, 19 nt, Artificial Sequence
  Description of Artificial Sequence: Synthetic oligonucleotide
  Sense strand starting at position 3750 of SEQ ID NO: 1244503
gcuagauuguuuguaugaa

SEQ ID NO: 1493663 - RNA, 19 nt, Artificial Sequence
  Description of Artificial Sequence: Synthetic oligonucleotide
  Antisense strand to SEQ ID NO: 1493662
uucauacaaacaaucuagc

SEQ ID NO: 1493664 - RNA, 19 nt, Artificial Sequence
  Description of Artificial Sequence: Synthetic oligonucleotide
  Sense strand starting at position 3758 of SEQ ID NO: 1244503
guuuguaugaaagaggcaa

SEQ ID NO: 1493665 - RNA, 19 nt, Artificial Sequence
  Description of Artificial Sequence: Synthetic oligonucleotide
  Antisense strand to SEQ ID NO: 1493664
uugccucuuucauacaaac

SEQ ID NO: 1493666 - RNA, 19 nt, Artificial Sequence
  Description of Artificial Sequence: Synthetic oligonucleotide
  Sense strand starting at position 3879 of SEQ ID NO: 1244503
agcugugcugcuguguuaa

SEQ ID NO: 1493667 - RNA, 19 nt, Artificial Sequence
  Description of Artificial Sequence: Synthetic oligonucleotide
  Antisense strand to SEQ ID NO: 1493666
uuaacacagcagcacagcu

SEQ ID NO: 1493668 - RNA, 19 nt, Artificial Sequence
  Description of Artificial Sequence: Synthetic oligonucleotide
  Sense strand starting at position 3892 of SEQ ID NO: 1244503
uguuaaccuggaggcauua

SEQ ID NO: 1493669 - RNA, 19 nt, Artificial Sequence
  Description of Artificial Sequence: Synthetic oligonucleotide
  Antisense strand to SEQ ID NO: 1493668
uaaugccuccagguuaaca

SEQ ID NO: 1493670 - RNA, 19 nt, Artificial Sequence
  Description of Artificial Sequence: Synthetic oligonucleotide
  Sense strand starting at position 3934 of SEQ ID NO: 1244503
gcauccauccacuggacaa

SEQ ID NO: 1493671 - RNA, 19 nt, Artificial Sequence
  Description of Artificial Sequence: Synthetic oligonucleotide
  Antisense strand to SEQ ID NO: 1493670
uuguccaguggauggaugc

SEQ ID NO: 1493672 - RNA, 19 nt, Artificial Sequence
  Description of Artificial Sequence: Synthetic oligonucleotide
  Sense strand starting at position 3975 of SEQ ID NO: 1244503
ucaauugcagcugauaaua

SEQ ID NO: 1493673 - RNA, 19 nt, Artificial Sequence
  Description of Artificial Sequence: Synthetic oligonucleotide
  Antisense strand to SEQ ID NO: 1493672
uauuaucagcugcaauuga

SEQ ID NO: 1493674 - RNA, 19 nt, Artificial Sequence
  Description of Artificial Sequence: Synthetic oligonucleotide
  Sense strand starting at position 3 of SEQ ID NO: 1244504
agccacacaguuuaagaau

SEQ ID NO: 1493675 - RNA, 19 nt, Artificial Sequence
  Description of Artificial Sequence: Synthetic oligonucleotide
  Antisense strand to SEQ ID NO: 1493674
auucuuaaacuguguggcu

SEQ ID NO: 1493676 - RNA, 19 nt, Artificial Sequence
  Description of Artificial Sequence: Synthetic oligonucleotide
  Sense strand starting at position 9 of SEQ ID NO: 1244504
acaguuuaagaauggcauu

SEQ ID NO: 1493677 - RNA, 19 nt, Artificial Sequence
  Description of Artificial Sequence: Synthetic oligonucleotide
  Antisense strand to SEQ ID NO: 1493676
aaugccauucuuaaacugu

SEQ ID NO: 1493678 - RNA, 19 nt, Artificial Sequence
  Description of Artificial Sequence: Synthetic oligonucleotide
  Sense strand starting at position 187 of SEQ ID NO: 1244504
uaggaacaaucuguguaaa

SEQ ID NO: 1493679 - RNA, 19 nt, Artificial Sequence
  Description of Artificial Sequence: Synthetic oligonucleotide
  Antisense strand to SEQ ID NO: 1493678
uuuacacagauuguuccua

SEQ ID NO: 1493680 - RNA, 19 nt, Artificial Sequence
  Description of Artificial Sequence: Synthetic oligonucleotide
  Sense strand starting at position 1113 of SEQ ID NO: 1244504
cgacaagucgccggucuua

SEQ ID NO: 1493681 - RNA, 19 nt, Artificial Sequence
  Description of Artificial Sequence: Synthetic oligonucleotide
  Antisense strand to SEQ ID NO: 1493680
uaagaccggcgacuugucg

SEQ ID NO: 1493682 - RNA, 19 nt, Artificial Sequence
  Description of Artificial Sequence: Synthetic oligonucleotide
  Sense strand starting at position 1222 of SEQ ID NO: 1244504
guccgucugccguagacaa

SEQ ID NO: 1493683 - RNA, 19 nt, Artificial Sequence
  Description of Artificial Sequence: Synthetic oligonucleotide
  Antisense strand to SEQ ID NO: 1493682
uugucuacggcagacggac

SEQ ID NO: 1493684 - RNA, 19 nt, Artificial Sequence
  Description of Artificial Sequence: Synthetic oligonucleotide
  Sense strand starting at position 1224 of SEQ ID NO: 1244504
ccgucugccguagacaaua

SEQ ID NO: 1493685 - RNA, 19 nt, Artificial Sequence
  Description of Artificial Sequence: Synthetic oligonucleotide
  Antisense strand to SEQ ID NO: 1493684
uauugucuacggcagacgg

SEQ ID NO: 1493686 - RNA, 19 nt, Artificial Sequence
  Description of Artificial Sequence: Synthetic oligonucleotide
  Sense strand starting at position 1284 of SEQ ID NO: 1244504
ccgacaaucaccgggcauu

SEQ ID NO: 1493687 - RNA, 19 nt, Artificial Sequence
  Description of Artificial Sequence: Synthetic oligonucleotide
  Antisense strand to SEQ ID NO: 1493686
aaugcccggugauugucgg

SEQ ID NO: 1493688 - RNA, 19 nt, Artificial Sequence
  Description of Artificial Sequence: Synthetic oligonucleotide
  Sense strand starting at position 1296 of SEQ ID NO: 1244504
gggcauucuccggcggcaa

SEQ ID NO: 1493689 - RNA, 19 nt, Artificial Sequence
  Description of Artificial Sequence: Synthetic oligonucleotide
  Antisense strand to SEQ ID NO: 1493688
uugccgccggagaaugccc

SEQ ID NO: 1493690 - RNA, 19 nt, Artificial Sequence
  Description of Artificial Sequence: Synthetic oligonucleotide
  Sense strand starting at position 1531 of SEQ ID NO: 1244504
accgucugaucuccaacua

SEQ ID NO: 1493691 - RNA, 19 nt, Artificial Sequence
  Description of Artificial Sequence: Synthetic oligonucleotide
  Antisense strand to SEQ ID NO: 1493690
uaguuggagaucagacggu

SEQ ID NO: 1493692 - RNA, 19 nt, Artificial Sequence
  Description of Artificial Sequence: Synthetic oligonucleotide
  Sense strand starting at position 1856 of SEQ ID NO: 1244504
acugcuucgcuccacagaa

SEQ ID NO: 1493693 - RNA, 19 nt, Artificial Sequence
  Description of Artificial Sequence: Synthetic oligonucleotide
  Antisense strand to SEQ ID NO: 1493692
uucuguggagcgaagcagu

SEQ ID NO: 1493694 - RNA, 19 nt, Artificial Sequence
  Description of Artificial Sequence: Synthetic oligonucleotide
  Sense strand starting at position 2304 of SEQ ID NO: 1244504
agaacucucggccaccaua

SEQ ID NO: 1493695 - RNA, 19 nt, Artificial Sequence
  Description of Artificial Sequence: Synthetic oligonucleotide
  Antisense strand to SEQ ID NO: 1493694
uaugguggccgagaguucu

SEQ ID NO: 1493696 - RNA, 19 nt, Artificial Sequence
  Description of Artificial Sequence: Synthetic oligonucleotide
  Sense strand starting at position 2382 of SEQ ID NO: 1244504
agaaaugauugcugggagu

SEQ ID NO: 1493697 - RNA, 19 nt, Artificial Sequence
  Description of Artificial Sequence: Synthetic oligonucleotide
  Antisense strand to SEQ ID NO: 1493696
acucccagcaaucauuucu

SEQ ID NO: 1493698 - RNA, 19 nt, Artificial Sequence
  Description of Artificial Sequence: Synthetic oligonucleotide
  Sense strand starting at position 2384 of SEQ ID NO: 1244504
aaaugauugcugggaguug

SEQ ID NO: 1493699 - RNA, 19 nt, Artificial Sequence
  Description of Artificial Sequence: Synthetic oligonucleotide
  Antisense strand to SEQ ID NO: 1493698
caacucccagcaaucauuu

SEQ ID NO: 1493700 - RNA, 19 nt, Artificial Sequence
  Description of Artificial Sequence: Synthetic oligonucleotide
  Sense strand starting at position 2385 of SEQ ID NO: 1244504
aaugauugcugggaguuga

SEQ ID NO: 1493701 - RNA, 19 nt, Artificial Sequence
  Description of Artificial Sequence: Synthetic oligonucleotide
  Antisense strand to SEQ ID NO: 1493700
ucaacucccagcaaucauu

SEQ ID NO: 1493702 - RNA, 19 nt, Artificial Sequence
  Description of Artificial Sequence: Synthetic oligonucleotide
  Sense strand starting at position 2389 of SEQ ID NO: 1244504
auugcugggaguugaagua

SEQ ID NO: 1493703 - RNA, 19 nt, Artificial Sequence
  Description of Artificial Sequence: Synthetic oligonucleotide
  Antisense strand to SEQ ID NO: 1493702
uacuucaacucccagcaau

SEQ ID NO: 1493704 - RNA, 19 nt, Artificial Sequence
  Description of Artificial Sequence: Synthetic oligonucleotide
  Sense strand starting at position 2399 of SEQ ID NO: 1244504
guugaaguauuccuggcga

SEQ ID NO: 1493705 - RNA, 19 nt, Artificial Sequence
  Description of Artificial Sequence: Synthetic oligonucleotide
  Antisense strand to SEQ ID NO: 1493704
ucgccaggaauacuucaac

SEQ ID NO: 1493706 - RNA, 19 nt, Artificial Sequence
  Description of Artificial Sequence: Synthetic oligonucleotide
  Sense strand starting at position 2401 of SEQ ID NO: 1244504
ugaaguauuccuggcgaua

SEQ ID NO: 1493707 - RNA, 19 nt, Artificial Sequence
  Description of Artificial Sequence: Synthetic oligonucleotide
  Antisense strand to SEQ ID NO: 1493706
uaucgccaggaauacuuca

SEQ ID NO: 1493708 - RNA, 19 nt, Artificial Sequence
  Description of Artificial Sequence: Synthetic oligonucleotide
  Sense strand starting at position 2404 of SEQ ID NO: 1244504
aguauuccuggcgauaaug

SEQ ID NO: 1493709 - RNA, 19 nt, Artificial Sequence
  Description of Artificial Sequence: Synthetic oligonucleotide
  Antisense strand to SEQ ID NO: 1493708
cauuaucgccaggaauacu

SEQ ID NO: 1493710 - RNA, 19 nt, Artificial Sequence
  Description of Artificial Sequence: Synthetic oligonucleotide
  Sense strand starting at position 2496 of SEQ ID NO: 1244504
gugacaugcaacugagaac

SEQ ID NO: 1493711 - RNA, 19 nt, Artificial Sequence
  Description of Artificial Sequence: Synthetic oligonucleotide
  Antisense strand to SEQ ID NO: 1493710
guucucaguugcaugucac

SEQ ID NO: 1493712 - RNA, 19 nt, Artificial Sequence
  Description of Artificial Sequence: Synthetic oligonucleotide
  Sense strand starting at position 2550 of SEQ ID NO: 1244504
uaguuagaauguucuagca

SEQ ID NO: 1493713 - RNA, 19 nt, Artificial Sequence
  Description of Artificial Sequence: Synthetic oligonucleotide
  Antisense strand to SEQ ID NO: 1493712
ugcuagaacauucuaacua

SEQ ID NO: 1493714 - RNA, 19 nt, Artificial Sequence
  Description of Artificial Sequence: Synthetic oligonucleotide
  Sense strand starting at position 2559 of SEQ ID NO: 1244504
uguucuagcaaauguggau

SEQ ID NO: 1493715 - RNA, 19 nt, Artificial Sequence
  Description of Artificial Sequence: Synthetic oligonucleotide
  Antisense strand to SEQ ID NO: 1493714
auccacauuugcuagaaca

SEQ ID NO: 1493716 - RNA, 19 nt, Artificial Sequence
  Description of Artificial Sequence: Synthetic oligonucleotide
  Sense strand starting at position 2667 of SEQ ID NO: 1244504
guuucacaugcguguuaua

SEQ ID NO: 1493717 - RNA, 19 nt, Artificial Sequence
  Description of Artificial Sequence: Synthetic oligonucleotide
  Antisense strand to SEQ ID NO: 1493716
uauaacacgcaugugaaac

SEQ ID NO: 1493718 - RNA, 19 nt, Artificial Sequence
  Description of Artificial Sequence: Synthetic oligonucleotide
  Sense strand starting at position 2810 of SEQ ID NO: 1244504
gcuuguacccaguacucuu

SEQ ID NO: 1493719 - RNA, 19 nt, Artificial Sequence
  Description of Artificial Sequence: Synthetic oligonucleotide
  Antisense strand to SEQ ID NO: 1493718
aagaguacuggguacaagc

SEQ ID NO: 1493720 - RNA, 19 nt, Artificial Sequence
  Description of Artificial Sequence: Synthetic oligonucleotide
  Sense strand starting at position 2922 of SEQ ID NO: 1244504
gugguuuccucuuuauuga

SEQ ID NO: 1493721 - RNA, 19 nt, Artificial Sequence
  Description of Artificial Sequence: Synthetic oligonucleotide
  Antisense strand to SEQ ID NO: 1493720
ucaauaaagaggaaaccac

SEQ ID NO: 1493722 - RNA, 19 nt, Artificial Sequence
  Description of Artificial Sequence: Synthetic oligonucleotide
  Sense strand starting at position 2923 of SEQ ID NO: 1244504
ugguuuccucuuuauugau

SEQ ID NO: 1493723 - RNA, 19 nt, Artificial Sequence
  Description of Artificial Sequence: Synthetic oligonucleotide
  Antisense strand to SEQ ID NO: 1493722
aucaauaaagaggaaacca

SEQ ID NO: 1493724 - RNA, 19 nt, Artificial Sequence
  Description of Artificial Sequence: Synthetic oligonucleotide
  Sense strand starting at position 3153 of SEQ ID NO: 1244504
aaaggagaguuacaagaug

SEQ ID NO: 1493725 - RNA, 19 nt, Artificial Sequence
  Description of Artificial Sequence: Synthetic oligonucleotide
  Antisense strand to SEQ ID NO: 1493724
caucuuguaacucuccuuu

SEQ ID NO: 1493726 - RNA, 19 nt, Artificial Sequence
  Description of Artificial Sequence: Synthetic oligonucleotide
  Sense strand starting at position 3252 of SEQ ID NO: 1244504
ggugguguuugagcuugaa

SEQ ID NO: 1493727 - RNA, 19 nt, Artificial Sequence
  Description of Artificial Sequence: Synthetic oligonucleotide
  Antisense strand to SEQ ID NO: 1493726
uucaagcucaaacaccacc

SEQ ID NO: 1493728 - RNA, 19 nt, Artificial Sequence
  Description of Artificial Sequence: Synthetic oligonucleotide
  Sense strand starting at position 3255 of SEQ ID NO: 1244504
gguguuugagcuugaagga

SEQ ID NO: 1493729 - RNA, 19 nt, Artificial Sequence
  Description of Artificial Sequence: Synthetic oligonucleotide
  Antisense strand to SEQ ID NO: 1493728
uccuucaagcucaaacacc

SEQ ID NO: 1493730 - RNA, 19 nt, Artificial Sequence
  Description of Artificial Sequence: Synthetic oligonucleotide
  Sense strand starting at position 3359 of SEQ ID NO: 1244504
agacacuuucgucacugua

SEQ ID NO: 1493731 - RNA, 19 nt, Artificial Sequence
  Description of Artificial Sequence: Synthetic oligonucleotide
  Antisense strand to SEQ ID NO: 1493730
uacagugacgaaagugucu

SEQ ID NO: 1493732 - RNA, 19 nt, Artificial Sequence
  Description of Artificial Sequence: Synthetic oligonucleotide
  Sense strand starting at position 3404 of SEQ ID NO: 1244504
caugguguuccugggauga

SEQ ID NO: 1493733 - RNA, 19 nt, Artificial Sequence
  Description of Artificial Sequence: Synthetic oligonucleotide
  Antisense strand to SEQ ID NO: 1493732
ucaucccaggaacaccaug

SEQ ID NO: 1493734 - RNA, 19 nt, Artificial Sequence
  Description of Artificial Sequence: Synthetic oligonucleotide
  Sense strand starting at position 3406 of SEQ ID NO: 1244504
ugguguuccugggaugaaa

SEQ ID NO: 1493735 - RNA, 19 nt, Artificial Sequence
  Description of Artificial Sequence: Synthetic oligonucleotide
  Antisense strand to SEQ ID NO: 1493734
uuucaucccaggaacacca

SEQ ID NO: 1493736 - RNA, 19 nt, Artificial Sequence
  Description of Artificial Sequence: Synthetic oligonucleotide
  Sense strand starting at position 3475 of SEQ ID NO: 1244504
ccagacacguucuucuaga

SEQ ID NO: 1493737 - RNA, 19 nt, Artificial Sequence
  Description of Artificial Sequence: Synthetic oligonucleotide
  Antisense strand to SEQ ID NO: 1493736
ucuagaagaacgugucugg

SEQ ID NO: 1493738 - RNA, 19 nt, Artificial Sequence
  Description of Artificial Sequence: Synthetic oligonucleotide
  Sense strand starting at position 3476 of SEQ ID NO: 1244504
cagacacguucuucuagaa

SEQ ID NO: 1493739 - RNA, 19 nt, Artificial Sequence
  Description of Artificial Sequence: Synthetic oligonucleotide
  Antisense strand to SEQ ID NO: 1493738
uucuagaagaacgugucug

SEQ ID NO: 1493740 - RNA, 19 nt, Artificial Sequence
  Description of Artificial Sequence: Synthetic oligonucleotide
  Sense strand starting at position 3545 of SEQ ID NO: 1244504
gcaguauaaucucugcagu

SEQ ID NO: 1493741 - RNA, 19 nt, Artificial Sequence
  Description of Artificial Sequence: Synthetic oligonucleotide
  Antisense strand to SEQ ID NO: 1493740
acugcagagauuauacugc

SEQ ID NO: 1493742 - RNA, 19 nt, Artificial Sequence
  Description of Artificial Sequence: Synthetic oligonucleotide
  Sense strand starting at position 3548 of SEQ ID NO: 1244504
guauaaucucugcaguccu

SEQ ID NO: 1493743 - RNA, 19 nt, Artificial Sequence
  Description of Artificial Sequence: Synthetic oligonucleotide
  Antisense strand to SEQ ID NO: 1493742
aggacugcagagauuauac

SEQ ID NO: 1493744 - RNA, 19 nt, Artificial Sequence
  Description of Artificial Sequence: Synthetic oligonucleotide
  Sense strand starting at position 3634 of SEQ ID NO: 1244504
acagauaguuucucuagcu

SEQ ID NO: 1493745 - RNA, 19 nt, Artificial Sequence
  Description of Artificial Sequence: Synthetic oligonucleotide
  Antisense strand to SEQ ID NO: 1493744
agcuagagaaacuaucugu

SEQ ID NO: 1493746 - RNA, 19 nt, Artificial Sequence
  Description of Artificial Sequence: Synthetic oligonucleotide
  Sense strand starting at position 3678 of SEQ ID NO: 1244504
uccuacuguucuguccaaa

SEQ ID NO: 1493747 - RNA, 19 nt, Artificial Sequence
  Description of Artificial Sequence: Synthetic oligonucleotide
  Antisense strand to SEQ ID NO: 1493746
uuuggacagaacaguagga

SEQ ID NO: 1493748 - RNA, 19 nt, Artificial Sequence
  Description of Artificial Sequence: Synthetic oligonucleotide
  Sense strand starting at position 3703 of SEQ ID NO: 1244504
acccacggcuauuaugaaa

SEQ ID NO: 1493749 - RNA, 19 nt, Artificial Sequence
  Description of Artificial Sequence: Synthetic oligonucleotide
  Antisense strand to SEQ ID NO: 1493748
uuucauaauagccgugggu

SEQ ID NO: 1493750 - RNA, 19 nt, Artificial Sequence
  Description of Artificial Sequence: Synthetic oligonucleotide
  Sense strand starting at position 3868 of SEQ ID NO: 1244504
guggaaugacauuguugac

SEQ ID NO: 1493751 - RNA, 19 nt, Artificial Sequence
  Description of Artificial Sequence: Synthetic oligonucleotide
  Antisense strand to SEQ ID NO: 1493750
gucaacaaugucauuccac

SEQ ID NO: 1493752 - RNA, 19 nt, Artificial Sequence
  Description of Artificial Sequence: Synthetic oligonucleotide
  Sense strand starting at position 3874 of SEQ ID NO: 1244504
ugacauuguugacaaagaa

SEQ ID NO: 1493753 - RNA, 19 nt, Artificial Sequence
  Description of Artificial Sequence: Synthetic oligonucleotide
  Antisense strand to SEQ ID NO: 1493752
uucuuugucaacaauguca

SEQ ID NO: 1493754 - RNA, 19 nt, Artificial Sequence
  Description of Artificial Sequence: Synthetic oligonucleotide
  Sense strand starting at position 2 of SEQ ID NO: 1244505
gcauguccucuugaccagu

SEQ ID NO: 1493755 - RNA, 19 nt, Artificial Sequence
  Description of Artificial Sequence: Synthetic oligonucleotide
  Antisense strand to SEQ ID NO: 1493754
acuggucaagaggacaugc

SEQ ID NO: 1493756 - RNA, 19 nt, Artificial Sequence
  Description of Artificial Sequence: Synthetic oligonucleotide
  Sense strand starting at position 10 of SEQ ID NO: 1244505
ucuugaccaguccguguua

SEQ ID NO: 1493757 - RNA, 19 nt, Artificial Sequence
  Description of Artificial Sequence: Synthetic oligonucleotide
  Antisense strand to SEQ ID NO: 1493756
uaacacggacuggucaaga

SEQ ID NO: 1493758 - RNA, 19 nt, Artificial Sequence
  Description of Artificial Sequence: Synthetic oligonucleotide
  Sense strand starting at position 105 of SEQ ID NO: 1244505
ccguuauguccuuagcucu

SEQ ID NO: 1493759 - RNA, 19 nt, Artificial Sequence
  Description of Artificial Sequence: Synthetic oligonucleotide
  Antisense strand to SEQ ID NO: 1493758
agagcuaaggacauaacgg

SEQ ID NO: 1493760 - RNA, 19 nt, Artificial Sequence
  Description of Artificial Sequence: Synthetic oligonucleotide
  Sense strand starting at position 127 of SEQ ID NO: 1244505
ucuguauagccucauuugu

SEQ ID NO: 1493761 - RNA, 19 nt, Artificial Sequence
  Description of Artificial Sequence: Synthetic oligonucleotide
  Antisense strand to SEQ ID NO: 1493760
acaaaugaggcuauacaga

SEQ ID NO: 1493762 - RNA, 19 nt, Artificial Sequence
  Description of Artificial Sequence: Synthetic oligonucleotide
  Sense strand starting at position 129 of SEQ ID NO: 1244505
uguauagccucauuuguua

SEQ ID NO: 1493763 - RNA, 19 nt, Artificial Sequence
  Description of Artificial Sequence: Synthetic oligonucleotide
  Antisense strand to SEQ ID NO: 1493762
uaacaaaugaggcuauaca

SEQ ID NO: 1493764 - RNA, 19 nt, Artificial Sequence
  Description of Artificial Sequence: Synthetic oligonucleotide
  Sense strand starting at position 380 of SEQ ID NO: 1244505
acaguucuguuugaacaac

SEQ ID NO: 1493765 - RNA, 19 nt, Artificial Sequence
  Description of Artificial Sequence: Synthetic oligonucleotide
  Antisense strand to SEQ ID NO: 1493764
guuguucaaacagaacugu

SEQ ID NO: 1493766 - RNA, 19 nt, Artificial Sequence
  Description of Artificial Sequence: Synthetic oligonucleotide
  Sense strand starting at position 425 of SEQ ID NO: 1244505
gccucaagucaguaauucu

SEQ ID NO: 1493767 - RNA, 19 nt, Artificial Sequence
  Description of Artificial Sequence: Synthetic oligonucleotide
  Antisense strand to SEQ ID NO: 1493766
agaauuacugacuugaggc

SEQ ID NO: 1493768 - RNA, 19 nt, Artificial Sequence
  Description of Artificial Sequence: Synthetic oligonucleotide
  Sense strand starting at position 499 of SEQ ID NO: 1244505
ugcagaauuuguugaaauc

SEQ ID NO: 1493769 - RNA, 19 nt, Artificial Sequence
  Description of Artificial Sequence: Synthetic oligonucleotide
  Antisense strand to SEQ ID NO: 1493768
gauuucaacaaauucugca

SEQ ID NO: 1493770 - RNA, 19 nt, Artificial Sequence
  Description of Artificial Sequence: Synthetic oligonucleotide
  Sense strand starting at position 560 of SEQ ID NO: 1244505
agauauggaucacaugcaa

SEQ ID NO: 1493771 - RNA, 19 nt, Artificial Sequence
  Description of Artificial Sequence: Synthetic oligonucleotide
  Antisense strand to SEQ ID NO: 1493770
uugcaugugauccauaucu

SEQ ID NO: 1493772 - RNA, 19 nt, Artificial Sequence
  Description of Artificial Sequence: Synthetic oligonucleotide
  Sense strand starting at position 579 of SEQ ID NO: 1244505
agccacacaguuuaagaau

SEQ ID NO: 1493773 - RNA, 19 nt, Artificial Sequence
  Description of Artificial Sequence: Synthetic oligonucleotide
  Antisense strand to SEQ ID NO: 1493772
auucuuaaacuguguggcu

SEQ ID NO: 1493774 - RNA, 19 nt, Artificial Sequence
  Description of Artificial Sequence: Synthetic oligonucleotide
  Sense strand starting at position 585 of SEQ ID NO: 1244505
acaguuuaagaauggcauu

SEQ ID NO: 1493775 - RNA, 19 nt, Artificial Sequence
  Description of Artificial Sequence: Synthetic oligonucleotide
  Antisense strand to SEQ ID NO: 1493774
aaugccauucuuaaacugu

SEQ ID NO: 1493776 - RNA, 19 nt, Artificial Sequence
  Description of Artificial Sequence: Synthetic oligonucleotide
  Sense strand starting at position 763 of SEQ ID NO: 1244505
uaggaacaaucuguguaaa

SEQ ID NO: 1493777 - RNA, 19 nt, Artificial Sequence
  Description of Artificial Sequence: Synthetic oligonucleotide
  Antisense strand to SEQ ID NO: 1493776
uuuacacagauuguuccua

SEQ ID NO: 1493778 - RNA, 19 nt, Artificial Sequence
  Description of Artificial Sequence: Synthetic oligonucleotide
  Sense strand starting at position 1689 of SEQ ID NO: 1244505
cgacaagucgccggucuua

SEQ ID NO: 1493779 - RNA, 19 nt, Artificial Sequence
  Description of Artificial Sequence: Synthetic oligonucleotide
  Antisense strand to SEQ ID NO: 1493778
uaagaccggcgacuugucg

SEQ ID NO: 1493780 - RNA, 19 nt, Artificial Sequence
  Description of Artificial Sequence: Synthetic oligonucleotide
  Sense strand starting at position 1798 of SEQ ID NO: 1244505
guccgucugccguagacaa

SEQ ID NO: 1493781 - RNA, 19 nt, Artificial Sequence
  Description of Artificial Sequence: Synthetic oligonucleotide
  Antisense strand to SEQ ID NO: 1493780
uugucuacggcagacggac

SEQ ID NO: 1493782 - RNA, 19 nt, Artificial Sequence
  Description of Artificial Sequence: Synthetic oligonucleotide
  Sense strand starting at position 1800 of SEQ ID NO: 1244505
ccgucugccguagacaaua

SEQ ID NO: 1493783 - RNA, 19 nt, Artificial Sequence
  Description of Artificial Sequence: Synthetic oligonucleotide
  Antisense strand to SEQ ID NO: 1493782
uauugucuacggcagacgg

SEQ ID NO: 1493784 - RNA, 19 nt, Artificial Sequence
  Description of Artificial Sequence: Synthetic oligonucleotide
  Sense strand starting at position 1860 of SEQ ID NO: 1244505
ccgacaaucaccgggcauu

SEQ ID NO: 1493785 - RNA, 19 nt, Artificial Sequence
  Description of Artificial Sequence: Synthetic oligonucleotide
  Antisense strand to SEQ ID NO: 1493784
aaugcccggugauugucgg

SEQ ID NO: 1493786 - RNA, 19 nt, Artificial Sequence
  Description of Artificial Sequence: Synthetic oligonucleotide
  Sense strand starting at position 1872 of SEQ ID NO: 1244505
gggcauucuccggcggcaa

SEQ ID NO: 1493787 - RNA, 19 nt, Artificial Sequence
  Description of Artificial Sequence: Synthetic oligonucleotide
  Antisense strand to SEQ ID NO: 1493786
uugccgccggagaaugccc

SEQ ID NO: 1493788 - RNA, 19 nt, Artificial Sequence
  Description of Artificial Sequence: Synthetic oligonucleotide
  Sense strand starting at position 2107 of SEQ ID NO: 1244505
accgucugaucuccaacua

SEQ ID NO: 1493789 - RNA, 19 nt, Artificial Sequence
  Description of Artificial Sequence: Synthetic oligonucleotide
  Antisense strand to SEQ ID NO: 1493788
uaguuggagaucagacggu

SEQ ID NO: 1493790 - RNA, 19 nt, Artificial Sequence
  Description of Artificial Sequence: Synthetic oligonucleotide
  Sense strand starting at position 2432 of SEQ ID NO: 1244505
acugcuucgcuccacagaa

SEQ ID NO: 1493791 - RNA, 19 nt, Artificial Sequence
  Description of Artificial Sequence: Synthetic oligonucleotide
  Antisense strand to SEQ ID NO: 1493790
uucuguggagcgaagcagu

SEQ ID NO: 1493792 - RNA, 19 nt, Artificial Sequence
  Description of Artificial Sequence: Synthetic oligonucleotide
  Sense strand starting at position 2880 of SEQ ID NO: 1244505
agaacucucggccaccaua

SEQ ID NO: 1493793 - RNA, 19 nt, Artificial Sequence
  Description of Artificial Sequence: Synthetic oligonucleotide
  Antisense strand to SEQ ID NO: 1493792
uaugguggccgagaguucu

SEQ ID NO: 1493794 - RNA, 19 nt, Artificial Sequence
  Description of Artificial Sequence: Synthetic oligonucleotide
  Sense strand starting at position 2958 of SEQ ID NO: 1244505
agaaaugauugcugggagu

SEQ ID NO: 1493795 - RNA, 19 nt, Artificial Sequence
  Description of Artificial Sequence: Synthetic oligonucleotide
  Antisense strand to SEQ ID NO: 1493794
acucccagcaaucauuucu

SEQ ID NO: 1493796 - RNA, 19 nt, Artificial Sequence
  Description of Artificial Sequence: Synthetic oligonucleotide
  Sense strand starting at position 2960 of SEQ ID NO: 1244505
aaaugauugcugggaguug

SEQ ID NO: 1493797 - RNA, 19 nt, Artificial Sequence
  Description of Artificial Sequence: Synthetic oligonucleotide
  Antisense strand to SEQ ID NO: 1493796
caacucccagcaaucauuu

SEQ ID NO: 1493798 - RNA, 19 nt, Artificial Sequence
  Description of Artificial Sequence: Synthetic oligonucleotide
  Sense strand starting at position 2961 of SEQ ID NO: 1244505
aaugauugcugggaguuga

SEQ ID NO: 1493799 - RNA, 19 nt, Artificial Sequence
  Description of Artificial Sequence: Synthetic oligonucleotide
  Antisense strand to SEQ ID NO: 1493798
ucaacucccagcaaucauu

SEQ ID NO: 1493800 - RNA, 19 nt, Artificial Sequence
  Description of Artificial Sequence: Synthetic oligonucleotide
  Sense strand starting at position 2965 of SEQ ID NO: 1244505
auugcugggaguugaagua

SEQ ID NO: 1493801 - RNA, 19 nt, Artificial Sequence
  Description of Artificial Sequence: Synthetic oligonucleotide
  Antisense strand to SEQ ID NO: 1493800
uacuucaacucccagcaau

SEQ ID NO: 1493802 - RNA, 19 nt, Artificial Sequence
  Description of Artificial Sequence: Synthetic oligonucleotide
  Sense strand starting at position 2975 of SEQ ID NO: 1244505
guugaaguauuccuggcga

SEQ ID NO: 1493803 - RNA, 19 nt, Artificial Sequence
  Description of Artificial Sequence: Synthetic oligonucleotide
  Antisense strand to SEQ ID NO: 1493802
ucgccaggaauacuucaac

SEQ ID NO: 1493804 - RNA, 19 nt, Artificial Sequence
  Description of Artificial Sequence: Synthetic oligonucleotide
  Sense strand starting at position 2977 of SEQ ID NO: 1244505
ugaaguauuccuggcgaua

SEQ ID NO: 1493805 - RNA, 19 nt, Artificial Sequence
  Description of Artificial Sequence: Synthetic oligonucleotide
  Antisense strand to SEQ ID NO: 1493804
uaucgccaggaauacuuca

SEQ ID NO: 1493806 - RNA, 19 nt, Artificial Sequence
  Description of Artificial Sequence: Synthetic oligonucleotide
  Sense strand starting at position 2980 of SEQ ID NO: 1244505
aguauuccuggcgauaaug

SEQ ID NO: 1493807 - RNA, 19 nt, Artificial Sequence
  Description of Artificial Sequence: Synthetic oligonucleotide
  Antisense strand to SEQ ID NO: 1493806
cauuaucgccaggaauacu

SEQ ID NO: 1493808 - RNA, 19 nt, Artificial Sequence
  Description of Artificial Sequence: Synthetic oligonucleotide
  Sense strand starting at position 3072 of SEQ ID NO: 1244505
gugacaugcaacugagaac

SEQ ID NO: 1493809 - RNA, 19 nt, Artificial Sequence
  Description of Artificial Sequence: Synthetic oligonucleotide
  Antisense strand to SEQ ID NO: 1493808
guucucaguugcaugucac

SEQ ID NO: 1493810 - RNA, 19 nt, Artificial Sequence
  Description of Artificial Sequence: Synthetic oligonucleotide
  Sense strand starting at position 3126 of SEQ ID NO: 1244505
uaguuagaauguucuagca

SEQ ID NO: 1493811 - RNA, 19 nt, Artificial Sequence
  Description of Artificial Sequence: Synthetic oligonucleotide
  Antisense strand to SEQ ID NO: 1493810
ugcuagaacauucuaacua

SEQ ID NO: 1493812 - RNA, 19 nt, Artificial Sequence
  Description of Artificial Sequence: Synthetic oligonucleotide
  Sense strand starting at position 3135 of SEQ ID NO: 1244505
uguucuagcaaauguggau

SEQ ID NO: 1493813 - RNA, 19 nt, Artificial Sequence
  Description of Artificial Sequence: Synthetic oligonucleotide
  Antisense strand to SEQ ID NO: 1493812
auccacauuugcuagaaca

SEQ ID NO: 1493814 - RNA, 19 nt, Artificial Sequence
  Description of Artificial Sequence: Synthetic oligonucleotide
  Sense strand starting at position 3243 of SEQ ID NO: 1244505
guuucacaugcguguuaua

SEQ ID NO: 1493815 - RNA, 19 nt, Artificial Sequence
  Description of Artificial Sequence: Synthetic oligonucleotide
  Antisense strand to SEQ ID NO: 1493814
uauaacacgcaugugaaac

SEQ ID NO: 1493816 - RNA, 19 nt, Artificial Sequence
  Description of Artificial Sequence: Synthetic oligonucleotide
  Sense strand starting at position 3386 of SEQ ID NO: 1244505
gcuuguacccaguacucuu

SEQ ID NO: 1493817 - RNA, 19 nt, Artificial Sequence
  Description of Artificial Sequence: Synthetic oligonucleotide
  Antisense strand to SEQ ID NO: 1493816
aagaguacuggguacaagc

SEQ ID NO: 1493818 - RNA, 19 nt, Artificial Sequence
  Description of Artificial Sequence: Synthetic oligonucleotide
  Sense strand starting at position 3498 of SEQ ID NO: 1244505
gugguuuccucuuuauuga

SEQ ID NO: 1493819 - RNA, 19 nt, Artificial Sequence
  Description of Artificial Sequence: Synthetic oligonucleotide
  Antisense strand to SEQ ID NO: 1493818
ucaauaaagaggaaaccac

SEQ ID NO: 1493820 - RNA, 19 nt, Artificial Sequence
  Description of Artificial Sequence: Synthetic oligonucleotide
  Sense strand starting at position 3499 of SEQ ID NO: 1244505
ugguuuccucuuuauugau

SEQ ID NO: 1493821 - RNA, 19 nt, Artificial Sequence
  Description of Artificial Sequence: Synthetic oligonucleotide
  Antisense strand to SEQ ID NO: 1493820
aucaauaaagaggaaacca

SEQ ID NO: 1493822 - RNA, 19 nt, Artificial Sequence
  Description of Artificial Sequence: Synthetic oligonucleotide
  Sense strand starting at position 3729 of SEQ ID NO: 1244505
aaaggagaguuacaagaug

SEQ ID NO: 1493823 - RNA, 19 nt, Artificial Sequence
  Description of Artificial Sequence: Synthetic oligonucleotide
  Antisense strand to SEQ ID NO: 1493822
caucuuguaacucuccuuu

SEQ ID NO: 1493824 - RNA, 19 nt, Artificial Sequence
  Description of Artificial Sequence: Synthetic oligonucleotide
  Sense strand starting at position 3828 of SEQ ID NO: 1244505
ggugguguuugagcuugaa

SEQ ID NO: 1493825 - RNA, 19 nt, Artificial Sequence
  Description of Artificial Sequence: Synthetic oligonucleotide
  Antisense strand to SEQ ID NO: 1493824
uucaagcucaaacaccacc

SEQ ID NO: 1493826 - RNA, 19 nt, Artificial Sequence
  Description of Artificial Sequence: Synthetic oligonucleotide
  Sense strand starting at position 3831 of SEQ ID NO: 1244505
gguguuugagcuugaagga

SEQ ID NO: 1493827 - RNA, 19 nt, Artificial Sequence
  Description of Artificial Sequence: Synthetic oligonucleotide
  Antisense strand to SEQ ID NO: 1493826
uccuucaagcucaaacacc

SEQ ID NO: 1493828 - RNA, 19 nt, Artificial Sequence
  Description of Artificial Sequence: Synthetic oligonucleotide
  Sense strand starting at position 3935 of SEQ ID NO: 1244505
agacacuuucgucacugua

SEQ ID NO: 1493829 - RNA, 19 nt, Artificial Sequence
  Description of Artificial Sequence: Synthetic oligonucleotide
  Antisense strand to SEQ ID NO: 1493828
uacagugacgaaagugucu

SEQ ID NO: 1493830 - RNA, 19 nt, Artificial Sequence
  Description of Artificial Sequence: Synthetic oligonucleotide
  Sense strand starting at position 3980 of SEQ ID NO: 1244505
caugguguuccugggauga

SEQ ID NO: 1493831 - RNA, 19 nt, Artificial Sequence
  Description of Artificial Sequence: Synthetic oligonucleotide
  Antisense strand to SEQ ID NO: 1493830
ucaucccaggaacaccaug

SEQ ID NO: 1493832 - RNA, 19 nt, Artificial Sequence
  Description of Artificial Sequence: Synthetic oligonucleotide
  Sense strand starting at position 3982 of SEQ ID NO: 1244505
ugguguuccugggaugaaa

SEQ ID NO: 1493833 - RNA, 19 nt, Artificial Sequence
  Description of Artificial Sequence: Synthetic oligonucleotide
  Antisense strand to SEQ ID NO: 1493832
uuucaucccaggaacacca

SEQ ID NO: 1493834 - RNA, 19 nt, Artificial Sequence
  Description of Artificial Sequence: Synthetic oligonucleotide
  Sense strand starting at position 299 of SEQ ID NO: 1244506
aacacuuauuguuugguga

SEQ ID NO: 1493835 - RNA, 19 nt, Artificial Sequence
  Description of Artificial Sequence: Synthetic oligonucleotide
  Antisense strand to SEQ ID NO: 1493834
ucaccaaacaauaaguguu

SEQ ID NO: 1493836 - RNA, 19 nt, Artificial Sequence
  Description of Artificial Sequence: Synthetic oligonucleotide
  Sense strand starting at position 302 of SEQ ID NO: 1244506
acuuauuguuuggugaguu

SEQ ID NO: 1493837 - RNA, 19 nt, Artificial Sequence
  Description of Artificial Sequence: Synthetic oligonucleotide
  Antisense strand to SEQ ID NO: 1493836
aacucaccaaacaauaagu

SEQ ID NO: 1493838 - RNA, 19 nt, Artificial Sequence
  Description of Artificial Sequence: Synthetic oligonucleotide
  Sense strand starting at position 452 of SEQ ID NO: 1244506
gaauuuggcuccugugaug

SEQ ID NO: 1493839 - RNA, 19 nt, Artificial Sequence
  Description of Artificial Sequence: Synthetic oligonucleotide
  Antisense strand to SEQ ID NO: 1493838
caucacaggagccaaauuc

SEQ ID NO: 1493840 - RNA, 19 nt, Artificial Sequence
  Description of Artificial Sequence: Synthetic oligonucleotide
  Sense strand starting at position 501 of SEQ ID NO: 1244506
uguucugagucaucaaauc

SEQ ID NO: 1493841 - RNA, 19 nt, Artificial Sequence
  Description of Artificial Sequence: Synthetic oligonucleotide
  Antisense strand to SEQ ID NO: 1493840
gauuugaugacucagaaca

SEQ ID NO: 1493842 - RNA, 19 nt, Artificial Sequence
  Description of Artificial Sequence: Synthetic oligonucleotide
  Sense strand starting at position 721 of SEQ ID NO: 1244506
uuagauuaaaucuguggga

SEQ ID NO: 1493843 - RNA, 19 nt, Artificial Sequence
  Description of Artificial Sequence: Synthetic oligonucleotide
  Antisense strand to SEQ ID NO: 1493842
ucccacagauuuaaucuaa

SEQ ID NO: 1493844 - RNA, 19 nt, Artificial Sequence
  Description of Artificial Sequence: Synthetic oligonucleotide
  Sense strand starting at position 769 of SEQ ID NO: 1244506
ugauacaggcccuaaguuu

SEQ ID NO: 1493845 - RNA, 19 nt, Artificial Sequence
  Description of Artificial Sequence: Synthetic oligonucleotide
  Antisense strand to SEQ ID NO: 1493844
aaacuuagggccuguauca

SEQ ID NO: 1493846 - RNA, 19 nt, Artificial Sequence
  Description of Artificial Sequence: Synthetic oligonucleotide
  Sense strand starting at position 1109 of SEQ ID NO: 1244506
gcgauuagaacucaggagu

SEQ ID NO: 1493847 - RNA, 19 nt, Artificial Sequence
  Description of Artificial Sequence: Synthetic oligonucleotide
  Antisense strand to SEQ ID NO: 1493846
acuccugaguucuaaucgc

SEQ ID NO: 1493848 - RNA, 19 nt, Artificial Sequence
  Description of Artificial Sequence: Synthetic oligonucleotide
  Sense strand starting at position 1504 of SEQ ID NO: 1244506
auuccuuggcuuugucaga

SEQ ID NO: 1493849 - RNA, 19 nt, Artificial Sequence
  Description of Artificial Sequence: Synthetic oligonucleotide
  Antisense strand to SEQ ID NO: 1493848
ucugacaaagccaaggaau

SEQ ID NO: 1493850 - RNA, 19 nt, Artificial Sequence
  Description of Artificial Sequence: Synthetic oligonucleotide
  Sense strand starting at position 1545 of SEQ ID NO: 1244506
agcacuauguuccugggua

SEQ ID NO: 1493851 - RNA, 19 nt, Artificial Sequence
  Description of Artificial Sequence: Synthetic oligonucleotide
  Antisense strand to SEQ ID NO: 1493850
uacccaggaacauagugcu

SEQ ID NO: 1493852 - RNA, 19 nt, Artificial Sequence
  Description of Artificial Sequence: Synthetic oligonucleotide
  Sense strand starting at position 1550 of SEQ ID NO: 1244506
uauguuccuggguaggaga

SEQ ID NO: 1493853 - RNA, 19 nt, Artificial Sequence
  Description of Artificial Sequence: Synthetic oligonucleotide
  Antisense strand to SEQ ID NO: 1493852
ucuccuacccaggaacaua

SEQ ID NO: 1493854 - RNA, 19 nt, Artificial Sequence
  Description of Artificial Sequence: Synthetic oligonucleotide
  Sense strand starting at position 1732 of SEQ ID NO: 1244506
ggcugaguuuggaguguaa

SEQ ID NO: 1493855 - RNA, 19 nt, Artificial Sequence
  Description of Artificial Sequence: Synthetic oligonucleotide
  Antisense strand to SEQ ID NO: 1493854
uuacacuccaaacucagcc

SEQ ID NO: 1493856 - RNA, 19 nt, Artificial Sequence
  Description of Artificial Sequence: Synthetic oligonucleotide
  Sense strand starting at position 1734 of SEQ ID NO: 1244506
cugaguuuggaguguaaga

SEQ ID NO: 1493857 - RNA, 19 nt, Artificial Sequence
  Description of Artificial Sequence: Synthetic oligonucleotide
  Antisense strand to SEQ ID NO: 1493856
ucuuacacuccaaacucag

SEQ ID NO: 1493858 - RNA, 19 nt, Artificial Sequence
  Description of Artificial Sequence: Synthetic oligonucleotide
  Sense strand starting at position 1893 of SEQ ID NO: 1244506
gaggaugaugugcgucuga

SEQ ID NO: 1493859 - RNA, 19 nt, Artificial Sequence
  Description of Artificial Sequence: Synthetic oligonucleotide
  Antisense strand to SEQ ID NO: 1493858
ucagacgcacaucauccuc

SEQ ID NO: 1493860 - RNA, 19 nt, Artificial Sequence
  Description of Artificial Sequence: Synthetic oligonucleotide
  Sense strand starting at position 2326 of SEQ ID NO: 1244506
gggcuucgguucuugagau

SEQ ID NO: 1493861 - RNA, 19 nt, Artificial Sequence
  Description of Artificial Sequence: Synthetic oligonucleotide
  Antisense strand to SEQ ID NO: 1493860
aucucaagaaccgaagccc

SEQ ID NO: 1493862 - RNA, 19 nt, Artificial Sequence
  Description of Artificial Sequence: Synthetic oligonucleotide
  Sense strand starting at position 2336 of SEQ ID NO: 1244506
ucuugagauuugcagaagu

SEQ ID NO: 1493863 - RNA, 19 nt, Artificial Sequence
  Description of Artificial Sequence: Synthetic oligonucleotide
  Antisense strand to SEQ ID NO: 1493862
acuucugcaaaucucaaga

SEQ ID NO: 1493864 - RNA, 19 nt, Artificial Sequence
  Description of Artificial Sequence: Synthetic oligonucleotide
  Sense strand starting at position 2376 of SEQ ID NO: 1244506
uccgcugucgcguccuaaa

SEQ ID NO: 1493865 - RNA, 19 nt, Artificial Sequence
  Description of Artificial Sequence: Synthetic oligonucleotide
  Antisense strand to SEQ ID NO: 1493864
uuuaggacgcgacagcgga

SEQ ID NO: 1493866 - RNA, 19 nt, Artificial Sequence
  Description of Artificial Sequence: Synthetic oligonucleotide
  Sense strand starting at position 2552 of SEQ ID NO: 1244506
ugcagauggcccuauaaau

SEQ ID NO: 1493867 - RNA, 19 nt, Artificial Sequence
  Description of Artificial Sequence: Synthetic oligonucleotide
  Antisense strand to SEQ ID NO: 1493866
auuuauagggccaucugca

SEQ ID NO: 1493868 - RNA, 19 nt, Artificial Sequence
  Description of Artificial Sequence: Synthetic oligonucleotide
  Sense strand starting at position 2592 of SEQ ID NO: 1244506
gcuuccuaagaguguguuu

SEQ ID NO: 1493869 - RNA, 19 nt, Artificial Sequence
  Description of Artificial Sequence: Synthetic oligonucleotide
  Antisense strand to SEQ ID NO: 1493868
aaacacacucuuaggaagc

SEQ ID NO: 1493870 - RNA, 19 nt, Artificial Sequence
  Description of Artificial Sequence: Synthetic oligonucleotide
  Sense strand starting at position 2594 of SEQ ID NO: 1244506
uuccuaagaguguguuucu

SEQ ID NO: 1493871 - RNA, 19 nt, Artificial Sequence
  Description of Artificial Sequence: Synthetic oligonucleotide
  Antisense strand to SEQ ID NO: 1493870
agaaacacacucuuaggaa

SEQ ID NO: 1493872 - RNA, 19 nt, Artificial Sequence
  Description of Artificial Sequence: Synthetic oligonucleotide
  Sense strand starting at position 2669 of SEQ ID NO: 1244506
agaagauaguguuucgaga

SEQ ID NO: 1493873 - RNA, 19 nt, Artificial Sequence
  Description of Artificial Sequence: Synthetic oligonucleotide
  Antisense strand to SEQ ID NO: 1493872
ucucgaaacacuaucuucu

SEQ ID NO: 1493874 - RNA, 19 nt, Artificial Sequence
  Description of Artificial Sequence: Synthetic oligonucleotide
  Sense strand starting at position 2676 of SEQ ID NO: 1244506
aguguuucgagaggaaaga

SEQ ID NO: 1493875 - RNA, 19 nt, Artificial Sequence
  Description of Artificial Sequence: Synthetic oligonucleotide
  Antisense strand to SEQ ID NO: 1493874
ucuuuccucucgaaacacu

SEQ ID NO: 1493876 - RNA, 19 nt, Artificial Sequence
  Description of Artificial Sequence: Synthetic oligonucleotide
  Sense strand starting at position 2694 of SEQ ID NO: 1244506
acgugaaacuaguauuuac

SEQ ID NO: 1493877 - RNA, 19 nt, Artificial Sequence
  Description of Artificial Sequence: Synthetic oligonucleotide
  Antisense strand to SEQ ID NO: 1493876
guaaauacuaguuucacgu

SEQ ID NO: 1493878 - RNA, 19 nt, Artificial Sequence
  Description of Artificial Sequence: Synthetic oligonucleotide
  Sense strand starting at position 2701 of SEQ ID NO: 1244506
acuaguauuuacugagaac

SEQ ID NO: 1493879 - RNA, 19 nt, Artificial Sequence
  Description of Artificial Sequence: Synthetic oligonucleotide
  Antisense strand to SEQ ID NO: 1493878
guucucaguaaauacuagu

SEQ ID NO: 1493880 - RNA, 19 nt, Artificial Sequence
  Description of Artificial Sequence: Synthetic oligonucleotide
  Sense strand starting at position 2704 of SEQ ID NO: 1244506
aguauuuacugagaacaua

SEQ ID NO: 1493881 - RNA, 19 nt, Artificial Sequence
  Description of Artificial Sequence: Synthetic oligonucleotide
  Antisense strand to SEQ ID NO: 1493880
uauguucucaguaaauacu

SEQ ID NO: 1493882 - RNA, 19 nt, Artificial Sequence
  Description of Artificial Sequence: Synthetic oligonucleotide
  Sense strand starting at position 2753 of SEQ ID NO: 1244506
gcguuuauggcugaauguu

SEQ ID NO: 1493883 - RNA, 19 nt, Artificial Sequence
  Description of Artificial Sequence: Synthetic oligonucleotide
  Antisense strand to SEQ ID NO: 1493882
aacauucagccauaaacgc

SEQ ID NO: 1493884 - RNA, 19 nt, Artificial Sequence
  Description of Artificial Sequence: Synthetic oligonucleotide
  Sense strand starting at position 2785 of SEQ ID NO: 1244506
aaauuauuugccuagccgu

SEQ ID NO: 1493885 - RNA, 19 nt, Artificial Sequence
  Description of Artificial Sequence: Synthetic oligonucleotide
  Antisense strand to SEQ ID NO: 1493884
acggcuaggcaaauaauuu

SEQ ID NO: 1493886 - RNA, 19 nt, Artificial Sequence
  Description of Artificial Sequence: Synthetic oligonucleotide
  Sense strand starting at position 2955 of SEQ ID NO: 1244506
uuaagaaauuagcuaggca

SEQ ID NO: 1493887 - RNA, 19 nt, Artificial Sequence
  Description of Artificial Sequence: Synthetic oligonucleotide
  Antisense strand to SEQ ID NO: 1493886
ugccuagcuaauuucuuaa

SEQ ID NO: 1493888 - RNA, 19 nt, Artificial Sequence
  Description of Artificial Sequence: Synthetic oligonucleotide
  Sense strand starting at position 3042 of SEQ ID NO: 1244506
aggugaaggcugcaguaaa

SEQ ID NO: 1493889 - RNA, 19 nt, Artificial Sequence
  Description of Artificial Sequence: Synthetic oligonucleotide
  Antisense strand to SEQ ID NO: 1493888
uuuacugcagccuucaccu

SEQ ID NO: 1493890 - RNA, 19 nt, Artificial Sequence
  Description of Artificial Sequence: Synthetic oligonucleotide
  Sense strand starting at position 3240 of SEQ ID NO: 1244506
gaggaccauguuugucuua

SEQ ID NO: 1493891 - RNA, 19 nt, Artificial Sequence
  Description of Artificial Sequence: Synthetic oligonucleotide
  Antisense strand to SEQ ID NO: 1493890
uaagacaaacaugguccuc

SEQ ID NO: 1493892 - RNA, 19 nt, Artificial Sequence
  Description of Artificial Sequence: Synthetic oligonucleotide
  Sense strand starting at position 3247 of SEQ ID NO: 1244506
auguuugucuuauugaugu

SEQ ID NO: 1493893 - RNA, 19 nt, Artificial Sequence
  Description of Artificial Sequence: Synthetic oligonucleotide
  Antisense strand to SEQ ID NO: 1493892
acaucaauaagacaaacau

SEQ ID NO: 1493894 - RNA, 19 nt, Artificial Sequence
  Description of Artificial Sequence: Synthetic oligonucleotide
  Sense strand starting at position 3249 of SEQ ID NO: 1244506
guuugucuuauugauguac

SEQ ID NO: 1493895 - RNA, 19 nt, Artificial Sequence
  Description of Artificial Sequence: Synthetic oligonucleotide
  Antisense strand to SEQ ID NO: 1493894
guacaucaauaagacaaac

SEQ ID NO: 1493896 - RNA, 19 nt, Artificial Sequence
  Description of Artificial Sequence: Synthetic oligonucleotide
  Sense strand starting at position 3301 of SEQ ID NO: 1244506
cacagugggccuuauagau

SEQ ID NO: 1493897 - RNA, 19 nt, Artificial Sequence
  Description of Artificial Sequence: Synthetic oligonucleotide
  Antisense strand to SEQ ID NO: 1493896
aucuauaaggcccacugug

SEQ ID NO: 1493898 - RNA, 19 nt, Artificial Sequence
  Description of Artificial Sequence: Synthetic oligonucleotide
  Sense strand starting at position 3310 of SEQ ID NO: 1244506
ccuuauagauguuuguuga

SEQ ID NO: 1493899 - RNA, 19 nt, Artificial Sequence
  Description of Artificial Sequence: Synthetic oligonucleotide
  Antisense strand to SEQ ID NO: 1493898
ucaacaaacaucuauaagg

SEQ ID NO: 1493900 - RNA, 19 nt, Artificial Sequence
  Description of Artificial Sequence: Synthetic oligonucleotide
  Sense strand starting at position 3311 of SEQ ID NO: 1244506
cuuauagauguuuguugag

SEQ ID NO: 1493901 - RNA, 19 nt, Artificial Sequence
  Description of Artificial Sequence: Synthetic oligonucleotide
  Antisense strand to SEQ ID NO: 1493900
cucaacaaacaucuauaag

SEQ ID NO: 1493902 - RNA, 19 nt, Artificial Sequence
  Description of Artificial Sequence: Synthetic oligonucleotide
  Sense strand starting at position 3313 of SEQ ID NO: 1244506
uauagauguuuguugagug

SEQ ID NO: 1493903 - RNA, 19 nt, Artificial Sequence
  Description of Artificial Sequence: Synthetic oligonucleotide
  Antisense strand to SEQ ID NO: 1493902
cacucaacaaacaucuaua

SEQ ID NO: 1493904 - RNA, 19 nt, Artificial Sequence
  Description of Artificial Sequence: Synthetic oligonucleotide
  Sense strand starting at position 3316 of SEQ ID NO: 1244506
agauguuuguugagugagg

SEQ ID NO: 1493905 - RNA, 19 nt, Artificial Sequence
  Description of Artificial Sequence: Synthetic oligonucleotide
  Antisense strand to SEQ ID NO: 1493904
ccucacucaacaaacaucu

SEQ ID NO: 1493906 - RNA, 19 nt, Artificial Sequence
  Description of Artificial Sequence: Synthetic oligonucleotide
  Sense strand starting at position 3673 of SEQ ID NO: 1244506
uguguuuagcucuagguua

SEQ ID NO: 1493907 - RNA, 19 nt, Artificial Sequence
  Description of Artificial Sequence: Synthetic oligonucleotide
  Antisense strand to SEQ ID NO: 1493906
uaaccuagagcuaaacaca

SEQ ID NO: 1493908 - RNA, 19 nt, Artificial Sequence
  Description of Artificial Sequence: Synthetic oligonucleotide
  Sense strand starting at position 3675 of SEQ ID NO: 1244506
uguuuagcucuagguuagu

SEQ ID NO: 1493909 - RNA, 19 nt, Artificial Sequence
  Description of Artificial Sequence: Synthetic oligonucleotide
  Antisense strand to SEQ ID NO: 1493908
acuaaccuagagcuaaaca

SEQ ID NO: 1493910 - RNA, 19 nt, Artificial Sequence
  Description of Artificial Sequence: Synthetic oligonucleotide
  Sense strand starting at position 3684 of SEQ ID NO: 1244506
cuagguuagugcuccauuu

SEQ ID NO: 1493911 - RNA, 19 nt, Artificial Sequence
  Description of Artificial Sequence: Synthetic oligonucleotide
  Antisense strand to SEQ ID NO: 1493910
aaauggagcacuaaccuag

SEQ ID NO: 1493912 - RNA, 19 nt, Artificial Sequence
  Description of Artificial Sequence: Synthetic oligonucleotide
  Sense strand starting at position 3686 of SEQ ID NO: 1244506
agguuagugcuccauuugu

SEQ ID NO: 1493913 - RNA, 19 nt, Artificial Sequence
  Description of Artificial Sequence: Synthetic oligonucleotide
  Antisense strand to SEQ ID NO: 1493912
acaaauggagcacuaaccu

SEQ ID NO: 1493914 - RNA, 19 nt, Artificial Sequence
  Description of Artificial Sequence: Synthetic oligonucleotide
  Sense strand starting at position 163 of SEQ ID NO: 1244507
guaguauauuaagacagau

SEQ ID NO: 1493915 - RNA, 19 nt, Artificial Sequence
  Description of Artificial Sequence: Synthetic oligonucleotide
  Antisense strand to SEQ ID NO: 1493914
aucugucuuaauauacuac

SEQ ID NO: 1493916 - RNA, 19 nt, Artificial Sequence
  Description of Artificial Sequence: Synthetic oligonucleotide
  Sense strand starting at position 626 of SEQ ID NO: 1244507
guucucugcucuuugcaau

SEQ ID NO: 1493917 - RNA, 19 nt, Artificial Sequence
  Description of Artificial Sequence: Synthetic oligonucleotide
  Antisense strand to SEQ ID NO: 1493916
auugcaaagagcagagaac

SEQ ID NO: 1493918 - RNA, 19 nt, Artificial Sequence
  Description of Artificial Sequence: Synthetic oligonucleotide
  Sense strand starting at position 681 of SEQ ID NO: 1244507
agggaugauuaagguuuau

SEQ ID NO: 1493919 - RNA, 19 nt, Artificial Sequence
  Description of Artificial Sequence: Synthetic oligonucleotide
  Antisense strand to SEQ ID NO: 1493918
auaaaccuuaaucaucccu

SEQ ID NO: 1493920 - RNA, 19 nt, Artificial Sequence
  Description of Artificial Sequence: Synthetic oligonucleotide
  Sense strand starting at position 687 of SEQ ID NO: 1244507
gauuaagguuuaucccgau

SEQ ID NO: 1493921 - RNA, 19 nt, Artificial Sequence
  Description of Artificial Sequence: Synthetic oligonucleotide
  Antisense strand to SEQ ID NO: 1493920
aucgggauaaaccuuaauc

SEQ ID NO: 1493922 - RNA, 19 nt, Artificial Sequence
  Description of Artificial Sequence: Synthetic oligonucleotide
  Sense strand starting at position 693 of SEQ ID NO: 1244507
gguuuaucccgaugaagcc

SEQ ID NO: 1493923 - RNA, 19 nt, Artificial Sequence
  Description of Artificial Sequence: Synthetic oligonucleotide
  Antisense strand to SEQ ID NO: 1493922
ggcuucaucgggauaaacc

SEQ ID NO: 1493924 - RNA, 19 nt, Artificial Sequence
  Description of Artificial Sequence: Synthetic oligonucleotide
  Sense strand starting at position 745 of SEQ ID NO: 1244507
auagguagauguuuaaagu

SEQ ID NO: 1493925 - RNA, 19 nt, Artificial Sequence
  Description of Artificial Sequence: Synthetic oligonucleotide
  Antisense strand to SEQ ID NO: 1493924
acuuuaaacaucuaccuau

SEQ ID NO: 1493926 - RNA, 19 nt, Artificial Sequence
  Description of Artificial Sequence: Synthetic oligonucleotide
  Sense strand starting at position 746 of SEQ ID NO: 1244507
uagguagauguuuaaaguu

SEQ ID NO: 1493927 - RNA, 19 nt, Artificial Sequence
  Description of Artificial Sequence: Synthetic oligonucleotide
  Antisense strand to SEQ ID NO: 1493926
aacuuuaaacaucuaccua

SEQ ID NO: 1493928 - RNA, 19 nt, Artificial Sequence
  Description of Artificial Sequence: Synthetic oligonucleotide
  Sense strand starting at position 768 of SEQ ID NO: 1244507
ugaggacacugcucuuauc

SEQ ID NO: 1493929 - RNA, 19 nt, Artificial Sequence
  Description of Artificial Sequence: Synthetic oligonucleotide
  Antisense strand to SEQ ID NO: 1493928
gauaagagcaguguccuca

SEQ ID NO: 1493930 - RNA, 19 nt, Artificial Sequence
  Description of Artificial Sequence: Synthetic oligonucleotide
  Sense strand starting at position 799 of SEQ ID NO: 1244507
uuuguaucccuagggcaua

SEQ ID NO: 1493931 - RNA, 19 nt, Artificial Sequence
  Description of Artificial Sequence: Synthetic oligonucleotide
  Antisense strand to SEQ ID NO: 1493930
uaugcccuagggauacaaa

SEQ ID NO: 1493932 - RNA, 19 nt, Artificial Sequence
  Description of Artificial Sequence: Synthetic oligonucleotide
  Sense strand starting at position 906 of SEQ ID NO: 1244507
aaaugugauuucugugaag

SEQ ID NO: 1493933 - RNA, 19 nt, Artificial Sequence
  Description of Artificial Sequence: Synthetic oligonucleotide
  Antisense strand to SEQ ID NO: 1493932
cuucacagaaaucacauuu

SEQ ID NO: 1493934 - RNA, 19 nt, Artificial Sequence
  Description of Artificial Sequence: Synthetic oligonucleotide
  Sense strand starting at position 909 of SEQ ID NO: 1244507
ugugauuucugugaagaag

SEQ ID NO: 1493935 - RNA, 19 nt, Artificial Sequence
  Description of Artificial Sequence: Synthetic oligonucleotide
  Antisense strand to SEQ ID NO: 1493934
cuucuucacagaaaucaca

SEQ ID NO: 1493936 - RNA, 19 nt, Artificial Sequence
  Description of Artificial Sequence: Synthetic oligonucleotide
  Sense strand starting at position 1006 of SEQ ID NO: 1244507
ugagguauacuuugacaug

SEQ ID NO: 1493937 - RNA, 19 nt, Artificial Sequence
  Description of Artificial Sequence: Synthetic oligonucleotide
  Antisense strand to SEQ ID NO: 1493936
caugucaaaguauaccuca

SEQ ID NO: 1493938 - RNA, 19 nt, Artificial Sequence
  Description of Artificial Sequence: Synthetic oligonucleotide
  Sense strand starting at position 1035 of SEQ ID NO: 1244507
cacccauuguauguguaca

SEQ ID NO: 1493939 - RNA, 19 nt, Artificial Sequence
  Description of Artificial Sequence: Synthetic oligonucleotide
  Antisense strand to SEQ ID NO: 1493938
uguacacauacaaugggug

SEQ ID NO: 1493940 - RNA, 19 nt, Artificial Sequence
  Description of Artificial Sequence: Synthetic oligonucleotide
  Sense strand starting at position 1037 of SEQ ID NO: 1244507
cccauuguauguguacaau

SEQ ID NO: 1493941 - RNA, 19 nt, Artificial Sequence
  Description of Artificial Sequence: Synthetic oligonucleotide
  Antisense strand to SEQ ID NO: 1493940
auuguacacauacaauggg

SEQ ID NO: 1493942 - RNA, 19 nt, Artificial Sequence
  Description of Artificial Sequence: Synthetic oligonucleotide
  Sense strand starting at position 1098 of SEQ ID NO: 1244507
ccagcuuaauggucaauau

SEQ ID NO: 1493943 - RNA, 19 nt, Artificial Sequence
  Description of Artificial Sequence: Synthetic oligonucleotide
  Antisense strand to SEQ ID NO: 1493942
auauugaccauuaagcugg

SEQ ID NO: 1493944 - RNA, 19 nt, Artificial Sequence
  Description of Artificial Sequence: Synthetic oligonucleotide
  Sense strand starting at position 1109 of SEQ ID NO: 1244507
gucaauauuugcuuuguca

SEQ ID NO: 1493945 - RNA, 19 nt, Artificial Sequence
  Description of Artificial Sequence: Synthetic oligonucleotide
  Antisense strand to SEQ ID NO: 1493944
ugacaaagcaaauauugac

SEQ ID NO: 1493946 - RNA, 19 nt, Artificial Sequence
  Description of Artificial Sequence: Synthetic oligonucleotide
  Sense strand starting at position 1116 of SEQ ID NO: 1244507
uuugcuuugucauuugauc

SEQ ID NO: 1493947 - RNA, 19 nt, Artificial Sequence
  Description of Artificial Sequence: Synthetic oligonucleotide
  Antisense strand to SEQ ID NO: 1493946
gaucaaaugacaaagcaaa

SEQ ID NO: 1493948 - RNA, 19 nt, Artificial Sequence
  Description of Artificial Sequence: Synthetic oligonucleotide
  Sense strand starting at position 1181 of SEQ ID NO: 1244507
cugaaagcuggguggaguu

SEQ ID NO: 1493949 - RNA, 19 nt, Artificial Sequence
  Description of Artificial Sequence: Synthetic oligonucleotide
  Antisense strand to SEQ ID NO: 1493948
aacuccacccagcuuucag

SEQ ID NO: 1493950 - RNA, 19 nt, Artificial Sequence
  Description of Artificial Sequence: Synthetic oligonucleotide
  Sense strand starting at position 1233 of SEQ ID NO: 1244507
ucuagucaucuaugucuaa

SEQ ID NO: 1493951 - RNA, 19 nt, Artificial Sequence
  Description of Artificial Sequence: Synthetic oligonucleotide
  Antisense strand to SEQ ID NO: 1493950
uuagacauagaugacuaga

SEQ ID NO: 1493952 - RNA, 19 nt, Artificial Sequence
  Description of Artificial Sequence: Synthetic oligonucleotide
  Sense strand starting at position 1234 of SEQ ID NO: 1244507
cuagucaucuaugucuaau

SEQ ID NO: 1493953 - RNA, 19 nt, Artificial Sequence
  Description of Artificial Sequence: Synthetic oligonucleotide
  Antisense strand to SEQ ID NO: 1493952
auuagacauagaugacuag

SEQ ID NO: 1493954 - RNA, 19 nt, Artificial Sequence
  Description of Artificial Sequence: Synthetic oligonucleotide
  Sense strand starting at position 1236 of SEQ ID NO: 1244507
agucaucuaugucuaauuc

SEQ ID NO: 1493955 - RNA, 19 nt, Artificial Sequence
  Description of Artificial Sequence: Synthetic oligonucleotide
  Antisense strand to SEQ ID NO: 1493954
gaauuagacauagaugacu

SEQ ID NO: 1493956 - RNA, 19 nt, Artificial Sequence
  Description of Artificial Sequence: Synthetic oligonucleotide
  Sense strand starting at position 1237 of SEQ ID NO: 1244507
gucaucuaugucuaauucu

SEQ ID NO: 1493957 - RNA, 19 nt, Artificial Sequence
  Description of Artificial Sequence: Synthetic oligonucleotide
  Antisense strand to SEQ ID NO: 1493956
agaauuagacauagaugac

SEQ ID NO: 1493958 - RNA, 19 nt, Artificial Sequence
  Description of Artificial Sequence: Synthetic oligonucleotide
  Sense strand starting at position 1261 of SEQ ID NO: 1244507
uugacacaugcauguuacu

SEQ ID NO: 1493959 - RNA, 19 nt, Artificial Sequence
  Description of Artificial Sequence: Synthetic oligonucleotide
  Antisense strand to SEQ ID NO: 1493958
aguaacaugcaugugucaa

SEQ ID NO: 1493960 - RNA, 19 nt, Artificial Sequence
  Description of Artificial Sequence: Synthetic oligonucleotide
  Sense strand starting at position 1371 of SEQ ID NO: 1244507
uuguuucgugugcuauaua

SEQ ID NO: 1493961 - RNA, 19 nt, Artificial Sequence
  Description of Artificial Sequence: Synthetic oligonucleotide
  Antisense strand to SEQ ID NO: 1493960
uauauagcacacgaaacaa

SEQ ID NO: 1493962 - RNA, 19 nt, Artificial Sequence
  Description of Artificial Sequence: Synthetic oligonucleotide
  Sense strand starting at position 1374 of SEQ ID NO: 1244507
uuucgugugcuauauagua

SEQ ID NO: 1493963 - RNA, 19 nt, Artificial Sequence
  Description of Artificial Sequence: Synthetic oligonucleotide
  Antisense strand to SEQ ID NO: 1493962
uacuauauagcacacgaaa

SEQ ID NO: 1493964 - RNA, 19 nt, Artificial Sequence
  Description of Artificial Sequence: Synthetic oligonucleotide
  Sense strand starting at position 1454 of SEQ ID NO: 1244507
uggaguucccaacggaaau

SEQ ID NO: 1493965 - RNA, 19 nt, Artificial Sequence
  Description of Artificial Sequence: Synthetic oligonucleotide
  Antisense strand to SEQ ID NO: 1493964
auuuccguugggaacucca

SEQ ID NO: 1493966 - RNA, 19 nt, Artificial Sequence
  Description of Artificial Sequence: Synthetic oligonucleotide
  Sense strand starting at position 1455 of SEQ ID NO: 1244507
ggaguucccaacggaaaug

SEQ ID NO: 1493967 - RNA, 19 nt, Artificial Sequence
  Description of Artificial Sequence: Synthetic oligonucleotide
  Antisense strand to SEQ ID NO: 1493966
cauuuccguugggaacucc

SEQ ID NO: 1493968 - RNA, 19 nt, Artificial Sequence
  Description of Artificial Sequence: Synthetic oligonucleotide
  Sense strand starting at position 1607 of SEQ ID NO: 1244507
agguaagaccuucggugua

SEQ ID NO: 1493969 - RNA, 19 nt, Artificial Sequence
  Description of Artificial Sequence: Synthetic oligonucleotide
  Antisense strand to SEQ ID NO: 1493968
uacaccgaaggucuuaccu

SEQ ID NO: 1493970 - RNA, 19 nt, Artificial Sequence
  Description of Artificial Sequence: Synthetic oligonucleotide
  Sense strand starting at position 1609 of SEQ ID NO: 1244507
guaagaccuucgguguauu

SEQ ID NO: 1493971 - RNA, 19 nt, Artificial Sequence
  Description of Artificial Sequence: Synthetic oligonucleotide
  Antisense strand to SEQ ID NO: 1493970
aauacaccgaaggucuuac

SEQ ID NO: 1493972 - RNA, 19 nt, Artificial Sequence
  Description of Artificial Sequence: Synthetic oligonucleotide
  Sense strand starting at position 1667 of SEQ ID NO: 1244507
ugagaucgguuagcacuua

SEQ ID NO: 1493973 - RNA, 19 nt, Artificial Sequence
  Description of Artificial Sequence: Synthetic oligonucleotide
  Antisense strand to SEQ ID NO: 1493972
uaagugcuaaccgaucuca

SEQ ID NO: 1493974 - RNA, 19 nt, Artificial Sequence
  Description of Artificial Sequence: Synthetic oligonucleotide
  Sense strand starting at position 2053 of SEQ ID NO: 1244507
uuggguuccgcuguuaagu

SEQ ID NO: 1493975 - RNA, 19 nt, Artificial Sequence
  Description of Artificial Sequence: Synthetic oligonucleotide
  Antisense strand to SEQ ID NO: 1493974
acuuaacagcggaacccaa

SEQ ID NO: 1493976 - RNA, 19 nt, Artificial Sequence
  Description of Artificial Sequence: Synthetic oligonucleotide
  Sense strand starting at position 2081 of SEQ ID NO: 1244507
cgacaugcuccggaagcuu

SEQ ID NO: 1493977 - RNA, 19 nt, Artificial Sequence
  Description of Artificial Sequence: Synthetic oligonucleotide
  Antisense strand to SEQ ID NO: 1493976
aagcuuccggagcaugucg

SEQ ID NO: 1493978 - RNA, 19 nt, Artificial Sequence
  Description of Artificial Sequence: Synthetic oligonucleotide
  Sense strand starting at position 2181 of SEQ ID NO: 1244507
acuguacaaucgguuuaaa

SEQ ID NO: 1493979 - RNA, 19 nt, Artificial Sequence
  Description of Artificial Sequence: Synthetic oligonucleotide
  Antisense strand to SEQ ID NO: 1493978
uuuaaaccgauuguacagu

SEQ ID NO: 1493980 - RNA, 19 nt, Artificial Sequence
  Description of Artificial Sequence: Synthetic oligonucleotide
  Sense strand starting at position 2309 of SEQ ID NO: 1244507
gcccguuauccguaugaca

SEQ ID NO: 1493981 - RNA, 19 nt, Artificial Sequence
  Description of Artificial Sequence: Synthetic oligonucleotide
  Antisense strand to SEQ ID NO: 1493980
ugucauacggauaacgggc

SEQ ID NO: 1493982 - RNA, 19 nt, Artificial Sequence
  Description of Artificial Sequence: Synthetic oligonucleotide
  Sense strand starting at position 2311 of SEQ ID NO: 1244507
ccguuauccguaugacagu

SEQ ID NO: 1493983 - RNA, 19 nt, Artificial Sequence
  Description of Artificial Sequence: Synthetic oligonucleotide
  Antisense strand to SEQ ID NO: 1493982
acugucauacggauaacgg

SEQ ID NO: 1493984 - RNA, 19 nt, Artificial Sequence
  Description of Artificial Sequence: Synthetic oligonucleotide
  Sense strand starting at position 2997 of SEQ ID NO: 1244507
gaacguaugcgugcgguua

SEQ ID NO: 1493985 - RNA, 19 nt, Artificial Sequence
  Description of Artificial Sequence: Synthetic oligonucleotide
  Antisense strand to SEQ ID NO: 1493984
uaaccgcacgcauacguuc

SEQ ID NO: 1493986 - RNA, 19 nt, Artificial Sequence
  Description of Artificial Sequence: Synthetic oligonucleotide
  Sense strand starting at position 3111 of SEQ ID NO: 1244507
gagcaacaucguggacaaa

SEQ ID NO: 1493987 - RNA, 19 nt, Artificial Sequence
  Description of Artificial Sequence: Synthetic oligonucleotide
  Antisense strand to SEQ ID NO: 1493986
uuuguccacgauguugcuc

SEQ ID NO: 1493988 - RNA, 19 nt, Artificial Sequence
  Description of Artificial Sequence: Synthetic oligonucleotide
  Sense strand starting at position 3174 of SEQ ID NO: 1244507
gccagagcccuagaaagua

SEQ ID NO: 1493989 - RNA, 19 nt, Artificial Sequence
  Description of Artificial Sequence: Synthetic oligonucleotide
  Antisense strand to SEQ ID NO: 1493988
uacuuucuagggcucuggc

SEQ ID NO: 1493990 - RNA, 19 nt, Artificial Sequence
  Description of Artificial Sequence: Synthetic oligonucleotide
  Sense strand starting at position 3190 of SEQ ID NO: 1244507
guaucuugggcaggucgaa

SEQ ID NO: 1493991 - RNA, 19 nt, Artificial Sequence
  Description of Artificial Sequence: Synthetic oligonucleotide
  Antisense strand to SEQ ID NO: 1493990
uucgaccugcccaagauac

SEQ ID NO: 1493992 - RNA, 19 nt, Artificial Sequence
  Description of Artificial Sequence: Synthetic oligonucleotide
  Sense strand starting at position 3568 of SEQ ID NO: 1244507
gggaguuggucucccaacu

SEQ ID NO: 1493993 - RNA, 19 nt, Artificial Sequence
  Description of Artificial Sequence: Synthetic oligonucleotide
  Antisense strand to SEQ ID NO: 1493992
aguugggagaccaacuccc

SEQ ID NO: 1493994 - RNA, 19 nt, Artificial Sequence
  Description of Artificial Sequence: Synthetic oligonucleotide
  Sense strand starting at position 51 of SEQ ID NO: 1244508
ugcuauuaacuuugccuga

SEQ ID NO: 1493995 - RNA, 19 nt, Artificial Sequence
  Description of Artificial Sequence: Synthetic oligonucleotide
  Antisense strand to SEQ ID NO: 1493994
ucaggcaaaguuaauagca

SEQ ID NO: 1493996 - RNA, 19 nt, Artificial Sequence
  Description of Artificial Sequence: Synthetic oligonucleotide
  Sense strand starting at position 52 of SEQ ID NO: 1244508
gcuauuaacuuugccugaa

SEQ ID NO: 1493997 - RNA, 19 nt, Artificial Sequence
  Description of Artificial Sequence: Synthetic oligonucleotide
  Antisense strand to SEQ ID NO: 1493996
uucaggcaaaguuaauagc

SEQ ID NO: 1493998 - RNA, 19 nt, Artificial Sequence
  Description of Artificial Sequence: Synthetic oligonucleotide
  Sense strand starting at position 171 of SEQ ID NO: 1244508
cucccagaugguuaauacu

SEQ ID NO: 1493999 - RNA, 19 nt, Artificial Sequence
  Description of Artificial Sequence: Synthetic oligonucleotide
  Antisense strand to SEQ ID NO: 1493998
aguauuaaccaucugggag

SEQ ID NO: 1494000 - RNA, 19 nt, Artificial Sequence
  Description of Artificial Sequence: Synthetic oligonucleotide
  Sense strand starting at position 328 of SEQ ID NO: 1244508
ccaguaaaguguuuaaugu

SEQ ID NO: 1494001 - RNA, 19 nt, Artificial Sequence
  Description of Artificial Sequence: Synthetic oligonucleotide
  Antisense strand to SEQ ID NO: 1494000
acauuaaacacuuuacugg

SEQ ID NO: 1494002 - RNA, 19 nt, Artificial Sequence
  Description of Artificial Sequence: Synthetic oligonucleotide
  Sense strand starting at position 329 of SEQ ID NO: 1244508
caguaaaguguuuaauguu

SEQ ID NO: 1494003 - RNA, 19 nt, Artificial Sequence
  Description of Artificial Sequence: Synthetic oligonucleotide
  Antisense strand to SEQ ID NO: 1494002
aacauuaaacacuuuacug

SEQ ID NO: 1494004 - RNA, 19 nt, Artificial Sequence
  Description of Artificial Sequence: Synthetic oligonucleotide
  Sense strand starting at position 537 of SEQ ID NO: 1244508
guggcuggugcagaagaau

SEQ ID NO: 1494005 - RNA, 19 nt, Artificial Sequence
  Description of Artificial Sequence: Synthetic oligonucleotide
  Antisense strand to SEQ ID NO: 1494004
auucuucugcaccagccac

SEQ ID NO: 1494006 - RNA, 19 nt, Artificial Sequence
  Description of Artificial Sequence: Synthetic oligonucleotide
  Sense strand starting at position 814 of SEQ ID NO: 1244508
gacugugaauuugaaagua

SEQ ID NO: 1494007 - RNA, 19 nt, Artificial Sequence
  Description of Artificial Sequence: Synthetic oligonucleotide
  Antisense strand to SEQ ID NO: 1494006
uacuuucaaauucacaguc

SEQ ID NO: 1494008 - RNA, 19 nt, Artificial Sequence
  Description of Artificial Sequence: Synthetic oligonucleotide
  Sense strand starting at position 1195 of SEQ ID NO: 1244508
gccacugaucugggaguaa

SEQ ID NO: 1494009 - RNA, 19 nt, Artificial Sequence
  Description of Artificial Sequence: Synthetic oligonucleotide
  Antisense strand to SEQ ID NO: 1494008
uuacucccagaucaguggc

SEQ ID NO: 1494010 - RNA, 19 nt, Artificial Sequence
  Description of Artificial Sequence: Synthetic oligonucleotide
  Sense strand starting at position 1426 of SEQ ID NO: 1244508
uugggaucuccgugcgaag

SEQ ID NO: 1494011 - RNA, 19 nt, Artificial Sequence
  Description of Artificial Sequence: Synthetic oligonucleotide
  Antisense strand to SEQ ID NO: 1494010
cuucgcacggagaucccaa

SEQ ID NO: 1494012 - RNA, 19 nt, Artificial Sequence
  Description of Artificial Sequence: Synthetic oligonucleotide
  Sense strand starting at position 1463 of SEQ ID NO: 1244508
aagggaaucucgucugaag

SEQ ID NO: 1494013 - RNA, 19 nt, Artificial Sequence
  Description of Artificial Sequence: Synthetic oligonucleotide
  Antisense strand to SEQ ID NO: 1494012
cuucagacgagauucccuu

SEQ ID NO: 1494014 - RNA, 19 nt, Artificial Sequence
  Description of Artificial Sequence: Synthetic oligonucleotide
  Sense strand starting at position 1465 of SEQ ID NO: 1244508
gggaaucucgucugaagag

SEQ ID NO: 1494015 - RNA, 19 nt, Artificial Sequence
  Description of Artificial Sequence: Synthetic oligonucleotide
  Antisense strand to SEQ ID NO: 1494014
cucuucagacgagauuccc

SEQ ID NO: 1494016 - RNA, 19 nt, Artificial Sequence
  Description of Artificial Sequence: Synthetic oligonucleotide
  Sense strand starting at position 1684 of SEQ ID NO: 1244508
aucggaaucucugcaacga

SEQ ID NO: 1494017 - RNA, 19 nt, Artificial Sequence
  Description of Artificial Sequence: Synthetic oligonucleotide
  Antisense strand to SEQ ID NO: 1494016
ucguugcagagauuccgau

SEQ ID NO: 1494018 - RNA, 19 nt, Artificial Sequence
  Description of Artificial Sequence: Synthetic oligonucleotide
  Sense strand starting at position 1891 of SEQ ID NO: 1244508
cccgcuucccuguagaaca

SEQ ID NO: 1494019 - RNA, 19 nt, Artificial Sequence
  Description of Artificial Sequence: Synthetic oligonucleotide
  Antisense strand to SEQ ID NO: 1494018
uguucuacagggaagcggg

SEQ ID NO: 1494020 - RNA, 19 nt, Artificial Sequence
  Description of Artificial Sequence: Synthetic oligonucleotide
  Sense strand starting at position 1980 of SEQ ID NO: 1244508
cuccgaggcucaucugaaa

SEQ ID NO: 1494021 - RNA, 19 nt, Artificial Sequence
  Description of Artificial Sequence: Synthetic oligonucleotide
  Antisense strand to SEQ ID NO: 1494020
uuucagaugagccucggag

SEQ ID NO: 1494022 - RNA, 19 nt, Artificial Sequence
  Description of Artificial Sequence: Synthetic oligonucleotide
  Sense strand starting at position 2063 of SEQ ID NO: 1244508
gucaacugucacggucuua

SEQ ID NO: 1494023 - RNA, 19 nt, Artificial Sequence
  Description of Artificial Sequence: Synthetic oligonucleotide
  Antisense strand to SEQ ID NO: 1494022
uaagaccgugacaguugac

SEQ ID NO: 1494024 - RNA, 19 nt, Artificial Sequence
  Description of Artificial Sequence: Synthetic oligonucleotide
  Sense strand starting at position 2073 of SEQ ID NO: 1244508
acggucuuauuauccuuau

SEQ ID NO: 1494025 - RNA, 19 nt, Artificial Sequence
  Description of Artificial Sequence: Synthetic oligonucleotide
  Antisense strand to SEQ ID NO: 1494024
auaaggauaauaagaccgu

SEQ ID NO: 1494026 - RNA, 19 nt, Artificial Sequence
  Description of Artificial Sequence: Synthetic oligonucleotide
  Sense strand starting at position 2076 of SEQ ID NO: 1244508
gucuuauuauccuuaucgu

SEQ ID NO: 1494027 - RNA, 19 nt, Artificial Sequence
  Description of Artificial Sequence: Synthetic oligonucleotide
  Antisense strand to SEQ ID NO: 1494026
acgauaaggauaauaagac

SEQ ID NO: 1494028 - RNA, 19 nt, Artificial Sequence
  Description of Artificial Sequence: Synthetic oligonucleotide
  Sense strand starting at position 2077 of SEQ ID NO: 1244508
ucuuauuauccuuaucgua

SEQ ID NO: 1494029 - RNA, 19 nt, Artificial Sequence
  Description of Artificial Sequence: Synthetic oligonucleotide
  Antisense strand to SEQ ID NO: 1494028
uacgauaaggauaauaaga

SEQ ID NO: 1494030 - RNA, 19 nt, Artificial Sequence
  Description of Artificial Sequence: Synthetic oligonucleotide
  Sense strand starting at position 2079 of SEQ ID NO: 1244508
uuauuauccuuaucguaga

SEQ ID NO: 1494031 - RNA, 19 nt, Artificial Sequence
  Description of Artificial Sequence: Synthetic oligonucleotide
  Antisense strand to SEQ ID NO: 1494030
ucuacgauaaggauaauaa

SEQ ID NO: 1494032 - RNA, 19 nt, Artificial Sequence
  Description of Artificial Sequence: Synthetic oligonucleotide
  Sense strand starting at position 2305 of SEQ ID NO: 1244508
ucacuuauuaggugaguga

SEQ ID NO: 1494033 - RNA, 19 nt, Artificial Sequence
  Description of Artificial Sequence: Synthetic oligonucleotide
  Antisense strand to SEQ ID NO: 1494032
ucacucaccuaauaaguga

SEQ ID NO: 1494034 - RNA, 19 nt, Artificial Sequence
  Description of Artificial Sequence: Synthetic oligonucleotide
  Sense strand starting at position 2309 of SEQ ID NO: 1244508
uuauuaggugagugaucgu

SEQ ID NO: 1494035 - RNA, 19 nt, Artificial Sequence
  Description of Artificial Sequence: Synthetic oligonucleotide
  Antisense strand to SEQ ID NO: 1494034
acgaucacucaccuaauaa

SEQ ID NO: 1494036 - RNA, 19 nt, Artificial Sequence
  Description of Artificial Sequence: Synthetic oligonucleotide
  Sense strand starting at position 2316 of SEQ ID NO: 1244508
gugagugaucgugagaaga

SEQ ID NO: 1494037 - RNA, 19 nt, Artificial Sequence
  Description of Artificial Sequence: Synthetic oligonucleotide
  Antisense strand to SEQ ID NO: 1494036
ucuucucacgaucacucac

SEQ ID NO: 1494038 - RNA, 19 nt, Artificial Sequence
  Description of Artificial Sequence: Synthetic oligonucleotide
  Sense strand starting at position 2326 of SEQ ID NO: 1244508
gugagaagaucguucugug

SEQ ID NO: 1494039 - RNA, 19 nt, Artificial Sequence
  Description of Artificial Sequence: Synthetic oligonucleotide
  Antisense strand to SEQ ID NO: 1494038
cacagaacgaucuucucac

SEQ ID NO: 1494040 - RNA, 19 nt, Artificial Sequence
  Description of Artificial Sequence: Synthetic oligonucleotide
  Sense strand starting at position 2330 of SEQ ID NO: 1244508
gaagaucguucugugccua

SEQ ID NO: 1494041 - RNA, 19 nt, Artificial Sequence
  Description of Artificial Sequence: Synthetic oligonucleotide
  Antisense strand to SEQ ID NO: 1494040
uaggcacagaacgaucuuc

SEQ ID NO: 1494042 - RNA, 19 nt, Artificial Sequence
  Description of Artificial Sequence: Synthetic oligonucleotide
  Sense strand starting at position 2401 of SEQ ID NO: 1244508
uauagaguuguaugaaaug

SEQ ID NO: 1494043 - RNA, 19 nt, Artificial Sequence
  Description of Artificial Sequence: Synthetic oligonucleotide
  Antisense strand to SEQ ID NO: 1494042
cauuucauacaacucuaua

SEQ ID NO: 1494044 - RNA, 19 nt, Artificial Sequence
  Description of Artificial Sequence: Synthetic oligonucleotide
  Sense strand starting at position 2406 of SEQ ID NO: 1244508
aguuguaugaaauguguca

SEQ ID NO: 1494045 - RNA, 19 nt, Artificial Sequence
  Description of Artificial Sequence: Synthetic oligonucleotide
  Antisense strand to SEQ ID NO: 1494044
ugacacauuucauacaacu

SEQ ID NO: 1494046 - RNA, 19 nt, Artificial Sequence
  Description of Artificial Sequence: Synthetic oligonucleotide
  Sense strand starting at position 2408 of SEQ ID NO: 1244508
uuguaugaaaugugucagu

SEQ ID NO: 1494047 - RNA, 19 nt, Artificial Sequence
  Description of Artificial Sequence: Synthetic oligonucleotide
  Antisense strand to SEQ ID NO: 1494046
acugacacauuucauacaa

SEQ ID NO: 1494048 - RNA, 19 nt, Artificial Sequence
  Description of Artificial Sequence: Synthetic oligonucleotide
  Sense strand starting at position 2413 of SEQ ID NO: 1244508
ugaaaugugucaguacaua

SEQ ID NO: 1494049 - RNA, 19 nt, Artificial Sequence
  Description of Artificial Sequence: Synthetic oligonucleotide
  Antisense strand to SEQ ID NO: 1494048
uauguacugacacauuuca

SEQ ID NO: 1494050 - RNA, 19 nt, Artificial Sequence
  Description of Artificial Sequence: Synthetic oligonucleotide
  Sense strand starting at position 2418 of SEQ ID NO: 1244508
ugugucaguacauauaaag

SEQ ID NO: 1494051 - RNA, 19 nt, Artificial Sequence
  Description of Artificial Sequence: Synthetic oligonucleotide
  Antisense strand to SEQ ID NO: 1494050
cuuuauauguacugacaca

SEQ ID NO: 1494052 - RNA, 19 nt, Artificial Sequence
  Description of Artificial Sequence: Synthetic oligonucleotide
  Sense strand starting at position 2851 of SEQ ID NO: 1244508
ugggcuuaacacugcgaga

SEQ ID NO: 1494053 - RNA, 19 nt, Artificial Sequence
  Description of Artificial Sequence: Synthetic oligonucleotide
  Antisense strand to SEQ ID NO: 1494052
ucucgcaguguuaagccca

SEQ ID NO: 1494054 - RNA, 19 nt, Artificial Sequence
  Description of Artificial Sequence: Synthetic oligonucleotide
  Sense strand starting at position 3006 of SEQ ID NO: 1244508
uguggcagucccuagaaga

SEQ ID NO: 1494055 - RNA, 19 nt, Artificial Sequence
  Description of Artificial Sequence: Synthetic oligonucleotide
  Antisense strand to SEQ ID NO: 1494054
ucuucuagggacugccaca

SEQ ID NO: 1494056 - RNA, 19 nt, Artificial Sequence
  Description of Artificial Sequence: Synthetic oligonucleotide
  Sense strand starting at position 3121 of SEQ ID NO: 1244508
cuugaagcccaguaagacu

SEQ ID NO: 1494057 - RNA, 19 nt, Artificial Sequence
  Description of Artificial Sequence: Synthetic oligonucleotide
  Antisense strand to SEQ ID NO: 1494056
agucuuacugggcuucaag

SEQ ID NO: 1494058 - RNA, 19 nt, Artificial Sequence
  Description of Artificial Sequence: Synthetic oligonucleotide
  Sense strand starting at position 3212 of SEQ ID NO: 1244508
gugggaauuugauguguaa

SEQ ID NO: 1494059 - RNA, 19 nt, Artificial Sequence
  Description of Artificial Sequence: Synthetic oligonucleotide
  Antisense strand to SEQ ID NO: 1494058
uuacacaucaaauucccac

SEQ ID NO: 1494060 - RNA, 19 nt, Artificial Sequence
  Description of Artificial Sequence: Synthetic oligonucleotide
  Sense strand starting at position 3271 of SEQ ID NO: 1244508
gcuguaugguauguacuca

SEQ ID NO: 1494061 - RNA, 19 nt, Artificial Sequence
  Description of Artificial Sequence: Synthetic oligonucleotide
  Antisense strand to SEQ ID NO: 1494060
ugaguacauaccauacagc

SEQ ID NO: 1494062 - RNA, 19 nt, Artificial Sequence
  Description of Artificial Sequence: Synthetic oligonucleotide
  Sense strand starting at position 3276 of SEQ ID NO: 1244508
augguauguacucaaggca

SEQ ID NO: 1494063 - RNA, 19 nt, Artificial Sequence
  Description of Artificial Sequence: Synthetic oligonucleotide
  Antisense strand to SEQ ID NO: 1494062
ugccuugaguacauaccau

SEQ ID NO: 1494064 - RNA, 19 nt, Artificial Sequence
  Description of Artificial Sequence: Synthetic oligonucleotide
  Sense strand starting at position 3279 of SEQ ID NO: 1244508
guauguacucaaggcauga

SEQ ID NO: 1494065 - RNA, 19 nt, Artificial Sequence
  Description of Artificial Sequence: Synthetic oligonucleotide
  Antisense strand to SEQ ID NO: 1494064
ucaugccuugaguacauac

SEQ ID NO: 1494066 - RNA, 19 nt, Artificial Sequence
  Description of Artificial Sequence: Synthetic oligonucleotide
  Sense strand starting at position 3283 of SEQ ID NO: 1244508
guacucaaggcaugaguca

SEQ ID NO: 1494067 - RNA, 19 nt, Artificial Sequence
  Description of Artificial Sequence: Synthetic oligonucleotide
  Antisense strand to SEQ ID NO: 1494066
ugacucaugccuugaguac

SEQ ID NO: 1494068 - RNA, 19 nt, Artificial Sequence
  Description of Artificial Sequence: Synthetic oligonucleotide
  Sense strand starting at position 3359 of SEQ ID NO: 1244508
gggagaagcuaccucauca

SEQ ID NO: 1494069 - RNA, 19 nt, Artificial Sequence
  Description of Artificial Sequence: Synthetic oligonucleotide
  Antisense strand to SEQ ID NO: 1494068
ugaugagguagcuucuccc

SEQ ID NO: 1494070 - RNA, 19 nt, Artificial Sequence
  Description of Artificial Sequence: Synthetic oligonucleotide
  Sense strand starting at position 3639 of SEQ ID NO: 1244508
gugguauggaguggauacu

SEQ ID NO: 1494071 - RNA, 19 nt, Artificial Sequence
  Description of Artificial Sequence: Synthetic oligonucleotide
  Antisense strand to SEQ ID NO: 1494070
aguauccacuccauaccac

SEQ ID NO: 1494072 - RNA, 19 nt, Artificial Sequence
  Description of Artificial Sequence: Synthetic oligonucleotide
  Sense strand starting at position 3649 of SEQ ID NO: 1244508
guggauacucaguaggcau

SEQ ID NO: 1494073 - RNA, 19 nt, Artificial Sequence
  Description of Artificial Sequence: Synthetic oligonucleotide
  Antisense strand to SEQ ID NO: 1494072
augccuacugaguauccac

SEQ ID NO: 1494074 - RNA, 19 nt, Artificial Sequence
  Description of Artificial Sequence: Synthetic oligonucleotide
  Sense strand starting at position 502 of SEQ ID NO: 1244509
agcauucuuguguaauuag

SEQ ID NO: 1494075 - RNA, 19 nt, Artificial Sequence
  Description of Artificial Sequence: Synthetic oligonucleotide
  Antisense strand to SEQ ID NO: 1494074
cuaauuacacaagaaugcu

SEQ ID NO: 1494076 - RNA, 19 nt, Artificial Sequence
  Description of Artificial Sequence: Synthetic oligonucleotide
  Sense strand starting at position 505 of SEQ ID NO: 1244509
auucuuguguaauuagcau

SEQ ID NO: 1494077 - RNA, 19 nt, Artificial Sequence
  Description of Artificial Sequence: Synthetic oligonucleotide
  Antisense strand to SEQ ID NO: 1494076
augcuaauuacacaagaau

SEQ ID NO: 1494078 - RNA, 19 nt, Artificial Sequence
  Description of Artificial Sequence: Synthetic oligonucleotide
  Sense strand starting at position 697 of SEQ ID NO: 1244509
agcuauucccuguacaaga

SEQ ID NO: 1494079 - RNA, 19 nt, Artificial Sequence
  Description of Artificial Sequence: Synthetic oligonucleotide
  Antisense strand to SEQ ID NO: 1494078
ucuuguacagggaauagcu

SEQ ID NO: 1494080 - RNA, 19 nt, Artificial Sequence
  Description of Artificial Sequence: Synthetic oligonucleotide
  Sense strand starting at position 1057 of SEQ ID NO: 1244509
gagcgaauuugggauauaa

SEQ ID NO: 1494081 - RNA, 19 nt, Artificial Sequence
  Description of Artificial Sequence: Synthetic oligonucleotide
  Antisense strand to SEQ ID NO: 1494080
uuauaucccaaauucgcuc

SEQ ID NO: 1494082 - RNA, 19 nt, Artificial Sequence
  Description of Artificial Sequence: Synthetic oligonucleotide
  Sense strand starting at position 1103 of SEQ ID NO: 1244509
gggaauuucuauuauggag

SEQ ID NO: 1494083 - RNA, 19 nt, Artificial Sequence
  Description of Artificial Sequence: Synthetic oligonucleotide
  Antisense strand to SEQ ID NO: 1494082
cuccauaauagaaauuccc

SEQ ID NO: 1494084 - RNA, 19 nt, Artificial Sequence
  Description of Artificial Sequence: Synthetic oligonucleotide
  Sense strand starting at position 1110 of SEQ ID NO: 1244509
ucuauuauggagcacagua

SEQ ID NO: 1494085 - RNA, 19 nt, Artificial Sequence
  Description of Artificial Sequence: Synthetic oligonucleotide
  Antisense strand to SEQ ID NO: 1494084
uacugugcuccauaauaga

SEQ ID NO: 1494086 - RNA, 19 nt, Artificial Sequence
  Description of Artificial Sequence: Synthetic oligonucleotide
  Sense strand starting at position 1128 of SEQ ID NO: 1244509
acguaucaugaagauucuu

SEQ ID NO: 1494087 - RNA, 19 nt, Artificial Sequence
  Description of Artificial Sequence: Synthetic oligonucleotide
  Antisense strand to SEQ ID NO: 1494086
aagaaucuucaugauacgu

SEQ ID NO: 1494088 - RNA, 19 nt, Artificial Sequence
  Description of Artificial Sequence: Synthetic oligonucleotide
  Sense strand starting at position 1133 of SEQ ID NO: 1244509
ucaugaagauucuuugaug

SEQ ID NO: 1494089 - RNA, 19 nt, Artificial Sequence
  Description of Artificial Sequence: Synthetic oligonucleotide
  Antisense strand to SEQ ID NO: 1494088
caucaaagaaucuucauga

SEQ ID NO: 1494090 - RNA, 19 nt, Artificial Sequence
  Description of Artificial Sequence: Synthetic oligonucleotide
  Sense strand starting at position 1162 of SEQ ID NO: 1244509
aggauuuacuaaugaccuu

SEQ ID NO: 1494091 - RNA, 19 nt, Artificial Sequence
  Description of Artificial Sequence: Synthetic oligonucleotide
  Antisense strand to SEQ ID NO: 1494090
aaggucauuaguaaauccu

SEQ ID NO: 1494092 - RNA, 19 nt, Artificial Sequence
  Description of Artificial Sequence: Synthetic oligonucleotide
  Sense strand starting at position 1257 of SEQ ID NO: 1244509
ccuacugccuugguacaaa

SEQ ID NO: 1494093 - RNA, 19 nt, Artificial Sequence
  Description of Artificial Sequence: Synthetic oligonucleotide
  Antisense strand to SEQ ID NO: 1494092
uuuguaccaaggcaguagg

SEQ ID NO: 1494094 - RNA, 19 nt, Artificial Sequence
  Description of Artificial Sequence: Synthetic oligonucleotide
  Sense strand starting at position 1344 of SEQ ID NO: 1244509
ucagguuaggauggaagua

SEQ ID NO: 1494095 - RNA, 19 nt, Artificial Sequence
  Description of Artificial Sequence: Synthetic oligonucleotide
  Antisense strand to SEQ ID NO: 1494094
uacuuccauccuaaccuga

SEQ ID NO: 1494096 - RNA, 19 nt, Artificial Sequence
  Description of Artificial Sequence: Synthetic oligonucleotide
  Sense strand starting at position 1373 of SEQ ID NO: 1244509
gugcauuaagaauggaugu

SEQ ID NO: 1494097 - RNA, 19 nt, Artificial Sequence
  Description of Artificial Sequence: Synthetic oligonucleotide
  Antisense strand to SEQ ID NO: 1494096
acauccauucuuaaugcac

SEQ ID NO: 1494098 - RNA, 19 nt, Artificial Sequence
  Description of Artificial Sequence: Synthetic oligonucleotide
  Sense strand starting at position 1374 of SEQ ID NO: 1244509
ugcauuaagaauggaugua

SEQ ID NO: 1494099 - RNA, 19 nt, Artificial Sequence
  Description of Artificial Sequence: Synthetic oligonucleotide
  Antisense strand to SEQ ID NO: 1494098
uacauccauucuuaaugca

SEQ ID NO: 1494100 - RNA, 19 nt, Artificial Sequence
  Description of Artificial Sequence: Synthetic oligonucleotide
  Sense strand starting at position 1386 of SEQ ID NO: 1244509
ggauguauagcacauacua

SEQ ID NO: 1494101 - RNA, 19 nt, Artificial Sequence
  Description of Artificial Sequence: Synthetic oligonucleotide
  Antisense strand to SEQ ID NO: 1494100
uaguaugugcuauacaucc

SEQ ID NO: 1494102 - RNA, 19 nt, Artificial Sequence
  Description of Artificial Sequence: Synthetic oligonucleotide
  Sense strand starting at position 1449 of SEQ ID NO: 1244509
gccacacaucauugucuga

SEQ ID NO: 1494103 - RNA, 19 nt, Artificial Sequence
  Description of Artificial Sequence: Synthetic oligonucleotide
  Antisense strand to SEQ ID NO: 1494102
ucagacaaugauguguggc

SEQ ID NO: 1494104 - RNA, 19 nt, Artificial Sequence
  Description of Artificial Sequence: Synthetic oligonucleotide
  Sense strand starting at position 1485 of SEQ ID NO: 1244509
gaacacauuuguugguuaa

SEQ ID NO: 1494105 - RNA, 19 nt, Artificial Sequence
  Description of Artificial Sequence: Synthetic oligonucleotide
  Antisense strand to SEQ ID NO: 1494104
uuaaccaacaaauguguuc

SEQ ID NO: 1494106 - RNA, 19 nt, Artificial Sequence
  Description of Artificial Sequence: Synthetic oligonucleotide
  Sense strand starting at position 1524 of SEQ ID NO: 1244509
aauguaccaugagcugaau

SEQ ID NO: 1494107 - RNA, 19 nt, Artificial Sequence
  Description of Artificial Sequence: Synthetic oligonucleotide
  Antisense strand to SEQ ID NO: 1494106
auucagcucaugguacauu

SEQ ID NO: 1494108 - RNA, 19 nt, Artificial Sequence
  Description of Artificial Sequence: Synthetic oligonucleotide
  Sense strand starting at position 1551 of SEQ ID NO: 1244509
gaaugcaugcgugcauuau

SEQ ID NO: 1494109 - RNA, 19 nt, Artificial Sequence
  Description of Artificial Sequence: Synthetic oligonucleotide
  Antisense strand to SEQ ID NO: 1494108
auaaugcacgcaugcauuc

SEQ ID NO: 1494110 - RNA, 19 nt, Artificial Sequence
  Description of Artificial Sequence: Synthetic oligonucleotide
  Sense strand starting at position 1638 of SEQ ID NO: 1244509
aguccuagccgagagaagu

SEQ ID NO: 1494111 - RNA, 19 nt, Artificial Sequence
  Description of Artificial Sequence: Synthetic oligonucleotide
  Antisense strand to SEQ ID NO: 1494110
acuucucucggcuaggacu

SEQ ID NO: 1494112 - RNA, 19 nt, Artificial Sequence
  Description of Artificial Sequence: Synthetic oligonucleotide
  Sense strand starting at position 2296 of SEQ ID NO: 1244509
gcccuaucaggguaauggu

SEQ ID NO: 1494113 - RNA, 19 nt, Artificial Sequence
  Description of Artificial Sequence: Synthetic oligonucleotide
  Antisense strand to SEQ ID NO: 1494112
accauuacccugauagggc

SEQ ID NO: 1494114 - RNA, 19 nt, Artificial Sequence
  Description of Artificial Sequence: Synthetic oligonucleotide
  Sense strand starting at position 2794 of SEQ ID NO: 1244509
cggugagugucaacccgaa

SEQ ID NO: 1494115 - RNA, 19 nt, Artificial Sequence
  Description of Artificial Sequence: Synthetic oligonucleotide
  Antisense strand to SEQ ID NO: 1494114
uucggguugacacucaccg

SEQ ID NO: 1494116 - RNA, 19 nt, Artificial Sequence
  Description of Artificial Sequence: Synthetic oligonucleotide
  Sense strand starting at position 2798 of SEQ ID NO: 1244509
gagugucaacccgaaccua

SEQ ID NO: 1494117 - RNA, 19 nt, Artificial Sequence
  Description of Artificial Sequence: Synthetic oligonucleotide
  Antisense strand to SEQ ID NO: 1494116
uagguucggguugacacuc

SEQ ID NO: 1494118 - RNA, 19 nt, Artificial Sequence
  Description of Artificial Sequence: Synthetic oligonucleotide
  Sense strand starting at position 2980 of SEQ ID NO: 1244509
uuggcucuugcuugaaaca

SEQ ID NO: 1494119 - RNA, 19 nt, Artificial Sequence
  Description of Artificial Sequence: Synthetic oligonucleotide
  Antisense strand to SEQ ID NO: 1494118
uguuucaagcaagagccaa

SEQ ID NO: 1494120 - RNA, 19 nt, Artificial Sequence
  Description of Artificial Sequence: Synthetic oligonucleotide
  Sense strand starting at position 2981 of SEQ ID NO: 1244509
uggcucuugcuugaaacaa

SEQ ID NO: 1494121 - RNA, 19 nt, Artificial Sequence
  Description of Artificial Sequence: Synthetic oligonucleotide
  Antisense strand to SEQ ID NO: 1494120
uuguuucaagcaagagcca

SEQ ID NO: 1494122 - RNA, 19 nt, Artificial Sequence
  Description of Artificial Sequence: Synthetic oligonucleotide
  Sense strand starting at position 3284 of SEQ ID NO: 1244509
gccagcuggacugaugaga

SEQ ID NO: 1494123 - RNA, 19 nt, Artificial Sequence
  Description of Artificial Sequence: Synthetic oligonucleotide
  Antisense strand to SEQ ID NO: 1494122
ucucaucaguccagcuggc

SEQ ID NO: 1494124 - RNA, 19 nt, Artificial Sequence
  Description of Artificial Sequence: Synthetic oligonucleotide
  Sense strand starting at position 3339 of SEQ ID NO: 1244509
uguccuccaugccuagaaa

SEQ ID NO: 1494125 - RNA, 19 nt, Artificial Sequence
  Description of Artificial Sequence: Synthetic oligonucleotide
  Antisense strand to SEQ ID NO: 1494124
uuucuaggcauggaggaca

SEQ ID NO: 1494126 - RNA, 19 nt, Artificial Sequence
  Description of Artificial Sequence: Synthetic oligonucleotide
  Sense strand starting at position 3358 of SEQ ID NO: 1244509
gaaacagucugagaaggag

SEQ ID NO: 1494127 - RNA, 19 nt, Artificial Sequence
  Description of Artificial Sequence: Synthetic oligonucleotide
  Antisense strand to SEQ ID NO: 1494126
cuccuucucagacuguuuc

SEQ ID NO: 1494128 - RNA, 19 nt, Artificial Sequence
  Description of Artificial Sequence: Synthetic oligonucleotide
  Sense strand starting at position 3404 of SEQ ID NO: 1244509
uugauucgguguuccauuu

SEQ ID NO: 1494129 - RNA, 19 nt, Artificial Sequence
  Description of Artificial Sequence: Synthetic oligonucleotide
  Antisense strand to SEQ ID NO: 1494128
aaauggaacaccgaaucaa

SEQ ID NO: 1494130 - RNA, 19 nt, Artificial Sequence
  Description of Artificial Sequence: Synthetic oligonucleotide
  Sense strand starting at position 3466 of SEQ ID NO: 1244509
ccagaaauucuuggcuggu

SEQ ID NO: 1494131 - RNA, 19 nt, Artificial Sequence
  Description of Artificial Sequence: Synthetic oligonucleotide
  Antisense strand to SEQ ID NO: 1494130
accagccaagaauuucugg

SEQ ID NO: 1494132 - RNA, 19 nt, Artificial Sequence
  Description of Artificial Sequence: Synthetic oligonucleotide
  Sense strand starting at position 3467 of SEQ ID NO: 1244509
cagaaauucuuggcuggua

SEQ ID NO: 1494133 - RNA, 19 nt, Artificial Sequence
  Description of Artificial Sequence: Synthetic oligonucleotide
  Antisense strand to SEQ ID NO: 1494132
uaccagccaagaauuucug

SEQ ID NO: 1494134 - RNA, 19 nt, Artificial Sequence
  Description of Artificial Sequence: Synthetic oligonucleotide
  Sense strand starting at position 3468 of SEQ ID NO: 1244509
agaaauucuuggcugguaa

SEQ ID NO: 1494135 - RNA, 19 nt, Artificial Sequence
  Description of Artificial Sequence: Synthetic oligonucleotide
  Antisense strand to SEQ ID NO: 1494134
uuaccagccaagaauuucu

SEQ ID NO: 1494136 - RNA, 19 nt, Artificial Sequence
  Description of Artificial Sequence: Synthetic oligonucleotide
  Sense strand starting at position 3469 of SEQ ID NO: 1244509
gaaauucuuggcugguaac

SEQ ID NO: 1494137 - RNA, 19 nt, Artificial Sequence
  Description of Artificial Sequence: Synthetic oligonucleotide
  Antisense strand to SEQ ID NO: 1494136
guuaccagccaagaauuuc

SEQ ID NO: 1494138 - RNA, 19 nt, Artificial Sequence
  Description of Artificial Sequence: Synthetic oligonucleotide
  Sense strand starting at position 3561 of SEQ ID NO: 1244509
gcugaugcugcaucguaau

SEQ ID NO: 1494139 - RNA, 19 nt, Artificial Sequence
  Description of Artificial Sequence: Synthetic oligonucleotide
  Antisense strand to SEQ ID NO: 1494138
auuacgaugcagcaucagc

SEQ ID NO: 1494140 - RNA, 19 nt, Artificial Sequence
  Description of Artificial Sequence: Synthetic oligonucleotide
  Sense strand starting at position 3634 of SEQ ID NO: 1244509
ccgugagaucuggauauua

SEQ ID NO: 1494141 - RNA, 19 nt, Artificial Sequence
  Description of Artificial Sequence: Synthetic oligonucleotide
  Antisense strand to SEQ ID NO: 1494140
uaauauccagaucucacgg

SEQ ID NO: 1494142 - RNA, 19 nt, Artificial Sequence
  Description of Artificial Sequence: Synthetic oligonucleotide
  Sense strand starting at position 3644 of SEQ ID NO: 1244509
uggauauuaucacuccguu

SEQ ID NO: 1494143 - RNA, 19 nt, Artificial Sequence
  Description of Artificial Sequence: Synthetic oligonucleotide
  Antisense strand to SEQ ID NO: 1494142
aacggagugauaauaucca

SEQ ID NO: 1494144 - RNA, 19 nt, Artificial Sequence
  Description of Artificial Sequence: Synthetic oligonucleotide
  Sense strand starting at position 3684 of SEQ ID NO: 1244509
gaggcuuaguucuuggguu

SEQ ID NO: 1494145 - RNA, 19 nt, Artificial Sequence
  Description of Artificial Sequence: Synthetic oligonucleotide
  Antisense strand to SEQ ID NO: 1494144
aacccaagaacuaagccuc

SEQ ID NO: 1494146 - RNA, 19 nt, Artificial Sequence
  Description of Artificial Sequence: Synthetic oligonucleotide
  Sense strand starting at position 3686 of SEQ ID NO: 1244509
ggcuuaguucuuggguucu

SEQ ID NO: 1494147 - RNA, 19 nt, Artificial Sequence
  Description of Artificial Sequence: Synthetic oligonucleotide
  Antisense strand to SEQ ID NO: 1494146
agaacccaagaacuaagcc

SEQ ID NO: 1494148 - RNA, 19 nt, Artificial Sequence
  Description of Artificial Sequence: Synthetic oligonucleotide
  Sense strand starting at position 3760 of SEQ ID NO: 1244509
uggaccuauugcuugagau

SEQ ID NO: 1494149 - RNA, 19 nt, Artificial Sequence
  Description of Artificial Sequence: Synthetic oligonucleotide
  Antisense strand to SEQ ID NO: 1494148
aucucaagcaauaggucca

SEQ ID NO: 1494150 - RNA, 19 nt, Artificial Sequence
  Description of Artificial Sequence: Synthetic oligonucleotide
  Sense strand starting at position 3761 of SEQ ID NO: 1244509
ggaccuauugcuugagaug

SEQ ID NO: 1494151 - RNA, 19 nt, Artificial Sequence
  Description of Artificial Sequence: Synthetic oligonucleotide
  Antisense strand to SEQ ID NO: 1494150
caucucaagcaauaggucc

SEQ ID NO: 1494152 - RNA, 19 nt, Artificial Sequence
  Description of Artificial Sequence: Synthetic oligonucleotide
  Sense strand starting at position 3778 of SEQ ID NO: 1244509
ugaguucccaguugaaaga

SEQ ID NO: 1494153 - RNA, 19 nt, Artificial Sequence
  Description of Artificial Sequence: Synthetic oligonucleotide
  Antisense strand to SEQ ID NO: 1494152
ucuuucaacugggaacuca

SEQ ID NO: 1494154 - RNA, 19 nt, Artificial Sequence
  Description of Artificial Sequence: Synthetic oligonucleotide
  Sense strand starting at position 27 of SEQ ID NO: 1244510
cagagacugucugcuucua

SEQ ID NO: 1494155 - RNA, 19 nt, Artificial Sequence
  Description of Artificial Sequence: Synthetic oligonucleotide
  Antisense strand to SEQ ID NO: 1494154
uagaagcagacagucucug

SEQ ID NO: 1494156 - RNA, 19 nt, Artificial Sequence
  Description of Artificial Sequence: Synthetic oligonucleotide
  Sense strand starting at position 29 of SEQ ID NO: 1244510
gagacugucugcuucuacu

SEQ ID NO: 1494157 - RNA, 19 nt, Artificial Sequence
  Description of Artificial Sequence: Synthetic oligonucleotide
  Antisense strand to SEQ ID NO: 1494156
aguagaagcagacagucuc

SEQ ID NO: 1494158 - RNA, 19 nt, Artificial Sequence
  Description of Artificial Sequence: Synthetic oligonucleotide
  Sense strand starting at position 58 of SEQ ID NO: 1244510
gagggaagauaaugaauca

SEQ ID NO: 1494159 - RNA, 19 nt, Artificial Sequence
  Description of Artificial Sequence: Synthetic oligonucleotide
  Antisense strand to SEQ ID NO: 1494158
ugauucauuaucuucccuc

SEQ ID NO: 1494160 - RNA, 19 nt, Artificial Sequence
  Description of Artificial Sequence: Synthetic oligonucleotide
  Sense strand starting at position 79 of SEQ ID NO: 1244510
ccucucguaagcuagagau

SEQ ID NO: 1494161 - RNA, 19 nt, Artificial Sequence
  Description of Artificial Sequence: Synthetic oligonucleotide
  Antisense strand to SEQ ID NO: 1494160
aucucuagcuuacgagagg

SEQ ID NO: 1494162 - RNA, 19 nt, Artificial Sequence
  Description of Artificial Sequence: Synthetic oligonucleotide
  Sense strand starting at position 81 of SEQ ID NO: 1244510
ucucguaagcuagagauga

SEQ ID NO: 1494163 - RNA, 19 nt, Artificial Sequence
  Description of Artificial Sequence: Synthetic oligonucleotide
  Antisense strand to SEQ ID NO: 1494162
ucaucucuagcuuacgaga

SEQ ID NO: 1494164 - RNA, 19 nt, Artificial Sequence
  Description of Artificial Sequence: Synthetic oligonucleotide
  Sense strand starting at position 83 of SEQ ID NO: 1244510
ucguaagcuagagaugaaa

SEQ ID NO: 1494165 - RNA, 19 nt, Artificial Sequence
  Description of Artificial Sequence: Synthetic oligonucleotide
  Antisense strand to SEQ ID NO: 1494164
uuucaucucuagcuuacga

SEQ ID NO: 1494166 - RNA, 19 nt, Artificial Sequence
  Description of Artificial Sequence: Synthetic oligonucleotide
  Sense strand starting at position 216 of SEQ ID NO: 1244510
aagaaaguagcuugaccau

SEQ ID NO: 1494167 - RNA, 19 nt, Artificial Sequence
  Description of Artificial Sequence: Synthetic oligonucleotide
  Antisense strand to SEQ ID NO: 1494166
auggucaagcuacuuucuu

SEQ ID NO: 1494168 - RNA, 19 nt, Artificial Sequence
  Description of Artificial Sequence: Synthetic oligonucleotide
  Sense strand starting at position 314 of SEQ ID NO: 1244510
gccagcguucuacaaacau

SEQ ID NO: 1494169 - RNA, 19 nt, Artificial Sequence
  Description of Artificial Sequence: Synthetic oligonucleotide
  Antisense strand to SEQ ID NO: 1494168
auguuuguagaacgcuggc

SEQ ID NO: 1494170 - RNA, 19 nt, Artificial Sequence
  Description of Artificial Sequence: Synthetic oligonucleotide
  Sense strand starting at position 355 of SEQ ID NO: 1244510
agccguucucaucauacau

SEQ ID NO: 1494171 - RNA, 19 nt, Artificial Sequence
  Description of Artificial Sequence: Synthetic oligonucleotide
  Antisense strand to SEQ ID NO: 1494170
auguaugaugagaacggcu

SEQ ID NO: 1494172 - RNA, 19 nt, Artificial Sequence
  Description of Artificial Sequence: Synthetic oligonucleotide
  Sense strand starting at position 456 of SEQ ID NO: 1244510
aucgcuugagcucaaggaa

SEQ ID NO: 1494173 - RNA, 19 nt, Artificial Sequence
  Description of Artificial Sequence: Synthetic oligonucleotide
  Antisense strand to SEQ ID NO: 1494172
uuccuugagcucaagcgau

SEQ ID NO: 1494174 - RNA, 19 nt, Artificial Sequence
  Description of Artificial Sequence: Synthetic oligonucleotide
  Sense strand starting at position 594 of SEQ ID NO: 1244510
gcuugagccugggaauuua

SEQ ID NO: 1494175 - RNA, 19 nt, Artificial Sequence
  Description of Artificial Sequence: Synthetic oligonucleotide
  Antisense strand to SEQ ID NO: 1494174
uaaauucccaggcucaagc

SEQ ID NO: 1494176 - RNA, 19 nt, Artificial Sequence
  Description of Artificial Sequence: Synthetic oligonucleotide
  Sense strand starting at position 794 of SEQ ID NO: 1244510
gcuggauccgguuggaacu

SEQ ID NO: 1494177 - RNA, 19 nt, Artificial Sequence
  Description of Artificial Sequence: Synthetic oligonucleotide
  Antisense strand to SEQ ID NO: 1494176
aguuccaaccggauccagc

SEQ ID NO: 1494178 - RNA, 19 nt, Artificial Sequence
  Description of Artificial Sequence: Synthetic oligonucleotide
  Sense strand starting at position 918 of SEQ ID NO: 1244510
ccuggaaagccacguugua

SEQ ID NO: 1494179 - RNA, 19 nt, Artificial Sequence
  Description of Artificial Sequence: Synthetic oligonucleotide
  Antisense strand to SEQ ID NO: 1494178
uacaacguggcuuuccagg

SEQ ID NO: 1494180 - RNA, 19 nt, Artificial Sequence
  Description of Artificial Sequence: Synthetic oligonucleotide
  Sense strand starting at position 935 of SEQ ID NO: 1244510
uaggguuggcuccaagaga

SEQ ID NO: 1494181 - RNA, 19 nt, Artificial Sequence
  Description of Artificial Sequence: Synthetic oligonucleotide
  Antisense strand to SEQ ID NO: 1494180
ucucuuggagccaacccua

SEQ ID NO: 1494182 - RNA, 19 nt, Artificial Sequence
  Description of Artificial Sequence: Synthetic oligonucleotide
  Sense strand starting at position 1055 of SEQ ID NO: 1244510
ggugucaguccagagagga

SEQ ID NO: 1494183 - RNA, 19 nt, Artificial Sequence
  Description of Artificial Sequence: Synthetic oligonucleotide
  Antisense strand to SEQ ID NO: 1494182
uccucucuggacugacacc

SEQ ID NO: 1494184 - RNA, 19 nt, Artificial Sequence
  Description of Artificial Sequence: Synthetic oligonucleotide
  Sense strand starting at position 1137 of SEQ ID NO: 1244510
cuccgagucuuguuaacuc

SEQ ID NO: 1494185 - RNA, 19 nt, Artificial Sequence
  Description of Artificial Sequence: Synthetic oligonucleotide
  Antisense strand to SEQ ID NO: 1494184
gaguuaacaagacucggag

SEQ ID NO: 1494186 - RNA, 19 nt, Artificial Sequence
  Description of Artificial Sequence: Synthetic oligonucleotide
  Sense strand starting at position 1145 of SEQ ID NO: 1244510
cuuguuaacucgcuuuaua

SEQ ID NO: 1494187 - RNA, 19 nt, Artificial Sequence
  Description of Artificial Sequence: Synthetic oligonucleotide
  Antisense strand to SEQ ID NO: 1494186
uauaaagcgaguuaacaag

SEQ ID NO: 1494188 - RNA, 19 nt, Artificial Sequence
  Description of Artificial Sequence: Synthetic oligonucleotide
  Sense strand starting at position 1148 of SEQ ID NO: 1244510
guuaacucgcuuuauacca

SEQ ID NO: 1494189 - RNA, 19 nt, Artificial Sequence
  Description of Artificial Sequence: Synthetic oligonucleotide
  Antisense strand to SEQ ID NO: 1494188
ugguauaaagcgaguuaac

SEQ ID NO: 1494190 - RNA, 19 nt, Artificial Sequence
  Description of Artificial Sequence: Synthetic oligonucleotide
  Sense strand starting at position 1330 of SEQ ID NO: 1244510
ggauguccaguguguaaac

SEQ ID NO: 1494191 - RNA, 19 nt, Artificial Sequence
  Description of Artificial Sequence: Synthetic oligonucleotide
  Antisense strand to SEQ ID NO: 1494190
guuuacacacuggacaucc

SEQ ID NO: 1494192 - RNA, 19 nt, Artificial Sequence
  Description of Artificial Sequence: Synthetic oligonucleotide
  Sense strand starting at position 1364 of SEQ ID NO: 1244510
gcagaaagcgugcaguucu

SEQ ID NO: 1494193 - RNA, 19 nt, Artificial Sequence
  Description of Artificial Sequence: Synthetic oligonucleotide
  Antisense strand to SEQ ID NO: 1494192
agaacugcacgcuuucugc

SEQ ID NO: 1494194 - RNA, 19 nt, Artificial Sequence
  Description of Artificial Sequence: Synthetic oligonucleotide
  Sense strand starting at position 1372 of SEQ ID NO: 1244510
cgugcaguucucuaggaca

SEQ ID NO: 1494195 - RNA, 19 nt, Artificial Sequence
  Description of Artificial Sequence: Synthetic oligonucleotide
  Antisense strand to SEQ ID NO: 1494194
uguccuagagaacugcacg

SEQ ID NO: 1494196 - RNA, 19 nt, Artificial Sequence
  Description of Artificial Sequence: Synthetic oligonucleotide
  Sense strand starting at position 1620 of SEQ ID NO: 1244510
agcagagguuacccggaua

SEQ ID NO: 1494197 - RNA, 19 nt, Artificial Sequence
  Description of Artificial Sequence: Synthetic oligonucleotide
  Antisense strand to SEQ ID NO: 1494196
uauccggguaaccucugcu

SEQ ID NO: 1494198 - RNA, 19 nt, Artificial Sequence
  Description of Artificial Sequence: Synthetic oligonucleotide
  Sense strand starting at position 1625 of SEQ ID NO: 1244510
agguuacccggauaacgau

SEQ ID NO: 1494199 - RNA, 19 nt, Artificial Sequence
  Description of Artificial Sequence: Synthetic oligonucleotide
  Antisense strand to SEQ ID NO: 1494198
aucguuauccggguaaccu

SEQ ID NO: 1494200 - RNA, 19 nt, Artificial Sequence
  Description of Artificial Sequence: Synthetic oligonucleotide
  Sense strand starting at position 2158 of SEQ ID NO: 1244510
gccgcaaggcgucugagaa

SEQ ID NO: 1494201 - RNA, 19 nt, Artificial Sequence
  Description of Artificial Sequence: Synthetic oligonucleotide
  Antisense strand to SEQ ID NO: 1494200
uucucagacgccuugcggc

SEQ ID NO: 1494202 - RNA, 19 nt, Artificial Sequence
  Description of Artificial Sequence: Synthetic oligonucleotide
  Sense strand starting at position 3131 of SEQ ID NO: 1244510
gccuccuuucccucguuua

SEQ ID NO: 1494203 - RNA, 19 nt, Artificial Sequence
  Description of Artificial Sequence: Synthetic oligonucleotide
  Antisense strand to SEQ ID NO: 1494202
uaaacgagggaaaggaggc

SEQ ID NO: 1494204 - RNA, 19 nt, Artificial Sequence
  Description of Artificial Sequence: Synthetic oligonucleotide
  Sense strand starting at position 3274 of SEQ ID NO: 1244510
gucauaauaucuguuagag

SEQ ID NO: 1494205 - RNA, 19 nt, Artificial Sequence
  Description of Artificial Sequence: Synthetic oligonucleotide
  Antisense strand to SEQ ID NO: 1494204
cucuaacagauauuaugac

SEQ ID NO: 1494206 - RNA, 19 nt, Artificial Sequence
  Description of Artificial Sequence: Synthetic oligonucleotide
  Sense strand starting at position 3282 of SEQ ID NO: 1244510
aucuguuagaggcgugcaa

SEQ ID NO: 1494207 - RNA, 19 nt, Artificial Sequence
  Description of Artificial Sequence: Synthetic oligonucleotide
  Antisense strand to SEQ ID NO: 1494206
uugcacgccucuaacagau

SEQ ID NO: 1494208 - RNA, 19 nt, Artificial Sequence
  Description of Artificial Sequence: Synthetic oligonucleotide
  Sense strand starting at position 3284 of SEQ ID NO: 1244510
cuguuagaggcgugcaaac

SEQ ID NO: 1494209 - RNA, 19 nt, Artificial Sequence
  Description of Artificial Sequence: Synthetic oligonucleotide
  Antisense strand to SEQ ID NO: 1494208
guuugcacgccucuaacag

SEQ ID NO: 1494210 - RNA, 19 nt, Artificial Sequence
  Description of Artificial Sequence: Synthetic oligonucleotide
  Sense strand starting at position 3307 of SEQ ID NO: 1244510
ccacaaggucauggucaua

SEQ ID NO: 1494211 - RNA, 19 nt, Artificial Sequence
  Description of Artificial Sequence: Synthetic oligonucleotide
  Antisense strand to SEQ ID NO: 1494210
uaugaccaugaccuugugg

SEQ ID NO: 1494212 - RNA, 19 nt, Artificial Sequence
  Description of Artificial Sequence: Synthetic oligonucleotide
  Sense strand starting at position 3324 of SEQ ID NO: 1244510
uacguuauuguuggucaaa

SEQ ID NO: 1494213 - RNA, 19 nt, Artificial Sequence
  Description of Artificial Sequence: Synthetic oligonucleotide
  Antisense strand to SEQ ID NO: 1494212
uuugaccaacaauaacgua

SEQ ID NO: 1494214 - RNA, 19 nt, Artificial Sequence
  Description of Artificial Sequence: Synthetic oligonucleotide
  Sense strand starting at position 3355 of SEQ ID NO: 1244510
accugaggcuuugagagau

SEQ ID NO: 1494215 - RNA, 19 nt, Artificial Sequence
  Description of Artificial Sequence: Synthetic oligonucleotide
  Antisense strand to SEQ ID NO: 1494214
aucucucaaagccucaggu

SEQ ID NO: 1494216 - RNA, 19 nt, Artificial Sequence
  Description of Artificial Sequence: Synthetic oligonucleotide
  Sense strand starting at position 3450 of SEQ ID NO: 1244510
gaaaguacccuugguugaa

SEQ ID NO: 1494217 - RNA, 19 nt, Artificial Sequence
  Description of Artificial Sequence: Synthetic oligonucleotide
  Antisense strand to SEQ ID NO: 1494216
uucaaccaaggguacuuuc

SEQ ID NO: 1494218 - RNA, 19 nt, Artificial Sequence
  Description of Artificial Sequence: Synthetic oligonucleotide
  Sense strand starting at position 3480 of SEQ ID NO: 1244510
gguuccagccaucguuaga

SEQ ID NO: 1494219 - RNA, 19 nt, Artificial Sequence
  Description of Artificial Sequence: Synthetic oligonucleotide
  Antisense strand to SEQ ID NO: 1494218
ucuaacgauggcuggaacc

SEQ ID NO: 1494220 - RNA, 19 nt, Artificial Sequence
  Description of Artificial Sequence: Synthetic oligonucleotide
  Sense strand starting at position 3489 of SEQ ID NO: 1244510
caucguuagacgugggaag

SEQ ID NO: 1494221 - RNA, 19 nt, Artificial Sequence
  Description of Artificial Sequence: Synthetic oligonucleotide
  Antisense strand to SEQ ID NO: 1494220
cuucccacgucuaacgaug

SEQ ID NO: 1494222 - RNA, 19 nt, Artificial Sequence
  Description of Artificial Sequence: Synthetic oligonucleotide
  Sense strand starting at position 3723 of SEQ ID NO: 1244510
gcagaaaugcucuggaauc

SEQ ID NO: 1494223 - RNA, 19 nt, Artificial Sequence
  Description of Artificial Sequence: Synthetic oligonucleotide
  Antisense strand to SEQ ID NO: 1494222
gauuccagagcauuucugc

SEQ ID NO: 1494224 - RNA, 19 nt, Artificial Sequence
  Description of Artificial Sequence: Synthetic oligonucleotide
  Sense strand starting at position 3766 of SEQ ID NO: 1244510
cugugugccagauggaaau

SEQ ID NO: 1494225 - RNA, 19 nt, Artificial Sequence
  Description of Artificial Sequence: Synthetic oligonucleotide
  Antisense strand to SEQ ID NO: 1494224
auuuccaucuggcacacag

SEQ ID NO: 1494226 - RNA, 19 nt, Artificial Sequence
  Description of Artificial Sequence: Synthetic oligonucleotide
  Sense strand starting at position 3772 of SEQ ID NO: 1244510
gccagauggaaauguugga

SEQ ID NO: 1494227 - RNA, 19 nt, Artificial Sequence
  Description of Artificial Sequence: Synthetic oligonucleotide
  Antisense strand to SEQ ID NO: 1494226
uccaacauuuccaucuggc

SEQ ID NO: 1494228 - RNA, 19 nt, Artificial Sequence
  Description of Artificial Sequence: Synthetic oligonucleotide
  Sense strand starting at position 3785 of SEQ ID NO: 1244510
guuggauuaggagagcacu

SEQ ID NO: 1494229 - RNA, 19 nt, Artificial Sequence
  Description of Artificial Sequence: Synthetic oligonucleotide
  Antisense strand to SEQ ID NO: 1494228
agugcucuccuaauccaac

SEQ ID NO: 1494230 - RNA, 19 nt, Artificial Sequence
  Description of Artificial Sequence: Synthetic oligonucleotide
  Sense strand starting at position 3826 of SEQ ID NO: 1244510
gagaaauuaugggaugccu

SEQ ID NO: 1494231 - RNA, 19 nt, Artificial Sequence
  Description of Artificial Sequence: Synthetic oligonucleotide
  Antisense strand to SEQ ID NO: 1494230
aggcaucccauaauuucuc

SEQ ID NO: 1494232 - RNA, 19 nt, Artificial Sequence
  Description of Artificial Sequence: Synthetic oligonucleotide
  Sense strand starting at position 3895 of SEQ ID NO: 1244510
cuccuagggcucugagcau

SEQ ID NO: 1494233 - RNA, 19 nt, Artificial Sequence
  Description of Artificial Sequence: Synthetic oligonucleotide
  Antisense strand to SEQ ID NO: 1494232
augcucagagcccuaggag

SEQ ID NO: 1494234 - RNA, 19 nt, Artificial Sequence
  Description of Artificial Sequence: Synthetic oligonucleotide
  Sense strand starting at position 191 of SEQ ID NO: 1244511
guguacuucccagggaaga

SEQ ID NO: 1494235 - RNA, 19 nt, Artificial Sequence
  Description of Artificial Sequence: Synthetic oligonucleotide
  Antisense strand to SEQ ID NO: 1494234
ucuucccugggaaguacac

SEQ ID NO: 1494236 - RNA, 19 nt, Artificial Sequence
  Description of Artificial Sequence: Synthetic oligonucleotide
  Sense strand starting at position 193 of SEQ ID NO: 1244511
guacuucccagggaagagu

SEQ ID NO: 1494237 - RNA, 19 nt, Artificial Sequence
  Description of Artificial Sequence: Synthetic oligonucleotide
  Antisense strand to SEQ ID NO: 1494236
acucuucccugggaaguac

SEQ ID NO: 1494238 - RNA, 19 nt, Artificial Sequence
  Description of Artificial Sequence: Synthetic oligonucleotide
  Sense strand starting at position 204 of SEQ ID NO: 1244511
ggaagaguuccaggcagca

SEQ ID NO: 1494239 - RNA, 19 nt, Artificial Sequence
  Description of Artificial Sequence: Synthetic oligonucleotide
  Antisense strand to SEQ ID NO: 1494238
ugcugccuggaacucuucc

SEQ ID NO: 1494240 - RNA, 19 nt, Artificial Sequence
  Description of Artificial Sequence: Synthetic oligonucleotide
  Sense strand starting at position 276 of SEQ ID NO: 1244511
uggcuacucacggagaagu

SEQ ID NO: 1494241 - RNA, 19 nt, Artificial Sequence
  Description of Artificial Sequence: Synthetic oligonucleotide
  Antisense strand to SEQ ID NO: 1494240
acuucuccgugaguagcca

SEQ ID NO: 1494242 - RNA, 19 nt, Artificial Sequence
  Description of Artificial Sequence: Synthetic oligonucleotide
  Sense strand starting at position 278 of SEQ ID NO: 1244511
gcuacucacggagaaguua

SEQ ID NO: 1494243 - RNA, 19 nt, Artificial Sequence
  Description of Artificial Sequence: Synthetic oligonucleotide
  Antisense strand to SEQ ID NO: 1494242
uaacuucuccgugaguagc

SEQ ID NO: 1494244 - RNA, 19 nt, Artificial Sequence
  Description of Artificial Sequence: Synthetic oligonucleotide
  Sense strand starting at position 295 of SEQ ID NO: 1244511
uagggaggccagugagaua

SEQ ID NO: 1494245 - RNA, 19 nt, Artificial Sequence
  Description of Artificial Sequence: Synthetic oligonucleotide
  Antisense strand to SEQ ID NO: 1494244
uaucucacuggccucccua

SEQ ID NO: 1494246 - RNA, 19 nt, Artificial Sequence
  Description of Artificial Sequence: Synthetic oligonucleotide
  Sense strand starting at position 328 of SEQ ID NO: 1244511
gcucuacaagcauaagaau

SEQ ID NO: 1494247 - RNA, 19 nt, Artificial Sequence
  Description of Artificial Sequence: Synthetic oligonucleotide
  Antisense strand to SEQ ID NO: 1494246
auucuuaugcuuguagagc

SEQ ID NO: 1494248 - RNA, 19 nt, Artificial Sequence
  Description of Artificial Sequence: Synthetic oligonucleotide
  Sense strand starting at position 598 of SEQ ID NO: 1244511
agcagauucgauggauucu

SEQ ID NO: 1494249 - RNA, 19 nt, Artificial Sequence
  Description of Artificial Sequence: Synthetic oligonucleotide
  Antisense strand to SEQ ID NO: 1494248
agaauccaucgaaucugcu

SEQ ID NO: 1494250 - RNA, 19 nt, Artificial Sequence
  Description of Artificial Sequence: Synthetic oligonucleotide
  Sense strand starting at position 599 of SEQ ID NO: 1244511
gcagauucgauggauucuu

SEQ ID NO: 1494251 - RNA, 19 nt, Artificial Sequence
  Description of Artificial Sequence: Synthetic oligonucleotide
  Antisense strand to SEQ ID NO: 1494250
aagaauccaucgaaucugc

SEQ ID NO: 1494252 - RNA, 19 nt, Artificial Sequence
  Description of Artificial Sequence: Synthetic oligonucleotide
  Sense strand starting at position 604 of SEQ ID NO: 1244511
uucgauggauucuuccaga

SEQ ID NO: 1494253 - RNA, 19 nt, Artificial Sequence
  Description of Artificial Sequence: Synthetic oligonucleotide
  Antisense strand to SEQ ID NO: 1494252
ucuggaagaauccaucgaa

SEQ ID NO: 1494254 - RNA, 19 nt, Artificial Sequence
  Description of Artificial Sequence: Synthetic oligonucleotide
  Sense strand starting at position 654 of SEQ ID NO: 1244511
ggaagaugccgugggagaa

SEQ ID NO: 1494255 - RNA, 19 nt, Artificial Sequence
  Description of Artificial Sequence: Synthetic oligonucleotide
  Antisense strand to SEQ ID NO: 1494254
uucucccacggcaucuucc

SEQ ID NO: 1494256 - RNA, 19 nt, Artificial Sequence
  Description of Artificial Sequence: Synthetic oligonucleotide
  Sense strand starting at position 1022 of SEQ ID NO: 1244511
cgagcuccuuucccagaga

SEQ ID NO: 1494257 - RNA, 19 nt, Artificial Sequence
  Description of Artificial Sequence: Synthetic oligonucleotide
  Antisense strand to SEQ ID NO: 1494256
ucucugggaaaggagcucg

SEQ ID NO: 1494258 - RNA, 19 nt, Artificial Sequence
  Description of Artificial Sequence: Synthetic oligonucleotide
  Sense strand starting at position 1025 of SEQ ID NO: 1244511
gcuccuuucccagagagca

SEQ ID NO: 1494259 - RNA, 19 nt, Artificial Sequence
  Description of Artificial Sequence: Synthetic oligonucleotide
  Antisense strand to SEQ ID NO: 1494258
ugcucucugggaaaggagc

SEQ ID NO: 1494260 - RNA, 19 nt, Artificial Sequence
  Description of Artificial Sequence: Synthetic oligonucleotide
  Sense strand starting at position 1218 of SEQ ID NO: 1244511
gacagaggugugggaagua

SEQ ID NO: 1494261 - RNA, 19 nt, Artificial Sequence
  Description of Artificial Sequence: Synthetic oligonucleotide
  Antisense strand to SEQ ID NO: 1494260
uacuucccacaccucuguc

SEQ ID NO: 1494262 - RNA, 19 nt, Artificial Sequence
  Description of Artificial Sequence: Synthetic oligonucleotide
  Sense strand starting at position 1358 of SEQ ID NO: 1244511
gaaucacucggaggacuuu

SEQ ID NO: 1494263 - RNA, 19 nt, Artificial Sequence
  Description of Artificial Sequence: Synthetic oligonucleotide
  Antisense strand to SEQ ID NO: 1494262
aaaguccuccgagugauuc

SEQ ID NO: 1494264 - RNA, 19 nt, Artificial Sequence
  Description of Artificial Sequence: Synthetic oligonucleotide
  Sense strand starting at position 1381 of SEQ ID NO: 1244511
gaauuuccaggcuguguuu

SEQ ID NO: 1494265 - RNA, 19 nt, Artificial Sequence
  Description of Artificial Sequence: Synthetic oligonucleotide
  Antisense strand to SEQ ID NO: 1494264
aaacacagccuggaaauuc

SEQ ID NO: 1494266 - RNA, 19 nt, Artificial Sequence
  Description of Artificial Sequence: Synthetic oligonucleotide
  Sense strand starting at position 1425 of SEQ ID NO: 1244511
gagcguguuccugaugaca

SEQ ID NO: 1494267 - RNA, 19 nt, Artificial Sequence
  Description of Artificial Sequence: Synthetic oligonucleotide
  Antisense strand to SEQ ID NO: 1494266
ugucaucaggaacacgcuc

SEQ ID NO: 1494268 - RNA, 19 nt, Artificial Sequence
  Description of Artificial Sequence: Synthetic oligonucleotide
  Sense strand starting at position 1460 of SEQ ID NO: 1244511
cucaauaugcuuggaggga

SEQ ID NO: 1494269 - RNA, 19 nt, Artificial Sequence
  Description of Artificial Sequence: Synthetic oligonucleotide
  Antisense strand to SEQ ID NO: 1494268
ucccuccaagcauauugag

SEQ ID NO: 1494270 - RNA, 19 nt, Artificial Sequence
  Description of Artificial Sequence: Synthetic oligonucleotide
  Sense strand starting at position 1655 of SEQ ID NO: 1244511
gcuggaaagucacugaaga

SEQ ID NO: 1494271 - RNA, 19 nt, Artificial Sequence
  Description of Artificial Sequence: Synthetic oligonucleotide
  Antisense strand to SEQ ID NO: 1494270
ucuucagugacuuuccagc

SEQ ID NO: 1494272 - RNA, 19 nt, Artificial Sequence
  Description of Artificial Sequence: Synthetic oligonucleotide
  Sense strand starting at position 1672 of SEQ ID NO: 1244511
gagggaauuucaggagggu

SEQ ID NO: 1494273 - RNA, 19 nt, Artificial Sequence
  Description of Artificial Sequence: Synthetic oligonucleotide
  Antisense strand to SEQ ID NO: 1494272
acccuccugaaauucccuc

SEQ ID NO: 1494274 - RNA, 19 nt, Artificial Sequence
  Description of Artificial Sequence: Synthetic oligonucleotide
  Sense strand starting at position 1850 of SEQ ID NO: 1244511
cucugauauuugcuagcca

SEQ ID NO: 1494275 - RNA, 19 nt, Artificial Sequence
  Description of Artificial Sequence: Synthetic oligonucleotide
  Antisense strand to SEQ ID NO: 1494274
uggcuagcaaauaucagag

SEQ ID NO: 1494276 - RNA, 19 nt, Artificial Sequence
  Description of Artificial Sequence: Synthetic oligonucleotide
  Sense strand starting at position 1854 of SEQ ID NO: 1244511
gauauuugcuagccaugug

SEQ ID NO: 1494277 - RNA, 19 nt, Artificial Sequence
  Description of Artificial Sequence: Synthetic oligonucleotide
  Antisense strand to SEQ ID NO: 1494276
cacauggcuagcaaauauc

SEQ ID NO: 1494278 - RNA, 19 nt, Artificial Sequence
  Description of Artificial Sequence: Synthetic oligonucleotide
  Sense strand starting at position 1868 of SEQ ID NO: 1244511
augugacuuugggcaaaua

SEQ ID NO: 1494279 - RNA, 19 nt, Artificial Sequence
  Description of Artificial Sequence: Synthetic oligonucleotide
  Antisense strand to SEQ ID NO: 1494278
uauuugcccaaagucacau

SEQ ID NO: 1494280 - RNA, 19 nt, Artificial Sequence
  Description of Artificial Sequence: Synthetic oligonucleotide
  Sense strand starting at position 1878 of SEQ ID NO: 1244511
gggcaaauacuuuaacuuu

SEQ ID NO: 1494281 - RNA, 19 nt, Artificial Sequence
  Description of Artificial Sequence: Synthetic oligonucleotide
  Antisense strand to SEQ ID NO: 1494280
aaaguuaaaguauuugccc

SEQ ID NO: 1494282 - RNA, 19 nt, Artificial Sequence
  Description of Artificial Sequence: Synthetic oligonucleotide
  Sense strand starting at position 1905 of SEQ ID NO: 1244511
ucuguugacuuaucuguaa

SEQ ID NO: 1494283 - RNA, 19 nt, Artificial Sequence
  Description of Artificial Sequence: Synthetic oligonucleotide
  Antisense strand to SEQ ID NO: 1494282
uuacagauaagucaacaga

SEQ ID NO: 1494284 - RNA, 19 nt, Artificial Sequence
  Description of Artificial Sequence: Synthetic oligonucleotide
  Sense strand starting at position 2180 of SEQ ID NO: 1244511
agagcugagccaugcagau

SEQ ID NO: 1494285 - RNA, 19 nt, Artificial Sequence
  Description of Artificial Sequence: Synthetic oligonucleotide
  Antisense strand to SEQ ID NO: 1494284
aucugcauggcucagcucu

SEQ ID NO: 1494286 - RNA, 19 nt, Artificial Sequence
  Description of Artificial Sequence: Synthetic oligonucleotide
  Sense strand starting at position 2571 of SEQ ID NO: 1244511
acgugauuccaagaaguga

SEQ ID NO: 1494287 - RNA, 19 nt, Artificial Sequence
  Description of Artificial Sequence: Synthetic oligonucleotide
  Antisense strand to SEQ ID NO: 1494286
ucacuucuuggaaucacgu

SEQ ID NO: 1494288 - RNA, 19 nt, Artificial Sequence
  Description of Artificial Sequence: Synthetic oligonucleotide
  Sense strand starting at position 2582 of SEQ ID NO: 1244511
agaagugaaacaugcugua

SEQ ID NO: 1494289 - RNA, 19 nt, Artificial Sequence
  Description of Artificial Sequence: Synthetic oligonucleotide
  Antisense strand to SEQ ID NO: 1494288
uacagcauguuucacuucu

SEQ ID NO: 1494290 - RNA, 19 nt, Artificial Sequence
  Description of Artificial Sequence: Synthetic oligonucleotide
  Sense strand starting at position 2719 of SEQ ID NO: 1244511
ggaagaguauuggagaaag

SEQ ID NO: 1494291 - RNA, 19 nt, Artificial Sequence
  Description of Artificial Sequence: Synthetic oligonucleotide
  Antisense strand to SEQ ID NO: 1494290
cuuucuccaauacucuucc

SEQ ID NO: 1494292 - RNA, 19 nt, Artificial Sequence
  Description of Artificial Sequence: Synthetic oligonucleotide
  Sense strand starting at position 2769 of SEQ ID NO: 1244511
ggaauuagcuugcugagaa

SEQ ID NO: 1494293 - RNA, 19 nt, Artificial Sequence
  Description of Artificial Sequence: Synthetic oligonucleotide
  Antisense strand to SEQ ID NO: 1494292
uucucagcaagcuaauucc

SEQ ID NO: 1494294 - RNA, 19 nt, Artificial Sequence
  Description of Artificial Sequence: Synthetic oligonucleotide
  Sense strand starting at position 3317 of SEQ ID NO: 1244511
uuuggaucuucuguuuaac

SEQ ID NO: 1494295 - RNA, 19 nt, Artificial Sequence
  Description of Artificial Sequence: Synthetic oligonucleotide
  Antisense strand to SEQ ID NO: 1494294
guuaaacagaagauccaaa

SEQ ID NO: 1494296 - RNA, 19 nt, Artificial Sequence
  Description of Artificial Sequence: Synthetic oligonucleotide
  Sense strand starting at position 3319 of SEQ ID NO: 1244511
uggaucuucuguuuaacac

SEQ ID NO: 1494297 - RNA, 19 nt, Artificial Sequence
  Description of Artificial Sequence: Synthetic oligonucleotide
  Antisense strand to SEQ ID NO: 1494296
guguuaaacagaagaucca

SEQ ID NO: 1494298 - RNA, 19 nt, Artificial Sequence
  Description of Artificial Sequence: Synthetic oligonucleotide
  Sense strand starting at position 3444 of SEQ ID NO: 1244511
gggacugacaccugugaug

SEQ ID NO: 1494299 - RNA, 19 nt, Artificial Sequence
  Description of Artificial Sequence: Synthetic oligonucleotide
  Antisense strand to SEQ ID NO: 1494298
caucacaggugucaguccc

SEQ ID NO: 1494300 - RNA, 19 nt, Artificial Sequence
  Description of Artificial Sequence: Synthetic oligonucleotide
  Sense strand starting at position 3446 of SEQ ID NO: 1244511
gacugacaccugugaugag

SEQ ID NO: 1494301 - RNA, 19 nt, Artificial Sequence
  Description of Artificial Sequence: Synthetic oligonucleotide
  Antisense strand to SEQ ID NO: 1494300
cucaucacaggugucaguc

SEQ ID NO: 1494302 - RNA, 19 nt, Artificial Sequence
  Description of Artificial Sequence: Synthetic oligonucleotide
  Sense strand starting at position 3748 of SEQ ID NO: 1244511
ggauaagggacuuguucga

SEQ ID NO: 1494303 - RNA, 19 nt, Artificial Sequence
  Description of Artificial Sequence: Synthetic oligonucleotide
  Antisense strand to SEQ ID NO: 1494302
ucgaacaagucccuuaucc

SEQ ID NO: 1494304 - RNA, 19 nt, Artificial Sequence
  Description of Artificial Sequence: Synthetic oligonucleotide
  Sense strand starting at position 3778 of SEQ ID NO: 1244511
gagaguugacacugguaua

SEQ ID NO: 1494305 - RNA, 19 nt, Artificial Sequence
  Description of Artificial Sequence: Synthetic oligonucleotide
  Antisense strand to SEQ ID NO: 1494304
uauaccagugucaacucuc

SEQ ID NO: 1494306 - RNA, 19 nt, Artificial Sequence
  Description of Artificial Sequence: Synthetic oligonucleotide
  Sense strand starting at position 3779 of SEQ ID NO: 1244511
agaguugacacugguauaa

SEQ ID NO: 1494307 - RNA, 19 nt, Artificial Sequence
  Description of Artificial Sequence: Synthetic oligonucleotide
  Antisense strand to SEQ ID NO: 1494306
uuauaccagugucaacucu

SEQ ID NO: 1494308 - RNA, 19 nt, Artificial Sequence
  Description of Artificial Sequence: Synthetic oligonucleotide
  Sense strand starting at position 3895 of SEQ ID NO: 1244511
cuaagagccacggaguauu

SEQ ID NO: 1494309 - RNA, 19 nt, Artificial Sequence
  Description of Artificial Sequence: Synthetic oligonucleotide
  Antisense strand to SEQ ID NO: 1494308
aauacuccguggcucuuag

SEQ ID NO: 1494310 - RNA, 19 nt, Artificial Sequence
  Description of Artificial Sequence: Synthetic oligonucleotide
  Sense strand starting at position 3903 of SEQ ID NO: 1244511
cacggaguauugucaagga

SEQ ID NO: 1494311 - RNA, 19 nt, Artificial Sequence
  Description of Artificial Sequence: Synthetic oligonucleotide
  Antisense strand to SEQ ID NO: 1494310
uccuugacaauacuccgug

SEQ ID NO: 1494312 - RNA, 19 nt, Artificial Sequence
  Description of Artificial Sequence: Synthetic oligonucleotide
  Sense strand starting at position 3907 of SEQ ID NO: 1244511
gaguauugucaaggacgug

SEQ ID NO: 1494313 - RNA, 19 nt, Artificial Sequence
  Description of Artificial Sequence: Synthetic oligonucleotide
  Antisense strand to SEQ ID NO: 1494312
cacguccuugacaauacuc

SEQ ID NO: 1494314 - RNA, 19 nt, Artificial Sequence
  Description of Artificial Sequence: Synthetic oligonucleotide
  Sense strand starting at position 53 of SEQ ID NO: 1244512
gaggucuacuucucagauu

SEQ ID NO: 1494315 - RNA, 19 nt, Artificial Sequence
  Description of Artificial Sequence: Synthetic oligonucleotide
  Antisense strand to SEQ ID NO: 1494314
aaucugagaaguagaccuc

SEQ ID NO: 1494316 - RNA, 19 nt, Artificial Sequence
  Description of Artificial Sequence: Synthetic oligonucleotide
  Sense strand starting at position 237 of SEQ ID NO: 1244512
cuuggugggaucugaauuc

SEQ ID NO: 1494317 - RNA, 19 nt, Artificial Sequence
  Description of Artificial Sequence: Synthetic oligonucleotide
  Antisense strand to SEQ ID NO: 1494316
gaauucagaucccaccaag

SEQ ID NO: 1494318 - RNA, 19 nt, Artificial Sequence
  Description of Artificial Sequence: Synthetic oligonucleotide
  Sense strand starting at position 506 of SEQ ID NO: 1244512
cucauaggcuugucaugag

SEQ ID NO: 1494319 - RNA, 19 nt, Artificial Sequence
  Description of Artificial Sequence: Synthetic oligonucleotide
  Antisense strand to SEQ ID NO: 1494318
cucaugacaagccuaugag

SEQ ID NO: 1494320 - RNA, 19 nt, Artificial Sequence
  Description of Artificial Sequence: Synthetic oligonucleotide
  Sense strand starting at position 510 of SEQ ID NO: 1244512
uaggcuugucaugagacua

SEQ ID NO: 1494321 - RNA, 19 nt, Artificial Sequence
  Description of Artificial Sequence: Synthetic oligonucleotide
  Antisense strand to SEQ ID NO: 1494320
uagucucaugacaagccua

SEQ ID NO: 1494322 - RNA, 19 nt, Artificial Sequence
  Description of Artificial Sequence: Synthetic oligonucleotide
  Sense strand starting at position 522 of SEQ ID NO: 1244512
gagacuaaaugagaugaua

SEQ ID NO: 1494323 - RNA, 19 nt, Artificial Sequence
  Description of Artificial Sequence: Synthetic oligonucleotide
  Antisense strand to SEQ ID NO: 1494322
uaucaucucauuuagucuc

SEQ ID NO: 1494324 - RNA, 19 nt, Artificial Sequence
  Description of Artificial Sequence: Synthetic oligonucleotide
  Sense strand starting at position 1254 of SEQ ID NO: 1244512
auuuguguauaggaagaga

SEQ ID NO: 1494325 - RNA, 19 nt, Artificial Sequence
  Description of Artificial Sequence: Synthetic oligonucleotide
  Antisense strand to SEQ ID NO: 1494324
ucucuuccuauacacaaau

SEQ ID NO: 1494326 - RNA, 19 nt, Artificial Sequence
  Description of Artificial Sequence: Synthetic oligonucleotide
  Sense strand starting at position 1309 of SEQ ID NO: 1244512
aggaaagugaugggcagau

SEQ ID NO: 1494327 - RNA, 19 nt, Artificial Sequence
  Description of Artificial Sequence: Synthetic oligonucleotide
  Antisense strand to SEQ ID NO: 1494326
aucugcccaucacuuuccu

SEQ ID NO: 1494328 - RNA, 19 nt, Artificial Sequence
  Description of Artificial Sequence: Synthetic oligonucleotide
  Sense strand starting at position 1321 of SEQ ID NO: 1244512
ggcagaugaugucccagaa

SEQ ID NO: 1494329 - RNA, 19 nt, Artificial Sequence
  Description of Artificial Sequence: Synthetic oligonucleotide
  Antisense strand to SEQ ID NO: 1494328
uucugggacaucaucugcc

SEQ ID NO: 1494330 - RNA, 19 nt, Artificial Sequence
  Description of Artificial Sequence: Synthetic oligonucleotide
  Sense strand starting at position 1482 of SEQ ID NO: 1244512
ccucuaaaugcuggugaga

SEQ ID NO: 1494331 - RNA, 19 nt, Artificial Sequence
  Description of Artificial Sequence: Synthetic oligonucleotide
  Antisense strand to SEQ ID NO: 1494330
ucucaccagcauuuagagg

SEQ ID NO: 1494332 - RNA, 19 nt, Artificial Sequence
  Description of Artificial Sequence: Synthetic oligonucleotide
  Sense strand starting at position 1485 of SEQ ID NO: 1244512
cuaaaugcuggugagaauc

SEQ ID NO: 1494333 - RNA, 19 nt, Artificial Sequence
  Description of Artificial Sequence: Synthetic oligonucleotide
  Antisense strand to SEQ ID NO: 1494332
gauucucaccagcauuuag

SEQ ID NO: 1494334 - RNA, 19 nt, Artificial Sequence
  Description of Artificial Sequence: Synthetic oligonucleotide
  Sense strand starting at position 1681 of SEQ ID NO: 1244512
aggucacccuucucagaaa

SEQ ID NO: 1494335 - RNA, 19 nt, Artificial Sequence
  Description of Artificial Sequence: Synthetic oligonucleotide
  Antisense strand to SEQ ID NO: 1494334
uuucugagaagggugaccu

SEQ ID NO: 1494336 - RNA, 19 nt, Artificial Sequence
  Description of Artificial Sequence: Synthetic oligonucleotide
  Sense strand starting at position 1797 of SEQ ID NO: 1244512
aucuguucugcucagaucu

SEQ ID NO: 1494337 - RNA, 19 nt, Artificial Sequence
  Description of Artificial Sequence: Synthetic oligonucleotide
  Antisense strand to SEQ ID NO: 1494336
agaucugagcagaacagau

SEQ ID NO: 1494338 - RNA, 19 nt, Artificial Sequence
  Description of Artificial Sequence: Synthetic oligonucleotide
  Sense strand starting at position 2087 of SEQ ID NO: 1244512
cugugaggauccuuucuaa

SEQ ID NO: 1494339 - RNA, 19 nt, Artificial Sequence
  Description of Artificial Sequence: Synthetic oligonucleotide
  Antisense strand to SEQ ID NO: 1494338
uuagaaaggauccucacag

SEQ ID NO: 1494340 - RNA, 19 nt, Artificial Sequence
  Description of Artificial Sequence: Synthetic oligonucleotide
  Sense strand starting at position 2128 of SEQ ID NO: 1244512
ggagguccuuuauucugau

SEQ ID NO: 1494341 - RNA, 19 nt, Artificial Sequence
  Description of Artificial Sequence: Synthetic oligonucleotide
  Antisense strand to SEQ ID NO: 1494340
aucagaauaaaggaccucc

SEQ ID NO: 1494342 - RNA, 19 nt, Artificial Sequence
  Description of Artificial Sequence: Synthetic oligonucleotide
  Sense strand starting at position 2134 of SEQ ID NO: 1244512
ccuuuauucugaucgaaug

SEQ ID NO: 1494343 - RNA, 19 nt, Artificial Sequence
  Description of Artificial Sequence: Synthetic oligonucleotide
  Antisense strand to SEQ ID NO: 1494342
cauucgaucagaauaaagg

SEQ ID NO: 1494344 - RNA, 19 nt, Artificial Sequence
  Description of Artificial Sequence: Synthetic oligonucleotide
  Sense strand starting at position 2135 of SEQ ID NO: 1244512
cuuuauucugaucgaaugu

SEQ ID NO: 1494345 - RNA, 19 nt, Artificial Sequence
  Description of Artificial Sequence: Synthetic oligonucleotide
  Antisense strand to SEQ ID NO: 1494344
acauucgaucagaauaaag

SEQ ID NO: 1494346 - RNA, 19 nt, Artificial Sequence
  Description of Artificial Sequence: Synthetic oligonucleotide
  Sense strand starting at position 2390 of SEQ ID NO: 1244512
cagcaaccucgguaucauc

SEQ ID NO: 1494347 - RNA, 19 nt, Artificial Sequence
  Description of Artificial Sequence: Synthetic oligonucleotide
  Antisense strand to SEQ ID NO: 1494346
gaugauaccgagguugcug

SEQ ID NO: 1494348 - RNA, 19 nt, Artificial Sequence
  Description of Artificial Sequence: Synthetic oligonucleotide
  Sense strand starting at position 2457 of SEQ ID NO: 1244512
cugucaauaggucauggau

SEQ ID NO: 1494349 - RNA, 19 nt, Artificial Sequence
  Description of Artificial Sequence: Synthetic oligonucleotide
  Antisense strand to SEQ ID NO: 1494348
auccaugaccuauugacag

SEQ ID NO: 1494350 - RNA, 19 nt, Artificial Sequence
  Description of Artificial Sequence: Synthetic oligonucleotide
  Sense strand starting at position 2466 of SEQ ID NO: 1244512
ggucauggauccuccacuu

SEQ ID NO: 1494351 - RNA, 19 nt, Artificial Sequence
  Description of Artificial Sequence: Synthetic oligonucleotide
  Antisense strand to SEQ ID NO: 1494350
aaguggaggauccaugacc

SEQ ID NO: 1494352 - RNA, 19 nt, Artificial Sequence
  Description of Artificial Sequence: Synthetic oligonucleotide
  Sense strand starting at position 2527 of SEQ ID NO: 1244512
ggucuuucuccugaaacac

SEQ ID NO: 1494353 - RNA, 19 nt, Artificial Sequence
  Description of Artificial Sequence: Synthetic oligonucleotide
  Antisense strand to SEQ ID NO: 1494352
guguuucaggagaaagacc

SEQ ID NO: 1494354 - RNA, 19 nt, Artificial Sequence
  Description of Artificial Sequence: Synthetic oligonucleotide
  Sense strand starting at position 2574 of SEQ ID NO: 1244512
agccaaaggucucuuucua

SEQ ID NO: 1494355 - RNA, 19 nt, Artificial Sequence
  Description of Artificial Sequence: Synthetic oligonucleotide
  Antisense strand to SEQ ID NO: 1494354
uagaaagagaccuuuggcu

SEQ ID NO: 1494356 - RNA, 19 nt, Artificial Sequence
  Description of Artificial Sequence: Synthetic oligonucleotide
  Sense strand starting at position 2578 of SEQ ID NO: 1244512
aaaggucucuuucuaagag

SEQ ID NO: 1494357 - RNA, 19 nt, Artificial Sequence
  Description of Artificial Sequence: Synthetic oligonucleotide
  Antisense strand to SEQ ID NO: 1494356
cucuuagaaagagaccuuu

SEQ ID NO: 1494358 - RNA, 19 nt, Artificial Sequence
  Description of Artificial Sequence: Synthetic oligonucleotide
  Sense strand starting at position 2585 of SEQ ID NO: 1244512
ucuuucuaagagugaaaca

SEQ ID NO: 1494359 - RNA, 19 nt, Artificial Sequence
  Description of Artificial Sequence: Synthetic oligonucleotide
  Antisense strand to SEQ ID NO: 1494358
uguuucacucuuagaaaga

SEQ ID NO: 1494360 - RNA, 19 nt, Artificial Sequence
  Description of Artificial Sequence: Synthetic oligonucleotide
  Sense strand starting at position 2691 of SEQ ID NO: 1244512
gccagacccuucuugaucu

SEQ ID NO: 1494361 - RNA, 19 nt, Artificial Sequence
  Description of Artificial Sequence: Synthetic oligonucleotide
  Antisense strand to SEQ ID NO: 1494360
agaucaagaagggucuggc

SEQ ID NO: 1494362 - RNA, 19 nt, Artificial Sequence
  Description of Artificial Sequence: Synthetic oligonucleotide
  Sense strand starting at position 3005 of SEQ ID NO: 1244512
guccuuggcaauuaggaga

SEQ ID NO: 1494363 - RNA, 19 nt, Artificial Sequence
  Description of Artificial Sequence: Synthetic oligonucleotide
  Antisense strand to SEQ ID NO: 1494362
ucuccuaauugccaaggac

SEQ ID NO: 1494364 - RNA, 19 nt, Artificial Sequence
  Description of Artificial Sequence: Synthetic oligonucleotide
  Sense strand starting at position 3079 of SEQ ID NO: 1244512
gugacacauuugcuacuuu

SEQ ID NO: 1494365 - RNA, 19 nt, Artificial Sequence
  Description of Artificial Sequence: Synthetic oligonucleotide
  Antisense strand to SEQ ID NO: 1494364
aaaguagcaaaugugucac

SEQ ID NO: 1494366 - RNA, 19 nt, Artificial Sequence
  Description of Artificial Sequence: Synthetic oligonucleotide
  Sense strand starting at position 3128 of SEQ ID NO: 1244512
aaacacuauuugggagagu

SEQ ID NO: 1494367 - RNA, 19 nt, Artificial Sequence
  Description of Artificial Sequence: Synthetic oligonucleotide
  Antisense strand to SEQ ID NO: 1494366
acucucccaaauaguguuu

SEQ ID NO: 1494368 - RNA, 19 nt, Artificial Sequence
  Description of Artificial Sequence: Synthetic oligonucleotide
  Sense strand starting at position 3141 of SEQ ID NO: 1244512
gagagucucugacacauuu

SEQ ID NO: 1494369 - RNA, 19 nt, Artificial Sequence
  Description of Artificial Sequence: Synthetic oligonucleotide
  Antisense strand to SEQ ID NO: 1494368
aaaugugucagagacucuc

SEQ ID NO: 1494370 - RNA, 19 nt, Artificial Sequence
  Description of Artificial Sequence: Synthetic oligonucleotide
  Sense strand starting at position 3211 of SEQ ID NO: 1244512
auggguaaauggcucuaga

SEQ ID NO: 1494371 - RNA, 19 nt, Artificial Sequence
  Description of Artificial Sequence: Synthetic oligonucleotide
  Antisense strand to SEQ ID NO: 1494370
ucuagagccauuuacccau

SEQ ID NO: 1494372 - RNA, 19 nt, Artificial Sequence
  Description of Artificial Sequence: Synthetic oligonucleotide
  Sense strand starting at position 3269 of SEQ ID NO: 1244512
ccagcuaugccugaaauuc

SEQ ID NO: 1494373 - RNA, 19 nt, Artificial Sequence
  Description of Artificial Sequence: Synthetic oligonucleotide
  Antisense strand to SEQ ID NO: 1494372
gaauuucaggcauagcugg

SEQ ID NO: 1494374 - RNA, 19 nt, Artificial Sequence
  Description of Artificial Sequence: Synthetic oligonucleotide
  Sense strand starting at position 3291 of SEQ ID NO: 1244512
ggcugaaucuacucuugga

SEQ ID NO: 1494375 - RNA, 19 nt, Artificial Sequence
  Description of Artificial Sequence: Synthetic oligonucleotide
  Antisense strand to SEQ ID NO: 1494374
uccaagaguagauucagcc

SEQ ID NO: 1494376 - RNA, 19 nt, Artificial Sequence
  Description of Artificial Sequence: Synthetic oligonucleotide
  Sense strand starting at position 3348 of SEQ ID NO: 1244512
uuggauuaagccuguugga

SEQ ID NO: 1494377 - RNA, 19 nt, Artificial Sequence
  Description of Artificial Sequence: Synthetic oligonucleotide
  Antisense strand to SEQ ID NO: 1494376
uccaacaggcuuaauccaa

SEQ ID NO: 1494378 - RNA, 19 nt, Artificial Sequence
  Description of Artificial Sequence: Synthetic oligonucleotide
  Sense strand starting at position 3402 of SEQ ID NO: 1244512
cugugaagucacugauccu

SEQ ID NO: 1494379 - RNA, 19 nt, Artificial Sequence
  Description of Artificial Sequence: Synthetic oligonucleotide
  Antisense strand to SEQ ID NO: 1494378
aggaucagugacuucacag

SEQ ID NO: 1494380 - RNA, 19 nt, Artificial Sequence
  Description of Artificial Sequence: Synthetic oligonucleotide
  Sense strand starting at position 3430 of SEQ ID NO: 1244512
gggcuugacuagguucuau

SEQ ID NO: 1494381 - RNA, 19 nt, Artificial Sequence
  Description of Artificial Sequence: Synthetic oligonucleotide
  Antisense strand to SEQ ID NO: 1494380
auagaaccuagucaagccc

SEQ ID NO: 1494382 - RNA, 19 nt, Artificial Sequence
  Description of Artificial Sequence: Synthetic oligonucleotide
  Sense strand starting at position 3594 of SEQ ID NO: 1244512
uguauuagcguucucagcu

SEQ ID NO: 1494383 - RNA, 19 nt, Artificial Sequence
  Description of Artificial Sequence: Synthetic oligonucleotide
  Antisense strand to SEQ ID NO: 1494382
agcugagaacgcuaauaca

SEQ ID NO: 1494384 - RNA, 19 nt, Artificial Sequence
  Description of Artificial Sequence: Synthetic oligonucleotide
  Sense strand starting at position 3682 of SEQ ID NO: 1244512
cguccaucacagggugaaa

SEQ ID NO: 1494385 - RNA, 19 nt, Artificial Sequence
  Description of Artificial Sequence: Synthetic oligonucleotide
  Antisense strand to SEQ ID NO: 1494384
uuucacccugugauggacg

SEQ ID NO: 1494386 - RNA, 19 nt, Artificial Sequence
  Description of Artificial Sequence: Synthetic oligonucleotide
  Sense strand starting at position 3706 of SEQ ID NO: 1244512
uuaagagaaugcuuggcuu

SEQ ID NO: 1494387 - RNA, 19 nt, Artificial Sequence
  Description of Artificial Sequence: Synthetic oligonucleotide
  Antisense strand to SEQ ID NO: 1494386
aagccaagcauucucuuaa

SEQ ID NO: 1494388 - RNA, 19 nt, Artificial Sequence
  Description of Artificial Sequence: Synthetic oligonucleotide
  Sense strand starting at position 3708 of SEQ ID NO: 1244512
aagagaaugcuuggcuuau

SEQ ID NO: 1494389 - RNA, 19 nt, Artificial Sequence
  Description of Artificial Sequence: Synthetic oligonucleotide
  Antisense strand to SEQ ID NO: 1494388
auaagccaagcauucucuu

SEQ ID NO: 1494390 - RNA, 19 nt, Artificial Sequence
  Description of Artificial Sequence: Synthetic oligonucleotide
  Sense strand starting at position 3709 of SEQ ID NO: 1244512
agagaaugcuuggcuuauu

SEQ ID NO: 1494391 - RNA, 19 nt, Artificial Sequence
  Description of Artificial Sequence: Synthetic oligonucleotide
  Antisense strand to SEQ ID NO: 1494390
aauaagccaagcauucucu

SEQ ID NO: 1494392 - RNA, 19 nt, Artificial Sequence
  Description of Artificial Sequence: Synthetic oligonucleotide
  Sense strand starting at position 3714 of SEQ ID NO: 1244512
augcuuggcuuauuuauga

SEQ ID NO: 1494393 - RNA, 19 nt, Artificial Sequence
  Description of Artificial Sequence: Synthetic oligonucleotide
  Antisense strand to SEQ ID NO: 1494392
ucauaaauaagccaagcau

SEQ ID NO: 1494394 - RNA, 19 nt, Artificial Sequence
  Description of Artificial Sequence: Synthetic oligonucleotide
  Sense strand starting at position 229 of SEQ ID NO: 1244513
ucgcuuggucuugugagca

SEQ ID NO: 1494395 - RNA, 19 nt, Artificial Sequence
  Description of Artificial Sequence: Synthetic oligonucleotide
  Antisense strand to SEQ ID NO: 1494394
ugcucacaagaccaagcga

SEQ ID NO: 1494396 - RNA, 19 nt, Artificial Sequence
  Description of Artificial Sequence: Synthetic oligonucleotide
  Sense strand starting at position 233 of SEQ ID NO: 1244513
uuggucuugugagcaauuu

SEQ ID NO: 1494397 - RNA, 19 nt, Artificial Sequence
  Description of Artificial Sequence: Synthetic oligonucleotide
  Antisense strand to SEQ ID NO: 1494396
aaauugcucacaagaccaa

SEQ ID NO: 1494398 - RNA, 19 nt, Artificial Sequence
  Description of Artificial Sequence: Synthetic oligonucleotide
  Sense strand starting at position 321 of SEQ ID NO: 1244513
aaauucuaguuagugaagu

SEQ ID NO: 1494399 - RNA, 19 nt, Artificial Sequence
  Description of Artificial Sequence: Synthetic oligonucleotide
  Antisense strand to SEQ ID NO: 1494398
acuucacuaacuagaauuu

SEQ ID NO: 1494400 - RNA, 19 nt, Artificial Sequence
  Description of Artificial Sequence: Synthetic oligonucleotide
  Sense strand starting at position 329 of SEQ ID NO: 1244513
guuagugaaguugguguuu

SEQ ID NO: 1494401 - RNA, 19 nt, Artificial Sequence
  Description of Artificial Sequence: Synthetic oligonucleotide
  Antisense strand to SEQ ID NO: 1494400
aaacaccaacuucacuaac

SEQ ID NO: 1494402 - RNA, 19 nt, Artificial Sequence
  Description of Artificial Sequence: Synthetic oligonucleotide
  Sense strand starting at position 394 of SEQ ID NO: 1244513
aagaaauggucagaaggca

SEQ ID NO: 1494403 - RNA, 19 nt, Artificial Sequence
  Description of Artificial Sequence: Synthetic oligonucleotide
  Antisense strand to SEQ ID NO: 1494402
ugccuucugaccauuucuu

SEQ ID NO: 1494404 - RNA, 19 nt, Artificial Sequence
  Description of Artificial Sequence: Synthetic oligonucleotide
  Sense strand starting at position 414 of SEQ ID NO: 1244513
agagcaagugguuggaaga

SEQ ID NO: 1494405 - RNA, 19 nt, Artificial Sequence
  Description of Artificial Sequence: Synthetic oligonucleotide
  Antisense strand to SEQ ID NO: 1494404
ucuuccaaccacuugcucu

SEQ ID NO: 1494406 - RNA, 19 nt, Artificial Sequence
  Description of Artificial Sequence: Synthetic oligonucleotide
  Sense strand starting at position 515 of SEQ ID NO: 1244513
guugaacaaucucaaagca

SEQ ID NO: 1494407 - RNA, 19 nt, Artificial Sequence
  Description of Artificial Sequence: Synthetic oligonucleotide
  Antisense strand to SEQ ID NO: 1494406
ugcuuugagauuguucaac

SEQ ID NO: 1494408 - RNA, 19 nt, Artificial Sequence
  Description of Artificial Sequence: Synthetic oligonucleotide
  Sense strand starting at position 569 of SEQ ID NO: 1244513
ggaccauaaucacuaugca

SEQ ID NO: 1494409 - RNA, 19 nt, Artificial Sequence
  Description of Artificial Sequence: Synthetic oligonucleotide
  Antisense strand to SEQ ID NO: 1494408
ugcauagugauuauggucc

SEQ ID NO: 1494410 - RNA, 19 nt, Artificial Sequence
  Description of Artificial Sequence: Synthetic oligonucleotide
  Sense strand starting at position 764 of SEQ ID NO: 1244513
aggugaagugucugguuca

SEQ ID NO: 1494411 - RNA, 19 nt, Artificial Sequence
  Description of Artificial Sequence: Synthetic oligonucleotide
  Antisense strand to SEQ ID NO: 1494410
ugaaccagacacuucaccu

SEQ ID NO: 1494412 - RNA, 19 nt, Artificial Sequence
  Description of Artificial Sequence: Synthetic oligonucleotide
  Sense strand starting at position 794 of SEQ ID NO: 1244513
gcuucuccaguugauacau

SEQ ID NO: 1494413 - RNA, 19 nt, Artificial Sequence
  Description of Artificial Sequence: Synthetic oligonucleotide
  Antisense strand to SEQ ID NO: 1494412
auguaucaacuggagaagc

SEQ ID NO: 1494414 - RNA, 19 nt, Artificial Sequence
  Description of Artificial Sequence: Synthetic oligonucleotide
  Sense strand starting at position 1435 of SEQ ID NO: 1244513
cgaaaugcuucuucuuggu

SEQ ID NO: 1494415 - RNA, 19 nt, Artificial Sequence
  Description of Artificial Sequence: Synthetic oligonucleotide
  Antisense strand to SEQ ID NO: 1494414
accaagaagaagcauuucg

SEQ ID NO: 1494416 - RNA, 19 nt, Artificial Sequence
  Description of Artificial Sequence: Synthetic oligonucleotide
  Sense strand starting at position 2373 of SEQ ID NO: 1244513
gucuuacucuggcucauuu

SEQ ID NO: 1494417 - RNA, 19 nt, Artificial Sequence
  Description of Artificial Sequence: Synthetic oligonucleotide
  Antisense strand to SEQ ID NO: 1494416
aaaugagccagaguaagac

SEQ ID NO: 1494418 - RNA, 19 nt, Artificial Sequence
  Description of Artificial Sequence: Synthetic oligonucleotide
  Sense strand starting at position 2425 of SEQ ID NO: 1244513
guuacauaauucucagaug

SEQ ID NO: 1494419 - RNA, 19 nt, Artificial Sequence
  Description of Artificial Sequence: Synthetic oligonucleotide
  Antisense strand to SEQ ID NO: 1494418
caucugagaauuauguaac

SEQ ID NO: 1494420 - RNA, 19 nt, Artificial Sequence
  Description of Artificial Sequence: Synthetic oligonucleotide
  Sense strand starting at position 2428 of SEQ ID NO: 1244513
acauaauucucagaugagg

SEQ ID NO: 1494421 - RNA, 19 nt, Artificial Sequence
  Description of Artificial Sequence: Synthetic oligonucleotide
  Antisense strand to SEQ ID NO: 1494420
ccucaucugagaauuaugu

SEQ ID NO: 1494422 - RNA, 19 nt, Artificial Sequence
  Description of Artificial Sequence: Synthetic oligonucleotide
  Sense strand starting at position 2483 of SEQ ID NO: 1244513
uuguucuuucugcauggaa

SEQ ID NO: 1494423 - RNA, 19 nt, Artificial Sequence
  Description of Artificial Sequence: Synthetic oligonucleotide
  Antisense strand to SEQ ID NO: 1494422
uuccaugcagaaagaacaa

SEQ ID NO: 1494424 - RNA, 19 nt, Artificial Sequence
  Description of Artificial Sequence: Synthetic oligonucleotide
  Sense strand starting at position 2485 of SEQ ID NO: 1244513
guucuuucugcauggaaau

SEQ ID NO: 1494425 - RNA, 19 nt, Artificial Sequence
  Description of Artificial Sequence: Synthetic oligonucleotide
  Antisense strand to SEQ ID NO: 1494424
auuuccaugcagaaagaac

SEQ ID NO: 1494426 - RNA, 19 nt, Artificial Sequence
  Description of Artificial Sequence: Synthetic oligonucleotide
  Sense strand starting at position 2495 of SEQ ID NO: 1244513
cauggaaauucguaaacac

SEQ ID NO: 1494427 - RNA, 19 nt, Artificial Sequence
  Description of Artificial Sequence: Synthetic oligonucleotide
  Antisense strand to SEQ ID NO: 1494426
guguuuacgaauuuccaug

SEQ ID NO: 1494428 - RNA, 19 nt, Artificial Sequence
  Description of Artificial Sequence: Synthetic oligonucleotide
  Sense strand starting at position 2499 of SEQ ID NO: 1244513
gaaauucguaaacacggua

SEQ ID NO: 1494429 - RNA, 19 nt, Artificial Sequence
  Description of Artificial Sequence: Synthetic oligonucleotide
  Antisense strand to SEQ ID NO: 1494428
uaccguguuuacgaauuuc

SEQ ID NO: 1494430 - RNA, 19 nt, Artificial Sequence
  Description of Artificial Sequence: Synthetic oligonucleotide
  Sense strand starting at position 2525 of SEQ ID NO: 1244513
gguggucgcucuuuaaaca

SEQ ID NO: 1494431 - RNA, 19 nt, Artificial Sequence
  Description of Artificial Sequence: Synthetic oligonucleotide
  Antisense strand to SEQ ID NO: 1494430
uguuuaaagagcgaccacc

SEQ ID NO: 1494432 - RNA, 19 nt, Artificial Sequence
  Description of Artificial Sequence: Synthetic oligonucleotide
  Sense strand starting at position 2601 of SEQ ID NO: 1244513
ggcauaaugaagugauuaa

SEQ ID NO: 1494433 - RNA, 19 nt, Artificial Sequence
  Description of Artificial Sequence: Synthetic oligonucleotide
  Antisense strand to SEQ ID NO: 1494432
uuaaucacuucauuaugcc

SEQ ID NO: 1494434 - RNA, 19 nt, Artificial Sequence
  Description of Artificial Sequence: Synthetic oligonucleotide
  Sense strand starting at position 2634 of SEQ ID NO: 1244513
auguuacauucucuaggga

SEQ ID NO: 1494435 - RNA, 19 nt, Artificial Sequence
  Description of Artificial Sequence: Synthetic oligonucleotide
  Antisense strand to SEQ ID NO: 1494434
ucccuagagaauguaacau

SEQ ID NO: 1494436 - RNA, 19 nt, Artificial Sequence
  Description of Artificial Sequence: Synthetic oligonucleotide
  Sense strand starting at position 2748 of SEQ ID NO: 1244513
aaggaaaucgcccagcuaa

SEQ ID NO: 1494437 - RNA, 19 nt, Artificial Sequence
  Description of Artificial Sequence: Synthetic oligonucleotide
  Antisense strand to SEQ ID NO: 1494436
uuagcugggcgauuuccuu

SEQ ID NO: 1494438 - RNA, 19 nt, Artificial Sequence
  Description of Artificial Sequence: Synthetic oligonucleotide
  Sense strand starting at position 2788 of SEQ ID NO: 1244513
ggaguucacuggucaaaug

SEQ ID NO: 1494439 - RNA, 19 nt, Artificial Sequence
  Description of Artificial Sequence: Synthetic oligonucleotide
  Antisense strand to SEQ ID NO: 1494438
cauuugaccagugaacucc

SEQ ID NO: 1494440 - RNA, 19 nt, Artificial Sequence
  Description of Artificial Sequence: Synthetic oligonucleotide
  Sense strand starting at position 3196 of SEQ ID NO: 1244513
uuuaguaccugacugaaag

SEQ ID NO: 1494441 - RNA, 19 nt, Artificial Sequence
  Description of Artificial Sequence: Synthetic oligonucleotide
  Antisense strand to SEQ ID NO: 1494440
cuuucagucagguacuaaa

SEQ ID NO: 1494442 - RNA, 19 nt, Artificial Sequence
  Description of Artificial Sequence: Synthetic oligonucleotide
  Sense strand starting at position 3197 of SEQ ID NO: 1244513
uuaguaccugacugaaaga

SEQ ID NO: 1494443 - RNA, 19 nt, Artificial Sequence
  Description of Artificial Sequence: Synthetic oligonucleotide
  Antisense strand to SEQ ID NO: 1494442
ucuuucagucagguacuaa

SEQ ID NO: 1494444 - RNA, 19 nt, Artificial Sequence
  Description of Artificial Sequence: Synthetic oligonucleotide
  Sense strand starting at position 3254 of SEQ ID NO: 1244513
agguuacuacacgguaaga

SEQ ID NO: 1494445 - RNA, 19 nt, Artificial Sequence
  Description of Artificial Sequence: Synthetic oligonucleotide
  Antisense strand to SEQ ID NO: 1494444
ucuuaccguguaguaaccu

SEQ ID NO: 1494446 - RNA, 19 nt, Artificial Sequence
  Description of Artificial Sequence: Synthetic oligonucleotide
  Sense strand starting at position 3422 of SEQ ID NO: 1244513
uccagaucucgucgauaaa

SEQ ID NO: 1494447 - RNA, 19 nt, Artificial Sequence
  Description of Artificial Sequence: Synthetic oligonucleotide
  Antisense strand to SEQ ID NO: 1494446
uuuaucgacgagaucugga

SEQ ID NO: 1494448 - RNA, 19 nt, Artificial Sequence
  Description of Artificial Sequence: Synthetic oligonucleotide
  Sense strand starting at position 3423 of SEQ ID NO: 1244513
ccagaucucgucgauaaac

SEQ ID NO: 1494449 - RNA, 19 nt, Artificial Sequence
  Description of Artificial Sequence: Synthetic oligonucleotide
  Antisense strand to SEQ ID NO: 1494448
guuuaucgacgagaucugg

SEQ ID NO: 1494450 - RNA, 19 nt, Artificial Sequence
  Description of Artificial Sequence: Synthetic oligonucleotide
  Sense strand starting at position 3502 of SEQ ID NO: 1244513
auuacuugccaucaagguu

SEQ ID NO: 1494451 - RNA, 19 nt, Artificial Sequence
  Description of Artificial Sequence: Synthetic oligonucleotide
  Antisense strand to SEQ ID NO: 1494450
aaccuugauggcaaguaau

SEQ ID NO: 1494452 - RNA, 19 nt, Artificial Sequence
  Description of Artificial Sequence: Synthetic oligonucleotide
  Sense strand starting at position 3525 of SEQ ID NO: 1244513
gugguucuauuacccagua

SEQ ID NO: 1494453 - RNA, 19 nt, Artificial Sequence
  Description of Artificial Sequence: Synthetic oligonucleotide
  Antisense strand to SEQ ID NO: 1494452
uacuggguaauagaaccac

SEQ ID NO: 1494454 - RNA, 19 nt, Artificial Sequence
  Description of Artificial Sequence: Synthetic oligonucleotide
  Sense strand starting at position 3526 of SEQ ID NO: 1244513
ugguucuauuacccaguaa

SEQ ID NO: 1494455 - RNA, 19 nt, Artificial Sequence
  Description of Artificial Sequence: Synthetic oligonucleotide
  Antisense strand to SEQ ID NO: 1494454
uuacuggguaauagaacca

SEQ ID NO: 1494456 - RNA, 19 nt, Artificial Sequence
  Description of Artificial Sequence: Synthetic oligonucleotide
  Sense strand starting at position 3530 of SEQ ID NO: 1244513
ucuauuacccaguaaaguc

SEQ ID NO: 1494457 - RNA, 19 nt, Artificial Sequence
  Description of Artificial Sequence: Synthetic oligonucleotide
  Antisense strand to SEQ ID NO: 1494456
gacuuuacuggguaauaga

SEQ ID NO: 1494458 - RNA, 19 nt, Artificial Sequence
  Description of Artificial Sequence: Synthetic oligonucleotide
  Sense strand starting at position 3538 of SEQ ID NO: 1244513
ccaguaaagucauugacca

SEQ ID NO: 1494459 - RNA, 19 nt, Artificial Sequence
  Description of Artificial Sequence: Synthetic oligonucleotide
  Antisense strand to SEQ ID NO: 1494458
uggucaaugacuuuacugg

SEQ ID NO: 1494460 - RNA, 19 nt, Artificial Sequence
  Description of Artificial Sequence: Synthetic oligonucleotide
  Sense strand starting at position 3730 of SEQ ID NO: 1244513
ugacaucauucugucacau

SEQ ID NO: 1494461 - RNA, 19 nt, Artificial Sequence
  Description of Artificial Sequence: Synthetic oligonucleotide
  Antisense strand to SEQ ID NO: 1494460
augugacagaaugauguca

SEQ ID NO: 1494462 - RNA, 19 nt, Artificial Sequence
  Description of Artificial Sequence: Synthetic oligonucleotide
  Sense strand starting at position 3772 of SEQ ID NO: 1244513
ucauuugucucaguaagca

SEQ ID NO: 1494463 - RNA, 19 nt, Artificial Sequence
  Description of Artificial Sequence: Synthetic oligonucleotide
  Antisense strand to SEQ ID NO: 1494462
ugcuuacugagacaaauga

SEQ ID NO: 1494464 - RNA, 19 nt, Artificial Sequence
  Description of Artificial Sequence: Synthetic oligonucleotide
  Sense strand starting at position 3788 of SEQ ID NO: 1244513
gcacaaucuaucuggguga

SEQ ID NO: 1494465 - RNA, 19 nt, Artificial Sequence
  Description of Artificial Sequence: Synthetic oligonucleotide
  Antisense strand to SEQ ID NO: 1494464
ucacccagauagauugugc

SEQ ID NO: 1494466 - RNA, 19 nt, Artificial Sequence
  Description of Artificial Sequence: Synthetic oligonucleotide
  Sense strand starting at position 3790 of SEQ ID NO: 1244513
acaaucuaucugggugaca

SEQ ID NO: 1494467 - RNA, 19 nt, Artificial Sequence
  Description of Artificial Sequence: Synthetic oligonucleotide
  Antisense strand to SEQ ID NO: 1494466
ugucacccagauagauugu

SEQ ID NO: 1494468 - RNA, 19 nt, Artificial Sequence
  Description of Artificial Sequence: Synthetic oligonucleotide
  Sense strand starting at position 3819 of SEQ ID NO: 1244513
uucugaagggucuggugua

SEQ ID NO: 1494469 - RNA, 19 nt, Artificial Sequence
  Description of Artificial Sequence: Synthetic oligonucleotide
  Antisense strand to SEQ ID NO: 1494468
uacaccagacccuucagaa

SEQ ID NO: 1494470 - RNA, 19 nt, Artificial Sequence
  Description of Artificial Sequence: Synthetic oligonucleotide
  Sense strand starting at position 3849 of SEQ ID NO: 1244513
ugaaauaggucuguuggca

SEQ ID NO: 1494471 - RNA, 19 nt, Artificial Sequence
  Description of Artificial Sequence: Synthetic oligonucleotide
  Antisense strand to SEQ ID NO: 1494470
ugccaacagaccuauuuca

SEQ ID NO: 1494472 - RNA, 19 nt, Artificial Sequence
  Description of Artificial Sequence: Synthetic oligonucleotide
  Sense strand starting at position 3858 of SEQ ID NO: 1244513
ucuguuggcacagguaaga

SEQ ID NO: 1494473 - RNA, 19 nt, Artificial Sequence
  Description of Artificial Sequence: Synthetic oligonucleotide
  Antisense strand to SEQ ID NO: 1494472
ucuuaccugugccaacaga

SEQ ID NO: 1494474 - RNA, 19 nt, Artificial Sequence
  Description of Artificial Sequence: Synthetic oligonucleotide
  Sense strand starting at position 346 of SEQ ID NO: 1244514
gcuguagugaacuaugaua

SEQ ID NO: 1494475 - RNA, 19 nt, Artificial Sequence
  Description of Artificial Sequence: Synthetic oligonucleotide
  Antisense strand to SEQ ID NO: 1494474
uaucauaguucacuacagc

SEQ ID NO: 1494476 - RNA, 19 nt, Artificial Sequence
  Description of Artificial Sequence: Synthetic oligonucleotide
  Sense strand starting at position 348 of SEQ ID NO: 1244514
uguagugaacuaugauagu

SEQ ID NO: 1494477 - RNA, 19 nt, Artificial Sequence
  Description of Artificial Sequence: Synthetic oligonucleotide
  Antisense strand to SEQ ID NO: 1494476
acuaucauaguucacuaca

SEQ ID NO: 1494478 - RNA, 19 nt, Artificial Sequence
  Description of Artificial Sequence: Synthetic oligonucleotide
  Sense strand starting at position 384 of SEQ ID NO: 1244514
cgugcaauagagugagauc

SEQ ID NO: 1494479 - RNA, 19 nt, Artificial Sequence
  Description of Artificial Sequence: Synthetic oligonucleotide
  Antisense strand to SEQ ID NO: 1494478
gaucucacucuauugcacg

SEQ ID NO: 1494480 - RNA, 19 nt, Artificial Sequence
  Description of Artificial Sequence: Synthetic oligonucleotide
  Sense strand starting at position 741 of SEQ ID NO: 1244514
aacaaugaguuuccugaga

SEQ ID NO: 1494481 - RNA, 19 nt, Artificial Sequence
  Description of Artificial Sequence: Synthetic oligonucleotide
  Antisense strand to SEQ ID NO: 1494480
ucucaggaaacucauuguu

SEQ ID NO: 1494482 - RNA, 19 nt, Artificial Sequence
  Description of Artificial Sequence: Synthetic oligonucleotide
  Sense strand starting at position 767 of SEQ ID NO: 1244514
ccaggaaucccuugggcuu

SEQ ID NO: 1494483 - RNA, 19 nt, Artificial Sequence
  Description of Artificial Sequence: Synthetic oligonucleotide
  Antisense strand to SEQ ID NO: 1494482
aagcccaagggauuccugg

SEQ ID NO: 1494484 - RNA, 19 nt, Artificial Sequence
  Description of Artificial Sequence: Synthetic oligonucleotide
  Sense strand starting at position 806 of SEQ ID NO: 1244514
ugaagaagguuucuaacua

SEQ ID NO: 1494485 - RNA, 19 nt, Artificial Sequence
  Description of Artificial Sequence: Synthetic oligonucleotide
  Antisense strand to SEQ ID NO: 1494484
uaguuagaaaccuucuuca

SEQ ID NO: 1494486 - RNA, 19 nt, Artificial Sequence
  Description of Artificial Sequence: Synthetic oligonucleotide
  Sense strand starting at position 1011 of SEQ ID NO: 1244514
gccucagucucacuuauca

SEQ ID NO: 1494487 - RNA, 19 nt, Artificial Sequence
  Description of Artificial Sequence: Synthetic oligonucleotide
  Antisense strand to SEQ ID NO: 1494486
ugauaagugagacugaggc

SEQ ID NO: 1494488 - RNA, 19 nt, Artificial Sequence
  Description of Artificial Sequence: Synthetic oligonucleotide
  Sense strand starting at position 1046 of SEQ ID NO: 1244514
gcugcuauuaucuggaggu

SEQ ID NO: 1494489 - RNA, 19 nt, Artificial Sequence
  Description of Artificial Sequence: Synthetic oligonucleotide
  Antisense strand to SEQ ID NO: 1494488
accuccagauaauagcagc

SEQ ID NO: 1494490 - RNA, 19 nt, Artificial Sequence
  Description of Artificial Sequence: Synthetic oligonucleotide
  Sense strand starting at position 1050 of SEQ ID NO: 1244514
cuauuaucuggagguggca

SEQ ID NO: 1494491 - RNA, 19 nt, Artificial Sequence
  Description of Artificial Sequence: Synthetic oligonucleotide
  Antisense strand to SEQ ID NO: 1494490
ugccaccuccagauaauag

SEQ ID NO: 1494492 - RNA, 19 nt, Artificial Sequence
  Description of Artificial Sequence: Synthetic oligonucleotide
  Sense strand starting at position 1115 of SEQ ID NO: 1244514
ggugugagaggccaggaau

SEQ ID NO: 1494493 - RNA, 19 nt, Artificial Sequence
  Description of Artificial Sequence: Synthetic oligonucleotide
  Antisense strand to SEQ ID NO: 1494492
auuccuggccucucacacc

SEQ ID NO: 1494494 - RNA, 19 nt, Artificial Sequence
  Description of Artificial Sequence: Synthetic oligonucleotide
  Sense strand starting at position 1148 of SEQ ID NO: 1244514
ccuaccucuuaggcugaua

SEQ ID NO: 1494495 - RNA, 19 nt, Artificial Sequence
  Description of Artificial Sequence: Synthetic oligonucleotide
  Antisense strand to SEQ ID NO: 1494494
uaucagccuaagagguagg

SEQ ID NO: 1494496 - RNA, 19 nt, Artificial Sequence
  Description of Artificial Sequence: Synthetic oligonucleotide
  Sense strand starting at position 1151 of SEQ ID NO: 1244514
accucuuaggcugauaaau

SEQ ID NO: 1494497 - RNA, 19 nt, Artificial Sequence
  Description of Artificial Sequence: Synthetic oligonucleotide
  Antisense strand to SEQ ID NO: 1494496
auuuaucagccuaagaggu

SEQ ID NO: 1494498 - RNA, 19 nt, Artificial Sequence
  Description of Artificial Sequence: Synthetic oligonucleotide
  Sense strand starting at position 1203 of SEQ ID NO: 1244514
uuagguuaccuagagcaga

SEQ ID NO: 1494499 - RNA, 19 nt, Artificial Sequence
  Description of Artificial Sequence: Synthetic oligonucleotide
  Antisense strand to SEQ ID NO: 1494498
ucugcucuagguaaccuaa

SEQ ID NO: 1494500 - RNA, 19 nt, Artificial Sequence
  Description of Artificial Sequence: Synthetic oligonucleotide
  Sense strand starting at position 1343 of SEQ ID NO: 1244514
gaggaaaugugccuagaaa

SEQ ID NO: 1494501 - RNA, 19 nt, Artificial Sequence
  Description of Artificial Sequence: Synthetic oligonucleotide
  Antisense strand to SEQ ID NO: 1494500
uuucuaggcacauuuccuc

SEQ ID NO: 1494502 - RNA, 19 nt, Artificial Sequence
  Description of Artificial Sequence: Synthetic oligonucleotide
  Sense strand starting at position 1368 of SEQ ID NO: 1244514
guggguaugagggauguga

SEQ ID NO: 1494503 - RNA, 19 nt, Artificial Sequence
  Description of Artificial Sequence: Synthetic oligonucleotide
  Antisense strand to SEQ ID NO: 1494502
ucacaucccucauacccac

SEQ ID NO: 1494504 - RNA, 19 nt, Artificial Sequence
  Description of Artificial Sequence: Synthetic oligonucleotide
  Sense strand starting at position 1372 of SEQ ID NO: 1244514
guaugagggaugugaaacu

SEQ ID NO: 1494505 - RNA, 19 nt, Artificial Sequence
  Description of Artificial Sequence: Synthetic oligonucleotide
  Antisense strand to SEQ ID NO: 1494504
aguuucacaucccucauac

SEQ ID NO: 1494506 - RNA, 19 nt, Artificial Sequence
  Description of Artificial Sequence: Synthetic oligonucleotide
  Sense strand starting at position 1383 of SEQ ID NO: 1244514
gugaaacuucuuugaauug

SEQ ID NO: 1494507 - RNA, 19 nt, Artificial Sequence
  Description of Artificial Sequence: Synthetic oligonucleotide
  Antisense strand to SEQ ID NO: 1494506
caauucaaagaaguuucac

SEQ ID NO: 1494508 - RNA, 19 nt, Artificial Sequence
  Description of Artificial Sequence: Synthetic oligonucleotide
  Sense strand starting at position 1390 of SEQ ID NO: 1244514
uucuuugaauugccaugaa

SEQ ID NO: 1494509 - RNA, 19 nt, Artificial Sequence
  Description of Artificial Sequence: Synthetic oligonucleotide
  Antisense strand to SEQ ID NO: 1494508
uucauggcaauucaaagaa

SEQ ID NO: 1494510 - RNA, 19 nt, Artificial Sequence
  Description of Artificial Sequence: Synthetic oligonucleotide
  Sense strand starting at position 1393 of SEQ ID NO: 1244514
uuugaauugccaugaaaca

SEQ ID NO: 1494511 - RNA, 19 nt, Artificial Sequence
  Description of Artificial Sequence: Synthetic oligonucleotide
  Antisense strand to SEQ ID NO: 1494510
uguuucauggcaauucaaa

SEQ ID NO: 1494512 - RNA, 19 nt, Artificial Sequence
  Description of Artificial Sequence: Synthetic oligonucleotide
  Sense strand starting at position 1991 of SEQ ID NO: 1244514
cuuccugucucauuaugau

SEQ ID NO: 1494513 - RNA, 19 nt, Artificial Sequence
  Description of Artificial Sequence: Synthetic oligonucleotide
  Antisense strand to SEQ ID NO: 1494512
aucauaaugagacaggaag

SEQ ID NO: 1494514 - RNA, 19 nt, Artificial Sequence
  Description of Artificial Sequence: Synthetic oligonucleotide
  Sense strand starting at position 1997 of SEQ ID NO: 1244514
gucucauuaugaucuuugu

SEQ ID NO: 1494515 - RNA, 19 nt, Artificial Sequence
  Description of Artificial Sequence: Synthetic oligonucleotide
  Antisense strand to SEQ ID NO: 1494514
acaaagaucauaaugagac

SEQ ID NO: 1494516 - RNA, 19 nt, Artificial Sequence
  Description of Artificial Sequence: Synthetic oligonucleotide
  Sense strand starting at position 2004 of SEQ ID NO: 1244514
uaugaucuuugucucagga

SEQ ID NO: 1494517 - RNA, 19 nt, Artificial Sequence
  Description of Artificial Sequence: Synthetic oligonucleotide
  Antisense strand to SEQ ID NO: 1494516
uccugagacaaagaucaua

SEQ ID NO: 1494518 - RNA, 19 nt, Artificial Sequence
  Description of Artificial Sequence: Synthetic oligonucleotide
  Sense strand starting at position 2020 of SEQ ID NO: 1244514
ggacuucggcccuggaauu

SEQ ID NO: 1494519 - RNA, 19 nt, Artificial Sequence
  Description of Artificial Sequence: Synthetic oligonucleotide
  Antisense strand to SEQ ID NO: 1494518
aauuccagggccgaagucc

SEQ ID NO: 1494520 - RNA, 19 nt, Artificial Sequence
  Description of Artificial Sequence: Synthetic oligonucleotide
  Sense strand starting at position 2109 of SEQ ID NO: 1244514
ugauuugcuuuagagauuc

SEQ ID NO: 1494521 - RNA, 19 nt, Artificial Sequence
  Description of Artificial Sequence: Synthetic oligonucleotide
  Antisense strand to SEQ ID NO: 1494520
gaaucucuaaagcaaauca

SEQ ID NO: 1494522 - RNA, 19 nt, Artificial Sequence
  Description of Artificial Sequence: Synthetic oligonucleotide
  Sense strand starting at position 2149 of SEQ ID NO: 1244514
uggcacgaugcccagaaua

SEQ ID NO: 1494523 - RNA, 19 nt, Artificial Sequence
  Description of Artificial Sequence: Synthetic oligonucleotide
  Antisense strand to SEQ ID NO: 1494522
uauucugggcaucgugcca

SEQ ID NO: 1494524 - RNA, 19 nt, Artificial Sequence
  Description of Artificial Sequence: Synthetic oligonucleotide
  Sense strand starting at position 2151 of SEQ ID NO: 1244514
gcacgaugcccagaauaag

SEQ ID NO: 1494525 - RNA, 19 nt, Artificial Sequence
  Description of Artificial Sequence: Synthetic oligonucleotide
  Antisense strand to SEQ ID NO: 1494524
cuuauucugggcaucgugc

SEQ ID NO: 1494526 - RNA, 19 nt, Artificial Sequence
  Description of Artificial Sequence: Synthetic oligonucleotide
  Sense strand starting at position 2449 of SEQ ID NO: 1244514
agggcuugauugucauaca

SEQ ID NO: 1494527 - RNA, 19 nt, Artificial Sequence
  Description of Artificial Sequence: Synthetic oligonucleotide
  Antisense strand to SEQ ID NO: 1494526
uguaugacaaucaagcccu

SEQ ID NO: 1494528 - RNA, 19 nt, Artificial Sequence
  Description of Artificial Sequence: Synthetic oligonucleotide
  Sense strand starting at position 2468 of SEQ ID NO: 1244514
guucgaggguacucuuuga

SEQ ID NO: 1494529 - RNA, 19 nt, Artificial Sequence
  Description of Artificial Sequence: Synthetic oligonucleotide
  Antisense strand to SEQ ID NO: 1494528
ucaaagaguacccucgaac

SEQ ID NO: 1494530 - RNA, 19 nt, Artificial Sequence
  Description of Artificial Sequence: Synthetic oligonucleotide
  Sense strand starting at position 2588 of SEQ ID NO: 1244514
ugguaaauuugccucugca

SEQ ID NO: 1494531 - RNA, 19 nt, Artificial Sequence
  Description of Artificial Sequence: Synthetic oligonucleotide
  Antisense strand to SEQ ID NO: 1494530
ugcagaggcaaauuuacca

SEQ ID NO: 1494532 - RNA, 19 nt, Artificial Sequence
  Description of Artificial Sequence: Synthetic oligonucleotide
  Sense strand starting at position 2596 of SEQ ID NO: 1244514
uugccucugcaugaguuau

SEQ ID NO: 1494533 - RNA, 19 nt, Artificial Sequence
  Description of Artificial Sequence: Synthetic oligonucleotide
  Antisense strand to SEQ ID NO: 1494532
auaacucaugcagaggcaa

SEQ ID NO: 1494534 - RNA, 19 nt, Artificial Sequence
  Description of Artificial Sequence: Synthetic oligonucleotide
  Sense strand starting at position 2624 of SEQ ID NO: 1244514
uccucauagcccuaggagu

SEQ ID NO: 1494535 - RNA, 19 nt, Artificial Sequence
  Description of Artificial Sequence: Synthetic oligonucleotide
  Antisense strand to SEQ ID NO: 1494534
acuccuagggcuaugagga

SEQ ID NO: 1494536 - RNA, 19 nt, Artificial Sequence
  Description of Artificial Sequence: Synthetic oligonucleotide
  Sense strand starting at position 2626 of SEQ ID NO: 1244514
cucauagcccuaggaguuu

SEQ ID NO: 1494537 - RNA, 19 nt, Artificial Sequence
  Description of Artificial Sequence: Synthetic oligonucleotide
  Antisense strand to SEQ ID NO: 1494536
aaacuccuagggcuaugag

SEQ ID NO: 1494538 - RNA, 19 nt, Artificial Sequence
  Description of Artificial Sequence: Synthetic oligonucleotide
  Sense strand starting at position 2786 of SEQ ID NO: 1244514
gcccgaguagcugaaacua

SEQ ID NO: 1494539 - RNA, 19 nt, Artificial Sequence
  Description of Artificial Sequence: Synthetic oligonucleotide
  Antisense strand to SEQ ID NO: 1494538
uaguuucagcuacucgggc

SEQ ID NO: 1494540 - RNA, 19 nt, Artificial Sequence
  Description of Artificial Sequence: Synthetic oligonucleotide
  Sense strand starting at position 3043 of SEQ ID NO: 1244514
gugacugcuugacccauaa

SEQ ID NO: 1494541 - RNA, 19 nt, Artificial Sequence
  Description of Artificial Sequence: Synthetic oligonucleotide
  Antisense strand to SEQ ID NO: 1494540
uuaugggucaagcagucac

SEQ ID NO: 1494542 - RNA, 19 nt, Artificial Sequence
  Description of Artificial Sequence: Synthetic oligonucleotide
  Sense strand starting at position 3178 of SEQ ID NO: 1244514
uugucauccaggcaggaga

SEQ ID NO: 1494543 - RNA, 19 nt, Artificial Sequence
  Description of Artificial Sequence: Synthetic oligonucleotide
  Antisense strand to SEQ ID NO: 1494542
ucuccugccuggaugacaa

SEQ ID NO: 1494544 - RNA, 19 nt, Artificial Sequence
  Description of Artificial Sequence: Synthetic oligonucleotide
  Sense strand starting at position 3551 of SEQ ID NO: 1244514
gaaugaaguuaucuugguu

SEQ ID NO: 1494545 - RNA, 19 nt, Artificial Sequence
  Description of Artificial Sequence: Synthetic oligonucleotide
  Antisense strand to SEQ ID NO: 1494544
aaccaagauaacuucauuc

SEQ ID NO: 1494546 - RNA, 19 nt, Artificial Sequence
  Description of Artificial Sequence: Synthetic oligonucleotide
  Sense strand starting at position 3556 of SEQ ID NO: 1244514
aaguuaucuugguuuggga

SEQ ID NO: 1494547 - RNA, 19 nt, Artificial Sequence
  Description of Artificial Sequence: Synthetic oligonucleotide
  Antisense strand to SEQ ID NO: 1494546
ucccaaaccaagauaacuu

SEQ ID NO: 1494548 - RNA, 19 nt, Artificial Sequence
  Description of Artificial Sequence: Synthetic oligonucleotide
  Sense strand starting at position 3613 of SEQ ID NO: 1244514
agacaaaccugugcaacau

SEQ ID NO: 1494549 - RNA, 19 nt, Artificial Sequence
  Description of Artificial Sequence: Synthetic oligonucleotide
  Antisense strand to SEQ ID NO: 1494548
auguugcacagguuugucu

SEQ ID NO: 1494550 - RNA, 19 nt, Artificial Sequence
  Description of Artificial Sequence: Synthetic oligonucleotide
  Sense strand starting at position 3725 of SEQ ID NO: 1244514
cugcauagugcagaagaau

SEQ ID NO: 1494551 - RNA, 19 nt, Artificial Sequence
  Description of Artificial Sequence: Synthetic oligonucleotide
  Antisense strand to SEQ ID NO: 1494550
auucuucugcacuaugcag

SEQ ID NO: 1494552 - RNA, 19 nt, Artificial Sequence
  Description of Artificial Sequence: Synthetic oligonucleotide
  Sense strand starting at position 3855 of SEQ ID NO: 1244514
auuacuuaauggcugaaga

SEQ ID NO: 1494553 - RNA, 19 nt, Artificial Sequence
  Description of Artificial Sequence: Synthetic oligonucleotide
  Antisense strand to SEQ ID NO: 1494552
ucuucagccauuaaguaau

SEQ ID NO: 1494554 - RNA, 19 nt, Artificial Sequence
  Description of Artificial Sequence: Synthetic oligonucleotide
  Sense strand starting at position 266 of SEQ ID NO: 1244515
ugaaauacaguugguauua

SEQ ID NO: 1494555 - RNA, 19 nt, Artificial Sequence
  Description of Artificial Sequence: Synthetic oligonucleotide
  Antisense strand to SEQ ID NO: 1494554
uaauaccaacuguauuuca

SEQ ID NO: 1494556 - RNA, 19 nt, Artificial Sequence
  Description of Artificial Sequence: Synthetic oligonucleotide
  Sense strand starting at position 267 of SEQ ID NO: 1244515
gaaauacaguugguauuaa

SEQ ID NO: 1494557 - RNA, 19 nt, Artificial Sequence
  Description of Artificial Sequence: Synthetic oligonucleotide
  Antisense strand to SEQ ID NO: 1494556
uuaauaccaacuguauuuc

SEQ ID NO: 1494558 - RNA, 19 nt, Artificial Sequence
  Description of Artificial Sequence: Synthetic oligonucleotide
  Sense strand starting at position 280 of SEQ ID NO: 1244515
uauuaagaggguugucaga

SEQ ID NO: 1494559 - RNA, 19 nt, Artificial Sequence
  Description of Artificial Sequence: Synthetic oligonucleotide
  Antisense strand to SEQ ID NO: 1494558
ucugacaacccucuuaaua

SEQ ID NO: 1494560 - RNA, 19 nt, Artificial Sequence
  Description of Artificial Sequence: Synthetic oligonucleotide
  Sense strand starting at position 282 of SEQ ID NO: 1244515
uuaagaggguugucagauu

SEQ ID NO: 1494561 - RNA, 19 nt, Artificial Sequence
  Description of Artificial Sequence: Synthetic oligonucleotide
  Antisense strand to SEQ ID NO: 1494560
aaucugacaacccucuuaa

SEQ ID NO: 1494562 - RNA, 19 nt, Artificial Sequence
  Description of Artificial Sequence: Synthetic oligonucleotide
  Sense strand starting at position 291 of SEQ ID NO: 1244515
uugucagauuuagagaaua

SEQ ID NO: 1494563 - RNA, 19 nt, Artificial Sequence
  Description of Artificial Sequence: Synthetic oligonucleotide
  Antisense strand to SEQ ID NO: 1494562
uauucucuaaaucugacaa

SEQ ID NO: 1494564 - RNA, 19 nt, Artificial Sequence
  Description of Artificial Sequence: Synthetic oligonucleotide
  Sense strand starting at position 368 of SEQ ID NO: 1244515
auguaagaauguuccagua

SEQ ID NO: 1494565 - RNA, 19 nt, Artificial Sequence
  Description of Artificial Sequence: Synthetic oligonucleotide
  Antisense strand to SEQ ID NO: 1494564
uacuggaacauucuuacau

SEQ ID NO: 1494566 - RNA, 19 nt, Artificial Sequence
  Description of Artificial Sequence: Synthetic oligonucleotide
  Sense strand starting at position 413 of SEQ ID NO: 1244515
auguauuuguuguuugaca

SEQ ID NO: 1494567 - RNA, 19 nt, Artificial Sequence
  Description of Artificial Sequence: Synthetic oligonucleotide
  Antisense strand to SEQ ID NO: 1494566
ugucaaacaacaaauacau

SEQ ID NO: 1494568 - RNA, 19 nt, Artificial Sequence
  Description of Artificial Sequence: Synthetic oligonucleotide
  Sense strand starting at position 414 of SEQ ID NO: 1244515
uguauuuguuguuugacaa

SEQ ID NO: 1494569 - RNA, 19 nt, Artificial Sequence
  Description of Artificial Sequence: Synthetic oligonucleotide
  Antisense strand to SEQ ID NO: 1494568
uugucaaacaacaaauaca

SEQ ID NO: 1494570 - RNA, 19 nt, Artificial Sequence
  Description of Artificial Sequence: Synthetic oligonucleotide
  Sense strand starting at position 725 of SEQ ID NO: 1244515
guauuauuccuguggaaga

SEQ ID NO: 1494571 - RNA, 19 nt, Artificial Sequence
  Description of Artificial Sequence: Synthetic oligonucleotide
  Antisense strand to SEQ ID NO: 1494570
ucuuccacaggaauaauac

SEQ ID NO: 1494572 - RNA, 19 nt, Artificial Sequence
  Description of Artificial Sequence: Synthetic oligonucleotide
  Sense strand starting at position 880 of SEQ ID NO: 1244515
ggacauucaguuggugacu

SEQ ID NO: 1494573 - RNA, 19 nt, Artificial Sequence
  Description of Artificial Sequence: Synthetic oligonucleotide
  Antisense strand to SEQ ID NO: 1494572
agucaccaacugaaugucc

SEQ ID NO: 1494574 - RNA, 19 nt, Artificial Sequence
  Description of Artificial Sequence: Synthetic oligonucleotide
  Sense strand starting at position 930 of SEQ ID NO: 1244515
aagugucugggcuaauaga

SEQ ID NO: 1494575 - RNA, 19 nt, Artificial Sequence
  Description of Artificial Sequence: Synthetic oligonucleotide
  Antisense strand to SEQ ID NO: 1494574
ucuauuagcccagacacuu

SEQ ID NO: 1494576 - RNA, 19 nt, Artificial Sequence
  Description of Artificial Sequence: Synthetic oligonucleotide
  Sense strand starting at position 1477 of SEQ ID NO: 1244515
ccacuuagauuugggagga

SEQ ID NO: 1494577 - RNA, 19 nt, Artificial Sequence
  Description of Artificial Sequence: Synthetic oligonucleotide
  Antisense strand to SEQ ID NO: 1494576
uccucccaaaucuaagugg

SEQ ID NO: 1494578 - RNA, 19 nt, Artificial Sequence
  Description of Artificial Sequence: Synthetic oligonucleotide
  Sense strand starting at position 1532 of SEQ ID NO: 1244515
gagugaaggcuggaugcua

SEQ ID NO: 1494579 - RNA, 19 nt, Artificial Sequence
  Description of Artificial Sequence: Synthetic oligonucleotide
  Antisense strand to SEQ ID NO: 1494578
uagcauccagccuucacuc

SEQ ID NO: 1494580 - RNA, 19 nt, Artificial Sequence
  Description of Artificial Sequence: Synthetic oligonucleotide
  Sense strand starting at position 1984 of SEQ ID NO: 1244515
ugugaaucccagcaacuga

SEQ ID NO: 1494581 - RNA, 19 nt, Artificial Sequence
  Description of Artificial Sequence: Synthetic oligonucleotide
  Antisense strand to SEQ ID NO: 1494580
ucaguugcugggauucaca

SEQ ID NO: 1494582 - RNA, 19 nt, Artificial Sequence
  Description of Artificial Sequence: Synthetic oligonucleotide
  Sense strand starting at position 2041 of SEQ ID NO: 1244515
ggccuaauggguuaacucu

SEQ ID NO: 1494583 - RNA, 19 nt, Artificial Sequence
  Description of Artificial Sequence: Synthetic oligonucleotide
  Antisense strand to SEQ ID NO: 1494582
agaguuaacccauuaggcc

SEQ ID NO: 1494584 - RNA, 19 nt, Artificial Sequence
  Description of Artificial Sequence: Synthetic oligonucleotide
  Sense strand starting at position 2354 of SEQ ID NO: 1244515
cagugcaggccuuaauaau

SEQ ID NO: 1494585 - RNA, 19 nt, Artificial Sequence
  Description of Artificial Sequence: Synthetic oligonucleotide
  Antisense strand to SEQ ID NO: 1494584
auuauuaaggccugcacug

SEQ ID NO: 1494586 - RNA, 19 nt, Artificial Sequence
  Description of Artificial Sequence: Synthetic oligonucleotide
  Sense strand starting at position 2368 of SEQ ID NO: 1244515
auaauuugaucugggaacu

SEQ ID NO: 1494587 - RNA, 19 nt, Artificial Sequence
  Description of Artificial Sequence: Synthetic oligonucleotide
  Antisense strand to SEQ ID NO: 1494586
aguucccagaucaaauuau

SEQ ID NO: 1494588 - RNA, 19 nt, Artificial Sequence
  Description of Artificial Sequence: Synthetic oligonucleotide
  Sense strand starting at position 2454 of SEQ ID NO: 1244515
gggacacuucuuggaacuu

SEQ ID NO: 1494589 - RNA, 19 nt, Artificial Sequence
  Description of Artificial Sequence: Synthetic oligonucleotide
  Antisense strand to SEQ ID NO: 1494588
aaguuccaagaaguguccc

SEQ ID NO: 1494590 - RNA, 19 nt, Artificial Sequence
  Description of Artificial Sequence: Synthetic oligonucleotide
  Sense strand starting at position 2761 of SEQ ID NO: 1244515
ucucaagaugcugacggau

SEQ ID NO: 1494591 - RNA, 19 nt, Artificial Sequence
  Description of Artificial Sequence: Synthetic oligonucleotide
  Antisense strand to SEQ ID NO: 1494590
auccgucagcaucuugaga

SEQ ID NO: 1494592 - RNA, 19 nt, Artificial Sequence
  Description of Artificial Sequence: Synthetic oligonucleotide
  Sense strand starting at position 2867 of SEQ ID NO: 1244515
guuguuccucaggauaacu

SEQ ID NO: 1494593 - RNA, 19 nt, Artificial Sequence
  Description of Artificial Sequence: Synthetic oligonucleotide
  Antisense strand to SEQ ID NO: 1494592
aguuauccugaggaacaac

SEQ ID NO: 1494594 - RNA, 19 nt, Artificial Sequence
  Description of Artificial Sequence: Synthetic oligonucleotide
  Sense strand starting at position 2983 of SEQ ID NO: 1244515
ugucaaggcagguaugaga

SEQ ID NO: 1494595 - RNA, 19 nt, Artificial Sequence
  Description of Artificial Sequence: Synthetic oligonucleotide
  Antisense strand to SEQ ID NO: 1494594
ucucauaccugccuugaca

SEQ ID NO: 1494596 - RNA, 19 nt, Artificial Sequence
  Description of Artificial Sequence: Synthetic oligonucleotide
  Sense strand starting at position 2994 of SEQ ID NO: 1244515
guaugagacucucccauau

SEQ ID NO: 1494597 - RNA, 19 nt, Artificial Sequence
  Description of Artificial Sequence: Synthetic oligonucleotide
  Antisense strand to SEQ ID NO: 1494596
auaugggagagucucauac

SEQ ID NO: 1494598 - RNA, 19 nt, Artificial Sequence
  Description of Artificial Sequence: Synthetic oligonucleotide
  Sense strand starting at position 3047 of SEQ ID NO: 1244515
aggagauucugagccuaga

SEQ ID NO: 1494599 - RNA, 19 nt, Artificial Sequence
  Description of Artificial Sequence: Synthetic oligonucleotide
  Antisense strand to SEQ ID NO: 1494598
ucuaggcucagaaucuccu

SEQ ID NO: 1494600 - RNA, 19 nt, Artificial Sequence
  Description of Artificial Sequence: Synthetic oligonucleotide
  Sense strand starting at position 3060 of SEQ ID NO: 1244515
ccuagaaggcucuguagag

SEQ ID NO: 1494601 - RNA, 19 nt, Artificial Sequence
  Description of Artificial Sequence: Synthetic oligonucleotide
  Antisense strand to SEQ ID NO: 1494600
cucuacagagccuucuagg

SEQ ID NO: 1494602 - RNA, 19 nt, Artificial Sequence
  Description of Artificial Sequence: Synthetic oligonucleotide
  Sense strand starting at position 3086 of SEQ ID NO: 1244515
ugugauccaugccuagaga

SEQ ID NO: 1494603 - RNA, 19 nt, Artificial Sequence
  Description of Artificial Sequence: Synthetic oligonucleotide
  Antisense strand to SEQ ID NO: 1494602
ucucuaggcauggaucaca

SEQ ID NO: 1494604 - RNA, 19 nt, Artificial Sequence
  Description of Artificial Sequence: Synthetic oligonucleotide
  Sense strand starting at position 3087 of SEQ ID NO: 1244515
gugauccaugccuagagaa

SEQ ID NO: 1494605 - RNA, 19 nt, Artificial Sequence
  Description of Artificial Sequence: Synthetic oligonucleotide
  Antisense strand to SEQ ID NO: 1494604
uucucuaggcauggaucac

SEQ ID NO: 1494606 - RNA, 19 nt, Artificial Sequence
  Description of Artificial Sequence: Synthetic oligonucleotide
  Sense strand starting at position 3242 of SEQ ID NO: 1244515
ggaacuugacuuugaaggu

SEQ ID NO: 1494607 - RNA, 19 nt, Artificial Sequence
  Description of Artificial Sequence: Synthetic oligonucleotide
  Antisense strand to SEQ ID NO: 1494606
accuucaaagucaaguucc

SEQ ID NO: 1494608 - RNA, 19 nt, Artificial Sequence
  Description of Artificial Sequence: Synthetic oligonucleotide
  Sense strand starting at position 3269 of SEQ ID NO: 1244515
augugaguugcuuugccuu

SEQ ID NO: 1494609 - RNA, 19 nt, Artificial Sequence
  Description of Artificial Sequence: Synthetic oligonucleotide
  Antisense strand to SEQ ID NO: 1494608
aaggcaaagcaacucacau

SEQ ID NO: 1494610 - RNA, 19 nt, Artificial Sequence
  Description of Artificial Sequence: Synthetic oligonucleotide
  Sense strand starting at position 3304 of SEQ ID NO: 1244515
auacucaaaucaguuugua

SEQ ID NO: 1494611 - RNA, 19 nt, Artificial Sequence
  Description of Artificial Sequence: Synthetic oligonucleotide
  Antisense strand to SEQ ID NO: 1494610
uacaaacugauuugaguau

SEQ ID NO: 1494612 - RNA, 19 nt, Artificial Sequence
  Description of Artificial Sequence: Synthetic oligonucleotide
  Sense strand starting at position 3563 of SEQ ID NO: 1244515
ccaugagguagccauguga

SEQ ID NO: 1494613 - RNA, 19 nt, Artificial Sequence
  Description of Artificial Sequence: Synthetic oligonucleotide
  Antisense strand to SEQ ID NO: 1494612
ucacauggcuaccucaugg

SEQ ID NO: 1494614 - RNA, 19 nt, Artificial Sequence
  Description of Artificial Sequence: Synthetic oligonucleotide
  Sense strand starting at position 3572 of SEQ ID NO: 1244515
agccaugugagguauauug

SEQ ID NO: 1494615 - RNA, 19 nt, Artificial Sequence
  Description of Artificial Sequence: Synthetic oligonucleotide
  Antisense strand to SEQ ID NO: 1494614
caauauaccucacauggcu

SEQ ID NO: 1494616 - RNA, 19 nt, Artificial Sequence
  Description of Artificial Sequence: Synthetic oligonucleotide
  Sense strand starting at position 3595 of SEQ ID NO: 1244515
cucuguauuuggccuugga

SEQ ID NO: 1494617 - RNA, 19 nt, Artificial Sequence
  Description of Artificial Sequence: Synthetic oligonucleotide
  Antisense strand to SEQ ID NO: 1494616
uccaaggccaaauacagag

SEQ ID NO: 1494618 - RNA, 19 nt, Artificial Sequence
  Description of Artificial Sequence: Synthetic oligonucleotide
  Sense strand starting at position 3598 of SEQ ID NO: 1244515
uguauuuggccuuggacga

SEQ ID NO: 1494619 - RNA, 19 nt, Artificial Sequence
  Description of Artificial Sequence: Synthetic oligonucleotide
  Antisense strand to SEQ ID NO: 1494618
ucguccaaggccaaauaca

SEQ ID NO: 1494620 - RNA, 19 nt, Artificial Sequence
  Description of Artificial Sequence: Synthetic oligonucleotide
  Sense strand starting at position 3599 of SEQ ID NO: 1244515
guauuuggccuuggacgaa

SEQ ID NO: 1494621 - RNA, 19 nt, Artificial Sequence
  Description of Artificial Sequence: Synthetic oligonucleotide
  Antisense strand to SEQ ID NO: 1494620
uucguccaaggccaaauac

SEQ ID NO: 1494622 - RNA, 19 nt, Artificial Sequence
  Description of Artificial Sequence: Synthetic oligonucleotide
  Sense strand starting at position 3645 of SEQ ID NO: 1244515
uguauucauugagugggau

SEQ ID NO: 1494623 - RNA, 19 nt, Artificial Sequence
  Description of Artificial Sequence: Synthetic oligonucleotide
  Antisense strand to SEQ ID NO: 1494622
aucccacucaaugaauaca

SEQ ID NO: 1494624 - RNA, 19 nt, Artificial Sequence
  Description of Artificial Sequence: Synthetic oligonucleotide
  Sense strand starting at position 3646 of SEQ ID NO: 1244515
guauucauugagugggauc

SEQ ID NO: 1494625 - RNA, 19 nt, Artificial Sequence
  Description of Artificial Sequence: Synthetic oligonucleotide
  Antisense strand to SEQ ID NO: 1494624
gaucccacucaaugaauac

SEQ ID NO: 1494626 - RNA, 19 nt, Artificial Sequence
  Description of Artificial Sequence: Synthetic oligonucleotide
  Sense strand starting at position 3657 of SEQ ID NO: 1244515
gugggaucauuacuacauc

SEQ ID NO: 1494627 - RNA, 19 nt, Artificial Sequence
  Description of Artificial Sequence: Synthetic oligonucleotide
  Antisense strand to SEQ ID NO: 1494626
gauguaguaaugaucccac

SEQ ID NO: 1494628 - RNA, 19 nt, Artificial Sequence
  Description of Artificial Sequence: Synthetic oligonucleotide
  Sense strand starting at position 3712 of SEQ ID NO: 1244515
auagcaagugcuuaaagaa

SEQ ID NO: 1494629 - RNA, 19 nt, Artificial Sequence
  Description of Artificial Sequence: Synthetic oligonucleotide
  Antisense strand to SEQ ID NO: 1494628
uucuuuaagcacuugcuau

SEQ ID NO: 1494630 - RNA, 19 nt, Artificial Sequence
  Description of Artificial Sequence: Synthetic oligonucleotide
  Sense strand starting at position 3719 of SEQ ID NO: 1244515
gugcuuaaagaauauauac

SEQ ID NO: 1494631 - RNA, 19 nt, Artificial Sequence
  Description of Artificial Sequence: Synthetic oligonucleotide
  Antisense strand to SEQ ID NO: 1494630
guauauauucuuuaagcac

SEQ ID NO: 1494632 - RNA, 19 nt, Artificial Sequence
  Description of Artificial Sequence: Synthetic oligonucleotide
  Sense strand starting at position 3760 of SEQ ID NO: 1244515
acauguguauaaguacaua

SEQ ID NO: 1494633 - RNA, 19 nt, Artificial Sequence
  Description of Artificial Sequence: Synthetic oligonucleotide
  Antisense strand to SEQ ID NO: 1494632
uauguacuuauacacaugu

SEQ ID NO: 1494634 - RNA, 19 nt, Artificial Sequence
  Description of Artificial Sequence: Synthetic oligonucleotide
  Sense strand starting at position 48 of SEQ ID NO: 1244516
ugagguguuuagcugggau

SEQ ID NO: 1494635 - RNA, 19 nt, Artificial Sequence
  Description of Artificial Sequence: Synthetic oligonucleotide
  Antisense strand to SEQ ID NO: 1494634
aucccagcuaaacaccuca

SEQ ID NO: 1494636 - RNA, 19 nt, Artificial Sequence
  Description of Artificial Sequence: Synthetic oligonucleotide
  Sense strand starting at position 50 of SEQ ID NO: 1244516
agguguuuagcugggauga

SEQ ID NO: 1494637 - RNA, 19 nt, Artificial Sequence
  Description of Artificial Sequence: Synthetic oligonucleotide
  Antisense strand to SEQ ID NO: 1494636
ucaucccagcuaaacaccu

SEQ ID NO: 1494638 - RNA, 19 nt, Artificial Sequence
  Description of Artificial Sequence: Synthetic oligonucleotide
  Sense strand starting at position 51 of SEQ ID NO: 1244516
gguguuuagcugggaugac

SEQ ID NO: 1494639 - RNA, 19 nt, Artificial Sequence
  Description of Artificial Sequence: Synthetic oligonucleotide
  Antisense strand to SEQ ID NO: 1494638
gucaucccagcuaaacacc

SEQ ID NO: 1494640 - RNA, 19 nt, Artificial Sequence
  Description of Artificial Sequence: Synthetic oligonucleotide
  Sense strand starting at position 159 of SEQ ID NO: 1244516
gucaaagugcgaucgcuga

SEQ ID NO: 1494641 - RNA, 19 nt, Artificial Sequence
  Description of Artificial Sequence: Synthetic oligonucleotide
  Antisense strand to SEQ ID NO: 1494640
ucagcgaucgcacuuugac

SEQ ID NO: 1494642 - RNA, 19 nt, Artificial Sequence
  Description of Artificial Sequence: Synthetic oligonucleotide
  Sense strand starting at position 163 of SEQ ID NO: 1244516
aagugcgaucgcugacaaa

SEQ ID NO: 1494643 - RNA, 19 nt, Artificial Sequence
  Description of Artificial Sequence: Synthetic oligonucleotide
  Antisense strand to SEQ ID NO: 1494642
uuugucagcgaucgcacuu

SEQ ID NO: 1494644 - RNA, 19 nt, Artificial Sequence
  Description of Artificial Sequence: Synthetic oligonucleotide
  Sense strand starting at position 220 of SEQ ID NO: 1244516
caaguugcucucuguuuga

SEQ ID NO: 1494645 - RNA, 19 nt, Artificial Sequence
  Description of Artificial Sequence: Synthetic oligonucleotide
  Antisense strand to SEQ ID NO: 1494644
ucaaacagagagcaacuug

SEQ ID NO: 1494646 - RNA, 19 nt, Artificial Sequence
  Description of Artificial Sequence: Synthetic oligonucleotide
  Sense strand starting at position 289 of SEQ ID NO: 1244516
acuguaaauucugugcaca

SEQ ID NO: 1494647 - RNA, 19 nt, Artificial Sequence
  Description of Artificial Sequence: Synthetic oligonucleotide
  Antisense strand to SEQ ID NO: 1494646
ugugcacagaauuuacagu

SEQ ID NO: 1494648 - RNA, 19 nt, Artificial Sequence
  Description of Artificial Sequence: Synthetic oligonucleotide
  Sense strand starting at position 290 of SEQ ID NO: 1244516
cuguaaauucugugcacac

SEQ ID NO: 1494649 - RNA, 19 nt, Artificial Sequence
  Description of Artificial Sequence: Synthetic oligonucleotide
  Antisense strand to SEQ ID NO: 1494648
gugugcacagaauuuacag

SEQ ID NO: 1494650 - RNA, 19 nt, Artificial Sequence
  Description of Artificial Sequence: Synthetic oligonucleotide
  Sense strand starting at position 291 of SEQ ID NO: 1244516
uguaaauucugugcacaca

SEQ ID NO: 1494651 - RNA, 19 nt, Artificial Sequence
  Description of Artificial Sequence: Synthetic oligonucleotide
  Antisense strand to SEQ ID NO: 1494650
ugugugcacagaauuuaca

SEQ ID NO: 1494652 - RNA, 19 nt, Artificial Sequence
  Description of Artificial Sequence: Synthetic oligonucleotide
  Sense strand starting at position 370 of SEQ ID NO: 1244516
cugugaugcuuacuuggaa

SEQ ID NO: 1494653 - RNA, 19 nt, Artificial Sequence
  Description of Artificial Sequence: Synthetic oligonucleotide
  Antisense strand to SEQ ID NO: 1494652
uuccaaguaagcaucacag

SEQ ID NO: 1494654 - RNA, 19 nt, Artificial Sequence
  Description of Artificial Sequence: Synthetic oligonucleotide
  Sense strand starting at position 400 of SEQ ID NO: 1244516
aacgauggcucaucuugua

SEQ ID NO: 1494655 - RNA, 19 nt, Artificial Sequence
  Description of Artificial Sequence: Synthetic oligonucleotide
  Antisense strand to SEQ ID NO: 1494654
uacaagaugagccaucguu

SEQ ID NO: 1494656 - RNA, 19 nt, Artificial Sequence
  Description of Artificial Sequence: Synthetic oligonucleotide
  Sense strand starting at position 2617 of SEQ ID NO: 1244516
gcaguaaucccaggcacau

SEQ ID NO: 1494657 - RNA, 19 nt, Artificial Sequence
  Description of Artificial Sequence: Synthetic oligonucleotide
  Antisense strand to SEQ ID NO: 1494656
augugccugggauuacugc

SEQ ID NO: 1494658 - RNA, 19 nt, Artificial Sequence
  Description of Artificial Sequence: Synthetic oligonucleotide
  Sense strand starting at position 2629 of SEQ ID NO: 1244516
ggcacaucaugccuguaau

SEQ ID NO: 1494659 - RNA, 19 nt, Artificial Sequence
  Description of Artificial Sequence: Synthetic oligonucleotide
  Antisense strand to SEQ ID NO: 1494658
auuacaggcaugaugugcc

SEQ ID NO: 1494660 - RNA, 19 nt, Artificial Sequence
  Description of Artificial Sequence: Synthetic oligonucleotide
  Sense strand starting at position 2630 of SEQ ID NO: 1244516
gcacaucaugccuguaaug

SEQ ID NO: 1494661 - RNA, 19 nt, Artificial Sequence
  Description of Artificial Sequence: Synthetic oligonucleotide
  Antisense strand to SEQ ID NO: 1494660
cauuacaggcaugaugugc

SEQ ID NO: 1494662 - RNA, 19 nt, Artificial Sequence
  Description of Artificial Sequence: Synthetic oligonucleotide
  Sense strand starting at position 2632 of SEQ ID NO: 1244516
acaucaugccuguaaugca

SEQ ID NO: 1494663 - RNA, 19 nt, Artificial Sequence
  Description of Artificial Sequence: Synthetic oligonucleotide
  Antisense strand to SEQ ID NO: 1494662
ugcauuacaggcaugaugu

SEQ ID NO: 1494664 - RNA, 19 nt, Artificial Sequence
  Description of Artificial Sequence: Synthetic oligonucleotide
  Sense strand starting at position 2915 of SEQ ID NO: 1244516
ggcugugagaaaugagaca

SEQ ID NO: 1494665 - RNA, 19 nt, Artificial Sequence
  Description of Artificial Sequence: Synthetic oligonucleotide
  Antisense strand to SEQ ID NO: 1494664
ugucucauuucucacagcc

SEQ ID NO: 1494666 - RNA, 19 nt, Artificial Sequence
  Description of Artificial Sequence: Synthetic oligonucleotide
  Sense strand starting at position 2934 of SEQ ID NO: 1244516
caggcuuagcggcauuaca

SEQ ID NO: 1494667 - RNA, 19 nt, Artificial Sequence
  Description of Artificial Sequence: Synthetic oligonucleotide
  Antisense strand to SEQ ID NO: 1494666
uguaaugccgcuaagccug

SEQ ID NO: 1494668 - RNA, 19 nt, Artificial Sequence
  Description of Artificial Sequence: Synthetic oligonucleotide
  Sense strand starting at position 2964 of SEQ ID NO: 1244516
cuaauugagcgucagggau

SEQ ID NO: 1494669 - RNA, 19 nt, Artificial Sequence
  Description of Artificial Sequence: Synthetic oligonucleotide
  Antisense strand to SEQ ID NO: 1494668
aucccugacgcucaauuag

SEQ ID NO: 1494670 - RNA, 19 nt, Artificial Sequence
  Description of Artificial Sequence: Synthetic oligonucleotide
  Sense strand starting at position 3006 of SEQ ID NO: 1244516
ggaagagauucucagaucu

SEQ ID NO: 1494671 - RNA, 19 nt, Artificial Sequence
  Description of Artificial Sequence: Synthetic oligonucleotide
  Antisense strand to SEQ ID NO: 1494670
agaucugagaaucucuucc

SEQ ID NO: 1494672 - RNA, 19 nt, Artificial Sequence
  Description of Artificial Sequence: Synthetic oligonucleotide
  Sense strand starting at position 3109 of SEQ ID NO: 1244516
cugacaagugaguggaaca

SEQ ID NO: 1494673 - RNA, 19 nt, Artificial Sequence
  Description of Artificial Sequence: Synthetic oligonucleotide
  Antisense strand to SEQ ID NO: 1494672
uguuccacucacuugucag

SEQ ID NO: 1494674 - RNA, 19 nt, Artificial Sequence
  Description of Artificial Sequence: Synthetic oligonucleotide
  Sense strand starting at position 3157 of SEQ ID NO: 1244516
gggaggguuccuggugaac

SEQ ID NO: 1494675 - RNA, 19 nt, Artificial Sequence
  Description of Artificial Sequence: Synthetic oligonucleotide
  Antisense strand to SEQ ID NO: 1494674
guucaccaggaacccuccc

SEQ ID NO: 1494676 - RNA, 19 nt, Artificial Sequence
  Description of Artificial Sequence: Synthetic oligonucleotide
  Sense strand starting at position 3160 of SEQ ID NO: 1244516
aggguuccuggugaacgau

SEQ ID NO: 1494677 - RNA, 19 nt, Artificial Sequence
  Description of Artificial Sequence: Synthetic oligonucleotide
  Antisense strand to SEQ ID NO: 1494676
aucguucaccaggaacccu

SEQ ID NO: 1494678 - RNA, 19 nt, Artificial Sequence
  Description of Artificial Sequence: Synthetic oligonucleotide
  Sense strand starting at position 3166 of SEQ ID NO: 1244516
ccuggugaacgaugauaag

SEQ ID NO: 1494679 - RNA, 19 nt, Artificial Sequence
  Description of Artificial Sequence: Synthetic oligonucleotide
  Antisense strand to SEQ ID NO: 1494678
cuuaucaucguucaccagg

SEQ ID NO: 1494680 - RNA, 19 nt, Artificial Sequence
  Description of Artificial Sequence: Synthetic oligonucleotide
  Sense strand starting at position 3169 of SEQ ID NO: 1244516
ggugaacgaugauaaggua

SEQ ID NO: 1494681 - RNA, 19 nt, Artificial Sequence
  Description of Artificial Sequence: Synthetic oligonucleotide
  Antisense strand to SEQ ID NO: 1494680
uaccuuaucaucguucacc

SEQ ID NO: 1494682 - RNA, 19 nt, Artificial Sequence
  Description of Artificial Sequence: Synthetic oligonucleotide
  Sense strand starting at position 3172 of SEQ ID NO: 1244516
gaacgaugauaagguauuu

SEQ ID NO: 1494683 - RNA, 19 nt, Artificial Sequence
  Description of Artificial Sequence: Synthetic oligonucleotide
  Antisense strand to SEQ ID NO: 1494682
aaauaccuuaucaucguuc

SEQ ID NO: 1494684 - RNA, 19 nt, Artificial Sequence
  Description of Artificial Sequence: Synthetic oligonucleotide
  Sense strand starting at position 3296 of SEQ ID NO: 1244516
gauggaaugccagagcgua

SEQ ID NO: 1494685 - RNA, 19 nt, Artificial Sequence
  Description of Artificial Sequence: Synthetic oligonucleotide
  Antisense strand to SEQ ID NO: 1494684
uacgcucuggcauuccauc

SEQ ID NO: 1494686 - RNA, 19 nt, Artificial Sequence
  Description of Artificial Sequence: Synthetic oligonucleotide
  Sense strand starting at position 3416 of SEQ ID NO: 1244516
gaagguaaacuccgugaga

SEQ ID NO: 1494687 - RNA, 19 nt, Artificial Sequence
  Description of Artificial Sequence: Synthetic oligonucleotide
  Antisense strand to SEQ ID NO: 1494686
ucucacggaguuuaccuuc

SEQ ID NO: 1494688 - RNA, 19 nt, Artificial Sequence
  Description of Artificial Sequence: Synthetic oligonucleotide
  Sense strand starting at position 3418 of SEQ ID NO: 1244516
agguaaacuccgugagacu

SEQ ID NO: 1494689 - RNA, 19 nt, Artificial Sequence
  Description of Artificial Sequence: Synthetic oligonucleotide
  Antisense strand to SEQ ID NO: 1494688
agucucacggaguuuaccu

SEQ ID NO: 1494690 - RNA, 19 nt, Artificial Sequence
  Description of Artificial Sequence: Synthetic oligonucleotide
  Sense strand starting at position 3419 of SEQ ID NO: 1244516
gguaaacuccgugagacuu

SEQ ID NO: 1494691 - RNA, 19 nt, Artificial Sequence
  Description of Artificial Sequence: Synthetic oligonucleotide
  Antisense strand to SEQ ID NO: 1494690
aagucucacggaguuuacc

SEQ ID NO: 1494692 - RNA, 19 nt, Artificial Sequence
  Description of Artificial Sequence: Synthetic oligonucleotide
  Sense strand starting at position 3427 of SEQ ID NO: 1244516
ccgugagacuuguugacuc

SEQ ID NO: 1494693 - RNA, 19 nt, Artificial Sequence
  Description of Artificial Sequence: Synthetic oligonucleotide
  Antisense strand to SEQ ID NO: 1494692
gagucaacaagucucacgg

SEQ ID NO: 1494694 - RNA, 19 nt, Artificial Sequence
  Description of Artificial Sequence: Synthetic oligonucleotide
  Sense strand starting at position 3429 of SEQ ID NO: 1244516
gugagacuuguugacucau

SEQ ID NO: 1494695 - RNA, 19 nt, Artificial Sequence
  Description of Artificial Sequence: Synthetic oligonucleotide
  Antisense strand to SEQ ID NO: 1494694
augagucaacaagucucac

SEQ ID NO: 1494696 - RNA, 19 nt, Artificial Sequence
  Description of Artificial Sequence: Synthetic oligonucleotide
  Sense strand starting at position 3431 of SEQ ID NO: 1244516
gagacuuguugacucauug

SEQ ID NO: 1494697 - RNA, 19 nt, Artificial Sequence
  Description of Artificial Sequence: Synthetic oligonucleotide
  Antisense strand to SEQ ID NO: 1494696
caaugagucaacaagucuc

SEQ ID NO: 1494698 - RNA, 19 nt, Artificial Sequence
  Description of Artificial Sequence: Synthetic oligonucleotide
  Sense strand starting at position 3438 of SEQ ID NO: 1244516
guugacucauuggcugaga

SEQ ID NO: 1494699 - RNA, 19 nt, Artificial Sequence
  Description of Artificial Sequence: Synthetic oligonucleotide
  Antisense strand to SEQ ID NO: 1494698
ucucagccaaugagucaac

SEQ ID NO: 1494700 - RNA, 19 nt, Artificial Sequence
  Description of Artificial Sequence: Synthetic oligonucleotide
  Sense strand starting at position 3505 of SEQ ID NO: 1244516
gguacugucuucucugaga

SEQ ID NO: 1494701 - RNA, 19 nt, Artificial Sequence
  Description of Artificial Sequence: Synthetic oligonucleotide
  Antisense strand to SEQ ID NO: 1494700
ucucagagaagacaguacc

SEQ ID NO: 1494702 - RNA, 19 nt, Artificial Sequence
  Description of Artificial Sequence: Synthetic oligonucleotide
  Sense strand starting at position 3508 of SEQ ID NO: 1244516
acugucuucucugagaaca

SEQ ID NO: 1494703 - RNA, 19 nt, Artificial Sequence
  Description of Artificial Sequence: Synthetic oligonucleotide
  Antisense strand to SEQ ID NO: 1494702
uguucucagagaagacagu

SEQ ID NO: 1494704 - RNA, 19 nt, Artificial Sequence
  Description of Artificial Sequence: Synthetic oligonucleotide
  Sense strand starting at position 3673 of SEQ ID NO: 1244516
uguugcuaucaggauguga

SEQ ID NO: 1494705 - RNA, 19 nt, Artificial Sequence
  Description of Artificial Sequence: Synthetic oligonucleotide
  Antisense strand to SEQ ID NO: 1494704
ucacauccugauagcaaca

SEQ ID NO: 1494706 - RNA, 19 nt, Artificial Sequence
  Description of Artificial Sequence: Synthetic oligonucleotide
  Sense strand starting at position 3675 of SEQ ID NO: 1244516
uugcuaucaggaugugacu

SEQ ID NO: 1494707 - RNA, 19 nt, Artificial Sequence
  Description of Artificial Sequence: Synthetic oligonucleotide
  Antisense strand to SEQ ID NO: 1494706
agucacauccugauagcaa

SEQ ID NO: 1494708 - RNA, 19 nt, Artificial Sequence
  Description of Artificial Sequence: Synthetic oligonucleotide
  Sense strand starting at position 3712 of SEQ ID NO: 1244516
ugagcacugugcucacuua

SEQ ID NO: 1494709 - RNA, 19 nt, Artificial Sequence
  Description of Artificial Sequence: Synthetic oligonucleotide
  Antisense strand to SEQ ID NO: 1494708
uaagugagcacagugcuca

SEQ ID NO: 1494710 - RNA, 19 nt, Artificial Sequence
  Description of Artificial Sequence: Synthetic oligonucleotide
  Sense strand starting at position 3713 of SEQ ID NO: 1244516
gagcacugugcucacuuau

SEQ ID NO: 1494711 - RNA, 19 nt, Artificial Sequence
  Description of Artificial Sequence: Synthetic oligonucleotide
  Antisense strand to SEQ ID NO: 1494710
auaagugagcacagugcuc

SEQ ID NO: 1494712 - RNA, 19 nt, Artificial Sequence
  Description of Artificial Sequence: Synthetic oligonucleotide
  Sense strand starting at position 3719 of SEQ ID NO: 1244516
ugugcucacuuaucagauc

SEQ ID NO: 1494713 - RNA, 19 nt, Artificial Sequence
  Description of Artificial Sequence: Synthetic oligonucleotide
  Antisense strand to SEQ ID NO: 1494712
gaucugauaagugagcaca

SEQ ID NO: 1494714 - RNA, 19 nt, Artificial Sequence
  Description of Artificial Sequence: Synthetic oligonucleotide
  Sense strand starting at position 19 of SEQ ID NO: 1244517
auaguuucgaggcaccaga

SEQ ID NO: 1494715 - RNA, 19 nt, Artificial Sequence
  Description of Artificial Sequence: Synthetic oligonucleotide
  Antisense strand to SEQ ID NO: 1494714
ucuggugccucgaaacuau

SEQ ID NO: 1494716 - RNA, 19 nt, Artificial Sequence
  Description of Artificial Sequence: Synthetic oligonucleotide
  Sense strand starting at position 157 of SEQ ID NO: 1244517
cgcucagcagucguggaau

SEQ ID NO: 1494717 - RNA, 19 nt, Artificial Sequence
  Description of Artificial Sequence: Synthetic oligonucleotide
  Antisense strand to SEQ ID NO: 1494716
auuccacgacugcugagcg

SEQ ID NO: 1494718 - RNA, 19 nt, Artificial Sequence
  Description of Artificial Sequence: Synthetic oligonucleotide
  Sense strand starting at position 222 of SEQ ID NO: 1244517
ccggaauaauccuaucuga

SEQ ID NO: 1494719 - RNA, 19 nt, Artificial Sequence
  Description of Artificial Sequence: Synthetic oligonucleotide
  Antisense strand to SEQ ID NO: 1494718
ucagauaggauuauuccgg

SEQ ID NO: 1494720 - RNA, 19 nt, Artificial Sequence
  Description of Artificial Sequence: Synthetic oligonucleotide
  Sense strand starting at position 2107 of SEQ ID NO: 1244517
acagcaugucucugccaga

SEQ ID NO: 1494721 - RNA, 19 nt, Artificial Sequence
  Description of Artificial Sequence: Synthetic oligonucleotide
  Antisense strand to SEQ ID NO: 1494720
ucuggcagagacaugcugu

SEQ ID NO: 1494722 - RNA, 19 nt, Artificial Sequence
  Description of Artificial Sequence: Synthetic oligonucleotide
  Sense strand starting at position 2216 of SEQ ID NO: 1244517
ucuccauugugcccugagu

SEQ ID NO: 1494723 - RNA, 19 nt, Artificial Sequence
  Description of Artificial Sequence: Synthetic oligonucleotide
  Antisense strand to SEQ ID NO: 1494722
acucagggcacaauggaga

SEQ ID NO: 1494724 - RNA, 19 nt, Artificial Sequence
  Description of Artificial Sequence: Synthetic oligonucleotide
  Sense strand starting at position 2310 of SEQ ID NO: 1244517
accuaugugugguccagua

SEQ ID NO: 1494725 - RNA, 19 nt, Artificial Sequence
  Description of Artificial Sequence: Synthetic oligonucleotide
  Antisense strand to SEQ ID NO: 1494724
uacuggaccacacauaggu

SEQ ID NO: 1494726 - RNA, 19 nt, Artificial Sequence
  Description of Artificial Sequence: Synthetic oligonucleotide
  Sense strand starting at position 2312 of SEQ ID NO: 1244517
cuaugugugguccaguaag

SEQ ID NO: 1494727 - RNA, 19 nt, Artificial Sequence
  Description of Artificial Sequence: Synthetic oligonucleotide
  Antisense strand to SEQ ID NO: 1494726
cuuacuggaccacacauag

SEQ ID NO: 1494728 - RNA, 19 nt, Artificial Sequence
  Description of Artificial Sequence: Synthetic oligonucleotide
  Sense strand starting at position 2419 of SEQ ID NO: 1244517
gcagccgugugaauggaaa

SEQ ID NO: 1494729 - RNA, 19 nt, Artificial Sequence
  Description of Artificial Sequence: Synthetic oligonucleotide
  Antisense strand to SEQ ID NO: 1494728
uuuccauucacacggcugc

SEQ ID NO: 1494730 - RNA, 19 nt, Artificial Sequence
  Description of Artificial Sequence: Synthetic oligonucleotide
  Sense strand starting at position 2512 of SEQ ID NO: 1244517
ucugcaaucuuucugcaga

SEQ ID NO: 1494731 - RNA, 19 nt, Artificial Sequence
  Description of Artificial Sequence: Synthetic oligonucleotide
  Antisense strand to SEQ ID NO: 1494730
ucugcagaaagauugcaga

SEQ ID NO: 1494732 - RNA, 19 nt, Artificial Sequence
  Description of Artificial Sequence: Synthetic oligonucleotide
  Sense strand starting at position 2514 of SEQ ID NO: 1244517
ugcaaucuuucugcagauu

SEQ ID NO: 1494733 - RNA, 19 nt, Artificial Sequence
  Description of Artificial Sequence: Synthetic oligonucleotide
  Antisense strand to SEQ ID NO: 1494732
aaucugcagaaagauugca

SEQ ID NO: 1494734 - RNA, 19 nt, Artificial Sequence
  Description of Artificial Sequence: Synthetic oligonucleotide
  Sense strand starting at position 2631 of SEQ ID NO: 1244517
guugcuauuugauccauau

SEQ ID NO: 1494735 - RNA, 19 nt, Artificial Sequence
  Description of Artificial Sequence: Synthetic oligonucleotide
  Antisense strand to SEQ ID NO: 1494734
auauggaucaaauagcaac

SEQ ID NO: 1494736 - RNA, 19 nt, Artificial Sequence
  Description of Artificial Sequence: Synthetic oligonucleotide
  Sense strand starting at position 2787 of SEQ ID NO: 1244517
gcaucaguugccuguauga

SEQ ID NO: 1494737 - RNA, 19 nt, Artificial Sequence
  Description of Artificial Sequence: Synthetic oligonucleotide
  Antisense strand to SEQ ID NO: 1494736
ucauacaggcaacugaugc

SEQ ID NO: 1494738 - RNA, 19 nt, Artificial Sequence
  Description of Artificial Sequence: Synthetic oligonucleotide
  Sense strand starting at position 2789 of SEQ ID NO: 1244517
aucaguugccuguaugaga

SEQ ID NO: 1494739 - RNA, 19 nt, Artificial Sequence
  Description of Artificial Sequence: Synthetic oligonucleotide
  Antisense strand to SEQ ID NO: 1494738
ucucauacaggcaacugau

SEQ ID NO: 1494740 - RNA, 19 nt, Artificial Sequence
  Description of Artificial Sequence: Synthetic oligonucleotide
  Sense strand starting at position 2800 of SEQ ID NO: 1244517
guaugagaauaaccuguaa

SEQ ID NO: 1494741 - RNA, 19 nt, Artificial Sequence
  Description of Artificial Sequence: Synthetic oligonucleotide
  Antisense strand to SEQ ID NO: 1494740
uuacagguuauucucauac

SEQ ID NO: 1494742 - RNA, 19 nt, Artificial Sequence
  Description of Artificial Sequence: Synthetic oligonucleotide
  Sense strand starting at position 2804 of SEQ ID NO: 1244517
gagaauaaccuguaagcgu

SEQ ID NO: 1494743 - RNA, 19 nt, Artificial Sequence
  Description of Artificial Sequence: Synthetic oligonucleotide
  Antisense strand to SEQ ID NO: 1494742
acgcuuacagguuauucuc

SEQ ID NO: 1494744 - RNA, 19 nt, Artificial Sequence
  Description of Artificial Sequence: Synthetic oligonucleotide
  Sense strand starting at position 2811 of SEQ ID NO: 1244517
accuguaagcguuaucuuu

SEQ ID NO: 1494745 - RNA, 19 nt, Artificial Sequence
  Description of Artificial Sequence: Synthetic oligonucleotide
  Antisense strand to SEQ ID NO: 1494744
aaagauaacgcuuacaggu

SEQ ID NO: 1494746 - RNA, 19 nt, Artificial Sequence
  Description of Artificial Sequence: Synthetic oligonucleotide
  Sense strand starting at position 2849 of SEQ ID NO: 1244517
cucugaaguccugaagcua

SEQ ID NO: 1494747 - RNA, 19 nt, Artificial Sequence
  Description of Artificial Sequence: Synthetic oligonucleotide
  Antisense strand to SEQ ID NO: 1494746
uagcuucaggacuucagag

SEQ ID NO: 1494748 - RNA, 19 nt, Artificial Sequence
  Description of Artificial Sequence: Synthetic oligonucleotide
  Sense strand starting at position 2871 of SEQ ID NO: 1244517
cuuagauggcgaugcagau

SEQ ID NO: 1494749 - RNA, 19 nt, Artificial Sequence
  Description of Artificial Sequence: Synthetic oligonucleotide
  Antisense strand to SEQ ID NO: 1494748
aucugcaucgccaucuaag

SEQ ID NO: 1494750 - RNA, 19 nt, Artificial Sequence
  Description of Artificial Sequence: Synthetic oligonucleotide
  Sense strand starting at position 2880 of SEQ ID NO: 1244517
cgaugcagaugccucaaua

SEQ ID NO: 1494751 - RNA, 19 nt, Artificial Sequence
  Description of Artificial Sequence: Synthetic oligonucleotide
  Antisense strand to SEQ ID NO: 1494750
uauugaggcaucugcaucg

SEQ ID NO: 1494752 - RNA, 19 nt, Artificial Sequence
  Description of Artificial Sequence: Synthetic oligonucleotide
  Sense strand starting at position 3073 of SEQ ID NO: 1244517
gauaaaugcuuuccagagu

SEQ ID NO: 1494753 - RNA, 19 nt, Artificial Sequence
  Description of Artificial Sequence: Synthetic oligonucleotide
  Antisense strand to SEQ ID NO: 1494752
acucuggaaagcauuuauc

SEQ ID NO: 1494754 - RNA, 19 nt, Artificial Sequence
  Description of Artificial Sequence: Synthetic oligonucleotide
  Sense strand starting at position 3127 of SEQ ID NO: 1244517
aaaccaaauuccucgaggu

SEQ ID NO: 1494755 - RNA, 19 nt, Artificial Sequence
  Description of Artificial Sequence: Synthetic oligonucleotide
  Antisense strand to SEQ ID NO: 1494754
accucgaggaauuugguuu

SEQ ID NO: 1494756 - RNA, 19 nt, Artificial Sequence
  Description of Artificial Sequence: Synthetic oligonucleotide
  Sense strand starting at position 3128 of SEQ ID NO: 1244517
aaccaaauuccucgaggug

SEQ ID NO: 1494757 - RNA, 19 nt, Artificial Sequence
  Description of Artificial Sequence: Synthetic oligonucleotide
  Antisense strand to SEQ ID NO: 1494756
caccucgaggaauuugguu

SEQ ID NO: 1494758 - RNA, 19 nt, Artificial Sequence
  Description of Artificial Sequence: Synthetic oligonucleotide
  Sense strand starting at position 3131 of SEQ ID NO: 1244517
caaauuccucgagguggaa

SEQ ID NO: 1494759 - RNA, 19 nt, Artificial Sequence
  Description of Artificial Sequence: Synthetic oligonucleotide
  Antisense strand to SEQ ID NO: 1494758
uuccaccucgaggaauuug

SEQ ID NO: 1494760 - RNA, 19 nt, Artificial Sequence
  Description of Artificial Sequence: Synthetic oligonucleotide
  Sense strand starting at position 3159 of SEQ ID NO: 1244517
cugacacugcaguguugaa

SEQ ID NO: 1494761 - RNA, 19 nt, Artificial Sequence
  Description of Artificial Sequence: Synthetic oligonucleotide
  Antisense strand to SEQ ID NO: 1494760
uucaacacugcagugucag

SEQ ID NO: 1494762 - RNA, 19 nt, Artificial Sequence
  Description of Artificial Sequence: Synthetic oligonucleotide
  Sense strand starting at position 3163 of SEQ ID NO: 1244517
cacugcaguguugaauaau

SEQ ID NO: 1494763 - RNA, 19 nt, Artificial Sequence
  Description of Artificial Sequence: Synthetic oligonucleotide
  Antisense strand to SEQ ID NO: 1494762
auuauucaacacugcagug

SEQ ID NO: 1494764 - RNA, 19 nt, Artificial Sequence
  Description of Artificial Sequence: Synthetic oligonucleotide
  Sense strand starting at position 3169 of SEQ ID NO: 1244517
aguguugaauaauaacaca

SEQ ID NO: 1494765 - RNA, 19 nt, Artificial Sequence
  Description of Artificial Sequence: Synthetic oligonucleotide
  Antisense strand to SEQ ID NO: 1494764
uguguuauuauucaacacu

SEQ ID NO: 1494766 - RNA, 19 nt, Artificial Sequence
  Description of Artificial Sequence: Synthetic oligonucleotide
  Sense strand starting at position 3187 of SEQ ID NO: 1244517
auuggaaggcugugauaug

SEQ ID NO: 1494767 - RNA, 19 nt, Artificial Sequence
  Description of Artificial Sequence: Synthetic oligonucleotide
  Antisense strand to SEQ ID NO: 1494766
cauaucacagccuuccaau

SEQ ID NO: 1494768 - RNA, 19 nt, Artificial Sequence
  Description of Artificial Sequence: Synthetic oligonucleotide
  Sense strand starting at position 3375 of SEQ ID NO: 1244517
cuggacauuuccugacacu

SEQ ID NO: 1494769 - RNA, 19 nt, Artificial Sequence
  Description of Artificial Sequence: Synthetic oligonucleotide
  Antisense strand to SEQ ID NO: 1494768
agugucaggaaauguccag

SEQ ID NO: 1494770 - RNA, 19 nt, Artificial Sequence
  Description of Artificial Sequence: Synthetic oligonucleotide
  Sense strand starting at position 3388 of SEQ ID NO: 1244517
gacacugauucuggaagga

SEQ ID NO: 1494771 - RNA, 19 nt, Artificial Sequence
  Description of Artificial Sequence: Synthetic oligonucleotide
  Antisense strand to SEQ ID NO: 1494770
uccuuccagaaucaguguc

SEQ ID NO: 1494772 - RNA, 19 nt, Artificial Sequence
  Description of Artificial Sequence: Synthetic oligonucleotide
  Sense strand starting at position 3435 of SEQ ID NO: 1244517
aggagcuacuucucugaau

SEQ ID NO: 1494773 - RNA, 19 nt, Artificial Sequence
  Description of Artificial Sequence: Synthetic oligonucleotide
  Antisense strand to SEQ ID NO: 1494772
auucagagaaguagcuccu

SEQ ID NO: 1494774 - RNA, 19 nt, Artificial Sequence
  Description of Artificial Sequence: Synthetic oligonucleotide
  Sense strand starting at position 3436 of SEQ ID NO: 1244517
ggagcuacuucucugaauu

SEQ ID NO: 1494775 - RNA, 19 nt, Artificial Sequence
  Description of Artificial Sequence: Synthetic oligonucleotide
  Antisense strand to SEQ ID NO: 1494774
aauucagagaaguagcucc

SEQ ID NO: 1494776 - RNA, 19 nt, Artificial Sequence
  Description of Artificial Sequence: Synthetic oligonucleotide
  Sense strand starting at position 3446 of SEQ ID NO: 1244517
cucugaauuucccgaacug

SEQ ID NO: 1494777 - RNA, 19 nt, Artificial Sequence
  Description of Artificial Sequence: Synthetic oligonucleotide
  Antisense strand to SEQ ID NO: 1494776
caguucgggaaauucagag

SEQ ID NO: 1494778 - RNA, 19 nt, Artificial Sequence
  Description of Artificial Sequence: Synthetic oligonucleotide
  Sense strand starting at position 3505 of SEQ ID NO: 1244517
ugcuguuauugguuuguga

SEQ ID NO: 1494779 - RNA, 19 nt, Artificial Sequence
  Description of Artificial Sequence: Synthetic oligonucleotide
  Antisense strand to SEQ ID NO: 1494778
ucacaaaccaauaacagca

SEQ ID NO: 1494780 - RNA, 19 nt, Artificial Sequence
  Description of Artificial Sequence: Synthetic oligonucleotide
  Sense strand starting at position 3507 of SEQ ID NO: 1244517
cuguuauugguuugugaug

SEQ ID NO: 1494781 - RNA, 19 nt, Artificial Sequence
  Description of Artificial Sequence: Synthetic oligonucleotide
  Antisense strand to SEQ ID NO: 1494780
caucacaaaccaauaacag

SEQ ID NO: 1494782 - RNA, 19 nt, Artificial Sequence
  Description of Artificial Sequence: Synthetic oligonucleotide
  Sense strand starting at position 3513 of SEQ ID NO: 1244517
uugguuugugauggaguuu

SEQ ID NO: 1494783 - RNA, 19 nt, Artificial Sequence
  Description of Artificial Sequence: Synthetic oligonucleotide
  Antisense strand to SEQ ID NO: 1494782
aaacuccaucacaaaccaa

SEQ ID NO: 1494784 - RNA, 19 nt, Artificial Sequence
  Description of Artificial Sequence: Synthetic oligonucleotide
  Sense strand starting at position 3811 of SEQ ID NO: 1244517
uaaggugacuucuccauug

SEQ ID NO: 1494785 - RNA, 19 nt, Artificial Sequence
  Description of Artificial Sequence: Synthetic oligonucleotide
  Antisense strand to SEQ ID NO: 1494784
caauggagaagucaccuua

SEQ ID NO: 1494786 - RNA, 19 nt, Artificial Sequence
  Description of Artificial Sequence: Synthetic oligonucleotide
  Sense strand starting at position 3816 of SEQ ID NO: 1244517
ugacuucuccauuggauuc

SEQ ID NO: 1494787 - RNA, 19 nt, Artificial Sequence
  Description of Artificial Sequence: Synthetic oligonucleotide
  Antisense strand to SEQ ID NO: 1494786
gaauccaauggagaaguca

SEQ ID NO: 1494788 - RNA, 19 nt, Artificial Sequence
  Description of Artificial Sequence: Synthetic oligonucleotide
  Sense strand starting at position 3857 of SEQ ID NO: 1244517
auccgcaaaccuggucaua

SEQ ID NO: 1494789 - RNA, 19 nt, Artificial Sequence
  Description of Artificial Sequence: Synthetic oligonucleotide
  Antisense strand to SEQ ID NO: 1494788
uaugaccagguuugcggau

SEQ ID NO: 1494790 - RNA, 19 nt, Artificial Sequence
  Description of Artificial Sequence: Synthetic oligonucleotide
  Sense strand starting at position 3859 of SEQ ID NO: 1244517
ccgcaaaccuggucauauu

SEQ ID NO: 1494791 - RNA, 19 nt, Artificial Sequence
  Description of Artificial Sequence: Synthetic oligonucleotide
  Antisense strand to SEQ ID NO: 1494790
aauaugaccagguuugcgg

SEQ ID NO: 1494792 - RNA, 19 nt, Artificial Sequence
  Description of Artificial Sequence: Synthetic oligonucleotide
  Sense strand starting at position 3860 of SEQ ID NO: 1244517
cgcaaaccuggucauauua

SEQ ID NO: 1494793 - RNA, 19 nt, Artificial Sequence
  Description of Artificial Sequence: Synthetic oligonucleotide
  Antisense strand to SEQ ID NO: 1494792
uaauaugaccagguuugcg

SEQ ID NO: 1494794 - RNA, 19 nt, Artificial Sequence
  Description of Artificial Sequence: Synthetic oligonucleotide
  Sense strand starting at position 157 of SEQ ID NO: 1244518
guccuucgaguccaauaga

SEQ ID NO: 1494795 - RNA, 19 nt, Artificial Sequence
  Description of Artificial Sequence: Synthetic oligonucleotide
  Antisense strand to SEQ ID NO: 1494794
ucuauuggacucgaaggac

SEQ ID NO: 1494796 - RNA, 19 nt, Artificial Sequence
  Description of Artificial Sequence: Synthetic oligonucleotide
  Sense strand starting at position 223 of SEQ ID NO: 1244518
ggcugcuauuucucugagu

SEQ ID NO: 1494797 - RNA, 19 nt, Artificial Sequence
  Description of Artificial Sequence: Synthetic oligonucleotide
  Antisense strand to SEQ ID NO: 1494796
acucagagaaauagcagcc

SEQ ID NO: 1494798 - RNA, 19 nt, Artificial Sequence
  Description of Artificial Sequence: Synthetic oligonucleotide
  Sense strand starting at position 224 of SEQ ID NO: 1244518
gcugcuauuucucugagua

SEQ ID NO: 1494799 - RNA, 19 nt, Artificial Sequence
  Description of Artificial Sequence: Synthetic oligonucleotide
  Antisense strand to SEQ ID NO: 1494798
uacucagagaaauagcagc

SEQ ID NO: 1494800 - RNA, 19 nt, Artificial Sequence
  Description of Artificial Sequence: Synthetic oligonucleotide
  Sense strand starting at position 225 of SEQ ID NO: 1244518
cugcuauuucucugaguau

SEQ ID NO: 1494801 - RNA, 19 nt, Artificial Sequence
  Description of Artificial Sequence: Synthetic oligonucleotide
  Antisense strand to SEQ ID NO: 1494800
auacucagagaaauagcag

SEQ ID NO: 1494802 - RNA, 19 nt, Artificial Sequence
  Description of Artificial Sequence: Synthetic oligonucleotide
  Sense strand starting at position 226 of SEQ ID NO: 1244518
ugcuauuucucugaguauc

SEQ ID NO: 1494803 - RNA, 19 nt, Artificial Sequence
  Description of Artificial Sequence: Synthetic oligonucleotide
  Antisense strand to SEQ ID NO: 1494802
gauacucagagaaauagca

SEQ ID NO: 1494804 - RNA, 19 nt, Artificial Sequence
  Description of Artificial Sequence: Synthetic oligonucleotide
  Sense strand starting at position 234 of SEQ ID NO: 1244518
cucugaguaucuguuucua

SEQ ID NO: 1494805 - RNA, 19 nt, Artificial Sequence
  Description of Artificial Sequence: Synthetic oligonucleotide
  Antisense strand to SEQ ID NO: 1494804
uagaaacagauacucagag

SEQ ID NO: 1494806 - RNA, 19 nt, Artificial Sequence
  Description of Artificial Sequence: Synthetic oligonucleotide
  Sense strand starting at position 236 of SEQ ID NO: 1244518
cugaguaucuguuucuaga

SEQ ID NO: 1494807 - RNA, 19 nt, Artificial Sequence
  Description of Artificial Sequence: Synthetic oligonucleotide
  Antisense strand to SEQ ID NO: 1494806
ucuagaaacagauacucag

SEQ ID NO: 1494808 - RNA, 19 nt, Artificial Sequence
  Description of Artificial Sequence: Synthetic oligonucleotide
  Sense strand starting at position 238 of SEQ ID NO: 1244518
gaguaucuguuucuagaug

SEQ ID NO: 1494809 - RNA, 19 nt, Artificial Sequence
  Description of Artificial Sequence: Synthetic oligonucleotide
  Antisense strand to SEQ ID NO: 1494808
caucuagaaacagauacuc

SEQ ID NO: 1494810 - RNA, 19 nt, Artificial Sequence
  Description of Artificial Sequence: Synthetic oligonucleotide
  Sense strand starting at position 290 of SEQ ID NO: 1244518
ccaggaucacgguacagua

SEQ ID NO: 1494811 - RNA, 19 nt, Artificial Sequence
  Description of Artificial Sequence: Synthetic oligonucleotide
  Antisense strand to SEQ ID NO: 1494810
uacuguaccgugauccugg

SEQ ID NO: 1494812 - RNA, 19 nt, Artificial Sequence
  Description of Artificial Sequence: Synthetic oligonucleotide
  Sense strand starting at position 304 of SEQ ID NO: 1244518
caguaaagagcuuagcacu

SEQ ID NO: 1494813 - RNA, 19 nt, Artificial Sequence
  Description of Artificial Sequence: Synthetic oligonucleotide
  Antisense strand to SEQ ID NO: 1494812
agugcuaagcucuuuacug

SEQ ID NO: 1494814 - RNA, 19 nt, Artificial Sequence
  Description of Artificial Sequence: Synthetic oligonucleotide
  Sense strand starting at position 382 of SEQ ID NO: 1244518
gcaggugaccugugcucaa

SEQ ID NO: 1494815 - RNA, 19 nt, Artificial Sequence
  Description of Artificial Sequence: Synthetic oligonucleotide
  Antisense strand to SEQ ID NO: 1494814
uugagcacaggucaccugc

SEQ ID NO: 1494816 - RNA, 19 nt, Artificial Sequence
  Description of Artificial Sequence: Synthetic oligonucleotide
  Sense strand starting at position 600 of SEQ ID NO: 1244518
gagugagaaggcuguuuag

SEQ ID NO: 1494817 - RNA, 19 nt, Artificial Sequence
  Description of Artificial Sequence: Synthetic oligonucleotide
  Antisense strand to SEQ ID NO: 1494816
cuaaacagccuucucacuc

SEQ ID NO: 1494818 - RNA, 19 nt, Artificial Sequence
  Description of Artificial Sequence: Synthetic oligonucleotide
  Sense strand starting at position 794 of SEQ ID NO: 1244518
cacacagcccgaugguauu

SEQ ID NO: 1494819 - RNA, 19 nt, Artificial Sequence
  Description of Artificial Sequence: Synthetic oligonucleotide
  Antisense strand to SEQ ID NO: 1494818
aauaccaucgggcugugug

SEQ ID NO: 1494820 - RNA, 19 nt, Artificial Sequence
  Description of Artificial Sequence: Synthetic oligonucleotide
  Sense strand starting at position 883 of SEQ ID NO: 1244518
gugugaguucaugguagau

SEQ ID NO: 1494821 - RNA, 19 nt, Artificial Sequence
  Description of Artificial Sequence: Synthetic oligonucleotide
  Antisense strand to SEQ ID NO: 1494820
aucuaccaugaacucacac

SEQ ID NO: 1494822 - RNA, 19 nt, Artificial Sequence
  Description of Artificial Sequence: Synthetic oligonucleotide
  Sense strand starting at position 1017 of SEQ ID NO: 1244518
cccagaaugugcccgauga

SEQ ID NO: 1494823 - RNA, 19 nt, Artificial Sequence
  Description of Artificial Sequence: Synthetic oligonucleotide
  Antisense strand to SEQ ID NO: 1494822
ucaucgggcacauucuggg

SEQ ID NO: 1494824 - RNA, 19 nt, Artificial Sequence
  Description of Artificial Sequence: Synthetic oligonucleotide
  Sense strand starting at position 1019 of SEQ ID NO: 1244518
cagaaugugcccgaugagu

SEQ ID NO: 1494825 - RNA, 19 nt, Artificial Sequence
  Description of Artificial Sequence: Synthetic oligonucleotide
  Antisense strand to SEQ ID NO: 1494824
acucaucgggcacauucug

SEQ ID NO: 1494826 - RNA, 19 nt, Artificial Sequence
  Description of Artificial Sequence: Synthetic oligonucleotide
  Sense strand starting at position 1021 of SEQ ID NO: 1244518
gaaugugcccgaugaguca

SEQ ID NO: 1494827 - RNA, 19 nt, Artificial Sequence
  Description of Artificial Sequence: Synthetic oligonucleotide
  Antisense strand to SEQ ID NO: 1494826
ugacucaucgggcacauuc

SEQ ID NO: 1494828 - RNA, 19 nt, Artificial Sequence
  Description of Artificial Sequence: Synthetic oligonucleotide
  Sense strand starting at position 1124 of SEQ ID NO: 1244518
gcagaugcuagugaaugaa

SEQ ID NO: 1494829 - RNA, 19 nt, Artificial Sequence
  Description of Artificial Sequence: Synthetic oligonucleotide
  Antisense strand to SEQ ID NO: 1494828
uucauucacuagcaucugc

SEQ ID NO: 1494830 - RNA, 19 nt, Artificial Sequence
  Description of Artificial Sequence: Synthetic oligonucleotide
  Sense strand starting at position 2548 of SEQ ID NO: 1244518
auuuauggcgucugaccua

SEQ ID NO: 1494831 - RNA, 19 nt, Artificial Sequence
  Description of Artificial Sequence: Synthetic oligonucleotide
  Antisense strand to SEQ ID NO: 1494830
uaggucagacgccauaaau

SEQ ID NO: 1494832 - RNA, 19 nt, Artificial Sequence
  Description of Artificial Sequence: Synthetic oligonucleotide
  Sense strand starting at position 2576 of SEQ ID NO: 1244518
gagaaaggauucccgugau

SEQ ID NO: 1494833 - RNA, 19 nt, Artificial Sequence
  Description of Artificial Sequence: Synthetic oligonucleotide
  Antisense strand to SEQ ID NO: 1494832
aucacgggaauccuuucuc

SEQ ID NO: 1494834 - RNA, 19 nt, Artificial Sequence
  Description of Artificial Sequence: Synthetic oligonucleotide
  Sense strand starting at position 2713 of SEQ ID NO: 1244518
ucgggaugcagagauucua

SEQ ID NO: 1494835 - RNA, 19 nt, Artificial Sequence
  Description of Artificial Sequence: Synthetic oligonucleotide
  Antisense strand to SEQ ID NO: 1494834
uagaaucucugcaucccga

SEQ ID NO: 1494836 - RNA, 19 nt, Artificial Sequence
  Description of Artificial Sequence: Synthetic oligonucleotide
  Sense strand starting at position 2984 of SEQ ID NO: 1244518
acuggagaauuccauccau

SEQ ID NO: 1494837 - RNA, 19 nt, Artificial Sequence
  Description of Artificial Sequence: Synthetic oligonucleotide
  Antisense strand to SEQ ID NO: 1494836
auggauggaauucuccagu

SEQ ID NO: 1494838 - RNA, 19 nt, Artificial Sequence
  Description of Artificial Sequence: Synthetic oligonucleotide
  Sense strand starting at position 3160 of SEQ ID NO: 1244518
acaggaagcucaguaucuu

SEQ ID NO: 1494839 - RNA, 19 nt, Artificial Sequence
  Description of Artificial Sequence: Synthetic oligonucleotide
  Antisense strand to SEQ ID NO: 1494838
aagauacugagcuuccugu

SEQ ID NO: 1494840 - RNA, 19 nt, Artificial Sequence
  Description of Artificial Sequence: Synthetic oligonucleotide
  Sense strand starting at position 3164 of SEQ ID NO: 1244518
gaagcucaguaucuuaagu

SEQ ID NO: 1494841 - RNA, 19 nt, Artificial Sequence
  Description of Artificial Sequence: Synthetic oligonucleotide
  Antisense strand to SEQ ID NO: 1494840
acuuaagauacugagcuuc

SEQ ID NO: 1494842 - RNA, 19 nt, Artificial Sequence
  Description of Artificial Sequence: Synthetic oligonucleotide
  Sense strand starting at position 3169 of SEQ ID NO: 1244518
ucaguaucuuaagugagag

SEQ ID NO: 1494843 - RNA, 19 nt, Artificial Sequence
  Description of Artificial Sequence: Synthetic oligonucleotide
  Antisense strand to SEQ ID NO: 1494842
cucucacuuaagauacuga

SEQ ID NO: 1494844 - RNA, 19 nt, Artificial Sequence
  Description of Artificial Sequence: Synthetic oligonucleotide
  Sense strand starting at position 3171 of SEQ ID NO: 1244518
aguaucuuaagugagaguu

SEQ ID NO: 1494845 - RNA, 19 nt, Artificial Sequence
  Description of Artificial Sequence: Synthetic oligonucleotide
  Antisense strand to SEQ ID NO: 1494844
aacucucacuuaagauacu

SEQ ID NO: 1494846 - RNA, 19 nt, Artificial Sequence
  Description of Artificial Sequence: Synthetic oligonucleotide
  Sense strand starting at position 3179 of SEQ ID NO: 1244518
aagugagaguucuuccuuu

SEQ ID NO: 1494847 - RNA, 19 nt, Artificial Sequence
  Description of Artificial Sequence: Synthetic oligonucleotide
  Antisense strand to SEQ ID NO: 1494846
aaaggaagaacucucacuu

SEQ ID NO: 1494848 - RNA, 19 nt, Artificial Sequence
  Description of Artificial Sequence: Synthetic oligonucleotide
  Sense strand starting at position 3225 of SEQ ID NO: 1244518
uagugcuggccuuaagaau

SEQ ID NO: 1494849 - RNA, 19 nt, Artificial Sequence
  Description of Artificial Sequence: Synthetic oligonucleotide
  Antisense strand to SEQ ID NO: 1494848
auucuuaaggccagcacua

SEQ ID NO: 1494850 - RNA, 19 nt, Artificial Sequence
  Description of Artificial Sequence: Synthetic oligonucleotide
  Sense strand starting at position 3231 of SEQ ID NO: 1244518
uggccuuaagaauguucuu

SEQ ID NO: 1494851 - RNA, 19 nt, Artificial Sequence
  Description of Artificial Sequence: Synthetic oligonucleotide
  Antisense strand to SEQ ID NO: 1494850
aagaacauucuuaaggcca

SEQ ID NO: 1494852 - RNA, 19 nt, Artificial Sequence
  Description of Artificial Sequence: Synthetic oligonucleotide
  Sense strand starting at position 3240 of SEQ ID NO: 1244518
gaauguucuuacucguuug

SEQ ID NO: 1494853 - RNA, 19 nt, Artificial Sequence
  Description of Artificial Sequence: Synthetic oligonucleotide
  Antisense strand to SEQ ID NO: 1494852
caaacgaguaagaacauuc

SEQ ID NO: 1494854 - RNA, 19 nt, Artificial Sequence
  Description of Artificial Sequence: Synthetic oligonucleotide
  Sense strand starting at position 3244 of SEQ ID NO: 1244518
guucuuacucguuugagcu

SEQ ID NO: 1494855 - RNA, 19 nt, Artificial Sequence
  Description of Artificial Sequence: Synthetic oligonucleotide
  Antisense strand to SEQ ID NO: 1494854
agcucaaacgaguaagaac

SEQ ID NO: 1494856 - RNA, 19 nt, Artificial Sequence
  Description of Artificial Sequence: Synthetic oligonucleotide
  Sense strand starting at position 3248 of SEQ ID NO: 1244518
uuacucguuugagcugaaa

SEQ ID NO: 1494857 - RNA, 19 nt, Artificial Sequence
  Description of Artificial Sequence: Synthetic oligonucleotide
  Antisense strand to SEQ ID NO: 1494856
uuucagcucaaacgaguaa

SEQ ID NO: 1494858 - RNA, 19 nt, Artificial Sequence
  Description of Artificial Sequence: Synthetic oligonucleotide
  Sense strand starting at position 3250 of SEQ ID NO: 1244518
acucguuugagcugaaauc

SEQ ID NO: 1494859 - RNA, 19 nt, Artificial Sequence
  Description of Artificial Sequence: Synthetic oligonucleotide
  Antisense strand to SEQ ID NO: 1494858
gauuucagcucaaacgagu

SEQ ID NO: 1494860 - RNA, 19 nt, Artificial Sequence
  Description of Artificial Sequence: Synthetic oligonucleotide
  Sense strand starting at position 3251 of SEQ ID NO: 1244518
cucguuugagcugaaaucu

SEQ ID NO: 1494861 - RNA, 19 nt, Artificial Sequence
  Description of Artificial Sequence: Synthetic oligonucleotide
  Antisense strand to SEQ ID NO: 1494860
agauuucagcucaaacgag

SEQ ID NO: 1494862 - RNA, 19 nt, Artificial Sequence
  Description of Artificial Sequence: Synthetic oligonucleotide
  Sense strand starting at position 3395 of SEQ ID NO: 1244518
ccacguuugccagagcuca

SEQ ID NO: 1494863 - RNA, 19 nt, Artificial Sequence
  Description of Artificial Sequence: Synthetic oligonucleotide
  Antisense strand to SEQ ID NO: 1494862
ugagcucuggcaaacgugg

SEQ ID NO: 1494864 - RNA, 19 nt, Artificial Sequence
  Description of Artificial Sequence: Synthetic oligonucleotide
  Sense strand starting at position 3658 of SEQ ID NO: 1244518
uguacucucucagcuacau

SEQ ID NO: 1494865 - RNA, 19 nt, Artificial Sequence
  Description of Artificial Sequence: Synthetic oligonucleotide
  Antisense strand to SEQ ID NO: 1494864
auguagcugagagaguaca

SEQ ID NO: 1494866 - RNA, 19 nt, Artificial Sequence
  Description of Artificial Sequence: Synthetic oligonucleotide
  Sense strand starting at position 3676 of SEQ ID NO: 1244518
uugcguuauccucagcaua

SEQ ID NO: 1494867 - RNA, 19 nt, Artificial Sequence
  Description of Artificial Sequence: Synthetic oligonucleotide
  Antisense strand to SEQ ID NO: 1494866
uaugcugaggauaacgcaa

SEQ ID NO: 1494868 - RNA, 19 nt, Artificial Sequence
  Description of Artificial Sequence: Synthetic oligonucleotide
  Sense strand starting at position 3715 of SEQ ID NO: 1244518
aagaaaguucggugcuugu

SEQ ID NO: 1494869 - RNA, 19 nt, Artificial Sequence
  Description of Artificial Sequence: Synthetic oligonucleotide
  Antisense strand to SEQ ID NO: 1494868
acaagcaccgaacuuucuu

SEQ ID NO: 1494870 - RNA, 19 nt, Artificial Sequence
  Description of Artificial Sequence: Synthetic oligonucleotide
  Sense strand starting at position 3728 of SEQ ID NO: 1244518
gcuuguggucauggaggau

SEQ ID NO: 1494871 - RNA, 19 nt, Artificial Sequence
  Description of Artificial Sequence: Synthetic oligonucleotide
  Antisense strand to SEQ ID NO: 1494870
auccuccaugaccacaagc

SEQ ID NO: 1494872 - RNA, 19 nt, Artificial Sequence
  Description of Artificial Sequence: Synthetic oligonucleotide
  Sense strand starting at position 3816 of SEQ ID NO: 1244518
gccugauagccuggacaau

SEQ ID NO: 1494873 - RNA, 19 nt, Artificial Sequence
  Description of Artificial Sequence: Synthetic oligonucleotide
  Antisense strand to SEQ ID NO: 1494872
auuguccaggcuaucaggc

SEQ ID NO: 1494874 - RNA, 19 nt, Artificial Sequence
  Description of Artificial Sequence: Synthetic oligonucleotide
  Sense strand starting at position 15 of SEQ ID NO: 1244519
uuucuuagcccagagaaug

SEQ ID NO: 1494875 - RNA, 19 nt, Artificial Sequence
  Description of Artificial Sequence: Synthetic oligonucleotide
  Antisense strand to SEQ ID NO: 1494874
cauucucugggcuaagaaa

SEQ ID NO: 1494876 - RNA, 19 nt, Artificial Sequence
  Description of Artificial Sequence: Synthetic oligonucleotide
  Sense strand starting at position 61 of SEQ ID NO: 1244519
agucuaucuccugggaguu

SEQ ID NO: 1494877 - RNA, 19 nt, Artificial Sequence
  Description of Artificial Sequence: Synthetic oligonucleotide
  Antisense strand to SEQ ID NO: 1494876
aacucccaggagauagacu

SEQ ID NO: 1494878 - RNA, 19 nt, Artificial Sequence
  Description of Artificial Sequence: Synthetic oligonucleotide
  Sense strand starting at position 62 of SEQ ID NO: 1244519
gucuaucuccugggaguuc

SEQ ID NO: 1494879 - RNA, 19 nt, Artificial Sequence
  Description of Artificial Sequence: Synthetic oligonucleotide
  Antisense strand to SEQ ID NO: 1494878
gaacucccaggagauagac

SEQ ID NO: 1494880 - RNA, 19 nt, Artificial Sequence
  Description of Artificial Sequence: Synthetic oligonucleotide
  Sense strand starting at position 237 of SEQ ID NO: 1244519
ccugaugcccuccagauaa

SEQ ID NO: 1494881 - RNA, 19 nt, Artificial Sequence
  Description of Artificial Sequence: Synthetic oligonucleotide
  Antisense strand to SEQ ID NO: 1494880
uuaucuggagggcaucagg

SEQ ID NO: 1494882 - RNA, 19 nt, Artificial Sequence
  Description of Artificial Sequence: Synthetic oligonucleotide
  Sense strand starting at position 250 of SEQ ID NO: 1244519
agauaaaguccaugacucu

SEQ ID NO: 1494883 - RNA, 19 nt, Artificial Sequence
  Description of Artificial Sequence: Synthetic oligonucleotide
  Antisense strand to SEQ ID NO: 1494882
agagucauggacuuuaucu

SEQ ID NO: 1494884 - RNA, 19 nt, Artificial Sequence
  Description of Artificial Sequence: Synthetic oligonucleotide
  Sense strand starting at position 427 of SEQ ID NO: 1244519
gucugaucucccugcugga

SEQ ID NO: 1494885 - RNA, 19 nt, Artificial Sequence
  Description of Artificial Sequence: Synthetic oligonucleotide
  Antisense strand to SEQ ID NO: 1494884
uccagcagggagaucagac

SEQ ID NO: 1494886 - RNA, 19 nt, Artificial Sequence
  Description of Artificial Sequence: Synthetic oligonucleotide
  Sense strand starting at position 534 of SEQ ID NO: 1244519
ccgcauaagugcuugucca

SEQ ID NO: 1494887 - RNA, 19 nt, Artificial Sequence
  Description of Artificial Sequence: Synthetic oligonucleotide
  Antisense strand to SEQ ID NO: 1494886
uggacaagcacuuaugcgg

SEQ ID NO: 1494888 - RNA, 19 nt, Artificial Sequence
  Description of Artificial Sequence: Synthetic oligonucleotide
  Sense strand starting at position 535 of SEQ ID NO: 1244519
cgcauaagugcuuguccaa

SEQ ID NO: 1494889 - RNA, 19 nt, Artificial Sequence
  Description of Artificial Sequence: Synthetic oligonucleotide
  Antisense strand to SEQ ID NO: 1494888
uuggacaagcacuuaugcg

SEQ ID NO: 1494890 - RNA, 19 nt, Artificial Sequence
  Description of Artificial Sequence: Synthetic oligonucleotide
  Sense strand starting at position 582 of SEQ ID NO: 1244519
uagagaugguguccuaugu

SEQ ID NO: 1494891 - RNA, 19 nt, Artificial Sequence
  Description of Artificial Sequence: Synthetic oligonucleotide
  Antisense strand to SEQ ID NO: 1494890
acauaggacaccaucucua

SEQ ID NO: 1494892 - RNA, 19 nt, Artificial Sequence
  Description of Artificial Sequence: Synthetic oligonucleotide
  Sense strand starting at position 586 of SEQ ID NO: 1244519
gaugguguccuaugucuca

SEQ ID NO: 1494893 - RNA, 19 nt, Artificial Sequence
  Description of Artificial Sequence: Synthetic oligonucleotide
  Antisense strand to SEQ ID NO: 1494892
ugagacauaggacaccauc

SEQ ID NO: 1494894 - RNA, 19 nt, Artificial Sequence
  Description of Artificial Sequence: Synthetic oligonucleotide
  Sense strand starting at position 589 of SEQ ID NO: 1244519
gguguccuaugucucagua

SEQ ID NO: 1494895 - RNA, 19 nt, Artificial Sequence
  Description of Artificial Sequence: Synthetic oligonucleotide
  Antisense strand to SEQ ID NO: 1494894
uacugagacauaggacacc

SEQ ID NO: 1494896 - RNA, 19 nt, Artificial Sequence
  Description of Artificial Sequence: Synthetic oligonucleotide
  Sense strand starting at position 593 of SEQ ID NO: 1244519
uccuaugucucaguaacca

SEQ ID NO: 1494897 - RNA, 19 nt, Artificial Sequence
  Description of Artificial Sequence: Synthetic oligonucleotide
  Antisense strand to SEQ ID NO: 1494896
ugguuacugagacauagga

SEQ ID NO: 1494898 - RNA, 19 nt, Artificial Sequence
  Description of Artificial Sequence: Synthetic oligonucleotide
  Sense strand starting at position 650 of SEQ ID NO: 1244519
gguggaaugagucgaggua

SEQ ID NO: 1494899 - RNA, 19 nt, Artificial Sequence
  Description of Artificial Sequence: Synthetic oligonucleotide
  Antisense strand to SEQ ID NO: 1494898
uaccucgacucauuccacc

SEQ ID NO: 1494900 - RNA, 19 nt, Artificial Sequence
  Description of Artificial Sequence: Synthetic oligonucleotide
  Sense strand starting at position 651 of SEQ ID NO: 1244519
guggaaugagucgagguaa

SEQ ID NO: 1494901 - RNA, 19 nt, Artificial Sequence
  Description of Artificial Sequence: Synthetic oligonucleotide
  Antisense strand to SEQ ID NO: 1494900
uuaccucgacucauuccac

SEQ ID NO: 1494902 - RNA, 19 nt, Artificial Sequence
  Description of Artificial Sequence: Synthetic oligonucleotide
  Sense strand starting at position 652 of SEQ ID NO: 1244519
uggaaugagucgagguaac

SEQ ID NO: 1494903 - RNA, 19 nt, Artificial Sequence
  Description of Artificial Sequence: Synthetic oligonucleotide
  Antisense strand to SEQ ID NO: 1494902
guuaccucgacucauucca

SEQ ID NO: 1494904 - RNA, 19 nt, Artificial Sequence
  Description of Artificial Sequence: Synthetic oligonucleotide
  Sense strand starting at position 828 of SEQ ID NO: 1244519
cgguccuuuccacgucaga

SEQ ID NO: 1494905 - RNA, 19 nt, Artificial Sequence
  Description of Artificial Sequence: Synthetic oligonucleotide
  Antisense strand to SEQ ID NO: 1494904
ucugacguggaaaggaccg

SEQ ID NO: 1494906 - RNA, 19 nt, Artificial Sequence
  Description of Artificial Sequence: Synthetic oligonucleotide
  Sense strand starting at position 831 of SEQ ID NO: 1244519
uccuuuccacgucagacaa

SEQ ID NO: 1494907 - RNA, 19 nt, Artificial Sequence
  Description of Artificial Sequence: Synthetic oligonucleotide
  Antisense strand to SEQ ID NO: 1494906
uugucugacguggaaagga

SEQ ID NO: 1494908 - RNA, 19 nt, Artificial Sequence
  Description of Artificial Sequence: Synthetic oligonucleotide
  Sense strand starting at position 1009 of SEQ ID NO: 1244519
gccgucucugagucaguuu

SEQ ID NO: 1494909 - RNA, 19 nt, Artificial Sequence
  Description of Artificial Sequence: Synthetic oligonucleotide
  Antisense strand to SEQ ID NO: 1494908
aaacugacucagagacggc

SEQ ID NO: 1494910 - RNA, 19 nt, Artificial Sequence
  Description of Artificial Sequence: Synthetic oligonucleotide
  Sense strand starting at position 1017 of SEQ ID NO: 1244519
ugagucaguuuccucacuu

SEQ ID NO: 1494911 - RNA, 19 nt, Artificial Sequence
  Description of Artificial Sequence: Synthetic oligonucleotide
  Antisense strand to SEQ ID NO: 1494910
aagugaggaaacugacuca

SEQ ID NO: 1494912 - RNA, 19 nt, Artificial Sequence
  Description of Artificial Sequence: Synthetic oligonucleotide
  Sense strand starting at position 1018 of SEQ ID NO: 1244519
gagucaguuuccucacuug

SEQ ID NO: 1494913 - RNA, 19 nt, Artificial Sequence
  Description of Artificial Sequence: Synthetic oligonucleotide
  Antisense strand to SEQ ID NO: 1494912
caagugaggaaacugacuc

SEQ ID NO: 1494914 - RNA, 19 nt, Artificial Sequence
  Description of Artificial Sequence: Synthetic oligonucleotide
  Sense strand starting at position 1060 of SEQ ID NO: 1244519
cuaggaagucgaggaagau

SEQ ID NO: 1494915 - RNA, 19 nt, Artificial Sequence
  Description of Artificial Sequence: Synthetic oligonucleotide
  Antisense strand to SEQ ID NO: 1494914
aucuuccucgacuuccuag

SEQ ID NO: 1494916 - RNA, 19 nt, Artificial Sequence
  Description of Artificial Sequence: Synthetic oligonucleotide
  Sense strand starting at position 1069 of SEQ ID NO: 1244519
cgaggaagauugcaagaca

SEQ ID NO: 1494917 - RNA, 19 nt, Artificial Sequence
  Description of Artificial Sequence: Synthetic oligonucleotide
  Antisense strand to SEQ ID NO: 1494916
ugucuugcaaucuuccucg

SEQ ID NO: 1494918 - RNA, 19 nt, Artificial Sequence
  Description of Artificial Sequence: Synthetic oligonucleotide
  Sense strand starting at position 1149 of SEQ ID NO: 1244519
auuccuucuccacgacuga

SEQ ID NO: 1494919 - RNA, 19 nt, Artificial Sequence
  Description of Artificial Sequence: Synthetic oligonucleotide
  Antisense strand to SEQ ID NO: 1494918
ucagucguggagaaggaau

SEQ ID NO: 1494920 - RNA, 19 nt, Artificial Sequence
  Description of Artificial Sequence: Synthetic oligonucleotide
  Sense strand starting at position 1420 of SEQ ID NO: 1244519
gcuccauucuccuuggaga

SEQ ID NO: 1494921 - RNA, 19 nt, Artificial Sequence
  Description of Artificial Sequence: Synthetic oligonucleotide
  Antisense strand to SEQ ID NO: 1494920
ucuccaaggagaauggagc

SEQ ID NO: 1494922 - RNA, 19 nt, Artificial Sequence
  Description of Artificial Sequence: Synthetic oligonucleotide
  Sense strand starting at position 1457 of SEQ ID NO: 1244519
cccgaauucgcgcuucaga

SEQ ID NO: 1494923 - RNA, 19 nt, Artificial Sequence
  Description of Artificial Sequence: Synthetic oligonucleotide
  Antisense strand to SEQ ID NO: 1494922
ucugaagcgcgaauucggg

SEQ ID NO: 1494924 - RNA, 19 nt, Artificial Sequence
  Description of Artificial Sequence: Synthetic oligonucleotide
  Sense strand starting at position 1458 of SEQ ID NO: 1244519
ccgaauucgcgcuucagac

SEQ ID NO: 1494925 - RNA, 19 nt, Artificial Sequence
  Description of Artificial Sequence: Synthetic oligonucleotide
  Antisense strand to SEQ ID NO: 1494924
gucugaagcgcgaauucgg

SEQ ID NO: 1494926 - RNA, 19 nt, Artificial Sequence
  Description of Artificial Sequence: Synthetic oligonucleotide
  Sense strand starting at position 2465 of SEQ ID NO: 1244519
agugacgucauaggauuaa

SEQ ID NO: 1494927 - RNA, 19 nt, Artificial Sequence
  Description of Artificial Sequence: Synthetic oligonucleotide
  Antisense strand to SEQ ID NO: 1494926
uuaauccuaugacgucacu

SEQ ID NO: 1494928 - RNA, 19 nt, Artificial Sequence
  Description of Artificial Sequence: Synthetic oligonucleotide
  Sense strand starting at position 2706 of SEQ ID NO: 1244519
gugugcacuuacuauuuau

SEQ ID NO: 1494929 - RNA, 19 nt, Artificial Sequence
  Description of Artificial Sequence: Synthetic oligonucleotide
  Antisense strand to SEQ ID NO: 1494928
auaaauaguaagugcacac

SEQ ID NO: 1494930 - RNA, 19 nt, Artificial Sequence
  Description of Artificial Sequence: Synthetic oligonucleotide
  Sense strand starting at position 2875 of SEQ ID NO: 1244519
gggccugauuugccaccua

SEQ ID NO: 1494931 - RNA, 19 nt, Artificial Sequence
  Description of Artificial Sequence: Synthetic oligonucleotide
  Antisense strand to SEQ ID NO: 1494930
uagguggcaaaucaggccc

SEQ ID NO: 1494932 - RNA, 19 nt, Artificial Sequence
  Description of Artificial Sequence: Synthetic oligonucleotide
  Sense strand starting at position 3304 of SEQ ID NO: 1244519
uuucuucuugauuaucgua

SEQ ID NO: 1494933 - RNA, 19 nt, Artificial Sequence
  Description of Artificial Sequence: Synthetic oligonucleotide
  Antisense strand to SEQ ID NO: 1494932
uacgauaaucaagaagaaa

SEQ ID NO: 1494934 - RNA, 19 nt, Artificial Sequence
  Description of Artificial Sequence: Synthetic oligonucleotide
  Sense strand starting at position 3306 of SEQ ID NO: 1244519
ucuucuugauuaucguauu

SEQ ID NO: 1494935 - RNA, 19 nt, Artificial Sequence
  Description of Artificial Sequence: Synthetic oligonucleotide
  Antisense strand to SEQ ID NO: 1494934
aauacgauaaucaagaaga

SEQ ID NO: 1494936 - RNA, 19 nt, Artificial Sequence
  Description of Artificial Sequence: Synthetic oligonucleotide
  Sense strand starting at position 3346 of SEQ ID NO: 1244519
gccguuccuuccuccagaa

SEQ ID NO: 1494937 - RNA, 19 nt, Artificial Sequence
  Description of Artificial Sequence: Synthetic oligonucleotide
  Antisense strand to SEQ ID NO: 1494936
uucuggaggaaggaacggc

SEQ ID NO: 1494938 - RNA, 19 nt, Artificial Sequence
  Description of Artificial Sequence: Synthetic oligonucleotide
  Sense strand starting at position 3399 of SEQ ID NO: 1244519
uuauucuuguuguuggaua

SEQ ID NO: 1494939 - RNA, 19 nt, Artificial Sequence
  Description of Artificial Sequence: Synthetic oligonucleotide
  Antisense strand to SEQ ID NO: 1494938
uauccaacaacaagaauaa

SEQ ID NO: 1494940 - RNA, 19 nt, Artificial Sequence
  Description of Artificial Sequence: Synthetic oligonucleotide
  Sense strand starting at position 3436 of SEQ ID NO: 1244519
uuuaauuguuauggacacu

SEQ ID NO: 1494941 - RNA, 19 nt, Artificial Sequence
  Description of Artificial Sequence: Synthetic oligonucleotide
  Antisense strand to SEQ ID NO: 1494940
aguguccauaacaauuaaa

SEQ ID NO: 1494942 - RNA, 19 nt, Artificial Sequence
  Description of Artificial Sequence: Synthetic oligonucleotide
  Sense strand starting at position 3452 of SEQ ID NO: 1244519
acuuaauaguugcagagaa

SEQ ID NO: 1494943 - RNA, 19 nt, Artificial Sequence
  Description of Artificial Sequence: Synthetic oligonucleotide
  Antisense strand to SEQ ID NO: 1494942
uucucugcaacuauuaagu

SEQ ID NO: 1494944 - RNA, 19 nt, Artificial Sequence
  Description of Artificial Sequence: Synthetic oligonucleotide
  Sense strand starting at position 3454 of SEQ ID NO: 1244519
uuaauaguugcagagaauu

SEQ ID NO: 1494945 - RNA, 19 nt, Artificial Sequence
  Description of Artificial Sequence: Synthetic oligonucleotide
  Antisense strand to SEQ ID NO: 1494944
aauucucugcaacuauuaa

SEQ ID NO: 1494946 - RNA, 19 nt, Artificial Sequence
  Description of Artificial Sequence: Synthetic oligonucleotide
  Sense strand starting at position 3468 of SEQ ID NO: 1244519
gaauuauggagaggcaugu

SEQ ID NO: 1494947 - RNA, 19 nt, Artificial Sequence
  Description of Artificial Sequence: Synthetic oligonucleotide
  Antisense strand to SEQ ID NO: 1494946
acaugccucuccauaauuc

SEQ ID NO: 1494948 - RNA, 19 nt, Artificial Sequence
  Description of Artificial Sequence: Synthetic oligonucleotide
  Sense strand starting at position 3472 of SEQ ID NO: 1244519
uauggagaggcauguaaug

SEQ ID NO: 1494949 - RNA, 19 nt, Artificial Sequence
  Description of Artificial Sequence: Synthetic oligonucleotide
  Antisense strand to SEQ ID NO: 1494948
cauuacaugccucuccaua

SEQ ID NO: 1494950 - RNA, 19 nt, Artificial Sequence
  Description of Artificial Sequence: Synthetic oligonucleotide
  Sense strand starting at position 3474 of SEQ ID NO: 1244519
uggagaggcauguaauguu

SEQ ID NO: 1494951 - RNA, 19 nt, Artificial Sequence
  Description of Artificial Sequence: Synthetic oligonucleotide
  Antisense strand to SEQ ID NO: 1494950
aacauuacaugccucucca

SEQ ID NO: 1494952 - RNA, 19 nt, Artificial Sequence
  Description of Artificial Sequence: Synthetic oligonucleotide
  Sense strand starting at position 3566 of SEQ ID NO: 1244519
uccuuuguauuaggaacau

SEQ ID NO: 1494953 - RNA, 19 nt, Artificial Sequence
  Description of Artificial Sequence: Synthetic oligonucleotide
  Antisense strand to SEQ ID NO: 1494952
auguuccuaauacaaagga

SEQ ID NO: 1494954 - RNA, 19 nt, Artificial Sequence
  Description of Artificial Sequence: Synthetic oligonucleotide
  Sense strand starting at position 16 of SEQ ID NO: 1244520
ggaugaaggucagguaaga

SEQ ID NO: 1494955 - RNA, 19 nt, Artificial Sequence
  Description of Artificial Sequence: Synthetic oligonucleotide
  Antisense strand to SEQ ID NO: 1494954
ucuuaccugaccuucaucc

SEQ ID NO: 1494956 - RNA, 19 nt, Artificial Sequence
  Description of Artificial Sequence: Synthetic oligonucleotide
  Sense strand starting at position 497 of SEQ ID NO: 1244520
cugagaugcuggcacagaa

SEQ ID NO: 1494957 - RNA, 19 nt, Artificial Sequence
  Description of Artificial Sequence: Synthetic oligonucleotide
  Antisense strand to SEQ ID NO: 1494956
uucugugccagcaucucag

SEQ ID NO: 1494958 - RNA, 19 nt, Artificial Sequence
  Description of Artificial Sequence: Synthetic oligonucleotide
  Sense strand starting at position 537 of SEQ ID NO: 1244520
cagggaaaguuuccuggua

SEQ ID NO: 1494959 - RNA, 19 nt, Artificial Sequence
  Description of Artificial Sequence: Synthetic oligonucleotide
  Antisense strand to SEQ ID NO: 1494958
uaccaggaaacuuucccug

SEQ ID NO: 1494960 - RNA, 19 nt, Artificial Sequence
  Description of Artificial Sequence: Synthetic oligonucleotide
  Sense strand starting at position 1128 of SEQ ID NO: 1244520
aagaaagucgaggagugua

SEQ ID NO: 1494961 - RNA, 19 nt, Artificial Sequence
  Description of Artificial Sequence: Synthetic oligonucleotide
  Antisense strand to SEQ ID NO: 1494960
uacacuccucgacuuucuu

SEQ ID NO: 1494962 - RNA, 19 nt, Artificial Sequence
  Description of Artificial Sequence: Synthetic oligonucleotide
  Sense strand starting at position 1322 of SEQ ID NO: 1244520
gccgucauccuaggaacau

SEQ ID NO: 1494963 - RNA, 19 nt, Artificial Sequence
  Description of Artificial Sequence: Synthetic oligonucleotide
  Antisense strand to SEQ ID NO: 1494962
auguuccuaggaugacggc

SEQ ID NO: 1494964 - RNA, 19 nt, Artificial Sequence
  Description of Artificial Sequence: Synthetic oligonucleotide
  Sense strand starting at position 1323 of SEQ ID NO: 1244520
ccgucauccuaggaacauu

SEQ ID NO: 1494965 - RNA, 19 nt, Artificial Sequence
  Description of Artificial Sequence: Synthetic oligonucleotide
  Antisense strand to SEQ ID NO: 1494964
aauguuccuaggaugacgg

SEQ ID NO: 1494966 - RNA, 19 nt, Artificial Sequence
  Description of Artificial Sequence: Synthetic oligonucleotide
  Sense strand starting at position 1765 of SEQ ID NO: 1244520
ccgaaaucugagcgugcga

SEQ ID NO: 1494967 - RNA, 19 nt, Artificial Sequence
  Description of Artificial Sequence: Synthetic oligonucleotide
  Antisense strand to SEQ ID NO: 1494966
ucgcacgcucagauuucgg

SEQ ID NO: 1494968 - RNA, 19 nt, Artificial Sequence
  Description of Artificial Sequence: Synthetic oligonucleotide
  Sense strand starting at position 1767 of SEQ ID NO: 1244520
gaaaucugagcgugcgacu

SEQ ID NO: 1494969 - RNA, 19 nt, Artificial Sequence
  Description of Artificial Sequence: Synthetic oligonucleotide
  Antisense strand to SEQ ID NO: 1494968
agucgcacgcucagauuuc

SEQ ID NO: 1494970 - RNA, 19 nt, Artificial Sequence
  Description of Artificial Sequence: Synthetic oligonucleotide
  Sense strand starting at position 2401 of SEQ ID NO: 1244520
ccagauagcguuuguaccu

SEQ ID NO: 1494971 - RNA, 19 nt, Artificial Sequence
  Description of Artificial Sequence: Synthetic oligonucleotide
  Antisense strand to SEQ ID NO: 1494970
agguacaaacgcuaucugg

SEQ ID NO: 1494972 - RNA, 19 nt, Artificial Sequence
  Description of Artificial Sequence: Synthetic oligonucleotide
  Sense strand starting at position 2408 of SEQ ID NO: 1244520
gcguuuguaccuggaagga

SEQ ID NO: 1494973 - RNA, 19 nt, Artificial Sequence
  Description of Artificial Sequence: Synthetic oligonucleotide
  Antisense strand to SEQ ID NO: 1494972
uccuuccagguacaaacgc

SEQ ID NO: 1494974 - RNA, 19 nt, Artificial Sequence
  Description of Artificial Sequence: Synthetic oligonucleotide
  Sense strand starting at position 2458 of SEQ ID NO: 1244520
cuacaaacccauuagugua

SEQ ID NO: 1494975 - RNA, 19 nt, Artificial Sequence
  Description of Artificial Sequence: Synthetic oligonucleotide
  Antisense strand to SEQ ID NO: 1494974
uacacuaauggguuuguag

SEQ ID NO: 1494976 - RNA, 19 nt, Artificial Sequence
  Description of Artificial Sequence: Synthetic oligonucleotide
  Sense strand starting at position 2508 of SEQ ID NO: 1244520
aacauuuauugcgcgcuua

SEQ ID NO: 1494977 - RNA, 19 nt, Artificial Sequence
  Description of Artificial Sequence: Synthetic oligonucleotide
  Antisense strand to SEQ ID NO: 1494976
uaagcgcgcaauaaauguu

SEQ ID NO: 1494978 - RNA, 19 nt, Artificial Sequence
  Description of Artificial Sequence: Synthetic oligonucleotide
  Sense strand starting at position 2521 of SEQ ID NO: 1244520
cgcuuacuccgugccagaa

SEQ ID NO: 1494979 - RNA, 19 nt, Artificial Sequence
  Description of Artificial Sequence: Synthetic oligonucleotide
  Antisense strand to SEQ ID NO: 1494978
uucuggcacggaguaagcg

SEQ ID NO: 1494980 - RNA, 19 nt, Artificial Sequence
  Description of Artificial Sequence: Synthetic oligonucleotide
  Sense strand starting at position 2531 of SEQ ID NO: 1244520
gugccagaaauugagagua

SEQ ID NO: 1494981 - RNA, 19 nt, Artificial Sequence
  Description of Artificial Sequence: Synthetic oligonucleotide
  Antisense strand to SEQ ID NO: 1494980
uacucucaauuucuggcac

SEQ ID NO: 1494982 - RNA, 19 nt, Artificial Sequence
  Description of Artificial Sequence: Synthetic oligonucleotide
  Sense strand starting at position 2533 of SEQ ID NO: 1244520
gccagaaauugagaguaug

SEQ ID NO: 1494983 - RNA, 19 nt, Artificial Sequence
  Description of Artificial Sequence: Synthetic oligonucleotide
  Antisense strand to SEQ ID NO: 1494982
cauacucucaauuucuggc

SEQ ID NO: 1494984 - RNA, 19 nt, Artificial Sequence
  Description of Artificial Sequence: Synthetic oligonucleotide
  Sense strand starting at position 2541 of SEQ ID NO: 1244520
uugagaguaugguaguaaa

SEQ ID NO: 1494985 - RNA, 19 nt, Artificial Sequence
  Description of Artificial Sequence: Synthetic oligonucleotide
  Antisense strand to SEQ ID NO: 1494984
uuuacuaccauacucucaa

SEQ ID NO: 1494986 - RNA, 19 nt, Artificial Sequence
  Description of Artificial Sequence: Synthetic oligonucleotide
  Sense strand starting at position 2544 of SEQ ID NO: 1244520
agaguaugguaguaaauaa

SEQ ID NO: 1494987 - RNA, 19 nt, Artificial Sequence
  Description of Artificial Sequence: Synthetic oligonucleotide
  Antisense strand to SEQ ID NO: 1494986
uuauuuacuaccauacucu

SEQ ID NO: 1494988 - RNA, 19 nt, Artificial Sequence
  Description of Artificial Sequence: Synthetic oligonucleotide
  Sense strand starting at position 2551 of SEQ ID NO: 1244520
gguaguaaauaagaugguu

SEQ ID NO: 1494989 - RNA, 19 nt, Artificial Sequence
  Description of Artificial Sequence: Synthetic oligonucleotide
  Antisense strand to SEQ ID NO: 1494988
aaccaucuuauuuacuacc

SEQ ID NO: 1494990 - RNA, 19 nt, Artificial Sequence
  Description of Artificial Sequence: Synthetic oligonucleotide
  Sense strand starting at position 2680 of SEQ ID NO: 1244520
uugauauacauguggguuu

SEQ ID NO: 1494991 - RNA, 19 nt, Artificial Sequence
  Description of Artificial Sequence: Synthetic oligonucleotide
  Antisense strand to SEQ ID NO: 1494990
aaacccacauguauaucaa

SEQ ID NO: 1494992 - RNA, 19 nt, Artificial Sequence
  Description of Artificial Sequence: Synthetic oligonucleotide
  Sense strand starting at position 2683 of SEQ ID NO: 1244520
auauacauguggguuucua

SEQ ID NO: 1494993 - RNA, 19 nt, Artificial Sequence
  Description of Artificial Sequence: Synthetic oligonucleotide
  Antisense strand to SEQ ID NO: 1494992
uagaaacccacauguauau

SEQ ID NO: 1494994 - RNA, 19 nt, Artificial Sequence
  Description of Artificial Sequence: Synthetic oligonucleotide
  Sense strand starting at position 2687 of SEQ ID NO: 1244520
acauguggguuucuaguuu

SEQ ID NO: 1494995 - RNA, 19 nt, Artificial Sequence
  Description of Artificial Sequence: Synthetic oligonucleotide
  Antisense strand to SEQ ID NO: 1494994
aaacuagaaacccacaugu

SEQ ID NO: 1494996 - RNA, 19 nt, Artificial Sequence
  Description of Artificial Sequence: Synthetic oligonucleotide
  Sense strand starting at position 2724 of SEQ ID NO: 1244520
cuguaaacauuccuguaag

SEQ ID NO: 1494997 - RNA, 19 nt, Artificial Sequence
  Description of Artificial Sequence: Synthetic oligonucleotide
  Antisense strand to SEQ ID NO: 1494996
cuuacaggaauguuuacag

SEQ ID NO: 1494998 - RNA, 19 nt, Artificial Sequence
  Description of Artificial Sequence: Synthetic oligonucleotide
  Sense strand starting at position 2736 of SEQ ID NO: 1244520
cuguaaguuugcguggaua

SEQ ID NO: 1494999 - RNA, 19 nt, Artificial Sequence
  Description of Artificial Sequence: Synthetic oligonucleotide
  Antisense strand to SEQ ID NO: 1494998
uauccacgcaaacuuacag

SEQ ID NO: 1495000 - RNA, 19 nt, Artificial Sequence
  Description of Artificial Sequence: Synthetic oligonucleotide
  Sense strand starting at position 2738 of SEQ ID NO: 1244520
guaaguuugcguggauagu

SEQ ID NO: 1495001 - RNA, 19 nt, Artificial Sequence
  Description of Artificial Sequence: Synthetic oligonucleotide
  Antisense strand to SEQ ID NO: 1495000
acuauccacgcaaacuuac

SEQ ID NO: 1495002 - RNA, 19 nt, Artificial Sequence
  Description of Artificial Sequence: Synthetic oligonucleotide
  Sense strand starting at position 2739 of SEQ ID NO: 1244520
uaaguuugcguggauaguu

SEQ ID NO: 1495003 - RNA, 19 nt, Artificial Sequence
  Description of Artificial Sequence: Synthetic oligonucleotide
  Antisense strand to SEQ ID NO: 1495002
aacuauccacgcaaacuua

SEQ ID NO: 1495004 - RNA, 19 nt, Artificial Sequence
  Description of Artificial Sequence: Synthetic oligonucleotide
  Sense strand starting at position 2758 of SEQ ID NO: 1244520
uuccuuuaucuuggguaac

SEQ ID NO: 1495005 - RNA, 19 nt, Artificial Sequence
  Description of Artificial Sequence: Synthetic oligonucleotide
  Antisense strand to SEQ ID NO: 1495004
guuacccaagauaaaggaa

SEQ ID NO: 1495006 - RNA, 19 nt, Artificial Sequence
  Description of Artificial Sequence: Synthetic oligonucleotide
  Sense strand starting at position 2760 of SEQ ID NO: 1244520
ccuuuaucuuggguaacua

SEQ ID NO: 1495007 - RNA, 19 nt, Artificial Sequence
  Description of Artificial Sequence: Synthetic oligonucleotide
  Antisense strand to SEQ ID NO: 1495006
uaguuacccaagauaaagg

SEQ ID NO: 1495008 - RNA, 19 nt, Artificial Sequence
  Description of Artificial Sequence: Synthetic oligonucleotide
  Sense strand starting at position 2782 of SEQ ID NO: 1244520
aguggaguuguucgaucau

SEQ ID NO: 1495009 - RNA, 19 nt, Artificial Sequence
  Description of Artificial Sequence: Synthetic oligonucleotide
  Antisense strand to SEQ ID NO: 1495008
augaucgaacaacuccacu

SEQ ID NO: 1495010 - RNA, 19 nt, Artificial Sequence
  Description of Artificial Sequence: Synthetic oligonucleotide
  Sense strand starting at position 2880 of SEQ ID NO: 1244520
aguguauggugguuccagu

SEQ ID NO: 1495011 - RNA, 19 nt, Artificial Sequence
  Description of Artificial Sequence: Synthetic oligonucleotide
  Antisense strand to SEQ ID NO: 1495010
acuggaaccaccauacacu

SEQ ID NO: 1495012 - RNA, 19 nt, Artificial Sequence
  Description of Artificial Sequence: Synthetic oligonucleotide
  Sense strand starting at position 2887 of SEQ ID NO: 1244520
ggugguuccaguuauucca

SEQ ID NO: 1495013 - RNA, 19 nt, Artificial Sequence
  Description of Artificial Sequence: Synthetic oligonucleotide
  Antisense strand to SEQ ID NO: 1495012
uggaauaacuggaaccacc

SEQ ID NO: 1495014 - RNA, 19 nt, Artificial Sequence
  Description of Artificial Sequence: Synthetic oligonucleotide
  Sense strand starting at position 2894 of SEQ ID NO: 1244520
ccaguuauuccauggcaug

SEQ ID NO: 1495015 - RNA, 19 nt, Artificial Sequence
  Description of Artificial Sequence: Synthetic oligonucleotide
  Antisense strand to SEQ ID NO: 1495014
caugccauggaauaacugg

SEQ ID NO: 1495016 - RNA, 19 nt, Artificial Sequence
  Description of Artificial Sequence: Synthetic oligonucleotide
  Sense strand starting at position 2932 of SEQ ID NO: 1244520
agucuuuagcguuggccau

SEQ ID NO: 1495017 - RNA, 19 nt, Artificial Sequence
  Description of Artificial Sequence: Synthetic oligonucleotide
  Antisense strand to SEQ ID NO: 1495016
auggccaacgcuaaagacu

SEQ ID NO: 1495018 - RNA, 19 nt, Artificial Sequence
  Description of Artificial Sequence: Synthetic oligonucleotide
  Sense strand starting at position 2936 of SEQ ID NO: 1244520
uuuagcguuggccauuuaa

SEQ ID NO: 1495019 - RNA, 19 nt, Artificial Sequence
  Description of Artificial Sequence: Synthetic oligonucleotide
  Antisense strand to SEQ ID NO: 1495018
uuaaauggccaacgcuaaa

SEQ ID NO: 1495020 - RNA, 19 nt, Artificial Sequence
  Description of Artificial Sequence: Synthetic oligonucleotide
  Sense strand starting at position 2956 of SEQ ID NO: 1244520
ggguguugugggcacauca

SEQ ID NO: 1495021 - RNA, 19 nt, Artificial Sequence
  Description of Artificial Sequence: Synthetic oligonucleotide
  Antisense strand to SEQ ID NO: 1495020
ugaugugcccacaacaccc

SEQ ID NO: 1495022 - RNA, 19 nt, Artificial Sequence
  Description of Artificial Sequence: Synthetic oligonucleotide
  Sense strand starting at position 2963 of SEQ ID NO: 1244520
gugggcacaucauugcaau

SEQ ID NO: 1495023 - RNA, 19 nt, Artificial Sequence
  Description of Artificial Sequence: Synthetic oligonucleotide
  Antisense strand to SEQ ID NO: 1495022
auugcaaugaugugcccac

SEQ ID NO: 1495024 - RNA, 19 nt, Artificial Sequence
  Description of Artificial Sequence: Synthetic oligonucleotide
  Sense strand starting at position 2964 of SEQ ID NO: 1244520
ugggcacaucauugcaauu

SEQ ID NO: 1495025 - RNA, 19 nt, Artificial Sequence
  Description of Artificial Sequence: Synthetic oligonucleotide
  Antisense strand to SEQ ID NO: 1495024
aauugcaaugaugugccca

SEQ ID NO: 1495026 - RNA, 19 nt, Artificial Sequence
  Description of Artificial Sequence: Synthetic oligonucleotide
  Sense strand starting at position 2987 of SEQ ID NO: 1244520
uugcauuugucuggagauc

SEQ ID NO: 1495027 - RNA, 19 nt, Artificial Sequence
  Description of Artificial Sequence: Synthetic oligonucleotide
  Antisense strand to SEQ ID NO: 1495026
gaucuccagacaaaugcaa

SEQ ID NO: 1495028 - RNA, 19 nt, Artificial Sequence
  Description of Artificial Sequence: Synthetic oligonucleotide
  Sense strand starting at position 2999 of SEQ ID NO: 1244520
ggagaucaaugauauugac

SEQ ID NO: 1495029 - RNA, 19 nt, Artificial Sequence
  Description of Artificial Sequence: Synthetic oligonucleotide
  Antisense strand to SEQ ID NO: 1495028
gucaauaucauugaucucc

SEQ ID NO: 1495030 - RNA, 19 nt, Artificial Sequence
  Description of Artificial Sequence: Synthetic oligonucleotide
  Sense strand starting at position 3979 of SEQ ID NO: 1244520
aaccuauagugauggaaau

SEQ ID NO: 1495031 - RNA, 19 nt, Artificial Sequence
  Description of Artificial Sequence: Synthetic oligonucleotide
  Antisense strand to SEQ ID NO: 1495030
auuuccaucacuauagguu

SEQ ID NO: 1495032 - RNA, 19 nt, Artificial Sequence
  Description of Artificial Sequence: Synthetic oligonucleotide
  Sense strand starting at position 3980 of SEQ ID NO: 1244520
accuauagugauggaaauc

SEQ ID NO: 1495033 - RNA, 19 nt, Artificial Sequence
  Description of Artificial Sequence: Synthetic oligonucleotide
  Antisense strand to SEQ ID NO: 1495032
gauuuccaucacuauaggu

SEQ ID NO: 1495034 - RNA, 19 nt, Artificial Sequence
  Description of Artificial Sequence: Synthetic oligonucleotide
  Sense strand starting at position 87 of SEQ ID NO: 1244521
uucucagugcccuaaauga

SEQ ID NO: 1495035 - RNA, 19 nt, Artificial Sequence
  Description of Artificial Sequence: Synthetic oligonucleotide
  Antisense strand to SEQ ID NO: 1495034
ucauuuagggcacugagaa

SEQ ID NO: 1495036 - RNA, 19 nt, Artificial Sequence
  Description of Artificial Sequence: Synthetic oligonucleotide
  Sense strand starting at position 235 of SEQ ID NO: 1244521
ccucgaagucagcgaggau

SEQ ID NO: 1495037 - RNA, 19 nt, Artificial Sequence
  Description of Artificial Sequence: Synthetic oligonucleotide
  Antisense strand to SEQ ID NO: 1495036
auccucgcugacuucgagg

SEQ ID NO: 1495038 - RNA, 19 nt, Artificial Sequence
  Description of Artificial Sequence: Synthetic oligonucleotide
  Sense strand starting at position 355 of SEQ ID NO: 1244521
acagaacuguacugugcau

SEQ ID NO: 1495039 - RNA, 19 nt, Artificial Sequence
  Description of Artificial Sequence: Synthetic oligonucleotide
  Antisense strand to SEQ ID NO: 1495038
augcacaguacaguucugu

SEQ ID NO: 1495040 - RNA, 19 nt, Artificial Sequence
  Description of Artificial Sequence: Synthetic oligonucleotide
  Sense strand starting at position 584 of SEQ ID NO: 1244521
aggcuauggcugugcagaa

SEQ ID NO: 1495041 - RNA, 19 nt, Artificial Sequence
  Description of Artificial Sequence: Synthetic oligonucleotide
  Antisense strand to SEQ ID NO: 1495040
uucugcacagccauagccu

SEQ ID NO: 1495042 - RNA, 19 nt, Artificial Sequence
  Description of Artificial Sequence: Synthetic oligonucleotide
  Sense strand starting at position 676 of SEQ ID NO: 1244521
ccaccaguauuaucagauc

SEQ ID NO: 1495043 - RNA, 19 nt, Artificial Sequence
  Description of Artificial Sequence: Synthetic oligonucleotide
  Antisense strand to SEQ ID NO: 1495042
gaucugauaauacuggugg

SEQ ID NO: 1495044 - RNA, 19 nt, Artificial Sequence
  Description of Artificial Sequence: Synthetic oligonucleotide
  Sense strand starting at position 716 of SEQ ID NO: 1244521
ugacuuucugggugccuga

SEQ ID NO: 1495045 - RNA, 19 nt, Artificial Sequence
  Description of Artificial Sequence: Synthetic oligonucleotide
  Antisense strand to SEQ ID NO: 1495044
ucaggcacccagaaaguca

SEQ ID NO: 1495046 - RNA, 19 nt, Artificial Sequence
  Description of Artificial Sequence: Synthetic oligonucleotide
  Sense strand starting at position 753 of SEQ ID NO: 1244521
ggcccaagagucugugagu

SEQ ID NO: 1495047 - RNA, 19 nt, Artificial Sequence
  Description of Artificial Sequence: Synthetic oligonucleotide
  Antisense strand to SEQ ID NO: 1495046
acucacagacucuugggcc

SEQ ID NO: 1495048 - RNA, 19 nt, Artificial Sequence
  Description of Artificial Sequence: Synthetic oligonucleotide
  Sense strand starting at position 756 of SEQ ID NO: 1244521
ccaagagucugugagugca

SEQ ID NO: 1495049 - RNA, 19 nt, Artificial Sequence
  Description of Artificial Sequence: Synthetic oligonucleotide
  Antisense strand to SEQ ID NO: 1495048
ugcacucacagacucuugg

SEQ ID NO: 1495050 - RNA, 19 nt, Artificial Sequence
  Description of Artificial Sequence: Synthetic oligonucleotide
  Sense strand starting at position 758 of SEQ ID NO: 1244521
aagagucugugagugcaga

SEQ ID NO: 1495051 - RNA, 19 nt, Artificial Sequence
  Description of Artificial Sequence: Synthetic oligonucleotide
  Antisense strand to SEQ ID NO: 1495050
ucugcacucacagacucuu

SEQ ID NO: 1495052 - RNA, 19 nt, Artificial Sequence
  Description of Artificial Sequence: Synthetic oligonucleotide
  Sense strand starting at position 759 of SEQ ID NO: 1244521
agagucugugagugcagau

SEQ ID NO: 1495053 - RNA, 19 nt, Artificial Sequence
  Description of Artificial Sequence: Synthetic oligonucleotide
  Antisense strand to SEQ ID NO: 1495052
aucugcacucacagacucu

SEQ ID NO: 1495054 - RNA, 19 nt, Artificial Sequence
  Description of Artificial Sequence: Synthetic oligonucleotide
  Sense strand starting at position 824 of SEQ ID NO: 1244521
gacugagaauccucaggug

SEQ ID NO: 1495055 - RNA, 19 nt, Artificial Sequence
  Description of Artificial Sequence: Synthetic oligonucleotide
  Antisense strand to SEQ ID NO: 1495054
caccugaggauucucaguc

SEQ ID NO: 1495056 - RNA, 19 nt, Artificial Sequence
  Description of Artificial Sequence: Synthetic oligonucleotide
  Sense strand starting at position 827 of SEQ ID NO: 1244521
ugagaauccucagguggga

SEQ ID NO: 1495057 - RNA, 19 nt, Artificial Sequence
  Description of Artificial Sequence: Synthetic oligonucleotide
  Antisense strand to SEQ ID NO: 1495056
ucccaccugaggauucuca

SEQ ID NO: 1495058 - RNA, 19 nt, Artificial Sequence
  Description of Artificial Sequence: Synthetic oligonucleotide
  Sense strand starting at position 843 of SEQ ID NO: 1244521
ggacaaggaucccaauuau

SEQ ID NO: 1495059 - RNA, 19 nt, Artificial Sequence
  Description of Artificial Sequence: Synthetic oligonucleotide
  Antisense strand to SEQ ID NO: 1495058
auaauugggauccuugucc

SEQ ID NO: 1495060 - RNA, 19 nt, Artificial Sequence
  Description of Artificial Sequence: Synthetic oligonucleotide
  Sense strand starting at position 967 of SEQ ID NO: 1244521
cgcugcuuucuagaacaug

SEQ ID NO: 1495061 - RNA, 19 nt, Artificial Sequence
  Description of Artificial Sequence: Synthetic oligonucleotide
  Antisense strand to SEQ ID NO: 1495060
cauguucuagaaagcagcg

SEQ ID NO: 1495062 - RNA, 19 nt, Artificial Sequence
  Description of Artificial Sequence: Synthetic oligonucleotide
  Sense strand starting at position 1000 of SEQ ID NO: 1244521
agcccaguggccugagauu

SEQ ID NO: 1495063 - RNA, 19 nt, Artificial Sequence
  Description of Artificial Sequence: Synthetic oligonucleotide
  Antisense strand to SEQ ID NO: 1495062
aaucucaggccacugggcu

SEQ ID NO: 1495064 - RNA, 19 nt, Artificial Sequence
  Description of Artificial Sequence: Synthetic oligonucleotide
  Sense strand starting at position 1364 of SEQ ID NO: 1244521
cucugcuuucuccgcguua

SEQ ID NO: 1495065 - RNA, 19 nt, Artificial Sequence
  Description of Artificial Sequence: Synthetic oligonucleotide
  Antisense strand to SEQ ID NO: 1495064
uaacgcggagaaagcagag

SEQ ID NO: 1495066 - RNA, 19 nt, Artificial Sequence
  Description of Artificial Sequence: Synthetic oligonucleotide
  Sense strand starting at position 1366 of SEQ ID NO: 1244521
cugcuuucuccgcguuaca

SEQ ID NO: 1495067 - RNA, 19 nt, Artificial Sequence
  Description of Artificial Sequence: Synthetic oligonucleotide
  Antisense strand to SEQ ID NO: 1495066
uguaacgcggagaaagcag

SEQ ID NO: 1495068 - RNA, 19 nt, Artificial Sequence
  Description of Artificial Sequence: Synthetic oligonucleotide
  Sense strand starting at position 2696 of SEQ ID NO: 1244521
cacugucuucucgggagca

SEQ ID NO: 1495069 - RNA, 19 nt, Artificial Sequence
  Description of Artificial Sequence: Synthetic oligonucleotide
  Antisense strand to SEQ ID NO: 1495068
ugcucccgagaagacagug

SEQ ID NO: 1495070 - RNA, 19 nt, Artificial Sequence
  Description of Artificial Sequence: Synthetic oligonucleotide
  Sense strand starting at position 3023 of SEQ ID NO: 1244521
ucuggagcuuaaucgcauu

SEQ ID NO: 1495071 - RNA, 19 nt, Artificial Sequence
  Description of Artificial Sequence: Synthetic oligonucleotide
  Antisense strand to SEQ ID NO: 1495070
aaugcgauuaagcuccaga

SEQ ID NO: 1495072 - RNA, 19 nt, Artificial Sequence
  Description of Artificial Sequence: Synthetic oligonucleotide
  Sense strand starting at position 3026 of SEQ ID NO: 1244521
ggagcuuaaucgcauugua

SEQ ID NO: 1495073 - RNA, 19 nt, Artificial Sequence
  Description of Artificial Sequence: Synthetic oligonucleotide
  Antisense strand to SEQ ID NO: 1495072
uacaaugcgauuaagcucc

SEQ ID NO: 1495074 - RNA, 19 nt, Artificial Sequence
  Description of Artificial Sequence: Synthetic oligonucleotide
  Sense strand starting at position 3029 of SEQ ID NO: 1244521
gcuuaaucgcauuguacca

SEQ ID NO: 1495075 - RNA, 19 nt, Artificial Sequence
  Description of Artificial Sequence: Synthetic oligonucleotide
  Antisense strand to SEQ ID NO: 1495074
ugguacaaugcgauuaagc

SEQ ID NO: 1495076 - RNA, 19 nt, Artificial Sequence
  Description of Artificial Sequence: Synthetic oligonucleotide
  Sense strand starting at position 3050 of SEQ ID NO: 1244521
gucaguuucuuagcuuuga

SEQ ID NO: 1495077 - RNA, 19 nt, Artificial Sequence
  Description of Artificial Sequence: Synthetic oligonucleotide
  Antisense strand to SEQ ID NO: 1495076
ucaaagcuaagaaacugac

SEQ ID NO: 1495078 - RNA, 19 nt, Artificial Sequence
  Description of Artificial Sequence: Synthetic oligonucleotide
  Sense strand starting at position 3118 of SEQ ID NO: 1244521
guaaauggaucucucuguu

SEQ ID NO: 1495079 - RNA, 19 nt, Artificial Sequence
  Description of Artificial Sequence: Synthetic oligonucleotide
  Antisense strand to SEQ ID NO: 1495078
aacagagagauccauuuac

SEQ ID NO: 1495080 - RNA, 19 nt, Artificial Sequence
  Description of Artificial Sequence: Synthetic oligonucleotide
  Sense strand starting at position 3128 of SEQ ID NO: 1244521
cucucuguucuauauucga

SEQ ID NO: 1495081 - RNA, 19 nt, Artificial Sequence
  Description of Artificial Sequence: Synthetic oligonucleotide
  Antisense strand to SEQ ID NO: 1495080
ucgaauauagaacagagag

SEQ ID NO: 1495082 - RNA, 19 nt, Artificial Sequence
  Description of Artificial Sequence: Synthetic oligonucleotide
  Sense strand starting at position 3131 of SEQ ID NO: 1244521
ucuguucuauauucgaaac

SEQ ID NO: 1495083 - RNA, 19 nt, Artificial Sequence
  Description of Artificial Sequence: Synthetic oligonucleotide
  Antisense strand to SEQ ID NO: 1495082
guuucgaauauagaacaga

SEQ ID NO: 1495084 - RNA, 19 nt, Artificial Sequence
  Description of Artificial Sequence: Synthetic oligonucleotide
  Sense strand starting at position 3133 of SEQ ID NO: 1244521
uguucuauauucgaaacuu

SEQ ID NO: 1495085 - RNA, 19 nt, Artificial Sequence
  Description of Artificial Sequence: Synthetic oligonucleotide
  Antisense strand to SEQ ID NO: 1495084
aaguuucgaauauagaaca

SEQ ID NO: 1495086 - RNA, 19 nt, Artificial Sequence
  Description of Artificial Sequence: Synthetic oligonucleotide
  Sense strand starting at position 3280 of SEQ ID NO: 1244521
ggcguaugugccuagaaca

SEQ ID NO: 1495087 - RNA, 19 nt, Artificial Sequence
  Description of Artificial Sequence: Synthetic oligonucleotide
  Antisense strand to SEQ ID NO: 1495086
uguucuaggcacauacgcc

SEQ ID NO: 1495088 - RNA, 19 nt, Artificial Sequence
  Description of Artificial Sequence: Synthetic oligonucleotide
  Sense strand starting at position 3448 of SEQ ID NO: 1244521
acagcuugaguucgggaau

SEQ ID NO: 1495089 - RNA, 19 nt, Artificial Sequence
  Description of Artificial Sequence: Synthetic oligonucleotide
  Antisense strand to SEQ ID NO: 1495088
auucccgaacucaagcugu

SEQ ID NO: 1495090 - RNA, 19 nt, Artificial Sequence
  Description of Artificial Sequence: Synthetic oligonucleotide
  Sense strand starting at position 3585 of SEQ ID NO: 1244521
gcuugagcucuggagacua

SEQ ID NO: 1495091 - RNA, 19 nt, Artificial Sequence
  Description of Artificial Sequence: Synthetic oligonucleotide
  Antisense strand to SEQ ID NO: 1495090
uagucuccagagcucaagc

SEQ ID NO: 1495092 - RNA, 19 nt, Artificial Sequence
  Description of Artificial Sequence: Synthetic oligonucleotide
  Sense strand starting at position 3869 of SEQ ID NO: 1244521
gagugauggaugugugcuu

SEQ ID NO: 1495093 - RNA, 19 nt, Artificial Sequence
  Description of Artificial Sequence: Synthetic oligonucleotide
  Antisense strand to SEQ ID NO: 1495092
aagcacacauccaucacuc

SEQ ID NO: 1495094 - RNA, 19 nt, Artificial Sequence
  Description of Artificial Sequence: Synthetic oligonucleotide
  Sense strand starting at position 3870 of SEQ ID NO: 1244521
agugauggaugugugcuua

SEQ ID NO: 1495095 - RNA, 19 nt, Artificial Sequence
  Description of Artificial Sequence: Synthetic oligonucleotide
  Antisense strand to SEQ ID NO: 1495094
uaagcacacauccaucacu

SEQ ID NO: 1495096 - RNA, 19 nt, Artificial Sequence
  Description of Artificial Sequence: Synthetic oligonucleotide
  Sense strand starting at position 3926 of SEQ ID NO: 1244521
ugucaaauuguauggugua

SEQ ID NO: 1495097 - RNA, 19 nt, Artificial Sequence
  Description of Artificial Sequence: Synthetic oligonucleotide
  Antisense strand to SEQ ID NO: 1495096
uacaccauacaauuugaca

SEQ ID NO: 1495098 - RNA, 19 nt, Artificial Sequence
  Description of Artificial Sequence: Synthetic oligonucleotide
  Sense strand starting at position 3927 of SEQ ID NO: 1244521
gucaaauuguaugguguaa

SEQ ID NO: 1495099 - RNA, 19 nt, Artificial Sequence
  Description of Artificial Sequence: Synthetic oligonucleotide
  Antisense strand to SEQ ID NO: 1495098
uuacaccauacaauuugac

SEQ ID NO: 1495100 - RNA, 19 nt, Artificial Sequence
  Description of Artificial Sequence: Synthetic oligonucleotide
  Sense strand starting at position 3929 of SEQ ID NO: 1244521
caaauuguaugguguaaau

SEQ ID NO: 1495101 - RNA, 19 nt, Artificial Sequence
  Description of Artificial Sequence: Synthetic oligonucleotide
  Antisense strand to SEQ ID NO: 1495100
auuuacaccauacaauuug

SEQ ID NO: 1495102 - RNA, 19 nt, Artificial Sequence
  Description of Artificial Sequence: Synthetic oligonucleotide
  Sense strand starting at position 3954 of SEQ ID NO: 1244521
aaauguaugucagugauua

SEQ ID NO: 1495103 - RNA, 19 nt, Artificial Sequence
  Description of Artificial Sequence: Synthetic oligonucleotide
  Antisense strand to SEQ ID NO: 1495102
uaaucacugacauacauuu

SEQ ID NO: 1495104 - RNA, 19 nt, Artificial Sequence
  Description of Artificial Sequence: Synthetic oligonucleotide
  Sense strand starting at position 3955 of SEQ ID NO: 1244521
aauguaugucagugauuau

SEQ ID NO: 1495105 - RNA, 19 nt, Artificial Sequence
  Description of Artificial Sequence: Synthetic oligonucleotide
  Antisense strand to SEQ ID NO: 1495104
auaaucacugacauacauu

SEQ ID NO: 1495106 - RNA, 19 nt, Artificial Sequence
  Description of Artificial Sequence: Synthetic oligonucleotide
  Sense strand starting at position 3956 of SEQ ID NO: 1244521
auguaugucagugauuaug

SEQ ID NO: 1495107 - RNA, 19 nt, Artificial Sequence
  Description of Artificial Sequence: Synthetic oligonucleotide
  Antisense strand to SEQ ID NO: 1495106
cauaaucacugacauacau

SEQ ID NO: 1495108 - RNA, 19 nt, Artificial Sequence
  Description of Artificial Sequence: Synthetic oligonucleotide
  Sense strand starting at position 3958 of SEQ ID NO: 1244521
guaugucagugauuauguc

SEQ ID NO: 1495109 - RNA, 19 nt, Artificial Sequence
  Description of Artificial Sequence: Synthetic oligonucleotide
  Antisense strand to SEQ ID NO: 1495108
gacauaaucacugacauac

SEQ ID NO: 1495110 - RNA, 19 nt, Artificial Sequence
  Description of Artificial Sequence: Synthetic oligonucleotide
  Sense strand starting at position 3959 of SEQ ID NO: 1244521
uaugucagugauuauguca

SEQ ID NO: 1495111 - RNA, 19 nt, Artificial Sequence
  Description of Artificial Sequence: Synthetic oligonucleotide
  Antisense strand to SEQ ID NO: 1495110
ugacauaaucacugacaua

SEQ ID NO: 1495112 - RNA, 19 nt, Artificial Sequence
  Description of Artificial Sequence: Synthetic oligonucleotide
  Sense strand starting at position 3962 of SEQ ID NO: 1244521
gucagugauuaugucaaua

SEQ ID NO: 1495113 - RNA, 19 nt, Artificial Sequence
  Description of Artificial Sequence: Synthetic oligonucleotide
  Antisense strand to SEQ ID NO: 1495112
uauugacauaaucacugac

SEQ ID NO: 1495114 - RNA, 19 nt, Artificial Sequence
  Description of Artificial Sequence: Synthetic oligonucleotide
  Sense strand starting at position 289 of SEQ ID NO: 1244522
gaggcaauggccugguaaa

SEQ ID NO: 1495115 - RNA, 19 nt, Artificial Sequence
  Description of Artificial Sequence: Synthetic oligonucleotide
  Antisense strand to SEQ ID NO: 1495114
uuuaccaggccauugccuc

SEQ ID NO: 1495116 - RNA, 19 nt, Artificial Sequence
  Description of Artificial Sequence: Synthetic oligonucleotide
  Sense strand starting at position 290 of SEQ ID NO: 1244522
aggcaauggccugguaaag

SEQ ID NO: 1495117 - RNA, 19 nt, Artificial Sequence
  Description of Artificial Sequence: Synthetic oligonucleotide
  Antisense strand to SEQ ID NO: 1495116
cuuuaccaggccauugccu

SEQ ID NO: 1495118 - RNA, 19 nt, Artificial Sequence
  Description of Artificial Sequence: Synthetic oligonucleotide
  Sense strand starting at position 825 of SEQ ID NO: 1244522
uccugaguggcaggguaau

SEQ ID NO: 1495119 - RNA, 19 nt, Artificial Sequence
  Description of Artificial Sequence: Synthetic oligonucleotide
  Antisense strand to SEQ ID NO: 1495118
auuacccugccacucagga

SEQ ID NO: 1495120 - RNA, 19 nt, Artificial Sequence
  Description of Artificial Sequence: Synthetic oligonucleotide
  Sense strand starting at position 1321 of SEQ ID NO: 1244522
ccgguuacagcgagaguga

SEQ ID NO: 1495121 - RNA, 19 nt, Artificial Sequence
  Description of Artificial Sequence: Synthetic oligonucleotide
  Antisense strand to SEQ ID NO: 1495120
ucacucucgcuguaaccgg

SEQ ID NO: 1495122 - RNA, 19 nt, Artificial Sequence
  Description of Artificial Sequence: Synthetic oligonucleotide
  Sense strand starting at position 1322 of SEQ ID NO: 1244522
cgguuacagcgagagugau

SEQ ID NO: 1495123 - RNA, 19 nt, Artificial Sequence
  Description of Artificial Sequence: Synthetic oligonucleotide
  Antisense strand to SEQ ID NO: 1495122
aucacucucgcuguaaccg

SEQ ID NO: 1495124 - RNA, 19 nt, Artificial Sequence
  Description of Artificial Sequence: Synthetic oligonucleotide
  Sense strand starting at position 1334 of SEQ ID NO: 1244522
gagugauugagacgaggcu

SEQ ID NO: 1495125 - RNA, 19 nt, Artificial Sequence
  Description of Artificial Sequence: Synthetic oligonucleotide
  Antisense strand to SEQ ID NO: 1495124
agccucgucucaaucacuc

SEQ ID NO: 1495126 - RNA, 19 nt, Artificial Sequence
  Description of Artificial Sequence: Synthetic oligonucleotide
  Sense strand starting at position 1803 of SEQ ID NO: 1244522
ggaaguaguguccguugga

SEQ ID NO: 1495127 - RNA, 19 nt, Artificial Sequence
  Description of Artificial Sequence: Synthetic oligonucleotide
  Antisense strand to SEQ ID NO: 1495126
uccaacggacacuacuucc

SEQ ID NO: 1495128 - RNA, 19 nt, Artificial Sequence
  Description of Artificial Sequence: Synthetic oligonucleotide
  Sense strand starting at position 1804 of SEQ ID NO: 1244522
gaaguaguguccguuggag

SEQ ID NO: 1495129 - RNA, 19 nt, Artificial Sequence
  Description of Artificial Sequence: Synthetic oligonucleotide
  Antisense strand to SEQ ID NO: 1495128
cuccaacggacacuacuuc

SEQ ID NO: 1495130 - RNA, 19 nt, Artificial Sequence
  Description of Artificial Sequence: Synthetic oligonucleotide
  Sense strand starting at position 2089 of SEQ ID NO: 1244522
acagucuccucuguccaau

SEQ ID NO: 1495131 - RNA, 19 nt, Artificial Sequence
  Description of Artificial Sequence: Synthetic oligonucleotide
  Antisense strand to SEQ ID NO: 1495130
auuggacagaggagacugu

SEQ ID NO: 1495132 - RNA, 19 nt, Artificial Sequence
  Description of Artificial Sequence: Synthetic oligonucleotide
  Sense strand starting at position 2408 of SEQ ID NO: 1244522
gucucagggucccugagaa

SEQ ID NO: 1495133 - RNA, 19 nt, Artificial Sequence
  Description of Artificial Sequence: Synthetic oligonucleotide
  Antisense strand to SEQ ID NO: 1495132
uucucagggacccugagac

SEQ ID NO: 1495134 - RNA, 19 nt, Artificial Sequence
  Description of Artificial Sequence: Synthetic oligonucleotide
  Sense strand starting at position 2522 of SEQ ID NO: 1244522
uccaguuucucggucugau

SEQ ID NO: 1495135 - RNA, 19 nt, Artificial Sequence
  Description of Artificial Sequence: Synthetic oligonucleotide
  Antisense strand to SEQ ID NO: 1495134
aucagaccgagaaacugga

SEQ ID NO: 1495136 - RNA, 19 nt, Artificial Sequence
  Description of Artificial Sequence: Synthetic oligonucleotide
  Sense strand starting at position 2911 of SEQ ID NO: 1244522
cagaccuaggccggaaaua

SEQ ID NO: 1495137 - RNA, 19 nt, Artificial Sequence
  Description of Artificial Sequence: Synthetic oligonucleotide
  Antisense strand to SEQ ID NO: 1495136
uauuuccggccuaggucug

SEQ ID NO: 1495138 - RNA, 19 nt, Artificial Sequence
  Description of Artificial Sequence: Synthetic oligonucleotide
  Sense strand starting at position 2971 of SEQ ID NO: 1244522
gagacugacuuggauucua

SEQ ID NO: 1495139 - RNA, 19 nt, Artificial Sequence
  Description of Artificial Sequence: Synthetic oligonucleotide
  Antisense strand to SEQ ID NO: 1495138
uagaauccaagucagucuc

SEQ ID NO: 1495140 - RNA, 19 nt, Artificial Sequence
  Description of Artificial Sequence: Synthetic oligonucleotide
  Sense strand starting at position 2976 of SEQ ID NO: 1244522
ugacuuggauucuaaggaa

SEQ ID NO: 1495141 - RNA, 19 nt, Artificial Sequence
  Description of Artificial Sequence: Synthetic oligonucleotide
  Antisense strand to SEQ ID NO: 1495140
uuccuuagaauccaaguca

SEQ ID NO: 1495142 - RNA, 19 nt, Artificial Sequence
  Description of Artificial Sequence: Synthetic oligonucleotide
  Sense strand starting at position 2979 of SEQ ID NO: 1244522
cuuggauucuaaggaauuc

SEQ ID NO: 1495143 - RNA, 19 nt, Artificial Sequence
  Description of Artificial Sequence: Synthetic oligonucleotide
  Antisense strand to SEQ ID NO: 1495142
gaauuccuuagaauccaag

SEQ ID NO: 1495144 - RNA, 19 nt, Artificial Sequence
  Description of Artificial Sequence: Synthetic oligonucleotide
  Sense strand starting at position 2988 of SEQ ID NO: 1244522
uaaggaauucuguggucuc

SEQ ID NO: 1495145 - RNA, 19 nt, Artificial Sequence
  Description of Artificial Sequence: Synthetic oligonucleotide
  Antisense strand to SEQ ID NO: 1495144
gagaccacagaauuccuua

SEQ ID NO: 1495146 - RNA, 19 nt, Artificial Sequence
  Description of Artificial Sequence: Synthetic oligonucleotide
  Sense strand starting at position 2991 of SEQ ID NO: 1244522
ggaauucuguggucuccga

SEQ ID NO: 1495147 - RNA, 19 nt, Artificial Sequence
  Description of Artificial Sequence: Synthetic oligonucleotide
  Antisense strand to SEQ ID NO: 1495146
ucggagaccacagaauucc

SEQ ID NO: 1495148 - RNA, 19 nt, Artificial Sequence
  Description of Artificial Sequence: Synthetic oligonucleotide
  Sense strand starting at position 2995 of SEQ ID NO: 1244522
uucuguggucuccgaauac

SEQ ID NO: 1495149 - RNA, 19 nt, Artificial Sequence
  Description of Artificial Sequence: Synthetic oligonucleotide
  Antisense strand to SEQ ID NO: 1495148
guauucggagaccacagaa

SEQ ID NO: 1495150 - RNA, 19 nt, Artificial Sequence
  Description of Artificial Sequence: Synthetic oligonucleotide
  Sense strand starting at position 3018 of SEQ ID NO: 1244522
gaggccucuuagggcuaau

SEQ ID NO: 1495151 - RNA, 19 nt, Artificial Sequence
  Description of Artificial Sequence: Synthetic oligonucleotide
  Antisense strand to SEQ ID NO: 1495150
auuagcccuaagaggccuc

SEQ ID NO: 1495152 - RNA, 19 nt, Artificial Sequence
  Description of Artificial Sequence: Synthetic oligonucleotide
  Sense strand starting at position 3021 of SEQ ID NO: 1244522
gccucuuagggcuaauauc

SEQ ID NO: 1495153 - RNA, 19 nt, Artificial Sequence
  Description of Artificial Sequence: Synthetic oligonucleotide
  Antisense strand to SEQ ID NO: 1495152
gauauuagcccuaagaggc

SEQ ID NO: 1495154 - RNA, 19 nt, Artificial Sequence
  Description of Artificial Sequence: Synthetic oligonucleotide
  Sense strand starting at position 3135 of SEQ ID NO: 1244522
ggcgauuccagagaucuug

SEQ ID NO: 1495155 - RNA, 19 nt, Artificial Sequence
  Description of Artificial Sequence: Synthetic oligonucleotide
  Antisense strand to SEQ ID NO: 1495154
caagaucucuggaaucgcc

SEQ ID NO: 1495156 - RNA, 19 nt, Artificial Sequence
  Description of Artificial Sequence: Synthetic oligonucleotide
  Sense strand starting at position 3440 of SEQ ID NO: 1244522
gacagcuuugcugaccgau

SEQ ID NO: 1495157 - RNA, 19 nt, Artificial Sequence
  Description of Artificial Sequence: Synthetic oligonucleotide
  Antisense strand to SEQ ID NO: 1495156
aucggucagcaaagcuguc

SEQ ID NO: 1495158 - RNA, 19 nt, Artificial Sequence
  Description of Artificial Sequence: Synthetic oligonucleotide
  Sense strand starting at position 3442 of SEQ ID NO: 1244522
cagcuuugcugaccgauau

SEQ ID NO: 1495159 - RNA, 19 nt, Artificial Sequence
  Description of Artificial Sequence: Synthetic oligonucleotide
  Antisense strand to SEQ ID NO: 1495158
auaucggucagcaaagcug

SEQ ID NO: 1495160 - RNA, 19 nt, Artificial Sequence
  Description of Artificial Sequence: Synthetic oligonucleotide
  Sense strand starting at position 3443 of SEQ ID NO: 1244522
agcuuugcugaccgauauu

SEQ ID NO: 1495161 - RNA, 19 nt, Artificial Sequence
  Description of Artificial Sequence: Synthetic oligonucleotide
  Antisense strand to SEQ ID NO: 1495160
aauaucggucagcaaagcu

SEQ ID NO: 1495162 - RNA, 19 nt, Artificial Sequence
  Description of Artificial Sequence: Synthetic oligonucleotide
  Sense strand starting at position 3446 of SEQ ID NO: 1244522
uuugcugaccgauauuaaa

SEQ ID NO: 1495163 - RNA, 19 nt, Artificial Sequence
  Description of Artificial Sequence: Synthetic oligonucleotide
  Antisense strand to SEQ ID NO: 1495162
uuuaauaucggucagcaaa

SEQ ID NO: 1495164 - RNA, 19 nt, Artificial Sequence
  Description of Artificial Sequence: Synthetic oligonucleotide
  Sense strand starting at position 3454 of SEQ ID NO: 1244522
ccgauauuaaaccgcgaga

SEQ ID NO: 1495165 - RNA, 19 nt, Artificial Sequence
  Description of Artificial Sequence: Synthetic oligonucleotide
  Antisense strand to SEQ ID NO: 1495164
ucucgcgguuuaauaucgg

SEQ ID NO: 1495166 - RNA, 19 nt, Artificial Sequence
  Description of Artificial Sequence: Synthetic oligonucleotide
  Sense strand starting at position 3456 of SEQ ID NO: 1244522
gauauuaaaccgcgagaac

SEQ ID NO: 1495167 - RNA, 19 nt, Artificial Sequence
  Description of Artificial Sequence: Synthetic oligonucleotide
  Antisense strand to SEQ ID NO: 1495166
guucucgcgguuuaauauc

SEQ ID NO: 1495168 - RNA, 19 nt, Artificial Sequence
  Description of Artificial Sequence: Synthetic oligonucleotide
  Sense strand starting at position 3457 of SEQ ID NO: 1244522
auauuaaaccgcgagaacu

SEQ ID NO: 1495169 - RNA, 19 nt, Artificial Sequence
  Description of Artificial Sequence: Synthetic oligonucleotide
  Antisense strand to SEQ ID NO: 1495168
aguucucgcgguuuaauau

SEQ ID NO: 1495170 - RNA, 19 nt, Artificial Sequence
  Description of Artificial Sequence: Synthetic oligonucleotide
  Sense strand starting at position 3470 of SEQ ID NO: 1244522
agaacugucgcacgugaac

SEQ ID NO: 1495171 - RNA, 19 nt, Artificial Sequence
  Description of Artificial Sequence: Synthetic oligonucleotide
  Antisense strand to SEQ ID NO: 1495170
guucacgugcgacaguucu

SEQ ID NO: 1495172 - RNA, 19 nt, Artificial Sequence
  Description of Artificial Sequence: Synthetic oligonucleotide
  Sense strand starting at position 3491 of SEQ ID NO: 1244522
cauccugcccguugugauu

SEQ ID NO: 1495173 - RNA, 19 nt, Artificial Sequence
  Description of Artificial Sequence: Synthetic oligonucleotide
  Antisense strand to SEQ ID NO: 1495172
aaucacaacgggcaggaug

SEQ ID NO: 1495174 - RNA, 19 nt, Artificial Sequence
  Description of Artificial Sequence: Synthetic oligonucleotide
  Sense strand starting at position 3497 of SEQ ID NO: 1244522
gcccguugugauuguguaa

SEQ ID NO: 1495175 - RNA, 19 nt, Artificial Sequence
  Description of Artificial Sequence: Synthetic oligonucleotide
  Antisense strand to SEQ ID NO: 1495174
uuacacaaucacaacgggc

SEQ ID NO: 1495176 - RNA, 19 nt, Artificial Sequence
  Description of Artificial Sequence: Synthetic oligonucleotide
  Sense strand starting at position 3567 of SEQ ID NO: 1244522
ggccucucuccacaugaga

SEQ ID NO: 1495177 - RNA, 19 nt, Artificial Sequence
  Description of Artificial Sequence: Synthetic oligonucleotide
  Antisense strand to SEQ ID NO: 1495176
ucucauguggagagaggcc

SEQ ID NO: 1495178 - RNA, 19 nt, Artificial Sequence
  Description of Artificial Sequence: Synthetic oligonucleotide
  Sense strand starting at position 3586 of SEQ ID NO: 1244522
guggccuguacugagagau

SEQ ID NO: 1495179 - RNA, 19 nt, Artificial Sequence
  Description of Artificial Sequence: Synthetic oligonucleotide
  Antisense strand to SEQ ID NO: 1495178
aucucucaguacaggccac

SEQ ID NO: 1495180 - RNA, 19 nt, Artificial Sequence
  Description of Artificial Sequence: Synthetic oligonucleotide
  Sense strand starting at position 3600 of SEQ ID NO: 1244522
gagauuaccuaggaaugga

SEQ ID NO: 1495181 - RNA, 19 nt, Artificial Sequence
  Description of Artificial Sequence: Synthetic oligonucleotide
  Antisense strand to SEQ ID NO: 1495180
uccauuccuagguaaucuc

SEQ ID NO: 1495182 - RNA, 19 nt, Artificial Sequence
  Description of Artificial Sequence: Synthetic oligonucleotide
  Sense strand starting at position 3652 of SEQ ID NO: 1244522
ggcccuugccugcagagaa

SEQ ID NO: 1495183 - RNA, 19 nt, Artificial Sequence
  Description of Artificial Sequence: Synthetic oligonucleotide
  Antisense strand to SEQ ID NO: 1495182
uucucugcaggcaagggcc

SEQ ID NO: 1495184 - RNA, 19 nt, Artificial Sequence
  Description of Artificial Sequence: Synthetic oligonucleotide
  Sense strand starting at position 3712 of SEQ ID NO: 1244522
gugcauuuccucugaccca

SEQ ID NO: 1495185 - RNA, 19 nt, Artificial Sequence
  Description of Artificial Sequence: Synthetic oligonucleotide
  Antisense strand to SEQ ID NO: 1495184
ugggucagaggaaaugcac

SEQ ID NO: 1495186 - RNA, 19 nt, Artificial Sequence
  Description of Artificial Sequence: Synthetic oligonucleotide
  Sense strand starting at position 3781 of SEQ ID NO: 1244522
cgugauaacuacucuggaa

SEQ ID NO: 1495187 - RNA, 19 nt, Artificial Sequence
  Description of Artificial Sequence: Synthetic oligonucleotide
  Antisense strand to SEQ ID NO: 1495186
uuccagaguaguuaucacg

SEQ ID NO: 1495188 - RNA, 19 nt, Artificial Sequence
  Description of Artificial Sequence: Synthetic oligonucleotide
  Sense strand starting at position 3908 of SEQ ID NO: 1244522
gggauuguaaagugguuau

SEQ ID NO: 1495189 - RNA, 19 nt, Artificial Sequence
  Description of Artificial Sequence: Synthetic oligonucleotide
  Antisense strand to SEQ ID NO: 1495188
auaaccacuuuacaauccc

SEQ ID NO: 1495190 - RNA, 19 nt, Artificial Sequence
  Description of Artificial Sequence: Synthetic oligonucleotide
  Sense strand starting at position 3911 of SEQ ID NO: 1244522
auuguaaagugguuaugaa

SEQ ID NO: 1495191 - RNA, 19 nt, Artificial Sequence
  Description of Artificial Sequence: Synthetic oligonucleotide
  Antisense strand to SEQ ID NO: 1495190
uucauaaccacuuuacaau

SEQ ID NO: 1495192 - RNA, 19 nt, Artificial Sequence
  Description of Artificial Sequence: Synthetic oligonucleotide
  Sense strand starting at position 3912 of SEQ ID NO: 1244522
uuguaaagugguuaugaaa

SEQ ID NO: 1495193 - RNA, 19 nt, Artificial Sequence
  Description of Artificial Sequence: Synthetic oligonucleotide
  Antisense strand to SEQ ID NO: 1495192
uuucauaaccacuuuacaa

SEQ ID NO: 1495194 - RNA, 19 nt, Artificial Sequence
  Description of Artificial Sequence: Synthetic oligonucleotide
  Sense strand starting at position 547 of SEQ ID NO: 1244523
gggagaggcccuuacaagu

SEQ ID NO: 1495195 - RNA, 19 nt, Artificial Sequence
  Description of Artificial Sequence: Synthetic oligonucleotide
  Antisense strand to SEQ ID NO: 1495194
acuuguaagggccucuccc

SEQ ID NO: 1495196 - RNA, 19 nt, Artificial Sequence
  Description of Artificial Sequence: Synthetic oligonucleotide
  Sense strand starting at position 1040 of SEQ ID NO: 1244523
aagcaauggacgcagaguu

SEQ ID NO: 1495197 - RNA, 19 nt, Artificial Sequence
  Description of Artificial Sequence: Synthetic oligonucleotide
  Antisense strand to SEQ ID NO: 1495196
aacucugcguccauugcuu

SEQ ID NO: 1495198 - RNA, 19 nt, Artificial Sequence
  Description of Artificial Sequence: Synthetic oligonucleotide
  Sense strand starting at position 1261 of SEQ ID NO: 1244523
aguuaagacuuggaauaag

SEQ ID NO: 1495199 - RNA, 19 nt, Artificial Sequence
  Description of Artificial Sequence: Synthetic oligonucleotide
  Antisense strand to SEQ ID NO: 1495198
cuuauuccaagucuuaacu

SEQ ID NO: 1495200 - RNA, 19 nt, Artificial Sequence
  Description of Artificial Sequence: Synthetic oligonucleotide
  Sense strand starting at position 1361 of SEQ ID NO: 1244523
gagguagaauguuugggau

SEQ ID NO: 1495201 - RNA, 19 nt, Artificial Sequence
  Description of Artificial Sequence: Synthetic oligonucleotide
  Antisense strand to SEQ ID NO: 1495200
aucccaaacauucuaccuc

SEQ ID NO: 1495202 - RNA, 19 nt, Artificial Sequence
  Description of Artificial Sequence: Synthetic oligonucleotide
  Sense strand starting at position 1363 of SEQ ID NO: 1244523
gguagaauguuugggauga

SEQ ID NO: 1495203 - RNA, 19 nt, Artificial Sequence
  Description of Artificial Sequence: Synthetic oligonucleotide
  Antisense strand to SEQ ID NO: 1495202
ucaucccaaacauucuacc

SEQ ID NO: 1495204 - RNA, 19 nt, Artificial Sequence
  Description of Artificial Sequence: Synthetic oligonucleotide
  Sense strand starting at position 1364 of SEQ ID NO: 1244523
guagaauguuugggaugag

SEQ ID NO: 1495205 - RNA, 19 nt, Artificial Sequence
  Description of Artificial Sequence: Synthetic oligonucleotide
  Antisense strand to SEQ ID NO: 1495204
cucaucccaaacauucuac

SEQ ID NO: 1495206 - RNA, 19 nt, Artificial Sequence
  Description of Artificial Sequence: Synthetic oligonucleotide
  Sense strand starting at position 1367 of SEQ ID NO: 1244523
gaauguuugggaugagcag

SEQ ID NO: 1495207 - RNA, 19 nt, Artificial Sequence
  Description of Artificial Sequence: Synthetic oligonucleotide
  Antisense strand to SEQ ID NO: 1495206
cugcucaucccaaacauuc

SEQ ID NO: 1495208 - RNA, 19 nt, Artificial Sequence
  Description of Artificial Sequence: Synthetic oligonucleotide
  Sense strand starting at position 1551 of SEQ ID NO: 1244523
ggccgagaucgguguugga

SEQ ID NO: 1495209 - RNA, 19 nt, Artificial Sequence
  Description of Artificial Sequence: Synthetic oligonucleotide
  Antisense strand to SEQ ID NO: 1495208
uccaacaccgaucucggcc

SEQ ID NO: 1495210 - RNA, 19 nt, Artificial Sequence
  Description of Artificial Sequence: Synthetic oligonucleotide
  Sense strand starting at position 1554 of SEQ ID NO: 1244523
cgagaucgguguuggaacu

SEQ ID NO: 1495211 - RNA, 19 nt, Artificial Sequence
  Description of Artificial Sequence: Synthetic oligonucleotide
  Antisense strand to SEQ ID NO: 1495210
aguuccaacaccgaucucg

SEQ ID NO: 1495212 - RNA, 19 nt, Artificial Sequence
  Description of Artificial Sequence: Synthetic oligonucleotide
  Sense strand starting at position 2426 of SEQ ID NO: 1244523
cgccuugcgcuuucaggau

SEQ ID NO: 1495213 - RNA, 19 nt, Artificial Sequence
  Description of Artificial Sequence: Synthetic oligonucleotide
  Antisense strand to SEQ ID NO: 1495212
auccugaaagcgcaaggcg

SEQ ID NO: 1495214 - RNA, 19 nt, Artificial Sequence
  Description of Artificial Sequence: Synthetic oligonucleotide
  Sense strand starting at position 2501 of SEQ ID NO: 1244523
ggcacucucccguguguaa

SEQ ID NO: 1495215 - RNA, 19 nt, Artificial Sequence
  Description of Artificial Sequence: Synthetic oligonucleotide
  Antisense strand to SEQ ID NO: 1495214
uuacacacgggagagugcc

SEQ ID NO: 1495216 - RNA, 19 nt, Artificial Sequence
  Description of Artificial Sequence: Synthetic oligonucleotide
  Sense strand starting at position 3123 of SEQ ID NO: 1244523
gucucacuguguuaccuaa

SEQ ID NO: 1495217 - RNA, 19 nt, Artificial Sequence
  Description of Artificial Sequence: Synthetic oligonucleotide
  Antisense strand to SEQ ID NO: 1495216
uuagguaacacagugagac

SEQ ID NO: 1495218 - RNA, 19 nt, Artificial Sequence
  Description of Artificial Sequence: Synthetic oligonucleotide
  Sense strand starting at position 3705 of SEQ ID NO: 1244523
gggucugaguguguuuacu

SEQ ID NO: 1495219 - RNA, 19 nt, Artificial Sequence
  Description of Artificial Sequence: Synthetic oligonucleotide
  Antisense strand to SEQ ID NO: 1495218
aguaaacacacucagaccc

SEQ ID NO: 1495220 - RNA, 19 nt, Artificial Sequence
  Description of Artificial Sequence: Synthetic oligonucleotide
  Sense strand starting at position 3711 of SEQ ID NO: 1244523
gaguguguuuacugcaguu

SEQ ID NO: 1495221 - RNA, 19 nt, Artificial Sequence
  Description of Artificial Sequence: Synthetic oligonucleotide
  Antisense strand to SEQ ID NO: 1495220
aacugcaguaaacacacuc

SEQ ID NO: 1495222 - RNA, 19 nt, Artificial Sequence
  Description of Artificial Sequence: Synthetic oligonucleotide
  Sense strand starting at position 3713 of SEQ ID NO: 1244523
guguguuuacugcaguuaa

SEQ ID NO: 1495223 - RNA, 19 nt, Artificial Sequence
  Description of Artificial Sequence: Synthetic oligonucleotide
  Antisense strand to SEQ ID NO: 1495222
uuaacugcaguaaacacac

SEQ ID NO: 1495224 - RNA, 19 nt, Artificial Sequence
  Description of Artificial Sequence: Synthetic oligonucleotide
  Sense strand starting at position 3875 of SEQ ID NO: 1244523
gcauaauccuugguggcuu

SEQ ID NO: 1495225 - RNA, 19 nt, Artificial Sequence
  Description of Artificial Sequence: Synthetic oligonucleotide
  Antisense strand to SEQ ID NO: 1495224
aagccaccaaggauuaugc

SEQ ID NO: 1495226 - RNA, 19 nt, Artificial Sequence
  Description of Artificial Sequence: Synthetic oligonucleotide
  Sense strand starting at position 1 of SEQ ID NO: 1244524
gcaagacugucuggcgauc

SEQ ID NO: 1495227 - RNA, 19 nt, Artificial Sequence
  Description of Artificial Sequence: Synthetic oligonucleotide
  Antisense strand to SEQ ID NO: 1495226
gaucgccagacagucuugc

SEQ ID NO: 1495228 - RNA, 19 nt, Artificial Sequence
  Description of Artificial Sequence: Synthetic oligonucleotide
  Sense strand starting at position 19 of SEQ ID NO: 1244524
cggcauccuggauggagaa

SEQ ID NO: 1495229 - RNA, 19 nt, Artificial Sequence
  Description of Artificial Sequence: Synthetic oligonucleotide
  Antisense strand to SEQ ID NO: 1495228
uucuccauccaggaugccg

SEQ ID NO: 1495230 - RNA, 19 nt, Artificial Sequence
  Description of Artificial Sequence: Synthetic oligonucleotide
  Sense strand starting at position 99 of SEQ ID NO: 1244524
uguacuuccaucugggagu

SEQ ID NO: 1495231 - RNA, 19 nt, Artificial Sequence
  Description of Artificial Sequence: Synthetic oligonucleotide
  Antisense strand to SEQ ID NO: 1495230
acucccagauggaaguaca

SEQ ID NO: 1495232 - RNA, 19 nt, Artificial Sequence
  Description of Artificial Sequence: Synthetic oligonucleotide
  Sense strand starting at position 156 of SEQ ID NO: 1244524
gcucuaucaucugucuauu

SEQ ID NO: 1495233 - RNA, 19 nt, Artificial Sequence
  Description of Artificial Sequence: Synthetic oligonucleotide
  Antisense strand to SEQ ID NO: 1495232
aauagacagaugauagagc

SEQ ID NO: 1495234 - RNA, 19 nt, Artificial Sequence
  Description of Artificial Sequence: Synthetic oligonucleotide
  Sense strand starting at position 234 of SEQ ID NO: 1244524
ucagguggaccucaucauu

SEQ ID NO: 1495235 - RNA, 19 nt, Artificial Sequence
  Description of Artificial Sequence: Synthetic oligonucleotide
  Antisense strand to SEQ ID NO: 1495234
aaugaugagguccaccuga

SEQ ID NO: 1495236 - RNA, 19 nt, Artificial Sequence
  Description of Artificial Sequence: Synthetic oligonucleotide
  Sense strand starting at position 632 of SEQ ID NO: 1244524
cgcucagccuucuggugaa

SEQ ID NO: 1495237 - RNA, 19 nt, Artificial Sequence
  Description of Artificial Sequence: Synthetic oligonucleotide
  Antisense strand to SEQ ID NO: 1495236
uucaccagaaggcugagcg

SEQ ID NO: 1495238 - RNA, 19 nt, Artificial Sequence
  Description of Artificial Sequence: Synthetic oligonucleotide
  Sense strand starting at position 635 of SEQ ID NO: 1244524
ucagccuucuggugaauca

SEQ ID NO: 1495239 - RNA, 19 nt, Artificial Sequence
  Description of Artificial Sequence: Synthetic oligonucleotide
  Antisense strand to SEQ ID NO: 1495238
ugauucaccagaaggcuga

SEQ ID NO: 1495240 - RNA, 19 nt, Artificial Sequence
  Description of Artificial Sequence: Synthetic oligonucleotide
  Sense strand starting at position 657 of SEQ ID NO: 1244524
ucugaucaaucuggaaaga

SEQ ID NO: 1495241 - RNA, 19 nt, Artificial Sequence
  Description of Artificial Sequence: Synthetic oligonucleotide
  Antisense strand to SEQ ID NO: 1495240
ucuuuccagauugaucaga

SEQ ID NO: 1495242 - RNA, 19 nt, Artificial Sequence
  Description of Artificial Sequence: Synthetic oligonucleotide
  Sense strand starting at position 763 of SEQ ID NO: 1244524
ccaggaauucgaggccaga

SEQ ID NO: 1495243 - RNA, 19 nt, Artificial Sequence
  Description of Artificial Sequence: Synthetic oligonucleotide
  Antisense strand to SEQ ID NO: 1495242
ucuggccucgaauuccugg

SEQ ID NO: 1495244 - RNA, 19 nt, Artificial Sequence
  Description of Artificial Sequence: Synthetic oligonucleotide
  Sense strand starting at position 983 of SEQ ID NO: 1244524
gggcaaguagccuguaaag

SEQ ID NO: 1495245 - RNA, 19 nt, Artificial Sequence
  Description of Artificial Sequence: Synthetic oligonucleotide
  Antisense strand to SEQ ID NO: 1495244
cuuuacaggcuacuugccc

SEQ ID NO: 1495246 - RNA, 19 nt, Artificial Sequence
  Description of Artificial Sequence: Synthetic oligonucleotide
  Sense strand starting at position 1175 of SEQ ID NO: 1244524
gagcacauuccgggaggau

SEQ ID NO: 1495247 - RNA, 19 nt, Artificial Sequence
  Description of Artificial Sequence: Synthetic oligonucleotide
  Antisense strand to SEQ ID NO: 1495246
auccucccggaaugugcuc

SEQ ID NO: 1495248 - RNA, 19 nt, Artificial Sequence
  Description of Artificial Sequence: Synthetic oligonucleotide
  Sense strand starting at position 1184 of SEQ ID NO: 1244524
ccgggaggauguguucaaa

SEQ ID NO: 1495249 - RNA, 19 nt, Artificial Sequence
  Description of Artificial Sequence: Synthetic oligonucleotide
  Antisense strand to SEQ ID NO: 1495248
uuugaacacauccucccgg

SEQ ID NO: 1495250 - RNA, 19 nt, Artificial Sequence
  Description of Artificial Sequence: Synthetic oligonucleotide
  Sense strand starting at position 1325 of SEQ ID NO: 1244524
ggaggcaaacucggagaua

SEQ ID NO: 1495251 - RNA, 19 nt, Artificial Sequence
  Description of Artificial Sequence: Synthetic oligonucleotide
  Antisense strand to SEQ ID NO: 1495250
uaucuccgaguuugccucc

SEQ ID NO: 1495252 - RNA, 19 nt, Artificial Sequence
  Description of Artificial Sequence: Synthetic oligonucleotide
  Sense strand starting at position 1866 of SEQ ID NO: 1244524
ugcagaugcccagagagua

SEQ ID NO: 1495253 - RNA, 19 nt, Artificial Sequence
  Description of Artificial Sequence: Synthetic oligonucleotide
  Antisense strand to SEQ ID NO: 1495252
uacucucugggcaucugca

SEQ ID NO: 1495254 - RNA, 19 nt, Artificial Sequence
  Description of Artificial Sequence: Synthetic oligonucleotide
  Sense strand starting at position 2288 of SEQ ID NO: 1244524
cgagaugagugucuucgac

SEQ ID NO: 1495255 - RNA, 19 nt, Artificial Sequence
  Description of Artificial Sequence: Synthetic oligonucleotide
  Antisense strand to SEQ ID NO: 1495254
gucgaagacacucaucucg

SEQ ID NO: 1495256 - RNA, 19 nt, Artificial Sequence
  Description of Artificial Sequence: Synthetic oligonucleotide
  Sense strand starting at position 2290 of SEQ ID NO: 1244524
agaugagugucuucgacug

SEQ ID NO: 1495257 - RNA, 19 nt, Artificial Sequence
  Description of Artificial Sequence: Synthetic oligonucleotide
  Antisense strand to SEQ ID NO: 1495256
cagucgaagacacucaucu

SEQ ID NO: 1495258 - RNA, 19 nt, Artificial Sequence
  Description of Artificial Sequence: Synthetic oligonucleotide
  Sense strand starting at position 2292 of SEQ ID NO: 1244524
augagugucuucgacugga

SEQ ID NO: 1495259 - RNA, 19 nt, Artificial Sequence
  Description of Artificial Sequence: Synthetic oligonucleotide
  Antisense strand to SEQ ID NO: 1495258
uccagucgaagacacucau

SEQ ID NO: 1495260 - RNA, 19 nt, Artificial Sequence
  Description of Artificial Sequence: Synthetic oligonucleotide
  Sense strand starting at position 2354 of SEQ ID NO: 1244524
uggcgcaagagaugaguuu

SEQ ID NO: 1495261 - RNA, 19 nt, Artificial Sequence
  Description of Artificial Sequence: Synthetic oligonucleotide
  Antisense strand to SEQ ID NO: 1495260
aaacucaucucuugcgcca

SEQ ID NO: 1495262 - RNA, 19 nt, Artificial Sequence
  Description of Artificial Sequence: Synthetic oligonucleotide
  Sense strand starting at position 2355 of SEQ ID NO: 1244524
ggcgcaagagaugaguuua

SEQ ID NO: 1495263 - RNA, 19 nt, Artificial Sequence
  Description of Artificial Sequence: Synthetic oligonucleotide
  Antisense strand to SEQ ID NO: 1495262
uaaacucaucucuugcgcc

SEQ ID NO: 1495264 - RNA, 19 nt, Artificial Sequence
  Description of Artificial Sequence: Synthetic oligonucleotide
  Sense strand starting at position 2439 of SEQ ID NO: 1244524
cgaggaguccaccgagaca

SEQ ID NO: 1495265 - RNA, 19 nt, Artificial Sequence
  Description of Artificial Sequence: Synthetic oligonucleotide
  Antisense strand to SEQ ID NO: 1495264
ugucucgguggacuccucg

SEQ ID NO: 1495266 - RNA, 19 nt, Artificial Sequence
  Description of Artificial Sequence: Synthetic oligonucleotide
  Sense strand starting at position 2831 of SEQ ID NO: 1244524
aggcgaaggcaucaccaau

SEQ ID NO: 1495267 - RNA, 19 nt, Artificial Sequence
  Description of Artificial Sequence: Synthetic oligonucleotide
  Antisense strand to SEQ ID NO: 1495266
auuggugaugccuucgccu

SEQ ID NO: 1495268 - RNA, 19 nt, Artificial Sequence
  Description of Artificial Sequence: Synthetic oligonucleotide
  Sense strand starting at position 2843 of SEQ ID NO: 1244524
caccaauaaggcgauaguu

SEQ ID NO: 1495269 - RNA, 19 nt, Artificial Sequence
  Description of Artificial Sequence: Synthetic oligonucleotide
  Antisense strand to SEQ ID NO: 1495268
aacuaucgccuuauuggug

SEQ ID NO: 1495270 - RNA, 19 nt, Artificial Sequence
  Description of Artificial Sequence: Synthetic oligonucleotide
  Sense strand starting at position 2845 of SEQ ID NO: 1244524
ccaauaaggcgauaguuag

SEQ ID NO: 1495271 - RNA, 19 nt, Artificial Sequence
  Description of Artificial Sequence: Synthetic oligonucleotide
  Antisense strand to SEQ ID NO: 1495270
cuaacuaucgccuuauugg

SEQ ID NO: 1495272 - RNA, 19 nt, Artificial Sequence
  Description of Artificial Sequence: Synthetic oligonucleotide
  Sense strand starting at position 3176 of SEQ ID NO: 1244524
gaaagaagaugauaguuga

SEQ ID NO: 1495273 - RNA, 19 nt, Artificial Sequence
  Description of Artificial Sequence: Synthetic oligonucleotide
  Antisense strand to SEQ ID NO: 1495272
ucaacuaucaucuucuuuc

SEQ ID NO: 1495274 - RNA, 19 nt, Artificial Sequence
  Description of Artificial Sequence: Synthetic oligonucleotide
  Sense strand starting at position 3216 of SEQ ID NO: 1244524
gggacugagcugugcagau

SEQ ID NO: 1495275 - RNA, 19 nt, Artificial Sequence
  Description of Artificial Sequence: Synthetic oligonucleotide
  Antisense strand to SEQ ID NO: 1495274
aucugcacagcucaguccc

SEQ ID NO: 1495276 - RNA, 19 nt, Artificial Sequence
  Description of Artificial Sequence: Synthetic oligonucleotide
  Sense strand starting at position 3218 of SEQ ID NO: 1244524
gacugagcugugcagauua

SEQ ID NO: 1495277 - RNA, 19 nt, Artificial Sequence
  Description of Artificial Sequence: Synthetic oligonucleotide
  Antisense strand to SEQ ID NO: 1495276
uaaucugcacagcucaguc

SEQ ID NO: 1495278 - RNA, 19 nt, Artificial Sequence
  Description of Artificial Sequence: Synthetic oligonucleotide
  Sense strand starting at position 3220 of SEQ ID NO: 1244524
cugagcugugcagauuacu

SEQ ID NO: 1495279 - RNA, 19 nt, Artificial Sequence
  Description of Artificial Sequence: Synthetic oligonucleotide
  Antisense strand to SEQ ID NO: 1495278
aguaaucugcacagcucag

SEQ ID NO: 1495280 - RNA, 19 nt, Artificial Sequence
  Description of Artificial Sequence: Synthetic oligonucleotide
  Sense strand starting at position 3226 of SEQ ID NO: 1244524
ugugcagauuacuggguaa

SEQ ID NO: 1495281 - RNA, 19 nt, Artificial Sequence
  Description of Artificial Sequence: Synthetic oligonucleotide
  Antisense strand to SEQ ID NO: 1495280
uuacccaguaaucugcaca

SEQ ID NO: 1495282 - RNA, 19 nt, Artificial Sequence
  Description of Artificial Sequence: Synthetic oligonucleotide
  Sense strand starting at position 3228 of SEQ ID NO: 1244524
ugcagauuacuggguaagu

SEQ ID NO: 1495283 - RNA, 19 nt, Artificial Sequence
  Description of Artificial Sequence: Synthetic oligonucleotide
  Antisense strand to SEQ ID NO: 1495282
acuuacccaguaaucugca

SEQ ID NO: 1495284 - RNA, 19 nt, Artificial Sequence
  Description of Artificial Sequence: Synthetic oligonucleotide
  Sense strand starting at position 3229 of SEQ ID NO: 1244524
gcagauuacuggguaagug

SEQ ID NO: 1495285 - RNA, 19 nt, Artificial Sequence
  Description of Artificial Sequence: Synthetic oligonucleotide
  Antisense strand to SEQ ID NO: 1495284
cacuuacccaguaaucugc

SEQ ID NO: 1495286 - RNA, 19 nt, Artificial Sequence
  Description of Artificial Sequence: Synthetic oligonucleotide
  Sense strand starting at position 3230 of SEQ ID NO: 1244524
cagauuacuggguaagugu

SEQ ID NO: 1495287 - RNA, 19 nt, Artificial Sequence
  Description of Artificial Sequence: Synthetic oligonucleotide
  Antisense strand to SEQ ID NO: 1495286
acacuuacccaguaaucug

SEQ ID NO: 1495288 - RNA, 19 nt, Artificial Sequence
  Description of Artificial Sequence: Synthetic oligonucleotide
  Sense strand starting at position 3241 of SEQ ID NO: 1244524
guaaguguuucaggcagag

SEQ ID NO: 1495289 - RNA, 19 nt, Artificial Sequence
  Description of Artificial Sequence: Synthetic oligonucleotide
  Antisense strand to SEQ ID NO: 1495288
cucugccugaaacacuuac

SEQ ID NO: 1495290 - RNA, 19 nt, Artificial Sequence
  Description of Artificial Sequence: Synthetic oligonucleotide
  Sense strand starting at position 3270 of SEQ ID NO: 1244524
gggcauagguccugaggca

SEQ ID NO: 1495291 - RNA, 19 nt, Artificial Sequence
  Description of Artificial Sequence: Synthetic oligonucleotide
  Antisense strand to SEQ ID NO: 1495290
ugccucaggaccuaugccc

SEQ ID NO: 1495292 - RNA, 19 nt, Artificial Sequence
  Description of Artificial Sequence: Synthetic oligonucleotide
  Sense strand starting at position 3286 of SEQ ID NO: 1244524
gcagaagaccagugagacu

SEQ ID NO: 1495293 - RNA, 19 nt, Artificial Sequence
  Description of Artificial Sequence: Synthetic oligonucleotide
  Antisense strand to SEQ ID NO: 1495292
agucucacuggucuucugc

SEQ ID NO: 1495294 - RNA, 19 nt, Artificial Sequence
  Description of Artificial Sequence: Synthetic oligonucleotide
  Sense strand starting at position 3394 of SEQ ID NO: 1244524
gggaaauguuggagggucu

SEQ ID NO: 1495295 - RNA, 19 nt, Artificial Sequence
  Description of Artificial Sequence: Synthetic oligonucleotide
  Antisense strand to SEQ ID NO: 1495294
agacccuccaacauuuccc

SEQ ID NO: 1495296 - RNA, 19 nt, Artificial Sequence
  Description of Artificial Sequence: Synthetic oligonucleotide
  Sense strand starting at position 287 of SEQ ID NO: 1244525
aguaucaguuacccauaaa

SEQ ID NO: 1495297 - RNA, 19 nt, Artificial Sequence
  Description of Artificial Sequence: Synthetic oligonucleotide
  Antisense strand to SEQ ID NO: 1495296
uuuauggguaacugauacu

SEQ ID NO: 1495298 - RNA, 19 nt, Artificial Sequence
  Description of Artificial Sequence: Synthetic oligonucleotide
  Sense strand starting at position 360 of SEQ ID NO: 1244525
acgcacaagagucaaagau

SEQ ID NO: 1495299 - RNA, 19 nt, Artificial Sequence
  Description of Artificial Sequence: Synthetic oligonucleotide
  Antisense strand to SEQ ID NO: 1495298
aucuuugacucuugugcgu

SEQ ID NO: 1495300 - RNA, 19 nt, Artificial Sequence
  Description of Artificial Sequence: Synthetic oligonucleotide
  Sense strand starting at position 426 of SEQ ID NO: 1244525
gaaaguaacuugucuaaag

SEQ ID NO: 1495301 - RNA, 19 nt, Artificial Sequence
  Description of Artificial Sequence: Synthetic oligonucleotide
  Antisense strand to SEQ ID NO: 1495300
cuuuagacaaguuacuuuc

SEQ ID NO: 1495302 - RNA, 19 nt, Artificial Sequence
  Description of Artificial Sequence: Synthetic oligonucleotide
  Sense strand starting at position 456 of SEQ ID NO: 1244525
gugagauggcgggacuaga

SEQ ID NO: 1495303 - RNA, 19 nt, Artificial Sequence
  Description of Artificial Sequence: Synthetic oligonucleotide
  Antisense strand to SEQ ID NO: 1495302
ucuagucccgccaucucac

SEQ ID NO: 1495304 - RNA, 19 nt, Artificial Sequence
  Description of Artificial Sequence: Synthetic oligonucleotide
  Sense strand starting at position 532 of SEQ ID NO: 1244525
gcagcuucucgguucguca

SEQ ID NO: 1495305 - RNA, 19 nt, Artificial Sequence
  Description of Artificial Sequence: Synthetic oligonucleotide
  Antisense strand to SEQ ID NO: 1495304
ugacgaaccgagaagcugc

SEQ ID NO: 1495306 - RNA, 19 nt, Artificial Sequence
  Description of Artificial Sequence: Synthetic oligonucleotide
  Sense strand starting at position 636 of SEQ ID NO: 1244525
aggucugucucagcuacau

SEQ ID NO: 1495307 - RNA, 19 nt, Artificial Sequence
  Description of Artificial Sequence: Synthetic oligonucleotide
  Antisense strand to SEQ ID NO: 1495306
auguagcugagacagaccu

SEQ ID NO: 1495308 - RNA, 19 nt, Artificial Sequence
  Description of Artificial Sequence: Synthetic oligonucleotide
  Sense strand starting at position 704 of SEQ ID NO: 1244525
ccagcacacuccugagaca

SEQ ID NO: 1495309 - RNA, 19 nt, Artificial Sequence
  Description of Artificial Sequence: Synthetic oligonucleotide
  Antisense strand to SEQ ID NO: 1495308
ugucucaggagugugcugg

SEQ ID NO: 1495310 - RNA, 19 nt, Artificial Sequence
  Description of Artificial Sequence: Synthetic oligonucleotide
  Sense strand starting at position 787 of SEQ ID NO: 1244525
gccaaugaugcacagguau

SEQ ID NO: 1495311 - RNA, 19 nt, Artificial Sequence
  Description of Artificial Sequence: Synthetic oligonucleotide
  Antisense strand to SEQ ID NO: 1495310
auaccugugcaucauuggc

SEQ ID NO: 1495312 - RNA, 19 nt, Artificial Sequence
  Description of Artificial Sequence: Synthetic oligonucleotide
  Sense strand starting at position 798 of SEQ ID NO: 1244525
acagguaucuaucuucuua

SEQ ID NO: 1495313 - RNA, 19 nt, Artificial Sequence
  Description of Artificial Sequence: Synthetic oligonucleotide
  Antisense strand to SEQ ID NO: 1495312
uaagaagauagauaccugu

SEQ ID NO: 1495314 - RNA, 19 nt, Artificial Sequence
  Description of Artificial Sequence: Synthetic oligonucleotide
  Sense strand starting at position 867 of SEQ ID NO: 1244525
agagaaagucuaggugcuu

SEQ ID NO: 1495315 - RNA, 19 nt, Artificial Sequence
  Description of Artificial Sequence: Synthetic oligonucleotide
  Antisense strand to SEQ ID NO: 1495314
aagcaccuagacuuucucu

SEQ ID NO: 1495316 - RNA, 19 nt, Artificial Sequence
  Description of Artificial Sequence: Synthetic oligonucleotide
  Sense strand starting at position 868 of SEQ ID NO: 1244525
gagaaagucuaggugcuua

SEQ ID NO: 1495317 - RNA, 19 nt, Artificial Sequence
  Description of Artificial Sequence: Synthetic oligonucleotide
  Antisense strand to SEQ ID NO: 1495316
uaagcaccuagacuuucuc

SEQ ID NO: 1495318 - RNA, 19 nt, Artificial Sequence
  Description of Artificial Sequence: Synthetic oligonucleotide
  Sense strand starting at position 927 of SEQ ID NO: 1244525
ccagguagaucucagaaag

SEQ ID NO: 1495319 - RNA, 19 nt, Artificial Sequence
  Description of Artificial Sequence: Synthetic oligonucleotide
  Antisense strand to SEQ ID NO: 1495318
cuuucugagaucuaccugg

SEQ ID NO: 1495320 - RNA, 19 nt, Artificial Sequence
  Description of Artificial Sequence: Synthetic oligonucleotide
  Sense strand starting at position 960 of SEQ ID NO: 1244525
agagaugaguuuggagaac

SEQ ID NO: 1495321 - RNA, 19 nt, Artificial Sequence
  Description of Artificial Sequence: Synthetic oligonucleotide
  Antisense strand to SEQ ID NO: 1495320
guucuccaaacucaucucu

SEQ ID NO: 1495322 - RNA, 19 nt, Artificial Sequence
  Description of Artificial Sequence: Synthetic oligonucleotide
  Sense strand starting at position 1466 of SEQ ID NO: 1244525
ccaguauccuuccaggaga

SEQ ID NO: 1495323 - RNA, 19 nt, Artificial Sequence
  Description of Artificial Sequence: Synthetic oligonucleotide
  Antisense strand to SEQ ID NO: 1495322
ucuccuggaaggauacugg

SEQ ID NO: 1495324 - RNA, 19 nt, Artificial Sequence
  Description of Artificial Sequence: Synthetic oligonucleotide
  Sense strand starting at position 1468 of SEQ ID NO: 1244525
aguauccuuccaggagaga

SEQ ID NO: 1495325 - RNA, 19 nt, Artificial Sequence
  Description of Artificial Sequence: Synthetic oligonucleotide
  Antisense strand to SEQ ID NO: 1495324
ucucuccuggaaggauacu

SEQ ID NO: 1495326 - RNA, 19 nt, Artificial Sequence
  Description of Artificial Sequence: Synthetic oligonucleotide
  Sense strand starting at position 1528 of SEQ ID NO: 1244525
acccuauguguuugggaaa

SEQ ID NO: 1495327 - RNA, 19 nt, Artificial Sequence
  Description of Artificial Sequence: Synthetic oligonucleotide
  Antisense strand to SEQ ID NO: 1495326
uuucccaaacacauagggu

SEQ ID NO: 1495328 - RNA, 19 nt, Artificial Sequence
  Description of Artificial Sequence: Synthetic oligonucleotide
  Sense strand starting at position 1529 of SEQ ID NO: 1244525
cccuauguguuugggaaag

SEQ ID NO: 1495329 - RNA, 19 nt, Artificial Sequence
  Description of Artificial Sequence: Synthetic oligonucleotide
  Antisense strand to SEQ ID NO: 1495328
cuuucccaaacacauaggg

SEQ ID NO: 1495330 - RNA, 19 nt, Artificial Sequence
  Description of Artificial Sequence: Synthetic oligonucleotide
  Sense strand starting at position 1531 of SEQ ID NO: 1244525
cuauguguuugggaaagug

SEQ ID NO: 1495331 - RNA, 19 nt, Artificial Sequence
  Description of Artificial Sequence: Synthetic oligonucleotide
  Antisense strand to SEQ ID NO: 1495330
cacuuucccaaacacauag

SEQ ID NO: 1495332 - RNA, 19 nt, Artificial Sequence
  Description of Artificial Sequence: Synthetic oligonucleotide
  Sense strand starting at position 2383 of SEQ ID NO: 1244525
cugagcuguucuucggaau

SEQ ID NO: 1495333 - RNA, 19 nt, Artificial Sequence
  Description of Artificial Sequence: Synthetic oligonucleotide
  Antisense strand to SEQ ID NO: 1495332
auuccgaagaacagcucag

SEQ ID NO: 1495334 - RNA, 19 nt, Artificial Sequence
  Description of Artificial Sequence: Synthetic oligonucleotide
  Sense strand starting at position 2384 of SEQ ID NO: 1244525
ugagcuguucuucggaauu

SEQ ID NO: 1495335 - RNA, 19 nt, Artificial Sequence
  Description of Artificial Sequence: Synthetic oligonucleotide
  Antisense strand to SEQ ID NO: 1495334
aauuccgaagaacagcuca

SEQ ID NO: 1495336 - RNA, 19 nt, Artificial Sequence
  Description of Artificial Sequence: Synthetic oligonucleotide
  Sense strand starting at position 2386 of SEQ ID NO: 1244525
agcuguucuucggaauucu

SEQ ID NO: 1495337 - RNA, 19 nt, Artificial Sequence
  Description of Artificial Sequence: Synthetic oligonucleotide
  Antisense strand to SEQ ID NO: 1495336
agaauuccgaagaacagcu

SEQ ID NO: 1495338 - RNA, 19 nt, Artificial Sequence
  Description of Artificial Sequence: Synthetic oligonucleotide
  Sense strand starting at position 2394 of SEQ ID NO: 1244525
uucggaauucugugcgucu

SEQ ID NO: 1495339 - RNA, 19 nt, Artificial Sequence
  Description of Artificial Sequence: Synthetic oligonucleotide
  Antisense strand to SEQ ID NO: 1495338
agacgcacagaauuccgaa

SEQ ID NO: 1495340 - RNA, 19 nt, Artificial Sequence
  Description of Artificial Sequence: Synthetic oligonucleotide
  Sense strand starting at position 2819 of SEQ ID NO: 1244525
cccgcaauguaggauauuu

SEQ ID NO: 1495341 - RNA, 19 nt, Artificial Sequence
  Description of Artificial Sequence: Synthetic oligonucleotide
  Antisense strand to SEQ ID NO: 1495340
aaauauccuacauugcggg

SEQ ID NO: 1495342 - RNA, 19 nt, Artificial Sequence
  Description of Artificial Sequence: Synthetic oligonucleotide
  Sense strand starting at position 3183 of SEQ ID NO: 1244525
ucucuaaucucuuagaacg

SEQ ID NO: 1495343 - RNA, 19 nt, Artificial Sequence
  Description of Artificial Sequence: Synthetic oligonucleotide
  Antisense strand to SEQ ID NO: 1495342
cguucuaagagauuagaga

SEQ ID NO: 1495344 - RNA, 19 nt, Artificial Sequence
  Description of Artificial Sequence: Synthetic oligonucleotide
  Sense strand starting at position 3287 of SEQ ID NO: 1244525
caaggccggucuguaaauu

SEQ ID NO: 1495345 - RNA, 19 nt, Artificial Sequence
  Description of Artificial Sequence: Synthetic oligonucleotide
  Antisense strand to SEQ ID NO: 1495344
aauuuacagaccggccuug

SEQ ID NO: 1495346 - RNA, 19 nt, Artificial Sequence
  Description of Artificial Sequence: Synthetic oligonucleotide
  Sense strand starting at position 3295 of SEQ ID NO: 1244525
gucuguaaauucuucuuga

SEQ ID NO: 1495347 - RNA, 19 nt, Artificial Sequence
  Description of Artificial Sequence: Synthetic oligonucleotide
  Antisense strand to SEQ ID NO: 1495346
ucaagaagaauuuacagac

SEQ ID NO: 1495348 - RNA, 19 nt, Artificial Sequence
  Description of Artificial Sequence: Synthetic oligonucleotide
  Sense strand starting at position 3298 of SEQ ID NO: 1244525
uguaaauucuucuugaugu

SEQ ID NO: 1495349 - RNA, 19 nt, Artificial Sequence
  Description of Artificial Sequence: Synthetic oligonucleotide
  Antisense strand to SEQ ID NO: 1495348
acaucaagaagaauuuaca

SEQ ID NO: 1495350 - RNA, 19 nt, Artificial Sequence
  Description of Artificial Sequence: Synthetic oligonucleotide
  Sense strand starting at position 3299 of SEQ ID NO: 1244525
guaaauucuucuugauguc

SEQ ID NO: 1495351 - RNA, 19 nt, Artificial Sequence
  Description of Artificial Sequence: Synthetic oligonucleotide
  Antisense strand to SEQ ID NO: 1495350
gacaucaagaagaauuuac

SEQ ID NO: 1495352 - RNA, 19 nt, Artificial Sequence
  Description of Artificial Sequence: Synthetic oligonucleotide
  Sense strand starting at position 3502 of SEQ ID NO: 1244525
ugagaagucucgggacgga

SEQ ID NO: 1495353 - RNA, 19 nt, Artificial Sequence
  Description of Artificial Sequence: Synthetic oligonucleotide
  Antisense strand to SEQ ID NO: 1495352
uccgucccgagacuucuca

SEQ ID NO: 1495354 - RNA, 19 nt, Artificial Sequence
  Description of Artificial Sequence: Synthetic oligonucleotide
  Sense strand starting at position 3571 of SEQ ID NO: 1244525
cguggucugucuuacaaga

SEQ ID NO: 1495355 - RNA, 19 nt, Artificial Sequence
  Description of Artificial Sequence: Synthetic oligonucleotide
  Antisense strand to SEQ ID NO: 1495354
ucuuguaagacagaccacg

SEQ ID NO: 1495356 - RNA, 19 nt, Artificial Sequence
  Description of Artificial Sequence: Synthetic oligonucleotide
  Sense strand starting at position 3573 of SEQ ID NO: 1244525
uggucugucuuacaagaag

SEQ ID NO: 1495357 - RNA, 19 nt, Artificial Sequence
  Description of Artificial Sequence: Synthetic oligonucleotide
  Antisense strand to SEQ ID NO: 1495356
cuucuuguaagacagacca

SEQ ID NO: 1495358 - RNA, 19 nt, Artificial Sequence
  Description of Artificial Sequence: Synthetic oligonucleotide
  Sense strand starting at position 3589 of SEQ ID NO: 1244525
aagagcucaggcugaaaca

SEQ ID NO: 1495359 - RNA, 19 nt, Artificial Sequence
  Description of Artificial Sequence: Synthetic oligonucleotide
  Antisense strand to SEQ ID NO: 1495358
uguuucagccugagcucuu

SEQ ID NO: 1495360 - RNA, 19 nt, Artificial Sequence
  Description of Artificial Sequence: Synthetic oligonucleotide
  Sense strand starting at position 3590 of SEQ ID NO: 1244525
agagcucaggcugaaacau

SEQ ID NO: 1495361 - RNA, 19 nt, Artificial Sequence
  Description of Artificial Sequence: Synthetic oligonucleotide
  Antisense strand to SEQ ID NO: 1495360
auguuucagccugagcucu

SEQ ID NO: 1495362 - RNA, 19 nt, Artificial Sequence
  Description of Artificial Sequence: Synthetic oligonucleotide
  Sense strand starting at position 3621 of SEQ ID NO: 1244525
aguagaagcaaauguguaa

SEQ ID NO: 1495363 - RNA, 19 nt, Artificial Sequence
  Description of Artificial Sequence: Synthetic oligonucleotide
  Antisense strand to SEQ ID NO: 1495362
uuacacauuugcuucuacu

SEQ ID NO: 1495364 - RNA, 19 nt, Artificial Sequence
  Description of Artificial Sequence: Synthetic oligonucleotide
  Sense strand starting at position 3624 of SEQ ID NO: 1244525
agaagcaaauguguaaauu

SEQ ID NO: 1495365 - RNA, 19 nt, Artificial Sequence
  Description of Artificial Sequence: Synthetic oligonucleotide
  Antisense strand to SEQ ID NO: 1495364
aauuuacacauuugcuucu

SEQ ID NO: 1495366 - RNA, 19 nt, Artificial Sequence
  Description of Artificial Sequence: Synthetic oligonucleotide
  Sense strand starting at position 3658 of SEQ ID NO: 1244525
agaacuugagaucguaauc

SEQ ID NO: 1495367 - RNA, 19 nt, Artificial Sequence
  Description of Artificial Sequence: Synthetic oligonucleotide
  Antisense strand to SEQ ID NO: 1495366
gauuacgaucucaaguucu

SEQ ID NO: 1495368 - RNA, 19 nt, Artificial Sequence
  Description of Artificial Sequence: Synthetic oligonucleotide
  Sense strand starting at position 3886 of SEQ ID NO: 1244525
auucauuaggucugggaug

SEQ ID NO: 1495369 - RNA, 19 nt, Artificial Sequence
  Description of Artificial Sequence: Synthetic oligonucleotide
  Antisense strand to SEQ ID NO: 1495368
caucccagaccuaaugaau

SEQ ID NO: 1495370 - RNA, 19 nt, Artificial Sequence
  Description of Artificial Sequence: Synthetic oligonucleotide
  Sense strand starting at position 3887 of SEQ ID NO: 1244525
uucauuaggucugggauga

SEQ ID NO: 1495371 - RNA, 19 nt, Artificial Sequence
  Description of Artificial Sequence: Synthetic oligonucleotide
  Antisense strand to SEQ ID NO: 1495370
ucaucccagaccuaaugaa

SEQ ID NO: 1495372 - RNA, 19 nt, Artificial Sequence
  Description of Artificial Sequence: Synthetic oligonucleotide
  Sense strand starting at position 3888 of SEQ ID NO: 1244525
ucauuaggucugggaugag

SEQ ID NO: 1495373 - RNA, 19 nt, Artificial Sequence
  Description of Artificial Sequence: Synthetic oligonucleotide
  Antisense strand to SEQ ID NO: 1495372
cucaucccagaccuaauga

SEQ ID NO: 1495374 - RNA, 19 nt, Artificial Sequence
  Description of Artificial Sequence: Synthetic oligonucleotide
  Sense strand starting at position 168 of SEQ ID NO: 1244526
caggaauguggauguuaaa

SEQ ID NO: 1495375 - RNA, 19 nt, Artificial Sequence
  Description of Artificial Sequence: Synthetic oligonucleotide
  Antisense strand to SEQ ID NO: 1495374
uuuaacauccacauuccug

SEQ ID NO: 1495376 - RNA, 19 nt, Artificial Sequence
  Description of Artificial Sequence: Synthetic oligonucleotide
  Sense strand starting at position 270 of SEQ ID NO: 1244526
gucauagaagcucaucacu

SEQ ID NO: 1495377 - RNA, 19 nt, Artificial Sequence
  Description of Artificial Sequence: Synthetic oligonucleotide
  Antisense strand to SEQ ID NO: 1495376
agugaugagcuucuaugac

SEQ ID NO: 1495378 - RNA, 19 nt, Artificial Sequence
  Description of Artificial Sequence: Synthetic oligonucleotide
  Sense strand starting at position 324 of SEQ ID NO: 1244526
uuugaaaggagcugcuauu

SEQ ID NO: 1495379 - RNA, 19 nt, Artificial Sequence
  Description of Artificial Sequence: Synthetic oligonucleotide
  Antisense strand to SEQ ID NO: 1495378
aauagcagcuccuuucaaa

SEQ ID NO: 1495380 - RNA, 19 nt, Artificial Sequence
  Description of Artificial Sequence: Synthetic oligonucleotide
  Sense strand starting at position 355 of SEQ ID NO: 1244526
auauucuuacgguaaguaa

SEQ ID NO: 1495381 - RNA, 19 nt, Artificial Sequence
  Description of Artificial Sequence: Synthetic oligonucleotide
  Antisense strand to SEQ ID NO: 1495380
uuacuuaccguaagaauau

SEQ ID NO: 1495382 - RNA, 19 nt, Artificial Sequence
  Description of Artificial Sequence: Synthetic oligonucleotide
  Sense strand starting at position 437 of SEQ ID NO: 1244526
aaugaaguguacuuguaaa

SEQ ID NO: 1495383 - RNA, 19 nt, Artificial Sequence
  Description of Artificial Sequence: Synthetic oligonucleotide
  Antisense strand to SEQ ID NO: 1495382
uuuacaaguacacuucauu

SEQ ID NO: 1495384 - RNA, 19 nt, Artificial Sequence
  Description of Artificial Sequence: Synthetic oligonucleotide
  Sense strand starting at position 462 of SEQ ID NO: 1244526
auuuacagugcccguuaua

SEQ ID NO: 1495385 - RNA, 19 nt, Artificial Sequence
  Description of Artificial Sequence: Synthetic oligonucleotide
  Antisense strand to SEQ ID NO: 1495384
uauaacgggcacuguaaau

SEQ ID NO: 1495386 - RNA, 19 nt, Artificial Sequence
  Description of Artificial Sequence: Synthetic oligonucleotide
  Sense strand starting at position 471 of SEQ ID NO: 1244526
gcccguuauaugccaagca

SEQ ID NO: 1495387 - RNA, 19 nt, Artificial Sequence
  Description of Artificial Sequence: Synthetic oligonucleotide
  Antisense strand to SEQ ID NO: 1495386
ugcuuggcauauaacgggc

SEQ ID NO: 1495388 - RNA, 19 nt, Artificial Sequence
  Description of Artificial Sequence: Synthetic oligonucleotide
  Sense strand starting at position 487 of SEQ ID NO: 1244526
gcacuuugccuggacuuua

SEQ ID NO: 1495389 - RNA, 19 nt, Artificial Sequence
  Description of Artificial Sequence: Synthetic oligonucleotide
  Antisense strand to SEQ ID NO: 1495388
uaaaguccaggcaaagugc

SEQ ID NO: 1495390 - RNA, 19 nt, Artificial Sequence
  Description of Artificial Sequence: Synthetic oligonucleotide
  Sense strand starting at position 954 of SEQ ID NO: 1244526
agucuaaagacauggcagu

SEQ ID NO: 1495391 - RNA, 19 nt, Artificial Sequence
  Description of Artificial Sequence: Synthetic oligonucleotide
  Antisense strand to SEQ ID NO: 1495390
acugccaugucuuuagacu

SEQ ID NO: 1495392 - RNA, 19 nt, Artificial Sequence
  Description of Artificial Sequence: Synthetic oligonucleotide
  Sense strand starting at position 1114 of SEQ ID NO: 1244526
uuagaaauaugagcauauc

SEQ ID NO: 1495393 - RNA, 19 nt, Artificial Sequence
  Description of Artificial Sequence: Synthetic oligonucleotide
  Antisense strand to SEQ ID NO: 1495392
gauaugcucauauuucuaa

SEQ ID NO: 1495394 - RNA, 19 nt, Artificial Sequence
  Description of Artificial Sequence: Synthetic oligonucleotide
  Sense strand starting at position 1149 of SEQ ID NO: 1244526
uucccuuccuuugugauuu

SEQ ID NO: 1495395 - RNA, 19 nt, Artificial Sequence
  Description of Artificial Sequence: Synthetic oligonucleotide
  Antisense strand to SEQ ID NO: 1495394
aaaucacaaaggaagggaa

SEQ ID NO: 1495396 - RNA, 19 nt, Artificial Sequence
  Description of Artificial Sequence: Synthetic oligonucleotide
  Sense strand starting at position 1561 of SEQ ID NO: 1244526
gcauuaggguuucuagaug

SEQ ID NO: 1495397 - RNA, 19 nt, Artificial Sequence
  Description of Artificial Sequence: Synthetic oligonucleotide
  Antisense strand to SEQ ID NO: 1495396
caucuagaaacccuaaugc

SEQ ID NO: 1495398 - RNA, 19 nt, Artificial Sequence
  Description of Artificial Sequence: Synthetic oligonucleotide
  Sense strand starting at position 1771 of SEQ ID NO: 1244526
aggcacaguuugccaauaa

SEQ ID NO: 1495399 - RNA, 19 nt, Artificial Sequence
  Description of Artificial Sequence: Synthetic oligonucleotide
  Antisense strand to SEQ ID NO: 1495398
uuauuggcaaacugugccu

SEQ ID NO: 1495400 - RNA, 19 nt, Artificial Sequence
  Description of Artificial Sequence: Synthetic oligonucleotide
  Sense strand starting at position 1827 of SEQ ID NO: 1244526
gcagauuucuuugcagcca

SEQ ID NO: 1495401 - RNA, 19 nt, Artificial Sequence
  Description of Artificial Sequence: Synthetic oligonucleotide
  Antisense strand to SEQ ID NO: 1495400
uggcugcaaagaaaucugc

SEQ ID NO: 1495402 - RNA, 19 nt, Artificial Sequence
  Description of Artificial Sequence: Synthetic oligonucleotide
  Sense strand starting at position 1842 of SEQ ID NO: 1244526
gccaaaugcaagggauguu

SEQ ID NO: 1495403 - RNA, 19 nt, Artificial Sequence
  Description of Artificial Sequence: Synthetic oligonucleotide
  Antisense strand to SEQ ID NO: 1495402
aacaucccuugcauuuggc

SEQ ID NO: 1495404 - RNA, 19 nt, Artificial Sequence
  Description of Artificial Sequence: Synthetic oligonucleotide
  Sense strand starting at position 1982 of SEQ ID NO: 1244526
ggcgucuuuccaguuuauu

SEQ ID NO: 1495405 - RNA, 19 nt, Artificial Sequence
  Description of Artificial Sequence: Synthetic oligonucleotide
  Antisense strand to SEQ ID NO: 1495404
aauaaacuggaaagacgcc

SEQ ID NO: 1495406 - RNA, 19 nt, Artificial Sequence
  Description of Artificial Sequence: Synthetic oligonucleotide
  Sense strand starting at position 1983 of SEQ ID NO: 1244526
gcgucuuuccaguuuauuc

SEQ ID NO: 1495407 - RNA, 19 nt, Artificial Sequence
  Description of Artificial Sequence: Synthetic oligonucleotide
  Antisense strand to SEQ ID NO: 1495406
gaauaaacuggaaagacgc

SEQ ID NO: 1495408 - RNA, 19 nt, Artificial Sequence
  Description of Artificial Sequence: Synthetic oligonucleotide
  Sense strand starting at position 2008 of SEQ ID NO: 1244526
ugguccaaugcugggauau

SEQ ID NO: 1495409 - RNA, 19 nt, Artificial Sequence
  Description of Artificial Sequence: Synthetic oligonucleotide
  Antisense strand to SEQ ID NO: 1495408
auaucccagcauuggacca

SEQ ID NO: 1495410 - RNA, 19 nt, Artificial Sequence
  Description of Artificial Sequence: Synthetic oligonucleotide
  Sense strand starting at position 2009 of SEQ ID NO: 1244526
gguccaaugcugggauaug

SEQ ID NO: 1495411 - RNA, 19 nt, Artificial Sequence
  Description of Artificial Sequence: Synthetic oligonucleotide
  Antisense strand to SEQ ID NO: 1495410
cauaucccagcauuggacc

SEQ ID NO: 1495412 - RNA, 19 nt, Artificial Sequence
  Description of Artificial Sequence: Synthetic oligonucleotide
  Sense strand starting at position 2067 of SEQ ID NO: 1244526
agagacaguguccaacuuu

SEQ ID NO: 1495413 - RNA, 19 nt, Artificial Sequence
  Description of Artificial Sequence: Synthetic oligonucleotide
  Antisense strand to SEQ ID NO: 1495412
aaaguuggacacugucucu

SEQ ID NO: 1495414 - RNA, 19 nt, Artificial Sequence
  Description of Artificial Sequence: Synthetic oligonucleotide
  Sense strand starting at position 2086 of SEQ ID NO: 1244526
guuugcuuuccagaauaca

SEQ ID NO: 1495415 - RNA, 19 nt, Artificial Sequence
  Description of Artificial Sequence: Synthetic oligonucleotide
  Antisense strand to SEQ ID NO: 1495414
uguauucuggaaagcaaac

SEQ ID NO: 1495416 - RNA, 19 nt, Artificial Sequence
  Description of Artificial Sequence: Synthetic oligonucleotide
  Sense strand starting at position 2152 of SEQ ID NO: 1244526
ggagaagagcuuugaguau

SEQ ID NO: 1495417 - RNA, 19 nt, Artificial Sequence
  Description of Artificial Sequence: Synthetic oligonucleotide
  Antisense strand to SEQ ID NO: 1495416
auacucaaagcucuucucc

SEQ ID NO: 1495418 - RNA, 19 nt, Artificial Sequence
  Description of Artificial Sequence: Synthetic oligonucleotide
  Sense strand starting at position 2163 of SEQ ID NO: 1244526
uugaguaugccugaagccu

SEQ ID NO: 1495419 - RNA, 19 nt, Artificial Sequence
  Description of Artificial Sequence: Synthetic oligonucleotide
  Antisense strand to SEQ ID NO: 1495418
aggcuucaggcauacucaa

SEQ ID NO: 1495420 - RNA, 19 nt, Artificial Sequence
  Description of Artificial Sequence: Synthetic oligonucleotide
  Sense strand starting at position 2180 of SEQ ID NO: 1244526
cugugaugccaagacuguu

SEQ ID NO: 1495421 - RNA, 19 nt, Artificial Sequence
  Description of Artificial Sequence: Synthetic oligonucleotide
  Antisense strand to SEQ ID NO: 1495420
aacagucuuggcaucacag

SEQ ID NO: 1495422 - RNA, 19 nt, Artificial Sequence
  Description of Artificial Sequence: Synthetic oligonucleotide
  Sense strand starting at position 2259 of SEQ ID NO: 1244526
cagugaauucugcagagau

SEQ ID NO: 1495423 - RNA, 19 nt, Artificial Sequence
  Description of Artificial Sequence: Synthetic oligonucleotide
  Antisense strand to SEQ ID NO: 1495422
aucucugcagaauucacug

SEQ ID NO: 1495424 - RNA, 19 nt, Artificial Sequence
  Description of Artificial Sequence: Synthetic oligonucleotide
  Sense strand starting at position 2261 of SEQ ID NO: 1244526
gugaauucugcagagauua

SEQ ID NO: 1495425 - RNA, 19 nt, Artificial Sequence
  Description of Artificial Sequence: Synthetic oligonucleotide
  Antisense strand to SEQ ID NO: 1495424
uaaucucugcagaauucac

SEQ ID NO: 1495426 - RNA, 19 nt, Artificial Sequence
  Description of Artificial Sequence: Synthetic oligonucleotide
  Sense strand starting at position 2288 of SEQ ID NO: 1244526
gugggaaggaucugugucu

SEQ ID NO: 1495427 - RNA, 19 nt, Artificial Sequence
  Description of Artificial Sequence: Synthetic oligonucleotide
  Antisense strand to SEQ ID NO: 1495426
agacacagauccuucccac

SEQ ID NO: 1495428 - RNA, 19 nt, Artificial Sequence
  Description of Artificial Sequence: Synthetic oligonucleotide
  Sense strand starting at position 2289 of SEQ ID NO: 1244526
ugggaaggaucugugucua

SEQ ID NO: 1495429 - RNA, 19 nt, Artificial Sequence
  Description of Artificial Sequence: Synthetic oligonucleotide
  Antisense strand to SEQ ID NO: 1495428
uagacacagauccuuccca

SEQ ID NO: 1495430 - RNA, 19 nt, Artificial Sequence
  Description of Artificial Sequence: Synthetic oligonucleotide
  Sense strand starting at position 2293 of SEQ ID NO: 1244526
aaggaucugugucuacagu

SEQ ID NO: 1495431 - RNA, 19 nt, Artificial Sequence
  Description of Artificial Sequence: Synthetic oligonucleotide
  Antisense strand to SEQ ID NO: 1495430
acuguagacacagauccuu

SEQ ID NO: 1495432 - RNA, 19 nt, Artificial Sequence
  Description of Artificial Sequence: Synthetic oligonucleotide
  Sense strand starting at position 2514 of SEQ ID NO: 1244526
acauguguuguacauuaga

SEQ ID NO: 1495433 - RNA, 19 nt, Artificial Sequence
  Description of Artificial Sequence: Synthetic oligonucleotide
  Antisense strand to SEQ ID NO: 1495432
ucuaauguacaacacaugu

SEQ ID NO: 1495434 - RNA, 19 nt, Artificial Sequence
  Description of Artificial Sequence: Synthetic oligonucleotide
  Sense strand starting at position 2569 of SEQ ID NO: 1244526
uuuaaugugcccgaaucaa

SEQ ID NO: 1495435 - RNA, 19 nt, Artificial Sequence
  Description of Artificial Sequence: Synthetic oligonucleotide
  Antisense strand to SEQ ID NO: 1495434
uugauucgggcacauuaaa

SEQ ID NO: 1495436 - RNA, 19 nt, Artificial Sequence
  Description of Artificial Sequence: Synthetic oligonucleotide
  Sense strand starting at position 2664 of SEQ ID NO: 1244526
ggcagaauaggcuggaaga

SEQ ID NO: 1495437 - RNA, 19 nt, Artificial Sequence
  Description of Artificial Sequence: Synthetic oligonucleotide
  Antisense strand to SEQ ID NO: 1495436
ucuuccagccuauucugcc

SEQ ID NO: 1495438 - RNA, 19 nt, Artificial Sequence
  Description of Artificial Sequence: Synthetic oligonucleotide
  Sense strand starting at position 2827 of SEQ ID NO: 1244526
uugcaugaguuuccuggaa

SEQ ID NO: 1495439 - RNA, 19 nt, Artificial Sequence
  Description of Artificial Sequence: Synthetic oligonucleotide
  Antisense strand to SEQ ID NO: 1495438
uuccaggaaacucaugcaa

SEQ ID NO: 1495440 - RNA, 19 nt, Artificial Sequence
  Description of Artificial Sequence: Synthetic oligonucleotide
  Sense strand starting at position 2831 of SEQ ID NO: 1244526
augaguuuccuggaauucu

SEQ ID NO: 1495441 - RNA, 19 nt, Artificial Sequence
  Description of Artificial Sequence: Synthetic oligonucleotide
  Antisense strand to SEQ ID NO: 1495440
agaauuccaggaaacucau

SEQ ID NO: 1495442 - RNA, 19 nt, Artificial Sequence
  Description of Artificial Sequence: Synthetic oligonucleotide
  Sense strand starting at position 3118 of SEQ ID NO: 1244526
acucaagagcuuugcaaau

SEQ ID NO: 1495443 - RNA, 19 nt, Artificial Sequence
  Description of Artificial Sequence: Synthetic oligonucleotide
  Antisense strand to SEQ ID NO: 1495442
auuugcaaagcucuugagu

SEQ ID NO: 1495444 - RNA, 19 nt, Artificial Sequence
  Description of Artificial Sequence: Synthetic oligonucleotide
  Sense strand starting at position 3263 of SEQ ID NO: 1244526
guuagauugucgcugauuu

SEQ ID NO: 1495445 - RNA, 19 nt, Artificial Sequence
  Description of Artificial Sequence: Synthetic oligonucleotide
  Antisense strand to SEQ ID NO: 1495444
aaaucagcgacaaucuaac

SEQ ID NO: 1495446 - RNA, 19 nt, Artificial Sequence
  Description of Artificial Sequence: Synthetic oligonucleotide
  Sense strand starting at position 3264 of SEQ ID NO: 1244526
uuagauugucgcugauuuc

SEQ ID NO: 1495447 - RNA, 19 nt, Artificial Sequence
  Description of Artificial Sequence: Synthetic oligonucleotide
  Antisense strand to SEQ ID NO: 1495446
gaaaucagcgacaaucuaa

SEQ ID NO: 1495448 - RNA, 19 nt, Artificial Sequence
  Description of Artificial Sequence: Synthetic oligonucleotide
  Sense strand starting at position 3699 of SEQ ID NO: 1244526
ggcuucuggccagauagga

SEQ ID NO: 1495449 - RNA, 19 nt, Artificial Sequence
  Description of Artificial Sequence: Synthetic oligonucleotide
  Antisense strand to SEQ ID NO: 1495448
uccuaucuggccagaagcc

SEQ ID NO: 1495450 - RNA, 19 nt, Artificial Sequence
  Description of Artificial Sequence: Synthetic oligonucleotide
  Sense strand starting at position 3712 of SEQ ID NO: 1244526
auaggagcagucugauuag

SEQ ID NO: 1495451 - RNA, 19 nt, Artificial Sequence
  Description of Artificial Sequence: Synthetic oligonucleotide
  Antisense strand to SEQ ID NO: 1495450
cuaaucagacugcuccuau

SEQ ID NO: 1495452 - RNA, 19 nt, Artificial Sequence
  Description of Artificial Sequence: Synthetic oligonucleotide
  Sense strand starting at position 3944 of SEQ ID NO: 1244526
cccagagucaggugaggaa

SEQ ID NO: 1495453 - RNA, 19 nt, Artificial Sequence
  Description of Artificial Sequence: Synthetic oligonucleotide
  Antisense strand to SEQ ID NO: 1495452
uuccucaccugacucuggg

SEQ ID NO: 1495454 - RNA, 19 nt, Artificial Sequence
  Description of Artificial Sequence: Synthetic oligonucleotide
  Sense strand starting at position 108 of SEQ ID NO: 1244527
ggacgaugauacucagcaa

SEQ ID NO: 1495455 - RNA, 19 nt, Artificial Sequence
  Description of Artificial Sequence: Synthetic oligonucleotide
  Antisense strand to SEQ ID NO: 1495454
uugcugaguaucaucgucc

SEQ ID NO: 1495456 - RNA, 19 nt, Artificial Sequence
  Description of Artificial Sequence: Synthetic oligonucleotide
  Sense strand starting at position 134 of SEQ ID NO: 1244527
agcauucuggcggcaaguu

SEQ ID NO: 1495457 - RNA, 19 nt, Artificial Sequence
  Description of Artificial Sequence: Synthetic oligonucleotide
  Antisense strand to SEQ ID NO: 1495456
aacuugccgccagaaugcu

SEQ ID NO: 1495458 - RNA, 19 nt, Artificial Sequence
  Description of Artificial Sequence: Synthetic oligonucleotide
  Sense strand starting at position 432 of SEQ ID NO: 1244527
agcgguucgcacgucuaaa

SEQ ID NO: 1495459 - RNA, 19 nt, Artificial Sequence
  Description of Artificial Sequence: Synthetic oligonucleotide
  Antisense strand to SEQ ID NO: 1495458
uuuagacgugcgaaccgcu

SEQ ID NO: 1495460 - RNA, 19 nt, Artificial Sequence
  Description of Artificial Sequence: Synthetic oligonucleotide
  Sense strand starting at position 571 of SEQ ID NO: 1244527
cccgguucagauggugaau

SEQ ID NO: 1495461 - RNA, 19 nt, Artificial Sequence
  Description of Artificial Sequence: Synthetic oligonucleotide
  Antisense strand to SEQ ID NO: 1495460
auucaccaucugaaccggg

SEQ ID NO: 1495462 - RNA, 19 nt, Artificial Sequence
  Description of Artificial Sequence: Synthetic oligonucleotide
  Sense strand starting at position 618 of SEQ ID NO: 1244527
gggaguaggugcccagauu

SEQ ID NO: 1495463 - RNA, 19 nt, Artificial Sequence
  Description of Artificial Sequence: Synthetic oligonucleotide
  Antisense strand to SEQ ID NO: 1495462
aaucugggcaccuacuccc

SEQ ID NO: 1495464 - RNA, 19 nt, Artificial Sequence
  Description of Artificial Sequence: Synthetic oligonucleotide
  Sense strand starting at position 832 of SEQ ID NO: 1244527
gccagaguaguguggaaag

SEQ ID NO: 1495465 - RNA, 19 nt, Artificial Sequence
  Description of Artificial Sequence: Synthetic oligonucleotide
  Antisense strand to SEQ ID NO: 1495464
cuuuccacacuacucuggc

SEQ ID NO: 1495466 - RNA, 19 nt, Artificial Sequence
  Description of Artificial Sequence: Synthetic oligonucleotide
  Sense strand starting at position 1159 of SEQ ID NO: 1244527
ggacauuuaucccaaguaa

SEQ ID NO: 1495467 - RNA, 19 nt, Artificial Sequence
  Description of Artificial Sequence: Synthetic oligonucleotide
  Antisense strand to SEQ ID NO: 1495466
uuacuugggauaaaugucc

SEQ ID NO: 1495468 - RNA, 19 nt, Artificial Sequence
  Description of Artificial Sequence: Synthetic oligonucleotide
  Sense strand starting at position 1239 of SEQ ID NO: 1244527
ggacaugcauggcugugaa

SEQ ID NO: 1495469 - RNA, 19 nt, Artificial Sequence
  Description of Artificial Sequence: Synthetic oligonucleotide
  Antisense strand to SEQ ID NO: 1495468
uucacagccaugcaugucc

SEQ ID NO: 1495470 - RNA, 19 nt, Artificial Sequence
  Description of Artificial Sequence: Synthetic oligonucleotide
  Sense strand starting at position 1251 of SEQ ID NO: 1244527
cugugaaagaucuggcuga

SEQ ID NO: 1495471 - RNA, 19 nt, Artificial Sequence
  Description of Artificial Sequence: Synthetic oligonucleotide
  Antisense strand to SEQ ID NO: 1495470
ucagccagaucuuucacag

SEQ ID NO: 1495472 - RNA, 19 nt, Artificial Sequence
  Description of Artificial Sequence: Synthetic oligonucleotide
  Sense strand starting at position 1255 of SEQ ID NO: 1244527
gaaagaucuggcugagacu

SEQ ID NO: 1495473 - RNA, 19 nt, Artificial Sequence
  Description of Artificial Sequence: Synthetic oligonucleotide
  Antisense strand to SEQ ID NO: 1495472
agucucagccagaucuuuc

SEQ ID NO: 1495474 - RNA, 19 nt, Artificial Sequence
  Description of Artificial Sequence: Synthetic oligonucleotide
  Sense strand starting at position 1394 of SEQ ID NO: 1244527
ucuggaaugcacuggaaga

SEQ ID NO: 1495475 - RNA, 19 nt, Artificial Sequence
  Description of Artificial Sequence: Synthetic oligonucleotide
  Antisense strand to SEQ ID NO: 1495474
ucuuccagugcauuccaga

SEQ ID NO: 1495476 - RNA, 19 nt, Artificial Sequence
  Description of Artificial Sequence: Synthetic oligonucleotide
  Sense strand starting at position 1535 of SEQ ID NO: 1244527
cagugugucccagagucaa

SEQ ID NO: 1495477 - RNA, 19 nt, Artificial Sequence
  Description of Artificial Sequence: Synthetic oligonucleotide
  Antisense strand to SEQ ID NO: 1495476
uugacucugggacacacug

SEQ ID NO: 1495478 - RNA, 19 nt, Artificial Sequence
  Description of Artificial Sequence: Synthetic oligonucleotide
  Sense strand starting at position 1659 of SEQ ID NO: 1244527
guuguauuacuccaagacc

SEQ ID NO: 1495479 - RNA, 19 nt, Artificial Sequence
  Description of Artificial Sequence: Synthetic oligonucleotide
  Antisense strand to SEQ ID NO: 1495478
ggucuuggaguaauacaac

SEQ ID NO: 1495480 - RNA, 19 nt, Artificial Sequence
  Description of Artificial Sequence: Synthetic oligonucleotide
  Sense strand starting at position 2103 of SEQ ID NO: 1244527
gacagucacuuggccuuaa

SEQ ID NO: 1495481 - RNA, 19 nt, Artificial Sequence
  Description of Artificial Sequence: Synthetic oligonucleotide
  Antisense strand to SEQ ID NO: 1495480
uuaaggccaagugacuguc

SEQ ID NO: 1495482 - RNA, 19 nt, Artificial Sequence
  Description of Artificial Sequence: Synthetic oligonucleotide
  Sense strand starting at position 2104 of SEQ ID NO: 1244527
acagucacuuggccuuaaa

SEQ ID NO: 1495483 - RNA, 19 nt, Artificial Sequence
  Description of Artificial Sequence: Synthetic oligonucleotide
  Antisense strand to SEQ ID NO: 1495482
uuuaaggccaagugacugu

SEQ ID NO: 1495484 - RNA, 19 nt, Artificial Sequence
  Description of Artificial Sequence: Synthetic oligonucleotide
  Sense strand starting at position 2118 of SEQ ID NO: 1244527
uuaaaugcgccucaagaaa

SEQ ID NO: 1495485 - RNA, 19 nt, Artificial Sequence
  Description of Artificial Sequence: Synthetic oligonucleotide
  Antisense strand to SEQ ID NO: 1495484
uuucuugaggcgcauuuaa

SEQ ID NO: 1495486 - RNA, 19 nt, Artificial Sequence
  Description of Artificial Sequence: Synthetic oligonucleotide
  Sense strand starting at position 2235 of SEQ ID NO: 1244527
ccuaguguugaccgagaaa

SEQ ID NO: 1495487 - RNA, 19 nt, Artificial Sequence
  Description of Artificial Sequence: Synthetic oligonucleotide
  Antisense strand to SEQ ID NO: 1495486
uuucucggucaacacuagg

SEQ ID NO: 1495488 - RNA, 19 nt, Artificial Sequence
  Description of Artificial Sequence: Synthetic oligonucleotide
  Sense strand starting at position 2238 of SEQ ID NO: 1244527
aguguugaccgagaaacug

SEQ ID NO: 1495489 - RNA, 19 nt, Artificial Sequence
  Description of Artificial Sequence: Synthetic oligonucleotide
  Antisense strand to SEQ ID NO: 1495488
caguuucucggucaacacu

SEQ ID NO: 1495490 - RNA, 19 nt, Artificial Sequence
  Description of Artificial Sequence: Synthetic oligonucleotide
  Sense strand starting at position 2608 of SEQ ID NO: 1244527
gauagcauggucugggauu

SEQ ID NO: 1495491 - RNA, 19 nt, Artificial Sequence
  Description of Artificial Sequence: Synthetic oligonucleotide
  Antisense strand to SEQ ID NO: 1495490
aaucccagaccaugcuauc

SEQ ID NO: 1495492 - RNA, 19 nt, Artificial Sequence
  Description of Artificial Sequence: Synthetic oligonucleotide
  Sense strand starting at position 2662 of SEQ ID NO: 1244527
ccgaauaagcucuaggcaa

SEQ ID NO: 1495493 - RNA, 19 nt, Artificial Sequence
  Description of Artificial Sequence: Synthetic oligonucleotide
  Antisense strand to SEQ ID NO: 1495492
uugccuagagcuuauucgg

SEQ ID NO: 1495494 - RNA, 19 nt, Artificial Sequence
  Description of Artificial Sequence: Synthetic oligonucleotide
  Sense strand starting at position 2664 of SEQ ID NO: 1244527
gaauaagcucuaggcaaag

SEQ ID NO: 1495495 - RNA, 19 nt, Artificial Sequence
  Description of Artificial Sequence: Synthetic oligonucleotide
  Antisense strand to SEQ ID NO: 1495494
cuuugccuagagcuuauuc

SEQ ID NO: 1495496 - RNA, 19 nt, Artificial Sequence
  Description of Artificial Sequence: Synthetic oligonucleotide
  Sense strand starting at position 2936 of SEQ ID NO: 1244527
caggaauguggauguuaaa

SEQ ID NO: 1495497 - RNA, 19 nt, Artificial Sequence
  Description of Artificial Sequence: Synthetic oligonucleotide
  Antisense strand to SEQ ID NO: 1495496
uuuaacauccacauuccug

SEQ ID NO: 1495498 - RNA, 19 nt, Artificial Sequence
  Description of Artificial Sequence: Synthetic oligonucleotide
  Sense strand starting at position 3038 of SEQ ID NO: 1244527
gucauagaagcucaucacu

SEQ ID NO: 1495499 - RNA, 19 nt, Artificial Sequence
  Description of Artificial Sequence: Synthetic oligonucleotide
  Antisense strand to SEQ ID NO: 1495498
agugaugagcuucuaugac

SEQ ID NO: 1495500 - RNA, 19 nt, Artificial Sequence
  Description of Artificial Sequence: Synthetic oligonucleotide
  Sense strand starting at position 3092 of SEQ ID NO: 1244527
uuugaaaggagcugcuauu

SEQ ID NO: 1495501 - RNA, 19 nt, Artificial Sequence
  Description of Artificial Sequence: Synthetic oligonucleotide
  Antisense strand to SEQ ID NO: 1495500
aauagcagcuccuuucaaa

SEQ ID NO: 1495502 - RNA, 19 nt, Artificial Sequence
  Description of Artificial Sequence: Synthetic oligonucleotide
  Sense strand starting at position 3123 of SEQ ID NO: 1244527
auauucuuacgguaaguaa

SEQ ID NO: 1495503 - RNA, 19 nt, Artificial Sequence
  Description of Artificial Sequence: Synthetic oligonucleotide
  Antisense strand to SEQ ID NO: 1495502
uuacuuaccguaagaauau

SEQ ID NO: 1495504 - RNA, 19 nt, Artificial Sequence
  Description of Artificial Sequence: Synthetic oligonucleotide
  Sense strand starting at position 3184 of SEQ ID NO: 1244527
acuaucguguuaucagauu

SEQ ID NO: 1495505 - RNA, 19 nt, Artificial Sequence
  Description of Artificial Sequence: Synthetic oligonucleotide
  Antisense strand to SEQ ID NO: 1495504
aaucugauaacacgauagu

SEQ ID NO: 1495506 - RNA, 19 nt, Artificial Sequence
  Description of Artificial Sequence: Synthetic oligonucleotide
  Sense strand starting at position 3205 of SEQ ID NO: 1244527
aaugaaguguacuuguaaa

SEQ ID NO: 1495507 - RNA, 19 nt, Artificial Sequence
  Description of Artificial Sequence: Synthetic oligonucleotide
  Antisense strand to SEQ ID NO: 1495506
uuuacaaguacacuucauu

SEQ ID NO: 1495508 - RNA, 19 nt, Artificial Sequence
  Description of Artificial Sequence: Synthetic oligonucleotide
  Sense strand starting at position 3230 of SEQ ID NO: 1244527
auuuacagugcccguuaua

SEQ ID NO: 1495509 - RNA, 19 nt, Artificial Sequence
  Description of Artificial Sequence: Synthetic oligonucleotide
  Antisense strand to SEQ ID NO: 1495508
uauaacgggcacuguaaau

SEQ ID NO: 1495510 - RNA, 19 nt, Artificial Sequence
  Description of Artificial Sequence: Synthetic oligonucleotide
  Sense strand starting at position 3239 of SEQ ID NO: 1244527
gcccguuauaugccaagca

SEQ ID NO: 1495511 - RNA, 19 nt, Artificial Sequence
  Description of Artificial Sequence: Synthetic oligonucleotide
  Antisense strand to SEQ ID NO: 1495510
ugcuuggcauauaacgggc

SEQ ID NO: 1495512 - RNA, 19 nt, Artificial Sequence
  Description of Artificial Sequence: Synthetic oligonucleotide
  Sense strand starting at position 3255 of SEQ ID NO: 1244527
gcacuuugccuggacuuua

SEQ ID NO: 1495513 - RNA, 19 nt, Artificial Sequence
  Description of Artificial Sequence: Synthetic oligonucleotide
  Antisense strand to SEQ ID NO: 1495512
uaaaguccaggcaaagugc

SEQ ID NO: 1495514 - RNA, 19 nt, Artificial Sequence
  Description of Artificial Sequence: Synthetic oligonucleotide
  Sense strand starting at position 3271 of SEQ ID NO: 1244527
uuauaugcauggucuguga

SEQ ID NO: 1495515 - RNA, 19 nt, Artificial Sequence
  Description of Artificial Sequence: Synthetic oligonucleotide
  Antisense strand to SEQ ID NO: 1495514
ucacagaccaugcauauaa

SEQ ID NO: 1495516 - RNA, 19 nt, Artificial Sequence
  Description of Artificial Sequence: Synthetic oligonucleotide
  Sense strand starting at position 3273 of SEQ ID NO: 1244527
auaugcauggucugugaga

SEQ ID NO: 1495517 - RNA, 19 nt, Artificial Sequence
  Description of Artificial Sequence: Synthetic oligonucleotide
  Antisense strand to SEQ ID NO: 1495516
ucucacagaccaugcauau

SEQ ID NO: 1495518 - RNA, 19 nt, Artificial Sequence
  Description of Artificial Sequence: Synthetic oligonucleotide
  Sense strand starting at position 3274 of SEQ ID NO: 1244527
uaugcauggucugugagag

SEQ ID NO: 1495519 - RNA, 19 nt, Artificial Sequence
  Description of Artificial Sequence: Synthetic oligonucleotide
  Antisense strand to SEQ ID NO: 1495518
cucucacagaccaugcaua

SEQ ID NO: 1495520 - RNA, 19 nt, Artificial Sequence
  Description of Artificial Sequence: Synthetic oligonucleotide
  Sense strand starting at position 3426 of SEQ ID NO: 1244527
aguaaugccugcuuuaaag

SEQ ID NO: 1495521 - RNA, 19 nt, Artificial Sequence
  Description of Artificial Sequence: Synthetic oligonucleotide
  Antisense strand to SEQ ID NO: 1495520
cuuuaaagcaggcauuacu

SEQ ID NO: 1495522 - RNA, 19 nt, Artificial Sequence
  Description of Artificial Sequence: Synthetic oligonucleotide
  Sense strand starting at position 3492 of SEQ ID NO: 1244527
ucgugucugcaacauaaua

SEQ ID NO: 1495523 - RNA, 19 nt, Artificial Sequence
  Description of Artificial Sequence: Synthetic oligonucleotide
  Antisense strand to SEQ ID NO: 1495522
uauuauguugcagacacga

SEQ ID NO: 1495524 - RNA, 19 nt, Artificial Sequence
  Description of Artificial Sequence: Synthetic oligonucleotide
  Sense strand starting at position 3599 of SEQ ID NO: 1244527
acuaaaguagcuuguaacu

SEQ ID NO: 1495525 - RNA, 19 nt, Artificial Sequence
  Description of Artificial Sequence: Synthetic oligonucleotide
  Antisense strand to SEQ ID NO: 1495524
aguuacaagcuacuuuagu

SEQ ID NO: 1495526 - RNA, 19 nt, Artificial Sequence
  Description of Artificial Sequence: Synthetic oligonucleotide
  Sense strand starting at position 3722 of SEQ ID NO: 1244527
agucuaaagacauggcagu

SEQ ID NO: 1495527 - RNA, 19 nt, Artificial Sequence
  Description of Artificial Sequence: Synthetic oligonucleotide
  Antisense strand to SEQ ID NO: 1495526
acugccaugucuuuagacu

SEQ ID NO: 1495528 - RNA, 19 nt, Artificial Sequence
  Description of Artificial Sequence: Synthetic oligonucleotide
  Sense strand starting at position 3882 of SEQ ID NO: 1244527
uuagaaauaugagcauauc

SEQ ID NO: 1495529 - RNA, 19 nt, Artificial Sequence
  Description of Artificial Sequence: Synthetic oligonucleotide
  Antisense strand to SEQ ID NO: 1495528
gauaugcucauauuucuaa

SEQ ID NO: 1495530 - RNA, 19 nt, Artificial Sequence
  Description of Artificial Sequence: Synthetic oligonucleotide
  Sense strand starting at position 3917 of SEQ ID NO: 1244527
uucccuuccuuugugauuu

SEQ ID NO: 1495531 - RNA, 19 nt, Artificial Sequence
  Description of Artificial Sequence: Synthetic oligonucleotide
  Antisense strand to SEQ ID NO: 1495530
aaaucacaaaggaagggaa

SEQ ID NO: 1495532 - RNA, 19 nt, Artificial Sequence
  Description of Artificial Sequence: Synthetic oligonucleotide
  Sense strand starting at position 3980 of SEQ ID NO: 1244527
gcauauauugggugcuaca

SEQ ID NO: 1495533 - RNA, 19 nt, Artificial Sequence
  Description of Artificial Sequence: Synthetic oligonucleotide
  Antisense strand to SEQ ID NO: 1495532
uguagcacccaauauaugc

SEQ ID NO: 1495534 - RNA, 19 nt, Artificial Sequence
  Description of Artificial Sequence: Synthetic oligonucleotide
  Sense strand starting at position 180 of SEQ ID NO: 1244528
ccagcucugggcugagaaa

SEQ ID NO: 1495535 - RNA, 19 nt, Artificial Sequence
  Description of Artificial Sequence: Synthetic oligonucleotide
  Antisense strand to SEQ ID NO: 1495534
uuucucagcccagagcugg

SEQ ID NO: 1495536 - RNA, 19 nt, Artificial Sequence
  Description of Artificial Sequence: Synthetic oligonucleotide
  Sense strand starting at position 249 of SEQ ID NO: 1244528
ccguuuggugaugaugaga

SEQ ID NO: 1495537 - RNA, 19 nt, Artificial Sequence
  Description of Artificial Sequence: Synthetic oligonucleotide
  Antisense strand to SEQ ID NO: 1495536
ucucaucaucaccaaacgg

SEQ ID NO: 1495538 - RNA, 19 nt, Artificial Sequence
  Description of Artificial Sequence: Synthetic oligonucleotide
  Sense strand starting at position 302 of SEQ ID NO: 1244528
acaguucugccagagauca

SEQ ID NO: 1495539 - RNA, 19 nt, Artificial Sequence
  Description of Artificial Sequence: Synthetic oligonucleotide
  Antisense strand to SEQ ID NO: 1495538
ugaucucuggcagaacugu

SEQ ID NO: 1495540 - RNA, 19 nt, Artificial Sequence
  Description of Artificial Sequence: Synthetic oligonucleotide
  Sense strand starting at position 304 of SEQ ID NO: 1244528
aguucugccagagaucagu

SEQ ID NO: 1495541 - RNA, 19 nt, Artificial Sequence
  Description of Artificial Sequence: Synthetic oligonucleotide
  Antisense strand to SEQ ID NO: 1495540
acugaucucuggcagaacu

SEQ ID NO: 1495542 - RNA, 19 nt, Artificial Sequence
  Description of Artificial Sequence: Synthetic oligonucleotide
  Sense strand starting at position 338 of SEQ ID NO: 1244528
cacgauccauugcuagaga

SEQ ID NO: 1495543 - RNA, 19 nt, Artificial Sequence
  Description of Artificial Sequence: Synthetic oligonucleotide
  Antisense strand to SEQ ID NO: 1495542
ucucuagcaauggaucgug

SEQ ID NO: 1495544 - RNA, 19 nt, Artificial Sequence
  Description of Artificial Sequence: Synthetic oligonucleotide
  Sense strand starting at position 351 of SEQ ID NO: 1244528
uagagagaaucagauagau

SEQ ID NO: 1495545 - RNA, 19 nt, Artificial Sequence
  Description of Artificial Sequence: Synthetic oligonucleotide
  Antisense strand to SEQ ID NO: 1495544
aucuaucugauucucucua

SEQ ID NO: 1495546 - RNA, 19 nt, Artificial Sequence
  Description of Artificial Sequence: Synthetic oligonucleotide
  Sense strand starting at position 360 of SEQ ID NO: 1244528
ucagauagauauccugagu

SEQ ID NO: 1495547 - RNA, 19 nt, Artificial Sequence
  Description of Artificial Sequence: Synthetic oligonucleotide
  Antisense strand to SEQ ID NO: 1495546
acucaggauaucuaucuga

SEQ ID NO: 1495548 - RNA, 19 nt, Artificial Sequence
  Description of Artificial Sequence: Synthetic oligonucleotide
  Sense strand starting at position 507 of SEQ ID NO: 1244528
gcaccuuguaaauggagaa

SEQ ID NO: 1495549 - RNA, 19 nt, Artificial Sequence
  Description of Artificial Sequence: Synthetic oligonucleotide
  Antisense strand to SEQ ID NO: 1495548
uucuccauuuacaaggugc

SEQ ID NO: 1495550 - RNA, 19 nt, Artificial Sequence
  Description of Artificial Sequence: Synthetic oligonucleotide
  Sense strand starting at position 520 of SEQ ID NO: 1244528
ggagaaguuccacaugcac

SEQ ID NO: 1495551 - RNA, 19 nt, Artificial Sequence
  Description of Artificial Sequence: Synthetic oligonucleotide
  Antisense strand to SEQ ID NO: 1495550
gugcauguggaacuucucc

SEQ ID NO: 1495552 - RNA, 19 nt, Artificial Sequence
  Description of Artificial Sequence: Synthetic oligonucleotide
  Sense strand starting at position 543 of SEQ ID NO: 1244528
aaacgauuaugugcagaga

SEQ ID NO: 1495553 - RNA, 19 nt, Artificial Sequence
  Description of Artificial Sequence: Synthetic oligonucleotide
  Antisense strand to SEQ ID NO: 1495552
ucucugcacauaaucguuu

SEQ ID NO: 1495554 - RNA, 19 nt, Artificial Sequence
  Description of Artificial Sequence: Synthetic oligonucleotide
  Sense strand starting at position 544 of SEQ ID NO: 1244528
aacgauuaugugcagagau

SEQ ID NO: 1495555 - RNA, 19 nt, Artificial Sequence
  Description of Artificial Sequence: Synthetic oligonucleotide
  Antisense strand to SEQ ID NO: 1495554
aucucugcacauaaucguu

SEQ ID NO: 1495556 - RNA, 19 nt, Artificial Sequence
  Description of Artificial Sequence: Synthetic oligonucleotide
  Sense strand starting at position 546 of SEQ ID NO: 1244528
cgauuaugugcagagaugu

SEQ ID NO: 1495557 - RNA, 19 nt, Artificial Sequence
  Description of Artificial Sequence: Synthetic oligonucleotide
  Antisense strand to SEQ ID NO: 1495556
acaucucugcacauaaucg

SEQ ID NO: 1495558 - RNA, 19 nt, Artificial Sequence
  Description of Artificial Sequence: Synthetic oligonucleotide
  Sense strand starting at position 556 of SEQ ID NO: 1244528
cagagauguuuacuauagu

SEQ ID NO: 1495559 - RNA, 19 nt, Artificial Sequence
  Description of Artificial Sequence: Synthetic oligonucleotide
  Antisense strand to SEQ ID NO: 1495558
acuauaguaaacaucucug

SEQ ID NO: 1495560 - RNA, 19 nt, Artificial Sequence
  Description of Artificial Sequence: Synthetic oligonucleotide
  Sense strand starting at position 628 of SEQ ID NO: 1244528
ccagcaucucgggaucauu

SEQ ID NO: 1495561 - RNA, 19 nt, Artificial Sequence
  Description of Artificial Sequence: Synthetic oligonucleotide
  Antisense strand to SEQ ID NO: 1495560
aaugaucccgagaugcugg

SEQ ID NO: 1495562 - RNA, 19 nt, Artificial Sequence
  Description of Artificial Sequence: Synthetic oligonucleotide
  Sense strand starting at position 666 of SEQ ID NO: 1244528
agucuauuuccuuguuuau

SEQ ID NO: 1495563 - RNA, 19 nt, Artificial Sequence
  Description of Artificial Sequence: Synthetic oligonucleotide
  Antisense strand to SEQ ID NO: 1495562
auaaacaaggaaauagacu

SEQ ID NO: 1495564 - RNA, 19 nt, Artificial Sequence
  Description of Artificial Sequence: Synthetic oligonucleotide
  Sense strand starting at position 687 of SEQ ID NO: 1244528
cuccuaucagucugauauc

SEQ ID NO: 1495565 - RNA, 19 nt, Artificial Sequence
  Description of Artificial Sequence: Synthetic oligonucleotide
  Antisense strand to SEQ ID NO: 1495564
gauaucagacugauaggag

SEQ ID NO: 1495566 - RNA, 19 nt, Artificial Sequence
  Description of Artificial Sequence: Synthetic oligonucleotide
  Sense strand starting at position 731 of SEQ ID NO: 1244528
cugugaagaugcuuguaaa

SEQ ID NO: 1495567 - RNA, 19 nt, Artificial Sequence
  Description of Artificial Sequence: Synthetic oligonucleotide
  Antisense strand to SEQ ID NO: 1495566
uuuacaagcaucuucacag

SEQ ID NO: 1495568 - RNA, 19 nt, Artificial Sequence
  Description of Artificial Sequence: Synthetic oligonucleotide
  Sense strand starting at position 1266 of SEQ ID NO: 1244528
aacagaaguuacucugaug

SEQ ID NO: 1495569 - RNA, 19 nt, Artificial Sequence
  Description of Artificial Sequence: Synthetic oligonucleotide
  Antisense strand to SEQ ID NO: 1495568
caucagaguaacuucuguu

SEQ ID NO: 1495570 - RNA, 19 nt, Artificial Sequence
  Description of Artificial Sequence: Synthetic oligonucleotide
  Sense strand starting at position 1299 of SEQ ID NO: 1244528
guggaagcuuuacuaacaa

SEQ ID NO: 1495571 - RNA, 19 nt, Artificial Sequence
  Description of Artificial Sequence: Synthetic oligonucleotide
  Antisense strand to SEQ ID NO: 1495570
uuguuaguaaagcuuccac

SEQ ID NO: 1495572 - RNA, 19 nt, Artificial Sequence
  Description of Artificial Sequence: Synthetic oligonucleotide
  Sense strand starting at position 1556 of SEQ ID NO: 1244528
ugaaguuacuuggcuuaaa

SEQ ID NO: 1495573 - RNA, 19 nt, Artificial Sequence
  Description of Artificial Sequence: Synthetic oligonucleotide
  Antisense strand to SEQ ID NO: 1495572
uuuaagccaaguaacuuca

SEQ ID NO: 1495574 - RNA, 19 nt, Artificial Sequence
  Description of Artificial Sequence: Synthetic oligonucleotide
  Sense strand starting at position 1557 of SEQ ID NO: 1244528
gaaguuacuuggcuuaaau

SEQ ID NO: 1495575 - RNA, 19 nt, Artificial Sequence
  Description of Artificial Sequence: Synthetic oligonucleotide
  Antisense strand to SEQ ID NO: 1495574
auuuaagccaaguaacuuc

SEQ ID NO: 1495576 - RNA, 19 nt, Artificial Sequence
  Description of Artificial Sequence: Synthetic oligonucleotide
  Sense strand starting at position 1559 of SEQ ID NO: 1244528
aguuacuuggcuuaaauag

SEQ ID NO: 1495577 - RNA, 19 nt, Artificial Sequence
  Description of Artificial Sequence: Synthetic oligonucleotide
  Antisense strand to SEQ ID NO: 1495576
cuauuuaagccaaguaacu

SEQ ID NO: 1495578 - RNA, 19 nt, Artificial Sequence
  Description of Artificial Sequence: Synthetic oligonucleotide
  Sense strand starting at position 1613 of SEQ ID NO: 1244528
gguuccuaucacugaaucu

SEQ ID NO: 1495579 - RNA, 19 nt, Artificial Sequence
  Description of Artificial Sequence: Synthetic oligonucleotide
  Antisense strand to SEQ ID NO: 1495578
agauucagugauaggaacc

SEQ ID NO: 1495580 - RNA, 19 nt, Artificial Sequence
  Description of Artificial Sequence: Synthetic oligonucleotide
  Sense strand starting at position 1662 of SEQ ID NO: 1244528
ggcagauugccagaaacuu

SEQ ID NO: 1495581 - RNA, 19 nt, Artificial Sequence
  Description of Artificial Sequence: Synthetic oligonucleotide
  Antisense strand to SEQ ID NO: 1495580
aaguuucuggcaaucugcc

SEQ ID NO: 1495582 - RNA, 19 nt, Artificial Sequence
  Description of Artificial Sequence: Synthetic oligonucleotide
  Sense strand starting at position 1670 of SEQ ID NO: 1244528
gccagaaacuucccuggga

SEQ ID NO: 1495583 - RNA, 19 nt, Artificial Sequence
  Description of Artificial Sequence: Synthetic oligonucleotide
  Antisense strand to SEQ ID NO: 1495582
ucccagggaaguuucuggc

SEQ ID NO: 1495584 - RNA, 19 nt, Artificial Sequence
  Description of Artificial Sequence: Synthetic oligonucleotide
  Sense strand starting at position 1853 of SEQ ID NO: 1244528
ggacgaugauacucagcaa

SEQ ID NO: 1495585 - RNA, 19 nt, Artificial Sequence
  Description of Artificial Sequence: Synthetic oligonucleotide
  Antisense strand to SEQ ID NO: 1495584
uugcugaguaucaucgucc

SEQ ID NO: 1495586 - RNA, 19 nt, Artificial Sequence
  Description of Artificial Sequence: Synthetic oligonucleotide
  Sense strand starting at position 1879 of SEQ ID NO: 1244528
agcauucuggcggcaaguu

SEQ ID NO: 1495587 - RNA, 19 nt, Artificial Sequence
  Description of Artificial Sequence: Synthetic oligonucleotide
  Antisense strand to SEQ ID NO: 1495586
aacuugccgccagaaugcu

SEQ ID NO: 1495588 - RNA, 19 nt, Artificial Sequence
  Description of Artificial Sequence: Synthetic oligonucleotide
  Sense strand starting at position 2177 of SEQ ID NO: 1244528
agcgguucgcacgucuaaa

SEQ ID NO: 1495589 - RNA, 19 nt, Artificial Sequence
  Description of Artificial Sequence: Synthetic oligonucleotide
  Antisense strand to SEQ ID NO: 1495588
uuuagacgugcgaaccgcu

SEQ ID NO: 1495590 - RNA, 19 nt, Artificial Sequence
  Description of Artificial Sequence: Synthetic oligonucleotide
  Sense strand starting at position 2363 of SEQ ID NO: 1244528
gggaguaggugcccagauu

SEQ ID NO: 1495591 - RNA, 19 nt, Artificial Sequence
  Description of Artificial Sequence: Synthetic oligonucleotide
  Antisense strand to SEQ ID NO: 1495590
aaucugggcaccuacuccc

SEQ ID NO: 1495592 - RNA, 19 nt, Artificial Sequence
  Description of Artificial Sequence: Synthetic oligonucleotide
  Sense strand starting at position 2904 of SEQ ID NO: 1244528
ggacauuuaucccaaguaa

SEQ ID NO: 1495593 - RNA, 19 nt, Artificial Sequence
  Description of Artificial Sequence: Synthetic oligonucleotide
  Antisense strand to SEQ ID NO: 1495592
uuacuugggauaaaugucc

SEQ ID NO: 1495594 - RNA, 19 nt, Artificial Sequence
  Description of Artificial Sequence: Synthetic oligonucleotide
  Sense strand starting at position 2996 of SEQ ID NO: 1244528
cugugaaagaucuggcuga

SEQ ID NO: 1495595 - RNA, 19 nt, Artificial Sequence
  Description of Artificial Sequence: Synthetic oligonucleotide
  Antisense strand to SEQ ID NO: 1495594
ucagccagaucuuucacag

SEQ ID NO: 1495596 - RNA, 19 nt, Artificial Sequence
  Description of Artificial Sequence: Synthetic oligonucleotide
  Sense strand starting at position 3000 of SEQ ID NO: 1244528
gaaagaucuggcugagacu

SEQ ID NO: 1495597 - RNA, 19 nt, Artificial Sequence
  Description of Artificial Sequence: Synthetic oligonucleotide
  Antisense strand to SEQ ID NO: 1495596
agucucagccagaucuuuc

SEQ ID NO: 1495598 - RNA, 19 nt, Artificial Sequence
  Description of Artificial Sequence: Synthetic oligonucleotide
  Sense strand starting at position 3139 of SEQ ID NO: 1244528
ucuggaaugcacuggaaga

SEQ ID NO: 1495599 - RNA, 19 nt, Artificial Sequence
  Description of Artificial Sequence: Synthetic oligonucleotide
  Antisense strand to SEQ ID NO: 1495598
ucuuccagugcauuccaga

SEQ ID NO: 1495600 - RNA, 19 nt, Artificial Sequence
  Description of Artificial Sequence: Synthetic oligonucleotide
  Sense strand starting at position 3280 of SEQ ID NO: 1244528
cagugugucccagagucaa

SEQ ID NO: 1495601 - RNA, 19 nt, Artificial Sequence
  Description of Artificial Sequence: Synthetic oligonucleotide
  Antisense strand to SEQ ID NO: 1495600
uugacucugggacacacug

SEQ ID NO: 1495602 - RNA, 19 nt, Artificial Sequence
  Description of Artificial Sequence: Synthetic oligonucleotide
  Sense strand starting at position 3404 of SEQ ID NO: 1244528
guuguauuacuccaagacc

SEQ ID NO: 1495603 - RNA, 19 nt, Artificial Sequence
  Description of Artificial Sequence: Synthetic oligonucleotide
  Antisense strand to SEQ ID NO: 1495602
ggucuuggaguaauacaac

SEQ ID NO: 1495604 - RNA, 19 nt, Artificial Sequence
  Description of Artificial Sequence: Synthetic oligonucleotide
  Sense strand starting at position 3848 of SEQ ID NO: 1244528
gacagucacuuggccuuaa

SEQ ID NO: 1495605 - RNA, 19 nt, Artificial Sequence
  Description of Artificial Sequence: Synthetic oligonucleotide
  Antisense strand to SEQ ID NO: 1495604
uuaaggccaagugacuguc

SEQ ID NO: 1495606 - RNA, 19 nt, Artificial Sequence
  Description of Artificial Sequence: Synthetic oligonucleotide
  Sense strand starting at position 3849 of SEQ ID NO: 1244528
acagucacuuggccuuaaa

SEQ ID NO: 1495607 - RNA, 19 nt, Artificial Sequence
  Description of Artificial Sequence: Synthetic oligonucleotide
  Antisense strand to SEQ ID NO: 1495606
uuuaaggccaagugacugu

SEQ ID NO: 1495608 - RNA, 19 nt, Artificial Sequence
  Description of Artificial Sequence: Synthetic oligonucleotide
  Sense strand starting at position 3863 of SEQ ID NO: 1244528
uuaaaugcgccucaagaaa

SEQ ID NO: 1495609 - RNA, 19 nt, Artificial Sequence
  Description of Artificial Sequence: Synthetic oligonucleotide
  Antisense strand to SEQ ID NO: 1495608
uuucuugaggcgcauuuaa

SEQ ID NO: 1495610 - RNA, 19 nt, Artificial Sequence
  Description of Artificial Sequence: Synthetic oligonucleotide
  Sense strand starting at position 3980 of SEQ ID NO: 1244528
ccuaguguugaccgagaaa

SEQ ID NO: 1495611 - RNA, 19 nt, Artificial Sequence
  Description of Artificial Sequence: Synthetic oligonucleotide
  Antisense strand to SEQ ID NO: 1495610
uuucucggucaacacuagg

SEQ ID NO: 1495612 - RNA, 19 nt, Artificial Sequence
  Description of Artificial Sequence: Synthetic oligonucleotide
  Sense strand starting at position 3983 of SEQ ID NO: 1244528
aguguugaccgagaaacug

SEQ ID NO: 1495613 - RNA, 19 nt, Artificial Sequence
  Description of Artificial Sequence: Synthetic oligonucleotide
  Antisense strand to SEQ ID NO: 1495612
caguuucucggucaacacu

SEQ ID NO: 1495614 - RNA, 19 nt, Artificial Sequence
  Description of Artificial Sequence: Synthetic oligonucleotide
  Sense strand starting at position 495 of SEQ ID NO: 1244529
cagcauucccugugcagga

SEQ ID NO: 1495615 - RNA, 19 nt, Artificial Sequence
  Description of Artificial Sequence: Synthetic oligonucleotide
  Antisense strand to SEQ ID NO: 1495614
uccugcacagggaaugcug

SEQ ID NO: 1495616 - RNA, 19 nt, Artificial Sequence
  Description of Artificial Sequence: Synthetic oligonucleotide
  Sense strand starting at position 1446 of SEQ ID NO: 1244529
cgaggaaauccuggcaguu

SEQ ID NO: 1495617 - RNA, 19 nt, Artificial Sequence
  Description of Artificial Sequence: Synthetic oligonucleotide
  Antisense strand to SEQ ID NO: 1495616
aacugccaggauuuccucg

SEQ ID NO: 1495618 - RNA, 19 nt, Artificial Sequence
  Description of Artificial Sequence: Synthetic oligonucleotide
  Sense strand starting at position 1631 of SEQ ID NO: 1244529
guuugcaccucucagcuau

SEQ ID NO: 1495619 - RNA, 19 nt, Artificial Sequence
  Description of Artificial Sequence: Synthetic oligonucleotide
  Antisense strand to SEQ ID NO: 1495618
auagcugagaggugcaaac

SEQ ID NO: 1495620 - RNA, 19 nt, Artificial Sequence
  Description of Artificial Sequence: Synthetic oligonucleotide
  Sense strand starting at position 1642 of SEQ ID NO: 1244529
ucagcuaucucuuguuucu

SEQ ID NO: 1495621 - RNA, 19 nt, Artificial Sequence
  Description of Artificial Sequence: Synthetic oligonucleotide
  Antisense strand to SEQ ID NO: 1495620
agaaacaagagauagcuga

SEQ ID NO: 1495622 - RNA, 19 nt, Artificial Sequence
  Description of Artificial Sequence: Synthetic oligonucleotide
  Sense strand starting at position 2748 of SEQ ID NO: 1244529
ggaggugagcugugcuaau

SEQ ID NO: 1495623 - RNA, 19 nt, Artificial Sequence
  Description of Artificial Sequence: Synthetic oligonucleotide
  Antisense strand to SEQ ID NO: 1495622
auuagcacagcucaccucc

SEQ ID NO: 1495624 - RNA, 19 nt, Artificial Sequence
  Description of Artificial Sequence: Synthetic oligonucleotide
  Sense strand starting at position 3090 of SEQ ID NO: 1244529
ugaagauucugcucagcac

SEQ ID NO: 1495625 - RNA, 19 nt, Artificial Sequence
  Description of Artificial Sequence: Synthetic oligonucleotide
  Antisense strand to SEQ ID NO: 1495624
gugcugagcagaaucuuca

SEQ ID NO: 1495626 - RNA, 19 nt, Artificial Sequence
  Description of Artificial Sequence: Synthetic oligonucleotide
  Sense strand starting at position 3110 of SEQ ID NO: 1244529
ccagguucuggcugucaaa

SEQ ID NO: 1495627 - RNA, 19 nt, Artificial Sequence
  Description of Artificial Sequence: Synthetic oligonucleotide
  Antisense strand to SEQ ID NO: 1495626
uuugacagccagaaccugg

SEQ ID NO: 1495628 - RNA, 19 nt, Artificial Sequence
  Description of Artificial Sequence: Synthetic oligonucleotide
  Sense strand starting at position 3165 of SEQ ID NO: 1244529
gccaauucugccuguggca

SEQ ID NO: 1495629 - RNA, 19 nt, Artificial Sequence
  Description of Artificial Sequence: Synthetic oligonucleotide
  Antisense strand to SEQ ID NO: 1495628
ugccacaggcagaauuggc

SEQ ID NO: 1495630 - RNA, 19 nt, Artificial Sequence
  Description of Artificial Sequence: Synthetic oligonucleotide
  Sense strand starting at position 3178 of SEQ ID NO: 1244529
guggcaucuccguggucuu

SEQ ID NO: 1495631 - RNA, 19 nt, Artificial Sequence
  Description of Artificial Sequence: Synthetic oligonucleotide
  Antisense strand to SEQ ID NO: 1495630
aagaccacggagaugccac

SEQ ID NO: 1495632 - RNA, 19 nt, Artificial Sequence
  Description of Artificial Sequence: Synthetic oligonucleotide
  Sense strand starting at position 3341 of SEQ ID NO: 1244529
gggaaagucuccuugggag

SEQ ID NO: 1495633 - RNA, 19 nt, Artificial Sequence
  Description of Artificial Sequence: Synthetic oligonucleotide
  Antisense strand to SEQ ID NO: 1495632
cucccaaggagacuuuccc

SEQ ID NO: 1495634 - RNA, 19 nt, Artificial Sequence
  Description of Artificial Sequence: Synthetic oligonucleotide
  Sense strand starting at position 3343 of SEQ ID NO: 1244529
gaaagucuccuugggagag

SEQ ID NO: 1495635 - RNA, 19 nt, Artificial Sequence
  Description of Artificial Sequence: Synthetic oligonucleotide
  Antisense strand to SEQ ID NO: 1495634
cucucccaaggagacuuuc

SEQ ID NO: 1495636 - RNA, 19 nt, Artificial Sequence
  Description of Artificial Sequence: Synthetic oligonucleotide
  Sense strand starting at position 3374 of SEQ ID NO: 1244529
ggacaugagucaccacaac

SEQ ID NO: 1495637 - RNA, 19 nt, Artificial Sequence
  Description of Artificial Sequence: Synthetic oligonucleotide
  Antisense strand to SEQ ID NO: 1495636
guuguggugacucaugucc

SEQ ID NO: 1495638 - RNA, 19 nt, Artificial Sequence
  Description of Artificial Sequence: Synthetic oligonucleotide
  Sense strand starting at position 3485 of SEQ ID NO: 1244529
aggauugauucugucugga

SEQ ID NO: 1495639 - RNA, 19 nt, Artificial Sequence
  Description of Artificial Sequence: Synthetic oligonucleotide
  Antisense strand to SEQ ID NO: 1495638
uccagacagaaucaauccu

SEQ ID NO: 1495640 - RNA, 19 nt, Artificial Sequence
  Description of Artificial Sequence: Synthetic oligonucleotide
  Sense strand starting at position 3487 of SEQ ID NO: 1244529
gauugauucugucuggauu

SEQ ID NO: 1495641 - RNA, 19 nt, Artificial Sequence
  Description of Artificial Sequence: Synthetic oligonucleotide
  Antisense strand to SEQ ID NO: 1495640
aauccagacagaaucaauc

SEQ ID NO: 1495642 - RNA, 19 nt, Artificial Sequence
  Description of Artificial Sequence: Synthetic oligonucleotide
  Sense strand starting at position 3488 of SEQ ID NO: 1244529
auugauucugucuggauuc

SEQ ID NO: 1495643 - RNA, 19 nt, Artificial Sequence
  Description of Artificial Sequence: Synthetic oligonucleotide
  Antisense strand to SEQ ID NO: 1495642
gaauccagacagaaucaau

SEQ ID NO: 1495644 - RNA, 19 nt, Artificial Sequence
  Description of Artificial Sequence: Synthetic oligonucleotide
  Sense strand starting at position 3592 of SEQ ID NO: 1244529
cuccauauucuccacgaga

SEQ ID NO: 1495645 - RNA, 19 nt, Artificial Sequence
  Description of Artificial Sequence: Synthetic oligonucleotide
  Antisense strand to SEQ ID NO: 1495644
ucucguggagaauauggag

SEQ ID NO: 1495646 - RNA, 19 nt, Artificial Sequence
  Description of Artificial Sequence: Synthetic oligonucleotide
  Sense strand starting at position 3594 of SEQ ID NO: 1244529
ccauauucuccacgagaca

SEQ ID NO: 1495647 - RNA, 19 nt, Artificial Sequence
  Description of Artificial Sequence: Synthetic oligonucleotide
  Antisense strand to SEQ ID NO: 1495646
ugucucguggagaauaugg

SEQ ID NO: 1495648 - RNA, 19 nt, Artificial Sequence
  Description of Artificial Sequence: Synthetic oligonucleotide
  Sense strand starting at position 3823 of SEQ ID NO: 1244529
ggagccuggucccagaagu

SEQ ID NO: 1495649 - RNA, 19 nt, Artificial Sequence
  Description of Artificial Sequence: Synthetic oligonucleotide
  Antisense strand to SEQ ID NO: 1495648
acuucugggaccaggcucc

SEQ ID NO: 1495650 - RNA, 19 nt, Artificial Sequence
  Description of Artificial Sequence: Synthetic oligonucleotide
  Sense strand starting at position 3895 of SEQ ID NO: 1244529
gcaacucuggcacaugauu

SEQ ID NO: 1495651 - RNA, 19 nt, Artificial Sequence
  Description of Artificial Sequence: Synthetic oligonucleotide
  Antisense strand to SEQ ID NO: 1495650
aaucaugugccagaguugc

SEQ ID NO: 1495652 - RNA, 19 nt, Artificial Sequence
  Description of Artificial Sequence: Synthetic oligonucleotide
  Sense strand starting at position 338 of SEQ ID NO: 1244530
uaagaaauaguaugcagua

SEQ ID NO: 1495653 - RNA, 19 nt, Artificial Sequence
  Description of Artificial Sequence: Synthetic oligonucleotide
  Antisense strand to SEQ ID NO: 1495652
uacugcauacuauuucuua

SEQ ID NO: 1495654 - RNA, 19 nt, Artificial Sequence
  Description of Artificial Sequence: Synthetic oligonucleotide
  Sense strand starting at position 339 of SEQ ID NO: 1244530
aagaaauaguaugcaguaa

SEQ ID NO: 1495655 - RNA, 19 nt, Artificial Sequence
  Description of Artificial Sequence: Synthetic oligonucleotide
  Antisense strand to SEQ ID NO: 1495654
uuacugcauacuauuucuu

SEQ ID NO: 1495656 - RNA, 19 nt, Artificial Sequence
  Description of Artificial Sequence: Synthetic oligonucleotide
  Sense strand starting at position 424 of SEQ ID NO: 1244530
acagcuagugauggauaaa

SEQ ID NO: 1495657 - RNA, 19 nt, Artificial Sequence
  Description of Artificial Sequence: Synthetic oligonucleotide
  Antisense strand to SEQ ID NO: 1495656
uuuauccaucacuagcugu

SEQ ID NO: 1495658 - RNA, 19 nt, Artificial Sequence
  Description of Artificial Sequence: Synthetic oligonucleotide
  Sense strand starting at position 449 of SEQ ID NO: 1244530
uuacaugucauggguguca

SEQ ID NO: 1495659 - RNA, 19 nt, Artificial Sequence
  Description of Artificial Sequence: Synthetic oligonucleotide
  Antisense strand to SEQ ID NO: 1495658
ugacacccaugacauguaa

SEQ ID NO: 1495660 - RNA, 19 nt, Artificial Sequence
  Description of Artificial Sequence: Synthetic oligonucleotide
  Sense strand starting at position 451 of SEQ ID NO: 1244530
acaugucaugggugucaaa

SEQ ID NO: 1495661 - RNA, 19 nt, Artificial Sequence
  Description of Artificial Sequence: Synthetic oligonucleotide
  Antisense strand to SEQ ID NO: 1495660
uuugacacccaugacaugu

SEQ ID NO: 1495662 - RNA, 19 nt, Artificial Sequence
  Description of Artificial Sequence: Synthetic oligonucleotide
  Sense strand starting at position 729 of SEQ ID NO: 1244530
cuccaacaugcucgacuaa

SEQ ID NO: 1495663 - RNA, 19 nt, Artificial Sequence
  Description of Artificial Sequence: Synthetic oligonucleotide
  Antisense strand to SEQ ID NO: 1495662
uuagucgagcauguuggag

SEQ ID NO: 1495664 - RNA, 19 nt, Artificial Sequence
  Description of Artificial Sequence: Synthetic oligonucleotide
  Sense strand starting at position 730 of SEQ ID NO: 1244530
uccaacaugcucgacuaau

SEQ ID NO: 1495665 - RNA, 19 nt, Artificial Sequence
  Description of Artificial Sequence: Synthetic oligonucleotide
  Antisense strand to SEQ ID NO: 1495664
auuagucgagcauguugga

SEQ ID NO: 1495666 - RNA, 19 nt, Artificial Sequence
  Description of Artificial Sequence: Synthetic oligonucleotide
  Sense strand starting at position 1036 of SEQ ID NO: 1244530
guuuguaagcuguuuguca

SEQ ID NO: 1495667 - RNA, 19 nt, Artificial Sequence
  Description of Artificial Sequence: Synthetic oligonucleotide
  Antisense strand to SEQ ID NO: 1495666
ugacaaacagcuuacaaac

SEQ ID NO: 1495668 - RNA, 19 nt, Artificial Sequence
  Description of Artificial Sequence: Synthetic oligonucleotide
  Sense strand starting at position 1038 of SEQ ID NO: 1244530
uuguaagcuguuugucacu

SEQ ID NO: 1495669 - RNA, 19 nt, Artificial Sequence
  Description of Artificial Sequence: Synthetic oligonucleotide
  Antisense strand to SEQ ID NO: 1495668
agugacaaacagcuuacaa

SEQ ID NO: 1495670 - RNA, 19 nt, Artificial Sequence
  Description of Artificial Sequence: Synthetic oligonucleotide
  Sense strand starting at position 1465 of SEQ ID NO: 1244530
gcucuuacccauuacgaaa

SEQ ID NO: 1495671 - RNA, 19 nt, Artificial Sequence
  Description of Artificial Sequence: Synthetic oligonucleotide
  Antisense strand to SEQ ID NO: 1495670
uuucguaauggguaagagc

SEQ ID NO: 1495672 - RNA, 19 nt, Artificial Sequence
  Description of Artificial Sequence: Synthetic oligonucleotide
  Sense strand starting at position 1995 of SEQ ID NO: 1244530
gccaaugaguuuccaggau

SEQ ID NO: 1495673 - RNA, 19 nt, Artificial Sequence
  Description of Artificial Sequence: Synthetic oligonucleotide
  Antisense strand to SEQ ID NO: 1495672
auccuggaaacucauuggc

SEQ ID NO: 1495674 - RNA, 19 nt, Artificial Sequence
  Description of Artificial Sequence: Synthetic oligonucleotide
  Sense strand starting at position 1999 of SEQ ID NO: 1244530
augaguuuccaggaucgga

SEQ ID NO: 1495675 - RNA, 19 nt, Artificial Sequence
  Description of Artificial Sequence: Synthetic oligonucleotide
  Antisense strand to SEQ ID NO: 1495674
uccgauccuggaaacucau

SEQ ID NO: 1495676 - RNA, 19 nt, Artificial Sequence
  Description of Artificial Sequence: Synthetic oligonucleotide
  Sense strand starting at position 2038 of SEQ ID NO: 1244530
aggucauugguuggagcuu

SEQ ID NO: 1495677 - RNA, 19 nt, Artificial Sequence
  Description of Artificial Sequence: Synthetic oligonucleotide
  Antisense strand to SEQ ID NO: 1495676
aagcuccaaccaaugaccu

SEQ ID NO: 1495678 - RNA, 19 nt, Artificial Sequence
  Description of Artificial Sequence: Synthetic oligonucleotide
  Sense strand starting at position 2069 of SEQ ID NO: 1244530
gccaauuagagcgagaaca

SEQ ID NO: 1495679 - RNA, 19 nt, Artificial Sequence
  Description of Artificial Sequence: Synthetic oligonucleotide
  Antisense strand to SEQ ID NO: 1495678
uguucucgcucuaauuggc

SEQ ID NO: 1495680 - RNA, 19 nt, Artificial Sequence
  Description of Artificial Sequence: Synthetic oligonucleotide
  Sense strand starting at position 2148 of SEQ ID NO: 1244530
gcugucaccgcgguuaaca

SEQ ID NO: 1495681 - RNA, 19 nt, Artificial Sequence
  Description of Artificial Sequence: Synthetic oligonucleotide
  Antisense strand to SEQ ID NO: 1495680
uguuaaccgcggugacagc

SEQ ID NO: 1495682 - RNA, 19 nt, Artificial Sequence
  Description of Artificial Sequence: Synthetic oligonucleotide
  Sense strand starting at position 2174 of SEQ ID NO: 1244530
ggagguugguuaaagguau

SEQ ID NO: 1495683 - RNA, 19 nt, Artificial Sequence
  Description of Artificial Sequence: Synthetic oligonucleotide
  Antisense strand to SEQ ID NO: 1495682
auaccuuuaaccaaccucc

SEQ ID NO: 1495684 - RNA, 19 nt, Artificial Sequence
  Description of Artificial Sequence: Synthetic oligonucleotide
  Sense strand starting at position 2178 of SEQ ID NO: 1244530
guugguuaaagguauagga

SEQ ID NO: 1495685 - RNA, 19 nt, Artificial Sequence
  Description of Artificial Sequence: Synthetic oligonucleotide
  Antisense strand to SEQ ID NO: 1495684
uccuauaccuuuaaccaac

SEQ ID NO: 1495686 - RNA, 19 nt, Artificial Sequence
  Description of Artificial Sequence: Synthetic oligonucleotide
  Sense strand starting at position 2182 of SEQ ID NO: 1244530
guuaaagguauaggaggau

SEQ ID NO: 1495687 - RNA, 19 nt, Artificial Sequence
  Description of Artificial Sequence: Synthetic oligonucleotide
  Antisense strand to SEQ ID NO: 1495686
auccuccuauaccuuuaac

SEQ ID NO: 1495688 - RNA, 19 nt, Artificial Sequence
  Description of Artificial Sequence: Synthetic oligonucleotide
  Sense strand starting at position 2247 of SEQ ID NO: 1244530
gggaguagucaguauuaag

SEQ ID NO: 1495689 - RNA, 19 nt, Artificial Sequence
  Description of Artificial Sequence: Synthetic oligonucleotide
  Antisense strand to SEQ ID NO: 1495688
cuuaauacugacuacuccc

SEQ ID NO: 1495690 - RNA, 19 nt, Artificial Sequence
  Description of Artificial Sequence: Synthetic oligonucleotide
  Sense strand starting at position 2429 of SEQ ID NO: 1244530
gggagaaauuagggcauga

SEQ ID NO: 1495691 - RNA, 19 nt, Artificial Sequence
  Description of Artificial Sequence: Synthetic oligonucleotide
  Antisense strand to SEQ ID NO: 1495690
ucaugcccuaauuucuccc

SEQ ID NO: 1495692 - RNA, 19 nt, Artificial Sequence
  Description of Artificial Sequence: Synthetic oligonucleotide
  Sense strand starting at position 2433 of SEQ ID NO: 1244530
gaaauuagggcaugagagu

SEQ ID NO: 1495693 - RNA, 19 nt, Artificial Sequence
  Description of Artificial Sequence: Synthetic oligonucleotide
  Antisense strand to SEQ ID NO: 1495692
acucucaugcccuaauuuc

SEQ ID NO: 1495694 - RNA, 19 nt, Artificial Sequence
  Description of Artificial Sequence: Synthetic oligonucleotide
  Sense strand starting at position 2459 of SEQ ID NO: 1244530
guugaaaugacuuguggac

SEQ ID NO: 1495695 - RNA, 19 nt, Artificial Sequence
  Description of Artificial Sequence: Synthetic oligonucleotide
  Antisense strand to SEQ ID NO: 1495694
guccacaagucauuucaac

SEQ ID NO: 1495696 - RNA, 19 nt, Artificial Sequence
  Description of Artificial Sequence: Synthetic oligonucleotide
  Sense strand starting at position 2559 of SEQ ID NO: 1244530
gaaggaaauuugggaccaa

SEQ ID NO: 1495697 - RNA, 19 nt, Artificial Sequence
  Description of Artificial Sequence: Synthetic oligonucleotide
  Antisense strand to SEQ ID NO: 1495696
uuggucccaaauuuccuuc

SEQ ID NO: 1495698 - RNA, 19 nt, Artificial Sequence
  Description of Artificial Sequence: Synthetic oligonucleotide
  Sense strand starting at position 2630 of SEQ ID NO: 1244530
uuguuugagacggagacua

SEQ ID NO: 1495699 - RNA, 19 nt, Artificial Sequence
  Description of Artificial Sequence: Synthetic oligonucleotide
  Antisense strand to SEQ ID NO: 1495698
uagucuccgucucaaacaa

SEQ ID NO: 1495700 - RNA, 19 nt, Artificial Sequence
  Description of Artificial Sequence: Synthetic oligonucleotide
  Sense strand starting at position 3403 of SEQ ID NO: 1244530
uggccaggugucugcauua

SEQ ID NO: 1495701 - RNA, 19 nt, Artificial Sequence
  Description of Artificial Sequence: Synthetic oligonucleotide
  Antisense strand to SEQ ID NO: 1495700
uaaugcagacaccuggcca

SEQ ID NO: 1495702 - RNA, 19 nt, Artificial Sequence
  Description of Artificial Sequence: Synthetic oligonucleotide
  Sense strand starting at position 3449 of SEQ ID NO: 1244530
agauaccugucauccuuua

SEQ ID NO: 1495703 - RNA, 19 nt, Artificial Sequence
  Description of Artificial Sequence: Synthetic oligonucleotide
  Antisense strand to SEQ ID NO: 1495702
uaaaggaugacagguaucu

SEQ ID NO: 1495704 - RNA, 19 nt, Artificial Sequence
  Description of Artificial Sequence: Synthetic oligonucleotide
  Sense strand starting at position 3454 of SEQ ID NO: 1244530
ccugucauccuuuaugugu

SEQ ID NO: 1495705 - RNA, 19 nt, Artificial Sequence
  Description of Artificial Sequence: Synthetic oligonucleotide
  Antisense strand to SEQ ID NO: 1495704
acacauaaaggaugacagg

SEQ ID NO: 1495706 - RNA, 19 nt, Artificial Sequence
  Description of Artificial Sequence: Synthetic oligonucleotide
  Sense strand starting at position 3476 of SEQ ID NO: 1244530
uagcuugagccagauagaa

SEQ ID NO: 1495707 - RNA, 19 nt, Artificial Sequence
  Description of Artificial Sequence: Synthetic oligonucleotide
  Antisense strand to SEQ ID NO: 1495706
uucuaucuggcucaagcua

SEQ ID NO: 1495708 - RNA, 19 nt, Artificial Sequence
  Description of Artificial Sequence: Synthetic oligonucleotide
  Sense strand starting at position 3478 of SEQ ID NO: 1244530
gcuugagccagauagaauc

SEQ ID NO: 1495709 - RNA, 19 nt, Artificial Sequence
  Description of Artificial Sequence: Synthetic oligonucleotide
  Antisense strand to SEQ ID NO: 1495708
gauucuaucuggcucaagc

SEQ ID NO: 1495710 - RNA, 19 nt, Artificial Sequence
  Description of Artificial Sequence: Synthetic oligonucleotide
  Sense strand starting at position 3530 of SEQ ID NO: 1244530
ugucucaaggcuuaaugau

SEQ ID NO: 1495711 - RNA, 19 nt, Artificial Sequence
  Description of Artificial Sequence: Synthetic oligonucleotide
  Antisense strand to SEQ ID NO: 1495710
aucauuaagccuugagaca

SEQ ID NO: 1495712 - RNA, 19 nt, Artificial Sequence
  Description of Artificial Sequence: Synthetic oligonucleotide
  Sense strand starting at position 3542 of SEQ ID NO: 1244530
uaaugauauuggucuaugg

SEQ ID NO: 1495713 - RNA, 19 nt, Artificial Sequence
  Description of Artificial Sequence: Synthetic oligonucleotide
  Antisense strand to SEQ ID NO: 1495712
ccauagaccaauaucauua

SEQ ID NO: 1495714 - RNA, 19 nt, Artificial Sequence
  Description of Artificial Sequence: Synthetic oligonucleotide
  Sense strand starting at position 3546 of SEQ ID NO: 1244530
gauauuggucuauggauuc

SEQ ID NO: 1495715 - RNA, 19 nt, Artificial Sequence
  Description of Artificial Sequence: Synthetic oligonucleotide
  Antisense strand to SEQ ID NO: 1495714
gaauccauagaccaauauc

SEQ ID NO: 1495716 - RNA, 19 nt, Artificial Sequence
  Description of Artificial Sequence: Synthetic oligonucleotide
  Sense strand starting at position 3559 of SEQ ID NO: 1244530
ggauucuccacugguugga

SEQ ID NO: 1495717 - RNA, 19 nt, Artificial Sequence
  Description of Artificial Sequence: Synthetic oligonucleotide
  Antisense strand to SEQ ID NO: 1495716
uccaaccaguggagaaucc

SEQ ID NO: 1495718 - RNA, 19 nt, Artificial Sequence
  Description of Artificial Sequence: Synthetic oligonucleotide
  Sense strand starting at position 3608 of SEQ ID NO: 1244530
cagcauaauugagagaaag

SEQ ID NO: 1495719 - RNA, 19 nt, Artificial Sequence
  Description of Artificial Sequence: Synthetic oligonucleotide
  Antisense strand to SEQ ID NO: 1495718
cuuucucucaauuaugcug

SEQ ID NO: 1495720 - RNA, 19 nt, Artificial Sequence
  Description of Artificial Sequence: Synthetic oligonucleotide
  Sense strand starting at position 3735 of SEQ ID NO: 1244530
aaucucgucucacugaaag

SEQ ID NO: 1495721 - RNA, 19 nt, Artificial Sequence
  Description of Artificial Sequence: Synthetic oligonucleotide
  Antisense strand to SEQ ID NO: 1495720
cuuucagugagacgagauu

SEQ ID NO: 1495722 - RNA, 19 nt, Artificial Sequence
  Description of Artificial Sequence: Synthetic oligonucleotide
  Sense strand starting at position 3967 of SEQ ID NO: 1244530
gccgaaguugucuuucugu

SEQ ID NO: 1495723 - RNA, 19 nt, Artificial Sequence
  Description of Artificial Sequence: Synthetic oligonucleotide
  Antisense strand to SEQ ID NO: 1495722
acagaaagacaacuucggc

SEQ ID NO: 1495724 - RNA, 19 nt, Artificial Sequence
  Description of Artificial Sequence: Synthetic oligonucleotide
  Sense strand starting at position 3970 of SEQ ID NO: 1244530
gaaguugucuuucuguaua

SEQ ID NO: 1495725 - RNA, 19 nt, Artificial Sequence
  Description of Artificial Sequence: Synthetic oligonucleotide
  Antisense strand to SEQ ID NO: 1495724
uauacagaaagacaacuuc

SEQ ID NO: 1495726 - RNA, 19 nt, Artificial Sequence
  Description of Artificial Sequence: Synthetic oligonucleotide
  Sense strand starting at position 3972 of SEQ ID NO: 1244530
aguugucuuucuguauaag

SEQ ID NO: 1495727 - RNA, 19 nt, Artificial Sequence
  Description of Artificial Sequence: Synthetic oligonucleotide
  Antisense strand to SEQ ID NO: 1495726
cuuauacagaaagacaacu

SEQ ID NO: 1495728 - RNA, 19 nt, Artificial Sequence
  Description of Artificial Sequence: Synthetic oligonucleotide
  Sense strand starting at position 3973 of SEQ ID NO: 1244530
guugucuuucuguauaaga

SEQ ID NO: 1495729 - RNA, 19 nt, Artificial Sequence
  Description of Artificial Sequence: Synthetic oligonucleotide
  Antisense strand to SEQ ID NO: 1495728
ucuuauacagaaagacaac

SEQ ID NO: 1495730 - RNA, 19 nt, Artificial Sequence
  Description of Artificial Sequence: Synthetic oligonucleotide
  Sense strand starting at position 3975 of SEQ ID NO: 1244530
ugucuuucuguauaagaac

SEQ ID NO: 1495731 - RNA, 19 nt, Artificial Sequence
  Description of Artificial Sequence: Synthetic oligonucleotide
  Antisense strand to SEQ ID NO: 1495730
guucuuauacagaaagaca

SEQ ID NO: 1495732 - RNA, 19 nt, Artificial Sequence
  Description of Artificial Sequence: Synthetic oligonucleotide
  Sense strand starting at position 159 of SEQ ID NO: 1244531
agcagagcacucuaugaaa

SEQ ID NO: 1495733 - RNA, 19 nt, Artificial Sequence
  Description of Artificial Sequence: Synthetic oligonucleotide
  Antisense strand to SEQ ID NO: 1495732
uuucauagagugcucugcu

SEQ ID NO: 1495734 - RNA, 19 nt, Artificial Sequence
  Description of Artificial Sequence: Synthetic oligonucleotide
  Sense strand starting at position 281 of SEQ ID NO: 1244531
ucgguuucugaguaggaag

SEQ ID NO: 1495735 - RNA, 19 nt, Artificial Sequence
  Description of Artificial Sequence: Synthetic oligonucleotide
  Antisense strand to SEQ ID NO: 1495734
cuuccuacucagaaaccga

SEQ ID NO: 1495736 - RNA, 19 nt, Artificial Sequence
  Description of Artificial Sequence: Synthetic oligonucleotide
  Sense strand starting at position 324 of SEQ ID NO: 1244531
ugagaagguaaugguaguu

SEQ ID NO: 1495737 - RNA, 19 nt, Artificial Sequence
  Description of Artificial Sequence: Synthetic oligonucleotide
  Antisense strand to SEQ ID NO: 1495736
aacuaccauuaccuucuca

SEQ ID NO: 1495738 - RNA, 19 nt, Artificial Sequence
  Description of Artificial Sequence: Synthetic oligonucleotide
  Sense strand starting at position 330 of SEQ ID NO: 1244531
gguaaugguaguuauccau

SEQ ID NO: 1495739 - RNA, 19 nt, Artificial Sequence
  Description of Artificial Sequence: Synthetic oligonucleotide
  Antisense strand to SEQ ID NO: 1495738
auggauaacuaccauuacc

SEQ ID NO: 1495740 - RNA, 19 nt, Artificial Sequence
  Description of Artificial Sequence: Synthetic oligonucleotide
  Sense strand starting at position 333 of SEQ ID NO: 1244531
aaugguaguuauccauaag

SEQ ID NO: 1495741 - RNA, 19 nt, Artificial Sequence
  Description of Artificial Sequence: Synthetic oligonucleotide
  Antisense strand to SEQ ID NO: 1495740
cuuauggauaacuaccauu

SEQ ID NO: 1495742 - RNA, 19 nt, Artificial Sequence
  Description of Artificial Sequence: Synthetic oligonucleotide
  Sense strand starting at position 1123 of SEQ ID NO: 1244531
agaugugaacuuuaugcuu

SEQ ID NO: 1495743 - RNA, 19 nt, Artificial Sequence
  Description of Artificial Sequence: Synthetic oligonucleotide
  Antisense strand to SEQ ID NO: 1495742
aagcauaaaguucacaucu

SEQ ID NO: 1495744 - RNA, 19 nt, Artificial Sequence
  Description of Artificial Sequence: Synthetic oligonucleotide
  Sense strand starting at position 1380 of SEQ ID NO: 1244531
ugcccuagggcugaauuaa

SEQ ID NO: 1495745 - RNA, 19 nt, Artificial Sequence
  Description of Artificial Sequence: Synthetic oligonucleotide
  Antisense strand to SEQ ID NO: 1495744
uuaauucagcccuagggca

SEQ ID NO: 1495746 - RNA, 19 nt, Artificial Sequence
  Description of Artificial Sequence: Synthetic oligonucleotide
  Sense strand starting at position 2384 of SEQ ID NO: 1244531
agcacucaucuagacaagu

SEQ ID NO: 1495747 - RNA, 19 nt, Artificial Sequence
  Description of Artificial Sequence: Synthetic oligonucleotide
  Antisense strand to SEQ ID NO: 1495746
acuugucuagaugagugcu

SEQ ID NO: 1495748 - RNA, 19 nt, Artificial Sequence
  Description of Artificial Sequence: Synthetic oligonucleotide
  Sense strand starting at position 2400 of SEQ ID NO: 1244531
agucaagagucacuccaua

SEQ ID NO: 1495749 - RNA, 19 nt, Artificial Sequence
  Description of Artificial Sequence: Synthetic oligonucleotide
  Antisense strand to SEQ ID NO: 1495748
uauggagugacucuugacu

SEQ ID NO: 1495750 - RNA, 19 nt, Artificial Sequence
  Description of Artificial Sequence: Synthetic oligonucleotide
  Sense strand starting at position 2439 of SEQ ID NO: 1244531
ucuuaacucccaugggaau

SEQ ID NO: 1495751 - RNA, 19 nt, Artificial Sequence
  Description of Artificial Sequence: Synthetic oligonucleotide
  Antisense strand to SEQ ID NO: 1495750
auucccaugggaguuaaga

SEQ ID NO: 1495752 - RNA, 19 nt, Artificial Sequence
  Description of Artificial Sequence: Synthetic oligonucleotide
  Sense strand starting at position 2440 of SEQ ID NO: 1244531
cuuaacucccaugggaauu

SEQ ID NO: 1495753 - RNA, 19 nt, Artificial Sequence
  Description of Artificial Sequence: Synthetic oligonucleotide
  Antisense strand to SEQ ID NO: 1495752
aauucccaugggaguuaag

SEQ ID NO: 1495754 - RNA, 19 nt, Artificial Sequence
  Description of Artificial Sequence: Synthetic oligonucleotide
  Sense strand starting at position 2457 of SEQ ID NO: 1244531
uuucucguggaugacaaau

SEQ ID NO: 1495755 - RNA, 19 nt, Artificial Sequence
  Description of Artificial Sequence: Synthetic oligonucleotide
  Antisense strand to SEQ ID NO: 1495754
auuugucauccacgagaaa

SEQ ID NO: 1495756 - RNA, 19 nt, Artificial Sequence
  Description of Artificial Sequence: Synthetic oligonucleotide
  Sense strand starting at position 2468 of SEQ ID NO: 1244531
ugacaaauuugcuugugca

SEQ ID NO: 1495757 - RNA, 19 nt, Artificial Sequence
  Description of Artificial Sequence: Synthetic oligonucleotide
  Antisense strand to SEQ ID NO: 1495756
ugcacaagcaaauuuguca

SEQ ID NO: 1495758 - RNA, 19 nt, Artificial Sequence
  Description of Artificial Sequence: Synthetic oligonucleotide
  Sense strand starting at position 2469 of SEQ ID NO: 1244531
gacaaauuugcuugugcag

SEQ ID NO: 1495759 - RNA, 19 nt, Artificial Sequence
  Description of Artificial Sequence: Synthetic oligonucleotide
  Antisense strand to SEQ ID NO: 1495758
cugcacaagcaaauuuguc

SEQ ID NO: 1495760 - RNA, 19 nt, Artificial Sequence
  Description of Artificial Sequence: Synthetic oligonucleotide
  Sense strand starting at position 2676 of SEQ ID NO: 1244531
aguggugaaaucugauacu

SEQ ID NO: 1495761 - RNA, 19 nt, Artificial Sequence
  Description of Artificial Sequence: Synthetic oligonucleotide
  Antisense strand to SEQ ID NO: 1495760
aguaucagauuucaccacu

SEQ ID NO: 1495762 - RNA, 19 nt, Artificial Sequence
  Description of Artificial Sequence: Synthetic oligonucleotide
  Sense strand starting at position 2715 of SEQ ID NO: 1244531
uuuaauauaggauggcaaa

SEQ ID NO: 1495763 - RNA, 19 nt, Artificial Sequence
  Description of Artificial Sequence: Synthetic oligonucleotide
  Antisense strand to SEQ ID NO: 1495762
uuugccauccuauauuaaa

SEQ ID NO: 1495764 - RNA, 19 nt, Artificial Sequence
  Description of Artificial Sequence: Synthetic oligonucleotide
  Sense strand starting at position 2744 of SEQ ID NO: 1244531
aaagaucuggccugagagu

SEQ ID NO: 1495765 - RNA, 19 nt, Artificial Sequence
  Description of Artificial Sequence: Synthetic oligonucleotide
  Antisense strand to SEQ ID NO: 1495764
acucucaggccagaucuuu

SEQ ID NO: 1495766 - RNA, 19 nt, Artificial Sequence
  Description of Artificial Sequence: Synthetic oligonucleotide
  Sense strand starting at position 2788 of SEQ ID NO: 1244531
ugucacuaauccuuugaag

SEQ ID NO: 1495767 - RNA, 19 nt, Artificial Sequence
  Description of Artificial Sequence: Synthetic oligonucleotide
  Antisense strand to SEQ ID NO: 1495766
cuucaaaggauuagugaca

SEQ ID NO: 1495768 - RNA, 19 nt, Artificial Sequence
  Description of Artificial Sequence: Synthetic oligonucleotide
  Sense strand starting at position 2790 of SEQ ID NO: 1244531
ucacuaauccuuugaagga

SEQ ID NO: 1495769 - RNA, 19 nt, Artificial Sequence
  Description of Artificial Sequence: Synthetic oligonucleotide
  Antisense strand to SEQ ID NO: 1495768
uccuucaaaggauuaguga

SEQ ID NO: 1495770 - RNA, 19 nt, Artificial Sequence
  Description of Artificial Sequence: Synthetic oligonucleotide
  Sense strand starting at position 2794 of SEQ ID NO: 1244531
uaauccuuugaaggaguca

SEQ ID NO: 1495771 - RNA, 19 nt, Artificial Sequence
  Description of Artificial Sequence: Synthetic oligonucleotide
  Antisense strand to SEQ ID NO: 1495770
ugacuccuucaaaggauua

SEQ ID NO: 1495772 - RNA, 19 nt, Artificial Sequence
  Description of Artificial Sequence: Synthetic oligonucleotide
  Sense strand starting at position 2920 of SEQ ID NO: 1244531
aggguagacugcucaauua

SEQ ID NO: 1495773 - RNA, 19 nt, Artificial Sequence
  Description of Artificial Sequence: Synthetic oligonucleotide
  Antisense strand to SEQ ID NO: 1495772
uaauugagcagucuacccu

SEQ ID NO: 1495774 - RNA, 19 nt, Artificial Sequence
  Description of Artificial Sequence: Synthetic oligonucleotide
  Sense strand starting at position 2960 of SEQ ID NO: 1244531
gaaagagauugccuaguau

SEQ ID NO: 1495775 - RNA, 19 nt, Artificial Sequence
  Description of Artificial Sequence: Synthetic oligonucleotide
  Antisense strand to SEQ ID NO: 1495774
auacuaggcaaucucuuuc

SEQ ID NO: 1495776 - RNA, 19 nt, Artificial Sequence
  Description of Artificial Sequence: Synthetic oligonucleotide
  Sense strand starting at position 2980 of SEQ ID NO: 1244531
aguguccucugagcauuua

SEQ ID NO: 1495777 - RNA, 19 nt, Artificial Sequence
  Description of Artificial Sequence: Synthetic oligonucleotide
  Antisense strand to SEQ ID NO: 1495776
uaaaugcucagaggacacu

SEQ ID NO: 1495778 - RNA, 19 nt, Artificial Sequence
  Description of Artificial Sequence: Synthetic oligonucleotide
  Sense strand starting at position 3014 of SEQ ID NO: 1244531
aaacuuauuuagggaagag

SEQ ID NO: 1495779 - RNA, 19 nt, Artificial Sequence
  Description of Artificial Sequence: Synthetic oligonucleotide
  Antisense strand to SEQ ID NO: 1495778
cucuucccuaaauaaguuu

SEQ ID NO: 1495780 - RNA, 19 nt, Artificial Sequence
  Description of Artificial Sequence: Synthetic oligonucleotide
  Sense strand starting at position 3068 of SEQ ID NO: 1244531
acaaguaaauggcuuacuu

SEQ ID NO: 1495781 - RNA, 19 nt, Artificial Sequence
  Description of Artificial Sequence: Synthetic oligonucleotide
  Antisense strand to SEQ ID NO: 1495780
aaguaagccauuuacuugu

SEQ ID NO: 1495782 - RNA, 19 nt, Artificial Sequence
  Description of Artificial Sequence: Synthetic oligonucleotide
  Sense strand starting at position 3070 of SEQ ID NO: 1244531
aaguaaauggcuuacuugu

SEQ ID NO: 1495783 - RNA, 19 nt, Artificial Sequence
  Description of Artificial Sequence: Synthetic oligonucleotide
  Antisense strand to SEQ ID NO: 1495782
acaaguaagccauuuacuu

SEQ ID NO: 1495784 - RNA, 19 nt, Artificial Sequence
  Description of Artificial Sequence: Synthetic oligonucleotide
  Sense strand starting at position 3094 of SEQ ID NO: 1244531
auaacacuggcaggauaau

SEQ ID NO: 1495785 - RNA, 19 nt, Artificial Sequence
  Description of Artificial Sequence: Synthetic oligonucleotide
  Antisense strand to SEQ ID NO: 1495784
auuauccugccaguguuau

SEQ ID NO: 1495786 - RNA, 19 nt, Artificial Sequence
  Description of Artificial Sequence: Synthetic oligonucleotide
  Sense strand starting at position 3398 of SEQ ID NO: 1244531
cggguauguaagggauaug

SEQ ID NO: 1495787 - RNA, 19 nt, Artificial Sequence
  Description of Artificial Sequence: Synthetic oligonucleotide
  Antisense strand to SEQ ID NO: 1495786
cauaucccuuacauacccg

SEQ ID NO: 1495788 - RNA, 19 nt, Artificial Sequence
  Description of Artificial Sequence: Synthetic oligonucleotide
  Sense strand starting at position 3399 of SEQ ID NO: 1244531
ggguauguaagggauaugu

SEQ ID NO: 1495789 - RNA, 19 nt, Artificial Sequence
  Description of Artificial Sequence: Synthetic oligonucleotide
  Antisense strand to SEQ ID NO: 1495788
acauaucccuuacauaccc

SEQ ID NO: 1495790 - RNA, 19 nt, Artificial Sequence
  Description of Artificial Sequence: Synthetic oligonucleotide
  Sense strand starting at position 3401 of SEQ ID NO: 1244531
guauguaagggauauguuu

SEQ ID NO: 1495791 - RNA, 19 nt, Artificial Sequence
  Description of Artificial Sequence: Synthetic oligonucleotide
  Antisense strand to SEQ ID NO: 1495790
aaacauaucccuuacauac

SEQ ID NO: 1495792 - RNA, 19 nt, Artificial Sequence
  Description of Artificial Sequence: Synthetic oligonucleotide
  Sense strand starting at position 3407 of SEQ ID NO: 1244531
aagggauauguuugugaga

SEQ ID NO: 1495793 - RNA, 19 nt, Artificial Sequence
  Description of Artificial Sequence: Synthetic oligonucleotide
  Antisense strand to SEQ ID NO: 1495792
ucucacaaacauaucccuu

SEQ ID NO: 1495794 - RNA, 19 nt, Artificial Sequence
  Description of Artificial Sequence: Synthetic oligonucleotide
  Sense strand starting at position 3408 of SEQ ID NO: 1244531
agggauauguuugugagag

SEQ ID NO: 1495795 - RNA, 19 nt, Artificial Sequence
  Description of Artificial Sequence: Synthetic oligonucleotide
  Antisense strand to SEQ ID NO: 1495794
cucucacaaacauaucccu

SEQ ID NO: 1495796 - RNA, 19 nt, Artificial Sequence
  Description of Artificial Sequence: Synthetic oligonucleotide
  Sense strand starting at position 3437 of SEQ ID NO: 1244531
cugaguugggcuuauccau

SEQ ID NO: 1495797 - RNA, 19 nt, Artificial Sequence
  Description of Artificial Sequence: Synthetic oligonucleotide
  Antisense strand to SEQ ID NO: 1495796
auggauaagcccaacucag

SEQ ID NO: 1495798 - RNA, 19 nt, Artificial Sequence
  Description of Artificial Sequence: Synthetic oligonucleotide
  Sense strand starting at position 3443 of SEQ ID NO: 1244531
ugggcuuauccaugauaca

SEQ ID NO: 1495799 - RNA, 19 nt, Artificial Sequence
  Description of Artificial Sequence: Synthetic oligonucleotide
  Antisense strand to SEQ ID NO: 1495798
uguaucauggauaagccca

SEQ ID NO: 1495800 - RNA, 19 nt, Artificial Sequence
  Description of Artificial Sequence: Synthetic oligonucleotide
  Sense strand starting at position 3444 of SEQ ID NO: 1244531
gggcuuauccaugauacac

SEQ ID NO: 1495801 - RNA, 19 nt, Artificial Sequence
  Description of Artificial Sequence: Synthetic oligonucleotide
  Antisense strand to SEQ ID NO: 1495800
guguaucauggauaagccc

SEQ ID NO: 1495802 - RNA, 19 nt, Artificial Sequence
  Description of Artificial Sequence: Synthetic oligonucleotide
  Sense strand starting at position 3598 of SEQ ID NO: 1244531
uggaguuacgacuaguaug

SEQ ID NO: 1495803 - RNA, 19 nt, Artificial Sequence
  Description of Artificial Sequence: Synthetic oligonucleotide
  Antisense strand to SEQ ID NO: 1495802
cauacuagucguaacucca

SEQ ID NO: 1495804 - RNA, 19 nt, Artificial Sequence
  Description of Artificial Sequence: Synthetic oligonucleotide
  Sense strand starting at position 3686 of SEQ ID NO: 1244531
cugggaauaucauucuucu

SEQ ID NO: 1495805 - RNA, 19 nt, Artificial Sequence
  Description of Artificial Sequence: Synthetic oligonucleotide
  Antisense strand to SEQ ID NO: 1495804
agaagaaugauauucccag

SEQ ID NO: 1495806 - RNA, 19 nt, Artificial Sequence
  Description of Artificial Sequence: Synthetic oligonucleotide
  Sense strand starting at position 3805 of SEQ ID NO: 1244531
ucacuugucagguaaggac

SEQ ID NO: 1495807 - RNA, 19 nt, Artificial Sequence
  Description of Artificial Sequence: Synthetic oligonucleotide
  Antisense strand to SEQ ID NO: 1495806
guccuuaccugacaaguga

SEQ ID NO: 1495808 - RNA, 19 nt, Artificial Sequence
  Description of Artificial Sequence: Synthetic oligonucleotide
  Sense strand starting at position 3902 of SEQ ID NO: 1244531
cauggaaacuugguuucua

SEQ ID NO: 1495809 - RNA, 19 nt, Artificial Sequence
  Description of Artificial Sequence: Synthetic oligonucleotide
  Antisense strand to SEQ ID NO: 1495808
uagaaaccaaguuuccaug

SEQ ID NO: 1495810 - RNA, 19 nt, Artificial Sequence
  Description of Artificial Sequence: Synthetic oligonucleotide
  Sense strand starting at position 3903 of SEQ ID NO: 1244531
auggaaacuugguuucuau

SEQ ID NO: 1495811 - RNA, 19 nt, Artificial Sequence
  Description of Artificial Sequence: Synthetic oligonucleotide
  Antisense strand to SEQ ID NO: 1495810
auagaaaccaaguuuccau

SEQ ID NO: 1495812 - RNA, 19 nt, Artificial Sequence
  Description of Artificial Sequence: Synthetic oligonucleotide
  Sense strand starting at position 604 of SEQ ID NO: 1244532
augaauaucuugguuccua

SEQ ID NO: 1495813 - RNA, 19 nt, Artificial Sequence
  Description of Artificial Sequence: Synthetic oligonucleotide
  Antisense strand to SEQ ID NO: 1495812
uaggaaccaagauauucau

SEQ ID NO: 1495814 - RNA, 19 nt, Artificial Sequence
  Description of Artificial Sequence: Synthetic oligonucleotide
  Sense strand starting at position 605 of SEQ ID NO: 1244532
ugaauaucuugguuccuaa

SEQ ID NO: 1495815 - RNA, 19 nt, Artificial Sequence
  Description of Artificial Sequence: Synthetic oligonucleotide
  Antisense strand to SEQ ID NO: 1495814
uuaggaaccaagauauuca

SEQ ID NO: 1495816 - RNA, 19 nt, Artificial Sequence
  Description of Artificial Sequence: Synthetic oligonucleotide
  Sense strand starting at position 933 of SEQ ID NO: 1244532
gcgccuggccuugauuuau

SEQ ID NO: 1495817 - RNA, 19 nt, Artificial Sequence
  Description of Artificial Sequence: Synthetic oligonucleotide
  Antisense strand to SEQ ID NO: 1495816
auaaaucaaggccaggcgc

SEQ ID NO: 1495818 - RNA, 19 nt, Artificial Sequence
  Description of Artificial Sequence: Synthetic oligonucleotide
  Sense strand starting at position 1100 of SEQ ID NO: 1244532
cgugaaauugagagcguuc

SEQ ID NO: 1495819 - RNA, 19 nt, Artificial Sequence
  Description of Artificial Sequence: Synthetic oligonucleotide
  Antisense strand to SEQ ID NO: 1495818
gaacgcucucaauuucacg

SEQ ID NO: 1495820 - RNA, 19 nt, Artificial Sequence
  Description of Artificial Sequence: Synthetic oligonucleotide
  Sense strand starting at position 1129 of SEQ ID NO: 1244532
cggacagauuguuuaagga

SEQ ID NO: 1495821 - RNA, 19 nt, Artificial Sequence
  Description of Artificial Sequence: Synthetic oligonucleotide
  Antisense strand to SEQ ID NO: 1495820
uccuuaaacaaucuguccg

SEQ ID NO: 1495822 - RNA, 19 nt, Artificial Sequence
  Description of Artificial Sequence: Synthetic oligonucleotide
  Sense strand starting at position 1233 of SEQ ID NO: 1244532
acuuccuugcaugggaaua

SEQ ID NO: 1495823 - RNA, 19 nt, Artificial Sequence
  Description of Artificial Sequence: Synthetic oligonucleotide
  Antisense strand to SEQ ID NO: 1495822
uauucccaugcaaggaagu

SEQ ID NO: 1495824 - RNA, 19 nt, Artificial Sequence
  Description of Artificial Sequence: Synthetic oligonucleotide
  Sense strand starting at position 1317 of SEQ ID NO: 1244532
gaagcaugaaaucgugaag

SEQ ID NO: 1495825 - RNA, 19 nt, Artificial Sequence
  Description of Artificial Sequence: Synthetic oligonucleotide
  Antisense strand to SEQ ID NO: 1495824
cuucacgauuucaugcuuc

SEQ ID NO: 1495826 - RNA, 19 nt, Artificial Sequence
  Description of Artificial Sequence: Synthetic oligonucleotide
  Sense strand starting at position 1331 of SEQ ID NO: 1244532
ugaagcauaccgugaagaa

SEQ ID NO: 1495827 - RNA, 19 nt, Artificial Sequence
  Description of Artificial Sequence: Synthetic oligonucleotide
  Antisense strand to SEQ ID NO: 1495826
uucuucacgguaugcuuca

SEQ ID NO: 1495828 - RNA, 19 nt, Artificial Sequence
  Description of Artificial Sequence: Synthetic oligonucleotide
  Sense strand starting at position 1376 of SEQ ID NO: 1244532
uuuaauacguucucaagaa

SEQ ID NO: 1495829 - RNA, 19 nt, Artificial Sequence
  Description of Artificial Sequence: Synthetic oligonucleotide
  Antisense strand to SEQ ID NO: 1495828
uucuugagaacguauuaaa

SEQ ID NO: 1495830 - RNA, 19 nt, Artificial Sequence
  Description of Artificial Sequence: Synthetic oligonucleotide
  Sense strand starting at position 1380 of SEQ ID NO: 1244532
auacguucucaagaaaugc

SEQ ID NO: 1495831 - RNA, 19 nt, Artificial Sequence
  Description of Artificial Sequence: Synthetic oligonucleotide
  Antisense strand to SEQ ID NO: 1495830
gcauuucuugagaacguau

SEQ ID NO: 1495832 - RNA, 19 nt, Artificial Sequence
  Description of Artificial Sequence: Synthetic oligonucleotide
  Sense strand starting at position 1429 of SEQ ID NO: 1244532
uugcaagauuucgcguaga

SEQ ID NO: 1495833 - RNA, 19 nt, Artificial Sequence
  Description of Artificial Sequence: Synthetic oligonucleotide
  Antisense strand to SEQ ID NO: 1495832
ucuacgcgaaaucuugcaa

SEQ ID NO: 1495834 - RNA, 19 nt, Artificial Sequence
  Description of Artificial Sequence: Synthetic oligonucleotide
  Sense strand starting at position 1432 of SEQ ID NO: 1244532
caagauuucgcguagaguu

SEQ ID NO: 1495835 - RNA, 19 nt, Artificial Sequence
  Description of Artificial Sequence: Synthetic oligonucleotide
  Antisense strand to SEQ ID NO: 1495834
aacucuacgcgaaaucuug

SEQ ID NO: 1495836 - RNA, 19 nt, Artificial Sequence
  Description of Artificial Sequence: Synthetic oligonucleotide
  Sense strand starting at position 1445 of SEQ ID NO: 1244532
agaguuucugcagaaacua

SEQ ID NO: 1495837 - RNA, 19 nt, Artificial Sequence
  Description of Artificial Sequence: Synthetic oligonucleotide
  Antisense strand to SEQ ID NO: 1495836
uaguuucugcagaaacucu

SEQ ID NO: 1495838 - RNA, 19 nt, Artificial Sequence
  Description of Artificial Sequence: Synthetic oligonucleotide
  Sense strand starting at position 1523 of SEQ ID NO: 1244532
gggaauaccugcucccuga

SEQ ID NO: 1495839 - RNA, 19 nt, Artificial Sequence
  Description of Artificial Sequence: Synthetic oligonucleotide
  Antisense strand to SEQ ID NO: 1495838
ucagggagcagguauuccc

SEQ ID NO: 1495840 - RNA, 19 nt, Artificial Sequence
  Description of Artificial Sequence: Synthetic oligonucleotide
  Sense strand starting at position 1668 of SEQ ID NO: 1244532
ggaaaugccuucucugaca

SEQ ID NO: 1495841 - RNA, 19 nt, Artificial Sequence
  Description of Artificial Sequence: Synthetic oligonucleotide
  Antisense strand to SEQ ID NO: 1495840
ugucagagaaggcauuucc

SEQ ID NO: 1495842 - RNA, 19 nt, Artificial Sequence
  Description of Artificial Sequence: Synthetic oligonucleotide
  Sense strand starting at position 2201 of SEQ ID NO: 1244532
uauuuauaaccguggugua

SEQ ID NO: 1495843 - RNA, 19 nt, Artificial Sequence
  Description of Artificial Sequence: Synthetic oligonucleotide
  Antisense strand to SEQ ID NO: 1495842
uacaccacgguuauaaaua

SEQ ID NO: 1495844 - RNA, 19 nt, Artificial Sequence
  Description of Artificial Sequence: Synthetic oligonucleotide
  Sense strand starting at position 2334 of SEQ ID NO: 1244532
ggcauuugguuucccuuua

SEQ ID NO: 1495845 - RNA, 19 nt, Artificial Sequence
  Description of Artificial Sequence: Synthetic oligonucleotide
  Antisense strand to SEQ ID NO: 1495844
uaaagggaaaccaaaugcc

SEQ ID NO: 1495846 - RNA, 19 nt, Artificial Sequence
  Description of Artificial Sequence: Synthetic oligonucleotide
  Sense strand starting at position 2335 of SEQ ID NO: 1244532
gcauuugguuucccuuuaa

SEQ ID NO: 1495847 - RNA, 19 nt, Artificial Sequence
  Description of Artificial Sequence: Synthetic oligonucleotide
  Antisense strand to SEQ ID NO: 1495846
uuaaagggaaaccaaaugc

SEQ ID NO: 1495848 - RNA, 19 nt, Artificial Sequence
  Description of Artificial Sequence: Synthetic oligonucleotide
  Sense strand starting at position 2339 of SEQ ID NO: 1244532
uugguuucccuuuaaacag

SEQ ID NO: 1495849 - RNA, 19 nt, Artificial Sequence
  Description of Artificial Sequence: Synthetic oligonucleotide
  Antisense strand to SEQ ID NO: 1495848
cuguuuaaagggaaaccaa

SEQ ID NO: 1495850 - RNA, 19 nt, Artificial Sequence
  Description of Artificial Sequence: Synthetic oligonucleotide
  Sense strand starting at position 2363 of SEQ ID NO: 1244532
guccuuuacggugauuugu

SEQ ID NO: 1495851 - RNA, 19 nt, Artificial Sequence
  Description of Artificial Sequence: Synthetic oligonucleotide
  Antisense strand to SEQ ID NO: 1495850
acaaaucaccguaaaggac

SEQ ID NO: 1495852 - RNA, 19 nt, Artificial Sequence
  Description of Artificial Sequence: Synthetic oligonucleotide
  Sense strand starting at position 2365 of SEQ ID NO: 1244532
ccuuuacggugauuuguaa

SEQ ID NO: 1495853 - RNA, 19 nt, Artificial Sequence
  Description of Artificial Sequence: Synthetic oligonucleotide
  Antisense strand to SEQ ID NO: 1495852
uuacaaaucaccguaaagg

SEQ ID NO: 1495854 - RNA, 19 nt, Artificial Sequence
  Description of Artificial Sequence: Synthetic oligonucleotide
  Sense strand starting at position 2694 of SEQ ID NO: 1244532
ugagacuugugacuguuau

SEQ ID NO: 1495855 - RNA, 19 nt, Artificial Sequence
  Description of Artificial Sequence: Synthetic oligonucleotide
  Antisense strand to SEQ ID NO: 1495854
auaacagucacaagucuca

SEQ ID NO: 1495856 - RNA, 19 nt, Artificial Sequence
  Description of Artificial Sequence: Synthetic oligonucleotide
  Sense strand starting at position 3030 of SEQ ID NO: 1244532
aggaaauaguucuucuuua

SEQ ID NO: 1495857 - RNA, 19 nt, Artificial Sequence
  Description of Artificial Sequence: Synthetic oligonucleotide
  Antisense strand to SEQ ID NO: 1495856
uaaagaagaacuauuuccu

SEQ ID NO: 1495858 - RNA, 19 nt, Artificial Sequence
  Description of Artificial Sequence: Synthetic oligonucleotide
  Sense strand starting at position 3031 of SEQ ID NO: 1244532
ggaaauaguucuucuuuac

SEQ ID NO: 1495859 - RNA, 19 nt, Artificial Sequence
  Description of Artificial Sequence: Synthetic oligonucleotide
  Antisense strand to SEQ ID NO: 1495858
guaaagaagaacuauuucc

SEQ ID NO: 1495860 - RNA, 19 nt, Artificial Sequence
  Description of Artificial Sequence: Synthetic oligonucleotide
  Sense strand starting at position 3035 of SEQ ID NO: 1244532
auaguucuucuuuacaagu

SEQ ID NO: 1495861 - RNA, 19 nt, Artificial Sequence
  Description of Artificial Sequence: Synthetic oligonucleotide
  Antisense strand to SEQ ID NO: 1495860
acuuguaaagaagaacuau

SEQ ID NO: 1495862 - RNA, 19 nt, Artificial Sequence
  Description of Artificial Sequence: Synthetic oligonucleotide
  Sense strand starting at position 3043 of SEQ ID NO: 1244532
ucuuuacaaguguauacaa

SEQ ID NO: 1495863 - RNA, 19 nt, Artificial Sequence
  Description of Artificial Sequence: Synthetic oligonucleotide
  Antisense strand to SEQ ID NO: 1495862
uuguauacacuuguaaaga

SEQ ID NO: 1495864 - RNA, 19 nt, Artificial Sequence
  Description of Artificial Sequence: Synthetic oligonucleotide
  Sense strand starting at position 3050 of SEQ ID NO: 1244532
aaguguauacaaggguuua

SEQ ID NO: 1495865 - RNA, 19 nt, Artificial Sequence
  Description of Artificial Sequence: Synthetic oligonucleotide
  Antisense strand to SEQ ID NO: 1495864
uaaacccuuguauacacuu

SEQ ID NO: 1495866 - RNA, 19 nt, Artificial Sequence
  Description of Artificial Sequence: Synthetic oligonucleotide
  Sense strand starting at position 3051 of SEQ ID NO: 1244532
aguguauacaaggguuuaa

SEQ ID NO: 1495867 - RNA, 19 nt, Artificial Sequence
  Description of Artificial Sequence: Synthetic oligonucleotide
  Antisense strand to SEQ ID NO: 1495866
uuaaacccuuguauacacu

SEQ ID NO: 1495868 - RNA, 19 nt, Artificial Sequence
  Description of Artificial Sequence: Synthetic oligonucleotide
  Sense strand starting at position 3074 of SEQ ID NO: 1244532
aggccagcuagauaguaau

SEQ ID NO: 1495869 - RNA, 19 nt, Artificial Sequence
  Description of Artificial Sequence: Synthetic oligonucleotide
  Antisense strand to SEQ ID NO: 1495868
auuacuaucuagcuggccu

SEQ ID NO: 1495870 - RNA, 19 nt, Artificial Sequence
  Description of Artificial Sequence: Synthetic oligonucleotide
  Sense strand starting at position 3080 of SEQ ID NO: 1244532
gcuagauaguaauuaacug

SEQ ID NO: 1495871 - RNA, 19 nt, Artificial Sequence
  Description of Artificial Sequence: Synthetic oligonucleotide
  Antisense strand to SEQ ID NO: 1495870
caguuaauuacuaucuagc

SEQ ID NO: 1495872 - RNA, 19 nt, Artificial Sequence
  Description of Artificial Sequence: Synthetic oligonucleotide
  Sense strand starting at position 3087 of SEQ ID NO: 1244532
aguaauuaacugcaaagcu

SEQ ID NO: 1495873 - RNA, 19 nt, Artificial Sequence
  Description of Artificial Sequence: Synthetic oligonucleotide
  Antisense strand to SEQ ID NO: 1495872
agcuuugcaguuaauuacu

SEQ ID NO: 1495874 - RNA, 19 nt, Artificial Sequence
  Description of Artificial Sequence: Synthetic oligonucleotide
  Sense strand starting at position 3464 of SEQ ID NO: 1244532
guuacuacaggcugaauua

SEQ ID NO: 1495875 - RNA, 19 nt, Artificial Sequence
  Description of Artificial Sequence: Synthetic oligonucleotide
  Antisense strand to SEQ ID NO: 1495874
uaauucagccuguaguaac

SEQ ID NO: 1495876 - RNA, 19 nt, Artificial Sequence
  Description of Artificial Sequence: Synthetic oligonucleotide
  Sense strand starting at position 3492 of SEQ ID NO: 1244532
gucuaaguccuagaaauau

SEQ ID NO: 1495877 - RNA, 19 nt, Artificial Sequence
  Description of Artificial Sequence: Synthetic oligonucleotide
  Antisense strand to SEQ ID NO: 1495876
auauuucuaggacuuagac

SEQ ID NO: 1495878 - RNA, 19 nt, Artificial Sequence
  Description of Artificial Sequence: Synthetic oligonucleotide
  Sense strand starting at position 3645 of SEQ ID NO: 1244532
cguaucagacucugggaaa

SEQ ID NO: 1495879 - RNA, 19 nt, Artificial Sequence
  Description of Artificial Sequence: Synthetic oligonucleotide
  Antisense strand to SEQ ID NO: 1495878
uuucccagagucugauacg

SEQ ID NO: 1495880 - RNA, 19 nt, Artificial Sequence
  Description of Artificial Sequence: Synthetic oligonucleotide
  Sense strand starting at position 3762 of SEQ ID NO: 1244532
gcaauaaacccauguugaa

SEQ ID NO: 1495881 - RNA, 19 nt, Artificial Sequence
  Description of Artificial Sequence: Synthetic oligonucleotide
  Antisense strand to SEQ ID NO: 1495880
uucaacauggguuuauugc

SEQ ID NO: 1495882 - RNA, 19 nt, Artificial Sequence
  Description of Artificial Sequence: Synthetic oligonucleotide
  Sense strand starting at position 3860 of SEQ ID NO: 1244532
ccuuguguugaguaugaau

SEQ ID NO: 1495883 - RNA, 19 nt, Artificial Sequence
  Description of Artificial Sequence: Synthetic oligonucleotide
  Antisense strand to SEQ ID NO: 1495882
auucauacucaacacaagg

SEQ ID NO: 1495884 - RNA, 19 nt, Artificial Sequence
  Description of Artificial Sequence: Synthetic oligonucleotide
  Sense strand starting at position 3880 of SEQ ID NO: 1244532
gaccuuacaguuugaggau

SEQ ID NO: 1495885 - RNA, 19 nt, Artificial Sequence
  Description of Artificial Sequence: Synthetic oligonucleotide
  Antisense strand to SEQ ID NO: 1495884
auccucaaacuguaagguc

SEQ ID NO: 1495886 - RNA, 19 nt, Artificial Sequence
  Description of Artificial Sequence: Synthetic oligonucleotide
  Sense strand starting at position 3889 of SEQ ID NO: 1244532
guuugaggaucucuagaau

SEQ ID NO: 1495887 - RNA, 19 nt, Artificial Sequence
  Description of Artificial Sequence: Synthetic oligonucleotide
  Antisense strand to SEQ ID NO: 1495886
auucuagagauccucaaac

SEQ ID NO: 1495888 - RNA, 19 nt, Artificial Sequence
  Description of Artificial Sequence: Synthetic oligonucleotide
  Sense strand starting at position 3941 of SEQ ID NO: 1244532
cagugugacuaguuaagag

SEQ ID NO: 1495889 - RNA, 19 nt, Artificial Sequence
  Description of Artificial Sequence: Synthetic oligonucleotide
  Antisense strand to SEQ ID NO: 1495888
cucuuaacuagucacacug

SEQ ID NO: 1495890 - RNA, 19 nt, Artificial Sequence
  Description of Artificial Sequence: Synthetic oligonucleotide
  Sense strand starting at position 3969 of SEQ ID NO: 1244532
gccugugaagacuagaauc

SEQ ID NO: 1495891 - RNA, 19 nt, Artificial Sequence
  Description of Artificial Sequence: Synthetic oligonucleotide
  Antisense strand to SEQ ID NO: 1495890
gauucuagucuucacaggc

SEQ ID NO: 1495892 - RNA, 19 nt, Artificial Sequence
  Description of Artificial Sequence: Synthetic oligonucleotide
  Sense strand starting at position 175 of SEQ ID NO: 1244533
ugugcugucacucuguuua

SEQ ID NO: 1495893 - RNA, 19 nt, Artificial Sequence
  Description of Artificial Sequence: Synthetic oligonucleotide
  Antisense strand to SEQ ID NO: 1495892
uaaacagagugacagcaca

SEQ ID NO: 1495894 - RNA, 19 nt, Artificial Sequence
  Description of Artificial Sequence: Synthetic oligonucleotide
  Sense strand starting at position 179 of SEQ ID NO: 1244533
cugucacucuguuuauaau

SEQ ID NO: 1495895 - RNA, 19 nt, Artificial Sequence
  Description of Artificial Sequence: Synthetic oligonucleotide
  Antisense strand to SEQ ID NO: 1495894
auuauaaacagagugacag

SEQ ID NO: 1495896 - RNA, 19 nt, Artificial Sequence
  Description of Artificial Sequence: Synthetic oligonucleotide
  Sense strand starting at position 180 of SEQ ID NO: 1244533
ugucacucuguuuauaauu

SEQ ID NO: 1495897 - RNA, 19 nt, Artificial Sequence
  Description of Artificial Sequence: Synthetic oligonucleotide
  Antisense strand to SEQ ID NO: 1495896
aauuauaaacagagugaca

SEQ ID NO: 1495898 - RNA, 19 nt, Artificial Sequence
  Description of Artificial Sequence: Synthetic oligonucleotide
  Sense strand starting at position 185 of SEQ ID NO: 1244533
cucuguuuauaauugucaa

SEQ ID NO: 1495899 - RNA, 19 nt, Artificial Sequence
  Description of Artificial Sequence: Synthetic oligonucleotide
  Antisense strand to SEQ ID NO: 1495898
uugacaauuauaaacagag

SEQ ID NO: 1495900 - RNA, 19 nt, Artificial Sequence
  Description of Artificial Sequence: Synthetic oligonucleotide
  Sense strand starting at position 188 of SEQ ID NO: 1244533
uguuuauaauugucaacga

SEQ ID NO: 1495901 - RNA, 19 nt, Artificial Sequence
  Description of Artificial Sequence: Synthetic oligonucleotide
  Antisense strand to SEQ ID NO: 1495900
ucguugacaauuauaaaca

SEQ ID NO: 1495902 - RNA, 19 nt, Artificial Sequence
  Description of Artificial Sequence: Synthetic oligonucleotide
  Sense strand starting at position 229 of SEQ ID NO: 1244533
aguccugacuccuuaccau

SEQ ID NO: 1495903 - RNA, 19 nt, Artificial Sequence
  Description of Artificial Sequence: Synthetic oligonucleotide
  Antisense strand to SEQ ID NO: 1495902
augguaaggagucaggacu

SEQ ID NO: 1495904 - RNA, 19 nt, Artificial Sequence
  Description of Artificial Sequence: Synthetic oligonucleotide
  Sense strand starting at position 383 of SEQ ID NO: 1244533
ugcuauuuccucugccgga

SEQ ID NO: 1495905 - RNA, 19 nt, Artificial Sequence
  Description of Artificial Sequence: Synthetic oligonucleotide
  Antisense strand to SEQ ID NO: 1495904
uccggcagaggaaauagca

SEQ ID NO: 1495906 - RNA, 19 nt, Artificial Sequence
  Description of Artificial Sequence: Synthetic oligonucleotide
  Sense strand starting at position 384 of SEQ ID NO: 1244533
gcuauuuccucugccggaa

SEQ ID NO: 1495907 - RNA, 19 nt, Artificial Sequence
  Description of Artificial Sequence: Synthetic oligonucleotide
  Antisense strand to SEQ ID NO: 1495906
uuccggcagaggaaauagc

SEQ ID NO: 1495908 - RNA, 19 nt, Artificial Sequence
  Description of Artificial Sequence: Synthetic oligonucleotide
  Sense strand starting at position 444 of SEQ ID NO: 1244533
cucucaucauuuggguaau

SEQ ID NO: 1495909 - RNA, 19 nt, Artificial Sequence
  Description of Artificial Sequence: Synthetic oligonucleotide
  Antisense strand to SEQ ID NO: 1495908
auuacccaaaugaugagag

SEQ ID NO: 1495910 - RNA, 19 nt, Artificial Sequence
  Description of Artificial Sequence: Synthetic oligonucleotide
  Sense strand starting at position 445 of SEQ ID NO: 1244533
ucucaucauuuggguaaug

SEQ ID NO: 1495911 - RNA, 19 nt, Artificial Sequence
  Description of Artificial Sequence: Synthetic oligonucleotide
  Antisense strand to SEQ ID NO: 1495910
cauuacccaaaugaugaga

SEQ ID NO: 1495912 - RNA, 19 nt, Artificial Sequence
  Description of Artificial Sequence: Synthetic oligonucleotide
  Sense strand starting at position 455 of SEQ ID NO: 1244533
uggguaaugucuucuaaga

SEQ ID NO: 1495913 - RNA, 19 nt, Artificial Sequence
  Description of Artificial Sequence: Synthetic oligonucleotide
  Antisense strand to SEQ ID NO: 1495912
ucuuagaagacauuaccca

SEQ ID NO: 1495914 - RNA, 19 nt, Artificial Sequence
  Description of Artificial Sequence: Synthetic oligonucleotide
  Sense strand starting at position 951 of SEQ ID NO: 1244533
agugacucuccaugggauu

SEQ ID NO: 1495915 - RNA, 19 nt, Artificial Sequence
  Description of Artificial Sequence: Synthetic oligonucleotide
  Antisense strand to SEQ ID NO: 1495914
aaucccauggagagucacu

SEQ ID NO: 1495916 - RNA, 19 nt, Artificial Sequence
  Description of Artificial Sequence: Synthetic oligonucleotide
  Sense strand starting at position 952 of SEQ ID NO: 1244533
gugacucuccaugggauua

SEQ ID NO: 1495917 - RNA, 19 nt, Artificial Sequence
  Description of Artificial Sequence: Synthetic oligonucleotide
  Antisense strand to SEQ ID NO: 1495916
uaaucccauggagagucac

SEQ ID NO: 1495918 - RNA, 19 nt, Artificial Sequence
  Description of Artificial Sequence: Synthetic oligonucleotide
  Sense strand starting at position 1057 of SEQ ID NO: 1244533
cacagacagugcucuugaa

SEQ ID NO: 1495919 - RNA, 19 nt, Artificial Sequence
  Description of Artificial Sequence: Synthetic oligonucleotide
  Antisense strand to SEQ ID NO: 1495918
uucaagagcacugucugug

SEQ ID NO: 1495920 - RNA, 19 nt, Artificial Sequence
  Description of Artificial Sequence: Synthetic oligonucleotide
  Sense strand starting at position 1061 of SEQ ID NO: 1244533
gacagugcucuugaaggua

SEQ ID NO: 1495921 - RNA, 19 nt, Artificial Sequence
  Description of Artificial Sequence: Synthetic oligonucleotide
  Antisense strand to SEQ ID NO: 1495920
uaccuucaagagcacuguc

SEQ ID NO: 1495922 - RNA, 19 nt, Artificial Sequence
  Description of Artificial Sequence: Synthetic oligonucleotide
  Sense strand starting at position 1091 of SEQ ID NO: 1244533
ugucguguucaccucugua

SEQ ID NO: 1495923 - RNA, 19 nt, Artificial Sequence
  Description of Artificial Sequence: Synthetic oligonucleotide
  Antisense strand to SEQ ID NO: 1495922
uacagaggugaacacgaca

SEQ ID NO: 1495924 - RNA, 19 nt, Artificial Sequence
  Description of Artificial Sequence: Synthetic oligonucleotide
  Sense strand starting at position 1185 of SEQ ID NO: 1244533
ggguuuggcuucuuaacca

SEQ ID NO: 1495925 - RNA, 19 nt, Artificial Sequence
  Description of Artificial Sequence: Synthetic oligonucleotide
  Antisense strand to SEQ ID NO: 1495924
ugguuaagaagccaaaccc

SEQ ID NO: 1495926 - RNA, 19 nt, Artificial Sequence
  Description of Artificial Sequence: Synthetic oligonucleotide
  Sense strand starting at position 1208 of SEQ ID NO: 1244533
uguaaagacucccuaggau

SEQ ID NO: 1495927 - RNA, 19 nt, Artificial Sequence
  Description of Artificial Sequence: Synthetic oligonucleotide
  Antisense strand to SEQ ID NO: 1495926
auccuagggagucuuuaca

SEQ ID NO: 1495928 - RNA, 19 nt, Artificial Sequence
  Description of Artificial Sequence: Synthetic oligonucleotide
  Sense strand starting at position 1229 of SEQ ID NO: 1244533
gucggaucgccuuuaacgu

SEQ ID NO: 1495929 - RNA, 19 nt, Artificial Sequence
  Description of Artificial Sequence: Synthetic oligonucleotide
  Antisense strand to SEQ ID NO: 1495928
acguuaaaggcgauccgac

SEQ ID NO: 1495930 - RNA, 19 nt, Artificial Sequence
  Description of Artificial Sequence: Synthetic oligonucleotide
  Sense strand starting at position 1235 of SEQ ID NO: 1244533
ucgccuuuaacgucgguaa

SEQ ID NO: 1495931 - RNA, 19 nt, Artificial Sequence
  Description of Artificial Sequence: Synthetic oligonucleotide
  Antisense strand to SEQ ID NO: 1495930
uuaccgacguuaaaggcga

SEQ ID NO: 1495932 - RNA, 19 nt, Artificial Sequence
  Description of Artificial Sequence: Synthetic oligonucleotide
  Sense strand starting at position 1250 of SEQ ID NO: 1244533
guaacucuggagugugaaa

SEQ ID NO: 1495933 - RNA, 19 nt, Artificial Sequence
  Description of Artificial Sequence: Synthetic oligonucleotide
  Antisense strand to SEQ ID NO: 1495932
uuucacacuccagaguuac

SEQ ID NO: 1495934 - RNA, 19 nt, Artificial Sequence
  Description of Artificial Sequence: Synthetic oligonucleotide
  Sense strand starting at position 1427 of SEQ ID NO: 1244533
acccauaagcagcgagaaa

SEQ ID NO: 1495935 - RNA, 19 nt, Artificial Sequence
  Description of Artificial Sequence: Synthetic oligonucleotide
  Antisense strand to SEQ ID NO: 1495934
uuucucgcugcuuaugggu

SEQ ID NO: 1495936 - RNA, 19 nt, Artificial Sequence
  Description of Artificial Sequence: Synthetic oligonucleotide
  Sense strand starting at position 2023 of SEQ ID NO: 1244533
cgcugaacgacgcuucuua

SEQ ID NO: 1495937 - RNA, 19 nt, Artificial Sequence
  Description of Artificial Sequence: Synthetic oligonucleotide
  Antisense strand to SEQ ID NO: 1495936
uaagaagcgucguucagcg

SEQ ID NO: 1495938 - RNA, 19 nt, Artificial Sequence
  Description of Artificial Sequence: Synthetic oligonucleotide
  Sense strand starting at position 2027 of SEQ ID NO: 1244533
gaacgacgcuucuuauaga

SEQ ID NO: 1495939 - RNA, 19 nt, Artificial Sequence
  Description of Artificial Sequence: Synthetic oligonucleotide
  Antisense strand to SEQ ID NO: 1495938
ucuauaagaagcgucguuc

SEQ ID NO: 1495940 - RNA, 19 nt, Artificial Sequence
  Description of Artificial Sequence: Synthetic oligonucleotide
  Sense strand starting at position 2128 of SEQ ID NO: 1244533
gccagagucguggguaaac

SEQ ID NO: 1495941 - RNA, 19 nt, Artificial Sequence
  Description of Artificial Sequence: Synthetic oligonucleotide
  Antisense strand to SEQ ID NO: 1495940
guuuacccacgacucuggc

SEQ ID NO: 1495942 - RNA, 19 nt, Artificial Sequence
  Description of Artificial Sequence: Synthetic oligonucleotide
  Sense strand starting at position 2254 of SEQ ID NO: 1244533
guuugaagacucgagggua

SEQ ID NO: 1495943 - RNA, 19 nt, Artificial Sequence
  Description of Artificial Sequence: Synthetic oligonucleotide
  Antisense strand to SEQ ID NO: 1495942
uacccucgagucuucaaac

SEQ ID NO: 1495944 - RNA, 19 nt, Artificial Sequence
  Description of Artificial Sequence: Synthetic oligonucleotide
  Sense strand starting at position 2362 of SEQ ID NO: 1244533
cugcucugcgaaucgguaa

SEQ ID NO: 1495945 - RNA, 19 nt, Artificial Sequence
  Description of Artificial Sequence: Synthetic oligonucleotide
  Antisense strand to SEQ ID NO: 1495944
uuaccgauucgcagagcag

SEQ ID NO: 1495946 - RNA, 19 nt, Artificial Sequence
  Description of Artificial Sequence: Synthetic oligonucleotide
  Sense strand starting at position 2416 of SEQ ID NO: 1244533
gcgguugcucaugaauaug

SEQ ID NO: 1495947 - RNA, 19 nt, Artificial Sequence
  Description of Artificial Sequence: Synthetic oligonucleotide
  Antisense strand to SEQ ID NO: 1495946
cauauucaugagcaaccgc

SEQ ID NO: 1495948 - RNA, 19 nt, Artificial Sequence
  Description of Artificial Sequence: Synthetic oligonucleotide
  Sense strand starting at position 2436 of SEQ ID NO: 1244533
aguucucuugcugaauaug

SEQ ID NO: 1495949 - RNA, 19 nt, Artificial Sequence
  Description of Artificial Sequence: Synthetic oligonucleotide
  Antisense strand to SEQ ID NO: 1495948
cauauucagcaagagaacu

SEQ ID NO: 1495950 - RNA, 19 nt, Artificial Sequence
  Description of Artificial Sequence: Synthetic oligonucleotide
  Sense strand starting at position 2445 of SEQ ID NO: 1244533
gcugaauaugcaugaacaa

SEQ ID NO: 1495951 - RNA, 19 nt, Artificial Sequence
  Description of Artificial Sequence: Synthetic oligonucleotide
  Antisense strand to SEQ ID NO: 1495950
uuguucaugcauauucagc

SEQ ID NO: 1495952 - RNA, 19 nt, Artificial Sequence
  Description of Artificial Sequence: Synthetic oligonucleotide
  Sense strand starting at position 2482 of SEQ ID NO: 1244533
guggcuuguccggaaguag

SEQ ID NO: 1495953 - RNA, 19 nt, Artificial Sequence
  Description of Artificial Sequence: Synthetic oligonucleotide
  Antisense strand to SEQ ID NO: 1495952
cuacuuccggacaagccac

SEQ ID NO: 1495954 - RNA, 19 nt, Artificial Sequence
  Description of Artificial Sequence: Synthetic oligonucleotide
  Sense strand starting at position 2535 of SEQ ID NO: 1244533
ggcaucuccuggccuguaa

SEQ ID NO: 1495955 - RNA, 19 nt, Artificial Sequence
  Description of Artificial Sequence: Synthetic oligonucleotide
  Antisense strand to SEQ ID NO: 1495954
uuacaggccaggagaugcc

SEQ ID NO: 1495956 - RNA, 19 nt, Artificial Sequence
  Description of Artificial Sequence: Synthetic oligonucleotide
  Sense strand starting at position 2559 of SEQ ID NO: 1244533
cgcuguaccgagccaugau

SEQ ID NO: 1495957 - RNA, 19 nt, Artificial Sequence
  Description of Artificial Sequence: Synthetic oligonucleotide
  Antisense strand to SEQ ID NO: 1495956
aucauggcucgguacagcg

SEQ ID NO: 1495958 - RNA, 19 nt, Artificial Sequence
  Description of Artificial Sequence: Synthetic oligonucleotide
  Sense strand starting at position 2594 of SEQ ID NO: 1244533
gagccucucgaagagacuu

SEQ ID NO: 1495959 - RNA, 19 nt, Artificial Sequence
  Description of Artificial Sequence: Synthetic oligonucleotide
  Antisense strand to SEQ ID NO: 1495958
aagucucuucgagaggcuc

SEQ ID NO: 1495960 - RNA, 19 nt, Artificial Sequence
  Description of Artificial Sequence: Synthetic oligonucleotide
  Sense strand starting at position 2643 of SEQ ID NO: 1244533
ggccacuguccgggagaga

SEQ ID NO: 1495961 - RNA, 19 nt, Artificial Sequence
  Description of Artificial Sequence: Synthetic oligonucleotide
  Antisense strand to SEQ ID NO: 1495960
ucucucccggacaguggcc

SEQ ID NO: 1495962 - RNA, 19 nt, Artificial Sequence
  Description of Artificial Sequence: Synthetic oligonucleotide
  Sense strand starting at position 2644 of SEQ ID NO: 1244533
gccacuguccgggagagau

SEQ ID NO: 1495963 - RNA, 19 nt, Artificial Sequence
  Description of Artificial Sequence: Synthetic oligonucleotide
  Antisense strand to SEQ ID NO: 1495962
aucucucccggacaguggc

SEQ ID NO: 1495964 - RNA, 19 nt, Artificial Sequence
  Description of Artificial Sequence: Synthetic oligonucleotide
  Sense strand starting at position 2734 of SEQ ID NO: 1244533
ggucaaggcaucugaacau

SEQ ID NO: 1495965 - RNA, 19 nt, Artificial Sequence
  Description of Artificial Sequence: Synthetic oligonucleotide
  Antisense strand to SEQ ID NO: 1495964
auguucagaugccuugacc

SEQ ID NO: 1495966 - RNA, 19 nt, Artificial Sequence
  Description of Artificial Sequence: Synthetic oligonucleotide
  Sense strand starting at position 2819 of SEQ ID NO: 1244533
uccaaugagaacggucgua

SEQ ID NO: 1495967 - RNA, 19 nt, Artificial Sequence
  Description of Artificial Sequence: Synthetic oligonucleotide
  Antisense strand to SEQ ID NO: 1495966
uacgaccguucucauugga

SEQ ID NO: 1495968 - RNA, 19 nt, Artificial Sequence
  Description of Artificial Sequence: Synthetic oligonucleotide
  Sense strand starting at position 2890 of SEQ ID NO: 1244533
cagaguaauccuuguuuga

SEQ ID NO: 1495969 - RNA, 19 nt, Artificial Sequence
  Description of Artificial Sequence: Synthetic oligonucleotide
  Antisense strand to SEQ ID NO: 1495968
ucaaacaaggauuacucug

SEQ ID NO: 1495970 - RNA, 19 nt, Artificial Sequence
  Description of Artificial Sequence: Synthetic oligonucleotide
  Sense strand starting at position 2892 of SEQ ID NO: 1244533
gaguaauccuuguuugaug

SEQ ID NO: 1495971 - RNA, 19 nt, Artificial Sequence
  Description of Artificial Sequence: Synthetic oligonucleotide
  Antisense strand to SEQ ID NO: 1495970
caucaaacaaggauuacuc

SEQ ID NO: 1495972 - RNA, 19 nt, Artificial Sequence
  Description of Artificial Sequence: Synthetic oligonucleotide
  Sense strand starting at position 119 of SEQ ID NO: 1244534
uuugaaaccggcuaaucua

SEQ ID NO: 1495973 - RNA, 19 nt, Artificial Sequence
  Description of Artificial Sequence: Synthetic oligonucleotide
  Antisense strand to SEQ ID NO: 1495972
uagauuagccgguuucaaa

SEQ ID NO: 1495974 - RNA, 19 nt, Artificial Sequence
  Description of Artificial Sequence: Synthetic oligonucleotide
  Sense strand starting at position 166 of SEQ ID NO: 1244534
uguucuguauuugcuaaau

SEQ ID NO: 1495975 - RNA, 19 nt, Artificial Sequence
  Description of Artificial Sequence: Synthetic oligonucleotide
  Antisense strand to SEQ ID NO: 1495974
auuuagcaaauacagaaca

SEQ ID NO: 1495976 - RNA, 19 nt, Artificial Sequence
  Description of Artificial Sequence: Synthetic oligonucleotide
  Sense strand starting at position 321 of SEQ ID NO: 1244534
ugcaauagauaagcaauua

SEQ ID NO: 1495977 - RNA, 19 nt, Artificial Sequence
  Description of Artificial Sequence: Synthetic oligonucleotide
  Antisense strand to SEQ ID NO: 1495976
uaauugcuuaucuauugca

SEQ ID NO: 1495978 - RNA, 19 nt, Artificial Sequence
  Description of Artificial Sequence: Synthetic oligonucleotide
  Sense strand starting at position 336 of SEQ ID NO: 1244534
auuauaaugcuguaagaug

SEQ ID NO: 1495979 - RNA, 19 nt, Artificial Sequence
  Description of Artificial Sequence: Synthetic oligonucleotide
  Antisense strand to SEQ ID NO: 1495978
caucuuacagcauuauaau

SEQ ID NO: 1495980 - RNA, 19 nt, Artificial Sequence
  Description of Artificial Sequence: Synthetic oligonucleotide
  Sense strand starting at position 348 of SEQ ID NO: 1244534
uaagaugauucuguaaaug

SEQ ID NO: 1495981 - RNA, 19 nt, Artificial Sequence
  Description of Artificial Sequence: Synthetic oligonucleotide
  Antisense strand to SEQ ID NO: 1495980
cauuuacagaaucaucuua

SEQ ID NO: 1495982 - RNA, 19 nt, Artificial Sequence
  Description of Artificial Sequence: Synthetic oligonucleotide
  Sense strand starting at position 359 of SEQ ID NO: 1244534
uguaaauguugggcacaga

SEQ ID NO: 1495983 - RNA, 19 nt, Artificial Sequence
  Description of Artificial Sequence: Synthetic oligonucleotide
  Antisense strand to SEQ ID NO: 1495982
ucugugcccaacauuuaca

SEQ ID NO: 1495984 - RNA, 19 nt, Artificial Sequence
  Description of Artificial Sequence: Synthetic oligonucleotide
  Sense strand starting at position 360 of SEQ ID NO: 1244534
guaaauguugggcacagaa

SEQ ID NO: 1495985 - RNA, 19 nt, Artificial Sequence
  Description of Artificial Sequence: Synthetic oligonucleotide
  Antisense strand to SEQ ID NO: 1495984
uucugugcccaacauuuac

SEQ ID NO: 1495986 - RNA, 19 nt, Artificial Sequence
  Description of Artificial Sequence: Synthetic oligonucleotide
  Sense strand starting at position 462 of SEQ ID NO: 1244534
uuccuucuagcauacagua

SEQ ID NO: 1495987 - RNA, 19 nt, Artificial Sequence
  Description of Artificial Sequence: Synthetic oligonucleotide
  Antisense strand to SEQ ID NO: 1495986
uacuguaugcuagaaggaa

SEQ ID NO: 1495988 - RNA, 19 nt, Artificial Sequence
  Description of Artificial Sequence: Synthetic oligonucleotide
  Sense strand starting at position 547 of SEQ ID NO: 1244534
ccgguugggaacuaucuga

SEQ ID NO: 1495989 - RNA, 19 nt, Artificial Sequence
  Description of Artificial Sequence: Synthetic oligonucleotide
  Antisense strand to SEQ ID NO: 1495988
ucagauaguucccaaccgg

SEQ ID NO: 1495990 - RNA, 19 nt, Artificial Sequence
  Description of Artificial Sequence: Synthetic oligonucleotide
  Sense strand starting at position 684 of SEQ ID NO: 1244534
gcaguacagguuuaugauc

SEQ ID NO: 1495991 - RNA, 19 nt, Artificial Sequence
  Description of Artificial Sequence: Synthetic oligonucleotide
  Antisense strand to SEQ ID NO: 1495990
gaucauaaaccuguacugc

SEQ ID NO: 1495992 - RNA, 19 nt, Artificial Sequence
  Description of Artificial Sequence: Synthetic oligonucleotide
  Sense strand starting at position 689 of SEQ ID NO: 1244534
acagguuuaugauccuaaa

SEQ ID NO: 1495993 - RNA, 19 nt, Artificial Sequence
  Description of Artificial Sequence: Synthetic oligonucleotide
  Antisense strand to SEQ ID NO: 1495992
uuuaggaucauaaaccugu

SEQ ID NO: 1495994 - RNA, 19 nt, Artificial Sequence
  Description of Artificial Sequence: Synthetic oligonucleotide
  Sense strand starting at position 717 of SEQ ID NO: 1244534
ccaucauuacaacggaauu

SEQ ID NO: 1495995 - RNA, 19 nt, Artificial Sequence
  Description of Artificial Sequence: Synthetic oligonucleotide
  Antisense strand to SEQ ID NO: 1495994
aauuccguuguaaugaugg

SEQ ID NO: 1495996 - RNA, 19 nt, Artificial Sequence
  Description of Artificial Sequence: Synthetic oligonucleotide
  Sense strand starting at position 825 of SEQ ID NO: 1244534
cgggucaaucuggagaacu

SEQ ID NO: 1495997 - RNA, 19 nt, Artificial Sequence
  Description of Artificial Sequence: Synthetic oligonucleotide
  Antisense strand to SEQ ID NO: 1495996
aguucuccagauugacccg

SEQ ID NO: 1495998 - RNA, 19 nt, Artificial Sequence
  Description of Artificial Sequence: Synthetic oligonucleotide
  Sense strand starting at position 1049 of SEQ ID NO: 1244534
cccauugauccuuggagga

SEQ ID NO: 1495999 - RNA, 19 nt, Artificial Sequence
  Description of Artificial Sequence: Synthetic oligonucleotide
  Antisense strand to SEQ ID NO: 1495998
uccuccaaggaucaauggg

SEQ ID NO: 1496000 - RNA, 19 nt, Artificial Sequence
  Description of Artificial Sequence: Synthetic oligonucleotide
  Sense strand starting at position 1173 of SEQ ID NO: 1244534
agucacuuccaucagugua

SEQ ID NO: 1496001 - RNA, 19 nt, Artificial Sequence
  Description of Artificial Sequence: Synthetic oligonucleotide
  Antisense strand to SEQ ID NO: 1496000
uacacugauggaagugacu

SEQ ID NO: 1496002 - RNA, 19 nt, Artificial Sequence
  Description of Artificial Sequence: Synthetic oligonucleotide
  Sense strand starting at position 1175 of SEQ ID NO: 1244534
ucacuuccaucaguguaua

SEQ ID NO: 1496003 - RNA, 19 nt, Artificial Sequence
  Description of Artificial Sequence: Synthetic oligonucleotide
  Antisense strand to SEQ ID NO: 1496002
uauacacugauggaaguga

SEQ ID NO: 1496004 - RNA, 19 nt, Artificial Sequence
  Description of Artificial Sequence: Synthetic oligonucleotide
  Sense strand starting at position 1178 of SEQ ID NO: 1244534
cuuccaucaguguauacuu

SEQ ID NO: 1496005 - RNA, 19 nt, Artificial Sequence
  Description of Artificial Sequence: Synthetic oligonucleotide
  Antisense strand to SEQ ID NO: 1496004
aaguauacacugauggaag

SEQ ID NO: 1496006 - RNA, 19 nt, Artificial Sequence
  Description of Artificial Sequence: Synthetic oligonucleotide
  Sense strand starting at position 2058 of SEQ ID NO: 1244534
cucucuaagcucgaccaau

SEQ ID NO: 1496007 - RNA, 19 nt, Artificial Sequence
  Description of Artificial Sequence: Synthetic oligonucleotide
  Antisense strand to SEQ ID NO: 1496006
auuggucgagcuuagagag

SEQ ID NO: 1496008 - RNA, 19 nt, Artificial Sequence
  Description of Artificial Sequence: Synthetic oligonucleotide
  Sense strand starting at position 2415 of SEQ ID NO: 1244534
cgggaaaccucccuuccaa

SEQ ID NO: 1496009 - RNA, 19 nt, Artificial Sequence
  Description of Artificial Sequence: Synthetic oligonucleotide
  Antisense strand to SEQ ID NO: 1496008
uuggaagggagguuucccg

SEQ ID NO: 1496010 - RNA, 19 nt, Artificial Sequence
  Description of Artificial Sequence: Synthetic oligonucleotide
  Sense strand starting at position 2491 of SEQ ID NO: 1244534
gacguauucgacugggaau

SEQ ID NO: 1496011 - RNA, 19 nt, Artificial Sequence
  Description of Artificial Sequence: Synthetic oligonucleotide
  Antisense strand to SEQ ID NO: 1496010
auucccagucgaauacguc

SEQ ID NO: 1496012 - RNA, 19 nt, Artificial Sequence
  Description of Artificial Sequence: Synthetic oligonucleotide
  Sense strand starting at position 2492 of SEQ ID NO: 1244534
acguauucgacugggaaug

SEQ ID NO: 1496013 - RNA, 19 nt, Artificial Sequence
  Description of Artificial Sequence: Synthetic oligonucleotide
  Antisense strand to SEQ ID NO: 1496012
cauucccagucgaauacgu

SEQ ID NO: 1496014 - RNA, 19 nt, Artificial Sequence
  Description of Artificial Sequence: Synthetic oligonucleotide
  Sense strand starting at position 2589 of SEQ ID NO: 1244534
cauaacuagguaugucaga

SEQ ID NO: 1496015 - RNA, 19 nt, Artificial Sequence
  Description of Artificial Sequence: Synthetic oligonucleotide
  Antisense strand to SEQ ID NO: 1496014
ucugacauaccuaguuaug

SEQ ID NO: 1496016 - RNA, 19 nt, Artificial Sequence
  Description of Artificial Sequence: Synthetic oligonucleotide
  Sense strand starting at position 2596 of SEQ ID NO: 1244534
agguaugucagagacguaa

SEQ ID NO: 1496017 - RNA, 19 nt, Artificial Sequence
  Description of Artificial Sequence: Synthetic oligonucleotide
  Antisense strand to SEQ ID NO: 1496016
uuacgucucugacauaccu

SEQ ID NO: 1496018 - RNA, 19 nt, Artificial Sequence
  Description of Artificial Sequence: Synthetic oligonucleotide
  Sense strand starting at position 2598 of SEQ ID NO: 1244534
guaugucagagacguaaga

SEQ ID NO: 1496019 - RNA, 19 nt, Artificial Sequence
  Description of Artificial Sequence: Synthetic oligonucleotide
  Antisense strand to SEQ ID NO: 1496018
ucuuacgucucugacauac

SEQ ID NO: 1496020 - RNA, 19 nt, Artificial Sequence
  Description of Artificial Sequence: Synthetic oligonucleotide
  Sense strand starting at position 2611 of SEQ ID NO: 1244534
guaagagggcuguauucua

SEQ ID NO: 1496021 - RNA, 19 nt, Artificial Sequence
  Description of Artificial Sequence: Synthetic oligonucleotide
  Antisense strand to SEQ ID NO: 1496020
uagaauacagcccucuuac

SEQ ID NO: 1496022 - RNA, 19 nt, Artificial Sequence
  Description of Artificial Sequence: Synthetic oligonucleotide
  Sense strand starting at position 2629 of SEQ ID NO: 1244534
aacgaauuccuaggcagau

SEQ ID NO: 1496023 - RNA, 19 nt, Artificial Sequence
  Description of Artificial Sequence: Synthetic oligonucleotide
  Antisense strand to SEQ ID NO: 1496022
aucugccuaggaauucguu

SEQ ID NO: 1496024 - RNA, 19 nt, Artificial Sequence
  Description of Artificial Sequence: Synthetic oligonucleotide
  Sense strand starting at position 2630 of SEQ ID NO: 1244534
acgaauuccuaggcagauc

SEQ ID NO: 1496025 - RNA, 19 nt, Artificial Sequence
  Description of Artificial Sequence: Synthetic oligonucleotide
  Antisense strand to SEQ ID NO: 1496024
gaucugccuaggaauucgu

SEQ ID NO: 1496026 - RNA, 19 nt, Artificial Sequence
  Description of Artificial Sequence: Synthetic oligonucleotide
  Sense strand starting at position 2879 of SEQ ID NO: 1244534
acacuaguauuugcucagu

SEQ ID NO: 1496027 - RNA, 19 nt, Artificial Sequence
  Description of Artificial Sequence: Synthetic oligonucleotide
  Antisense strand to SEQ ID NO: 1496026
acugagcaaauacuagugu

SEQ ID NO: 1496028 - RNA, 19 nt, Artificial Sequence
  Description of Artificial Sequence: Synthetic oligonucleotide
  Sense strand starting at position 2881 of SEQ ID NO: 1244534
acuaguauuugcucaguag

SEQ ID NO: 1496029 - RNA, 19 nt, Artificial Sequence
  Description of Artificial Sequence: Synthetic oligonucleotide
  Antisense strand to SEQ ID NO: 1496028
cuacugagcaaauacuagu

SEQ ID NO: 1496030 - RNA, 19 nt, Artificial Sequence
  Description of Artificial Sequence: Synthetic oligonucleotide
  Sense strand starting at position 2884 of SEQ ID NO: 1244534
aguauuugcucaguagcau

SEQ ID NO: 1496031 - RNA, 19 nt, Artificial Sequence
  Description of Artificial Sequence: Synthetic oligonucleotide
  Antisense strand to SEQ ID NO: 1496030
augcuacugagcaaauacu

SEQ ID NO: 1496032 - RNA, 19 nt, Artificial Sequence
  Description of Artificial Sequence: Synthetic oligonucleotide
  Sense strand starting at position 2885 of SEQ ID NO: 1244534
guauuugcucaguagcaua

SEQ ID NO: 1496033 - RNA, 19 nt, Artificial Sequence
  Description of Artificial Sequence: Synthetic oligonucleotide
  Antisense strand to SEQ ID NO: 1496032
uaugcuacugagcaaauac

SEQ ID NO: 1496034 - RNA, 19 nt, Artificial Sequence
  Description of Artificial Sequence: Synthetic oligonucleotide
  Sense strand starting at position 2910 of SEQ ID NO: 1244534
guaguugaaucacuuuaaa

SEQ ID NO: 1496035 - RNA, 19 nt, Artificial Sequence
  Description of Artificial Sequence: Synthetic oligonucleotide
  Antisense strand to SEQ ID NO: 1496034
uuuaaagugauucaacuac

SEQ ID NO: 1496036 - RNA, 19 nt, Artificial Sequence
  Description of Artificial Sequence: Synthetic oligonucleotide
  Sense strand starting at position 2913 of SEQ ID NO: 1244534
guugaaucacuuuaaaguu

SEQ ID NO: 1496037 - RNA, 19 nt, Artificial Sequence
  Description of Artificial Sequence: Synthetic oligonucleotide
  Antisense strand to SEQ ID NO: 1496036
aacuuuaaagugauucaac

SEQ ID NO: 1496038 - RNA, 19 nt, Artificial Sequence
  Description of Artificial Sequence: Synthetic oligonucleotide
  Sense strand starting at position 2964 of SEQ ID NO: 1244534
aucuguacuuuccuguaaa

SEQ ID NO: 1496039 - RNA, 19 nt, Artificial Sequence
  Description of Artificial Sequence: Synthetic oligonucleotide
  Antisense strand to SEQ ID NO: 1496038
uuuacaggaaaguacagau

SEQ ID NO: 1496040 - RNA, 19 nt, Artificial Sequence
  Description of Artificial Sequence: Synthetic oligonucleotide
  Sense strand starting at position 3246 of SEQ ID NO: 1244534
cuuguuuggagagguaauc

SEQ ID NO: 1496041 - RNA, 19 nt, Artificial Sequence
  Description of Artificial Sequence: Synthetic oligonucleotide
  Antisense strand to SEQ ID NO: 1496040
gauuaccucuccaaacaag

SEQ ID NO: 1496042 - RNA, 19 nt, Artificial Sequence
  Description of Artificial Sequence: Synthetic oligonucleotide
  Sense strand starting at position 3361 of SEQ ID NO: 1244534
uuagcauuguaauuaggga

SEQ ID NO: 1496043 - RNA, 19 nt, Artificial Sequence
  Description of Artificial Sequence: Synthetic oligonucleotide
  Antisense strand to SEQ ID NO: 1496042
ucccuaauuacaaugcuaa

SEQ ID NO: 1496044 - RNA, 19 nt, Artificial Sequence
  Description of Artificial Sequence: Synthetic oligonucleotide
  Sense strand starting at position 3376 of SEQ ID NO: 1244534
gggagcagccuccauauca

SEQ ID NO: 1496045 - RNA, 19 nt, Artificial Sequence
  Description of Artificial Sequence: Synthetic oligonucleotide
  Antisense strand to SEQ ID NO: 1496044
ugauauggaggcugcuccc

SEQ ID NO: 1496046 - RNA, 19 nt, Artificial Sequence
  Description of Artificial Sequence: Synthetic oligonucleotide
  Sense strand starting at position 3439 of SEQ ID NO: 1244534
ccacguuugacccaagaga

SEQ ID NO: 1496047 - RNA, 19 nt, Artificial Sequence
  Description of Artificial Sequence: Synthetic oligonucleotide
  Antisense strand to SEQ ID NO: 1496046
ucucuugggucaaacgugg

SEQ ID NO: 1496048 - RNA, 19 nt, Artificial Sequence
  Description of Artificial Sequence: Synthetic oligonucleotide
  Sense strand starting at position 3521 of SEQ ID NO: 1244534
cugcgucauccguuuauug

SEQ ID NO: 1496049 - RNA, 19 nt, Artificial Sequence
  Description of Artificial Sequence: Synthetic oligonucleotide
  Antisense strand to SEQ ID NO: 1496048
caauaaacggaugacgcag

SEQ ID NO: 1496050 - RNA, 19 nt, Artificial Sequence
  Description of Artificial Sequence: Synthetic oligonucleotide
  Sense strand starting at position 3681 of SEQ ID NO: 1244534
cuguaaauguucccaucaa

SEQ ID NO: 1496051 - RNA, 19 nt, Artificial Sequence
  Description of Artificial Sequence: Synthetic oligonucleotide
  Antisense strand to SEQ ID NO: 1496050
uugaugggaacauuuacag

SEQ ID NO: 1496052 - RNA, 19 nt, Artificial Sequence
  Description of Artificial Sequence: Synthetic oligonucleotide
  Sense strand starting at position 36 of SEQ ID NO: 1244535
gcuaauugacgguaauacu

SEQ ID NO: 1496053 - RNA, 19 nt, Artificial Sequence
  Description of Artificial Sequence: Synthetic oligonucleotide
  Antisense strand to SEQ ID NO: 1496052
aguauuaccgucaauuagc

SEQ ID NO: 1496054 - RNA, 19 nt, Artificial Sequence
  Description of Artificial Sequence: Synthetic oligonucleotide
  Sense strand starting at position 44 of SEQ ID NO: 1244535
acgguaauacuguaauuga

SEQ ID NO: 1496055 - RNA, 19 nt, Artificial Sequence
  Description of Artificial Sequence: Synthetic oligonucleotide
  Antisense strand to SEQ ID NO: 1496054
ucaauuacaguauuaccgu

SEQ ID NO: 1496056 - RNA, 19 nt, Artificial Sequence
  Description of Artificial Sequence: Synthetic oligonucleotide
  Sense strand starting at position 47 of SEQ ID NO: 1244535
guaauacuguaauugaaca

SEQ ID NO: 1496057 - RNA, 19 nt, Artificial Sequence
  Description of Artificial Sequence: Synthetic oligonucleotide
  Antisense strand to SEQ ID NO: 1496056
uguucaauuacaguauuac

SEQ ID NO: 1496058 - RNA, 19 nt, Artificial Sequence
  Description of Artificial Sequence: Synthetic oligonucleotide
  Sense strand starting at position 52 of SEQ ID NO: 1244535
acuguaauugaacaguauu

SEQ ID NO: 1496059 - RNA, 19 nt, Artificial Sequence
  Description of Artificial Sequence: Synthetic oligonucleotide
  Antisense strand to SEQ ID NO: 1496058
aauacuguucaauuacagu

SEQ ID NO: 1496060 - RNA, 19 nt, Artificial Sequence
  Description of Artificial Sequence: Synthetic oligonucleotide
  Sense strand starting at position 115 of SEQ ID NO: 1244535
aguccacuucuauggaaga

SEQ ID NO: 1496061 - RNA, 19 nt, Artificial Sequence
  Description of Artificial Sequence: Synthetic oligonucleotide
  Antisense strand to SEQ ID NO: 1496060
ucuuccauagaaguggacu

SEQ ID NO: 1496062 - RNA, 19 nt, Artificial Sequence
  Description of Artificial Sequence: Synthetic oligonucleotide
  Sense strand starting at position 178 of SEQ ID NO: 1244535
ggagaaugaucugaucagg

SEQ ID NO: 1496063 - RNA, 19 nt, Artificial Sequence
  Description of Artificial Sequence: Synthetic oligonucleotide
  Antisense strand to SEQ ID NO: 1496062
ccugaucagaucauucucc

SEQ ID NO: 1496064 - RNA, 19 nt, Artificial Sequence
  Description of Artificial Sequence: Synthetic oligonucleotide
  Sense strand starting at position 181 of SEQ ID NO: 1244535
gaaugaucugaucaggugu

SEQ ID NO: 1496065 - RNA, 19 nt, Artificial Sequence
  Description of Artificial Sequence: Synthetic oligonucleotide
  Antisense strand to SEQ ID NO: 1496064
acaccugaucagaucauuc

SEQ ID NO: 1496066 - RNA, 19 nt, Artificial Sequence
  Description of Artificial Sequence: Synthetic oligonucleotide
  Sense strand starting at position 197 of SEQ ID NO: 1244535
ugucuauuagcuuggauga

SEQ ID NO: 1496067 - RNA, 19 nt, Artificial Sequence
  Description of Artificial Sequence: Synthetic oligonucleotide
  Antisense strand to SEQ ID NO: 1496066
ucauccaagcuaauagaca

SEQ ID NO: 1496068 - RNA, 19 nt, Artificial Sequence
  Description of Artificial Sequence: Synthetic oligonucleotide
  Sense strand starting at position 198 of SEQ ID NO: 1244535
gucuauuagcuuggaugaa

SEQ ID NO: 1496069 - RNA, 19 nt, Artificial Sequence
  Description of Artificial Sequence: Synthetic oligonucleotide
  Antisense strand to SEQ ID NO: 1496068
uucauccaagcuaauagac

SEQ ID NO: 1496070 - RNA, 19 nt, Artificial Sequence
  Description of Artificial Sequence: Synthetic oligonucleotide
  Sense strand starting at position 288 of SEQ ID NO: 1244535
acuuaauuacagcgaaucu

SEQ ID NO: 1496071 - RNA, 19 nt, Artificial Sequence
  Description of Artificial Sequence: Synthetic oligonucleotide
  Antisense strand to SEQ ID NO: 1496070
agauucgcuguaauuaagu

SEQ ID NO: 1496072 - RNA, 19 nt, Artificial Sequence
  Description of Artificial Sequence: Synthetic oligonucleotide
  Sense strand starting at position 300 of SEQ ID NO: 1244535
cgaaucuugcaguaguaaa

SEQ ID NO: 1496073 - RNA, 19 nt, Artificial Sequence
  Description of Artificial Sequence: Synthetic oligonucleotide
  Antisense strand to SEQ ID NO: 1496072
uuuacuacugcaagauucg

SEQ ID NO: 1496074 - RNA, 19 nt, Artificial Sequence
  Description of Artificial Sequence: Synthetic oligonucleotide
  Sense strand starting at position 869 of SEQ ID NO: 1244535
cgguauaaccaucauuguu

SEQ ID NO: 1496075 - RNA, 19 nt, Artificial Sequence
  Description of Artificial Sequence: Synthetic oligonucleotide
  Antisense strand to SEQ ID NO: 1496074
aacaaugaugguuauaccg

SEQ ID NO: 1496076 - RNA, 19 nt, Artificial Sequence
  Description of Artificial Sequence: Synthetic oligonucleotide
  Sense strand starting at position 2142 of SEQ ID NO: 1244535
ccuuuauuccuacggagag

SEQ ID NO: 1496077 - RNA, 19 nt, Artificial Sequence
  Description of Artificial Sequence: Synthetic oligonucleotide
  Antisense strand to SEQ ID NO: 1496076
cucuccguaggaauaaagg

SEQ ID NO: 1496078 - RNA, 19 nt, Artificial Sequence
  Description of Artificial Sequence: Synthetic oligonucleotide
  Sense strand starting at position 2279 of SEQ ID NO: 1244535
ucugaaugucuuuauuggu

SEQ ID NO: 1496079 - RNA, 19 nt, Artificial Sequence
  Description of Artificial Sequence: Synthetic oligonucleotide
  Antisense strand to SEQ ID NO: 1496078
accaauaaagacauucaga

SEQ ID NO: 1496080 - RNA, 19 nt, Artificial Sequence
  Description of Artificial Sequence: Synthetic oligonucleotide
  Sense strand starting at position 2284 of SEQ ID NO: 1244535
augucuuuauugguuggau

SEQ ID NO: 1496081 - RNA, 19 nt, Artificial Sequence
  Description of Artificial Sequence: Synthetic oligonucleotide
  Antisense strand to SEQ ID NO: 1496080
auccaaccaauaaagacau

SEQ ID NO: 1496082 - RNA, 19 nt, Artificial Sequence
  Description of Artificial Sequence: Synthetic oligonucleotide
  Sense strand starting at position 2285 of SEQ ID NO: 1244535
ugucuuuauugguuggaua

SEQ ID NO: 1496083 - RNA, 19 nt, Artificial Sequence
  Description of Artificial Sequence: Synthetic oligonucleotide
  Antisense strand to SEQ ID NO: 1496082
uauccaaccaauaaagaca

SEQ ID NO: 1496084 - RNA, 19 nt, Artificial Sequence
  Description of Artificial Sequence: Synthetic oligonucleotide
  Sense strand starting at position 2286 of SEQ ID NO: 1244535
gucuuuauugguuggauac

SEQ ID NO: 1496085 - RNA, 19 nt, Artificial Sequence
  Description of Artificial Sequence: Synthetic oligonucleotide
  Antisense strand to SEQ ID NO: 1496084
guauccaaccaauaaagac

SEQ ID NO: 1496086 - RNA, 19 nt, Artificial Sequence
  Description of Artificial Sequence: Synthetic oligonucleotide
  Sense strand starting at position 2309 of SEQ ID NO: 1244535
cccucacgugguuaagagu

SEQ ID NO: 1496087 - RNA, 19 nt, Artificial Sequence
  Description of Artificial Sequence: Synthetic oligonucleotide
  Antisense strand to SEQ ID NO: 1496086
acucuuaaccacgugaggg

SEQ ID NO: 1496088 - RNA, 19 nt, Artificial Sequence
  Description of Artificial Sequence: Synthetic oligonucleotide
  Sense strand starting at position 2316 of SEQ ID NO: 1244535
gugguuaagagugagcuaa

SEQ ID NO: 1496089 - RNA, 19 nt, Artificial Sequence
  Description of Artificial Sequence: Synthetic oligonucleotide
  Antisense strand to SEQ ID NO: 1496088
uuagcucacucuuaaccac

SEQ ID NO: 1496090 - RNA, 19 nt, Artificial Sequence
  Description of Artificial Sequence: Synthetic oligonucleotide
  Sense strand starting at position 2318 of SEQ ID NO: 1244535
gguuaagagugagcuaaga

SEQ ID NO: 1496091 - RNA, 19 nt, Artificial Sequence
  Description of Artificial Sequence: Synthetic oligonucleotide
  Antisense strand to SEQ ID NO: 1496090
ucuuagcucacucuuaacc

SEQ ID NO: 1496092 - RNA, 19 nt, Artificial Sequence
  Description of Artificial Sequence: Synthetic oligonucleotide
  Sense strand starting at position 2467 of SEQ ID NO: 1244535
gcagucuuugaauaaguag

SEQ ID NO: 1496093 - RNA, 19 nt, Artificial Sequence
  Description of Artificial Sequence: Synthetic oligonucleotide
  Antisense strand to SEQ ID NO: 1496092
cuacuuauucaaagacugc

SEQ ID NO: 1496094 - RNA, 19 nt, Artificial Sequence
  Description of Artificial Sequence: Synthetic oligonucleotide
  Sense strand starting at position 2470 of SEQ ID NO: 1244535
gucuuugaauaaguaguuu

SEQ ID NO: 1496095 - RNA, 19 nt, Artificial Sequence
  Description of Artificial Sequence: Synthetic oligonucleotide
  Antisense strand to SEQ ID NO: 1496094
aaacuacuuauucaaagac

SEQ ID NO: 1496096 - RNA, 19 nt, Artificial Sequence
  Description of Artificial Sequence: Synthetic oligonucleotide
  Sense strand starting at position 2549 of SEQ ID NO: 1244535
ucacuugauucugugaaga

SEQ ID NO: 1496097 - RNA, 19 nt, Artificial Sequence
  Description of Artificial Sequence: Synthetic oligonucleotide
  Antisense strand to SEQ ID NO: 1496096
ucuucacagaaucaaguga

SEQ ID NO: 1496098 - RNA, 19 nt, Artificial Sequence
  Description of Artificial Sequence: Synthetic oligonucleotide
  Sense strand starting at position 2560 of SEQ ID NO: 1244535
ugugaagaaagugguguua

SEQ ID NO: 1496099 - RNA, 19 nt, Artificial Sequence
  Description of Artificial Sequence: Synthetic oligonucleotide
  Antisense strand to SEQ ID NO: 1496098
uaacaccacuuucuucaca

SEQ ID NO: 1496100 - RNA, 19 nt, Artificial Sequence
  Description of Artificial Sequence: Synthetic oligonucleotide
  Sense strand starting at position 2573 of SEQ ID NO: 1244535
guguuacucucauuucuua

SEQ ID NO: 1496101 - RNA, 19 nt, Artificial Sequence
  Description of Artificial Sequence: Synthetic oligonucleotide
  Antisense strand to SEQ ID NO: 1496100
uaagaaaugagaguaacac

SEQ ID NO: 1496102 - RNA, 19 nt, Artificial Sequence
  Description of Artificial Sequence: Synthetic oligonucleotide
  Sense strand starting at position 2723 of SEQ ID NO: 1244535
caacucugucuccggagau

SEQ ID NO: 1496103 - RNA, 19 nt, Artificial Sequence
  Description of Artificial Sequence: Synthetic oligonucleotide
  Antisense strand to SEQ ID NO: 1496102
aucuccggagacagaguug

SEQ ID NO: 1496104 - RNA, 19 nt, Artificial Sequence
  Description of Artificial Sequence: Synthetic oligonucleotide
  Sense strand starting at position 2749 of SEQ ID NO: 1244535
ugcaauugucuguauaaca

SEQ ID NO: 1496105 - RNA, 19 nt, Artificial Sequence
  Description of Artificial Sequence: Synthetic oligonucleotide
  Antisense strand to SEQ ID NO: 1496104
uguuauacagacaauugca

SEQ ID NO: 1496106 - RNA, 19 nt, Artificial Sequence
  Description of Artificial Sequence: Synthetic oligonucleotide
  Sense strand starting at position 2823 of SEQ ID NO: 1244535
accacagucccuugaggua

SEQ ID NO: 1496107 - RNA, 19 nt, Artificial Sequence
  Description of Artificial Sequence: Synthetic oligonucleotide
  Antisense strand to SEQ ID NO: 1496106
uaccucaagggacuguggu

SEQ ID NO: 1496108 - RNA, 19 nt, Artificial Sequence
  Description of Artificial Sequence: Synthetic oligonucleotide
  Sense strand starting at position 2828 of SEQ ID NO: 1244535
agucccuugagguauagga

SEQ ID NO: 1496109 - RNA, 19 nt, Artificial Sequence
  Description of Artificial Sequence: Synthetic oligonucleotide
  Antisense strand to SEQ ID NO: 1496108
uccuauaccucaagggacu

SEQ ID NO: 1496110 - RNA, 19 nt, Artificial Sequence
  Description of Artificial Sequence: Synthetic oligonucleotide
  Sense strand starting at position 2844 of SEQ ID NO: 1244535
ggacguuaccguuaugauu

SEQ ID NO: 1496111 - RNA, 19 nt, Artificial Sequence
  Description of Artificial Sequence: Synthetic oligonucleotide
  Antisense strand to SEQ ID NO: 1496110
aaucauaacgguaacgucc

SEQ ID NO: 1496112 - RNA, 19 nt, Artificial Sequence
  Description of Artificial Sequence: Synthetic oligonucleotide
  Sense strand starting at position 3184 of SEQ ID NO: 1244535
ccuuaaagacauggugacu

SEQ ID NO: 1496113 - RNA, 19 nt, Artificial Sequence
  Description of Artificial Sequence: Synthetic oligonucleotide
  Antisense strand to SEQ ID NO: 1496112
agucaccaugucuuuaagg

SEQ ID NO: 1496114 - RNA, 19 nt, Artificial Sequence
  Description of Artificial Sequence: Synthetic oligonucleotide
  Sense strand starting at position 3235 of SEQ ID NO: 1244535
ggacucaauccaggucuuu

SEQ ID NO: 1496115 - RNA, 19 nt, Artificial Sequence
  Description of Artificial Sequence: Synthetic oligonucleotide
  Antisense strand to SEQ ID NO: 1496114
aaagaccuggauugagucc

SEQ ID NO: 1496116 - RNA, 19 nt, Artificial Sequence
  Description of Artificial Sequence: Synthetic oligonucleotide
  Sense strand starting at position 3739 of SEQ ID NO: 1244535
uuucuuucuuggguuggaa

SEQ ID NO: 1496117 - RNA, 19 nt, Artificial Sequence
  Description of Artificial Sequence: Synthetic oligonucleotide
  Antisense strand to SEQ ID NO: 1496116
uuccaacccaagaaagaaa

SEQ ID NO: 1496118 - RNA, 19 nt, Artificial Sequence
  Description of Artificial Sequence: Synthetic oligonucleotide
  Sense strand starting at position 3741 of SEQ ID NO: 1244535
ucuuucuuggguuggaauu

SEQ ID NO: 1496119 - RNA, 19 nt, Artificial Sequence
  Description of Artificial Sequence: Synthetic oligonucleotide
  Antisense strand to SEQ ID NO: 1496118
aauuccaacccaagaaaga

SEQ ID NO: 1496120 - RNA, 19 nt, Artificial Sequence
  Description of Artificial Sequence: Synthetic oligonucleotide
  Sense strand starting at position 3747 of SEQ ID NO: 1244535
uuggguuggaauugaaaug

SEQ ID NO: 1496121 - RNA, 19 nt, Artificial Sequence
  Description of Artificial Sequence: Synthetic oligonucleotide
  Antisense strand to SEQ ID NO: 1496120
cauuucaauuccaacccaa

SEQ ID NO: 1496122 - RNA, 19 nt, Artificial Sequence
  Description of Artificial Sequence: Synthetic oligonucleotide
  Sense strand starting at position 3858 of SEQ ID NO: 1244535
guuauacagcuguauagau

SEQ ID NO: 1496123 - RNA, 19 nt, Artificial Sequence
  Description of Artificial Sequence: Synthetic oligonucleotide
  Antisense strand to SEQ ID NO: 1496122
aucuauacagcuguauaac

SEQ ID NO: 1496124 - RNA, 19 nt, Artificial Sequence
  Description of Artificial Sequence: Synthetic oligonucleotide
  Sense strand starting at position 3865 of SEQ ID NO: 1244535
agcuguauagaugauagca

SEQ ID NO: 1496125 - RNA, 19 nt, Artificial Sequence
  Description of Artificial Sequence: Synthetic oligonucleotide
  Antisense strand to SEQ ID NO: 1496124
ugcuaucaucuauacagcu

SEQ ID NO: 1496126 - RNA, 19 nt, Artificial Sequence
  Description of Artificial Sequence: Synthetic oligonucleotide
  Sense strand starting at position 3881 of SEQ ID NO: 1244535
gcaucauuacugcaaacug

SEQ ID NO: 1496127 - RNA, 19 nt, Artificial Sequence
  Description of Artificial Sequence: Synthetic oligonucleotide
  Antisense strand to SEQ ID NO: 1496126
caguuugcaguaaugaugc

SEQ ID NO: 1496128 - RNA, 19 nt, Artificial Sequence
  Description of Artificial Sequence: Synthetic oligonucleotide
  Sense strand starting at position 3903 of SEQ ID NO: 1244535
uguccauggcaacauauaa

SEQ ID NO: 1496129 - RNA, 19 nt, Artificial Sequence
  Description of Artificial Sequence: Synthetic oligonucleotide
  Antisense strand to SEQ ID NO: 1496128
uuauauguugccauggaca

SEQ ID NO: 1496130 - RNA, 19 nt, Artificial Sequence
  Description of Artificial Sequence: Synthetic oligonucleotide
  Sense strand starting at position 3936 of SEQ ID NO: 1244535
agugauucuuucucuacuu

SEQ ID NO: 1496131 - RNA, 19 nt, Artificial Sequence
  Description of Artificial Sequence: Synthetic oligonucleotide
  Antisense strand to SEQ ID NO: 1496130
aaguagagaaagaaucacu

SEQ ID NO: 1496132 - RNA, 19 nt, Artificial Sequence
  Description of Artificial Sequence: Synthetic oligonucleotide
  Sense strand starting at position 31 of SEQ ID NO: 1244536
gugugcagaucugugcaaa

SEQ ID NO: 1496133 - RNA, 19 nt, Artificial Sequence
  Description of Artificial Sequence: Synthetic oligonucleotide
  Antisense strand to SEQ ID NO: 1496132
uuugcacagaucugcacac

SEQ ID NO: 1496134 - RNA, 19 nt, Artificial Sequence
  Description of Artificial Sequence: Synthetic oligonucleotide
  Sense strand starting at position 32 of SEQ ID NO: 1244536
ugugcagaucugugcaaau

SEQ ID NO: 1496135 - RNA, 19 nt, Artificial Sequence
  Description of Artificial Sequence: Synthetic oligonucleotide
  Antisense strand to SEQ ID NO: 1496134
auuugcacagaucugcaca

SEQ ID NO: 1496136 - RNA, 19 nt, Artificial Sequence
  Description of Artificial Sequence: Synthetic oligonucleotide
  Sense strand starting at position 43 of SEQ ID NO: 1244536
gugcaaaugggaugcaaau

SEQ ID NO: 1496137 - RNA, 19 nt, Artificial Sequence
  Description of Artificial Sequence: Synthetic oligonucleotide
  Antisense strand to SEQ ID NO: 1496136
auuugcaucccauuugcac

SEQ ID NO: 1496138 - RNA, 19 nt, Artificial Sequence
  Description of Artificial Sequence: Synthetic oligonucleotide
  Sense strand starting at position 342 of SEQ ID NO: 1244536
cgggcuauguguggcgaaa

SEQ ID NO: 1496139 - RNA, 19 nt, Artificial Sequence
  Description of Artificial Sequence: Synthetic oligonucleotide
  Antisense strand to SEQ ID NO: 1496138
uuucgccacacauagcccg

SEQ ID NO: 1496140 - RNA, 19 nt, Artificial Sequence
  Description of Artificial Sequence: Synthetic oligonucleotide
  Sense strand starting at position 344 of SEQ ID NO: 1244536
ggcuauguguggcgaaaca

SEQ ID NO: 1496141 - RNA, 19 nt, Artificial Sequence
  Description of Artificial Sequence: Synthetic oligonucleotide
  Antisense strand to SEQ ID NO: 1496140
uguuucgccacacauagcc

SEQ ID NO: 1496142 - RNA, 19 nt, Artificial Sequence
  Description of Artificial Sequence: Synthetic oligonucleotide
  Sense strand starting at position 447 of SEQ ID NO: 1244536
aguaccuuucagcgaaggu

SEQ ID NO: 1496143 - RNA, 19 nt, Artificial Sequence
  Description of Artificial Sequence: Synthetic oligonucleotide
  Antisense strand to SEQ ID NO: 1496142
accuucgcugaaagguacu

SEQ ID NO: 1496144 - RNA, 19 nt, Artificial Sequence
  Description of Artificial Sequence: Synthetic oligonucleotide
  Sense strand starting at position 622 of SEQ ID NO: 1244536
ugauuuagccacugcuaau

SEQ ID NO: 1496145 - RNA, 19 nt, Artificial Sequence
  Description of Artificial Sequence: Synthetic oligonucleotide
  Antisense strand to SEQ ID NO: 1496144
auuagcaguggcuaaauca

SEQ ID NO: 1496146 - RNA, 19 nt, Artificial Sequence
  Description of Artificial Sequence: Synthetic oligonucleotide
  Sense strand starting at position 803 of SEQ ID NO: 1244536
aggacugcccauugauaug

SEQ ID NO: 1496147 - RNA, 19 nt, Artificial Sequence
  Description of Artificial Sequence: Synthetic oligonucleotide
  Antisense strand to SEQ ID NO: 1496146
cauaucaaugggcaguccu

SEQ ID NO: 1496148 - RNA, 19 nt, Artificial Sequence
  Description of Artificial Sequence: Synthetic oligonucleotide
  Sense strand starting at position 809 of SEQ ID NO: 1244536
gcccauugauaugcuaaug

SEQ ID NO: 1496149 - RNA, 19 nt, Artificial Sequence
  Description of Artificial Sequence: Synthetic oligonucleotide
  Antisense strand to SEQ ID NO: 1496148
cauuagcauaucaaugggc

SEQ ID NO: 1496150 - RNA, 19 nt, Artificial Sequence
  Description of Artificial Sequence: Synthetic oligonucleotide
  Sense strand starting at position 1026 of SEQ ID NO: 1244536
gagaaagaauccgaguuau

SEQ ID NO: 1496151 - RNA, 19 nt, Artificial Sequence
  Description of Artificial Sequence: Synthetic oligonucleotide
  Antisense strand to SEQ ID NO: 1496150
auaacucggauucuuucuc

SEQ ID NO: 1496152 - RNA, 19 nt, Artificial Sequence
  Description of Artificial Sequence: Synthetic oligonucleotide
  Sense strand starting at position 1109 of SEQ ID NO: 1244536
gugucaugucaauaaauaa

SEQ ID NO: 1496153 - RNA, 19 nt, Artificial Sequence
  Description of Artificial Sequence: Synthetic oligonucleotide
  Antisense strand to SEQ ID NO: 1496152
uuauuuauugacaugacac

SEQ ID NO: 1496154 - RNA, 19 nt, Artificial Sequence
  Description of Artificial Sequence: Synthetic oligonucleotide
  Sense strand starting at position 1432 of SEQ ID NO: 1244536
ugaaucaaagucugucaga

SEQ ID NO: 1496155 - RNA, 19 nt, Artificial Sequence
  Description of Artificial Sequence: Synthetic oligonucleotide
  Antisense strand to SEQ ID NO: 1496154
ucugacagacuuugauuca

SEQ ID NO: 1496156 - RNA, 19 nt, Artificial Sequence
  Description of Artificial Sequence: Synthetic oligonucleotide
  Sense strand starting at position 1433 of SEQ ID NO: 1244536
gaaucaaagucugucagag

SEQ ID NO: 1496157 - RNA, 19 nt, Artificial Sequence
  Description of Artificial Sequence: Synthetic oligonucleotide
  Antisense strand to SEQ ID NO: 1496156
cucugacagacuuugauuc

SEQ ID NO: 1496158 - RNA, 19 nt, Artificial Sequence
  Description of Artificial Sequence: Synthetic oligonucleotide
  Sense strand starting at position 1437 of SEQ ID NO: 1244536
caaagucugucagagccaa

SEQ ID NO: 1496159 - RNA, 19 nt, Artificial Sequence
  Description of Artificial Sequence: Synthetic oligonucleotide
  Antisense strand to SEQ ID NO: 1496158
uuggcucugacagacuuug

SEQ ID NO: 1496160 - RNA, 19 nt, Artificial Sequence
  Description of Artificial Sequence: Synthetic oligonucleotide
  Sense strand starting at position 1517 of SEQ ID NO: 1244536
gagauuuggcaaugugcuu

SEQ ID NO: 1496161 - RNA, 19 nt, Artificial Sequence
  Description of Artificial Sequence: Synthetic oligonucleotide
  Antisense strand to SEQ ID NO: 1496160
aagcacauugccaaaucuc

SEQ ID NO: 1496162 - RNA, 19 nt, Artificial Sequence
  Description of Artificial Sequence: Synthetic oligonucleotide
  Sense strand starting at position 2091 of SEQ ID NO: 1244536
uuaauuaggucccuguuga

SEQ ID NO: 1496163 - RNA, 19 nt, Artificial Sequence
  Description of Artificial Sequence: Synthetic oligonucleotide
  Antisense strand to SEQ ID NO: 1496162
ucaacagggaccuaauuaa

SEQ ID NO: 1496164 - RNA, 19 nt, Artificial Sequence
  Description of Artificial Sequence: Synthetic oligonucleotide
  Sense strand starting at position 2092 of SEQ ID NO: 1244536
uaauuaggucccuguugag

SEQ ID NO: 1496165 - RNA, 19 nt, Artificial Sequence
  Description of Artificial Sequence: Synthetic oligonucleotide
  Antisense strand to SEQ ID NO: 1496164
cucaacagggaccuaauua

SEQ ID NO: 1496166 - RNA, 19 nt, Artificial Sequence
  Description of Artificial Sequence: Synthetic oligonucleotide
  Sense strand starting at position 2102 of SEQ ID NO: 1244536
ccuguugagcuccagggaa

SEQ ID NO: 1496167 - RNA, 19 nt, Artificial Sequence
  Description of Artificial Sequence: Synthetic oligonucleotide
  Antisense strand to SEQ ID NO: 1496166
uucccuggagcucaacagg

SEQ ID NO: 1496168 - RNA, 19 nt, Artificial Sequence
  Description of Artificial Sequence: Synthetic oligonucleotide
  Sense strand starting at position 2104 of SEQ ID NO: 1244536
uguugagcuccagggaaau

SEQ ID NO: 1496169 - RNA, 19 nt, Artificial Sequence
  Description of Artificial Sequence: Synthetic oligonucleotide
  Antisense strand to SEQ ID NO: 1496168
auuucccuggagcucaaca

SEQ ID NO: 1496170 - RNA, 19 nt, Artificial Sequence
  Description of Artificial Sequence: Synthetic oligonucleotide
  Sense strand starting at position 2139 of SEQ ID NO: 1244536
gugaguuaagcugaaacug

SEQ ID NO: 1496171 - RNA, 19 nt, Artificial Sequence
  Description of Artificial Sequence: Synthetic oligonucleotide
  Antisense strand to SEQ ID NO: 1496170
caguuucagcuuaacucac

SEQ ID NO: 1496172 - RNA, 19 nt, Artificial Sequence
  Description of Artificial Sequence: Synthetic oligonucleotide
  Sense strand starting at position 2338 of SEQ ID NO: 1244536
aguggagcucucugucaca

SEQ ID NO: 1496173 - RNA, 19 nt, Artificial Sequence
  Description of Artificial Sequence: Synthetic oligonucleotide
  Antisense strand to SEQ ID NO: 1496172
ugugacagagagcuccacu

SEQ ID NO: 1496174 - RNA, 19 nt, Artificial Sequence
  Description of Artificial Sequence: Synthetic oligonucleotide
  Sense strand starting at position 2408 of SEQ ID NO: 1244536
gacucaguagucuguggga

SEQ ID NO: 1496175 - RNA, 19 nt, Artificial Sequence
  Description of Artificial Sequence: Synthetic oligonucleotide
  Antisense strand to SEQ ID NO: 1496174
ucccacagacuacugaguc

SEQ ID NO: 1496176 - RNA, 19 nt, Artificial Sequence
  Description of Artificial Sequence: Synthetic oligonucleotide
  Sense strand starting at position 2410 of SEQ ID NO: 1244536
cucaguagucugugggaag

SEQ ID NO: 1496177 - RNA, 19 nt, Artificial Sequence
  Description of Artificial Sequence: Synthetic oligonucleotide
  Antisense strand to SEQ ID NO: 1496176
cuucccacagacuacugag

SEQ ID NO: 1496178 - RNA, 19 nt, Artificial Sequence
  Description of Artificial Sequence: Synthetic oligonucleotide
  Sense strand starting at position 2411 of SEQ ID NO: 1244536
ucaguagucugugggaaga

SEQ ID NO: 1496179 - RNA, 19 nt, Artificial Sequence
  Description of Artificial Sequence: Synthetic oligonucleotide
  Antisense strand to SEQ ID NO: 1496178
ucuucccacagacuacuga

SEQ ID NO: 1496180 - RNA, 19 nt, Artificial Sequence
  Description of Artificial Sequence: Synthetic oligonucleotide
  Sense strand starting at position 2422 of SEQ ID NO: 1244536
ugggaagaggucuggcuuu

SEQ ID NO: 1496181 - RNA, 19 nt, Artificial Sequence
  Description of Artificial Sequence: Synthetic oligonucleotide
  Antisense strand to SEQ ID NO: 1496180
aaagccagaccucuuccca

SEQ ID NO: 1496182 - RNA, 19 nt, Artificial Sequence
  Description of Artificial Sequence: Synthetic oligonucleotide
  Sense strand starting at position 2428 of SEQ ID NO: 1244536
gaggucuggcuuugugaug

SEQ ID NO: 1496183 - RNA, 19 nt, Artificial Sequence
  Description of Artificial Sequence: Synthetic oligonucleotide
  Antisense strand to SEQ ID NO: 1496182
caucacaaagccagaccuc

SEQ ID NO: 1496184 - RNA, 19 nt, Artificial Sequence
  Description of Artificial Sequence: Synthetic oligonucleotide
  Sense strand starting at position 2429 of SEQ ID NO: 1244536
aggucuggcuuugugauga

SEQ ID NO: 1496185 - RNA, 19 nt, Artificial Sequence
  Description of Artificial Sequence: Synthetic oligonucleotide
  Antisense strand to SEQ ID NO: 1496184
ucaucacaaagccagaccu

SEQ ID NO: 1496186 - RNA, 19 nt, Artificial Sequence
  Description of Artificial Sequence: Synthetic oligonucleotide
  Sense strand starting at position 3647 of SEQ ID NO: 1244536
ggccaaugagcauggagaa

SEQ ID NO: 1496187 - RNA, 19 nt, Artificial Sequence
  Description of Artificial Sequence: Synthetic oligonucleotide
  Antisense strand to SEQ ID NO: 1496186
uucuccaugcucauuggcc

SEQ ID NO: 1496188 - RNA, 19 nt, Artificial Sequence
  Description of Artificial Sequence: Synthetic oligonucleotide
  Sense strand starting at position 3648 of SEQ ID NO: 1244536
gccaaugagcauggagaau

SEQ ID NO: 1496189 - RNA, 19 nt, Artificial Sequence
  Description of Artificial Sequence: Synthetic oligonucleotide
  Antisense strand to SEQ ID NO: 1496188
auucuccaugcucauuggc

SEQ ID NO: 1496190 - RNA, 19 nt, Artificial Sequence
  Description of Artificial Sequence: Synthetic oligonucleotide
  Sense strand starting at position 3657 of SEQ ID NO: 1244536
cauggagaaucguguucuc

SEQ ID NO: 1496191 - RNA, 19 nt, Artificial Sequence
  Description of Artificial Sequence: Synthetic oligonucleotide
  Antisense strand to SEQ ID NO: 1496190
gagaacacgauucuccaug

SEQ ID NO: 1496192 - RNA, 19 nt, Artificial Sequence
  Description of Artificial Sequence: Synthetic oligonucleotide
  Sense strand starting at position 3660 of SEQ ID NO: 1244536
ggagaaucguguucuccug

SEQ ID NO: 1496193 - RNA, 19 nt, Artificial Sequence
  Description of Artificial Sequence: Synthetic oligonucleotide
  Antisense strand to SEQ ID NO: 1496192
caggagaacacgauucucc

SEQ ID NO: 1496194 - RNA, 19 nt, Artificial Sequence
  Description of Artificial Sequence: Synthetic oligonucleotide
  Sense strand starting at position 3761 of SEQ ID NO: 1244536
cugcauuauugauggaguc

SEQ ID NO: 1496195 - RNA, 19 nt, Artificial Sequence
  Description of Artificial Sequence: Synthetic oligonucleotide
  Antisense strand to SEQ ID NO: 1496194
gacuccaucaauaaugcag

SEQ ID NO: 1496196 - RNA, 19 nt, Artificial Sequence
  Description of Artificial Sequence: Synthetic oligonucleotide
  Sense strand starting at position 3763 of SEQ ID NO: 1244536
gcauuauugauggagucca

SEQ ID NO: 1496197 - RNA, 19 nt, Artificial Sequence
  Description of Artificial Sequence: Synthetic oligonucleotide
  Antisense strand to SEQ ID NO: 1496196
uggacuccaucaauaaugc

SEQ ID NO: 1496198 - RNA, 19 nt, Artificial Sequence
  Description of Artificial Sequence: Synthetic oligonucleotide
  Sense strand starting at position 3828 of SEQ ID NO: 1244536
gcaggacucuggcuuuaac

SEQ ID NO: 1496199 - RNA, 19 nt, Artificial Sequence
  Description of Artificial Sequence: Synthetic oligonucleotide
  Antisense strand to SEQ ID NO: 1496198
guuaaagccagaguccugc

SEQ ID NO: 1496200 - RNA, 19 nt, Artificial Sequence
  Description of Artificial Sequence: Synthetic oligonucleotide
  Sense strand starting at position 3947 of SEQ ID NO: 1244536
gcgagugugaccgaguugu

SEQ ID NO: 1496201 - RNA, 19 nt, Artificial Sequence
  Description of Artificial Sequence: Synthetic oligonucleotide
  Antisense strand to SEQ ID NO: 1496200
acaacucggucacacucgc

SEQ ID NO: 1496202 - RNA, 19 nt, Artificial Sequence
  Description of Artificial Sequence: Synthetic oligonucleotide
  Sense strand starting at position 3951 of SEQ ID NO: 1244536
gugugaccgaguugugugu

SEQ ID NO: 1496203 - RNA, 19 nt, Artificial Sequence
  Description of Artificial Sequence: Synthetic oligonucleotide
  Antisense strand to SEQ ID NO: 1496202
acacacaacucggucacac

SEQ ID NO: 1496204 - RNA, 19 nt, Artificial Sequence
  Description of Artificial Sequence: Synthetic oligonucleotide
  Sense strand starting at position 3972 of SEQ ID NO: 1244536
gaggacacgugucagucau

SEQ ID NO: 1496205 - RNA, 19 nt, Artificial Sequence
  Description of Artificial Sequence: Synthetic oligonucleotide
  Antisense strand to SEQ ID NO: 1496204
augacugacacguguccuc

SEQ ID NO: 1496206 - RNA, 19 nt, Artificial Sequence
  Description of Artificial Sequence: Synthetic oligonucleotide
  Sense strand starting at position 517 of SEQ ID NO: 1244537
uuaauuaggucccuguuga

SEQ ID NO: 1496207 - RNA, 19 nt, Artificial Sequence
  Description of Artificial Sequence: Synthetic oligonucleotide
  Antisense strand to SEQ ID NO: 1496206
ucaacagggaccuaauuaa

SEQ ID NO: 1496208 - RNA, 19 nt, Artificial Sequence
  Description of Artificial Sequence: Synthetic oligonucleotide
  Sense strand starting at position 518 of SEQ ID NO: 1244537
uaauuaggucccuguugag

SEQ ID NO: 1496209 - RNA, 19 nt, Artificial Sequence
  Description of Artificial Sequence: Synthetic oligonucleotide
  Antisense strand to SEQ ID NO: 1496208
cucaacagggaccuaauua

SEQ ID NO: 1496210 - RNA, 19 nt, Artificial Sequence
  Description of Artificial Sequence: Synthetic oligonucleotide
  Sense strand starting at position 528 of SEQ ID NO: 1244537
ccuguugagcuccagggaa

SEQ ID NO: 1496211 - RNA, 19 nt, Artificial Sequence
  Description of Artificial Sequence: Synthetic oligonucleotide
  Antisense strand to SEQ ID NO: 1496210
uucccuggagcucaacagg

SEQ ID NO: 1496212 - RNA, 19 nt, Artificial Sequence
  Description of Artificial Sequence: Synthetic oligonucleotide
  Sense strand starting at position 530 of SEQ ID NO: 1244537
uguugagcuccagggaaau

SEQ ID NO: 1496213 - RNA, 19 nt, Artificial Sequence
  Description of Artificial Sequence: Synthetic oligonucleotide
  Antisense strand to SEQ ID NO: 1496212
auuucccuggagcucaaca

SEQ ID NO: 1496214 - RNA, 19 nt, Artificial Sequence
  Description of Artificial Sequence: Synthetic oligonucleotide
  Sense strand starting at position 565 of SEQ ID NO: 1244537
gugaguuaagcugaaacug

SEQ ID NO: 1496215 - RNA, 19 nt, Artificial Sequence
  Description of Artificial Sequence: Synthetic oligonucleotide
  Antisense strand to SEQ ID NO: 1496214
caguuucagcuuaacucac

SEQ ID NO: 1496216 - RNA, 19 nt, Artificial Sequence
  Description of Artificial Sequence: Synthetic oligonucleotide
  Sense strand starting at position 764 of SEQ ID NO: 1244537
aguggagcucucugucaca

SEQ ID NO: 1496217 - RNA, 19 nt, Artificial Sequence
  Description of Artificial Sequence: Synthetic oligonucleotide
  Antisense strand to SEQ ID NO: 1496216
ugugacagagagcuccacu

SEQ ID NO: 1496218 - RNA, 19 nt, Artificial Sequence
  Description of Artificial Sequence: Synthetic oligonucleotide
  Sense strand starting at position 834 of SEQ ID NO: 1244537
gacucaguagucuguggga

SEQ ID NO: 1496219 - RNA, 19 nt, Artificial Sequence
  Description of Artificial Sequence: Synthetic oligonucleotide
  Antisense strand to SEQ ID NO: 1496218
ucccacagacuacugaguc

SEQ ID NO: 1496220 - RNA, 19 nt, Artificial Sequence
  Description of Artificial Sequence: Synthetic oligonucleotide
  Sense strand starting at position 836 of SEQ ID NO: 1244537
cucaguagucugugggaag

SEQ ID NO: 1496221 - RNA, 19 nt, Artificial Sequence
  Description of Artificial Sequence: Synthetic oligonucleotide
  Antisense strand to SEQ ID NO: 1496220
cuucccacagacuacugag

SEQ ID NO: 1496222 - RNA, 19 nt, Artificial Sequence
  Description of Artificial Sequence: Synthetic oligonucleotide
  Sense strand starting at position 848 of SEQ ID NO: 1244537
ugggaagaggucuggcuuu

SEQ ID NO: 1496223 - RNA, 19 nt, Artificial Sequence
  Description of Artificial Sequence: Synthetic oligonucleotide
  Antisense strand to SEQ ID NO: 1496222
aaagccagaccucuuccca

SEQ ID NO: 1496224 - RNA, 19 nt, Artificial Sequence
  Description of Artificial Sequence: Synthetic oligonucleotide
  Sense strand starting at position 854 of SEQ ID NO: 1244537
gaggucuggcuuugugaug

SEQ ID NO: 1496225 - RNA, 19 nt, Artificial Sequence
  Description of Artificial Sequence: Synthetic oligonucleotide
  Antisense strand to SEQ ID NO: 1496224
caucacaaagccagaccuc

SEQ ID NO: 1496226 - RNA, 19 nt, Artificial Sequence
  Description of Artificial Sequence: Synthetic oligonucleotide
  Sense strand starting at position 855 of SEQ ID NO: 1244537
aggucuggcuuugugauga

SEQ ID NO: 1496227 - RNA, 19 nt, Artificial Sequence
  Description of Artificial Sequence: Synthetic oligonucleotide
  Antisense strand to SEQ ID NO: 1496226
ucaucacaaagccagaccu

SEQ ID NO: 1496228 - RNA, 19 nt, Artificial Sequence
  Description of Artificial Sequence: Synthetic oligonucleotide
  Sense strand starting at position 2073 of SEQ ID NO: 1244537
ggccaaugagcauggagaa

SEQ ID NO: 1496229 - RNA, 19 nt, Artificial Sequence
  Description of Artificial Sequence: Synthetic oligonucleotide
  Antisense strand to SEQ ID NO: 1496228
uucuccaugcucauuggcc

SEQ ID NO: 1496230 - RNA, 19 nt, Artificial Sequence
  Description of Artificial Sequence: Synthetic oligonucleotide
  Sense strand starting at position 2074 of SEQ ID NO: 1244537
gccaaugagcauggagaau

SEQ ID NO: 1496231 - RNA, 19 nt, Artificial Sequence
  Description of Artificial Sequence: Synthetic oligonucleotide
  Antisense strand to SEQ ID NO: 1496230
auucuccaugcucauuggc

SEQ ID NO: 1496232 - RNA, 19 nt, Artificial Sequence
  Description of Artificial Sequence: Synthetic oligonucleotide
  Sense strand starting at position 2086 of SEQ ID NO: 1244537
ggagaaucguguucuccug

SEQ ID NO: 1496233 - RNA, 19 nt, Artificial Sequence
  Description of Artificial Sequence: Synthetic oligonucleotide
  Antisense strand to SEQ ID NO: 1496232
caggagaacacgauucucc

SEQ ID NO: 1496234 - RNA, 19 nt, Artificial Sequence
  Description of Artificial Sequence: Synthetic oligonucleotide
  Sense strand starting at position 2189 of SEQ ID NO: 1244537
gcauuauugauggagucca

SEQ ID NO: 1496235 - RNA, 19 nt, Artificial Sequence
  Description of Artificial Sequence: Synthetic oligonucleotide
  Antisense strand to SEQ ID NO: 1496234
uggacuccaucaauaaugc

SEQ ID NO: 1496236 - RNA, 19 nt, Artificial Sequence
  Description of Artificial Sequence: Synthetic oligonucleotide
  Sense strand starting at position 2254 of SEQ ID NO: 1244537
gcaggacucuggcuuuaac

SEQ ID NO: 1496237 - RNA, 19 nt, Artificial Sequence
  Description of Artificial Sequence: Synthetic oligonucleotide
  Antisense strand to SEQ ID NO: 1496236
guuaaagccagaguccugc

SEQ ID NO: 1496238 - RNA, 19 nt, Artificial Sequence
  Description of Artificial Sequence: Synthetic oligonucleotide
  Sense strand starting at position 2533 of SEQ ID NO: 1244537
caaagaugcaggugugagu

SEQ ID NO: 1496239 - RNA, 19 nt, Artificial Sequence
  Description of Artificial Sequence: Synthetic oligonucleotide
  Antisense strand to SEQ ID NO: 1496238
acucacaccugcaucuuug

SEQ ID NO: 1496240 - RNA, 19 nt, Artificial Sequence
  Description of Artificial Sequence: Synthetic oligonucleotide
  Sense strand starting at position 2701 of SEQ ID NO: 1244537
ugagguuguggauguguga

SEQ ID NO: 1496241 - RNA, 19 nt, Artificial Sequence
  Description of Artificial Sequence: Synthetic oligonucleotide
  Antisense strand to SEQ ID NO: 1496240
ucacacauccacaaccuca

SEQ ID NO: 1496242 - RNA, 19 nt, Artificial Sequence
  Description of Artificial Sequence: Synthetic oligonucleotide
  Sense strand starting at position 2787 of SEQ ID NO: 1244537
cuuuccucuccggaucuaa

SEQ ID NO: 1496243 - RNA, 19 nt, Artificial Sequence
  Description of Artificial Sequence: Synthetic oligonucleotide
  Antisense strand to SEQ ID NO: 1496242
uuagauccggagaggaaag

SEQ ID NO: 1496244 - RNA, 19 nt, Artificial Sequence
  Description of Artificial Sequence: Synthetic oligonucleotide
  Sense strand starting at position 2867 of SEQ ID NO: 1244537
ugccaucacgugcaugaau

SEQ ID NO: 1496245 - RNA, 19 nt, Artificial Sequence
  Description of Artificial Sequence: Synthetic oligonucleotide
  Antisense strand to SEQ ID NO: 1496244
auucaugcacgugauggca

SEQ ID NO: 1496246 - RNA, 19 nt, Artificial Sequence
  Description of Artificial Sequence: Synthetic oligonucleotide
  Sense strand starting at position 2869 of SEQ ID NO: 1244537
ccaucacgugcaugaauuu

SEQ ID NO: 1496247 - RNA, 19 nt, Artificial Sequence
  Description of Artificial Sequence: Synthetic oligonucleotide
  Antisense strand to SEQ ID NO: 1496246
aaauucaugcacgugaugg

SEQ ID NO: 1496248 - RNA, 19 nt, Artificial Sequence
  Description of Artificial Sequence: Synthetic oligonucleotide
  Sense strand starting at position 2937 of SEQ ID NO: 1244537
uccagagguauuugugugu

SEQ ID NO: 1496249 - RNA, 19 nt, Artificial Sequence
  Description of Artificial Sequence: Synthetic oligonucleotide
  Antisense strand to SEQ ID NO: 1496248
acacacaaauaccucugga

SEQ ID NO: 1496250 - RNA, 19 nt, Artificial Sequence
  Description of Artificial Sequence: Synthetic oligonucleotide
  Sense strand starting at position 2992 of SEQ ID NO: 1244537
gguggaaugucccugucua

SEQ ID NO: 1496251 - RNA, 19 nt, Artificial Sequence
  Description of Artificial Sequence: Synthetic oligonucleotide
  Antisense strand to SEQ ID NO: 1496250
uagacagggacauuccacc

SEQ ID NO: 1496252 - RNA, 19 nt, Artificial Sequence
  Description of Artificial Sequence: Synthetic oligonucleotide
  Sense strand starting at position 2993 of SEQ ID NO: 1244537
guggaaugucccugucuau

SEQ ID NO: 1496253 - RNA, 19 nt, Artificial Sequence
  Description of Artificial Sequence: Synthetic oligonucleotide
  Antisense strand to SEQ ID NO: 1496252
auagacagggacauuccac

SEQ ID NO: 1496254 - RNA, 19 nt, Artificial Sequence
  Description of Artificial Sequence: Synthetic oligonucleotide
  Sense strand starting at position 3242 of SEQ ID NO: 1244537
gguccuggguggagugaaa

SEQ ID NO: 1496255 - RNA, 19 nt, Artificial Sequence
  Description of Artificial Sequence: Synthetic oligonucleotide
  Antisense strand to SEQ ID NO: 1496254
uuucacuccacccaggacc

SEQ ID NO: 1496256 - RNA, 19 nt, Artificial Sequence
  Description of Artificial Sequence: Synthetic oligonucleotide
  Sense strand starting at position 3265 of SEQ ID NO: 1244537
agaggaaucuucuggaauu

SEQ ID NO: 1496257 - RNA, 19 nt, Artificial Sequence
  Description of Artificial Sequence: Synthetic oligonucleotide
  Antisense strand to SEQ ID NO: 1496256
aauuccagaagauuccucu

SEQ ID NO: 1496258 - RNA, 19 nt, Artificial Sequence
  Description of Artificial Sequence: Synthetic oligonucleotide
  Sense strand starting at position 3321 of SEQ ID NO: 1244537
gcaggagguccagaguguu

SEQ ID NO: 1496259 - RNA, 19 nt, Artificial Sequence
  Description of Artificial Sequence: Synthetic oligonucleotide
  Antisense strand to SEQ ID NO: 1496258
aacacucuggaccuccugc

SEQ ID NO: 1496260 - RNA, 19 nt, Artificial Sequence
  Description of Artificial Sequence: Synthetic oligonucleotide
  Sense strand starting at position 3329 of SEQ ID NO: 1244537
uccagaguguugcucauag

SEQ ID NO: 1496261 - RNA, 19 nt, Artificial Sequence
  Description of Artificial Sequence: Synthetic oligonucleotide
  Antisense strand to SEQ ID NO: 1496260
cuaugagcaacacucugga

SEQ ID NO: 1496262 - RNA, 19 nt, Artificial Sequence
  Description of Artificial Sequence: Synthetic oligonucleotide
  Sense strand starting at position 3331 of SEQ ID NO: 1244537
cagaguguugcucauagga

SEQ ID NO: 1496263 - RNA, 19 nt, Artificial Sequence
  Description of Artificial Sequence: Synthetic oligonucleotide
  Antisense strand to SEQ ID NO: 1496262
uccuaugagcaacacucug

SEQ ID NO: 1496264 - RNA, 19 nt, Artificial Sequence
  Description of Artificial Sequence: Synthetic oligonucleotide
  Sense strand starting at position 3350 of SEQ ID NO: 1244537
gugggauguccuggccauc

SEQ ID NO: 1496265 - RNA, 19 nt, Artificial Sequence
  Description of Artificial Sequence: Synthetic oligonucleotide
  Antisense strand to SEQ ID NO: 1496264
gauggccaggacaucccac

SEQ ID NO: 1496266 - RNA, 19 nt, Artificial Sequence
  Description of Artificial Sequence: Synthetic oligonucleotide
  Sense strand starting at position 3397 of SEQ ID NO: 1244537
ggcucaagucccuguaugu

SEQ ID NO: 1496267 - RNA, 19 nt, Artificial Sequence
  Description of Artificial Sequence: Synthetic oligonucleotide
  Antisense strand to SEQ ID NO: 1496266
acauacagggacuugagcc

SEQ ID NO: 1496268 - RNA, 19 nt, Artificial Sequence
  Description of Artificial Sequence: Synthetic oligonucleotide
  Sense strand starting at position 3406 of SEQ ID NO: 1244537
cccuguauguuuguugacu

SEQ ID NO: 1496269 - RNA, 19 nt, Artificial Sequence
  Description of Artificial Sequence: Synthetic oligonucleotide
  Antisense strand to SEQ ID NO: 1496268
agucaacaaacauacaggg

SEQ ID NO: 1496270 - RNA, 19 nt, Artificial Sequence
  Description of Artificial Sequence: Synthetic oligonucleotide
  Sense strand starting at position 3407 of SEQ ID NO: 1244537
ccuguauguuuguugacuu

SEQ ID NO: 1496271 - RNA, 19 nt, Artificial Sequence
  Description of Artificial Sequence: Synthetic oligonucleotide
  Antisense strand to SEQ ID NO: 1496270
aagucaacaaacauacagg

SEQ ID NO: 1496272 - RNA, 19 nt, Artificial Sequence
  Description of Artificial Sequence: Synthetic oligonucleotide
  Sense strand starting at position 3423 of SEQ ID NO: 1244537
cuuauauacuuguugggaa

SEQ ID NO: 1496273 - RNA, 19 nt, Artificial Sequence
  Description of Artificial Sequence: Synthetic oligonucleotide
  Antisense strand to SEQ ID NO: 1496272
uucccaacaaguauauaag

SEQ ID NO: 1496274 - RNA, 19 nt, Artificial Sequence
  Description of Artificial Sequence: Synthetic oligonucleotide
  Sense strand starting at position 3425 of SEQ ID NO: 1244537
uauauacuuguugggaaac

SEQ ID NO: 1496275 - RNA, 19 nt, Artificial Sequence
  Description of Artificial Sequence: Synthetic oligonucleotide
  Antisense strand to SEQ ID NO: 1496274
guuucccaacaaguauaua

SEQ ID NO: 1496276 - RNA, 19 nt, Artificial Sequence
  Description of Artificial Sequence: Synthetic oligonucleotide
  Sense strand starting at position 3560 of SEQ ID NO: 1244537
agugccuucggaggguaaa

SEQ ID NO: 1496277 - RNA, 19 nt, Artificial Sequence
  Description of Artificial Sequence: Synthetic oligonucleotide
  Antisense strand to SEQ ID NO: 1496276
uuuacccuccgaaggcacu

SEQ ID NO: 1496278 - RNA, 19 nt, Artificial Sequence
  Description of Artificial Sequence: Synthetic oligonucleotide
  Sense strand starting at position 3561 of SEQ ID NO: 1244537
gugccuucggaggguaaau

SEQ ID NO: 1496279 - RNA, 19 nt, Artificial Sequence
  Description of Artificial Sequence: Synthetic oligonucleotide
  Antisense strand to SEQ ID NO: 1496278
auuuacccuccgaaggcac

SEQ ID NO: 1496280 - RNA, 19 nt, Artificial Sequence
  Description of Artificial Sequence: Synthetic oligonucleotide
  Sense strand starting at position 3563 of SEQ ID NO: 1244537
gccuucggaggguaaauaa

SEQ ID NO: 1496281 - RNA, 19 nt, Artificial Sequence
  Description of Artificial Sequence: Synthetic oligonucleotide
  Antisense strand to SEQ ID NO: 1496280
uuauuuacccuccgaaggc

SEQ ID NO: 1496282 - RNA, 19 nt, Artificial Sequence
  Description of Artificial Sequence: Synthetic oligonucleotide
  Sense strand starting at position 3864 of SEQ ID NO: 1244537
ggaggcucugcugaacuua

SEQ ID NO: 1496283 - RNA, 19 nt, Artificial Sequence
  Description of Artificial Sequence: Synthetic oligonucleotide
  Antisense strand to SEQ ID NO: 1496282
uaaguucagcagagccucc

SEQ ID NO: 1496284 - RNA, 19 nt, Artificial Sequence
  Description of Artificial Sequence: Synthetic oligonucleotide
  Sense strand starting at position 3976 of SEQ ID NO: 1244537
ucagcuaggccuggaagau

SEQ ID NO: 1496285 - RNA, 19 nt, Artificial Sequence
  Description of Artificial Sequence: Synthetic oligonucleotide
  Antisense strand to SEQ ID NO: 1496284
aucuuccaggccuagcuga

SEQ ID NO: 1496286 - RNA, 19 nt, Artificial Sequence
  Description of Artificial Sequence: Synthetic oligonucleotide
  Sense strand starting at position 472 of SEQ ID NO: 1244538
gggagucacguuuauugaa

SEQ ID NO: 1496287 - RNA, 19 nt, Artificial Sequence
  Description of Artificial Sequence: Synthetic oligonucleotide
  Antisense strand to SEQ ID NO: 1496286
uucaauaaacgugacuccc

SEQ ID NO: 1496288 - RNA, 19 nt, Artificial Sequence
  Description of Artificial Sequence: Synthetic oligonucleotide
  Sense strand starting at position 717 of SEQ ID NO: 1244538
ccuuguaguccgggucgau

SEQ ID NO: 1496289 - RNA, 19 nt, Artificial Sequence
  Description of Artificial Sequence: Synthetic oligonucleotide
  Antisense strand to SEQ ID NO: 1496288
aucgacccggacuacaagg

SEQ ID NO: 1496290 - RNA, 19 nt, Artificial Sequence
  Description of Artificial Sequence: Synthetic oligonucleotide
  Sense strand starting at position 778 of SEQ ID NO: 1244538
guccgcucccagggagaua

SEQ ID NO: 1496291 - RNA, 19 nt, Artificial Sequence
  Description of Artificial Sequence: Synthetic oligonucleotide
  Antisense strand to SEQ ID NO: 1496290
uaucucccugggagcggac

SEQ ID NO: 1496292 - RNA, 19 nt, Artificial Sequence
  Description of Artificial Sequence: Synthetic oligonucleotide
  Sense strand starting at position 984 of SEQ ID NO: 1244538
guugguucuauugaggaca

SEQ ID NO: 1496293 - RNA, 19 nt, Artificial Sequence
  Description of Artificial Sequence: Synthetic oligonucleotide
  Antisense strand to SEQ ID NO: 1496292
uguccucaauagaaccaac

SEQ ID NO: 1496294 - RNA, 19 nt, Artificial Sequence
  Description of Artificial Sequence: Synthetic oligonucleotide
  Sense strand starting at position 986 of SEQ ID NO: 1244538
ugguucuauugaggacaaa

SEQ ID NO: 1496295 - RNA, 19 nt, Artificial Sequence
  Description of Artificial Sequence: Synthetic oligonucleotide
  Antisense strand to SEQ ID NO: 1496294
uuuguccucaauagaacca

SEQ ID NO: 1496296 - RNA, 19 nt, Artificial Sequence
  Description of Artificial Sequence: Synthetic oligonucleotide
  Sense strand starting at position 1019 of SEQ ID NO: 1244538
uccagaagccucuaggguu

SEQ ID NO: 1496297 - RNA, 19 nt, Artificial Sequence
  Description of Artificial Sequence: Synthetic oligonucleotide
  Antisense strand to SEQ ID NO: 1496296
aacccuagaggcuucugga

SEQ ID NO: 1496298 - RNA, 19 nt, Artificial Sequence
  Description of Artificial Sequence: Synthetic oligonucleotide
  Sense strand starting at position 1239 of SEQ ID NO: 1244538
gaggguucuugucacgaac

SEQ ID NO: 1496299 - RNA, 19 nt, Artificial Sequence
  Description of Artificial Sequence: Synthetic oligonucleotide
  Antisense strand to SEQ ID NO: 1496298
guucgugacaagaacccuc

SEQ ID NO: 1496300 - RNA, 19 nt, Artificial Sequence
  Description of Artificial Sequence: Synthetic oligonucleotide
  Sense strand starting at position 1419 of SEQ ID NO: 1244538
gguucaagccuguguagac

SEQ ID NO: 1496301 - RNA, 19 nt, Artificial Sequence
  Description of Artificial Sequence: Synthetic oligonucleotide
  Antisense strand to SEQ ID NO: 1496300
gucuacacaggcuugaacc

SEQ ID NO: 1496302 - RNA, 19 nt, Artificial Sequence
  Description of Artificial Sequence: Synthetic oligonucleotide
  Sense strand starting at position 1507 of SEQ ID NO: 1244538
gccucaucucgcuggugaa

SEQ ID NO: 1496303 - RNA, 19 nt, Artificial Sequence
  Description of Artificial Sequence: Synthetic oligonucleotide
  Antisense strand to SEQ ID NO: 1496302
uucaccagcgagaugaggc

SEQ ID NO: 1496304 - RNA, 19 nt, Artificial Sequence
  Description of Artificial Sequence: Synthetic oligonucleotide
  Sense strand starting at position 1508 of SEQ ID NO: 1244538
ccucaucucgcuggugaau

SEQ ID NO: 1496305 - RNA, 19 nt, Artificial Sequence
  Description of Artificial Sequence: Synthetic oligonucleotide
  Antisense strand to SEQ ID NO: 1496304
auucaccagcgagaugagg

SEQ ID NO: 1496306 - RNA, 19 nt, Artificial Sequence
  Description of Artificial Sequence: Synthetic oligonucleotide
  Sense strand starting at position 2010 of SEQ ID NO: 1244538
cggccucugacuugcuuau

SEQ ID NO: 1496307 - RNA, 19 nt, Artificial Sequence
  Description of Artificial Sequence: Synthetic oligonucleotide
  Antisense strand to SEQ ID NO: 1496306
auaagcaagucagaggccg

SEQ ID NO: 1496308 - RNA, 19 nt, Artificial Sequence
  Description of Artificial Sequence: Synthetic oligonucleotide
  Sense strand starting at position 2012 of SEQ ID NO: 1244538
gccucugacuugcuuauau

SEQ ID NO: 1496309 - RNA, 19 nt, Artificial Sequence
  Description of Artificial Sequence: Synthetic oligonucleotide
  Antisense strand to SEQ ID NO: 1496308
auauaagcaagucagaggc

SEQ ID NO: 1496310 - RNA, 19 nt, Artificial Sequence
  Description of Artificial Sequence: Synthetic oligonucleotide
  Sense strand starting at position 2014 of SEQ ID NO: 1244538
cucugacuugcuuauauag

SEQ ID NO: 1496311 - RNA, 19 nt, Artificial Sequence
  Description of Artificial Sequence: Synthetic oligonucleotide
  Antisense strand to SEQ ID NO: 1496310
cuauauaagcaagucagag

SEQ ID NO: 1496312 - RNA, 19 nt, Artificial Sequence
  Description of Artificial Sequence: Synthetic oligonucleotide
  Sense strand starting at position 2113 of SEQ ID NO: 1244538
cccagaucauguuuaguga

SEQ ID NO: 1496313 - RNA, 19 nt, Artificial Sequence
  Description of Artificial Sequence: Synthetic oligonucleotide
  Antisense strand to SEQ ID NO: 1496312
ucacuaaacaugaucuggg

SEQ ID NO: 1496314 - RNA, 19 nt, Artificial Sequence
  Description of Artificial Sequence: Synthetic oligonucleotide
  Sense strand starting at position 2117 of SEQ ID NO: 1244538
gaucauguuuagugacuca

SEQ ID NO: 1496315 - RNA, 19 nt, Artificial Sequence
  Description of Artificial Sequence: Synthetic oligonucleotide
  Antisense strand to SEQ ID NO: 1496314
ugagucacuaaacaugauc

SEQ ID NO: 1496316 - RNA, 19 nt, Artificial Sequence
  Description of Artificial Sequence: Synthetic oligonucleotide
  Sense strand starting at position 2330 of SEQ ID NO: 1244538
ucucuaccuccuggaaagu

SEQ ID NO: 1496317 - RNA, 19 nt, Artificial Sequence
  Description of Artificial Sequence: Synthetic oligonucleotide
  Antisense strand to SEQ ID NO: 1496316
acuuuccaggagguagaga

SEQ ID NO: 1496318 - RNA, 19 nt, Artificial Sequence
  Description of Artificial Sequence: Synthetic oligonucleotide
  Sense strand starting at position 2464 of SEQ ID NO: 1244538
gccucacucucagugguuu

SEQ ID NO: 1496319 - RNA, 19 nt, Artificial Sequence
  Description of Artificial Sequence: Synthetic oligonucleotide
  Antisense strand to SEQ ID NO: 1496318
aaaccacugagagugaggc

SEQ ID NO: 1496320 - RNA, 19 nt, Artificial Sequence
  Description of Artificial Sequence: Synthetic oligonucleotide
  Sense strand starting at position 2777 of SEQ ID NO: 1244538
gcugcuuccugcucagaaa

SEQ ID NO: 1496321 - RNA, 19 nt, Artificial Sequence
  Description of Artificial Sequence: Synthetic oligonucleotide
  Antisense strand to SEQ ID NO: 1496320
uuucugagcaggaagcagc

SEQ ID NO: 1496322 - RNA, 19 nt, Artificial Sequence
  Description of Artificial Sequence: Synthetic oligonucleotide
  Sense strand starting at position 2843 of SEQ ID NO: 1244538
cagucaguccugcgacuuu

SEQ ID NO: 1496323 - RNA, 19 nt, Artificial Sequence
  Description of Artificial Sequence: Synthetic oligonucleotide
  Antisense strand to SEQ ID NO: 1496322
aaagucgcaggacugacug

SEQ ID NO: 1496324 - RNA, 19 nt, Artificial Sequence
  Description of Artificial Sequence: Synthetic oligonucleotide
  Sense strand starting at position 2939 of SEQ ID NO: 1244538
ugcauagugucucugcauu

SEQ ID NO: 1496325 - RNA, 19 nt, Artificial Sequence
  Description of Artificial Sequence: Synthetic oligonucleotide
  Antisense strand to SEQ ID NO: 1496324
aaugcagagacacuaugca

SEQ ID NO: 1496326 - RNA, 19 nt, Artificial Sequence
  Description of Artificial Sequence: Synthetic oligonucleotide
  Sense strand starting at position 2949 of SEQ ID NO: 1244538
cucugcauuccagguuuga

SEQ ID NO: 1496327 - RNA, 19 nt, Artificial Sequence
  Description of Artificial Sequence: Synthetic oligonucleotide
  Antisense strand to SEQ ID NO: 1496326
ucaaaccuggaaugcagag

SEQ ID NO: 1496328 - RNA, 19 nt, Artificial Sequence
  Description of Artificial Sequence: Synthetic oligonucleotide
  Sense strand starting at position 2953 of SEQ ID NO: 1244538
gcauuccagguuugacaca

SEQ ID NO: 1496329 - RNA, 19 nt, Artificial Sequence
  Description of Artificial Sequence: Synthetic oligonucleotide
  Antisense strand to SEQ ID NO: 1496328
ugugucaaaccuggaaugc

SEQ ID NO: 1496330 - RNA, 19 nt, Artificial Sequence
  Description of Artificial Sequence: Synthetic oligonucleotide
  Sense strand starting at position 3060 of SEQ ID NO: 1244538
cugugaucuuaccucuaga

SEQ ID NO: 1496331 - RNA, 19 nt, Artificial Sequence
  Description of Artificial Sequence: Synthetic oligonucleotide
  Antisense strand to SEQ ID NO: 1496330
ucuagagguaagaucacag

SEQ ID NO: 1496332 - RNA, 19 nt, Artificial Sequence
  Description of Artificial Sequence: Synthetic oligonucleotide
  Sense strand starting at position 3063 of SEQ ID NO: 1244538
ugaucuuaccucuagaagc

SEQ ID NO: 1496333 - RNA, 19 nt, Artificial Sequence
  Description of Artificial Sequence: Synthetic oligonucleotide
  Antisense strand to SEQ ID NO: 1496332
gcuucuagagguaagauca

SEQ ID NO: 1496334 - RNA, 19 nt, Artificial Sequence
  Description of Artificial Sequence: Synthetic oligonucleotide
  Sense strand starting at position 3477 of SEQ ID NO: 1244538
caaaguagggcuuggacua

SEQ ID NO: 1496335 - RNA, 19 nt, Artificial Sequence
  Description of Artificial Sequence: Synthetic oligonucleotide
  Antisense strand to SEQ ID NO: 1496334
uaguccaagcccuacuuug

SEQ ID NO: 1496336 - RNA, 19 nt, Artificial Sequence
  Description of Artificial Sequence: Synthetic oligonucleotide
  Sense strand starting at position 3548 of SEQ ID NO: 1244538
aggucuuuguugucaggga

SEQ ID NO: 1496337 - RNA, 19 nt, Artificial Sequence
  Description of Artificial Sequence: Synthetic oligonucleotide
  Antisense strand to SEQ ID NO: 1496336
ucccugacaacaaagaccu

SEQ ID NO: 1496338 - RNA, 19 nt, Artificial Sequence
  Description of Artificial Sequence: Synthetic oligonucleotide
  Sense strand starting at position 3569 of SEQ ID NO: 1244538
gcgaucgauugugcuagga

SEQ ID NO: 1496339 - RNA, 19 nt, Artificial Sequence
  Description of Artificial Sequence: Synthetic oligonucleotide
  Antisense strand to SEQ ID NO: 1496338
uccuagcacaaucgaucgc

SEQ ID NO: 1496340 - RNA, 19 nt, Artificial Sequence
  Description of Artificial Sequence: Synthetic oligonucleotide
  Sense strand starting at position 137 of SEQ ID NO: 1244539
uugagaaguuccuggcuuu

SEQ ID NO: 1496341 - RNA, 19 nt, Artificial Sequence
  Description of Artificial Sequence: Synthetic oligonucleotide
  Antisense strand to SEQ ID NO: 1496340
aaagccaggaacuucucaa

SEQ ID NO: 1496342 - RNA, 19 nt, Artificial Sequence
  Description of Artificial Sequence: Synthetic oligonucleotide
  Sense strand starting at position 138 of SEQ ID NO: 1244539
ugagaaguuccuggcuuuc

SEQ ID NO: 1496343 - RNA, 19 nt, Artificial Sequence
  Description of Artificial Sequence: Synthetic oligonucleotide
  Antisense strand to SEQ ID NO: 1496342
gaaagccaggaacuucuca

SEQ ID NO: 1496344 - RNA, 19 nt, Artificial Sequence
  Description of Artificial Sequence: Synthetic oligonucleotide
  Sense strand starting at position 224 of SEQ ID NO: 1244539
gggcaaaugucucuccuga

SEQ ID NO: 1496345 - RNA, 19 nt, Artificial Sequence
  Description of Artificial Sequence: Synthetic oligonucleotide
  Antisense strand to SEQ ID NO: 1496344
ucaggagagacauuugccc

SEQ ID NO: 1496346 - RNA, 19 nt, Artificial Sequence
  Description of Artificial Sequence: Synthetic oligonucleotide
  Sense strand starting at position 226 of SEQ ID NO: 1244539
gcaaaugucucuccugaag

SEQ ID NO: 1496347 - RNA, 19 nt, Artificial Sequence
  Description of Artificial Sequence: Synthetic oligonucleotide
  Antisense strand to SEQ ID NO: 1496346
cuucaggagagacauuugc

SEQ ID NO: 1496348 - RNA, 19 nt, Artificial Sequence
  Description of Artificial Sequence: Synthetic oligonucleotide
  Sense strand starting at position 300 of SEQ ID NO: 1244539
ggaauguccgggugaggaa

SEQ ID NO: 1496349 - RNA, 19 nt, Artificial Sequence
  Description of Artificial Sequence: Synthetic oligonucleotide
  Antisense strand to SEQ ID NO: 1496348
uuccucacccggacauucc

SEQ ID NO: 1496350 - RNA, 19 nt, Artificial Sequence
  Description of Artificial Sequence: Synthetic oligonucleotide
  Sense strand starting at position 524 of SEQ ID NO: 1244539
gcugacucagccugccaaa

SEQ ID NO: 1496351 - RNA, 19 nt, Artificial Sequence
  Description of Artificial Sequence: Synthetic oligonucleotide
  Antisense strand to SEQ ID NO: 1496350
uuuggcaggcugagucagc

SEQ ID NO: 1496352 - RNA, 19 nt, Artificial Sequence
  Description of Artificial Sequence: Synthetic oligonucleotide
  Sense strand starting at position 1098 of SEQ ID NO: 1244539
ggcuuaaucuugcgcaccu

SEQ ID NO: 1496353 - RNA, 19 nt, Artificial Sequence
  Description of Artificial Sequence: Synthetic oligonucleotide
  Antisense strand to SEQ ID NO: 1496352
aggugcgcaagauuaagcc

SEQ ID NO: 1496354 - RNA, 19 nt, Artificial Sequence
  Description of Artificial Sequence: Synthetic oligonucleotide
  Sense strand starting at position 1336 of SEQ ID NO: 1244539
ucgagucggccuucucgaa

SEQ ID NO: 1496355 - RNA, 19 nt, Artificial Sequence
  Description of Artificial Sequence: Synthetic oligonucleotide
  Antisense strand to SEQ ID NO: 1496354
uucgagaaggccgacucga

SEQ ID NO: 1496356 - RNA, 19 nt, Artificial Sequence
  Description of Artificial Sequence: Synthetic oligonucleotide
  Sense strand starting at position 1802 of SEQ ID NO: 1244539
gcccaucugcaggaacaua

SEQ ID NO: 1496357 - RNA, 19 nt, Artificial Sequence
  Description of Artificial Sequence: Synthetic oligonucleotide
  Antisense strand to SEQ ID NO: 1496356
uauguuccugcagaugggc

SEQ ID NO: 1496358 - RNA, 19 nt, Artificial Sequence
  Description of Artificial Sequence: Synthetic oligonucleotide
  Sense strand starting at position 1842 of SEQ ID NO: 1244539
gagccauauuucuuguggu

SEQ ID NO: 1496359 - RNA, 19 nt, Artificial Sequence
  Description of Artificial Sequence: Synthetic oligonucleotide
  Antisense strand to SEQ ID NO: 1496358
accacaagaaauauggcuc

SEQ ID NO: 1496360 - RNA, 19 nt, Artificial Sequence
  Description of Artificial Sequence: Synthetic oligonucleotide
  Sense strand starting at position 2809 of SEQ ID NO: 1244539
accgcaccuccaugaaaua

SEQ ID NO: 1496361 - RNA, 19 nt, Artificial Sequence
  Description of Artificial Sequence: Synthetic oligonucleotide
  Antisense strand to SEQ ID NO: 1496360
uauuucauggaggugcggu

SEQ ID NO: 1496362 - RNA, 19 nt, Artificial Sequence
  Description of Artificial Sequence: Synthetic oligonucleotide
  Sense strand starting at position 2810 of SEQ ID NO: 1244539
ccgcaccuccaugaaauau

SEQ ID NO: 1496363 - RNA, 19 nt, Artificial Sequence
  Description of Artificial Sequence: Synthetic oligonucleotide
  Antisense strand to SEQ ID NO: 1496362
auauuucauggaggugcgg

SEQ ID NO: 1496364 - RNA, 19 nt, Artificial Sequence
  Description of Artificial Sequence: Synthetic oligonucleotide
  Sense strand starting at position 2904 of SEQ ID NO: 1244539
uucaguguccucggagcua

SEQ ID NO: 1496365 - RNA, 19 nt, Artificial Sequence
  Description of Artificial Sequence: Synthetic oligonucleotide
  Antisense strand to SEQ ID NO: 1496364
uagcuccgaggacacugaa

SEQ ID NO: 1496366 - RNA, 19 nt, Artificial Sequence
  Description of Artificial Sequence: Synthetic oligonucleotide
  Sense strand starting at position 2941 of SEQ ID NO: 1244539
agccuuuagcaucagaauc

SEQ ID NO: 1496367 - RNA, 19 nt, Artificial Sequence
  Description of Artificial Sequence: Synthetic oligonucleotide
  Antisense strand to SEQ ID NO: 1496366
gauucugaugcuaaaggcu

SEQ ID NO: 1496368 - RNA, 19 nt, Artificial Sequence
  Description of Artificial Sequence: Synthetic oligonucleotide
  Sense strand starting at position 2977 of SEQ ID NO: 1244539
aaugcagauuucugggauc

SEQ ID NO: 1496369 - RNA, 19 nt, Artificial Sequence
  Description of Artificial Sequence: Synthetic oligonucleotide
  Antisense strand to SEQ ID NO: 1496368
gaucccagaaaucugcauu

SEQ ID NO: 1496370 - RNA, 19 nt, Artificial Sequence
  Description of Artificial Sequence: Synthetic oligonucleotide
  Sense strand starting at position 2980 of SEQ ID NO: 1244539
gcagauuucugggaucucu

SEQ ID NO: 1496371 - RNA, 19 nt, Artificial Sequence
  Description of Artificial Sequence: Synthetic oligonucleotide
  Antisense strand to SEQ ID NO: 1496370
agagaucccagaaaucugc

SEQ ID NO: 1496372 - RNA, 19 nt, Artificial Sequence
  Description of Artificial Sequence: Synthetic oligonucleotide
  Sense strand starting at position 2998 of SEQ ID NO: 1244539
ucucgaaccuugugaagga

SEQ ID NO: 1496373 - RNA, 19 nt, Artificial Sequence
  Description of Artificial Sequence: Synthetic oligonucleotide
  Antisense strand to SEQ ID NO: 1496372
uccuucacaagguucgaga

SEQ ID NO: 1496374 - RNA, 19 nt, Artificial Sequence
  Description of Artificial Sequence: Synthetic oligonucleotide
  Sense strand starting at position 3015 of SEQ ID NO: 1244539
gagaaucuccgaggcugaa

SEQ ID NO: 1496375 - RNA, 19 nt, Artificial Sequence
  Description of Artificial Sequence: Synthetic oligonucleotide
  Antisense strand to SEQ ID NO: 1496374
uucagccucggagauucuc

SEQ ID NO: 1496376 - RNA, 19 nt, Artificial Sequence
  Description of Artificial Sequence: Synthetic oligonucleotide
  Sense strand starting at position 3089 of SEQ ID NO: 1244539
gugugaaaccuugguccag

SEQ ID NO: 1496377 - RNA, 19 nt, Artificial Sequence
  Description of Artificial Sequence: Synthetic oligonucleotide
  Antisense strand to SEQ ID NO: 1496376
cuggaccaagguuucacac

SEQ ID NO: 1496378 - RNA, 19 nt, Artificial Sequence
  Description of Artificial Sequence: Synthetic oligonucleotide
  Sense strand starting at position 3193 of SEQ ID NO: 1244539
ugccgaagucuggaaagga

SEQ ID NO: 1496379 - RNA, 19 nt, Artificial Sequence
  Description of Artificial Sequence: Synthetic oligonucleotide
  Antisense strand to SEQ ID NO: 1496378
uccuuuccagacuucggca

SEQ ID NO: 1496380 - RNA, 19 nt, Artificial Sequence
  Description of Artificial Sequence: Synthetic oligonucleotide
  Sense strand starting at position 3298 of SEQ ID NO: 1244539
gcaggaauucgagaggccu

SEQ ID NO: 1496381 - RNA, 19 nt, Artificial Sequence
  Description of Artificial Sequence: Synthetic oligonucleotide
  Antisense strand to SEQ ID NO: 1496380
aggccucucgaauuccugc

SEQ ID NO: 1496382 - RNA, 19 nt, Artificial Sequence
  Description of Artificial Sequence: Synthetic oligonucleotide
  Sense strand starting at position 3320 of SEQ ID NO: 1244539
gccaaaguuucgccaguga

SEQ ID NO: 1496383 - RNA, 19 nt, Artificial Sequence
  Description of Artificial Sequence: Synthetic oligonucleotide
  Antisense strand to SEQ ID NO: 1496382
ucacuggcgaaacuuuggc

SEQ ID NO: 1496384 - RNA, 19 nt, Artificial Sequence
  Description of Artificial Sequence: Synthetic oligonucleotide
  Sense strand starting at position 3333 of SEQ ID NO: 1244539
cagugagagcucuaacuug

SEQ ID NO: 1496385 - RNA, 19 nt, Artificial Sequence
  Description of Artificial Sequence: Synthetic oligonucleotide
  Antisense strand to SEQ ID NO: 1496384
caaguuagagcucucacug

SEQ ID NO: 1496386 - RNA, 19 nt, Artificial Sequence
  Description of Artificial Sequence: Synthetic oligonucleotide
  Sense strand starting at position 3816 of SEQ ID NO: 1244539
gugggauauuaacgcguua

SEQ ID NO: 1496387 - RNA, 19 nt, Artificial Sequence
  Description of Artificial Sequence: Synthetic oligonucleotide
  Antisense strand to SEQ ID NO: 1496386
uaacgcguuaauaucccac

SEQ ID NO: 1496388 - RNA, 19 nt, Artificial Sequence
  Description of Artificial Sequence: Synthetic oligonucleotide
  Sense strand starting at position 3818 of SEQ ID NO: 1244539
gggauauuaacgcguuacc

SEQ ID NO: 1496389 - RNA, 19 nt, Artificial Sequence
  Description of Artificial Sequence: Synthetic oligonucleotide
  Antisense strand to SEQ ID NO: 1496388
gguaacgcguuaauauccc

SEQ ID NO: 1496390 - RNA, 19 nt, Artificial Sequence
  Description of Artificial Sequence: Synthetic oligonucleotide
  Sense strand starting at position 3821 of SEQ ID NO: 1244539
auauuaacgcguuaccaug

SEQ ID NO: 1496391 - RNA, 19 nt, Artificial Sequence
  Description of Artificial Sequence: Synthetic oligonucleotide
  Antisense strand to SEQ ID NO: 1496390
caugguaacgcguuaauau

SEQ ID NO: 1496392 - RNA, 19 nt, Artificial Sequence
  Description of Artificial Sequence: Synthetic oligonucleotide
  Sense strand starting at position 3827 of SEQ ID NO: 1244539
acgcguuaccaugugcaaa

SEQ ID NO: 1496393 - RNA, 19 nt, Artificial Sequence
  Description of Artificial Sequence: Synthetic oligonucleotide
  Antisense strand to SEQ ID NO: 1496392
uuugcacaugguaacgcgu

SEQ ID NO: 1496394 - RNA, 19 nt, Artificial Sequence
  Description of Artificial Sequence: Synthetic oligonucleotide
  Sense strand starting at position 3969 of SEQ ID NO: 1244539
agaucuagguugugagcua

SEQ ID NO: 1496395 - RNA, 19 nt, Artificial Sequence
  Description of Artificial Sequence: Synthetic oligonucleotide
  Antisense strand to SEQ ID NO: 1496394
uagcucacaaccuagaucu

SEQ ID NO: 1496396 - RNA, 19 nt, Artificial Sequence
  Description of Artificial Sequence: Synthetic oligonucleotide
  Sense strand starting at position 65 of SEQ ID NO: 1244540
gaaggucuauggguacuga

SEQ ID NO: 1496397 - RNA, 19 nt, Artificial Sequence
  Description of Artificial Sequence: Synthetic oligonucleotide
  Antisense strand to SEQ ID NO: 1496396
ucaguacccauagaccuuc

SEQ ID NO: 1496398 - RNA, 19 nt, Artificial Sequence
  Description of Artificial Sequence: Synthetic oligonucleotide
  Sense strand starting at position 191 of SEQ ID NO: 1244540
ggaugaguugagugacucu

SEQ ID NO: 1496399 - RNA, 19 nt, Artificial Sequence
  Description of Artificial Sequence: Synthetic oligonucleotide
  Antisense strand to SEQ ID NO: 1496398
agagucacucaacucaucc

SEQ ID NO: 1496400 - RNA, 19 nt, Artificial Sequence
  Description of Artificial Sequence: Synthetic oligonucleotide
  Sense strand starting at position 194 of SEQ ID NO: 1244540
ugaguugagugacucugau

SEQ ID NO: 1496401 - RNA, 19 nt, Artificial Sequence
  Description of Artificial Sequence: Synthetic oligonucleotide
  Antisense strand to SEQ ID NO: 1496400
aucagagucacucaacuca

SEQ ID NO: 1496402 - RNA, 19 nt, Artificial Sequence
  Description of Artificial Sequence: Synthetic oligonucleotide
  Sense strand starting at position 218 of SEQ ID NO: 1244540
ccgccaacguucuggauga

SEQ ID NO: 1496403 - RNA, 19 nt, Artificial Sequence
  Description of Artificial Sequence: Synthetic oligonucleotide
  Antisense strand to SEQ ID NO: 1496402
ucauccagaacguuggcgg

SEQ ID NO: 1496404 - RNA, 19 nt, Artificial Sequence
  Description of Artificial Sequence: Synthetic oligonucleotide
  Sense strand starting at position 338 of SEQ ID NO: 1244540
guggcuuugacuugcuuua

SEQ ID NO: 1496405 - RNA, 19 nt, Artificial Sequence
  Description of Artificial Sequence: Synthetic oligonucleotide
  Antisense strand to SEQ ID NO: 1496404
uaaagcaagucaaagccac

SEQ ID NO: 1496406 - RNA, 19 nt, Artificial Sequence
  Description of Artificial Sequence: Synthetic oligonucleotide
  Sense strand starting at position 340 of SEQ ID NO: 1244540
ggcuuugacuugcuuuauu

SEQ ID NO: 1496407 - RNA, 19 nt, Artificial Sequence
  Description of Artificial Sequence: Synthetic oligonucleotide
  Antisense strand to SEQ ID NO: 1496406
aauaaagcaagucaaagcc

SEQ ID NO: 1496408 - RNA, 19 nt, Artificial Sequence
  Description of Artificial Sequence: Synthetic oligonucleotide
  Sense strand starting at position 382 of SEQ ID NO: 1244540
aagcuuuggccagagccaa

SEQ ID NO: 1496409 - RNA, 19 nt, Artificial Sequence
  Description of Artificial Sequence: Synthetic oligonucleotide
  Antisense strand to SEQ ID NO: 1496408
uuggcucuggccaaagcuu

SEQ ID NO: 1496410 - RNA, 19 nt, Artificial Sequence
  Description of Artificial Sequence: Synthetic oligonucleotide
  Sense strand starting at position 434 of SEQ ID NO: 1244540
cauggagucguaggagaca

SEQ ID NO: 1496411 - RNA, 19 nt, Artificial Sequence
  Description of Artificial Sequence: Synthetic oligonucleotide
  Antisense strand to SEQ ID NO: 1496410
ugucuccuacgacuccaug

SEQ ID NO: 1496412 - RNA, 19 nt, Artificial Sequence
  Description of Artificial Sequence: Synthetic oligonucleotide
  Sense strand starting at position 449 of SEQ ID NO: 1244540
gacagaagguggcauuaua

SEQ ID NO: 1496413 - RNA, 19 nt, Artificial Sequence
  Description of Artificial Sequence: Synthetic oligonucleotide
  Antisense strand to SEQ ID NO: 1496412
uauaaugccaccuucuguc

SEQ ID NO: 1496414 - RNA, 19 nt, Artificial Sequence
  Description of Artificial Sequence: Synthetic oligonucleotide
  Sense strand starting at position 1006 of SEQ ID NO: 1244540
uggucagcauguugaugua

SEQ ID NO: 1496415 - RNA, 19 nt, Artificial Sequence
  Description of Artificial Sequence: Synthetic oligonucleotide
  Antisense strand to SEQ ID NO: 1496414
uacaucaacaugcugacca

SEQ ID NO: 1496416 - RNA, 19 nt, Artificial Sequence
  Description of Artificial Sequence: Synthetic oligonucleotide
  Sense strand starting at position 1009 of SEQ ID NO: 1244540
ucagcauguugauguaucu

SEQ ID NO: 1496417 - RNA, 19 nt, Artificial Sequence
  Description of Artificial Sequence: Synthetic oligonucleotide
  Antisense strand to SEQ ID NO: 1496416
agauacaucaacaugcuga

SEQ ID NO: 1496418 - RNA, 19 nt, Artificial Sequence
  Description of Artificial Sequence: Synthetic oligonucleotide
  Sense strand starting at position 1018 of SEQ ID NO: 1244540
ugauguaucuacggagauc

SEQ ID NO: 1496419 - RNA, 19 nt, Artificial Sequence
  Description of Artificial Sequence: Synthetic oligonucleotide
  Antisense strand to SEQ ID NO: 1496418
gaucuccguagauacauca

SEQ ID NO: 1496420 - RNA, 19 nt, Artificial Sequence
  Description of Artificial Sequence: Synthetic oligonucleotide
  Sense strand starting at position 1447 of SEQ ID NO: 1244540
ggaugugaguccuggagac

SEQ ID NO: 1496421 - RNA, 19 nt, Artificial Sequence
  Description of Artificial Sequence: Synthetic oligonucleotide
  Antisense strand to SEQ ID NO: 1496420
gucuccaggacucacaucc

SEQ ID NO: 1496422 - RNA, 19 nt, Artificial Sequence
  Description of Artificial Sequence: Synthetic oligonucleotide
  Sense strand starting at position 1449 of SEQ ID NO: 1244540
augugaguccuggagacac

SEQ ID NO: 1496423 - RNA, 19 nt, Artificial Sequence
  Description of Artificial Sequence: Synthetic oligonucleotide
  Antisense strand to SEQ ID NO: 1496422
gugucuccaggacucacau

SEQ ID NO: 1496424 - RNA, 19 nt, Artificial Sequence
  Description of Artificial Sequence: Synthetic oligonucleotide
  Sense strand starting at position 1635 of SEQ ID NO: 1244540
agauaucgguccuggagaa

SEQ ID NO: 1496425 - RNA, 19 nt, Artificial Sequence
  Description of Artificial Sequence: Synthetic oligonucleotide
  Antisense strand to SEQ ID NO: 1496424
uucuccaggaccgauaucu

SEQ ID NO: 1496426 - RNA, 19 nt, Artificial Sequence
  Description of Artificial Sequence: Synthetic oligonucleotide
  Sense strand starting at position 1636 of SEQ ID NO: 1244540
gauaucgguccuggagaag

SEQ ID NO: 1496427 - RNA, 19 nt, Artificial Sequence
  Description of Artificial Sequence: Synthetic oligonucleotide
  Antisense strand to SEQ ID NO: 1496426
cuucuccaggaccgauauc

SEQ ID NO: 1496428 - RNA, 19 nt, Artificial Sequence
  Description of Artificial Sequence: Synthetic oligonucleotide
  Sense strand starting at position 2024 of SEQ ID NO: 1244540
ucggcugggccgcuuuaua

SEQ ID NO: 1496429 - RNA, 19 nt, Artificial Sequence
  Description of Artificial Sequence: Synthetic oligonucleotide
  Antisense strand to SEQ ID NO: 1496428
uauaaagcggcccagccga

SEQ ID NO: 1496430 - RNA, 19 nt, Artificial Sequence
  Description of Artificial Sequence: Synthetic oligonucleotide
  Sense strand starting at position 2170 of SEQ ID NO: 1244540
caguucugugggugccaga

SEQ ID NO: 1496431 - RNA, 19 nt, Artificial Sequence
  Description of Artificial Sequence: Synthetic oligonucleotide
  Antisense strand to SEQ ID NO: 1496430
ucuggcacccacagaacug

SEQ ID NO: 1496432 - RNA, 19 nt, Artificial Sequence
  Description of Artificial Sequence: Synthetic oligonucleotide
  Sense strand starting at position 2651 of SEQ ID NO: 1244540
gccgguuuccaguauccau

SEQ ID NO: 1496433 - RNA, 19 nt, Artificial Sequence
  Description of Artificial Sequence: Synthetic oligonucleotide
  Antisense strand to SEQ ID NO: 1496432
auggauacuggaaaccggc

SEQ ID NO: 1496434 - RNA, 19 nt, Artificial Sequence
  Description of Artificial Sequence: Synthetic oligonucleotide
  Sense strand starting at position 2694 of SEQ ID NO: 1244540
auuccagggaagugcuaaa

SEQ ID NO: 1496435 - RNA, 19 nt, Artificial Sequence
  Description of Artificial Sequence: Synthetic oligonucleotide
  Antisense strand to SEQ ID NO: 1496434
uuuagcacuucccuggaau

SEQ ID NO: 1496436 - RNA, 19 nt, Artificial Sequence
  Description of Artificial Sequence: Synthetic oligonucleotide
  Sense strand starting at position 2812 of SEQ ID NO: 1244540
gaaaucugcucagagaugu

SEQ ID NO: 1496437 - RNA, 19 nt, Artificial Sequence
  Description of Artificial Sequence: Synthetic oligonucleotide
  Antisense strand to SEQ ID NO: 1496436
acaucucugagcagauuuc

SEQ ID NO: 1496438 - RNA, 19 nt, Artificial Sequence
  Description of Artificial Sequence: Synthetic oligonucleotide
  Sense strand starting at position 2914 of SEQ ID NO: 1244540
ccgucaaaguauuguuaua

SEQ ID NO: 1496439 - RNA, 19 nt, Artificial Sequence
  Description of Artificial Sequence: Synthetic oligonucleotide
  Antisense strand to SEQ ID NO: 1496438
uauaacaauacuuugacgg

SEQ ID NO: 1496440 - RNA, 19 nt, Artificial Sequence
  Description of Artificial Sequence: Synthetic oligonucleotide
  Sense strand starting at position 2972 of SEQ ID NO: 1244540
gguaaagacgcuugcucaa

SEQ ID NO: 1496441 - RNA, 19 nt, Artificial Sequence
  Description of Artificial Sequence: Synthetic oligonucleotide
  Antisense strand to SEQ ID NO: 1496440
uugagcaagcgucuuuacc

SEQ ID NO: 1496442 - RNA, 19 nt, Artificial Sequence
  Description of Artificial Sequence: Synthetic oligonucleotide
  Sense strand starting at position 2975 of SEQ ID NO: 1244540
aaagacgcuugcucaagau

SEQ ID NO: 1496443 - RNA, 19 nt, Artificial Sequence
  Description of Artificial Sequence: Synthetic oligonucleotide
  Antisense strand to SEQ ID NO: 1496442
aucuugagcaagcgucuuu

SEQ ID NO: 1496444 - RNA, 19 nt, Artificial Sequence
  Description of Artificial Sequence: Synthetic oligonucleotide
  Sense strand starting at position 2979 of SEQ ID NO: 1244540
acgcuugcucaagaucuca

SEQ ID NO: 1496445 - RNA, 19 nt, Artificial Sequence
  Description of Artificial Sequence: Synthetic oligonucleotide
  Antisense strand to SEQ ID NO: 1496444
ugagaucuugagcaagcgu

SEQ ID NO: 1496446 - RNA, 19 nt, Artificial Sequence
  Description of Artificial Sequence: Synthetic oligonucleotide
  Sense strand starting at position 3008 of SEQ ID NO: 1244540
gguuccgaauucuggcuua

SEQ ID NO: 1496447 - RNA, 19 nt, Artificial Sequence
  Description of Artificial Sequence: Synthetic oligonucleotide
  Antisense strand to SEQ ID NO: 1496446
uaagccagaauucggaacc

SEQ ID NO: 1496448 - RNA, 19 nt, Artificial Sequence
  Description of Artificial Sequence: Synthetic oligonucleotide
  Sense strand starting at position 3011 of SEQ ID NO: 1244540
uccgaauucuggcuuagau

SEQ ID NO: 1496449 - RNA, 19 nt, Artificial Sequence
  Description of Artificial Sequence: Synthetic oligonucleotide
  Antisense strand to SEQ ID NO: 1496448
aucuaagccagaauucgga

SEQ ID NO: 1496450 - RNA, 19 nt, Artificial Sequence
  Description of Artificial Sequence: Synthetic oligonucleotide
  Sense strand starting at position 3013 of SEQ ID NO: 1244540
cgaauucuggcuuagauuc

SEQ ID NO: 1496451 - RNA, 19 nt, Artificial Sequence
  Description of Artificial Sequence: Synthetic oligonucleotide
  Antisense strand to SEQ ID NO: 1496450
gaaucuaagccagaauucg

SEQ ID NO: 1496452 - RNA, 19 nt, Artificial Sequence
  Description of Artificial Sequence: Synthetic oligonucleotide
  Sense strand starting at position 3136 of SEQ ID NO: 1244540
acuggcugugucugaauga

SEQ ID NO: 1496453 - RNA, 19 nt, Artificial Sequence
  Description of Artificial Sequence: Synthetic oligonucleotide
  Antisense strand to SEQ ID NO: 1496452
ucauucagacacagccagu

SEQ ID NO: 1496454 - RNA, 19 nt, Artificial Sequence
  Description of Artificial Sequence: Synthetic oligonucleotide
  Sense strand starting at position 3183 of SEQ ID NO: 1244540
acuuaugacugcugacguu

SEQ ID NO: 1496455 - RNA, 19 nt, Artificial Sequence
  Description of Artificial Sequence: Synthetic oligonucleotide
  Antisense strand to SEQ ID NO: 1496454
aacgucagcagucauaagu

SEQ ID NO: 1496456 - RNA, 19 nt, Artificial Sequence
  Description of Artificial Sequence: Synthetic oligonucleotide
  Sense strand starting at position 3201 of SEQ ID NO: 1244540
ucugcugucccagaucagu

SEQ ID NO: 1496457 - RNA, 19 nt, Artificial Sequence
  Description of Artificial Sequence: Synthetic oligonucleotide
  Antisense strand to SEQ ID NO: 1496456
acugaucugggacagcaga

SEQ ID NO: 1496458 - RNA, 19 nt, Artificial Sequence
  Description of Artificial Sequence: Synthetic oligonucleotide
  Sense strand starting at position 3204 of SEQ ID NO: 1244540
gcugucccagaucaguaua

SEQ ID NO: 1496459 - RNA, 19 nt, Artificial Sequence
  Description of Artificial Sequence: Synthetic oligonucleotide
  Antisense strand to SEQ ID NO: 1496458
uauacugaucugggacagc

SEQ ID NO: 1496460 - RNA, 19 nt, Artificial Sequence
  Description of Artificial Sequence: Synthetic oligonucleotide
  Sense strand starting at position 3207 of SEQ ID NO: 1244540
gucccagaucaguauacca

SEQ ID NO: 1496461 - RNA, 19 nt, Artificial Sequence
  Description of Artificial Sequence: Synthetic oligonucleotide
  Antisense strand to SEQ ID NO: 1496460
ugguauacugaucugggac

SEQ ID NO: 1496462 - RNA, 19 nt, Artificial Sequence
  Description of Artificial Sequence: Synthetic oligonucleotide
  Sense strand starting at position 3212 of SEQ ID NO: 1244540
agaucaguauaccaagaag

SEQ ID NO: 1496463 - RNA, 19 nt, Artificial Sequence
  Description of Artificial Sequence: Synthetic oligonucleotide
  Antisense strand to SEQ ID NO: 1496462
cuucuugguauacugaucu

SEQ ID NO: 1496464 - RNA, 19 nt, Artificial Sequence
  Description of Artificial Sequence: Synthetic oligonucleotide
  Sense strand starting at position 3271 of SEQ ID NO: 1244540
ggugaaacuccagggaucu

SEQ ID NO: 1496465 - RNA, 19 nt, Artificial Sequence
  Description of Artificial Sequence: Synthetic oligonucleotide
  Antisense strand to SEQ ID NO: 1496464
agaucccuggaguuucacc

SEQ ID NO: 1496466 - RNA, 19 nt, Artificial Sequence
  Description of Artificial Sequence: Synthetic oligonucleotide
  Sense strand starting at position 3352 of SEQ ID NO: 1244540
cugugagccugggaaagua

SEQ ID NO: 1496467 - RNA, 19 nt, Artificial Sequence
  Description of Artificial Sequence: Synthetic oligonucleotide
  Antisense strand to SEQ ID NO: 1496466
uacuuucccaggcucacag

SEQ ID NO: 1496468 - RNA, 19 nt, Artificial Sequence
  Description of Artificial Sequence: Synthetic oligonucleotide
  Sense strand starting at position 3430 of SEQ ID NO: 1244540
aucugaagauagggagaau

SEQ ID NO: 1496469 - RNA, 19 nt, Artificial Sequence
  Description of Artificial Sequence: Synthetic oligonucleotide
  Antisense strand to SEQ ID NO: 1496468
auucucccuaucuucagau

SEQ ID NO: 1496470 - RNA, 19 nt, Artificial Sequence
  Description of Artificial Sequence: Synthetic oligonucleotide
  Sense strand starting at position 3824 of SEQ ID NO: 1244540
gggauugacucagaugcca

SEQ ID NO: 1496471 - RNA, 19 nt, Artificial Sequence
  Description of Artificial Sequence: Synthetic oligonucleotide
  Antisense strand to SEQ ID NO: 1496470
uggcaucugagucaauccc

SEQ ID NO: 1496472 - RNA, 19 nt, Artificial Sequence
  Description of Artificial Sequence: Synthetic oligonucleotide
  Sense strand starting at position 3859 of SEQ ID NO: 1244540
uauccugucgcagagguaa

SEQ ID NO: 1496473 - RNA, 19 nt, Artificial Sequence
  Description of Artificial Sequence: Synthetic oligonucleotide
  Antisense strand to SEQ ID NO: 1496472
uuaccucugcgacaggaua

SEQ ID NO: 1496474 - RNA, 19 nt, Artificial Sequence
  Description of Artificial Sequence: Synthetic oligonucleotide
  Sense strand starting at position 3880 of SEQ ID NO: 1244540
cuaagugccuaagaaauaa

SEQ ID NO: 1496475 - RNA, 19 nt, Artificial Sequence
  Description of Artificial Sequence: Synthetic oligonucleotide
  Antisense strand to SEQ ID NO: 1496474
uuauuucuuaggcacuuag

SEQ ID NO: 1496476 - RNA, 19 nt, Artificial Sequence
  Description of Artificial Sequence: Synthetic oligonucleotide
  Sense strand starting at position 170 of SEQ ID NO: 1244541
augaguaguugguugacaa

SEQ ID NO: 1496477 - RNA, 19 nt, Artificial Sequence
  Description of Artificial Sequence: Synthetic oligonucleotide
  Antisense strand to SEQ ID NO: 1496476
uugucaaccaacuacucau

SEQ ID NO: 1496478 - RNA, 19 nt, Artificial Sequence
  Description of Artificial Sequence: Synthetic oligonucleotide
  Sense strand starting at position 171 of SEQ ID NO: 1244541
ugaguaguugguugacaaa

SEQ ID NO: 1496479 - RNA, 19 nt, Artificial Sequence
  Description of Artificial Sequence: Synthetic oligonucleotide
  Antisense strand to SEQ ID NO: 1496478
uuugucaaccaacuacuca

SEQ ID NO: 1496480 - RNA, 19 nt, Artificial Sequence
  Description of Artificial Sequence: Synthetic oligonucleotide
  Sense strand starting at position 218 of SEQ ID NO: 1244541
ugcauauaugcagaucugu

SEQ ID NO: 1496481 - RNA, 19 nt, Artificial Sequence
  Description of Artificial Sequence: Synthetic oligonucleotide
  Antisense strand to SEQ ID NO: 1496480
acagaucugcauauaugca

SEQ ID NO: 1496482 - RNA, 19 nt, Artificial Sequence
  Description of Artificial Sequence: Synthetic oligonucleotide
  Sense strand starting at position 367 of SEQ ID NO: 1244541
agaggagucccugggcuuu

SEQ ID NO: 1496483 - RNA, 19 nt, Artificial Sequence
  Description of Artificial Sequence: Synthetic oligonucleotide
  Antisense strand to SEQ ID NO: 1496482
aaagcccagggacuccucu

SEQ ID NO: 1496484 - RNA, 19 nt, Artificial Sequence
  Description of Artificial Sequence: Synthetic oligonucleotide
  Sense strand starting at position 407 of SEQ ID NO: 1244541
gagguuaagcgcuccuguu

SEQ ID NO: 1496485 - RNA, 19 nt, Artificial Sequence
  Description of Artificial Sequence: Synthetic oligonucleotide
  Antisense strand to SEQ ID NO: 1496484
aacaggagcgcuuaaccuc

SEQ ID NO: 1496486 - RNA, 19 nt, Artificial Sequence
  Description of Artificial Sequence: Synthetic oligonucleotide
  Sense strand starting at position 408 of SEQ ID NO: 1244541
agguuaagcgcuccuguuu

SEQ ID NO: 1496487 - RNA, 19 nt, Artificial Sequence
  Description of Artificial Sequence: Synthetic oligonucleotide
  Antisense strand to SEQ ID NO: 1496486
aaacaggagcgcuuaaccu

SEQ ID NO: 1496488 - RNA, 19 nt, Artificial Sequence
  Description of Artificial Sequence: Synthetic oligonucleotide
  Sense strand starting at position 556 of SEQ ID NO: 1244541
agaguuaggugaguccuga

SEQ ID NO: 1496489 - RNA, 19 nt, Artificial Sequence
  Description of Artificial Sequence: Synthetic oligonucleotide
  Antisense strand to SEQ ID NO: 1496488
ucaggacucaccuaacucu

SEQ ID NO: 1496490 - RNA, 19 nt, Artificial Sequence
  Description of Artificial Sequence: Synthetic oligonucleotide
  Sense strand starting at position 562 of SEQ ID NO: 1244541
aggugaguccugaguguuu

SEQ ID NO: 1496491 - RNA, 19 nt, Artificial Sequence
  Description of Artificial Sequence: Synthetic oligonucleotide
  Antisense strand to SEQ ID NO: 1496490
aaacacucaggacucaccu

SEQ ID NO: 1496492 - RNA, 19 nt, Artificial Sequence
  Description of Artificial Sequence: Synthetic oligonucleotide
  Sense strand starting at position 607 of SEQ ID NO: 1244541
accaaugacuuggcaauau

SEQ ID NO: 1496493 - RNA, 19 nt, Artificial Sequence
  Description of Artificial Sequence: Synthetic oligonucleotide
  Antisense strand to SEQ ID NO: 1496492
auauugccaagucauuggu

SEQ ID NO: 1496494 - RNA, 19 nt, Artificial Sequence
  Description of Artificial Sequence: Synthetic oligonucleotide
  Sense strand starting at position 611 of SEQ ID NO: 1244541
augacuuggcaauaucagu

SEQ ID NO: 1496495 - RNA, 19 nt, Artificial Sequence
  Description of Artificial Sequence: Synthetic oligonucleotide
  Antisense strand to SEQ ID NO: 1496494
acugauauugccaagucau

SEQ ID NO: 1496496 - RNA, 19 nt, Artificial Sequence
  Description of Artificial Sequence: Synthetic oligonucleotide
  Sense strand starting at position 624 of SEQ ID NO: 1244541
aucagugguuggcugaaga

SEQ ID NO: 1496497 - RNA, 19 nt, Artificial Sequence
  Description of Artificial Sequence: Synthetic oligonucleotide
  Antisense strand to SEQ ID NO: 1496496
ucuucagccaaccacugau

SEQ ID NO: 1496498 - RNA, 19 nt, Artificial Sequence
  Description of Artificial Sequence: Synthetic oligonucleotide
  Sense strand starting at position 1134 of SEQ ID NO: 1244541
uugccuuaaggaugaguua

SEQ ID NO: 1496499 - RNA, 19 nt, Artificial Sequence
  Description of Artificial Sequence: Synthetic oligonucleotide
  Antisense strand to SEQ ID NO: 1496498
uaacucauccuuaaggcaa

SEQ ID NO: 1496500 - RNA, 19 nt, Artificial Sequence
  Description of Artificial Sequence: Synthetic oligonucleotide
  Sense strand starting at position 1137 of SEQ ID NO: 1244541
ccuuaaggaugaguuaguu

SEQ ID NO: 1496501 - RNA, 19 nt, Artificial Sequence
  Description of Artificial Sequence: Synthetic oligonucleotide
  Antisense strand to SEQ ID NO: 1496500
aacuaacucauccuuaagg

SEQ ID NO: 1496502 - RNA, 19 nt, Artificial Sequence
  Description of Artificial Sequence: Synthetic oligonucleotide
  Sense strand starting at position 1141 of SEQ ID NO: 1244541
aaggaugaguuaguuuaaa

SEQ ID NO: 1496503 - RNA, 19 nt, Artificial Sequence
  Description of Artificial Sequence: Synthetic oligonucleotide
  Antisense strand to SEQ ID NO: 1496502
uuuaaacuaacucauccuu

SEQ ID NO: 1496504 - RNA, 19 nt, Artificial Sequence
  Description of Artificial Sequence: Synthetic oligonucleotide
  Sense strand starting at position 1480 of SEQ ID NO: 1244541
agucuuauggcagaccuua

SEQ ID NO: 1496505 - RNA, 19 nt, Artificial Sequence
  Description of Artificial Sequence: Synthetic oligonucleotide
  Antisense strand to SEQ ID NO: 1496504
uaaggucugccauaagacu

SEQ ID NO: 1496506 - RNA, 19 nt, Artificial Sequence
  Description of Artificial Sequence: Synthetic oligonucleotide
  Sense strand starting at position 1786 of SEQ ID NO: 1244541
cgaucaguuuaccuuauua

SEQ ID NO: 1496507 - RNA, 19 nt, Artificial Sequence
  Description of Artificial Sequence: Synthetic oligonucleotide
  Antisense strand to SEQ ID NO: 1496506
uaauaagguaaacugaucg

SEQ ID NO: 1496508 - RNA, 19 nt, Artificial Sequence
  Description of Artificial Sequence: Synthetic oligonucleotide
  Sense strand starting at position 1813 of SEQ ID NO: 1244541
agcacucuuggagguagua

SEQ ID NO: 1496509 - RNA, 19 nt, Artificial Sequence
  Description of Artificial Sequence: Synthetic oligonucleotide
  Antisense strand to SEQ ID NO: 1496508
uacuaccuccaagagugcu

SEQ ID NO: 1496510 - RNA, 19 nt, Artificial Sequence
  Description of Artificial Sequence: Synthetic oligonucleotide
  Sense strand starting at position 1840 of SEQ ID NO: 1244541
cgguccuugaucugagaaa

SEQ ID NO: 1496511 - RNA, 19 nt, Artificial Sequence
  Description of Artificial Sequence: Synthetic oligonucleotide
  Antisense strand to SEQ ID NO: 1496510
uuucucagaucaaggaccg

SEQ ID NO: 1496512 - RNA, 19 nt, Artificial Sequence
  Description of Artificial Sequence: Synthetic oligonucleotide
  Sense strand starting at position 1851 of SEQ ID NO: 1244541
cugagaaaugggcgcacaa

SEQ ID NO: 1496513 - RNA, 19 nt, Artificial Sequence
  Description of Artificial Sequence: Synthetic oligonucleotide
  Antisense strand to SEQ ID NO: 1496512
uugugcgcccauuucucag

SEQ ID NO: 1496514 - RNA, 19 nt, Artificial Sequence
  Description of Artificial Sequence: Synthetic oligonucleotide
  Sense strand starting at position 1853 of SEQ ID NO: 1244541
gagaaaugggcgcacaaca

SEQ ID NO: 1496515 - RNA, 19 nt, Artificial Sequence
  Description of Artificial Sequence: Synthetic oligonucleotide
  Antisense strand to SEQ ID NO: 1496514
uguugugcgcccauuucuc

SEQ ID NO: 1496516 - RNA, 19 nt, Artificial Sequence
  Description of Artificial Sequence: Synthetic oligonucleotide
  Sense strand starting at position 1928 of SEQ ID NO: 1244541
caagcaucggccuaaaggu

SEQ ID NO: 1496517 - RNA, 19 nt, Artificial Sequence
  Description of Artificial Sequence: Synthetic oligonucleotide
  Antisense strand to SEQ ID NO: 1496516
accuuuaggccgaugcuug

SEQ ID NO: 1496518 - RNA, 19 nt, Artificial Sequence
  Description of Artificial Sequence: Synthetic oligonucleotide
  Sense strand starting at position 2460 of SEQ ID NO: 1244541
guggaauucuuucccucac

SEQ ID NO: 1496519 - RNA, 19 nt, Artificial Sequence
  Description of Artificial Sequence: Synthetic oligonucleotide
  Antisense strand to SEQ ID NO: 1496518
gugagggaaagaauuccac

SEQ ID NO: 1496520 - RNA, 19 nt, Artificial Sequence
  Description of Artificial Sequence: Synthetic oligonucleotide
  Sense strand starting at position 2783 of SEQ ID NO: 1244541
gcaaguuuacgguaacgag

SEQ ID NO: 1496521 - RNA, 19 nt, Artificial Sequence
  Description of Artificial Sequence: Synthetic oligonucleotide
  Antisense strand to SEQ ID NO: 1496520
cucguuaccguaaacuugc

SEQ ID NO: 1496522 - RNA, 19 nt, Artificial Sequence
  Description of Artificial Sequence: Synthetic oligonucleotide
  Sense strand starting at position 2792 of SEQ ID NO: 1244541
cgguaacgaguucaucuau

SEQ ID NO: 1496523 - RNA, 19 nt, Artificial Sequence
  Description of Artificial Sequence: Synthetic oligonucleotide
  Antisense strand to SEQ ID NO: 1496522
auagaugaacucguuaccg

SEQ ID NO: 1496524 - RNA, 19 nt, Artificial Sequence
  Description of Artificial Sequence: Synthetic oligonucleotide
  Sense strand starting at position 2833 of SEQ ID NO: 1244541
ggauuucuauuagacagga

SEQ ID NO: 1496525 - RNA, 19 nt, Artificial Sequence
  Description of Artificial Sequence: Synthetic oligonucleotide
  Antisense strand to SEQ ID NO: 1496524
uccugucuaauagaaaucc

SEQ ID NO: 1496526 - RNA, 19 nt, Artificial Sequence
  Description of Artificial Sequence: Synthetic oligonucleotide
  Sense strand starting at position 2960 of SEQ ID NO: 1244541
ggaagagaaguuugcucua

SEQ ID NO: 1496527 - RNA, 19 nt, Artificial Sequence
  Description of Artificial Sequence: Synthetic oligonucleotide
  Antisense strand to SEQ ID NO: 1496526
uagagcaaacuucucuucc

SEQ ID NO: 1496528 - RNA, 19 nt, Artificial Sequence
  Description of Artificial Sequence: Synthetic oligonucleotide
  Sense strand starting at position 2963 of SEQ ID NO: 1244541
agagaaguuugcucuaggu

SEQ ID NO: 1496529 - RNA, 19 nt, Artificial Sequence
  Description of Artificial Sequence: Synthetic oligonucleotide
  Antisense strand to SEQ ID NO: 1496528
accuagagcaaacuucucu

SEQ ID NO: 1496530 - RNA, 19 nt, Artificial Sequence
  Description of Artificial Sequence: Synthetic oligonucleotide
  Sense strand starting at position 2965 of SEQ ID NO: 1244541
agaaguuugcucuagguug

SEQ ID NO: 1496531 - RNA, 19 nt, Artificial Sequence
  Description of Artificial Sequence: Synthetic oligonucleotide
  Antisense strand to SEQ ID NO: 1496530
caaccuagagcaaacuucu

SEQ ID NO: 1496532 - RNA, 19 nt, Artificial Sequence
  Description of Artificial Sequence: Synthetic oligonucleotide
  Sense strand starting at position 2997 of SEQ ID NO: 1244541
ggagcugcucccgagaacu

SEQ ID NO: 1496533 - RNA, 19 nt, Artificial Sequence
  Description of Artificial Sequence: Synthetic oligonucleotide
  Antisense strand to SEQ ID NO: 1496532
aguucucgggagcagcucc

SEQ ID NO: 1496534 - RNA, 19 nt, Artificial Sequence
  Description of Artificial Sequence: Synthetic oligonucleotide
  Sense strand starting at position 3315 of SEQ ID NO: 1244541
uugcuuuggaguuagaaau

SEQ ID NO: 1496535 - RNA, 19 nt, Artificial Sequence
  Description of Artificial Sequence: Synthetic oligonucleotide
  Antisense strand to SEQ ID NO: 1496534
auuucuaacuccaaagcaa

SEQ ID NO: 1496536 - RNA, 19 nt, Artificial Sequence
  Description of Artificial Sequence: Synthetic oligonucleotide
  Sense strand starting at position 3407 of SEQ ID NO: 1244541
ggaguuuggcucugaggga

SEQ ID NO: 1496537 - RNA, 19 nt, Artificial Sequence
  Description of Artificial Sequence: Synthetic oligonucleotide
  Antisense strand to SEQ ID NO: 1496536
ucccucagagccaaacucc

SEQ ID NO: 1496538 - RNA, 19 nt, Artificial Sequence
  Description of Artificial Sequence: Synthetic oligonucleotide
  Sense strand starting at position 3442 of SEQ ID NO: 1244541
ggcagcucaggguacaauu

SEQ ID NO: 1496539 - RNA, 19 nt, Artificial Sequence
  Description of Artificial Sequence: Synthetic oligonucleotide
  Antisense strand to SEQ ID NO: 1496538
aauuguacccugagcugcc

SEQ ID NO: 1496540 - RNA, 19 nt, Artificial Sequence
  Description of Artificial Sequence: Synthetic oligonucleotide
  Sense strand starting at position 3452 of SEQ ID NO: 1244541
gguacaauugcgccuuguu

SEQ ID NO: 1496541 - RNA, 19 nt, Artificial Sequence
  Description of Artificial Sequence: Synthetic oligonucleotide
  Antisense strand to SEQ ID NO: 1496540
aacaaggcgcaauuguacc

SEQ ID NO: 1496542 - RNA, 19 nt, Artificial Sequence
  Description of Artificial Sequence: Synthetic oligonucleotide
  Sense strand starting at position 3453 of SEQ ID NO: 1244541
guacaauugcgccuuguua

SEQ ID NO: 1496543 - RNA, 19 nt, Artificial Sequence
  Description of Artificial Sequence: Synthetic oligonucleotide
  Antisense strand to SEQ ID NO: 1496542
uaacaaggcgcaauuguac

SEQ ID NO: 1496544 - RNA, 19 nt, Artificial Sequence
  Description of Artificial Sequence: Synthetic oligonucleotide
  Sense strand starting at position 3519 of SEQ ID NO: 1244541
gcguuuauucgucugugag

SEQ ID NO: 1496545 - RNA, 19 nt, Artificial Sequence
  Description of Artificial Sequence: Synthetic oligonucleotide
  Antisense strand to SEQ ID NO: 1496544
cucacagacgaauaaacgc

SEQ ID NO: 1496546 - RNA, 19 nt, Artificial Sequence
  Description of Artificial Sequence: Synthetic oligonucleotide
  Sense strand starting at position 3644 of SEQ ID NO: 1244541
auaucugcaggcgaauaua

SEQ ID NO: 1496547 - RNA, 19 nt, Artificial Sequence
  Description of Artificial Sequence: Synthetic oligonucleotide
  Antisense strand to SEQ ID NO: 1496546
uauauucgccugcagauau

SEQ ID NO: 1496548 - RNA, 19 nt, Artificial Sequence
  Description of Artificial Sequence: Synthetic oligonucleotide
  Sense strand starting at position 3655 of SEQ ID NO: 1244541
cgaauauagguuuguagau

SEQ ID NO: 1496549 - RNA, 19 nt, Artificial Sequence
  Description of Artificial Sequence: Synthetic oligonucleotide
  Antisense strand to SEQ ID NO: 1496548
aucuacaaaccuauauucg

SEQ ID NO: 1496550 - RNA, 19 nt, Artificial Sequence
  Description of Artificial Sequence: Synthetic oligonucleotide
  Sense strand starting at position 3656 of SEQ ID NO: 1244541
gaauauagguuuguagauu

SEQ ID NO: 1496551 - RNA, 19 nt, Artificial Sequence
  Description of Artificial Sequence: Synthetic oligonucleotide
  Antisense strand to SEQ ID NO: 1496550
aaucuacaaaccuauauuc

SEQ ID NO: 1496552 - RNA, 19 nt, Artificial Sequence
  Description of Artificial Sequence: Synthetic oligonucleotide
  Sense strand starting at position 3691 of SEQ ID NO: 1244541
acaaauaagugagagauuu

SEQ ID NO: 1496553 - RNA, 19 nt, Artificial Sequence
  Description of Artificial Sequence: Synthetic oligonucleotide
  Antisense strand to SEQ ID NO: 1496552
aaaucucucacuuauuugu

SEQ ID NO: 1496554 - RNA, 19 nt, Artificial Sequence
  Description of Artificial Sequence: Synthetic oligonucleotide
  Sense strand starting at position 3752 of SEQ ID NO: 1244541
agggauucccaaugaaagc

SEQ ID NO: 1496555 - RNA, 19 nt, Artificial Sequence
  Description of Artificial Sequence: Synthetic oligonucleotide
  Antisense strand to SEQ ID NO: 1496554
gcuuucauugggaaucccu

SEQ ID NO: 1496556 - RNA, 19 nt, Artificial Sequence
  Description of Artificial Sequence: Synthetic oligonucleotide
  Sense strand starting at position 266 of SEQ ID NO: 1244542
cggagauggcccugguaga

SEQ ID NO: 1496557 - RNA, 19 nt, Artificial Sequence
  Description of Artificial Sequence: Synthetic oligonucleotide
  Antisense strand to SEQ ID NO: 1496556
ucuaccagggccaucuccg

SEQ ID NO: 1496558 - RNA, 19 nt, Artificial Sequence
  Description of Artificial Sequence: Synthetic oligonucleotide
  Sense strand starting at position 926 of SEQ ID NO: 1244542
ggacgaccacauugaaauc

SEQ ID NO: 1496559 - RNA, 19 nt, Artificial Sequence
  Description of Artificial Sequence: Synthetic oligonucleotide
  Antisense strand to SEQ ID NO: 1496558
gauuucaauguggucgucc

SEQ ID NO: 1496560 - RNA, 19 nt, Artificial Sequence
  Description of Artificial Sequence: Synthetic oligonucleotide
  Sense strand starting at position 945 of SEQ ID NO: 1244542
ucucacuuauuuguguuua

SEQ ID NO: 1496561 - RNA, 19 nt, Artificial Sequence
  Description of Artificial Sequence: Synthetic oligonucleotide
  Antisense strand to SEQ ID NO: 1496560
uaaacacaaauaagugaga

SEQ ID NO: 1496562 - RNA, 19 nt, Artificial Sequence
  Description of Artificial Sequence: Synthetic oligonucleotide
  Sense strand starting at position 985 of SEQ ID NO: 1244542
ccuauauucgccugcagau

SEQ ID NO: 1496563 - RNA, 19 nt, Artificial Sequence
  Description of Artificial Sequence: Synthetic oligonucleotide
  Antisense strand to SEQ ID NO: 1496562
aucugcaggcgaauauagg

SEQ ID NO: 1496564 - RNA, 19 nt, Artificial Sequence
  Description of Artificial Sequence: Synthetic oligonucleotide
  Sense strand starting at position 987 of SEQ ID NO: 1244542
uauauucgccugcagauau

SEQ ID NO: 1496565 - RNA, 19 nt, Artificial Sequence
  Description of Artificial Sequence: Synthetic oligonucleotide
  Antisense strand to SEQ ID NO: 1496564
auaucugcaggcgaauaua

SEQ ID NO: 1496566 - RNA, 19 nt, Artificial Sequence
  Description of Artificial Sequence: Synthetic oligonucleotide
  Sense strand starting at position 1012 of SEQ ID NO: 1244542
uuacauaagggcuauguua

SEQ ID NO: 1496567 - RNA, 19 nt, Artificial Sequence
  Description of Artificial Sequence: Synthetic oligonucleotide
  Antisense strand to SEQ ID NO: 1496566
uaacauagcccuuauguaa

SEQ ID NO: 1496568 - RNA, 19 nt, Artificial Sequence
  Description of Artificial Sequence: Synthetic oligonucleotide
  Sense strand starting at position 1014 of SEQ ID NO: 1244542
acauaagggcuauguuaag

SEQ ID NO: 1496569 - RNA, 19 nt, Artificial Sequence
  Description of Artificial Sequence: Synthetic oligonucleotide
  Antisense strand to SEQ ID NO: 1496568
cuuaacauagcccuuaugu

SEQ ID NO: 1496570 - RNA, 19 nt, Artificial Sequence
  Description of Artificial Sequence: Synthetic oligonucleotide
  Sense strand starting at position 1054 of SEQ ID NO: 1244542
uuaccauucggacaaacgu

SEQ ID NO: 1496571 - RNA, 19 nt, Artificial Sequence
  Description of Artificial Sequence: Synthetic oligonucleotide
  Antisense strand to SEQ ID NO: 1496570
acguuuguccgaaugguaa

SEQ ID NO: 1496572 - RNA, 19 nt, Artificial Sequence
  Description of Artificial Sequence: Synthetic oligonucleotide
  Sense strand starting at position 1071 of SEQ ID NO: 1244542
gugugaacacaaugucaca

SEQ ID NO: 1496573 - RNA, 19 nt, Artificial Sequence
  Description of Artificial Sequence: Synthetic oligonucleotide
  Antisense strand to SEQ ID NO: 1496572
ugugacauuguguucacac

SEQ ID NO: 1496574 - RNA, 19 nt, Artificial Sequence
  Description of Artificial Sequence: Synthetic oligonucleotide
  Sense strand starting at position 1248 of SEQ ID NO: 1244542
cgaaucucucagcaagcua

SEQ ID NO: 1496575 - RNA, 19 nt, Artificial Sequence
  Description of Artificial Sequence: Synthetic oligonucleotide
  Antisense strand to SEQ ID NO: 1496574
uagcuugcugagagauucg

SEQ ID NO: 1496576 - RNA, 19 nt, Artificial Sequence
  Description of Artificial Sequence: Synthetic oligonucleotide
  Sense strand starting at position 1378 of SEQ ID NO: 1244542
gcgcaaugcguagaaacua

SEQ ID NO: 1496577 - RNA, 19 nt, Artificial Sequence
  Description of Artificial Sequence: Synthetic oligonucleotide
  Antisense strand to SEQ ID NO: 1496576
uaguuucuacgcauugcgc

SEQ ID NO: 1496578 - RNA, 19 nt, Artificial Sequence
  Description of Artificial Sequence: Synthetic oligonucleotide
  Sense strand starting at position 1551 of SEQ ID NO: 1244542
ggcgaucccuacuccaaau

SEQ ID NO: 1496579 - RNA, 19 nt, Artificial Sequence
  Description of Artificial Sequence: Synthetic oligonucleotide
  Antisense strand to SEQ ID NO: 1496578
auuuggaguagggaucgcc

SEQ ID NO: 1496580 - RNA, 19 nt, Artificial Sequence
  Description of Artificial Sequence: Synthetic oligonucleotide
  Sense strand starting at position 1718 of SEQ ID NO: 1244542
aguuauauugaaggugcua

SEQ ID NO: 1496581 - RNA, 19 nt, Artificial Sequence
  Description of Artificial Sequence: Synthetic oligonucleotide
  Antisense strand to SEQ ID NO: 1496580
uagcaccuucaauauaacu

SEQ ID NO: 1496582 - RNA, 19 nt, Artificial Sequence
  Description of Artificial Sequence: Synthetic oligonucleotide
  Sense strand starting at position 1732 of SEQ ID NO: 1244542
ugcuaagugcugcacucua

SEQ ID NO: 1496583 - RNA, 19 nt, Artificial Sequence
  Description of Artificial Sequence: Synthetic oligonucleotide
  Antisense strand to SEQ ID NO: 1496582
uagagugcagcacuuagca

SEQ ID NO: 1496584 - RNA, 19 nt, Artificial Sequence
  Description of Artificial Sequence: Synthetic oligonucleotide
  Sense strand starting at position 1793 of SEQ ID NO: 1244542
acccguccugucuaauaga

SEQ ID NO: 1496585 - RNA, 19 nt, Artificial Sequence
  Description of Artificial Sequence: Synthetic oligonucleotide
  Antisense strand to SEQ ID NO: 1496584
ucuauuagacaggacgggu

SEQ ID NO: 1496586 - RNA, 19 nt, Artificial Sequence
  Description of Artificial Sequence: Synthetic oligonucleotide
  Sense strand starting at position 1820 of SEQ ID NO: 1244542
agcugcaaccgcgaauuaa

SEQ ID NO: 1496587 - RNA, 19 nt, Artificial Sequence
  Description of Artificial Sequence: Synthetic oligonucleotide
  Antisense strand to SEQ ID NO: 1496586
uuaauucgcgguugcagcu

SEQ ID NO: 1496588 - RNA, 19 nt, Artificial Sequence
  Description of Artificial Sequence: Synthetic oligonucleotide
  Sense strand starting at position 1828 of SEQ ID NO: 1244542
ccgcgaauuaaauagauga

SEQ ID NO: 1496589 - RNA, 19 nt, Artificial Sequence
  Description of Artificial Sequence: Synthetic oligonucleotide
  Antisense strand to SEQ ID NO: 1496588
ucaucuauuuaauucgcgg

SEQ ID NO: 1496590 - RNA, 19 nt, Artificial Sequence
  Description of Artificial Sequence: Synthetic oligonucleotide
  Sense strand starting at position 1841 of SEQ ID NO: 1244542
agaugaacucguuaccgua

SEQ ID NO: 1496591 - RNA, 19 nt, Artificial Sequence
  Description of Artificial Sequence: Synthetic oligonucleotide
  Antisense strand to SEQ ID NO: 1496590
uacgguaacgaguucaucu

SEQ ID NO: 1496592 - RNA, 19 nt, Artificial Sequence
  Description of Artificial Sequence: Synthetic oligonucleotide
  Sense strand starting at position 1843 of SEQ ID NO: 1244542
augaacucguuaccguaaa

SEQ ID NO: 1496593 - RNA, 19 nt, Artificial Sequence
  Description of Artificial Sequence: Synthetic oligonucleotide
  Antisense strand to SEQ ID NO: 1496592
uuuacgguaacgaguucau

SEQ ID NO: 1496594 - RNA, 19 nt, Artificial Sequence
  Description of Artificial Sequence: Synthetic oligonucleotide
  Sense strand starting at position 2115 of SEQ ID NO: 1244542
ccaguuaguucuguguaga

SEQ ID NO: 1496595 - RNA, 19 nt, Artificial Sequence
  Description of Artificial Sequence: Synthetic oligonucleotide
  Antisense strand to SEQ ID NO: 1496594
ucuacacagaacuaacugg

SEQ ID NO: 1496596 - RNA, 19 nt, Artificial Sequence
  Description of Artificial Sequence: Synthetic oligonucleotide
  Sense strand starting at position 2116 of SEQ ID NO: 1244542
caguuaguucuguguagag

SEQ ID NO: 1496597 - RNA, 19 nt, Artificial Sequence
  Description of Artificial Sequence: Synthetic oligonucleotide
  Antisense strand to SEQ ID NO: 1496596
cucuacacagaacuaacug

SEQ ID NO: 1496598 - RNA, 19 nt, Artificial Sequence
  Description of Artificial Sequence: Synthetic oligonucleotide
  Sense strand starting at position 2305 of SEQ ID NO: 1244542
ggacuuugccauugaacuu

SEQ ID NO: 1496599 - RNA, 19 nt, Artificial Sequence
  Description of Artificial Sequence: Synthetic oligonucleotide
  Antisense strand to SEQ ID NO: 1496598
aaguucaauggcaaagucc

SEQ ID NO: 1496600 - RNA, 19 nt, Artificial Sequence
  Description of Artificial Sequence: Synthetic oligonucleotide
  Sense strand starting at position 2408 of SEQ ID NO: 1244542
agaggacuucucuggccuu

SEQ ID NO: 1496601 - RNA, 19 nt, Artificial Sequence
  Description of Artificial Sequence: Synthetic oligonucleotide
  Antisense strand to SEQ ID NO: 1496600
aaggccagagaaguccucu

SEQ ID NO: 1496602 - RNA, 19 nt, Artificial Sequence
  Description of Artificial Sequence: Synthetic oligonucleotide
  Sense strand starting at position 2786 of SEQ ID NO: 1244542
gcccauuucucagaucaag

SEQ ID NO: 1496603 - RNA, 19 nt, Artificial Sequence
  Description of Artificial Sequence: Synthetic oligonucleotide
  Antisense strand to SEQ ID NO: 1496602
cuugaucugagaaaugggc

SEQ ID NO: 1496604 - RNA, 19 nt, Artificial Sequence
  Description of Artificial Sequence: Synthetic oligonucleotide
  Sense strand starting at position 2885 of SEQ ID NO: 1244542
cggaucgcucaguauggua

SEQ ID NO: 1496605 - RNA, 19 nt, Artificial Sequence
  Description of Artificial Sequence: Synthetic oligonucleotide
  Antisense strand to SEQ ID NO: 1496604
uaccauacugagcgauccg

SEQ ID NO: 1496606 - RNA, 19 nt, Artificial Sequence
  Description of Artificial Sequence: Synthetic oligonucleotide
  Sense strand starting at position 2935 of SEQ ID NO: 1244542
ccaggaauuugggagccuu

SEQ ID NO: 1496607 - RNA, 19 nt, Artificial Sequence
  Description of Artificial Sequence: Synthetic oligonucleotide
  Antisense strand to SEQ ID NO: 1496606
aaggcucccaaauuccugg

SEQ ID NO: 1496608 - RNA, 19 nt, Artificial Sequence
  Description of Artificial Sequence: Synthetic oligonucleotide
  Sense strand starting at position 3147 of SEQ ID NO: 1244542
gcuguaaggucugccauaa

SEQ ID NO: 1496609 - RNA, 19 nt, Artificial Sequence
  Description of Artificial Sequence: Synthetic oligonucleotide
  Antisense strand to SEQ ID NO: 1496608
uuauggcagaccuuacagc

SEQ ID NO: 1496610 - RNA, 19 nt, Artificial Sequence
  Description of Artificial Sequence: Synthetic oligonucleotide
  Sense strand starting at position 3151 of SEQ ID NO: 1244542
uaaggucugccauaagacu

SEQ ID NO: 1496611 - RNA, 19 nt, Artificial Sequence
  Description of Artificial Sequence: Synthetic oligonucleotide
  Antisense strand to SEQ ID NO: 1496610
agucuuauggcagaccuua

SEQ ID NO: 1496612 - RNA, 19 nt, Artificial Sequence
  Description of Artificial Sequence: Synthetic oligonucleotide
  Sense strand starting at position 3168 of SEQ ID NO: 1244542
cuuaauguuugucuccaau

SEQ ID NO: 1496613 - RNA, 19 nt, Artificial Sequence
  Description of Artificial Sequence: Synthetic oligonucleotide
  Antisense strand to SEQ ID NO: 1496612
auuggagacaaacauuaag

SEQ ID NO: 1496614 - RNA, 19 nt, Artificial Sequence
  Description of Artificial Sequence: Synthetic oligonucleotide
  Sense strand starting at position 3174 of SEQ ID NO: 1244542
guuugucuccaaugggaug

SEQ ID NO: 1496615 - RNA, 19 nt, Artificial Sequence
  Description of Artificial Sequence: Synthetic oligonucleotide
  Antisense strand to SEQ ID NO: 1496614
caucccauuggagacaaac

SEQ ID NO: 1496616 - RNA, 19 nt, Artificial Sequence
  Description of Artificial Sequence: Synthetic oligonucleotide
  Sense strand starting at position 3192 of SEQ ID NO: 1244542
ggaguccuggcauaagcaa

SEQ ID NO: 1496617 - RNA, 19 nt, Artificial Sequence
  Description of Artificial Sequence: Synthetic oligonucleotide
  Antisense strand to SEQ ID NO: 1496616
uugcuuaugccaggacucc

SEQ ID NO: 1496618 - RNA, 19 nt, Artificial Sequence
  Description of Artificial Sequence: Synthetic oligonucleotide
  Sense strand starting at position 3296 of SEQ ID NO: 1244542
gggcgagaccaggagugau

SEQ ID NO: 1496619 - RNA, 19 nt, Artificial Sequence
  Description of Artificial Sequence: Synthetic oligonucleotide
  Antisense strand to SEQ ID NO: 1496618
aucacuccuggucucgccc

SEQ ID NO: 1496620 - RNA, 19 nt, Artificial Sequence
  Description of Artificial Sequence: Synthetic oligonucleotide
  Sense strand starting at position 3309 of SEQ ID NO: 1244542
agugauggcucagccugua

SEQ ID NO: 1496621 - RNA, 19 nt, Artificial Sequence
  Description of Artificial Sequence: Synthetic oligonucleotide
  Antisense strand to SEQ ID NO: 1496620
uacaggcugagccaucacu

SEQ ID NO: 1496622 - RNA, 19 nt, Artificial Sequence
  Description of Artificial Sequence: Synthetic oligonucleotide
  Sense strand starting at position 3314 of SEQ ID NO: 1244542
uggcucagccuguaauucu

SEQ ID NO: 1496623 - RNA, 19 nt, Artificial Sequence
  Description of Artificial Sequence: Synthetic oligonucleotide
  Antisense strand to SEQ ID NO: 1496622
agaauuacaggcugagcca

SEQ ID NO: 1496624 - RNA, 19 nt, Artificial Sequence
  Description of Artificial Sequence: Synthetic oligonucleotide
  Sense strand starting at position 3408 of SEQ ID NO: 1244542
cgcugucucuauuuauaca

SEQ ID NO: 1496625 - RNA, 19 nt, Artificial Sequence
  Description of Artificial Sequence: Synthetic oligonucleotide
  Antisense strand to SEQ ID NO: 1496624
uguauaaauagagacagcg

SEQ ID NO: 1496626 - RNA, 19 nt, Artificial Sequence
  Description of Artificial Sequence: Synthetic oligonucleotide
  Sense strand starting at position 3454 of SEQ ID NO: 1244542
ggugaaaguuaacugugau

SEQ ID NO: 1496627 - RNA, 19 nt, Artificial Sequence
  Description of Artificial Sequence: Synthetic oligonucleotide
  Antisense strand to SEQ ID NO: 1496626
aucacaguuaacuuucacc

SEQ ID NO: 1496628 - RNA, 19 nt, Artificial Sequence
  Description of Artificial Sequence: Synthetic oligonucleotide
  Sense strand starting at position 3455 of SEQ ID NO: 1244542
gugaaaguuaacugugauu

SEQ ID NO: 1496629 - RNA, 19 nt, Artificial Sequence
  Description of Artificial Sequence: Synthetic oligonucleotide
  Antisense strand to SEQ ID NO: 1496628
aaucacaguuaacuuucac

SEQ ID NO: 1496630 - RNA, 19 nt, Artificial Sequence
  Description of Artificial Sequence: Synthetic oligonucleotide
  Sense strand starting at position 3457 of SEQ ID NO: 1244542
gaaaguuaacugugauuau

SEQ ID NO: 1496631 - RNA, 19 nt, Artificial Sequence
  Description of Artificial Sequence: Synthetic oligonucleotide
  Antisense strand to SEQ ID NO: 1496630
auaaucacaguuaacuuuc

SEQ ID NO: 1496632 - RNA, 19 nt, Artificial Sequence
  Description of Artificial Sequence: Synthetic oligonucleotide
  Sense strand starting at position 3813 of SEQ ID NO: 1244542
gagacucugugacaaauaa

SEQ ID NO: 1496633 - RNA, 19 nt, Artificial Sequence
  Description of Artificial Sequence: Synthetic oligonucleotide
  Antisense strand to SEQ ID NO: 1496632
uuauuugucacagagucuc

SEQ ID NO: 1496634 - RNA, 19 nt, Artificial Sequence
  Description of Artificial Sequence: Synthetic oligonucleotide
  Sense strand starting at position 3914 of SEQ ID NO: 1244542
uugccaagugugggaucaa

SEQ ID NO: 1496635 - RNA, 19 nt, Artificial Sequence
  Description of Artificial Sequence: Synthetic oligonucleotide
  Antisense strand to SEQ ID NO: 1496634
uugaucccacacuuggcaa

SEQ ID NO: 1496636 - RNA, 19 nt, Artificial Sequence
  Description of Artificial Sequence: Synthetic oligonucleotide
  Sense strand starting at position 49 of SEQ ID NO: 1244543
cgcauucuccacgauugag

SEQ ID NO: 1496637 - RNA, 19 nt, Artificial Sequence
  Description of Artificial Sequence: Synthetic oligonucleotide
  Antisense strand to SEQ ID NO: 1496636
cucaaucguggagaaugcg

SEQ ID NO: 1496638 - RNA, 19 nt, Artificial Sequence
  Description of Artificial Sequence: Synthetic oligonucleotide
  Sense strand starting at position 73 of SEQ ID NO: 1244543
aggccugaagucuggacaa

SEQ ID NO: 1496639 - RNA, 19 nt, Artificial Sequence
  Description of Artificial Sequence: Synthetic oligonucleotide
  Antisense strand to SEQ ID NO: 1496638
uuguccagacuucaggccu

SEQ ID NO: 1496640 - RNA, 19 nt, Artificial Sequence
  Description of Artificial Sequence: Synthetic oligonucleotide
  Sense strand starting at position 174 of SEQ ID NO: 1244543
ccacuaccucgaggacauu

SEQ ID NO: 1496641 - RNA, 19 nt, Artificial Sequence
  Description of Artificial Sequence: Synthetic oligonucleotide
  Antisense strand to SEQ ID NO: 1496640
aauguccucgagguagugg

SEQ ID NO: 1496642 - RNA, 19 nt, Artificial Sequence
  Description of Artificial Sequence: Synthetic oligonucleotide
  Sense strand starting at position 201 of SEQ ID NO: 1244543
ggagccagcucuccuagaa

SEQ ID NO: 1496643 - RNA, 19 nt, Artificial Sequence
  Description of Artificial Sequence: Synthetic oligonucleotide
  Antisense strand to SEQ ID NO: 1496642
uucuaggagagcuggcucc

SEQ ID NO: 1496644 - RNA, 19 nt, Artificial Sequence
  Description of Artificial Sequence: Synthetic oligonucleotide
  Sense strand starting at position 304 of SEQ ID NO: 1244543
gagggugggacgugacuua

SEQ ID NO: 1496645 - RNA, 19 nt, Artificial Sequence
  Description of Artificial Sequence: Synthetic oligonucleotide
  Antisense strand to SEQ ID NO: 1496644
uaagucacgucccacccuc

SEQ ID NO: 1496646 - RNA, 19 nt, Artificial Sequence
  Description of Artificial Sequence: Synthetic oligonucleotide
  Sense strand starting at position 790 of SEQ ID NO: 1244543
cggagauggcccugguaga

SEQ ID NO: 1496647 - RNA, 19 nt, Artificial Sequence
  Description of Artificial Sequence: Synthetic oligonucleotide
  Antisense strand to SEQ ID NO: 1496646
ucuaccagggccaucuccg

SEQ ID NO: 1496648 - RNA, 19 nt, Artificial Sequence
  Description of Artificial Sequence: Synthetic oligonucleotide
  Sense strand starting at position 1450 of SEQ ID NO: 1244543
ggacgaccacauugaaauc

SEQ ID NO: 1496649 - RNA, 19 nt, Artificial Sequence
  Description of Artificial Sequence: Synthetic oligonucleotide
  Antisense strand to SEQ ID NO: 1496648
gauuucaauguggucgucc

SEQ ID NO: 1496650 - RNA, 19 nt, Artificial Sequence
  Description of Artificial Sequence: Synthetic oligonucleotide
  Sense strand starting at position 1469 of SEQ ID NO: 1244543
ucucacuuauuuguguuua

SEQ ID NO: 1496651 - RNA, 19 nt, Artificial Sequence
  Description of Artificial Sequence: Synthetic oligonucleotide
  Antisense strand to SEQ ID NO: 1496650
uaaacacaaauaagugaga

SEQ ID NO: 1496652 - RNA, 19 nt, Artificial Sequence
  Description of Artificial Sequence: Synthetic oligonucleotide
  Sense strand starting at position 1511 of SEQ ID NO: 1244543
uauauucgccugcagauau

SEQ ID NO: 1496653 - RNA, 19 nt, Artificial Sequence
  Description of Artificial Sequence: Synthetic oligonucleotide
  Antisense strand to SEQ ID NO: 1496652
auaucugcaggcgaauaua

SEQ ID NO: 1496654 - RNA, 19 nt, Artificial Sequence
  Description of Artificial Sequence: Synthetic oligonucleotide
  Sense strand starting at position 1536 of SEQ ID NO: 1244543
uuacauaagggcuauguua

SEQ ID NO: 1496655 - RNA, 19 nt, Artificial Sequence
  Description of Artificial Sequence: Synthetic oligonucleotide
  Antisense strand to SEQ ID NO: 1496654
uaacauagcccuuauguaa

SEQ ID NO: 1496656 - RNA, 19 nt, Artificial Sequence
  Description of Artificial Sequence: Synthetic oligonucleotide
  Sense strand starting at position 1538 of SEQ ID NO: 1244543
acauaagggcuauguuaag

SEQ ID NO: 1496657 - RNA, 19 nt, Artificial Sequence
  Description of Artificial Sequence: Synthetic oligonucleotide
  Antisense strand to SEQ ID NO: 1496656
cuuaacauagcccuuaugu

SEQ ID NO: 1496658 - RNA, 19 nt, Artificial Sequence
  Description of Artificial Sequence: Synthetic oligonucleotide
  Sense strand starting at position 1578 of SEQ ID NO: 1244543
uuaccauucggacaaacgu

SEQ ID NO: 1496659 - RNA, 19 nt, Artificial Sequence
  Description of Artificial Sequence: Synthetic oligonucleotide
  Antisense strand to SEQ ID NO: 1496658
acguuuguccgaaugguaa

SEQ ID NO: 1496660 - RNA, 19 nt, Artificial Sequence
  Description of Artificial Sequence: Synthetic oligonucleotide
  Sense strand starting at position 1595 of SEQ ID NO: 1244543
gugugaacacaaugucaca

SEQ ID NO: 1496661 - RNA, 19 nt, Artificial Sequence
  Description of Artificial Sequence: Synthetic oligonucleotide
  Antisense strand to SEQ ID NO: 1496660
ugugacauuguguucacac

SEQ ID NO: 1496662 - RNA, 19 nt, Artificial Sequence
  Description of Artificial Sequence: Synthetic oligonucleotide
  Sense strand starting at position 1772 of SEQ ID NO: 1244543
cgaaucucucagcaagcua

SEQ ID NO: 1496663 - RNA, 19 nt, Artificial Sequence
  Description of Artificial Sequence: Synthetic oligonucleotide
  Antisense strand to SEQ ID NO: 1496662
uagcuugcugagagauucg

SEQ ID NO: 1496664 - RNA, 19 nt, Artificial Sequence
  Description of Artificial Sequence: Synthetic oligonucleotide
  Sense strand starting at position 2075 of SEQ ID NO: 1244543
ggcgaucccuacuccaaau

SEQ ID NO: 1496665 - RNA, 19 nt, Artificial Sequence
  Description of Artificial Sequence: Synthetic oligonucleotide
  Antisense strand to SEQ ID NO: 1496664
auuuggaguagggaucgcc

SEQ ID NO: 1496666 - RNA, 19 nt, Artificial Sequence
  Description of Artificial Sequence: Synthetic oligonucleotide
  Sense strand starting at position 2242 of SEQ ID NO: 1244543
aguuauauugaaggugcua

SEQ ID NO: 1496667 - RNA, 19 nt, Artificial Sequence
  Description of Artificial Sequence: Synthetic oligonucleotide
  Antisense strand to SEQ ID NO: 1496666
uagcaccuucaauauaacu

SEQ ID NO: 1496668 - RNA, 19 nt, Artificial Sequence
  Description of Artificial Sequence: Synthetic oligonucleotide
  Sense strand starting at position 2256 of SEQ ID NO: 1244543
ugcuaagugcugcacucua

SEQ ID NO: 1496669 - RNA, 19 nt, Artificial Sequence
  Description of Artificial Sequence: Synthetic oligonucleotide
  Antisense strand to SEQ ID NO: 1496668
uagagugcagcacuuagca

SEQ ID NO: 1496670 - RNA, 19 nt, Artificial Sequence
  Description of Artificial Sequence: Synthetic oligonucleotide
  Sense strand starting at position 2317 of SEQ ID NO: 1244543
acccguccugucuaauaga

SEQ ID NO: 1496671 - RNA, 19 nt, Artificial Sequence
  Description of Artificial Sequence: Synthetic oligonucleotide
  Antisense strand to SEQ ID NO: 1496670
ucuauuagacaggacgggu

SEQ ID NO: 1496672 - RNA, 19 nt, Artificial Sequence
  Description of Artificial Sequence: Synthetic oligonucleotide
  Sense strand starting at position 2344 of SEQ ID NO: 1244543
agcugcaaccgcgaauuaa

SEQ ID NO: 1496673 - RNA, 19 nt, Artificial Sequence
  Description of Artificial Sequence: Synthetic oligonucleotide
  Antisense strand to SEQ ID NO: 1496672
uuaauucgcgguugcagcu

SEQ ID NO: 1496674 - RNA, 19 nt, Artificial Sequence
  Description of Artificial Sequence: Synthetic oligonucleotide
  Sense strand starting at position 2352 of SEQ ID NO: 1244543
ccgcgaauuaaauagauga

SEQ ID NO: 1496675 - RNA, 19 nt, Artificial Sequence
  Description of Artificial Sequence: Synthetic oligonucleotide
  Antisense strand to SEQ ID NO: 1496674
ucaucuauuuaauucgcgg

SEQ ID NO: 1496676 - RNA, 19 nt, Artificial Sequence
  Description of Artificial Sequence: Synthetic oligonucleotide
  Sense strand starting at position 2365 of SEQ ID NO: 1244543
agaugaacucguuaccgua

SEQ ID NO: 1496677 - RNA, 19 nt, Artificial Sequence
  Description of Artificial Sequence: Synthetic oligonucleotide
  Antisense strand to SEQ ID NO: 1496676
uacgguaacgaguucaucu

SEQ ID NO: 1496678 - RNA, 19 nt, Artificial Sequence
  Description of Artificial Sequence: Synthetic oligonucleotide
  Sense strand starting at position 2367 of SEQ ID NO: 1244543
augaacucguuaccguaaa

SEQ ID NO: 1496679 - RNA, 19 nt, Artificial Sequence
  Description of Artificial Sequence: Synthetic oligonucleotide
  Antisense strand to SEQ ID NO: 1496678
uuuacgguaacgaguucau

SEQ ID NO: 1496680 - RNA, 19 nt, Artificial Sequence
  Description of Artificial Sequence: Synthetic oligonucleotide
  Sense strand starting at position 2639 of SEQ ID NO: 1244543
ccaguuaguucuguguaga

SEQ ID NO: 1496681 - RNA, 19 nt, Artificial Sequence
  Description of Artificial Sequence: Synthetic oligonucleotide
  Antisense strand to SEQ ID NO: 1496680
ucuacacagaacuaacugg

SEQ ID NO: 1496682 - RNA, 19 nt, Artificial Sequence
  Description of Artificial Sequence: Synthetic oligonucleotide
  Sense strand starting at position 2640 of SEQ ID NO: 1244543
caguuaguucuguguagag

SEQ ID NO: 1496683 - RNA, 19 nt, Artificial Sequence
  Description of Artificial Sequence: Synthetic oligonucleotide
  Antisense strand to SEQ ID NO: 1496682
cucuacacagaacuaacug

SEQ ID NO: 1496684 - RNA, 19 nt, Artificial Sequence
  Description of Artificial Sequence: Synthetic oligonucleotide
  Sense strand starting at position 2829 of SEQ ID NO: 1244543
ggacuuugccauugaacuu

SEQ ID NO: 1496685 - RNA, 19 nt, Artificial Sequence
  Description of Artificial Sequence: Synthetic oligonucleotide
  Antisense strand to SEQ ID NO: 1496684
aaguucaauggcaaagucc

SEQ ID NO: 1496686 - RNA, 19 nt, Artificial Sequence
  Description of Artificial Sequence: Synthetic oligonucleotide
  Sense strand starting at position 2932 of SEQ ID NO: 1244543
agaggacuucucuggccuu

SEQ ID NO: 1496687 - RNA, 19 nt, Artificial Sequence
  Description of Artificial Sequence: Synthetic oligonucleotide
  Antisense strand to SEQ ID NO: 1496686
aaggccagagaaguccucu

SEQ ID NO: 1496688 - RNA, 19 nt, Artificial Sequence
  Description of Artificial Sequence: Synthetic oligonucleotide
  Sense strand starting at position 3310 of SEQ ID NO: 1244543
gcccauuucucagaucaag

SEQ ID NO: 1496689 - RNA, 19 nt, Artificial Sequence
  Description of Artificial Sequence: Synthetic oligonucleotide
  Antisense strand to SEQ ID NO: 1496688
cuugaucugagaaaugggc

SEQ ID NO: 1496690 - RNA, 19 nt, Artificial Sequence
  Description of Artificial Sequence: Synthetic oligonucleotide
  Sense strand starting at position 3409 of SEQ ID NO: 1244543
cggaucgcucaguauggua

SEQ ID NO: 1496691 - RNA, 19 nt, Artificial Sequence
  Description of Artificial Sequence: Synthetic oligonucleotide
  Antisense strand to SEQ ID NO: 1496690
uaccauacugagcgauccg

SEQ ID NO: 1496692 - RNA, 19 nt, Artificial Sequence
  Description of Artificial Sequence: Synthetic oligonucleotide
  Sense strand starting at position 3459 of SEQ ID NO: 1244543
ccaggaauuugggagccuu

SEQ ID NO: 1496693 - RNA, 19 nt, Artificial Sequence
  Description of Artificial Sequence: Synthetic oligonucleotide
  Antisense strand to SEQ ID NO: 1496692
aaggcucccaaauuccugg

SEQ ID NO: 1496694 - RNA, 19 nt, Artificial Sequence
  Description of Artificial Sequence: Synthetic oligonucleotide
  Sense strand starting at position 3671 of SEQ ID NO: 1244543
gcuguaaggucugccauaa

SEQ ID NO: 1496695 - RNA, 19 nt, Artificial Sequence
  Description of Artificial Sequence: Synthetic oligonucleotide
  Antisense strand to SEQ ID NO: 1496694
uuauggcagaccuuacagc

SEQ ID NO: 1496696 - RNA, 19 nt, Artificial Sequence
  Description of Artificial Sequence: Synthetic oligonucleotide
  Sense strand starting at position 3675 of SEQ ID NO: 1244543
uaaggucugccauaagacu

SEQ ID NO: 1496697 - RNA, 19 nt, Artificial Sequence
  Description of Artificial Sequence: Synthetic oligonucleotide
  Antisense strand to SEQ ID NO: 1496696
agucuuauggcagaccuua

SEQ ID NO: 1496698 - RNA, 19 nt, Artificial Sequence
  Description of Artificial Sequence: Synthetic oligonucleotide
  Sense strand starting at position 3692 of SEQ ID NO: 1244543
cuuaauguuugucuccaau

SEQ ID NO: 1496699 - RNA, 19 nt, Artificial Sequence
  Description of Artificial Sequence: Synthetic oligonucleotide
  Antisense strand to SEQ ID NO: 1496698
auuggagacaaacauuaag

SEQ ID NO: 1496700 - RNA, 19 nt, Artificial Sequence
  Description of Artificial Sequence: Synthetic oligonucleotide
  Sense strand starting at position 3698 of SEQ ID NO: 1244543
guuugucuccaaugggaug

SEQ ID NO: 1496701 - RNA, 19 nt, Artificial Sequence
  Description of Artificial Sequence: Synthetic oligonucleotide
  Antisense strand to SEQ ID NO: 1496700
caucccauuggagacaaac

SEQ ID NO: 1496702 - RNA, 19 nt, Artificial Sequence
  Description of Artificial Sequence: Synthetic oligonucleotide
  Sense strand starting at position 3716 of SEQ ID NO: 1244543
ggaguccuggcauaagcaa

SEQ ID NO: 1496703 - RNA, 19 nt, Artificial Sequence
  Description of Artificial Sequence: Synthetic oligonucleotide
  Antisense strand to SEQ ID NO: 1496702
uugcuuaugccaggacucc

SEQ ID NO: 1496704 - RNA, 19 nt, Artificial Sequence
  Description of Artificial Sequence: Synthetic oligonucleotide
  Sense strand starting at position 3820 of SEQ ID NO: 1244543
gggcgagaccaggagugau

SEQ ID NO: 1496705 - RNA, 19 nt, Artificial Sequence
  Description of Artificial Sequence: Synthetic oligonucleotide
  Antisense strand to SEQ ID NO: 1496704
aucacuccuggucucgccc

SEQ ID NO: 1496706 - RNA, 19 nt, Artificial Sequence
  Description of Artificial Sequence: Synthetic oligonucleotide
  Sense strand starting at position 3838 of SEQ ID NO: 1244543
uggcucagccuguaauucu

SEQ ID NO: 1496707 - RNA, 19 nt, Artificial Sequence
  Description of Artificial Sequence: Synthetic oligonucleotide
  Antisense strand to SEQ ID NO: 1496706
agaauuacaggcugagcca

SEQ ID NO: 1496708 - RNA, 19 nt, Artificial Sequence
  Description of Artificial Sequence: Synthetic oligonucleotide
  Sense strand starting at position 3932 of SEQ ID NO: 1244543
cgcugucucuauuuauaca

SEQ ID NO: 1496709 - RNA, 19 nt, Artificial Sequence
  Description of Artificial Sequence: Synthetic oligonucleotide
  Antisense strand to SEQ ID NO: 1496708
uguauaaauagagacagcg

SEQ ID NO: 1496710 - RNA, 19 nt, Artificial Sequence
  Description of Artificial Sequence: Synthetic oligonucleotide
  Sense strand starting at position 3978 of SEQ ID NO: 1244543
ggugaaaguuaacugugau

SEQ ID NO: 1496711 - RNA, 19 nt, Artificial Sequence
  Description of Artificial Sequence: Synthetic oligonucleotide
  Antisense strand to SEQ ID NO: 1496710
aucacaguuaacuuucacc

SEQ ID NO: 1496712 - RNA, 19 nt, Artificial Sequence
  Description of Artificial Sequence: Synthetic oligonucleotide
  Sense strand starting at position 3979 of SEQ ID NO: 1244543
gugaaaguuaacugugauu

SEQ ID NO: 1496713 - RNA, 19 nt, Artificial Sequence
  Description of Artificial Sequence: Synthetic oligonucleotide
  Antisense strand to SEQ ID NO: 1496712
aaucacaguuaacuuucac

SEQ ID NO: 1496714 - RNA, 19 nt, Artificial Sequence
  Description of Artificial Sequence: Synthetic oligonucleotide
  Sense strand starting at position 3981 of SEQ ID NO: 1244543
gaaaguuaacugugauuau

SEQ ID NO: 1496715 - RNA, 19 nt, Artificial Sequence
  Description of Artificial Sequence: Synthetic oligonucleotide
  Antisense strand to SEQ ID NO: 1496714
auaaucacaguuaacuuuc

SEQ ID NO: 1496716 - RNA, 19 nt, Artificial Sequence
  Description of Artificial Sequence: Synthetic oligonucleotide
  Sense strand starting at position 24 of SEQ ID NO: 1244544
ccucccgagugacuuaaua

SEQ ID NO: 1496717 - RNA, 19 nt, Artificial Sequence
  Description of Artificial Sequence: Synthetic oligonucleotide
  Antisense strand to SEQ ID NO: 1496716
uauuaagucacucgggagg

SEQ ID NO: 1496718 - RNA, 19 nt, Artificial Sequence
  Description of Artificial Sequence: Synthetic oligonucleotide
  Sense strand starting at position 32 of SEQ ID NO: 1244544
gugacuuaauagguaggaa

SEQ ID NO: 1496719 - RNA, 19 nt, Artificial Sequence
  Description of Artificial Sequence: Synthetic oligonucleotide
  Antisense strand to SEQ ID NO: 1496718
uuccuaccuauuaagucac

SEQ ID NO: 1496720 - RNA, 19 nt, Artificial Sequence
  Description of Artificial Sequence: Synthetic oligonucleotide
  Sense strand starting at position 72 of SEQ ID NO: 1244544
acaggucccgagcaugaaa

SEQ ID NO: 1496721 - RNA, 19 nt, Artificial Sequence
  Description of Artificial Sequence: Synthetic oligonucleotide
  Antisense strand to SEQ ID NO: 1496720
uuucaugcucgggaccugu

SEQ ID NO: 1496722 - RNA, 19 nt, Artificial Sequence
  Description of Artificial Sequence: Synthetic oligonucleotide
  Sense strand starting at position 209 of SEQ ID NO: 1244544
gucuuuccauuaguaagag

SEQ ID NO: 1496723 - RNA, 19 nt, Artificial Sequence
  Description of Artificial Sequence: Synthetic oligonucleotide
  Antisense strand to SEQ ID NO: 1496722
cucuuacuaauggaaagac

SEQ ID NO: 1496724 - RNA, 19 nt, Artificial Sequence
  Description of Artificial Sequence: Synthetic oligonucleotide
  Sense strand starting at position 329 of SEQ ID NO: 1244544
uggucauuguagcugauuu

SEQ ID NO: 1496725 - RNA, 19 nt, Artificial Sequence
  Description of Artificial Sequence: Synthetic oligonucleotide
  Antisense strand to SEQ ID NO: 1496724
aaaucagcuacaaugacca

SEQ ID NO: 1496726 - RNA, 19 nt, Artificial Sequence
  Description of Artificial Sequence: Synthetic oligonucleotide
  Sense strand starting at position 330 of SEQ ID NO: 1244544
ggucauuguagcugauuua

SEQ ID NO: 1496727 - RNA, 19 nt, Artificial Sequence
  Description of Artificial Sequence: Synthetic oligonucleotide
  Antisense strand to SEQ ID NO: 1496726
uaaaucagcuacaaugacc

SEQ ID NO: 1496728 - RNA, 19 nt, Artificial Sequence
  Description of Artificial Sequence: Synthetic oligonucleotide
  Sense strand starting at position 342 of SEQ ID NO: 1244544
ugauuuaacuagugauauc

SEQ ID NO: 1496729 - RNA, 19 nt, Artificial Sequence
  Description of Artificial Sequence: Synthetic oligonucleotide
  Antisense strand to SEQ ID NO: 1496728
gauaucacuaguuaaauca

SEQ ID NO: 1496730 - RNA, 19 nt, Artificial Sequence
  Description of Artificial Sequence: Synthetic oligonucleotide
  Sense strand starting at position 410 of SEQ ID NO: 1244544
cgcagaaaugccuccgcuu

SEQ ID NO: 1496731 - RNA, 19 nt, Artificial Sequence
  Description of Artificial Sequence: Synthetic oligonucleotide
  Antisense strand to SEQ ID NO: 1496730
aagcggaggcauuucugcg

SEQ ID NO: 1496732 - RNA, 19 nt, Artificial Sequence
  Description of Artificial Sequence: Synthetic oligonucleotide
  Sense strand starting at position 455 of SEQ ID NO: 1244544
gggccuucugaucaucaga

SEQ ID NO: 1496733 - RNA, 19 nt, Artificial Sequence
  Description of Artificial Sequence: Synthetic oligonucleotide
  Antisense strand to SEQ ID NO: 1496732
ucugaugaucagaaggccc

SEQ ID NO: 1496734 - RNA, 19 nt, Artificial Sequence
  Description of Artificial Sequence: Synthetic oligonucleotide
  Sense strand starting at position 457 of SEQ ID NO: 1244544
gccuucugaucaucagaau

SEQ ID NO: 1496735 - RNA, 19 nt, Artificial Sequence
  Description of Artificial Sequence: Synthetic oligonucleotide
  Antisense strand to SEQ ID NO: 1496734
auucugaugaucagaaggc

SEQ ID NO: 1496736 - RNA, 19 nt, Artificial Sequence
  Description of Artificial Sequence: Synthetic oligonucleotide
  Sense strand starting at position 483 of SEQ ID NO: 1244544
cucagaaucccaggacuca

SEQ ID NO: 1496737 - RNA, 19 nt, Artificial Sequence
  Description of Artificial Sequence: Synthetic oligonucleotide
  Antisense strand to SEQ ID NO: 1496736
ugaguccugggauucugag

SEQ ID NO: 1496738 - RNA, 19 nt, Artificial Sequence
  Description of Artificial Sequence: Synthetic oligonucleotide
  Sense strand starting at position 540 of SEQ ID NO: 1244544
ccaguuuccgcauaucuaa

SEQ ID NO: 1496739 - RNA, 19 nt, Artificial Sequence
  Description of Artificial Sequence: Synthetic oligonucleotide
  Antisense strand to SEQ ID NO: 1496738
uuagauaugcggaaacugg

SEQ ID NO: 1496740 - RNA, 19 nt, Artificial Sequence
  Description of Artificial Sequence: Synthetic oligonucleotide
  Sense strand starting at position 548 of SEQ ID NO: 1244544
cgcauaucuaagggacaca

SEQ ID NO: 1496741 - RNA, 19 nt, Artificial Sequence
  Description of Artificial Sequence: Synthetic oligonucleotide
  Antisense strand to SEQ ID NO: 1496740
ugugucccuuagauaugcg

SEQ ID NO: 1496742 - RNA, 19 nt, Artificial Sequence
  Description of Artificial Sequence: Synthetic oligonucleotide
  Sense strand starting at position 593 of SEQ ID NO: 1244544
agacauggauggucacagu

SEQ ID NO: 1496743 - RNA, 19 nt, Artificial Sequence
  Description of Artificial Sequence: Synthetic oligonucleotide
  Antisense strand to SEQ ID NO: 1496742
acugugaccauccaugucu

SEQ ID NO: 1496744 - RNA, 19 nt, Artificial Sequence
  Description of Artificial Sequence: Synthetic oligonucleotide
  Sense strand starting at position 624 of SEQ ID NO: 1244544
agucuucccuguguggaga

SEQ ID NO: 1496745 - RNA, 19 nt, Artificial Sequence
  Description of Artificial Sequence: Synthetic oligonucleotide
  Antisense strand to SEQ ID NO: 1496744
ucuccacacagggaagacu

SEQ ID NO: 1496746 - RNA, 19 nt, Artificial Sequence
  Description of Artificial Sequence: Synthetic oligonucleotide
  Sense strand starting at position 669 of SEQ ID NO: 1244544
caaagaugucaucggaucu

SEQ ID NO: 1496747 - RNA, 19 nt, Artificial Sequence
  Description of Artificial Sequence: Synthetic oligonucleotide
  Antisense strand to SEQ ID NO: 1496746
agauccgaugacaucuuug

SEQ ID NO: 1496748 - RNA, 19 nt, Artificial Sequence
  Description of Artificial Sequence: Synthetic oligonucleotide
  Sense strand starting at position 815 of SEQ ID NO: 1244544
uccaguguuugguugggau

SEQ ID NO: 1496749 - RNA, 19 nt, Artificial Sequence
  Description of Artificial Sequence: Synthetic oligonucleotide
  Antisense strand to SEQ ID NO: 1496748
aucccaaccaaacacugga

SEQ ID NO: 1496750 - RNA, 19 nt, Artificial Sequence
  Description of Artificial Sequence: Synthetic oligonucleotide
  Sense strand starting at position 817 of SEQ ID NO: 1244544
caguguuugguugggauag

SEQ ID NO: 1496751 - RNA, 19 nt, Artificial Sequence
  Description of Artificial Sequence: Synthetic oligonucleotide
  Antisense strand to SEQ ID NO: 1496750
cuaucccaaccaaacacug

SEQ ID NO: 1496752 - RNA, 19 nt, Artificial Sequence
  Description of Artificial Sequence: Synthetic oligonucleotide
  Sense strand starting at position 936 of SEQ ID NO: 1244544
agaguuaacuuucuggcca

SEQ ID NO: 1496753 - RNA, 19 nt, Artificial Sequence
  Description of Artificial Sequence: Synthetic oligonucleotide
  Antisense strand to SEQ ID NO: 1496752
uggccagaaaguuaacucu

SEQ ID NO: 1496754 - RNA, 19 nt, Artificial Sequence
  Description of Artificial Sequence: Synthetic oligonucleotide
  Sense strand starting at position 1243 of SEQ ID NO: 1244544
gcggcuuugguccagagga

SEQ ID NO: 1496755 - RNA, 19 nt, Artificial Sequence
  Description of Artificial Sequence: Synthetic oligonucleotide
  Antisense strand to SEQ ID NO: 1496754
uccucuggaccaaagccgc

SEQ ID NO: 1496756 - RNA, 19 nt, Artificial Sequence
  Description of Artificial Sequence: Synthetic oligonucleotide
  Sense strand starting at position 1801 of SEQ ID NO: 1244544
gccauagcccggucaguuu

SEQ ID NO: 1496757 - RNA, 19 nt, Artificial Sequence
  Description of Artificial Sequence: Synthetic oligonucleotide
  Antisense strand to SEQ ID NO: 1496756
aaacugaccgggcuauggc

SEQ ID NO: 1496758 - RNA, 19 nt, Artificial Sequence
  Description of Artificial Sequence: Synthetic oligonucleotide
  Sense strand starting at position 2017 of SEQ ID NO: 1244544
gauggauuaggaggcucaa

SEQ ID NO: 1496759 - RNA, 19 nt, Artificial Sequence
  Description of Artificial Sequence: Synthetic oligonucleotide
  Antisense strand to SEQ ID NO: 1496758
uugagccuccuaauccauc

SEQ ID NO: 1496760 - RNA, 19 nt, Artificial Sequence
  Description of Artificial Sequence: Synthetic oligonucleotide
  Sense strand starting at position 2059 of SEQ ID NO: 1244544
cgaccuugugaggacugau

SEQ ID NO: 1496761 - RNA, 19 nt, Artificial Sequence
  Description of Artificial Sequence: Synthetic oligonucleotide
  Antisense strand to SEQ ID NO: 1496760
aucaguccucacaaggucg

SEQ ID NO: 1496762 - RNA, 19 nt, Artificial Sequence
  Description of Artificial Sequence: Synthetic oligonucleotide
  Sense strand starting at position 2062 of SEQ ID NO: 1244544
ccuugugaggacugauuaa

SEQ ID NO: 1496763 - RNA, 19 nt, Artificial Sequence
  Description of Artificial Sequence: Synthetic oligonucleotide
  Antisense strand to SEQ ID NO: 1496762
uuaaucaguccucacaagg

SEQ ID NO: 1496764 - RNA, 19 nt, Artificial Sequence
  Description of Artificial Sequence: Synthetic oligonucleotide
  Sense strand starting at position 2221 of SEQ ID NO: 1244544
guacaaugacugcaguaga

SEQ ID NO: 1496765 - RNA, 19 nt, Artificial Sequence
  Description of Artificial Sequence: Synthetic oligonucleotide
  Antisense strand to SEQ ID NO: 1496764
ucuacugcagucauuguac

SEQ ID NO: 1496766 - RNA, 19 nt, Artificial Sequence
  Description of Artificial Sequence: Synthetic oligonucleotide
  Sense strand starting at position 2236 of SEQ ID NO: 1244544
uagagugacccaggaguua

SEQ ID NO: 1496767 - RNA, 19 nt, Artificial Sequence
  Description of Artificial Sequence: Synthetic oligonucleotide
  Antisense strand to SEQ ID NO: 1496766
uaacuccugggucacucua

SEQ ID NO: 1496768 - RNA, 19 nt, Artificial Sequence
  Description of Artificial Sequence: Synthetic oligonucleotide
  Sense strand starting at position 2325 of SEQ ID NO: 1244544
cugaauuugcagugcacaa

SEQ ID NO: 1496769 - RNA, 19 nt, Artificial Sequence
  Description of Artificial Sequence: Synthetic oligonucleotide
  Antisense strand to SEQ ID NO: 1496768
uugugcacugcaaauucag

SEQ ID NO: 1496770 - RNA, 19 nt, Artificial Sequence
  Description of Artificial Sequence: Synthetic oligonucleotide
  Sense strand starting at position 2410 of SEQ ID NO: 1244544
caguaacugcaaggugaau

SEQ ID NO: 1496771 - RNA, 19 nt, Artificial Sequence
  Description of Artificial Sequence: Synthetic oligonucleotide
  Antisense strand to SEQ ID NO: 1496770
auucaccuugcaguuacug

SEQ ID NO: 1496772 - RNA, 19 nt, Artificial Sequence
  Description of Artificial Sequence: Synthetic oligonucleotide
  Sense strand starting at position 2439 of SEQ ID NO: 1244544
caaugaugucaccguggaa

SEQ ID NO: 1496773 - RNA, 19 nt, Artificial Sequence
  Description of Artificial Sequence: Synthetic oligonucleotide
  Antisense strand to SEQ ID NO: 1496772
uuccacggugacaucauug

SEQ ID NO: 1496774 - RNA, 19 nt, Artificial Sequence
  Description of Artificial Sequence: Synthetic oligonucleotide
  Sense strand starting at position 2443 of SEQ ID NO: 1244544
gaugucaccguggaagcau

SEQ ID NO: 1496775 - RNA, 19 nt, Artificial Sequence
  Description of Artificial Sequence: Synthetic oligonucleotide
  Antisense strand to SEQ ID NO: 1496774
augcuuccacggugacauc

SEQ ID NO: 1496776 - RNA, 19 nt, Artificial Sequence
  Description of Artificial Sequence: Synthetic oligonucleotide
  Sense strand starting at position 2482 of SEQ ID NO: 1244544
ggaggaauauuggauaaug

SEQ ID NO: 1496777 - RNA, 19 nt, Artificial Sequence
  Description of Artificial Sequence: Synthetic oligonucleotide
  Antisense strand to SEQ ID NO: 1496776
cauuauccaauauuccucc

SEQ ID NO: 1496778 - RNA, 19 nt, Artificial Sequence
  Description of Artificial Sequence: Synthetic oligonucleotide
  Sense strand starting at position 2659 of SEQ ID NO: 1244544
gcuagacuacuguacagau

SEQ ID NO: 1496779 - RNA, 19 nt, Artificial Sequence
  Description of Artificial Sequence: Synthetic oligonucleotide
  Antisense strand to SEQ ID NO: 1496778
aucuguacaguagucuagc

SEQ ID NO: 1496780 - RNA, 19 nt, Artificial Sequence
  Description of Artificial Sequence: Synthetic oligonucleotide
  Sense strand starting at position 2699 of SEQ ID NO: 1244544
auauuacauuugcaaagga

SEQ ID NO: 1496781 - RNA, 19 nt, Artificial Sequence
  Description of Artificial Sequence: Synthetic oligonucleotide
  Antisense strand to SEQ ID NO: 1496780
uccuuugcaaauguaauau

SEQ ID NO: 1496782 - RNA, 19 nt, Artificial Sequence
  Description of Artificial Sequence: Synthetic oligonucleotide
  Sense strand starting at position 2709 of SEQ ID NO: 1244544
ugcaaaggaugagaugaaa

SEQ ID NO: 1496783 - RNA, 19 nt, Artificial Sequence
  Description of Artificial Sequence: Synthetic oligonucleotide
  Antisense strand to SEQ ID NO: 1496782
uuucaucucauccuuugca

SEQ ID NO: 1496784 - RNA, 19 nt, Artificial Sequence
  Description of Artificial Sequence: Synthetic oligonucleotide
  Sense strand starting at position 2861 of SEQ ID NO: 1244544
gagacaugggucugggagu

SEQ ID NO: 1496785 - RNA, 19 nt, Artificial Sequence
  Description of Artificial Sequence: Synthetic oligonucleotide
  Antisense strand to SEQ ID NO: 1496784
acucccagacccaugucuc

SEQ ID NO: 1496786 - RNA, 19 nt, Artificial Sequence
  Description of Artificial Sequence: Synthetic oligonucleotide
  Sense strand starting at position 2872 of SEQ ID NO: 1244544
cugggaguggugugagaac

SEQ ID NO: 1496787 - RNA, 19 nt, Artificial Sequence
  Description of Artificial Sequence: Synthetic oligonucleotide
  Antisense strand to SEQ ID NO: 1496786
guucucacaccacucccag

SEQ ID NO: 1496788 - RNA, 19 nt, Artificial Sequence
  Description of Artificial Sequence: Synthetic oligonucleotide
  Sense strand starting at position 3133 of SEQ ID NO: 1244544
agagccaacccuuagcaau

SEQ ID NO: 1496789 - RNA, 19 nt, Artificial Sequence
  Description of Artificial Sequence: Synthetic oligonucleotide
  Antisense strand to SEQ ID NO: 1496788
auugcuaaggguuggcucu

SEQ ID NO: 1496790 - RNA, 19 nt, Artificial Sequence
  Description of Artificial Sequence: Synthetic oligonucleotide
  Sense strand starting at position 3170 of SEQ ID NO: 1244544
caagucuugagcgaggaca

SEQ ID NO: 1496791 - RNA, 19 nt, Artificial Sequence
  Description of Artificial Sequence: Synthetic oligonucleotide
  Antisense strand to SEQ ID NO: 1496790
uguccucgcucaagacuug

SEQ ID NO: 1496792 - RNA, 19 nt, Artificial Sequence
  Description of Artificial Sequence: Synthetic oligonucleotide
  Sense strand starting at position 3898 of SEQ ID NO: 1244544
aguguuggacuuugaguca

SEQ ID NO: 1496793 - RNA, 19 nt, Artificial Sequence
  Description of Artificial Sequence: Synthetic oligonucleotide
  Antisense strand to SEQ ID NO: 1496792
ugacucaaaguccaacacu

SEQ ID NO: 1496794 - RNA, 19 nt, Artificial Sequence
  Description of Artificial Sequence: Synthetic oligonucleotide
  Sense strand starting at position 3901 of SEQ ID NO: 1244544
guuggacuuugagucaguu

SEQ ID NO: 1496795 - RNA, 19 nt, Artificial Sequence
  Description of Artificial Sequence: Synthetic oligonucleotide
  Antisense strand to SEQ ID NO: 1496794
aacugacucaaaguccaac

SEQ ID NO: 1496796 - RNA, 19 nt, Artificial Sequence
  Description of Artificial Sequence: Synthetic oligonucleotide
  Sense strand starting at position 148 of SEQ ID NO: 1244545
gcuacacuguuacucauuu

SEQ ID NO: 1496797 - RNA, 19 nt, Artificial Sequence
  Description of Artificial Sequence: Synthetic oligonucleotide
  Antisense strand to SEQ ID NO: 1496796
aaaugaguaacaguguagc

SEQ ID NO: 1496798 - RNA, 19 nt, Artificial Sequence
  Description of Artificial Sequence: Synthetic oligonucleotide
  Sense strand starting at position 395 of SEQ ID NO: 1244545
aguagaauugucugcauuu

SEQ ID NO: 1496799 - RNA, 19 nt, Artificial Sequence
  Description of Artificial Sequence: Synthetic oligonucleotide
  Antisense strand to SEQ ID NO: 1496798
aaaugcagacaauucuacu

SEQ ID NO: 1496800 - RNA, 19 nt, Artificial Sequence
  Description of Artificial Sequence: Synthetic oligonucleotide
  Sense strand starting at position 396 of SEQ ID NO: 1244545
guagaauugucugcauuuc

SEQ ID NO: 1496801 - RNA, 19 nt, Artificial Sequence
  Description of Artificial Sequence: Synthetic oligonucleotide
  Antisense strand to SEQ ID NO: 1496800
gaaaugcagacaauucuac

SEQ ID NO: 1496802 - RNA, 19 nt, Artificial Sequence
  Description of Artificial Sequence: Synthetic oligonucleotide
  Sense strand starting at position 550 of SEQ ID NO: 1244545
gggccuaaggagugaaacu

SEQ ID NO: 1496803 - RNA, 19 nt, Artificial Sequence
  Description of Artificial Sequence: Synthetic oligonucleotide
  Antisense strand to SEQ ID NO: 1496802
aguuucacuccuuaggccc

SEQ ID NO: 1496804 - RNA, 19 nt, Artificial Sequence
  Description of Artificial Sequence: Synthetic oligonucleotide
  Sense strand starting at position 609 of SEQ ID NO: 1244545
aaagauagccaccgguaau

SEQ ID NO: 1496805 - RNA, 19 nt, Artificial Sequence
  Description of Artificial Sequence: Synthetic oligonucleotide
  Antisense strand to SEQ ID NO: 1496804
auuaccgguggcuaucuuu

SEQ ID NO: 1496806 - RNA, 19 nt, Artificial Sequence
  Description of Artificial Sequence: Synthetic oligonucleotide
  Sense strand starting at position 620 of SEQ ID NO: 1244545
ccgguaauaggacaguaua

SEQ ID NO: 1496807 - RNA, 19 nt, Artificial Sequence
  Description of Artificial Sequence: Synthetic oligonucleotide
  Antisense strand to SEQ ID NO: 1496806
uauacuguccuauuaccgg

SEQ ID NO: 1496808 - RNA, 19 nt, Artificial Sequence
  Description of Artificial Sequence: Synthetic oligonucleotide
  Sense strand starting at position 732 of SEQ ID NO: 1244545
auucucuauguguacuuau

SEQ ID NO: 1496809 - RNA, 19 nt, Artificial Sequence
  Description of Artificial Sequence: Synthetic oligonucleotide
  Antisense strand to SEQ ID NO: 1496808
auaaguacacauagagaau

SEQ ID NO: 1496810 - RNA, 19 nt, Artificial Sequence
  Description of Artificial Sequence: Synthetic oligonucleotide
  Sense strand starting at position 882 of SEQ ID NO: 1244545
auuguuucgaaaggauuac

SEQ ID NO: 1496811 - RNA, 19 nt, Artificial Sequence
  Description of Artificial Sequence: Synthetic oligonucleotide
  Antisense strand to SEQ ID NO: 1496810
guaauccuuucgaaacaau

SEQ ID NO: 1496812 - RNA, 19 nt, Artificial Sequence
  Description of Artificial Sequence: Synthetic oligonucleotide
  Sense strand starting at position 883 of SEQ ID NO: 1244545
uuguuucgaaaggauuaca

SEQ ID NO: 1496813 - RNA, 19 nt, Artificial Sequence
  Description of Artificial Sequence: Synthetic oligonucleotide
  Antisense strand to SEQ ID NO: 1496812
uguaauccuuucgaaacaa

SEQ ID NO: 1496814 - RNA, 19 nt, Artificial Sequence
  Description of Artificial Sequence: Synthetic oligonucleotide
  Sense strand starting at position 926 of SEQ ID NO: 1244545
uugagaaacuguuccugau

SEQ ID NO: 1496815 - RNA, 19 nt, Artificial Sequence
  Description of Artificial Sequence: Synthetic oligonucleotide
  Antisense strand to SEQ ID NO: 1496814
aucaggaacaguuucucaa

SEQ ID NO: 1496816 - RNA, 19 nt, Artificial Sequence
  Description of Artificial Sequence: Synthetic oligonucleotide
  Sense strand starting at position 928 of SEQ ID NO: 1244545
gagaaacuguuccugauuc

SEQ ID NO: 1496817 - RNA, 19 nt, Artificial Sequence
  Description of Artificial Sequence: Synthetic oligonucleotide
  Antisense strand to SEQ ID NO: 1496816
gaaucaggaacaguuucuc

SEQ ID NO: 1496818 - RNA, 19 nt, Artificial Sequence
  Description of Artificial Sequence: Synthetic oligonucleotide
  Sense strand starting at position 986 of SEQ ID NO: 1244545
uagggucaucuugaguaag

SEQ ID NO: 1496819 - RNA, 19 nt, Artificial Sequence
  Description of Artificial Sequence: Synthetic oligonucleotide
  Antisense strand to SEQ ID NO: 1496818
cuuacucaagaugacccua

SEQ ID NO: 1496820 - RNA, 19 nt, Artificial Sequence
  Description of Artificial Sequence: Synthetic oligonucleotide
  Sense strand starting at position 1032 of SEQ ID NO: 1244545
gacggaucucuugggaauc

SEQ ID NO: 1496821 - RNA, 19 nt, Artificial Sequence
  Description of Artificial Sequence: Synthetic oligonucleotide
  Antisense strand to SEQ ID NO: 1496820
gauucccaagagauccguc

SEQ ID NO: 1496822 - RNA, 19 nt, Artificial Sequence
  Description of Artificial Sequence: Synthetic oligonucleotide
  Sense strand starting at position 1084 of SEQ ID NO: 1244545
cugagcugaagagguuaau

SEQ ID NO: 1496823 - RNA, 19 nt, Artificial Sequence
  Description of Artificial Sequence: Synthetic oligonucleotide
  Antisense strand to SEQ ID NO: 1496822
auuaaccucuucagcucag

SEQ ID NO: 1496824 - RNA, 19 nt, Artificial Sequence
  Description of Artificial Sequence: Synthetic oligonucleotide
  Sense strand starting at position 1303 of SEQ ID NO: 1244545
cgacuaagaccgucguguu

SEQ ID NO: 1496825 - RNA, 19 nt, Artificial Sequence
  Description of Artificial Sequence: Synthetic oligonucleotide
  Antisense strand to SEQ ID NO: 1496824
aacacgacggucuuagucg

SEQ ID NO: 1496826 - RNA, 19 nt, Artificial Sequence
  Description of Artificial Sequence: Synthetic oligonucleotide
  Sense strand starting at position 1326 of SEQ ID NO: 1244545
gaaagaucacuccgcuaug

SEQ ID NO: 1496827 - RNA, 19 nt, Artificial Sequence
  Description of Artificial Sequence: Synthetic oligonucleotide
  Antisense strand to SEQ ID NO: 1496826
cauagcggagugaucuuuc

SEQ ID NO: 1496828 - RNA, 19 nt, Artificial Sequence
  Description of Artificial Sequence: Synthetic oligonucleotide
  Sense strand starting at position 1329 of SEQ ID NO: 1244545
agaucacuccgcuaugaag

SEQ ID NO: 1496829 - RNA, 19 nt, Artificial Sequence
  Description of Artificial Sequence: Synthetic oligonucleotide
  Antisense strand to SEQ ID NO: 1496828
cuucauagcggagugaucu

SEQ ID NO: 1496830 - RNA, 19 nt, Artificial Sequence
  Description of Artificial Sequence: Synthetic oligonucleotide
  Sense strand starting at position 2656 of SEQ ID NO: 1244545
agucauccgguccaggaaa

SEQ ID NO: 1496831 - RNA, 19 nt, Artificial Sequence
  Description of Artificial Sequence: Synthetic oligonucleotide
  Antisense strand to SEQ ID NO: 1496830
uuuccuggaccggaugacu

SEQ ID NO: 1496832 - RNA, 19 nt, Artificial Sequence
  Description of Artificial Sequence: Synthetic oligonucleotide
  Sense strand starting at position 2775 of SEQ ID NO: 1244545
ggacuuugucaggguccaa

SEQ ID NO: 1496833 - RNA, 19 nt, Artificial Sequence
  Description of Artificial Sequence: Synthetic oligonucleotide
  Antisense strand to SEQ ID NO: 1496832
uuggacccugacaaagucc

SEQ ID NO: 1496834 - RNA, 19 nt, Artificial Sequence
  Description of Artificial Sequence: Synthetic oligonucleotide
  Sense strand starting at position 2989 of SEQ ID NO: 1244545
ccaucagaguaucugucua

SEQ ID NO: 1496835 - RNA, 19 nt, Artificial Sequence
  Description of Artificial Sequence: Synthetic oligonucleotide
  Antisense strand to SEQ ID NO: 1496834
uagacagauacucugaugg

SEQ ID NO: 1496836 - RNA, 19 nt, Artificial Sequence
  Description of Artificial Sequence: Synthetic oligonucleotide
  Sense strand starting at position 2991 of SEQ ID NO: 1244545
aucagaguaucugucuaag

SEQ ID NO: 1496837 - RNA, 19 nt, Artificial Sequence
  Description of Artificial Sequence: Synthetic oligonucleotide
  Antisense strand to SEQ ID NO: 1496836
cuuagacagauacucugau

SEQ ID NO: 1496838 - RNA, 19 nt, Artificial Sequence
  Description of Artificial Sequence: Synthetic oligonucleotide
  Sense strand starting at position 2993 of SEQ ID NO: 1244545
cagaguaucugucuaagga

SEQ ID NO: 1496839 - RNA, 19 nt, Artificial Sequence
  Description of Artificial Sequence: Synthetic oligonucleotide
  Antisense strand to SEQ ID NO: 1496838
uccuuagacagauacucug

SEQ ID NO: 1496840 - RNA, 19 nt, Artificial Sequence
  Description of Artificial Sequence: Synthetic oligonucleotide
  Sense strand starting at position 3043 of SEQ ID NO: 1244545
acaucaagucuguaacuca

SEQ ID NO: 1496841 - RNA, 19 nt, Artificial Sequence
  Description of Artificial Sequence: Synthetic oligonucleotide
  Antisense strand to SEQ ID NO: 1496840
ugaguuacagacuugaugu

SEQ ID NO: 1496842 - RNA, 19 nt, Artificial Sequence
  Description of Artificial Sequence: Synthetic oligonucleotide
  Sense strand starting at position 3079 of SEQ ID NO: 1244545
aggaaacauguccaagugu

SEQ ID NO: 1496843 - RNA, 19 nt, Artificial Sequence
  Description of Artificial Sequence: Synthetic oligonucleotide
  Antisense strand to SEQ ID NO: 1496842
acacuuggacauguuuccu

SEQ ID NO: 1496844 - RNA, 19 nt, Artificial Sequence
  Description of Artificial Sequence: Synthetic oligonucleotide
  Sense strand starting at position 3290 of SEQ ID NO: 1244545
aaaguagcucaauaguguu

SEQ ID NO: 1496845 - RNA, 19 nt, Artificial Sequence
  Description of Artificial Sequence: Synthetic oligonucleotide
  Antisense strand to SEQ ID NO: 1496844
aacacuauugagcuacuuu

SEQ ID NO: 1496846 - RNA, 19 nt, Artificial Sequence
  Description of Artificial Sequence: Synthetic oligonucleotide
  Sense strand starting at position 3305 of SEQ ID NO: 1244545
uguuuauauugauuccaga

SEQ ID NO: 1496847 - RNA, 19 nt, Artificial Sequence
  Description of Artificial Sequence: Synthetic oligonucleotide
  Antisense strand to SEQ ID NO: 1496846
ucuggaaucaauauaaaca

SEQ ID NO: 1496848 - RNA, 19 nt, Artificial Sequence
  Description of Artificial Sequence: Synthetic oligonucleotide
  Sense strand starting at position 3505 of SEQ ID NO: 1244545
gguacuguccaucagauga

SEQ ID NO: 1496849 - RNA, 19 nt, Artificial Sequence
  Description of Artificial Sequence: Synthetic oligonucleotide
  Antisense strand to SEQ ID NO: 1496848
ucaucugauggacaguacc

SEQ ID NO: 1496850 - RNA, 19 nt, Artificial Sequence
  Description of Artificial Sequence: Synthetic oligonucleotide
  Sense strand starting at position 3556 of SEQ ID NO: 1244545
uagggauacauaggcgaua

SEQ ID NO: 1496851 - RNA, 19 nt, Artificial Sequence
  Description of Artificial Sequence: Synthetic oligonucleotide
  Antisense strand to SEQ ID NO: 1496850
uaucgccuauguaucccua

SEQ ID NO: 1496852 - RNA, 19 nt, Artificial Sequence
  Description of Artificial Sequence: Synthetic oligonucleotide
  Sense strand starting at position 3557 of SEQ ID NO: 1244545
agggauacauaggcgauau

SEQ ID NO: 1496853 - RNA, 19 nt, Artificial Sequence
  Description of Artificial Sequence: Synthetic oligonucleotide
  Antisense strand to SEQ ID NO: 1496852
auaucgccuauguaucccu

SEQ ID NO: 1496854 - RNA, 19 nt, Artificial Sequence
  Description of Artificial Sequence: Synthetic oligonucleotide
  Sense strand starting at position 3558 of SEQ ID NO: 1244545
gggauacauaggcgauauc

SEQ ID NO: 1496855 - RNA, 19 nt, Artificial Sequence
  Description of Artificial Sequence: Synthetic oligonucleotide
  Antisense strand to SEQ ID NO: 1496854
gauaucgccuauguauccc

SEQ ID NO: 1496856 - RNA, 19 nt, Artificial Sequence
  Description of Artificial Sequence: Synthetic oligonucleotide
  Sense strand starting at position 3694 of SEQ ID NO: 1244545
gccucagucagauaggauu

SEQ ID NO: 1496857 - RNA, 19 nt, Artificial Sequence
  Description of Artificial Sequence: Synthetic oligonucleotide
  Antisense strand to SEQ ID NO: 1496856
aauccuaucugacugaggc

SEQ ID NO: 1496858 - RNA, 19 nt, Artificial Sequence
  Description of Artificial Sequence: Synthetic oligonucleotide
  Sense strand starting at position 3771 of SEQ ID NO: 1244545
gagggaauuugauagcauu

SEQ ID NO: 1496859 - RNA, 19 nt, Artificial Sequence
  Description of Artificial Sequence: Synthetic oligonucleotide
  Antisense strand to SEQ ID NO: 1496858
aaugcuaucaaauucccuc

SEQ ID NO: 1496860 - RNA, 19 nt, Artificial Sequence
  Description of Artificial Sequence: Synthetic oligonucleotide
  Sense strand starting at position 3774 of SEQ ID NO: 1244545
ggaauuugauagcauugag

SEQ ID NO: 1496861 - RNA, 19 nt, Artificial Sequence
  Description of Artificial Sequence: Synthetic oligonucleotide
  Antisense strand to SEQ ID NO: 1496860
cucaaugcuaucaaauucc

SEQ ID NO: 1496862 - RNA, 19 nt, Artificial Sequence
  Description of Artificial Sequence: Synthetic oligonucleotide
  Sense strand starting at position 3800 of SEQ ID NO: 1244545
ggucauguuaugggaagaa

SEQ ID NO: 1496863 - RNA, 19 nt, Artificial Sequence
  Description of Artificial Sequence: Synthetic oligonucleotide
  Antisense strand to SEQ ID NO: 1496862
uucuucccauaacaugacc

SEQ ID NO: 1496864 - RNA, 19 nt, Artificial Sequence
  Description of Artificial Sequence: Synthetic oligonucleotide
  Sense strand starting at position 3831 of SEQ ID NO: 1244545
agguaaaucugaguuuggu

SEQ ID NO: 1496865 - RNA, 19 nt, Artificial Sequence
  Description of Artificial Sequence: Synthetic oligonucleotide
  Antisense strand to SEQ ID NO: 1496864
accaaacucagauuuaccu

SEQ ID NO: 1496866 - RNA, 19 nt, Artificial Sequence
  Description of Artificial Sequence: Synthetic oligonucleotide
  Sense strand starting at position 3866 of SEQ ID NO: 1244545
uccgguaauugacuuaauc

SEQ ID NO: 1496867 - RNA, 19 nt, Artificial Sequence
  Description of Artificial Sequence: Synthetic oligonucleotide
  Antisense strand to SEQ ID NO: 1496866
gauuaagucaauuaccgga

SEQ ID NO: 1496868 - RNA, 19 nt, Artificial Sequence
  Description of Artificial Sequence: Synthetic oligonucleotide
  Sense strand starting at position 3875 of SEQ ID NO: 1244545
ugacuuaaucuccaugggu

SEQ ID NO: 1496869 - RNA, 19 nt, Artificial Sequence
  Description of Artificial Sequence: Synthetic oligonucleotide
  Antisense strand to SEQ ID NO: 1496868
acccauggagauuaaguca

SEQ ID NO: 1496870 - RNA, 19 nt, Artificial Sequence
  Description of Artificial Sequence: Synthetic oligonucleotide
  Sense strand starting at position 3919 of SEQ ID NO: 1244545
ugaacaggacuuuguugaa

SEQ ID NO: 1496871 - RNA, 19 nt, Artificial Sequence
  Description of Artificial Sequence: Synthetic oligonucleotide
  Antisense strand to SEQ ID NO: 1496870
uucaacaaaguccuguuca

SEQ ID NO: 1496872 - RNA, 19 nt, Artificial Sequence
  Description of Artificial Sequence: Synthetic oligonucleotide
  Sense strand starting at position 3923 of SEQ ID NO: 1244545
caggacuuuguugaaguua

SEQ ID NO: 1496873 - RNA, 19 nt, Artificial Sequence
  Description of Artificial Sequence: Synthetic oligonucleotide
  Antisense strand to SEQ ID NO: 1496872
uaacuucaacaaaguccug

SEQ ID NO: 1496874 - RNA, 19 nt, Artificial Sequence
  Description of Artificial Sequence: Synthetic oligonucleotide
  Sense strand starting at position 3931 of SEQ ID NO: 1244545
uguugaaguuaacuacuaa

SEQ ID NO: 1496875 - RNA, 19 nt, Artificial Sequence
  Description of Artificial Sequence: Synthetic oligonucleotide
  Antisense strand to SEQ ID NO: 1496874
uuaguaguuaacuucaaca

SEQ ID NO: 1496876 - RNA, 19 nt, Artificial Sequence
  Description of Artificial Sequence: Synthetic oligonucleotide
  Sense strand starting at position 127 of SEQ ID NO: 1244546
uacuuaaagguccagguau

SEQ ID NO: 1496877 - RNA, 19 nt, Artificial Sequence
  Description of Artificial Sequence: Synthetic oligonucleotide
  Antisense strand to SEQ ID NO: 1496876
auaccuggaccuuuaagua

SEQ ID NO: 1496878 - RNA, 19 nt, Artificial Sequence
  Description of Artificial Sequence: Synthetic oligonucleotide
  Sense strand starting at position 129 of SEQ ID NO: 1244546
cuuaaagguccagguaucu

SEQ ID NO: 1496879 - RNA, 19 nt, Artificial Sequence
  Description of Artificial Sequence: Synthetic oligonucleotide
  Antisense strand to SEQ ID NO: 1496878
agauaccuggaccuuuaag

SEQ ID NO: 1496880 - RNA, 19 nt, Artificial Sequence
  Description of Artificial Sequence: Synthetic oligonucleotide
  Sense strand starting at position 134 of SEQ ID NO: 1244546
agguccagguaucuauauu

SEQ ID NO: 1496881 - RNA, 19 nt, Artificial Sequence
  Description of Artificial Sequence: Synthetic oligonucleotide
  Antisense strand to SEQ ID NO: 1496880
aauauagauaccuggaccu

SEQ ID NO: 1496882 - RNA, 19 nt, Artificial Sequence
  Description of Artificial Sequence: Synthetic oligonucleotide
  Sense strand starting at position 209 of SEQ ID NO: 1244546
cauguugaacugugacuuu

SEQ ID NO: 1496883 - RNA, 19 nt, Artificial Sequence
  Description of Artificial Sequence: Synthetic oligonucleotide
  Antisense strand to SEQ ID NO: 1496882
aaagucacaguucaacaug

SEQ ID NO: 1496884 - RNA, 19 nt, Artificial Sequence
  Description of Artificial Sequence: Synthetic oligonucleotide
  Sense strand starting at position 212 of SEQ ID NO: 1244546
guugaacugugacuuuaau

SEQ ID NO: 1496885 - RNA, 19 nt, Artificial Sequence
  Description of Artificial Sequence: Synthetic oligonucleotide
  Antisense strand to SEQ ID NO: 1496884
auuaaagucacaguucaac

SEQ ID NO: 1496886 - RNA, 19 nt, Artificial Sequence
  Description of Artificial Sequence: Synthetic oligonucleotide
  Sense strand starting at position 319 of SEQ ID NO: 1244546
cuuuguuagucuuuaaaca

SEQ ID NO: 1496887 - RNA, 19 nt, Artificial Sequence
  Description of Artificial Sequence: Synthetic oligonucleotide
  Antisense strand to SEQ ID NO: 1496886
uguuuaaagacuaacaaag

SEQ ID NO: 1496888 - RNA, 19 nt, Artificial Sequence
  Description of Artificial Sequence: Synthetic oligonucleotide
  Sense strand starting at position 320 of SEQ ID NO: 1244546
uuuguuagucuuuaaacag

SEQ ID NO: 1496889 - RNA, 19 nt, Artificial Sequence
  Description of Artificial Sequence: Synthetic oligonucleotide
  Antisense strand to SEQ ID NO: 1496888
cuguuuaaagacuaacaaa

SEQ ID NO: 1496890 - RNA, 19 nt, Artificial Sequence
  Description of Artificial Sequence: Synthetic oligonucleotide
  Sense strand starting at position 444 of SEQ ID NO: 1244546
uucuauugauguccaaaga

SEQ ID NO: 1496891 - RNA, 19 nt, Artificial Sequence
  Description of Artificial Sequence: Synthetic oligonucleotide
  Antisense strand to SEQ ID NO: 1496890
ucuuuggacaucaauagaa

SEQ ID NO: 1496892 - RNA, 19 nt, Artificial Sequence
  Description of Artificial Sequence: Synthetic oligonucleotide
  Sense strand starting at position 540 of SEQ ID NO: 1244546
augaccuggcucuacaaua

SEQ ID NO: 1496893 - RNA, 19 nt, Artificial Sequence
  Description of Artificial Sequence: Synthetic oligonucleotide
  Antisense strand to SEQ ID NO: 1496892
uauuguagagccaggucau

SEQ ID NO: 1496894 - RNA, 19 nt, Artificial Sequence
  Description of Artificial Sequence: Synthetic oligonucleotide
  Sense strand starting at position 559 of SEQ ID NO: 1244546
cuuccaugauuuggaaauu

SEQ ID NO: 1496895 - RNA, 19 nt, Artificial Sequence
  Description of Artificial Sequence: Synthetic oligonucleotide
  Antisense strand to SEQ ID NO: 1496894
aauuuccaaaucauggaag

SEQ ID NO: 1496896 - RNA, 19 nt, Artificial Sequence
  Description of Artificial Sequence: Synthetic oligonucleotide
  Sense strand starting at position 729 of SEQ ID NO: 1244546
auaccugaucaaugagcua

SEQ ID NO: 1496897 - RNA, 19 nt, Artificial Sequence
  Description of Artificial Sequence: Synthetic oligonucleotide
  Antisense strand to SEQ ID NO: 1496896
uagcucauugaucagguau

SEQ ID NO: 1496898 - RNA, 19 nt, Artificial Sequence
  Description of Artificial Sequence: Synthetic oligonucleotide
  Sense strand starting at position 1072 of SEQ ID NO: 1244546
ucguuucuugagggagaug

SEQ ID NO: 1496899 - RNA, 19 nt, Artificial Sequence
  Description of Artificial Sequence: Synthetic oligonucleotide
  Antisense strand to SEQ ID NO: 1496898
caucucccucaagaaacga

SEQ ID NO: 1496900 - RNA, 19 nt, Artificial Sequence
  Description of Artificial Sequence: Synthetic oligonucleotide
  Sense strand starting at position 1073 of SEQ ID NO: 1244546
cguuucuugagggagauga

SEQ ID NO: 1496901 - RNA, 19 nt, Artificial Sequence
  Description of Artificial Sequence: Synthetic oligonucleotide
  Antisense strand to SEQ ID NO: 1496900
ucaucucccucaagaaacg

SEQ ID NO: 1496902 - RNA, 19 nt, Artificial Sequence
  Description of Artificial Sequence: Synthetic oligonucleotide
  Sense strand starting at position 1156 of SEQ ID NO: 1244546
augccauauacguagguca

SEQ ID NO: 1496903 - RNA, 19 nt, Artificial Sequence
  Description of Artificial Sequence: Synthetic oligonucleotide
  Antisense strand to SEQ ID NO: 1496902
ugaccuacguauauggcau

SEQ ID NO: 1496904 - RNA, 19 nt, Artificial Sequence
  Description of Artificial Sequence: Synthetic oligonucleotide
  Sense strand starting at position 1240 of SEQ ID NO: 1244546
gcaacaaguccugaccaau

SEQ ID NO: 1496905 - RNA, 19 nt, Artificial Sequence
  Description of Artificial Sequence: Synthetic oligonucleotide
  Antisense strand to SEQ ID NO: 1496904
auuggucaggacuuguugc

SEQ ID NO: 1496906 - RNA, 19 nt, Artificial Sequence
  Description of Artificial Sequence: Synthetic oligonucleotide
  Sense strand starting at position 1498 of SEQ ID NO: 1244546
auagaacugcuauacuagu

SEQ ID NO: 1496907 - RNA, 19 nt, Artificial Sequence
  Description of Artificial Sequence: Synthetic oligonucleotide
  Antisense strand to SEQ ID NO: 1496906
acuaguauagcaguucuau

SEQ ID NO: 1496908 - RNA, 19 nt, Artificial Sequence
  Description of Artificial Sequence: Synthetic oligonucleotide
  Sense strand starting at position 1993 of SEQ ID NO: 1244546
caugguucucugcgagaaa

SEQ ID NO: 1496909 - RNA, 19 nt, Artificial Sequence
  Description of Artificial Sequence: Synthetic oligonucleotide
  Antisense strand to SEQ ID NO: 1496908
uuucucgcagagaaccaug

SEQ ID NO: 1496910 - RNA, 19 nt, Artificial Sequence
  Description of Artificial Sequence: Synthetic oligonucleotide
  Sense strand starting at position 2160 of SEQ ID NO: 1244546
uguacagaauuagcauuau

SEQ ID NO: 1496911 - RNA, 19 nt, Artificial Sequence
  Description of Artificial Sequence: Synthetic oligonucleotide
  Antisense strand to SEQ ID NO: 1496910
auaaugcuaauucuguaca

SEQ ID NO: 1496912 - RNA, 19 nt, Artificial Sequence
  Description of Artificial Sequence: Synthetic oligonucleotide
  Sense strand starting at position 2268 of SEQ ID NO: 1244546
ccacuaaccucugcagaga

SEQ ID NO: 1496913 - RNA, 19 nt, Artificial Sequence
  Description of Artificial Sequence: Synthetic oligonucleotide
  Antisense strand to SEQ ID NO: 1496912
ucucugcagagguuagugg

SEQ ID NO: 1496914 - RNA, 19 nt, Artificial Sequence
  Description of Artificial Sequence: Synthetic oligonucleotide
  Sense strand starting at position 2444 of SEQ ID NO: 1244546
ucugacauucccuauacgu

SEQ ID NO: 1496915 - RNA, 19 nt, Artificial Sequence
  Description of Artificial Sequence: Synthetic oligonucleotide
  Antisense strand to SEQ ID NO: 1496914
acguauagggaaugucaga

SEQ ID NO: 1496916 - RNA, 19 nt, Artificial Sequence
  Description of Artificial Sequence: Synthetic oligonucleotide
  Sense strand starting at position 2446 of SEQ ID NO: 1244546
ugacauucccuauacguaa

SEQ ID NO: 1496917 - RNA, 19 nt, Artificial Sequence
  Description of Artificial Sequence: Synthetic oligonucleotide
  Antisense strand to SEQ ID NO: 1496916
uuacguauagggaauguca

SEQ ID NO: 1496918 - RNA, 19 nt, Artificial Sequence
  Description of Artificial Sequence: Synthetic oligonucleotide
  Sense strand starting at position 2464 of SEQ ID NO: 1244546
acuucuaucccaugggagu

SEQ ID NO: 1496919 - RNA, 19 nt, Artificial Sequence
  Description of Artificial Sequence: Synthetic oligonucleotide
  Antisense strand to SEQ ID NO: 1496918
acucccaugggauagaagu

SEQ ID NO: 1496920 - RNA, 19 nt, Artificial Sequence
  Description of Artificial Sequence: Synthetic oligonucleotide
  Sense strand starting at position 2465 of SEQ ID NO: 1244546
cuucuaucccaugggagua

SEQ ID NO: 1496921 - RNA, 19 nt, Artificial Sequence
  Description of Artificial Sequence: Synthetic oligonucleotide
  Antisense strand to SEQ ID NO: 1496920
uacucccaugggauagaag

SEQ ID NO: 1496922 - RNA, 19 nt, Artificial Sequence
  Description of Artificial Sequence: Synthetic oligonucleotide
  Sense strand starting at position 2516 of SEQ ID NO: 1244546
ggaucugauuagccaacua

SEQ ID NO: 1496923 - RNA, 19 nt, Artificial Sequence
  Description of Artificial Sequence: Synthetic oligonucleotide
  Antisense strand to SEQ ID NO: 1496922
uaguuggcuaaucagaucc

SEQ ID NO: 1496924 - RNA, 19 nt, Artificial Sequence
  Description of Artificial Sequence: Synthetic oligonucleotide
  Sense strand starting at position 2592 of SEQ ID NO: 1244546
accuuuauuccagacucgu

SEQ ID NO: 1496925 - RNA, 19 nt, Artificial Sequence
  Description of Artificial Sequence: Synthetic oligonucleotide
  Antisense strand to SEQ ID NO: 1496924
acgagucuggaauaaaggu

SEQ ID NO: 1496926 - RNA, 19 nt, Artificial Sequence
  Description of Artificial Sequence: Synthetic oligonucleotide
  Sense strand starting at position 2605 of SEQ ID NO: 1244546
acucguuugccagauucca

SEQ ID NO: 1496927 - RNA, 19 nt, Artificial Sequence
  Description of Artificial Sequence: Synthetic oligonucleotide
  Antisense strand to SEQ ID NO: 1496926
uggaaucuggcaaacgagu

SEQ ID NO: 1496928 - RNA, 19 nt, Artificial Sequence
  Description of Artificial Sequence: Synthetic oligonucleotide
  Sense strand starting at position 2865 of SEQ ID NO: 1244546
gaauuaugguaccuuuaug

SEQ ID NO: 1496929 - RNA, 19 nt, Artificial Sequence
  Description of Artificial Sequence: Synthetic oligonucleotide
  Antisense strand to SEQ ID NO: 1496928
cauaaagguaccauaauuc

SEQ ID NO: 1496930 - RNA, 19 nt, Artificial Sequence
  Description of Artificial Sequence: Synthetic oligonucleotide
  Sense strand starting at position 3163 of SEQ ID NO: 1244546
gcuacacuguuacucauuu

SEQ ID NO: 1496931 - RNA, 19 nt, Artificial Sequence
  Description of Artificial Sequence: Synthetic oligonucleotide
  Antisense strand to SEQ ID NO: 1496930
aaaugaguaacaguguagc

SEQ ID NO: 1496932 - RNA, 19 nt, Artificial Sequence
  Description of Artificial Sequence: Synthetic oligonucleotide
  Sense strand starting at position 3410 of SEQ ID NO: 1244546
aguagaauugucugcauuu

SEQ ID NO: 1496933 - RNA, 19 nt, Artificial Sequence
  Description of Artificial Sequence: Synthetic oligonucleotide
  Antisense strand to SEQ ID NO: 1496932
aaaugcagacaauucuacu

SEQ ID NO: 1496934 - RNA, 19 nt, Artificial Sequence
  Description of Artificial Sequence: Synthetic oligonucleotide
  Sense strand starting at position 3411 of SEQ ID NO: 1244546
guagaauugucugcauuuc

SEQ ID NO: 1496935 - RNA, 19 nt, Artificial Sequence
  Description of Artificial Sequence: Synthetic oligonucleotide
  Antisense strand to SEQ ID NO: 1496934
gaaaugcagacaauucuac

SEQ ID NO: 1496936 - RNA, 19 nt, Artificial Sequence
  Description of Artificial Sequence: Synthetic oligonucleotide
  Sense strand starting at position 3565 of SEQ ID NO: 1244546
gggccuaaggagugaaacu

SEQ ID NO: 1496937 - RNA, 19 nt, Artificial Sequence
  Description of Artificial Sequence: Synthetic oligonucleotide
  Antisense strand to SEQ ID NO: 1496936
aguuucacuccuuaggccc

SEQ ID NO: 1496938 - RNA, 19 nt, Artificial Sequence
  Description of Artificial Sequence: Synthetic oligonucleotide
  Sense strand starting at position 3624 of SEQ ID NO: 1244546
aaagauagccaccgguaau

SEQ ID NO: 1496939 - RNA, 19 nt, Artificial Sequence
  Description of Artificial Sequence: Synthetic oligonucleotide
  Antisense strand to SEQ ID NO: 1496938
auuaccgguggcuaucuuu

SEQ ID NO: 1496940 - RNA, 19 nt, Artificial Sequence
  Description of Artificial Sequence: Synthetic oligonucleotide
  Sense strand starting at position 3635 of SEQ ID NO: 1244546
ccgguaauaggacaguaua

SEQ ID NO: 1496941 - RNA, 19 nt, Artificial Sequence
  Description of Artificial Sequence: Synthetic oligonucleotide
  Antisense strand to SEQ ID NO: 1496940
uauacuguccuauuaccgg

SEQ ID NO: 1496942 - RNA, 19 nt, Artificial Sequence
  Description of Artificial Sequence: Synthetic oligonucleotide
  Sense strand starting at position 3734 of SEQ ID NO: 1244546
ucgaguuacccggauucuc

SEQ ID NO: 1496943 - RNA, 19 nt, Artificial Sequence
  Description of Artificial Sequence: Synthetic oligonucleotide
  Antisense strand to SEQ ID NO: 1496942
gagaauccggguaacucga

SEQ ID NO: 1496944 - RNA, 19 nt, Artificial Sequence
  Description of Artificial Sequence: Synthetic oligonucleotide
  Sense strand starting at position 3747 of SEQ ID NO: 1244546
auucucuauguguacuuau

SEQ ID NO: 1496945 - RNA, 19 nt, Artificial Sequence
  Description of Artificial Sequence: Synthetic oligonucleotide
  Antisense strand to SEQ ID NO: 1496944
auaaguacacauagagaau

SEQ ID NO: 1496946 - RNA, 19 nt, Artificial Sequence
  Description of Artificial Sequence: Synthetic oligonucleotide
  Sense strand starting at position 3832 of SEQ ID NO: 1244546
cugcauugucucuauguaa

SEQ ID NO: 1496947 - RNA, 19 nt, Artificial Sequence
  Description of Artificial Sequence: Synthetic oligonucleotide
  Antisense strand to SEQ ID NO: 1496946
uuacauagagacaaugcag

SEQ ID NO: 1496948 - RNA, 19 nt, Artificial Sequence
  Description of Artificial Sequence: Synthetic oligonucleotide
  Sense strand starting at position 3897 of SEQ ID NO: 1244546
auuguuucgaaaggauuac

SEQ ID NO: 1496949 - RNA, 19 nt, Artificial Sequence
  Description of Artificial Sequence: Synthetic oligonucleotide
  Antisense strand to SEQ ID NO: 1496948
guaauccuuucgaaacaau

SEQ ID NO: 1496950 - RNA, 19 nt, Artificial Sequence
  Description of Artificial Sequence: Synthetic oligonucleotide
  Sense strand starting at position 3898 of SEQ ID NO: 1244546
uuguuucgaaaggauuaca

SEQ ID NO: 1496951 - RNA, 19 nt, Artificial Sequence
  Description of Artificial Sequence: Synthetic oligonucleotide
  Antisense strand to SEQ ID NO: 1496950
uguaauccuuucgaaacaa

SEQ ID NO: 1496952 - RNA, 19 nt, Artificial Sequence
  Description of Artificial Sequence: Synthetic oligonucleotide
  Sense strand starting at position 3941 of SEQ ID NO: 1244546
uugagaaacuguuccugau

SEQ ID NO: 1496953 - RNA, 19 nt, Artificial Sequence
  Description of Artificial Sequence: Synthetic oligonucleotide
  Antisense strand to SEQ ID NO: 1496952
aucaggaacaguuucucaa

SEQ ID NO: 1496954 - RNA, 19 nt, Artificial Sequence
  Description of Artificial Sequence: Synthetic oligonucleotide
  Sense strand starting at position 3943 of SEQ ID NO: 1244546
gagaaacuguuccugauuc

SEQ ID NO: 1496955 - RNA, 19 nt, Artificial Sequence
  Description of Artificial Sequence: Synthetic oligonucleotide
  Antisense strand to SEQ ID NO: 1496954
gaaucaggaacaguuucuc

SEQ ID NO: 1496956 - RNA, 19 nt, Artificial Sequence
  Description of Artificial Sequence: Synthetic oligonucleotide
  Sense strand starting at position 147 of SEQ ID NO: 1244547
ucaguagugcauggaacuu

SEQ ID NO: 1496957 - RNA, 19 nt, Artificial Sequence
  Description of Artificial Sequence: Synthetic oligonucleotide
  Antisense strand to SEQ ID NO: 1496956
aaguuccaugcacuacuga

SEQ ID NO: 1496958 - RNA, 19 nt, Artificial Sequence
  Description of Artificial Sequence: Synthetic oligonucleotide
  Sense strand starting at position 269 of SEQ ID NO: 1244547
ggaaauccauuccaaagga

SEQ ID NO: 1496959 - RNA, 19 nt, Artificial Sequence
  Description of Artificial Sequence: Synthetic oligonucleotide
  Antisense strand to SEQ ID NO: 1496958
uccuuuggaauggauuucc

SEQ ID NO: 1496960 - RNA, 19 nt, Artificial Sequence
  Description of Artificial Sequence: Synthetic oligonucleotide
  Sense strand starting at position 671 of SEQ ID NO: 1244547
auaugcuguuagcaagauu

SEQ ID NO: 1496961 - RNA, 19 nt, Artificial Sequence
  Description of Artificial Sequence: Synthetic oligonucleotide
  Antisense strand to SEQ ID NO: 1496960
aaucuugcuaacagcauau

SEQ ID NO: 1496962 - RNA, 19 nt, Artificial Sequence
  Description of Artificial Sequence: Synthetic oligonucleotide
  Sense strand starting at position 674 of SEQ ID NO: 1244547
ugcuguuagcaagauuaac

SEQ ID NO: 1496963 - RNA, 19 nt, Artificial Sequence
  Description of Artificial Sequence: Synthetic oligonucleotide
  Antisense strand to SEQ ID NO: 1496962
guuaaucuugcuaacagca

SEQ ID NO: 1496964 - RNA, 19 nt, Artificial Sequence
  Description of Artificial Sequence: Synthetic oligonucleotide
  Sense strand starting at position 1282 of SEQ ID NO: 1244547
accaauaaaugugauaugu

SEQ ID NO: 1496965 - RNA, 19 nt, Artificial Sequence
  Description of Artificial Sequence: Synthetic oligonucleotide
  Antisense strand to SEQ ID NO: 1496964
acauaucacauuuauuggu

SEQ ID NO: 1496966 - RNA, 19 nt, Artificial Sequence
  Description of Artificial Sequence: Synthetic oligonucleotide
  Sense strand starting at position 1292 of SEQ ID NO: 1244547
gugauaugucaauaaaugu

SEQ ID NO: 1496967 - RNA, 19 nt, Artificial Sequence
  Description of Artificial Sequence: Synthetic oligonucleotide
  Antisense strand to SEQ ID NO: 1496966
acauuuauugacauaucac

SEQ ID NO: 1496968 - RNA, 19 nt, Artificial Sequence
  Description of Artificial Sequence: Synthetic oligonucleotide
  Sense strand starting at position 10 of SEQ ID NO: 1244548
aaagauagccaccgguaau

SEQ ID NO: 1496969 - RNA, 19 nt, Artificial Sequence
  Description of Artificial Sequence: Synthetic oligonucleotide
  Antisense strand to SEQ ID NO: 1496968
auuaccgguggcuaucuuu

SEQ ID NO: 1496970 - RNA, 19 nt, Artificial Sequence
  Description of Artificial Sequence: Synthetic oligonucleotide
  Sense strand starting at position 21 of SEQ ID NO: 1244548
ccgguaauaggacaguaua

SEQ ID NO: 1496971 - RNA, 19 nt, Artificial Sequence
  Description of Artificial Sequence: Synthetic oligonucleotide
  Antisense strand to SEQ ID NO: 1496970
uauacuguccuauuaccgg

SEQ ID NO: 1496972 - RNA, 19 nt, Artificial Sequence
  Description of Artificial Sequence: Synthetic oligonucleotide
  Sense strand starting at position 133 of SEQ ID NO: 1244548
auucucuauguguacuuau

SEQ ID NO: 1496973 - RNA, 19 nt, Artificial Sequence
  Description of Artificial Sequence: Synthetic oligonucleotide
  Antisense strand to SEQ ID NO: 1496972
auaaguacacauagagaau

SEQ ID NO: 1496974 - RNA, 19 nt, Artificial Sequence
  Description of Artificial Sequence: Synthetic oligonucleotide
  Sense strand starting at position 283 of SEQ ID NO: 1244548
auuguuucgaaaggauuac

SEQ ID NO: 1496975 - RNA, 19 nt, Artificial Sequence
  Description of Artificial Sequence: Synthetic oligonucleotide
  Antisense strand to SEQ ID NO: 1496974
guaauccuuucgaaacaau

SEQ ID NO: 1496976 - RNA, 19 nt, Artificial Sequence
  Description of Artificial Sequence: Synthetic oligonucleotide
  Sense strand starting at position 284 of SEQ ID NO: 1244548
uuguuucgaaaggauuaca

SEQ ID NO: 1496977 - RNA, 19 nt, Artificial Sequence
  Description of Artificial Sequence: Synthetic oligonucleotide
  Antisense strand to SEQ ID NO: 1496976
uguaauccuuucgaaacaa

SEQ ID NO: 1496978 - RNA, 19 nt, Artificial Sequence
  Description of Artificial Sequence: Synthetic oligonucleotide
  Sense strand starting at position 327 of SEQ ID NO: 1244548
uugagaaacuguuccugau

SEQ ID NO: 1496979 - RNA, 19 nt, Artificial Sequence
  Description of Artificial Sequence: Synthetic oligonucleotide
  Antisense strand to SEQ ID NO: 1496978
aucaggaacaguuucucaa

SEQ ID NO: 1496980 - RNA, 19 nt, Artificial Sequence
  Description of Artificial Sequence: Synthetic oligonucleotide
  Sense strand starting at position 329 of SEQ ID NO: 1244548
gagaaacuguuccugauuc

SEQ ID NO: 1496981 - RNA, 19 nt, Artificial Sequence
  Description of Artificial Sequence: Synthetic oligonucleotide
  Antisense strand to SEQ ID NO: 1496980
gaaucaggaacaguuucuc

SEQ ID NO: 1496982 - RNA, 19 nt, Artificial Sequence
  Description of Artificial Sequence: Synthetic oligonucleotide
  Sense strand starting at position 387 of SEQ ID NO: 1244548
uagggucaucuugaguaag

SEQ ID NO: 1496983 - RNA, 19 nt, Artificial Sequence
  Description of Artificial Sequence: Synthetic oligonucleotide
  Antisense strand to SEQ ID NO: 1496982
cuuacucaagaugacccua

SEQ ID NO: 1496984 - RNA, 19 nt, Artificial Sequence
  Description of Artificial Sequence: Synthetic oligonucleotide
  Sense strand starting at position 389 of SEQ ID NO: 1244548
gggucaucuugaguaagug

SEQ ID NO: 1496985 - RNA, 19 nt, Artificial Sequence
  Description of Artificial Sequence: Synthetic oligonucleotide
  Antisense strand to SEQ ID NO: 1496984
cacuuacucaagaugaccc

SEQ ID NO: 1496986 - RNA, 19 nt, Artificial Sequence
  Description of Artificial Sequence: Synthetic oligonucleotide
  Sense strand starting at position 433 of SEQ ID NO: 1244548
gacggaucucuugggaauc

SEQ ID NO: 1496987 - RNA, 19 nt, Artificial Sequence
  Description of Artificial Sequence: Synthetic oligonucleotide
  Antisense strand to SEQ ID NO: 1496986
gauucccaagagauccguc

SEQ ID NO: 1496988 - RNA, 19 nt, Artificial Sequence
  Description of Artificial Sequence: Synthetic oligonucleotide
  Sense strand starting at position 485 of SEQ ID NO: 1244548
cugagcugaagagguuaau

SEQ ID NO: 1496989 - RNA, 19 nt, Artificial Sequence
  Description of Artificial Sequence: Synthetic oligonucleotide
  Antisense strand to SEQ ID NO: 1496988
auuaaccucuucagcucag

SEQ ID NO: 1496990 - RNA, 19 nt, Artificial Sequence
  Description of Artificial Sequence: Synthetic oligonucleotide
  Sense strand starting at position 704 of SEQ ID NO: 1244548
cgacuaagaccgucguguu

SEQ ID NO: 1496991 - RNA, 19 nt, Artificial Sequence
  Description of Artificial Sequence: Synthetic oligonucleotide
  Antisense strand to SEQ ID NO: 1496990
aacacgacggucuuagucg

SEQ ID NO: 1496992 - RNA, 19 nt, Artificial Sequence
  Description of Artificial Sequence: Synthetic oligonucleotide
  Sense strand starting at position 727 of SEQ ID NO: 1244548
gaaagaucacuccgcuaug

SEQ ID NO: 1496993 - RNA, 19 nt, Artificial Sequence
  Description of Artificial Sequence: Synthetic oligonucleotide
  Antisense strand to SEQ ID NO: 1496992
cauagcggagugaucuuuc

SEQ ID NO: 1496994 - RNA, 19 nt, Artificial Sequence
  Description of Artificial Sequence: Synthetic oligonucleotide
  Sense strand starting at position 730 of SEQ ID NO: 1244548
agaucacuccgcuaugaag

SEQ ID NO: 1496995 - RNA, 19 nt, Artificial Sequence
  Description of Artificial Sequence: Synthetic oligonucleotide
  Antisense strand to SEQ ID NO: 1496994
cuucauagcggagugaucu

SEQ ID NO: 1496996 - RNA, 19 nt, Artificial Sequence
  Description of Artificial Sequence: Synthetic oligonucleotide
  Sense strand starting at position 2057 of SEQ ID NO: 1244548
agucauccgguccaggaaa

SEQ ID NO: 1496997 - RNA, 19 nt, Artificial Sequence
  Description of Artificial Sequence: Synthetic oligonucleotide
  Antisense strand to SEQ ID NO: 1496996
uuuccuggaccggaugacu

SEQ ID NO: 1496998 - RNA, 19 nt, Artificial Sequence
  Description of Artificial Sequence: Synthetic oligonucleotide
  Sense strand starting at position 2176 of SEQ ID NO: 1244548
ggacuuugucaggguccaa

SEQ ID NO: 1496999 - RNA, 19 nt, Artificial Sequence
  Description of Artificial Sequence: Synthetic oligonucleotide
  Antisense strand to SEQ ID NO: 1496998
uuggacccugacaaagucc

SEQ ID NO: 1497000 - RNA, 19 nt, Artificial Sequence
  Description of Artificial Sequence: Synthetic oligonucleotide
  Sense strand starting at position 2390 of SEQ ID NO: 1244548
ccaucagaguaucugucua

SEQ ID NO: 1497001 - RNA, 19 nt, Artificial Sequence
  Description of Artificial Sequence: Synthetic oligonucleotide
  Antisense strand to SEQ ID NO: 1497000
uagacagauacucugaugg

SEQ ID NO: 1497002 - RNA, 19 nt, Artificial Sequence
  Description of Artificial Sequence: Synthetic oligonucleotide
  Sense strand starting at position 2392 of SEQ ID NO: 1244548
aucagaguaucugucuaag

SEQ ID NO: 1497003 - RNA, 19 nt, Artificial Sequence
  Description of Artificial Sequence: Synthetic oligonucleotide
  Antisense strand to SEQ ID NO: 1497002
cuuagacagauacucugau

SEQ ID NO: 1497004 - RNA, 19 nt, Artificial Sequence
  Description of Artificial Sequence: Synthetic oligonucleotide
  Sense strand starting at position 2394 of SEQ ID NO: 1244548
cagaguaucugucuaagga

SEQ ID NO: 1497005 - RNA, 19 nt, Artificial Sequence
  Description of Artificial Sequence: Synthetic oligonucleotide
  Antisense strand to SEQ ID NO: 1497004
uccuuagacagauacucug

SEQ ID NO: 1497006 - RNA, 19 nt, Artificial Sequence
  Description of Artificial Sequence: Synthetic oligonucleotide
  Sense strand starting at position 2444 of SEQ ID NO: 1244548
acaucaagucuguaacuca

SEQ ID NO: 1497007 - RNA, 19 nt, Artificial Sequence
  Description of Artificial Sequence: Synthetic oligonucleotide
  Antisense strand to SEQ ID NO: 1497006
ugaguuacagacuugaugu

SEQ ID NO: 1497008 - RNA, 19 nt, Artificial Sequence
  Description of Artificial Sequence: Synthetic oligonucleotide
  Sense strand starting at position 2480 of SEQ ID NO: 1244548
aggaaacauguccaagugu

SEQ ID NO: 1497009 - RNA, 19 nt, Artificial Sequence
  Description of Artificial Sequence: Synthetic oligonucleotide
  Antisense strand to SEQ ID NO: 1497008
acacuuggacauguuuccu

SEQ ID NO: 1497010 - RNA, 19 nt, Artificial Sequence
  Description of Artificial Sequence: Synthetic oligonucleotide
  Sense strand starting at position 2691 of SEQ ID NO: 1244548
aaaguagcucaauaguguu

SEQ ID NO: 1497011 - RNA, 19 nt, Artificial Sequence
  Description of Artificial Sequence: Synthetic oligonucleotide
  Antisense strand to SEQ ID NO: 1497010
aacacuauugagcuacuuu

SEQ ID NO: 1497012 - RNA, 19 nt, Artificial Sequence
  Description of Artificial Sequence: Synthetic oligonucleotide
  Sense strand starting at position 2706 of SEQ ID NO: 1244548
uguuuauauugauuccaga

SEQ ID NO: 1497013 - RNA, 19 nt, Artificial Sequence
  Description of Artificial Sequence: Synthetic oligonucleotide
  Antisense strand to SEQ ID NO: 1497012
ucuggaaucaauauaaaca

SEQ ID NO: 1497014 - RNA, 19 nt, Artificial Sequence
  Description of Artificial Sequence: Synthetic oligonucleotide
  Sense strand starting at position 2906 of SEQ ID NO: 1244548
gguacuguccaucagauga

SEQ ID NO: 1497015 - RNA, 19 nt, Artificial Sequence
  Description of Artificial Sequence: Synthetic oligonucleotide
  Antisense strand to SEQ ID NO: 1497014
ucaucugauggacaguacc

SEQ ID NO: 1497016 - RNA, 19 nt, Artificial Sequence
  Description of Artificial Sequence: Synthetic oligonucleotide
  Sense strand starting at position 2957 of SEQ ID NO: 1244548
uagggauacauaggcgaua

SEQ ID NO: 1497017 - RNA, 19 nt, Artificial Sequence
  Description of Artificial Sequence: Synthetic oligonucleotide
  Antisense strand to SEQ ID NO: 1497016
uaucgccuauguaucccua

SEQ ID NO: 1497018 - RNA, 19 nt, Artificial Sequence
  Description of Artificial Sequence: Synthetic oligonucleotide
  Sense strand starting at position 2958 of SEQ ID NO: 1244548
agggauacauaggcgauau

SEQ ID NO: 1497019 - RNA, 19 nt, Artificial Sequence
  Description of Artificial Sequence: Synthetic oligonucleotide
  Antisense strand to SEQ ID NO: 1497018
auaucgccuauguaucccu

SEQ ID NO: 1497020 - RNA, 19 nt, Artificial Sequence
  Description of Artificial Sequence: Synthetic oligonucleotide
  Sense strand starting at position 2959 of SEQ ID NO: 1244548
gggauacauaggcgauauc

SEQ ID NO: 1497021 - RNA, 19 nt, Artificial Sequence
  Description of Artificial Sequence: Synthetic oligonucleotide
  Antisense strand to SEQ ID NO: 1497020
gauaucgccuauguauccc

SEQ ID NO: 1497022 - RNA, 19 nt, Artificial Sequence
  Description of Artificial Sequence: Synthetic oligonucleotide
  Sense strand starting at position 3095 of SEQ ID NO: 1244548
gccucagucagauaggauu

SEQ ID NO: 1497023 - RNA, 19 nt, Artificial Sequence
  Description of Artificial Sequence: Synthetic oligonucleotide
  Antisense strand to SEQ ID NO: 1497022
aauccuaucugacugaggc

SEQ ID NO: 1497024 - RNA, 19 nt, Artificial Sequence
  Description of Artificial Sequence: Synthetic oligonucleotide
  Sense strand starting at position 3172 of SEQ ID NO: 1244548
gagggaauuugauagcauu

SEQ ID NO: 1497025 - RNA, 19 nt, Artificial Sequence
  Description of Artificial Sequence: Synthetic oligonucleotide
  Antisense strand to SEQ ID NO: 1497024
aaugcuaucaaauucccuc

SEQ ID NO: 1497026 - RNA, 19 nt, Artificial Sequence
  Description of Artificial Sequence: Synthetic oligonucleotide
  Sense strand starting at position 3175 of SEQ ID NO: 1244548
ggaauuugauagcauugag

SEQ ID NO: 1497027 - RNA, 19 nt, Artificial Sequence
  Description of Artificial Sequence: Synthetic oligonucleotide
  Antisense strand to SEQ ID NO: 1497026
cucaaugcuaucaaauucc

SEQ ID NO: 1497028 - RNA, 19 nt, Artificial Sequence
  Description of Artificial Sequence: Synthetic oligonucleotide
  Sense strand starting at position 3201 of SEQ ID NO: 1244548
ggucauguuaugggaagaa

SEQ ID NO: 1497029 - RNA, 19 nt, Artificial Sequence
  Description of Artificial Sequence: Synthetic oligonucleotide
  Antisense strand to SEQ ID NO: 1497028
uucuucccauaacaugacc

SEQ ID NO: 1497030 - RNA, 19 nt, Artificial Sequence
  Description of Artificial Sequence: Synthetic oligonucleotide
  Sense strand starting at position 3232 of SEQ ID NO: 1244548
agguaaaucugaguuuggu

SEQ ID NO: 1497031 - RNA, 19 nt, Artificial Sequence
  Description of Artificial Sequence: Synthetic oligonucleotide
  Antisense strand to SEQ ID NO: 1497030
accaaacucagauuuaccu

SEQ ID NO: 1497032 - RNA, 19 nt, Artificial Sequence
  Description of Artificial Sequence: Synthetic oligonucleotide
  Sense strand starting at position 3267 of SEQ ID NO: 1244548
uccgguaauugacuuaauc

SEQ ID NO: 1497033 - RNA, 19 nt, Artificial Sequence
  Description of Artificial Sequence: Synthetic oligonucleotide
  Antisense strand to SEQ ID NO: 1497032
gauuaagucaauuaccgga

SEQ ID NO: 1497034 - RNA, 19 nt, Artificial Sequence
  Description of Artificial Sequence: Synthetic oligonucleotide
  Sense strand starting at position 3276 of SEQ ID NO: 1244548
ugacuuaaucuccaugggu

SEQ ID NO: 1497035 - RNA, 19 nt, Artificial Sequence
  Description of Artificial Sequence: Synthetic oligonucleotide
  Antisense strand to SEQ ID NO: 1497034
acccauggagauuaaguca

SEQ ID NO: 1497036 - RNA, 19 nt, Artificial Sequence
  Description of Artificial Sequence: Synthetic oligonucleotide
  Sense strand starting at position 3320 of SEQ ID NO: 1244548
ugaacaggacuuuguugaa

SEQ ID NO: 1497037 - RNA, 19 nt, Artificial Sequence
  Description of Artificial Sequence: Synthetic oligonucleotide
  Antisense strand to SEQ ID NO: 1497036
uucaacaaaguccuguuca

SEQ ID NO: 1497038 - RNA, 19 nt, Artificial Sequence
  Description of Artificial Sequence: Synthetic oligonucleotide
  Sense strand starting at position 3324 of SEQ ID NO: 1244548
caggacuuuguugaaguua

SEQ ID NO: 1497039 - RNA, 19 nt, Artificial Sequence
  Description of Artificial Sequence: Synthetic oligonucleotide
  Antisense strand to SEQ ID NO: 1497038
uaacuucaacaaaguccug

SEQ ID NO: 1497040 - RNA, 19 nt, Artificial Sequence
  Description of Artificial Sequence: Synthetic oligonucleotide
  Sense strand starting at position 3332 of SEQ ID NO: 1244548
uguugaaguuaacuacuaa

SEQ ID NO: 1497041 - RNA, 19 nt, Artificial Sequence
  Description of Artificial Sequence: Synthetic oligonucleotide
  Antisense strand to SEQ ID NO: 1497040
uuaguaguuaacuucaaca

SEQ ID NO: 1497042 - RNA, 19 nt, Artificial Sequence
  Description of Artificial Sequence: Synthetic oligonucleotide
  Sense strand starting at position 3400 of SEQ ID NO: 1244548
aucuaagggcuuuacacau

SEQ ID NO: 1497043 - RNA, 19 nt, Artificial Sequence
  Description of Artificial Sequence: Synthetic oligonucleotide
  Antisense strand to SEQ ID NO: 1497042
auguguaaagcccuuagau

SEQ ID NO: 1497044 - RNA, 19 nt, Artificial Sequence
  Description of Artificial Sequence: Synthetic oligonucleotide
  Sense strand starting at position 3562 of SEQ ID NO: 1244548
cucuccauugcagaauaga

SEQ ID NO: 1497045 - RNA, 19 nt, Artificial Sequence
  Description of Artificial Sequence: Synthetic oligonucleotide
  Antisense strand to SEQ ID NO: 1497044
ucuauucugcaauggagag

SEQ ID NO: 1497046 - RNA, 19 nt, Artificial Sequence
  Description of Artificial Sequence: Synthetic oligonucleotide
  Sense strand starting at position 3913 of SEQ ID NO: 1244548
ggccauuuccugugucagu

SEQ ID NO: 1497047 - RNA, 19 nt, Artificial Sequence
  Description of Artificial Sequence: Synthetic oligonucleotide
  Antisense strand to SEQ ID NO: 1497046
acugacacaggaaauggcc

SEQ ID NO: 1497048 - RNA, 19 nt, Artificial Sequence
  Description of Artificial Sequence: Synthetic oligonucleotide
  Sense strand starting at position 35 of SEQ ID NO: 1244549
ccgacuagacaguggaaau

SEQ ID NO: 1497049 - RNA, 19 nt, Artificial Sequence
  Description of Artificial Sequence: Synthetic oligonucleotide
  Antisense strand to SEQ ID NO: 1497048
auuuccacugucuagucgg

SEQ ID NO: 1497050 - RNA, 19 nt, Artificial Sequence
  Description of Artificial Sequence: Synthetic oligonucleotide
  Sense strand starting at position 222 of SEQ ID NO: 1244549
acccuaguggcccaagaua

SEQ ID NO: 1497051 - RNA, 19 nt, Artificial Sequence
  Description of Artificial Sequence: Synthetic oligonucleotide
  Antisense strand to SEQ ID NO: 1497050
uaucuugggccacuagggu

SEQ ID NO: 1497052 - RNA, 19 nt, Artificial Sequence
  Description of Artificial Sequence: Synthetic oligonucleotide
  Sense strand starting at position 233 of SEQ ID NO: 1244549
ccaagauaccugugccaca

SEQ ID NO: 1497053 - RNA, 19 nt, Artificial Sequence
  Description of Artificial Sequence: Synthetic oligonucleotide
  Antisense strand to SEQ ID NO: 1497052
uguggcacagguaucuugg

SEQ ID NO: 1497054 - RNA, 19 nt, Artificial Sequence
  Description of Artificial Sequence: Synthetic oligonucleotide
  Sense strand starting at position 536 of SEQ ID NO: 1244549
agaugaaagcuguaauucu

SEQ ID NO: 1497055 - RNA, 19 nt, Artificial Sequence
  Description of Artificial Sequence: Synthetic oligonucleotide
  Antisense strand to SEQ ID NO: 1497054
agaauuacagcuuucaucu

SEQ ID NO: 1497056 - RNA, 19 nt, Artificial Sequence
  Description of Artificial Sequence: Synthetic oligonucleotide
  Sense strand starting at position 547 of SEQ ID NO: 1244549
guaauucucucaccaggaa

SEQ ID NO: 1497057 - RNA, 19 nt, Artificial Sequence
  Description of Artificial Sequence: Synthetic oligonucleotide
  Antisense strand to SEQ ID NO: 1497056
uuccuggugagagaauuac

SEQ ID NO: 1497058 - RNA, 19 nt, Artificial Sequence
  Description of Artificial Sequence: Synthetic oligonucleotide
  Sense strand starting at position 628 of SEQ ID NO: 1244549
auguaucgauucuccauaa

SEQ ID NO: 1497059 - RNA, 19 nt, Artificial Sequence
  Description of Artificial Sequence: Synthetic oligonucleotide
  Antisense strand to SEQ ID NO: 1497058
uuauggagaaucgauacau

SEQ ID NO: 1497060 - RNA, 19 nt, Artificial Sequence
  Description of Artificial Sequence: Synthetic oligonucleotide
  Sense strand starting at position 629 of SEQ ID NO: 1244549
uguaucgauucuccauaag

SEQ ID NO: 1497061 - RNA, 19 nt, Artificial Sequence
  Description of Artificial Sequence: Synthetic oligonucleotide
  Antisense strand to SEQ ID NO: 1497060
cuuauggagaaucgauaca

SEQ ID NO: 1497062 - RNA, 19 nt, Artificial Sequence
  Description of Artificial Sequence: Synthetic oligonucleotide
  Sense strand starting at position 662 of SEQ ID NO: 1244549
ccgaguuaagaaugccuga

SEQ ID NO: 1497063 - RNA, 19 nt, Artificial Sequence
  Description of Artificial Sequence: Synthetic oligonucleotide
  Antisense strand to SEQ ID NO: 1497062
ucaggcauucuuaacucgg

SEQ ID NO: 1497064 - RNA, 19 nt, Artificial Sequence
  Description of Artificial Sequence: Synthetic oligonucleotide
  Sense strand starting at position 665 of SEQ ID NO: 1244549
aguuaagaaugccugaauu

SEQ ID NO: 1497065 - RNA, 19 nt, Artificial Sequence
  Description of Artificial Sequence: Synthetic oligonucleotide
  Antisense strand to SEQ ID NO: 1497064
aauucaggcauucuuaacu

SEQ ID NO: 1497066 - RNA, 19 nt, Artificial Sequence
  Description of Artificial Sequence: Synthetic oligonucleotide
  Sense strand starting at position 687 of SEQ ID NO: 1244549
uggcgauuaccugaucucu

SEQ ID NO: 1497067 - RNA, 19 nt, Artificial Sequence
  Description of Artificial Sequence: Synthetic oligonucleotide
  Antisense strand to SEQ ID NO: 1497066
agagaucagguaaucgcca

SEQ ID NO: 1497068 - RNA, 19 nt, Artificial Sequence
  Description of Artificial Sequence: Synthetic oligonucleotide
  Sense strand starting at position 689 of SEQ ID NO: 1244549
gcgauuaccugaucucuga

SEQ ID NO: 1497069 - RNA, 19 nt, Artificial Sequence
  Description of Artificial Sequence: Synthetic oligonucleotide
  Antisense strand to SEQ ID NO: 1497068
ucagagaucagguaaucgc

SEQ ID NO: 1497070 - RNA, 19 nt, Artificial Sequence
  Description of Artificial Sequence: Synthetic oligonucleotide
  Sense strand starting at position 767 of SEQ ID NO: 1244549
aggucuaaucucgaguuga

SEQ ID NO: 1497071 - RNA, 19 nt, Artificial Sequence
  Description of Artificial Sequence: Synthetic oligonucleotide
  Antisense strand to SEQ ID NO: 1497070
ucaacucgagauuagaccu

SEQ ID NO: 1497072 - RNA, 19 nt, Artificial Sequence
  Description of Artificial Sequence: Synthetic oligonucleotide
  Sense strand starting at position 1124 of SEQ ID NO: 1244549
gugccauuugccugcuaga

SEQ ID NO: 1497073 - RNA, 19 nt, Artificial Sequence
  Description of Artificial Sequence: Synthetic oligonucleotide
  Antisense strand to SEQ ID NO: 1497072
ucuagcaggcaaauggcac

SEQ ID NO: 1497074 - RNA, 19 nt, Artificial Sequence
  Description of Artificial Sequence: Synthetic oligonucleotide
  Sense strand starting at position 1674 of SEQ ID NO: 1244549
gguuccaaguuaucggagu

SEQ ID NO: 1497075 - RNA, 19 nt, Artificial Sequence
  Description of Artificial Sequence: Synthetic oligonucleotide
  Antisense strand to SEQ ID NO: 1497074
acuccgauaacuuggaacc

SEQ ID NO: 1497076 - RNA, 19 nt, Artificial Sequence
  Description of Artificial Sequence: Synthetic oligonucleotide
  Sense strand starting at position 1676 of SEQ ID NO: 1244549
uuccaaguuaucggaguga

SEQ ID NO: 1497077 - RNA, 19 nt, Artificial Sequence
  Description of Artificial Sequence: Synthetic oligonucleotide
  Antisense strand to SEQ ID NO: 1497076
ucacuccgauaacuuggaa

SEQ ID NO: 1497078 - RNA, 19 nt, Artificial Sequence
  Description of Artificial Sequence: Synthetic oligonucleotide
  Sense strand starting at position 1680 of SEQ ID NO: 1244549
aaguuaucggagugagcca

SEQ ID NO: 1497079 - RNA, 19 nt, Artificial Sequence
  Description of Artificial Sequence: Synthetic oligonucleotide
  Antisense strand to SEQ ID NO: 1497078
uggcucacuccgauaacuu

SEQ ID NO: 1497080 - RNA, 19 nt, Artificial Sequence
  Description of Artificial Sequence: Synthetic oligonucleotide
  Sense strand starting at position 3077 of SEQ ID NO: 1244549
uaauuuguacgucgggcau

SEQ ID NO: 1497081 - RNA, 19 nt, Artificial Sequence
  Description of Artificial Sequence: Synthetic oligonucleotide
  Antisense strand to SEQ ID NO: 1497080
augcccgacguacaaauua

SEQ ID NO: 1497082 - RNA, 19 nt, Artificial Sequence
  Description of Artificial Sequence: Synthetic oligonucleotide
  Sense strand starting at position 3106 of SEQ ID NO: 1244549
gugggaugguuaaaggacu

SEQ ID NO: 1497083 - RNA, 19 nt, Artificial Sequence
  Description of Artificial Sequence: Synthetic oligonucleotide
  Antisense strand to SEQ ID NO: 1497082
aguccuuuaaccaucccac

SEQ ID NO: 1497084 - RNA, 19 nt, Artificial Sequence
  Description of Artificial Sequence: Synthetic oligonucleotide
  Sense strand starting at position 3113 of SEQ ID NO: 1244549
gguuaaaggacuugucuua

SEQ ID NO: 1497085 - RNA, 19 nt, Artificial Sequence
  Description of Artificial Sequence: Synthetic oligonucleotide
  Antisense strand to SEQ ID NO: 1497084
uaagacaaguccuuuaacc

SEQ ID NO: 1497086 - RNA, 19 nt, Artificial Sequence
  Description of Artificial Sequence: Synthetic oligonucleotide
  Sense strand starting at position 3129 of SEQ ID NO: 1244549
uuagguauuuaucccguua

SEQ ID NO: 1497087 - RNA, 19 nt, Artificial Sequence
  Description of Artificial Sequence: Synthetic oligonucleotide
  Antisense strand to SEQ ID NO: 1497086
uaacgggauaaauaccuaa

SEQ ID NO: 1497088 - RNA, 19 nt, Artificial Sequence
  Description of Artificial Sequence: Synthetic oligonucleotide
  Sense strand starting at position 3177 of SEQ ID NO: 1244549
uuaucaggcuuucuugauu

SEQ ID NO: 1497089 - RNA, 19 nt, Artificial Sequence
  Description of Artificial Sequence: Synthetic oligonucleotide
  Antisense strand to SEQ ID NO: 1497088
aaucaagaaagccugauaa

SEQ ID NO: 1497090 - RNA, 19 nt, Artificial Sequence
  Description of Artificial Sequence: Synthetic oligonucleotide
  Sense strand starting at position 3272 of SEQ ID NO: 1244549
gcagccaguacguuuguaa

SEQ ID NO: 1497091 - RNA, 19 nt, Artificial Sequence
  Description of Artificial Sequence: Synthetic oligonucleotide
  Antisense strand to SEQ ID NO: 1497090
uuacaaacguacuggcugc

SEQ ID NO: 1497092 - RNA, 19 nt, Artificial Sequence
  Description of Artificial Sequence: Synthetic oligonucleotide
  Sense strand starting at position 3283 of SEQ ID NO: 1244549
guuuguaacuuaccaagua

SEQ ID NO: 1497093 - RNA, 19 nt, Artificial Sequence
  Description of Artificial Sequence: Synthetic oligonucleotide
  Antisense strand to SEQ ID NO: 1497092
uacuugguaaguuacaaac

SEQ ID NO: 1497094 - RNA, 19 nt, Artificial Sequence
  Description of Artificial Sequence: Synthetic oligonucleotide
  Sense strand starting at position 3363 of SEQ ID NO: 1244549
gcuaaucacucgcugaaua

SEQ ID NO: 1497095 - RNA, 19 nt, Artificial Sequence
  Description of Artificial Sequence: Synthetic oligonucleotide
  Antisense strand to SEQ ID NO: 1497094
uauucagcgagugauuagc

SEQ ID NO: 1497096 - RNA, 19 nt, Artificial Sequence
  Description of Artificial Sequence: Synthetic oligonucleotide
  Sense strand starting at position 3364 of SEQ ID NO: 1244549
cuaaucacucgcugaauau

SEQ ID NO: 1497097 - RNA, 19 nt, Artificial Sequence
  Description of Artificial Sequence: Synthetic oligonucleotide
  Antisense strand to SEQ ID NO: 1497096
auauucagcgagugauuag

SEQ ID NO: 1497098 - RNA, 19 nt, Artificial Sequence
  Description of Artificial Sequence: Synthetic oligonucleotide
  Sense strand starting at position 3517 of SEQ ID NO: 1244549
agagaacacguuugauccu

SEQ ID NO: 1497099 - RNA, 19 nt, Artificial Sequence
  Description of Artificial Sequence: Synthetic oligonucleotide
  Antisense strand to SEQ ID NO: 1497098
aggaucaaacguguucucu

SEQ ID NO: 1497100 - RNA, 19 nt, Artificial Sequence
  Description of Artificial Sequence: Synthetic oligonucleotide
  Sense strand starting at position 3575 of SEQ ID NO: 1244549
acuuucuuagagcauguaa

SEQ ID NO: 1497101 - RNA, 19 nt, Artificial Sequence
  Description of Artificial Sequence: Synthetic oligonucleotide
  Antisense strand to SEQ ID NO: 1497100
uuacaugcucuaagaaagu

SEQ ID NO: 1497102 - RNA, 19 nt, Artificial Sequence
  Description of Artificial Sequence: Synthetic oligonucleotide
  Sense strand starting at position 3620 of SEQ ID NO: 1244549
uuucuuugagauugccuaa

SEQ ID NO: 1497103 - RNA, 19 nt, Artificial Sequence
  Description of Artificial Sequence: Synthetic oligonucleotide
  Antisense strand to SEQ ID NO: 1497102
uuaggcaaucucaaagaaa

SEQ ID NO: 1497104 - RNA, 19 nt, Artificial Sequence
  Description of Artificial Sequence: Synthetic oligonucleotide
  Sense strand starting at position 3623 of SEQ ID NO: 1244549
cuuugagauugccuaauug

SEQ ID NO: 1497105 - RNA, 19 nt, Artificial Sequence
  Description of Artificial Sequence: Synthetic oligonucleotide
  Antisense strand to SEQ ID NO: 1497104
caauuaggcaaucucaaag

SEQ ID NO: 1497106 - RNA, 19 nt, Artificial Sequence
  Description of Artificial Sequence: Synthetic oligonucleotide
  Sense strand starting at position 3627 of SEQ ID NO: 1244549
gagauugccuaauugugau

SEQ ID NO: 1497107 - RNA, 19 nt, Artificial Sequence
  Description of Artificial Sequence: Synthetic oligonucleotide
  Antisense strand to SEQ ID NO: 1497106
aucacaauuaggcaaucuc

SEQ ID NO: 1497108 - RNA, 19 nt, Artificial Sequence
  Description of Artificial Sequence: Synthetic oligonucleotide
  Sense strand starting at position 3637 of SEQ ID NO: 1244549
aauugugaugcuugaugau

SEQ ID NO: 1497109 - RNA, 19 nt, Artificial Sequence
  Description of Artificial Sequence: Synthetic oligonucleotide
  Antisense strand to SEQ ID NO: 1497108
aucaucaagcaucacaauu

SEQ ID NO: 1497110 - RNA, 19 nt, Artificial Sequence
  Description of Artificial Sequence: Synthetic oligonucleotide
  Sense strand starting at position 3649 of SEQ ID NO: 1244549
ugaugauaggaauguccuu

SEQ ID NO: 1497111 - RNA, 19 nt, Artificial Sequence
  Description of Artificial Sequence: Synthetic oligonucleotide
  Antisense strand to SEQ ID NO: 1497110
aaggacauuccuaucauca

SEQ ID NO: 1497112 - RNA, 19 nt, Artificial Sequence
  Description of Artificial Sequence: Synthetic oligonucleotide
  Sense strand starting at position 3654 of SEQ ID NO: 1244549
auaggaauguccuuuauau

SEQ ID NO: 1497113 - RNA, 19 nt, Artificial Sequence
  Description of Artificial Sequence: Synthetic oligonucleotide
  Antisense strand to SEQ ID NO: 1497112
auauaaaggacauuccuau

SEQ ID NO: 1497114 - RNA, 19 nt, Artificial Sequence
  Description of Artificial Sequence: Synthetic oligonucleotide
  Sense strand starting at position 3783 of SEQ ID NO: 1244549
gguauucuagcuggucaga

SEQ ID NO: 1497115 - RNA, 19 nt, Artificial Sequence
  Description of Artificial Sequence: Synthetic oligonucleotide
  Antisense strand to SEQ ID NO: 1497114
ucugaccagcuagaauacc

SEQ ID NO: 1497116 - RNA, 19 nt, Artificial Sequence
  Description of Artificial Sequence: Synthetic oligonucleotide
  Sense strand starting at position 3785 of SEQ ID NO: 1244549
uauucuagcuggucagaaa

SEQ ID NO: 1497117 - RNA, 19 nt, Artificial Sequence
  Description of Artificial Sequence: Synthetic oligonucleotide
  Antisense strand to SEQ ID NO: 1497116
uuucugaccagcuagaaua

SEQ ID NO: 1497118 - RNA, 19 nt, Artificial Sequence
  Description of Artificial Sequence: Synthetic oligonucleotide
  Sense strand starting at position 3786 of SEQ ID NO: 1244549
auucuagcuggucagaaau

SEQ ID NO: 1497119 - RNA, 19 nt, Artificial Sequence
  Description of Artificial Sequence: Synthetic oligonucleotide
  Antisense strand to SEQ ID NO: 1497118
auuucugaccagcuagaau

SEQ ID NO: 1497120 - RNA, 19 nt, Artificial Sequence
  Description of Artificial Sequence: Synthetic oligonucleotide
  Sense strand starting at position 3788 of SEQ ID NO: 1244549
ucuagcuggucagaaauuu

SEQ ID NO: 1497121 - RNA, 19 nt, Artificial Sequence
  Description of Artificial Sequence: Synthetic oligonucleotide
  Antisense strand to SEQ ID NO: 1497120
aaauuucugaccagcuaga

SEQ ID NO: 1497122 - RNA, 19 nt, Artificial Sequence
  Description of Artificial Sequence: Synthetic oligonucleotide
  Sense strand starting at position 3934 of SEQ ID NO: 1244549
ggugguuuauugcuugaaa

SEQ ID NO: 1497123 - RNA, 19 nt, Artificial Sequence
  Description of Artificial Sequence: Synthetic oligonucleotide
  Antisense strand to SEQ ID NO: 1497122
uuucaagcaauaaaccacc

SEQ ID NO: 1497124 - RNA, 19 nt, Artificial Sequence
  Description of Artificial Sequence: Synthetic oligonucleotide
  Sense strand starting at position 3935 of SEQ ID NO: 1244549
gugguuuauugcuugaaag

SEQ ID NO: 1497125 - RNA, 19 nt, Artificial Sequence
  Description of Artificial Sequence: Synthetic oligonucleotide
  Antisense strand to SEQ ID NO: 1497124
cuuucaagcaauaaaccac

SEQ ID NO: 1497126 - RNA, 19 nt, Artificial Sequence
  Description of Artificial Sequence: Synthetic oligonucleotide
  Sense strand starting at position 3937 of SEQ ID NO: 1244549
gguuuauugcuugaaagca

SEQ ID NO: 1497127 - RNA, 19 nt, Artificial Sequence
  Description of Artificial Sequence: Synthetic oligonucleotide
  Antisense strand to SEQ ID NO: 1497126
ugcuuucaagcaauaaacc

SEQ ID NO: 1497128 - RNA, 19 nt, Artificial Sequence
  Description of Artificial Sequence: Synthetic oligonucleotide
  Sense strand starting at position 689 of SEQ ID NO: 1244550
gucagagccuguuuacucu

SEQ ID NO: 1497129 - RNA, 19 nt, Artificial Sequence
  Description of Artificial Sequence: Synthetic oligonucleotide
  Antisense strand to SEQ ID NO: 1497128
agaguaaacaggcucugac

SEQ ID NO: 1497130 - RNA, 19 nt, Artificial Sequence
  Description of Artificial Sequence: Synthetic oligonucleotide
  Sense strand starting at position 743 of SEQ ID NO: 1244550
cagcucuguuugugaagga

SEQ ID NO: 1497131 - RNA, 19 nt, Artificial Sequence
  Description of Artificial Sequence: Synthetic oligonucleotide
  Antisense strand to SEQ ID NO: 1497130
uccuucacaaacagagcug

SEQ ID NO: 1497132 - RNA, 19 nt, Artificial Sequence
  Description of Artificial Sequence: Synthetic oligonucleotide
  Sense strand starting at position 788 of SEQ ID NO: 1244550
agacgaauuuaguaacucu

SEQ ID NO: 1497133 - RNA, 19 nt, Artificial Sequence
  Description of Artificial Sequence: Synthetic oligonucleotide
  Antisense strand to SEQ ID NO: 1497132
agaguuacuaaauucgucu

SEQ ID NO: 1497134 - RNA, 19 nt, Artificial Sequence
  Description of Artificial Sequence: Synthetic oligonucleotide
  Sense strand starting at position 831 of SEQ ID NO: 1244550
gcucuuuaguuccagagga

SEQ ID NO: 1497135 - RNA, 19 nt, Artificial Sequence
  Description of Artificial Sequence: Synthetic oligonucleotide
  Antisense strand to SEQ ID NO: 1497134
uccucuggaacuaaagagc

SEQ ID NO: 1497136 - RNA, 19 nt, Artificial Sequence
  Description of Artificial Sequence: Synthetic oligonucleotide
  Sense strand starting at position 977 of SEQ ID NO: 1244550
aggcguuaaucggcgcaca

SEQ ID NO: 1497137 - RNA, 19 nt, Artificial Sequence
  Description of Artificial Sequence: Synthetic oligonucleotide
  Antisense strand to SEQ ID NO: 1497136
ugugcgccgauuaacgccu

SEQ ID NO: 1497138 - RNA, 19 nt, Artificial Sequence
  Description of Artificial Sequence: Synthetic oligonucleotide
  Sense strand starting at position 978 of SEQ ID NO: 1244550
ggcguuaaucggcgcacaa

SEQ ID NO: 1497139 - RNA, 19 nt, Artificial Sequence
  Description of Artificial Sequence: Synthetic oligonucleotide
  Antisense strand to SEQ ID NO: 1497138
uugugcgccgauuaacgcc

SEQ ID NO: 1497140 - RNA, 19 nt, Artificial Sequence
  Description of Artificial Sequence: Synthetic oligonucleotide
  Sense strand starting at position 979 of SEQ ID NO: 1244550
gcguuaaucggcgcacaaa

SEQ ID NO: 1497141 - RNA, 19 nt, Artificial Sequence
  Description of Artificial Sequence: Synthetic oligonucleotide
  Antisense strand to SEQ ID NO: 1497140
uuugugcgccgauuaacgc

SEQ ID NO: 1497142 - RNA, 19 nt, Artificial Sequence
  Description of Artificial Sequence: Synthetic oligonucleotide
  Sense strand starting at position 1015 of SEQ ID NO: 1244550
acaaguuaugcucaucugu

SEQ ID NO: 1497143 - RNA, 19 nt, Artificial Sequence
  Description of Artificial Sequence: Synthetic oligonucleotide
  Antisense strand to SEQ ID NO: 1497142
acagaugagcauaacuugu

SEQ ID NO: 1497144 - RNA, 19 nt, Artificial Sequence
  Description of Artificial Sequence: Synthetic oligonucleotide
  Sense strand starting at position 1020 of SEQ ID NO: 1244550
uuaugcucaucuguacaga

SEQ ID NO: 1497145 - RNA, 19 nt, Artificial Sequence
  Description of Artificial Sequence: Synthetic oligonucleotide
  Antisense strand to SEQ ID NO: 1497144
ucuguacagaugagcauaa

SEQ ID NO: 1497146 - RNA, 19 nt, Artificial Sequence
  Description of Artificial Sequence: Synthetic oligonucleotide
  Sense strand starting at position 1023 of SEQ ID NO: 1244550
ugcucaucuguacagaauc

SEQ ID NO: 1497147 - RNA, 19 nt, Artificial Sequence
  Description of Artificial Sequence: Synthetic oligonucleotide
  Antisense strand to SEQ ID NO: 1497146
gauucuguacagaugagca

SEQ ID NO: 1497148 - RNA, 19 nt, Artificial Sequence
  Description of Artificial Sequence: Synthetic oligonucleotide
  Sense strand starting at position 1214 of SEQ ID NO: 1244550
gcccgcgucuccuuggaaa

SEQ ID NO: 1497149 - RNA, 19 nt, Artificial Sequence
  Description of Artificial Sequence: Synthetic oligonucleotide
  Antisense strand to SEQ ID NO: 1497148
uuuccaaggagacgcgggc

SEQ ID NO: 1497150 - RNA, 19 nt, Artificial Sequence
  Description of Artificial Sequence: Synthetic oligonucleotide
  Sense strand starting at position 1216 of SEQ ID NO: 1244550
ccgcgucuccuuggaaaug

SEQ ID NO: 1497151 - RNA, 19 nt, Artificial Sequence
  Description of Artificial Sequence: Synthetic oligonucleotide
  Antisense strand to SEQ ID NO: 1497150
cauuuccaaggagacgcgg

SEQ ID NO: 1497152 - RNA, 19 nt, Artificial Sequence
  Description of Artificial Sequence: Synthetic oligonucleotide
  Sense strand starting at position 1256 of SEQ ID NO: 1244550
ggagguaauugugaugcca

SEQ ID NO: 1497153 - RNA, 19 nt, Artificial Sequence
  Description of Artificial Sequence: Synthetic oligonucleotide
  Antisense strand to SEQ ID NO: 1497152
uggcaucacaauuaccucc

SEQ ID NO: 1497154 - RNA, 19 nt, Artificial Sequence
  Description of Artificial Sequence: Synthetic oligonucleotide
  Sense strand starting at position 1820 of SEQ ID NO: 1244550
ggucuucgucucuacagga

SEQ ID NO: 1497155 - RNA, 19 nt, Artificial Sequence
  Description of Artificial Sequence: Synthetic oligonucleotide
  Antisense strand to SEQ ID NO: 1497154
uccuguagagacgaagacc

SEQ ID NO: 1497156 - RNA, 19 nt, Artificial Sequence
  Description of Artificial Sequence: Synthetic oligonucleotide
  Sense strand starting at position 1833 of SEQ ID NO: 1244550
acaggacucuugcgugaag

SEQ ID NO: 1497157 - RNA, 19 nt, Artificial Sequence
  Description of Artificial Sequence: Synthetic oligonucleotide
  Antisense strand to SEQ ID NO: 1497156
cuucacgcaagaguccugu

SEQ ID NO: 1497158 - RNA, 19 nt, Artificial Sequence
  Description of Artificial Sequence: Synthetic oligonucleotide
  Sense strand starting at position 1834 of SEQ ID NO: 1244550
caggacucuugcgugaagu

SEQ ID NO: 1497159 - RNA, 19 nt, Artificial Sequence
  Description of Artificial Sequence: Synthetic oligonucleotide
  Antisense strand to SEQ ID NO: 1497158
acuucacgcaagaguccug

SEQ ID NO: 1497160 - RNA, 19 nt, Artificial Sequence
  Description of Artificial Sequence: Synthetic oligonucleotide
  Sense strand starting at position 1835 of SEQ ID NO: 1244550
aggacucuugcgugaaguc

SEQ ID NO: 1497161 - RNA, 19 nt, Artificial Sequence
  Description of Artificial Sequence: Synthetic oligonucleotide
  Antisense strand to SEQ ID NO: 1497160
gacuucacgcaagaguccu

SEQ ID NO: 1497162 - RNA, 19 nt, Artificial Sequence
  Description of Artificial Sequence: Synthetic oligonucleotide
  Sense strand starting at position 2166 of SEQ ID NO: 1244550
cccaauucuuaguguuaca

SEQ ID NO: 1497163 - RNA, 19 nt, Artificial Sequence
  Description of Artificial Sequence: Synthetic oligonucleotide
  Antisense strand to SEQ ID NO: 1497162
uguaacacuaagaauuggg

SEQ ID NO: 1497164 - RNA, 19 nt, Artificial Sequence
  Description of Artificial Sequence: Synthetic oligonucleotide
  Sense strand starting at position 2641 of SEQ ID NO: 1244550
aauagagagucguaagcuu

SEQ ID NO: 1497165 - RNA, 19 nt, Artificial Sequence
  Description of Artificial Sequence: Synthetic oligonucleotide
  Antisense strand to SEQ ID NO: 1497164
aagcuuacgacucucuauu

SEQ ID NO: 1497166 - RNA, 19 nt, Artificial Sequence
  Description of Artificial Sequence: Synthetic oligonucleotide
  Sense strand starting at position 2649 of SEQ ID NO: 1244550
gucguaagcuuauccugau

SEQ ID NO: 1497167 - RNA, 19 nt, Artificial Sequence
  Description of Artificial Sequence: Synthetic oligonucleotide
  Antisense strand to SEQ ID NO: 1497166
aucaggauaagcuuacgac

SEQ ID NO: 1497168 - RNA, 19 nt, Artificial Sequence
  Description of Artificial Sequence: Synthetic oligonucleotide
  Sense strand starting at position 2650 of SEQ ID NO: 1244550
ucguaagcuuauccugaua

SEQ ID NO: 1497169 - RNA, 19 nt, Artificial Sequence
  Description of Artificial Sequence: Synthetic oligonucleotide
  Antisense strand to SEQ ID NO: 1497168
uaucaggauaagcuuacga

SEQ ID NO: 1497170 - RNA, 19 nt, Artificial Sequence
  Description of Artificial Sequence: Synthetic oligonucleotide
  Sense strand starting at position 2652 of SEQ ID NO: 1244550
guaagcuuauccugauaga

SEQ ID NO: 1497171 - RNA, 19 nt, Artificial Sequence
  Description of Artificial Sequence: Synthetic oligonucleotide
  Antisense strand to SEQ ID NO: 1497170
ucuaucaggauaagcuuac

SEQ ID NO: 1497172 - RNA, 19 nt, Artificial Sequence
  Description of Artificial Sequence: Synthetic oligonucleotide
  Sense strand starting at position 2655 of SEQ ID NO: 1244550
agcuuauccugauagacaa

SEQ ID NO: 1497173 - RNA, 19 nt, Artificial Sequence
  Description of Artificial Sequence: Synthetic oligonucleotide
  Antisense strand to SEQ ID NO: 1497172
uugucuaucaggauaagcu

SEQ ID NO: 1497174 - RNA, 19 nt, Artificial Sequence
  Description of Artificial Sequence: Synthetic oligonucleotide
  Sense strand starting at position 2980 of SEQ ID NO: 1244550
aaguuauggccauaucgac

SEQ ID NO: 1497175 - RNA, 19 nt, Artificial Sequence
  Description of Artificial Sequence: Synthetic oligonucleotide
  Antisense strand to SEQ ID NO: 1497174
gucgauauggccauaacuu

SEQ ID NO: 1497176 - RNA, 19 nt, Artificial Sequence
  Description of Artificial Sequence: Synthetic oligonucleotide
  Sense strand starting at position 2986 of SEQ ID NO: 1244550
uggccauaucgacgacauu

SEQ ID NO: 1497177 - RNA, 19 nt, Artificial Sequence
  Description of Artificial Sequence: Synthetic oligonucleotide
  Antisense strand to SEQ ID NO: 1497176
aaugucgucgauauggcca

SEQ ID NO: 1497178 - RNA, 19 nt, Artificial Sequence
  Description of Artificial Sequence: Synthetic oligonucleotide
  Sense strand starting at position 3125 of SEQ ID NO: 1244550
cuacuauugcucugccuga

SEQ ID NO: 1497179 - RNA, 19 nt, Artificial Sequence
  Description of Artificial Sequence: Synthetic oligonucleotide
  Antisense strand to SEQ ID NO: 1497178
ucaggcagagcaauaguag

SEQ ID NO: 1497180 - RNA, 19 nt, Artificial Sequence
  Description of Artificial Sequence: Synthetic oligonucleotide
  Sense strand starting at position 3212 of SEQ ID NO: 1244550
cgugguagcucuagagagu

SEQ ID NO: 1497181 - RNA, 19 nt, Artificial Sequence
  Description of Artificial Sequence: Synthetic oligonucleotide
  Antisense strand to SEQ ID NO: 1497180
acucucuagagcuaccacg

SEQ ID NO: 1497182 - RNA, 19 nt, Artificial Sequence
  Description of Artificial Sequence: Synthetic oligonucleotide
  Sense strand starting at position 3215 of SEQ ID NO: 1244550
gguagcucuagagagucua

SEQ ID NO: 1497183 - RNA, 19 nt, Artificial Sequence
  Description of Artificial Sequence: Synthetic oligonucleotide
  Antisense strand to SEQ ID NO: 1497182
uagacucucuagagcuacc

SEQ ID NO: 1497184 - RNA, 19 nt, Artificial Sequence
  Description of Artificial Sequence: Synthetic oligonucleotide
  Sense strand starting at position 3283 of SEQ ID NO: 1244550
caaccauccuggugagaau

SEQ ID NO: 1497185 - RNA, 19 nt, Artificial Sequence
  Description of Artificial Sequence: Synthetic oligonucleotide
  Antisense strand to SEQ ID NO: 1497184
auucucaccaggaugguug

SEQ ID NO: 1497186 - RNA, 19 nt, Artificial Sequence
  Description of Artificial Sequence: Synthetic oligonucleotide
  Sense strand starting at position 3343 of SEQ ID NO: 1244550
gccagaaucugccuucuaa

SEQ ID NO: 1497187 - RNA, 19 nt, Artificial Sequence
  Description of Artificial Sequence: Synthetic oligonucleotide
  Antisense strand to SEQ ID NO: 1497186
uuagaaggcagauucuggc

SEQ ID NO: 1497188 - RNA, 19 nt, Artificial Sequence
  Description of Artificial Sequence: Synthetic oligonucleotide
  Sense strand starting at position 3408 of SEQ ID NO: 1244550
cuccuuuguugacccagau

SEQ ID NO: 1497189 - RNA, 19 nt, Artificial Sequence
  Description of Artificial Sequence: Synthetic oligonucleotide
  Antisense strand to SEQ ID NO: 1497188
aucugggucaacaaaggag

SEQ ID NO: 1497190 - RNA, 19 nt, Artificial Sequence
  Description of Artificial Sequence: Synthetic oligonucleotide
  Sense strand starting at position 3421 of SEQ ID NO: 1244550
ccagaugucugaggugcuu

SEQ ID NO: 1497191 - RNA, 19 nt, Artificial Sequence
  Description of Artificial Sequence: Synthetic oligonucleotide
  Antisense strand to SEQ ID NO: 1497190
aagcaccucagacaucugg

SEQ ID NO: 1497192 - RNA, 19 nt, Artificial Sequence
  Description of Artificial Sequence: Synthetic oligonucleotide
  Sense strand starting at position 3448 of SEQ ID NO: 1244550
ucuggaacucuggguuaga

SEQ ID NO: 1497193 - RNA, 19 nt, Artificial Sequence
  Description of Artificial Sequence: Synthetic oligonucleotide
  Antisense strand to SEQ ID NO: 1497192
ucuaacccagaguuccaga

SEQ ID NO: 1497194 - RNA, 19 nt, Artificial Sequence
  Description of Artificial Sequence: Synthetic oligonucleotide
  Sense strand starting at position 3449 of SEQ ID NO: 1244550
cuggaacucuggguuagau

SEQ ID NO: 1497195 - RNA, 19 nt, Artificial Sequence
  Description of Artificial Sequence: Synthetic oligonucleotide
  Antisense strand to SEQ ID NO: 1497194
aucuaacccagaguuccag

SEQ ID NO: 1497196 - RNA, 19 nt, Artificial Sequence
  Description of Artificial Sequence: Synthetic oligonucleotide
  Sense strand starting at position 3451 of SEQ ID NO: 1244550
ggaacucuggguuagaugu

SEQ ID NO: 1497197 - RNA, 19 nt, Artificial Sequence
  Description of Artificial Sequence: Synthetic oligonucleotide
  Antisense strand to SEQ ID NO: 1497196
acaucuaacccagaguucc

SEQ ID NO: 1497198 - RNA, 19 nt, Artificial Sequence
  Description of Artificial Sequence: Synthetic oligonucleotide
  Sense strand starting at position 3489 of SEQ ID NO: 1244550
uggucaccuuucuuucuua

SEQ ID NO: 1497199 - RNA, 19 nt, Artificial Sequence
  Description of Artificial Sequence: Synthetic oligonucleotide
  Antisense strand to SEQ ID NO: 1497198
uaagaaagaaaggugacca

SEQ ID NO: 1497200 - RNA, 19 nt, Artificial Sequence
  Description of Artificial Sequence: Synthetic oligonucleotide
  Sense strand starting at position 3490 of SEQ ID NO: 1244550
ggucaccuuucuuucuuau

SEQ ID NO: 1497201 - RNA, 19 nt, Artificial Sequence
  Description of Artificial Sequence: Synthetic oligonucleotide
  Antisense strand to SEQ ID NO: 1497200
auaagaaagaaaggugacc

SEQ ID NO: 1497202 - RNA, 19 nt, Artificial Sequence
  Description of Artificial Sequence: Synthetic oligonucleotide
  Sense strand starting at position 3571 of SEQ ID NO: 1244550
gguuauaacuccugaguuc

SEQ ID NO: 1497203 - RNA, 19 nt, Artificial Sequence
  Description of Artificial Sequence: Synthetic oligonucleotide
  Antisense strand to SEQ ID NO: 1497202
gaacucaggaguuauaacc

SEQ ID NO: 1497204 - RNA, 19 nt, Artificial Sequence
  Description of Artificial Sequence: Synthetic oligonucleotide
  Sense strand starting at position 413 of SEQ ID NO: 1244551
agggacaucuuauaauauc

SEQ ID NO: 1497205 - RNA, 19 nt, Artificial Sequence
  Description of Artificial Sequence: Synthetic oligonucleotide
  Antisense strand to SEQ ID NO: 1497204
gauauuauaagaugucccu

SEQ ID NO: 1497206 - RNA, 19 nt, Artificial Sequence
  Description of Artificial Sequence: Synthetic oligonucleotide
  Sense strand starting at position 503 of SEQ ID NO: 1244551
uguagaaauuaucagagac

SEQ ID NO: 1497207 - RNA, 19 nt, Artificial Sequence
  Description of Artificial Sequence: Synthetic oligonucleotide
  Antisense strand to SEQ ID NO: 1497206
gucucugauaauuucuaca

SEQ ID NO: 1497208 - RNA, 19 nt, Artificial Sequence
  Description of Artificial Sequence: Synthetic oligonucleotide
  Sense strand starting at position 697 of SEQ ID NO: 1244551
cuccauggucucgaaugau

SEQ ID NO: 1497209 - RNA, 19 nt, Artificial Sequence
  Description of Artificial Sequence: Synthetic oligonucleotide
  Antisense strand to SEQ ID NO: 1497208
aucauucgagaccauggag

SEQ ID NO: 1497210 - RNA, 19 nt, Artificial Sequence
  Description of Artificial Sequence: Synthetic oligonucleotide
  Sense strand starting at position 700 of SEQ ID NO: 1244551
cauggucucgaaugaucuu

SEQ ID NO: 1497211 - RNA, 19 nt, Artificial Sequence
  Description of Artificial Sequence: Synthetic oligonucleotide
  Antisense strand to SEQ ID NO: 1497210
aagaucauucgagaccaug

SEQ ID NO: 1497212 - RNA, 19 nt, Artificial Sequence
  Description of Artificial Sequence: Synthetic oligonucleotide
  Sense strand starting at position 706 of SEQ ID NO: 1244551
cucgaaugaucuuccugac

SEQ ID NO: 1497213 - RNA, 19 nt, Artificial Sequence
  Description of Artificial Sequence: Synthetic oligonucleotide
  Antisense strand to SEQ ID NO: 1497212
gucaggaagaucauucgag

SEQ ID NO: 1497214 - RNA, 19 nt, Artificial Sequence
  Description of Artificial Sequence: Synthetic oligonucleotide
  Sense strand starting at position 786 of SEQ ID NO: 1244551
uagcgcuuggccugcaauu

SEQ ID NO: 1497215 - RNA, 19 nt, Artificial Sequence
  Description of Artificial Sequence: Synthetic oligonucleotide
  Antisense strand to SEQ ID NO: 1497214
aauugcaggccaagcgcua

SEQ ID NO: 1497216 - RNA, 19 nt, Artificial Sequence
  Description of Artificial Sequence: Synthetic oligonucleotide
  Sense strand starting at position 1344 of SEQ ID NO: 1244551
cugucucucccgcuguaau

SEQ ID NO: 1497217 - RNA, 19 nt, Artificial Sequence
  Description of Artificial Sequence: Synthetic oligonucleotide
  Antisense strand to SEQ ID NO: 1497216
auuacagcgggagagacag

SEQ ID NO: 1497218 - RNA, 19 nt, Artificial Sequence
  Description of Artificial Sequence: Synthetic oligonucleotide
  Sense strand starting at position 1345 of SEQ ID NO: 1244551
ugucucucccgcuguaauu

SEQ ID NO: 1497219 - RNA, 19 nt, Artificial Sequence
  Description of Artificial Sequence: Synthetic oligonucleotide
  Antisense strand to SEQ ID NO: 1497218
aauuacagcgggagagaca

SEQ ID NO: 1497220 - RNA, 19 nt, Artificial Sequence
  Description of Artificial Sequence: Synthetic oligonucleotide
  Sense strand starting at position 1347 of SEQ ID NO: 1244551
ucucucccgcuguaauuua

SEQ ID NO: 1497221 - RNA, 19 nt, Artificial Sequence
  Description of Artificial Sequence: Synthetic oligonucleotide
  Antisense strand to SEQ ID NO: 1497220
uaaauuacagcgggagaga

SEQ ID NO: 1497222 - RNA, 19 nt, Artificial Sequence
  Description of Artificial Sequence: Synthetic oligonucleotide
  Sense strand starting at position 1412 of SEQ ID NO: 1244551
gcuggaucagcgcuugcaa

SEQ ID NO: 1497223 - RNA, 19 nt, Artificial Sequence
  Description of Artificial Sequence: Synthetic oligonucleotide
  Antisense strand to SEQ ID NO: 1497222
uugcaagcgcugauccagc

SEQ ID NO: 1497224 - RNA, 19 nt, Artificial Sequence
  Description of Artificial Sequence: Synthetic oligonucleotide
  Sense strand starting at position 1414 of SEQ ID NO: 1244551
uggaucagcgcuugcaaau

SEQ ID NO: 1497225 - RNA, 19 nt, Artificial Sequence
  Description of Artificial Sequence: Synthetic oligonucleotide
  Antisense strand to SEQ ID NO: 1497224
auuugcaagcgcugaucca

SEQ ID NO: 1497226 - RNA, 19 nt, Artificial Sequence
  Description of Artificial Sequence: Synthetic oligonucleotide
  Sense strand starting at position 1672 of SEQ ID NO: 1244551
aggaaacacuccggccaua

SEQ ID NO: 1497227 - RNA, 19 nt, Artificial Sequence
  Description of Artificial Sequence: Synthetic oligonucleotide
  Antisense strand to SEQ ID NO: 1497226
uauggccggaguguuuccu

SEQ ID NO: 1497228 - RNA, 19 nt, Artificial Sequence
  Description of Artificial Sequence: Synthetic oligonucleotide
  Sense strand starting at position 1683 of SEQ ID NO: 1244551
cggccauauccggagaauc

SEQ ID NO: 1497229 - RNA, 19 nt, Artificial Sequence
  Description of Artificial Sequence: Synthetic oligonucleotide
  Antisense strand to SEQ ID NO: 1497228
gauucuccggauauggccg

SEQ ID NO: 1497230 - RNA, 19 nt, Artificial Sequence
  Description of Artificial Sequence: Synthetic oligonucleotide
  Sense strand starting at position 1685 of SEQ ID NO: 1244551
gccauauccggagaaucug

SEQ ID NO: 1497231 - RNA, 19 nt, Artificial Sequence
  Description of Artificial Sequence: Synthetic oligonucleotide
  Antisense strand to SEQ ID NO: 1497230
cagauucuccggauauggc

SEQ ID NO: 1497232 - RNA, 19 nt, Artificial Sequence
  Description of Artificial Sequence: Synthetic oligonucleotide
  Sense strand starting at position 1991 of SEQ ID NO: 1244551
acccgaguucagcaguuga

SEQ ID NO: 1497233 - RNA, 19 nt, Artificial Sequence
  Description of Artificial Sequence: Synthetic oligonucleotide
  Antisense strand to SEQ ID NO: 1497232
ucaacugcugaacucgggu

SEQ ID NO: 1497234 - RNA, 19 nt, Artificial Sequence
  Description of Artificial Sequence: Synthetic oligonucleotide
  Sense strand starting at position 2025 of SEQ ID NO: 1244551
ggugcucagauggauuagu

SEQ ID NO: 1497235 - RNA, 19 nt, Artificial Sequence
  Description of Artificial Sequence: Synthetic oligonucleotide
  Antisense strand to SEQ ID NO: 1497234
acuaauccaucugagcacc

SEQ ID NO: 1497236 - RNA, 19 nt, Artificial Sequence
  Description of Artificial Sequence: Synthetic oligonucleotide
  Sense strand starting at position 2036 of SEQ ID NO: 1244551
ggauuagugagacgaccaa

SEQ ID NO: 1497237 - RNA, 19 nt, Artificial Sequence
  Description of Artificial Sequence: Synthetic oligonucleotide
  Antisense strand to SEQ ID NO: 1497236
uuggucgucucacuaaucc

SEQ ID NO: 1497238 - RNA, 19 nt, Artificial Sequence
  Description of Artificial Sequence: Synthetic oligonucleotide
  Sense strand starting at position 2253 of SEQ ID NO: 1244551
aagauugcgcauuguacga

SEQ ID NO: 1497239 - RNA, 19 nt, Artificial Sequence
  Description of Artificial Sequence: Synthetic oligonucleotide
  Antisense strand to SEQ ID NO: 1497238
ucguacaaugcgcaaucuu

SEQ ID NO: 1497240 - RNA, 19 nt, Artificial Sequence
  Description of Artificial Sequence: Synthetic oligonucleotide
  Sense strand starting at position 2269 of SEQ ID NO: 1244551
cgaugucuguugucaucaa

SEQ ID NO: 1497241 - RNA, 19 nt, Artificial Sequence
  Description of Artificial Sequence: Synthetic oligonucleotide
  Antisense strand to SEQ ID NO: 1497240
uugaugacaacagacaucg

SEQ ID NO: 1497242 - RNA, 19 nt, Artificial Sequence
  Description of Artificial Sequence: Synthetic oligonucleotide
  Sense strand starting at position 2273 of SEQ ID NO: 1244551
gucuguugucaucaaugug

SEQ ID NO: 1497243 - RNA, 19 nt, Artificial Sequence
  Description of Artificial Sequence: Synthetic oligonucleotide
  Antisense strand to SEQ ID NO: 1497242
cacauugaugacaacagac

SEQ ID NO: 1497244 - RNA, 19 nt, Artificial Sequence
  Description of Artificial Sequence: Synthetic oligonucleotide
  Sense strand starting at position 2276 of SEQ ID NO: 1244551
uguugucaucaauguguac

SEQ ID NO: 1497245 - RNA, 19 nt, Artificial Sequence
  Description of Artificial Sequence: Synthetic oligonucleotide
  Antisense strand to SEQ ID NO: 1497244
guacacauugaugacaaca

SEQ ID NO: 1497246 - RNA, 19 nt, Artificial Sequence
  Description of Artificial Sequence: Synthetic oligonucleotide
  Sense strand starting at position 2305 of SEQ ID NO: 1244551
guacuagcuccuggacagu

SEQ ID NO: 1497247 - RNA, 19 nt, Artificial Sequence
  Description of Artificial Sequence: Synthetic oligonucleotide
  Antisense strand to SEQ ID NO: 1497246
acuguccaggagcuaguac

SEQ ID NO: 1497248 - RNA, 19 nt, Artificial Sequence
  Description of Artificial Sequence: Synthetic oligonucleotide
  Sense strand starting at position 2745 of SEQ ID NO: 1244551
cugaaauucuguggagggu

SEQ ID NO: 1497249 - RNA, 19 nt, Artificial Sequence
  Description of Artificial Sequence: Synthetic oligonucleotide
  Antisense strand to SEQ ID NO: 1497248
acccuccacagaauuucag

SEQ ID NO: 1497250 - RNA, 19 nt, Artificial Sequence
  Description of Artificial Sequence: Synthetic oligonucleotide
  Sense strand starting at position 2767 of SEQ ID NO: 1244551
gaggaauuguaacccauac

SEQ ID NO: 1497251 - RNA, 19 nt, Artificial Sequence
  Description of Artificial Sequence: Synthetic oligonucleotide
  Antisense strand to SEQ ID NO: 1497250
guauggguuacaauuccuc

SEQ ID NO: 1497252 - RNA, 19 nt, Artificial Sequence
  Description of Artificial Sequence: Synthetic oligonucleotide
  Sense strand starting at position 2789 of SEQ ID NO: 1244551
cccugaaucuaguugagaa

SEQ ID NO: 1497253 - RNA, 19 nt, Artificial Sequence
  Description of Artificial Sequence: Synthetic oligonucleotide
  Antisense strand to SEQ ID NO: 1497252
uucucaacuagauucaggg

SEQ ID NO: 1497254 - RNA, 19 nt, Artificial Sequence
  Description of Artificial Sequence: Synthetic oligonucleotide
  Sense strand starting at position 2793 of SEQ ID NO: 1244551
gaaucuaguugagaauuua

SEQ ID NO: 1497255 - RNA, 19 nt, Artificial Sequence
  Description of Artificial Sequence: Synthetic oligonucleotide
  Antisense strand to SEQ ID NO: 1497254
uaaauucucaacuagauuc

SEQ ID NO: 1497256 - RNA, 19 nt, Artificial Sequence
  Description of Artificial Sequence: Synthetic oligonucleotide
  Sense strand starting at position 2844 of SEQ ID NO: 1244551
aaaggaugucaaugugcuu

SEQ ID NO: 1497257 - RNA, 19 nt, Artificial Sequence
  Description of Artificial Sequence: Synthetic oligonucleotide
  Antisense strand to SEQ ID NO: 1497256
aagcacauugacauccuuu

SEQ ID NO: 1497258 - RNA, 19 nt, Artificial Sequence
  Description of Artificial Sequence: Synthetic oligonucleotide
  Sense strand starting at position 2857 of SEQ ID NO: 1244551
gugcuuucagaacgguaaa

SEQ ID NO: 1497259 - RNA, 19 nt, Artificial Sequence
  Description of Artificial Sequence: Synthetic oligonucleotide
  Antisense strand to SEQ ID NO: 1497258
uuuaccguucugaaagcac

SEQ ID NO: 1497260 - RNA, 19 nt, Artificial Sequence
  Description of Artificial Sequence: Synthetic oligonucleotide
  Sense strand starting at position 3199 of SEQ ID NO: 1244551
uuuaaugcuggguguucua

SEQ ID NO: 1497261 - RNA, 19 nt, Artificial Sequence
  Description of Artificial Sequence: Synthetic oligonucleotide
  Antisense strand to SEQ ID NO: 1497260
uagaacacccagcauuaaa

SEQ ID NO: 1497262 - RNA, 19 nt, Artificial Sequence
  Description of Artificial Sequence: Synthetic oligonucleotide
  Sense strand starting at position 3202 of SEQ ID NO: 1244551
aaugcuggguguucuaaag

SEQ ID NO: 1497263 - RNA, 19 nt, Artificial Sequence
  Description of Artificial Sequence: Synthetic oligonucleotide
  Antisense strand to SEQ ID NO: 1497262
cuuuagaacacccagcauu

SEQ ID NO: 1497264 - RNA, 19 nt, Artificial Sequence
  Description of Artificial Sequence: Synthetic oligonucleotide
  Sense strand starting at position 3213 of SEQ ID NO: 1244551
uucuaaaggucccuacagu

SEQ ID NO: 1497265 - RNA, 19 nt, Artificial Sequence
  Description of Artificial Sequence: Synthetic oligonucleotide
  Antisense strand to SEQ ID NO: 1497264
acuguagggaccuuuagaa

SEQ ID NO: 1497266 - RNA, 19 nt, Artificial Sequence
  Description of Artificial Sequence: Synthetic oligonucleotide
  Sense strand starting at position 3271 of SEQ ID NO: 1244551
auggauggaugugaggauu

SEQ ID NO: 1497267 - RNA, 19 nt, Artificial Sequence
  Description of Artificial Sequence: Synthetic oligonucleotide
  Antisense strand to SEQ ID NO: 1497266
aauccucacauccauccau

SEQ ID NO: 1497268 - RNA, 19 nt, Artificial Sequence
  Description of Artificial Sequence: Synthetic oligonucleotide
  Sense strand starting at position 3320 of SEQ ID NO: 1244551
gguaaucccaagugguaga

SEQ ID NO: 1497269 - RNA, 19 nt, Artificial Sequence
  Description of Artificial Sequence: Synthetic oligonucleotide
  Antisense strand to SEQ ID NO: 1497268
ucuaccacuugggauuacc

SEQ ID NO: 1497270 - RNA, 19 nt, Artificial Sequence
  Description of Artificial Sequence: Synthetic oligonucleotide
  Sense strand starting at position 3321 of SEQ ID NO: 1244551
guaaucccaagugguagaa

SEQ ID NO: 1497271 - RNA, 19 nt, Artificial Sequence
  Description of Artificial Sequence: Synthetic oligonucleotide
  Antisense strand to SEQ ID NO: 1497270
uucuaccacuugggauuac

SEQ ID NO: 1497272 - RNA, 19 nt, Artificial Sequence
  Description of Artificial Sequence: Synthetic oligonucleotide
  Sense strand starting at position 3412 of SEQ ID NO: 1244551
cggcgagaggauugguuaa

SEQ ID NO: 1497273 - RNA, 19 nt, Artificial Sequence
  Description of Artificial Sequence: Synthetic oligonucleotide
  Antisense strand to SEQ ID NO: 1497272
uuaaccaauccucucgccg

SEQ ID NO: 1497274 - RNA, 19 nt, Artificial Sequence
  Description of Artificial Sequence: Synthetic oligonucleotide
  Sense strand starting at position 3414 of SEQ ID NO: 1244551
gcgagaggauugguuaaac

SEQ ID NO: 1497275 - RNA, 19 nt, Artificial Sequence
  Description of Artificial Sequence: Synthetic oligonucleotide
  Antisense strand to SEQ ID NO: 1497274
guuuaaccaauccucucgc

SEQ ID NO: 1497276 - RNA, 19 nt, Artificial Sequence
  Description of Artificial Sequence: Synthetic oligonucleotide
  Sense strand starting at position 3425 of SEQ ID NO: 1244551
gguuaaacucaugaguuua

SEQ ID NO: 1497277 - RNA, 19 nt, Artificial Sequence
  Description of Artificial Sequence: Synthetic oligonucleotide
  Antisense strand to SEQ ID NO: 1497276
uaaacucaugaguuuaacc

SEQ ID NO: 1497278 - RNA, 19 nt, Artificial Sequence
  Description of Artificial Sequence: Synthetic oligonucleotide
  Sense strand starting at position 3595 of SEQ ID NO: 1244551
gagcgaggcugguuucaua

SEQ ID NO: 1497279 - RNA, 19 nt, Artificial Sequence
  Description of Artificial Sequence: Synthetic oligonucleotide
  Antisense strand to SEQ ID NO: 1497278
uaugaaaccagccucgcuc

SEQ ID NO: 1497280 - RNA, 19 nt, Artificial Sequence
  Description of Artificial Sequence: Synthetic oligonucleotide
  Sense strand starting at position 3598 of SEQ ID NO: 1244551
cgaggcugguuucauagaa

SEQ ID NO: 1497281 - RNA, 19 nt, Artificial Sequence
  Description of Artificial Sequence: Synthetic oligonucleotide
  Antisense strand to SEQ ID NO: 1497280
uucuaugaaaccagccucg

SEQ ID NO: 1497282 - RNA, 19 nt, Artificial Sequence
  Description of Artificial Sequence: Synthetic oligonucleotide
  Sense strand starting at position 3889 of SEQ ID NO: 1244551
cgcaaauugcugggauuuc

SEQ ID NO: 1497283 - RNA, 19 nt, Artificial Sequence
  Description of Artificial Sequence: Synthetic oligonucleotide
  Antisense strand to SEQ ID NO: 1497282
gaaaucccagcaauuugcg

SEQ ID NO: 1497284 - RNA, 19 nt, Artificial Sequence
  Description of Artificial Sequence: Synthetic oligonucleotide
  Sense strand starting at position 110 of SEQ ID NO: 1244552
gucuuagauuucuaacaag

SEQ ID NO: 1497285 - RNA, 19 nt, Artificial Sequence
  Description of Artificial Sequence: Synthetic oligonucleotide
  Antisense strand to SEQ ID NO: 1497284
cuuguuagaaaucuaagac

SEQ ID NO: 1497286 - RNA, 19 nt, Artificial Sequence
  Description of Artificial Sequence: Synthetic oligonucleotide
  Sense strand starting at position 113 of SEQ ID NO: 1244552
uuagauuucuaacaagugu

SEQ ID NO: 1497287 - RNA, 19 nt, Artificial Sequence
  Description of Artificial Sequence: Synthetic oligonucleotide
  Antisense strand to SEQ ID NO: 1497286
acacuuguuagaaaucuaa

SEQ ID NO: 1497288 - RNA, 19 nt, Artificial Sequence
  Description of Artificial Sequence: Synthetic oligonucleotide
  Sense strand starting at position 121 of SEQ ID NO: 1244552
cuaacaaguguauguagaa

SEQ ID NO: 1497289 - RNA, 19 nt, Artificial Sequence
  Description of Artificial Sequence: Synthetic oligonucleotide
  Antisense strand to SEQ ID NO: 1497288
uucuacauacacuuguuag

SEQ ID NO: 1497290 - RNA, 19 nt, Artificial Sequence
  Description of Artificial Sequence: Synthetic oligonucleotide
  Sense strand starting at position 122 of SEQ ID NO: 1244552
uaacaaguguauguagaaa

SEQ ID NO: 1497291 - RNA, 19 nt, Artificial Sequence
  Description of Artificial Sequence: Synthetic oligonucleotide
  Antisense strand to SEQ ID NO: 1497290
uuucuacauacacuuguua

SEQ ID NO: 1497292 - RNA, 19 nt, Artificial Sequence
  Description of Artificial Sequence: Synthetic oligonucleotide
  Sense strand starting at position 163 of SEQ ID NO: 1244552
auaucagagcucugggauu

SEQ ID NO: 1497293 - RNA, 19 nt, Artificial Sequence
  Description of Artificial Sequence: Synthetic oligonucleotide
  Antisense strand to SEQ ID NO: 1497292
aaucccagagcucugauau

SEQ ID NO: 1497294 - RNA, 19 nt, Artificial Sequence
  Description of Artificial Sequence: Synthetic oligonucleotide
  Sense strand starting at position 541 of SEQ ID NO: 1244552
gaggccacuuaguaaacaa

SEQ ID NO: 1497295 - RNA, 19 nt, Artificial Sequence
  Description of Artificial Sequence: Synthetic oligonucleotide
  Antisense strand to SEQ ID NO: 1497294
uuguuuacuaaguggccuc

SEQ ID NO: 1497296 - RNA, 19 nt, Artificial Sequence
  Description of Artificial Sequence: Synthetic oligonucleotide
  Sense strand starting at position 658 of SEQ ID NO: 1244552
agaugagguucagggaaau

SEQ ID NO: 1497297 - RNA, 19 nt, Artificial Sequence
  Description of Artificial Sequence: Synthetic oligonucleotide
  Antisense strand to SEQ ID NO: 1497296
auuucccugaaccucaucu

SEQ ID NO: 1497298 - RNA, 19 nt, Artificial Sequence
  Description of Artificial Sequence: Synthetic oligonucleotide
  Sense strand starting at position 727 of SEQ ID NO: 1244552
gcaucucagagcugucaga

SEQ ID NO: 1497299 - RNA, 19 nt, Artificial Sequence
  Description of Artificial Sequence: Synthetic oligonucleotide
  Antisense strand to SEQ ID NO: 1497298
ucugacagcucugagaugc

SEQ ID NO: 1497300 - RNA, 19 nt, Artificial Sequence
  Description of Artificial Sequence: Synthetic oligonucleotide
  Sense strand starting at position 827 of SEQ ID NO: 1244552
cagggucaggccugucauu

SEQ ID NO: 1497301 - RNA, 19 nt, Artificial Sequence
  Description of Artificial Sequence: Synthetic oligonucleotide
  Antisense strand to SEQ ID NO: 1497300
aaugacaggccugacccug

SEQ ID NO: 1497302 - RNA, 19 nt, Artificial Sequence
  Description of Artificial Sequence: Synthetic oligonucleotide
  Sense strand starting at position 971 of SEQ ID NO: 1244552
gucucacugcagugagacu

SEQ ID NO: 1497303 - RNA, 19 nt, Artificial Sequence
  Description of Artificial Sequence: Synthetic oligonucleotide
  Antisense strand to SEQ ID NO: 1497302
agucucacugcagugagac

SEQ ID NO: 1497304 - RNA, 19 nt, Artificial Sequence
  Description of Artificial Sequence: Synthetic oligonucleotide
  Sense strand starting at position 978 of SEQ ID NO: 1244552
ugcagugagacuugagagu

SEQ ID NO: 1497305 - RNA, 19 nt, Artificial Sequence
  Description of Artificial Sequence: Synthetic oligonucleotide
  Antisense strand to SEQ ID NO: 1497304
acucucaagucucacugca

SEQ ID NO: 1497306 - RNA, 19 nt, Artificial Sequence
  Description of Artificial Sequence: Synthetic oligonucleotide
  Sense strand starting at position 1004 of SEQ ID NO: 1244552
gucagauucccaggucaac

SEQ ID NO: 1497307 - RNA, 19 nt, Artificial Sequence
  Description of Artificial Sequence: Synthetic oligonucleotide
  Antisense strand to SEQ ID NO: 1497306
guugaccugggaaucugac

SEQ ID NO: 1497308 - RNA, 19 nt, Artificial Sequence
  Description of Artificial Sequence: Synthetic oligonucleotide
  Sense strand starting at position 1421 of SEQ ID NO: 1244552
guggaguuggccgagaaga

SEQ ID NO: 1497309 - RNA, 19 nt, Artificial Sequence
  Description of Artificial Sequence: Synthetic oligonucleotide
  Antisense strand to SEQ ID NO: 1497308
ucuucucggccaacuccac

SEQ ID NO: 1497310 - RNA, 19 nt, Artificial Sequence
  Description of Artificial Sequence: Synthetic oligonucleotide
  Sense strand starting at position 1423 of SEQ ID NO: 1244552
ggaguuggccgagaagacu

SEQ ID NO: 1497311 - RNA, 19 nt, Artificial Sequence
  Description of Artificial Sequence: Synthetic oligonucleotide
  Antisense strand to SEQ ID NO: 1497310
agucuucucggccaacucc

SEQ ID NO: 1497312 - RNA, 19 nt, Artificial Sequence
  Description of Artificial Sequence: Synthetic oligonucleotide
  Sense strand starting at position 1606 of SEQ ID NO: 1244552
agugcuuccgacugcgaga

SEQ ID NO: 1497313 - RNA, 19 nt, Artificial Sequence
  Description of Artificial Sequence: Synthetic oligonucleotide
  Antisense strand to SEQ ID NO: 1497312
ucucgcagucggaagcacu

SEQ ID NO: 1497314 - RNA, 19 nt, Artificial Sequence
  Description of Artificial Sequence: Synthetic oligonucleotide
  Sense strand starting at position 2026 of SEQ ID NO: 1244552
cgaggagguauacgaucua

SEQ ID NO: 1497315 - RNA, 19 nt, Artificial Sequence
  Description of Artificial Sequence: Synthetic oligonucleotide
  Antisense strand to SEQ ID NO: 1497314
uagaucguauaccuccucg

SEQ ID NO: 1497316 - RNA, 19 nt, Artificial Sequence
  Description of Artificial Sequence: Synthetic oligonucleotide
  Sense strand starting at position 2130 of SEQ ID NO: 1244552
guucuuuccagcugguuga

SEQ ID NO: 1497317 - RNA, 19 nt, Artificial Sequence
  Description of Artificial Sequence: Synthetic oligonucleotide
  Antisense strand to SEQ ID NO: 1497316
ucaaccagcuggaaagaac

SEQ ID NO: 1497318 - RNA, 19 nt, Artificial Sequence
  Description of Artificial Sequence: Synthetic oligonucleotide
  Sense strand starting at position 2180 of SEQ ID NO: 1244552
ucuccugagccugaucuuu

SEQ ID NO: 1497319 - RNA, 19 nt, Artificial Sequence
  Description of Artificial Sequence: Synthetic oligonucleotide
  Antisense strand to SEQ ID NO: 1497318
aaagaucaggcucaggaga

SEQ ID NO: 1497320 - RNA, 19 nt, Artificial Sequence
  Description of Artificial Sequence: Synthetic oligonucleotide
  Sense strand starting at position 2276 of SEQ ID NO: 1244552
gccgguauucgcuuucaau

SEQ ID NO: 1497321 - RNA, 19 nt, Artificial Sequence
  Description of Artificial Sequence: Synthetic oligonucleotide
  Antisense strand to SEQ ID NO: 1497320
auugaaagcgaauaccggc

SEQ ID NO: 1497322 - RNA, 19 nt, Artificial Sequence
  Description of Artificial Sequence: Synthetic oligonucleotide
  Sense strand starting at position 2355 of SEQ ID NO: 1244552
gcgucuguuccacagucuu

SEQ ID NO: 1497323 - RNA, 19 nt, Artificial Sequence
  Description of Artificial Sequence: Synthetic oligonucleotide
  Antisense strand to SEQ ID NO: 1497322
aagacuguggaacagacgc

SEQ ID NO: 1497324 - RNA, 19 nt, Artificial Sequence
  Description of Artificial Sequence: Synthetic oligonucleotide
  Sense strand starting at position 2413 of SEQ ID NO: 1244552
gacugugccacacguagau

SEQ ID NO: 1497325 - RNA, 19 nt, Artificial Sequence
  Description of Artificial Sequence: Synthetic oligonucleotide
  Antisense strand to SEQ ID NO: 1497324
aucuacguguggcacaguc

SEQ ID NO: 1497326 - RNA, 19 nt, Artificial Sequence
  Description of Artificial Sequence: Synthetic oligonucleotide
  Sense strand starting at position 2423 of SEQ ID NO: 1244552
cacguagaugcuugcauuu

SEQ ID NO: 1497327 - RNA, 19 nt, Artificial Sequence
  Description of Artificial Sequence: Synthetic oligonucleotide
  Antisense strand to SEQ ID NO: 1497326
aaaugcaagcaucuacgug

SEQ ID NO: 1497328 - RNA, 19 nt, Artificial Sequence
  Description of Artificial Sequence: Synthetic oligonucleotide
  Sense strand starting at position 2474 of SEQ ID NO: 1244552
augcuugcauauuuaugua

SEQ ID NO: 1497329 - RNA, 19 nt, Artificial Sequence
  Description of Artificial Sequence: Synthetic oligonucleotide
  Antisense strand to SEQ ID NO: 1497328
uacauaaauaugcaagcau

SEQ ID NO: 1497330 - RNA, 19 nt, Artificial Sequence
  Description of Artificial Sequence: Synthetic oligonucleotide
  Sense strand starting at position 2510 of SEQ ID NO: 1244552
uuuccuaacuaggauguaa

SEQ ID NO: 1497331 - RNA, 19 nt, Artificial Sequence
  Description of Artificial Sequence: Synthetic oligonucleotide
  Antisense strand to SEQ ID NO: 1497330
uuacauccuaguuaggaaa

SEQ ID NO: 1497332 - RNA, 19 nt, Artificial Sequence
  Description of Artificial Sequence: Synthetic oligonucleotide
  Sense strand starting at position 2540 of SEQ ID NO: 1244552
gccacaucgugaguuccuu

SEQ ID NO: 1497333 - RNA, 19 nt, Artificial Sequence
  Description of Artificial Sequence: Synthetic oligonucleotide
  Antisense strand to SEQ ID NO: 1497332
aaggaacucacgauguggc

SEQ ID NO: 1497334 - RNA, 19 nt, Artificial Sequence
  Description of Artificial Sequence: Synthetic oligonucleotide
  Sense strand starting at position 2749 of SEQ ID NO: 1244552
ucguguauuccugagugcu

SEQ ID NO: 1497335 - RNA, 19 nt, Artificial Sequence
  Description of Artificial Sequence: Synthetic oligonucleotide
  Antisense strand to SEQ ID NO: 1497334
agcacucaggaauacacga

SEQ ID NO: 1497336 - RNA, 19 nt, Artificial Sequence
  Description of Artificial Sequence: Synthetic oligonucleotide
  Sense strand starting at position 2761 of SEQ ID NO: 1244552
gagugcuccguguuaccca

SEQ ID NO: 1497337 - RNA, 19 nt, Artificial Sequence
  Description of Artificial Sequence: Synthetic oligonucleotide
  Antisense strand to SEQ ID NO: 1497336
uggguaacacggagcacuc

SEQ ID NO: 1497338 - RNA, 19 nt, Artificial Sequence
  Description of Artificial Sequence: Synthetic oligonucleotide
  Sense strand starting at position 2766 of SEQ ID NO: 1244552
cuccguguuacccagugua

SEQ ID NO: 1497339 - RNA, 19 nt, Artificial Sequence
  Description of Artificial Sequence: Synthetic oligonucleotide
  Antisense strand to SEQ ID NO: 1497338
uacacuggguaacacggag

SEQ ID NO: 1497340 - RNA, 19 nt, Artificial Sequence
  Description of Artificial Sequence: Synthetic oligonucleotide
  Sense strand starting at position 2769 of SEQ ID NO: 1244552
cguguuacccaguguauag

SEQ ID NO: 1497341 - RNA, 19 nt, Artificial Sequence
  Description of Artificial Sequence: Synthetic oligonucleotide
  Antisense strand to SEQ ID NO: 1497340
cuauacacuggguaacacg

SEQ ID NO: 1497342 - RNA, 19 nt, Artificial Sequence
  Description of Artificial Sequence: Synthetic oligonucleotide
  Sense strand starting at position 2812 of SEQ ID NO: 1244552
cgcaaucaguacuuguuga

SEQ ID NO: 1497343 - RNA, 19 nt, Artificial Sequence
  Description of Artificial Sequence: Synthetic oligonucleotide
  Antisense strand to SEQ ID NO: 1497342
ucaacaaguacugauugcg

SEQ ID NO: 1497344 - RNA, 19 nt, Artificial Sequence
  Description of Artificial Sequence: Synthetic oligonucleotide
  Sense strand starting at position 2823 of SEQ ID NO: 1244552
cuuguugaaguagaaagua

SEQ ID NO: 1497345 - RNA, 19 nt, Artificial Sequence
  Description of Artificial Sequence: Synthetic oligonucleotide
  Antisense strand to SEQ ID NO: 1497344
uacuuucuacuucaacaag

SEQ ID NO: 1497346 - RNA, 19 nt, Artificial Sequence
  Description of Artificial Sequence: Synthetic oligonucleotide
  Sense strand starting at position 2850 of SEQ ID NO: 1244552
ggaagcauuugagaucucu

SEQ ID NO: 1497347 - RNA, 19 nt, Artificial Sequence
  Description of Artificial Sequence: Synthetic oligonucleotide
  Antisense strand to SEQ ID NO: 1497346
agagaucucaaaugcuucc

SEQ ID NO: 1497348 - RNA, 19 nt, Artificial Sequence
  Description of Artificial Sequence: Synthetic oligonucleotide
  Sense strand starting at position 2859 of SEQ ID NO: 1244552
ugagaucucuaguuaucag

SEQ ID NO: 1497349 - RNA, 19 nt, Artificial Sequence
  Description of Artificial Sequence: Synthetic oligonucleotide
  Antisense strand to SEQ ID NO: 1497348
cugauaacuagagaucuca

SEQ ID NO: 1497350 - RNA, 19 nt, Artificial Sequence
  Description of Artificial Sequence: Synthetic oligonucleotide
  Sense strand starting at position 2920 of SEQ ID NO: 1244552
acaguaccaucuucugaga

SEQ ID NO: 1497351 - RNA, 19 nt, Artificial Sequence
  Description of Artificial Sequence: Synthetic oligonucleotide
  Antisense strand to SEQ ID NO: 1497350
ucucagaagaugguacugu

SEQ ID NO: 1497352 - RNA, 19 nt, Artificial Sequence
  Description of Artificial Sequence: Synthetic oligonucleotide
  Sense strand starting at position 2923 of SEQ ID NO: 1244552
guaccaucuucugagaaug

SEQ ID NO: 1497353 - RNA, 19 nt, Artificial Sequence
  Description of Artificial Sequence: Synthetic oligonucleotide
  Antisense strand to SEQ ID NO: 1497352
cauucucagaagaugguac

SEQ ID NO: 1497354 - RNA, 19 nt, Artificial Sequence
  Description of Artificial Sequence: Synthetic oligonucleotide
  Sense strand starting at position 2933 of SEQ ID NO: 1244552
cugagaauguccuuuagag

SEQ ID NO: 1497355 - RNA, 19 nt, Artificial Sequence
  Description of Artificial Sequence: Synthetic oligonucleotide
  Antisense strand to SEQ ID NO: 1497354
cucuaaaggacauucucag

SEQ ID NO: 1497356 - RNA, 19 nt, Artificial Sequence
  Description of Artificial Sequence: Synthetic oligonucleotide
  Sense strand starting at position 2965 of SEQ ID NO: 1244552
ugacauugggcuugaggga

SEQ ID NO: 1497357 - RNA, 19 nt, Artificial Sequence
  Description of Artificial Sequence: Synthetic oligonucleotide
  Antisense strand to SEQ ID NO: 1497356
ucccucaagcccaauguca

SEQ ID NO: 1497358 - RNA, 19 nt, Artificial Sequence
  Description of Artificial Sequence: Synthetic oligonucleotide
  Sense strand starting at position 2981 of SEQ ID NO: 1244552
ggagcaguagauugugacu

SEQ ID NO: 1497359 - RNA, 19 nt, Artificial Sequence
  Description of Artificial Sequence: Synthetic oligonucleotide
  Antisense strand to SEQ ID NO: 1497358
agucacaaucuacugcucc

SEQ ID NO: 1497360 - RNA, 19 nt, Artificial Sequence
  Description of Artificial Sequence: Synthetic oligonucleotide
  Sense strand starting at position 2986 of SEQ ID NO: 1244552
aguagauugugacucagca

SEQ ID NO: 1497361 - RNA, 19 nt, Artificial Sequence
  Description of Artificial Sequence: Synthetic oligonucleotide
  Antisense strand to SEQ ID NO: 1497360
ugcugagucacaaucuacu

SEQ ID NO: 1497362 - RNA, 19 nt, Artificial Sequence
  Description of Artificial Sequence: Synthetic oligonucleotide
  Sense strand starting at position 3281 of SEQ ID NO: 1244552
ggaugauaguuugagguca

SEQ ID NO: 1497363 - RNA, 19 nt, Artificial Sequence
  Description of Artificial Sequence: Synthetic oligonucleotide
  Antisense strand to SEQ ID NO: 1497362
ugaccucaaacuaucaucc

SEQ ID NO: 1497364 - RNA, 19 nt, Artificial Sequence
  Description of Artificial Sequence: Synthetic oligonucleotide
  Sense strand starting at position 413 of SEQ ID NO: 1244553
guggacagaguaugacauu

SEQ ID NO: 1497365 - RNA, 19 nt, Artificial Sequence
  Description of Artificial Sequence: Synthetic oligonucleotide
  Antisense strand to SEQ ID NO: 1497364
aaugucauacucuguccac

SEQ ID NO: 1497366 - RNA, 19 nt, Artificial Sequence
  Description of Artificial Sequence: Synthetic oligonucleotide
  Sense strand starting at position 422 of SEQ ID NO: 1244553
guaugacauuuggaauuac

SEQ ID NO: 1497367 - RNA, 19 nt, Artificial Sequence
  Description of Artificial Sequence: Synthetic oligonucleotide
  Antisense strand to SEQ ID NO: 1497366
guaauuccaaaugucauac

SEQ ID NO: 1497368 - RNA, 19 nt, Artificial Sequence
  Description of Artificial Sequence: Synthetic oligonucleotide
  Sense strand starting at position 467 of SEQ ID NO: 1244553
gccuguaaccuuggacaag

SEQ ID NO: 1497369 - RNA, 19 nt, Artificial Sequence
  Description of Artificial Sequence: Synthetic oligonucleotide
  Antisense strand to SEQ ID NO: 1497368
cuuguccaagguuacaggc

SEQ ID NO: 1497370 - RNA, 19 nt, Artificial Sequence
  Description of Artificial Sequence: Synthetic oligonucleotide
  Sense strand starting at position 906 of SEQ ID NO: 1244553
cacaguucuggguguauaa

SEQ ID NO: 1497371 - RNA, 19 nt, Artificial Sequence
  Description of Artificial Sequence: Synthetic oligonucleotide
  Antisense strand to SEQ ID NO: 1497370
uuauacacccagaacugug

SEQ ID NO: 1497372 - RNA, 19 nt, Artificial Sequence
  Description of Artificial Sequence: Synthetic oligonucleotide
  Sense strand starting at position 908 of SEQ ID NO: 1244553
caguucuggguguauaaua

SEQ ID NO: 1497373 - RNA, 19 nt, Artificial Sequence
  Description of Artificial Sequence: Synthetic oligonucleotide
  Antisense strand to SEQ ID NO: 1497372
uauuauacacccagaacug

SEQ ID NO: 1497374 - RNA, 19 nt, Artificial Sequence
  Description of Artificial Sequence: Synthetic oligonucleotide
  Sense strand starting at position 1254 of SEQ ID NO: 1244553
caguuauuaucguuauuug

SEQ ID NO: 1497375 - RNA, 19 nt, Artificial Sequence
  Description of Artificial Sequence: Synthetic oligonucleotide
  Antisense strand to SEQ ID NO: 1497374
caaauaacgauaauaacug

SEQ ID NO: 1497376 - RNA, 19 nt, Artificial Sequence
  Description of Artificial Sequence: Synthetic oligonucleotide
  Sense strand starting at position 1348 of SEQ ID NO: 1244553
agguaauguuuacucuuua

SEQ ID NO: 1497377 - RNA, 19 nt, Artificial Sequence
  Description of Artificial Sequence: Synthetic oligonucleotide
  Antisense strand to SEQ ID NO: 1497376
uaaagaguaaacauuaccu

SEQ ID NO: 1497378 - RNA, 19 nt, Artificial Sequence
  Description of Artificial Sequence: Synthetic oligonucleotide
  Sense strand starting at position 1503 of SEQ ID NO: 1244553
cugagacgacgacguuaaa

SEQ ID NO: 1497379 - RNA, 19 nt, Artificial Sequence
  Description of Artificial Sequence: Synthetic oligonucleotide
  Antisense strand to SEQ ID NO: 1497378
uuuaacgucgucgucucag

SEQ ID NO: 1497380 - RNA, 19 nt, Artificial Sequence
  Description of Artificial Sequence: Synthetic oligonucleotide
  Sense strand starting at position 1506 of SEQ ID NO: 1244553
agacgacgacguuaaauaa

SEQ ID NO: 1497381 - RNA, 19 nt, Artificial Sequence
  Description of Artificial Sequence: Synthetic oligonucleotide
  Antisense strand to SEQ ID NO: 1497380
uuauuuaacgucgucgucu

SEQ ID NO: 1497382 - RNA, 19 nt, Artificial Sequence
  Description of Artificial Sequence: Synthetic oligonucleotide
  Sense strand starting at position 1743 of SEQ ID NO: 1244553
cgaauuguaaauuagguga

SEQ ID NO: 1497383 - RNA, 19 nt, Artificial Sequence
  Description of Artificial Sequence: Synthetic oligonucleotide
  Antisense strand to SEQ ID NO: 1497382
ucaccuaauuuacaauucg

SEQ ID NO: 1497384 - RNA, 19 nt, Artificial Sequence
  Description of Artificial Sequence: Synthetic oligonucleotide
  Sense strand starting at position 1747 of SEQ ID NO: 1244553
uuguaaauuaggugagacu

SEQ ID NO: 1497385 - RNA, 19 nt, Artificial Sequence
  Description of Artificial Sequence: Synthetic oligonucleotide
  Antisense strand to SEQ ID NO: 1497384
agucucaccuaauuuacaa

SEQ ID NO: 1497386 - RNA, 19 nt, Artificial Sequence
  Description of Artificial Sequence: Synthetic oligonucleotide
  Sense strand starting at position 1756 of SEQ ID NO: 1244553
aggugagacuucgugaaau

SEQ ID NO: 1497387 - RNA, 19 nt, Artificial Sequence
  Description of Artificial Sequence: Synthetic oligonucleotide
  Antisense strand to SEQ ID NO: 1497386
auuucacgaagucucaccu

SEQ ID NO: 1497388 - RNA, 19 nt, Artificial Sequence
  Description of Artificial Sequence: Synthetic oligonucleotide
  Sense strand starting at position 1758 of SEQ ID NO: 1244553
gugagacuucgugaaaugg

SEQ ID NO: 1497389 - RNA, 19 nt, Artificial Sequence
  Description of Artificial Sequence: Synthetic oligonucleotide
  Antisense strand to SEQ ID NO: 1497388
ccauuucacgaagucucac

SEQ ID NO: 1497390 - RNA, 19 nt, Artificial Sequence
  Description of Artificial Sequence: Synthetic oligonucleotide
  Sense strand starting at position 1772 of SEQ ID NO: 1244553
aauggagucguuugaaaca

SEQ ID NO: 1497391 - RNA, 19 nt, Artificial Sequence
  Description of Artificial Sequence: Synthetic oligonucleotide
  Antisense strand to SEQ ID NO: 1497390
uguuucaaacgacuccauu

SEQ ID NO: 1497392 - RNA, 19 nt, Artificial Sequence
  Description of Artificial Sequence: Synthetic oligonucleotide
  Sense strand starting at position 1816 of SEQ ID NO: 1244553
ggacauaccucuuuguaaa

SEQ ID NO: 1497393 - RNA, 19 nt, Artificial Sequence
  Description of Artificial Sequence: Synthetic oligonucleotide
  Antisense strand to SEQ ID NO: 1497392
uuuacaaagagguaugucc

SEQ ID NO: 1497394 - RNA, 19 nt, Artificial Sequence
  Description of Artificial Sequence: Synthetic oligonucleotide
  Sense strand starting at position 1841 of SEQ ID NO: 1244553
gacccaugagcccagugau

SEQ ID NO: 1497395 - RNA, 19 nt, Artificial Sequence
  Description of Artificial Sequence: Synthetic oligonucleotide
  Antisense strand to SEQ ID NO: 1497394
aucacugggcucauggguc

SEQ ID NO: 1497396 - RNA, 19 nt, Artificial Sequence
  Description of Artificial Sequence: Synthetic oligonucleotide
  Sense strand starting at position 1844 of SEQ ID NO: 1244553
ccaugagcccagugauuau

SEQ ID NO: 1497397 - RNA, 19 nt, Artificial Sequence
  Description of Artificial Sequence: Synthetic oligonucleotide
  Antisense strand to SEQ ID NO: 1497396
auaaucacugggcucaugg

SEQ ID NO: 1497398 - RNA, 19 nt, Artificial Sequence
  Description of Artificial Sequence: Synthetic oligonucleotide
  Sense strand starting at position 1851 of SEQ ID NO: 1244553
cccagugauuaucugcaua

SEQ ID NO: 1497399 - RNA, 19 nt, Artificial Sequence
  Description of Artificial Sequence: Synthetic oligonucleotide
  Antisense strand to SEQ ID NO: 1497398
uaugcagauaaucacuggg

SEQ ID NO: 1497400 - RNA, 19 nt, Artificial Sequence
  Description of Artificial Sequence: Synthetic oligonucleotide
  Sense strand starting at position 1854 of SEQ ID NO: 1244553
agugauuaucugcauacca

SEQ ID NO: 1497401 - RNA, 19 nt, Artificial Sequence
  Description of Artificial Sequence: Synthetic oligonucleotide
  Antisense strand to SEQ ID NO: 1497400
ugguaugcagauaaucacu

SEQ ID NO: 1497402 - RNA, 19 nt, Artificial Sequence
  Description of Artificial Sequence: Synthetic oligonucleotide
  Sense strand starting at position 2044 of SEQ ID NO: 1244553
gcugauucgcuccaaagau

SEQ ID NO: 1497403 - RNA, 19 nt, Artificial Sequence
  Description of Artificial Sequence: Synthetic oligonucleotide
  Antisense strand to SEQ ID NO: 1497402
aucuuuggagcgaaucagc

SEQ ID NO: 1497404 - RNA, 19 nt, Artificial Sequence
  Description of Artificial Sequence: Synthetic oligonucleotide
  Sense strand starting at position 2267 of SEQ ID NO: 1244553
ggacauuucuauuauggaa

SEQ ID NO: 1497405 - RNA, 19 nt, Artificial Sequence
  Description of Artificial Sequence: Synthetic oligonucleotide
  Antisense strand to SEQ ID NO: 1497404
uuccauaauagaaaugucc

SEQ ID NO: 1497406 - RNA, 19 nt, Artificial Sequence
  Description of Artificial Sequence: Synthetic oligonucleotide
  Sense strand starting at position 2493 of SEQ ID NO: 1244553
ugaacuugauagcuccauu

SEQ ID NO: 1497407 - RNA, 19 nt, Artificial Sequence
  Description of Artificial Sequence: Synthetic oligonucleotide
  Antisense strand to SEQ ID NO: 1497406
aauggagcuaucaaguuca

SEQ ID NO: 1497408 - RNA, 19 nt, Artificial Sequence
  Description of Artificial Sequence: Synthetic oligonucleotide
  Sense strand starting at position 2519 of SEQ ID NO: 1244553
ucgagucuucccuaaacca

SEQ ID NO: 1497409 - RNA, 19 nt, Artificial Sequence
  Description of Artificial Sequence: Synthetic oligonucleotide
  Antisense strand to SEQ ID NO: 1497408
ugguuuagggaagacucga

SEQ ID NO: 1497410 - RNA, 19 nt, Artificial Sequence
  Description of Artificial Sequence: Synthetic oligonucleotide
  Sense strand starting at position 2718 of SEQ ID NO: 1244553
caaguaugguacucaagaa

SEQ ID NO: 1497411 - RNA, 19 nt, Artificial Sequence
  Description of Artificial Sequence: Synthetic oligonucleotide
  Antisense strand to SEQ ID NO: 1497410
uucuugaguaccauacuug

SEQ ID NO: 1497412 - RNA, 19 nt, Artificial Sequence
  Description of Artificial Sequence: Synthetic oligonucleotide
  Sense strand starting at position 2755 of SEQ ID NO: 1244553
gccuuauccuuucuggaaa

SEQ ID NO: 1497413 - RNA, 19 nt, Artificial Sequence
  Description of Artificial Sequence: Synthetic oligonucleotide
  Antisense strand to SEQ ID NO: 1497412
uuuccagaaaggauaaggc

SEQ ID NO: 1497414 - RNA, 19 nt, Artificial Sequence
  Description of Artificial Sequence: Synthetic oligonucleotide
  Sense strand starting at position 2803 of SEQ ID NO: 1244553
guguuugcaccauacaaga

SEQ ID NO: 1497415 - RNA, 19 nt, Artificial Sequence
  Description of Artificial Sequence: Synthetic oligonucleotide
  Antisense strand to SEQ ID NO: 1497414
ucuuguauggugcaaacac

SEQ ID NO: 1497416 - RNA, 19 nt, Artificial Sequence
  Description of Artificial Sequence: Synthetic oligonucleotide
  Sense strand starting at position 3240 of SEQ ID NO: 1244553
ggguuuaggccauaggagu

SEQ ID NO: 1497417 - RNA, 19 nt, Artificial Sequence
  Description of Artificial Sequence: Synthetic oligonucleotide
  Antisense strand to SEQ ID NO: 1497416
acuccuauggccuaaaccc

SEQ ID NO: 1497418 - RNA, 19 nt, Artificial Sequence
  Description of Artificial Sequence: Synthetic oligonucleotide
  Sense strand starting at position 3432 of SEQ ID NO: 1244553
uuuguuauacaauggguaa

SEQ ID NO: 1497419 - RNA, 19 nt, Artificial Sequence
  Description of Artificial Sequence: Synthetic oligonucleotide
  Antisense strand to SEQ ID NO: 1497418
uuacccauuguauaacaaa

SEQ ID NO: 1497420 - RNA, 19 nt, Artificial Sequence
  Description of Artificial Sequence: Synthetic oligonucleotide
  Sense strand starting at position 3435 of SEQ ID NO: 1244553
guuauacaauggguaauga

SEQ ID NO: 1497421 - RNA, 19 nt, Artificial Sequence
  Description of Artificial Sequence: Synthetic oligonucleotide
  Antisense strand to SEQ ID NO: 1497420
ucauuacccauuguauaac

SEQ ID NO: 1497422 - RNA, 19 nt, Artificial Sequence
  Description of Artificial Sequence: Synthetic oligonucleotide
  Sense strand starting at position 3488 of SEQ ID NO: 1244553
uggucaguuccacacgaau

SEQ ID NO: 1497423 - RNA, 19 nt, Artificial Sequence
  Description of Artificial Sequence: Synthetic oligonucleotide
  Antisense strand to SEQ ID NO: 1497422
auucguguggaacugacca

SEQ ID NO: 1497424 - RNA, 19 nt, Artificial Sequence
  Description of Artificial Sequence: Synthetic oligonucleotide
  Sense strand starting at position 3642 of SEQ ID NO: 1244553
cuguauaucgacuauaaau

SEQ ID NO: 1497425 - RNA, 19 nt, Artificial Sequence
  Description of Artificial Sequence: Synthetic oligonucleotide
  Antisense strand to SEQ ID NO: 1497424
auuuauagucgauauacag

SEQ ID NO: 1497426 - RNA, 19 nt, Artificial Sequence
  Description of Artificial Sequence: Synthetic oligonucleotide
  Sense strand starting at position 3712 of SEQ ID NO: 1244553
aaggaaucuuugcuauagu

SEQ ID NO: 1497427 - RNA, 19 nt, Artificial Sequence
  Description of Artificial Sequence: Synthetic oligonucleotide
  Antisense strand to SEQ ID NO: 1497426
acuauagcaaagauuccuu

SEQ ID NO: 1497428 - RNA, 19 nt, Artificial Sequence
  Description of Artificial Sequence: Synthetic oligonucleotide
  Sense strand starting at position 3715 of SEQ ID NO: 1244553
gaaucuuugcuauaguuug

SEQ ID NO: 1497429 - RNA, 19 nt, Artificial Sequence
  Description of Artificial Sequence: Synthetic oligonucleotide
  Antisense strand to SEQ ID NO: 1497428
caaacuauagcaaagauuc

SEQ ID NO: 1497430 - RNA, 19 nt, Artificial Sequence
  Description of Artificial Sequence: Synthetic oligonucleotide
  Sense strand starting at position 3720 of SEQ ID NO: 1244553
uuugcuauaguuugauaga

SEQ ID NO: 1497431 - RNA, 19 nt, Artificial Sequence
  Description of Artificial Sequence: Synthetic oligonucleotide
  Antisense strand to SEQ ID NO: 1497430
ucuaucaaacuauagcaaa

SEQ ID NO: 1497432 - RNA, 19 nt, Artificial Sequence
  Description of Artificial Sequence: Synthetic oligonucleotide
  Sense strand starting at position 3747 of SEQ ID NO: 1244553
agcaguaugguguaacaaa

SEQ ID NO: 1497433 - RNA, 19 nt, Artificial Sequence
  Description of Artificial Sequence: Synthetic oligonucleotide
  Antisense strand to SEQ ID NO: 1497432
uuuguuacaccauacugcu

SEQ ID NO: 1497434 - RNA, 19 nt, Artificial Sequence
  Description of Artificial Sequence: Synthetic oligonucleotide
  Sense strand starting at position 3808 of SEQ ID NO: 1244553
cagggacuuagguguccau

SEQ ID NO: 1497435 - RNA, 19 nt, Artificial Sequence
  Description of Artificial Sequence: Synthetic oligonucleotide
  Antisense strand to SEQ ID NO: 1497434
auggacaccuaagucccug

SEQ ID NO: 1497436 - RNA, 19 nt, Artificial Sequence
  Description of Artificial Sequence: Synthetic oligonucleotide
  Sense strand starting at position 3812 of SEQ ID NO: 1244553
gacuuagguguccaucacu

SEQ ID NO: 1497437 - RNA, 19 nt, Artificial Sequence
  Description of Artificial Sequence: Synthetic oligonucleotide
  Antisense strand to SEQ ID NO: 1497436
agugauggacaccuaaguc

SEQ ID NO: 1497438 - RNA, 19 nt, Artificial Sequence
  Description of Artificial Sequence: Synthetic oligonucleotide
  Sense strand starting at position 3817 of SEQ ID NO: 1244553
agguguccaucacuaggau

SEQ ID NO: 1497439 - RNA, 19 nt, Artificial Sequence
  Description of Artificial Sequence: Synthetic oligonucleotide
  Antisense strand to SEQ ID NO: 1497438
auccuagugauggacaccu

SEQ ID NO: 1497440 - RNA, 19 nt, Artificial Sequence
  Description of Artificial Sequence: Synthetic oligonucleotide
  Sense strand starting at position 3857 of SEQ ID NO: 1244553
guccucauuguggaaauga

SEQ ID NO: 1497441 - RNA, 19 nt, Artificial Sequence
  Description of Artificial Sequence: Synthetic oligonucleotide
  Antisense strand to SEQ ID NO: 1497440
ucauuuccacaaugaggac

SEQ ID NO: 1497442 - RNA, 19 nt, Artificial Sequence
  Description of Artificial Sequence: Synthetic oligonucleotide
  Sense strand starting at position 3903 of SEQ ID NO: 1244553
ucuguuuccucaguggaaa

SEQ ID NO: 1497443 - RNA, 19 nt, Artificial Sequence
  Description of Artificial Sequence: Synthetic oligonucleotide
  Antisense strand to SEQ ID NO: 1497442
uuuccacugaggaaacaga

SEQ ID NO: 1497444 - RNA, 19 nt, Artificial Sequence
  Description of Artificial Sequence: Synthetic oligonucleotide
  Sense strand starting at position 7 of SEQ ID NO: 1244554
cugccugacuucuugcuaa

SEQ ID NO: 1497445 - RNA, 19 nt, Artificial Sequence
  Description of Artificial Sequence: Synthetic oligonucleotide
  Antisense strand to SEQ ID NO: 1497444
uuagcaagaagucaggcag

SEQ ID NO: 1497446 - RNA, 19 nt, Artificial Sequence
  Description of Artificial Sequence: Synthetic oligonucleotide
  Sense strand starting at position 11 of SEQ ID NO: 1244554
cugacuucuugcuaaugga

SEQ ID NO: 1497447 - RNA, 19 nt, Artificial Sequence
  Description of Artificial Sequence: Synthetic oligonucleotide
  Antisense strand to SEQ ID NO: 1497446
uccauuagcaagaagucag

SEQ ID NO: 1497448 - RNA, 19 nt, Artificial Sequence
  Description of Artificial Sequence: Synthetic oligonucleotide
  Sense strand starting at position 14 of SEQ ID NO: 1244554
acuucuugcuaauggaaau

SEQ ID NO: 1497449 - RNA, 19 nt, Artificial Sequence
  Description of Artificial Sequence: Synthetic oligonucleotide
  Antisense strand to SEQ ID NO: 1497448
auuuccauuagcaagaagu

SEQ ID NO: 1497450 - RNA, 19 nt, Artificial Sequence
  Description of Artificial Sequence: Synthetic oligonucleotide
  Sense strand starting at position 111 of SEQ ID NO: 1244554
guuccacaugcccaagaua

SEQ ID NO: 1497451 - RNA, 19 nt, Artificial Sequence
  Description of Artificial Sequence: Synthetic oligonucleotide
  Antisense strand to SEQ ID NO: 1497450
uaucuugggcauguggaac

SEQ ID NO: 1497452 - RNA, 19 nt, Artificial Sequence
  Description of Artificial Sequence: Synthetic oligonucleotide
  Sense strand starting at position 244 of SEQ ID NO: 1244554
uuuacuauuuaaggagacu

SEQ ID NO: 1497453 - RNA, 19 nt, Artificial Sequence
  Description of Artificial Sequence: Synthetic oligonucleotide
  Antisense strand to SEQ ID NO: 1497452
agucuccuuaaauaguaaa

SEQ ID NO: 1497454 - RNA, 19 nt, Artificial Sequence
  Description of Artificial Sequence: Synthetic oligonucleotide
  Sense strand starting at position 261 of SEQ ID NO: 1244554
cucguaaaucgauaagagu

SEQ ID NO: 1497455 - RNA, 19 nt, Artificial Sequence
  Description of Artificial Sequence: Synthetic oligonucleotide
  Antisense strand to SEQ ID NO: 1497454
acucuuaucgauuuacgag

SEQ ID NO: 1497456 - RNA, 19 nt, Artificial Sequence
  Description of Artificial Sequence: Synthetic oligonucleotide
  Sense strand starting at position 264 of SEQ ID NO: 1244554
guaaaucgauaagaguaaa

SEQ ID NO: 1497457 - RNA, 19 nt, Artificial Sequence
  Description of Artificial Sequence: Synthetic oligonucleotide
  Antisense strand to SEQ ID NO: 1497456
uuuacucuuaucgauuuac

SEQ ID NO: 1497458 - RNA, 19 nt, Artificial Sequence
  Description of Artificial Sequence: Synthetic oligonucleotide
  Sense strand starting at position 446 of SEQ ID NO: 1244554
agcccacguuccugagaca

SEQ ID NO: 1497459 - RNA, 19 nt, Artificial Sequence
  Description of Artificial Sequence: Synthetic oligonucleotide
  Antisense strand to SEQ ID NO: 1497458
ugucucaggaacgugggcu

SEQ ID NO: 1497460 - RNA, 19 nt, Artificial Sequence
  Description of Artificial Sequence: Synthetic oligonucleotide
  Sense strand starting at position 682 of SEQ ID NO: 1244554
cugaaauuaccuuguuugu

SEQ ID NO: 1497461 - RNA, 19 nt, Artificial Sequence
  Description of Artificial Sequence: Synthetic oligonucleotide
  Antisense strand to SEQ ID NO: 1497460
acaaacaagguaauuucag

SEQ ID NO: 1497462 - RNA, 19 nt, Artificial Sequence
  Description of Artificial Sequence: Synthetic oligonucleotide
  Sense strand starting at position 717 of SEQ ID NO: 1244554
cuguuuggcucccauacua

SEQ ID NO: 1497463 - RNA, 19 nt, Artificial Sequence
  Description of Artificial Sequence: Synthetic oligonucleotide
  Antisense strand to SEQ ID NO: 1497462
uaguaugggagccaaacag

SEQ ID NO: 1497464 - RNA, 19 nt, Artificial Sequence
  Description of Artificial Sequence: Synthetic oligonucleotide
  Sense strand starting at position 754 of SEQ ID NO: 1244554
aaggauggaucuugacuca

SEQ ID NO: 1497465 - RNA, 19 nt, Artificial Sequence
  Description of Artificial Sequence: Synthetic oligonucleotide
  Antisense strand to SEQ ID NO: 1497464
ugagucaagauccauccuu

SEQ ID NO: 1497466 - RNA, 19 nt, Artificial Sequence
  Description of Artificial Sequence: Synthetic oligonucleotide
  Sense strand starting at position 1348 of SEQ ID NO: 1244554
acaugaacaucuugcauga

SEQ ID NO: 1497467 - RNA, 19 nt, Artificial Sequence
  Description of Artificial Sequence: Synthetic oligonucleotide
  Antisense strand to SEQ ID NO: 1497466
ucaugcaagauguucaugu

SEQ ID NO: 1497468 - RNA, 19 nt, Artificial Sequence
  Description of Artificial Sequence: Synthetic oligonucleotide
  Sense strand starting at position 1695 of SEQ ID NO: 1244554
acugccauaugauaugaaa

SEQ ID NO: 1497469 - RNA, 19 nt, Artificial Sequence
  Description of Artificial Sequence: Synthetic oligonucleotide
  Antisense strand to SEQ ID NO: 1497468
uuucauaucauauggcagu

SEQ ID NO: 1497470 - RNA, 19 nt, Artificial Sequence
  Description of Artificial Sequence: Synthetic oligonucleotide
  Sense strand starting at position 1698 of SEQ ID NO: 1244554
gccauaugauaugaaauau

SEQ ID NO: 1497471 - RNA, 19 nt, Artificial Sequence
  Description of Artificial Sequence: Synthetic oligonucleotide
  Antisense strand to SEQ ID NO: 1497470
auauuucauaucauauggc

SEQ ID NO: 1497472 - RNA, 19 nt, Artificial Sequence
  Description of Artificial Sequence: Synthetic oligonucleotide
  Sense strand starting at position 1755 of SEQ ID NO: 1244554
gaaggaaauuaguuuccau

SEQ ID NO: 1497473 - RNA, 19 nt, Artificial Sequence
  Description of Artificial Sequence: Synthetic oligonucleotide
  Antisense strand to SEQ ID NO: 1497472
auggaaacuaauuuccuuc

SEQ ID NO: 1497474 - RNA, 19 nt, Artificial Sequence
  Description of Artificial Sequence: Synthetic oligonucleotide
  Sense strand starting at position 1758 of SEQ ID NO: 1244554
ggaaauuaguuuccauccu

SEQ ID NO: 1497475 - RNA, 19 nt, Artificial Sequence
  Description of Artificial Sequence: Synthetic oligonucleotide
  Antisense strand to SEQ ID NO: 1497474
aggauggaaacuaauuucc

SEQ ID NO: 1497476 - RNA, 19 nt, Artificial Sequence
  Description of Artificial Sequence: Synthetic oligonucleotide
  Sense strand starting at position 1838 of SEQ ID NO: 1244554
guccuaaauuuauggaaau

SEQ ID NO: 1497477 - RNA, 19 nt, Artificial Sequence
  Description of Artificial Sequence: Synthetic oligonucleotide
  Antisense strand to SEQ ID NO: 1497476
auuuccauaaauuuaggac

SEQ ID NO: 1497478 - RNA, 19 nt, Artificial Sequence
  Description of Artificial Sequence: Synthetic oligonucleotide
  Sense strand starting at position 2029 of SEQ ID NO: 1244554
agccauuagcgagaacaag

SEQ ID NO: 1497479 - RNA, 19 nt, Artificial Sequence
  Description of Artificial Sequence: Synthetic oligonucleotide
  Antisense strand to SEQ ID NO: 1497478
cuuguucucgcuaauggcu

SEQ ID NO: 1497480 - RNA, 19 nt, Artificial Sequence
  Description of Artificial Sequence: Synthetic oligonucleotide
  Sense strand starting at position 2099 of SEQ ID NO: 1244554
uccuguaauccuuguuuac

SEQ ID NO: 1497481 - RNA, 19 nt, Artificial Sequence
  Description of Artificial Sequence: Synthetic oligonucleotide
  Antisense strand to SEQ ID NO: 1497480
guaaacaaggauuacagga

SEQ ID NO: 1497482 - RNA, 19 nt, Artificial Sequence
  Description of Artificial Sequence: Synthetic oligonucleotide
  Sense strand starting at position 2101 of SEQ ID NO: 1244554
cuguaauccuuguuuacca

SEQ ID NO: 1497483 - RNA, 19 nt, Artificial Sequence
  Description of Artificial Sequence: Synthetic oligonucleotide
  Antisense strand to SEQ ID NO: 1497482
ugguaaacaaggauuacag

SEQ ID NO: 1497484 - RNA, 19 nt, Artificial Sequence
  Description of Artificial Sequence: Synthetic oligonucleotide
  Sense strand starting at position 2103 of SEQ ID NO: 1244554
guaauccuuguuuaccaua

SEQ ID NO: 1497485 - RNA, 19 nt, Artificial Sequence
  Description of Artificial Sequence: Synthetic oligonucleotide
  Antisense strand to SEQ ID NO: 1497484
uaugguaaacaaggauuac

SEQ ID NO: 1497486 - RNA, 19 nt, Artificial Sequence
  Description of Artificial Sequence: Synthetic oligonucleotide
  Sense strand starting at position 2144 of SEQ ID NO: 1244554
ugcccugugucaugucuaa

SEQ ID NO: 1497487 - RNA, 19 nt, Artificial Sequence
  Description of Artificial Sequence: Synthetic oligonucleotide
  Antisense strand to SEQ ID NO: 1497486
uuagacaugacacagggca

SEQ ID NO: 1497488 - RNA, 19 nt, Artificial Sequence
  Description of Artificial Sequence: Synthetic oligonucleotide
  Sense strand starting at position 2295 of SEQ ID NO: 1244554
aaaggucccuggcuuauaa

SEQ ID NO: 1497489 - RNA, 19 nt, Artificial Sequence
  Description of Artificial Sequence: Synthetic oligonucleotide
  Antisense strand to SEQ ID NO: 1497488
uuauaagccagggaccuuu

SEQ ID NO: 1497490 - RNA, 19 nt, Artificial Sequence
  Description of Artificial Sequence: Synthetic oligonucleotide
  Sense strand starting at position 2297 of SEQ ID NO: 1244554
aggucccuggcuuauaaau

SEQ ID NO: 1497491 - RNA, 19 nt, Artificial Sequence
  Description of Artificial Sequence: Synthetic oligonucleotide
  Antisense strand to SEQ ID NO: 1497490
auuuauaagccagggaccu

SEQ ID NO: 1497492 - RNA, 19 nt, Artificial Sequence
  Description of Artificial Sequence: Synthetic oligonucleotide
  Sense strand starting at position 2299 of SEQ ID NO: 1244554
gucccuggcuuauaaauca

SEQ ID NO: 1497493 - RNA, 19 nt, Artificial Sequence
  Description of Artificial Sequence: Synthetic oligonucleotide
  Antisense strand to SEQ ID NO: 1497492
ugauuuauaagccagggac

SEQ ID NO: 1497494 - RNA, 19 nt, Artificial Sequence
  Description of Artificial Sequence: Synthetic oligonucleotide
  Sense strand starting at position 2314 of SEQ ID NO: 1244554
aucaucagugcuggucaga

SEQ ID NO: 1497495 - RNA, 19 nt, Artificial Sequence
  Description of Artificial Sequence: Synthetic oligonucleotide
  Antisense strand to SEQ ID NO: 1497494
ucugaccagcacugaugau

SEQ ID NO: 1497496 - RNA, 19 nt, Artificial Sequence
  Description of Artificial Sequence: Synthetic oligonucleotide
  Sense strand starting at position 2617 of SEQ ID NO: 1244554
gucgucaucauugcugagu

SEQ ID NO: 1497497 - RNA, 19 nt, Artificial Sequence
  Description of Artificial Sequence: Synthetic oligonucleotide
  Antisense strand to SEQ ID NO: 1497496
acucagcaaugaugacgac

SEQ ID NO: 1497498 - RNA, 19 nt, Artificial Sequence
  Description of Artificial Sequence: Synthetic oligonucleotide
  Sense strand starting at position 2619 of SEQ ID NO: 1244554
cgucaucauugcugagugu

SEQ ID NO: 1497499 - RNA, 19 nt, Artificial Sequence
  Description of Artificial Sequence: Synthetic oligonucleotide
  Antisense strand to SEQ ID NO: 1497498
acacucagcaaugaugacg

SEQ ID NO: 1497500 - RNA, 19 nt, Artificial Sequence
  Description of Artificial Sequence: Synthetic oligonucleotide
  Sense strand starting at position 2628 of SEQ ID NO: 1244554
ugcugaguguccucaucac

SEQ ID NO: 1497501 - RNA, 19 nt, Artificial Sequence
  Description of Artificial Sequence: Synthetic oligonucleotide
  Antisense strand to SEQ ID NO: 1497500
gugaugaggacacucagca

SEQ ID NO: 1497502 - RNA, 19 nt, Artificial Sequence
  Description of Artificial Sequence: Synthetic oligonucleotide
  Sense strand starting at position 2738 of SEQ ID NO: 1244554
guuguauguucaccuggga

SEQ ID NO: 1497503 - RNA, 19 nt, Artificial Sequence
  Description of Artificial Sequence: Synthetic oligonucleotide
  Antisense strand to SEQ ID NO: 1497502
ucccaggugaacauacaac

SEQ ID NO: 1497504 - RNA, 19 nt, Artificial Sequence
  Description of Artificial Sequence: Synthetic oligonucleotide
  Sense strand starting at position 2761 of SEQ ID NO: 1244554
ugggaaggcugguguagau

SEQ ID NO: 1497505 - RNA, 19 nt, Artificial Sequence
  Description of Artificial Sequence: Synthetic oligonucleotide
  Antisense strand to SEQ ID NO: 1497504
aucuacaccagccuuccca

SEQ ID NO: 1497506 - RNA, 19 nt, Artificial Sequence
  Description of Artificial Sequence: Synthetic oligonucleotide
  Sense strand starting at position 2768 of SEQ ID NO: 1244554
gcugguguagaucaucaau

SEQ ID NO: 1497507 - RNA, 19 nt, Artificial Sequence
  Description of Artificial Sequence: Synthetic oligonucleotide
  Antisense strand to SEQ ID NO: 1497506
auugaugaucuacaccagc

SEQ ID NO: 1497508 - RNA, 19 nt, Artificial Sequence
  Description of Artificial Sequence: Synthetic oligonucleotide
  Sense strand starting at position 2770 of SEQ ID NO: 1244554
ugguguagaucaucaauga

SEQ ID NO: 1497509 - RNA, 19 nt, Artificial Sequence
  Description of Artificial Sequence: Synthetic oligonucleotide
  Antisense strand to SEQ ID NO: 1497508
ucauugaugaucuacacca

SEQ ID NO: 1497510 - RNA, 19 nt, Artificial Sequence
  Description of Artificial Sequence: Synthetic oligonucleotide
  Sense strand starting at position 3065 of SEQ ID NO: 1244554
uugagaaucgcuugaacuc

SEQ ID NO: 1497511 - RNA, 19 nt, Artificial Sequence
  Description of Artificial Sequence: Synthetic oligonucleotide
  Antisense strand to SEQ ID NO: 1497510
gaguucaagcgauucucaa

SEQ ID NO: 1497512 - RNA, 19 nt, Artificial Sequence
  Description of Artificial Sequence: Synthetic oligonucleotide
  Sense strand starting at position 3174 of SEQ ID NO: 1244554
ccugaaacaugauaguuaa

SEQ ID NO: 1497513 - RNA, 19 nt, Artificial Sequence
  Description of Artificial Sequence: Synthetic oligonucleotide
  Antisense strand to SEQ ID NO: 1497512
uuaacuaucauguuucagg

SEQ ID NO: 1497514 - RNA, 19 nt, Artificial Sequence
  Description of Artificial Sequence: Synthetic oligonucleotide
  Sense strand starting at position 3181 of SEQ ID NO: 1244554
caugauaguuaaggauaaa

SEQ ID NO: 1497515 - RNA, 19 nt, Artificial Sequence
  Description of Artificial Sequence: Synthetic oligonucleotide
  Antisense strand to SEQ ID NO: 1497514
uuuauccuuaacuaucaug

SEQ ID NO: 1497516 - RNA, 19 nt, Artificial Sequence
  Description of Artificial Sequence: Synthetic oligonucleotide
  Sense strand starting at position 3231 of SEQ ID NO: 1244554
aagugaggguucuuaucag

SEQ ID NO: 1497517 - RNA, 19 nt, Artificial Sequence
  Description of Artificial Sequence: Synthetic oligonucleotide
  Antisense strand to SEQ ID NO: 1497516
cugauaagaacccucacuu

SEQ ID NO: 1497518 - RNA, 19 nt, Artificial Sequence
  Description of Artificial Sequence: Synthetic oligonucleotide
  Sense strand starting at position 3235 of SEQ ID NO: 1244554
gaggguucuuaucaguuug

SEQ ID NO: 1497519 - RNA, 19 nt, Artificial Sequence
  Description of Artificial Sequence: Synthetic oligonucleotide
  Antisense strand to SEQ ID NO: 1497518
caaacugauaagaacccuc

SEQ ID NO: 1497520 - RNA, 19 nt, Artificial Sequence
  Description of Artificial Sequence: Synthetic oligonucleotide
  Sense strand starting at position 3237 of SEQ ID NO: 1244554
ggguucuuaucaguuuggu

SEQ ID NO: 1497521 - RNA, 19 nt, Artificial Sequence
  Description of Artificial Sequence: Synthetic oligonucleotide
  Antisense strand to SEQ ID NO: 1497520
accaaacugauaagaaccc

SEQ ID NO: 1497522 - RNA, 19 nt, Artificial Sequence
  Description of Artificial Sequence: Synthetic oligonucleotide
  Sense strand starting at position 3245 of SEQ ID NO: 1244554
aucaguuugguagggacaa

SEQ ID NO: 1497523 - RNA, 19 nt, Artificial Sequence
  Description of Artificial Sequence: Synthetic oligonucleotide
  Antisense strand to SEQ ID NO: 1497522
uugucccuaccaaacugau

SEQ ID NO: 1497524 - RNA, 19 nt, Artificial Sequence
  Description of Artificial Sequence: Synthetic oligonucleotide
  Sense strand starting at position 17 of SEQ ID NO: 1244555
auguuuauuggaugggcau

SEQ ID NO: 1497525 - RNA, 19 nt, Artificial Sequence
  Description of Artificial Sequence: Synthetic oligonucleotide
  Antisense strand to SEQ ID NO: 1497524
augcccauccaauaaacau

SEQ ID NO: 1497526 - RNA, 19 nt, Artificial Sequence
  Description of Artificial Sequence: Synthetic oligonucleotide
  Sense strand starting at position 353 of SEQ ID NO: 1244555
gccucacuccaaggaaauc

SEQ ID NO: 1497527 - RNA, 19 nt, Artificial Sequence
  Description of Artificial Sequence: Synthetic oligonucleotide
  Antisense strand to SEQ ID NO: 1497526
gauuuccuuggagugaggc

SEQ ID NO: 1497528 - RNA, 19 nt, Artificial Sequence
  Description of Artificial Sequence: Synthetic oligonucleotide
  Sense strand starting at position 429 of SEQ ID NO: 1244555
cuuccacuccuguaugauc

SEQ ID NO: 1497529 - RNA, 19 nt, Artificial Sequence
  Description of Artificial Sequence: Synthetic oligonucleotide
  Antisense strand to SEQ ID NO: 1497528
gaucauacaggaguggaag

SEQ ID NO: 1497530 - RNA, 19 nt, Artificial Sequence
  Description of Artificial Sequence: Synthetic oligonucleotide
  Sense strand starting at position 564 of SEQ ID NO: 1244555
gaagcuagguuuccagaug

SEQ ID NO: 1497531 - RNA, 19 nt, Artificial Sequence
  Description of Artificial Sequence: Synthetic oligonucleotide
  Antisense strand to SEQ ID NO: 1497530
caucuggaaaccuagcuuc

SEQ ID NO: 1497532 - RNA, 19 nt, Artificial Sequence
  Description of Artificial Sequence: Synthetic oligonucleotide
  Sense strand starting at position 786 of SEQ ID NO: 1244555
aaacaugccuuguuuggaa

SEQ ID NO: 1497533 - RNA, 19 nt, Artificial Sequence
  Description of Artificial Sequence: Synthetic oligonucleotide
  Antisense strand to SEQ ID NO: 1497532
uuccaaacaaggcauguuu

SEQ ID NO: 1497534 - RNA, 19 nt, Artificial Sequence
  Description of Artificial Sequence: Synthetic oligonucleotide
  Sense strand starting at position 837 of SEQ ID NO: 1244555
acagaaguuugauucggua

SEQ ID NO: 1497535 - RNA, 19 nt, Artificial Sequence
  Description of Artificial Sequence: Synthetic oligonucleotide
  Antisense strand to SEQ ID NO: 1497534
uaccgaaucaaacuucugu

SEQ ID NO: 1497536 - RNA, 19 nt, Artificial Sequence
  Description of Artificial Sequence: Synthetic oligonucleotide
  Sense strand starting at position 841 of SEQ ID NO: 1244555
aaguuugauucgguauuuc

SEQ ID NO: 1497537 - RNA, 19 nt, Artificial Sequence
  Description of Artificial Sequence: Synthetic oligonucleotide
  Antisense strand to SEQ ID NO: 1497536
gaaauaccgaaucaaacuu

SEQ ID NO: 1497538 - RNA, 19 nt, Artificial Sequence
  Description of Artificial Sequence: Synthetic oligonucleotide
  Sense strand starting at position 853 of SEQ ID NO: 1244555
guauuuccacuucggguaa

SEQ ID NO: 1497539 - RNA, 19 nt, Artificial Sequence
  Description of Artificial Sequence: Synthetic oligonucleotide
  Antisense strand to SEQ ID NO: 1497538
uuacccgaaguggaaauac

SEQ ID NO: 1497540 - RNA, 19 nt, Artificial Sequence
  Description of Artificial Sequence: Synthetic oligonucleotide
  Sense strand starting at position 857 of SEQ ID NO: 1244555
uuccacuucggguaauuau

SEQ ID NO: 1497541 - RNA, 19 nt, Artificial Sequence
  Description of Artificial Sequence: Synthetic oligonucleotide
  Antisense strand to SEQ ID NO: 1497540
auaauuacccgaaguggaa

SEQ ID NO: 1497542 - RNA, 19 nt, Artificial Sequence
  Description of Artificial Sequence: Synthetic oligonucleotide
  Sense strand starting at position 894 of SEQ ID NO: 1244555
aagcuauaugcucagugau

SEQ ID NO: 1497543 - RNA, 19 nt, Artificial Sequence
  Description of Artificial Sequence: Synthetic oligonucleotide
  Antisense strand to SEQ ID NO: 1497542
aucacugagcauauagcuu

SEQ ID NO: 1497544 - RNA, 19 nt, Artificial Sequence
  Description of Artificial Sequence: Synthetic oligonucleotide
  Sense strand starting at position 906 of SEQ ID NO: 1244555
cagugaugguggucaacau

SEQ ID NO: 1497545 - RNA, 19 nt, Artificial Sequence
  Description of Artificial Sequence: Synthetic oligonucleotide
  Antisense strand to SEQ ID NO: 1497544
auguugaccaccaucacug

SEQ ID NO: 1497546 - RNA, 19 nt, Artificial Sequence
  Description of Artificial Sequence: Synthetic oligonucleotide
  Sense strand starting at position 907 of SEQ ID NO: 1244555
agugaugguggucaacaua

SEQ ID NO: 1497547 - RNA, 19 nt, Artificial Sequence
  Description of Artificial Sequence: Synthetic oligonucleotide
  Antisense strand to SEQ ID NO: 1497546
uauguugaccaccaucacu

SEQ ID NO: 1497548 - RNA, 19 nt, Artificial Sequence
  Description of Artificial Sequence: Synthetic oligonucleotide
  Sense strand starting at position 946 of SEQ ID NO: 1244555
acaccagaccuguguaaag

SEQ ID NO: 1497549 - RNA, 19 nt, Artificial Sequence
  Description of Artificial Sequence: Synthetic oligonucleotide
  Antisense strand to SEQ ID NO: 1497548
cuuuacacaggucuggugu

SEQ ID NO: 1497550 - RNA, 19 nt, Artificial Sequence
  Description of Artificial Sequence: Synthetic oligonucleotide
  Sense strand starting at position 948 of SEQ ID NO: 1244555
accagaccuguguaaaggu

SEQ ID NO: 1497551 - RNA, 19 nt, Artificial Sequence
  Description of Artificial Sequence: Synthetic oligonucleotide
  Antisense strand to SEQ ID NO: 1497550
accuuuacacaggucuggu

SEQ ID NO: 1497552 - RNA, 19 nt, Artificial Sequence
  Description of Artificial Sequence: Synthetic oligonucleotide
  Sense strand starting at position 1032 of SEQ ID NO: 1244555
aguaucuaugaaugacuuu

SEQ ID NO: 1497553 - RNA, 19 nt, Artificial Sequence
  Description of Artificial Sequence: Synthetic oligonucleotide
  Antisense strand to SEQ ID NO: 1497552
aaagucauucauagauacu

SEQ ID NO: 1497554 - RNA, 19 nt, Artificial Sequence
  Description of Artificial Sequence: Synthetic oligonucleotide
  Sense strand starting at position 1146 of SEQ ID NO: 1244555
ucaauaaugugggugaauu

SEQ ID NO: 1497555 - RNA, 19 nt, Artificial Sequence
  Description of Artificial Sequence: Synthetic oligonucleotide
  Antisense strand to SEQ ID NO: 1497554
aauucacccacauuauuga

SEQ ID NO: 1497556 - RNA, 19 nt, Artificial Sequence
  Description of Artificial Sequence: Synthetic oligonucleotide
  Sense strand starting at position 1147 of SEQ ID NO: 1244555
caauaaugugggugaauua

SEQ ID NO: 1497557 - RNA, 19 nt, Artificial Sequence
  Description of Artificial Sequence: Synthetic oligonucleotide
  Antisense strand to SEQ ID NO: 1497556
uaauucacccacauuauug

SEQ ID NO: 1497558 - RNA, 19 nt, Artificial Sequence
  Description of Artificial Sequence: Synthetic oligonucleotide
  Sense strand starting at position 1361 of SEQ ID NO: 1244555
ugaguucugaguuggauaa

SEQ ID NO: 1497559 - RNA, 19 nt, Artificial Sequence
  Description of Artificial Sequence: Synthetic oligonucleotide
  Antisense strand to SEQ ID NO: 1497558
uuauccaacucagaacuca

SEQ ID NO: 1497560 - RNA, 19 nt, Artificial Sequence
  Description of Artificial Sequence: Synthetic oligonucleotide
  Sense strand starting at position 1362 of SEQ ID NO: 1244555
gaguucugaguuggauaaa

SEQ ID NO: 1497561 - RNA, 19 nt, Artificial Sequence
  Description of Artificial Sequence: Synthetic oligonucleotide
  Antisense strand to SEQ ID NO: 1497560
uuuauccaacucagaacuc

SEQ ID NO: 1497562 - RNA, 19 nt, Artificial Sequence
  Description of Artificial Sequence: Synthetic oligonucleotide
  Sense strand starting at position 1383 of SEQ ID NO: 1244555
cauccuuuaggaggugaga

SEQ ID NO: 1497563 - RNA, 19 nt, Artificial Sequence
  Description of Artificial Sequence: Synthetic oligonucleotide
  Antisense strand to SEQ ID NO: 1497562
ucucaccuccuaaaggaug

SEQ ID NO: 1497564 - RNA, 19 nt, Artificial Sequence
  Description of Artificial Sequence: Synthetic oligonucleotide
  Sense strand starting at position 1394 of SEQ ID NO: 1244555
aggugagagauauauucgu

SEQ ID NO: 1497565 - RNA, 19 nt, Artificial Sequence
  Description of Artificial Sequence: Synthetic oligonucleotide
  Antisense strand to SEQ ID NO: 1497564
acgaauauaucucucaccu

SEQ ID NO: 1497566 - RNA, 19 nt, Artificial Sequence
  Description of Artificial Sequence: Synthetic oligonucleotide
  Sense strand starting at position 1399 of SEQ ID NO: 1244555
agagauauauucguaacua

SEQ ID NO: 1497567 - RNA, 19 nt, Artificial Sequence
  Description of Artificial Sequence: Synthetic oligonucleotide
  Antisense strand to SEQ ID NO: 1497566
uaguuacgaauauaucucu

SEQ ID NO: 1497568 - RNA, 19 nt, Artificial Sequence
  Description of Artificial Sequence: Synthetic oligonucleotide
  Sense strand starting at position 1403 of SEQ ID NO: 1244555
auauauucguaacuagcaa

SEQ ID NO: 1497569 - RNA, 19 nt, Artificial Sequence
  Description of Artificial Sequence: Synthetic oligonucleotide
  Antisense strand to SEQ ID NO: 1497568
uugcuaguuacgaauauau

SEQ ID NO: 1497570 - RNA, 19 nt, Artificial Sequence
  Description of Artificial Sequence: Synthetic oligonucleotide
  Sense strand starting at position 1415 of SEQ ID NO: 1244555
cuagcaaagccagguaaau

SEQ ID NO: 1497571 - RNA, 19 nt, Artificial Sequence
  Description of Artificial Sequence: Synthetic oligonucleotide
  Antisense strand to SEQ ID NO: 1497570
auuuaccuggcuuugcuag

SEQ ID NO: 1497572 - RNA, 19 nt, Artificial Sequence
  Description of Artificial Sequence: Synthetic oligonucleotide
  Sense strand starting at position 2182 of SEQ ID NO: 1244555
guggacagaguaugacauu

SEQ ID NO: 1497573 - RNA, 19 nt, Artificial Sequence
  Description of Artificial Sequence: Synthetic oligonucleotide
  Antisense strand to SEQ ID NO: 1497572
aaugucauacucuguccac

SEQ ID NO: 1497574 - RNA, 19 nt, Artificial Sequence
  Description of Artificial Sequence: Synthetic oligonucleotide
  Sense strand starting at position 2191 of SEQ ID NO: 1244555
guaugacauuuggaauuac

SEQ ID NO: 1497575 - RNA, 19 nt, Artificial Sequence
  Description of Artificial Sequence: Synthetic oligonucleotide
  Antisense strand to SEQ ID NO: 1497574
guaauuccaaaugucauac

SEQ ID NO: 1497576 - RNA, 19 nt, Artificial Sequence
  Description of Artificial Sequence: Synthetic oligonucleotide
  Sense strand starting at position 2236 of SEQ ID NO: 1244555
gccuguaaccuuggacaag

SEQ ID NO: 1497577 - RNA, 19 nt, Artificial Sequence
  Description of Artificial Sequence: Synthetic oligonucleotide
  Antisense strand to SEQ ID NO: 1497576
cuuguccaagguuacaggc

SEQ ID NO: 1497578 - RNA, 19 nt, Artificial Sequence
  Description of Artificial Sequence: Synthetic oligonucleotide
  Sense strand starting at position 2677 of SEQ ID NO: 1244555
caguucuggguguauaaua

SEQ ID NO: 1497579 - RNA, 19 nt, Artificial Sequence
  Description of Artificial Sequence: Synthetic oligonucleotide
  Antisense strand to SEQ ID NO: 1497578
uauuauacacccagaacug

SEQ ID NO: 1497580 - RNA, 19 nt, Artificial Sequence
  Description of Artificial Sequence: Synthetic oligonucleotide
  Sense strand starting at position 3023 of SEQ ID NO: 1244555
caguuauuaucguuauuug

SEQ ID NO: 1497581 - RNA, 19 nt, Artificial Sequence
  Description of Artificial Sequence: Synthetic oligonucleotide
  Antisense strand to SEQ ID NO: 1497580
caaauaacgauaauaacug

SEQ ID NO: 1497582 - RNA, 19 nt, Artificial Sequence
  Description of Artificial Sequence: Synthetic oligonucleotide
  Sense strand starting at position 3117 of SEQ ID NO: 1244555
agguaauguuuacucuuua

SEQ ID NO: 1497583 - RNA, 19 nt, Artificial Sequence
  Description of Artificial Sequence: Synthetic oligonucleotide
  Antisense strand to SEQ ID NO: 1497582
uaaagaguaaacauuaccu

SEQ ID NO: 1497584 - RNA, 19 nt, Artificial Sequence
  Description of Artificial Sequence: Synthetic oligonucleotide
  Sense strand starting at position 3275 of SEQ ID NO: 1244555
agacgacgacguuaaauaa

SEQ ID NO: 1497585 - RNA, 19 nt, Artificial Sequence
  Description of Artificial Sequence: Synthetic oligonucleotide
  Antisense strand to SEQ ID NO: 1497584
uuauuuaacgucgucgucu

SEQ ID NO: 1497586 - RNA, 19 nt, Artificial Sequence
  Description of Artificial Sequence: Synthetic oligonucleotide
  Sense strand starting at position 3512 of SEQ ID NO: 1244555
cgaauuguaaauuagguga

SEQ ID NO: 1497587 - RNA, 19 nt, Artificial Sequence
  Description of Artificial Sequence: Synthetic oligonucleotide
  Antisense strand to SEQ ID NO: 1497586
ucaccuaauuuacaauucg

SEQ ID NO: 1497588 - RNA, 19 nt, Artificial Sequence
  Description of Artificial Sequence: Synthetic oligonucleotide
  Sense strand starting at position 3516 of SEQ ID NO: 1244555
uuguaaauuaggugagacu

SEQ ID NO: 1497589 - RNA, 19 nt, Artificial Sequence
  Description of Artificial Sequence: Synthetic oligonucleotide
  Antisense strand to SEQ ID NO: 1497588
agucucaccuaauuuacaa

SEQ ID NO: 1497590 - RNA, 19 nt, Artificial Sequence
  Description of Artificial Sequence: Synthetic oligonucleotide
  Sense strand starting at position 3525 of SEQ ID NO: 1244555
aggugagacuucgugaaau

SEQ ID NO: 1497591 - RNA, 19 nt, Artificial Sequence
  Description of Artificial Sequence: Synthetic oligonucleotide
  Antisense strand to SEQ ID NO: 1497590
auuucacgaagucucaccu

SEQ ID NO: 1497592 - RNA, 19 nt, Artificial Sequence
  Description of Artificial Sequence: Synthetic oligonucleotide
  Sense strand starting at position 3527 of SEQ ID NO: 1244555
gugagacuucgugaaaugg

SEQ ID NO: 1497593 - RNA, 19 nt, Artificial Sequence
  Description of Artificial Sequence: Synthetic oligonucleotide
  Antisense strand to SEQ ID NO: 1497592
ccauuucacgaagucucac

SEQ ID NO: 1497594 - RNA, 19 nt, Artificial Sequence
  Description of Artificial Sequence: Synthetic oligonucleotide
  Sense strand starting at position 3541 of SEQ ID NO: 1244555
aauggagucguuugaaaca

SEQ ID NO: 1497595 - RNA, 19 nt, Artificial Sequence
  Description of Artificial Sequence: Synthetic oligonucleotide
  Antisense strand to SEQ ID NO: 1497594
uguuucaaacgacuccauu

SEQ ID NO: 1497596 - RNA, 19 nt, Artificial Sequence
  Description of Artificial Sequence: Synthetic oligonucleotide
  Sense strand starting at position 3585 of SEQ ID NO: 1244555
ggacauaccucuuuguaaa

SEQ ID NO: 1497597 - RNA, 19 nt, Artificial Sequence
  Description of Artificial Sequence: Synthetic oligonucleotide
  Antisense strand to SEQ ID NO: 1497596
uuuacaaagagguaugucc

SEQ ID NO: 1497598 - RNA, 19 nt, Artificial Sequence
  Description of Artificial Sequence: Synthetic oligonucleotide
  Sense strand starting at position 3610 of SEQ ID NO: 1244555
gacccaugagcccagugau

SEQ ID NO: 1497599 - RNA, 19 nt, Artificial Sequence
  Description of Artificial Sequence: Synthetic oligonucleotide
  Antisense strand to SEQ ID NO: 1497598
aucacugggcucauggguc

SEQ ID NO: 1497600 - RNA, 19 nt, Artificial Sequence
  Description of Artificial Sequence: Synthetic oligonucleotide
  Sense strand starting at position 3613 of SEQ ID NO: 1244555
ccaugagcccagugauuau

SEQ ID NO: 1497601 - RNA, 19 nt, Artificial Sequence
  Description of Artificial Sequence: Synthetic oligonucleotide
  Antisense strand to SEQ ID NO: 1497600
auaaucacugggcucaugg

SEQ ID NO: 1497602 - RNA, 19 nt, Artificial Sequence
  Description of Artificial Sequence: Synthetic oligonucleotide
  Sense strand starting at position 3623 of SEQ ID NO: 1244555
agugauuaucugcauacca

SEQ ID NO: 1497603 - RNA, 19 nt, Artificial Sequence
  Description of Artificial Sequence: Synthetic oligonucleotide
  Antisense strand to SEQ ID NO: 1497602
ugguaugcagauaaucacu

SEQ ID NO: 1497604 - RNA, 19 nt, Artificial Sequence
  Description of Artificial Sequence: Synthetic oligonucleotide
  Sense strand starting at position 92 of SEQ ID NO: 1244556
uuuauacuggcugaaaugu

SEQ ID NO: 1497605 - RNA, 19 nt, Artificial Sequence
  Description of Artificial Sequence: Synthetic oligonucleotide
  Antisense strand to SEQ ID NO: 1497604
acauuucagccaguauaaa

SEQ ID NO: 1497606 - RNA, 19 nt, Artificial Sequence
  Description of Artificial Sequence: Synthetic oligonucleotide
  Sense strand starting at position 275 of SEQ ID NO: 1244556
gcaggagcuaaauaauguu

SEQ ID NO: 1497607 - RNA, 19 nt, Artificial Sequence
  Description of Artificial Sequence: Synthetic oligonucleotide
  Antisense strand to SEQ ID NO: 1497606
aacauuauuuagcuccugc

SEQ ID NO: 1497608 - RNA, 19 nt, Artificial Sequence
  Description of Artificial Sequence: Synthetic oligonucleotide
  Sense strand starting at position 327 of SEQ ID NO: 1244556
cuaaguguuagcuagcaag

SEQ ID NO: 1497609 - RNA, 19 nt, Artificial Sequence
  Description of Artificial Sequence: Synthetic oligonucleotide
  Antisense strand to SEQ ID NO: 1497608
cuugcuagcuaacacuuag

SEQ ID NO: 1497610 - RNA, 19 nt, Artificial Sequence
  Description of Artificial Sequence: Synthetic oligonucleotide
  Sense strand starting at position 377 of SEQ ID NO: 1244556
uugucaaauucucuugguu

SEQ ID NO: 1497611 - RNA, 19 nt, Artificial Sequence
  Description of Artificial Sequence: Synthetic oligonucleotide
  Antisense strand to SEQ ID NO: 1497610
aaccaagagaauuugacaa

SEQ ID NO: 1497612 - RNA, 19 nt, Artificial Sequence
  Description of Artificial Sequence: Synthetic oligonucleotide
  Sense strand starting at position 382 of SEQ ID NO: 1244556
aaauucucuugguuaggga

SEQ ID NO: 1497613 - RNA, 19 nt, Artificial Sequence
  Description of Artificial Sequence: Synthetic oligonucleotide
  Antisense strand to SEQ ID NO: 1497612
ucccuaaccaagagaauuu

SEQ ID NO: 1497614 - RNA, 19 nt, Artificial Sequence
  Description of Artificial Sequence: Synthetic oligonucleotide
  Sense strand starting at position 899 of SEQ ID NO: 1244556
aacggaaaugacuguugca

SEQ ID NO: 1497615 - RNA, 19 nt, Artificial Sequence
  Description of Artificial Sequence: Synthetic oligonucleotide
  Antisense strand to SEQ ID NO: 1497614
ugcaacagucauuuccguu

SEQ ID NO: 1497616 - RNA, 19 nt, Artificial Sequence
  Description of Artificial Sequence: Synthetic oligonucleotide
  Sense strand starting at position 998 of SEQ ID NO: 1244556
ccauuagcaguccaauuga

SEQ ID NO: 1497617 - RNA, 19 nt, Artificial Sequence
  Description of Artificial Sequence: Synthetic oligonucleotide
  Antisense strand to SEQ ID NO: 1497616
ucaauuggacugcuaaugg

SEQ ID NO: 1497618 - RNA, 19 nt, Artificial Sequence
  Description of Artificial Sequence: Synthetic oligonucleotide
  Sense strand starting at position 1036 of SEQ ID NO: 1244556
gcacuauuucuggguacuu

SEQ ID NO: 1497619 - RNA, 19 nt, Artificial Sequence
  Description of Artificial Sequence: Synthetic oligonucleotide
  Antisense strand to SEQ ID NO: 1497618
aaguacccagaaauagugc

SEQ ID NO: 1497620 - RNA, 19 nt, Artificial Sequence
  Description of Artificial Sequence: Synthetic oligonucleotide
  Sense strand starting at position 1149 of SEQ ID NO: 1244556
agucucaucccgcacagua

SEQ ID NO: 1497621 - RNA, 19 nt, Artificial Sequence
  Description of Artificial Sequence: Synthetic oligonucleotide
  Antisense strand to SEQ ID NO: 1497620
uacugugcgggaugagacu

SEQ ID NO: 1497622 - RNA, 19 nt, Artificial Sequence
  Description of Artificial Sequence: Synthetic oligonucleotide
  Sense strand starting at position 1240 of SEQ ID NO: 1244556
auaguaauauucccaguca

SEQ ID NO: 1497623 - RNA, 19 nt, Artificial Sequence
  Description of Artificial Sequence: Synthetic oligonucleotide
  Antisense strand to SEQ ID NO: 1497622
ugacugggaauauuacuau

SEQ ID NO: 1497624 - RNA, 19 nt, Artificial Sequence
  Description of Artificial Sequence: Synthetic oligonucleotide
  Sense strand starting at position 1278 of SEQ ID NO: 1244556
cuuuaaugugcauagaaau

SEQ ID NO: 1497625 - RNA, 19 nt, Artificial Sequence
  Description of Artificial Sequence: Synthetic oligonucleotide
  Antisense strand to SEQ ID NO: 1497624
auuucuaugcacauuaaag

SEQ ID NO: 1497626 - RNA, 19 nt, Artificial Sequence
  Description of Artificial Sequence: Synthetic oligonucleotide
  Sense strand starting at position 1342 of SEQ ID NO: 1244556
uuggguggaguccgauaau

SEQ ID NO: 1497627 - RNA, 19 nt, Artificial Sequence
  Description of Artificial Sequence: Synthetic oligonucleotide
  Antisense strand to SEQ ID NO: 1497626
auuaucggacuccacccaa

SEQ ID NO: 1497628 - RNA, 19 nt, Artificial Sequence
  Description of Artificial Sequence: Synthetic oligonucleotide
  Sense strand starting at position 1413 of SEQ ID NO: 1244556
ugcauugagcagcaaauau

SEQ ID NO: 1497629 - RNA, 19 nt, Artificial Sequence
  Description of Artificial Sequence: Synthetic oligonucleotide
  Antisense strand to SEQ ID NO: 1497628
auauuugcugcucaaugca

SEQ ID NO: 1497630 - RNA, 19 nt, Artificial Sequence
  Description of Artificial Sequence: Synthetic oligonucleotide
  Sense strand starting at position 1484 of SEQ ID NO: 1244556
cgaaguguuaauuaaauag

SEQ ID NO: 1497631 - RNA, 19 nt, Artificial Sequence
  Description of Artificial Sequence: Synthetic oligonucleotide
  Antisense strand to SEQ ID NO: 1497630
cuauuuaauuaacacuucg

SEQ ID NO: 1497632 - RNA, 19 nt, Artificial Sequence
  Description of Artificial Sequence: Synthetic oligonucleotide
  Sense strand starting at position 1499 of SEQ ID NO: 1244556
auagaaguaugguuaagau

SEQ ID NO: 1497633 - RNA, 19 nt, Artificial Sequence
  Description of Artificial Sequence: Synthetic oligonucleotide
  Antisense strand to SEQ ID NO: 1497632
aucuuaaccauacuucuau

SEQ ID NO: 1497634 - RNA, 19 nt, Artificial Sequence
  Description of Artificial Sequence: Synthetic oligonucleotide
  Sense strand starting at position 1579 of SEQ ID NO: 1244556
cuucguguccagccaaagu

SEQ ID NO: 1497635 - RNA, 19 nt, Artificial Sequence
  Description of Artificial Sequence: Synthetic oligonucleotide
  Antisense strand to SEQ ID NO: 1497634
acuuuggcuggacacgaag

SEQ ID NO: 1497636 - RNA, 19 nt, Artificial Sequence
  Description of Artificial Sequence: Synthetic oligonucleotide
  Sense strand starting at position 1686 of SEQ ID NO: 1244556
ugcacuuacuagucuaaga

SEQ ID NO: 1497637 - RNA, 19 nt, Artificial Sequence
  Description of Artificial Sequence: Synthetic oligonucleotide
  Antisense strand to SEQ ID NO: 1497636
ucuuagacuaguaagugca

SEQ ID NO: 1497638 - RNA, 19 nt, Artificial Sequence
  Description of Artificial Sequence: Synthetic oligonucleotide
  Sense strand starting at position 2037 of SEQ ID NO: 1244556
ucaagcucuucucugcaga

SEQ ID NO: 1497639 - RNA, 19 nt, Artificial Sequence
  Description of Artificial Sequence: Synthetic oligonucleotide
  Antisense strand to SEQ ID NO: 1497638
ucugcagagaagagcuuga

SEQ ID NO: 1497640 - RNA, 19 nt, Artificial Sequence
  Description of Artificial Sequence: Synthetic oligonucleotide
  Sense strand starting at position 2146 of SEQ ID NO: 1244556
gccuuugcccaacaggaaa

SEQ ID NO: 1497641 - RNA, 19 nt, Artificial Sequence
  Description of Artificial Sequence: Synthetic oligonucleotide
  Antisense strand to SEQ ID NO: 1497640
uuuccuguugggcaaaggc

SEQ ID NO: 1497642 - RNA, 19 nt, Artificial Sequence
  Description of Artificial Sequence: Synthetic oligonucleotide
  Sense strand starting at position 2230 of SEQ ID NO: 1244556
caaugagugcgagauguug

SEQ ID NO: 1497643 - RNA, 19 nt, Artificial Sequence
  Description of Artificial Sequence: Synthetic oligonucleotide
  Antisense strand to SEQ ID NO: 1497642
caacaucucgcacucauug

SEQ ID NO: 1497644 - RNA, 19 nt, Artificial Sequence
  Description of Artificial Sequence: Synthetic oligonucleotide
  Sense strand starting at position 2238 of SEQ ID NO: 1244556
gcgagauguugagugacag

SEQ ID NO: 1497645 - RNA, 19 nt, Artificial Sequence
  Description of Artificial Sequence: Synthetic oligonucleotide
  Antisense strand to SEQ ID NO: 1497644
cugucacucaacaucucgc

SEQ ID NO: 1497646 - RNA, 19 nt, Artificial Sequence
  Description of Artificial Sequence: Synthetic oligonucleotide
  Sense strand starting at position 2246 of SEQ ID NO: 1244556
uugagugacagcuguccaa

SEQ ID NO: 1497647 - RNA, 19 nt, Artificial Sequence
  Description of Artificial Sequence: Synthetic oligonucleotide
  Antisense strand to SEQ ID NO: 1497646
uuggacagcugucacucaa

SEQ ID NO: 1497648 - RNA, 19 nt, Artificial Sequence
  Description of Artificial Sequence: Synthetic oligonucleotide
  Sense strand starting at position 2357 of SEQ ID NO: 1244556
gcuggaacugauggugagu

SEQ ID NO: 1497649 - RNA, 19 nt, Artificial Sequence
  Description of Artificial Sequence: Synthetic oligonucleotide
  Antisense strand to SEQ ID NO: 1497648
acucaccaucaguuccagc

SEQ ID NO: 1497650 - RNA, 19 nt, Artificial Sequence
  Description of Artificial Sequence: Synthetic oligonucleotide
  Sense strand starting at position 2362 of SEQ ID NO: 1244556
aacugauggugagugcaaa

SEQ ID NO: 1497651 - RNA, 19 nt, Artificial Sequence
  Description of Artificial Sequence: Synthetic oligonucleotide
  Antisense strand to SEQ ID NO: 1497650
uuugcacucaccaucaguu

SEQ ID NO: 1497652 - RNA, 19 nt, Artificial Sequence
  Description of Artificial Sequence: Synthetic oligonucleotide
  Sense strand starting at position 2385 of SEQ ID NO: 1244556
aggagaucuacuggguagu

SEQ ID NO: 1497653 - RNA, 19 nt, Artificial Sequence
  Description of Artificial Sequence: Synthetic oligonucleotide
  Antisense strand to SEQ ID NO: 1497652
acuacccaguagaucuccu

SEQ ID NO: 1497654 - RNA, 19 nt, Artificial Sequence
  Description of Artificial Sequence: Synthetic oligonucleotide
  Sense strand starting at position 2386 of SEQ ID NO: 1244556
ggagaucuacuggguaguu

SEQ ID NO: 1497655 - RNA, 19 nt, Artificial Sequence
  Description of Artificial Sequence: Synthetic oligonucleotide
  Antisense strand to SEQ ID NO: 1497654
aacuacccaguagaucucc

SEQ ID NO: 1497656 - RNA, 19 nt, Artificial Sequence
  Description of Artificial Sequence: Synthetic oligonucleotide
  Sense strand starting at position 2387 of SEQ ID NO: 1244556
gagaucuacuggguaguuu

SEQ ID NO: 1497657 - RNA, 19 nt, Artificial Sequence
  Description of Artificial Sequence: Synthetic oligonucleotide
  Antisense strand to SEQ ID NO: 1497656
aaacuacccaguagaucuc

SEQ ID NO: 1497658 - RNA, 19 nt, Artificial Sequence
  Description of Artificial Sequence: Synthetic oligonucleotide
  Sense strand starting at position 2388 of SEQ ID NO: 1244556
agaucuacuggguaguuua

SEQ ID NO: 1497659 - RNA, 19 nt, Artificial Sequence
  Description of Artificial Sequence: Synthetic oligonucleotide
  Antisense strand to SEQ ID NO: 1497658
uaaacuacccaguagaucu

SEQ ID NO: 1497660 - RNA, 19 nt, Artificial Sequence
  Description of Artificial Sequence: Synthetic oligonucleotide
  Sense strand starting at position 2550 of SEQ ID NO: 1244556
ggguuacauccgggaaacu

SEQ ID NO: 1497661 - RNA, 19 nt, Artificial Sequence
  Description of Artificial Sequence: Synthetic oligonucleotide
  Antisense strand to SEQ ID NO: 1497660
aguuucccggauguaaccc

SEQ ID NO: 1497662 - RNA, 19 nt, Artificial Sequence
  Description of Artificial Sequence: Synthetic oligonucleotide
  Sense strand starting at position 2559 of SEQ ID NO: 1244556
ccgggaaacucgucaggga

SEQ ID NO: 1497663 - RNA, 19 nt, Artificial Sequence
  Description of Artificial Sequence: Synthetic oligonucleotide
  Antisense strand to SEQ ID NO: 1497662
ucccugacgaguuucccgg

SEQ ID NO: 1497664 - RNA, 19 nt, Artificial Sequence
  Description of Artificial Sequence: Synthetic oligonucleotide
  Sense strand starting at position 2560 of SEQ ID NO: 1244556
cgggaaacucgucagggaa

SEQ ID NO: 1497665 - RNA, 19 nt, Artificial Sequence
  Description of Artificial Sequence: Synthetic oligonucleotide
  Antisense strand to SEQ ID NO: 1497664
uucccugacgaguuucccg

SEQ ID NO: 1497666 - RNA, 19 nt, Artificial Sequence
  Description of Artificial Sequence: Synthetic oligonucleotide
  Sense strand starting at position 2563 of SEQ ID NO: 1244556
gaaacucgucagggaaaug

SEQ ID NO: 1497667 - RNA, 19 nt, Artificial Sequence
  Description of Artificial Sequence: Synthetic oligonucleotide
  Antisense strand to SEQ ID NO: 1497666
cauuucccugacgaguuuc

SEQ ID NO: 1497668 - RNA, 19 nt, Artificial Sequence
  Description of Artificial Sequence: Synthetic oligonucleotide
  Sense strand starting at position 2608 of SEQ ID NO: 1244556
uuuggaauuccuuguuccu

SEQ ID NO: 1497669 - RNA, 19 nt, Artificial Sequence
  Description of Artificial Sequence: Synthetic oligonucleotide
  Antisense strand to SEQ ID NO: 1497668
aggaacaaggaauuccaaa

SEQ ID NO: 1497670 - RNA, 19 nt, Artificial Sequence
  Description of Artificial Sequence: Synthetic oligonucleotide
  Sense strand starting at position 2849 of SEQ ID NO: 1244556
gagaaagucugagaaagga

SEQ ID NO: 1497671 - RNA, 19 nt, Artificial Sequence
  Description of Artificial Sequence: Synthetic oligonucleotide
  Antisense strand to SEQ ID NO: 1497670
uccuuucucagacuuucuc

SEQ ID NO: 1497672 - RNA, 19 nt, Artificial Sequence
  Description of Artificial Sequence: Synthetic oligonucleotide
  Sense strand starting at position 2869 of SEQ ID NO: 1244556
gcuagacuuguaugcacaa

SEQ ID NO: 1497673 - RNA, 19 nt, Artificial Sequence
  Description of Artificial Sequence: Synthetic oligonucleotide
  Antisense strand to SEQ ID NO: 1497672
uugugcauacaagucuagc

SEQ ID NO: 1497674 - RNA, 19 nt, Artificial Sequence
  Description of Artificial Sequence: Synthetic oligonucleotide
  Sense strand starting at position 2912 of SEQ ID NO: 1244556
uucuguuugauccggaggu

SEQ ID NO: 1497675 - RNA, 19 nt, Artificial Sequence
  Description of Artificial Sequence: Synthetic oligonucleotide
  Antisense strand to SEQ ID NO: 1497674
accuccggaucaaacagaa

SEQ ID NO: 1497676 - RNA, 19 nt, Artificial Sequence
  Description of Artificial Sequence: Synthetic oligonucleotide
  Sense strand starting at position 3334 of SEQ ID NO: 1244556
uugggcugcuuuccuuaaa

SEQ ID NO: 1497677 - RNA, 19 nt, Artificial Sequence
  Description of Artificial Sequence: Synthetic oligonucleotide
  Antisense strand to SEQ ID NO: 1497676
uuuaaggaaagcagcccaa

SEQ ID NO: 1497678 - RNA, 19 nt, Artificial Sequence
  Description of Artificial Sequence: Synthetic oligonucleotide
  Sense strand starting at position 3789 of SEQ ID NO: 1244556
uggcauuacugcuuaggua

SEQ ID NO: 1497679 - RNA, 19 nt, Artificial Sequence
  Description of Artificial Sequence: Synthetic oligonucleotide
  Antisense strand to SEQ ID NO: 1497678
uaccuaagcaguaaugcca

SEQ ID NO: 1497680 - RNA, 19 nt, Artificial Sequence
  Description of Artificial Sequence: Synthetic oligonucleotide
  Sense strand starting at position 3790 of SEQ ID NO: 1244556
ggcauuacugcuuagguau

SEQ ID NO: 1497681 - RNA, 19 nt, Artificial Sequence
  Description of Artificial Sequence: Synthetic oligonucleotide
  Antisense strand to SEQ ID NO: 1497680
auaccuaagcaguaaugcc

SEQ ID NO: 1497682 - RNA, 19 nt, Artificial Sequence
  Description of Artificial Sequence: Synthetic oligonucleotide
  Sense strand starting at position 3836 of SEQ ID NO: 1244556
gcugaaucuugggucucua

SEQ ID NO: 1497683 - RNA, 19 nt, Artificial Sequence
  Description of Artificial Sequence: Synthetic oligonucleotide
  Antisense strand to SEQ ID NO: 1497682
uagagacccaagauucagc

SEQ ID NO: 1497684 - RNA, 19 nt, Artificial Sequence
  Description of Artificial Sequence: Synthetic oligonucleotide
  Sense strand starting at position 14 of SEQ ID NO: 1244557
gauccagcuccugagacua

SEQ ID NO: 1497685 - RNA, 19 nt, Artificial Sequence
  Description of Artificial Sequence: Synthetic oligonucleotide
  Antisense strand to SEQ ID NO: 1497684
uagucucaggagcuggauc

SEQ ID NO: 1497686 - RNA, 19 nt, Artificial Sequence
  Description of Artificial Sequence: Synthetic oligonucleotide
  Sense strand starting at position 19 of SEQ ID NO: 1244557
agcuccugagacuaucaua

SEQ ID NO: 1497687 - RNA, 19 nt, Artificial Sequence
  Description of Artificial Sequence: Synthetic oligonucleotide
  Antisense strand to SEQ ID NO: 1497686
uaugauagucucaggagcu

SEQ ID NO: 1497688 - RNA, 19 nt, Artificial Sequence
  Description of Artificial Sequence: Synthetic oligonucleotide
  Sense strand starting at position 162 of SEQ ID NO: 1244557
cacagaucacgaggaacuu

SEQ ID NO: 1497689 - RNA, 19 nt, Artificial Sequence
  Description of Artificial Sequence: Synthetic oligonucleotide
  Antisense strand to SEQ ID NO: 1497688
aaguuccucgugaucugug

SEQ ID NO: 1497690 - RNA, 19 nt, Artificial Sequence
  Description of Artificial Sequence: Synthetic oligonucleotide
  Sense strand starting at position 173 of SEQ ID NO: 1244557
aggaacuucucagcaaacu

SEQ ID NO: 1497691 - RNA, 19 nt, Artificial Sequence
  Description of Artificial Sequence: Synthetic oligonucleotide
  Antisense strand to SEQ ID NO: 1497690
aguuugcugagaaguuccu

SEQ ID NO: 1497692 - RNA, 19 nt, Artificial Sequence
  Description of Artificial Sequence: Synthetic oligonucleotide
  Sense strand starting at position 273 of SEQ ID NO: 1244557
guacucuggucucucuaga

SEQ ID NO: 1497693 - RNA, 19 nt, Artificial Sequence
  Description of Artificial Sequence: Synthetic oligonucleotide
  Antisense strand to SEQ ID NO: 1497692
ucuagagagaccagaguac

SEQ ID NO: 1497694 - RNA, 19 nt, Artificial Sequence
  Description of Artificial Sequence: Synthetic oligonucleotide
  Sense strand starting at position 278 of SEQ ID NO: 1244557
cuggucucucuagaauacu

SEQ ID NO: 1497695 - RNA, 19 nt, Artificial Sequence
  Description of Artificial Sequence: Synthetic oligonucleotide
  Antisense strand to SEQ ID NO: 1497694
aguauucuagagagaccag

SEQ ID NO: 1497696 - RNA, 19 nt, Artificial Sequence
  Description of Artificial Sequence: Synthetic oligonucleotide
  Sense strand starting at position 286 of SEQ ID NO: 1244557
ucuagaauacucugccaga

SEQ ID NO: 1497697 - RNA, 19 nt, Artificial Sequence
  Description of Artificial Sequence: Synthetic oligonucleotide
  Antisense strand to SEQ ID NO: 1497696
ucuggcagaguauucuaga

SEQ ID NO: 1497698 - RNA, 19 nt, Artificial Sequence
  Description of Artificial Sequence: Synthetic oligonucleotide
  Sense strand starting at position 287 of SEQ ID NO: 1244557
cuagaauacucugccagag

SEQ ID NO: 1497699 - RNA, 19 nt, Artificial Sequence
  Description of Artificial Sequence: Synthetic oligonucleotide
  Antisense strand to SEQ ID NO: 1497698
cucuggcagaguauucuag

SEQ ID NO: 1497700 - RNA, 19 nt, Artificial Sequence
  Description of Artificial Sequence: Synthetic oligonucleotide
  Sense strand starting at position 310 of SEQ ID NO: 1244557
ggugcaguggcucaaacua

SEQ ID NO: 1497701 - RNA, 19 nt, Artificial Sequence
  Description of Artificial Sequence: Synthetic oligonucleotide
  Antisense strand to SEQ ID NO: 1497700
uaguuugagccacugcacc

SEQ ID NO: 1497702 - RNA, 19 nt, Artificial Sequence
  Description of Artificial Sequence: Synthetic oligonucleotide
  Sense strand starting at position 699 of SEQ ID NO: 1244557
auuagcaagccugacuuau

SEQ ID NO: 1497703 - RNA, 19 nt, Artificial Sequence
  Description of Artificial Sequence: Synthetic oligonucleotide
  Antisense strand to SEQ ID NO: 1497702
auaagucaggcuugcuaau

SEQ ID NO: 1497704 - RNA, 19 nt, Artificial Sequence
  Description of Artificial Sequence: Synthetic oligonucleotide
  Sense strand starting at position 716 of SEQ ID NO: 1244557
auggaaaucugaguuugca

SEQ ID NO: 1497705 - RNA, 19 nt, Artificial Sequence
  Description of Artificial Sequence: Synthetic oligonucleotide
  Antisense strand to SEQ ID NO: 1497704
ugcaaacucagauuuccau

SEQ ID NO: 1497706 - RNA, 19 nt, Artificial Sequence
  Description of Artificial Sequence: Synthetic oligonucleotide
  Sense strand starting at position 780 of SEQ ID NO: 1244557
agcuguaggaucuguaaau

SEQ ID NO: 1497707 - RNA, 19 nt, Artificial Sequence
  Description of Artificial Sequence: Synthetic oligonucleotide
  Antisense strand to SEQ ID NO: 1497706
auuuacagauccuacagcu

SEQ ID NO: 1497708 - RNA, 19 nt, Artificial Sequence
  Description of Artificial Sequence: Synthetic oligonucleotide
  Sense strand starting at position 781 of SEQ ID NO: 1244557
gcuguaggaucuguaaaua

SEQ ID NO: 1497709 - RNA, 19 nt, Artificial Sequence
  Description of Artificial Sequence: Synthetic oligonucleotide
  Antisense strand to SEQ ID NO: 1497708
uauuuacagauccuacagc

SEQ ID NO: 1497710 - RNA, 19 nt, Artificial Sequence
  Description of Artificial Sequence: Synthetic oligonucleotide
  Sense strand starting at position 789 of SEQ ID NO: 1244557
aucuguaaauagucaucau

SEQ ID NO: 1497711 - RNA, 19 nt, Artificial Sequence
  Description of Artificial Sequence: Synthetic oligonucleotide
  Antisense strand to SEQ ID NO: 1497710
augaugacuauuuacagau

SEQ ID NO: 1497712 - RNA, 19 nt, Artificial Sequence
  Description of Artificial Sequence: Synthetic oligonucleotide
  Sense strand starting at position 1025 of SEQ ID NO: 1244557
caguuagcucgugcagguu

SEQ ID NO: 1497713 - RNA, 19 nt, Artificial Sequence
  Description of Artificial Sequence: Synthetic oligonucleotide
  Antisense strand to SEQ ID NO: 1497712
aaccugcacgagcuaacug

SEQ ID NO: 1497714 - RNA, 19 nt, Artificial Sequence
  Description of Artificial Sequence: Synthetic oligonucleotide
  Sense strand starting at position 1086 of SEQ ID NO: 1244557
cuugcaauccagggaugau

SEQ ID NO: 1497715 - RNA, 19 nt, Artificial Sequence
  Description of Artificial Sequence: Synthetic oligonucleotide
  Antisense strand to SEQ ID NO: 1497714
aucaucccuggauugcaag

SEQ ID NO: 1497716 - RNA, 19 nt, Artificial Sequence
  Description of Artificial Sequence: Synthetic oligonucleotide
  Sense strand starting at position 1321 of SEQ ID NO: 1244557
gggucaaguuaaccauuga

SEQ ID NO: 1497717 - RNA, 19 nt, Artificial Sequence
  Description of Artificial Sequence: Synthetic oligonucleotide
  Antisense strand to SEQ ID NO: 1497716
ucaaugguuaacuugaccc

SEQ ID NO: 1497718 - RNA, 19 nt, Artificial Sequence
  Description of Artificial Sequence: Synthetic oligonucleotide
  Sense strand starting at position 1376 of SEQ ID NO: 1244557
ggaagcaagucagcuaaua

SEQ ID NO: 1497719 - RNA, 19 nt, Artificial Sequence
  Description of Artificial Sequence: Synthetic oligonucleotide
  Antisense strand to SEQ ID NO: 1497718
uauuagcugacuugcuucc

SEQ ID NO: 1497720 - RNA, 19 nt, Artificial Sequence
  Description of Artificial Sequence: Synthetic oligonucleotide
  Sense strand starting at position 1641 of SEQ ID NO: 1244557
ggaugagucuugaguggag

SEQ ID NO: 1497721 - RNA, 19 nt, Artificial Sequence
  Description of Artificial Sequence: Synthetic oligonucleotide
  Antisense strand to SEQ ID NO: 1497720
cuccacucaagacucaucc

SEQ ID NO: 1497722 - RNA, 19 nt, Artificial Sequence
  Description of Artificial Sequence: Synthetic oligonucleotide
  Sense strand starting at position 1808 of SEQ ID NO: 1244557
gugagaccuuuccuagaga

SEQ ID NO: 1497723 - RNA, 19 nt, Artificial Sequence
  Description of Artificial Sequence: Synthetic oligonucleotide
  Antisense strand to SEQ ID NO: 1497722
ucucuaggaaaggucucac

SEQ ID NO: 1497724 - RNA, 19 nt, Artificial Sequence
  Description of Artificial Sequence: Synthetic oligonucleotide
  Sense strand starting at position 2053 of SEQ ID NO: 1244557
ccggcucaagcugaugaau

SEQ ID NO: 1497725 - RNA, 19 nt, Artificial Sequence
  Description of Artificial Sequence: Synthetic oligonucleotide
  Antisense strand to SEQ ID NO: 1497724
auucaucagcuugagccgg

SEQ ID NO: 1497726 - RNA, 19 nt, Artificial Sequence
  Description of Artificial Sequence: Synthetic oligonucleotide
  Sense strand starting at position 2056 of SEQ ID NO: 1244557
gcucaagcugaugaauauu

SEQ ID NO: 1497727 - RNA, 19 nt, Artificial Sequence
  Description of Artificial Sequence: Synthetic oligonucleotide
  Antisense strand to SEQ ID NO: 1497726
aauauucaucagcuugagc

SEQ ID NO: 1497728 - RNA, 19 nt, Artificial Sequence
  Description of Artificial Sequence: Synthetic oligonucleotide
  Sense strand starting at position 2407 of SEQ ID NO: 1244557
ugaacucccugagucgaaa

SEQ ID NO: 1497729 - RNA, 19 nt, Artificial Sequence
  Description of Artificial Sequence: Synthetic oligonucleotide
  Antisense strand to SEQ ID NO: 1497728
uuucgacucagggaguuca

SEQ ID NO: 1497730 - RNA, 19 nt, Artificial Sequence
  Description of Artificial Sequence: Synthetic oligonucleotide
  Sense strand starting at position 2422 of SEQ ID NO: 1244557
gaaaccagucccgguuaaa

SEQ ID NO: 1497731 - RNA, 19 nt, Artificial Sequence
  Description of Artificial Sequence: Synthetic oligonucleotide
  Antisense strand to SEQ ID NO: 1497730
uuuaaccgggacugguuuc

SEQ ID NO: 1497732 - RNA, 19 nt, Artificial Sequence
  Description of Artificial Sequence: Synthetic oligonucleotide
  Sense strand starting at position 2434 of SEQ ID NO: 1244557
gguuaaacugguuggcaga

SEQ ID NO: 1497733 - RNA, 19 nt, Artificial Sequence
  Description of Artificial Sequence: Synthetic oligonucleotide
  Antisense strand to SEQ ID NO: 1497732
ucugccaaccaguuuaacc

SEQ ID NO: 1497734 - RNA, 19 nt, Artificial Sequence
  Description of Artificial Sequence: Synthetic oligonucleotide
  Sense strand starting at position 2674 of SEQ ID NO: 1244557
uugagaucuuaugcagaau

SEQ ID NO: 1497735 - RNA, 19 nt, Artificial Sequence
  Description of Artificial Sequence: Synthetic oligonucleotide
  Antisense strand to SEQ ID NO: 1497734
auucugcauaagaucucaa

SEQ ID NO: 1497736 - RNA, 19 nt, Artificial Sequence
  Description of Artificial Sequence: Synthetic oligonucleotide
  Sense strand starting at position 2755 of SEQ ID NO: 1244557
caaagagaccugugccagu

SEQ ID NO: 1497737 - RNA, 19 nt, Artificial Sequence
  Description of Artificial Sequence: Synthetic oligonucleotide
  Antisense strand to SEQ ID NO: 1497736
acuggcacaggucucuuug

SEQ ID NO: 1497738 - RNA, 19 nt, Artificial Sequence
  Description of Artificial Sequence: Synthetic oligonucleotide
  Sense strand starting at position 2811 of SEQ ID NO: 1244557
ccagauguccagcagucua

SEQ ID NO: 1497739 - RNA, 19 nt, Artificial Sequence
  Description of Artificial Sequence: Synthetic oligonucleotide
  Antisense strand to SEQ ID NO: 1497738
uagacugcuggacaucugg

SEQ ID NO: 1497740 - RNA, 19 nt, Artificial Sequence
  Description of Artificial Sequence: Synthetic oligonucleotide
  Sense strand starting at position 2816 of SEQ ID NO: 1244557
uguccagcagucuauugaa

SEQ ID NO: 1497741 - RNA, 19 nt, Artificial Sequence
  Description of Artificial Sequence: Synthetic oligonucleotide
  Antisense strand to SEQ ID NO: 1497740
uucaauagacugcuggaca

SEQ ID NO: 1497742 - RNA, 19 nt, Artificial Sequence
  Description of Artificial Sequence: Synthetic oligonucleotide
  Sense strand starting at position 2835 of SEQ ID NO: 1244557
agggccuuccuggguauua

SEQ ID NO: 1497743 - RNA, 19 nt, Artificial Sequence
  Description of Artificial Sequence: Synthetic oligonucleotide
  Antisense strand to SEQ ID NO: 1497742
uaauacccaggaaggcccu

SEQ ID NO: 1497744 - RNA, 19 nt, Artificial Sequence
  Description of Artificial Sequence: Synthetic oligonucleotide
  Sense strand starting at position 2837 of SEQ ID NO: 1244557
ggccuuccuggguauuaua

SEQ ID NO: 1497745 - RNA, 19 nt, Artificial Sequence
  Description of Artificial Sequence: Synthetic oligonucleotide
  Antisense strand to SEQ ID NO: 1497744
uauaauacccaggaaggcc

SEQ ID NO: 1497746 - RNA, 19 nt, Artificial Sequence
  Description of Artificial Sequence: Synthetic oligonucleotide
  Sense strand starting at position 2870 of SEQ ID NO: 1244557
uggagcaaguucucaagga

SEQ ID NO: 1497747 - RNA, 19 nt, Artificial Sequence
  Description of Artificial Sequence: Synthetic oligonucleotide
  Antisense strand to SEQ ID NO: 1497746
uccuugagaacuugcucca

SEQ ID NO: 1497748 - RNA, 19 nt, Artificial Sequence
  Description of Artificial Sequence: Synthetic oligonucleotide
  Sense strand starting at position 2874 of SEQ ID NO: 1244557
gcaaguucucaaggaaagg

SEQ ID NO: 1497749 - RNA, 19 nt, Artificial Sequence
  Description of Artificial Sequence: Synthetic oligonucleotide
  Antisense strand to SEQ ID NO: 1497748
ccuuuccuugagaacuugc

SEQ ID NO: 1497750 - RNA, 19 nt, Artificial Sequence
  Description of Artificial Sequence: Synthetic oligonucleotide
  Sense strand starting at position 3355 of SEQ ID NO: 1244557
uggcucucccucuaaguua

SEQ ID NO: 1497751 - RNA, 19 nt, Artificial Sequence
  Description of Artificial Sequence: Synthetic oligonucleotide
  Antisense strand to SEQ ID NO: 1497750
uaacuuagagggagagcca

SEQ ID NO: 1497752 - RNA, 19 nt, Artificial Sequence
  Description of Artificial Sequence: Synthetic oligonucleotide
  Sense strand starting at position 3465 of SEQ ID NO: 1244557
uguauucuccuccaucuga

SEQ ID NO: 1497753 - RNA, 19 nt, Artificial Sequence
  Description of Artificial Sequence: Synthetic oligonucleotide
  Antisense strand to SEQ ID NO: 1497752
ucagauggaggagaauaca

SEQ ID NO: 1497754 - RNA, 19 nt, Artificial Sequence
  Description of Artificial Sequence: Synthetic oligonucleotide
  Sense strand starting at position 3514 of SEQ ID NO: 1244557
gguggacaguccuccaaag

SEQ ID NO: 1497755 - RNA, 19 nt, Artificial Sequence
  Description of Artificial Sequence: Synthetic oligonucleotide
  Antisense strand to SEQ ID NO: 1497754
cuuuggaggacuguccacc

SEQ ID NO: 1497756 - RNA, 19 nt, Artificial Sequence
  Description of Artificial Sequence: Synthetic oligonucleotide
  Sense strand starting at position 3674 of SEQ ID NO: 1244557
cugccuuagaagggugaga

SEQ ID NO: 1497757 - RNA, 19 nt, Artificial Sequence
  Description of Artificial Sequence: Synthetic oligonucleotide
  Antisense strand to SEQ ID NO: 1497756
ucucacccuucuaaggcag

SEQ ID NO: 1497758 - RNA, 19 nt, Artificial Sequence
  Description of Artificial Sequence: Synthetic oligonucleotide
  Sense strand starting at position 3676 of SEQ ID NO: 1244557
gccuuagaagggugagauu

SEQ ID NO: 1497759 - RNA, 19 nt, Artificial Sequence
  Description of Artificial Sequence: Synthetic oligonucleotide
  Antisense strand to SEQ ID NO: 1497758
aaucucacccuucuaaggc

SEQ ID NO: 1497760 - RNA, 19 nt, Artificial Sequence
  Description of Artificial Sequence: Synthetic oligonucleotide
  Sense strand starting at position 3707 of SEQ ID NO: 1244557
ugugcucuuggguaacaau

SEQ ID NO: 1497761 - RNA, 19 nt, Artificial Sequence
  Description of Artificial Sequence: Synthetic oligonucleotide
  Antisense strand to SEQ ID NO: 1497760
auuguuacccaagagcaca

SEQ ID NO: 1497762 - RNA, 19 nt, Artificial Sequence
  Description of Artificial Sequence: Synthetic oligonucleotide
  Sense strand starting at position 3915 of SEQ ID NO: 1244557
gcucuuagagcccagaauu

SEQ ID NO: 1497763 - RNA, 19 nt, Artificial Sequence
  Description of Artificial Sequence: Synthetic oligonucleotide
  Antisense strand to SEQ ID NO: 1497762
aauucugggcucuaagagc

SEQ ID NO: 1497764 - RNA, 19 nt, Artificial Sequence
  Description of Artificial Sequence: Synthetic oligonucleotide
  Sense strand starting at position 217 of SEQ ID NO: 1244558
accuaugugucaucacuga

SEQ ID NO: 1497765 - RNA, 19 nt, Artificial Sequence
  Description of Artificial Sequence: Synthetic oligonucleotide
  Antisense strand to SEQ ID NO: 1497764
ucagugaugacacauaggu

SEQ ID NO: 1497766 - RNA, 19 nt, Artificial Sequence
  Description of Artificial Sequence: Synthetic oligonucleotide
  Sense strand starting at position 221 of SEQ ID NO: 1244558
augugucaucacugaggac

SEQ ID NO: 1497767 - RNA, 19 nt, Artificial Sequence
  Description of Artificial Sequence: Synthetic oligonucleotide
  Antisense strand to SEQ ID NO: 1497766
guccucagugaugacacau

SEQ ID NO: 1497768 - RNA, 19 nt, Artificial Sequence
  Description of Artificial Sequence: Synthetic oligonucleotide
  Sense strand starting at position 370 of SEQ ID NO: 1244558
gcccacuauuggcugagua

SEQ ID NO: 1497769 - RNA, 19 nt, Artificial Sequence
  Description of Artificial Sequence: Synthetic oligonucleotide
  Antisense strand to SEQ ID NO: 1497768
uacucagccaauagugggc

SEQ ID NO: 1497770 - RNA, 19 nt, Artificial Sequence
  Description of Artificial Sequence: Synthetic oligonucleotide
  Sense strand starting at position 371 of SEQ ID NO: 1244558
cccacuauuggcugaguaa

SEQ ID NO: 1497771 - RNA, 19 nt, Artificial Sequence
  Description of Artificial Sequence: Synthetic oligonucleotide
  Antisense strand to SEQ ID NO: 1497770
uuacucagccaauaguggg

SEQ ID NO: 1497772 - RNA, 19 nt, Artificial Sequence
  Description of Artificial Sequence: Synthetic oligonucleotide
  Sense strand starting at position 372 of SEQ ID NO: 1244558
ccacuauuggcugaguaag

SEQ ID NO: 1497773 - RNA, 19 nt, Artificial Sequence
  Description of Artificial Sequence: Synthetic oligonucleotide
  Antisense strand to SEQ ID NO: 1497772
cuuacucagccaauagugg

SEQ ID NO: 1497774 - RNA, 19 nt, Artificial Sequence
  Description of Artificial Sequence: Synthetic oligonucleotide
  Sense strand starting at position 396 of SEQ ID NO: 1244558
gccuuagagcuauaugcac

SEQ ID NO: 1497775 - RNA, 19 nt, Artificial Sequence
  Description of Artificial Sequence: Synthetic oligonucleotide
  Antisense strand to SEQ ID NO: 1497774
gugcauauagcucuaaggc

SEQ ID NO: 1497776 - RNA, 19 nt, Artificial Sequence
  Description of Artificial Sequence: Synthetic oligonucleotide
  Sense strand starting at position 402 of SEQ ID NO: 1244558
gagcuauaugcacaugcau

SEQ ID NO: 1497777 - RNA, 19 nt, Artificial Sequence
  Description of Artificial Sequence: Synthetic oligonucleotide
  Antisense strand to SEQ ID NO: 1497776
augcaugugcauauagcuc

SEQ ID NO: 1497778 - RNA, 19 nt, Artificial Sequence
  Description of Artificial Sequence: Synthetic oligonucleotide
  Sense strand starting at position 829 of SEQ ID NO: 1244558
ugugcacuugugcuuugua

SEQ ID NO: 1497779 - RNA, 19 nt, Artificial Sequence
  Description of Artificial Sequence: Synthetic oligonucleotide
  Antisense strand to SEQ ID NO: 1497778
uacaaagcacaagugcaca

SEQ ID NO: 1497780 - RNA, 19 nt, Artificial Sequence
  Description of Artificial Sequence: Synthetic oligonucleotide
  Sense strand starting at position 876 of SEQ ID NO: 1244558
ggcuuuguaucccuaacca

SEQ ID NO: 1497781 - RNA, 19 nt, Artificial Sequence
  Description of Artificial Sequence: Synthetic oligonucleotide
  Antisense strand to SEQ ID NO: 1497780
ugguuagggauacaaagcc

SEQ ID NO: 1497782 - RNA, 19 nt, Artificial Sequence
  Description of Artificial Sequence: Synthetic oligonucleotide
  Sense strand starting at position 2255 of SEQ ID NO: 1244558
gguguguuuguugagugaa

SEQ ID NO: 1497783 - RNA, 19 nt, Artificial Sequence
  Description of Artificial Sequence: Synthetic oligonucleotide
  Antisense strand to SEQ ID NO: 1497782
uucacucaacaaacacacc

SEQ ID NO: 1497784 - RNA, 19 nt, Artificial Sequence
  Description of Artificial Sequence: Synthetic oligonucleotide
  Sense strand starting at position 2314 of SEQ ID NO: 1244558
gcccgauugacucagcuga

SEQ ID NO: 1497785 - RNA, 19 nt, Artificial Sequence
  Description of Artificial Sequence: Synthetic oligonucleotide
  Antisense strand to SEQ ID NO: 1497784
ucagcugagucaaucgggc

SEQ ID NO: 1497786 - RNA, 19 nt, Artificial Sequence
  Description of Artificial Sequence: Synthetic oligonucleotide
  Sense strand starting at position 2316 of SEQ ID NO: 1244558
ccgauugacucagcugaaa

SEQ ID NO: 1497787 - RNA, 19 nt, Artificial Sequence
  Description of Artificial Sequence: Synthetic oligonucleotide
  Antisense strand to SEQ ID NO: 1497786
uuucagcugagucaaucgg

SEQ ID NO: 1497788 - RNA, 19 nt, Artificial Sequence
  Description of Artificial Sequence: Synthetic oligonucleotide
  Sense strand starting at position 2437 of SEQ ID NO: 1244558
ggcuuccugccaggaaaga

SEQ ID NO: 1497789 - RNA, 19 nt, Artificial Sequence
  Description of Artificial Sequence: Synthetic oligonucleotide
  Antisense strand to SEQ ID NO: 1497788
ucuuuccuggcaggaagcc

SEQ ID NO: 1497790 - RNA, 19 nt, Artificial Sequence
  Description of Artificial Sequence: Synthetic oligonucleotide
  Sense strand starting at position 2446 of SEQ ID NO: 1244558
ccaggaaagagugguuucu

SEQ ID NO: 1497791 - RNA, 19 nt, Artificial Sequence
  Description of Artificial Sequence: Synthetic oligonucleotide
  Antisense strand to SEQ ID NO: 1497790
agaaaccacucuuuccugg

SEQ ID NO: 1497792 - RNA, 19 nt, Artificial Sequence
  Description of Artificial Sequence: Synthetic oligonucleotide
  Sense strand starting at position 2490 of SEQ ID NO: 1244558
gcccgaauucacggaagag

SEQ ID NO: 1497793 - RNA, 19 nt, Artificial Sequence
  Description of Artificial Sequence: Synthetic oligonucleotide
  Antisense strand to SEQ ID NO: 1497792
cucuuccgugaauucgggc

SEQ ID NO: 1497794 - RNA, 19 nt, Artificial Sequence
  Description of Artificial Sequence: Synthetic oligonucleotide
  Sense strand starting at position 2511 of SEQ ID NO: 1244558
ugaggacucuggcuggaaa

SEQ ID NO: 1497795 - RNA, 19 nt, Artificial Sequence
  Description of Artificial Sequence: Synthetic oligonucleotide
  Antisense strand to SEQ ID NO: 1497794
uuuccagccagaguccuca

SEQ ID NO: 1497796 - RNA, 19 nt, Artificial Sequence
  Description of Artificial Sequence: Synthetic oligonucleotide
  Sense strand starting at position 2707 of SEQ ID NO: 1244558
aggucuuccuugcuuaaga

SEQ ID NO: 1497797 - RNA, 19 nt, Artificial Sequence
  Description of Artificial Sequence: Synthetic oligonucleotide
  Antisense strand to SEQ ID NO: 1497796
ucuuaagcaaggaagaccu

SEQ ID NO: 1497798 - RNA, 19 nt, Artificial Sequence
  Description of Artificial Sequence: Synthetic oligonucleotide
  Sense strand starting at position 2708 of SEQ ID NO: 1244558
ggucuuccuugcuuaagaa

SEQ ID NO: 1497799 - RNA, 19 nt, Artificial Sequence
  Description of Artificial Sequence: Synthetic oligonucleotide
  Antisense strand to SEQ ID NO: 1497798
uucuuaagcaaggaagacc

SEQ ID NO: 1497800 - RNA, 19 nt, Artificial Sequence
  Description of Artificial Sequence: Synthetic oligonucleotide
  Sense strand starting at position 2709 of SEQ ID NO: 1244558
gucuuccuugcuuaagaac

SEQ ID NO: 1497801 - RNA, 19 nt, Artificial Sequence
  Description of Artificial Sequence: Synthetic oligonucleotide
  Antisense strand to SEQ ID NO: 1497800
guucuuaagcaaggaagac

SEQ ID NO: 1497802 - RNA, 19 nt, Artificial Sequence
  Description of Artificial Sequence: Synthetic oligonucleotide
  Sense strand starting at position 2741 of SEQ ID NO: 1244558
gaucuauuucugcagcugu

SEQ ID NO: 1497803 - RNA, 19 nt, Artificial Sequence
  Description of Artificial Sequence: Synthetic oligonucleotide
  Antisense strand to SEQ ID NO: 1497802
acagcugcagaaauagauc

SEQ ID NO: 1497804 - RNA, 19 nt, Artificial Sequence
  Description of Artificial Sequence: Synthetic oligonucleotide
  Sense strand starting at position 2867 of SEQ ID NO: 1244558
ccugccaguccuggaguaa

SEQ ID NO: 1497805 - RNA, 19 nt, Artificial Sequence
  Description of Artificial Sequence: Synthetic oligonucleotide
  Antisense strand to SEQ ID NO: 1497804
uuacuccaggacuggcagg

SEQ ID NO: 1497806 - RNA, 19 nt, Artificial Sequence
  Description of Artificial Sequence: Synthetic oligonucleotide
  Sense strand starting at position 2868 of SEQ ID NO: 1244558
cugccaguccuggaguaag

SEQ ID NO: 1497807 - RNA, 19 nt, Artificial Sequence
  Description of Artificial Sequence: Synthetic oligonucleotide
  Antisense strand to SEQ ID NO: 1497806
cuuacuccaggacuggcag

SEQ ID NO: 1497808 - RNA, 19 nt, Artificial Sequence
  Description of Artificial Sequence: Synthetic oligonucleotide
  Sense strand starting at position 2948 of SEQ ID NO: 1244558
gcuugugggcauuacuuua

SEQ ID NO: 1497809 - RNA, 19 nt, Artificial Sequence
  Description of Artificial Sequence: Synthetic oligonucleotide
  Antisense strand to SEQ ID NO: 1497808
uaaaguaaugcccacaagc

SEQ ID NO: 1497810 - RNA, 19 nt, Artificial Sequence
  Description of Artificial Sequence: Synthetic oligonucleotide
  Sense strand starting at position 3076 of SEQ ID NO: 1244558
auucucauuccagguagaa

SEQ ID NO: 1497811 - RNA, 19 nt, Artificial Sequence
  Description of Artificial Sequence: Synthetic oligonucleotide
  Antisense strand to SEQ ID NO: 1497810
uucuaccuggaaugagaau

SEQ ID NO: 1497812 - RNA, 19 nt, Artificial Sequence
  Description of Artificial Sequence: Synthetic oligonucleotide
  Sense strand starting at position 3140 of SEQ ID NO: 1244558
aagugucugcgugugcaau

SEQ ID NO: 1497813 - RNA, 19 nt, Artificial Sequence
  Description of Artificial Sequence: Synthetic oligonucleotide
  Antisense strand to SEQ ID NO: 1497812
auugcacacgcagacacuu

SEQ ID NO: 1497814 - RNA, 19 nt, Artificial Sequence
  Description of Artificial Sequence: Synthetic oligonucleotide
  Sense strand starting at position 3286 of SEQ ID NO: 1244558
ggacuugaccgcugaggga

SEQ ID NO: 1497815 - RNA, 19 nt, Artificial Sequence
  Description of Artificial Sequence: Synthetic oligonucleotide
  Antisense strand to SEQ ID NO: 1497814
ucccucagcggucaagucc

SEQ ID NO: 1497816 - RNA, 19 nt, Artificial Sequence
  Description of Artificial Sequence: Synthetic oligonucleotide
  Sense strand starting at position 3433 of SEQ ID NO: 1244558
ggucaaacugucugacugu

SEQ ID NO: 1497817 - RNA, 19 nt, Artificial Sequence
  Description of Artificial Sequence: Synthetic oligonucleotide
  Antisense strand to SEQ ID NO: 1497816
acagucagacaguuugacc

SEQ ID NO: 1497818 - RNA, 19 nt, Artificial Sequence
  Description of Artificial Sequence: Synthetic oligonucleotide
  Sense strand starting at position 3436 of SEQ ID NO: 1244558
caaacugucugacuguaga

SEQ ID NO: 1497819 - RNA, 19 nt, Artificial Sequence
  Description of Artificial Sequence: Synthetic oligonucleotide
  Antisense strand to SEQ ID NO: 1497818
ucuacagucagacaguuug

SEQ ID NO: 1497820 - RNA, 19 nt, Artificial Sequence
  Description of Artificial Sequence: Synthetic oligonucleotide
  Sense strand starting at position 3505 of SEQ ID NO: 1244558
ugccaagguuuggaauuua

SEQ ID NO: 1497821 - RNA, 19 nt, Artificial Sequence
  Description of Artificial Sequence: Synthetic oligonucleotide
  Antisense strand to SEQ ID NO: 1497820
uaaauuccaaaccuuggca

SEQ ID NO: 1497822 - RNA, 19 nt, Artificial Sequence
  Description of Artificial Sequence: Synthetic oligonucleotide
  Sense strand starting at position 3535 of SEQ ID NO: 1244558
guggguaauggagagcuau

SEQ ID NO: 1497823 - RNA, 19 nt, Artificial Sequence
  Description of Artificial Sequence: Synthetic oligonucleotide
  Antisense strand to SEQ ID NO: 1497822
auagcucuccauuacccac

SEQ ID NO: 1497824 - RNA, 19 nt, Artificial Sequence
  Description of Artificial Sequence: Synthetic oligonucleotide
  Sense strand starting at position 3605 of SEQ ID NO: 1244558
ucaggaagauuguucuugu

SEQ ID NO: 1497825 - RNA, 19 nt, Artificial Sequence
  Description of Artificial Sequence: Synthetic oligonucleotide
  Antisense strand to SEQ ID NO: 1497824
acaagaacaaucuuccuga

SEQ ID NO: 1497826 - RNA, 19 nt, Artificial Sequence
  Description of Artificial Sequence: Synthetic oligonucleotide
  Sense strand starting at position 3606 of SEQ ID NO: 1244558
caggaagauuguucuuguc

SEQ ID NO: 1497827 - RNA, 19 nt, Artificial Sequence
  Description of Artificial Sequence: Synthetic oligonucleotide
  Antisense strand to SEQ ID NO: 1497826
gacaagaacaaucuuccug

SEQ ID NO: 1497828 - RNA, 19 nt, Artificial Sequence
  Description of Artificial Sequence: Synthetic oligonucleotide
  Sense strand starting at position 3608 of SEQ ID NO: 1244558
ggaagauuguucuugucca

SEQ ID NO: 1497829 - RNA, 19 nt, Artificial Sequence
  Description of Artificial Sequence: Synthetic oligonucleotide
  Antisense strand to SEQ ID NO: 1497828
uggacaagaacaaucuucc

SEQ ID NO: 1497830 - RNA, 19 nt, Artificial Sequence
  Description of Artificial Sequence: Synthetic oligonucleotide
  Sense strand starting at position 3655 of SEQ ID NO: 1244558
guaacaaaugucugauagg

SEQ ID NO: 1497831 - RNA, 19 nt, Artificial Sequence
  Description of Artificial Sequence: Synthetic oligonucleotide
  Antisense strand to SEQ ID NO: 1497830
ccuaucagacauuuguuac

SEQ ID NO: 1497832 - RNA, 19 nt, Artificial Sequence
  Description of Artificial Sequence: Synthetic oligonucleotide
  Sense strand starting at position 3887 of SEQ ID NO: 1244558
uggauaaugugggaauaga

SEQ ID NO: 1497833 - RNA, 19 nt, Artificial Sequence
  Description of Artificial Sequence: Synthetic oligonucleotide
  Antisense strand to SEQ ID NO: 1497832
ucuauucccacauuaucca

SEQ ID NO: 1497834 - RNA, 19 nt, Artificial Sequence
  Description of Artificial Sequence: Synthetic oligonucleotide
  Sense strand starting at position 3898 of SEQ ID NO: 1244558
ggaauagaauaucucuguu

SEQ ID NO: 1497835 - RNA, 19 nt, Artificial Sequence
  Description of Artificial Sequence: Synthetic oligonucleotide
  Antisense strand to SEQ ID NO: 1497834
aacagagauauucuauucc

SEQ ID NO: 1497836 - RNA, 19 nt, Artificial Sequence
  Description of Artificial Sequence: Synthetic oligonucleotide
  Sense strand starting at position 3901 of SEQ ID NO: 1244558
auagaauaucucuguugau

SEQ ID NO: 1497837 - RNA, 19 nt, Artificial Sequence
  Description of Artificial Sequence: Synthetic oligonucleotide
  Antisense strand to SEQ ID NO: 1497836
aucaacagagauauucuau

SEQ ID NO: 1497838 - RNA, 19 nt, Artificial Sequence
  Description of Artificial Sequence: Synthetic oligonucleotide
  Sense strand starting at position 3902 of SEQ ID NO: 1244558
uagaauaucucuguugaug

SEQ ID NO: 1497839 - RNA, 19 nt, Artificial Sequence
  Description of Artificial Sequence: Synthetic oligonucleotide
  Antisense strand to SEQ ID NO: 1497838
caucaacagagauauucua

SEQ ID NO: 1497840 - RNA, 19 nt, Artificial Sequence
  Description of Artificial Sequence: Synthetic oligonucleotide
  Sense strand starting at position 3905 of SEQ ID NO: 1244558
aauaucucuguugauguga

SEQ ID NO: 1497841 - RNA, 19 nt, Artificial Sequence
  Description of Artificial Sequence: Synthetic oligonucleotide
  Antisense strand to SEQ ID NO: 1497840
ucacaucaacagagauauu

SEQ ID NO: 1497842 - RNA, 19 nt, Artificial Sequence
  Description of Artificial Sequence: Synthetic oligonucleotide
  Sense strand starting at position 3924 of SEQ ID NO: 1244558
aaaguuguccaagacaguu

SEQ ID NO: 1497843 - RNA, 19 nt, Artificial Sequence
  Description of Artificial Sequence: Synthetic oligonucleotide
  Antisense strand to SEQ ID NO: 1497842
aacugucuuggacaacuuu

SEQ ID NO: 1497844 - RNA, 19 nt, Artificial Sequence
  Description of Artificial Sequence: Synthetic oligonucleotide
  Sense strand starting at position 151 of SEQ ID NO: 1244559
gugagaucucaguaagugu

SEQ ID NO: 1497845 - RNA, 19 nt, Artificial Sequence
  Description of Artificial Sequence: Synthetic oligonucleotide
  Antisense strand to SEQ ID NO: 1497844
acacuuacugagaucucac

SEQ ID NO: 1497846 - RNA, 19 nt, Artificial Sequence
  Description of Artificial Sequence: Synthetic oligonucleotide
  Sense strand starting at position 154 of SEQ ID NO: 1244559
agaucucaguaaguguuau

SEQ ID NO: 1497847 - RNA, 19 nt, Artificial Sequence
  Description of Artificial Sequence: Synthetic oligonucleotide
  Antisense strand to SEQ ID NO: 1497846
auaacacuuacugagaucu

SEQ ID NO: 1497848 - RNA, 19 nt, Artificial Sequence
  Description of Artificial Sequence: Synthetic oligonucleotide
  Sense strand starting at position 165 of SEQ ID NO: 1244559
aguguuauguucuugagac

SEQ ID NO: 1497849 - RNA, 19 nt, Artificial Sequence
  Description of Artificial Sequence: Synthetic oligonucleotide
  Antisense strand to SEQ ID NO: 1497848
gucucaagaacauaacacu

SEQ ID NO: 1497850 - RNA, 19 nt, Artificial Sequence
  Description of Artificial Sequence: Synthetic oligonucleotide
  Sense strand starting at position 167 of SEQ ID NO: 1244559
uguuauguucuugagacuc

SEQ ID NO: 1497851 - RNA, 19 nt, Artificial Sequence
  Description of Artificial Sequence: Synthetic oligonucleotide
  Antisense strand to SEQ ID NO: 1497850
gagucucaagaacauaaca

SEQ ID NO: 1497852 - RNA, 19 nt, Artificial Sequence
  Description of Artificial Sequence: Synthetic oligonucleotide
  Sense strand starting at position 868 of SEQ ID NO: 1244559
aacugcuugcaagauguuu

SEQ ID NO: 1497853 - RNA, 19 nt, Artificial Sequence
  Description of Artificial Sequence: Synthetic oligonucleotide
  Antisense strand to SEQ ID NO: 1497852
aaacaucuugcaagcaguu

SEQ ID NO: 1497854 - RNA, 19 nt, Artificial Sequence
  Description of Artificial Sequence: Synthetic oligonucleotide
  Sense strand starting at position 873 of SEQ ID NO: 1244559
cuugcaagauguuucuauu

SEQ ID NO: 1497855 - RNA, 19 nt, Artificial Sequence
  Description of Artificial Sequence: Synthetic oligonucleotide
  Antisense strand to SEQ ID NO: 1497854
aauagaaacaucuugcaag

SEQ ID NO: 1497856 - RNA, 19 nt, Artificial Sequence
  Description of Artificial Sequence: Synthetic oligonucleotide
  Sense strand starting at position 1281 of SEQ ID NO: 1244559
uggugugugguagaugacu

SEQ ID NO: 1497857 - RNA, 19 nt, Artificial Sequence
  Description of Artificial Sequence: Synthetic oligonucleotide
  Antisense strand to SEQ ID NO: 1497856
agucaucuaccacacacca

SEQ ID NO: 1497858 - RNA, 19 nt, Artificial Sequence
  Description of Artificial Sequence: Synthetic oligonucleotide
  Sense strand starting at position 1283 of SEQ ID NO: 1244559
gugugugguagaugacuga

SEQ ID NO: 1497859 - RNA, 19 nt, Artificial Sequence
  Description of Artificial Sequence: Synthetic oligonucleotide
  Antisense strand to SEQ ID NO: 1497858
ucagucaucuaccacacac

SEQ ID NO: 1497860 - RNA, 19 nt, Artificial Sequence
  Description of Artificial Sequence: Synthetic oligonucleotide
  Sense strand starting at position 1993 of SEQ ID NO: 1244559
ggcggacucuuccuggaca

SEQ ID NO: 1497861 - RNA, 19 nt, Artificial Sequence
  Description of Artificial Sequence: Synthetic oligonucleotide
  Antisense strand to SEQ ID NO: 1497860
uguccaggaagaguccgcc

SEQ ID NO: 1497862 - RNA, 19 nt, Artificial Sequence
  Description of Artificial Sequence: Synthetic oligonucleotide
  Sense strand starting at position 2015 of SEQ ID NO: 1244559
gggcuuucuauuggucaca

SEQ ID NO: 1497863 - RNA, 19 nt, Artificial Sequence
  Description of Artificial Sequence: Synthetic oligonucleotide
  Antisense strand to SEQ ID NO: 1497862
ugugaccaauagaaagccc

SEQ ID NO: 1497864 - RNA, 19 nt, Artificial Sequence
  Description of Artificial Sequence: Synthetic oligonucleotide
  Sense strand starting at position 2054 of SEQ ID NO: 1244559
acagguaguuugguugcaa

SEQ ID NO: 1497865 - RNA, 19 nt, Artificial Sequence
  Description of Artificial Sequence: Synthetic oligonucleotide
  Antisense strand to SEQ ID NO: 1497864
uugcaaccaaacuaccugu

SEQ ID NO: 1497866 - RNA, 19 nt, Artificial Sequence
  Description of Artificial Sequence: Synthetic oligonucleotide
  Sense strand starting at position 2120 of SEQ ID NO: 1244559
gcggaagagacuugcgaca

SEQ ID NO: 1497867 - RNA, 19 nt, Artificial Sequence
  Description of Artificial Sequence: Synthetic oligonucleotide
  Antisense strand to SEQ ID NO: 1497866
ugucgcaagucucuuccgc

SEQ ID NO: 1497868 - RNA, 19 nt, Artificial Sequence
  Description of Artificial Sequence: Synthetic oligonucleotide
  Sense strand starting at position 2213 of SEQ ID NO: 1244559
gcuggugaaacuggguuua

SEQ ID NO: 1497869 - RNA, 19 nt, Artificial Sequence
  Description of Artificial Sequence: Synthetic oligonucleotide
  Antisense strand to SEQ ID NO: 1497868
uaaacccaguuucaccagc

SEQ ID NO: 1497870 - RNA, 19 nt, Artificial Sequence
  Description of Artificial Sequence: Synthetic oligonucleotide
  Sense strand starting at position 2267 of SEQ ID NO: 1244559
gcuuaucaacgugauguau

SEQ ID NO: 1497871 - RNA, 19 nt, Artificial Sequence
  Description of Artificial Sequence: Synthetic oligonucleotide
  Antisense strand to SEQ ID NO: 1497870
auacaucacguugauaagc

SEQ ID NO: 1497872 - RNA, 19 nt, Artificial Sequence
  Description of Artificial Sequence: Synthetic oligonucleotide
  Sense strand starting at position 2278 of SEQ ID NO: 1244559
ugauguaugaguucgucgu

SEQ ID NO: 1497873 - RNA, 19 nt, Artificial Sequence
  Description of Artificial Sequence: Synthetic oligonucleotide
  Antisense strand to SEQ ID NO: 1497872
acgacgaacucauacauca

SEQ ID NO: 1497874 - RNA, 19 nt, Artificial Sequence
  Description of Artificial Sequence: Synthetic oligonucleotide
  Sense strand starting at position 2292 of SEQ ID NO: 1244559
gucguauuagucgugcuag

SEQ ID NO: 1497875 - RNA, 19 nt, Artificial Sequence
  Description of Artificial Sequence: Synthetic oligonucleotide
  Antisense strand to SEQ ID NO: 1497874
cuagcacgacuaauacgac

SEQ ID NO: 1497876 - RNA, 19 nt, Artificial Sequence
  Description of Artificial Sequence: Synthetic oligonucleotide
  Sense strand starting at position 2294 of SEQ ID NO: 1244559
cguauuagucgugcuagcu

SEQ ID NO: 1497877 - RNA, 19 nt, Artificial Sequence
  Description of Artificial Sequence: Synthetic oligonucleotide
  Antisense strand to SEQ ID NO: 1497876
agcuagcacgacuaauacg

SEQ ID NO: 1497878 - RNA, 19 nt, Artificial Sequence
  Description of Artificial Sequence: Synthetic oligonucleotide
  Sense strand starting at position 2295 of SEQ ID NO: 1244559
guauuagucgugcuagcuu

SEQ ID NO: 1497879 - RNA, 19 nt, Artificial Sequence
  Description of Artificial Sequence: Synthetic oligonucleotide
  Antisense strand to SEQ ID NO: 1497878
aagcuagcacgacuaauac

SEQ ID NO: 1497880 - RNA, 19 nt, Artificial Sequence
  Description of Artificial Sequence: Synthetic oligonucleotide
  Sense strand starting at position 2298 of SEQ ID NO: 1244559
uuagucgugcuagcuuauu

SEQ ID NO: 1497881 - RNA, 19 nt, Artificial Sequence
  Description of Artificial Sequence: Synthetic oligonucleotide
  Antisense strand to SEQ ID NO: 1497880
aauaagcuagcacgacuaa

SEQ ID NO: 1497882 - RNA, 19 nt, Artificial Sequence
  Description of Artificial Sequence: Synthetic oligonucleotide
  Sense strand starting at position 2404 of SEQ ID NO: 1244559
auaggaggcgcccauuaaa

SEQ ID NO: 1497883 - RNA, 19 nt, Artificial Sequence
  Description of Artificial Sequence: Synthetic oligonucleotide
  Antisense strand to SEQ ID NO: 1497882
uuuaaugggcgccuccuau

SEQ ID NO: 1497884 - RNA, 19 nt, Artificial Sequence
  Description of Artificial Sequence: Synthetic oligonucleotide
  Sense strand starting at position 2422 of SEQ ID NO: 1244559
auggaaauuuaaugaugca

SEQ ID NO: 1497885 - RNA, 19 nt, Artificial Sequence
  Description of Artificial Sequence: Synthetic oligonucleotide
  Antisense strand to SEQ ID NO: 1497884
ugcaucauuaaauuuccau

SEQ ID NO: 1497886 - RNA, 19 nt, Artificial Sequence
  Description of Artificial Sequence: Synthetic oligonucleotide
  Sense strand starting at position 2762 of SEQ ID NO: 1244559
ccacuuauuucgcccgaug

SEQ ID NO: 1497887 - RNA, 19 nt, Artificial Sequence
  Description of Artificial Sequence: Synthetic oligonucleotide
  Antisense strand to SEQ ID NO: 1497886
caucgggcgaaauaagugg

SEQ ID NO: 1497888 - RNA, 19 nt, Artificial Sequence
  Description of Artificial Sequence: Synthetic oligonucleotide
  Sense strand starting at position 3155 of SEQ ID NO: 1244559
gcuagaucgcaggaaaccu

SEQ ID NO: 1497889 - RNA, 19 nt, Artificial Sequence
  Description of Artificial Sequence: Synthetic oligonucleotide
  Antisense strand to SEQ ID NO: 1497888
agguuuccugcgaucuagc

SEQ ID NO: 1497890 - RNA, 19 nt, Artificial Sequence
  Description of Artificial Sequence: Synthetic oligonucleotide
  Sense strand starting at position 3274 of SEQ ID NO: 1244559
uauugucugccucaaucga

SEQ ID NO: 1497891 - RNA, 19 nt, Artificial Sequence
  Description of Artificial Sequence: Synthetic oligonucleotide
  Antisense strand to SEQ ID NO: 1497890
ucgauugaggcagacaaua

SEQ ID NO: 1497892 - RNA, 19 nt, Artificial Sequence
  Description of Artificial Sequence: Synthetic oligonucleotide
  Sense strand starting at position 3281 of SEQ ID NO: 1244559
ugccucaaucgauauuaca

SEQ ID NO: 1497893 - RNA, 19 nt, Artificial Sequence
  Description of Artificial Sequence: Synthetic oligonucleotide
  Antisense strand to SEQ ID NO: 1497892
uguaauaucgauugaggca

SEQ ID NO: 1497894 - RNA, 19 nt, Artificial Sequence
  Description of Artificial Sequence: Synthetic oligonucleotide
  Sense strand starting at position 3385 of SEQ ID NO: 1244559
gggagaacauuguugugau

SEQ ID NO: 1497895 - RNA, 19 nt, Artificial Sequence
  Description of Artificial Sequence: Synthetic oligonucleotide
  Antisense strand to SEQ ID NO: 1497894
aucacaacaauguucuccc

SEQ ID NO: 1497896 - RNA, 19 nt, Artificial Sequence
  Description of Artificial Sequence: Synthetic oligonucleotide
  Sense strand starting at position 3395 of SEQ ID NO: 1244559
uguugugauacagggaaag

SEQ ID NO: 1497897 - RNA, 19 nt, Artificial Sequence
  Description of Artificial Sequence: Synthetic oligonucleotide
  Antisense strand to SEQ ID NO: 1497896
cuuucccuguaucacaaca

SEQ ID NO: 1497898 - RNA, 19 nt, Artificial Sequence
  Description of Artificial Sequence: Synthetic oligonucleotide
  Sense strand starting at position 3481 of SEQ ID NO: 1244559
agacgcauuuaauauuaga

SEQ ID NO: 1497899 - RNA, 19 nt, Artificial Sequence
  Description of Artificial Sequence: Synthetic oligonucleotide
  Antisense strand to SEQ ID NO: 1497898
ucuaauauuaaaugcgucu

SEQ ID NO: 1497900 - RNA, 19 nt, Artificial Sequence
  Description of Artificial Sequence: Synthetic oligonucleotide
  Sense strand starting at position 3702 of SEQ ID NO: 1244559
gggaucugauccucgcaau

SEQ ID NO: 1497901 - RNA, 19 nt, Artificial Sequence
  Description of Artificial Sequence: Synthetic oligonucleotide
  Antisense strand to SEQ ID NO: 1497900
auugcgaggaucagauccc

SEQ ID NO: 1497902 - RNA, 19 nt, Artificial Sequence
  Description of Artificial Sequence: Synthetic oligonucleotide
  Sense strand starting at position 3703 of SEQ ID NO: 1244559
ggaucugauccucgcaaua

SEQ ID NO: 1497903 - RNA, 19 nt, Artificial Sequence
  Description of Artificial Sequence: Synthetic oligonucleotide
  Antisense strand to SEQ ID NO: 1497902
uauugcgaggaucagaucc

SEQ ID NO: 1497904 - RNA, 19 nt, Artificial Sequence
  Description of Artificial Sequence: Synthetic oligonucleotide
  Sense strand starting at position 3726 of SEQ ID NO: 1244559
uugguauaugcuggaggua

SEQ ID NO: 1497905 - RNA, 19 nt, Artificial Sequence
  Description of Artificial Sequence: Synthetic oligonucleotide
  Antisense strand to SEQ ID NO: 1497904
uaccuccagcauauaccaa

SEQ ID NO: 1497906 - RNA, 19 nt, Artificial Sequence
  Description of Artificial Sequence: Synthetic oligonucleotide
  Sense strand starting at position 3727 of SEQ ID NO: 1244559
ugguauaugcuggagguaa

SEQ ID NO: 1497907 - RNA, 19 nt, Artificial Sequence
  Description of Artificial Sequence: Synthetic oligonucleotide
  Antisense strand to SEQ ID NO: 1497906
uuaccuccagcauauacca

SEQ ID NO: 1497908 - RNA, 19 nt, Artificial Sequence
  Description of Artificial Sequence: Synthetic oligonucleotide
  Sense strand starting at position 3729 of SEQ ID NO: 1244559
guauaugcuggagguaauu

SEQ ID NO: 1497909 - RNA, 19 nt, Artificial Sequence
  Description of Artificial Sequence: Synthetic oligonucleotide
  Antisense strand to SEQ ID NO: 1497908
aauuaccuccagcauauac

SEQ ID NO: 1497910 - RNA, 19 nt, Artificial Sequence
  Description of Artificial Sequence: Synthetic oligonucleotide
  Sense strand starting at position 3738 of SEQ ID NO: 1244559
ggagguaauugccuagauu

SEQ ID NO: 1497911 - RNA, 19 nt, Artificial Sequence
  Description of Artificial Sequence: Synthetic oligonucleotide
  Antisense strand to SEQ ID NO: 1497910
aaucuaggcaauuaccucc

SEQ ID NO: 1497912 - RNA, 19 nt, Artificial Sequence
  Description of Artificial Sequence: Synthetic oligonucleotide
  Sense strand starting at position 3750 of SEQ ID NO: 1244559
cuagauuucccgcguuccu

SEQ ID NO: 1497913 - RNA, 19 nt, Artificial Sequence
  Description of Artificial Sequence: Synthetic oligonucleotide
  Antisense strand to SEQ ID NO: 1497912
aggaacgcgggaaaucuag

SEQ ID NO: 1497914 - RNA, 19 nt, Artificial Sequence
  Description of Artificial Sequence: Synthetic oligonucleotide
  Sense strand starting at position 3799 of SEQ ID NO: 1244559
cacugugacucuucugaug

SEQ ID NO: 1497915 - RNA, 19 nt, Artificial Sequence
  Description of Artificial Sequence: Synthetic oligonucleotide
  Antisense strand to SEQ ID NO: 1497914
caucagaagagucacagug

SEQ ID NO: 1497916 - RNA, 19 nt, Artificial Sequence
  Description of Artificial Sequence: Synthetic oligonucleotide
  Sense strand starting at position 3817 of SEQ ID NO: 1244559
gcacuugucagcuagagga

SEQ ID NO: 1497917 - RNA, 19 nt, Artificial Sequence
  Description of Artificial Sequence: Synthetic oligonucleotide
  Antisense strand to SEQ ID NO: 1497916
uccucuagcugacaagugc

SEQ ID NO: 1497918 - RNA, 19 nt, Artificial Sequence
  Description of Artificial Sequence: Synthetic oligonucleotide
  Sense strand starting at position 3961 of SEQ ID NO: 1244559
gacacuuggucucugcaga

SEQ ID NO: 1497919 - RNA, 19 nt, Artificial Sequence
  Description of Artificial Sequence: Synthetic oligonucleotide
  Antisense strand to SEQ ID NO: 1497918
ucugcagagaccaaguguc

SEQ ID NO: 1497920 - RNA, 19 nt, Artificial Sequence
  Description of Artificial Sequence: Synthetic oligonucleotide
  Sense strand starting at position 3962 of SEQ ID NO: 1244559
acacuuggucucugcagau

SEQ ID NO: 1497921 - RNA, 19 nt, Artificial Sequence
  Description of Artificial Sequence: Synthetic oligonucleotide
  Antisense strand to SEQ ID NO: 1497920
aucugcagagaccaagugu

SEQ ID NO: 1497922 - RNA, 19 nt, Artificial Sequence
  Description of Artificial Sequence: Synthetic oligonucleotide
  Sense strand starting at position 3975 of SEQ ID NO: 1244559
gcagauucggcucaaagga

SEQ ID NO: 1497923 - RNA, 19 nt, Artificial Sequence
  Description of Artificial Sequence: Synthetic oligonucleotide
  Antisense strand to SEQ ID NO: 1497922
uccuuugagccgaaucugc

SEQ ID NO: 1497924 - RNA, 19 nt, Artificial Sequence
  Description of Artificial Sequence: Synthetic oligonucleotide
  Sense strand starting at position 131 of SEQ ID NO: 1244560
guacaccugccagauagaa

SEQ ID NO: 1497925 - RNA, 19 nt, Artificial Sequence
  Description of Artificial Sequence: Synthetic oligonucleotide
  Antisense strand to SEQ ID NO: 1497924
uucuaucuggcagguguac

SEQ ID NO: 1497926 - RNA, 19 nt, Artificial Sequence
  Description of Artificial Sequence: Synthetic oligonucleotide
  Sense strand starting at position 199 of SEQ ID NO: 1244560
uguccauucugcuauuggu

SEQ ID NO: 1497927 - RNA, 19 nt, Artificial Sequence
  Description of Artificial Sequence: Synthetic oligonucleotide
  Antisense strand to SEQ ID NO: 1497926
accaauagcagaauggaca

SEQ ID NO: 1497928 - RNA, 19 nt, Artificial Sequence
  Description of Artificial Sequence: Synthetic oligonucleotide
  Sense strand starting at position 207 of SEQ ID NO: 1244560
cugcuauuggucugaggca

SEQ ID NO: 1497929 - RNA, 19 nt, Artificial Sequence
  Description of Artificial Sequence: Synthetic oligonucleotide
  Antisense strand to SEQ ID NO: 1497928
ugccucagaccaauagcag

SEQ ID NO: 1497930 - RNA, 19 nt, Artificial Sequence
  Description of Artificial Sequence: Synthetic oligonucleotide
  Sense strand starting at position 214 of SEQ ID NO: 1244560
uggucugaggcacguuaau

SEQ ID NO: 1497931 - RNA, 19 nt, Artificial Sequence
  Description of Artificial Sequence: Synthetic oligonucleotide
  Antisense strand to SEQ ID NO: 1497930
auuaacgugccucagacca

SEQ ID NO: 1497932 - RNA, 19 nt, Artificial Sequence
  Description of Artificial Sequence: Synthetic oligonucleotide
  Sense strand starting at position 223 of SEQ ID NO: 1244560
gcacguuaauaguaagaau

SEQ ID NO: 1497933 - RNA, 19 nt, Artificial Sequence
  Description of Artificial Sequence: Synthetic oligonucleotide
  Antisense strand to SEQ ID NO: 1497932
auucuuacuauuaacgugc

SEQ ID NO: 1497934 - RNA, 19 nt, Artificial Sequence
  Description of Artificial Sequence: Synthetic oligonucleotide
  Sense strand starting at position 226 of SEQ ID NO: 1244560
cguuaauaguaagaauaag

SEQ ID NO: 1497935 - RNA, 19 nt, Artificial Sequence
  Description of Artificial Sequence: Synthetic oligonucleotide
  Antisense strand to SEQ ID NO: 1497934
cuuauucuuacuauuaacg

SEQ ID NO: 1497936 - RNA, 19 nt, Artificial Sequence
  Description of Artificial Sequence: Synthetic oligonucleotide
  Sense strand starting at position 776 of SEQ ID NO: 1244560
ucucuuagggcucagggau

SEQ ID NO: 1497937 - RNA, 19 nt, Artificial Sequence
  Description of Artificial Sequence: Synthetic oligonucleotide
  Antisense strand to SEQ ID NO: 1497936
aucccugagcccuaagaga

SEQ ID NO: 1497938 - RNA, 19 nt, Artificial Sequence
  Description of Artificial Sequence: Synthetic oligonucleotide
  Sense strand starting at position 790 of SEQ ID NO: 1244560
gggauaggauguccaguau

SEQ ID NO: 1497939 - RNA, 19 nt, Artificial Sequence
  Description of Artificial Sequence: Synthetic oligonucleotide
  Antisense strand to SEQ ID NO: 1497938
auacuggacauccuauccc

SEQ ID NO: 1497940 - RNA, 19 nt, Artificial Sequence
  Description of Artificial Sequence: Synthetic oligonucleotide
  Sense strand starting at position 1104 of SEQ ID NO: 1244560
gugccuggccuccaguauu

SEQ ID NO: 1497941 - RNA, 19 nt, Artificial Sequence
  Description of Artificial Sequence: Synthetic oligonucleotide
  Antisense strand to SEQ ID NO: 1497940
aauacuggaggccaggcac

SEQ ID NO: 1497942 - RNA, 19 nt, Artificial Sequence
  Description of Artificial Sequence: Synthetic oligonucleotide
  Sense strand starting at position 1165 of SEQ ID NO: 1244560
uuguaaggauuccacuaac

SEQ ID NO: 1497943 - RNA, 19 nt, Artificial Sequence
  Description of Artificial Sequence: Synthetic oligonucleotide
  Antisense strand to SEQ ID NO: 1497942
guuaguggaauccuuacaa

SEQ ID NO: 1497944 - RNA, 19 nt, Artificial Sequence
  Description of Artificial Sequence: Synthetic oligonucleotide
  Sense strand starting at position 1405 of SEQ ID NO: 1244560
ccaugauaguggucuggga

SEQ ID NO: 1497945 - RNA, 19 nt, Artificial Sequence
  Description of Artificial Sequence: Synthetic oligonucleotide
  Antisense strand to SEQ ID NO: 1497944
ucccagaccacuaucaugg

SEQ ID NO: 1497946 - RNA, 19 nt, Artificial Sequence
  Description of Artificial Sequence: Synthetic oligonucleotide
  Sense strand starting at position 1407 of SEQ ID NO: 1244560
augauaguggucugggaaa

SEQ ID NO: 1497947 - RNA, 19 nt, Artificial Sequence
  Description of Artificial Sequence: Synthetic oligonucleotide
  Antisense strand to SEQ ID NO: 1497946
uuucccagaccacuaucau

SEQ ID NO: 1497948 - RNA, 19 nt, Artificial Sequence
  Description of Artificial Sequence: Synthetic oligonucleotide
  Sense strand starting at position 1435 of SEQ ID NO: 1244560
ggaguaagucuacauucuc

SEQ ID NO: 1497949 - RNA, 19 nt, Artificial Sequence
  Description of Artificial Sequence: Synthetic oligonucleotide
  Antisense strand to SEQ ID NO: 1497948
gagaauguagacuuacucc

SEQ ID NO: 1497950 - RNA, 19 nt, Artificial Sequence
  Description of Artificial Sequence: Synthetic oligonucleotide
  Sense strand starting at position 1442 of SEQ ID NO: 1244560
gucuacauucuccagcaga

SEQ ID NO: 1497951 - RNA, 19 nt, Artificial Sequence
  Description of Artificial Sequence: Synthetic oligonucleotide
  Antisense strand to SEQ ID NO: 1497950
ucugcuggagaauguagac

SEQ ID NO: 1497952 - RNA, 19 nt, Artificial Sequence
  Description of Artificial Sequence: Synthetic oligonucleotide
  Sense strand starting at position 1502 of SEQ ID NO: 1244560
aaaucuguccgucgcugaa

SEQ ID NO: 1497953 - RNA, 19 nt, Artificial Sequence
  Description of Artificial Sequence: Synthetic oligonucleotide
  Antisense strand to SEQ ID NO: 1497952
uucagcgacggacagauuu

SEQ ID NO: 1497954 - RNA, 19 nt, Artificial Sequence
  Description of Artificial Sequence: Synthetic oligonucleotide
  Sense strand starting at position 1590 of SEQ ID NO: 1244560
agacucaucccguacuuaa

SEQ ID NO: 1497955 - RNA, 19 nt, Artificial Sequence
  Description of Artificial Sequence: Synthetic oligonucleotide
  Antisense strand to SEQ ID NO: 1497954
uuaaguacgggaugagucu

SEQ ID NO: 1497956 - RNA, 19 nt, Artificial Sequence
  Description of Artificial Sequence: Synthetic oligonucleotide
  Sense strand starting at position 1620 of SEQ ID NO: 1244560
ucacuagccucgcaggauu

SEQ ID NO: 1497957 - RNA, 19 nt, Artificial Sequence
  Description of Artificial Sequence: Synthetic oligonucleotide
  Antisense strand to SEQ ID NO: 1497956
aauccugcgaggcuaguga

SEQ ID NO: 1497958 - RNA, 19 nt, Artificial Sequence
  Description of Artificial Sequence: Synthetic oligonucleotide
  Sense strand starting at position 2507 of SEQ ID NO: 1244560
uaccgaucuuauggaguua

SEQ ID NO: 1497959 - RNA, 19 nt, Artificial Sequence
  Description of Artificial Sequence: Synthetic oligonucleotide
  Antisense strand to SEQ ID NO: 1497958
uaacuccauaagaucggua

SEQ ID NO: 1497960 - RNA, 19 nt, Artificial Sequence
  Description of Artificial Sequence: Synthetic oligonucleotide
  Sense strand starting at position 2552 of SEQ ID NO: 1244560
cugagagucuuugggcuaa

SEQ ID NO: 1497961 - RNA, 19 nt, Artificial Sequence
  Description of Artificial Sequence: Synthetic oligonucleotide
  Antisense strand to SEQ ID NO: 1497960
uuagcccaaagacucucag

SEQ ID NO: 1497962 - RNA, 19 nt, Artificial Sequence
  Description of Artificial Sequence: Synthetic oligonucleotide
  Sense strand starting at position 2554 of SEQ ID NO: 1244560
gagagucuuugggcuaaag

SEQ ID NO: 1497963 - RNA, 19 nt, Artificial Sequence
  Description of Artificial Sequence: Synthetic oligonucleotide
  Antisense strand to SEQ ID NO: 1497962
cuuuagcccaaagacucuc

SEQ ID NO: 1497964 - RNA, 19 nt, Artificial Sequence
  Description of Artificial Sequence: Synthetic oligonucleotide
  Sense strand starting at position 2556 of SEQ ID NO: 1244560
gagucuuugggcuaaagug

SEQ ID NO: 1497965 - RNA, 19 nt, Artificial Sequence
  Description of Artificial Sequence: Synthetic oligonucleotide
  Antisense strand to SEQ ID NO: 1497964
cacuuuagcccaaagacuc

SEQ ID NO: 1497966 - RNA, 19 nt, Artificial Sequence
  Description of Artificial Sequence: Synthetic oligonucleotide
  Sense strand starting at position 2601 of SEQ ID NO: 1244560
guuauauacuuaggaguau

SEQ ID NO: 1497967 - RNA, 19 nt, Artificial Sequence
  Description of Artificial Sequence: Synthetic oligonucleotide
  Antisense strand to SEQ ID NO: 1497966
auacuccuaaguauauaac

SEQ ID NO: 1497968 - RNA, 19 nt, Artificial Sequence
  Description of Artificial Sequence: Synthetic oligonucleotide
  Sense strand starting at position 2612 of SEQ ID NO: 1244560
aggaguauaugcuggcaga

SEQ ID NO: 1497969 - RNA, 19 nt, Artificial Sequence
  Description of Artificial Sequence: Synthetic oligonucleotide
  Antisense strand to SEQ ID NO: 1497968
ucugccagcauauacuccu

SEQ ID NO: 1497970 - RNA, 19 nt, Artificial Sequence
  Description of Artificial Sequence: Synthetic oligonucleotide
  Sense strand starting at position 2613 of SEQ ID NO: 1244560
ggaguauaugcuggcagag

SEQ ID NO: 1497971 - RNA, 19 nt, Artificial Sequence
  Description of Artificial Sequence: Synthetic oligonucleotide
  Antisense strand to SEQ ID NO: 1497970
cucugccagcauauacucc

SEQ ID NO: 1497972 - RNA, 19 nt, Artificial Sequence
  Description of Artificial Sequence: Synthetic oligonucleotide
  Sense strand starting at position 2615 of SEQ ID NO: 1244560
aguauaugcuggcagagga

SEQ ID NO: 1497973 - RNA, 19 nt, Artificial Sequence
  Description of Artificial Sequence: Synthetic oligonucleotide
  Antisense strand to SEQ ID NO: 1497972
uccucugccagcauauacu

SEQ ID NO: 1497974 - RNA, 19 nt, Artificial Sequence
  Description of Artificial Sequence: Synthetic oligonucleotide
  Sense strand starting at position 2628 of SEQ ID NO: 1244560
agaggaauuuauggguucu

SEQ ID NO: 1497975 - RNA, 19 nt, Artificial Sequence
  Description of Artificial Sequence: Synthetic oligonucleotide
  Antisense strand to SEQ ID NO: 1497974
agaacccauaaauuccucu

SEQ ID NO: 1497976 - RNA, 19 nt, Artificial Sequence
  Description of Artificial Sequence: Synthetic oligonucleotide
  Sense strand starting at position 2634 of SEQ ID NO: 1244560
auuuauggguucuaugaua

SEQ ID NO: 1497977 - RNA, 19 nt, Artificial Sequence
  Description of Artificial Sequence: Synthetic oligonucleotide
  Antisense strand to SEQ ID NO: 1497976
uaucauagaacccauaaau

SEQ ID NO: 1497978 - RNA, 19 nt, Artificial Sequence
  Description of Artificial Sequence: Synthetic oligonucleotide
  Sense strand starting at position 2639 of SEQ ID NO: 1244560
uggguucuaugauaacugu

SEQ ID NO: 1497979 - RNA, 19 nt, Artificial Sequence
  Description of Artificial Sequence: Synthetic oligonucleotide
  Antisense strand to SEQ ID NO: 1497978
acaguuaucauagaaccca

SEQ ID NO: 1497980 - RNA, 19 nt, Artificial Sequence
  Description of Artificial Sequence: Synthetic oligonucleotide
  Sense strand starting at position 2642 of SEQ ID NO: 1244560
guucuaugauaacuguaug

SEQ ID NO: 1497981 - RNA, 19 nt, Artificial Sequence
  Description of Artificial Sequence: Synthetic oligonucleotide
  Antisense strand to SEQ ID NO: 1497980
cauacaguuaucauagaac

SEQ ID NO: 1497982 - RNA, 19 nt, Artificial Sequence
  Description of Artificial Sequence: Synthetic oligonucleotide
  Sense strand starting at position 2645 of SEQ ID NO: 1244560
cuaugauaacuguauguuu

SEQ ID NO: 1497983 - RNA, 19 nt, Artificial Sequence
  Description of Artificial Sequence: Synthetic oligonucleotide
  Antisense strand to SEQ ID NO: 1497982
aaacauacaguuaucauag

SEQ ID NO: 1497984 - RNA, 19 nt, Artificial Sequence
  Description of Artificial Sequence: Synthetic oligonucleotide
  Sense strand starting at position 2864 of SEQ ID NO: 1244560
ugagcauauuuccaugaga

SEQ ID NO: 1497985 - RNA, 19 nt, Artificial Sequence
  Description of Artificial Sequence: Synthetic oligonucleotide
  Antisense strand to SEQ ID NO: 1497984
ucucauggaaauaugcuca

SEQ ID NO: 1497986 - RNA, 19 nt, Artificial Sequence
  Description of Artificial Sequence: Synthetic oligonucleotide
  Sense strand starting at position 3028 of SEQ ID NO: 1244560
ggguuugucuugcgguguu

SEQ ID NO: 1497987 - RNA, 19 nt, Artificial Sequence
  Description of Artificial Sequence: Synthetic oligonucleotide
  Antisense strand to SEQ ID NO: 1497986
aacaccgcaagacaaaccc

SEQ ID NO: 1497988 - RNA, 19 nt, Artificial Sequence
  Description of Artificial Sequence: Synthetic oligonucleotide
  Sense strand starting at position 3040 of SEQ ID NO: 1244560
cgguguuucccaggcugga

SEQ ID NO: 1497989 - RNA, 19 nt, Artificial Sequence
  Description of Artificial Sequence: Synthetic oligonucleotide
  Antisense strand to SEQ ID NO: 1497988
uccagccugggaaacaccg

SEQ ID NO: 1497990 - RNA, 19 nt, Artificial Sequence
  Description of Artificial Sequence: Synthetic oligonucleotide
  Sense strand starting at position 3065 of SEQ ID NO: 1244560
augggaucauggugcacua

SEQ ID NO: 1497991 - RNA, 19 nt, Artificial Sequence
  Description of Artificial Sequence: Synthetic oligonucleotide
  Antisense strand to SEQ ID NO: 1497990
uagugcaccaugaucccau

SEQ ID NO: 1497992 - RNA, 19 nt, Artificial Sequence
  Description of Artificial Sequence: Synthetic oligonucleotide
  Sense strand starting at position 3067 of SEQ ID NO: 1244560
gggaucauggugcacuaua

SEQ ID NO: 1497993 - RNA, 19 nt, Artificial Sequence
  Description of Artificial Sequence: Synthetic oligonucleotide
  Antisense strand to SEQ ID NO: 1497992
uauagugcaccaugauccc

SEQ ID NO: 1497994 - RNA, 19 nt, Artificial Sequence
  Description of Artificial Sequence: Synthetic oligonucleotide
  Sense strand starting at position 3800 of SEQ ID NO: 1244560
uuaauauucuagguacuag

SEQ ID NO: 1497995 - RNA, 19 nt, Artificial Sequence
  Description of Artificial Sequence: Synthetic oligonucleotide
  Antisense strand to SEQ ID NO: 1497994
cuaguaccuagaauauuaa

SEQ ID NO: 1497996 - RNA, 19 nt, Artificial Sequence
  Description of Artificial Sequence: Synthetic oligonucleotide
  Sense strand starting at position 3880 of SEQ ID NO: 1244560
auugguguucuuugaagca

SEQ ID NO: 1497997 - RNA, 19 nt, Artificial Sequence
  Description of Artificial Sequence: Synthetic oligonucleotide
  Antisense strand to SEQ ID NO: 1497996
ugcuucaaagaacaccaau

SEQ ID NO: 1497998 - RNA, 19 nt, Artificial Sequence
  Description of Artificial Sequence: Synthetic oligonucleotide
  Sense strand starting at position 3910 of SEQ ID NO: 1244560
agugccagcucuuacauuu

SEQ ID NO: 1497999 - RNA, 19 nt, Artificial Sequence
  Description of Artificial Sequence: Synthetic oligonucleotide
  Antisense strand to SEQ ID NO: 1497998
aaauguaagagcuggcacu

SEQ ID NO: 1498000 - RNA, 19 nt, Artificial Sequence
  Description of Artificial Sequence: Synthetic oligonucleotide
  Sense strand starting at position 3964 of SEQ ID NO: 1244560
ugugaugugaaguagaagu

SEQ ID NO: 1498001 - RNA, 19 nt, Artificial Sequence
  Description of Artificial Sequence: Synthetic oligonucleotide
  Antisense strand to SEQ ID NO: 1498000
acuucuacuucacaucaca

SEQ ID NO: 1498002 - RNA, 19 nt, Artificial Sequence
  Description of Artificial Sequence: Synthetic oligonucleotide
  Sense strand starting at position 355 of SEQ ID NO: 1244561
aacaauuagcucggagcau

SEQ ID NO: 1498003 - RNA, 19 nt, Artificial Sequence
  Description of Artificial Sequence: Synthetic oligonucleotide
  Antisense strand to SEQ ID NO: 1498002
augcuccgagcuaauuguu

SEQ ID NO: 1498004 - RNA, 19 nt, Artificial Sequence
  Description of Artificial Sequence: Synthetic oligonucleotide
  Sense strand starting at position 366 of SEQ ID NO: 1244561
cggagcauucaaggaagau

SEQ ID NO: 1498005 - RNA, 19 nt, Artificial Sequence
  Description of Artificial Sequence: Synthetic oligonucleotide
  Antisense strand to SEQ ID NO: 1498004
aucuuccuugaaugcuccg

SEQ ID NO: 1498006 - RNA, 19 nt, Artificial Sequence
  Description of Artificial Sequence: Synthetic oligonucleotide
  Sense strand starting at position 392 of SEQ ID NO: 1244561
aaaggugaugucuaaguga

SEQ ID NO: 1498007 - RNA, 19 nt, Artificial Sequence
  Description of Artificial Sequence: Synthetic oligonucleotide
  Antisense strand to SEQ ID NO: 1498006
ucacuuagacaucaccuuu

SEQ ID NO: 1498008 - RNA, 19 nt, Artificial Sequence
  Description of Artificial Sequence: Synthetic oligonucleotide
  Sense strand starting at position 395 of SEQ ID NO: 1244561
ggugaugucuaagugaaau

SEQ ID NO: 1498009 - RNA, 19 nt, Artificial Sequence
  Description of Artificial Sequence: Synthetic oligonucleotide
  Antisense strand to SEQ ID NO: 1498008
auuucacuuagacaucacc

SEQ ID NO: 1498010 - RNA, 19 nt, Artificial Sequence
  Description of Artificial Sequence: Synthetic oligonucleotide
  Sense strand starting at position 630 of SEQ ID NO: 1244561
ggugcaugaccagaucuau

SEQ ID NO: 1498011 - RNA, 19 nt, Artificial Sequence
  Description of Artificial Sequence: Synthetic oligonucleotide
  Antisense strand to SEQ ID NO: 1498010
auagaucuggucaugcacc

SEQ ID NO: 1498012 - RNA, 19 nt, Artificial Sequence
  Description of Artificial Sequence: Synthetic oligonucleotide
  Sense strand starting at position 658 of SEQ ID NO: 1244561
ucauucugacugcaauguu

SEQ ID NO: 1498013 - RNA, 19 nt, Artificial Sequence
  Description of Artificial Sequence: Synthetic oligonucleotide
  Antisense strand to SEQ ID NO: 1498012
aacauugcagucagaauga

SEQ ID NO: 1498014 - RNA, 19 nt, Artificial Sequence
  Description of Artificial Sequence: Synthetic oligonucleotide
  Sense strand starting at position 661 of SEQ ID NO: 1244561
uucugacugcaauguuuaa

SEQ ID NO: 1498015 - RNA, 19 nt, Artificial Sequence
  Description of Artificial Sequence: Synthetic oligonucleotide
  Antisense strand to SEQ ID NO: 1498014
uuaaacauugcagucagaa

SEQ ID NO: 1498016 - RNA, 19 nt, Artificial Sequence
  Description of Artificial Sequence: Synthetic oligonucleotide
  Sense strand starting at position 665 of SEQ ID NO: 1244561
gacugcaauguuuaagagu

SEQ ID NO: 1498017 - RNA, 19 nt, Artificial Sequence
  Description of Artificial Sequence: Synthetic oligonucleotide
  Antisense strand to SEQ ID NO: 1498016
acucuuaaacauugcaguc

SEQ ID NO: 1498018 - RNA, 19 nt, Artificial Sequence
  Description of Artificial Sequence: Synthetic oligonucleotide
  Sense strand starting at position 700 of SEQ ID NO: 1244561
gagccaagaucuguuagga

SEQ ID NO: 1498019 - RNA, 19 nt, Artificial Sequence
  Description of Artificial Sequence: Synthetic oligonucleotide
  Antisense strand to SEQ ID NO: 1498018
uccuaacagaucuuggcuc

SEQ ID NO: 1498020 - RNA, 19 nt, Artificial Sequence
  Description of Artificial Sequence: Synthetic oligonucleotide
  Sense strand starting at position 956 of SEQ ID NO: 1244561
uggacuugaugguugacua

SEQ ID NO: 1498021 - RNA, 19 nt, Artificial Sequence
  Description of Artificial Sequence: Synthetic oligonucleotide
  Antisense strand to SEQ ID NO: 1498020
uagucaaccaucaagucca

SEQ ID NO: 1498022 - RNA, 19 nt, Artificial Sequence
  Description of Artificial Sequence: Synthetic oligonucleotide
  Sense strand starting at position 960 of SEQ ID NO: 1244561
cuugaugguugacuaguaa

SEQ ID NO: 1498023 - RNA, 19 nt, Artificial Sequence
  Description of Artificial Sequence: Synthetic oligonucleotide
  Antisense strand to SEQ ID NO: 1498022
uuacuagucaaccaucaag

SEQ ID NO: 1498024 - RNA, 19 nt, Artificial Sequence
  Description of Artificial Sequence: Synthetic oligonucleotide
  Sense strand starting at position 1006 of SEQ ID NO: 1244561
ugguuugggugaagaguaa

SEQ ID NO: 1498025 - RNA, 19 nt, Artificial Sequence
  Description of Artificial Sequence: Synthetic oligonucleotide
  Antisense strand to SEQ ID NO: 1498024
uuacucuucacccaaacca

SEQ ID NO: 1498026 - RNA, 19 nt, Artificial Sequence
  Description of Artificial Sequence: Synthetic oligonucleotide
  Sense strand starting at position 1013 of SEQ ID NO: 1244561
ggugaagaguaauuccauu

SEQ ID NO: 1498027 - RNA, 19 nt, Artificial Sequence
  Description of Artificial Sequence: Synthetic oligonucleotide
  Antisense strand to SEQ ID NO: 1498026
aauggaauuacucuucacc

SEQ ID NO: 1498028 - RNA, 19 nt, Artificial Sequence
  Description of Artificial Sequence: Synthetic oligonucleotide
  Sense strand starting at position 1035 of SEQ ID NO: 1244561
ggaggagaauguuagaaag

SEQ ID NO: 1498029 - RNA, 19 nt, Artificial Sequence
  Description of Artificial Sequence: Synthetic oligonucleotide
  Antisense strand to SEQ ID NO: 1498028
cuuucuaacauucuccucc

SEQ ID NO: 1498030 - RNA, 19 nt, Artificial Sequence
  Description of Artificial Sequence: Synthetic oligonucleotide
  Sense strand starting at position 1137 of SEQ ID NO: 1244561
ggaggucugggcuggagaa

SEQ ID NO: 1498031 - RNA, 19 nt, Artificial Sequence
  Description of Artificial Sequence: Synthetic oligonucleotide
  Antisense strand to SEQ ID NO: 1498030
uucuccagcccagaccucc

SEQ ID NO: 1498032 - RNA, 19 nt, Artificial Sequence
  Description of Artificial Sequence: Synthetic oligonucleotide
  Sense strand starting at position 1138 of SEQ ID NO: 1244561
gaggucugggcuggagaau

SEQ ID NO: 1498033 - RNA, 19 nt, Artificial Sequence
  Description of Artificial Sequence: Synthetic oligonucleotide
  Antisense strand to SEQ ID NO: 1498032
auucuccagcccagaccuc

SEQ ID NO: 1498034 - RNA, 19 nt, Artificial Sequence
  Description of Artificial Sequence: Synthetic oligonucleotide
  Sense strand starting at position 1161 of SEQ ID NO: 1244561
auuugauauguguguuuag

SEQ ID NO: 1498035 - RNA, 19 nt, Artificial Sequence
  Description of Artificial Sequence: Synthetic oligonucleotide
  Antisense strand to SEQ ID NO: 1498034
cuaaacacacauaucaaau

SEQ ID NO: 1498036 - RNA, 19 nt, Artificial Sequence
  Description of Artificial Sequence: Synthetic oligonucleotide
  Sense strand starting at position 1162 of SEQ ID NO: 1244561
uuugauauguguguuuaga

SEQ ID NO: 1498037 - RNA, 19 nt, Artificial Sequence
  Description of Artificial Sequence: Synthetic oligonucleotide
  Antisense strand to SEQ ID NO: 1498036
ucuaaacacacauaucaaa

SEQ ID NO: 1498038 - RNA, 19 nt, Artificial Sequence
  Description of Artificial Sequence: Synthetic oligonucleotide
  Sense strand starting at position 1164 of SEQ ID NO: 1244561
ugauauguguguuuagaga

SEQ ID NO: 1498039 - RNA, 19 nt, Artificial Sequence
  Description of Artificial Sequence: Synthetic oligonucleotide
  Antisense strand to SEQ ID NO: 1498038
ucucuaaacacacauauca

SEQ ID NO: 1498040 - RNA, 19 nt, Artificial Sequence
  Description of Artificial Sequence: Synthetic oligonucleotide
  Sense strand starting at position 1222 of SEQ ID NO: 1244561
guugcuaauguagaugaua

SEQ ID NO: 1498041 - RNA, 19 nt, Artificial Sequence
  Description of Artificial Sequence: Synthetic oligonucleotide
  Antisense strand to SEQ ID NO: 1498040
uaucaucuacauuagcaac

SEQ ID NO: 1498042 - RNA, 19 nt, Artificial Sequence
  Description of Artificial Sequence: Synthetic oligonucleotide
  Sense strand starting at position 1224 of SEQ ID NO: 1244561
ugcuaauguagaugauaag

SEQ ID NO: 1498043 - RNA, 19 nt, Artificial Sequence
  Description of Artificial Sequence: Synthetic oligonucleotide
  Antisense strand to SEQ ID NO: 1498042
cuuaucaucuacauuagca

SEQ ID NO: 1498044 - RNA, 19 nt, Artificial Sequence
  Description of Artificial Sequence: Synthetic oligonucleotide
  Sense strand starting at position 1227 of SEQ ID NO: 1244561
uaauguagaugauaaggaa

SEQ ID NO: 1498045 - RNA, 19 nt, Artificial Sequence
  Description of Artificial Sequence: Synthetic oligonucleotide
  Antisense strand to SEQ ID NO: 1498044
uuccuuaucaucuacauua

SEQ ID NO: 1498046 - RNA, 19 nt, Artificial Sequence
  Description of Artificial Sequence: Synthetic oligonucleotide
  Sense strand starting at position 1248 of SEQ ID NO: 1244561
agagcuuuggagcggaaau

SEQ ID NO: 1498047 - RNA, 19 nt, Artificial Sequence
  Description of Artificial Sequence: Synthetic oligonucleotide
  Antisense strand to SEQ ID NO: 1498046
auuuccgcuccaaagcucu

SEQ ID NO: 1498048 - RNA, 19 nt, Artificial Sequence
  Description of Artificial Sequence: Synthetic oligonucleotide
  Sense strand starting at position 1249 of SEQ ID NO: 1244561
gagcuuuggagcggaaaug

SEQ ID NO: 1498049 - RNA, 19 nt, Artificial Sequence
  Description of Artificial Sequence: Synthetic oligonucleotide
  Antisense strand to SEQ ID NO: 1498048
cauuuccgcuccaaagcuc

SEQ ID NO: 1498050 - RNA, 19 nt, Artificial Sequence
  Description of Artificial Sequence: Synthetic oligonucleotide
  Sense strand starting at position 1371 of SEQ ID NO: 1244561
uaaggaugguggccuaaga

SEQ ID NO: 1498051 - RNA, 19 nt, Artificial Sequence
  Description of Artificial Sequence: Synthetic oligonucleotide
  Antisense strand to SEQ ID NO: 1498050
ucuuaggccaccauccuua

SEQ ID NO: 1498052 - RNA, 19 nt, Artificial Sequence
  Description of Artificial Sequence: Synthetic oligonucleotide
  Sense strand starting at position 1382 of SEQ ID NO: 1244561
gccuaagacaggugaguuu

SEQ ID NO: 1498053 - RNA, 19 nt, Artificial Sequence
  Description of Artificial Sequence: Synthetic oligonucleotide
  Antisense strand to SEQ ID NO: 1498052
aaacucaccugucuuaggc

SEQ ID NO: 1498054 - RNA, 19 nt, Artificial Sequence
  Description of Artificial Sequence: Synthetic oligonucleotide
  Sense strand starting at position 1458 of SEQ ID NO: 1244561
gggcucucaugggugacaa

SEQ ID NO: 1498055 - RNA, 19 nt, Artificial Sequence
  Description of Artificial Sequence: Synthetic oligonucleotide
  Antisense strand to SEQ ID NO: 1498054
uugucacccaugagagccc

SEQ ID NO: 1498056 - RNA, 19 nt, Artificial Sequence
  Description of Artificial Sequence: Synthetic oligonucleotide
  Sense strand starting at position 1459 of SEQ ID NO: 1244561
ggcucucaugggugacaau

SEQ ID NO: 1498057 - RNA, 19 nt, Artificial Sequence
  Description of Artificial Sequence: Synthetic oligonucleotide
  Antisense strand to SEQ ID NO: 1498056
auugucacccaugagagcc

SEQ ID NO: 1498058 - RNA, 19 nt, Artificial Sequence
  Description of Artificial Sequence: Synthetic oligonucleotide
  Sense strand starting at position 1470 of SEQ ID NO: 1244561
gugacaaucggcgcaaguu

SEQ ID NO: 1498059 - RNA, 19 nt, Artificial Sequence
  Description of Artificial Sequence: Synthetic oligonucleotide
  Antisense strand to SEQ ID NO: 1498058
aacuugcgccgauugucac

SEQ ID NO: 1498060 - RNA, 19 nt, Artificial Sequence
  Description of Artificial Sequence: Synthetic oligonucleotide
  Sense strand starting at position 1482 of SEQ ID NO: 1244561
gcaaguucuccucaccuga

SEQ ID NO: 1498061 - RNA, 19 nt, Artificial Sequence
  Description of Artificial Sequence: Synthetic oligonucleotide
  Antisense strand to SEQ ID NO: 1498060
ucaggugaggagaacuugc

SEQ ID NO: 1498062 - RNA, 19 nt, Artificial Sequence
  Description of Artificial Sequence: Synthetic oligonucleotide
  Sense strand starting at position 1605 of SEQ ID NO: 1244561
ggagcaaucagaggagucu

SEQ ID NO: 1498063 - RNA, 19 nt, Artificial Sequence
  Description of Artificial Sequence: Synthetic oligonucleotide
  Antisense strand to SEQ ID NO: 1498062
agacuccucugauugcucc

SEQ ID NO: 1498064 - RNA, 19 nt, Artificial Sequence
  Description of Artificial Sequence: Synthetic oligonucleotide
  Sense strand starting at position 2458 of SEQ ID NO: 1244561
uagauagugguaggaaagu

SEQ ID NO: 1498065 - RNA, 19 nt, Artificial Sequence
  Description of Artificial Sequence: Synthetic oligonucleotide
  Antisense strand to SEQ ID NO: 1498064
acuuuccuaccacuaucua

SEQ ID NO: 1498066 - RNA, 19 nt, Artificial Sequence
  Description of Artificial Sequence: Synthetic oligonucleotide
  Sense strand starting at position 2467 of SEQ ID NO: 1244561
guaggaaagugguugugaa

SEQ ID NO: 1498067 - RNA, 19 nt, Artificial Sequence
  Description of Artificial Sequence: Synthetic oligonucleotide
  Antisense strand to SEQ ID NO: 1498066
uucacaaccacuuuccuac

SEQ ID NO: 1498068 - RNA, 19 nt, Artificial Sequence
  Description of Artificial Sequence: Synthetic oligonucleotide
  Sense strand starting at position 2468 of SEQ ID NO: 1244561
uaggaaagugguugugaaa

SEQ ID NO: 1498069 - RNA, 19 nt, Artificial Sequence
  Description of Artificial Sequence: Synthetic oligonucleotide
  Antisense strand to SEQ ID NO: 1498068
uuucacaaccacuuuccua

SEQ ID NO: 1498070 - RNA, 19 nt, Artificial Sequence
  Description of Artificial Sequence: Synthetic oligonucleotide
  Sense strand starting at position 2782 of SEQ ID NO: 1244561
agacgcagucucgaacaaa

SEQ ID NO: 1498071 - RNA, 19 nt, Artificial Sequence
  Description of Artificial Sequence: Synthetic oligonucleotide
  Antisense strand to SEQ ID NO: 1498070
uuuguucgagacugcgucu

SEQ ID NO: 1498072 - RNA, 19 nt, Artificial Sequence
  Description of Artificial Sequence: Synthetic oligonucleotide
  Sense strand starting at position 2974 of SEQ ID NO: 1244561
uuuguuagcccagacaauc

SEQ ID NO: 1498073 - RNA, 19 nt, Artificial Sequence
  Description of Artificial Sequence: Synthetic oligonucleotide
  Antisense strand to SEQ ID NO: 1498072
gauugucugggcuaacaaa

SEQ ID NO: 1498074 - RNA, 19 nt, Artificial Sequence
  Description of Artificial Sequence: Synthetic oligonucleotide
  Sense strand starting at position 2985 of SEQ ID NO: 1244561
agacaaucucagggcaaca

SEQ ID NO: 1498075 - RNA, 19 nt, Artificial Sequence
  Description of Artificial Sequence: Synthetic oligonucleotide
  Antisense strand to SEQ ID NO: 1498074
uguugcccugagauugucu

SEQ ID NO: 1498076 - RNA, 19 nt, Artificial Sequence
  Description of Artificial Sequence: Synthetic oligonucleotide
  Sense strand starting at position 3207 of SEQ ID NO: 1244561
gcacguuuaggagacaaua

SEQ ID NO: 1498077 - RNA, 19 nt, Artificial Sequence
  Description of Artificial Sequence: Synthetic oligonucleotide
  Antisense strand to SEQ ID NO: 1498076
uauugucuccuaaacgugc

SEQ ID NO: 1498078 - RNA, 19 nt, Artificial Sequence
  Description of Artificial Sequence: Synthetic oligonucleotide
  Sense strand starting at position 3215 of SEQ ID NO: 1244561
aggagacaauauuaagaau

SEQ ID NO: 1498079 - RNA, 19 nt, Artificial Sequence
  Description of Artificial Sequence: Synthetic oligonucleotide
  Antisense strand to SEQ ID NO: 1498078
auucuuaauauugucuccu

SEQ ID NO: 1498080 - RNA, 19 nt, Artificial Sequence
  Description of Artificial Sequence: Synthetic oligonucleotide
  Sense strand starting at position 3612 of SEQ ID NO: 1244561
gaaggaaaguagccucaua

SEQ ID NO: 1498081 - RNA, 19 nt, Artificial Sequence
  Description of Artificial Sequence: Synthetic oligonucleotide
  Antisense strand to SEQ ID NO: 1498080
uaugaggcuacuuuccuuc

SEQ ID NO: 1498082 - RNA, 19 nt, Artificial Sequence
  Description of Artificial Sequence: Synthetic oligonucleotide
  Sense strand starting at position 240 of SEQ ID NO: 1244562
aacaauuagcucggagcau

SEQ ID NO: 1498083 - RNA, 19 nt, Artificial Sequence
  Description of Artificial Sequence: Synthetic oligonucleotide
  Antisense strand to SEQ ID NO: 1498082
augcuccgagcuaauuguu

SEQ ID NO: 1498084 - RNA, 19 nt, Artificial Sequence
  Description of Artificial Sequence: Synthetic oligonucleotide
  Sense strand starting at position 251 of SEQ ID NO: 1244562
cggagcauucaaggaagau

SEQ ID NO: 1498085 - RNA, 19 nt, Artificial Sequence
  Description of Artificial Sequence: Synthetic oligonucleotide
  Antisense strand to SEQ ID NO: 1498084
aucuuccuugaaugcuccg

SEQ ID NO: 1498086 - RNA, 19 nt, Artificial Sequence
  Description of Artificial Sequence: Synthetic oligonucleotide
  Sense strand starting at position 277 of SEQ ID NO: 1244562
aaaggugaugucuaaguga

SEQ ID NO: 1498087 - RNA, 19 nt, Artificial Sequence
  Description of Artificial Sequence: Synthetic oligonucleotide
  Antisense strand to SEQ ID NO: 1498086
ucacuuagacaucaccuuu

SEQ ID NO: 1498088 - RNA, 19 nt, Artificial Sequence
  Description of Artificial Sequence: Synthetic oligonucleotide
  Sense strand starting at position 280 of SEQ ID NO: 1244562
ggugaugucuaagugaaau

SEQ ID NO: 1498089 - RNA, 19 nt, Artificial Sequence
  Description of Artificial Sequence: Synthetic oligonucleotide
  Antisense strand to SEQ ID NO: 1498088
auuucacuuagacaucacc

SEQ ID NO: 1498090 - RNA, 19 nt, Artificial Sequence
  Description of Artificial Sequence: Synthetic oligonucleotide
  Sense strand starting at position 515 of SEQ ID NO: 1244562
ggugcaugaccagaucuau

SEQ ID NO: 1498091 - RNA, 19 nt, Artificial Sequence
  Description of Artificial Sequence: Synthetic oligonucleotide
  Antisense strand to SEQ ID NO: 1498090
auagaucuggucaugcacc

SEQ ID NO: 1498092 - RNA, 19 nt, Artificial Sequence
  Description of Artificial Sequence: Synthetic oligonucleotide
  Sense strand starting at position 543 of SEQ ID NO: 1244562
ucauucugacugcaauguu

SEQ ID NO: 1498093 - RNA, 19 nt, Artificial Sequence
  Description of Artificial Sequence: Synthetic oligonucleotide
  Antisense strand to SEQ ID NO: 1498092
aacauugcagucagaauga

SEQ ID NO: 1498094 - RNA, 19 nt, Artificial Sequence
  Description of Artificial Sequence: Synthetic oligonucleotide
  Sense strand starting at position 546 of SEQ ID NO: 1244562
uucugacugcaauguuuaa

SEQ ID NO: 1498095 - RNA, 19 nt, Artificial Sequence
  Description of Artificial Sequence: Synthetic oligonucleotide
  Antisense strand to SEQ ID NO: 1498094
uuaaacauugcagucagaa

SEQ ID NO: 1498096 - RNA, 19 nt, Artificial Sequence
  Description of Artificial Sequence: Synthetic oligonucleotide
  Sense strand starting at position 550 of SEQ ID NO: 1244562
gacugcaauguuuaagagu

SEQ ID NO: 1498097 - RNA, 19 nt, Artificial Sequence
  Description of Artificial Sequence: Synthetic oligonucleotide
  Antisense strand to SEQ ID NO: 1498096
acucuuaaacauugcaguc

SEQ ID NO: 1498098 - RNA, 19 nt, Artificial Sequence
  Description of Artificial Sequence: Synthetic oligonucleotide
  Sense strand starting at position 585 of SEQ ID NO: 1244562
gagccaagaucuguuagga

SEQ ID NO: 1498099 - RNA, 19 nt, Artificial Sequence
  Description of Artificial Sequence: Synthetic oligonucleotide
  Antisense strand to SEQ ID NO: 1498098
uccuaacagaucuuggcuc

SEQ ID NO: 1498100 - RNA, 19 nt, Artificial Sequence
  Description of Artificial Sequence: Synthetic oligonucleotide
  Sense strand starting at position 841 of SEQ ID NO: 1244562
uggacuugaugguugacua

SEQ ID NO: 1498101 - RNA, 19 nt, Artificial Sequence
  Description of Artificial Sequence: Synthetic oligonucleotide
  Antisense strand to SEQ ID NO: 1498100
uagucaaccaucaagucca

SEQ ID NO: 1498102 - RNA, 19 nt, Artificial Sequence
  Description of Artificial Sequence: Synthetic oligonucleotide
  Sense strand starting at position 845 of SEQ ID NO: 1244562
cuugaugguugacuaguaa

SEQ ID NO: 1498103 - RNA, 19 nt, Artificial Sequence
  Description of Artificial Sequence: Synthetic oligonucleotide
  Antisense strand to SEQ ID NO: 1498102
uuacuagucaaccaucaag

SEQ ID NO: 1498104 - RNA, 19 nt, Artificial Sequence
  Description of Artificial Sequence: Synthetic oligonucleotide
  Sense strand starting at position 898 of SEQ ID NO: 1244562
ggugaagaguaauuccauu

SEQ ID NO: 1498105 - RNA, 19 nt, Artificial Sequence
  Description of Artificial Sequence: Synthetic oligonucleotide
  Antisense strand to SEQ ID NO: 1498104
aauggaauuacucuucacc

SEQ ID NO: 1498106 - RNA, 19 nt, Artificial Sequence
  Description of Artificial Sequence: Synthetic oligonucleotide
  Sense strand starting at position 920 of SEQ ID NO: 1244562
ggaggagaauguuagaaag

SEQ ID NO: 1498107 - RNA, 19 nt, Artificial Sequence
  Description of Artificial Sequence: Synthetic oligonucleotide
  Antisense strand to SEQ ID NO: 1498106
cuuucuaacauucuccucc

SEQ ID NO: 1498108 - RNA, 19 nt, Artificial Sequence
  Description of Artificial Sequence: Synthetic oligonucleotide
  Sense strand starting at position 1022 of SEQ ID NO: 1244562
ggaggucugggcuggagaa

SEQ ID NO: 1498109 - RNA, 19 nt, Artificial Sequence
  Description of Artificial Sequence: Synthetic oligonucleotide
  Antisense strand to SEQ ID NO: 1498108
uucuccagcccagaccucc

SEQ ID NO: 1498110 - RNA, 19 nt, Artificial Sequence
  Description of Artificial Sequence: Synthetic oligonucleotide
  Sense strand starting at position 1023 of SEQ ID NO: 1244562
gaggucugggcuggagaau

SEQ ID NO: 1498111 - RNA, 19 nt, Artificial Sequence
  Description of Artificial Sequence: Synthetic oligonucleotide
  Antisense strand to SEQ ID NO: 1498110
auucuccagcccagaccuc

SEQ ID NO: 1498112 - RNA, 19 nt, Artificial Sequence
  Description of Artificial Sequence: Synthetic oligonucleotide
  Sense strand starting at position 1046 of SEQ ID NO: 1244562
auuugauauguguguuuag

SEQ ID NO: 1498113 - RNA, 19 nt, Artificial Sequence
  Description of Artificial Sequence: Synthetic oligonucleotide
  Antisense strand to SEQ ID NO: 1498112
cuaaacacacauaucaaau

SEQ ID NO: 1498114 - RNA, 19 nt, Artificial Sequence
  Description of Artificial Sequence: Synthetic oligonucleotide
  Sense strand starting at position 1049 of SEQ ID NO: 1244562
ugauauguguguuuagaga

SEQ ID NO: 1498115 - RNA, 19 nt, Artificial Sequence
  Description of Artificial Sequence: Synthetic oligonucleotide
  Antisense strand to SEQ ID NO: 1498114
ucucuaaacacacauauca

SEQ ID NO: 1498116 - RNA, 19 nt, Artificial Sequence
  Description of Artificial Sequence: Synthetic oligonucleotide
  Sense strand starting at position 1107 of SEQ ID NO: 1244562
guugcuaauguagaugaua

SEQ ID NO: 1498117 - RNA, 19 nt, Artificial Sequence
  Description of Artificial Sequence: Synthetic oligonucleotide
  Antisense strand to SEQ ID NO: 1498116
uaucaucuacauuagcaac

SEQ ID NO: 1498118 - RNA, 19 nt, Artificial Sequence
  Description of Artificial Sequence: Synthetic oligonucleotide
  Sense strand starting at position 1109 of SEQ ID NO: 1244562
ugcuaauguagaugauaag

SEQ ID NO: 1498119 - RNA, 19 nt, Artificial Sequence
  Description of Artificial Sequence: Synthetic oligonucleotide
  Antisense strand to SEQ ID NO: 1498118
cuuaucaucuacauuagca

SEQ ID NO: 1498120 - RNA, 19 nt, Artificial Sequence
  Description of Artificial Sequence: Synthetic oligonucleotide
  Sense strand starting at position 1133 of SEQ ID NO: 1244562
agagcuuuggagcggaaau

SEQ ID NO: 1498121 - RNA, 19 nt, Artificial Sequence
  Description of Artificial Sequence: Synthetic oligonucleotide
  Antisense strand to SEQ ID NO: 1498120
auuuccgcuccaaagcucu

SEQ ID NO: 1498122 - RNA, 19 nt, Artificial Sequence
  Description of Artificial Sequence: Synthetic oligonucleotide
  Sense strand starting at position 1134 of SEQ ID NO: 1244562
gagcuuuggagcggaaaug

SEQ ID NO: 1498123 - RNA, 19 nt, Artificial Sequence
  Description of Artificial Sequence: Synthetic oligonucleotide
  Antisense strand to SEQ ID NO: 1498122
cauuuccgcuccaaagcuc

SEQ ID NO: 1498124 - RNA, 19 nt, Artificial Sequence
  Description of Artificial Sequence: Synthetic oligonucleotide
  Sense strand starting at position 1256 of SEQ ID NO: 1244562
uaaggaugguggccuaaga

SEQ ID NO: 1498125 - RNA, 19 nt, Artificial Sequence
  Description of Artificial Sequence: Synthetic oligonucleotide
  Antisense strand to SEQ ID NO: 1498124
ucuuaggccaccauccuua

SEQ ID NO: 1498126 - RNA, 19 nt, Artificial Sequence
  Description of Artificial Sequence: Synthetic oligonucleotide
  Sense strand starting at position 1267 of SEQ ID NO: 1244562
gccuaagacaggugaguuu

SEQ ID NO: 1498127 - RNA, 19 nt, Artificial Sequence
  Description of Artificial Sequence: Synthetic oligonucleotide
  Antisense strand to SEQ ID NO: 1498126
aaacucaccugucuuaggc

SEQ ID NO: 1498128 - RNA, 19 nt, Artificial Sequence
  Description of Artificial Sequence: Synthetic oligonucleotide
  Sense strand starting at position 1343 of SEQ ID NO: 1244562
gggcucucaugggugacaa

SEQ ID NO: 1498129 - RNA, 19 nt, Artificial Sequence
  Description of Artificial Sequence: Synthetic oligonucleotide
  Antisense strand to SEQ ID NO: 1498128
uugucacccaugagagccc

SEQ ID NO: 1498130 - RNA, 19 nt, Artificial Sequence
  Description of Artificial Sequence: Synthetic oligonucleotide
  Sense strand starting at position 1344 of SEQ ID NO: 1244562
ggcucucaugggugacaau

SEQ ID NO: 1498131 - RNA, 19 nt, Artificial Sequence
  Description of Artificial Sequence: Synthetic oligonucleotide
  Antisense strand to SEQ ID NO: 1498130
auugucacccaugagagcc

SEQ ID NO: 1498132 - RNA, 19 nt, Artificial Sequence
  Description of Artificial Sequence: Synthetic oligonucleotide
  Sense strand starting at position 1355 of SEQ ID NO: 1244562
gugacaaucggcgcaaguu

SEQ ID NO: 1498133 - RNA, 19 nt, Artificial Sequence
  Description of Artificial Sequence: Synthetic oligonucleotide
  Antisense strand to SEQ ID NO: 1498132
aacuugcgccgauugucac

SEQ ID NO: 1498134 - RNA, 19 nt, Artificial Sequence
  Description of Artificial Sequence: Synthetic oligonucleotide
  Sense strand starting at position 1367 of SEQ ID NO: 1244562
gcaaguucuccucaccuga

SEQ ID NO: 1498135 - RNA, 19 nt, Artificial Sequence
  Description of Artificial Sequence: Synthetic oligonucleotide
  Antisense strand to SEQ ID NO: 1498134
ucaggugaggagaacuugc

SEQ ID NO: 1498136 - RNA, 19 nt, Artificial Sequence
  Description of Artificial Sequence: Synthetic oligonucleotide
  Sense strand starting at position 1490 of SEQ ID NO: 1244562
ggagcaaucagaggagucu

SEQ ID NO: 1498137 - RNA, 19 nt, Artificial Sequence
  Description of Artificial Sequence: Synthetic oligonucleotide
  Antisense strand to SEQ ID NO: 1498136
agacuccucugauugcucc

SEQ ID NO: 1498138 - RNA, 19 nt, Artificial Sequence
  Description of Artificial Sequence: Synthetic oligonucleotide
  Sense strand starting at position 2343 of SEQ ID NO: 1244562
uagauagugguaggaaagu

SEQ ID NO: 1498139 - RNA, 19 nt, Artificial Sequence
  Description of Artificial Sequence: Synthetic oligonucleotide
  Antisense strand to SEQ ID NO: 1498138
acuuuccuaccacuaucua

SEQ ID NO: 1498140 - RNA, 19 nt, Artificial Sequence
  Description of Artificial Sequence: Synthetic oligonucleotide
  Sense strand starting at position 2352 of SEQ ID NO: 1244562
guaggaaagugguugugaa

SEQ ID NO: 1498141 - RNA, 19 nt, Artificial Sequence
  Description of Artificial Sequence: Synthetic oligonucleotide
  Antisense strand to SEQ ID NO: 1498140
uucacaaccacuuuccuac

SEQ ID NO: 1498142 - RNA, 19 nt, Artificial Sequence
  Description of Artificial Sequence: Synthetic oligonucleotide
  Sense strand starting at position 2353 of SEQ ID NO: 1244562
uaggaaagugguugugaaa

SEQ ID NO: 1498143 - RNA, 19 nt, Artificial Sequence
  Description of Artificial Sequence: Synthetic oligonucleotide
  Antisense strand to SEQ ID NO: 1498142
uuucacaaccacuuuccua

SEQ ID NO: 1498144 - RNA, 19 nt, Artificial Sequence
  Description of Artificial Sequence: Synthetic oligonucleotide
  Sense strand starting at position 2667 of SEQ ID NO: 1244562
agacgcagucucgaacaaa

SEQ ID NO: 1498145 - RNA, 19 nt, Artificial Sequence
  Description of Artificial Sequence: Synthetic oligonucleotide
  Antisense strand to SEQ ID NO: 1498144
uuuguucgagacugcgucu

SEQ ID NO: 1498146 - RNA, 19 nt, Artificial Sequence
  Description of Artificial Sequence: Synthetic oligonucleotide
  Sense strand starting at position 2859 of SEQ ID NO: 1244562
uuuguuagcccagacaauc

SEQ ID NO: 1498147 - RNA, 19 nt, Artificial Sequence
  Description of Artificial Sequence: Synthetic oligonucleotide
  Antisense strand to SEQ ID NO: 1498146
gauugucugggcuaacaaa

SEQ ID NO: 1498148 - RNA, 19 nt, Artificial Sequence
  Description of Artificial Sequence: Synthetic oligonucleotide
  Sense strand starting at position 2870 of SEQ ID NO: 1244562
agacaaucucagggcaaca

SEQ ID NO: 1498149 - RNA, 19 nt, Artificial Sequence
  Description of Artificial Sequence: Synthetic oligonucleotide
  Antisense strand to SEQ ID NO: 1498148
uguugcccugagauugucu

SEQ ID NO: 1498150 - RNA, 19 nt, Artificial Sequence
  Description of Artificial Sequence: Synthetic oligonucleotide
  Sense strand starting at position 3092 of SEQ ID NO: 1244562
gcacguuuaggagacaaua

SEQ ID NO: 1498151 - RNA, 19 nt, Artificial Sequence
  Description of Artificial Sequence: Synthetic oligonucleotide
  Antisense strand to SEQ ID NO: 1498150
uauugucuccuaaacgugc

SEQ ID NO: 1498152 - RNA, 19 nt, Artificial Sequence
  Description of Artificial Sequence: Synthetic oligonucleotide
  Sense strand starting at position 3100 of SEQ ID NO: 1244562
aggagacaauauuaagaau

SEQ ID NO: 1498153 - RNA, 19 nt, Artificial Sequence
  Description of Artificial Sequence: Synthetic oligonucleotide
  Antisense strand to SEQ ID NO: 1498152
auucuuaauauugucuccu

SEQ ID NO: 1498154 - RNA, 19 nt, Artificial Sequence
  Description of Artificial Sequence: Synthetic oligonucleotide
  Sense strand starting at position 3497 of SEQ ID NO: 1244562
gaaggaaaguagccucaua

SEQ ID NO: 1498155 - RNA, 19 nt, Artificial Sequence
  Description of Artificial Sequence: Synthetic oligonucleotide
  Antisense strand to SEQ ID NO: 1498154
uaugaggcuacuuuccuuc

SEQ ID NO: 1498156 - RNA, 19 nt, Artificial Sequence
  Description of Artificial Sequence: Synthetic oligonucleotide
  Sense strand starting at position 3892 of SEQ ID NO: 1244562
ccugucuuuccacaucaga

SEQ ID NO: 1498157 - RNA, 19 nt, Artificial Sequence
  Description of Artificial Sequence: Synthetic oligonucleotide
  Antisense strand to SEQ ID NO: 1498156
ucugauguggaaagacagg

SEQ ID NO: 1498158 - RNA, 19 nt, Artificial Sequence
  Description of Artificial Sequence: Synthetic oligonucleotide
  Sense strand starting at position 3903 of SEQ ID NO: 1244562
acaucagagcucugaacuu

SEQ ID NO: 1498159 - RNA, 19 nt, Artificial Sequence
  Description of Artificial Sequence: Synthetic oligonucleotide
  Antisense strand to SEQ ID NO: 1498158
aaguucagagcucugaugu

SEQ ID NO: 1498160 - RNA, 19 nt, Artificial Sequence
  Description of Artificial Sequence: Synthetic oligonucleotide
  Sense strand starting at position 3940 of SEQ ID NO: 1244562
guuugagaagccuaaagug

SEQ ID NO: 1498161 - RNA, 19 nt, Artificial Sequence
  Description of Artificial Sequence: Synthetic oligonucleotide
  Antisense strand to SEQ ID NO: 1498160
cacuuuaggcuucucaaac

SEQ ID NO: 1498162 - RNA, 19 nt, Artificial Sequence
  Description of Artificial Sequence: Synthetic oligonucleotide
  Sense strand starting at position 245 of SEQ ID NO: 1244563
guaggaucuuggccaagac

SEQ ID NO: 1498163 - RNA, 19 nt, Artificial Sequence
  Description of Artificial Sequence: Synthetic oligonucleotide
  Antisense strand to SEQ ID NO: 1498162
gucuuggccaagauccuac

SEQ ID NO: 1498164 - RNA, 19 nt, Artificial Sequence
  Description of Artificial Sequence: Synthetic oligonucleotide
  Sense strand starting at position 271 of SEQ ID NO: 1244563
gucugaaugagcugaggga

SEQ ID NO: 1498165 - RNA, 19 nt, Artificial Sequence
  Description of Artificial Sequence: Synthetic oligonucleotide
  Antisense strand to SEQ ID NO: 1498164
ucccucagcucauucagac

SEQ ID NO: 1498166 - RNA, 19 nt, Artificial Sequence
  Description of Artificial Sequence: Synthetic oligonucleotide
  Sense strand starting at position 404 of SEQ ID NO: 1244563
guccaauacugguccagga

SEQ ID NO: 1498167 - RNA, 19 nt, Artificial Sequence
  Description of Artificial Sequence: Synthetic oligonucleotide
  Antisense strand to SEQ ID NO: 1498166
uccuggaccaguauuggac

SEQ ID NO: 1498168 - RNA, 19 nt, Artificial Sequence
  Description of Artificial Sequence: Synthetic oligonucleotide
  Sense strand starting at position 406 of SEQ ID NO: 1244563
ccaauacugguccaggagu

SEQ ID NO: 1498169 - RNA, 19 nt, Artificial Sequence
  Description of Artificial Sequence: Synthetic oligonucleotide
  Antisense strand to SEQ ID NO: 1498168
acuccuggaccaguauugg

SEQ ID NO: 1498170 - RNA, 19 nt, Artificial Sequence
  Description of Artificial Sequence: Synthetic oligonucleotide
  Sense strand starting at position 408 of SEQ ID NO: 1244563
aauacugguccaggaguaa

SEQ ID NO: 1498171 - RNA, 19 nt, Artificial Sequence
  Description of Artificial Sequence: Synthetic oligonucleotide
  Antisense strand to SEQ ID NO: 1498170
uuacuccuggaccaguauu

SEQ ID NO: 1498172 - RNA, 19 nt, Artificial Sequence
  Description of Artificial Sequence: Synthetic oligonucleotide
  Sense strand starting at position 468 of SEQ ID NO: 1244563
ccaaauuucuugcaggaag

SEQ ID NO: 1498173 - RNA, 19 nt, Artificial Sequence
  Description of Artificial Sequence: Synthetic oligonucleotide
  Antisense strand to SEQ ID NO: 1498172
cuuccugcaagaaauuugg

SEQ ID NO: 1498174 - RNA, 19 nt, Artificial Sequence
  Description of Artificial Sequence: Synthetic oligonucleotide
  Sense strand starting at position 517 of SEQ ID NO: 1244563
ugagaaaccugaguucuag

SEQ ID NO: 1498175 - RNA, 19 nt, Artificial Sequence
  Description of Artificial Sequence: Synthetic oligonucleotide
  Antisense strand to SEQ ID NO: 1498174
cuagaacucagguuucuca

SEQ ID NO: 1498176 - RNA, 19 nt, Artificial Sequence
  Description of Artificial Sequence: Synthetic oligonucleotide
  Sense strand starting at position 648 of SEQ ID NO: 1244563
uacuaaggugaacgaauaa

SEQ ID NO: 1498177 - RNA, 19 nt, Artificial Sequence
  Description of Artificial Sequence: Synthetic oligonucleotide
  Antisense strand to SEQ ID NO: 1498176
uuauucguucaccuuagua

SEQ ID NO: 1498178 - RNA, 19 nt, Artificial Sequence
  Description of Artificial Sequence: Synthetic oligonucleotide
  Sense strand starting at position 798 of SEQ ID NO: 1244563
ggguuagggugaaauugaa

SEQ ID NO: 1498179 - RNA, 19 nt, Artificial Sequence
  Description of Artificial Sequence: Synthetic oligonucleotide
  Antisense strand to SEQ ID NO: 1498178
uucaauuucacccuaaccc

SEQ ID NO: 1498180 - RNA, 19 nt, Artificial Sequence
  Description of Artificial Sequence: Synthetic oligonucleotide
  Sense strand starting at position 821 of SEQ ID NO: 1244563
cauggaccuguccaaaguu

SEQ ID NO: 1498181 - RNA, 19 nt, Artificial Sequence
  Description of Artificial Sequence: Synthetic oligonucleotide
  Antisense strand to SEQ ID NO: 1498180
aacuuuggacagguccaug

SEQ ID NO: 1498182 - RNA, 19 nt, Artificial Sequence
  Description of Artificial Sequence: Synthetic oligonucleotide
  Sense strand starting at position 939 of SEQ ID NO: 1244563
ggaagccuuacugguaaca

SEQ ID NO: 1498183 - RNA, 19 nt, Artificial Sequence
  Description of Artificial Sequence: Synthetic oligonucleotide
  Antisense strand to SEQ ID NO: 1498182
uguuaccaguaaggcuucc

SEQ ID NO: 1498184 - RNA, 19 nt, Artificial Sequence
  Description of Artificial Sequence: Synthetic oligonucleotide
  Sense strand starting at position 1056 of SEQ ID NO: 1244563
gaauuagcauuguccagau

SEQ ID NO: 1498185 - RNA, 19 nt, Artificial Sequence
  Description of Artificial Sequence: Synthetic oligonucleotide
  Antisense strand to SEQ ID NO: 1498184
aucuggacaaugcuaauuc

SEQ ID NO: 1498186 - RNA, 19 nt, Artificial Sequence
  Description of Artificial Sequence: Synthetic oligonucleotide
  Sense strand starting at position 1115 of SEQ ID NO: 1244563
acccaaccucuuggugaua

SEQ ID NO: 1498187 - RNA, 19 nt, Artificial Sequence
  Description of Artificial Sequence: Synthetic oligonucleotide
  Antisense strand to SEQ ID NO: 1498186
uaucaccaagagguugggu

SEQ ID NO: 1498188 - RNA, 19 nt, Artificial Sequence
  Description of Artificial Sequence: Synthetic oligonucleotide
  Sense strand starting at position 1116 of SEQ ID NO: 1244563
cccaaccucuuggugauaa

SEQ ID NO: 1498189 - RNA, 19 nt, Artificial Sequence
  Description of Artificial Sequence: Synthetic oligonucleotide
  Antisense strand to SEQ ID NO: 1498188
uuaucaccaagagguuggg

SEQ ID NO: 1498190 - RNA, 19 nt, Artificial Sequence
  Description of Artificial Sequence: Synthetic oligonucleotide
  Sense strand starting at position 1229 of SEQ ID NO: 1244563
cuauuaagauuugacucga

SEQ ID NO: 1498191 - RNA, 19 nt, Artificial Sequence
  Description of Artificial Sequence: Synthetic oligonucleotide
  Antisense strand to SEQ ID NO: 1498190
ucgagucaaaucuuaauag

SEQ ID NO: 1498192 - RNA, 19 nt, Artificial Sequence
  Description of Artificial Sequence: Synthetic oligonucleotide
  Sense strand starting at position 1239 of SEQ ID NO: 1244563
uugacucgaagauguguaa

SEQ ID NO: 1498193 - RNA, 19 nt, Artificial Sequence
  Description of Artificial Sequence: Synthetic oligonucleotide
  Antisense strand to SEQ ID NO: 1498192
uuacacaucuucgagucaa

SEQ ID NO: 1498194 - RNA, 19 nt, Artificial Sequence
  Description of Artificial Sequence: Synthetic oligonucleotide
  Sense strand starting at position 1242 of SEQ ID NO: 1244563
acucgaagauguguaacaa

SEQ ID NO: 1498195 - RNA, 19 nt, Artificial Sequence
  Description of Artificial Sequence: Synthetic oligonucleotide
  Antisense strand to SEQ ID NO: 1498194
uuguuacacaucuucgagu

SEQ ID NO: 1498196 - RNA, 19 nt, Artificial Sequence
  Description of Artificial Sequence: Synthetic oligonucleotide
  Sense strand starting at position 1243 of SEQ ID NO: 1244563
cucgaagauguguaacaaa

SEQ ID NO: 1498197 - RNA, 19 nt, Artificial Sequence
  Description of Artificial Sequence: Synthetic oligonucleotide
  Antisense strand to SEQ ID NO: 1498196
uuuguuacacaucuucgag

SEQ ID NO: 1498198 - RNA, 19 nt, Artificial Sequence
  Description of Artificial Sequence: Synthetic oligonucleotide
  Sense strand starting at position 1304 of SEQ ID NO: 1244563
acaagagauugcuuacuuc

SEQ ID NO: 1498199 - RNA, 19 nt, Artificial Sequence
  Description of Artificial Sequence: Synthetic oligonucleotide
  Antisense strand to SEQ ID NO: 1498198
gaaguaagcaaucucuugu

SEQ ID NO: 1498200 - RNA, 19 nt, Artificial Sequence
  Description of Artificial Sequence: Synthetic oligonucleotide
  Sense strand starting at position 1307 of SEQ ID NO: 1244563
agagauugcuuacuucuga

SEQ ID NO: 1498201 - RNA, 19 nt, Artificial Sequence
  Description of Artificial Sequence: Synthetic oligonucleotide
  Antisense strand to SEQ ID NO: 1498200
ucagaaguaagcaaucucu

SEQ ID NO: 1498202 - RNA, 19 nt, Artificial Sequence
  Description of Artificial Sequence: Synthetic oligonucleotide
  Sense strand starting at position 1308 of SEQ ID NO: 1244563
gagauugcuuacuucugau

SEQ ID NO: 1498203 - RNA, 19 nt, Artificial Sequence
  Description of Artificial Sequence: Synthetic oligonucleotide
  Antisense strand to SEQ ID NO: 1498202
aucagaaguaagcaaucuc

SEQ ID NO: 1498204 - RNA, 19 nt, Artificial Sequence
  Description of Artificial Sequence: Synthetic oligonucleotide
  Sense strand starting at position 1553 of SEQ ID NO: 1244563
gacacagagugagucuuaa

SEQ ID NO: 1498205 - RNA, 19 nt, Artificial Sequence
  Description of Artificial Sequence: Synthetic oligonucleotide
  Antisense strand to SEQ ID NO: 1498204
uuaagacucacucuguguc

SEQ ID NO: 1498206 - RNA, 19 nt, Artificial Sequence
  Description of Artificial Sequence: Synthetic oligonucleotide
  Sense strand starting at position 1564 of SEQ ID NO: 1244563
agucuuaaacgacagguua

SEQ ID NO: 1498207 - RNA, 19 nt, Artificial Sequence
  Description of Artificial Sequence: Synthetic oligonucleotide
  Antisense strand to SEQ ID NO: 1498206
uaaccugucguuuaagacu

SEQ ID NO: 1498208 - RNA, 19 nt, Artificial Sequence
  Description of Artificial Sequence: Synthetic oligonucleotide
  Sense strand starting at position 2283 of SEQ ID NO: 1244563
agaagaauuccgggucaau

SEQ ID NO: 1498209 - RNA, 19 nt, Artificial Sequence
  Description of Artificial Sequence: Synthetic oligonucleotide
  Antisense strand to SEQ ID NO: 1498208
auugacccggaauucuucu

SEQ ID NO: 1498210 - RNA, 19 nt, Artificial Sequence
  Description of Artificial Sequence: Synthetic oligonucleotide
  Sense strand starting at position 2421 of SEQ ID NO: 1244563
uugaaacucuguuuauagu

SEQ ID NO: 1498211 - RNA, 19 nt, Artificial Sequence
  Description of Artificial Sequence: Synthetic oligonucleotide
  Antisense strand to SEQ ID NO: 1498210
acuauaaacagaguuucaa

SEQ ID NO: 1498212 - RNA, 19 nt, Artificial Sequence
  Description of Artificial Sequence: Synthetic oligonucleotide
  Sense strand starting at position 2422 of SEQ ID NO: 1244563
ugaaacucuguuuauaguu

SEQ ID NO: 1498213 - RNA, 19 nt, Artificial Sequence
  Description of Artificial Sequence: Synthetic oligonucleotide
  Antisense strand to SEQ ID NO: 1498212
aacuauaaacagaguuuca

SEQ ID NO: 1498214 - RNA, 19 nt, Artificial Sequence
  Description of Artificial Sequence: Synthetic oligonucleotide
  Sense strand starting at position 2883 of SEQ ID NO: 1244563
gagcgaucucugcccgguu

SEQ ID NO: 1498215 - RNA, 19 nt, Artificial Sequence
  Description of Artificial Sequence: Synthetic oligonucleotide
  Antisense strand to SEQ ID NO: 1498214
aaccgggcagagaucgcuc

SEQ ID NO: 1498216 - RNA, 19 nt, Artificial Sequence
  Description of Artificial Sequence: Synthetic oligonucleotide
  Sense strand starting at position 3264 of SEQ ID NO: 1244563
ggaauacgugccuaugaua

SEQ ID NO: 1498217 - RNA, 19 nt, Artificial Sequence
  Description of Artificial Sequence: Synthetic oligonucleotide
  Antisense strand to SEQ ID NO: 1498216
uaucauaggcacguauucc

SEQ ID NO: 1498218 - RNA, 19 nt, Artificial Sequence
  Description of Artificial Sequence: Synthetic oligonucleotide
  Sense strand starting at position 3339 of SEQ ID NO: 1244563
aaaggauggcucuagguuu

SEQ ID NO: 1498219 - RNA, 19 nt, Artificial Sequence
  Description of Artificial Sequence: Synthetic oligonucleotide
  Antisense strand to SEQ ID NO: 1498218
aaaccuagagccauccuuu

SEQ ID NO: 1498220 - RNA, 19 nt, Artificial Sequence
  Description of Artificial Sequence: Synthetic oligonucleotide
  Sense strand starting at position 3520 of SEQ ID NO: 1244563
uuuagaauacucugaccug

SEQ ID NO: 1498221 - RNA, 19 nt, Artificial Sequence
  Description of Artificial Sequence: Synthetic oligonucleotide
  Antisense strand to SEQ ID NO: 1498220
caggucagaguauucuaaa

SEQ ID NO: 1498222 - RNA, 19 nt, Artificial Sequence
  Description of Artificial Sequence: Synthetic oligonucleotide
  Sense strand starting at position 3737 of SEQ ID NO: 1244563
gccugacaucuguacgaca

SEQ ID NO: 1498223 - RNA, 19 nt, Artificial Sequence
  Description of Artificial Sequence: Synthetic oligonucleotide
  Antisense strand to SEQ ID NO: 1498222
ugucguacagaugucaggc

SEQ ID NO: 1498224 - RNA, 19 nt, Artificial Sequence
  Description of Artificial Sequence: Synthetic oligonucleotide
  Sense strand starting at position 3739 of SEQ ID NO: 1244563
cugacaucuguacgacaag

SEQ ID NO: 1498225 - RNA, 19 nt, Artificial Sequence
  Description of Artificial Sequence: Synthetic oligonucleotide
  Antisense strand to SEQ ID NO: 1498224
cuugucguacagaugucag

SEQ ID NO: 1498226 - RNA, 19 nt, Artificial Sequence
  Description of Artificial Sequence: Synthetic oligonucleotide
  Sense strand starting at position 3751 of SEQ ID NO: 1244563
cgacaagaccuauggcauu

SEQ ID NO: 1498227 - RNA, 19 nt, Artificial Sequence
  Description of Artificial Sequence: Synthetic oligonucleotide
  Antisense strand to SEQ ID NO: 1498226
aaugccauaggucuugucg

SEQ ID NO: 1498228 - RNA, 19 nt, Artificial Sequence
  Description of Artificial Sequence: Synthetic oligonucleotide
  Sense strand starting at position 3791 of SEQ ID NO: 1244563
uauuuagagucagggauaa

SEQ ID NO: 1498229 - RNA, 19 nt, Artificial Sequence
  Description of Artificial Sequence: Synthetic oligonucleotide
  Antisense strand to SEQ ID NO: 1498228
uuaucccugacucuaaaua

SEQ ID NO: 1498230 - RNA, 19 nt, Artificial Sequence
  Description of Artificial Sequence: Synthetic oligonucleotide
  Sense strand starting at position 3804 of SEQ ID NO: 1244563
ggauaaagguguuuggaau

SEQ ID NO: 1498231 - RNA, 19 nt, Artificial Sequence
  Description of Artificial Sequence: Synthetic oligonucleotide
  Antisense strand to SEQ ID NO: 1498230
auuccaaacaccuuuaucc

SEQ ID NO: 1498232 - RNA, 19 nt, Artificial Sequence
  Description of Artificial Sequence: Synthetic oligonucleotide
  Sense strand starting at position 3805 of SEQ ID NO: 1244563
gauaaagguguuuggaauu

SEQ ID NO: 1498233 - RNA, 19 nt, Artificial Sequence
  Description of Artificial Sequence: Synthetic oligonucleotide
  Antisense strand to SEQ ID NO: 1498232
aauuccaaacaccuuuauc

SEQ ID NO: 1498234 - RNA, 19 nt, Artificial Sequence
  Description of Artificial Sequence: Synthetic oligonucleotide
  Sense strand starting at position 3811 of SEQ ID NO: 1244563
gguguuuggaauugggaga

SEQ ID NO: 1498235 - RNA, 19 nt, Artificial Sequence
  Description of Artificial Sequence: Synthetic oligonucleotide
  Antisense strand to SEQ ID NO: 1498234
ucucccaauuccaaacacc

SEQ ID NO: 1498236 - RNA, 19 nt, Artificial Sequence
  Description of Artificial Sequence: Synthetic oligonucleotide
  Sense strand starting at position 3812 of SEQ ID NO: 1244563
guguuuggaauugggagaa

SEQ ID NO: 1498237 - RNA, 19 nt, Artificial Sequence
  Description of Artificial Sequence: Synthetic oligonucleotide
  Antisense strand to SEQ ID NO: 1498236
uucucccaauuccaaacac

SEQ ID NO: 1498238 - RNA, 19 nt, Artificial Sequence
  Description of Artificial Sequence: Synthetic oligonucleotide
  Sense strand starting at position 3834 of SEQ ID NO: 1244563
cagagaucuuuagugaagu

SEQ ID NO: 1498239 - RNA, 19 nt, Artificial Sequence
  Description of Artificial Sequence: Synthetic oligonucleotide
  Antisense strand to SEQ ID NO: 1498238
acuucacuaaagaucucug

SEQ ID NO: 1498240 - RNA, 19 nt, Artificial Sequence
  Description of Artificial Sequence: Synthetic oligonucleotide
  Sense strand starting at position 3878 of SEQ ID NO: 1244563
cuguaaucuccaugaaggu

SEQ ID NO: 1498241 - RNA, 19 nt, Artificial Sequence
  Description of Artificial Sequence: Synthetic oligonucleotide
  Antisense strand to SEQ ID NO: 1498240
accuucauggagauuacag

SEQ ID NO: 1498242 - RNA, 19 nt, Artificial Sequence
  Description of Artificial Sequence: Synthetic oligonucleotide
  Sense strand starting at position 130 of SEQ ID NO: 1244564
guccaauacugguccagga

SEQ ID NO: 1498243 - RNA, 19 nt, Artificial Sequence
  Description of Artificial Sequence: Synthetic oligonucleotide
  Antisense strand to SEQ ID NO: 1498242
uccuggaccaguauuggac

SEQ ID NO: 1498244 - RNA, 19 nt, Artificial Sequence
  Description of Artificial Sequence: Synthetic oligonucleotide
  Sense strand starting at position 132 of SEQ ID NO: 1244564
ccaauacugguccaggagu

SEQ ID NO: 1498245 - RNA, 19 nt, Artificial Sequence
  Description of Artificial Sequence: Synthetic oligonucleotide
  Antisense strand to SEQ ID NO: 1498244
acuccuggaccaguauugg

SEQ ID NO: 1498246 - RNA, 19 nt, Artificial Sequence
  Description of Artificial Sequence: Synthetic oligonucleotide
  Sense strand starting at position 134 of SEQ ID NO: 1244564
aauacugguccaggaguaa

SEQ ID NO: 1498247 - RNA, 19 nt, Artificial Sequence
  Description of Artificial Sequence: Synthetic oligonucleotide
  Antisense strand to SEQ ID NO: 1498246
uuacuccuggaccaguauu

SEQ ID NO: 1498248 - RNA, 19 nt, Artificial Sequence
  Description of Artificial Sequence: Synthetic oligonucleotide
  Sense strand starting at position 194 of SEQ ID NO: 1244564
ccaaauuucuugcaggaag

SEQ ID NO: 1498249 - RNA, 19 nt, Artificial Sequence
  Description of Artificial Sequence: Synthetic oligonucleotide
  Antisense strand to SEQ ID NO: 1498248
cuuccugcaagaaauuugg

SEQ ID NO: 1498250 - RNA, 19 nt, Artificial Sequence
  Description of Artificial Sequence: Synthetic oligonucleotide
  Sense strand starting at position 243 of SEQ ID NO: 1244564
ugagaaaccugaguucuag

SEQ ID NO: 1498251 - RNA, 19 nt, Artificial Sequence
  Description of Artificial Sequence: Synthetic oligonucleotide
  Antisense strand to SEQ ID NO: 1498250
cuagaacucagguuucuca

SEQ ID NO: 1498252 - RNA, 19 nt, Artificial Sequence
  Description of Artificial Sequence: Synthetic oligonucleotide
  Sense strand starting at position 374 of SEQ ID NO: 1244564
uacuaaggugaacgaauaa

SEQ ID NO: 1498253 - RNA, 19 nt, Artificial Sequence
  Description of Artificial Sequence: Synthetic oligonucleotide
  Antisense strand to SEQ ID NO: 1498252
uuauucguucaccuuagua

SEQ ID NO: 1498254 - RNA, 19 nt, Artificial Sequence
  Description of Artificial Sequence: Synthetic oligonucleotide
  Sense strand starting at position 524 of SEQ ID NO: 1244564
ggguuagggugaaauugaa

SEQ ID NO: 1498255 - RNA, 19 nt, Artificial Sequence
  Description of Artificial Sequence: Synthetic oligonucleotide
  Antisense strand to SEQ ID NO: 1498254
uucaauuucacccuaaccc

SEQ ID NO: 1498256 - RNA, 19 nt, Artificial Sequence
  Description of Artificial Sequence: Synthetic oligonucleotide
  Sense strand starting at position 547 of SEQ ID NO: 1244564
cauggaccuguccaaaguu

SEQ ID NO: 1498257 - RNA, 19 nt, Artificial Sequence
  Description of Artificial Sequence: Synthetic oligonucleotide
  Antisense strand to SEQ ID NO: 1498256
aacuuuggacagguccaug

SEQ ID NO: 1498258 - RNA, 19 nt, Artificial Sequence
  Description of Artificial Sequence: Synthetic oligonucleotide
  Sense strand starting at position 665 of SEQ ID NO: 1244564
ggaagccuuacugguaaca

SEQ ID NO: 1498259 - RNA, 19 nt, Artificial Sequence
  Description of Artificial Sequence: Synthetic oligonucleotide
  Antisense strand to SEQ ID NO: 1498258
uguuaccaguaaggcuucc

SEQ ID NO: 1498260 - RNA, 19 nt, Artificial Sequence
  Description of Artificial Sequence: Synthetic oligonucleotide
  Sense strand starting at position 782 of SEQ ID NO: 1244564
gaauuagcauuguccagau

SEQ ID NO: 1498261 - RNA, 19 nt, Artificial Sequence
  Description of Artificial Sequence: Synthetic oligonucleotide
  Antisense strand to SEQ ID NO: 1498260
aucuggacaaugcuaauuc

SEQ ID NO: 1498262 - RNA, 19 nt, Artificial Sequence
  Description of Artificial Sequence: Synthetic oligonucleotide
  Sense strand starting at position 841 of SEQ ID NO: 1244564
acccaaccucuuggugaua

SEQ ID NO: 1498263 - RNA, 19 nt, Artificial Sequence
  Description of Artificial Sequence: Synthetic oligonucleotide
  Antisense strand to SEQ ID NO: 1498262
uaucaccaagagguugggu

SEQ ID NO: 1498264 - RNA, 19 nt, Artificial Sequence
  Description of Artificial Sequence: Synthetic oligonucleotide
  Sense strand starting at position 842 of SEQ ID NO: 1244564
cccaaccucuuggugauaa

SEQ ID NO: 1498265 - RNA, 19 nt, Artificial Sequence
  Description of Artificial Sequence: Synthetic oligonucleotide
  Antisense strand to SEQ ID NO: 1498264
uuaucaccaagagguuggg

SEQ ID NO: 1498266 - RNA, 19 nt, Artificial Sequence
  Description of Artificial Sequence: Synthetic oligonucleotide
  Sense strand starting at position 955 of SEQ ID NO: 1244564
cuauuaagauuugacucga

SEQ ID NO: 1498267 - RNA, 19 nt, Artificial Sequence
  Description of Artificial Sequence: Synthetic oligonucleotide
  Antisense strand to SEQ ID NO: 1498266
ucgagucaaaucuuaauag

SEQ ID NO: 1498268 - RNA, 19 nt, Artificial Sequence
  Description of Artificial Sequence: Synthetic oligonucleotide
  Sense strand starting at position 965 of SEQ ID NO: 1244564
uugacucgaagauguguaa

SEQ ID NO: 1498269 - RNA, 19 nt, Artificial Sequence
  Description of Artificial Sequence: Synthetic oligonucleotide
  Antisense strand to SEQ ID NO: 1498268
uuacacaucuucgagucaa

SEQ ID NO: 1498270 - RNA, 19 nt, Artificial Sequence
  Description of Artificial Sequence: Synthetic oligonucleotide
  Sense strand starting at position 968 of SEQ ID NO: 1244564
acucgaagauguguaacaa

SEQ ID NO: 1498271 - RNA, 19 nt, Artificial Sequence
  Description of Artificial Sequence: Synthetic oligonucleotide
  Antisense strand to SEQ ID NO: 1498270
uuguuacacaucuucgagu

SEQ ID NO: 1498272 - RNA, 19 nt, Artificial Sequence
  Description of Artificial Sequence: Synthetic oligonucleotide
  Sense strand starting at position 969 of SEQ ID NO: 1244564
cucgaagauguguaacaaa

SEQ ID NO: 1498273 - RNA, 19 nt, Artificial Sequence
  Description of Artificial Sequence: Synthetic oligonucleotide
  Antisense strand to SEQ ID NO: 1498272
uuuguuacacaucuucgag

SEQ ID NO: 1498274 - RNA, 19 nt, Artificial Sequence
  Description of Artificial Sequence: Synthetic oligonucleotide
  Sense strand starting at position 1030 of SEQ ID NO: 1244564
acaagagauugcuuacuuc

SEQ ID NO: 1498275 - RNA, 19 nt, Artificial Sequence
  Description of Artificial Sequence: Synthetic oligonucleotide
  Antisense strand to SEQ ID NO: 1498274
gaaguaagcaaucucuugu

SEQ ID NO: 1498276 - RNA, 19 nt, Artificial Sequence
  Description of Artificial Sequence: Synthetic oligonucleotide
  Sense strand starting at position 1033 of SEQ ID NO: 1244564
agagauugcuuacuucuga

SEQ ID NO: 1498277 - RNA, 19 nt, Artificial Sequence
  Description of Artificial Sequence: Synthetic oligonucleotide
  Antisense strand to SEQ ID NO: 1498276
ucagaaguaagcaaucucu

SEQ ID NO: 1498278 - RNA, 19 nt, Artificial Sequence
  Description of Artificial Sequence: Synthetic oligonucleotide
  Sense strand starting at position 1034 of SEQ ID NO: 1244564
gagauugcuuacuucugau

SEQ ID NO: 1498279 - RNA, 19 nt, Artificial Sequence
  Description of Artificial Sequence: Synthetic oligonucleotide
  Antisense strand to SEQ ID NO: 1498278
aucagaaguaagcaaucuc

SEQ ID NO: 1498280 - RNA, 19 nt, Artificial Sequence
  Description of Artificial Sequence: Synthetic oligonucleotide
  Sense strand starting at position 1279 of SEQ ID NO: 1244564
gacacagagugagucuuaa

SEQ ID NO: 1498281 - RNA, 19 nt, Artificial Sequence
  Description of Artificial Sequence: Synthetic oligonucleotide
  Antisense strand to SEQ ID NO: 1498280
uuaagacucacucuguguc

SEQ ID NO: 1498282 - RNA, 19 nt, Artificial Sequence
  Description of Artificial Sequence: Synthetic oligonucleotide
  Sense strand starting at position 1290 of SEQ ID NO: 1244564
agucuuaaacgacagguua

SEQ ID NO: 1498283 - RNA, 19 nt, Artificial Sequence
  Description of Artificial Sequence: Synthetic oligonucleotide
  Antisense strand to SEQ ID NO: 1498282
uaaccugucguuuaagacu

SEQ ID NO: 1498284 - RNA, 19 nt, Artificial Sequence
  Description of Artificial Sequence: Synthetic oligonucleotide
  Sense strand starting at position 2009 of SEQ ID NO: 1244564
agaagaauuccgggucaau

SEQ ID NO: 1498285 - RNA, 19 nt, Artificial Sequence
  Description of Artificial Sequence: Synthetic oligonucleotide
  Antisense strand to SEQ ID NO: 1498284
auugacccggaauucuucu

SEQ ID NO: 1498286 - RNA, 19 nt, Artificial Sequence
  Description of Artificial Sequence: Synthetic oligonucleotide
  Sense strand starting at position 2148 of SEQ ID NO: 1244564
ugaaacucuguuuauaguu

SEQ ID NO: 1498287 - RNA, 19 nt, Artificial Sequence
  Description of Artificial Sequence: Synthetic oligonucleotide
  Antisense strand to SEQ ID NO: 1498286
aacuauaaacagaguuuca

SEQ ID NO: 1498288 - RNA, 19 nt, Artificial Sequence
  Description of Artificial Sequence: Synthetic oligonucleotide
  Sense strand starting at position 2609 of SEQ ID NO: 1244564
gagcgaucucugcccgguu

SEQ ID NO: 1498289 - RNA, 19 nt, Artificial Sequence
  Description of Artificial Sequence: Synthetic oligonucleotide
  Antisense strand to SEQ ID NO: 1498288
aaccgggcagagaucgcuc

SEQ ID NO: 1498290 - RNA, 19 nt, Artificial Sequence
  Description of Artificial Sequence: Synthetic oligonucleotide
  Sense strand starting at position 2990 of SEQ ID NO: 1244564
ggaauacgugccuaugaua

SEQ ID NO: 1498291 - RNA, 19 nt, Artificial Sequence
  Description of Artificial Sequence: Synthetic oligonucleotide
  Antisense strand to SEQ ID NO: 1498290
uaucauaggcacguauucc

SEQ ID NO: 1498292 - RNA, 19 nt, Artificial Sequence
  Description of Artificial Sequence: Synthetic oligonucleotide
  Sense strand starting at position 3065 of SEQ ID NO: 1244564
aaaggauggcucuagguuu

SEQ ID NO: 1498293 - RNA, 19 nt, Artificial Sequence
  Description of Artificial Sequence: Synthetic oligonucleotide
  Antisense strand to SEQ ID NO: 1498292
aaaccuagagccauccuuu

SEQ ID NO: 1498294 - RNA, 19 nt, Artificial Sequence
  Description of Artificial Sequence: Synthetic oligonucleotide
  Sense strand starting at position 3246 of SEQ ID NO: 1244564
uuuagaauacucugaccug

SEQ ID NO: 1498295 - RNA, 19 nt, Artificial Sequence
  Description of Artificial Sequence: Synthetic oligonucleotide
  Antisense strand to SEQ ID NO: 1498294
caggucagaguauucuaaa

SEQ ID NO: 1498296 - RNA, 19 nt, Artificial Sequence
  Description of Artificial Sequence: Synthetic oligonucleotide
  Sense strand starting at position 3463 of SEQ ID NO: 1244564
gccugacaucuguacgaca

SEQ ID NO: 1498297 - RNA, 19 nt, Artificial Sequence
  Description of Artificial Sequence: Synthetic oligonucleotide
  Antisense strand to SEQ ID NO: 1498296
ugucguacagaugucaggc

SEQ ID NO: 1498298 - RNA, 19 nt, Artificial Sequence
  Description of Artificial Sequence: Synthetic oligonucleotide
  Sense strand starting at position 3465 of SEQ ID NO: 1244564
cugacaucuguacgacaag

SEQ ID NO: 1498299 - RNA, 19 nt, Artificial Sequence
  Description of Artificial Sequence: Synthetic oligonucleotide
  Antisense strand to SEQ ID NO: 1498298
cuugucguacagaugucag

SEQ ID NO: 1498300 - RNA, 19 nt, Artificial Sequence
  Description of Artificial Sequence: Synthetic oligonucleotide
  Sense strand starting at position 3477 of SEQ ID NO: 1244564
cgacaagaccuauggcauu

SEQ ID NO: 1498301 - RNA, 19 nt, Artificial Sequence
  Description of Artificial Sequence: Synthetic oligonucleotide
  Antisense strand to SEQ ID NO: 1498300
aaugccauaggucuugucg

SEQ ID NO: 1498302 - RNA, 19 nt, Artificial Sequence
  Description of Artificial Sequence: Synthetic oligonucleotide
  Sense strand starting at position 3517 of SEQ ID NO: 1244564
uauuuagagucagggauaa

SEQ ID NO: 1498303 - RNA, 19 nt, Artificial Sequence
  Description of Artificial Sequence: Synthetic oligonucleotide
  Antisense strand to SEQ ID NO: 1498302
uuaucccugacucuaaaua

SEQ ID NO: 1498304 - RNA, 19 nt, Artificial Sequence
  Description of Artificial Sequence: Synthetic oligonucleotide
  Sense strand starting at position 3530 of SEQ ID NO: 1244564
ggauaaagguguuuggaau

SEQ ID NO: 1498305 - RNA, 19 nt, Artificial Sequence
  Description of Artificial Sequence: Synthetic oligonucleotide
  Antisense strand to SEQ ID NO: 1498304
auuccaaacaccuuuaucc

SEQ ID NO: 1498306 - RNA, 19 nt, Artificial Sequence
  Description of Artificial Sequence: Synthetic oligonucleotide
  Sense strand starting at position 3531 of SEQ ID NO: 1244564
gauaaagguguuuggaauu

SEQ ID NO: 1498307 - RNA, 19 nt, Artificial Sequence
  Description of Artificial Sequence: Synthetic oligonucleotide
  Antisense strand to SEQ ID NO: 1498306
aauuccaaacaccuuuauc

SEQ ID NO: 1498308 - RNA, 19 nt, Artificial Sequence
  Description of Artificial Sequence: Synthetic oligonucleotide
  Sense strand starting at position 3537 of SEQ ID NO: 1244564
gguguuuggaauugggaga

SEQ ID NO: 1498309 - RNA, 19 nt, Artificial Sequence
  Description of Artificial Sequence: Synthetic oligonucleotide
  Antisense strand to SEQ ID NO: 1498308
ucucccaauuccaaacacc

SEQ ID NO: 1498310 - RNA, 19 nt, Artificial Sequence
  Description of Artificial Sequence: Synthetic oligonucleotide
  Sense strand starting at position 3538 of SEQ ID NO: 1244564
guguuuggaauugggagaa

SEQ ID NO: 1498311 - RNA, 19 nt, Artificial Sequence
  Description of Artificial Sequence: Synthetic oligonucleotide
  Antisense strand to SEQ ID NO: 1498310
uucucccaauuccaaacac

SEQ ID NO: 1498312 - RNA, 19 nt, Artificial Sequence
  Description of Artificial Sequence: Synthetic oligonucleotide
  Sense strand starting at position 3560 of SEQ ID NO: 1244564
cagagaucuuuagugaagu

SEQ ID NO: 1498313 - RNA, 19 nt, Artificial Sequence
  Description of Artificial Sequence: Synthetic oligonucleotide
  Antisense strand to SEQ ID NO: 1498312
acuucacuaaagaucucug

SEQ ID NO: 1498314 - RNA, 19 nt, Artificial Sequence
  Description of Artificial Sequence: Synthetic oligonucleotide
  Sense strand starting at position 3604 of SEQ ID NO: 1244564
cuguaaucuccaugaaggu

SEQ ID NO: 1498315 - RNA, 19 nt, Artificial Sequence
  Description of Artificial Sequence: Synthetic oligonucleotide
  Antisense strand to SEQ ID NO: 1498314
accuucauggagauuacag

SEQ ID NO: 1498316 - RNA, 19 nt, Artificial Sequence
  Description of Artificial Sequence: Synthetic oligonucleotide
  Sense strand starting at position 3768 of SEQ ID NO: 1244564
cucuuuaggcccugaggaa

SEQ ID NO: 1498317 - RNA, 19 nt, Artificial Sequence
  Description of Artificial Sequence: Synthetic oligonucleotide
  Antisense strand to SEQ ID NO: 1498316
uuccucagggccuaaagag

SEQ ID NO: 1498318 - RNA, 19 nt, Artificial Sequence
  Description of Artificial Sequence: Synthetic oligonucleotide
  Sense strand starting at position 3790 of SEQ ID NO: 1244564
gcugaagaccuggaagguu

SEQ ID NO: 1498319 - RNA, 19 nt, Artificial Sequence
  Description of Artificial Sequence: Synthetic oligonucleotide
  Antisense strand to SEQ ID NO: 1498318
aaccuuccaggucuucagc

SEQ ID NO: 1498320 - RNA, 19 nt, Artificial Sequence
  Description of Artificial Sequence: Synthetic oligonucleotide
  Sense strand starting at position 3808 of SEQ ID NO: 1244564
ugauguugugcucaaugau

SEQ ID NO: 1498321 - RNA, 19 nt, Artificial Sequence
  Description of Artificial Sequence: Synthetic oligonucleotide
  Antisense strand to SEQ ID NO: 1498320
aucauugagcacaacauca

SEQ ID NO: 1498322 - RNA, 19 nt, Artificial Sequence
  Description of Artificial Sequence: Synthetic oligonucleotide
  Sense strand starting at position 17 of SEQ ID NO: 1244565
guguguuagggauaagcag

SEQ ID NO: 1498323 - RNA, 19 nt, Artificial Sequence
  Description of Artificial Sequence: Synthetic oligonucleotide
  Antisense strand to SEQ ID NO: 1498322
cugcuuaucccuaacacac

SEQ ID NO: 1498324 - RNA, 19 nt, Artificial Sequence
  Description of Artificial Sequence: Synthetic oligonucleotide
  Sense strand starting at position 23 of SEQ ID NO: 1244565
uagggauaagcaggucuau

SEQ ID NO: 1498325 - RNA, 19 nt, Artificial Sequence
  Description of Artificial Sequence: Synthetic oligonucleotide
  Antisense strand to SEQ ID NO: 1498324
auagaccugcuuaucccua

SEQ ID NO: 1498326 - RNA, 19 nt, Artificial Sequence
  Description of Artificial Sequence: Synthetic oligonucleotide
  Sense strand starting at position 147 of SEQ ID NO: 1244565
ugugcuaucuguccuauuu

SEQ ID NO: 1498327 - RNA, 19 nt, Artificial Sequence
  Description of Artificial Sequence: Synthetic oligonucleotide
  Antisense strand to SEQ ID NO: 1498326
aaauaggacagauagcaca

SEQ ID NO: 1498328 - RNA, 19 nt, Artificial Sequence
  Description of Artificial Sequence: Synthetic oligonucleotide
  Sense strand starting at position 200 of SEQ ID NO: 1244565
ggaauagccucuccaaguu

SEQ ID NO: 1498329 - RNA, 19 nt, Artificial Sequence
  Description of Artificial Sequence: Synthetic oligonucleotide
  Antisense strand to SEQ ID NO: 1498328
aacuuggagaggcuauucc

SEQ ID NO: 1498330 - RNA, 19 nt, Artificial Sequence
  Description of Artificial Sequence: Synthetic oligonucleotide
  Sense strand starting at position 216 of SEQ ID NO: 1244565
guuuguagugaucaucacu

SEQ ID NO: 1498331 - RNA, 19 nt, Artificial Sequence
  Description of Artificial Sequence: Synthetic oligonucleotide
  Antisense strand to SEQ ID NO: 1498330
agugaugaucacuacaaac

SEQ ID NO: 1498332 - RNA, 19 nt, Artificial Sequence
  Description of Artificial Sequence: Synthetic oligonucleotide
  Sense strand starting at position 219 of SEQ ID NO: 1244565
uguagugaucaucacuagu

SEQ ID NO: 1498333 - RNA, 19 nt, Artificial Sequence
  Description of Artificial Sequence: Synthetic oligonucleotide
  Antisense strand to SEQ ID NO: 1498332
acuagugaugaucacuaca

SEQ ID NO: 1498334 - RNA, 19 nt, Artificial Sequence
  Description of Artificial Sequence: Synthetic oligonucleotide
  Sense strand starting at position 222 of SEQ ID NO: 1244565
agugaucaucacuaguuac

SEQ ID NO: 1498335 - RNA, 19 nt, Artificial Sequence
  Description of Artificial Sequence: Synthetic oligonucleotide
  Antisense strand to SEQ ID NO: 1498334
guaacuagugaugaucacu

SEQ ID NO: 1498336 - RNA, 19 nt, Artificial Sequence
  Description of Artificial Sequence: Synthetic oligonucleotide
  Sense strand starting at position 490 of SEQ ID NO: 1244565
aauaguguguacucagaau

SEQ ID NO: 1498337 - RNA, 19 nt, Artificial Sequence
  Description of Artificial Sequence: Synthetic oligonucleotide
  Antisense strand to SEQ ID NO: 1498336
auucugaguacacacuauu

SEQ ID NO: 1498338 - RNA, 19 nt, Artificial Sequence
  Description of Artificial Sequence: Synthetic oligonucleotide
  Sense strand starting at position 518 of SEQ ID NO: 1244565
auguaacggugauugagau

SEQ ID NO: 1498339 - RNA, 19 nt, Artificial Sequence
  Description of Artificial Sequence: Synthetic oligonucleotide
  Antisense strand to SEQ ID NO: 1498338
aucucaaucaccguuacau

SEQ ID NO: 1498340 - RNA, 19 nt, Artificial Sequence
  Description of Artificial Sequence: Synthetic oligonucleotide
  Sense strand starting at position 524 of SEQ ID NO: 1244565
cggugauugagaugacucu

SEQ ID NO: 1498341 - RNA, 19 nt, Artificial Sequence
  Description of Artificial Sequence: Synthetic oligonucleotide
  Antisense strand to SEQ ID NO: 1498340
agagucaucucaaucaccg

SEQ ID NO: 1498342 - RNA, 19 nt, Artificial Sequence
  Description of Artificial Sequence: Synthetic oligonucleotide
  Sense strand starting at position 540 of SEQ ID NO: 1244565
ucugguuccguagaaguaa

SEQ ID NO: 1498343 - RNA, 19 nt, Artificial Sequence
  Description of Artificial Sequence: Synthetic oligonucleotide
  Antisense strand to SEQ ID NO: 1498342
uuacuucuacggaaccaga

SEQ ID NO: 1498344 - RNA, 19 nt, Artificial Sequence
  Description of Artificial Sequence: Synthetic oligonucleotide
  Sense strand starting at position 548 of SEQ ID NO: 1244565
cguagaaguaacugaccua

SEQ ID NO: 1498345 - RNA, 19 nt, Artificial Sequence
  Description of Artificial Sequence: Synthetic oligonucleotide
  Antisense strand to SEQ ID NO: 1498344
uaggucaguuacuucuacg

SEQ ID NO: 1498346 - RNA, 19 nt, Artificial Sequence
  Description of Artificial Sequence: Synthetic oligonucleotide
  Sense strand starting at position 771 of SEQ ID NO: 1244565
uucucauacuacuuguuga

SEQ ID NO: 1498347 - RNA, 19 nt, Artificial Sequence
  Description of Artificial Sequence: Synthetic oligonucleotide
  Antisense strand to SEQ ID NO: 1498346
ucaacaaguaguaugagaa

SEQ ID NO: 1498348 - RNA, 19 nt, Artificial Sequence
  Description of Artificial Sequence: Synthetic oligonucleotide
  Sense strand starting at position 778 of SEQ ID NO: 1244565
acuacuuguugagccaauu

SEQ ID NO: 1498349 - RNA, 19 nt, Artificial Sequence
  Description of Artificial Sequence: Synthetic oligonucleotide
  Antisense strand to SEQ ID NO: 1498348
aauuggcucaacaaguagu

SEQ ID NO: 1498350 - RNA, 19 nt, Artificial Sequence
  Description of Artificial Sequence: Synthetic oligonucleotide
  Sense strand starting at position 827 of SEQ ID NO: 1244565
ccauuacaugugcagugaa

SEQ ID NO: 1498351 - RNA, 19 nt, Artificial Sequence
  Description of Artificial Sequence: Synthetic oligonucleotide
  Antisense strand to SEQ ID NO: 1498350
uucacugcacauguaaugg

SEQ ID NO: 1498352 - RNA, 19 nt, Artificial Sequence
  Description of Artificial Sequence: Synthetic oligonucleotide
  Sense strand starting at position 869 of SEQ ID NO: 1244565
auccuuuaugagugaacau

SEQ ID NO: 1498353 - RNA, 19 nt, Artificial Sequence
  Description of Artificial Sequence: Synthetic oligonucleotide
  Antisense strand to SEQ ID NO: 1498352
auguucacucauaaaggau

SEQ ID NO: 1498354 - RNA, 19 nt, Artificial Sequence
  Description of Artificial Sequence: Synthetic oligonucleotide
  Sense strand starting at position 891 of SEQ ID NO: 1244565
cgucuucuucugucguaau

SEQ ID NO: 1498355 - RNA, 19 nt, Artificial Sequence
  Description of Artificial Sequence: Synthetic oligonucleotide
  Antisense strand to SEQ ID NO: 1498354
auuacgacagaagaagacg

SEQ ID NO: 1498356 - RNA, 19 nt, Artificial Sequence
  Description of Artificial Sequence: Synthetic oligonucleotide
  Sense strand starting at position 1011 of SEQ ID NO: 1244565
uuauuacagcguuaagaaa

SEQ ID NO: 1498357 - RNA, 19 nt, Artificial Sequence
  Description of Artificial Sequence: Synthetic oligonucleotide
  Antisense strand to SEQ ID NO: 1498356
uuucuuaacgcuguaauaa

SEQ ID NO: 1498358 - RNA, 19 nt, Artificial Sequence
  Description of Artificial Sequence: Synthetic oligonucleotide
  Sense strand starting at position 1354 of SEQ ID NO: 1244565
gaaggaaacucccagagaa

SEQ ID NO: 1498359 - RNA, 19 nt, Artificial Sequence
  Description of Artificial Sequence: Synthetic oligonucleotide
  Antisense strand to SEQ ID NO: 1498358
uucucugggaguuuccuuc

SEQ ID NO: 1498360 - RNA, 19 nt, Artificial Sequence
  Description of Artificial Sequence: Synthetic oligonucleotide
  Sense strand starting at position 1741 of SEQ ID NO: 1244565
gugagucagcagcaucaga

SEQ ID NO: 1498361 - RNA, 19 nt, Artificial Sequence
  Description of Artificial Sequence: Synthetic oligonucleotide
  Antisense strand to SEQ ID NO: 1498360
ucugaugcugcugacucac

SEQ ID NO: 1498362 - RNA, 19 nt, Artificial Sequence
  Description of Artificial Sequence: Synthetic oligonucleotide
  Sense strand starting at position 1841 of SEQ ID NO: 1244565
gaccuuuaccgauggagug

SEQ ID NO: 1498363 - RNA, 19 nt, Artificial Sequence
  Description of Artificial Sequence: Synthetic oligonucleotide
  Antisense strand to SEQ ID NO: 1498362
cacuccaucgguaaagguc

SEQ ID NO: 1498364 - RNA, 19 nt, Artificial Sequence
  Description of Artificial Sequence: Synthetic oligonucleotide
  Sense strand starting at position 2272 of SEQ ID NO: 1244565
ugaguacugggcuagguau

SEQ ID NO: 1498365 - RNA, 19 nt, Artificial Sequence
  Description of Artificial Sequence: Synthetic oligonucleotide
  Antisense strand to SEQ ID NO: 1498364
auaccuagcccaguacuca

SEQ ID NO: 1498366 - RNA, 19 nt, Artificial Sequence
  Description of Artificial Sequence: Synthetic oligonucleotide
  Sense strand starting at position 2280 of SEQ ID NO: 1244565
gggcuagguauugagucaa

SEQ ID NO: 1498367 - RNA, 19 nt, Artificial Sequence
  Description of Artificial Sequence: Synthetic oligonucleotide
  Antisense strand to SEQ ID NO: 1498366
uugacucaauaccuagccc

SEQ ID NO: 1498368 - RNA, 19 nt, Artificial Sequence
  Description of Artificial Sequence: Synthetic oligonucleotide
  Sense strand starting at position 2316 of SEQ ID NO: 1244565
ugcggcuuccacgauuuaa

SEQ ID NO: 1498369 - RNA, 19 nt, Artificial Sequence
  Description of Artificial Sequence: Synthetic oligonucleotide
  Antisense strand to SEQ ID NO: 1498368
uuaaaucguggaagccgca

SEQ ID NO: 1498370 - RNA, 19 nt, Artificial Sequence
  Description of Artificial Sequence: Synthetic oligonucleotide
  Sense strand starting at position 2335 of SEQ ID NO: 1244565
ccauucauucgggacgaua

SEQ ID NO: 1498371 - RNA, 19 nt, Artificial Sequence
  Description of Artificial Sequence: Synthetic oligonucleotide
  Antisense strand to SEQ ID NO: 1498370
uaucgucccgaaugaaugg

SEQ ID NO: 1498372 - RNA, 19 nt, Artificial Sequence
  Description of Artificial Sequence: Synthetic oligonucleotide
  Sense strand starting at position 2337 of SEQ ID NO: 1244565
auucauucgggacgauaag

SEQ ID NO: 1498373 - RNA, 19 nt, Artificial Sequence
  Description of Artificial Sequence: Synthetic oligonucleotide
  Antisense strand to SEQ ID NO: 1498372
cuuaucgucccgaaugaau

SEQ ID NO: 1498374 - RNA, 19 nt, Artificial Sequence
  Description of Artificial Sequence: Synthetic oligonucleotide
  Sense strand starting at position 2338 of SEQ ID NO: 1244565
uucauucgggacgauaagu

SEQ ID NO: 1498375 - RNA, 19 nt, Artificial Sequence
  Description of Artificial Sequence: Synthetic oligonucleotide
  Antisense strand to SEQ ID NO: 1498374
acuuaucgucccgaaugaa

SEQ ID NO: 1498376 - RNA, 19 nt, Artificial Sequence
  Description of Artificial Sequence: Synthetic oligonucleotide
  Sense strand starting at position 2347 of SEQ ID NO: 1244565
gacgauaagugaccuuaua

SEQ ID NO: 1498377 - RNA, 19 nt, Artificial Sequence
  Description of Artificial Sequence: Synthetic oligonucleotide
  Antisense strand to SEQ ID NO: 1498376
uauaaggucacuuaucguc

SEQ ID NO: 1498378 - RNA, 19 nt, Artificial Sequence
  Description of Artificial Sequence: Synthetic oligonucleotide
  Sense strand starting at position 2362 of SEQ ID NO: 1244565
uauaaagugcucgcuaugu

SEQ ID NO: 1498379 - RNA, 19 nt, Artificial Sequence
  Description of Artificial Sequence: Synthetic oligonucleotide
  Antisense strand to SEQ ID NO: 1498378
acauagcgagcacuuuaua

SEQ ID NO: 1498380 - RNA, 19 nt, Artificial Sequence
  Description of Artificial Sequence: Synthetic oligonucleotide
  Sense strand starting at position 2854 of SEQ ID NO: 1244565
ggaagaccuuucucuaggu

SEQ ID NO: 1498381 - RNA, 19 nt, Artificial Sequence
  Description of Artificial Sequence: Synthetic oligonucleotide
  Antisense strand to SEQ ID NO: 1498380
accuagagaaaggucuucc

SEQ ID NO: 1498382 - RNA, 19 nt, Artificial Sequence
  Description of Artificial Sequence: Synthetic oligonucleotide
  Sense strand starting at position 2858 of SEQ ID NO: 1244565
gaccuuucucuaggugaug

SEQ ID NO: 1498383 - RNA, 19 nt, Artificial Sequence
  Description of Artificial Sequence: Synthetic oligonucleotide
  Antisense strand to SEQ ID NO: 1498382
caucaccuagagaaagguc

SEQ ID NO: 1498384 - RNA, 19 nt, Artificial Sequence
  Description of Artificial Sequence: Synthetic oligonucleotide
  Sense strand starting at position 2859 of SEQ ID NO: 1244565
accuuucucuaggugauga

SEQ ID NO: 1498385 - RNA, 19 nt, Artificial Sequence
  Description of Artificial Sequence: Synthetic oligonucleotide
  Antisense strand to SEQ ID NO: 1498384
ucaucaccuagagaaaggu

SEQ ID NO: 1498386 - RNA, 19 nt, Artificial Sequence
  Description of Artificial Sequence: Synthetic oligonucleotide
  Sense strand starting at position 3073 of SEQ ID NO: 1244565
ucaaaucgugauugggaga

SEQ ID NO: 1498387 - RNA, 19 nt, Artificial Sequence
  Description of Artificial Sequence: Synthetic oligonucleotide
  Antisense strand to SEQ ID NO: 1498386
ucucccaaucacgauuuga

SEQ ID NO: 1498388 - RNA, 19 nt, Artificial Sequence
  Description of Artificial Sequence: Synthetic oligonucleotide
  Sense strand starting at position 3110 of SEQ ID NO: 1244565
gggaaugccuuccuaauuc

SEQ ID NO: 1498389 - RNA, 19 nt, Artificial Sequence
  Description of Artificial Sequence: Synthetic oligonucleotide
  Antisense strand to SEQ ID NO: 1498388
gaauuaggaaggcauuccc

SEQ ID NO: 1498390 - RNA, 19 nt, Artificial Sequence
  Description of Artificial Sequence: Synthetic oligonucleotide
  Sense strand starting at position 3153 of SEQ ID NO: 1244565
guugacaucucaucagguu

SEQ ID NO: 1498391 - RNA, 19 nt, Artificial Sequence
  Description of Artificial Sequence: Synthetic oligonucleotide
  Antisense strand to SEQ ID NO: 1498390
aaccugaugagaugucaac

SEQ ID NO: 1498392 - RNA, 19 nt, Artificial Sequence
  Description of Artificial Sequence: Synthetic oligonucleotide
  Sense strand starting at position 3168 of SEQ ID NO: 1244565
gguuguuguaaacaggauu

SEQ ID NO: 1498393 - RNA, 19 nt, Artificial Sequence
  Description of Artificial Sequence: Synthetic oligonucleotide
  Antisense strand to SEQ ID NO: 1498392
aauccuguuuacaacaacc

SEQ ID NO: 1498394 - RNA, 19 nt, Artificial Sequence
  Description of Artificial Sequence: Synthetic oligonucleotide
  Sense strand starting at position 3187 of SEQ ID NO: 1244565
caugacuuugauggagagu

SEQ ID NO: 1498395 - RNA, 19 nt, Artificial Sequence
  Description of Artificial Sequence: Synthetic oligonucleotide
  Antisense strand to SEQ ID NO: 1498394
acucuccaucaaagucaug

SEQ ID NO: 1498396 - RNA, 19 nt, Artificial Sequence
  Description of Artificial Sequence: Synthetic oligonucleotide
  Sense strand starting at position 3441 of SEQ ID NO: 1244565
gagugcuggccucacuaca

SEQ ID NO: 1498397 - RNA, 19 nt, Artificial Sequence
  Description of Artificial Sequence: Synthetic oligonucleotide
  Antisense strand to SEQ ID NO: 1498396
uguagugaggccagcacuc

SEQ ID NO: 1498398 - RNA, 19 nt, Artificial Sequence
  Description of Artificial Sequence: Synthetic oligonucleotide
  Sense strand starting at position 3837 of SEQ ID NO: 1244565
gccagaucuuucucccaag

SEQ ID NO: 1498399 - RNA, 19 nt, Artificial Sequence
  Description of Artificial Sequence: Synthetic oligonucleotide
  Antisense strand to SEQ ID NO: 1498398
cuugggagaaagaucuggc

SEQ ID NO: 1498400 - RNA, 19 nt, Artificial Sequence
  Description of Artificial Sequence: Synthetic oligonucleotide
  Sense strand starting at position 3900 of SEQ ID NO: 1244565
ugugaucaucauggugaaa

SEQ ID NO: 1498401 - RNA, 19 nt, Artificial Sequence
  Description of Artificial Sequence: Synthetic oligonucleotide
  Antisense strand to SEQ ID NO: 1498400
uuucaccaugaugaucaca

SEQ ID NO: 1498402 - RNA, 19 nt, Artificial Sequence
  Description of Artificial Sequence: Synthetic oligonucleotide
  Sense strand starting at position 53 of SEQ ID NO: 1244566
gaccuuggccuguauguuu

SEQ ID NO: 1498403 - RNA, 19 nt, Artificial Sequence
  Description of Artificial Sequence: Synthetic oligonucleotide
  Antisense strand to SEQ ID NO: 1498402
aaacauacaggccaagguc

SEQ ID NO: 1498404 - RNA, 19 nt, Artificial Sequence
  Description of Artificial Sequence: Synthetic oligonucleotide
  Sense strand starting at position 71 of SEQ ID NO: 1244566
uuguucuagcuacauugua

SEQ ID NO: 1498405 - RNA, 19 nt, Artificial Sequence
  Description of Artificial Sequence: Synthetic oligonucleotide
  Antisense strand to SEQ ID NO: 1498404
uacaauguagcuagaacaa

SEQ ID NO: 1498406 - RNA, 19 nt, Artificial Sequence
  Description of Artificial Sequence: Synthetic oligonucleotide
  Sense strand starting at position 84 of SEQ ID NO: 1244566
auuguauuggcucaaauag

SEQ ID NO: 1498407 - RNA, 19 nt, Artificial Sequence
  Description of Artificial Sequence: Synthetic oligonucleotide
  Antisense strand to SEQ ID NO: 1498406
cuauuugagccaauacaau

SEQ ID NO: 1498408 - RNA, 19 nt, Artificial Sequence
  Description of Artificial Sequence: Synthetic oligonucleotide
  Sense strand starting at position 145 of SEQ ID NO: 1244566
gguauuuaaugagaaauuc

SEQ ID NO: 1498409 - RNA, 19 nt, Artificial Sequence
  Description of Artificial Sequence: Synthetic oligonucleotide
  Antisense strand to SEQ ID NO: 1498408
gaauuucucauuaaauacc

SEQ ID NO: 1498410 - RNA, 19 nt, Artificial Sequence
  Description of Artificial Sequence: Synthetic oligonucleotide
  Sense strand starting at position 224 of SEQ ID NO: 1244566
uggcaaagauuaucugaag

SEQ ID NO: 1498411 - RNA, 19 nt, Artificial Sequence
  Description of Artificial Sequence: Synthetic oligonucleotide
  Antisense strand to SEQ ID NO: 1498410
cuucagauaaucuuugcca

SEQ ID NO: 1498412 - RNA, 19 nt, Artificial Sequence
  Description of Artificial Sequence: Synthetic oligonucleotide
  Sense strand starting at position 652 of SEQ ID NO: 1244566
gcaccagcuccagaaucua

SEQ ID NO: 1498413 - RNA, 19 nt, Artificial Sequence
  Description of Artificial Sequence: Synthetic oligonucleotide
  Antisense strand to SEQ ID NO: 1498412
uagauucuggagcuggugc

SEQ ID NO: 1498414 - RNA, 19 nt, Artificial Sequence
  Description of Artificial Sequence: Synthetic oligonucleotide
  Sense strand starting at position 708 of SEQ ID NO: 1244566
cuuuacuagcuguaugauc

SEQ ID NO: 1498415 - RNA, 19 nt, Artificial Sequence
  Description of Artificial Sequence: Synthetic oligonucleotide
  Antisense strand to SEQ ID NO: 1498414
gaucauacagcuaguaaag

SEQ ID NO: 1498416 - RNA, 19 nt, Artificial Sequence
  Description of Artificial Sequence: Synthetic oligonucleotide
  Sense strand starting at position 819 of SEQ ID NO: 1244566
gaucaaauggcuuagugca

SEQ ID NO: 1498417 - RNA, 19 nt, Artificial Sequence
  Description of Artificial Sequence: Synthetic oligonucleotide
  Antisense strand to SEQ ID NO: 1498416
ugcacuaagccauuugauc

SEQ ID NO: 1498418 - RNA, 19 nt, Artificial Sequence
  Description of Artificial Sequence: Synthetic oligonucleotide
  Sense strand starting at position 1109 of SEQ ID NO: 1244566
uguaguuccgucuucagua

SEQ ID NO: 1498419 - RNA, 19 nt, Artificial Sequence
  Description of Artificial Sequence: Synthetic oligonucleotide
  Antisense strand to SEQ ID NO: 1498418
uacugaagacggaacuaca

SEQ ID NO: 1498420 - RNA, 19 nt, Artificial Sequence
  Description of Artificial Sequence: Synthetic oligonucleotide
  Sense strand starting at position 1334 of SEQ ID NO: 1244566
uguguuagucaucuucgua

SEQ ID NO: 1498421 - RNA, 19 nt, Artificial Sequence
  Description of Artificial Sequence: Synthetic oligonucleotide
  Antisense strand to SEQ ID NO: 1498420
uacgaagaugacuaacaca

SEQ ID NO: 1498422 - RNA, 19 nt, Artificial Sequence
  Description of Artificial Sequence: Synthetic oligonucleotide
  Sense strand starting at position 1335 of SEQ ID NO: 1244566
guguuagucaucuucguac

SEQ ID NO: 1498423 - RNA, 19 nt, Artificial Sequence
  Description of Artificial Sequence: Synthetic oligonucleotide
  Antisense strand to SEQ ID NO: 1498422
guacgaagaugacuaacac

SEQ ID NO: 1498424 - RNA, 19 nt, Artificial Sequence
  Description of Artificial Sequence: Synthetic oligonucleotide
  Sense strand starting at position 1368 of SEQ ID NO: 1244566
cccuucuccuggccaaaga

SEQ ID NO: 1498425 - RNA, 19 nt, Artificial Sequence
  Description of Artificial Sequence: Synthetic oligonucleotide
  Antisense strand to SEQ ID NO: 1498424
ucuuuggccaggagaaggg

SEQ ID NO: 1498426 - RNA, 19 nt, Artificial Sequence
  Description of Artificial Sequence: Synthetic oligonucleotide
  Sense strand starting at position 1390 of SEQ ID NO: 1244566
ggcacauagccaugaucca

SEQ ID NO: 1498427 - RNA, 19 nt, Artificial Sequence
  Description of Artificial Sequence: Synthetic oligonucleotide
  Antisense strand to SEQ ID NO: 1498426
uggaucauggcuaugugcc

SEQ ID NO: 1498428 - RNA, 19 nt, Artificial Sequence
  Description of Artificial Sequence: Synthetic oligonucleotide
  Sense strand starting at position 1397 of SEQ ID NO: 1244566
agccaugauccacaaacga

SEQ ID NO: 1498429 - RNA, 19 nt, Artificial Sequence
  Description of Artificial Sequence: Synthetic oligonucleotide
  Antisense strand to SEQ ID NO: 1498428
ucguuuguggaucauggcu

SEQ ID NO: 1498430 - RNA, 19 nt, Artificial Sequence
  Description of Artificial Sequence: Synthetic oligonucleotide
  Sense strand starting at position 2191 of SEQ ID NO: 1244566
gcgaguguaauagaacaga

SEQ ID NO: 1498431 - RNA, 19 nt, Artificial Sequence
  Description of Artificial Sequence: Synthetic oligonucleotide
  Antisense strand to SEQ ID NO: 1498430
ucuguucuauuacacucgc

SEQ ID NO: 1498432 - RNA, 19 nt, Artificial Sequence
  Description of Artificial Sequence: Synthetic oligonucleotide
  Sense strand starting at position 2356 of SEQ ID NO: 1244566
uugagaaucuugguggcuu

SEQ ID NO: 1498433 - RNA, 19 nt, Artificial Sequence
  Description of Artificial Sequence: Synthetic oligonucleotide
  Antisense strand to SEQ ID NO: 1498432
aagccaccaagauucucaa

SEQ ID NO: 1498434 - RNA, 19 nt, Artificial Sequence
  Description of Artificial Sequence: Synthetic oligonucleotide
  Sense strand starting at position 2369 of SEQ ID NO: 1244566
uggcuuacucugugggauc

SEQ ID NO: 1498435 - RNA, 19 nt, Artificial Sequence
  Description of Artificial Sequence: Synthetic oligonucleotide
  Antisense strand to SEQ ID NO: 1498434
gaucccacagaguaagcca

SEQ ID NO: 1498436 - RNA, 19 nt, Artificial Sequence
  Description of Artificial Sequence: Synthetic oligonucleotide
  Sense strand starting at position 2391 of SEQ ID NO: 1244566
gaaagcuccuaagagaaga

SEQ ID NO: 1498437 - RNA, 19 nt, Artificial Sequence
  Description of Artificial Sequence: Synthetic oligonucleotide
  Antisense strand to SEQ ID NO: 1498436
ucuucucuuaggagcuuuc

SEQ ID NO: 1498438 - RNA, 19 nt, Artificial Sequence
  Description of Artificial Sequence: Synthetic oligonucleotide
  Sense strand starting at position 2413 of SEQ ID NO: 1244566
ggcagcagcucagucauuu

SEQ ID NO: 1498439 - RNA, 19 nt, Artificial Sequence
  Description of Artificial Sequence: Synthetic oligonucleotide
  Antisense strand to SEQ ID NO: 1498438
aaaugacugagcugcugcc

SEQ ID NO: 1498440 - RNA, 19 nt, Artificial Sequence
  Description of Artificial Sequence: Synthetic oligonucleotide
  Sense strand starting at position 2417 of SEQ ID NO: 1244566
gcagcucagucauuuaaua

SEQ ID NO: 1498441 - RNA, 19 nt, Artificial Sequence
  Description of Artificial Sequence: Synthetic oligonucleotide
  Antisense strand to SEQ ID NO: 1498440
uauuaaaugacugagcugc

SEQ ID NO: 1498442 - RNA, 19 nt, Artificial Sequence
  Description of Artificial Sequence: Synthetic oligonucleotide
  Sense strand starting at position 2469 of SEQ ID NO: 1244566
acuguaauccacuaaguug

SEQ ID NO: 1498443 - RNA, 19 nt, Artificial Sequence
  Description of Artificial Sequence: Synthetic oligonucleotide
  Antisense strand to SEQ ID NO: 1498442
caacuuaguggauuacagu

SEQ ID NO: 1498444 - RNA, 19 nt, Artificial Sequence
  Description of Artificial Sequence: Synthetic oligonucleotide
  Sense strand starting at position 2507 of SEQ ID NO: 1244566
agacauauuuguuaucccu

SEQ ID NO: 1498445 - RNA, 19 nt, Artificial Sequence
  Description of Artificial Sequence: Synthetic oligonucleotide
  Antisense strand to SEQ ID NO: 1498444
agggauaacaaauaugucu

SEQ ID NO: 1498446 - RNA, 19 nt, Artificial Sequence
  Description of Artificial Sequence: Synthetic oligonucleotide
  Sense strand starting at position 2515 of SEQ ID NO: 1244566
uuguuaucccuauaggauu

SEQ ID NO: 1498447 - RNA, 19 nt, Artificial Sequence
  Description of Artificial Sequence: Synthetic oligonucleotide
  Antisense strand to SEQ ID NO: 1498446
aauccuauagggauaacaa

SEQ ID NO: 1498448 - RNA, 19 nt, Artificial Sequence
  Description of Artificial Sequence: Synthetic oligonucleotide
  Sense strand starting at position 2533 of SEQ ID NO: 1244566
uuucgugagcaucaaacua

SEQ ID NO: 1498449 - RNA, 19 nt, Artificial Sequence
  Description of Artificial Sequence: Synthetic oligonucleotide
  Antisense strand to SEQ ID NO: 1498448
uaguuugaugcucacgaaa

SEQ ID NO: 1498450 - RNA, 19 nt, Artificial Sequence
  Description of Artificial Sequence: Synthetic oligonucleotide
  Sense strand starting at position 2615 of SEQ ID NO: 1244566
ccaugcuggucccuagaaa

SEQ ID NO: 1498451 - RNA, 19 nt, Artificial Sequence
  Description of Artificial Sequence: Synthetic oligonucleotide
  Antisense strand to SEQ ID NO: 1498450
uuucuagggaccagcaugg

SEQ ID NO: 1498452 - RNA, 19 nt, Artificial Sequence
  Description of Artificial Sequence: Synthetic oligonucleotide
  Sense strand starting at position 3005 of SEQ ID NO: 1244566
ugggaaugagguuguguuu

SEQ ID NO: 1498453 - RNA, 19 nt, Artificial Sequence
  Description of Artificial Sequence: Synthetic oligonucleotide
  Antisense strand to SEQ ID NO: 1498452
aaacacaaccucauuccca

SEQ ID NO: 1498454 - RNA, 19 nt, Artificial Sequence
  Description of Artificial Sequence: Synthetic oligonucleotide
  Sense strand starting at position 3008 of SEQ ID NO: 1244566
gaaugagguuguguuuggu

SEQ ID NO: 1498455 - RNA, 19 nt, Artificial Sequence
  Description of Artificial Sequence: Synthetic oligonucleotide
  Antisense strand to SEQ ID NO: 1498454
accaaacacaaccucauuc

SEQ ID NO: 1498456 - RNA, 19 nt, Artificial Sequence
  Description of Artificial Sequence: Synthetic oligonucleotide
  Sense strand starting at position 3071 of SEQ ID NO: 1244566
gggaaaucuuggagugguu

SEQ ID NO: 1498457 - RNA, 19 nt, Artificial Sequence
  Description of Artificial Sequence: Synthetic oligonucleotide
  Antisense strand to SEQ ID NO: 1498456
aaccacuccaagauuuccc

SEQ ID NO: 1498458 - RNA, 19 nt, Artificial Sequence
  Description of Artificial Sequence: Synthetic oligonucleotide
  Sense strand starting at position 3073 of SEQ ID NO: 1244566
gaaaucuuggagugguuua

SEQ ID NO: 1498459 - RNA, 19 nt, Artificial Sequence
  Description of Artificial Sequence: Synthetic oligonucleotide
  Antisense strand to SEQ ID NO: 1498458
uaaaccacuccaagauuuc

SEQ ID NO: 1498460 - RNA, 19 nt, Artificial Sequence
  Description of Artificial Sequence: Synthetic oligonucleotide
  Sense strand starting at position 3078 of SEQ ID NO: 1244566
cuuggagugguuuaucuau

SEQ ID NO: 1498461 - RNA, 19 nt, Artificial Sequence
  Description of Artificial Sequence: Synthetic oligonucleotide
  Antisense strand to SEQ ID NO: 1498460
auagauaaaccacuccaag

SEQ ID NO: 1498462 - RNA, 19 nt, Artificial Sequence
  Description of Artificial Sequence: Synthetic oligonucleotide
  Sense strand starting at position 3080 of SEQ ID NO: 1244566
uggagugguuuaucuauua

SEQ ID NO: 1498463 - RNA, 19 nt, Artificial Sequence
  Description of Artificial Sequence: Synthetic oligonucleotide
  Antisense strand to SEQ ID NO: 1498462
uaauagauaaaccacucca

SEQ ID NO: 1498464 - RNA, 19 nt, Artificial Sequence
  Description of Artificial Sequence: Synthetic oligonucleotide
  Sense strand starting at position 3126 of SEQ ID NO: 1244566
ccgacaucgcuuuauagau

SEQ ID NO: 1498465 - RNA, 19 nt, Artificial Sequence
  Description of Artificial Sequence: Synthetic oligonucleotide
  Antisense strand to SEQ ID NO: 1498464
aucuauaaagcgaugucgg

SEQ ID NO: 1498466 - RNA, 19 nt, Artificial Sequence
  Description of Artificial Sequence: Synthetic oligonucleotide
  Sense strand starting at position 3146 of SEQ ID NO: 1244566
cugaauagaucucuuuguu

SEQ ID NO: 1498467 - RNA, 19 nt, Artificial Sequence
  Description of Artificial Sequence: Synthetic oligonucleotide
  Antisense strand to SEQ ID NO: 1498466
aacaaagagaucuauucag

SEQ ID NO: 1498468 - RNA, 19 nt, Artificial Sequence
  Description of Artificial Sequence: Synthetic oligonucleotide
  Sense strand starting at position 3150 of SEQ ID NO: 1244566
auagaucucuuuguuuguu

SEQ ID NO: 1498469 - RNA, 19 nt, Artificial Sequence
  Description of Artificial Sequence: Synthetic oligonucleotide
  Antisense strand to SEQ ID NO: 1498468
aacaaacaaagagaucuau

SEQ ID NO: 1498470 - RNA, 19 nt, Artificial Sequence
  Description of Artificial Sequence: Synthetic oligonucleotide
  Sense strand starting at position 3231 of SEQ ID NO: 1244566
agcuauaaucuguaaugua

SEQ ID NO: 1498471 - RNA, 19 nt, Artificial Sequence
  Description of Artificial Sequence: Synthetic oligonucleotide
  Antisense strand to SEQ ID NO: 1498470
uacauuacagauuauagcu

SEQ ID NO: 1498472 - RNA, 19 nt, Artificial Sequence
  Description of Artificial Sequence: Synthetic oligonucleotide
  Sense strand starting at position 3487 of SEQ ID NO: 1244566
aguaguuauuuacacccau

SEQ ID NO: 1498473 - RNA, 19 nt, Artificial Sequence
  Description of Artificial Sequence: Synthetic oligonucleotide
  Antisense strand to SEQ ID NO: 1498472
auggguguaaauaacuacu

SEQ ID NO: 1498474 - RNA, 19 nt, Artificial Sequence
  Description of Artificial Sequence: Synthetic oligonucleotide
  Sense strand starting at position 3569 of SEQ ID NO: 1244566
augguaagggccuauuguu

SEQ ID NO: 1498475 - RNA, 19 nt, Artificial Sequence
  Description of Artificial Sequence: Synthetic oligonucleotide
  Antisense strand to SEQ ID NO: 1498474
aacaauaggcccuuaccau

SEQ ID NO: 1498476 - RNA, 19 nt, Artificial Sequence
  Description of Artificial Sequence: Synthetic oligonucleotide
  Sense strand starting at position 3576 of SEQ ID NO: 1244566
gggccuauuguuggugaca

SEQ ID NO: 1498477 - RNA, 19 nt, Artificial Sequence
  Description of Artificial Sequence: Synthetic oligonucleotide
  Antisense strand to SEQ ID NO: 1498476
ugucaccaacaauaggccc

SEQ ID NO: 1498478 - RNA, 19 nt, Artificial Sequence
  Description of Artificial Sequence: Synthetic oligonucleotide
  Sense strand starting at position 3616 of SEQ ID NO: 1244566
aagccacuucuugguaaag

SEQ ID NO: 1498479 - RNA, 19 nt, Artificial Sequence
  Description of Artificial Sequence: Synthetic oligonucleotide
  Antisense strand to SEQ ID NO: 1498478
cuuuaccaagaaguggcuu

SEQ ID NO: 1498480 - RNA, 19 nt, Artificial Sequence
  Description of Artificial Sequence: Synthetic oligonucleotide
  Sense strand starting at position 3662 of SEQ ID NO: 1244566
guccaucagaugggucuua

SEQ ID NO: 1498481 - RNA, 19 nt, Artificial Sequence
  Description of Artificial Sequence: Synthetic oligonucleotide
  Antisense strand to SEQ ID NO: 1498480
uaagacccaucugauggac

SEQ ID NO: 1498482 - RNA, 19 nt, Artificial Sequence
  Description of Artificial Sequence: Synthetic oligonucleotide
  Sense strand starting at position 41 of SEQ ID NO: 1244567
guaucugggccacacuaau

SEQ ID NO: 1498483 - RNA, 19 nt, Artificial Sequence
  Description of Artificial Sequence: Synthetic oligonucleotide
  Antisense strand to SEQ ID NO: 1498482
auuaguguggcccagauac

SEQ ID NO: 1498484 - RNA, 19 nt, Artificial Sequence
  Description of Artificial Sequence: Synthetic oligonucleotide
  Sense strand starting at position 245 of SEQ ID NO: 1244567
gcugauuauguuuacgaau

SEQ ID NO: 1498485 - RNA, 19 nt, Artificial Sequence
  Description of Artificial Sequence: Synthetic oligonucleotide
  Antisense strand to SEQ ID NO: 1498484
auucguaaacauaaucagc

SEQ ID NO: 1498486 - RNA, 19 nt, Artificial Sequence
  Description of Artificial Sequence: Synthetic oligonucleotide
  Sense strand starting at position 464 of SEQ ID NO: 1244567
aaaugaagugccuguaaua

SEQ ID NO: 1498487 - RNA, 19 nt, Artificial Sequence
  Description of Artificial Sequence: Synthetic oligonucleotide
  Antisense strand to SEQ ID NO: 1498486
uauuacaggcacuucauuu

SEQ ID NO: 1498488 - RNA, 19 nt, Artificial Sequence
  Description of Artificial Sequence: Synthetic oligonucleotide
  Sense strand starting at position 635 of SEQ ID NO: 1244567
ggaggauaacuuugcuuau

SEQ ID NO: 1498489 - RNA, 19 nt, Artificial Sequence
  Description of Artificial Sequence: Synthetic oligonucleotide
  Antisense strand to SEQ ID NO: 1498488
auaagcaaaguuauccucc

SEQ ID NO: 1498490 - RNA, 19 nt, Artificial Sequence
  Description of Artificial Sequence: Synthetic oligonucleotide
  Sense strand starting at position 637 of SEQ ID NO: 1244567
aggauaacuuugcuuaucu

SEQ ID NO: 1498491 - RNA, 19 nt, Artificial Sequence
  Description of Artificial Sequence: Synthetic oligonucleotide
  Antisense strand to SEQ ID NO: 1498490
agauaagcaaaguuauccu

SEQ ID NO: 1498492 - RNA, 19 nt, Artificial Sequence
  Description of Artificial Sequence: Synthetic oligonucleotide
  Sense strand starting at position 638 of SEQ ID NO: 1244567
ggauaacuuugcuuaucuc

SEQ ID NO: 1498493 - RNA, 19 nt, Artificial Sequence
  Description of Artificial Sequence: Synthetic oligonucleotide
  Antisense strand to SEQ ID NO: 1498492
gagauaagcaaaguuaucc

SEQ ID NO: 1498494 - RNA, 19 nt, Artificial Sequence
  Description of Artificial Sequence: Synthetic oligonucleotide
  Sense strand starting at position 716 of SEQ ID NO: 1244567
ggucccacuugauccagaa

SEQ ID NO: 1498495 - RNA, 19 nt, Artificial Sequence
  Description of Artificial Sequence: Synthetic oligonucleotide
  Antisense strand to SEQ ID NO: 1498494
uucuggaucaagugggacc

SEQ ID NO: 1498496 - RNA, 19 nt, Artificial Sequence
  Description of Artificial Sequence: Synthetic oligonucleotide
  Sense strand starting at position 885 of SEQ ID NO: 1244567
auaggagacaccgguauau

SEQ ID NO: 1498497 - RNA, 19 nt, Artificial Sequence
  Description of Artificial Sequence: Synthetic oligonucleotide
  Antisense strand to SEQ ID NO: 1498496
auauaccggugucuccuau

SEQ ID NO: 1498498 - RNA, 19 nt, Artificial Sequence
  Description of Artificial Sequence: Synthetic oligonucleotide
  Sense strand starting at position 904 of SEQ ID NO: 1244567
aggaguuuaggccaaaggu

SEQ ID NO: 1498499 - RNA, 19 nt, Artificial Sequence
  Description of Artificial Sequence: Synthetic oligonucleotide
  Antisense strand to SEQ ID NO: 1498498
accuuuggccuaaacuccu

SEQ ID NO: 1498500 - RNA, 19 nt, Artificial Sequence
  Description of Artificial Sequence: Synthetic oligonucleotide
  Sense strand starting at position 912 of SEQ ID NO: 1244567
aggccaaagguugaguauu

SEQ ID NO: 1498501 - RNA, 19 nt, Artificial Sequence
  Description of Artificial Sequence: Synthetic oligonucleotide
  Antisense strand to SEQ ID NO: 1498500
aauacucaaccuuuggccu

SEQ ID NO: 1498502 - RNA, 19 nt, Artificial Sequence
  Description of Artificial Sequence: Synthetic oligonucleotide
  Sense strand starting at position 1073 of SEQ ID NO: 1244567
aagauacuaggucgaaaug

SEQ ID NO: 1498503 - RNA, 19 nt, Artificial Sequence
  Description of Artificial Sequence: Synthetic oligonucleotide
  Antisense strand to SEQ ID NO: 1498502
cauuucgaccuaguaucuu

SEQ ID NO: 1498504 - RNA, 19 nt, Artificial Sequence
  Description of Artificial Sequence: Synthetic oligonucleotide
  Sense strand starting at position 1213 of SEQ ID NO: 1244567
gguuuccagcgggaacaau

SEQ ID NO: 1498505 - RNA, 19 nt, Artificial Sequence
  Description of Artificial Sequence: Synthetic oligonucleotide
  Antisense strand to SEQ ID NO: 1498504
auuguucccgcuggaaacc

SEQ ID NO: 1498506 - RNA, 19 nt, Artificial Sequence
  Description of Artificial Sequence: Synthetic oligonucleotide
  Sense strand starting at position 1222 of SEQ ID NO: 1244567
cgggaacaaucagucauau

SEQ ID NO: 1498507 - RNA, 19 nt, Artificial Sequence
  Description of Artificial Sequence: Synthetic oligonucleotide
  Antisense strand to SEQ ID NO: 1498506
auaugacugauuguucccg

SEQ ID NO: 1498508 - RNA, 19 nt, Artificial Sequence
  Description of Artificial Sequence: Synthetic oligonucleotide
  Sense strand starting at position 1254 of SEQ ID NO: 1244567
aaaucagucgggugggaua

SEQ ID NO: 1498509 - RNA, 19 nt, Artificial Sequence
  Description of Artificial Sequence: Synthetic oligonucleotide
  Antisense strand to SEQ ID NO: 1498508
uaucccacccgacugauuu

SEQ ID NO: 1498510 - RNA, 19 nt, Artificial Sequence
  Description of Artificial Sequence: Synthetic oligonucleotide
  Sense strand starting at position 1256 of SEQ ID NO: 1244567
aucagucgggugggauaua

SEQ ID NO: 1498511 - RNA, 19 nt, Artificial Sequence
  Description of Artificial Sequence: Synthetic oligonucleotide
  Antisense strand to SEQ ID NO: 1498510
uauaucccacccgacugau

SEQ ID NO: 1498512 - RNA, 19 nt, Artificial Sequence
  Description of Artificial Sequence: Synthetic oligonucleotide
  Sense strand starting at position 1398 of SEQ ID NO: 1244567
agagaagguucagucauug

SEQ ID NO: 1498513 - RNA, 19 nt, Artificial Sequence
  Description of Artificial Sequence: Synthetic oligonucleotide
  Antisense strand to SEQ ID NO: 1498512
caaugacugaaccuucucu

SEQ ID NO: 1498514 - RNA, 19 nt, Artificial Sequence
  Description of Artificial Sequence: Synthetic oligonucleotide
  Sense strand starting at position 2089 of SEQ ID NO: 1244567
gcuuucuuucgagcgcuua

SEQ ID NO: 1498515 - RNA, 19 nt, Artificial Sequence
  Description of Artificial Sequence: Synthetic oligonucleotide
  Antisense strand to SEQ ID NO: 1498514
uaagcgcucgaaagaaagc

SEQ ID NO: 1498516 - RNA, 19 nt, Artificial Sequence
  Description of Artificial Sequence: Synthetic oligonucleotide
  Sense strand starting at position 2092 of SEQ ID NO: 1244567
uucuuucgagcgcuuaagu

SEQ ID NO: 1498517 - RNA, 19 nt, Artificial Sequence
  Description of Artificial Sequence: Synthetic oligonucleotide
  Antisense strand to SEQ ID NO: 1498516
acuuaagcgcucgaaagaa

SEQ ID NO: 1498518 - RNA, 19 nt, Artificial Sequence
  Description of Artificial Sequence: Synthetic oligonucleotide
  Sense strand starting at position 2123 of SEQ ID NO: 1244567
uguuccucucgagugcauu

SEQ ID NO: 1498519 - RNA, 19 nt, Artificial Sequence
  Description of Artificial Sequence: Synthetic oligonucleotide
  Antisense strand to SEQ ID NO: 1498518
aaugcacucgagaggaaca

SEQ ID NO: 1498520 - RNA, 19 nt, Artificial Sequence
  Description of Artificial Sequence: Synthetic oligonucleotide
  Sense strand starting at position 2474 of SEQ ID NO: 1244567
ggacuuccuugguuagauu

SEQ ID NO: 1498521 - RNA, 19 nt, Artificial Sequence
  Description of Artificial Sequence: Synthetic oligonucleotide
  Antisense strand to SEQ ID NO: 1498520
aaucuaaccaaggaagucc

SEQ ID NO: 1498522 - RNA, 19 nt, Artificial Sequence
  Description of Artificial Sequence: Synthetic oligonucleotide
  Sense strand starting at position 2494 of SEQ ID NO: 1244567
gaguuuagugcugaacaua

SEQ ID NO: 1498523 - RNA, 19 nt, Artificial Sequence
  Description of Artificial Sequence: Synthetic oligonucleotide
  Antisense strand to SEQ ID NO: 1498522
uauguucagcacuaaacuc

SEQ ID NO: 1498524 - RNA, 19 nt, Artificial Sequence
  Description of Artificial Sequence: Synthetic oligonucleotide
  Sense strand starting at position 2567 of SEQ ID NO: 1244567
guagaaucacuccaguuua

SEQ ID NO: 1498525 - RNA, 19 nt, Artificial Sequence
  Description of Artificial Sequence: Synthetic oligonucleotide
  Antisense strand to SEQ ID NO: 1498524
uaaacuggagugauucuac

SEQ ID NO: 1498526 - RNA, 19 nt, Artificial Sequence
  Description of Artificial Sequence: Synthetic oligonucleotide
  Sense strand starting at position 2645 of SEQ ID NO: 1244567
acagcucaagaauguagua

SEQ ID NO: 1498527 - RNA, 19 nt, Artificial Sequence
  Description of Artificial Sequence: Synthetic oligonucleotide
  Antisense strand to SEQ ID NO: 1498526
uacuacauucuugagcugu

SEQ ID NO: 1498528 - RNA, 19 nt, Artificial Sequence
  Description of Artificial Sequence: Synthetic oligonucleotide
  Sense strand starting at position 2670 of SEQ ID NO: 1244567
ggagucagaugguuagaua

SEQ ID NO: 1498529 - RNA, 19 nt, Artificial Sequence
  Description of Artificial Sequence: Synthetic oligonucleotide
  Antisense strand to SEQ ID NO: 1498528
uaucuaaccaucugacucc

SEQ ID NO: 1498530 - RNA, 19 nt, Artificial Sequence
  Description of Artificial Sequence: Synthetic oligonucleotide
  Sense strand starting at position 2719 of SEQ ID NO: 1244567
uugggaguguugaggaaag

SEQ ID NO: 1498531 - RNA, 19 nt, Artificial Sequence
  Description of Artificial Sequence: Synthetic oligonucleotide
  Antisense strand to SEQ ID NO: 1498530
cuuuccucaacacucccaa

SEQ ID NO: 1498532 - RNA, 19 nt, Artificial Sequence
  Description of Artificial Sequence: Synthetic oligonucleotide
  Sense strand starting at position 2825 of SEQ ID NO: 1244567
agaauaauggugugccuaa

SEQ ID NO: 1498533 - RNA, 19 nt, Artificial Sequence
  Description of Artificial Sequence: Synthetic oligonucleotide
  Antisense strand to SEQ ID NO: 1498532
uuaggcacaccauuauucu

SEQ ID NO: 1498534 - RNA, 19 nt, Artificial Sequence
  Description of Artificial Sequence: Synthetic oligonucleotide
  Sense strand starting at position 2826 of SEQ ID NO: 1244567
gaauaauggugugccuaag

SEQ ID NO: 1498535 - RNA, 19 nt, Artificial Sequence
  Description of Artificial Sequence: Synthetic oligonucleotide
  Antisense strand to SEQ ID NO: 1498534
cuuaggcacaccauuauuc

SEQ ID NO: 1498536 - RNA, 19 nt, Artificial Sequence
  Description of Artificial Sequence: Synthetic oligonucleotide
  Sense strand starting at position 2846 of SEQ ID NO: 1244567
agagaaugaugguuuacuu

SEQ ID NO: 1498537 - RNA, 19 nt, Artificial Sequence
  Description of Artificial Sequence: Synthetic oligonucleotide
  Antisense strand to SEQ ID NO: 1498536
aaguaaaccaucauucucu

SEQ ID NO: 1498538 - RNA, 19 nt, Artificial Sequence
  Description of Artificial Sequence: Synthetic oligonucleotide
  Sense strand starting at position 2860 of SEQ ID NO: 1244567
uacuuagugguguaccuaa

SEQ ID NO: 1498539 - RNA, 19 nt, Artificial Sequence
  Description of Artificial Sequence: Synthetic oligonucleotide
  Antisense strand to SEQ ID NO: 1498538
uuagguacaccacuaagua

SEQ ID NO: 1498540 - RNA, 19 nt, Artificial Sequence
  Description of Artificial Sequence: Synthetic oligonucleotide
  Sense strand starting at position 3152 of SEQ ID NO: 1244567
aaggguauccugcauaucu

SEQ ID NO: 1498541 - RNA, 19 nt, Artificial Sequence
  Description of Artificial Sequence: Synthetic oligonucleotide
  Antisense strand to SEQ ID NO: 1498540
agauaugcaggauacccuu

SEQ ID NO: 1498542 - RNA, 19 nt, Artificial Sequence
  Description of Artificial Sequence: Synthetic oligonucleotide
  Sense strand starting at position 3154 of SEQ ID NO: 1244567
ggguauccugcauaucuuu

SEQ ID NO: 1498543 - RNA, 19 nt, Artificial Sequence
  Description of Artificial Sequence: Synthetic oligonucleotide
  Antisense strand to SEQ ID NO: 1498542
aaagauaugcaggauaccc

SEQ ID NO: 1498544 - RNA, 19 nt, Artificial Sequence
  Description of Artificial Sequence: Synthetic oligonucleotide
  Sense strand starting at position 3221 of SEQ ID NO: 1244567
acucgcuaacuggaaagau

SEQ ID NO: 1498545 - RNA, 19 nt, Artificial Sequence
  Description of Artificial Sequence: Synthetic oligonucleotide
  Antisense strand to SEQ ID NO: 1498544
aucuuuccaguuagcgagu

SEQ ID NO: 1498546 - RNA, 19 nt, Artificial Sequence
  Description of Artificial Sequence: Synthetic oligonucleotide
  Sense strand starting at position 3231 of SEQ ID NO: 1244567
uggaaagauaugugcucua

SEQ ID NO: 1498547 - RNA, 19 nt, Artificial Sequence
  Description of Artificial Sequence: Synthetic oligonucleotide
  Antisense strand to SEQ ID NO: 1498546
uagagcacauaucuuucca

SEQ ID NO: 1498548 - RNA, 19 nt, Artificial Sequence
  Description of Artificial Sequence: Synthetic oligonucleotide
  Sense strand starting at position 3449 of SEQ ID NO: 1244567
aggaguuacucuucuagau

SEQ ID NO: 1498549 - RNA, 19 nt, Artificial Sequence
  Description of Artificial Sequence: Synthetic oligonucleotide
  Antisense strand to SEQ ID NO: 1498548
aucuagaagaguaacuccu

SEQ ID NO: 1498550 - RNA, 19 nt, Artificial Sequence
  Description of Artificial Sequence: Synthetic oligonucleotide
  Sense strand starting at position 3453 of SEQ ID NO: 1244567
guuacucuucuagauaguu

SEQ ID NO: 1498551 - RNA, 19 nt, Artificial Sequence
  Description of Artificial Sequence: Synthetic oligonucleotide
  Antisense strand to SEQ ID NO: 1498550
aacuaucuagaagaguaac

SEQ ID NO: 1498552 - RNA, 19 nt, Artificial Sequence
  Description of Artificial Sequence: Synthetic oligonucleotide
  Sense strand starting at position 3542 of SEQ ID NO: 1244567
ccaguauauccaugagcaa

SEQ ID NO: 1498553 - RNA, 19 nt, Artificial Sequence
  Description of Artificial Sequence: Synthetic oligonucleotide
  Antisense strand to SEQ ID NO: 1498552
uugcucauggauauacugg

SEQ ID NO: 1498554 - RNA, 19 nt, Artificial Sequence
  Description of Artificial Sequence: Synthetic oligonucleotide
  Sense strand starting at position 3545 of SEQ ID NO: 1244567
guauauccaugagcaauag

SEQ ID NO: 1498555 - RNA, 19 nt, Artificial Sequence
  Description of Artificial Sequence: Synthetic oligonucleotide
  Antisense strand to SEQ ID NO: 1498554
cuauugcucauggauauac

SEQ ID NO: 1498556 - RNA, 19 nt, Artificial Sequence
  Description of Artificial Sequence: Synthetic oligonucleotide
  Sense strand starting at position 3621 of SEQ ID NO: 1244567
cuggcaguuggucaugaau

SEQ ID NO: 1498557 - RNA, 19 nt, Artificial Sequence
  Description of Artificial Sequence: Synthetic oligonucleotide
  Antisense strand to SEQ ID NO: 1498556
auucaugaccaacugccag

SEQ ID NO: 1498558 - RNA, 19 nt, Artificial Sequence
  Description of Artificial Sequence: Synthetic oligonucleotide
  Sense strand starting at position 3632 of SEQ ID NO: 1244567
ucaugaauucuugguggau

SEQ ID NO: 1498559 - RNA, 19 nt, Artificial Sequence
  Description of Artificial Sequence: Synthetic oligonucleotide
  Antisense strand to SEQ ID NO: 1498558
auccaccaagaauucauga

SEQ ID NO: 1498560 - RNA, 19 nt, Artificial Sequence
  Description of Artificial Sequence: Synthetic oligonucleotide
  Sense strand starting at position 3633 of SEQ ID NO: 1244567
caugaauucuugguggaug

SEQ ID NO: 1498561 - RNA, 19 nt, Artificial Sequence
  Description of Artificial Sequence: Synthetic oligonucleotide
  Antisense strand to SEQ ID NO: 1498560
cauccaccaagaauucaug

SEQ ID NO: 1498562 - RNA, 19 nt, Artificial Sequence
  Description of Artificial Sequence: Synthetic oligonucleotide
  Sense strand starting at position 123 of SEQ ID NO: 1244568
auacuagagucaucauguc

SEQ ID NO: 1498563 - RNA, 19 nt, Artificial Sequence
  Description of Artificial Sequence: Synthetic oligonucleotide
  Antisense strand to SEQ ID NO: 1498562
gacaugaugacucuaguau

SEQ ID NO: 1498564 - RNA, 19 nt, Artificial Sequence
  Description of Artificial Sequence: Synthetic oligonucleotide
  Sense strand starting at position 132 of SEQ ID NO: 1244568
ucaucaugucuguaacaga

SEQ ID NO: 1498565 - RNA, 19 nt, Artificial Sequence
  Description of Artificial Sequence: Synthetic oligonucleotide
  Antisense strand to SEQ ID NO: 1498564
ucuguuacagacaugauga

SEQ ID NO: 1498566 - RNA, 19 nt, Artificial Sequence
  Description of Artificial Sequence: Synthetic oligonucleotide
  Sense strand starting at position 222 of SEQ ID NO: 1244568
aggaccuacugcucaagaa

SEQ ID NO: 1498567 - RNA, 19 nt, Artificial Sequence
  Description of Artificial Sequence: Synthetic oligonucleotide
  Antisense strand to SEQ ID NO: 1498566
uucuugagcaguagguccu

SEQ ID NO: 1498568 - RNA, 19 nt, Artificial Sequence
  Description of Artificial Sequence: Synthetic oligonucleotide
  Sense strand starting at position 357 of SEQ ID NO: 1244568
guuuaagauugguuccuga

SEQ ID NO: 1498569 - RNA, 19 nt, Artificial Sequence
  Description of Artificial Sequence: Synthetic oligonucleotide
  Antisense strand to SEQ ID NO: 1498568
ucaggaaccaaucuuaaac

SEQ ID NO: 1498570 - RNA, 19 nt, Artificial Sequence
  Description of Artificial Sequence: Synthetic oligonucleotide
  Sense strand starting at position 360 of SEQ ID NO: 1244568
uaagauugguuccugaaag

SEQ ID NO: 1498571 - RNA, 19 nt, Artificial Sequence
  Description of Artificial Sequence: Synthetic oligonucleotide
  Antisense strand to SEQ ID NO: 1498570
cuuucaggaaccaaucuua

SEQ ID NO: 1498572 - RNA, 19 nt, Artificial Sequence
  Description of Artificial Sequence: Synthetic oligonucleotide
  Sense strand starting at position 508 of SEQ ID NO: 1244568
acaguaauaccagggccaa

SEQ ID NO: 1498573 - RNA, 19 nt, Artificial Sequence
  Description of Artificial Sequence: Synthetic oligonucleotide
  Antisense strand to SEQ ID NO: 1498572
uuggcccugguauuacugu

SEQ ID NO: 1498574 - RNA, 19 nt, Artificial Sequence
  Description of Artificial Sequence: Synthetic oligonucleotide
  Sense strand starting at position 509 of SEQ ID NO: 1244568
caguaauaccagggccaaa

SEQ ID NO: 1498575 - RNA, 19 nt, Artificial Sequence
  Description of Artificial Sequence: Synthetic oligonucleotide
  Antisense strand to SEQ ID NO: 1498574
uuuggcccugguauuacug

SEQ ID NO: 1498576 - RNA, 19 nt, Artificial Sequence
  Description of Artificial Sequence: Synthetic oligonucleotide
  Sense strand starting at position 652 of SEQ ID NO: 1244568
ugaauuaauaucuguggga

SEQ ID NO: 1498577 - RNA, 19 nt, Artificial Sequence
  Description of Artificial Sequence: Synthetic oligonucleotide
  Antisense strand to SEQ ID NO: 1498576
ucccacagauauuaauuca

SEQ ID NO: 1498578 - RNA, 19 nt, Artificial Sequence
  Description of Artificial Sequence: Synthetic oligonucleotide
  Sense strand starting at position 656 of SEQ ID NO: 1244568
uuaauaucugugggaaggu

SEQ ID NO: 1498579 - RNA, 19 nt, Artificial Sequence
  Description of Artificial Sequence: Synthetic oligonucleotide
  Antisense strand to SEQ ID NO: 1498578
accuucccacagauauuaa

SEQ ID NO: 1498580 - RNA, 19 nt, Artificial Sequence
  Description of Artificial Sequence: Synthetic oligonucleotide
  Sense strand starting at position 708 of SEQ ID NO: 1244568
gguaucuccucuuugggaa

SEQ ID NO: 1498581 - RNA, 19 nt, Artificial Sequence
  Description of Artificial Sequence: Synthetic oligonucleotide
  Antisense strand to SEQ ID NO: 1498580
uucccaaagaggagauacc

SEQ ID NO: 1498582 - RNA, 19 nt, Artificial Sequence
  Description of Artificial Sequence: Synthetic oligonucleotide
  Sense strand starting at position 709 of SEQ ID NO: 1244568
guaucuccucuuugggaaa

SEQ ID NO: 1498583 - RNA, 19 nt, Artificial Sequence
  Description of Artificial Sequence: Synthetic oligonucleotide
  Antisense strand to SEQ ID NO: 1498582
uuucccaaagaggagauac

SEQ ID NO: 1498584 - RNA, 19 nt, Artificial Sequence
  Description of Artificial Sequence: Synthetic oligonucleotide
  Sense strand starting at position 1123 of SEQ ID NO: 1244568
agaccuagucuaugauacu

SEQ ID NO: 1498585 - RNA, 19 nt, Artificial Sequence
  Description of Artificial Sequence: Synthetic oligonucleotide
  Antisense strand to SEQ ID NO: 1498584
aguaucauagacuaggucu

SEQ ID NO: 1498586 - RNA, 19 nt, Artificial Sequence
  Description of Artificial Sequence: Synthetic oligonucleotide
  Sense strand starting at position 2119 of SEQ ID NO: 1244568
aguguuuaggcuagagcga

SEQ ID NO: 1498587 - RNA, 19 nt, Artificial Sequence
  Description of Artificial Sequence: Synthetic oligonucleotide
  Antisense strand to SEQ ID NO: 1498586
ucgcucuagccuaaacacu

SEQ ID NO: 1498588 - RNA, 19 nt, Artificial Sequence
  Description of Artificial Sequence: Synthetic oligonucleotide
  Sense strand starting at position 2170 of SEQ ID NO: 1244568
gguacauuucccugccaac

SEQ ID NO: 1498589 - RNA, 19 nt, Artificial Sequence
  Description of Artificial Sequence: Synthetic oligonucleotide
  Antisense strand to SEQ ID NO: 1498588
guuggcagggaaauguacc

SEQ ID NO: 1498590 - RNA, 19 nt, Artificial Sequence
  Description of Artificial Sequence: Synthetic oligonucleotide
  Sense strand starting at position 2201 of SEQ ID NO: 1244568
gcuuccagaccucaaagau

SEQ ID NO: 1498591 - RNA, 19 nt, Artificial Sequence
  Description of Artificial Sequence: Synthetic oligonucleotide
  Antisense strand to SEQ ID NO: 1498590
aucuuugaggucuggaagc

SEQ ID NO: 1498592 - RNA, 19 nt, Artificial Sequence
  Description of Artificial Sequence: Synthetic oligonucleotide
  Sense strand starting at position 2280 of SEQ ID NO: 1244568
aguacauccugagccagaa

SEQ ID NO: 1498593 - RNA, 19 nt, Artificial Sequence
  Description of Artificial Sequence: Synthetic oligonucleotide
  Antisense strand to SEQ ID NO: 1498592
uucuggcucaggauguacu

SEQ ID NO: 1498594 - RNA, 19 nt, Artificial Sequence
  Description of Artificial Sequence: Synthetic oligonucleotide
  Sense strand starting at position 2325 of SEQ ID NO: 1244568
ugcuguaucuauuugccua

SEQ ID NO: 1498595 - RNA, 19 nt, Artificial Sequence
  Description of Artificial Sequence: Synthetic oligonucleotide
  Antisense strand to SEQ ID NO: 1498594
uaggcaaauagauacagca

SEQ ID NO: 1498596 - RNA, 19 nt, Artificial Sequence
  Description of Artificial Sequence: Synthetic oligonucleotide
  Sense strand starting at position 2393 of SEQ ID NO: 1244568
cucucucgacauuggauau

SEQ ID NO: 1498597 - RNA, 19 nt, Artificial Sequence
  Description of Artificial Sequence: Synthetic oligonucleotide
  Antisense strand to SEQ ID NO: 1498596
auauccaaugucgagagag

SEQ ID NO: 1498598 - RNA, 19 nt, Artificial Sequence
  Description of Artificial Sequence: Synthetic oligonucleotide
  Sense strand starting at position 2452 of SEQ ID NO: 1244568
agaaauaugugagucacau

SEQ ID NO: 1498599 - RNA, 19 nt, Artificial Sequence
  Description of Artificial Sequence: Synthetic oligonucleotide
  Antisense strand to SEQ ID NO: 1498598
augugacucacauauuucu

SEQ ID NO: 1498600 - RNA, 19 nt, Artificial Sequence
  Description of Artificial Sequence: Synthetic oligonucleotide
  Sense strand starting at position 2458 of SEQ ID NO: 1244568
augugagucacauauguag

SEQ ID NO: 1498601 - RNA, 19 nt, Artificial Sequence
  Description of Artificial Sequence: Synthetic oligonucleotide
  Antisense strand to SEQ ID NO: 1498600
cuacauaugugacucacau

SEQ ID NO: 1498602 - RNA, 19 nt, Artificial Sequence
  Description of Artificial Sequence: Synthetic oligonucleotide
  Sense strand starting at position 2464 of SEQ ID NO: 1244568
gucacauauguagguugaa

SEQ ID NO: 1498603 - RNA, 19 nt, Artificial Sequence
  Description of Artificial Sequence: Synthetic oligonucleotide
  Antisense strand to SEQ ID NO: 1498602
uucaaccuacauaugugac

SEQ ID NO: 1498604 - RNA, 19 nt, Artificial Sequence
  Description of Artificial Sequence: Synthetic oligonucleotide
  Sense strand starting at position 2465 of SEQ ID NO: 1244568
ucacauauguagguugaaa

SEQ ID NO: 1498605 - RNA, 19 nt, Artificial Sequence
  Description of Artificial Sequence: Synthetic oligonucleotide
  Antisense strand to SEQ ID NO: 1498604
uuucaaccuacauauguga

SEQ ID NO: 1498606 - RNA, 19 nt, Artificial Sequence
  Description of Artificial Sequence: Synthetic oligonucleotide
  Sense strand starting at position 2467 of SEQ ID NO: 1244568
acauauguagguugaaauc

SEQ ID NO: 1498607 - RNA, 19 nt, Artificial Sequence
  Description of Artificial Sequence: Synthetic oligonucleotide
  Antisense strand to SEQ ID NO: 1498606
gauuucaaccuacauaugu

SEQ ID NO: 1498608 - RNA, 19 nt, Artificial Sequence
  Description of Artificial Sequence: Synthetic oligonucleotide
  Sense strand starting at position 2719 of SEQ ID NO: 1244568
uucuguauugaagagcaca

SEQ ID NO: 1498609 - RNA, 19 nt, Artificial Sequence
  Description of Artificial Sequence: Synthetic oligonucleotide
  Antisense strand to SEQ ID NO: 1498608
ugugcucuucaauacagaa

SEQ ID NO: 1498610 - RNA, 19 nt, Artificial Sequence
  Description of Artificial Sequence: Synthetic oligonucleotide
  Sense strand starting at position 2730 of SEQ ID NO: 1244568
agagcacagcucugggaaa

SEQ ID NO: 1498611 - RNA, 19 nt, Artificial Sequence
  Description of Artificial Sequence: Synthetic oligonucleotide
  Antisense strand to SEQ ID NO: 1498610
uuucccagagcugugcucu

SEQ ID NO: 1498612 - RNA, 19 nt, Artificial Sequence
  Description of Artificial Sequence: Synthetic oligonucleotide
  Sense strand starting at position 2977 of SEQ ID NO: 1244568
agagccuugagagguauaa

SEQ ID NO: 1498613 - RNA, 19 nt, Artificial Sequence
  Description of Artificial Sequence: Synthetic oligonucleotide
  Antisense strand to SEQ ID NO: 1498612
uuauaccucucaaggcucu

SEQ ID NO: 1498614 - RNA, 19 nt, Artificial Sequence
  Description of Artificial Sequence: Synthetic oligonucleotide
  Sense strand starting at position 3066 of SEQ ID NO: 1244568
ugaggaggguuguuaguaa

SEQ ID NO: 1498615 - RNA, 19 nt, Artificial Sequence
  Description of Artificial Sequence: Synthetic oligonucleotide
  Antisense strand to SEQ ID NO: 1498614
uuacuaacaacccuccuca

SEQ ID NO: 1498616 - RNA, 19 nt, Artificial Sequence
  Description of Artificial Sequence: Synthetic oligonucleotide
  Sense strand starting at position 3134 of SEQ ID NO: 1244568
ucgcucuugcuguugaaca

SEQ ID NO: 1498617 - RNA, 19 nt, Artificial Sequence
  Description of Artificial Sequence: Synthetic oligonucleotide
  Antisense strand to SEQ ID NO: 1498616
uguucaacagcaagagcga

SEQ ID NO: 1498618 - RNA, 19 nt, Artificial Sequence
  Description of Artificial Sequence: Synthetic oligonucleotide
  Sense strand starting at position 3248 of SEQ ID NO: 1244568
ggaucagagaccugggcuu

SEQ ID NO: 1498619 - RNA, 19 nt, Artificial Sequence
  Description of Artificial Sequence: Synthetic oligonucleotide
  Antisense strand to SEQ ID NO: 1498618
aagcccaggucucugaucc

SEQ ID NO: 1498620 - RNA, 19 nt, Artificial Sequence
  Description of Artificial Sequence: Synthetic oligonucleotide
  Sense strand starting at position 3281 of SEQ ID NO: 1244568
gcuccuuacuaacuggaau

SEQ ID NO: 1498621 - RNA, 19 nt, Artificial Sequence
  Description of Artificial Sequence: Synthetic oligonucleotide
  Antisense strand to SEQ ID NO: 1498620
auuccaguuaguaaggagc

SEQ ID NO: 1498622 - RNA, 19 nt, Artificial Sequence
  Description of Artificial Sequence: Synthetic oligonucleotide
  Sense strand starting at position 3293 of SEQ ID NO: 1244568
cuggaaucuugggcaaauu

SEQ ID NO: 1498623 - RNA, 19 nt, Artificial Sequence
  Description of Artificial Sequence: Synthetic oligonucleotide
  Antisense strand to SEQ ID NO: 1498622
aauuugcccaagauuccag

SEQ ID NO: 1498624 - RNA, 19 nt, Artificial Sequence
  Description of Artificial Sequence: Synthetic oligonucleotide
  Sense strand starting at position 3301 of SEQ ID NO: 1244568
uugggcaaauuauugaaau

SEQ ID NO: 1498625 - RNA, 19 nt, Artificial Sequence
  Description of Artificial Sequence: Synthetic oligonucleotide
  Antisense strand to SEQ ID NO: 1498624
auuucaauaauuugcccaa

SEQ ID NO: 1498626 - RNA, 19 nt, Artificial Sequence
  Description of Artificial Sequence: Synthetic oligonucleotide
  Sense strand starting at position 3392 of SEQ ID NO: 1244568
uaguguugugaauauuaga

SEQ ID NO: 1498627 - RNA, 19 nt, Artificial Sequence
  Description of Artificial Sequence: Synthetic oligonucleotide
  Antisense strand to SEQ ID NO: 1498626
ucuaauauucacaacacua

SEQ ID NO: 1498628 - RNA, 19 nt, Artificial Sequence
  Description of Artificial Sequence: Synthetic oligonucleotide
  Sense strand starting at position 3463 of SEQ ID NO: 1244568
gccacugucagguaaguaa

SEQ ID NO: 1498629 - RNA, 19 nt, Artificial Sequence
  Description of Artificial Sequence: Synthetic oligonucleotide
  Antisense strand to SEQ ID NO: 1498628
uuacuuaccugacaguggc

SEQ ID NO: 1498630 - RNA, 19 nt, Artificial Sequence
  Description of Artificial Sequence: Synthetic oligonucleotide
  Sense strand starting at position 3503 of SEQ ID NO: 1244568
ugaagagguuacuccuuaa

SEQ ID NO: 1498631 - RNA, 19 nt, Artificial Sequence
  Description of Artificial Sequence: Synthetic oligonucleotide
  Antisense strand to SEQ ID NO: 1498630
uuaaggaguaaccucuuca

SEQ ID NO: 1498632 - RNA, 19 nt, Artificial Sequence
  Description of Artificial Sequence: Synthetic oligonucleotide
  Sense strand starting at position 3506 of SEQ ID NO: 1244568
agagguuacuccuuaaauu

SEQ ID NO: 1498633 - RNA, 19 nt, Artificial Sequence
  Description of Artificial Sequence: Synthetic oligonucleotide
  Antisense strand to SEQ ID NO: 1498632
aauuuaaggaguaaccucu

SEQ ID NO: 1498634 - RNA, 19 nt, Artificial Sequence
  Description of Artificial Sequence: Synthetic oligonucleotide
  Sense strand starting at position 3639 of SEQ ID NO: 1244568
acauuucccugggaacuuu

SEQ ID NO: 1498635 - RNA, 19 nt, Artificial Sequence
  Description of Artificial Sequence: Synthetic oligonucleotide
  Antisense strand to SEQ ID NO: 1498634
aaaguucccagggaaaugu

SEQ ID NO: 1498636 - RNA, 19 nt, Artificial Sequence
  Description of Artificial Sequence: Synthetic oligonucleotide
  Sense strand starting at position 3659 of SEQ ID NO: 1244568
gagauccgauuugaaacuu

SEQ ID NO: 1498637 - RNA, 19 nt, Artificial Sequence
  Description of Artificial Sequence: Synthetic oligonucleotide
  Antisense strand to SEQ ID NO: 1498636
aaguuucaaaucggaucuc

SEQ ID NO: 1498638 - RNA, 19 nt, Artificial Sequence
  Description of Artificial Sequence: Synthetic oligonucleotide
  Sense strand starting at position 3879 of SEQ ID NO: 1244568
ccauccaaguguuuaauau

SEQ ID NO: 1498639 - RNA, 19 nt, Artificial Sequence
  Description of Artificial Sequence: Synthetic oligonucleotide
  Antisense strand to SEQ ID NO: 1498638
auauuaaacacuuggaugg

SEQ ID NO: 1498640 - RNA, 19 nt, Artificial Sequence
  Description of Artificial Sequence: Synthetic oligonucleotide
  Sense strand starting at position 3983 of SEQ ID NO: 1244568
agucacaugugaucacuga

SEQ ID NO: 1498641 - RNA, 19 nt, Artificial Sequence
  Description of Artificial Sequence: Synthetic oligonucleotide
  Antisense strand to SEQ ID NO: 1498640
ucagugaucacaugugacu

SEQ ID NO: 1498642 - RNA, 19 nt, Artificial Sequence
  Description of Artificial Sequence: Synthetic oligonucleotide
  Sense strand starting at position 6 of SEQ ID NO: 1244569
guaaguuaacugggagaga

SEQ ID NO: 1498643 - RNA, 19 nt, Artificial Sequence
  Description of Artificial Sequence: Synthetic oligonucleotide
  Antisense strand to SEQ ID NO: 1498642
ucucucccaguuaacuuac

SEQ ID NO: 1498644 - RNA, 19 nt, Artificial Sequence
  Description of Artificial Sequence: Synthetic oligonucleotide
  Sense strand starting at position 86 of SEQ ID NO: 1244569
gcaugacggguugauagau

SEQ ID NO: 1498645 - RNA, 19 nt, Artificial Sequence
  Description of Artificial Sequence: Synthetic oligonucleotide
  Antisense strand to SEQ ID NO: 1498644
aucuaucaacccgucaugc

SEQ ID NO: 1498646 - RNA, 19 nt, Artificial Sequence
  Description of Artificial Sequence: Synthetic oligonucleotide
  Sense strand starting at position 534 of SEQ ID NO: 1244569
gcaggacuuguugagugau

SEQ ID NO: 1498647 - RNA, 19 nt, Artificial Sequence
  Description of Artificial Sequence: Synthetic oligonucleotide
  Antisense strand to SEQ ID NO: 1498646
aucacucaacaaguccugc

SEQ ID NO: 1498648 - RNA, 19 nt, Artificial Sequence
  Description of Artificial Sequence: Synthetic oligonucleotide
  Sense strand starting at position 537 of SEQ ID NO: 1244569
ggacuuguugagugauuga

SEQ ID NO: 1498649 - RNA, 19 nt, Artificial Sequence
  Description of Artificial Sequence: Synthetic oligonucleotide
  Antisense strand to SEQ ID NO: 1498648
ucaaucacucaacaagucc

SEQ ID NO: 1498650 - RNA, 19 nt, Artificial Sequence
  Description of Artificial Sequence: Synthetic oligonucleotide
  Sense strand starting at position 540 of SEQ ID NO: 1244569
cuuguugagugauugaaua

SEQ ID NO: 1498651 - RNA, 19 nt, Artificial Sequence
  Description of Artificial Sequence: Synthetic oligonucleotide
  Antisense strand to SEQ ID NO: 1498650
uauucaaucacucaacaag

SEQ ID NO: 1498652 - RNA, 19 nt, Artificial Sequence
  Description of Artificial Sequence: Synthetic oligonucleotide
  Sense strand starting at position 542 of SEQ ID NO: 1244569
uguugagugauugaauauu

SEQ ID NO: 1498653 - RNA, 19 nt, Artificial Sequence
  Description of Artificial Sequence: Synthetic oligonucleotide
  Antisense strand to SEQ ID NO: 1498652
aauauucaaucacucaaca

SEQ ID NO: 1498654 - RNA, 19 nt, Artificial Sequence
  Description of Artificial Sequence: Synthetic oligonucleotide
  Sense strand starting at position 550 of SEQ ID NO: 1244569
gauugaauauuggcuggaa

SEQ ID NO: 1498655 - RNA, 19 nt, Artificial Sequence
  Description of Artificial Sequence: Synthetic oligonucleotide
  Antisense strand to SEQ ID NO: 1498654
uuccagccaauauucaauc

SEQ ID NO: 1498656 - RNA, 19 nt, Artificial Sequence
  Description of Artificial Sequence: Synthetic oligonucleotide
  Sense strand starting at position 551 of SEQ ID NO: 1244569
auugaauauuggcuggaaa

SEQ ID NO: 1498657 - RNA, 19 nt, Artificial Sequence
  Description of Artificial Sequence: Synthetic oligonucleotide
  Antisense strand to SEQ ID NO: 1498656
uuuccagccaauauucaau

SEQ ID NO: 1498658 - RNA, 19 nt, Artificial Sequence
  Description of Artificial Sequence: Synthetic oligonucleotide
  Sense strand starting at position 553 of SEQ ID NO: 1244569
ugaauauuggcuggaaagg

SEQ ID NO: 1498659 - RNA, 19 nt, Artificial Sequence
  Description of Artificial Sequence: Synthetic oligonucleotide
  Antisense strand to SEQ ID NO: 1498658
ccuuuccagccaauauuca

SEQ ID NO: 1498660 - RNA, 19 nt, Artificial Sequence
  Description of Artificial Sequence: Synthetic oligonucleotide
  Sense strand starting at position 588 of SEQ ID NO: 1244569
agcuguaaccuggguacau

SEQ ID NO: 1498661 - RNA, 19 nt, Artificial Sequence
  Description of Artificial Sequence: Synthetic oligonucleotide
  Antisense strand to SEQ ID NO: 1498660
auguacccagguuacagcu

SEQ ID NO: 1498662 - RNA, 19 nt, Artificial Sequence
  Description of Artificial Sequence: Synthetic oligonucleotide
  Sense strand starting at position 643 of SEQ ID NO: 1244569
uugauauccuccuugguaa

SEQ ID NO: 1498663 - RNA, 19 nt, Artificial Sequence
  Description of Artificial Sequence: Synthetic oligonucleotide
  Antisense strand to SEQ ID NO: 1498662
uuaccaaggaggauaucaa

SEQ ID NO: 1498664 - RNA, 19 nt, Artificial Sequence
  Description of Artificial Sequence: Synthetic oligonucleotide
  Sense strand starting at position 644 of SEQ ID NO: 1244569
ugauauccuccuugguaag

SEQ ID NO: 1498665 - RNA, 19 nt, Artificial Sequence
  Description of Artificial Sequence: Synthetic oligonucleotide
  Antisense strand to SEQ ID NO: 1498664
cuuaccaaggaggauauca

SEQ ID NO: 1498666 - RNA, 19 nt, Artificial Sequence
  Description of Artificial Sequence: Synthetic oligonucleotide
  Sense strand starting at position 704 of SEQ ID NO: 1244569
aaguaauagagcgggaaga

SEQ ID NO: 1498667 - RNA, 19 nt, Artificial Sequence
  Description of Artificial Sequence: Synthetic oligonucleotide
  Antisense strand to SEQ ID NO: 1498666
ucuucccgcucuauuacuu

SEQ ID NO: 1498668 - RNA, 19 nt, Artificial Sequence
  Description of Artificial Sequence: Synthetic oligonucleotide
  Sense strand starting at position 735 of SEQ ID NO: 1244569
ggaguccugccagauagag

SEQ ID NO: 1498669 - RNA, 19 nt, Artificial Sequence
  Description of Artificial Sequence: Synthetic oligonucleotide
  Antisense strand to SEQ ID NO: 1498668
cucuaucuggcaggacucc

SEQ ID NO: 1498670 - RNA, 19 nt, Artificial Sequence
  Description of Artificial Sequence: Synthetic oligonucleotide
  Sense strand starting at position 747 of SEQ ID NO: 1244569
gauagagagccucauucuu

SEQ ID NO: 1498671 - RNA, 19 nt, Artificial Sequence
  Description of Artificial Sequence: Synthetic oligonucleotide
  Antisense strand to SEQ ID NO: 1498670
aagaaugaggcucucuauc

SEQ ID NO: 1498672 - RNA, 19 nt, Artificial Sequence
  Description of Artificial Sequence: Synthetic oligonucleotide
  Sense strand starting at position 749 of SEQ ID NO: 1244569
uagagagccucauucuuag

SEQ ID NO: 1498673 - RNA, 19 nt, Artificial Sequence
  Description of Artificial Sequence: Synthetic oligonucleotide
  Antisense strand to SEQ ID NO: 1498672
cuaagaaugaggcucucua

SEQ ID NO: 1498674 - RNA, 19 nt, Artificial Sequence
  Description of Artificial Sequence: Synthetic oligonucleotide
  Sense strand starting at position 1032 of SEQ ID NO: 1244569
ugcggugauccucaauaag

SEQ ID NO: 1498675 - RNA, 19 nt, Artificial Sequence
  Description of Artificial Sequence: Synthetic oligonucleotide
  Antisense strand to SEQ ID NO: 1498674
cuuauugaggaucaccgca

SEQ ID NO: 1498676 - RNA, 19 nt, Artificial Sequence
  Description of Artificial Sequence: Synthetic oligonucleotide
  Sense strand starting at position 1043 of SEQ ID NO: 1244569
ucaauaagcacguggacau

SEQ ID NO: 1498677 - RNA, 19 nt, Artificial Sequence
  Description of Artificial Sequence: Synthetic oligonucleotide
  Antisense strand to SEQ ID NO: 1498676
auguccacgugcuuauuga

SEQ ID NO: 1498678 - RNA, 19 nt, Artificial Sequence
  Description of Artificial Sequence: Synthetic oligonucleotide
  Sense strand starting at position 1316 of SEQ ID NO: 1244569
ggaagaauagaacgugcaa

SEQ ID NO: 1498679 - RNA, 19 nt, Artificial Sequence
  Description of Artificial Sequence: Synthetic oligonucleotide
  Antisense strand to SEQ ID NO: 1498678
uugcacguucuauucuucc

SEQ ID NO: 1498680 - RNA, 19 nt, Artificial Sequence
  Description of Artificial Sequence: Synthetic oligonucleotide
  Sense strand starting at position 1612 of SEQ ID NO: 1244569
uccuuauauggucgggaga

SEQ ID NO: 1498681 - RNA, 19 nt, Artificial Sequence
  Description of Artificial Sequence: Synthetic oligonucleotide
  Antisense strand to SEQ ID NO: 1498680
ucucccgaccauauaagga

SEQ ID NO: 1498682 - RNA, 19 nt, Artificial Sequence
  Description of Artificial Sequence: Synthetic oligonucleotide
  Sense strand starting at position 1670 of SEQ ID NO: 1244569
ggaucugcacucuggagau

SEQ ID NO: 1498683 - RNA, 19 nt, Artificial Sequence
  Description of Artificial Sequence: Synthetic oligonucleotide
  Antisense strand to SEQ ID NO: 1498682
aucuccagagugcagaucc

SEQ ID NO: 1498684 - RNA, 19 nt, Artificial Sequence
  Description of Artificial Sequence: Synthetic oligonucleotide
  Sense strand starting at position 2033 of SEQ ID NO: 1244569
ugguguuuccgggaagaug

SEQ ID NO: 1498685 - RNA, 19 nt, Artificial Sequence
  Description of Artificial Sequence: Synthetic oligonucleotide
  Antisense strand to SEQ ID NO: 1498684
caucuucccggaaacacca

SEQ ID NO: 1498686 - RNA, 19 nt, Artificial Sequence
  Description of Artificial Sequence: Synthetic oligonucleotide
  Sense strand starting at position 2566 of SEQ ID NO: 1244569
ccgcgaggaauaugggaau

SEQ ID NO: 1498687 - RNA, 19 nt, Artificial Sequence
  Description of Artificial Sequence: Synthetic oligonucleotide
  Antisense strand to SEQ ID NO: 1498686
auucccauauuccucgcgg

SEQ ID NO: 1498688 - RNA, 19 nt, Artificial Sequence
  Description of Artificial Sequence: Synthetic oligonucleotide
  Sense strand starting at position 2779 of SEQ ID NO: 1244569
cgugaugacgugaguggua

SEQ ID NO: 1498689 - RNA, 19 nt, Artificial Sequence
  Description of Artificial Sequence: Synthetic oligonucleotide
  Antisense strand to SEQ ID NO: 1498688
uaccacucacgucaucacg

SEQ ID NO: 1498690 - RNA, 19 nt, Artificial Sequence
  Description of Artificial Sequence: Synthetic oligonucleotide
  Sense strand starting at position 2781 of SEQ ID NO: 1244569
ugaugacgugagugguaga

SEQ ID NO: 1498691 - RNA, 19 nt, Artificial Sequence
  Description of Artificial Sequence: Synthetic oligonucleotide
  Antisense strand to SEQ ID NO: 1498690
ucuaccacucacgucauca

SEQ ID NO: 1498692 - RNA, 19 nt, Artificial Sequence
  Description of Artificial Sequence: Synthetic oligonucleotide
  Sense strand starting at position 2865 of SEQ ID NO: 1244569
ucaccuuucccucacguau

SEQ ID NO: 1498693 - RNA, 19 nt, Artificial Sequence
  Description of Artificial Sequence: Synthetic oligonucleotide
  Antisense strand to SEQ ID NO: 1498692
auacgugagggaaagguga

SEQ ID NO: 1498694 - RNA, 19 nt, Artificial Sequence
  Description of Artificial Sequence: Synthetic oligonucleotide
  Sense strand starting at position 2893 of SEQ ID NO: 1244569
gaacacuuuggcugcuaga

SEQ ID NO: 1498695 - RNA, 19 nt, Artificial Sequence
  Description of Artificial Sequence: Synthetic oligonucleotide
  Antisense strand to SEQ ID NO: 1498694
ucuagcagccaaaguguuc

SEQ ID NO: 1498696 - RNA, 19 nt, Artificial Sequence
  Description of Artificial Sequence: Synthetic oligonucleotide
  Sense strand starting at position 2951 of SEQ ID NO: 1244569
aggaaagugaguuggaauc

SEQ ID NO: 1498697 - RNA, 19 nt, Artificial Sequence
  Description of Artificial Sequence: Synthetic oligonucleotide
  Antisense strand to SEQ ID NO: 1498696
gauuccaacucacuuuccu

SEQ ID NO: 1498698 - RNA, 19 nt, Artificial Sequence
  Description of Artificial Sequence: Synthetic oligonucleotide
  Sense strand starting at position 2958 of SEQ ID NO: 1244569
ugaguuggaauccguggaa

SEQ ID NO: 1498699 - RNA, 19 nt, Artificial Sequence
  Description of Artificial Sequence: Synthetic oligonucleotide
  Antisense strand to SEQ ID NO: 1498698
uuccacggauuccaacuca

SEQ ID NO: 1498700 - RNA, 19 nt, Artificial Sequence
  Description of Artificial Sequence: Synthetic oligonucleotide
  Sense strand starting at position 2961 of SEQ ID NO: 1244569
guuggaauccguggaaauu

SEQ ID NO: 1498701 - RNA, 19 nt, Artificial Sequence
  Description of Artificial Sequence: Synthetic oligonucleotide
  Antisense strand to SEQ ID NO: 1498700
aauuuccacggauuccaac

SEQ ID NO: 1498702 - RNA, 19 nt, Artificial Sequence
  Description of Artificial Sequence: Synthetic oligonucleotide
  Sense strand starting at position 3005 of SEQ ID NO: 1244569
ccugaaaucuaggcagucu

SEQ ID NO: 1498703 - RNA, 19 nt, Artificial Sequence
  Description of Artificial Sequence: Synthetic oligonucleotide
  Antisense strand to SEQ ID NO: 1498702
agacugccuagauuucagg

SEQ ID NO: 1498704 - RNA, 19 nt, Artificial Sequence
  Description of Artificial Sequence: Synthetic oligonucleotide
  Sense strand starting at position 3054 of SEQ ID NO: 1244569
acagcagggucucuuagua

SEQ ID NO: 1498705 - RNA, 19 nt, Artificial Sequence
  Description of Artificial Sequence: Synthetic oligonucleotide
  Antisense strand to SEQ ID NO: 1498704
uacuaagagacccugcugu

SEQ ID NO: 1498706 - RNA, 19 nt, Artificial Sequence
  Description of Artificial Sequence: Synthetic oligonucleotide
  Sense strand starting at position 3062 of SEQ ID NO: 1244569
gucucuuaguaacugaaau

SEQ ID NO: 1498707 - RNA, 19 nt, Artificial Sequence
  Description of Artificial Sequence: Synthetic oligonucleotide
  Antisense strand to SEQ ID NO: 1498706
auuucaguuacuaagagac

SEQ ID NO: 1498708 - RNA, 19 nt, Artificial Sequence
  Description of Artificial Sequence: Synthetic oligonucleotide
  Sense strand starting at position 3275 of SEQ ID NO: 1244569
ccugcuuaaucauuaggca

SEQ ID NO: 1498709 - RNA, 19 nt, Artificial Sequence
  Description of Artificial Sequence: Synthetic oligonucleotide
  Antisense strand to SEQ ID NO: 1498708
ugccuaaugauuaagcagg

SEQ ID NO: 1498710 - RNA, 19 nt, Artificial Sequence
  Description of Artificial Sequence: Synthetic oligonucleotide
  Sense strand starting at position 3276 of SEQ ID NO: 1244569
cugcuuaaucauuaggcau

SEQ ID NO: 1498711 - RNA, 19 nt, Artificial Sequence
  Description of Artificial Sequence: Synthetic oligonucleotide
  Antisense strand to SEQ ID NO: 1498710
augccuaaugauuaagcag

SEQ ID NO: 1498712 - RNA, 19 nt, Artificial Sequence
  Description of Artificial Sequence: Synthetic oligonucleotide
  Sense strand starting at position 3352 of SEQ ID NO: 1244569
uagugaaacuauguauaag

SEQ ID NO: 1498713 - RNA, 19 nt, Artificial Sequence
  Description of Artificial Sequence: Synthetic oligonucleotide
  Antisense strand to SEQ ID NO: 1498712
cuuauacauaguuucacua

SEQ ID NO: 1498714 - RNA, 19 nt, Artificial Sequence
  Description of Artificial Sequence: Synthetic oligonucleotide
  Sense strand starting at position 3378 of SEQ ID NO: 1244569
guaaacguuuccuuacaag

SEQ ID NO: 1498715 - RNA, 19 nt, Artificial Sequence
  Description of Artificial Sequence: Synthetic oligonucleotide
  Antisense strand to SEQ ID NO: 1498714
cuuguaaggaaacguuuac

SEQ ID NO: 1498716 - RNA, 19 nt, Artificial Sequence
  Description of Artificial Sequence: Synthetic oligonucleotide
  Sense strand starting at position 3420 of SEQ ID NO: 1244569
aagugcuggcuuuauugga

SEQ ID NO: 1498717 - RNA, 19 nt, Artificial Sequence
  Description of Artificial Sequence: Synthetic oligonucleotide
  Antisense strand to SEQ ID NO: 1498716
uccaauaaagccagcacuu

SEQ ID NO: 1498718 - RNA, 19 nt, Artificial Sequence
  Description of Artificial Sequence: Synthetic oligonucleotide
  Sense strand starting at position 3516 of SEQ ID NO: 1244569
ggcgcaauuucugcuuacu

SEQ ID NO: 1498719 - RNA, 19 nt, Artificial Sequence
  Description of Artificial Sequence: Synthetic oligonucleotide
  Antisense strand to SEQ ID NO: 1498718
aguaagcagaaauugcgcc

SEQ ID NO: 1498720 - RNA, 19 nt, Artificial Sequence
  Description of Artificial Sequence: Synthetic oligonucleotide
  Sense strand starting at position 3728 of SEQ ID NO: 1244569
ggauuagagaagugagcca

SEQ ID NO: 1498721 - RNA, 19 nt, Artificial Sequence
  Description of Artificial Sequence: Synthetic oligonucleotide
  Antisense strand to SEQ ID NO: 1498720
uggcucacuucucuaaucc

SEQ ID NO: 1498722 - RNA, 19 nt, Artificial Sequence
  Description of Artificial Sequence: Synthetic oligonucleotide
  Sense strand starting at position 6 of SEQ ID NO: 1244570
guaaguuaacugggagaga

SEQ ID NO: 1498723 - RNA, 19 nt, Artificial Sequence
  Description of Artificial Sequence: Synthetic oligonucleotide
  Antisense strand to SEQ ID NO: 1498722
ucucucccaguuaacuuac

SEQ ID NO: 1498724 - RNA, 19 nt, Artificial Sequence
  Description of Artificial Sequence: Synthetic oligonucleotide
  Sense strand starting at position 86 of SEQ ID NO: 1244570
gcaugacggguugauagau

SEQ ID NO: 1498725 - RNA, 19 nt, Artificial Sequence
  Description of Artificial Sequence: Synthetic oligonucleotide
  Antisense strand to SEQ ID NO: 1498724
aucuaucaacccgucaugc

SEQ ID NO: 1498726 - RNA, 19 nt, Artificial Sequence
  Description of Artificial Sequence: Synthetic oligonucleotide
  Sense strand starting at position 534 of SEQ ID NO: 1244570
gcaggacuuguugagugau

SEQ ID NO: 1498727 - RNA, 19 nt, Artificial Sequence
  Description of Artificial Sequence: Synthetic oligonucleotide
  Antisense strand to SEQ ID NO: 1498726
aucacucaacaaguccugc

SEQ ID NO: 1498728 - RNA, 19 nt, Artificial Sequence
  Description of Artificial Sequence: Synthetic oligonucleotide
  Sense strand starting at position 537 of SEQ ID NO: 1244570
ggacuuguugagugauuga

SEQ ID NO: 1498729 - RNA, 19 nt, Artificial Sequence
  Description of Artificial Sequence: Synthetic oligonucleotide
  Antisense strand to SEQ ID NO: 1498728
ucaaucacucaacaagucc

SEQ ID NO: 1498730 - RNA, 19 nt, Artificial Sequence
  Description of Artificial Sequence: Synthetic oligonucleotide
  Sense strand starting at position 540 of SEQ ID NO: 1244570
cuuguugagugauugaaua

SEQ ID NO: 1498731 - RNA, 19 nt, Artificial Sequence
  Description of Artificial Sequence: Synthetic oligonucleotide
  Antisense strand to SEQ ID NO: 1498730
uauucaaucacucaacaag

SEQ ID NO: 1498732 - RNA, 19 nt, Artificial Sequence
  Description of Artificial Sequence: Synthetic oligonucleotide
  Sense strand starting at position 542 of SEQ ID NO: 1244570
uguugagugauugaauauu

SEQ ID NO: 1498733 - RNA, 19 nt, Artificial Sequence
  Description of Artificial Sequence: Synthetic oligonucleotide
  Antisense strand to SEQ ID NO: 1498732
aauauucaaucacucaaca

SEQ ID NO: 1498734 - RNA, 19 nt, Artificial Sequence
  Description of Artificial Sequence: Synthetic oligonucleotide
  Sense strand starting at position 550 of SEQ ID NO: 1244570
gauugaauauuggcuggaa

SEQ ID NO: 1498735 - RNA, 19 nt, Artificial Sequence
  Description of Artificial Sequence: Synthetic oligonucleotide
  Antisense strand to SEQ ID NO: 1498734
uuccagccaauauucaauc

SEQ ID NO: 1498736 - RNA, 19 nt, Artificial Sequence
  Description of Artificial Sequence: Synthetic oligonucleotide
  Sense strand starting at position 551 of SEQ ID NO: 1244570
auugaauauuggcuggaaa

SEQ ID NO: 1498737 - RNA, 19 nt, Artificial Sequence
  Description of Artificial Sequence: Synthetic oligonucleotide
  Antisense strand to SEQ ID NO: 1498736
uuuccagccaauauucaau

SEQ ID NO: 1498738 - RNA, 19 nt, Artificial Sequence
  Description of Artificial Sequence: Synthetic oligonucleotide
  Sense strand starting at position 553 of SEQ ID NO: 1244570
ugaauauuggcuggaaagg

SEQ ID NO: 1498739 - RNA, 19 nt, Artificial Sequence
  Description of Artificial Sequence: Synthetic oligonucleotide
  Antisense strand to SEQ ID NO: 1498738
ccuuuccagccaauauuca

SEQ ID NO: 1498740 - RNA, 19 nt, Artificial Sequence
  Description of Artificial Sequence: Synthetic oligonucleotide
  Sense strand starting at position 588 of SEQ ID NO: 1244570
agcuguaaccuggguacau

SEQ ID NO: 1498741 - RNA, 19 nt, Artificial Sequence
  Description of Artificial Sequence: Synthetic oligonucleotide
  Antisense strand to SEQ ID NO: 1498740
auguacccagguuacagcu

SEQ ID NO: 1498742 - RNA, 19 nt, Artificial Sequence
  Description of Artificial Sequence: Synthetic oligonucleotide
  Sense strand starting at position 643 of SEQ ID NO: 1244570
uugauauccuccuugguaa

SEQ ID NO: 1498743 - RNA, 19 nt, Artificial Sequence
  Description of Artificial Sequence: Synthetic oligonucleotide
  Antisense strand to SEQ ID NO: 1498742
uuaccaaggaggauaucaa

SEQ ID NO: 1498744 - RNA, 19 nt, Artificial Sequence
  Description of Artificial Sequence: Synthetic oligonucleotide
  Sense strand starting at position 644 of SEQ ID NO: 1244570
ugauauccuccuugguaag

SEQ ID NO: 1498745 - RNA, 19 nt, Artificial Sequence
  Description of Artificial Sequence: Synthetic oligonucleotide
  Antisense strand to SEQ ID NO: 1498744
cuuaccaaggaggauauca

SEQ ID NO: 1498746 - RNA, 19 nt, Artificial Sequence
  Description of Artificial Sequence: Synthetic oligonucleotide
  Sense strand starting at position 704 of SEQ ID NO: 1244570
aaguaauagagcgggaaga

SEQ ID NO: 1498747 - RNA, 19 nt, Artificial Sequence
  Description of Artificial Sequence: Synthetic oligonucleotide
  Antisense strand to SEQ ID NO: 1498746
ucuucccgcucuauuacuu

SEQ ID NO: 1498748 - RNA, 19 nt, Artificial Sequence
  Description of Artificial Sequence: Synthetic oligonucleotide
  Sense strand starting at position 735 of SEQ ID NO: 1244570
ggaguccugccagauagag

SEQ ID NO: 1498749 - RNA, 19 nt, Artificial Sequence
  Description of Artificial Sequence: Synthetic oligonucleotide
  Antisense strand to SEQ ID NO: 1498748
cucuaucuggcaggacucc

SEQ ID NO: 1498750 - RNA, 19 nt, Artificial Sequence
  Description of Artificial Sequence: Synthetic oligonucleotide
  Sense strand starting at position 747 of SEQ ID NO: 1244570
gauagagagccucauucuu

SEQ ID NO: 1498751 - RNA, 19 nt, Artificial Sequence
  Description of Artificial Sequence: Synthetic oligonucleotide
  Antisense strand to SEQ ID NO: 1498750
aagaaugaggcucucuauc

SEQ ID NO: 1498752 - RNA, 19 nt, Artificial Sequence
  Description of Artificial Sequence: Synthetic oligonucleotide
  Sense strand starting at position 749 of SEQ ID NO: 1244570
uagagagccucauucuuag

SEQ ID NO: 1498753 - RNA, 19 nt, Artificial Sequence
  Description of Artificial Sequence: Synthetic oligonucleotide
  Antisense strand to SEQ ID NO: 1498752
cuaagaaugaggcucucua

SEQ ID NO: 1498754 - RNA, 19 nt, Artificial Sequence
  Description of Artificial Sequence: Synthetic oligonucleotide
  Sense strand starting at position 1032 of SEQ ID NO: 1244570
ugcggugauccucaauaag

SEQ ID NO: 1498755 - RNA, 19 nt, Artificial Sequence
  Description of Artificial Sequence: Synthetic oligonucleotide
  Antisense strand to SEQ ID NO: 1498754
cuuauugaggaucaccgca

SEQ ID NO: 1498756 - RNA, 19 nt, Artificial Sequence
  Description of Artificial Sequence: Synthetic oligonucleotide
  Sense strand starting at position 1043 of SEQ ID NO: 1244570
ucaauaagcacguggacau

SEQ ID NO: 1498757 - RNA, 19 nt, Artificial Sequence
  Description of Artificial Sequence: Synthetic oligonucleotide
  Antisense strand to SEQ ID NO: 1498756
auguccacgugcuuauuga

SEQ ID NO: 1498758 - RNA, 19 nt, Artificial Sequence
  Description of Artificial Sequence: Synthetic oligonucleotide
  Sense strand starting at position 1316 of SEQ ID NO: 1244570
ggaagaauagaacgugcaa

SEQ ID NO: 1498759 - RNA, 19 nt, Artificial Sequence
  Description of Artificial Sequence: Synthetic oligonucleotide
  Antisense strand to SEQ ID NO: 1498758
uugcacguucuauucuucc

SEQ ID NO: 1498760 - RNA, 19 nt, Artificial Sequence
  Description of Artificial Sequence: Synthetic oligonucleotide
  Sense strand starting at position 1612 of SEQ ID NO: 1244570
uccuuauauggucgggaga

SEQ ID NO: 1498761 - RNA, 19 nt, Artificial Sequence
  Description of Artificial Sequence: Synthetic oligonucleotide
  Antisense strand to SEQ ID NO: 1498760
ucucccgaccauauaagga

SEQ ID NO: 1498762 - RNA, 19 nt, Artificial Sequence
  Description of Artificial Sequence: Synthetic oligonucleotide
  Sense strand starting at position 1670 of SEQ ID NO: 1244570
ggaucugcacucuggagau

SEQ ID NO: 1498763 - RNA, 19 nt, Artificial Sequence
  Description of Artificial Sequence: Synthetic oligonucleotide
  Antisense strand to SEQ ID NO: 1498762
aucuccagagugcagaucc

SEQ ID NO: 1498764 - RNA, 19 nt, Artificial Sequence
  Description of Artificial Sequence: Synthetic oligonucleotide
  Sense strand starting at position 2033 of SEQ ID NO: 1244570
ugguguuuccgggaagaug

SEQ ID NO: 1498765 - RNA, 19 nt, Artificial Sequence
  Description of Artificial Sequence: Synthetic oligonucleotide
  Antisense strand to SEQ ID NO: 1498764
caucuucccggaaacacca

SEQ ID NO: 1498766 - RNA, 19 nt, Artificial Sequence
  Description of Artificial Sequence: Synthetic oligonucleotide
  Sense strand starting at position 2566 of SEQ ID NO: 1244570
ccgcgaggaauaugggaau

SEQ ID NO: 1498767 - RNA, 19 nt, Artificial Sequence
  Description of Artificial Sequence: Synthetic oligonucleotide
  Antisense strand to SEQ ID NO: 1498766
auucccauauuccucgcgg

SEQ ID NO: 1498768 - RNA, 19 nt, Artificial Sequence
  Description of Artificial Sequence: Synthetic oligonucleotide
  Sense strand starting at position 2779 of SEQ ID NO: 1244570
cgugaugacgugaguggua

SEQ ID NO: 1498769 - RNA, 19 nt, Artificial Sequence
  Description of Artificial Sequence: Synthetic oligonucleotide
  Antisense strand to SEQ ID NO: 1498768
uaccacucacgucaucacg

SEQ ID NO: 1498770 - RNA, 19 nt, Artificial Sequence
  Description of Artificial Sequence: Synthetic oligonucleotide
  Sense strand starting at position 2781 of SEQ ID NO: 1244570
ugaugacgugagugguaga

SEQ ID NO: 1498771 - RNA, 19 nt, Artificial Sequence
  Description of Artificial Sequence: Synthetic oligonucleotide
  Antisense strand to SEQ ID NO: 1498770
ucuaccacucacgucauca

SEQ ID NO: 1498772 - RNA, 19 nt, Artificial Sequence
  Description of Artificial Sequence: Synthetic oligonucleotide
  Sense strand starting at position 2865 of SEQ ID NO: 1244570
ucaccuuucccucacguau

SEQ ID NO: 1498773 - RNA, 19 nt, Artificial Sequence
  Description of Artificial Sequence: Synthetic oligonucleotide
  Antisense strand to SEQ ID NO: 1498772
auacgugagggaaagguga

SEQ ID NO: 1498774 - RNA, 19 nt, Artificial Sequence
  Description of Artificial Sequence: Synthetic oligonucleotide
  Sense strand starting at position 2893 of SEQ ID NO: 1244570
gaacacuuuggcugcuaga

SEQ ID NO: 1498775 - RNA, 19 nt, Artificial Sequence
  Description of Artificial Sequence: Synthetic oligonucleotide
  Antisense strand to SEQ ID NO: 1498774
ucuagcagccaaaguguuc

SEQ ID NO: 1498776 - RNA, 19 nt, Artificial Sequence
  Description of Artificial Sequence: Synthetic oligonucleotide
  Sense strand starting at position 2951 of SEQ ID NO: 1244570
aggaaagugaguuggaauc

SEQ ID NO: 1498777 - RNA, 19 nt, Artificial Sequence
  Description of Artificial Sequence: Synthetic oligonucleotide
  Antisense strand to SEQ ID NO: 1498776
gauuccaacucacuuuccu

SEQ ID NO: 1498778 - RNA, 19 nt, Artificial Sequence
  Description of Artificial Sequence: Synthetic oligonucleotide
  Sense strand starting at position 2958 of SEQ ID NO: 1244570
ugaguuggaauccguggaa

SEQ ID NO: 1498779 - RNA, 19 nt, Artificial Sequence
  Description of Artificial Sequence: Synthetic oligonucleotide
  Antisense strand to SEQ ID NO: 1498778
uuccacggauuccaacuca

SEQ ID NO: 1498780 - RNA, 19 nt, Artificial Sequence
  Description of Artificial Sequence: Synthetic oligonucleotide
  Sense strand starting at position 2961 of SEQ ID NO: 1244570
guuggaauccguggaaauu

SEQ ID NO: 1498781 - RNA, 19 nt, Artificial Sequence
  Description of Artificial Sequence: Synthetic oligonucleotide
  Antisense strand to SEQ ID NO: 1498780
aauuuccacggauuccaac

SEQ ID NO: 1498782 - RNA, 19 nt, Artificial Sequence
  Description of Artificial Sequence: Synthetic oligonucleotide
  Sense strand starting at position 3005 of SEQ ID NO: 1244570
ccugaaaucuaggcagucu

SEQ ID NO: 1498783 - RNA, 19 nt, Artificial Sequence
  Description of Artificial Sequence: Synthetic oligonucleotide
  Antisense strand to SEQ ID NO: 1498782
agacugccuagauuucagg

SEQ ID NO: 1498784 - RNA, 19 nt, Artificial Sequence
  Description of Artificial Sequence: Synthetic oligonucleotide
  Sense strand starting at position 3054 of SEQ ID NO: 1244570
acagcagggucucuuagua

SEQ ID NO: 1498785 - RNA, 19 nt, Artificial Sequence
  Description of Artificial Sequence: Synthetic oligonucleotide
  Antisense strand to SEQ ID NO: 1498784
uacuaagagacccugcugu

SEQ ID NO: 1498786 - RNA, 19 nt, Artificial Sequence
  Description of Artificial Sequence: Synthetic oligonucleotide
  Sense strand starting at position 3062 of SEQ ID NO: 1244570
gucucuuaguaacugaaau

SEQ ID NO: 1498787 - RNA, 19 nt, Artificial Sequence
  Description of Artificial Sequence: Synthetic oligonucleotide
  Antisense strand to SEQ ID NO: 1498786
auuucaguuacuaagagac

SEQ ID NO: 1498788 - RNA, 19 nt, Artificial Sequence
  Description of Artificial Sequence: Synthetic oligonucleotide
  Sense strand starting at position 3275 of SEQ ID NO: 1244570
ccugcuuaaucauuaggca

SEQ ID NO: 1498789 - RNA, 19 nt, Artificial Sequence
  Description of Artificial Sequence: Synthetic oligonucleotide
  Antisense strand to SEQ ID NO: 1498788
ugccuaaugauuaagcagg

SEQ ID NO: 1498790 - RNA, 19 nt, Artificial Sequence
  Description of Artificial Sequence: Synthetic oligonucleotide
  Sense strand starting at position 3276 of SEQ ID NO: 1244570
cugcuuaaucauuaggcau

SEQ ID NO: 1498791 - RNA, 19 nt, Artificial Sequence
  Description of Artificial Sequence: Synthetic oligonucleotide
  Antisense strand to SEQ ID NO: 1498790
augccuaaugauuaagcag

SEQ ID NO: 1498792 - RNA, 19 nt, Artificial Sequence
  Description of Artificial Sequence: Synthetic oligonucleotide
  Sense strand starting at position 3352 of SEQ ID NO: 1244570
uagugaaacuauguauaag

SEQ ID NO: 1498793 - RNA, 19 nt, Artificial Sequence
  Description of Artificial Sequence: Synthetic oligonucleotide
  Antisense strand to SEQ ID NO: 1498792
cuuauacauaguuucacua

SEQ ID NO: 1498794 - RNA, 19 nt, Artificial Sequence
  Description of Artificial Sequence: Synthetic oligonucleotide
  Sense strand starting at position 3378 of SEQ ID NO: 1244570
guaaacguuuccuuacaag

SEQ ID NO: 1498795 - RNA, 19 nt, Artificial Sequence
  Description of Artificial Sequence: Synthetic oligonucleotide
  Antisense strand to SEQ ID NO: 1498794
cuuguaaggaaacguuuac

SEQ ID NO: 1498796 - RNA, 19 nt, Artificial Sequence
  Description of Artificial Sequence: Synthetic oligonucleotide
  Sense strand starting at position 3420 of SEQ ID NO: 1244570
aagugcuggcuuuauugga

SEQ ID NO: 1498797 - RNA, 19 nt, Artificial Sequence
  Description of Artificial Sequence: Synthetic oligonucleotide
  Antisense strand to SEQ ID NO: 1498796
uccaauaaagccagcacuu

SEQ ID NO: 1498798 - RNA, 19 nt, Artificial Sequence
  Description of Artificial Sequence: Synthetic oligonucleotide
  Sense strand starting at position 3516 of SEQ ID NO: 1244570
ggcgcaauuucugcuuacu

SEQ ID NO: 1498799 - RNA, 19 nt, Artificial Sequence
  Description of Artificial Sequence: Synthetic oligonucleotide
  Antisense strand to SEQ ID NO: 1498798
aguaagcagaaauugcgcc

SEQ ID NO: 1498800 - RNA, 19 nt, Artificial Sequence
  Description of Artificial Sequence: Synthetic oligonucleotide
  Sense strand starting at position 3728 of SEQ ID NO: 1244570
ggauuagagaagugagcca

SEQ ID NO: 1498801 - RNA, 19 nt, Artificial Sequence
  Description of Artificial Sequence: Synthetic oligonucleotide
  Antisense strand to SEQ ID NO: 1498800
uggcucacuucucuaaucc

SEQ ID NO: 1498802 - RNA, 19 nt, Artificial Sequence
  Description of Artificial Sequence: Synthetic oligonucleotide
  Sense strand starting at position 115 of SEQ ID NO: 1244571
aagaaauggcugggcacau

SEQ ID NO: 1498803 - RNA, 19 nt, Artificial Sequence
  Description of Artificial Sequence: Synthetic oligonucleotide
  Antisense strand to SEQ ID NO: 1498802
augugcccagccauuucuu

SEQ ID NO: 1498804 - RNA, 19 nt, Artificial Sequence
  Description of Artificial Sequence: Synthetic oligonucleotide
  Sense strand starting at position 379 of SEQ ID NO: 1244571
gugcuacgggagugagaau

SEQ ID NO: 1498805 - RNA, 19 nt, Artificial Sequence
  Description of Artificial Sequence: Synthetic oligonucleotide
  Antisense strand to SEQ ID NO: 1498804
auucucacucccguagcac

SEQ ID NO: 1498806 - RNA, 19 nt, Artificial Sequence
  Description of Artificial Sequence: Synthetic oligonucleotide
  Sense strand starting at position 531 of SEQ ID NO: 1244571
guaaguuaacugggagaga

SEQ ID NO: 1498807 - RNA, 19 nt, Artificial Sequence
  Description of Artificial Sequence: Synthetic oligonucleotide
  Antisense strand to SEQ ID NO: 1498806
ucucucccaguuaacuuac

SEQ ID NO: 1498808 - RNA, 19 nt, Artificial Sequence
  Description of Artificial Sequence: Synthetic oligonucleotide
  Sense strand starting at position 611 of SEQ ID NO: 1244571
gcaugacggguugauagau

SEQ ID NO: 1498809 - RNA, 19 nt, Artificial Sequence
  Description of Artificial Sequence: Synthetic oligonucleotide
  Antisense strand to SEQ ID NO: 1498808
aucuaucaacccgucaugc

SEQ ID NO: 1498810 - RNA, 19 nt, Artificial Sequence
  Description of Artificial Sequence: Synthetic oligonucleotide
  Sense strand starting at position 1059 of SEQ ID NO: 1244571
gcaggacuuguugagugau

SEQ ID NO: 1498811 - RNA, 19 nt, Artificial Sequence
  Description of Artificial Sequence: Synthetic oligonucleotide
  Antisense strand to SEQ ID NO: 1498810
aucacucaacaaguccugc

SEQ ID NO: 1498812 - RNA, 19 nt, Artificial Sequence
  Description of Artificial Sequence: Synthetic oligonucleotide
  Sense strand starting at position 1062 of SEQ ID NO: 1244571
ggacuuguugagugauuga

SEQ ID NO: 1498813 - RNA, 19 nt, Artificial Sequence
  Description of Artificial Sequence: Synthetic oligonucleotide
  Antisense strand to SEQ ID NO: 1498812
ucaaucacucaacaagucc

SEQ ID NO: 1498814 - RNA, 19 nt, Artificial Sequence
  Description of Artificial Sequence: Synthetic oligonucleotide
  Sense strand starting at position 1065 of SEQ ID NO: 1244571
cuuguugagugauugaaua

SEQ ID NO: 1498815 - RNA, 19 nt, Artificial Sequence
  Description of Artificial Sequence: Synthetic oligonucleotide
  Antisense strand to SEQ ID NO: 1498814
uauucaaucacucaacaag

SEQ ID NO: 1498816 - RNA, 19 nt, Artificial Sequence
  Description of Artificial Sequence: Synthetic oligonucleotide
  Sense strand starting at position 1067 of SEQ ID NO: 1244571
uguugagugauugaauauu

SEQ ID NO: 1498817 - RNA, 19 nt, Artificial Sequence
  Description of Artificial Sequence: Synthetic oligonucleotide
  Antisense strand to SEQ ID NO: 1498816
aauauucaaucacucaaca

SEQ ID NO: 1498818 - RNA, 19 nt, Artificial Sequence
  Description of Artificial Sequence: Synthetic oligonucleotide
  Sense strand starting at position 1075 of SEQ ID NO: 1244571
gauugaauauuggcuggaa

SEQ ID NO: 1498819 - RNA, 19 nt, Artificial Sequence
  Description of Artificial Sequence: Synthetic oligonucleotide
  Antisense strand to SEQ ID NO: 1498818
uuccagccaauauucaauc

SEQ ID NO: 1498820 - RNA, 19 nt, Artificial Sequence
  Description of Artificial Sequence: Synthetic oligonucleotide
  Sense strand starting at position 1076 of SEQ ID NO: 1244571
auugaauauuggcuggaaa

SEQ ID NO: 1498821 - RNA, 19 nt, Artificial Sequence
  Description of Artificial Sequence: Synthetic oligonucleotide
  Antisense strand to SEQ ID NO: 1498820
uuuccagccaauauucaau

SEQ ID NO: 1498822 - RNA, 19 nt, Artificial Sequence
  Description of Artificial Sequence: Synthetic oligonucleotide
  Sense strand starting at position 1078 of SEQ ID NO: 1244571
ugaauauuggcuggaaagg

SEQ ID NO: 1498823 - RNA, 19 nt, Artificial Sequence
  Description of Artificial Sequence: Synthetic oligonucleotide
  Antisense strand to SEQ ID NO: 1498822
ccuuuccagccaauauuca

SEQ ID NO: 1498824 - RNA, 19 nt, Artificial Sequence
  Description of Artificial Sequence: Synthetic oligonucleotide
  Sense strand starting at position 1113 of SEQ ID NO: 1244571
agcuguaaccuggguacau

SEQ ID NO: 1498825 - RNA, 19 nt, Artificial Sequence
  Description of Artificial Sequence: Synthetic oligonucleotide
  Antisense strand to SEQ ID NO: 1498824
auguacccagguuacagcu

SEQ ID NO: 1498826 - RNA, 19 nt, Artificial Sequence
  Description of Artificial Sequence: Synthetic oligonucleotide
  Sense strand starting at position 1168 of SEQ ID NO: 1244571
uugauauccuccuugguaa

SEQ ID NO: 1498827 - RNA, 19 nt, Artificial Sequence
  Description of Artificial Sequence: Synthetic oligonucleotide
  Antisense strand to SEQ ID NO: 1498826
uuaccaaggaggauaucaa

SEQ ID NO: 1498828 - RNA, 19 nt, Artificial Sequence
  Description of Artificial Sequence: Synthetic oligonucleotide
  Sense strand starting at position 1169 of SEQ ID NO: 1244571
ugauauccuccuugguaag

SEQ ID NO: 1498829 - RNA, 19 nt, Artificial Sequence
  Description of Artificial Sequence: Synthetic oligonucleotide
  Antisense strand to SEQ ID NO: 1498828
cuuaccaaggaggauauca

SEQ ID NO: 1498830 - RNA, 19 nt, Artificial Sequence
  Description of Artificial Sequence: Synthetic oligonucleotide
  Sense strand starting at position 1229 of SEQ ID NO: 1244571
aaguaauagagcgggaaga

SEQ ID NO: 1498831 - RNA, 19 nt, Artificial Sequence
  Description of Artificial Sequence: Synthetic oligonucleotide
  Antisense strand to SEQ ID NO: 1498830
ucuucccgcucuauuacuu

SEQ ID NO: 1498832 - RNA, 19 nt, Artificial Sequence
  Description of Artificial Sequence: Synthetic oligonucleotide
  Sense strand starting at position 1260 of SEQ ID NO: 1244571
ggaguccugccagauagag

SEQ ID NO: 1498833 - RNA, 19 nt, Artificial Sequence
  Description of Artificial Sequence: Synthetic oligonucleotide
  Antisense strand to SEQ ID NO: 1498832
cucuaucuggcaggacucc

SEQ ID NO: 1498834 - RNA, 19 nt, Artificial Sequence
  Description of Artificial Sequence: Synthetic oligonucleotide
  Sense strand starting at position 1272 of SEQ ID NO: 1244571
gauagagagccucauucuu

SEQ ID NO: 1498835 - RNA, 19 nt, Artificial Sequence
  Description of Artificial Sequence: Synthetic oligonucleotide
  Antisense strand to SEQ ID NO: 1498834
aagaaugaggcucucuauc

SEQ ID NO: 1498836 - RNA, 19 nt, Artificial Sequence
  Description of Artificial Sequence: Synthetic oligonucleotide
  Sense strand starting at position 1274 of SEQ ID NO: 1244571
uagagagccucauucuuag

SEQ ID NO: 1498837 - RNA, 19 nt, Artificial Sequence
  Description of Artificial Sequence: Synthetic oligonucleotide
  Antisense strand to SEQ ID NO: 1498836
cuaagaaugaggcucucua

SEQ ID NO: 1498838 - RNA, 19 nt, Artificial Sequence
  Description of Artificial Sequence: Synthetic oligonucleotide
  Sense strand starting at position 1557 of SEQ ID NO: 1244571
ugcggugauccucaauaag

SEQ ID NO: 1498839 - RNA, 19 nt, Artificial Sequence
  Description of Artificial Sequence: Synthetic oligonucleotide
  Antisense strand to SEQ ID NO: 1498838
cuuauugaggaucaccgca

SEQ ID NO: 1498840 - RNA, 19 nt, Artificial Sequence
  Description of Artificial Sequence: Synthetic oligonucleotide
  Sense strand starting at position 1568 of SEQ ID NO: 1244571
ucaauaagcacguggacau

SEQ ID NO: 1498841 - RNA, 19 nt, Artificial Sequence
  Description of Artificial Sequence: Synthetic oligonucleotide
  Antisense strand to SEQ ID NO: 1498840
auguccacgugcuuauuga

SEQ ID NO: 1498842 - RNA, 19 nt, Artificial Sequence
  Description of Artificial Sequence: Synthetic oligonucleotide
  Sense strand starting at position 1841 of SEQ ID NO: 1244571
ggaagaauagaacgugcaa

SEQ ID NO: 1498843 - RNA, 19 nt, Artificial Sequence
  Description of Artificial Sequence: Synthetic oligonucleotide
  Antisense strand to SEQ ID NO: 1498842
uugcacguucuauucuucc

SEQ ID NO: 1498844 - RNA, 19 nt, Artificial Sequence
  Description of Artificial Sequence: Synthetic oligonucleotide
  Sense strand starting at position 2137 of SEQ ID NO: 1244571
uccuuauauggucgggaga

SEQ ID NO: 1498845 - RNA, 19 nt, Artificial Sequence
  Description of Artificial Sequence: Synthetic oligonucleotide
  Antisense strand to SEQ ID NO: 1498844
ucucccgaccauauaagga

SEQ ID NO: 1498846 - RNA, 19 nt, Artificial Sequence
  Description of Artificial Sequence: Synthetic oligonucleotide
  Sense strand starting at position 2195 of SEQ ID NO: 1244571
ggaucugcacucuggagau

SEQ ID NO: 1498847 - RNA, 19 nt, Artificial Sequence
  Description of Artificial Sequence: Synthetic oligonucleotide
  Antisense strand to SEQ ID NO: 1498846
aucuccagagugcagaucc

SEQ ID NO: 1498848 - RNA, 19 nt, Artificial Sequence
  Description of Artificial Sequence: Synthetic oligonucleotide
  Sense strand starting at position 2558 of SEQ ID NO: 1244571
ugguguuuccgggaagaug

SEQ ID NO: 1498849 - RNA, 19 nt, Artificial Sequence
  Description of Artificial Sequence: Synthetic oligonucleotide
  Antisense strand to SEQ ID NO: 1498848
caucuucccggaaacacca

SEQ ID NO: 1498850 - RNA, 19 nt, Artificial Sequence
  Description of Artificial Sequence: Synthetic oligonucleotide
  Sense strand starting at position 3091 of SEQ ID NO: 1244571
ccgcgaggaauaugggaau

SEQ ID NO: 1498851 - RNA, 19 nt, Artificial Sequence
  Description of Artificial Sequence: Synthetic oligonucleotide
  Antisense strand to SEQ ID NO: 1498850
auucccauauuccucgcgg

SEQ ID NO: 1498852 - RNA, 19 nt, Artificial Sequence
  Description of Artificial Sequence: Synthetic oligonucleotide
  Sense strand starting at position 3304 of SEQ ID NO: 1244571
cgugaugacgugaguggua

SEQ ID NO: 1498853 - RNA, 19 nt, Artificial Sequence
  Description of Artificial Sequence: Synthetic oligonucleotide
  Antisense strand to SEQ ID NO: 1498852
uaccacucacgucaucacg

SEQ ID NO: 1498854 - RNA, 19 nt, Artificial Sequence
  Description of Artificial Sequence: Synthetic oligonucleotide
  Sense strand starting at position 3306 of SEQ ID NO: 1244571
ugaugacgugagugguaga

SEQ ID NO: 1498855 - RNA, 19 nt, Artificial Sequence
  Description of Artificial Sequence: Synthetic oligonucleotide
  Antisense strand to SEQ ID NO: 1498854
ucuaccacucacgucauca

SEQ ID NO: 1498856 - RNA, 19 nt, Artificial Sequence
  Description of Artificial Sequence: Synthetic oligonucleotide
  Sense strand starting at position 3390 of SEQ ID NO: 1244571
ucaccuuucccucacguau

SEQ ID NO: 1498857 - RNA, 19 nt, Artificial Sequence
  Description of Artificial Sequence: Synthetic oligonucleotide
  Antisense strand to SEQ ID NO: 1498856
auacgugagggaaagguga

SEQ ID NO: 1498858 - RNA, 19 nt, Artificial Sequence
  Description of Artificial Sequence: Synthetic oligonucleotide
  Sense strand starting at position 3418 of SEQ ID NO: 1244571
gaacacuuuggcugcuaga

SEQ ID NO: 1498859 - RNA, 19 nt, Artificial Sequence
  Description of Artificial Sequence: Synthetic oligonucleotide
  Antisense strand to SEQ ID NO: 1498858
ucuagcagccaaaguguuc

SEQ ID NO: 1498860 - RNA, 19 nt, Artificial Sequence
  Description of Artificial Sequence: Synthetic oligonucleotide
  Sense strand starting at position 3476 of SEQ ID NO: 1244571
aggaaagugaguuggaauc

SEQ ID NO: 1498861 - RNA, 19 nt, Artificial Sequence
  Description of Artificial Sequence: Synthetic oligonucleotide
  Antisense strand to SEQ ID NO: 1498860
gauuccaacucacuuuccu

SEQ ID NO: 1498862 - RNA, 19 nt, Artificial Sequence
  Description of Artificial Sequence: Synthetic oligonucleotide
  Sense strand starting at position 3483 of SEQ ID NO: 1244571
ugaguuggaauccguggaa

SEQ ID NO: 1498863 - RNA, 19 nt, Artificial Sequence
  Description of Artificial Sequence: Synthetic oligonucleotide
  Antisense strand to SEQ ID NO: 1498862
uuccacggauuccaacuca

SEQ ID NO: 1498864 - RNA, 19 nt, Artificial Sequence
  Description of Artificial Sequence: Synthetic oligonucleotide
  Sense strand starting at position 3486 of SEQ ID NO: 1244571
guuggaauccguggaaauu

SEQ ID NO: 1498865 - RNA, 19 nt, Artificial Sequence
  Description of Artificial Sequence: Synthetic oligonucleotide
  Antisense strand to SEQ ID NO: 1498864
aauuuccacggauuccaac

SEQ ID NO: 1498866 - RNA, 19 nt, Artificial Sequence
  Description of Artificial Sequence: Synthetic oligonucleotide
  Sense strand starting at position 3530 of SEQ ID NO: 1244571
ccugaaaucuaggcagucu

SEQ ID NO: 1498867 - RNA, 19 nt, Artificial Sequence
  Description of Artificial Sequence: Synthetic oligonucleotide
  Antisense strand to SEQ ID NO: 1498866
agacugccuagauuucagg

SEQ ID NO: 1498868 - RNA, 19 nt, Artificial Sequence
  Description of Artificial Sequence: Synthetic oligonucleotide
  Sense strand starting at position 3579 of SEQ ID NO: 1244571
acagcagggucucuuagua

SEQ ID NO: 1498869 - RNA, 19 nt, Artificial Sequence
  Description of Artificial Sequence: Synthetic oligonucleotide
  Antisense strand to SEQ ID NO: 1498868
uacuaagagacccugcugu

SEQ ID NO: 1498870 - RNA, 19 nt, Artificial Sequence
  Description of Artificial Sequence: Synthetic oligonucleotide
  Sense strand starting at position 3587 of SEQ ID NO: 1244571
gucucuuaguaacugaaau

SEQ ID NO: 1498871 - RNA, 19 nt, Artificial Sequence
  Description of Artificial Sequence: Synthetic oligonucleotide
  Antisense strand to SEQ ID NO: 1498870
auuucaguuacuaagagac

SEQ ID NO: 1498872 - RNA, 19 nt, Artificial Sequence
  Description of Artificial Sequence: Synthetic oligonucleotide
  Sense strand starting at position 3800 of SEQ ID NO: 1244571
ccugcuuaaucauuaggca

SEQ ID NO: 1498873 - RNA, 19 nt, Artificial Sequence
  Description of Artificial Sequence: Synthetic oligonucleotide
  Antisense strand to SEQ ID NO: 1498872
ugccuaaugauuaagcagg

SEQ ID NO: 1498874 - RNA, 19 nt, Artificial Sequence
  Description of Artificial Sequence: Synthetic oligonucleotide
  Sense strand starting at position 3801 of SEQ ID NO: 1244571
cugcuuaaucauuaggcau

SEQ ID NO: 1498875 - RNA, 19 nt, Artificial Sequence
  Description of Artificial Sequence: Synthetic oligonucleotide
  Antisense strand to SEQ ID NO: 1498874
augccuaaugauuaagcag

SEQ ID NO: 1498876 - RNA, 19 nt, Artificial Sequence
  Description of Artificial Sequence: Synthetic oligonucleotide
  Sense strand starting at position 3877 of SEQ ID NO: 1244571
uagugaaacuauguauaag

SEQ ID NO: 1498877 - RNA, 19 nt, Artificial Sequence
  Description of Artificial Sequence: Synthetic oligonucleotide
  Antisense strand to SEQ ID NO: 1498876
cuuauacauaguuucacua

SEQ ID NO: 1498878 - RNA, 19 nt, Artificial Sequence
  Description of Artificial Sequence: Synthetic oligonucleotide
  Sense strand starting at position 3903 of SEQ ID NO: 1244571
guaaacguuuccuuacaag

SEQ ID NO: 1498879 - RNA, 19 nt, Artificial Sequence
  Description of Artificial Sequence: Synthetic oligonucleotide
  Antisense strand to SEQ ID NO: 1498878
cuuguaaggaaacguuuac

SEQ ID NO: 1498880 - RNA, 19 nt, Artificial Sequence
  Description of Artificial Sequence: Synthetic oligonucleotide
  Sense strand starting at position 3945 of SEQ ID NO: 1244571
aagugcuggcuuuauugga

SEQ ID NO: 1498881 - RNA, 19 nt, Artificial Sequence
  Description of Artificial Sequence: Synthetic oligonucleotide
  Antisense strand to SEQ ID NO: 1498880
uccaauaaagccagcacuu

SEQ ID NO: 1498882 - RNA, 19 nt, Artificial Sequence
  Description of Artificial Sequence: Synthetic oligonucleotide
  Sense strand starting at position 304 of SEQ ID NO: 1244572
ccgagacucccagguuuau

SEQ ID NO: 1498883 - RNA, 19 nt, Artificial Sequence
  Description of Artificial Sequence: Synthetic oligonucleotide
  Antisense strand to SEQ ID NO: 1498882
auaaaccugggagucucgg

SEQ ID NO: 1498884 - RNA, 19 nt, Artificial Sequence
  Description of Artificial Sequence: Synthetic oligonucleotide
  Sense strand starting at position 350 of SEQ ID NO: 1244572
uuuauccaagugugaagaa

SEQ ID NO: 1498885 - RNA, 19 nt, Artificial Sequence
  Description of Artificial Sequence: Synthetic oligonucleotide
  Antisense strand to SEQ ID NO: 1498884
uucuucacacuuggauaaa

SEQ ID NO: 1498886 - RNA, 19 nt, Artificial Sequence
  Description of Artificial Sequence: Synthetic oligonucleotide
  Sense strand starting at position 351 of SEQ ID NO: 1244572
uuauccaagugugaagaau

SEQ ID NO: 1498887 - RNA, 19 nt, Artificial Sequence
  Description of Artificial Sequence: Synthetic oligonucleotide
  Antisense strand to SEQ ID NO: 1498886
auucuucacacuuggauaa

SEQ ID NO: 1498888 - RNA, 19 nt, Artificial Sequence
  Description of Artificial Sequence: Synthetic oligonucleotide
  Sense strand starting at position 802 of SEQ ID NO: 1244572
gugccugagcccugaauca

SEQ ID NO: 1498889 - RNA, 19 nt, Artificial Sequence
  Description of Artificial Sequence: Synthetic oligonucleotide
  Antisense strand to SEQ ID NO: 1498888
ugauucagggcucaggcac

SEQ ID NO: 1498890 - RNA, 19 nt, Artificial Sequence
  Description of Artificial Sequence: Synthetic oligonucleotide
  Sense strand starting at position 814 of SEQ ID NO: 1244572
ugaaucacccgcuauauca

SEQ ID NO: 1498891 - RNA, 19 nt, Artificial Sequence
  Description of Artificial Sequence: Synthetic oligonucleotide
  Antisense strand to SEQ ID NO: 1498890
ugauauagcgggugauuca

SEQ ID NO: 1498892 - RNA, 19 nt, Artificial Sequence
  Description of Artificial Sequence: Synthetic oligonucleotide
  Sense strand starting at position 1011 of SEQ ID NO: 1244572
cgcuaauucgguucugcua

SEQ ID NO: 1498893 - RNA, 19 nt, Artificial Sequence
  Description of Artificial Sequence: Synthetic oligonucleotide
  Antisense strand to SEQ ID NO: 1498892
uagcagaaccgaauuagcg

SEQ ID NO: 1498894 - RNA, 19 nt, Artificial Sequence
  Description of Artificial Sequence: Synthetic oligonucleotide
  Sense strand starting at position 1018 of SEQ ID NO: 1244572
ucgguucugcuacaaguuu

SEQ ID NO: 1498895 - RNA, 19 nt, Artificial Sequence
  Description of Artificial Sequence: Synthetic oligonucleotide
  Antisense strand to SEQ ID NO: 1498894
aaacuuguagcagaaccga

SEQ ID NO: 1498896 - RNA, 19 nt, Artificial Sequence
  Description of Artificial Sequence: Synthetic oligonucleotide
  Sense strand starting at position 1297 of SEQ ID NO: 1244572
gugggcucaccugguagau

SEQ ID NO: 1498897 - RNA, 19 nt, Artificial Sequence
  Description of Artificial Sequence: Synthetic oligonucleotide
  Antisense strand to SEQ ID NO: 1498896
aucuaccaggugagcccac

SEQ ID NO: 1498898 - RNA, 19 nt, Artificial Sequence
  Description of Artificial Sequence: Synthetic oligonucleotide
  Sense strand starting at position 1299 of SEQ ID NO: 1244572
gggcucaccugguagauca

SEQ ID NO: 1498899 - RNA, 19 nt, Artificial Sequence
  Description of Artificial Sequence: Synthetic oligonucleotide
  Antisense strand to SEQ ID NO: 1498898
ugaucuaccaggugagccc

SEQ ID NO: 1498900 - RNA, 19 nt, Artificial Sequence
  Description of Artificial Sequence: Synthetic oligonucleotide
  Sense strand starting at position 1306 of SEQ ID NO: 1244572
ccugguagaucaugacuuu

SEQ ID NO: 1498901 - RNA, 19 nt, Artificial Sequence
  Description of Artificial Sequence: Synthetic oligonucleotide
  Antisense strand to SEQ ID NO: 1498900
aaagucaugaucuaccagg

SEQ ID NO: 1498902 - RNA, 19 nt, Artificial Sequence
  Description of Artificial Sequence: Synthetic oligonucleotide
  Sense strand starting at position 1309 of SEQ ID NO: 1244572
gguagaucaugacuuuaaa

SEQ ID NO: 1498903 - RNA, 19 nt, Artificial Sequence
  Description of Artificial Sequence: Synthetic oligonucleotide
  Antisense strand to SEQ ID NO: 1498902
uuuaaagucaugaucuacc

SEQ ID NO: 1498904 - RNA, 19 nt, Artificial Sequence
  Description of Artificial Sequence: Synthetic oligonucleotide
  Sense strand starting at position 1447 of SEQ ID NO: 1244572
gcagcuugcucaccguauu

SEQ ID NO: 1498905 - RNA, 19 nt, Artificial Sequence
  Description of Artificial Sequence: Synthetic oligonucleotide
  Antisense strand to SEQ ID NO: 1498904
aauacggugagcaagcugc

SEQ ID NO: 1498906 - RNA, 19 nt, Artificial Sequence
  Description of Artificial Sequence: Synthetic oligonucleotide
  Sense strand starting at position 1551 of SEQ ID NO: 1244572
uccagcugugcuugaguca

SEQ ID NO: 1498907 - RNA, 19 nt, Artificial Sequence
  Description of Artificial Sequence: Synthetic oligonucleotide
  Antisense strand to SEQ ID NO: 1498906
ugacucaagcacagcugga

SEQ ID NO: 1498908 - RNA, 19 nt, Artificial Sequence
  Description of Artificial Sequence: Synthetic oligonucleotide
  Sense strand starting at position 1558 of SEQ ID NO: 1244572
gugcuugagucagcuggau

SEQ ID NO: 1498909 - RNA, 19 nt, Artificial Sequence
  Description of Artificial Sequence: Synthetic oligonucleotide
  Antisense strand to SEQ ID NO: 1498908
auccagcugacucaagcac

SEQ ID NO: 1498910 - RNA, 19 nt, Artificial Sequence
  Description of Artificial Sequence: Synthetic oligonucleotide
  Sense strand starting at position 1560 of SEQ ID NO: 1244572
gcuugagucagcuggaucu

SEQ ID NO: 1498911 - RNA, 19 nt, Artificial Sequence
  Description of Artificial Sequence: Synthetic oligonucleotide
  Antisense strand to SEQ ID NO: 1498910
agauccagcugacucaagc

SEQ ID NO: 1498912 - RNA, 19 nt, Artificial Sequence
  Description of Artificial Sequence: Synthetic oligonucleotide
  Sense strand starting at position 1741 of SEQ ID NO: 1244572
gcggccgcucgacaauaua

SEQ ID NO: 1498913 - RNA, 19 nt, Artificial Sequence
  Description of Artificial Sequence: Synthetic oligonucleotide
  Antisense strand to SEQ ID NO: 1498912
uauauugucgagcggccgc

SEQ ID NO: 1498914 - RNA, 19 nt, Artificial Sequence
  Description of Artificial Sequence: Synthetic oligonucleotide
  Sense strand starting at position 1980 of SEQ ID NO: 1244572
uccggagucugaucgcuga

SEQ ID NO: 1498915 - RNA, 19 nt, Artificial Sequence
  Description of Artificial Sequence: Synthetic oligonucleotide
  Antisense strand to SEQ ID NO: 1498914
ucagcgaucagacuccgga

SEQ ID NO: 1498916 - RNA, 19 nt, Artificial Sequence
  Description of Artificial Sequence: Synthetic oligonucleotide
  Sense strand starting at position 2100 of SEQ ID NO: 1244572
ccgggaugguuggaauagu

SEQ ID NO: 1498917 - RNA, 19 nt, Artificial Sequence
  Description of Artificial Sequence: Synthetic oligonucleotide
  Antisense strand to SEQ ID NO: 1498916
acuauuccaaccaucccgg

SEQ ID NO: 1498918 - RNA, 19 nt, Artificial Sequence
  Description of Artificial Sequence: Synthetic oligonucleotide
  Sense strand starting at position 2101 of SEQ ID NO: 1244572
cgggaugguuggaauaguu

SEQ ID NO: 1498919 - RNA, 19 nt, Artificial Sequence
  Description of Artificial Sequence: Synthetic oligonucleotide
  Antisense strand to SEQ ID NO: 1498918
aacuauuccaaccaucccg

SEQ ID NO: 1498920 - RNA, 19 nt, Artificial Sequence
  Description of Artificial Sequence: Synthetic oligonucleotide
  Sense strand starting at position 2188 of SEQ ID NO: 1244572
ggaaucagguucuaagagu

SEQ ID NO: 1498921 - RNA, 19 nt, Artificial Sequence
  Description of Artificial Sequence: Synthetic oligonucleotide
  Antisense strand to SEQ ID NO: 1498920
acucuuagaaccugauucc

SEQ ID NO: 1498922 - RNA, 19 nt, Artificial Sequence
  Description of Artificial Sequence: Synthetic oligonucleotide
  Sense strand starting at position 2203 of SEQ ID NO: 1244572
gaguguugcucucuguuuc

SEQ ID NO: 1498923 - RNA, 19 nt, Artificial Sequence
  Description of Artificial Sequence: Synthetic oligonucleotide
  Antisense strand to SEQ ID NO: 1498922
gaaacagagagcaacacuc

SEQ ID NO: 1498924 - RNA, 19 nt, Artificial Sequence
  Description of Artificial Sequence: Synthetic oligonucleotide
  Sense strand starting at position 2228 of SEQ ID NO: 1244572
acuugaauugcucauccga

SEQ ID NO: 1498925 - RNA, 19 nt, Artificial Sequence
  Description of Artificial Sequence: Synthetic oligonucleotide
  Antisense strand to SEQ ID NO: 1498924
ucggaugagcaauucaagu

SEQ ID NO: 1498926 - RNA, 19 nt, Artificial Sequence
  Description of Artificial Sequence: Synthetic oligonucleotide
  Sense strand starting at position 2230 of SEQ ID NO: 1244572
uugaauugcucauccgaaa

SEQ ID NO: 1498927 - RNA, 19 nt, Artificial Sequence
  Description of Artificial Sequence: Synthetic oligonucleotide
  Antisense strand to SEQ ID NO: 1498926
uuucggaugagcaauucaa

SEQ ID NO: 1498928 - RNA, 19 nt, Artificial Sequence
  Description of Artificial Sequence: Synthetic oligonucleotide
  Sense strand starting at position 2276 of SEQ ID NO: 1244572
ccaggagauucugaaauua

SEQ ID NO: 1498929 - RNA, 19 nt, Artificial Sequence
  Description of Artificial Sequence: Synthetic oligonucleotide
  Antisense strand to SEQ ID NO: 1498928
uaauuucagaaucuccugg

SEQ ID NO: 1498930 - RNA, 19 nt, Artificial Sequence
  Description of Artificial Sequence: Synthetic oligonucleotide
  Sense strand starting at position 2500 of SEQ ID NO: 1244572
cugcgaagcuccucuaagu

SEQ ID NO: 1498931 - RNA, 19 nt, Artificial Sequence
  Description of Artificial Sequence: Synthetic oligonucleotide
  Antisense strand to SEQ ID NO: 1498930
acuuagaggagcuucgcag

SEQ ID NO: 1498932 - RNA, 19 nt, Artificial Sequence
  Description of Artificial Sequence: Synthetic oligonucleotide
  Sense strand starting at position 2532 of SEQ ID NO: 1244572
gcccuaacagaguagaauu

SEQ ID NO: 1498933 - RNA, 19 nt, Artificial Sequence
  Description of Artificial Sequence: Synthetic oligonucleotide
  Antisense strand to SEQ ID NO: 1498932
aauucuacucuguuagggc

SEQ ID NO: 1498934 - RNA, 19 nt, Artificial Sequence
  Description of Artificial Sequence: Synthetic oligonucleotide
  Sense strand starting at position 2543 of SEQ ID NO: 1244572
guagaauuaagaugggcaa

SEQ ID NO: 1498935 - RNA, 19 nt, Artificial Sequence
  Description of Artificial Sequence: Synthetic oligonucleotide
  Antisense strand to SEQ ID NO: 1498934
uugcccaucuuaauucuac

SEQ ID NO: 1498936 - RNA, 19 nt, Artificial Sequence
  Description of Artificial Sequence: Synthetic oligonucleotide
  Sense strand starting at position 2640 of SEQ ID NO: 1244572
gcggucugaucacaguuca

SEQ ID NO: 1498937 - RNA, 19 nt, Artificial Sequence
  Description of Artificial Sequence: Synthetic oligonucleotide
  Antisense strand to SEQ ID NO: 1498936
ugaacugugaucagaccgc

SEQ ID NO: 1498938 - RNA, 19 nt, Artificial Sequence
  Description of Artificial Sequence: Synthetic oligonucleotide
  Sense strand starting at position 3271 of SEQ ID NO: 1244572
ugagauucgcgccauugca

SEQ ID NO: 1498939 - RNA, 19 nt, Artificial Sequence
  Description of Artificial Sequence: Synthetic oligonucleotide
  Antisense strand to SEQ ID NO: 1498938
ugcaauggcgcgaaucuca

SEQ ID NO: 1498940 - RNA, 19 nt, Artificial Sequence
  Description of Artificial Sequence: Synthetic oligonucleotide
  Sense strand starting at position 3399 of SEQ ID NO: 1244572
uaaaguaaguugguaaucu

SEQ ID NO: 1498941 - RNA, 19 nt, Artificial Sequence
  Description of Artificial Sequence: Synthetic oligonucleotide
  Antisense strand to SEQ ID NO: 1498940
agauuaccaacuuacuuua

SEQ ID NO: 1498942 - RNA, 19 nt, Artificial Sequence
  Description of Artificial Sequence: Synthetic oligonucleotide
  Sense strand starting at position 3403 of SEQ ID NO: 1244572
guaaguugguaaucugcca

SEQ ID NO: 1498943 - RNA, 19 nt, Artificial Sequence
  Description of Artificial Sequence: Synthetic oligonucleotide
  Antisense strand to SEQ ID NO: 1498942
uggcagauuaccaacuuac

SEQ ID NO: 1498944 - RNA, 19 nt, Artificial Sequence
  Description of Artificial Sequence: Synthetic oligonucleotide
  Sense strand starting at position 3423 of SEQ ID NO: 1244572
uugguaauccacugucuga

SEQ ID NO: 1498945 - RNA, 19 nt, Artificial Sequence
  Description of Artificial Sequence: Synthetic oligonucleotide
  Antisense strand to SEQ ID NO: 1498944
ucagacaguggauuaccaa

SEQ ID NO: 1498946 - RNA, 19 nt, Artificial Sequence
  Description of Artificial Sequence: Synthetic oligonucleotide
  Sense strand starting at position 3580 of SEQ ID NO: 1244572
acaccaaucucagugagca

SEQ ID NO: 1498947 - RNA, 19 nt, Artificial Sequence
  Description of Artificial Sequence: Synthetic oligonucleotide
  Antisense strand to SEQ ID NO: 1498946
ugcucacugagauuggugu

SEQ ID NO: 1498948 - RNA, 19 nt, Artificial Sequence
  Description of Artificial Sequence: Synthetic oligonucleotide
  Sense strand starting at position 3641 of SEQ ID NO: 1244572
caguaagccaucggagaga

SEQ ID NO: 1498949 - RNA, 19 nt, Artificial Sequence
  Description of Artificial Sequence: Synthetic oligonucleotide
  Antisense strand to SEQ ID NO: 1498948
ucucuccgauggcuuacug

SEQ ID NO: 1498950 - RNA, 19 nt, Artificial Sequence
  Description of Artificial Sequence: Synthetic oligonucleotide
  Sense strand starting at position 3717 of SEQ ID NO: 1244572
gguggcuugccagagauca

SEQ ID NO: 1498951 - RNA, 19 nt, Artificial Sequence
  Description of Artificial Sequence: Synthetic oligonucleotide
  Antisense strand to SEQ ID NO: 1498950
ugaucucuggcaagccacc

SEQ ID NO: 1498952 - RNA, 19 nt, Artificial Sequence
  Description of Artificial Sequence: Synthetic oligonucleotide
  Sense strand starting at position 3719 of SEQ ID NO: 1244572
uggcuugccagagaucacu

SEQ ID NO: 1498953 - RNA, 19 nt, Artificial Sequence
  Description of Artificial Sequence: Synthetic oligonucleotide
  Antisense strand to SEQ ID NO: 1498952
agugaucucuggcaagcca

SEQ ID NO: 1498954 - RNA, 19 nt, Artificial Sequence
  Description of Artificial Sequence: Synthetic oligonucleotide
  Sense strand starting at position 3728 of SEQ ID NO: 1244572
agagaucacucgcagguua

SEQ ID NO: 1498955 - RNA, 19 nt, Artificial Sequence
  Description of Artificial Sequence: Synthetic oligonucleotide
  Antisense strand to SEQ ID NO: 1498954
uaaccugcgagugaucucu

SEQ ID NO: 1498956 - RNA, 19 nt, Artificial Sequence
  Description of Artificial Sequence: Synthetic oligonucleotide
  Sense strand starting at position 3730 of SEQ ID NO: 1244572
agaucacucgcagguuagu

SEQ ID NO: 1498957 - RNA, 19 nt, Artificial Sequence
  Description of Artificial Sequence: Synthetic oligonucleotide
  Antisense strand to SEQ ID NO: 1498956
acuaaccugcgagugaucu

SEQ ID NO: 1498958 - RNA, 19 nt, Artificial Sequence
  Description of Artificial Sequence: Synthetic oligonucleotide
  Sense strand starting at position 3739 of SEQ ID NO: 1244572
gcagguuaguguuggcauu

SEQ ID NO: 1498959 - RNA, 19 nt, Artificial Sequence
  Description of Artificial Sequence: Synthetic oligonucleotide
  Antisense strand to SEQ ID NO: 1498958
aaugccaacacuaaccugc

SEQ ID NO: 1498960 - RNA, 19 nt, Artificial Sequence
  Description of Artificial Sequence: Synthetic oligonucleotide
  Sense strand starting at position 3950 of SEQ ID NO: 1244572
gaggguccuuagugcagaa

SEQ ID NO: 1498961 - RNA, 19 nt, Artificial Sequence
  Description of Artificial Sequence: Synthetic oligonucleotide
  Antisense strand to SEQ ID NO: 1498960
uucugcacuaaggacccuc

SEQ ID NO: 1498962 - RNA, 19 nt, Artificial Sequence
  Description of Artificial Sequence: Synthetic oligonucleotide
  Sense strand starting at position 192 of SEQ ID NO: 1244573
gcagcaucucgaguccagu

SEQ ID NO: 1498963 - RNA, 19 nt, Artificial Sequence
  Description of Artificial Sequence: Synthetic oligonucleotide
  Antisense strand to SEQ ID NO: 1498962
acuggacucgagaugcugc

SEQ ID NO: 1498964 - RNA, 19 nt, Artificial Sequence
  Description of Artificial Sequence: Synthetic oligonucleotide
  Sense strand starting at position 259 of SEQ ID NO: 1244573
uuaaauaauuagccagaug

SEQ ID NO: 1498965 - RNA, 19 nt, Artificial Sequence
  Description of Artificial Sequence: Synthetic oligonucleotide
  Antisense strand to SEQ ID NO: 1498964
caucuggcuaauuauuuaa

SEQ ID NO: 1498966 - RNA, 19 nt, Artificial Sequence
  Description of Artificial Sequence: Synthetic oligonucleotide
  Sense strand starting at position 492 of SEQ ID NO: 1244573
cccauaucucaauggagug

SEQ ID NO: 1498967 - RNA, 19 nt, Artificial Sequence
  Description of Artificial Sequence: Synthetic oligonucleotide
  Antisense strand to SEQ ID NO: 1498966
cacuccauugagauauggg

SEQ ID NO: 1498968 - RNA, 19 nt, Artificial Sequence
  Description of Artificial Sequence: Synthetic oligonucleotide
  Sense strand starting at position 497 of SEQ ID NO: 1244573
aucucaauggagugucuaa

SEQ ID NO: 1498969 - RNA, 19 nt, Artificial Sequence
  Description of Artificial Sequence: Synthetic oligonucleotide
  Antisense strand to SEQ ID NO: 1498968
uuagacacuccauugagau

SEQ ID NO: 1498970 - RNA, 19 nt, Artificial Sequence
  Description of Artificial Sequence: Synthetic oligonucleotide
  Sense strand starting at position 504 of SEQ ID NO: 1244573
uggagugucuaaucauaaa

SEQ ID NO: 1498971 - RNA, 19 nt, Artificial Sequence
  Description of Artificial Sequence: Synthetic oligonucleotide
  Antisense strand to SEQ ID NO: 1498970
uuuaugauuagacacucca

SEQ ID NO: 1498972 - RNA, 19 nt, Artificial Sequence
  Description of Artificial Sequence: Synthetic oligonucleotide
  Sense strand starting at position 550 of SEQ ID NO: 1244573
ucuuuaggauguucuaauc

SEQ ID NO: 1498973 - RNA, 19 nt, Artificial Sequence
  Description of Artificial Sequence: Synthetic oligonucleotide
  Antisense strand to SEQ ID NO: 1498972
gauuagaacauccuaaaga

SEQ ID NO: 1498974 - RNA, 19 nt, Artificial Sequence
  Description of Artificial Sequence: Synthetic oligonucleotide
  Sense strand starting at position 638 of SEQ ID NO: 1244573
uuacgacaagcguaucaau

SEQ ID NO: 1498975 - RNA, 19 nt, Artificial Sequence
  Description of Artificial Sequence: Synthetic oligonucleotide
  Antisense strand to SEQ ID NO: 1498974
auugauacgcuugucguaa

SEQ ID NO: 1498976 - RNA, 19 nt, Artificial Sequence
  Description of Artificial Sequence: Synthetic oligonucleotide
  Sense strand starting at position 657 of SEQ ID NO: 1244573
aagccuagugccuaagacu

SEQ ID NO: 1498977 - RNA, 19 nt, Artificial Sequence
  Description of Artificial Sequence: Synthetic oligonucleotide
  Antisense strand to SEQ ID NO: 1498976
agucuuaggcacuaggcuu

SEQ ID NO: 1498978 - RNA, 19 nt, Artificial Sequence
  Description of Artificial Sequence: Synthetic oligonucleotide
  Sense strand starting at position 1484 of SEQ ID NO: 1244573
uuucgacuauauucuuaga

SEQ ID NO: 1498979 - RNA, 19 nt, Artificial Sequence
  Description of Artificial Sequence: Synthetic oligonucleotide
  Antisense strand to SEQ ID NO: 1498978
ucuaagaauauagucgaaa

SEQ ID NO: 1498980 - RNA, 19 nt, Artificial Sequence
  Description of Artificial Sequence: Synthetic oligonucleotide
  Sense strand starting at position 1486 of SEQ ID NO: 1244573
ucgacuauauucuuagaaa

SEQ ID NO: 1498981 - RNA, 19 nt, Artificial Sequence
  Description of Artificial Sequence: Synthetic oligonucleotide
  Antisense strand to SEQ ID NO: 1498980
uuucuaagaauauagucga

SEQ ID NO: 1498982 - RNA, 19 nt, Artificial Sequence
  Description of Artificial Sequence: Synthetic oligonucleotide
  Sense strand starting at position 1572 of SEQ ID NO: 1244573
guaugaggccugcucgcua

SEQ ID NO: 1498983 - RNA, 19 nt, Artificial Sequence
  Description of Artificial Sequence: Synthetic oligonucleotide
  Antisense strand to SEQ ID NO: 1498982
uagcgagcaggccucauac

SEQ ID NO: 1498984 - RNA, 19 nt, Artificial Sequence
  Description of Artificial Sequence: Synthetic oligonucleotide
  Sense strand starting at position 1593 of SEQ ID NO: 1244573
uuaucaauuucggagagag

SEQ ID NO: 1498985 - RNA, 19 nt, Artificial Sequence
  Description of Artificial Sequence: Synthetic oligonucleotide
  Antisense strand to SEQ ID NO: 1498984
cucucuccgaaauugauaa

SEQ ID NO: 1498986 - RNA, 19 nt, Artificial Sequence
  Description of Artificial Sequence: Synthetic oligonucleotide
  Sense strand starting at position 1632 of SEQ ID NO: 1244573
ggaggcuuugcugggaacu

SEQ ID NO: 1498987 - RNA, 19 nt, Artificial Sequence
  Description of Artificial Sequence: Synthetic oligonucleotide
  Antisense strand to SEQ ID NO: 1498986
aguucccagcaaagccucc

SEQ ID NO: 1498988 - RNA, 19 nt, Artificial Sequence
  Description of Artificial Sequence: Synthetic oligonucleotide
  Sense strand starting at position 1633 of SEQ ID NO: 1244573
gaggcuuugcugggaacua

SEQ ID NO: 1498989 - RNA, 19 nt, Artificial Sequence
  Description of Artificial Sequence: Synthetic oligonucleotide
  Antisense strand to SEQ ID NO: 1498988
uaguucccagcaaagccuc

SEQ ID NO: 1498990 - RNA, 19 nt, Artificial Sequence
  Description of Artificial Sequence: Synthetic oligonucleotide
  Sense strand starting at position 1684 of SEQ ID NO: 1244573
guuccuuuccuccaaagga

SEQ ID NO: 1498991 - RNA, 19 nt, Artificial Sequence
  Description of Artificial Sequence: Synthetic oligonucleotide
  Antisense strand to SEQ ID NO: 1498990
uccuuuggaggaaaggaac

SEQ ID NO: 1498992 - RNA, 19 nt, Artificial Sequence
  Description of Artificial Sequence: Synthetic oligonucleotide
  Sense strand starting at position 2783 of SEQ ID NO: 1244573
agaggaacuucucagauuu

SEQ ID NO: 1498993 - RNA, 19 nt, Artificial Sequence
  Description of Artificial Sequence: Synthetic oligonucleotide
  Antisense strand to SEQ ID NO: 1498992
aaaucugagaaguuccucu

SEQ ID NO: 1498994 - RNA, 19 nt, Artificial Sequence
  Description of Artificial Sequence: Synthetic oligonucleotide
  Sense strand starting at position 2864 of SEQ ID NO: 1244573
ucuuauuacaguggaggua

SEQ ID NO: 1498995 - RNA, 19 nt, Artificial Sequence
  Description of Artificial Sequence: Synthetic oligonucleotide
  Antisense strand to SEQ ID NO: 1498994
uaccuccacuguaauaaga

SEQ ID NO: 1498996 - RNA, 19 nt, Artificial Sequence
  Description of Artificial Sequence: Synthetic oligonucleotide
  Sense strand starting at position 2865 of SEQ ID NO: 1244573
cuuauuacaguggagguau

SEQ ID NO: 1498997 - RNA, 19 nt, Artificial Sequence
  Description of Artificial Sequence: Synthetic oligonucleotide
  Antisense strand to SEQ ID NO: 1498996
auaccuccacuguaauaag

SEQ ID NO: 1498998 - RNA, 19 nt, Artificial Sequence
  Description of Artificial Sequence: Synthetic oligonucleotide
  Sense strand starting at position 2873 of SEQ ID NO: 1244573
aguggagguauuugcagua

SEQ ID NO: 1498999 - RNA, 19 nt, Artificial Sequence
  Description of Artificial Sequence: Synthetic oligonucleotide
  Antisense strand to SEQ ID NO: 1498998
uacugcaaauaccuccacu

SEQ ID NO: 1499000 - RNA, 19 nt, Artificial Sequence
  Description of Artificial Sequence: Synthetic oligonucleotide
  Sense strand starting at position 2892 of SEQ ID NO: 1244573
aaacgugaaggucgacuua

SEQ ID NO: 1499001 - RNA, 19 nt, Artificial Sequence
  Description of Artificial Sequence: Synthetic oligonucleotide
  Antisense strand to SEQ ID NO: 1499000
uaagucgaccuucacguuu

SEQ ID NO: 1499002 - RNA, 19 nt, Artificial Sequence
  Description of Artificial Sequence: Synthetic oligonucleotide
  Sense strand starting at position 2946 of SEQ ID NO: 1244573
gucacacugcuagauuacu

SEQ ID NO: 1499003 - RNA, 19 nt, Artificial Sequence
  Description of Artificial Sequence: Synthetic oligonucleotide
  Antisense strand to SEQ ID NO: 1499002
aguaaucuagcagugugac

SEQ ID NO: 1499004 - RNA, 19 nt, Artificial Sequence
  Description of Artificial Sequence: Synthetic oligonucleotide
  Sense strand starting at position 2951 of SEQ ID NO: 1244573
acugcuagauuacuuauga

SEQ ID NO: 1499005 - RNA, 19 nt, Artificial Sequence
  Description of Artificial Sequence: Synthetic oligonucleotide
  Antisense strand to SEQ ID NO: 1499004
ucauaaguaaucuagcagu

SEQ ID NO: 1499006 - RNA, 19 nt, Artificial Sequence
  Description of Artificial Sequence: Synthetic oligonucleotide
  Sense strand starting at position 2952 of SEQ ID NO: 1244573
cugcuagauuacuuaugac

SEQ ID NO: 1499007 - RNA, 19 nt, Artificial Sequence
  Description of Artificial Sequence: Synthetic oligonucleotide
  Antisense strand to SEQ ID NO: 1499006
gucauaaguaaucuagcag

SEQ ID NO: 1499008 - RNA, 19 nt, Artificial Sequence
  Description of Artificial Sequence: Synthetic oligonucleotide
  Sense strand starting at position 3154 of SEQ ID NO: 1244573
uuugaagaagcuuguacaa

SEQ ID NO: 1499009 - RNA, 19 nt, Artificial Sequence
  Description of Artificial Sequence: Synthetic oligonucleotide
  Antisense strand to SEQ ID NO: 1499008
uuguacaagcuucuucaaa

SEQ ID NO: 1499010 - RNA, 19 nt, Artificial Sequence
  Description of Artificial Sequence: Synthetic oligonucleotide
  Sense strand starting at position 3172 of SEQ ID NO: 1244573
aguguuucugguguuguca

SEQ ID NO: 1499011 - RNA, 19 nt, Artificial Sequence
  Description of Artificial Sequence: Synthetic oligonucleotide
  Antisense strand to SEQ ID NO: 1499010
ugacaacaccagaaacacu

SEQ ID NO: 1499012 - RNA, 19 nt, Artificial Sequence
  Description of Artificial Sequence: Synthetic oligonucleotide
  Sense strand starting at position 3173 of SEQ ID NO: 1244573
guguuucugguguugucau

SEQ ID NO: 1499013 - RNA, 19 nt, Artificial Sequence
  Description of Artificial Sequence: Synthetic oligonucleotide
  Antisense strand to SEQ ID NO: 1499012
augacaacaccagaaacac

SEQ ID NO: 1499014 - RNA, 19 nt, Artificial Sequence
  Description of Artificial Sequence: Synthetic oligonucleotide
  Sense strand starting at position 3180 of SEQ ID NO: 1244573
ugguguugucaugauagaa

SEQ ID NO: 1499015 - RNA, 19 nt, Artificial Sequence
  Description of Artificial Sequence: Synthetic oligonucleotide
  Antisense strand to SEQ ID NO: 1499014
uucuaucaugacaacacca

SEQ ID NO: 1499016 - RNA, 19 nt, Artificial Sequence
  Description of Artificial Sequence: Synthetic oligonucleotide
  Sense strand starting at position 3260 of SEQ ID NO: 1244573
guauucuuagcauagauga

SEQ ID NO: 1499017 - RNA, 19 nt, Artificial Sequence
  Description of Artificial Sequence: Synthetic oligonucleotide
  Antisense strand to SEQ ID NO: 1499016
ucaucuaugcuaagaauac

SEQ ID NO: 1499018 - RNA, 19 nt, Artificial Sequence
  Description of Artificial Sequence: Synthetic oligonucleotide
  Sense strand starting at position 3296 of SEQ ID NO: 1244573
cuuacuaggcaucauugua

SEQ ID NO: 1499019 - RNA, 19 nt, Artificial Sequence
  Description of Artificial Sequence: Synthetic oligonucleotide
  Antisense strand to SEQ ID NO: 1499018
uacaaugaugccuaguaag

SEQ ID NO: 1499020 - RNA, 19 nt, Artificial Sequence
  Description of Artificial Sequence: Synthetic oligonucleotide
  Sense strand starting at position 3353 of SEQ ID NO: 1244573
gugguaccuagacaaaugu

SEQ ID NO: 1499021 - RNA, 19 nt, Artificial Sequence
  Description of Artificial Sequence: Synthetic oligonucleotide
  Antisense strand to SEQ ID NO: 1499020
acauuugucuagguaccac

SEQ ID NO: 1499022 - RNA, 19 nt, Artificial Sequence
  Description of Artificial Sequence: Synthetic oligonucleotide
  Sense strand starting at position 3383 of SEQ ID NO: 1244573
guagguaugaagugacucu

SEQ ID NO: 1499023 - RNA, 19 nt, Artificial Sequence
  Description of Artificial Sequence: Synthetic oligonucleotide
  Antisense strand to SEQ ID NO: 1499022
agagucacuucauaccuac

SEQ ID NO: 1499024 - RNA, 19 nt, Artificial Sequence
  Description of Artificial Sequence: Synthetic oligonucleotide
  Sense strand starting at position 3393 of SEQ ID NO: 1244573
agugacucucucgaguaga

SEQ ID NO: 1499025 - RNA, 19 nt, Artificial Sequence
  Description of Artificial Sequence: Synthetic oligonucleotide
  Antisense strand to SEQ ID NO: 1499024
ucuacucgagagagucacu

SEQ ID NO: 1499026 - RNA, 19 nt, Artificial Sequence
  Description of Artificial Sequence: Synthetic oligonucleotide
  Sense strand starting at position 3396 of SEQ ID NO: 1244573
gacucucucgaguagaaau

SEQ ID NO: 1499027 - RNA, 19 nt, Artificial Sequence
  Description of Artificial Sequence: Synthetic oligonucleotide
  Antisense strand to SEQ ID NO: 1499026
auuucuacucgagagaguc

SEQ ID NO: 1499028 - RNA, 19 nt, Artificial Sequence
  Description of Artificial Sequence: Synthetic oligonucleotide
  Sense strand starting at position 3721 of SEQ ID NO: 1244573
cgguaaauuugcuucuuga

SEQ ID NO: 1499029 - RNA, 19 nt, Artificial Sequence
  Description of Artificial Sequence: Synthetic oligonucleotide
  Antisense strand to SEQ ID NO: 1499028
ucaagaagcaaauuuaccg

SEQ ID NO: 1499030 - RNA, 19 nt, Artificial Sequence
  Description of Artificial Sequence: Synthetic oligonucleotide
  Sense strand starting at position 3786 of SEQ ID NO: 1244573
aggacugauuauccaguuu

SEQ ID NO: 1499031 - RNA, 19 nt, Artificial Sequence
  Description of Artificial Sequence: Synthetic oligonucleotide
  Antisense strand to SEQ ID NO: 1499030
aaacuggauaaucaguccu

SEQ ID NO: 1499032 - RNA, 19 nt, Artificial Sequence
  Description of Artificial Sequence: Synthetic oligonucleotide
  Sense strand starting at position 3831 of SEQ ID NO: 1244573
uggcuugaaucaccacuuu

SEQ ID NO: 1499033 - RNA, 19 nt, Artificial Sequence
  Description of Artificial Sequence: Synthetic oligonucleotide
  Antisense strand to SEQ ID NO: 1499032
aaaguggugauucaagcca

SEQ ID NO: 1499034 - RNA, 19 nt, Artificial Sequence
  Description of Artificial Sequence: Synthetic oligonucleotide
  Sense strand starting at position 3906 of SEQ ID NO: 1244573
cuccaacacuuguuaagua

SEQ ID NO: 1499035 - RNA, 19 nt, Artificial Sequence
  Description of Artificial Sequence: Synthetic oligonucleotide
  Antisense strand to SEQ ID NO: 1499034
uacuuaacaaguguuggag

SEQ ID NO: 1499036 - RNA, 19 nt, Artificial Sequence
  Description of Artificial Sequence: Synthetic oligonucleotide
  Sense strand starting at position 3919 of SEQ ID NO: 1244573
uaaguaauggcugauaggu

SEQ ID NO: 1499037 - RNA, 19 nt, Artificial Sequence
  Description of Artificial Sequence: Synthetic oligonucleotide
  Antisense strand to SEQ ID NO: 1499036
accuaucagccauuacuua

SEQ ID NO: 1499038 - RNA, 19 nt, Artificial Sequence
  Description of Artificial Sequence: Synthetic oligonucleotide
  Sense strand starting at position 3928 of SEQ ID NO: 1244573
gcugauagguuaccuaaca

SEQ ID NO: 1499039 - RNA, 19 nt, Artificial Sequence
  Description of Artificial Sequence: Synthetic oligonucleotide
  Antisense strand to SEQ ID NO: 1499038
uguuagguaaccuaucagc

SEQ ID NO: 1499040 - RNA, 19 nt, Artificial Sequence
  Description of Artificial Sequence: Synthetic oligonucleotide
  Sense strand starting at position 3929 of SEQ ID NO: 1244573
cugauagguuaccuaacau

SEQ ID NO: 1499041 - RNA, 19 nt, Artificial Sequence
  Description of Artificial Sequence: Synthetic oligonucleotide
  Antisense strand to SEQ ID NO: 1499040
auguuagguaaccuaucag

SEQ ID NO: 1499042 - RNA, 19 nt, Artificial Sequence
  Description of Artificial Sequence: Synthetic oligonucleotide
  Sense strand starting at position 2 of SEQ ID NO: 1244574
gugcuaccuucucaaugga

SEQ ID NO: 1499043 - RNA, 19 nt, Artificial Sequence
  Description of Artificial Sequence: Synthetic oligonucleotide
  Antisense strand to SEQ ID NO: 1499042
uccauugagaagguagcac

SEQ ID NO: 1499044 - RNA, 19 nt, Artificial Sequence
  Description of Artificial Sequence: Synthetic oligonucleotide
  Sense strand starting at position 55 of SEQ ID NO: 1244574
augugucuguccucaaugu

SEQ ID NO: 1499045 - RNA, 19 nt, Artificial Sequence
  Description of Artificial Sequence: Synthetic oligonucleotide
  Antisense strand to SEQ ID NO: 1499044
acauugaggacagacacau

SEQ ID NO: 1499046 - RNA, 19 nt, Artificial Sequence
  Description of Artificial Sequence: Synthetic oligonucleotide
  Sense strand starting at position 271 of SEQ ID NO: 1244574
cacagagaaugcuggaguu

SEQ ID NO: 1499047 - RNA, 19 nt, Artificial Sequence
  Description of Artificial Sequence: Synthetic oligonucleotide
  Antisense strand to SEQ ID NO: 1499046
aacuccagcauucucugug

SEQ ID NO: 1499048 - RNA, 19 nt, Artificial Sequence
  Description of Artificial Sequence: Synthetic oligonucleotide
  Sense strand starting at position 360 of SEQ ID NO: 1244574
ggaagaacucuguguggaa

SEQ ID NO: 1499049 - RNA, 19 nt, Artificial Sequence
  Description of Artificial Sequence: Synthetic oligonucleotide
  Antisense strand to SEQ ID NO: 1499048
uuccacacagaguucuucc

SEQ ID NO: 1499050 - RNA, 19 nt, Artificial Sequence
  Description of Artificial Sequence: Synthetic oligonucleotide
  Sense strand starting at position 361 of SEQ ID NO: 1244574
gaagaacucuguguggaau

SEQ ID NO: 1499051 - RNA, 19 nt, Artificial Sequence
  Description of Artificial Sequence: Synthetic oligonucleotide
  Antisense strand to SEQ ID NO: 1499050
auuccacacagaguucuuc

SEQ ID NO: 1499052 - RNA, 19 nt, Artificial Sequence
  Description of Artificial Sequence: Synthetic oligonucleotide
  Sense strand starting at position 362 of SEQ ID NO: 1244574
aagaacucuguguggaaua

SEQ ID NO: 1499053 - RNA, 19 nt, Artificial Sequence
  Description of Artificial Sequence: Synthetic oligonucleotide
  Antisense strand to SEQ ID NO: 1499052
uauuccacacagaguucuu

SEQ ID NO: 1499054 - RNA, 19 nt, Artificial Sequence
  Description of Artificial Sequence: Synthetic oligonucleotide
  Sense strand starting at position 363 of SEQ ID NO: 1244574
agaacucuguguggaauau

SEQ ID NO: 1499055 - RNA, 19 nt, Artificial Sequence
  Description of Artificial Sequence: Synthetic oligonucleotide
  Antisense strand to SEQ ID NO: 1499054
auauuccacacagaguucu

SEQ ID NO: 1499056 - RNA, 19 nt, Artificial Sequence
  Description of Artificial Sequence: Synthetic oligonucleotide
  Sense strand starting at position 375 of SEQ ID NO: 1244574
ggaauaugucccugcugca

SEQ ID NO: 1499057 - RNA, 19 nt, Artificial Sequence
  Description of Artificial Sequence: Synthetic oligonucleotide
  Antisense strand to SEQ ID NO: 1499056
ugcagcagggacauauucc

SEQ ID NO: 1499058 - RNA, 19 nt, Artificial Sequence
  Description of Artificial Sequence: Synthetic oligonucleotide
  Sense strand starting at position 1739 of SEQ ID NO: 1244574
guggagguuccgcagaaga

SEQ ID NO: 1499059 - RNA, 19 nt, Artificial Sequence
  Description of Artificial Sequence: Synthetic oligonucleotide
  Antisense strand to SEQ ID NO: 1499058
ucuucugcggaaccuccac

SEQ ID NO: 1499060 - RNA, 19 nt, Artificial Sequence
  Description of Artificial Sequence: Synthetic oligonucleotide
  Sense strand starting at position 1741 of SEQ ID NO: 1244574
ggagguuccgcagaagaaa

SEQ ID NO: 1499061 - RNA, 19 nt, Artificial Sequence
  Description of Artificial Sequence: Synthetic oligonucleotide
  Antisense strand to SEQ ID NO: 1499060
uuucuucugcggaaccucc

SEQ ID NO: 1499062 - RNA, 19 nt, Artificial Sequence
  Description of Artificial Sequence: Synthetic oligonucleotide
  Sense strand starting at position 2044 of SEQ ID NO: 1244574
gccagagcgguugcaucau

SEQ ID NO: 1499063 - RNA, 19 nt, Artificial Sequence
  Description of Artificial Sequence: Synthetic oligonucleotide
  Antisense strand to SEQ ID NO: 1499062
augaugcaaccgcucuggc

SEQ ID NO: 1499064 - RNA, 19 nt, Artificial Sequence
  Description of Artificial Sequence: Synthetic oligonucleotide
  Sense strand starting at position 2351 of SEQ ID NO: 1244574
cuucuacugucaucgaguu

SEQ ID NO: 1499065 - RNA, 19 nt, Artificial Sequence
  Description of Artificial Sequence: Synthetic oligonucleotide
  Antisense strand to SEQ ID NO: 1499064
aacucgaugacaguagaag

SEQ ID NO: 1499066 - RNA, 19 nt, Artificial Sequence
  Description of Artificial Sequence: Synthetic oligonucleotide
  Sense strand starting at position 2352 of SEQ ID NO: 1244574
uucuacugucaucgaguuu

SEQ ID NO: 1499067 - RNA, 19 nt, Artificial Sequence
  Description of Artificial Sequence: Synthetic oligonucleotide
  Antisense strand to SEQ ID NO: 1499066
aaacucgaugacaguagaa

SEQ ID NO: 1499068 - RNA, 19 nt, Artificial Sequence
  Description of Artificial Sequence: Synthetic oligonucleotide
  Sense strand starting at position 2358 of SEQ ID NO: 1244574
ugucaucgaguuuggagaa

SEQ ID NO: 1499069 - RNA, 19 nt, Artificial Sequence
  Description of Artificial Sequence: Synthetic oligonucleotide
  Antisense strand to SEQ ID NO: 1499068
uucuccaaacucgaugaca

SEQ ID NO: 1499070 - RNA, 19 nt, Artificial Sequence
  Description of Artificial Sequence: Synthetic oligonucleotide
  Sense strand starting at position 2917 of SEQ ID NO: 1244574
cccggagcauccuccaaua

SEQ ID NO: 1499071 - RNA, 19 nt, Artificial Sequence
  Description of Artificial Sequence: Synthetic oligonucleotide
  Antisense strand to SEQ ID NO: 1499070
uauuggaggaugcuccggg

SEQ ID NO: 1499072 - RNA, 19 nt, Artificial Sequence
  Description of Artificial Sequence: Synthetic oligonucleotide
  Sense strand starting at position 2993 of SEQ ID NO: 1244574
ugaggacaugcucagaguu

SEQ ID NO: 1499073 - RNA, 19 nt, Artificial Sequence
  Description of Artificial Sequence: Synthetic oligonucleotide
  Antisense strand to SEQ ID NO: 1499072
aacucugagcauguccuca

SEQ ID NO: 1499074 - RNA, 19 nt, Artificial Sequence
  Description of Artificial Sequence: Synthetic oligonucleotide
  Sense strand starting at position 3149 of SEQ ID NO: 1244574
ugugcuguaucuuagauga

SEQ ID NO: 1499075 - RNA, 19 nt, Artificial Sequence
  Description of Artificial Sequence: Synthetic oligonucleotide
  Antisense strand to SEQ ID NO: 1499074
ucaucuaagauacagcaca

SEQ ID NO: 1499076 - RNA, 19 nt, Artificial Sequence
  Description of Artificial Sequence: Synthetic oligonucleotide
  Sense strand starting at position 3151 of SEQ ID NO: 1244574
ugcuguaucuuagaugaug

SEQ ID NO: 1499077 - RNA, 19 nt, Artificial Sequence
  Description of Artificial Sequence: Synthetic oligonucleotide
  Antisense strand to SEQ ID NO: 1499076
caucaucuaagauacagca

SEQ ID NO: 1499078 - RNA, 19 nt, Artificial Sequence
  Description of Artificial Sequence: Synthetic oligonucleotide
  Sense strand starting at position 3172 of SEQ ID NO: 1244574
aggcuauucuagcacauca

SEQ ID NO: 1499079 - RNA, 19 nt, Artificial Sequence
  Description of Artificial Sequence: Synthetic oligonucleotide
  Antisense strand to SEQ ID NO: 1499078
ugaugugcuagaauagccu

SEQ ID NO: 1499080 - RNA, 19 nt, Artificial Sequence
  Description of Artificial Sequence: Synthetic oligonucleotide
  Sense strand starting at position 3202 of SEQ ID NO: 1244574
cugggaugcuucugccaca

SEQ ID NO: 1499081 - RNA, 19 nt, Artificial Sequence
  Description of Artificial Sequence: Synthetic oligonucleotide
  Antisense strand to SEQ ID NO: 1499080
uguggcagaagcaucccag

SEQ ID NO: 1499082 - RNA, 19 nt, Artificial Sequence
  Description of Artificial Sequence: Synthetic oligonucleotide
  Sense strand starting at position 3323 of SEQ ID NO: 1244574
ggaagagcuuguccagaug

SEQ ID NO: 1499083 - RNA, 19 nt, Artificial Sequence
  Description of Artificial Sequence: Synthetic oligonucleotide
  Antisense strand to SEQ ID NO: 1499082
caucuggacaagcucuucc

SEQ ID NO: 1499084 - RNA, 19 nt, Artificial Sequence
  Description of Artificial Sequence: Synthetic oligonucleotide
  Sense strand starting at position 3374 of SEQ ID NO: 1244574
ucgccuaggcgcuuugaga

SEQ ID NO: 1499085 - RNA, 19 nt, Artificial Sequence
  Description of Artificial Sequence: Synthetic oligonucleotide
  Antisense strand to SEQ ID NO: 1499084
ucucaaagcgccuaggcga

SEQ ID NO: 1499086 - RNA, 19 nt, Artificial Sequence
  Description of Artificial Sequence: Synthetic oligonucleotide
  Sense strand starting at position 3516 of SEQ ID NO: 1244574
aggacugacucugaaggaa

SEQ ID NO: 1499087 - RNA, 19 nt, Artificial Sequence
  Description of Artificial Sequence: Synthetic oligonucleotide
  Antisense strand to SEQ ID NO: 1499086
uuccuucagagucaguccu

SEQ ID NO: 1499088 - RNA, 19 nt, Artificial Sequence
  Description of Artificial Sequence: Synthetic oligonucleotide
  Sense strand starting at position 3622 of SEQ ID NO: 1244574
uugggaaguuggugacaau

SEQ ID NO: 1499089 - RNA, 19 nt, Artificial Sequence
  Description of Artificial Sequence: Synthetic oligonucleotide
  Antisense strand to SEQ ID NO: 1499088
auugucaccaacuucccaa

SEQ ID NO: 1499090 - RNA, 19 nt, Artificial Sequence
  Description of Artificial Sequence: Synthetic oligonucleotide
  Sense strand starting at position 3625 of SEQ ID NO: 1244574
ggaaguuggugacaauuaa

SEQ ID NO: 1499091 - RNA, 19 nt, Artificial Sequence
  Description of Artificial Sequence: Synthetic oligonucleotide
  Antisense strand to SEQ ID NO: 1499090
uuaauugucaccaacuucc

SEQ ID NO: 1499092 - RNA, 19 nt, Artificial Sequence
  Description of Artificial Sequence: Synthetic oligonucleotide
  Sense strand starting at position 3650 of SEQ ID NO: 1244574
ucagaauucuggccacaug

SEQ ID NO: 1499093 - RNA, 19 nt, Artificial Sequence
  Description of Artificial Sequence: Synthetic oligonucleotide
  Antisense strand to SEQ ID NO: 1499092
cauguggccagaauucuga

SEQ ID NO: 1499094 - RNA, 19 nt, Artificial Sequence
  Description of Artificial Sequence: Synthetic oligonucleotide
  Sense strand starting at position 3689 of SEQ ID NO: 1244574
cuggguccucuccaagacu

SEQ ID NO: 1499095 - RNA, 19 nt, Artificial Sequence
  Description of Artificial Sequence: Synthetic oligonucleotide
  Antisense strand to SEQ ID NO: 1499094
agucuuggagaggacccag

SEQ ID NO: 1499096 - RNA, 19 nt, Artificial Sequence
  Description of Artificial Sequence: Synthetic oligonucleotide
  Sense strand starting at position 3866 of SEQ ID NO: 1244574
gacccuguuuguuggcuaa

SEQ ID NO: 1499097 - RNA, 19 nt, Artificial Sequence
  Description of Artificial Sequence: Synthetic oligonucleotide
  Antisense strand to SEQ ID NO: 1499096
uuagccaacaaacaggguc

SEQ ID NO: 1499098 - RNA, 19 nt, Artificial Sequence
  Description of Artificial Sequence: Synthetic oligonucleotide
  Sense strand starting at position 91 of SEQ ID NO: 1244575
gugcuaccuucucaaugga

SEQ ID NO: 1499099 - RNA, 19 nt, Artificial Sequence
  Description of Artificial Sequence: Synthetic oligonucleotide
  Antisense strand to SEQ ID NO: 1499098
uccauugagaagguagcac

SEQ ID NO: 1499100 - RNA, 19 nt, Artificial Sequence
  Description of Artificial Sequence: Synthetic oligonucleotide
  Sense strand starting at position 144 of SEQ ID NO: 1244575
augugucuguccucaaugu

SEQ ID NO: 1499101 - RNA, 19 nt, Artificial Sequence
  Description of Artificial Sequence: Synthetic oligonucleotide
  Antisense strand to SEQ ID NO: 1499100
acauugaggacagacacau

SEQ ID NO: 1499102 - RNA, 19 nt, Artificial Sequence
  Description of Artificial Sequence: Synthetic oligonucleotide
  Sense strand starting at position 360 of SEQ ID NO: 1244575
cacagagaaugcuggaguu

SEQ ID NO: 1499103 - RNA, 19 nt, Artificial Sequence
  Description of Artificial Sequence: Synthetic oligonucleotide
  Antisense strand to SEQ ID NO: 1499102
aacuccagcauucucugug

SEQ ID NO: 1499104 - RNA, 19 nt, Artificial Sequence
  Description of Artificial Sequence: Synthetic oligonucleotide
  Sense strand starting at position 449 of SEQ ID NO: 1244575
ggaagaacucuguguggaa

SEQ ID NO: 1499105 - RNA, 19 nt, Artificial Sequence
  Description of Artificial Sequence: Synthetic oligonucleotide
  Antisense strand to SEQ ID NO: 1499104
uuccacacagaguucuucc

SEQ ID NO: 1499106 - RNA, 19 nt, Artificial Sequence
  Description of Artificial Sequence: Synthetic oligonucleotide
  Sense strand starting at position 450 of SEQ ID NO: 1244575
gaagaacucuguguggaau

SEQ ID NO: 1499107 - RNA, 19 nt, Artificial Sequence
  Description of Artificial Sequence: Synthetic oligonucleotide
  Antisense strand to SEQ ID NO: 1499106
auuccacacagaguucuuc

SEQ ID NO: 1499108 - RNA, 19 nt, Artificial Sequence
  Description of Artificial Sequence: Synthetic oligonucleotide
  Sense strand starting at position 451 of SEQ ID NO: 1244575
aagaacucuguguggaaua

SEQ ID NO: 1499109 - RNA, 19 nt, Artificial Sequence
  Description of Artificial Sequence: Synthetic oligonucleotide
  Antisense strand to SEQ ID NO: 1499108
uauuccacacagaguucuu

SEQ ID NO: 1499110 - RNA, 19 nt, Artificial Sequence
  Description of Artificial Sequence: Synthetic oligonucleotide
  Sense strand starting at position 452 of SEQ ID NO: 1244575
agaacucuguguggaauau

SEQ ID NO: 1499111 - RNA, 19 nt, Artificial Sequence
  Description of Artificial Sequence: Synthetic oligonucleotide
  Antisense strand to SEQ ID NO: 1499110
auauuccacacagaguucu

SEQ ID NO: 1499112 - RNA, 19 nt, Artificial Sequence
  Description of Artificial Sequence: Synthetic oligonucleotide
  Sense strand starting at position 464 of SEQ ID NO: 1244575
ggaauaugucccugcugca

SEQ ID NO: 1499113 - RNA, 19 nt, Artificial Sequence
  Description of Artificial Sequence: Synthetic oligonucleotide
  Antisense strand to SEQ ID NO: 1499112
ugcagcagggacauauucc

SEQ ID NO: 1499114 - RNA, 19 nt, Artificial Sequence
  Description of Artificial Sequence: Synthetic oligonucleotide
  Sense strand starting at position 1828 of SEQ ID NO: 1244575
guggagguuccgcagaaga

SEQ ID NO: 1499115 - RNA, 19 nt, Artificial Sequence
  Description of Artificial Sequence: Synthetic oligonucleotide
  Antisense strand to SEQ ID NO: 1499114
ucuucugcggaaccuccac

SEQ ID NO: 1499116 - RNA, 19 nt, Artificial Sequence
  Description of Artificial Sequence: Synthetic oligonucleotide
  Sense strand starting at position 1830 of SEQ ID NO: 1244575
ggagguuccgcagaagaaa

SEQ ID NO: 1499117 - RNA, 19 nt, Artificial Sequence
  Description of Artificial Sequence: Synthetic oligonucleotide
  Antisense strand to SEQ ID NO: 1499116
uuucuucugcggaaccucc

SEQ ID NO: 1499118 - RNA, 19 nt, Artificial Sequence
  Description of Artificial Sequence: Synthetic oligonucleotide
  Sense strand starting at position 2133 of SEQ ID NO: 1244575
gccagagcgguugcaucau

SEQ ID NO: 1499119 - RNA, 19 nt, Artificial Sequence
  Description of Artificial Sequence: Synthetic oligonucleotide
  Antisense strand to SEQ ID NO: 1499118
augaugcaaccgcucuggc

SEQ ID NO: 1499120 - RNA, 19 nt, Artificial Sequence
  Description of Artificial Sequence: Synthetic oligonucleotide
  Sense strand starting at position 2440 of SEQ ID NO: 1244575
cuucuacugucaucgaguu

SEQ ID NO: 1499121 - RNA, 19 nt, Artificial Sequence
  Description of Artificial Sequence: Synthetic oligonucleotide
  Antisense strand to SEQ ID NO: 1499120
aacucgaugacaguagaag

SEQ ID NO: 1499122 - RNA, 19 nt, Artificial Sequence
  Description of Artificial Sequence: Synthetic oligonucleotide
  Sense strand starting at position 2441 of SEQ ID NO: 1244575
uucuacugucaucgaguuu

SEQ ID NO: 1499123 - RNA, 19 nt, Artificial Sequence
  Description of Artificial Sequence: Synthetic oligonucleotide
  Antisense strand to SEQ ID NO: 1499122
aaacucgaugacaguagaa

SEQ ID NO: 1499124 - RNA, 19 nt, Artificial Sequence
  Description of Artificial Sequence: Synthetic oligonucleotide
  Sense strand starting at position 2447 of SEQ ID NO: 1244575
ugucaucgaguuuggagaa

SEQ ID NO: 1499125 - RNA, 19 nt, Artificial Sequence
  Description of Artificial Sequence: Synthetic oligonucleotide
  Antisense strand to SEQ ID NO: 1499124
uucuccaaacucgaugaca

SEQ ID NO: 1499126 - RNA, 19 nt, Artificial Sequence
  Description of Artificial Sequence: Synthetic oligonucleotide
  Sense strand starting at position 3006 of SEQ ID NO: 1244575
cccggagcauccuccaaua

SEQ ID NO: 1499127 - RNA, 19 nt, Artificial Sequence
  Description of Artificial Sequence: Synthetic oligonucleotide
  Antisense strand to SEQ ID NO: 1499126
uauuggaggaugcuccggg

SEQ ID NO: 1499128 - RNA, 19 nt, Artificial Sequence
  Description of Artificial Sequence: Synthetic oligonucleotide
  Sense strand starting at position 3082 of SEQ ID NO: 1244575
ugaggacaugcucagaguu

SEQ ID NO: 1499129 - RNA, 19 nt, Artificial Sequence
  Description of Artificial Sequence: Synthetic oligonucleotide
  Antisense strand to SEQ ID NO: 1499128
aacucugagcauguccuca

SEQ ID NO: 1499130 - RNA, 19 nt, Artificial Sequence
  Description of Artificial Sequence: Synthetic oligonucleotide
  Sense strand starting at position 3238 of SEQ ID NO: 1244575
ugugcuguaucuuagauga

SEQ ID NO: 1499131 - RNA, 19 nt, Artificial Sequence
  Description of Artificial Sequence: Synthetic oligonucleotide
  Antisense strand to SEQ ID NO: 1499130
ucaucuaagauacagcaca

SEQ ID NO: 1499132 - RNA, 19 nt, Artificial Sequence
  Description of Artificial Sequence: Synthetic oligonucleotide
  Sense strand starting at position 3240 of SEQ ID NO: 1244575
ugcuguaucuuagaugaug

SEQ ID NO: 1499133 - RNA, 19 nt, Artificial Sequence
  Description of Artificial Sequence: Synthetic oligonucleotide
  Antisense strand to SEQ ID NO: 1499132
caucaucuaagauacagca

SEQ ID NO: 1499134 - RNA, 19 nt, Artificial Sequence
  Description of Artificial Sequence: Synthetic oligonucleotide
  Sense strand starting at position 3261 of SEQ ID NO: 1244575
aggcuauucuagcacauca

SEQ ID NO: 1499135 - RNA, 19 nt, Artificial Sequence
  Description of Artificial Sequence: Synthetic oligonucleotide
  Antisense strand to SEQ ID NO: 1499134
ugaugugcuagaauagccu

SEQ ID NO: 1499136 - RNA, 19 nt, Artificial Sequence
  Description of Artificial Sequence: Synthetic oligonucleotide
  Sense strand starting at position 3291 of SEQ ID NO: 1244575
cugggaugcuucugccaca

SEQ ID NO: 1499137 - RNA, 19 nt, Artificial Sequence
  Description of Artificial Sequence: Synthetic oligonucleotide
  Antisense strand to SEQ ID NO: 1499136
uguggcagaagcaucccag

SEQ ID NO: 1499138 - RNA, 19 nt, Artificial Sequence
  Description of Artificial Sequence: Synthetic oligonucleotide
  Sense strand starting at position 3412 of SEQ ID NO: 1244575
ggaagagcuuguccagaug

SEQ ID NO: 1499139 - RNA, 19 nt, Artificial Sequence
  Description of Artificial Sequence: Synthetic oligonucleotide
  Antisense strand to SEQ ID NO: 1499138
caucuggacaagcucuucc

SEQ ID NO: 1499140 - RNA, 19 nt, Artificial Sequence
  Description of Artificial Sequence: Synthetic oligonucleotide
  Sense strand starting at position 3463 of SEQ ID NO: 1244575
ucgccuaggcgcuuugaga

SEQ ID NO: 1499141 - RNA, 19 nt, Artificial Sequence
  Description of Artificial Sequence: Synthetic oligonucleotide
  Antisense strand to SEQ ID NO: 1499140
ucucaaagcgccuaggcga

SEQ ID NO: 1499142 - RNA, 19 nt, Artificial Sequence
  Description of Artificial Sequence: Synthetic oligonucleotide
  Sense strand starting at position 3605 of SEQ ID NO: 1244575
aggacugacucugaaggaa

SEQ ID NO: 1499143 - RNA, 19 nt, Artificial Sequence
  Description of Artificial Sequence: Synthetic oligonucleotide
  Antisense strand to SEQ ID NO: 1499142
uuccuucagagucaguccu

SEQ ID NO: 1499144 - RNA, 19 nt, Artificial Sequence
  Description of Artificial Sequence: Synthetic oligonucleotide
  Sense strand starting at position 3711 of SEQ ID NO: 1244575
uugggaaguuggugacaau

SEQ ID NO: 1499145 - RNA, 19 nt, Artificial Sequence
  Description of Artificial Sequence: Synthetic oligonucleotide
  Antisense strand to SEQ ID NO: 1499144
auugucaccaacuucccaa

SEQ ID NO: 1499146 - RNA, 19 nt, Artificial Sequence
  Description of Artificial Sequence: Synthetic oligonucleotide
  Sense strand starting at position 3714 of SEQ ID NO: 1244575
ggaaguuggugacaauuaa

SEQ ID NO: 1499147 - RNA, 19 nt, Artificial Sequence
  Description of Artificial Sequence: Synthetic oligonucleotide
  Antisense strand to SEQ ID NO: 1499146
uuaauugucaccaacuucc

SEQ ID NO: 1499148 - RNA, 19 nt, Artificial Sequence
  Description of Artificial Sequence: Synthetic oligonucleotide
  Sense strand starting at position 3739 of SEQ ID NO: 1244575
ucagaauucuggccacaug

SEQ ID NO: 1499149 - RNA, 19 nt, Artificial Sequence
  Description of Artificial Sequence: Synthetic oligonucleotide
  Antisense strand to SEQ ID NO: 1499148
cauguggccagaauucuga

SEQ ID NO: 1499150 - RNA, 19 nt, Artificial Sequence
  Description of Artificial Sequence: Synthetic oligonucleotide
  Sense strand starting at position 3778 of SEQ ID NO: 1244575
cuggguccucuccaagacu

SEQ ID NO: 1499151 - RNA, 19 nt, Artificial Sequence
  Description of Artificial Sequence: Synthetic oligonucleotide
  Antisense strand to SEQ ID NO: 1499150
agucuuggagaggacccag

SEQ ID NO: 1499152 - RNA, 19 nt, Artificial Sequence
  Description of Artificial Sequence: Synthetic oligonucleotide
  Sense strand starting at position 3955 of SEQ ID NO: 1244575
gacccuguuuguuggcuaa

SEQ ID NO: 1499153 - RNA, 19 nt, Artificial Sequence
  Description of Artificial Sequence: Synthetic oligonucleotide
  Antisense strand to SEQ ID NO: 1499152
uuagccaacaaacaggguc

SEQ ID NO: 1499154 - RNA, 19 nt, Artificial Sequence
  Description of Artificial Sequence: Synthetic oligonucleotide
  Sense strand starting at position 73 of SEQ ID NO: 1244576
gugcuaccuucucaaugga

SEQ ID NO: 1499155 - RNA, 19 nt, Artificial Sequence
  Description of Artificial Sequence: Synthetic oligonucleotide
  Antisense strand to SEQ ID NO: 1499154
uccauugagaagguagcac

SEQ ID NO: 1499156 - RNA, 19 nt, Artificial Sequence
  Description of Artificial Sequence: Synthetic oligonucleotide
  Sense strand starting at position 126 of SEQ ID NO: 1244576
augugucuguccucaaugu

SEQ ID NO: 1499157 - RNA, 19 nt, Artificial Sequence
  Description of Artificial Sequence: Synthetic oligonucleotide
  Antisense strand to SEQ ID NO: 1499156
acauugaggacagacacau

SEQ ID NO: 1499158 - RNA, 19 nt, Artificial Sequence
  Description of Artificial Sequence: Synthetic oligonucleotide
  Sense strand starting at position 342 of SEQ ID NO: 1244576
cacagagaaugcuggaguu

SEQ ID NO: 1499159 - RNA, 19 nt, Artificial Sequence
  Description of Artificial Sequence: Synthetic oligonucleotide
  Antisense strand to SEQ ID NO: 1499158
aacuccagcauucucugug

SEQ ID NO: 1499160 - RNA, 19 nt, Artificial Sequence
  Description of Artificial Sequence: Synthetic oligonucleotide
  Sense strand starting at position 431 of SEQ ID NO: 1244576
ggaagaacucuguguggaa

SEQ ID NO: 1499161 - RNA, 19 nt, Artificial Sequence
  Description of Artificial Sequence: Synthetic oligonucleotide
  Antisense strand to SEQ ID NO: 1499160
uuccacacagaguucuucc

SEQ ID NO: 1499162 - RNA, 19 nt, Artificial Sequence
  Description of Artificial Sequence: Synthetic oligonucleotide
  Sense strand starting at position 432 of SEQ ID NO: 1244576
gaagaacucuguguggaau

SEQ ID NO: 1499163 - RNA, 19 nt, Artificial Sequence
  Description of Artificial Sequence: Synthetic oligonucleotide
  Antisense strand to SEQ ID NO: 1499162
auuccacacagaguucuuc

SEQ ID NO: 1499164 - RNA, 19 nt, Artificial Sequence
  Description of Artificial Sequence: Synthetic oligonucleotide
  Sense strand starting at position 433 of SEQ ID NO: 1244576
aagaacucuguguggaaua

SEQ ID NO: 1499165 - RNA, 19 nt, Artificial Sequence
  Description of Artificial Sequence: Synthetic oligonucleotide
  Antisense strand to SEQ ID NO: 1499164
uauuccacacagaguucuu

SEQ ID NO: 1499166 - RNA, 19 nt, Artificial Sequence
  Description of Artificial Sequence: Synthetic oligonucleotide
  Sense strand starting at position 434 of SEQ ID NO: 1244576
agaacucuguguggaauau

SEQ ID NO: 1499167 - RNA, 19 nt, Artificial Sequence
  Description of Artificial Sequence: Synthetic oligonucleotide
  Antisense strand to SEQ ID NO: 1499166
auauuccacacagaguucu

SEQ ID NO: 1499168 - RNA, 19 nt, Artificial Sequence
  Description of Artificial Sequence: Synthetic oligonucleotide
  Sense strand starting at position 446 of SEQ ID NO: 1244576
ggaauaugucccugcugca

SEQ ID NO: 1499169 - RNA, 19 nt, Artificial Sequence
  Description of Artificial Sequence: Synthetic oligonucleotide
  Antisense strand to SEQ ID NO: 1499168
ugcagcagggacauauucc

SEQ ID NO: 1499170 - RNA, 19 nt, Artificial Sequence
  Description of Artificial Sequence: Synthetic oligonucleotide
  Sense strand starting at position 1810 of SEQ ID NO: 1244576
guggagguuccgcagaaga

SEQ ID NO: 1499171 - RNA, 19 nt, Artificial Sequence
  Description of Artificial Sequence: Synthetic oligonucleotide
  Antisense strand to SEQ ID NO: 1499170
ucuucugcggaaccuccac

SEQ ID NO: 1499172 - RNA, 19 nt, Artificial Sequence
  Description of Artificial Sequence: Synthetic oligonucleotide
  Sense strand starting at position 1812 of SEQ ID NO: 1244576
ggagguuccgcagaagaaa

SEQ ID NO: 1499173 - RNA, 19 nt, Artificial Sequence
  Description of Artificial Sequence: Synthetic oligonucleotide
  Antisense strand to SEQ ID NO: 1499172
uuucuucugcggaaccucc

SEQ ID NO: 1499174 - RNA, 19 nt, Artificial Sequence
  Description of Artificial Sequence: Synthetic oligonucleotide
  Sense strand starting at position 2115 of SEQ ID NO: 1244576
gccagagcgguugcaucau

SEQ ID NO: 1499175 - RNA, 19 nt, Artificial Sequence
  Description of Artificial Sequence: Synthetic oligonucleotide
  Antisense strand to SEQ ID NO: 1499174
augaugcaaccgcucuggc

SEQ ID NO: 1499176 - RNA, 19 nt, Artificial Sequence
  Description of Artificial Sequence: Synthetic oligonucleotide
  Sense strand starting at position 2422 of SEQ ID NO: 1244576
cuucuacugucaucgaguu

SEQ ID NO: 1499177 - RNA, 19 nt, Artificial Sequence
  Description of Artificial Sequence: Synthetic oligonucleotide
  Antisense strand to SEQ ID NO: 1499176
aacucgaugacaguagaag

SEQ ID NO: 1499178 - RNA, 19 nt, Artificial Sequence
  Description of Artificial Sequence: Synthetic oligonucleotide
  Sense strand starting at position 2423 of SEQ ID NO: 1244576
uucuacugucaucgaguuu

SEQ ID NO: 1499179 - RNA, 19 nt, Artificial Sequence
  Description of Artificial Sequence: Synthetic oligonucleotide
  Antisense strand to SEQ ID NO: 1499178
aaacucgaugacaguagaa

SEQ ID NO: 1499180 - RNA, 19 nt, Artificial Sequence
  Description of Artificial Sequence: Synthetic oligonucleotide
  Sense strand starting at position 2429 of SEQ ID NO: 1244576
ugucaucgaguuuggagaa

SEQ ID NO: 1499181 - RNA, 19 nt, Artificial Sequence
  Description of Artificial Sequence: Synthetic oligonucleotide
  Antisense strand to SEQ ID NO: 1499180
uucuccaaacucgaugaca

SEQ ID NO: 1499182 - RNA, 19 nt, Artificial Sequence
  Description of Artificial Sequence: Synthetic oligonucleotide
  Sense strand starting at position 2988 of SEQ ID NO: 1244576
cccggagcauccuccaaua

SEQ ID NO: 1499183 - RNA, 19 nt, Artificial Sequence
  Description of Artificial Sequence: Synthetic oligonucleotide
  Antisense strand to SEQ ID NO: 1499182
uauuggaggaugcuccggg

SEQ ID NO: 1499184 - RNA, 19 nt, Artificial Sequence
  Description of Artificial Sequence: Synthetic oligonucleotide
  Sense strand starting at position 3064 of SEQ ID NO: 1244576
ugaggacaugcucagaguu

SEQ ID NO: 1499185 - RNA, 19 nt, Artificial Sequence
  Description of Artificial Sequence: Synthetic oligonucleotide
  Antisense strand to SEQ ID NO: 1499184
aacucugagcauguccuca

SEQ ID NO: 1499186 - RNA, 19 nt, Artificial Sequence
  Description of Artificial Sequence: Synthetic oligonucleotide
  Sense strand starting at position 3220 of SEQ ID NO: 1244576
ugugcuguaucuuagauga

SEQ ID NO: 1499187 - RNA, 19 nt, Artificial Sequence
  Description of Artificial Sequence: Synthetic oligonucleotide
  Antisense strand to SEQ ID NO: 1499186
ucaucuaagauacagcaca

SEQ ID NO: 1499188 - RNA, 19 nt, Artificial Sequence
  Description of Artificial Sequence: Synthetic oligonucleotide
  Sense strand starting at position 3222 of SEQ ID NO: 1244576
ugcuguaucuuagaugaug

SEQ ID NO: 1499189 - RNA, 19 nt, Artificial Sequence
  Description of Artificial Sequence: Synthetic oligonucleotide
  Antisense strand to SEQ ID NO: 1499188
caucaucuaagauacagca

SEQ ID NO: 1499190 - RNA, 19 nt, Artificial Sequence
  Description of Artificial Sequence: Synthetic oligonucleotide
  Sense strand starting at position 3243 of SEQ ID NO: 1244576
aggcuauucuagcacauca

SEQ ID NO: 1499191 - RNA, 19 nt, Artificial Sequence
  Description of Artificial Sequence: Synthetic oligonucleotide
  Antisense strand to SEQ ID NO: 1499190
ugaugugcuagaauagccu

SEQ ID NO: 1499192 - RNA, 19 nt, Artificial Sequence
  Description of Artificial Sequence: Synthetic oligonucleotide
  Sense strand starting at position 3273 of SEQ ID NO: 1244576
cugggaugcuucugccaca

SEQ ID NO: 1499193 - RNA, 19 nt, Artificial Sequence
  Description of Artificial Sequence: Synthetic oligonucleotide
  Antisense strand to SEQ ID NO: 1499192
uguggcagaagcaucccag

SEQ ID NO: 1499194 - RNA, 19 nt, Artificial Sequence
  Description of Artificial Sequence: Synthetic oligonucleotide
  Sense strand starting at position 3394 of SEQ ID NO: 1244576
ggaagagcuuguccagaug

SEQ ID NO: 1499195 - RNA, 19 nt, Artificial Sequence
  Description of Artificial Sequence: Synthetic oligonucleotide
  Antisense strand to SEQ ID NO: 1499194
caucuggacaagcucuucc

SEQ ID NO: 1499196 - RNA, 19 nt, Artificial Sequence
  Description of Artificial Sequence: Synthetic oligonucleotide
  Sense strand starting at position 3445 of SEQ ID NO: 1244576
ucgccuaggcgcuuugaga

SEQ ID NO: 1499197 - RNA, 19 nt, Artificial Sequence
  Description of Artificial Sequence: Synthetic oligonucleotide
  Antisense strand to SEQ ID NO: 1499196
ucucaaagcgccuaggcga

SEQ ID NO: 1499198 - RNA, 19 nt, Artificial Sequence
  Description of Artificial Sequence: Synthetic oligonucleotide
  Sense strand starting at position 3587 of SEQ ID NO: 1244576
aggacugacucugaaggaa

SEQ ID NO: 1499199 - RNA, 19 nt, Artificial Sequence
  Description of Artificial Sequence: Synthetic oligonucleotide
  Antisense strand to SEQ ID NO: 1499198
uuccuucagagucaguccu

SEQ ID NO: 1499200 - RNA, 19 nt, Artificial Sequence
  Description of Artificial Sequence: Synthetic oligonucleotide
  Sense strand starting at position 3693 of SEQ ID NO: 1244576
uugggaaguuggugacaau

SEQ ID NO: 1499201 - RNA, 19 nt, Artificial Sequence
  Description of Artificial Sequence: Synthetic oligonucleotide
  Antisense strand to SEQ ID NO: 1499200
auugucaccaacuucccaa

SEQ ID NO: 1499202 - RNA, 19 nt, Artificial Sequence
  Description of Artificial Sequence: Synthetic oligonucleotide
  Sense strand starting at position 3696 of SEQ ID NO: 1244576
ggaaguuggugacaauuaa

SEQ ID NO: 1499203 - RNA, 19 nt, Artificial Sequence
  Description of Artificial Sequence: Synthetic oligonucleotide
  Antisense strand to SEQ ID NO: 1499202
uuaauugucaccaacuucc

SEQ ID NO: 1499204 - RNA, 19 nt, Artificial Sequence
  Description of Artificial Sequence: Synthetic oligonucleotide
  Sense strand starting at position 3721 of SEQ ID NO: 1244576
ucagaauucuggccacaug

SEQ ID NO: 1499205 - RNA, 19 nt, Artificial Sequence
  Description of Artificial Sequence: Synthetic oligonucleotide
  Antisense strand to SEQ ID NO: 1499204
cauguggccagaauucuga

SEQ ID NO: 1499206 - RNA, 19 nt, Artificial Sequence
  Description of Artificial Sequence: Synthetic oligonucleotide
  Sense strand starting at position 3760 of SEQ ID NO: 1244576
cuggguccucuccaagacu

SEQ ID NO: 1499207 - RNA, 19 nt, Artificial Sequence
  Description of Artificial Sequence: Synthetic oligonucleotide
  Antisense strand to SEQ ID NO: 1499206
agucuuggagaggacccag

SEQ ID NO: 1499208 - RNA, 19 nt, Artificial Sequence
  Description of Artificial Sequence: Synthetic oligonucleotide
  Sense strand starting at position 3937 of SEQ ID NO: 1244576
gacccuguuuguuggcuaa

SEQ ID NO: 1499209 - RNA, 19 nt, Artificial Sequence
  Description of Artificial Sequence: Synthetic oligonucleotide
  Antisense strand to SEQ ID NO: 1499208
uuagccaacaaacaggguc

SEQ ID NO: 1499210 - RNA, 19 nt, Artificial Sequence
  Description of Artificial Sequence: Synthetic oligonucleotide
  Sense strand starting at position 127 of SEQ ID NO: 1244577
auugaaucauauccuguga

SEQ ID NO: 1499211 - RNA, 19 nt, Artificial Sequence
  Description of Artificial Sequence: Synthetic oligonucleotide
  Antisense strand to SEQ ID NO: 1499210
ucacaggauaugauucaau

SEQ ID NO: 1499212 - RNA, 19 nt, Artificial Sequence
  Description of Artificial Sequence: Synthetic oligonucleotide
  Sense strand starting at position 132 of SEQ ID NO: 1244577
aucauauccugugaauguu

SEQ ID NO: 1499213 - RNA, 19 nt, Artificial Sequence
  Description of Artificial Sequence: Synthetic oligonucleotide
  Antisense strand to SEQ ID NO: 1499212
aacauucacaggauaugau

SEQ ID NO: 1499214 - RNA, 19 nt, Artificial Sequence
  Description of Artificial Sequence: Synthetic oligonucleotide
  Sense strand starting at position 204 of SEQ ID NO: 1244577
agaacugcuuccuagacca

SEQ ID NO: 1499215 - RNA, 19 nt, Artificial Sequence
  Description of Artificial Sequence: Synthetic oligonucleotide
  Antisense strand to SEQ ID NO: 1499214
uggucuaggaagcaguucu

SEQ ID NO: 1499216 - RNA, 19 nt, Artificial Sequence
  Description of Artificial Sequence: Synthetic oligonucleotide
  Sense strand starting at position 229 of SEQ ID NO: 1244577
cggcuugugagcugaguga

SEQ ID NO: 1499217 - RNA, 19 nt, Artificial Sequence
  Description of Artificial Sequence: Synthetic oligonucleotide
  Antisense strand to SEQ ID NO: 1499216
ucacucagcucacaagccg

SEQ ID NO: 1499218 - RNA, 19 nt, Artificial Sequence
  Description of Artificial Sequence: Synthetic oligonucleotide
  Sense strand starting at position 308 of SEQ ID NO: 1244577
aauagcuauccuggaguca

SEQ ID NO: 1499219 - RNA, 19 nt, Artificial Sequence
  Description of Artificial Sequence: Synthetic oligonucleotide
  Antisense strand to SEQ ID NO: 1499218
ugacuccaggauagcuauu

SEQ ID NO: 1499220 - RNA, 19 nt, Artificial Sequence
  Description of Artificial Sequence: Synthetic oligonucleotide
  Sense strand starting at position 319 of SEQ ID NO: 1244577
uggagucacugagaggauu

SEQ ID NO: 1499221 - RNA, 19 nt, Artificial Sequence
  Description of Artificial Sequence: Synthetic oligonucleotide
  Antisense strand to SEQ ID NO: 1499220
aauccucucagugacucca

SEQ ID NO: 1499222 - RNA, 19 nt, Artificial Sequence
  Description of Artificial Sequence: Synthetic oligonucleotide
  Sense strand starting at position 343 of SEQ ID NO: 1244577
aaugacuauuugugaaguc

SEQ ID NO: 1499223 - RNA, 19 nt, Artificial Sequence
  Description of Artificial Sequence: Synthetic oligonucleotide
  Antisense strand to SEQ ID NO: 1499222
gacuucacaaauagucauu

SEQ ID NO: 1499224 - RNA, 19 nt, Artificial Sequence
  Description of Artificial Sequence: Synthetic oligonucleotide
  Sense strand starting at position 353 of SEQ ID NO: 1244577
ugugaaguccuuugcauag

SEQ ID NO: 1499225 - RNA, 19 nt, Artificial Sequence
  Description of Artificial Sequence: Synthetic oligonucleotide
  Antisense strand to SEQ ID NO: 1499224
cuaugcaaaggacuucaca

SEQ ID NO: 1499226 - RNA, 19 nt, Artificial Sequence
  Description of Artificial Sequence: Synthetic oligonucleotide
  Sense strand starting at position 364 of SEQ ID NO: 1244577
uugcauagugccuagcauu

SEQ ID NO: 1499227 - RNA, 19 nt, Artificial Sequence
  Description of Artificial Sequence: Synthetic oligonucleotide
  Antisense strand to SEQ ID NO: 1499226
aaugcuaggcacuaugcaa

SEQ ID NO: 1499228 - RNA, 19 nt, Artificial Sequence
  Description of Artificial Sequence: Synthetic oligonucleotide
  Sense strand starting at position 374 of SEQ ID NO: 1244577
ccuagcauucgacaugugu

SEQ ID NO: 1499229 - RNA, 19 nt, Artificial Sequence
  Description of Artificial Sequence: Synthetic oligonucleotide
  Antisense strand to SEQ ID NO: 1499228
acacaugucgaaugcuagg

SEQ ID NO: 1499230 - RNA, 19 nt, Artificial Sequence
  Description of Artificial Sequence: Synthetic oligonucleotide
  Sense strand starting at position 383 of SEQ ID NO: 1244577
cgacauguguuagcuauuc

SEQ ID NO: 1499231 - RNA, 19 nt, Artificial Sequence
  Description of Artificial Sequence: Synthetic oligonucleotide
  Antisense strand to SEQ ID NO: 1499230
gaauagcuaacacaugucg

SEQ ID NO: 1499232 - RNA, 19 nt, Artificial Sequence
  Description of Artificial Sequence: Synthetic oligonucleotide
  Sense strand starting at position 388 of SEQ ID NO: 1244577
uguguuagcuauuccucua

SEQ ID NO: 1499233 - RNA, 19 nt, Artificial Sequence
  Description of Artificial Sequence: Synthetic oligonucleotide
  Antisense strand to SEQ ID NO: 1499232
uagaggaauagcuaacaca

SEQ ID NO: 1499234 - RNA, 19 nt, Artificial Sequence
  Description of Artificial Sequence: Synthetic oligonucleotide
  Sense strand starting at position 391 of SEQ ID NO: 1244577
guuagcuauuccucuacca

SEQ ID NO: 1499235 - RNA, 19 nt, Artificial Sequence
  Description of Artificial Sequence: Synthetic oligonucleotide
  Antisense strand to SEQ ID NO: 1499234
ugguagaggaauagcuaac

SEQ ID NO: 1499236 - RNA, 19 nt, Artificial Sequence
  Description of Artificial Sequence: Synthetic oligonucleotide
  Sense strand starting at position 428 of SEQ ID NO: 1244577
gugcuaggguaucuuuaac

SEQ ID NO: 1499237 - RNA, 19 nt, Artificial Sequence
  Description of Artificial Sequence: Synthetic oligonucleotide
  Antisense strand to SEQ ID NO: 1499236
guuaaagauacccuagcac

SEQ ID NO: 1499238 - RNA, 19 nt, Artificial Sequence
  Description of Artificial Sequence: Synthetic oligonucleotide
  Sense strand starting at position 467 of SEQ ID NO: 1244577
ccauguuaccaagaaagca

SEQ ID NO: 1499239 - RNA, 19 nt, Artificial Sequence
  Description of Artificial Sequence: Synthetic oligonucleotide
  Antisense strand to SEQ ID NO: 1499238
ugcuuucuugguaacaugg

SEQ ID NO: 1499240 - RNA, 19 nt, Artificial Sequence
  Description of Artificial Sequence: Synthetic oligonucleotide
  Sense strand starting at position 487 of SEQ ID NO: 1244577
gcaagcuaugcagauggaa

SEQ ID NO: 1499241 - RNA, 19 nt, Artificial Sequence
  Description of Artificial Sequence: Synthetic oligonucleotide
  Antisense strand to SEQ ID NO: 1499240
uuccaucugcauagcuugc

SEQ ID NO: 1499242 - RNA, 19 nt, Artificial Sequence
  Description of Artificial Sequence: Synthetic oligonucleotide
  Sense strand starting at position 490 of SEQ ID NO: 1244577
agcuaugcagauggaauau

SEQ ID NO: 1499243 - RNA, 19 nt, Artificial Sequence
  Description of Artificial Sequence: Synthetic oligonucleotide
  Antisense strand to SEQ ID NO: 1499242
auauuccaucugcauagcu

SEQ ID NO: 1499244 - RNA, 19 nt, Artificial Sequence
  Description of Artificial Sequence: Synthetic oligonucleotide
  Sense strand starting at position 817 of SEQ ID NO: 1244577
ucacuugauucuuaaggcu

SEQ ID NO: 1499245 - RNA, 19 nt, Artificial Sequence
  Description of Artificial Sequence: Synthetic oligonucleotide
  Antisense strand to SEQ ID NO: 1499244
agccuuaagaaucaaguga

SEQ ID NO: 1499246 - RNA, 19 nt, Artificial Sequence
  Description of Artificial Sequence: Synthetic oligonucleotide
  Sense strand starting at position 820 of SEQ ID NO: 1244577
cuugauucuuaaggcuuau

SEQ ID NO: 1499247 - RNA, 19 nt, Artificial Sequence
  Description of Artificial Sequence: Synthetic oligonucleotide
  Antisense strand to SEQ ID NO: 1499246
auaagccuuaagaaucaag

SEQ ID NO: 1499248 - RNA, 19 nt, Artificial Sequence
  Description of Artificial Sequence: Synthetic oligonucleotide
  Sense strand starting at position 824 of SEQ ID NO: 1244577
auucuuaaggcuuauggca

SEQ ID NO: 1499249 - RNA, 19 nt, Artificial Sequence
  Description of Artificial Sequence: Synthetic oligonucleotide
  Antisense strand to SEQ ID NO: 1499248
ugccauaagccuuaagaau

SEQ ID NO: 1499250 - RNA, 19 nt, Artificial Sequence
  Description of Artificial Sequence: Synthetic oligonucleotide
  Sense strand starting at position 833 of SEQ ID NO: 1244577
gcuuauggcaagugauacu

SEQ ID NO: 1499251 - RNA, 19 nt, Artificial Sequence
  Description of Artificial Sequence: Synthetic oligonucleotide
  Antisense strand to SEQ ID NO: 1499250
aguaucacuugccauaagc

SEQ ID NO: 1499252 - RNA, 19 nt, Artificial Sequence
  Description of Artificial Sequence: Synthetic oligonucleotide
  Sense strand starting at position 842 of SEQ ID NO: 1244577
aagugauacuggccuaguu

SEQ ID NO: 1499253 - RNA, 19 nt, Artificial Sequence
  Description of Artificial Sequence: Synthetic oligonucleotide
  Antisense strand to SEQ ID NO: 1499252
aacuaggccaguaucacuu

SEQ ID NO: 1499254 - RNA, 19 nt, Artificial Sequence
  Description of Artificial Sequence: Synthetic oligonucleotide
  Sense strand starting at position 844 of SEQ ID NO: 1244577
gugauacuggccuaguuac

SEQ ID NO: 1499255 - RNA, 19 nt, Artificial Sequence
  Description of Artificial Sequence: Synthetic oligonucleotide
  Antisense strand to SEQ ID NO: 1499254
guaacuaggccaguaucac

SEQ ID NO: 1499256 - RNA, 19 nt, Artificial Sequence
  Description of Artificial Sequence: Synthetic oligonucleotide
  Sense strand starting at position 1224 of SEQ ID NO: 1244577
guuacagaggucgagugaa

SEQ ID NO: 1499257 - RNA, 19 nt, Artificial Sequence
  Description of Artificial Sequence: Synthetic oligonucleotide
  Antisense strand to SEQ ID NO: 1499256
uucacucgaccucuguaac

SEQ ID NO: 1499258 - RNA, 19 nt, Artificial Sequence
  Description of Artificial Sequence: Synthetic oligonucleotide
  Sense strand starting at position 1302 of SEQ ID NO: 1244577
ucaggaguucacgaacagu

SEQ ID NO: 1499259 - RNA, 19 nt, Artificial Sequence
  Description of Artificial Sequence: Synthetic oligonucleotide
  Antisense strand to SEQ ID NO: 1499258
acuguucgugaacuccuga

SEQ ID NO: 1499260 - RNA, 19 nt, Artificial Sequence
  Description of Artificial Sequence: Synthetic oligonucleotide
  Sense strand starting at position 1313 of SEQ ID NO: 1244577
cgaacagucugggcaacau

SEQ ID NO: 1499261 - RNA, 19 nt, Artificial Sequence
  Description of Artificial Sequence: Synthetic oligonucleotide
  Antisense strand to SEQ ID NO: 1499260
auguugcccagacuguucg

SEQ ID NO: 1499262 - RNA, 19 nt, Artificial Sequence
  Description of Artificial Sequence: Synthetic oligonucleotide
  Sense strand starting at position 1565 of SEQ ID NO: 1244577
agaugugauauucgauaaa

SEQ ID NO: 1499263 - RNA, 19 nt, Artificial Sequence
  Description of Artificial Sequence: Synthetic oligonucleotide
  Antisense strand to SEQ ID NO: 1499262
uuuaucgaauaucacaucu

SEQ ID NO: 1499264 - RNA, 19 nt, Artificial Sequence
  Description of Artificial Sequence: Synthetic oligonucleotide
  Sense strand starting at position 1663 of SEQ ID NO: 1244577
gugacuggaguuuggcaaa

SEQ ID NO: 1499265 - RNA, 19 nt, Artificial Sequence
  Description of Artificial Sequence: Synthetic oligonucleotide
  Antisense strand to SEQ ID NO: 1499264
uuugccaaacuccagucac

SEQ ID NO: 1499266 - RNA, 19 nt, Artificial Sequence
  Description of Artificial Sequence: Synthetic oligonucleotide
  Sense strand starting at position 1685 of SEQ ID NO: 1244577
ugguaaccucauggucauu

SEQ ID NO: 1499267 - RNA, 19 nt, Artificial Sequence
  Description of Artificial Sequence: Synthetic oligonucleotide
  Antisense strand to SEQ ID NO: 1499266
aaugaccaugagguuacca

SEQ ID NO: 1499268 - RNA, 19 nt, Artificial Sequence
  Description of Artificial Sequence: Synthetic oligonucleotide
  Sense strand starting at position 1853 of SEQ ID NO: 1244577
cuucuucucuggucagaau

SEQ ID NO: 1499269 - RNA, 19 nt, Artificial Sequence
  Description of Artificial Sequence: Synthetic oligonucleotide
  Antisense strand to SEQ ID NO: 1499268
auucugaccagagaagaag

SEQ ID NO: 1499270 - RNA, 19 nt, Artificial Sequence
  Description of Artificial Sequence: Synthetic oligonucleotide
  Sense strand starting at position 1862 of SEQ ID NO: 1244577
uggucagaaugccaaucau

SEQ ID NO: 1499271 - RNA, 19 nt, Artificial Sequence
  Description of Artificial Sequence: Synthetic oligonucleotide
  Antisense strand to SEQ ID NO: 1499270
augauuggcauucugacca

SEQ ID NO: 1499272 - RNA, 19 nt, Artificial Sequence
  Description of Artificial Sequence: Synthetic oligonucleotide
  Sense strand starting at position 1918 of SEQ ID NO: 1244577
cuaccuuggcagcagauua

SEQ ID NO: 1499273 - RNA, 19 nt, Artificial Sequence
  Description of Artificial Sequence: Synthetic oligonucleotide
  Antisense strand to SEQ ID NO: 1499272
uaaucugcugccaagguag

SEQ ID NO: 1499274 - RNA, 19 nt, Artificial Sequence
  Description of Artificial Sequence: Synthetic oligonucleotide
  Sense strand starting at position 1970 of SEQ ID NO: 1244577
gaccgauaguggguucagu

SEQ ID NO: 1499275 - RNA, 19 nt, Artificial Sequence
  Description of Artificial Sequence: Synthetic oligonucleotide
  Antisense strand to SEQ ID NO: 1499274
acugaacccacuaucgguc

SEQ ID NO: 1499276 - RNA, 19 nt, Artificial Sequence
  Description of Artificial Sequence: Synthetic oligonucleotide
  Sense strand starting at position 2176 of SEQ ID NO: 1244577
gcaagaguugguugucguc

SEQ ID NO: 1499277 - RNA, 19 nt, Artificial Sequence
  Description of Artificial Sequence: Synthetic oligonucleotide
  Antisense strand to SEQ ID NO: 1499276
gacgacaaccaacucuugc

SEQ ID NO: 1499278 - RNA, 19 nt, Artificial Sequence
  Description of Artificial Sequence: Synthetic oligonucleotide
  Sense strand starting at position 2178 of SEQ ID NO: 1244577
aagaguugguugucgucau

SEQ ID NO: 1499279 - RNA, 19 nt, Artificial Sequence
  Description of Artificial Sequence: Synthetic oligonucleotide
  Antisense strand to SEQ ID NO: 1499278
augacgacaaccaacucuu

SEQ ID NO: 1499280 - RNA, 19 nt, Artificial Sequence
  Description of Artificial Sequence: Synthetic oligonucleotide
  Sense strand starting at position 2776 of SEQ ID NO: 1244577
gccguaagcuccuccggaa

SEQ ID NO: 1499281 - RNA, 19 nt, Artificial Sequence
  Description of Artificial Sequence: Synthetic oligonucleotide
  Antisense strand to SEQ ID NO: 1499280
uuccggaggagcuuacggc

SEQ ID NO: 1499282 - RNA, 19 nt, Artificial Sequence
  Description of Artificial Sequence: Synthetic oligonucleotide
  Sense strand starting at position 2843 of SEQ ID NO: 1244577
gugugaugcucugaagaag

SEQ ID NO: 1499283 - RNA, 19 nt, Artificial Sequence
  Description of Artificial Sequence: Synthetic oligonucleotide
  Antisense strand to SEQ ID NO: 1499282
cuucuucagagcaucacac

SEQ ID NO: 1499284 - RNA, 19 nt, Artificial Sequence
  Description of Artificial Sequence: Synthetic oligonucleotide
  Sense strand starting at position 2932 of SEQ ID NO: 1244577
aaagaugucccggagucca

SEQ ID NO: 1499285 - RNA, 19 nt, Artificial Sequence
  Description of Artificial Sequence: Synthetic oligonucleotide
  Antisense strand to SEQ ID NO: 1499284
uggacuccgggacaucuuu

SEQ ID NO: 1499286 - RNA, 19 nt, Artificial Sequence
  Description of Artificial Sequence: Synthetic oligonucleotide
  Sense strand starting at position 3133 of SEQ ID NO: 1244577
cgugucacgcuccuugaaa

SEQ ID NO: 1499287 - RNA, 19 nt, Artificial Sequence
  Description of Artificial Sequence: Synthetic oligonucleotide
  Antisense strand to SEQ ID NO: 1499286
uuucaaggagcgugacacg

SEQ ID NO: 1499288 - RNA, 19 nt, Artificial Sequence
  Description of Artificial Sequence: Synthetic oligonucleotide
  Sense strand starting at position 3134 of SEQ ID NO: 1244577
gugucacgcuccuugaaag

SEQ ID NO: 1499289 - RNA, 19 nt, Artificial Sequence
  Description of Artificial Sequence: Synthetic oligonucleotide
  Antisense strand to SEQ ID NO: 1499288
cuuucaaggagcgugacac

SEQ ID NO: 1499290 - RNA, 19 nt, Artificial Sequence
  Description of Artificial Sequence: Synthetic oligonucleotide
  Sense strand starting at position 21 of SEQ ID NO: 1244578
agcugaacaucugugcuau

SEQ ID NO: 1499291 - RNA, 19 nt, Artificial Sequence
  Description of Artificial Sequence: Synthetic oligonucleotide
  Antisense strand to SEQ ID NO: 1499290
auagcacagauguucagcu

SEQ ID NO: 1499292 - RNA, 19 nt, Artificial Sequence
  Description of Artificial Sequence: Synthetic oligonucleotide
  Sense strand starting at position 22 of SEQ ID NO: 1244578
gcugaacaucugugcuauc

SEQ ID NO: 1499293 - RNA, 19 nt, Artificial Sequence
  Description of Artificial Sequence: Synthetic oligonucleotide
  Antisense strand to SEQ ID NO: 1499292
gauagcacagauguucagc

SEQ ID NO: 1499294 - RNA, 19 nt, Artificial Sequence
  Description of Artificial Sequence: Synthetic oligonucleotide
  Sense strand starting at position 70 of SEQ ID NO: 1244578
agcaaaucgcuacaacaua

SEQ ID NO: 1499295 - RNA, 19 nt, Artificial Sequence
  Description of Artificial Sequence: Synthetic oligonucleotide
  Antisense strand to SEQ ID NO: 1499294
uauguuguagcgauuugcu

SEQ ID NO: 1499296 - RNA, 19 nt, Artificial Sequence
  Description of Artificial Sequence: Synthetic oligonucleotide
  Sense strand starting at position 93 of SEQ ID NO: 1244578
gcuaucauauuugggauua

SEQ ID NO: 1499297 - RNA, 19 nt, Artificial Sequence
  Description of Artificial Sequence: Synthetic oligonucleotide
  Antisense strand to SEQ ID NO: 1499296
uaaucccaaauaugauagc

SEQ ID NO: 1499298 - RNA, 19 nt, Artificial Sequence
  Description of Artificial Sequence: Synthetic oligonucleotide
  Sense strand starting at position 573 of SEQ ID NO: 1244578
agacaugcuucccagagca

SEQ ID NO: 1499299 - RNA, 19 nt, Artificial Sequence
  Description of Artificial Sequence: Synthetic oligonucleotide
  Antisense strand to SEQ ID NO: 1499298
ugcucugggaagcaugucu

SEQ ID NO: 1499300 - RNA, 19 nt, Artificial Sequence
  Description of Artificial Sequence: Synthetic oligonucleotide
  Sense strand starting at position 575 of SEQ ID NO: 1244578
acaugcuucccagagcaaa

SEQ ID NO: 1499301 - RNA, 19 nt, Artificial Sequence
  Description of Artificial Sequence: Synthetic oligonucleotide
  Antisense strand to SEQ ID NO: 1499300
uuugcucugggaagcaugu

SEQ ID NO: 1499302 - RNA, 19 nt, Artificial Sequence
  Description of Artificial Sequence: Synthetic oligonucleotide
  Sense strand starting at position 787 of SEQ ID NO: 1244578
uaagguggcucugagacau

SEQ ID NO: 1499303 - RNA, 19 nt, Artificial Sequence
  Description of Artificial Sequence: Synthetic oligonucleotide
  Antisense strand to SEQ ID NO: 1499302
augucucagagccaccuua

SEQ ID NO: 1499304 - RNA, 19 nt, Artificial Sequence
  Description of Artificial Sequence: Synthetic oligonucleotide
  Sense strand starting at position 799 of SEQ ID NO: 1244578
gagacaugcacgugucuau

SEQ ID NO: 1499305 - RNA, 19 nt, Artificial Sequence
  Description of Artificial Sequence: Synthetic oligonucleotide
  Antisense strand to SEQ ID NO: 1499304
auagacacgugcaugucuc

SEQ ID NO: 1499306 - RNA, 19 nt, Artificial Sequence
  Description of Artificial Sequence: Synthetic oligonucleotide
  Sense strand starting at position 1249 of SEQ ID NO: 1244578
uggcuugugucauggccau

SEQ ID NO: 1499307 - RNA, 19 nt, Artificial Sequence
  Description of Artificial Sequence: Synthetic oligonucleotide
  Antisense strand to SEQ ID NO: 1499306
auggccaugacacaagcca

SEQ ID NO: 1499308 - RNA, 19 nt, Artificial Sequence
  Description of Artificial Sequence: Synthetic oligonucleotide
  Sense strand starting at position 1253 of SEQ ID NO: 1244578
uugugucauggccauagga

SEQ ID NO: 1499309 - RNA, 19 nt, Artificial Sequence
  Description of Artificial Sequence: Synthetic oligonucleotide
  Antisense strand to SEQ ID NO: 1499308
uccuauggccaugacacaa

SEQ ID NO: 1499310 - RNA, 19 nt, Artificial Sequence
  Description of Artificial Sequence: Synthetic oligonucleotide
  Sense strand starting at position 1255 of SEQ ID NO: 1244578
gugucauggccauaggaag

SEQ ID NO: 1499311 - RNA, 19 nt, Artificial Sequence
  Description of Artificial Sequence: Synthetic oligonucleotide
  Antisense strand to SEQ ID NO: 1499310
cuuccuauggccaugacac

SEQ ID NO: 1499312 - RNA, 19 nt, Artificial Sequence
  Description of Artificial Sequence: Synthetic oligonucleotide
  Sense strand starting at position 1374 of SEQ ID NO: 1244578
cuaagaaucuucugagaag

SEQ ID NO: 1499313 - RNA, 19 nt, Artificial Sequence
  Description of Artificial Sequence: Synthetic oligonucleotide
  Antisense strand to SEQ ID NO: 1499312
cuucucagaagauucuuag

SEQ ID NO: 1499314 - RNA, 19 nt, Artificial Sequence
  Description of Artificial Sequence: Synthetic oligonucleotide
  Sense strand starting at position 1377 of SEQ ID NO: 1244578
agaaucuucugagaaguug

SEQ ID NO: 1499315 - RNA, 19 nt, Artificial Sequence
  Description of Artificial Sequence: Synthetic oligonucleotide
  Antisense strand to SEQ ID NO: 1499314
caacuucucagaagauucu

SEQ ID NO: 1499316 - RNA, 19 nt, Artificial Sequence
  Description of Artificial Sequence: Synthetic oligonucleotide
  Sense strand starting at position 1434 of SEQ ID NO: 1244578
cugauaaguggugggcgaa

SEQ ID NO: 1499317 - RNA, 19 nt, Artificial Sequence
  Description of Artificial Sequence: Synthetic oligonucleotide
  Antisense strand to SEQ ID NO: 1499316
uucgcccaccacuuaucag

SEQ ID NO: 1499318 - RNA, 19 nt, Artificial Sequence
  Description of Artificial Sequence: Synthetic oligonucleotide
  Sense strand starting at position 1446 of SEQ ID NO: 1244578
gggcgaaccucucccguaa

SEQ ID NO: 1499319 - RNA, 19 nt, Artificial Sequence
  Description of Artificial Sequence: Synthetic oligonucleotide
  Antisense strand to SEQ ID NO: 1499318
uuacgggagagguucgccc

SEQ ID NO: 1499320 - RNA, 19 nt, Artificial Sequence
  Description of Artificial Sequence: Synthetic oligonucleotide
  Sense strand starting at position 1775 of SEQ ID NO: 1244578
gcgugcucacccuggcaaa

SEQ ID NO: 1499321 - RNA, 19 nt, Artificial Sequence
  Description of Artificial Sequence: Synthetic oligonucleotide
  Antisense strand to SEQ ID NO: 1499320
uuugccagggugagcacgc

SEQ ID NO: 1499322 - RNA, 19 nt, Artificial Sequence
  Description of Artificial Sequence: Synthetic oligonucleotide
  Sense strand starting at position 1806 of SEQ ID NO: 1244578
ggcggcguccuucaugaua

SEQ ID NO: 1499323 - RNA, 19 nt, Artificial Sequence
  Description of Artificial Sequence: Synthetic oligonucleotide
  Antisense strand to SEQ ID NO: 1499322
uaucaugaaggacgccgcc

SEQ ID NO: 1499324 - RNA, 19 nt, Artificial Sequence
  Description of Artificial Sequence: Synthetic oligonucleotide
  Sense strand starting at position 1808 of SEQ ID NO: 1244578
cggcguccuucaugauacu

SEQ ID NO: 1499325 - RNA, 19 nt, Artificial Sequence
  Description of Artificial Sequence: Synthetic oligonucleotide
  Antisense strand to SEQ ID NO: 1499324
aguaucaugaaggacgccg

SEQ ID NO: 1499326 - RNA, 19 nt, Artificial Sequence
  Description of Artificial Sequence: Synthetic oligonucleotide
  Sense strand starting at position 2168 of SEQ ID NO: 1244578
ggaagucgauccggguauu

SEQ ID NO: 1499327 - RNA, 19 nt, Artificial Sequence
  Description of Artificial Sequence: Synthetic oligonucleotide
  Antisense strand to SEQ ID NO: 1499326
aauacccggaucgacuucc

SEQ ID NO: 1499328 - RNA, 19 nt, Artificial Sequence
  Description of Artificial Sequence: Synthetic oligonucleotide
  Sense strand starting at position 2169 of SEQ ID NO: 1244578
gaagucgauccggguauuu

SEQ ID NO: 1499329 - RNA, 19 nt, Artificial Sequence
  Description of Artificial Sequence: Synthetic oligonucleotide
  Antisense strand to SEQ ID NO: 1499328
aaauacccggaucgacuuc

SEQ ID NO: 1499330 - RNA, 19 nt, Artificial Sequence
  Description of Artificial Sequence: Synthetic oligonucleotide
  Sense strand starting at position 2192 of SEQ ID NO: 1244578
ggucgagguucuugagcau

SEQ ID NO: 1499331 - RNA, 19 nt, Artificial Sequence
  Description of Artificial Sequence: Synthetic oligonucleotide
  Antisense strand to SEQ ID NO: 1499330
augcucaagaaccucgacc

SEQ ID NO: 1499332 - RNA, 19 nt, Artificial Sequence
  Description of Artificial Sequence: Synthetic oligonucleotide
  Sense strand starting at position 2444 of SEQ ID NO: 1244578
ggccgagucacuggacaga

SEQ ID NO: 1499333 - RNA, 19 nt, Artificial Sequence
  Description of Artificial Sequence: Synthetic oligonucleotide
  Antisense strand to SEQ ID NO: 1499332
ucuguccagugacucggcc

SEQ ID NO: 1499334 - RNA, 19 nt, Artificial Sequence
  Description of Artificial Sequence: Synthetic oligonucleotide
  Sense strand starting at position 2619 of SEQ ID NO: 1244578
cccugaagauuccacguaa

SEQ ID NO: 1499335 - RNA, 19 nt, Artificial Sequence
  Description of Artificial Sequence: Synthetic oligonucleotide
  Antisense strand to SEQ ID NO: 1499334
uuacguggaaucuucaggg

SEQ ID NO: 1499336 - RNA, 19 nt, Artificial Sequence
  Description of Artificial Sequence: Synthetic oligonucleotide
  Sense strand starting at position 2821 of SEQ ID NO: 1244578
aggguuuccuggcaaccau

SEQ ID NO: 1499337 - RNA, 19 nt, Artificial Sequence
  Description of Artificial Sequence: Synthetic oligonucleotide
  Antisense strand to SEQ ID NO: 1499336
augguugccaggaaacccu

SEQ ID NO: 1499338 - RNA, 19 nt, Artificial Sequence
  Description of Artificial Sequence: Synthetic oligonucleotide
  Sense strand starting at position 2832 of SEQ ID NO: 1244578
gcaaccaugcuuuguguca

SEQ ID NO: 1499339 - RNA, 19 nt, Artificial Sequence
  Description of Artificial Sequence: Synthetic oligonucleotide
  Antisense strand to SEQ ID NO: 1499338
ugacacaaagcaugguugc

SEQ ID NO: 1499340 - RNA, 19 nt, Artificial Sequence
  Description of Artificial Sequence: Synthetic oligonucleotide
  Sense strand starting at position 3024 of SEQ ID NO: 1244578
augacuaacugguggcuaa

SEQ ID NO: 1499341 - RNA, 19 nt, Artificial Sequence
  Description of Artificial Sequence: Synthetic oligonucleotide
  Antisense strand to SEQ ID NO: 1499340
uuagccaccaguuagucau

SEQ ID NO: 1499342 - RNA, 19 nt, Artificial Sequence
  Description of Artificial Sequence: Synthetic oligonucleotide
  Sense strand starting at position 3025 of SEQ ID NO: 1244578
ugacuaacugguggcuaau

SEQ ID NO: 1499343 - RNA, 19 nt, Artificial Sequence
  Description of Artificial Sequence: Synthetic oligonucleotide
  Antisense strand to SEQ ID NO: 1499342
auuagccaccaguuaguca

SEQ ID NO: 1499344 - RNA, 19 nt, Artificial Sequence
  Description of Artificial Sequence: Synthetic oligonucleotide
  Sense strand starting at position 3200 of SEQ ID NO: 1244578
ggauuacagaugcguggua

SEQ ID NO: 1499345 - RNA, 19 nt, Artificial Sequence
  Description of Artificial Sequence: Synthetic oligonucleotide
  Antisense strand to SEQ ID NO: 1499344
uaccacgcaucuguaaucc

SEQ ID NO: 1499346 - RNA, 19 nt, Artificial Sequence
  Description of Artificial Sequence: Synthetic oligonucleotide
  Sense strand starting at position 3358 of SEQ ID NO: 1244578
cgcccagccugccauaaau

SEQ ID NO: 1499347 - RNA, 19 nt, Artificial Sequence
  Description of Artificial Sequence: Synthetic oligonucleotide
  Antisense strand to SEQ ID NO: 1499346
auuuauggcaggcugggcg

SEQ ID NO: 1499348 - RNA, 19 nt, Artificial Sequence
  Description of Artificial Sequence: Synthetic oligonucleotide
  Sense strand starting at position 3723 of SEQ ID NO: 1244578
gccugugcuugagcucauu

SEQ ID NO: 1499349 - RNA, 19 nt, Artificial Sequence
  Description of Artificial Sequence: Synthetic oligonucleotide
  Antisense strand to SEQ ID NO: 1499348
aaugagcucaagcacaggc

SEQ ID NO: 1499350 - RNA, 19 nt, Artificial Sequence
  Description of Artificial Sequence: Synthetic oligonucleotide
  Sense strand starting at position 3726 of SEQ ID NO: 1244578
ugugcuugagcucauuaca

SEQ ID NO: 1499351 - RNA, 19 nt, Artificial Sequence
  Description of Artificial Sequence: Synthetic oligonucleotide
  Antisense strand to SEQ ID NO: 1499350
uguaaugagcucaagcaca

SEQ ID NO: 1499352 - RNA, 19 nt, Artificial Sequence
  Description of Artificial Sequence: Synthetic oligonucleotide
  Sense strand starting at position 3729 of SEQ ID NO: 1244578
gcuugagcucauuacaaag

SEQ ID NO: 1499353 - RNA, 19 nt, Artificial Sequence
  Description of Artificial Sequence: Synthetic oligonucleotide
  Antisense strand to SEQ ID NO: 1499352
cuuuguaaugagcucaagc

SEQ ID NO: 1499354 - RNA, 19 nt, Artificial Sequence
  Description of Artificial Sequence: Synthetic oligonucleotide
  Sense strand starting at position 3762 of SEQ ID NO: 1244578
acgagacaaaucugguguu

SEQ ID NO: 1499355 - RNA, 19 nt, Artificial Sequence
  Description of Artificial Sequence: Synthetic oligonucleotide
  Antisense strand to SEQ ID NO: 1499354
aacaccagauuugucucgu

SEQ ID NO: 1499356 - RNA, 19 nt, Artificial Sequence
  Description of Artificial Sequence: Synthetic oligonucleotide
  Sense strand starting at position 3763 of SEQ ID NO: 1244578
cgagacaaaucugguguua

SEQ ID NO: 1499357 - RNA, 19 nt, Artificial Sequence
  Description of Artificial Sequence: Synthetic oligonucleotide
  Antisense strand to SEQ ID NO: 1499356
uaacaccagauuugucucg

SEQ ID NO: 1499358 - RNA, 19 nt, Artificial Sequence
  Description of Artificial Sequence: Synthetic oligonucleotide
  Sense strand starting at position 3765 of SEQ ID NO: 1244578
agacaaaucugguguuaac

SEQ ID NO: 1499359 - RNA, 19 nt, Artificial Sequence
  Description of Artificial Sequence: Synthetic oligonucleotide
  Antisense strand to SEQ ID NO: 1499358
guuaacaccagauuugucu

SEQ ID NO: 1499360 - RNA, 19 nt, Artificial Sequence
  Description of Artificial Sequence: Synthetic oligonucleotide
  Sense strand starting at position 3775 of SEQ ID NO: 1244578
gguguuaacaauugagaca

SEQ ID NO: 1499361 - RNA, 19 nt, Artificial Sequence
  Description of Artificial Sequence: Synthetic oligonucleotide
  Antisense strand to SEQ ID NO: 1499360
ugucucaauuguuaacacc

SEQ ID NO: 1499362 - RNA, 19 nt, Artificial Sequence
  Description of Artificial Sequence: Synthetic oligonucleotide
  Sense strand starting at position 3778 of SEQ ID NO: 1244578
guuaacaauugagacauga

SEQ ID NO: 1499363 - RNA, 19 nt, Artificial Sequence
  Description of Artificial Sequence: Synthetic oligonucleotide
  Antisense strand to SEQ ID NO: 1499362
ucaugucucaauuguuaac

SEQ ID NO: 1499364 - RNA, 19 nt, Artificial Sequence
  Description of Artificial Sequence: Synthetic oligonucleotide
  Sense strand starting at position 3954 of SEQ ID NO: 1244578
cguacagauuccugucaug

SEQ ID NO: 1499365 - RNA, 19 nt, Artificial Sequence
  Description of Artificial Sequence: Synthetic oligonucleotide
  Antisense strand to SEQ ID NO: 1499364
caugacaggaaucuguacg

SEQ ID NO: 1499366 - RNA, 19 nt, Artificial Sequence
  Description of Artificial Sequence: Synthetic oligonucleotide
  Sense strand starting at position 3957 of SEQ ID NO: 1244578
acagauuccugucaugauu

SEQ ID NO: 1499367 - RNA, 19 nt, Artificial Sequence
  Description of Artificial Sequence: Synthetic oligonucleotide
  Antisense strand to SEQ ID NO: 1499366
aaucaugacaggaaucugu

SEQ ID NO: 1499368 - RNA, 19 nt, Artificial Sequence
  Description of Artificial Sequence: Synthetic oligonucleotide
  Sense strand starting at position 3959 of SEQ ID NO: 1244578
agauuccugucaugauucu

SEQ ID NO: 1499369 - RNA, 19 nt, Artificial Sequence
  Description of Artificial Sequence: Synthetic oligonucleotide
  Antisense strand to SEQ ID NO: 1499368
agaaucaugacaggaaucu

SEQ ID NO: 1499370 - RNA, 19 nt, Artificial Sequence
  Description of Artificial Sequence: Synthetic oligonucleotide
  Sense strand starting at position 19 of SEQ ID NO: 1244579
gcaggucugucucuagagu

SEQ ID NO: 1499371 - RNA, 19 nt, Artificial Sequence
  Description of Artificial Sequence: Synthetic oligonucleotide
  Antisense strand to SEQ ID NO: 1499370
acucuagagacagaccugc

SEQ ID NO: 1499372 - RNA, 19 nt, Artificial Sequence
  Description of Artificial Sequence: Synthetic oligonucleotide
  Sense strand starting at position 25 of SEQ ID NO: 1244579
cugucucuagaguguauga

SEQ ID NO: 1499373 - RNA, 19 nt, Artificial Sequence
  Description of Artificial Sequence: Synthetic oligonucleotide
  Antisense strand to SEQ ID NO: 1499372
ucauacacucuagagacag

SEQ ID NO: 1499374 - RNA, 19 nt, Artificial Sequence
  Description of Artificial Sequence: Synthetic oligonucleotide
  Sense strand starting at position 36 of SEQ ID NO: 1244579
guguaugagggagaagguu

SEQ ID NO: 1499375 - RNA, 19 nt, Artificial Sequence
  Description of Artificial Sequence: Synthetic oligonucleotide
  Antisense strand to SEQ ID NO: 1499374
aaccuucucccucauacac

SEQ ID NO: 1499376 - RNA, 19 nt, Artificial Sequence
  Description of Artificial Sequence: Synthetic oligonucleotide
  Sense strand starting at position 48 of SEQ ID NO: 1244579
gaagguucuaauggcagga

SEQ ID NO: 1499377 - RNA, 19 nt, Artificial Sequence
  Description of Artificial Sequence: Synthetic oligonucleotide
  Antisense strand to SEQ ID NO: 1499376
uccugccauuagaaccuuc

SEQ ID NO: 1499378 - RNA, 19 nt, Artificial Sequence
  Description of Artificial Sequence: Synthetic oligonucleotide
  Sense strand starting at position 224 of SEQ ID NO: 1244579
ugcagucuguguucugaga

SEQ ID NO: 1499379 - RNA, 19 nt, Artificial Sequence
  Description of Artificial Sequence: Synthetic oligonucleotide
  Antisense strand to SEQ ID NO: 1499378
ucucagaacacagacugca

SEQ ID NO: 1499380 - RNA, 19 nt, Artificial Sequence
  Description of Artificial Sequence: Synthetic oligonucleotide
  Sense strand starting at position 231 of SEQ ID NO: 1244579
uguguucugagaggaagga

SEQ ID NO: 1499381 - RNA, 19 nt, Artificial Sequence
  Description of Artificial Sequence: Synthetic oligonucleotide
  Antisense strand to SEQ ID NO: 1499380
uccuuccucucagaacaca

SEQ ID NO: 1499382 - RNA, 19 nt, Artificial Sequence
  Description of Artificial Sequence: Synthetic oligonucleotide
  Sense strand starting at position 360 of SEQ ID NO: 1244579
ggcagugucccucagcaaa

SEQ ID NO: 1499383 - RNA, 19 nt, Artificial Sequence
  Description of Artificial Sequence: Synthetic oligonucleotide
  Antisense strand to SEQ ID NO: 1499382
uuugcugagggacacugcc

SEQ ID NO: 1499384 - RNA, 19 nt, Artificial Sequence
  Description of Artificial Sequence: Synthetic oligonucleotide
  Sense strand starting at position 433 of SEQ ID NO: 1244579
guggguaccugaguucuca

SEQ ID NO: 1499385 - RNA, 19 nt, Artificial Sequence
  Description of Artificial Sequence: Synthetic oligonucleotide
  Antisense strand to SEQ ID NO: 1499384
ugagaacucagguacccac

SEQ ID NO: 1499386 - RNA, 19 nt, Artificial Sequence
  Description of Artificial Sequence: Synthetic oligonucleotide
  Sense strand starting at position 531 of SEQ ID NO: 1244579
gagagaugauucucaaucg

SEQ ID NO: 1499387 - RNA, 19 nt, Artificial Sequence
  Description of Artificial Sequence: Synthetic oligonucleotide
  Antisense strand to SEQ ID NO: 1499386
cgauugagaaucaucucuc

SEQ ID NO: 1499388 - RNA, 19 nt, Artificial Sequence
  Description of Artificial Sequence: Synthetic oligonucleotide
  Sense strand starting at position 615 of SEQ ID NO: 1244579
ucugaaaugccugguccga

SEQ ID NO: 1499389 - RNA, 19 nt, Artificial Sequence
  Description of Artificial Sequence: Synthetic oligonucleotide
  Antisense strand to SEQ ID NO: 1499388
ucggaccaggcauuucaga

SEQ ID NO: 1499390 - RNA, 19 nt, Artificial Sequence
  Description of Artificial Sequence: Synthetic oligonucleotide
  Sense strand starting at position 711 of SEQ ID NO: 1244579
cuuagauggccuuggaaac

SEQ ID NO: 1499391 - RNA, 19 nt, Artificial Sequence
  Description of Artificial Sequence: Synthetic oligonucleotide
  Antisense strand to SEQ ID NO: 1499390
guuuccaaggccaucuaag

SEQ ID NO: 1499392 - RNA, 19 nt, Artificial Sequence
  Description of Artificial Sequence: Synthetic oligonucleotide
  Sense strand starting at position 851 of SEQ ID NO: 1244579
uguagugugcguuuaguga

SEQ ID NO: 1499393 - RNA, 19 nt, Artificial Sequence
  Description of Artificial Sequence: Synthetic oligonucleotide
  Antisense strand to SEQ ID NO: 1499392
ucacuaaacgcacacuaca

SEQ ID NO: 1499394 - RNA, 19 nt, Artificial Sequence
  Description of Artificial Sequence: Synthetic oligonucleotide
  Sense strand starting at position 866 of SEQ ID NO: 1244579
gugauaugacuccguccac

SEQ ID NO: 1499395 - RNA, 19 nt, Artificial Sequence
  Description of Artificial Sequence: Synthetic oligonucleotide
  Antisense strand to SEQ ID NO: 1499394
guggacggagucauaucac

SEQ ID NO: 1499396 - RNA, 19 nt, Artificial Sequence
  Description of Artificial Sequence: Synthetic oligonucleotide
  Sense strand starting at position 920 of SEQ ID NO: 1244579
guuaacaaucuacguaagu

SEQ ID NO: 1499397 - RNA, 19 nt, Artificial Sequence
  Description of Artificial Sequence: Synthetic oligonucleotide
  Antisense strand to SEQ ID NO: 1499396
acuuacguagauuguuaac

SEQ ID NO: 1499398 - RNA, 19 nt, Artificial Sequence
  Description of Artificial Sequence: Synthetic oligonucleotide
  Sense strand starting at position 2386 of SEQ ID NO: 1244579
gcgcguuccgugacugcau

SEQ ID NO: 1499399 - RNA, 19 nt, Artificial Sequence
  Description of Artificial Sequence: Synthetic oligonucleotide
  Antisense strand to SEQ ID NO: 1499398
augcagucacggaacgcgc

SEQ ID NO: 1499400 - RNA, 19 nt, Artificial Sequence
  Description of Artificial Sequence: Synthetic oligonucleotide
  Sense strand starting at position 2401 of SEQ ID NO: 1244579
gcauucaucccggaggaag

SEQ ID NO: 1499401 - RNA, 19 nt, Artificial Sequence
  Description of Artificial Sequence: Synthetic oligonucleotide
  Antisense strand to SEQ ID NO: 1499400
cuuccuccgggaugaaugc

SEQ ID NO: 1499402 - RNA, 19 nt, Artificial Sequence
  Description of Artificial Sequence: Synthetic oligonucleotide
  Sense strand starting at position 2542 of SEQ ID NO: 1244579
ggcgcucuccugcaagaca

SEQ ID NO: 1499403 - RNA, 19 nt, Artificial Sequence
  Description of Artificial Sequence: Synthetic oligonucleotide
  Antisense strand to SEQ ID NO: 1499402
ugucuugcaggagagcgcc

SEQ ID NO: 1499404 - RNA, 19 nt, Artificial Sequence
  Description of Artificial Sequence: Synthetic oligonucleotide
  Sense strand starting at position 2879 of SEQ ID NO: 1244579
cccauuagugcucagcgga

SEQ ID NO: 1499405 - RNA, 19 nt, Artificial Sequence
  Description of Artificial Sequence: Synthetic oligonucleotide
  Antisense strand to SEQ ID NO: 1499404
uccgcugagcacuaauggg

SEQ ID NO: 1499406 - RNA, 19 nt, Artificial Sequence
  Description of Artificial Sequence: Synthetic oligonucleotide
  Sense strand starting at position 3060 of SEQ ID NO: 1244579
cugucaugcucagcacaga

SEQ ID NO: 1499407 - RNA, 19 nt, Artificial Sequence
  Description of Artificial Sequence: Synthetic oligonucleotide
  Antisense strand to SEQ ID NO: 1499406
ucugugcugagcaugacag

SEQ ID NO: 1499408 - RNA, 19 nt, Artificial Sequence
  Description of Artificial Sequence: Synthetic oligonucleotide
  Sense strand starting at position 3077 of SEQ ID NO: 1244579
gagguuuccuccuccggga

SEQ ID NO: 1499409 - RNA, 19 nt, Artificial Sequence
  Description of Artificial Sequence: Synthetic oligonucleotide
  Antisense strand to SEQ ID NO: 1499408
ucccggaggaggaaaccuc

SEQ ID NO: 1499410 - RNA, 19 nt, Artificial Sequence
  Description of Artificial Sequence: Synthetic oligonucleotide
  Sense strand starting at position 3091 of SEQ ID NO: 1244579
cgggaaggcuucucugaug

SEQ ID NO: 1499411 - RNA, 19 nt, Artificial Sequence
  Description of Artificial Sequence: Synthetic oligonucleotide
  Antisense strand to SEQ ID NO: 1499410
caucagagaagccuucccg

SEQ ID NO: 1499412 - RNA, 19 nt, Artificial Sequence
  Description of Artificial Sequence: Synthetic oligonucleotide
  Sense strand starting at position 3119 of SEQ ID NO: 1244579
cuuaucuucuauucugagu

SEQ ID NO: 1499413 - RNA, 19 nt, Artificial Sequence
  Description of Artificial Sequence: Synthetic oligonucleotide
  Antisense strand to SEQ ID NO: 1499412
acucagaauagaagauaag

SEQ ID NO: 1499414 - RNA, 19 nt, Artificial Sequence
  Description of Artificial Sequence: Synthetic oligonucleotide
  Sense strand starting at position 3156 of SEQ ID NO: 1244579
gugcccaguuaauucuuaa

SEQ ID NO: 1499415 - RNA, 19 nt, Artificial Sequence
  Description of Artificial Sequence: Synthetic oligonucleotide
  Antisense strand to SEQ ID NO: 1499414
uuaagaauuaacugggcac

SEQ ID NO: 1499416 - RNA, 19 nt, Artificial Sequence
  Description of Artificial Sequence: Synthetic oligonucleotide
  Sense strand starting at position 3222 of SEQ ID NO: 1244579
agggcaagauaugucuuaa

SEQ ID NO: 1499417 - RNA, 19 nt, Artificial Sequence
  Description of Artificial Sequence: Synthetic oligonucleotide
  Antisense strand to SEQ ID NO: 1499416
uuaagacauaucuugcccu

SEQ ID NO: 1499418 - RNA, 19 nt, Artificial Sequence
  Description of Artificial Sequence: Synthetic oligonucleotide
  Sense strand starting at position 3251 of SEQ ID NO: 1244579
gucccugaucuccaggcaa

SEQ ID NO: 1499419 - RNA, 19 nt, Artificial Sequence
  Description of Artificial Sequence: Synthetic oligonucleotide
  Antisense strand to SEQ ID NO: 1499418
uugccuggagaucagggac

SEQ ID NO: 1499420 - RNA, 19 nt, Artificial Sequence
  Description of Artificial Sequence: Synthetic oligonucleotide
  Sense strand starting at position 3253 of SEQ ID NO: 1244579
cccugaucuccaggcaaga

SEQ ID NO: 1499421 - RNA, 19 nt, Artificial Sequence
  Description of Artificial Sequence: Synthetic oligonucleotide
  Antisense strand to SEQ ID NO: 1499420
ucuugccuggagaucaggg

SEQ ID NO: 1499422 - RNA, 19 nt, Artificial Sequence
  Description of Artificial Sequence: Synthetic oligonucleotide
  Sense strand starting at position 3255 of SEQ ID NO: 1244579
cugaucuccaggcaagagu

SEQ ID NO: 1499423 - RNA, 19 nt, Artificial Sequence
  Description of Artificial Sequence: Synthetic oligonucleotide
  Antisense strand to SEQ ID NO: 1499422
acucuugccuggagaucag

SEQ ID NO: 1499424 - RNA, 19 nt, Artificial Sequence
  Description of Artificial Sequence: Synthetic oligonucleotide
  Sense strand starting at position 3570 of SEQ ID NO: 1244579
gcaacaccucuugggaaga

SEQ ID NO: 1499425 - RNA, 19 nt, Artificial Sequence
  Description of Artificial Sequence: Synthetic oligonucleotide
  Antisense strand to SEQ ID NO: 1499424
ucuucccaagagguguugc

SEQ ID NO: 1499426 - RNA, 19 nt, Artificial Sequence
  Description of Artificial Sequence: Synthetic oligonucleotide
  Sense strand starting at position 3583 of SEQ ID NO: 1244579
ggaagagagaccugugguu

SEQ ID NO: 1499427 - RNA, 19 nt, Artificial Sequence
  Description of Artificial Sequence: Synthetic oligonucleotide
  Antisense strand to SEQ ID NO: 1499426
aaccacaggucucucuucc

SEQ ID NO: 1499428 - RNA, 19 nt, Artificial Sequence
  Description of Artificial Sequence: Synthetic oligonucleotide
  Sense strand starting at position 3585 of SEQ ID NO: 1244579
aagagagaccugugguucu

SEQ ID NO: 1499429 - RNA, 19 nt, Artificial Sequence
  Description of Artificial Sequence: Synthetic oligonucleotide
  Antisense strand to SEQ ID NO: 1499428
agaaccacaggucucucuu

SEQ ID NO: 1499430 - RNA, 19 nt, Artificial Sequence
  Description of Artificial Sequence: Synthetic oligonucleotide
  Sense strand starting at position 3607 of SEQ ID NO: 1244579
gauugaggaguccgaaaug

SEQ ID NO: 1499431 - RNA, 19 nt, Artificial Sequence
  Description of Artificial Sequence: Synthetic oligonucleotide
  Antisense strand to SEQ ID NO: 1499430
cauuucggacuccucaauc

SEQ ID NO: 1499432 - RNA, 19 nt, Artificial Sequence
  Description of Artificial Sequence: Synthetic oligonucleotide
  Sense strand starting at position 3612 of SEQ ID NO: 1244579
aggaguccgaaaugugaga

SEQ ID NO: 1499433 - RNA, 19 nt, Artificial Sequence
  Description of Artificial Sequence: Synthetic oligonucleotide
  Antisense strand to SEQ ID NO: 1499432
ucucacauuucggacuccu

SEQ ID NO: 1499434 - RNA, 19 nt, Artificial Sequence
  Description of Artificial Sequence: Synthetic oligonucleotide
  Sense strand starting at position 3614 of SEQ ID NO: 1244579
gaguccgaaaugugagaaa

SEQ ID NO: 1499435 - RNA, 19 nt, Artificial Sequence
  Description of Artificial Sequence: Synthetic oligonucleotide
  Antisense strand to SEQ ID NO: 1499434
uuucucacauuucggacuc

SEQ ID NO: 1499436 - RNA, 19 nt, Artificial Sequence
  Description of Artificial Sequence: Synthetic oligonucleotide
  Sense strand starting at position 3712 of SEQ ID NO: 1244579
gcaggauacuagcauauuu

SEQ ID NO: 1499437 - RNA, 19 nt, Artificial Sequence
  Description of Artificial Sequence: Synthetic oligonucleotide
  Antisense strand to SEQ ID NO: 1499436
aaauaugcuaguauccugc

SEQ ID NO: 1499438 - RNA, 19 nt, Artificial Sequence
  Description of Artificial Sequence: Synthetic oligonucleotide
  Sense strand starting at position 3733 of SEQ ID NO: 1244579
gccgguuuccucgccugua

SEQ ID NO: 1499439 - RNA, 19 nt, Artificial Sequence
  Description of Artificial Sequence: Synthetic oligonucleotide
  Antisense strand to SEQ ID NO: 1499438
uacaggcgaggaaaccggc

SEQ ID NO: 1499440 - RNA, 19 nt, Artificial Sequence
  Description of Artificial Sequence: Synthetic oligonucleotide
  Sense strand starting at position 3747 of SEQ ID NO: 1244579
cuguaccgugaggauaaua

SEQ ID NO: 1499441 - RNA, 19 nt, Artificial Sequence
  Description of Artificial Sequence: Synthetic oligonucleotide
  Antisense strand to SEQ ID NO: 1499440
uauuauccucacgguacag

SEQ ID NO: 1499442 - RNA, 19 nt, Artificial Sequence
  Description of Artificial Sequence: Synthetic oligonucleotide
  Sense strand starting at position 3758 of SEQ ID NO: 1244579
ggauaauaguaccuuccuu

SEQ ID NO: 1499443 - RNA, 19 nt, Artificial Sequence
  Description of Artificial Sequence: Synthetic oligonucleotide
  Antisense strand to SEQ ID NO: 1499442
aaggaagguacuauuaucc

SEQ ID NO: 1499444 - RNA, 19 nt, Artificial Sequence
  Description of Artificial Sequence: Synthetic oligonucleotide
  Sense strand starting at position 3968 of SEQ ID NO: 1244579
ccgauauuaguucguccaa

SEQ ID NO: 1499445 - RNA, 19 nt, Artificial Sequence
  Description of Artificial Sequence: Synthetic oligonucleotide
  Antisense strand to SEQ ID NO: 1499444
uuggacgaacuaauaucgg

SEQ ID NO: 1499446 - RNA, 19 nt, Artificial Sequence
  Description of Artificial Sequence: Synthetic oligonucleotide
  Sense strand starting at position 3969 of SEQ ID NO: 1244579
cgauauuaguucguccaag

SEQ ID NO: 1499447 - RNA, 19 nt, Artificial Sequence
  Description of Artificial Sequence: Synthetic oligonucleotide
  Antisense strand to SEQ ID NO: 1499446
cuuggacgaacuaauaucg

SEQ ID NO: 1499448 - RNA, 19 nt, Artificial Sequence
  Description of Artificial Sequence: Synthetic oligonucleotide
  Sense strand starting at position 3970 of SEQ ID NO: 1244579
gauauuaguucguccaagg

SEQ ID NO: 1499449 - RNA, 19 nt, Artificial Sequence
  Description of Artificial Sequence: Synthetic oligonucleotide
  Antisense strand to SEQ ID NO: 1499448
ccuuggacgaacuaauauc

SEQ ID NO: 1499450 - RNA, 19 nt, Artificial Sequence
  Description of Artificial Sequence: Synthetic oligonucleotide
  Sense strand starting at position 21 of SEQ ID NO: 1244580
ugugacuuuggacacguua

SEQ ID NO: 1499451 - RNA, 19 nt, Artificial Sequence
  Description of Artificial Sequence: Synthetic oligonucleotide
  Antisense strand to SEQ ID NO: 1499450
uaacguguccaaagucaca

SEQ ID NO: 1499452 - RNA, 19 nt, Artificial Sequence
  Description of Artificial Sequence: Synthetic oligonucleotide
  Sense strand starting at position 23 of SEQ ID NO: 1244580
ugacuuuggacacguuauu

SEQ ID NO: 1499453 - RNA, 19 nt, Artificial Sequence
  Description of Artificial Sequence: Synthetic oligonucleotide
  Antisense strand to SEQ ID NO: 1499452
aauaacguguccaaaguca

SEQ ID NO: 1499454 - RNA, 19 nt, Artificial Sequence
  Description of Artificial Sequence: Synthetic oligonucleotide
  Sense strand starting at position 118 of SEQ ID NO: 1244580
ugagauaaauguccuauau

SEQ ID NO: 1499455 - RNA, 19 nt, Artificial Sequence
  Description of Artificial Sequence: Synthetic oligonucleotide
  Antisense strand to SEQ ID NO: 1499454
auauaggacauuuaucuca

SEQ ID NO: 1499456 - RNA, 19 nt, Artificial Sequence
  Description of Artificial Sequence: Synthetic oligonucleotide
  Sense strand starting at position 184 of SEQ ID NO: 1244580
aucuuaagugauggacuuu

SEQ ID NO: 1499457 - RNA, 19 nt, Artificial Sequence
  Description of Artificial Sequence: Synthetic oligonucleotide
  Antisense strand to SEQ ID NO: 1499456
aaaguccaucacuuaagau

SEQ ID NO: 1499458 - RNA, 19 nt, Artificial Sequence
  Description of Artificial Sequence: Synthetic oligonucleotide
  Sense strand starting at position 266 of SEQ ID NO: 1244580
ugccaacuguuaucaguau

SEQ ID NO: 1499459 - RNA, 19 nt, Artificial Sequence
  Description of Artificial Sequence: Synthetic oligonucleotide
  Antisense strand to SEQ ID NO: 1499458
auacugauaacaguuggca

SEQ ID NO: 1499460 - RNA, 19 nt, Artificial Sequence
  Description of Artificial Sequence: Synthetic oligonucleotide
  Sense strand starting at position 562 of SEQ ID NO: 1244580
gguuguuuacccucgcuau

SEQ ID NO: 1499461 - RNA, 19 nt, Artificial Sequence
  Description of Artificial Sequence: Synthetic oligonucleotide
  Antisense strand to SEQ ID NO: 1499460
auagcgaggguaaacaacc

SEQ ID NO: 1499462 - RNA, 19 nt, Artificial Sequence
  Description of Artificial Sequence: Synthetic oligonucleotide
  Sense strand starting at position 574 of SEQ ID NO: 1244580
ucgcuaugacuacagaguu

SEQ ID NO: 1499463 - RNA, 19 nt, Artificial Sequence
  Description of Artificial Sequence: Synthetic oligonucleotide
  Antisense strand to SEQ ID NO: 1499462
aacucuguagucauagcga

SEQ ID NO: 1499464 - RNA, 19 nt, Artificial Sequence
  Description of Artificial Sequence: Synthetic oligonucleotide
  Sense strand starting at position 688 of SEQ ID NO: 1244580
gucuuugugcccgugcaaa

SEQ ID NO: 1499465 - RNA, 19 nt, Artificial Sequence
  Description of Artificial Sequence: Synthetic oligonucleotide
  Antisense strand to SEQ ID NO: 1499464
uuugcacgggcacaaagac

SEQ ID NO: 1499466 - RNA, 19 nt, Artificial Sequence
  Description of Artificial Sequence: Synthetic oligonucleotide
  Sense strand starting at position 1096 of SEQ ID NO: 1244580
gggugucccgacuacaacu

SEQ ID NO: 1499467 - RNA, 19 nt, Artificial Sequence
  Description of Artificial Sequence: Synthetic oligonucleotide
  Antisense strand to SEQ ID NO: 1499466
aguuguagucgggacaccc

SEQ ID NO: 1499468 - RNA, 19 nt, Artificial Sequence
  Description of Artificial Sequence: Synthetic oligonucleotide
  Sense strand starting at position 1262 of SEQ ID NO: 1244580
gacucuucggccgccaauu

SEQ ID NO: 1499469 - RNA, 19 nt, Artificial Sequence
  Description of Artificial Sequence: Synthetic oligonucleotide
  Antisense strand to SEQ ID NO: 1499468
aauuggcggccgaagaguc

SEQ ID NO: 1499470 - RNA, 19 nt, Artificial Sequence
  Description of Artificial Sequence: Synthetic oligonucleotide
  Sense strand starting at position 1368 of SEQ ID NO: 1244580
gccggaugguuccuacaau

SEQ ID NO: 1499471 - RNA, 19 nt, Artificial Sequence
  Description of Artificial Sequence: Synthetic oligonucleotide
  Antisense strand to SEQ ID NO: 1499470
auuguaggaaccauccggc

SEQ ID NO: 1499472 - RNA, 19 nt, Artificial Sequence
  Description of Artificial Sequence: Synthetic oligonucleotide
  Sense strand starting at position 1770 of SEQ ID NO: 1244580
gcuggagccuauccagaua

SEQ ID NO: 1499473 - RNA, 19 nt, Artificial Sequence
  Description of Artificial Sequence: Synthetic oligonucleotide
  Antisense strand to SEQ ID NO: 1499472
uaucuggauaggcuccagc

SEQ ID NO: 1499474 - RNA, 19 nt, Artificial Sequence
  Description of Artificial Sequence: Synthetic oligonucleotide
  Sense strand starting at position 2115 of SEQ ID NO: 1244580
gucugaagucuggcgucuu

SEQ ID NO: 1499475 - RNA, 19 nt, Artificial Sequence
  Description of Artificial Sequence: Synthetic oligonucleotide
  Antisense strand to SEQ ID NO: 1499474
aagacgccagacuucagac

SEQ ID NO: 1499476 - RNA, 19 nt, Artificial Sequence
  Description of Artificial Sequence: Synthetic oligonucleotide
  Sense strand starting at position 2323 of SEQ ID NO: 1244580
ggacaacuccuuugugcaa

SEQ ID NO: 1499477 - RNA, 19 nt, Artificial Sequence
  Description of Artificial Sequence: Synthetic oligonucleotide
  Antisense strand to SEQ ID NO: 1499476
uugcacaaaggaguugucc

SEQ ID NO: 1499478 - RNA, 19 nt, Artificial Sequence
  Description of Artificial Sequence: Synthetic oligonucleotide
  Sense strand starting at position 2337 of SEQ ID NO: 1244580
ugcaaaguccugcaggaua

SEQ ID NO: 1499479 - RNA, 19 nt, Artificial Sequence
  Description of Artificial Sequence: Synthetic oligonucleotide
  Antisense strand to SEQ ID NO: 1499478
uauccugcaggacuuugca

SEQ ID NO: 1499480 - RNA, 19 nt, Artificial Sequence
  Description of Artificial Sequence: Synthetic oligonucleotide
  Sense strand starting at position 2339 of SEQ ID NO: 1244580
caaaguccugcaggauaga

SEQ ID NO: 1499481 - RNA, 19 nt, Artificial Sequence
  Description of Artificial Sequence: Synthetic oligonucleotide
  Antisense strand to SEQ ID NO: 1499480
ucuauccugcaggacuuug

SEQ ID NO: 1499482 - RNA, 19 nt, Artificial Sequence
  Description of Artificial Sequence: Synthetic oligonucleotide
  Sense strand starting at position 2472 of SEQ ID NO: 1244580
aagcgaaccugaguguuaa

SEQ ID NO: 1499483 - RNA, 19 nt, Artificial Sequence
  Description of Artificial Sequence: Synthetic oligonucleotide
  Antisense strand to SEQ ID NO: 1499482
uuaacacucagguucgcuu

SEQ ID NO: 1499484 - RNA, 19 nt, Artificial Sequence
  Description of Artificial Sequence: Synthetic oligonucleotide
  Sense strand starting at position 2473 of SEQ ID NO: 1244580
agcgaaccugaguguuaag

SEQ ID NO: 1499485 - RNA, 19 nt, Artificial Sequence
  Description of Artificial Sequence: Synthetic oligonucleotide
  Antisense strand to SEQ ID NO: 1499484
cuuaacacucagguucgcu

SEQ ID NO: 1499486 - RNA, 19 nt, Artificial Sequence
  Description of Artificial Sequence: Synthetic oligonucleotide
  Sense strand starting at position 2503 of SEQ ID NO: 1244580
ugugucuggagcugaauuu

SEQ ID NO: 1499487 - RNA, 19 nt, Artificial Sequence
  Description of Artificial Sequence: Synthetic oligonucleotide
  Antisense strand to SEQ ID NO: 1499486
aaauucagcuccagacaca

SEQ ID NO: 1499488 - RNA, 19 nt, Artificial Sequence
  Description of Artificial Sequence: Synthetic oligonucleotide
  Sense strand starting at position 2572 of SEQ ID NO: 1244580
gggauugugagugaaguua

SEQ ID NO: 1499489 - RNA, 19 nt, Artificial Sequence
  Description of Artificial Sequence: Synthetic oligonucleotide
  Antisense strand to SEQ ID NO: 1499488
uaacuucacucacaauccc

SEQ ID NO: 1499490 - RNA, 19 nt, Artificial Sequence
  Description of Artificial Sequence: Synthetic oligonucleotide
  Sense strand starting at position 2583 of SEQ ID NO: 1244580
ugaaguuacuaaccggaaa

SEQ ID NO: 1499491 - RNA, 19 nt, Artificial Sequence
  Description of Artificial Sequence: Synthetic oligonucleotide
  Antisense strand to SEQ ID NO: 1499490
uuuccgguuaguaacuuca

SEQ ID NO: 1499492 - RNA, 19 nt, Artificial Sequence
  Description of Artificial Sequence: Synthetic oligonucleotide
  Sense strand starting at position 2607 of SEQ ID NO: 1244580
gcgaaucuuggagaaaugu

SEQ ID NO: 1499493 - RNA, 19 nt, Artificial Sequence
  Description of Artificial Sequence: Synthetic oligonucleotide
  Antisense strand to SEQ ID NO: 1499492
acauuucuccaagauucgc

SEQ ID NO: 1499494 - RNA, 19 nt, Artificial Sequence
  Description of Artificial Sequence: Synthetic oligonucleotide
  Sense strand starting at position 2720 of SEQ ID NO: 1244580
ccuuguacuuccucugaca

SEQ ID NO: 1499495 - RNA, 19 nt, Artificial Sequence
  Description of Artificial Sequence: Synthetic oligonucleotide
  Antisense strand to SEQ ID NO: 1499494
ugucagaggaaguacaagg

SEQ ID NO: 1499496 - RNA, 19 nt, Artificial Sequence
  Description of Artificial Sequence: Synthetic oligonucleotide
  Sense strand starting at position 2722 of SEQ ID NO: 1244580
uuguacuuccucugacacu

SEQ ID NO: 1499497 - RNA, 19 nt, Artificial Sequence
  Description of Artificial Sequence: Synthetic oligonucleotide
  Antisense strand to SEQ ID NO: 1499496
agugucagaggaaguacaa

SEQ ID NO: 1499498 - RNA, 19 nt, Artificial Sequence
  Description of Artificial Sequence: Synthetic oligonucleotide
  Sense strand starting at position 2816 of SEQ ID NO: 1244580
gcuggaauggcucauugca

SEQ ID NO: 1499499 - RNA, 19 nt, Artificial Sequence
  Description of Artificial Sequence: Synthetic oligonucleotide
  Antisense strand to SEQ ID NO: 1499498
ugcaaugagccauuccagc

SEQ ID NO: 1499500 - RNA, 19 nt, Artificial Sequence
  Description of Artificial Sequence: Synthetic oligonucleotide
  Sense strand starting at position 3076 of SEQ ID NO: 1244580
ccaccaaaucacuguguua

SEQ ID NO: 1499501 - RNA, 19 nt, Artificial Sequence
  Description of Artificial Sequence: Synthetic oligonucleotide
  Antisense strand to SEQ ID NO: 1499500
uaacacagugauuuggugg

SEQ ID NO: 1499502 - RNA, 19 nt, Artificial Sequence
  Description of Artificial Sequence: Synthetic oligonucleotide
  Sense strand starting at position 3078 of SEQ ID NO: 1244580
accaaaucacuguguuauu

SEQ ID NO: 1499503 - RNA, 19 nt, Artificial Sequence
  Description of Artificial Sequence: Synthetic oligonucleotide
  Antisense strand to SEQ ID NO: 1499502
aauaacacagugauuuggu

SEQ ID NO: 1499504 - RNA, 19 nt, Artificial Sequence
  Description of Artificial Sequence: Synthetic oligonucleotide
  Sense strand starting at position 3079 of SEQ ID NO: 1244580
ccaaaucacuguguuauug

SEQ ID NO: 1499505 - RNA, 19 nt, Artificial Sequence
  Description of Artificial Sequence: Synthetic oligonucleotide
  Antisense strand to SEQ ID NO: 1499504
caauaacacagugauuugg

SEQ ID NO: 1499506 - RNA, 19 nt, Artificial Sequence
  Description of Artificial Sequence: Synthetic oligonucleotide
  Sense strand starting at position 3083 of SEQ ID NO: 1244580
aucacuguguuauugauaa

SEQ ID NO: 1499507 - RNA, 19 nt, Artificial Sequence
  Description of Artificial Sequence: Synthetic oligonucleotide
  Antisense strand to SEQ ID NO: 1499506
uuaucaauaacacagugau

SEQ ID NO: 1499508 - RNA, 19 nt, Artificial Sequence
  Description of Artificial Sequence: Synthetic oligonucleotide
  Sense strand starting at position 3121 of SEQ ID NO: 1244580
cucaguucgaccgagcaaa

SEQ ID NO: 1499509 - RNA, 19 nt, Artificial Sequence
  Description of Artificial Sequence: Synthetic oligonucleotide
  Antisense strand to SEQ ID NO: 1499508
uuugcucggucgaacugag

SEQ ID NO: 1499510 - RNA, 19 nt, Artificial Sequence
  Description of Artificial Sequence: Synthetic oligonucleotide
  Sense strand starting at position 3144 of SEQ ID NO: 1244580
gcuccagcacucuagaacu

SEQ ID NO: 1499511 - RNA, 19 nt, Artificial Sequence
  Description of Artificial Sequence: Synthetic oligonucleotide
  Antisense strand to SEQ ID NO: 1499510
aguucuagagugcuggagc

SEQ ID NO: 1499512 - RNA, 19 nt, Artificial Sequence
  Description of Artificial Sequence: Synthetic oligonucleotide
  Sense strand starting at position 3157 of SEQ ID NO: 1244580
agaacuuagcuguaucuaa

SEQ ID NO: 1499513 - RNA, 19 nt, Artificial Sequence
  Description of Artificial Sequence: Synthetic oligonucleotide
  Antisense strand to SEQ ID NO: 1499512
uuagauacagcuaaguucu

SEQ ID NO: 1499514 - RNA, 19 nt, Artificial Sequence
  Description of Artificial Sequence: Synthetic oligonucleotide
  Sense strand starting at position 3233 of SEQ ID NO: 1244580
uggcaauccucuucccuga

SEQ ID NO: 1499515 - RNA, 19 nt, Artificial Sequence
  Description of Artificial Sequence: Synthetic oligonucleotide
  Antisense strand to SEQ ID NO: 1499514
ucagggaagaggauugcca

SEQ ID NO: 1499516 - RNA, 19 nt, Artificial Sequence
  Description of Artificial Sequence: Synthetic oligonucleotide
  Sense strand starting at position 3235 of SEQ ID NO: 1244580
gcaauccucuucccugaga

SEQ ID NO: 1499517 - RNA, 19 nt, Artificial Sequence
  Description of Artificial Sequence: Synthetic oligonucleotide
  Antisense strand to SEQ ID NO: 1499516
ucucagggaagaggauugc

SEQ ID NO: 1499518 - RNA, 19 nt, Artificial Sequence
  Description of Artificial Sequence: Synthetic oligonucleotide
  Sense strand starting at position 3253 of SEQ ID NO: 1244580
acuggcaguugcucaagau

SEQ ID NO: 1499519 - RNA, 19 nt, Artificial Sequence
  Description of Artificial Sequence: Synthetic oligonucleotide
  Antisense strand to SEQ ID NO: 1499518
aucuugagcaacugccagu

SEQ ID NO: 1499520 - RNA, 19 nt, Artificial Sequence
  Description of Artificial Sequence: Synthetic oligonucleotide
  Sense strand starting at position 3254 of SEQ ID NO: 1244580
cuggcaguugcucaagaua

SEQ ID NO: 1499521 - RNA, 19 nt, Artificial Sequence
  Description of Artificial Sequence: Synthetic oligonucleotide
  Antisense strand to SEQ ID NO: 1499520
uaucuugagcaacugccag

SEQ ID NO: 1499522 - RNA, 19 nt, Artificial Sequence
  Description of Artificial Sequence: Synthetic oligonucleotide
  Sense strand starting at position 3257 of SEQ ID NO: 1244580
gcaguugcucaagauagga

SEQ ID NO: 1499523 - RNA, 19 nt, Artificial Sequence
  Description of Artificial Sequence: Synthetic oligonucleotide
  Antisense strand to SEQ ID NO: 1499522
uccuaucuugagcaacugc

SEQ ID NO: 1499524 - RNA, 19 nt, Artificial Sequence
  Description of Artificial Sequence: Synthetic oligonucleotide
  Sense strand starting at position 3329 of SEQ ID NO: 1244580
gcaaauaaacgcgugucuu

SEQ ID NO: 1499525 - RNA, 19 nt, Artificial Sequence
  Description of Artificial Sequence: Synthetic oligonucleotide
  Antisense strand to SEQ ID NO: 1499524
aagacacgcguuuauuugc

SEQ ID NO: 1499526 - RNA, 19 nt, Artificial Sequence
  Description of Artificial Sequence: Synthetic oligonucleotide
  Sense strand starting at position 3672 of SEQ ID NO: 1244580
cgagucuuuagugcucuuu

SEQ ID NO: 1499527 - RNA, 19 nt, Artificial Sequence
  Description of Artificial Sequence: Synthetic oligonucleotide
  Antisense strand to SEQ ID NO: 1499526
aaagagcacuaaagacucg

SEQ ID NO: 1499528 - RNA, 19 nt, Artificial Sequence
  Description of Artificial Sequence: Synthetic oligonucleotide
  Sense strand starting at position 3682 of SEQ ID NO: 1244580
gugcucuuuggcgcuauaa

SEQ ID NO: 1499529 - RNA, 19 nt, Artificial Sequence
  Description of Artificial Sequence: Synthetic oligonucleotide
  Antisense strand to SEQ ID NO: 1499528
uuauagcgccaaagagcac

SEQ ID NO: 1499530 - RNA, 19 nt, Artificial Sequence
  Description of Artificial Sequence: Synthetic oligonucleotide
  Sense strand starting at position 162 of SEQ ID NO: 1244581
cuuaaaucugcuggacaca

SEQ ID NO: 1499531 - RNA, 19 nt, Artificial Sequence
  Description of Artificial Sequence: Synthetic oligonucleotide
  Antisense strand to SEQ ID NO: 1499530
uguguccagcagauuuaag

SEQ ID NO: 1499532 - RNA, 19 nt, Artificial Sequence
  Description of Artificial Sequence: Synthetic oligonucleotide
  Sense strand starting at position 238 of SEQ ID NO: 1244581
cgacuagguccagaaaggu

SEQ ID NO: 1499533 - RNA, 19 nt, Artificial Sequence
  Description of Artificial Sequence: Synthetic oligonucleotide
  Antisense strand to SEQ ID NO: 1499532
accuuucuggaccuagucg

SEQ ID NO: 1499534 - RNA, 19 nt, Artificial Sequence
  Description of Artificial Sequence: Synthetic oligonucleotide
  Sense strand starting at position 265 of SEQ ID NO: 1244581
ccaggcugaggguauuaua

SEQ ID NO: 1499535 - RNA, 19 nt, Artificial Sequence
  Description of Artificial Sequence: Synthetic oligonucleotide
  Antisense strand to SEQ ID NO: 1499534
uauaauacccucagccugg

SEQ ID NO: 1499536 - RNA, 19 nt, Artificial Sequence
  Description of Artificial Sequence: Synthetic oligonucleotide
  Sense strand starting at position 399 of SEQ ID NO: 1244581
ugugacuuuggacacguua

SEQ ID NO: 1499537 - RNA, 19 nt, Artificial Sequence
  Description of Artificial Sequence: Synthetic oligonucleotide
  Antisense strand to SEQ ID NO: 1499536
uaacguguccaaagucaca

SEQ ID NO: 1499538 - RNA, 19 nt, Artificial Sequence
  Description of Artificial Sequence: Synthetic oligonucleotide
  Sense strand starting at position 401 of SEQ ID NO: 1244581
ugacuuuggacacguuauu

SEQ ID NO: 1499539 - RNA, 19 nt, Artificial Sequence
  Description of Artificial Sequence: Synthetic oligonucleotide
  Antisense strand to SEQ ID NO: 1499538
aauaacguguccaaaguca

SEQ ID NO: 1499540 - RNA, 19 nt, Artificial Sequence
  Description of Artificial Sequence: Synthetic oligonucleotide
  Sense strand starting at position 496 of SEQ ID NO: 1244581
ugagauaaauguccuauau

SEQ ID NO: 1499541 - RNA, 19 nt, Artificial Sequence
  Description of Artificial Sequence: Synthetic oligonucleotide
  Antisense strand to SEQ ID NO: 1499540
auauaggacauuuaucuca

SEQ ID NO: 1499542 - RNA, 19 nt, Artificial Sequence
  Description of Artificial Sequence: Synthetic oligonucleotide
  Sense strand starting at position 562 of SEQ ID NO: 1244581
aucuuaagugauggacuuu

SEQ ID NO: 1499543 - RNA, 19 nt, Artificial Sequence
  Description of Artificial Sequence: Synthetic oligonucleotide
  Antisense strand to SEQ ID NO: 1499542
aaaguccaucacuuaagau

SEQ ID NO: 1499544 - RNA, 19 nt, Artificial Sequence
  Description of Artificial Sequence: Synthetic oligonucleotide
  Sense strand starting at position 940 of SEQ ID NO: 1244581
gguuguuuacccucgcuau

SEQ ID NO: 1499545 - RNA, 19 nt, Artificial Sequence
  Description of Artificial Sequence: Synthetic oligonucleotide
  Antisense strand to SEQ ID NO: 1499544
auagcgaggguaaacaacc

SEQ ID NO: 1499546 - RNA, 19 nt, Artificial Sequence
  Description of Artificial Sequence: Synthetic oligonucleotide
  Sense strand starting at position 952 of SEQ ID NO: 1244581
ucgcuaugacuacagaguu

SEQ ID NO: 1499547 - RNA, 19 nt, Artificial Sequence
  Description of Artificial Sequence: Synthetic oligonucleotide
  Antisense strand to SEQ ID NO: 1499546
aacucuguagucauagcga

SEQ ID NO: 1499548 - RNA, 19 nt, Artificial Sequence
  Description of Artificial Sequence: Synthetic oligonucleotide
  Sense strand starting at position 1066 of SEQ ID NO: 1244581
gucuuugugcccgugcaaa

SEQ ID NO: 1499549 - RNA, 19 nt, Artificial Sequence
  Description of Artificial Sequence: Synthetic oligonucleotide
  Antisense strand to SEQ ID NO: 1499548
uuugcacgggcacaaagac

SEQ ID NO: 1499550 - RNA, 19 nt, Artificial Sequence
  Description of Artificial Sequence: Synthetic oligonucleotide
  Sense strand starting at position 1474 of SEQ ID NO: 1244581
gggugucccgacuacaacu

SEQ ID NO: 1499551 - RNA, 19 nt, Artificial Sequence
  Description of Artificial Sequence: Synthetic oligonucleotide
  Antisense strand to SEQ ID NO: 1499550
aguuguagucgggacaccc

SEQ ID NO: 1499552 - RNA, 19 nt, Artificial Sequence
  Description of Artificial Sequence: Synthetic oligonucleotide
  Sense strand starting at position 1640 of SEQ ID NO: 1244581
gacucuucggccgccaauu

SEQ ID NO: 1499553 - RNA, 19 nt, Artificial Sequence
  Description of Artificial Sequence: Synthetic oligonucleotide
  Antisense strand to SEQ ID NO: 1499552
aauuggcggccgaagaguc

SEQ ID NO: 1499554 - RNA, 19 nt, Artificial Sequence
  Description of Artificial Sequence: Synthetic oligonucleotide
  Sense strand starting at position 1746 of SEQ ID NO: 1244581
gccggaugguuccuacaau

SEQ ID NO: 1499555 - RNA, 19 nt, Artificial Sequence
  Description of Artificial Sequence: Synthetic oligonucleotide
  Antisense strand to SEQ ID NO: 1499554
auuguaggaaccauccggc

SEQ ID NO: 1499556 - RNA, 19 nt, Artificial Sequence
  Description of Artificial Sequence: Synthetic oligonucleotide
  Sense strand starting at position 2148 of SEQ ID NO: 1244581
gcuggagccuauccagaua

SEQ ID NO: 1499557 - RNA, 19 nt, Artificial Sequence
  Description of Artificial Sequence: Synthetic oligonucleotide
  Antisense strand to SEQ ID NO: 1499556
uaucuggauaggcuccagc

SEQ ID NO: 1499558 - RNA, 19 nt, Artificial Sequence
  Description of Artificial Sequence: Synthetic oligonucleotide
  Sense strand starting at position 2493 of SEQ ID NO: 1244581
gucugaagucuggcgucuu

SEQ ID NO: 1499559 - RNA, 19 nt, Artificial Sequence
  Description of Artificial Sequence: Synthetic oligonucleotide
  Antisense strand to SEQ ID NO: 1499558
aagacgccagacuucagac

SEQ ID NO: 1499560 - RNA, 19 nt, Artificial Sequence
  Description of Artificial Sequence: Synthetic oligonucleotide
  Sense strand starting at position 2701 of SEQ ID NO: 1244581
ggacaacuccuuugugcaa

SEQ ID NO: 1499561 - RNA, 19 nt, Artificial Sequence
  Description of Artificial Sequence: Synthetic oligonucleotide
  Antisense strand to SEQ ID NO: 1499560
uugcacaaaggaguugucc

SEQ ID NO: 1499562 - RNA, 19 nt, Artificial Sequence
  Description of Artificial Sequence: Synthetic oligonucleotide
  Sense strand starting at position 2715 of SEQ ID NO: 1244581
ugcaaaguccugcaggaua

SEQ ID NO: 1499563 - RNA, 19 nt, Artificial Sequence
  Description of Artificial Sequence: Synthetic oligonucleotide
  Antisense strand to SEQ ID NO: 1499562
uauccugcaggacuuugca

SEQ ID NO: 1499564 - RNA, 19 nt, Artificial Sequence
  Description of Artificial Sequence: Synthetic oligonucleotide
  Sense strand starting at position 2717 of SEQ ID NO: 1244581
caaaguccugcaggauaga

SEQ ID NO: 1499565 - RNA, 19 nt, Artificial Sequence
  Description of Artificial Sequence: Synthetic oligonucleotide
  Antisense strand to SEQ ID NO: 1499564
ucuauccugcaggacuuug

SEQ ID NO: 1499566 - RNA, 19 nt, Artificial Sequence
  Description of Artificial Sequence: Synthetic oligonucleotide
  Sense strand starting at position 2850 of SEQ ID NO: 1244581
aagcgaaccugaguguuaa

SEQ ID NO: 1499567 - RNA, 19 nt, Artificial Sequence
  Description of Artificial Sequence: Synthetic oligonucleotide
  Antisense strand to SEQ ID NO: 1499566
uuaacacucagguucgcuu

SEQ ID NO: 1499568 - RNA, 19 nt, Artificial Sequence
  Description of Artificial Sequence: Synthetic oligonucleotide
  Sense strand starting at position 2851 of SEQ ID NO: 1244581
agcgaaccugaguguuaag

SEQ ID NO: 1499569 - RNA, 19 nt, Artificial Sequence
  Description of Artificial Sequence: Synthetic oligonucleotide
  Antisense strand to SEQ ID NO: 1499568
cuuaacacucagguucgcu

SEQ ID NO: 1499570 - RNA, 19 nt, Artificial Sequence
  Description of Artificial Sequence: Synthetic oligonucleotide
  Sense strand starting at position 2881 of SEQ ID NO: 1244581
ugugucuggagcugaauuu

SEQ ID NO: 1499571 - RNA, 19 nt, Artificial Sequence
  Description of Artificial Sequence: Synthetic oligonucleotide
  Antisense strand to SEQ ID NO: 1499570
aaauucagcuccagacaca

SEQ ID NO: 1499572 - RNA, 19 nt, Artificial Sequence
  Description of Artificial Sequence: Synthetic oligonucleotide
  Sense strand starting at position 2950 of SEQ ID NO: 1244581
gggauugugagugaaguua

SEQ ID NO: 1499573 - RNA, 19 nt, Artificial Sequence
  Description of Artificial Sequence: Synthetic oligonucleotide
  Antisense strand to SEQ ID NO: 1499572
uaacuucacucacaauccc

SEQ ID NO: 1499574 - RNA, 19 nt, Artificial Sequence
  Description of Artificial Sequence: Synthetic oligonucleotide
  Sense strand starting at position 2961 of SEQ ID NO: 1244581
ugaaguuacuaaccggaaa

SEQ ID NO: 1499575 - RNA, 19 nt, Artificial Sequence
  Description of Artificial Sequence: Synthetic oligonucleotide
  Antisense strand to SEQ ID NO: 1499574
uuuccgguuaguaacuuca

SEQ ID NO: 1499576 - RNA, 19 nt, Artificial Sequence
  Description of Artificial Sequence: Synthetic oligonucleotide
  Sense strand starting at position 2985 of SEQ ID NO: 1244581
gcgaaucuuggagaaaugu

SEQ ID NO: 1499577 - RNA, 19 nt, Artificial Sequence
  Description of Artificial Sequence: Synthetic oligonucleotide
  Antisense strand to SEQ ID NO: 1499576
acauuucuccaagauucgc

SEQ ID NO: 1499578 - RNA, 19 nt, Artificial Sequence
  Description of Artificial Sequence: Synthetic oligonucleotide
  Sense strand starting at position 3098 of SEQ ID NO: 1244581
ccuuguacuuccucugaca

SEQ ID NO: 1499579 - RNA, 19 nt, Artificial Sequence
  Description of Artificial Sequence: Synthetic oligonucleotide
  Antisense strand to SEQ ID NO: 1499578
ugucagaggaaguacaagg

SEQ ID NO: 1499580 - RNA, 19 nt, Artificial Sequence
  Description of Artificial Sequence: Synthetic oligonucleotide
  Sense strand starting at position 3100 of SEQ ID NO: 1244581
uuguacuuccucugacacu

SEQ ID NO: 1499581 - RNA, 19 nt, Artificial Sequence
  Description of Artificial Sequence: Synthetic oligonucleotide
  Antisense strand to SEQ ID NO: 1499580
agugucagaggaaguacaa

SEQ ID NO: 1499582 - RNA, 19 nt, Artificial Sequence
  Description of Artificial Sequence: Synthetic oligonucleotide
  Sense strand starting at position 3194 of SEQ ID NO: 1244581
gcuggaauggcucauugca

SEQ ID NO: 1499583 - RNA, 19 nt, Artificial Sequence
  Description of Artificial Sequence: Synthetic oligonucleotide
  Antisense strand to SEQ ID NO: 1499582
ugcaaugagccauuccagc

SEQ ID NO: 1499584 - RNA, 19 nt, Artificial Sequence
  Description of Artificial Sequence: Synthetic oligonucleotide
  Sense strand starting at position 3454 of SEQ ID NO: 1244581
ccaccaaaucacuguguua

SEQ ID NO: 1499585 - RNA, 19 nt, Artificial Sequence
  Description of Artificial Sequence: Synthetic oligonucleotide
  Antisense strand to SEQ ID NO: 1499584
uaacacagugauuuggugg

SEQ ID NO: 1499586 - RNA, 19 nt, Artificial Sequence
  Description of Artificial Sequence: Synthetic oligonucleotide
  Sense strand starting at position 3456 of SEQ ID NO: 1244581
accaaaucacuguguuauu

SEQ ID NO: 1499587 - RNA, 19 nt, Artificial Sequence
  Description of Artificial Sequence: Synthetic oligonucleotide
  Antisense strand to SEQ ID NO: 1499586
aauaacacagugauuuggu

SEQ ID NO: 1499588 - RNA, 19 nt, Artificial Sequence
  Description of Artificial Sequence: Synthetic oligonucleotide
  Sense strand starting at position 3457 of SEQ ID NO: 1244581
ccaaaucacuguguuauug

SEQ ID NO: 1499589 - RNA, 19 nt, Artificial Sequence
  Description of Artificial Sequence: Synthetic oligonucleotide
  Antisense strand to SEQ ID NO: 1499588
caauaacacagugauuugg

SEQ ID NO: 1499590 - RNA, 19 nt, Artificial Sequence
  Description of Artificial Sequence: Synthetic oligonucleotide
  Sense strand starting at position 3461 of SEQ ID NO: 1244581
aucacuguguuauugauaa

SEQ ID NO: 1499591 - RNA, 19 nt, Artificial Sequence
  Description of Artificial Sequence: Synthetic oligonucleotide
  Antisense strand to SEQ ID NO: 1499590
uuaucaauaacacagugau

SEQ ID NO: 1499592 - RNA, 19 nt, Artificial Sequence
  Description of Artificial Sequence: Synthetic oligonucleotide
  Sense strand starting at position 3499 of SEQ ID NO: 1244581
cucaguucgaccgagcaaa

SEQ ID NO: 1499593 - RNA, 19 nt, Artificial Sequence
  Description of Artificial Sequence: Synthetic oligonucleotide
  Antisense strand to SEQ ID NO: 1499592
uuugcucggucgaacugag

SEQ ID NO: 1499594 - RNA, 19 nt, Artificial Sequence
  Description of Artificial Sequence: Synthetic oligonucleotide
  Sense strand starting at position 3522 of SEQ ID NO: 1244581
gcuccagcacucuagaacu

SEQ ID NO: 1499595 - RNA, 19 nt, Artificial Sequence
  Description of Artificial Sequence: Synthetic oligonucleotide
  Antisense strand to SEQ ID NO: 1499594
aguucuagagugcuggagc

SEQ ID NO: 1499596 - RNA, 19 nt, Artificial Sequence
  Description of Artificial Sequence: Synthetic oligonucleotide
  Sense strand starting at position 3535 of SEQ ID NO: 1244581
agaacuuagcuguaucuaa

SEQ ID NO: 1499597 - RNA, 19 nt, Artificial Sequence
  Description of Artificial Sequence: Synthetic oligonucleotide
  Antisense strand to SEQ ID NO: 1499596
uuagauacagcuaaguucu

SEQ ID NO: 1499598 - RNA, 19 nt, Artificial Sequence
  Description of Artificial Sequence: Synthetic oligonucleotide
  Sense strand starting at position 3611 of SEQ ID NO: 1244581
uggcaauccucuucccuga

SEQ ID NO: 1499599 - RNA, 19 nt, Artificial Sequence
  Description of Artificial Sequence: Synthetic oligonucleotide
  Antisense strand to SEQ ID NO: 1499598
ucagggaagaggauugcca

SEQ ID NO: 1499600 - RNA, 19 nt, Artificial Sequence
  Description of Artificial Sequence: Synthetic oligonucleotide
  Sense strand starting at position 3613 of SEQ ID NO: 1244581
gcaauccucuucccugaga

SEQ ID NO: 1499601 - RNA, 19 nt, Artificial Sequence
  Description of Artificial Sequence: Synthetic oligonucleotide
  Antisense strand to SEQ ID NO: 1499600
ucucagggaagaggauugc

SEQ ID NO: 1499602 - RNA, 19 nt, Artificial Sequence
  Description of Artificial Sequence: Synthetic oligonucleotide
  Sense strand starting at position 3631 of SEQ ID NO: 1244581
acuggcaguugcucaagau

SEQ ID NO: 1499603 - RNA, 19 nt, Artificial Sequence
  Description of Artificial Sequence: Synthetic oligonucleotide
  Antisense strand to SEQ ID NO: 1499602
aucuugagcaacugccagu

SEQ ID NO: 1499604 - RNA, 19 nt, Artificial Sequence
  Description of Artificial Sequence: Synthetic oligonucleotide
  Sense strand starting at position 3632 of SEQ ID NO: 1244581
cuggcaguugcucaagaua

SEQ ID NO: 1499605 - RNA, 19 nt, Artificial Sequence
  Description of Artificial Sequence: Synthetic oligonucleotide
  Antisense strand to SEQ ID NO: 1499604
uaucuugagcaacugccag

SEQ ID NO: 1499606 - RNA, 19 nt, Artificial Sequence
  Description of Artificial Sequence: Synthetic oligonucleotide
  Sense strand starting at position 3635 of SEQ ID NO: 1244581
gcaguugcucaagauagga

SEQ ID NO: 1499607 - RNA, 19 nt, Artificial Sequence
  Description of Artificial Sequence: Synthetic oligonucleotide
  Antisense strand to SEQ ID NO: 1499606
uccuaucuugagcaacugc

SEQ ID NO: 1499608 - RNA, 19 nt, Artificial Sequence
  Description of Artificial Sequence: Synthetic oligonucleotide
  Sense strand starting at position 3707 of SEQ ID NO: 1244581
gcaaauaaacgcgugucuu

SEQ ID NO: 1499609 - RNA, 19 nt, Artificial Sequence
  Description of Artificial Sequence: Synthetic oligonucleotide
  Antisense strand to SEQ ID NO: 1499608
aagacacgcguuuauuugc

SEQ ID NO: 1499610 - RNA, 19 nt, Artificial Sequence
  Description of Artificial Sequence: Synthetic oligonucleotide
  Sense strand starting at position 17 of SEQ ID NO: 1244582
ggcuuaauggguuaagcag

SEQ ID NO: 1499611 - RNA, 19 nt, Artificial Sequence
  Description of Artificial Sequence: Synthetic oligonucleotide
  Antisense strand to SEQ ID NO: 1499610
cugcuuaacccauuaagcc

SEQ ID NO: 1499612 - RNA, 19 nt, Artificial Sequence
  Description of Artificial Sequence: Synthetic oligonucleotide
  Sense strand starting at position 35 of SEQ ID NO: 1244582
gggacuagguuugaauuau

SEQ ID NO: 1499613 - RNA, 19 nt, Artificial Sequence
  Description of Artificial Sequence: Synthetic oligonucleotide
  Antisense strand to SEQ ID NO: 1499612
auaauucaaaccuaguccc

SEQ ID NO: 1499614 - RNA, 19 nt, Artificial Sequence
  Description of Artificial Sequence: Synthetic oligonucleotide
  Sense strand starting at position 62 of SEQ ID NO: 1244582
cucugaaauugacagugga

SEQ ID NO: 1499615 - RNA, 19 nt, Artificial Sequence
  Description of Artificial Sequence: Synthetic oligonucleotide
  Antisense strand to SEQ ID NO: 1499614
uccacugucaauuucagag

SEQ ID NO: 1499616 - RNA, 19 nt, Artificial Sequence
  Description of Artificial Sequence: Synthetic oligonucleotide
  Sense strand starting at position 109 of SEQ ID NO: 1244582
ggguacuggcauuaguuaa

SEQ ID NO: 1499617 - RNA, 19 nt, Artificial Sequence
  Description of Artificial Sequence: Synthetic oligonucleotide
  Antisense strand to SEQ ID NO: 1499616
uuaacuaaugccaguaccc

SEQ ID NO: 1499618 - RNA, 19 nt, Artificial Sequence
  Description of Artificial Sequence: Synthetic oligonucleotide
  Sense strand starting at position 119 of SEQ ID NO: 1244582
auuaguuaacucuggugga

SEQ ID NO: 1499619 - RNA, 19 nt, Artificial Sequence
  Description of Artificial Sequence: Synthetic oligonucleotide
  Antisense strand to SEQ ID NO: 1499618
uccaccagaguuaacuaau

SEQ ID NO: 1499620 - RNA, 19 nt, Artificial Sequence
  Description of Artificial Sequence: Synthetic oligonucleotide
  Sense strand starting at position 169 of SEQ ID NO: 1244582
aaggaugggucuugauuug

SEQ ID NO: 1499621 - RNA, 19 nt, Artificial Sequence
  Description of Artificial Sequence: Synthetic oligonucleotide
  Antisense strand to SEQ ID NO: 1499620
caaaucaagacccauccuu

SEQ ID NO: 1499622 - RNA, 19 nt, Artificial Sequence
  Description of Artificial Sequence: Synthetic oligonucleotide
  Sense strand starting at position 233 of SEQ ID NO: 1244582
guggcaugguuuccauagu

SEQ ID NO: 1499623 - RNA, 19 nt, Artificial Sequence
  Description of Artificial Sequence: Synthetic oligonucleotide
  Antisense strand to SEQ ID NO: 1499622
acuauggaaaccaugccac

SEQ ID NO: 1499624 - RNA, 19 nt, Artificial Sequence
  Description of Artificial Sequence: Synthetic oligonucleotide
  Sense strand starting at position 241 of SEQ ID NO: 1244582
guuuccauaguggguagaa

SEQ ID NO: 1499625 - RNA, 19 nt, Artificial Sequence
  Description of Artificial Sequence: Synthetic oligonucleotide
  Antisense strand to SEQ ID NO: 1499624
uucuacccacuauggaaac

SEQ ID NO: 1499626 - RNA, 19 nt, Artificial Sequence
  Description of Artificial Sequence: Synthetic oligonucleotide
  Sense strand starting at position 266 of SEQ ID NO: 1244582
gggauaaugucuuugaggu

SEQ ID NO: 1499627 - RNA, 19 nt, Artificial Sequence
  Description of Artificial Sequence: Synthetic oligonucleotide
  Antisense strand to SEQ ID NO: 1499626
accucaaagacauuauccc

SEQ ID NO: 1499628 - RNA, 19 nt, Artificial Sequence
  Description of Artificial Sequence: Synthetic oligonucleotide
  Sense strand starting at position 267 of SEQ ID NO: 1244582
ggauaaugucuuugaggua

SEQ ID NO: 1499629 - RNA, 19 nt, Artificial Sequence
  Description of Artificial Sequence: Synthetic oligonucleotide
  Antisense strand to SEQ ID NO: 1499628
uaccucaaagacauuaucc

SEQ ID NO: 1499630 - RNA, 19 nt, Artificial Sequence
  Description of Artificial Sequence: Synthetic oligonucleotide
  Sense strand starting at position 270 of SEQ ID NO: 1244582
uaaugucuuugagguauuu

SEQ ID NO: 1499631 - RNA, 19 nt, Artificial Sequence
  Description of Artificial Sequence: Synthetic oligonucleotide
  Antisense strand to SEQ ID NO: 1499630
aaauaccucaaagacauua

SEQ ID NO: 1499632 - RNA, 19 nt, Artificial Sequence
  Description of Artificial Sequence: Synthetic oligonucleotide
  Sense strand starting at position 286 of SEQ ID NO: 1244582
uuucuagagucuguuaaug

SEQ ID NO: 1499633 - RNA, 19 nt, Artificial Sequence
  Description of Artificial Sequence: Synthetic oligonucleotide
  Antisense strand to SEQ ID NO: 1499632
cauuaacagacucuagaaa

SEQ ID NO: 1499634 - RNA, 19 nt, Artificial Sequence
  Description of Artificial Sequence: Synthetic oligonucleotide
  Sense strand starting at position 311 of SEQ ID NO: 1244582
gcccaucaucguggugaau

SEQ ID NO: 1499635 - RNA, 19 nt, Artificial Sequence
  Description of Artificial Sequence: Synthetic oligonucleotide
  Antisense strand to SEQ ID NO: 1499634
auucaccacgaugaugggc

SEQ ID NO: 1499636 - RNA, 19 nt, Artificial Sequence
  Description of Artificial Sequence: Synthetic oligonucleotide
  Sense strand starting at position 320 of SEQ ID NO: 1244582
cguggugaaucaccuaaga

SEQ ID NO: 1499637 - RNA, 19 nt, Artificial Sequence
  Description of Artificial Sequence: Synthetic oligonucleotide
  Antisense strand to SEQ ID NO: 1499636
ucuuaggugauucaccacg

SEQ ID NO: 1499638 - RNA, 19 nt, Artificial Sequence
  Description of Artificial Sequence: Synthetic oligonucleotide
  Sense strand starting at position 360 of SEQ ID NO: 1244582
gugggaacugucugccugu

SEQ ID NO: 1499639 - RNA, 19 nt, Artificial Sequence
  Description of Artificial Sequence: Synthetic oligonucleotide
  Antisense strand to SEQ ID NO: 1499638
acaggcagacaguucccac

SEQ ID NO: 1499640 - RNA, 19 nt, Artificial Sequence
  Description of Artificial Sequence: Synthetic oligonucleotide
  Sense strand starting at position 601 of SEQ ID NO: 1244582
gagggccagucuuugugua

SEQ ID NO: 1499641 - RNA, 19 nt, Artificial Sequence
  Description of Artificial Sequence: Synthetic oligonucleotide
  Antisense strand to SEQ ID NO: 1499640
uacacaaagacuggcccuc

SEQ ID NO: 1499642 - RNA, 19 nt, Artificial Sequence
  Description of Artificial Sequence: Synthetic oligonucleotide
  Sense strand starting at position 603 of SEQ ID NO: 1244582
gggccagucuuuguguacu

SEQ ID NO: 1499643 - RNA, 19 nt, Artificial Sequence
  Description of Artificial Sequence: Synthetic oligonucleotide
  Antisense strand to SEQ ID NO: 1499642
aguacacaaagacuggccc

SEQ ID NO: 1499644 - RNA, 19 nt, Artificial Sequence
  Description of Artificial Sequence: Synthetic oligonucleotide
  Sense strand starting at position 606 of SEQ ID NO: 1244582
ccagucuuuguguacuuua

SEQ ID NO: 1499645 - RNA, 19 nt, Artificial Sequence
  Description of Artificial Sequence: Synthetic oligonucleotide
  Antisense strand to SEQ ID NO: 1499644
uaaaguacacaaagacugg

SEQ ID NO: 1499646 - RNA, 19 nt, Artificial Sequence
  Description of Artificial Sequence: Synthetic oligonucleotide
  Sense strand starting at position 611 of SEQ ID NO: 1244582
cuuuguguacuuuacagau

SEQ ID NO: 1499647 - RNA, 19 nt, Artificial Sequence
  Description of Artificial Sequence: Synthetic oligonucleotide
  Antisense strand to SEQ ID NO: 1499646
aucuguaaaguacacaaag

SEQ ID NO: 1499648 - RNA, 19 nt, Artificial Sequence
  Description of Artificial Sequence: Synthetic oligonucleotide
  Sense strand starting at position 672 of SEQ ID NO: 1244582
cggugauuccaccaaacac

SEQ ID NO: 1499649 - RNA, 19 nt, Artificial Sequence
  Description of Artificial Sequence: Synthetic oligonucleotide
  Antisense strand to SEQ ID NO: 1499648
guguuugguggaaucaccg

SEQ ID NO: 1499650 - RNA, 19 nt, Artificial Sequence
  Description of Artificial Sequence: Synthetic oligonucleotide
  Sense strand starting at position 1143 of SEQ ID NO: 1244582
gucccuaccuguuuccaua

SEQ ID NO: 1499651 - RNA, 19 nt, Artificial Sequence
  Description of Artificial Sequence: Synthetic oligonucleotide
  Antisense strand to SEQ ID NO: 1499650
uauggaaacagguagggac

SEQ ID NO: 1499652 - RNA, 19 nt, Artificial Sequence
  Description of Artificial Sequence: Synthetic oligonucleotide
  Sense strand starting at position 1241 of SEQ ID NO: 1244582
acugaaaucuuucucaggu

SEQ ID NO: 1499653 - RNA, 19 nt, Artificial Sequence
  Description of Artificial Sequence: Synthetic oligonucleotide
  Antisense strand to SEQ ID NO: 1499652
accugagaaagauuucagu

SEQ ID NO: 1499654 - RNA, 19 nt, Artificial Sequence
  Description of Artificial Sequence: Synthetic oligonucleotide
  Sense strand starting at position 1242 of SEQ ID NO: 1244582
cugaaaucuuucucagguu

SEQ ID NO: 1499655 - RNA, 19 nt, Artificial Sequence
  Description of Artificial Sequence: Synthetic oligonucleotide
  Antisense strand to SEQ ID NO: 1499654
aaccugagaaagauuucag

SEQ ID NO: 1499656 - RNA, 19 nt, Artificial Sequence
  Description of Artificial Sequence: Synthetic oligonucleotide
  Sense strand starting at position 1396 of SEQ ID NO: 1244582
gccuuaaaccuggauguca

SEQ ID NO: 1499657 - RNA, 19 nt, Artificial Sequence
  Description of Artificial Sequence: Synthetic oligonucleotide
  Antisense strand to SEQ ID NO: 1499656
ugacauccagguuuaaggc

SEQ ID NO: 1499658 - RNA, 19 nt, Artificial Sequence
  Description of Artificial Sequence: Synthetic oligonucleotide
  Sense strand starting at position 1398 of SEQ ID NO: 1244582
cuuaaaccuggaugucaga

SEQ ID NO: 1499659 - RNA, 19 nt, Artificial Sequence
  Description of Artificial Sequence: Synthetic oligonucleotide
  Antisense strand to SEQ ID NO: 1499658
ucugacauccagguuuaag

SEQ ID NO: 1499660 - RNA, 19 nt, Artificial Sequence
  Description of Artificial Sequence: Synthetic oligonucleotide
  Sense strand starting at position 1581 of SEQ ID NO: 1244582
ggcucauauuugccagagu

SEQ ID NO: 1499661 - RNA, 19 nt, Artificial Sequence
  Description of Artificial Sequence: Synthetic oligonucleotide
  Antisense strand to SEQ ID NO: 1499660
acucuggcaaauaugagcc

SEQ ID NO: 1499662 - RNA, 19 nt, Artificial Sequence
  Description of Artificial Sequence: Synthetic oligonucleotide
  Sense strand starting at position 2446 of SEQ ID NO: 1244582
agcucaucugaauauaguu

SEQ ID NO: 1499663 - RNA, 19 nt, Artificial Sequence
  Description of Artificial Sequence: Synthetic oligonucleotide
  Antisense strand to SEQ ID NO: 1499662
aacuauauucagaugagcu

SEQ ID NO: 1499664 - RNA, 19 nt, Artificial Sequence
  Description of Artificial Sequence: Synthetic oligonucleotide
  Sense strand starting at position 2543 of SEQ ID NO: 1244582
gacccuuuaguauggauca

SEQ ID NO: 1499665 - RNA, 19 nt, Artificial Sequence
  Description of Artificial Sequence: Synthetic oligonucleotide
  Antisense strand to SEQ ID NO: 1499664
ugauccauacuaaaggguc

SEQ ID NO: 1499666 - RNA, 19 nt, Artificial Sequence
  Description of Artificial Sequence: Synthetic oligonucleotide
  Sense strand starting at position 2582 of SEQ ID NO: 1244582
guugguugugcccagaaug

SEQ ID NO: 1499667 - RNA, 19 nt, Artificial Sequence
  Description of Artificial Sequence: Synthetic oligonucleotide
  Antisense strand to SEQ ID NO: 1499666
cauucugggcacaaccaac

SEQ ID NO: 1499668 - RNA, 19 nt, Artificial Sequence
  Description of Artificial Sequence: Synthetic oligonucleotide
  Sense strand starting at position 2610 of SEQ ID NO: 1244582
gggagagcuuucgcaagag

SEQ ID NO: 1499669 - RNA, 19 nt, Artificial Sequence
  Description of Artificial Sequence: Synthetic oligonucleotide
  Antisense strand to SEQ ID NO: 1499668
cucuugcgaaagcucuccc

SEQ ID NO: 1499670 - RNA, 19 nt, Artificial Sequence
  Description of Artificial Sequence: Synthetic oligonucleotide
  Sense strand starting at position 2731 of SEQ ID NO: 1244582
caugaagucguagaucauu

SEQ ID NO: 1499671 - RNA, 19 nt, Artificial Sequence
  Description of Artificial Sequence: Synthetic oligonucleotide
  Antisense strand to SEQ ID NO: 1499670
aaugaucuacgacuucaug

SEQ ID NO: 1499672 - RNA, 19 nt, Artificial Sequence
  Description of Artificial Sequence: Synthetic oligonucleotide
  Sense strand starting at position 2941 of SEQ ID NO: 1244582
gacgguuugagggaugugu

SEQ ID NO: 1499673 - RNA, 19 nt, Artificial Sequence
  Description of Artificial Sequence: Synthetic oligonucleotide
  Antisense strand to SEQ ID NO: 1499672
acacaucccucaaaccguc

SEQ ID NO: 1499674 - RNA, 19 nt, Artificial Sequence
  Description of Artificial Sequence: Synthetic oligonucleotide
  Sense strand starting at position 3340 of SEQ ID NO: 1244582
uggcuuaugggccaccaua

SEQ ID NO: 1499675 - RNA, 19 nt, Artificial Sequence
  Description of Artificial Sequence: Synthetic oligonucleotide
  Antisense strand to SEQ ID NO: 1499674
uaugguggcccauaagcca

SEQ ID NO: 1499676 - RNA, 19 nt, Artificial Sequence
  Description of Artificial Sequence: Synthetic oligonucleotide
  Sense strand starting at position 3407 of SEQ ID NO: 1244582
ugacaucagcuggagguau

SEQ ID NO: 1499677 - RNA, 19 nt, Artificial Sequence
  Description of Artificial Sequence: Synthetic oligonucleotide
  Antisense strand to SEQ ID NO: 1499676
auaccuccagcugauguca

SEQ ID NO: 1499678 - RNA, 19 nt, Artificial Sequence
  Description of Artificial Sequence: Synthetic oligonucleotide
  Sense strand starting at position 3465 of SEQ ID NO: 1244582
ggugaucuccaguagagua

SEQ ID NO: 1499679 - RNA, 19 nt, Artificial Sequence
  Description of Artificial Sequence: Synthetic oligonucleotide
  Antisense strand to SEQ ID NO: 1499678
uacucuacuggagaucacc

SEQ ID NO: 1499680 - RNA, 19 nt, Artificial Sequence
  Description of Artificial Sequence: Synthetic oligonucleotide
  Sense strand starting at position 3479 of SEQ ID NO: 1244582
gaguaaagagcuuggguua

SEQ ID NO: 1499681 - RNA, 19 nt, Artificial Sequence
  Description of Artificial Sequence: Synthetic oligonucleotide
  Antisense strand to SEQ ID NO: 1499680
uaacccaagcucuuuacuc

SEQ ID NO: 1499682 - RNA, 19 nt, Artificial Sequence
  Description of Artificial Sequence: Synthetic oligonucleotide
  Sense strand starting at position 3505 of SEQ ID NO: 1244582
uggaggugagcgugcuaua

SEQ ID NO: 1499683 - RNA, 19 nt, Artificial Sequence
  Description of Artificial Sequence: Synthetic oligonucleotide
  Antisense strand to SEQ ID NO: 1499682
uauagcacgcucaccucca

SEQ ID NO: 1499684 - RNA, 19 nt, Artificial Sequence
  Description of Artificial Sequence: Synthetic oligonucleotide
  Sense strand starting at position 3632 of SEQ ID NO: 1244582
aggcucuugcugcaaauaa

SEQ ID NO: 1499685 - RNA, 19 nt, Artificial Sequence
  Description of Artificial Sequence: Synthetic oligonucleotide
  Antisense strand to SEQ ID NO: 1499684
uuauuugcagcaagagccu

SEQ ID NO: 1499686 - RNA, 19 nt, Artificial Sequence
  Description of Artificial Sequence: Synthetic oligonucleotide
  Sense strand starting at position 3643 of SEQ ID NO: 1244582
gcaaauaaugccgagguuu

SEQ ID NO: 1499687 - RNA, 19 nt, Artificial Sequence
  Description of Artificial Sequence: Synthetic oligonucleotide
  Antisense strand to SEQ ID NO: 1499686
aaaccucggcauuauuugc

SEQ ID NO: 1499688 - RNA, 19 nt, Artificial Sequence
  Description of Artificial Sequence: Synthetic oligonucleotide
  Sense strand starting at position 3837 of SEQ ID NO: 1244582
guauucuuaguagagaacu

SEQ ID NO: 1499689 - RNA, 19 nt, Artificial Sequence
  Description of Artificial Sequence: Synthetic oligonucleotide
  Antisense strand to SEQ ID NO: 1499688
aguucucuacuaagaauac

SEQ ID NO: 1499690 - RNA, 19 nt, Artificial Sequence
  Description of Artificial Sequence: Synthetic oligonucleotide
  Sense strand starting at position 204 of SEQ ID NO: 1244583
gagggccagucuuugugua

SEQ ID NO: 1499691 - RNA, 19 nt, Artificial Sequence
  Description of Artificial Sequence: Synthetic oligonucleotide
  Antisense strand to SEQ ID NO: 1499690
uacacaaagacuggcccuc

SEQ ID NO: 1499692 - RNA, 19 nt, Artificial Sequence
  Description of Artificial Sequence: Synthetic oligonucleotide
  Sense strand starting at position 206 of SEQ ID NO: 1244583
gggccagucuuuguguacu

SEQ ID NO: 1499693 - RNA, 19 nt, Artificial Sequence
  Description of Artificial Sequence: Synthetic oligonucleotide
  Antisense strand to SEQ ID NO: 1499692
aguacacaaagacuggccc

SEQ ID NO: 1499694 - RNA, 19 nt, Artificial Sequence
  Description of Artificial Sequence: Synthetic oligonucleotide
  Sense strand starting at position 208 of SEQ ID NO: 1244583
gccagucuuuguguacuuu

SEQ ID NO: 1499695 - RNA, 19 nt, Artificial Sequence
  Description of Artificial Sequence: Synthetic oligonucleotide
  Antisense strand to SEQ ID NO: 1499694
aaaguacacaaagacuggc

SEQ ID NO: 1499696 - RNA, 19 nt, Artificial Sequence
  Description of Artificial Sequence: Synthetic oligonucleotide
  Sense strand starting at position 209 of SEQ ID NO: 1244583
ccagucuuuguguacuuua

SEQ ID NO: 1499697 - RNA, 19 nt, Artificial Sequence
  Description of Artificial Sequence: Synthetic oligonucleotide
  Antisense strand to SEQ ID NO: 1499696
uaaaguacacaaagacugg

SEQ ID NO: 1499698 - RNA, 19 nt, Artificial Sequence
  Description of Artificial Sequence: Synthetic oligonucleotide
  Sense strand starting at position 214 of SEQ ID NO: 1244583
cuuuguguacuuuacagau

SEQ ID NO: 1499699 - RNA, 19 nt, Artificial Sequence
  Description of Artificial Sequence: Synthetic oligonucleotide
  Antisense strand to SEQ ID NO: 1499698
aucuguaaaguacacaaag

SEQ ID NO: 1499700 - RNA, 19 nt, Artificial Sequence
  Description of Artificial Sequence: Synthetic oligonucleotide
  Sense strand starting at position 216 of SEQ ID NO: 1244583
uuguguacuuuacagauca

SEQ ID NO: 1499701 - RNA, 19 nt, Artificial Sequence
  Description of Artificial Sequence: Synthetic oligonucleotide
  Antisense strand to SEQ ID NO: 1499700
ugaucuguaaaguacacaa

SEQ ID NO: 1499702 - RNA, 19 nt, Artificial Sequence
  Description of Artificial Sequence: Synthetic oligonucleotide
  Sense strand starting at position 275 of SEQ ID NO: 1244583
cggugauuccaccaaacac

SEQ ID NO: 1499703 - RNA, 19 nt, Artificial Sequence
  Description of Artificial Sequence: Synthetic oligonucleotide
  Antisense strand to SEQ ID NO: 1499702
guguuugguggaaucaccg

SEQ ID NO: 1499704 - RNA, 19 nt, Artificial Sequence
  Description of Artificial Sequence: Synthetic oligonucleotide
  Sense strand starting at position 746 of SEQ ID NO: 1244583
gucccuaccuguuuccaua

SEQ ID NO: 1499705 - RNA, 19 nt, Artificial Sequence
  Description of Artificial Sequence: Synthetic oligonucleotide
  Antisense strand to SEQ ID NO: 1499704
uauggaaacagguagggac

SEQ ID NO: 1499706 - RNA, 19 nt, Artificial Sequence
  Description of Artificial Sequence: Synthetic oligonucleotide
  Sense strand starting at position 844 of SEQ ID NO: 1244583
acugaaaucuuucucaggu

SEQ ID NO: 1499707 - RNA, 19 nt, Artificial Sequence
  Description of Artificial Sequence: Synthetic oligonucleotide
  Antisense strand to SEQ ID NO: 1499706
accugagaaagauuucagu

SEQ ID NO: 1499708 - RNA, 19 nt, Artificial Sequence
  Description of Artificial Sequence: Synthetic oligonucleotide
  Sense strand starting at position 845 of SEQ ID NO: 1244583
cugaaaucuuucucagguu

SEQ ID NO: 1499709 - RNA, 19 nt, Artificial Sequence
  Description of Artificial Sequence: Synthetic oligonucleotide
  Antisense strand to SEQ ID NO: 1499708
aaccugagaaagauuucag

SEQ ID NO: 1499710 - RNA, 19 nt, Artificial Sequence
  Description of Artificial Sequence: Synthetic oligonucleotide
  Sense strand starting at position 848 of SEQ ID NO: 1244583
aaaucuuucucagguucga

SEQ ID NO: 1499711 - RNA, 19 nt, Artificial Sequence
  Description of Artificial Sequence: Synthetic oligonucleotide
  Antisense strand to SEQ ID NO: 1499710
ucgaaccugagaaagauuu

SEQ ID NO: 1499712 - RNA, 19 nt, Artificial Sequence
  Description of Artificial Sequence: Synthetic oligonucleotide
  Sense strand starting at position 999 of SEQ ID NO: 1244583
gccuuaaaccuggauguca

SEQ ID NO: 1499713 - RNA, 19 nt, Artificial Sequence
  Description of Artificial Sequence: Synthetic oligonucleotide
  Antisense strand to SEQ ID NO: 1499712
ugacauccagguuuaaggc

SEQ ID NO: 1499714 - RNA, 19 nt, Artificial Sequence
  Description of Artificial Sequence: Synthetic oligonucleotide
  Sense strand starting at position 1001 of SEQ ID NO: 1244583
cuuaaaccuggaugucaga

SEQ ID NO: 1499715 - RNA, 19 nt, Artificial Sequence
  Description of Artificial Sequence: Synthetic oligonucleotide
  Antisense strand to SEQ ID NO: 1499714
ucugacauccagguuuaag

SEQ ID NO: 1499716 - RNA, 19 nt, Artificial Sequence
  Description of Artificial Sequence: Synthetic oligonucleotide
  Sense strand starting at position 1137 of SEQ ID NO: 1244583
ccgagaguugcgcgcuuaa

SEQ ID NO: 1499717 - RNA, 19 nt, Artificial Sequence
  Description of Artificial Sequence: Synthetic oligonucleotide
  Antisense strand to SEQ ID NO: 1499716
uuaagcgcgcaacucucgg

SEQ ID NO: 1499718 - RNA, 19 nt, Artificial Sequence
  Description of Artificial Sequence: Synthetic oligonucleotide
  Sense strand starting at position 1184 of SEQ ID NO: 1244583
ggcucauauuugccagagu

SEQ ID NO: 1499719 - RNA, 19 nt, Artificial Sequence
  Description of Artificial Sequence: Synthetic oligonucleotide
  Antisense strand to SEQ ID NO: 1499718
acucuggcaaauaugagcc

SEQ ID NO: 1499720 - RNA, 19 nt, Artificial Sequence
  Description of Artificial Sequence: Synthetic oligonucleotide
  Sense strand starting at position 1185 of SEQ ID NO: 1244583
gcucauauuugccagagug

SEQ ID NO: 1499721 - RNA, 19 nt, Artificial Sequence
  Description of Artificial Sequence: Synthetic oligonucleotide
  Antisense strand to SEQ ID NO: 1499720
cacucuggcaaauaugagc

SEQ ID NO: 1499722 - RNA, 19 nt, Artificial Sequence
  Description of Artificial Sequence: Synthetic oligonucleotide
  Sense strand starting at position 2046 of SEQ ID NO: 1244583
ccgagcucaucugaauaua

SEQ ID NO: 1499723 - RNA, 19 nt, Artificial Sequence
  Description of Artificial Sequence: Synthetic oligonucleotide
  Antisense strand to SEQ ID NO: 1499722
uauauucagaugagcucgg

SEQ ID NO: 1499724 - RNA, 19 nt, Artificial Sequence
  Description of Artificial Sequence: Synthetic oligonucleotide
  Sense strand starting at position 2049 of SEQ ID NO: 1244583
agcucaucugaauauaguu

SEQ ID NO: 1499725 - RNA, 19 nt, Artificial Sequence
  Description of Artificial Sequence: Synthetic oligonucleotide
  Antisense strand to SEQ ID NO: 1499724
aacuauauucagaugagcu

SEQ ID NO: 1499726 - RNA, 19 nt, Artificial Sequence
  Description of Artificial Sequence: Synthetic oligonucleotide
  Sense strand starting at position 2146 of SEQ ID NO: 1244583
gacccuuuaguauggauca

SEQ ID NO: 1499727 - RNA, 19 nt, Artificial Sequence
  Description of Artificial Sequence: Synthetic oligonucleotide
  Antisense strand to SEQ ID NO: 1499726
ugauccauacuaaaggguc

SEQ ID NO: 1499728 - RNA, 19 nt, Artificial Sequence
  Description of Artificial Sequence: Synthetic oligonucleotide
  Sense strand starting at position 2185 of SEQ ID NO: 1244583
guugguugugcccagaaug

SEQ ID NO: 1499729 - RNA, 19 nt, Artificial Sequence
  Description of Artificial Sequence: Synthetic oligonucleotide
  Antisense strand to SEQ ID NO: 1499728
cauucugggcacaaccaac

SEQ ID NO: 1499730 - RNA, 19 nt, Artificial Sequence
  Description of Artificial Sequence: Synthetic oligonucleotide
  Sense strand starting at position 2213 of SEQ ID NO: 1244583
gggagagcuuucgcaagag

SEQ ID NO: 1499731 - RNA, 19 nt, Artificial Sequence
  Description of Artificial Sequence: Synthetic oligonucleotide
  Antisense strand to SEQ ID NO: 1499730
cucuugcgaaagcucuccc

SEQ ID NO: 1499732 - RNA, 19 nt, Artificial Sequence
  Description of Artificial Sequence: Synthetic oligonucleotide
  Sense strand starting at position 2334 of SEQ ID NO: 1244583
caugaagucguagaucauu

SEQ ID NO: 1499733 - RNA, 19 nt, Artificial Sequence
  Description of Artificial Sequence: Synthetic oligonucleotide
  Antisense strand to SEQ ID NO: 1499732
aaugaucuacgacuucaug

SEQ ID NO: 1499734 - RNA, 19 nt, Artificial Sequence
  Description of Artificial Sequence: Synthetic oligonucleotide
  Sense strand starting at position 2386 of SEQ ID NO: 1244583
ggcagcuccuggugacaga

SEQ ID NO: 1499735 - RNA, 19 nt, Artificial Sequence
  Description of Artificial Sequence: Synthetic oligonucleotide
  Antisense strand to SEQ ID NO: 1499734
ucugucaccaggagcugcc

SEQ ID NO: 1499736 - RNA, 19 nt, Artificial Sequence
  Description of Artificial Sequence: Synthetic oligonucleotide
  Sense strand starting at position 2544 of SEQ ID NO: 1244583
gacgguuugagggaugugu

SEQ ID NO: 1499737 - RNA, 19 nt, Artificial Sequence
  Description of Artificial Sequence: Synthetic oligonucleotide
  Antisense strand to SEQ ID NO: 1499736
acacaucccucaaaccguc

SEQ ID NO: 1499738 - RNA, 19 nt, Artificial Sequence
  Description of Artificial Sequence: Synthetic oligonucleotide
  Sense strand starting at position 2943 of SEQ ID NO: 1244583
uggcuuaugggccaccaua

SEQ ID NO: 1499739 - RNA, 19 nt, Artificial Sequence
  Description of Artificial Sequence: Synthetic oligonucleotide
  Antisense strand to SEQ ID NO: 1499738
uaugguggcccauaagcca

SEQ ID NO: 1499740 - RNA, 19 nt, Artificial Sequence
  Description of Artificial Sequence: Synthetic oligonucleotide
  Sense strand starting at position 3010 of SEQ ID NO: 1244583
ugacaucagcuggagguau

SEQ ID NO: 1499741 - RNA, 19 nt, Artificial Sequence
  Description of Artificial Sequence: Synthetic oligonucleotide
  Antisense strand to SEQ ID NO: 1499740
auaccuccagcugauguca

SEQ ID NO: 1499742 - RNA, 19 nt, Artificial Sequence
  Description of Artificial Sequence: Synthetic oligonucleotide
  Sense strand starting at position 3068 of SEQ ID NO: 1244583
ggugaucuccaguagagua

SEQ ID NO: 1499743 - RNA, 19 nt, Artificial Sequence
  Description of Artificial Sequence: Synthetic oligonucleotide
  Antisense strand to SEQ ID NO: 1499742
uacucuacuggagaucacc

SEQ ID NO: 1499744 - RNA, 19 nt, Artificial Sequence
  Description of Artificial Sequence: Synthetic oligonucleotide
  Sense strand starting at position 3082 of SEQ ID NO: 1244583
gaguaaagagcuuggguua

SEQ ID NO: 1499745 - RNA, 19 nt, Artificial Sequence
  Description of Artificial Sequence: Synthetic oligonucleotide
  Antisense strand to SEQ ID NO: 1499744
uaacccaagcucuuuacuc

SEQ ID NO: 1499746 - RNA, 19 nt, Artificial Sequence
  Description of Artificial Sequence: Synthetic oligonucleotide
  Sense strand starting at position 3108 of SEQ ID NO: 1244583
uggaggugagcgugcuaua

SEQ ID NO: 1499747 - RNA, 19 nt, Artificial Sequence
  Description of Artificial Sequence: Synthetic oligonucleotide
  Antisense strand to SEQ ID NO: 1499746
uauagcacgcucaccucca

SEQ ID NO: 1499748 - RNA, 19 nt, Artificial Sequence
  Description of Artificial Sequence: Synthetic oligonucleotide
  Sense strand starting at position 3205 of SEQ ID NO: 1244583
gcgugguguugguugcuau

SEQ ID NO: 1499749 - RNA, 19 nt, Artificial Sequence
  Description of Artificial Sequence: Synthetic oligonucleotide
  Antisense strand to SEQ ID NO: 1499748
auagcaaccaacaccacgc

SEQ ID NO: 1499750 - RNA, 19 nt, Artificial Sequence
  Description of Artificial Sequence: Synthetic oligonucleotide
  Sense strand starting at position 3206 of SEQ ID NO: 1244583
cgugguguugguugcuauu

SEQ ID NO: 1499751 - RNA, 19 nt, Artificial Sequence
  Description of Artificial Sequence: Synthetic oligonucleotide
  Antisense strand to SEQ ID NO: 1499750
aauagcaaccaacaccacg

SEQ ID NO: 1499752 - RNA, 19 nt, Artificial Sequence
  Description of Artificial Sequence: Synthetic oligonucleotide
  Sense strand starting at position 3233 of SEQ ID NO: 1244583
agaggcucuugcugcaaau

SEQ ID NO: 1499753 - RNA, 19 nt, Artificial Sequence
  Description of Artificial Sequence: Synthetic oligonucleotide
  Antisense strand to SEQ ID NO: 1499752
auuugcagcaagagccucu

SEQ ID NO: 1499754 - RNA, 19 nt, Artificial Sequence
  Description of Artificial Sequence: Synthetic oligonucleotide
  Sense strand starting at position 3235 of SEQ ID NO: 1244583
aggcucuugcugcaaauaa

SEQ ID NO: 1499755 - RNA, 19 nt, Artificial Sequence
  Description of Artificial Sequence: Synthetic oligonucleotide
  Antisense strand to SEQ ID NO: 1499754
uuauuugcagcaagagccu

SEQ ID NO: 1499756 - RNA, 19 nt, Artificial Sequence
  Description of Artificial Sequence: Synthetic oligonucleotide
  Sense strand starting at position 3245 of SEQ ID NO: 1244583
ugcaaauaaugccgagguu

SEQ ID NO: 1499757 - RNA, 19 nt, Artificial Sequence
  Description of Artificial Sequence: Synthetic oligonucleotide
  Antisense strand to SEQ ID NO: 1499756
aaccucggcauuauuugca

SEQ ID NO: 1499758 - RNA, 19 nt, Artificial Sequence
  Description of Artificial Sequence: Synthetic oligonucleotide
  Sense strand starting at position 3246 of SEQ ID NO: 1244583
gcaaauaaugccgagguuu

SEQ ID NO: 1499759 - RNA, 19 nt, Artificial Sequence
  Description of Artificial Sequence: Synthetic oligonucleotide
  Antisense strand to SEQ ID NO: 1499758
aaaccucggcauuauuugc

SEQ ID NO: 1499760 - RNA, 19 nt, Artificial Sequence
  Description of Artificial Sequence: Synthetic oligonucleotide
  Sense strand starting at position 3326 of SEQ ID NO: 1244583
ggcgggaucuuggcgcauu

SEQ ID NO: 1499761 - RNA, 19 nt, Artificial Sequence
  Description of Artificial Sequence: Synthetic oligonucleotide
  Antisense strand to SEQ ID NO: 1499760
aaugcgccaagaucccgcc

SEQ ID NO: 1499762 - RNA, 19 nt, Artificial Sequence
  Description of Artificial Sequence: Synthetic oligonucleotide
  Sense strand starting at position 3440 of SEQ ID NO: 1244583
guauucuuaguagagaacu

SEQ ID NO: 1499763 - RNA, 19 nt, Artificial Sequence
  Description of Artificial Sequence: Synthetic oligonucleotide
  Antisense strand to SEQ ID NO: 1499762
aguucucuacuaagaauac

SEQ ID NO: 1499764 - RNA, 19 nt, Artificial Sequence
  Description of Artificial Sequence: Synthetic oligonucleotide
  Sense strand starting at position 92 of SEQ ID NO: 1244584
cugggauaguuguuauaca

SEQ ID NO: 1499765 - RNA, 19 nt, Artificial Sequence
  Description of Artificial Sequence: Synthetic oligonucleotide
  Antisense strand to SEQ ID NO: 1499764
uguauaacaacuaucccag

SEQ ID NO: 1499766 - RNA, 19 nt, Artificial Sequence
  Description of Artificial Sequence: Synthetic oligonucleotide
  Sense strand starting at position 389 of SEQ ID NO: 1244584
gcacacuuugaugagaagu

SEQ ID NO: 1499767 - RNA, 19 nt, Artificial Sequence
  Description of Artificial Sequence: Synthetic oligonucleotide
  Antisense strand to SEQ ID NO: 1499766
acuucucaucaaagugugc

SEQ ID NO: 1499768 - RNA, 19 nt, Artificial Sequence
  Description of Artificial Sequence: Synthetic oligonucleotide
  Sense strand starting at position 425 of SEQ ID NO: 1244584
gaaagaauacuacacgugu

SEQ ID NO: 1499769 - RNA, 19 nt, Artificial Sequence
  Description of Artificial Sequence: Synthetic oligonucleotide
  Antisense strand to SEQ ID NO: 1499768
acacguguaguauucuuuc

SEQ ID NO: 1499770 - RNA, 19 nt, Artificial Sequence
  Description of Artificial Sequence: Synthetic oligonucleotide
  Sense strand starting at position 490 of SEQ ID NO: 1244584
ugcuuucuuggacaaguca

SEQ ID NO: 1499771 - RNA, 19 nt, Artificial Sequence
  Description of Artificial Sequence: Synthetic oligonucleotide
  Antisense strand to SEQ ID NO: 1499770
ugacuuguccaagaaagca

SEQ ID NO: 1499772 - RNA, 19 nt, Artificial Sequence
  Description of Artificial Sequence: Synthetic oligonucleotide
  Sense strand starting at position 535 of SEQ ID NO: 1244584
ucaaauauaagcuggguga

SEQ ID NO: 1499773 - RNA, 19 nt, Artificial Sequence
  Description of Artificial Sequence: Synthetic oligonucleotide
  Antisense strand to SEQ ID NO: 1499772
ucacccagcuuauauuuga

SEQ ID NO: 1499774 - RNA, 19 nt, Artificial Sequence
  Description of Artificial Sequence: Synthetic oligonucleotide
  Sense strand starting at position 536 of SEQ ID NO: 1244584
caaauauaagcugggugau

SEQ ID NO: 1499775 - RNA, 19 nt, Artificial Sequence
  Description of Artificial Sequence: Synthetic oligonucleotide
  Antisense strand to SEQ ID NO: 1499774
aucacccagcuuauauuug

SEQ ID NO: 1499776 - RNA, 19 nt, Artificial Sequence
  Description of Artificial Sequence: Synthetic oligonucleotide
  Sense strand starting at position 537 of SEQ ID NO: 1244584
aaauauaagcugggugaua

SEQ ID NO: 1499777 - RNA, 19 nt, Artificial Sequence
  Description of Artificial Sequence: Synthetic oligonucleotide
  Antisense strand to SEQ ID NO: 1499776
uaucacccagcuuauauuu

SEQ ID NO: 1499778 - RNA, 19 nt, Artificial Sequence
  Description of Artificial Sequence: Synthetic oligonucleotide
  Sense strand starting at position 539 of SEQ ID NO: 1244584
auauaagcugggugauaga

SEQ ID NO: 1499779 - RNA, 19 nt, Artificial Sequence
  Description of Artificial Sequence: Synthetic oligonucleotide
  Antisense strand to SEQ ID NO: 1499778
ucuaucacccagcuuauau

SEQ ID NO: 1499780 - RNA, 19 nt, Artificial Sequence
  Description of Artificial Sequence: Synthetic oligonucleotide
  Sense strand starting at position 673 of SEQ ID NO: 1244584
gugaacuggcauuaucaaa

SEQ ID NO: 1499781 - RNA, 19 nt, Artificial Sequence
  Description of Artificial Sequence: Synthetic oligonucleotide
  Antisense strand to SEQ ID NO: 1499780
uuugauaaugccaguucac

SEQ ID NO: 1499782 - RNA, 19 nt, Artificial Sequence
  Description of Artificial Sequence: Synthetic oligonucleotide
  Sense strand starting at position 895 of SEQ ID NO: 1244584
gcauaagaaacuugaguga

SEQ ID NO: 1499783 - RNA, 19 nt, Artificial Sequence
  Description of Artificial Sequence: Synthetic oligonucleotide
  Antisense strand to SEQ ID NO: 1499782
ucacucaaguuucuuaugc

SEQ ID NO: 1499784 - RNA, 19 nt, Artificial Sequence
  Description of Artificial Sequence: Synthetic oligonucleotide
  Sense strand starting at position 988 of SEQ ID NO: 1244584
ggaagcuuucuggagccau

SEQ ID NO: 1499785 - RNA, 19 nt, Artificial Sequence
  Description of Artificial Sequence: Synthetic oligonucleotide
  Antisense strand to SEQ ID NO: 1499784
auggcuccagaaagcuucc

SEQ ID NO: 1499786 - RNA, 19 nt, Artificial Sequence
  Description of Artificial Sequence: Synthetic oligonucleotide
  Sense strand starting at position 1426 of SEQ ID NO: 1244584
caacguuagguugaggaau

SEQ ID NO: 1499787 - RNA, 19 nt, Artificial Sequence
  Description of Artificial Sequence: Synthetic oligonucleotide
  Antisense strand to SEQ ID NO: 1499786
auuccucaaccuaacguug

SEQ ID NO: 1499788 - RNA, 19 nt, Artificial Sequence
  Description of Artificial Sequence: Synthetic oligonucleotide
  Sense strand starting at position 1447 of SEQ ID NO: 1244584
aggagauguuuaccuuaug

SEQ ID NO: 1499789 - RNA, 19 nt, Artificial Sequence
  Description of Artificial Sequence: Synthetic oligonucleotide
  Antisense strand to SEQ ID NO: 1499788
cauaagguaaacaucuccu

SEQ ID NO: 1499790 - RNA, 19 nt, Artificial Sequence
  Description of Artificial Sequence: Synthetic oligonucleotide
  Sense strand starting at position 1450 of SEQ ID NO: 1244584
agauguuuaccuuaugcag

SEQ ID NO: 1499791 - RNA, 19 nt, Artificial Sequence
  Description of Artificial Sequence: Synthetic oligonucleotide
  Antisense strand to SEQ ID NO: 1499790
cugcauaagguaaacaucu

SEQ ID NO: 1499792 - RNA, 19 nt, Artificial Sequence
  Description of Artificial Sequence: Synthetic oligonucleotide
  Sense strand starting at position 2023 of SEQ ID NO: 1244584
acacguuugcagaggcgaa

SEQ ID NO: 1499793 - RNA, 19 nt, Artificial Sequence
  Description of Artificial Sequence: Synthetic oligonucleotide
  Antisense strand to SEQ ID NO: 1499792
uucgccucugcaaacgugu

SEQ ID NO: 1499794 - RNA, 19 nt, Artificial Sequence
  Description of Artificial Sequence: Synthetic oligonucleotide
  Sense strand starting at position 2079 of SEQ ID NO: 1244584
ggacaauucucuccaggau

SEQ ID NO: 1499795 - RNA, 19 nt, Artificial Sequence
  Description of Artificial Sequence: Synthetic oligonucleotide
  Antisense strand to SEQ ID NO: 1499794
auccuggagagaauugucc

SEQ ID NO: 1499796 - RNA, 19 nt, Artificial Sequence
  Description of Artificial Sequence: Synthetic oligonucleotide
  Sense strand starting at position 2120 of SEQ ID NO: 1244584
aagucugaggucgacagua

SEQ ID NO: 1499797 - RNA, 19 nt, Artificial Sequence
  Description of Artificial Sequence: Synthetic oligonucleotide
  Antisense strand to SEQ ID NO: 1499796
uacugucgaccucagacuu

SEQ ID NO: 1499798 - RNA, 19 nt, Artificial Sequence
  Description of Artificial Sequence: Synthetic oligonucleotide
  Sense strand starting at position 2122 of SEQ ID NO: 1244584
gucugaggucgacaguaga

SEQ ID NO: 1499799 - RNA, 19 nt, Artificial Sequence
  Description of Artificial Sequence: Synthetic oligonucleotide
  Antisense strand to SEQ ID NO: 1499798
ucuacugucgaccucagac

SEQ ID NO: 1499800 - RNA, 19 nt, Artificial Sequence
  Description of Artificial Sequence: Synthetic oligonucleotide
  Sense strand starting at position 2205 of SEQ ID NO: 1244584
ggagaagguccagggcuuu

SEQ ID NO: 1499801 - RNA, 19 nt, Artificial Sequence
  Description of Artificial Sequence: Synthetic oligonucleotide
  Antisense strand to SEQ ID NO: 1499800
aaagcccuggaccuucucc

SEQ ID NO: 1499802 - RNA, 19 nt, Artificial Sequence
  Description of Artificial Sequence: Synthetic oligonucleotide
  Sense strand starting at position 2244 of SEQ ID NO: 1244584
acaugaccgcaagaaguua

SEQ ID NO: 1499803 - RNA, 19 nt, Artificial Sequence
  Description of Artificial Sequence: Synthetic oligonucleotide
  Antisense strand to SEQ ID NO: 1499802
uaacuucuugcggucaugu

SEQ ID NO: 1499804 - RNA, 19 nt, Artificial Sequence
  Description of Artificial Sequence: Synthetic oligonucleotide
  Sense strand starting at position 2352 of SEQ ID NO: 1244584
ugcaaacucgggcaaauua

SEQ ID NO: 1499805 - RNA, 19 nt, Artificial Sequence
  Description of Artificial Sequence: Synthetic oligonucleotide
  Antisense strand to SEQ ID NO: 1499804
uaauuugcccgaguuugca

SEQ ID NO: 1499806 - RNA, 19 nt, Artificial Sequence
  Description of Artificial Sequence: Synthetic oligonucleotide
  Sense strand starting at position 2579 of SEQ ID NO: 1244584
gcugcugcgaccuuugauu

SEQ ID NO: 1499807 - RNA, 19 nt, Artificial Sequence
  Description of Artificial Sequence: Synthetic oligonucleotide
  Antisense strand to SEQ ID NO: 1499806
aaucaaaggucgcagcagc

SEQ ID NO: 1499808 - RNA, 19 nt, Artificial Sequence
  Description of Artificial Sequence: Synthetic oligonucleotide
  Sense strand starting at position 2607 of SEQ ID NO: 1244584
gcaucaucacauggaauau

SEQ ID NO: 1499809 - RNA, 19 nt, Artificial Sequence
  Description of Artificial Sequence: Synthetic oligonucleotide
  Antisense strand to SEQ ID NO: 1499808
auauuccaugugaugaugc

SEQ ID NO: 1499810 - RNA, 19 nt, Artificial Sequence
  Description of Artificial Sequence: Synthetic oligonucleotide
  Sense strand starting at position 2676 of SEQ ID NO: 1244584
cugggauuauuaucagauu

SEQ ID NO: 1499811 - RNA, 19 nt, Artificial Sequence
  Description of Artificial Sequence: Synthetic oligonucleotide
  Antisense strand to SEQ ID NO: 1499810
aaucugauaauaaucccag

SEQ ID NO: 1499812 - RNA, 19 nt, Artificial Sequence
  Description of Artificial Sequence: Synthetic oligonucleotide
  Sense strand starting at position 2724 of SEQ ID NO: 1244584
ggcccuuggagucaauauc

SEQ ID NO: 1499813 - RNA, 19 nt, Artificial Sequence
  Description of Artificial Sequence: Synthetic oligonucleotide
  Antisense strand to SEQ ID NO: 1499812
gauauugacuccaagggcc

SEQ ID NO: 1499814 - RNA, 19 nt, Artificial Sequence
  Description of Artificial Sequence: Synthetic oligonucleotide
  Sense strand starting at position 2817 of SEQ ID NO: 1244584
aguugugugaaccagauca

SEQ ID NO: 1499815 - RNA, 19 nt, Artificial Sequence
  Description of Artificial Sequence: Synthetic oligonucleotide
  Antisense strand to SEQ ID NO: 1499814
ugaucugguucacacaacu

SEQ ID NO: 1499816 - RNA, 19 nt, Artificial Sequence
  Description of Artificial Sequence: Synthetic oligonucleotide
  Sense strand starting at position 2819 of SEQ ID NO: 1244584
uugugugaaccagaucacu

SEQ ID NO: 1499817 - RNA, 19 nt, Artificial Sequence
  Description of Artificial Sequence: Synthetic oligonucleotide
  Antisense strand to SEQ ID NO: 1499816
agugaucugguucacacaa

SEQ ID NO: 1499818 - RNA, 19 nt, Artificial Sequence
  Description of Artificial Sequence: Synthetic oligonucleotide
  Sense strand starting at position 2841 of SEQ ID NO: 1244584
guucccugggauuacuuau

SEQ ID NO: 1499819 - RNA, 19 nt, Artificial Sequence
  Description of Artificial Sequence: Synthetic oligonucleotide
  Antisense strand to SEQ ID NO: 1499818
auaaguaaucccagggaac

SEQ ID NO: 1499820 - RNA, 19 nt, Artificial Sequence
  Description of Artificial Sequence: Synthetic oligonucleotide
  Sense strand starting at position 2990 of SEQ ID NO: 1244584
uuauuauugcuggaaucac

SEQ ID NO: 1499821 - RNA, 19 nt, Artificial Sequence
  Description of Artificial Sequence: Synthetic oligonucleotide
  Antisense strand to SEQ ID NO: 1499820
gugauuccagcaauaauaa

SEQ ID NO: 1499822 - RNA, 19 nt, Artificial Sequence
  Description of Artificial Sequence: Synthetic oligonucleotide
  Sense strand starting at position 3075 of SEQ ID NO: 1244584
augagauucucacugggcu

SEQ ID NO: 1499823 - RNA, 19 nt, Artificial Sequence
  Description of Artificial Sequence: Synthetic oligonucleotide
  Antisense strand to SEQ ID NO: 1499822
agcccagugagaaucucau

SEQ ID NO: 1499824 - RNA, 19 nt, Artificial Sequence
  Description of Artificial Sequence: Synthetic oligonucleotide
  Sense strand starting at position 3176 of SEQ ID NO: 1244584
cuuaaugugagguggauaa

SEQ ID NO: 1499825 - RNA, 19 nt, Artificial Sequence
  Description of Artificial Sequence: Synthetic oligonucleotide
  Antisense strand to SEQ ID NO: 1499824
uuauccaccucacauuaag

SEQ ID NO: 1499826 - RNA, 19 nt, Artificial Sequence
  Description of Artificial Sequence: Synthetic oligonucleotide
  Sense strand starting at position 3461 of SEQ ID NO: 1244584
aagggucacuccucagagu

SEQ ID NO: 1499827 - RNA, 19 nt, Artificial Sequence
  Description of Artificial Sequence: Synthetic oligonucleotide
  Antisense strand to SEQ ID NO: 1499826
acucugaggagugacccuu

SEQ ID NO: 1499828 - RNA, 19 nt, Artificial Sequence
  Description of Artificial Sequence: Synthetic oligonucleotide
  Sense strand starting at position 3501 of SEQ ID NO: 1244584
ucagaaacaugauucuguu

SEQ ID NO: 1499829 - RNA, 19 nt, Artificial Sequence
  Description of Artificial Sequence: Synthetic oligonucleotide
  Antisense strand to SEQ ID NO: 1499828
aacagaaucauguuucuga

SEQ ID NO: 1499830 - RNA, 19 nt, Artificial Sequence
  Description of Artificial Sequence: Synthetic oligonucleotide
  Sense strand starting at position 3589 of SEQ ID NO: 1244584
gagaaaugauguuuaagcu

SEQ ID NO: 1499831 - RNA, 19 nt, Artificial Sequence
  Description of Artificial Sequence: Synthetic oligonucleotide
  Antisense strand to SEQ ID NO: 1499830
agcuuaaacaucauuucuc

SEQ ID NO: 1499832 - RNA, 19 nt, Artificial Sequence
  Description of Artificial Sequence: Synthetic oligonucleotide
  Sense strand starting at position 3794 of SEQ ID NO: 1244584
gaucauguggaucauguua

SEQ ID NO: 1499833 - RNA, 19 nt, Artificial Sequence
  Description of Artificial Sequence: Synthetic oligonucleotide
  Antisense strand to SEQ ID NO: 1499832
uaacaugauccacaugauc

SEQ ID NO: 1499834 - RNA, 19 nt, Artificial Sequence
  Description of Artificial Sequence: Synthetic oligonucleotide
  Sense strand starting at position 3840 of SEQ ID NO: 1244584
augugaagccauugaagga

SEQ ID NO: 1499835 - RNA, 19 nt, Artificial Sequence
  Description of Artificial Sequence: Synthetic oligonucleotide
  Antisense strand to SEQ ID NO: 1499834
uccuucaauggcuucacau

SEQ ID NO: 1499836 - RNA, 19 nt, Artificial Sequence
  Description of Artificial Sequence: Synthetic oligonucleotide
  Sense strand starting at position 3909 of SEQ ID NO: 1244584
uuggcuacuguauagagaa

SEQ ID NO: 1499837 - RNA, 19 nt, Artificial Sequence
  Description of Artificial Sequence: Synthetic oligonucleotide
  Antisense strand to SEQ ID NO: 1499836
uucucuauacaguagccaa

SEQ ID NO: 1499838 - RNA, 19 nt, Artificial Sequence
  Description of Artificial Sequence: Synthetic oligonucleotide
  Sense strand starting at position 3916 of SEQ ID NO: 1244584
cuguauagagaaugaguua

SEQ ID NO: 1499839 - RNA, 19 nt, Artificial Sequence
  Description of Artificial Sequence: Synthetic oligonucleotide
  Antisense strand to SEQ ID NO: 1499838
uaacucauucucuauacag

SEQ ID NO: 1499840 - RNA, 19 nt, Artificial Sequence
  Description of Artificial Sequence: Synthetic oligonucleotide
  Sense strand starting at position 3919 of SEQ ID NO: 1244584
uauagagaaugaguuaagu

SEQ ID NO: 1499841 - RNA, 19 nt, Artificial Sequence
  Description of Artificial Sequence: Synthetic oligonucleotide
  Antisense strand to SEQ ID NO: 1499840
acuuaacucauucucuaua

SEQ ID NO: 1499842 - RNA, 19 nt, Artificial Sequence
  Description of Artificial Sequence: Synthetic oligonucleotide
  Sense strand starting at position 3932 of SEQ ID NO: 1244584
uuaagucaagaaugaaugu

SEQ ID NO: 1499843 - RNA, 19 nt, Artificial Sequence
  Description of Artificial Sequence: Synthetic oligonucleotide
  Antisense strand to SEQ ID NO: 1499842
acauucauucuugacuuaa

SEQ ID NO: 1499844 - RNA, 19 nt, Artificial Sequence
  Description of Artificial Sequence: Synthetic oligonucleotide
  Sense strand starting at position 123 of SEQ ID NO: 1244585
ccgaacuaucuagaaaugu

SEQ ID NO: 1499845 - RNA, 19 nt, Artificial Sequence
  Description of Artificial Sequence: Synthetic oligonucleotide
  Antisense strand to SEQ ID NO: 1499844
acauuucuagauaguucgg

SEQ ID NO: 1499846 - RNA, 19 nt, Artificial Sequence
  Description of Artificial Sequence: Synthetic oligonucleotide
  Sense strand starting at position 710 of SEQ ID NO: 1244585
gguccuucccaccaagacu

SEQ ID NO: 1499847 - RNA, 19 nt, Artificial Sequence
  Description of Artificial Sequence: Synthetic oligonucleotide
  Antisense strand to SEQ ID NO: 1499846
agucuuggugggaaggacc

SEQ ID NO: 1499848 - RNA, 19 nt, Artificial Sequence
  Description of Artificial Sequence: Synthetic oligonucleotide
  Sense strand starting at position 1820 of SEQ ID NO: 1244585
gcaggaacuugagcagaaa

SEQ ID NO: 1499849 - RNA, 19 nt, Artificial Sequence
  Description of Artificial Sequence: Synthetic oligonucleotide
  Antisense strand to SEQ ID NO: 1499848
uuucugcucaaguuccugc

SEQ ID NO: 1499850 - RNA, 19 nt, Artificial Sequence
  Description of Artificial Sequence: Synthetic oligonucleotide
  Sense strand starting at position 2504 of SEQ ID NO: 1244585
gucccugucgccguagaau

SEQ ID NO: 1499851 - RNA, 19 nt, Artificial Sequence
  Description of Artificial Sequence: Synthetic oligonucleotide
  Antisense strand to SEQ ID NO: 1499850
auucuacggcgacagggac

SEQ ID NO: 1499852 - RNA, 19 nt, Artificial Sequence
  Description of Artificial Sequence: Synthetic oligonucleotide
  Sense strand starting at position 2661 of SEQ ID NO: 1244585
augugugccucugcagaua

SEQ ID NO: 1499853 - RNA, 19 nt, Artificial Sequence
  Description of Artificial Sequence: Synthetic oligonucleotide
  Antisense strand to SEQ ID NO: 1499852
uaucugcagaggcacacau

SEQ ID NO: 1499854 - RNA, 19 nt, Artificial Sequence
  Description of Artificial Sequence: Synthetic oligonucleotide
  Sense strand starting at position 2672 of SEQ ID NO: 1244585
ugcagauaucugcacaugu

SEQ ID NO: 1499855 - RNA, 19 nt, Artificial Sequence
  Description of Artificial Sequence: Synthetic oligonucleotide
  Antisense strand to SEQ ID NO: 1499854
acaugugcagauaucugca

SEQ ID NO: 1499856 - RNA, 19 nt, Artificial Sequence
  Description of Artificial Sequence: Synthetic oligonucleotide
  Sense strand starting at position 2768 of SEQ ID NO: 1244585
ggugucugcacauguaugu

SEQ ID NO: 1499857 - RNA, 19 nt, Artificial Sequence
  Description of Artificial Sequence: Synthetic oligonucleotide
  Antisense strand to SEQ ID NO: 1499856
acauacaugugcagacacc

SEQ ID NO: 1499858 - RNA, 19 nt, Artificial Sequence
  Description of Artificial Sequence: Synthetic oligonucleotide
  Sense strand starting at position 2804 of SEQ ID NO: 1244585
ucugcagaugucugcacau

SEQ ID NO: 1499859 - RNA, 19 nt, Artificial Sequence
  Description of Artificial Sequence: Synthetic oligonucleotide
  Antisense strand to SEQ ID NO: 1499858
augugcagacaucugcaga

SEQ ID NO: 1499860 - RNA, 19 nt, Artificial Sequence
  Description of Artificial Sequence: Synthetic oligonucleotide
  Sense strand starting at position 2806 of SEQ ID NO: 1244585
ugcagaugucugcacaucu

SEQ ID NO: 1499861 - RNA, 19 nt, Artificial Sequence
  Description of Artificial Sequence: Synthetic oligonucleotide
  Antisense strand to SEQ ID NO: 1499860
agaugugcagacaucugca

SEQ ID NO: 1499862 - RNA, 19 nt, Artificial Sequence
  Description of Artificial Sequence: Synthetic oligonucleotide
  Sense strand starting at position 2919 of SEQ ID NO: 1244585
cugcgugugcugcuucuau

SEQ ID NO: 1499863 - RNA, 19 nt, Artificial Sequence
  Description of Artificial Sequence: Synthetic oligonucleotide
  Antisense strand to SEQ ID NO: 1499862
auagaagcagcacacgcag

SEQ ID NO: 1499864 - RNA, 19 nt, Artificial Sequence
  Description of Artificial Sequence: Synthetic oligonucleotide
  Sense strand starting at position 2923 of SEQ ID NO: 1244585
gugugcugcuucuaugcau

SEQ ID NO: 1499865 - RNA, 19 nt, Artificial Sequence
  Description of Artificial Sequence: Synthetic oligonucleotide
  Antisense strand to SEQ ID NO: 1499864
augcauagaagcagcacac

SEQ ID NO: 1499866 - RNA, 19 nt, Artificial Sequence
  Description of Artificial Sequence: Synthetic oligonucleotide
  Sense strand starting at position 3107 of SEQ ID NO: 1244585
ggugcacauugguuuauuu

SEQ ID NO: 1499867 - RNA, 19 nt, Artificial Sequence
  Description of Artificial Sequence: Synthetic oligonucleotide
  Antisense strand to SEQ ID NO: 1499866
aaauaaaccaaugugcacc

SEQ ID NO: 1499868 - RNA, 19 nt, Artificial Sequence
  Description of Artificial Sequence: Synthetic oligonucleotide
  Sense strand starting at position 3115 of SEQ ID NO: 1244585
uugguuuauuuggugcaga

SEQ ID NO: 1499869 - RNA, 19 nt, Artificial Sequence
  Description of Artificial Sequence: Synthetic oligonucleotide
  Antisense strand to SEQ ID NO: 1499868
ucugcaccaaauaaaccaa

SEQ ID NO: 1499870 - RNA, 19 nt, Artificial Sequence
  Description of Artificial Sequence: Synthetic oligonucleotide
  Sense strand starting at position 3116 of SEQ ID NO: 1244585
ugguuuauuuggugcagaa

SEQ ID NO: 1499871 - RNA, 19 nt, Artificial Sequence
  Description of Artificial Sequence: Synthetic oligonucleotide
  Antisense strand to SEQ ID NO: 1499870
uucugcaccaaauaaacca

SEQ ID NO: 1499872 - RNA, 19 nt, Artificial Sequence
  Description of Artificial Sequence: Synthetic oligonucleotide
  Sense strand starting at position 3349 of SEQ ID NO: 1244585
aaauguuuacuuuggaaug

SEQ ID NO: 1499873 - RNA, 19 nt, Artificial Sequence
  Description of Artificial Sequence: Synthetic oligonucleotide
  Antisense strand to SEQ ID NO: 1499872
cauuccaaaguaaacauuu

SEQ ID NO: 1499874 - RNA, 19 nt, Artificial Sequence
  Description of Artificial Sequence: Synthetic oligonucleotide
  Sense strand starting at position 3365 of SEQ ID NO: 1244585
augccaauuuaguuugcaa

SEQ ID NO: 1499875 - RNA, 19 nt, Artificial Sequence
  Description of Artificial Sequence: Synthetic oligonucleotide
  Antisense strand to SEQ ID NO: 1499874
uugcaaacuaaauuggcau

SEQ ID NO: 1499876 - RNA, 19 nt, Artificial Sequence
  Description of Artificial Sequence: Synthetic oligonucleotide
  Sense strand starting at position 3367 of SEQ ID NO: 1244585
gccaauuuaguuugcaaca

SEQ ID NO: 1499877 - RNA, 19 nt, Artificial Sequence
  Description of Artificial Sequence: Synthetic oligonucleotide
  Antisense strand to SEQ ID NO: 1499876
uguugcaaacuaaauuggc

SEQ ID NO: 1499878 - RNA, 19 nt, Artificial Sequence
  Description of Artificial Sequence: Synthetic oligonucleotide
  Sense strand starting at position 3400 of SEQ ID NO: 1244585
guugauuaguugcuuuagu

SEQ ID NO: 1499879 - RNA, 19 nt, Artificial Sequence
  Description of Artificial Sequence: Synthetic oligonucleotide
  Antisense strand to SEQ ID NO: 1499878
acuaaagcaacuaaucaac

SEQ ID NO: 1499880 - RNA, 19 nt, Artificial Sequence
  Description of Artificial Sequence: Synthetic oligonucleotide
  Sense strand starting at position 3401 of SEQ ID NO: 1244585
uugauuaguugcuuuaguu

SEQ ID NO: 1499881 - RNA, 19 nt, Artificial Sequence
  Description of Artificial Sequence: Synthetic oligonucleotide
  Antisense strand to SEQ ID NO: 1499880
aacuaaagcaacuaaucaa

SEQ ID NO: 1499882 - RNA, 19 nt, Artificial Sequence
  Description of Artificial Sequence: Synthetic oligonucleotide
  Sense strand starting at position 3405 of SEQ ID NO: 1244585
uuaguugcuuuaguuacua

SEQ ID NO: 1499883 - RNA, 19 nt, Artificial Sequence
  Description of Artificial Sequence: Synthetic oligonucleotide
  Antisense strand to SEQ ID NO: 1499882
uaguaacuaaagcaacuaa

SEQ ID NO: 1499884 - RNA, 19 nt, Artificial Sequence
  Description of Artificial Sequence: Synthetic oligonucleotide
  Sense strand starting at position 3410 of SEQ ID NO: 1244585
ugcuuuaguuacuaaugca

SEQ ID NO: 1499885 - RNA, 19 nt, Artificial Sequence
  Description of Artificial Sequence: Synthetic oligonucleotide
  Antisense strand to SEQ ID NO: 1499884
ugcauuaguaacuaaagca

SEQ ID NO: 1499886 - RNA, 19 nt, Artificial Sequence
  Description of Artificial Sequence: Synthetic oligonucleotide
  Sense strand starting at position 3751 of SEQ ID NO: 1244585
cuaugagaaagauggcauu

SEQ ID NO: 1499887 - RNA, 19 nt, Artificial Sequence
  Description of Artificial Sequence: Synthetic oligonucleotide
  Antisense strand to SEQ ID NO: 1499886
aaugccaucuuucucauag

SEQ ID NO: 1499888 - RNA, 19 nt, Artificial Sequence
  Description of Artificial Sequence: Synthetic oligonucleotide
  Sense strand starting at position 3870 of SEQ ID NO: 1244585
gcuauuaccuagugaggaa

SEQ ID NO: 1499889 - RNA, 19 nt, Artificial Sequence
  Description of Artificial Sequence: Synthetic oligonucleotide
  Antisense strand to SEQ ID NO: 1499888
uuccucacuagguaauagc

SEQ ID NO: 1499890 - RNA, 19 nt, Artificial Sequence
  Description of Artificial Sequence: Synthetic oligonucleotide
  Sense strand starting at position 31 of SEQ ID NO: 1244586
agcuguugacccuaauaag

SEQ ID NO: 1499891 - RNA, 19 nt, Artificial Sequence
  Description of Artificial Sequence: Synthetic oligonucleotide
  Antisense strand to SEQ ID NO: 1499890
cuuauuagggucaacagcu

SEQ ID NO: 1499892 - RNA, 19 nt, Artificial Sequence
  Description of Artificial Sequence: Synthetic oligonucleotide
  Sense strand starting at position 660 of SEQ ID NO: 1244586
cuguacuuuggccacauaa

SEQ ID NO: 1499893 - RNA, 19 nt, Artificial Sequence
  Description of Artificial Sequence: Synthetic oligonucleotide
  Antisense strand to SEQ ID NO: 1499892
uuauguggccaaaguacag

SEQ ID NO: 1499894 - RNA, 19 nt, Artificial Sequence
  Description of Artificial Sequence: Synthetic oligonucleotide
  Sense strand starting at position 662 of SEQ ID NO: 1244586
guacuuuggccacauaaca

SEQ ID NO: 1499895 - RNA, 19 nt, Artificial Sequence
  Description of Artificial Sequence: Synthetic oligonucleotide
  Antisense strand to SEQ ID NO: 1499894
uguuauguggccaaaguac

SEQ ID NO: 1499896 - RNA, 19 nt, Artificial Sequence
  Description of Artificial Sequence: Synthetic oligonucleotide
  Sense strand starting at position 675 of SEQ ID NO: 1244586
auaacaaagcuuggucuga

SEQ ID NO: 1499897 - RNA, 19 nt, Artificial Sequence
  Description of Artificial Sequence: Synthetic oligonucleotide
  Antisense strand to SEQ ID NO: 1499896
ucagaccaagcuuuguuau

SEQ ID NO: 1499898 - RNA, 19 nt, Artificial Sequence
  Description of Artificial Sequence: Synthetic oligonucleotide
  Sense strand starting at position 677 of SEQ ID NO: 1244586
aacaaagcuuggucugaga

SEQ ID NO: 1499899 - RNA, 19 nt, Artificial Sequence
  Description of Artificial Sequence: Synthetic oligonucleotide
  Antisense strand to SEQ ID NO: 1499898
ucucagaccaagcuuuguu

SEQ ID NO: 1499900 - RNA, 19 nt, Artificial Sequence
  Description of Artificial Sequence: Synthetic oligonucleotide
  Sense strand starting at position 679 of SEQ ID NO: 1244586
caaagcuuggucugagaca

SEQ ID NO: 1499901 - RNA, 19 nt, Artificial Sequence
  Description of Artificial Sequence: Synthetic oligonucleotide
  Antisense strand to SEQ ID NO: 1499900
ugucucagaccaagcuuug

SEQ ID NO: 1499902 - RNA, 19 nt, Artificial Sequence
  Description of Artificial Sequence: Synthetic oligonucleotide
  Sense strand starting at position 742 of SEQ ID NO: 1244586
agucaauaugguugaggga

SEQ ID NO: 1499903 - RNA, 19 nt, Artificial Sequence
  Description of Artificial Sequence: Synthetic oligonucleotide
  Antisense strand to SEQ ID NO: 1499902
ucccucaaccauauugacu

SEQ ID NO: 1499904 - RNA, 19 nt, Artificial Sequence
  Description of Artificial Sequence: Synthetic oligonucleotide
  Sense strand starting at position 781 of SEQ ID NO: 1244586
aucggaauuccucaggcua

SEQ ID NO: 1499905 - RNA, 19 nt, Artificial Sequence
  Description of Artificial Sequence: Synthetic oligonucleotide
  Antisense strand to SEQ ID NO: 1499904
uagccugaggaauuccgau

SEQ ID NO: 1499906 - RNA, 19 nt, Artificial Sequence
  Description of Artificial Sequence: Synthetic oligonucleotide
  Sense strand starting at position 812 of SEQ ID NO: 1244586
cagaacugccauugugauc

SEQ ID NO: 1499907 - RNA, 19 nt, Artificial Sequence
  Description of Artificial Sequence: Synthetic oligonucleotide
  Antisense strand to SEQ ID NO: 1499906
gaucacaauggcaguucug

SEQ ID NO: 1499908 - RNA, 19 nt, Artificial Sequence
  Description of Artificial Sequence: Synthetic oligonucleotide
  Sense strand starting at position 821 of SEQ ID NO: 1244586
cauugugaucuugacuuag

SEQ ID NO: 1499909 - RNA, 19 nt, Artificial Sequence
  Description of Artificial Sequence: Synthetic oligonucleotide
  Antisense strand to SEQ ID NO: 1499908
cuaagucaagaucacaaug

SEQ ID NO: 1499910 - RNA, 19 nt, Artificial Sequence
  Description of Artificial Sequence: Synthetic oligonucleotide
  Sense strand starting at position 823 of SEQ ID NO: 1244586
uugugaucuugacuuaguc

SEQ ID NO: 1499911 - RNA, 19 nt, Artificial Sequence
  Description of Artificial Sequence: Synthetic oligonucleotide
  Antisense strand to SEQ ID NO: 1499910
gacuaagucaagaucacaa

SEQ ID NO: 1499912 - RNA, 19 nt, Artificial Sequence
  Description of Artificial Sequence: Synthetic oligonucleotide
  Sense strand starting at position 831 of SEQ ID NO: 1244586
uugacuuaguccucaguaa

SEQ ID NO: 1499913 - RNA, 19 nt, Artificial Sequence
  Description of Artificial Sequence: Synthetic oligonucleotide
  Antisense strand to SEQ ID NO: 1499912
uuacugaggacuaagucaa

SEQ ID NO: 1499914 - RNA, 19 nt, Artificial Sequence
  Description of Artificial Sequence: Synthetic oligonucleotide
  Sense strand starting at position 832 of SEQ ID NO: 1244586
ugacuuaguccucaguaau

SEQ ID NO: 1499915 - RNA, 19 nt, Artificial Sequence
  Description of Artificial Sequence: Synthetic oligonucleotide
  Antisense strand to SEQ ID NO: 1499914
auuacugaggacuaaguca

SEQ ID NO: 1499916 - RNA, 19 nt, Artificial Sequence
  Description of Artificial Sequence: Synthetic oligonucleotide
  Sense strand starting at position 835 of SEQ ID NO: 1244586
cuuaguccucaguaauaag

SEQ ID NO: 1499917 - RNA, 19 nt, Artificial Sequence
  Description of Artificial Sequence: Synthetic oligonucleotide
  Antisense strand to SEQ ID NO: 1499916
cuuauuacugaggacuaag

SEQ ID NO: 1499918 - RNA, 19 nt, Artificial Sequence
  Description of Artificial Sequence: Synthetic oligonucleotide
  Sense strand starting at position 926 of SEQ ID NO: 1244586
uguguuugggagugggaaa

SEQ ID NO: 1499919 - RNA, 19 nt, Artificial Sequence
  Description of Artificial Sequence: Synthetic oligonucleotide
  Antisense strand to SEQ ID NO: 1499918
uuucccacucccaaacaca

SEQ ID NO: 1499920 - RNA, 19 nt, Artificial Sequence
  Description of Artificial Sequence: Synthetic oligonucleotide
  Sense strand starting at position 1134 of SEQ ID NO: 1244586
ccugaucugugaucuguag

SEQ ID NO: 1499921 - RNA, 19 nt, Artificial Sequence
  Description of Artificial Sequence: Synthetic oligonucleotide
  Antisense strand to SEQ ID NO: 1499920
cuacagaucacagaucagg

SEQ ID NO: 1499922 - RNA, 19 nt, Artificial Sequence
  Description of Artificial Sequence: Synthetic oligonucleotide
  Sense strand starting at position 1138 of SEQ ID NO: 1244586
aucugugaucuguagcuag

SEQ ID NO: 1499923 - RNA, 19 nt, Artificial Sequence
  Description of Artificial Sequence: Synthetic oligonucleotide
  Antisense strand to SEQ ID NO: 1499922
cuagcuacagaucacagau

SEQ ID NO: 1499924 - RNA, 19 nt, Artificial Sequence
  Description of Artificial Sequence: Synthetic oligonucleotide
  Sense strand starting at position 1142 of SEQ ID NO: 1244586
gugaucuguagcuaggauu

SEQ ID NO: 1499925 - RNA, 19 nt, Artificial Sequence
  Description of Artificial Sequence: Synthetic oligonucleotide
  Antisense strand to SEQ ID NO: 1499924
aauccuagcuacagaucac

SEQ ID NO: 1499926 - RNA, 19 nt, Artificial Sequence
  Description of Artificial Sequence: Synthetic oligonucleotide
  Sense strand starting at position 1149 of SEQ ID NO: 1244586
guagcuaggauugagcaaa

SEQ ID NO: 1499927 - RNA, 19 nt, Artificial Sequence
  Description of Artificial Sequence: Synthetic oligonucleotide
  Antisense strand to SEQ ID NO: 1499926
uuugcucaauccuagcuac

SEQ ID NO: 1499928 - RNA, 19 nt, Artificial Sequence
  Description of Artificial Sequence: Synthetic oligonucleotide
  Sense strand starting at position 1275 of SEQ ID NO: 1244586
ucuaguaagugacuuuaaa

SEQ ID NO: 1499929 - RNA, 19 nt, Artificial Sequence
  Description of Artificial Sequence: Synthetic oligonucleotide
  Antisense strand to SEQ ID NO: 1499928
uuuaaagucacuuacuaga

SEQ ID NO: 1499930 - RNA, 19 nt, Artificial Sequence
  Description of Artificial Sequence: Synthetic oligonucleotide
  Sense strand starting at position 1313 of SEQ ID NO: 1244586
gguucucuggcuugaggaa

SEQ ID NO: 1499931 - RNA, 19 nt, Artificial Sequence
  Description of Artificial Sequence: Synthetic oligonucleotide
  Antisense strand to SEQ ID NO: 1499930
uuccucaagccagagaacc

SEQ ID NO: 1499932 - RNA, 19 nt, Artificial Sequence
  Description of Artificial Sequence: Synthetic oligonucleotide
  Sense strand starting at position 1314 of SEQ ID NO: 1244586
guucucuggcuugaggaaa

SEQ ID NO: 1499933 - RNA, 19 nt, Artificial Sequence
  Description of Artificial Sequence: Synthetic oligonucleotide
  Antisense strand to SEQ ID NO: 1499932
uuuccucaagccagagaac

SEQ ID NO: 1499934 - RNA, 19 nt, Artificial Sequence
  Description of Artificial Sequence: Synthetic oligonucleotide
  Sense strand starting at position 1422 of SEQ ID NO: 1244586
ucgagauauuccucuaggg

SEQ ID NO: 1499935 - RNA, 19 nt, Artificial Sequence
  Description of Artificial Sequence: Synthetic oligonucleotide
  Antisense strand to SEQ ID NO: 1499934
cccuagaggaauaucucga

SEQ ID NO: 1499936 - RNA, 19 nt, Artificial Sequence
  Description of Artificial Sequence: Synthetic oligonucleotide
  Sense strand starting at position 1424 of SEQ ID NO: 1244586
gagauauuccucuagggcu

SEQ ID NO: 1499937 - RNA, 19 nt, Artificial Sequence
  Description of Artificial Sequence: Synthetic oligonucleotide
  Antisense strand to SEQ ID NO: 1499936
agcccuagaggaauaucuc

SEQ ID NO: 1499938 - RNA, 19 nt, Artificial Sequence
  Description of Artificial Sequence: Synthetic oligonucleotide
  Sense strand starting at position 1992 of SEQ ID NO: 1244586
ucaauacucccaggugauu

SEQ ID NO: 1499939 - RNA, 19 nt, Artificial Sequence
  Description of Artificial Sequence: Synthetic oligonucleotide
  Antisense strand to SEQ ID NO: 1499938
aaucaccugggaguauuga

SEQ ID NO: 1499940 - RNA, 19 nt, Artificial Sequence
  Description of Artificial Sequence: Synthetic oligonucleotide
  Sense strand starting at position 2319 of SEQ ID NO: 1244586
ucccgaggagcuggauuau

SEQ ID NO: 1499941 - RNA, 19 nt, Artificial Sequence
  Description of Artificial Sequence: Synthetic oligonucleotide
  Antisense strand to SEQ ID NO: 1499940
auaauccagcuccucggga

SEQ ID NO: 1499942 - RNA, 19 nt, Artificial Sequence
  Description of Artificial Sequence: Synthetic oligonucleotide
  Sense strand starting at position 2761 of SEQ ID NO: 1244586
ggaagaguucucugcagga

SEQ ID NO: 1499943 - RNA, 19 nt, Artificial Sequence
  Description of Artificial Sequence: Synthetic oligonucleotide
  Antisense strand to SEQ ID NO: 1499942
uccugcagagaacucuucc

SEQ ID NO: 1499944 - RNA, 19 nt, Artificial Sequence
  Description of Artificial Sequence: Synthetic oligonucleotide
  Sense strand starting at position 2763 of SEQ ID NO: 1244586
aagaguucucugcaggaug

SEQ ID NO: 1499945 - RNA, 19 nt, Artificial Sequence
  Description of Artificial Sequence: Synthetic oligonucleotide
  Antisense strand to SEQ ID NO: 1499944
cauccugcagagaacucuu

SEQ ID NO: 1499946 - RNA, 19 nt, Artificial Sequence
  Description of Artificial Sequence: Synthetic oligonucleotide
  Sense strand starting at position 2774 of SEQ ID NO: 1244586
gcaggaugcugggugagau

SEQ ID NO: 1499947 - RNA, 19 nt, Artificial Sequence
  Description of Artificial Sequence: Synthetic oligonucleotide
  Antisense strand to SEQ ID NO: 1499946
aucucacccagcauccugc

SEQ ID NO: 1499948 - RNA, 19 nt, Artificial Sequence
  Description of Artificial Sequence: Synthetic oligonucleotide
  Sense strand starting at position 3106 of SEQ ID NO: 1244586
gcaucucauccucaaggga

SEQ ID NO: 1499949 - RNA, 19 nt, Artificial Sequence
  Description of Artificial Sequence: Synthetic oligonucleotide
  Antisense strand to SEQ ID NO: 1499948
ucccuugaggaugagaugc

SEQ ID NO: 1499950 - RNA, 19 nt, Artificial Sequence
  Description of Artificial Sequence: Synthetic oligonucleotide
  Sense strand starting at position 3210 of SEQ ID NO: 1244586
ggagccucagcuggagaau

SEQ ID NO: 1499951 - RNA, 19 nt, Artificial Sequence
  Description of Artificial Sequence: Synthetic oligonucleotide
  Antisense strand to SEQ ID NO: 1499950
auucuccagcugaggcucc

SEQ ID NO: 1499952 - RNA, 19 nt, Artificial Sequence
  Description of Artificial Sequence: Synthetic oligonucleotide
  Sense strand starting at position 3211 of SEQ ID NO: 1244586
gagccucagcuggagaauu

SEQ ID NO: 1499953 - RNA, 19 nt, Artificial Sequence
  Description of Artificial Sequence: Synthetic oligonucleotide
  Antisense strand to SEQ ID NO: 1499952
aauucuccagcugaggcuc

SEQ ID NO: 1499954 - RNA, 19 nt, Artificial Sequence
  Description of Artificial Sequence: Synthetic oligonucleotide
  Sense strand starting at position 3337 of SEQ ID NO: 1244586
gccaguguucaugagaagu

SEQ ID NO: 1499955 - RNA, 19 nt, Artificial Sequence
  Description of Artificial Sequence: Synthetic oligonucleotide
  Antisense strand to SEQ ID NO: 1499954
acuucucaugaacacuggc

SEQ ID NO: 1499956 - RNA, 19 nt, Artificial Sequence
  Description of Artificial Sequence: Synthetic oligonucleotide
  Sense strand starting at position 3467 of SEQ ID NO: 1244586
uacccaguucuggaacagu

SEQ ID NO: 1499957 - RNA, 19 nt, Artificial Sequence
  Description of Artificial Sequence: Synthetic oligonucleotide
  Antisense strand to SEQ ID NO: 1499956
acuguuccagaacugggua

SEQ ID NO: 1499958 - RNA, 19 nt, Artificial Sequence
  Description of Artificial Sequence: Synthetic oligonucleotide
  Sense strand starting at position 3477 of SEQ ID NO: 1244586
uggaacaguuccuuauaca

SEQ ID NO: 1499959 - RNA, 19 nt, Artificial Sequence
  Description of Artificial Sequence: Synthetic oligonucleotide
  Antisense strand to SEQ ID NO: 1499958
uguauaaggaacuguucca

SEQ ID NO: 1499960 - RNA, 19 nt, Artificial Sequence
  Description of Artificial Sequence: Synthetic oligonucleotide
  Sense strand starting at position 3484 of SEQ ID NO: 1244586
guuccuuauacaggaggga

SEQ ID NO: 1499961 - RNA, 19 nt, Artificial Sequence
  Description of Artificial Sequence: Synthetic oligonucleotide
  Antisense strand to SEQ ID NO: 1499960
ucccuccuguauaaggaac

SEQ ID NO: 1499962 - RNA, 19 nt, Artificial Sequence
  Description of Artificial Sequence: Synthetic oligonucleotide
  Sense strand starting at position 3621 of SEQ ID NO: 1244586
guauaauaggcccauagug

SEQ ID NO: 1499963 - RNA, 19 nt, Artificial Sequence
  Description of Artificial Sequence: Synthetic oligonucleotide
  Antisense strand to SEQ ID NO: 1499962
cacuaugggccuauuauac

SEQ ID NO: 1499964 - RNA, 19 nt, Artificial Sequence
  Description of Artificial Sequence: Synthetic oligonucleotide
  Sense strand starting at position 3629 of SEQ ID NO: 1244586
ggcccauagugacuaauua

SEQ ID NO: 1499965 - RNA, 19 nt, Artificial Sequence
  Description of Artificial Sequence: Synthetic oligonucleotide
  Antisense strand to SEQ ID NO: 1499964
uaauuagucacuaugggcc

SEQ ID NO: 1499966 - RNA, 19 nt, Artificial Sequence
  Description of Artificial Sequence: Synthetic oligonucleotide
  Sense strand starting at position 3630 of SEQ ID NO: 1244586
gcccauagugacuaauuaa

SEQ ID NO: 1499967 - RNA, 19 nt, Artificial Sequence
  Description of Artificial Sequence: Synthetic oligonucleotide
  Antisense strand to SEQ ID NO: 1499966
uuaauuagucacuaugggc

SEQ ID NO: 1499968 - RNA, 19 nt, Artificial Sequence
  Description of Artificial Sequence: Synthetic oligonucleotide
  Sense strand starting at position 3637 of SEQ ID NO: 1244586
gugacuaauuaaguuucuu

SEQ ID NO: 1499969 - RNA, 19 nt, Artificial Sequence
  Description of Artificial Sequence: Synthetic oligonucleotide
  Antisense strand to SEQ ID NO: 1499968
aagaaacuuaauuagucac

SEQ ID NO: 1499970 - RNA, 19 nt, Artificial Sequence
  Description of Artificial Sequence: Synthetic oligonucleotide
  Sense strand starting at position 43 of SEQ ID NO: 1244587
uuagucacuucugccuauu

SEQ ID NO: 1499971 - RNA, 19 nt, Artificial Sequence
  Description of Artificial Sequence: Synthetic oligonucleotide
  Antisense strand to SEQ ID NO: 1499970
aauaggcagaagugacuaa

SEQ ID NO: 1499972 - RNA, 19 nt, Artificial Sequence
  Description of Artificial Sequence: Synthetic oligonucleotide
  Sense strand starting at position 45 of SEQ ID NO: 1244587
agucacuucugccuauuua

SEQ ID NO: 1499973 - RNA, 19 nt, Artificial Sequence
  Description of Artificial Sequence: Synthetic oligonucleotide
  Antisense strand to SEQ ID NO: 1499972
uaaauaggcagaagugacu

SEQ ID NO: 1499974 - RNA, 19 nt, Artificial Sequence
  Description of Artificial Sequence: Synthetic oligonucleotide
  Sense strand starting at position 103 of SEQ ID NO: 1244587
uuugauuccagacggucau

SEQ ID NO: 1499975 - RNA, 19 nt, Artificial Sequence
  Description of Artificial Sequence: Synthetic oligonucleotide
  Antisense strand to SEQ ID NO: 1499974
augaccgucuggaaucaaa

SEQ ID NO: 1499976 - RNA, 19 nt, Artificial Sequence
  Description of Artificial Sequence: Synthetic oligonucleotide
  Sense strand starting at position 136 of SEQ ID NO: 1244587
ccuagacguuucuuuccau

SEQ ID NO: 1499977 - RNA, 19 nt, Artificial Sequence
  Description of Artificial Sequence: Synthetic oligonucleotide
  Antisense strand to SEQ ID NO: 1499976
auggaaagaaacgucuagg

SEQ ID NO: 1499978 - RNA, 19 nt, Artificial Sequence
  Description of Artificial Sequence: Synthetic oligonucleotide
  Sense strand starting at position 139 of SEQ ID NO: 1244587
agacguuucuuuccaugca

SEQ ID NO: 1499979 - RNA, 19 nt, Artificial Sequence
  Description of Artificial Sequence: Synthetic oligonucleotide
  Antisense strand to SEQ ID NO: 1499978
ugcauggaaagaaacgucu

SEQ ID NO: 1499980 - RNA, 19 nt, Artificial Sequence
  Description of Artificial Sequence: Synthetic oligonucleotide
  Sense strand starting at position 232 of SEQ ID NO: 1244587
cucugugugcaguaacaaa

SEQ ID NO: 1499981 - RNA, 19 nt, Artificial Sequence
  Description of Artificial Sequence: Synthetic oligonucleotide
  Antisense strand to SEQ ID NO: 1499980
uuuguuacugcacacagag

SEQ ID NO: 1499982 - RNA, 19 nt, Artificial Sequence
  Description of Artificial Sequence: Synthetic oligonucleotide
  Sense strand starting at position 240 of SEQ ID NO: 1244587
gcaguaacaaagugggauu

SEQ ID NO: 1499983 - RNA, 19 nt, Artificial Sequence
  Description of Artificial Sequence: Synthetic oligonucleotide
  Antisense strand to SEQ ID NO: 1499982
aaucccacuuuguuacugc

SEQ ID NO: 1499984 - RNA, 19 nt, Artificial Sequence
  Description of Artificial Sequence: Synthetic oligonucleotide
  Sense strand starting at position 251 of SEQ ID NO: 1244587
gugggauuguggaagaaca

SEQ ID NO: 1499985 - RNA, 19 nt, Artificial Sequence
  Description of Artificial Sequence: Synthetic oligonucleotide
  Antisense strand to SEQ ID NO: 1499984
uguucuuccacaaucccac

SEQ ID NO: 1499986 - RNA, 19 nt, Artificial Sequence
  Description of Artificial Sequence: Synthetic oligonucleotide
  Sense strand starting at position 415 of SEQ ID NO: 1244587
agucuaaaugcuuacugga

SEQ ID NO: 1499987 - RNA, 19 nt, Artificial Sequence
  Description of Artificial Sequence: Synthetic oligonucleotide
  Antisense strand to SEQ ID NO: 1499986
uccaguaagcauuuagacu

SEQ ID NO: 1499988 - RNA, 19 nt, Artificial Sequence
  Description of Artificial Sequence: Synthetic oligonucleotide
  Sense strand starting at position 417 of SEQ ID NO: 1244587
ucuaaaugcuuacuggaca

SEQ ID NO: 1499989 - RNA, 19 nt, Artificial Sequence
  Description of Artificial Sequence: Synthetic oligonucleotide
  Antisense strand to SEQ ID NO: 1499988
uguccaguaagcauuuaga

SEQ ID NO: 1499990 - RNA, 19 nt, Artificial Sequence
  Description of Artificial Sequence: Synthetic oligonucleotide
  Sense strand starting at position 686 of SEQ ID NO: 1244587
agcacacacgcugauuaua

SEQ ID NO: 1499991 - RNA, 19 nt, Artificial Sequence
  Description of Artificial Sequence: Synthetic oligonucleotide
  Antisense strand to SEQ ID NO: 1499990
uauaaucagcgugugugcu

SEQ ID NO: 1499992 - RNA, 19 nt, Artificial Sequence
  Description of Artificial Sequence: Synthetic oligonucleotide
  Sense strand starting at position 778 of SEQ ID NO: 1244587
acaucuauucuagguggua

SEQ ID NO: 1499993 - RNA, 19 nt, Artificial Sequence
  Description of Artificial Sequence: Synthetic oligonucleotide
  Antisense strand to SEQ ID NO: 1499992
uaccaccuagaauagaugu

SEQ ID NO: 1499994 - RNA, 19 nt, Artificial Sequence
  Description of Artificial Sequence: Synthetic oligonucleotide
  Sense strand starting at position 779 of SEQ ID NO: 1244587
caucuauucuaggugguaa

SEQ ID NO: 1499995 - RNA, 19 nt, Artificial Sequence
  Description of Artificial Sequence: Synthetic oligonucleotide
  Antisense strand to SEQ ID NO: 1499994
uuaccaccuagaauagaug

SEQ ID NO: 1499996 - RNA, 19 nt, Artificial Sequence
  Description of Artificial Sequence: Synthetic oligonucleotide
  Sense strand starting at position 803 of SEQ ID NO: 1244587
ggaaccauguagucaaucu

SEQ ID NO: 1499997 - RNA, 19 nt, Artificial Sequence
  Description of Artificial Sequence: Synthetic oligonucleotide
  Antisense strand to SEQ ID NO: 1499996
agauugacuacaugguucc

SEQ ID NO: 1499998 - RNA, 19 nt, Artificial Sequence
  Description of Artificial Sequence: Synthetic oligonucleotide
  Sense strand starting at position 811 of SEQ ID NO: 1244587
guagucaaucugugaagca

SEQ ID NO: 1499999 - RNA, 19 nt, Artificial Sequence
  Description of Artificial Sequence: Synthetic oligonucleotide
  Antisense strand to SEQ ID NO: 1499998
ugcuucacagauugacuac

SEQ ID NO: 1500000 - RNA, 19 nt, Artificial Sequence
  Description of Artificial Sequence: Synthetic oligonucleotide
  Sense strand starting at position 826 of SEQ ID NO: 1244587
agcacagcuuaguccaauu

SEQ ID NO: 1500001 - RNA, 19 nt, Artificial Sequence
  Description of Artificial Sequence: Synthetic oligonucleotide
  Antisense strand to SEQ ID NO: 1500000
aauuggacuaagcugugcu

SEQ ID NO: 1500002 - RNA, 19 nt, Artificial Sequence
  Description of Artificial Sequence: Synthetic oligonucleotide
  Sense strand starting at position 988 of SEQ ID NO: 1244587
gcaaguaggccucagcauu

SEQ ID NO: 1500003 - RNA, 19 nt, Artificial Sequence
  Description of Artificial Sequence: Synthetic oligonucleotide
  Antisense strand to SEQ ID NO: 1500002
aaugcugaggccuacuugc

SEQ ID NO: 1500004 - RNA, 19 nt, Artificial Sequence
  Description of Artificial Sequence: Synthetic oligonucleotide
  Sense strand starting at position 1116 of SEQ ID NO: 1244587
ugguuaauucgugggugag

SEQ ID NO: 1500005 - RNA, 19 nt, Artificial Sequence
  Description of Artificial Sequence: Synthetic oligonucleotide
  Antisense strand to SEQ ID NO: 1500004
cucacccacgaauuaacca

SEQ ID NO: 1500006 - RNA, 19 nt, Artificial Sequence
  Description of Artificial Sequence: Synthetic oligonucleotide
  Sense strand starting at position 1117 of SEQ ID NO: 1244587
gguuaauucgugggugaga

SEQ ID NO: 1500007 - RNA, 19 nt, Artificial Sequence
  Description of Artificial Sequence: Synthetic oligonucleotide
  Antisense strand to SEQ ID NO: 1500006
ucucacccacgaauuaacc

SEQ ID NO: 1500008 - RNA, 19 nt, Artificial Sequence
  Description of Artificial Sequence: Synthetic oligonucleotide
  Sense strand starting at position 1118 of SEQ ID NO: 1244587
guuaauucgugggugagaa

SEQ ID NO: 1500009 - RNA, 19 nt, Artificial Sequence
  Description of Artificial Sequence: Synthetic oligonucleotide
  Antisense strand to SEQ ID NO: 1500008
uucucacccacgaauuaac

SEQ ID NO: 1500010 - RNA, 19 nt, Artificial Sequence
  Description of Artificial Sequence: Synthetic oligonucleotide
  Sense strand starting at position 1119 of SEQ ID NO: 1244587
uuaauucgugggugagaau

SEQ ID NO: 1500011 - RNA, 19 nt, Artificial Sequence
  Description of Artificial Sequence: Synthetic oligonucleotide
  Antisense strand to SEQ ID NO: 1500010
auucucacccacgaauuaa

SEQ ID NO: 1500012 - RNA, 19 nt, Artificial Sequence
  Description of Artificial Sequence: Synthetic oligonucleotide
  Sense strand starting at position 1120 of SEQ ID NO: 1244587
uaauucgugggugagaaua

SEQ ID NO: 1500013 - RNA, 19 nt, Artificial Sequence
  Description of Artificial Sequence: Synthetic oligonucleotide
  Antisense strand to SEQ ID NO: 1500012
uauucucacccacgaauua

SEQ ID NO: 1500014 - RNA, 19 nt, Artificial Sequence
  Description of Artificial Sequence: Synthetic oligonucleotide
  Sense strand starting at position 1170 of SEQ ID NO: 1244587
agagcuugcugguuaagaa

SEQ ID NO: 1500015 - RNA, 19 nt, Artificial Sequence
  Description of Artificial Sequence: Synthetic oligonucleotide
  Antisense strand to SEQ ID NO: 1500014
uucuuaaccagcaagcucu

SEQ ID NO: 1500016 - RNA, 19 nt, Artificial Sequence
  Description of Artificial Sequence: Synthetic oligonucleotide
  Sense strand starting at position 1171 of SEQ ID NO: 1244587
gagcuugcugguuaagaau

SEQ ID NO: 1500017 - RNA, 19 nt, Artificial Sequence
  Description of Artificial Sequence: Synthetic oligonucleotide
  Antisense strand to SEQ ID NO: 1500016
auucuuaaccagcaagcuc

SEQ ID NO: 1500018 - RNA, 19 nt, Artificial Sequence
  Description of Artificial Sequence: Synthetic oligonucleotide
  Sense strand starting at position 1291 of SEQ ID NO: 1244587
gucacauaacugggugcaa

SEQ ID NO: 1500019 - RNA, 19 nt, Artificial Sequence
  Description of Artificial Sequence: Synthetic oligonucleotide
  Antisense strand to SEQ ID NO: 1500018
uugcacccaguuaugugac

SEQ ID NO: 1500020 - RNA, 19 nt, Artificial Sequence
  Description of Artificial Sequence: Synthetic oligonucleotide
  Sense strand starting at position 1292 of SEQ ID NO: 1244587
ucacauaacugggugcaaa

SEQ ID NO: 1500021 - RNA, 19 nt, Artificial Sequence
  Description of Artificial Sequence: Synthetic oligonucleotide
  Antisense strand to SEQ ID NO: 1500020
uuugcacccaguuauguga

SEQ ID NO: 1500022 - RNA, 19 nt, Artificial Sequence
  Description of Artificial Sequence: Synthetic oligonucleotide
  Sense strand starting at position 1371 of SEQ ID NO: 1244587
uucuuuaacgaauauagca

SEQ ID NO: 1500023 - RNA, 19 nt, Artificial Sequence
  Description of Artificial Sequence: Synthetic oligonucleotide
  Antisense strand to SEQ ID NO: 1500022
ugcuauauucguuaaagaa

SEQ ID NO: 1500024 - RNA, 19 nt, Artificial Sequence
  Description of Artificial Sequence: Synthetic oligonucleotide
  Sense strand starting at position 2447 of SEQ ID NO: 1244587
aaguuuaaacgagguaaua

SEQ ID NO: 1500025 - RNA, 19 nt, Artificial Sequence
  Description of Artificial Sequence: Synthetic oligonucleotide
  Antisense strand to SEQ ID NO: 1500024
uauuaccucguuuaaacuu

SEQ ID NO: 1500026 - RNA, 19 nt, Artificial Sequence
  Description of Artificial Sequence: Synthetic oligonucleotide
  Sense strand starting at position 2460 of SEQ ID NO: 1244587
guaauaaaguaugaagaac

SEQ ID NO: 1500027 - RNA, 19 nt, Artificial Sequence
  Description of Artificial Sequence: Synthetic oligonucleotide
  Antisense strand to SEQ ID NO: 1500026
guucuucauacuuuauuac

SEQ ID NO: 1500028 - RNA, 19 nt, Artificial Sequence
  Description of Artificial Sequence: Synthetic oligonucleotide
  Sense strand starting at position 2476 of SEQ ID NO: 1244587
aacuguuuccgacaguacu

SEQ ID NO: 1500029 - RNA, 19 nt, Artificial Sequence
  Description of Artificial Sequence: Synthetic oligonucleotide
  Antisense strand to SEQ ID NO: 1500028
aguacugucggaaacaguu

SEQ ID NO: 1500030 - RNA, 19 nt, Artificial Sequence
  Description of Artificial Sequence: Synthetic oligonucleotide
  Sense strand starting at position 2519 of SEQ ID NO: 1244587
ugcagaggccaguauacua

SEQ ID NO: 1500031 - RNA, 19 nt, Artificial Sequence
  Description of Artificial Sequence: Synthetic oligonucleotide
  Antisense strand to SEQ ID NO: 1500030
uaguauacuggccucugca

SEQ ID NO: 1500032 - RNA, 19 nt, Artificial Sequence
  Description of Artificial Sequence: Synthetic oligonucleotide
  Sense strand starting at position 2545 of SEQ ID NO: 1244587
agcaaauacguuuggguuu

SEQ ID NO: 1500033 - RNA, 19 nt, Artificial Sequence
  Description of Artificial Sequence: Synthetic oligonucleotide
  Antisense strand to SEQ ID NO: 1500032
aaacccaaacguauuugcu

SEQ ID NO: 1500034 - RNA, 19 nt, Artificial Sequence
  Description of Artificial Sequence: Synthetic oligonucleotide
  Sense strand starting at position 2566 of SEQ ID NO: 1244587
agucgugauagaugcugga

SEQ ID NO: 1500035 - RNA, 19 nt, Artificial Sequence
  Description of Artificial Sequence: Synthetic oligonucleotide
  Antisense strand to SEQ ID NO: 1500034
uccagcaucuaucacgacu

SEQ ID NO: 1500036 - RNA, 19 nt, Artificial Sequence
  Description of Artificial Sequence: Synthetic oligonucleotide
  Sense strand starting at position 2642 of SEQ ID NO: 1244587
aaguguggcccuuauacuu

SEQ ID NO: 1500037 - RNA, 19 nt, Artificial Sequence
  Description of Artificial Sequence: Synthetic oligonucleotide
  Antisense strand to SEQ ID NO: 1500036
aaguauaagggccacacuu

SEQ ID NO: 1500038 - RNA, 19 nt, Artificial Sequence
  Description of Artificial Sequence: Synthetic oligonucleotide
  Sense strand starting at position 3167 of SEQ ID NO: 1244587
ccaaguucugaauacuugu

SEQ ID NO: 1500039 - RNA, 19 nt, Artificial Sequence
  Description of Artificial Sequence: Synthetic oligonucleotide
  Antisense strand to SEQ ID NO: 1500038
acaaguauucagaacuugg

SEQ ID NO: 1500040 - RNA, 19 nt, Artificial Sequence
  Description of Artificial Sequence: Synthetic oligonucleotide
  Sense strand starting at position 3192 of SEQ ID NO: 1244587
agaauucccuuuccagaug

SEQ ID NO: 1500041 - RNA, 19 nt, Artificial Sequence
  Description of Artificial Sequence: Synthetic oligonucleotide
  Antisense strand to SEQ ID NO: 1500040
caucuggaaagggaauucu

SEQ ID NO: 1500042 - RNA, 19 nt, Artificial Sequence
  Description of Artificial Sequence: Synthetic oligonucleotide
  Sense strand starting at position 3219 of SEQ ID NO: 1244587
uguggucucuuucccagau

SEQ ID NO: 1500043 - RNA, 19 nt, Artificial Sequence
  Description of Artificial Sequence: Synthetic oligonucleotide
  Antisense strand to SEQ ID NO: 1500042
aucugggaaagagaccaca

SEQ ID NO: 1500044 - RNA, 19 nt, Artificial Sequence
  Description of Artificial Sequence: Synthetic oligonucleotide
  Sense strand starting at position 3223 of SEQ ID NO: 1244587
gucucuuucccagauccau

SEQ ID NO: 1500045 - RNA, 19 nt, Artificial Sequence
  Description of Artificial Sequence: Synthetic oligonucleotide
  Antisense strand to SEQ ID NO: 1500044
auggaucugggaaagagac

SEQ ID NO: 1500046 - RNA, 19 nt, Artificial Sequence
  Description of Artificial Sequence: Synthetic oligonucleotide
  Sense strand starting at position 3238 of SEQ ID NO: 1244587
ccauucucucuauggcaga

SEQ ID NO: 1500047 - RNA, 19 nt, Artificial Sequence
  Description of Artificial Sequence: Synthetic oligonucleotide
  Antisense strand to SEQ ID NO: 1500046
ucugccauagagagaaugg

SEQ ID NO: 1500048 - RNA, 19 nt, Artificial Sequence
  Description of Artificial Sequence: Synthetic oligonucleotide
  Sense strand starting at position 3729 of SEQ ID NO: 1244587
agaucagccucuccaagau

SEQ ID NO: 1500049 - RNA, 19 nt, Artificial Sequence
  Description of Artificial Sequence: Synthetic oligonucleotide
  Antisense strand to SEQ ID NO: 1500048
aucuuggagaggcugaucu

SEQ ID NO: 1500050 - RNA, 19 nt, Artificial Sequence
  Description of Artificial Sequence: Synthetic oligonucleotide
  Sense strand starting at position 565 of SEQ ID NO: 1244588
cgcaauugccucuaaagga

SEQ ID NO: 1500051 - RNA, 19 nt, Artificial Sequence
  Description of Artificial Sequence: Synthetic oligonucleotide
  Antisense strand to SEQ ID NO: 1500050
uccuuuagaggcaauugcg

SEQ ID NO: 1500052 - RNA, 19 nt, Artificial Sequence
  Description of Artificial Sequence: Synthetic oligonucleotide
  Sense strand starting at position 644 of SEQ ID NO: 1244588
cuaccuuggcacgaacauu

SEQ ID NO: 1500053 - RNA, 19 nt, Artificial Sequence
  Description of Artificial Sequence: Synthetic oligonucleotide
  Antisense strand to SEQ ID NO: 1500052
aauguucgugccaagguag

SEQ ID NO: 1500054 - RNA, 19 nt, Artificial Sequence
  Description of Artificial Sequence: Synthetic oligonucleotide
  Sense strand starting at position 701 of SEQ ID NO: 1244588
gaaagacguccuugggaaa

SEQ ID NO: 1500055 - RNA, 19 nt, Artificial Sequence
  Description of Artificial Sequence: Synthetic oligonucleotide
  Antisense strand to SEQ ID NO: 1500054
uuucccaaggacgucuuuc

SEQ ID NO: 1500056 - RNA, 19 nt, Artificial Sequence
  Description of Artificial Sequence: Synthetic oligonucleotide
  Sense strand starting at position 814 of SEQ ID NO: 1244588
cccauuguuacguacaguu

SEQ ID NO: 1500057 - RNA, 19 nt, Artificial Sequence
  Description of Artificial Sequence: Synthetic oligonucleotide
  Antisense strand to SEQ ID NO: 1500056
aacuguacguaacaauggg

SEQ ID NO: 1500058 - RNA, 19 nt, Artificial Sequence
  Description of Artificial Sequence: Synthetic oligonucleotide
  Sense strand starting at position 2497 of SEQ ID NO: 1244588
gccagaauguaucacaaag

SEQ ID NO: 1500059 - RNA, 19 nt, Artificial Sequence
  Description of Artificial Sequence: Synthetic oligonucleotide
  Antisense strand to SEQ ID NO: 1500058
cuuugugauacauucuggc

SEQ ID NO: 1500060 - RNA, 19 nt, Artificial Sequence
  Description of Artificial Sequence: Synthetic oligonucleotide
  Sense strand starting at position 486 of SEQ ID NO: 1244589
auuuaugcuuccucgacua

SEQ ID NO: 1500061 - RNA, 19 nt, Artificial Sequence
  Description of Artificial Sequence: Synthetic oligonucleotide
  Antisense strand to SEQ ID NO: 1500060
uagucgaggaagcauaaau

SEQ ID NO: 1500062 - RNA, 19 nt, Artificial Sequence
  Description of Artificial Sequence: Synthetic oligonucleotide
  Sense strand starting at position 488 of SEQ ID NO: 1244589
uuaugcuuccucgacuaca

SEQ ID NO: 1500063 - RNA, 19 nt, Artificial Sequence
  Description of Artificial Sequence: Synthetic oligonucleotide
  Antisense strand to SEQ ID NO: 1500062
uguagucgaggaagcauaa

SEQ ID NO: 1500064 - RNA, 19 nt, Artificial Sequence
  Description of Artificial Sequence: Synthetic oligonucleotide
  Sense strand starting at position 522 of SEQ ID NO: 1244589
gacaguguggccugagaaa

SEQ ID NO: 1500065 - RNA, 19 nt, Artificial Sequence
  Description of Artificial Sequence: Synthetic oligonucleotide
  Antisense strand to SEQ ID NO: 1500064
uuucucaggccacacuguc

SEQ ID NO: 1500066 - RNA, 19 nt, Artificial Sequence
  Description of Artificial Sequence: Synthetic oligonucleotide
  Sense strand starting at position 589 of SEQ ID NO: 1244589
ugacaucacuuaucaguuu

SEQ ID NO: 1500067 - RNA, 19 nt, Artificial Sequence
  Description of Artificial Sequence: Synthetic oligonucleotide
  Antisense strand to SEQ ID NO: 1500066
aaacugauaagugauguca

SEQ ID NO: 1500068 - RNA, 19 nt, Artificial Sequence
  Description of Artificial Sequence: Synthetic oligonucleotide
  Sense strand starting at position 611 of SEQ ID NO: 1244589
auaucagugcuugaucuga

SEQ ID NO: 1500069 - RNA, 19 nt, Artificial Sequence
  Description of Artificial Sequence: Synthetic oligonucleotide
  Antisense strand to SEQ ID NO: 1500068
ucagaucaagcacugauau

SEQ ID NO: 1500070 - RNA, 19 nt, Artificial Sequence
  Description of Artificial Sequence: Synthetic oligonucleotide
  Sense strand starting at position 613 of SEQ ID NO: 1244589
aucagugcuugaucugaua

SEQ ID NO: 1500071 - RNA, 19 nt, Artificial Sequence
  Description of Artificial Sequence: Synthetic oligonucleotide
  Antisense strand to SEQ ID NO: 1500070
uaucagaucaagcacugau

SEQ ID NO: 1500072 - RNA, 19 nt, Artificial Sequence
  Description of Artificial Sequence: Synthetic oligonucleotide
  Sense strand starting at position 677 of SEQ ID NO: 1244589
gacagcauuuaggaaauga

SEQ ID NO: 1500073 - RNA, 19 nt, Artificial Sequence
  Description of Artificial Sequence: Synthetic oligonucleotide
  Antisense strand to SEQ ID NO: 1500072
ucauuuccuaaaugcuguc

SEQ ID NO: 1500074 - RNA, 19 nt, Artificial Sequence
  Description of Artificial Sequence: Synthetic oligonucleotide
  Sense strand starting at position 710 of SEQ ID NO: 1244589
gccugaaugcuggaauuag

SEQ ID NO: 1500075 - RNA, 19 nt, Artificial Sequence
  Description of Artificial Sequence: Synthetic oligonucleotide
  Antisense strand to SEQ ID NO: 1500074
cuaauuccagcauucaggc

SEQ ID NO: 1500076 - RNA, 19 nt, Artificial Sequence
  Description of Artificial Sequence: Synthetic oligonucleotide
  Sense strand starting at position 722 of SEQ ID NO: 1244589
gaauuagauugccuggguu

SEQ ID NO: 1500077 - RNA, 19 nt, Artificial Sequence
  Description of Artificial Sequence: Synthetic oligonucleotide
  Antisense strand to SEQ ID NO: 1500076
aacccaggcaaucuaauuc

SEQ ID NO: 1500078 - RNA, 19 nt, Artificial Sequence
  Description of Artificial Sequence: Synthetic oligonucleotide
  Sense strand starting at position 877 of SEQ ID NO: 1244589
uaaaguagucaauaguugu

SEQ ID NO: 1500079 - RNA, 19 nt, Artificial Sequence
  Description of Artificial Sequence: Synthetic oligonucleotide
  Antisense strand to SEQ ID NO: 1500078
acaacuauugacuacuuua

SEQ ID NO: 1500080 - RNA, 19 nt, Artificial Sequence
  Description of Artificial Sequence: Synthetic oligonucleotide
  Sense strand starting at position 888 of SEQ ID NO: 1244589
auaguuguuagugaucauu

SEQ ID NO: 1500081 - RNA, 19 nt, Artificial Sequence
  Description of Artificial Sequence: Synthetic oligonucleotide
  Antisense strand to SEQ ID NO: 1500080
aaugaucacuaacaacuau

SEQ ID NO: 1500082 - RNA, 19 nt, Artificial Sequence
  Description of Artificial Sequence: Synthetic oligonucleotide
  Sense strand starting at position 891 of SEQ ID NO: 1244589
guuguuagugaucauuauu

SEQ ID NO: 1500083 - RNA, 19 nt, Artificial Sequence
  Description of Artificial Sequence: Synthetic oligonucleotide
  Antisense strand to SEQ ID NO: 1500082
aauaaugaucacuaacaac

SEQ ID NO: 1500084 - RNA, 19 nt, Artificial Sequence
  Description of Artificial Sequence: Synthetic oligonucleotide
  Sense strand starting at position 994 of SEQ ID NO: 1244589
cgcgguaugacuuaaacag

SEQ ID NO: 1500085 - RNA, 19 nt, Artificial Sequence
  Description of Artificial Sequence: Synthetic oligonucleotide
  Antisense strand to SEQ ID NO: 1500084
cuguuuaagucauaccgcg

SEQ ID NO: 1500086 - RNA, 19 nt, Artificial Sequence
  Description of Artificial Sequence: Synthetic oligonucleotide
  Sense strand starting at position 1019 of SEQ ID NO: 1244589
cuggguccacgagacuuau

SEQ ID NO: 1500087 - RNA, 19 nt, Artificial Sequence
  Description of Artificial Sequence: Synthetic oligonucleotide
  Antisense strand to SEQ ID NO: 1500086
auaagucucguggacccag

SEQ ID NO: 1500088 - RNA, 19 nt, Artificial Sequence
  Description of Artificial Sequence: Synthetic oligonucleotide
  Sense strand starting at position 1025 of SEQ ID NO: 1244589
ccacgagacuuauucuuua

SEQ ID NO: 1500089 - RNA, 19 nt, Artificial Sequence
  Description of Artificial Sequence: Synthetic oligonucleotide
  Antisense strand to SEQ ID NO: 1500088
uaaagaauaagucucgugg

SEQ ID NO: 1500090 - RNA, 19 nt, Artificial Sequence
  Description of Artificial Sequence: Synthetic oligonucleotide
  Sense strand starting at position 1028 of SEQ ID NO: 1244589
cgagacuuauucuuuagag

SEQ ID NO: 1500091 - RNA, 19 nt, Artificial Sequence
  Description of Artificial Sequence: Synthetic oligonucleotide
  Antisense strand to SEQ ID NO: 1500090
cucuaaagaauaagucucg

SEQ ID NO: 1500092 - RNA, 19 nt, Artificial Sequence
  Description of Artificial Sequence: Synthetic oligonucleotide
  Sense strand starting at position 1037 of SEQ ID NO: 1244589
uucuuuagaggcgaauuga

SEQ ID NO: 1500093 - RNA, 19 nt, Artificial Sequence
  Description of Artificial Sequence: Synthetic oligonucleotide
  Antisense strand to SEQ ID NO: 1500092
ucaauucgccucuaaagaa

SEQ ID NO: 1500094 - RNA, 19 nt, Artificial Sequence
  Description of Artificial Sequence: Synthetic oligonucleotide
  Sense strand starting at position 1177 of SEQ ID NO: 1244589
cucauauuuguaugucuca

SEQ ID NO: 1500095 - RNA, 19 nt, Artificial Sequence
  Description of Artificial Sequence: Synthetic oligonucleotide
  Antisense strand to SEQ ID NO: 1500094
ugagacauacaaauaugag

SEQ ID NO: 1500096 - RNA, 19 nt, Artificial Sequence
  Description of Artificial Sequence: Synthetic oligonucleotide
  Sense strand starting at position 1215 of SEQ ID NO: 1244589
ugcaaugcucuggaauaug

SEQ ID NO: 1500097 - RNA, 19 nt, Artificial Sequence
  Description of Artificial Sequence: Synthetic oligonucleotide
  Antisense strand to SEQ ID NO: 1500096
cauauuccagagcauugca

SEQ ID NO: 1500098 - RNA, 19 nt, Artificial Sequence
  Description of Artificial Sequence: Synthetic oligonucleotide
  Sense strand starting at position 1257 of SEQ ID NO: 1244589
uacguaagagaauauucuu

SEQ ID NO: 1500099 - RNA, 19 nt, Artificial Sequence
  Description of Artificial Sequence: Synthetic oligonucleotide
  Antisense strand to SEQ ID NO: 1500098
aagaauauucucuuacgua

SEQ ID NO: 1500100 - RNA, 19 nt, Artificial Sequence
  Description of Artificial Sequence: Synthetic oligonucleotide
  Sense strand starting at position 1260 of SEQ ID NO: 1244589
guaagagaauauucuuucu

SEQ ID NO: 1500101 - RNA, 19 nt, Artificial Sequence
  Description of Artificial Sequence: Synthetic oligonucleotide
  Antisense strand to SEQ ID NO: 1500100
agaaagaauauucucuuac

SEQ ID NO: 1500102 - RNA, 19 nt, Artificial Sequence
  Description of Artificial Sequence: Synthetic oligonucleotide
  Sense strand starting at position 1468 of SEQ ID NO: 1244589
agauaucaguucucucauc

SEQ ID NO: 1500103 - RNA, 19 nt, Artificial Sequence
  Description of Artificial Sequence: Synthetic oligonucleotide
  Antisense strand to SEQ ID NO: 1500102
gaugagagaacugauaucu

SEQ ID NO: 1500104 - RNA, 19 nt, Artificial Sequence
  Description of Artificial Sequence: Synthetic oligonucleotide
  Sense strand starting at position 1516 of SEQ ID NO: 1244589
cggguugaggguuaaauga

SEQ ID NO: 1500105 - RNA, 19 nt, Artificial Sequence
  Description of Artificial Sequence: Synthetic oligonucleotide
  Antisense strand to SEQ ID NO: 1500104
ucauuuaacccucaacccg

SEQ ID NO: 1500106 - RNA, 19 nt, Artificial Sequence
  Description of Artificial Sequence: Synthetic oligonucleotide
  Sense strand starting at position 1518 of SEQ ID NO: 1244589
gguugaggguuaaaugaga

SEQ ID NO: 1500107 - RNA, 19 nt, Artificial Sequence
  Description of Artificial Sequence: Synthetic oligonucleotide
  Antisense strand to SEQ ID NO: 1500106
ucucauuuaacccucaacc

SEQ ID NO: 1500108 - RNA, 19 nt, Artificial Sequence
  Description of Artificial Sequence: Synthetic oligonucleotide
  Sense strand starting at position 1681 of SEQ ID NO: 1244589
gcagaaucuaacggagacu

SEQ ID NO: 1500109 - RNA, 19 nt, Artificial Sequence
  Description of Artificial Sequence: Synthetic oligonucleotide
  Antisense strand to SEQ ID NO: 1500108
agucuccguuagauucugc

SEQ ID NO: 1500110 - RNA, 19 nt, Artificial Sequence
  Description of Artificial Sequence: Synthetic oligonucleotide
  Sense strand starting at position 2061 of SEQ ID NO: 1244589
agcuuugcgcagucuugua

SEQ ID NO: 1500111 - RNA, 19 nt, Artificial Sequence
  Description of Artificial Sequence: Synthetic oligonucleotide
  Antisense strand to SEQ ID NO: 1500110
uacaagacugcgcaaagcu

SEQ ID NO: 1500112 - RNA, 19 nt, Artificial Sequence
  Description of Artificial Sequence: Synthetic oligonucleotide
  Sense strand starting at position 2063 of SEQ ID NO: 1244589
cuuugcgcagucuuguaaa

SEQ ID NO: 1500113 - RNA, 19 nt, Artificial Sequence
  Description of Artificial Sequence: Synthetic oligonucleotide
  Antisense strand to SEQ ID NO: 1500112
uuuacaagacugcgcaaag

SEQ ID NO: 1500114 - RNA, 19 nt, Artificial Sequence
  Description of Artificial Sequence: Synthetic oligonucleotide
  Sense strand starting at position 2065 of SEQ ID NO: 1244589
uugcgcagucuuguaaauu

SEQ ID NO: 1500115 - RNA, 19 nt, Artificial Sequence
  Description of Artificial Sequence: Synthetic oligonucleotide
  Antisense strand to SEQ ID NO: 1500114
aauuuacaagacugcgcaa

SEQ ID NO: 1500116 - RNA, 19 nt, Artificial Sequence
  Description of Artificial Sequence: Synthetic oligonucleotide
  Sense strand starting at position 2256 of SEQ ID NO: 1244589
gccucagagucauuaauag

SEQ ID NO: 1500117 - RNA, 19 nt, Artificial Sequence
  Description of Artificial Sequence: Synthetic oligonucleotide
  Antisense strand to SEQ ID NO: 1500116
cuauuaaugacucugaggc

SEQ ID NO: 1500118 - RNA, 19 nt, Artificial Sequence
  Description of Artificial Sequence: Synthetic oligonucleotide
  Sense strand starting at position 2276 of SEQ ID NO: 1244589
aaugaucucgagugggagu

SEQ ID NO: 1500119 - RNA, 19 nt, Artificial Sequence
  Description of Artificial Sequence: Synthetic oligonucleotide
  Antisense strand to SEQ ID NO: 1500118
acucccacucgagaucauu

SEQ ID NO: 1500120 - RNA, 19 nt, Artificial Sequence
  Description of Artificial Sequence: Synthetic oligonucleotide
  Sense strand starting at position 2277 of SEQ ID NO: 1244589
augaucucgagugggagua

SEQ ID NO: 1500121 - RNA, 19 nt, Artificial Sequence
  Description of Artificial Sequence: Synthetic oligonucleotide
  Antisense strand to SEQ ID NO: 1500120
uacucccacucgagaucau

SEQ ID NO: 1500122 - RNA, 19 nt, Artificial Sequence
  Description of Artificial Sequence: Synthetic oligonucleotide
  Sense strand starting at position 2287 of SEQ ID NO: 1244589
gugggaguagugagcguaa

SEQ ID NO: 1500123 - RNA, 19 nt, Artificial Sequence
  Description of Artificial Sequence: Synthetic oligonucleotide
  Antisense strand to SEQ ID NO: 1500122
uuacgcucacuacucccac

SEQ ID NO: 1500124 - RNA, 19 nt, Artificial Sequence
  Description of Artificial Sequence: Synthetic oligonucleotide
  Sense strand starting at position 2756 of SEQ ID NO: 1244589
agugaccgccucuaaauua

SEQ ID NO: 1500125 - RNA, 19 nt, Artificial Sequence
  Description of Artificial Sequence: Synthetic oligonucleotide
  Antisense strand to SEQ ID NO: 1500124
uaauuuagaggcggucacu

SEQ ID NO: 1500126 - RNA, 19 nt, Artificial Sequence
  Description of Artificial Sequence: Synthetic oligonucleotide
  Sense strand starting at position 2799 of SEQ ID NO: 1244589
caguuuagaaggugguuua

SEQ ID NO: 1500127 - RNA, 19 nt, Artificial Sequence
  Description of Artificial Sequence: Synthetic oligonucleotide
  Antisense strand to SEQ ID NO: 1500126
uaaaccaccuucuaaacug

SEQ ID NO: 1500128 - RNA, 19 nt, Artificial Sequence
  Description of Artificial Sequence: Synthetic oligonucleotide
  Sense strand starting at position 2800 of SEQ ID NO: 1244589
aguuuagaaggugguuuau

SEQ ID NO: 1500129 - RNA, 19 nt, Artificial Sequence
  Description of Artificial Sequence: Synthetic oligonucleotide
  Antisense strand to SEQ ID NO: 1500128
auaaaccaccuucuaaacu

SEQ ID NO: 1500130 - RNA, 19 nt, Artificial Sequence
  Description of Artificial Sequence: Synthetic oligonucleotide
  Sense strand starting at position 3299 of SEQ ID NO: 1244589
uguugagcacuuuagcaaa

SEQ ID NO: 1500131 - RNA, 19 nt, Artificial Sequence
  Description of Artificial Sequence: Synthetic oligonucleotide
  Antisense strand to SEQ ID NO: 1500130
uuugcuaaagugcucaaca

SEQ ID NO: 1500132 - RNA, 19 nt, Artificial Sequence
  Description of Artificial Sequence: Synthetic oligonucleotide
  Sense strand starting at position 3369 of SEQ ID NO: 1244589
ggaagcucagcauauaguu

SEQ ID NO: 1500133 - RNA, 19 nt, Artificial Sequence
  Description of Artificial Sequence: Synthetic oligonucleotide
  Antisense strand to SEQ ID NO: 1500132
aacuauaugcugagcuucc

SEQ ID NO: 1500134 - RNA, 19 nt, Artificial Sequence
  Description of Artificial Sequence: Synthetic oligonucleotide
  Sense strand starting at position 3479 of SEQ ID NO: 1244589
ucucuuugagcucaugagu

SEQ ID NO: 1500135 - RNA, 19 nt, Artificial Sequence
  Description of Artificial Sequence: Synthetic oligonucleotide
  Antisense strand to SEQ ID NO: 1500134
acucaugagcucaaagaga

SEQ ID NO: 1500136 - RNA, 19 nt, Artificial Sequence
  Description of Artificial Sequence: Synthetic oligonucleotide
  Sense strand starting at position 3900 of SEQ ID NO: 1244589
gucuauauuugagcgcuca

SEQ ID NO: 1500137 - RNA, 19 nt, Artificial Sequence
  Description of Artificial Sequence: Synthetic oligonucleotide
  Antisense strand to SEQ ID NO: 1500136
ugagcgcucaaauauagac

SEQ ID NO: 1500138 - RNA, 19 nt, Artificial Sequence
  Description of Artificial Sequence: Synthetic oligonucleotide
  Sense strand starting at position 3974 of SEQ ID NO: 1244589
ccagauucuugggugaaga

SEQ ID NO: 1500139 - RNA, 19 nt, Artificial Sequence
  Description of Artificial Sequence: Synthetic oligonucleotide
  Antisense strand to SEQ ID NO: 1500138
ucuucacccaagaaucugg

SEQ ID NO: 1500140 - RNA, 19 nt, Artificial Sequence
  Description of Artificial Sequence: Synthetic oligonucleotide
  Sense strand starting at position 48 of SEQ ID NO: 1244590
gcuaaacucaaguaggguu

SEQ ID NO: 1500141 - RNA, 19 nt, Artificial Sequence
  Description of Artificial Sequence: Synthetic oligonucleotide
  Antisense strand to SEQ ID NO: 1500140
aacccuacuugaguuuagc

SEQ ID NO: 1500142 - RNA, 19 nt, Artificial Sequence
  Description of Artificial Sequence: Synthetic oligonucleotide
  Sense strand starting at position 61 of SEQ ID NO: 1244590
aggguuaauuaucucuaac

SEQ ID NO: 1500143 - RNA, 19 nt, Artificial Sequence
  Description of Artificial Sequence: Synthetic oligonucleotide
  Antisense strand to SEQ ID NO: 1500142
guuagagauaauuaacccu

SEQ ID NO: 1500144 - RNA, 19 nt, Artificial Sequence
  Description of Artificial Sequence: Synthetic oligonucleotide
  Sense strand starting at position 63 of SEQ ID NO: 1244590
gguuaauuaucucuaacug

SEQ ID NO: 1500145 - RNA, 19 nt, Artificial Sequence
  Description of Artificial Sequence: Synthetic oligonucleotide
  Antisense strand to SEQ ID NO: 1500144
caguuagagauaauuaacc

SEQ ID NO: 1500146 - RNA, 19 nt, Artificial Sequence
  Description of Artificial Sequence: Synthetic oligonucleotide
  Sense strand starting at position 64 of SEQ ID NO: 1244590
guuaauuaucucuaacugg

SEQ ID NO: 1500147 - RNA, 19 nt, Artificial Sequence
  Description of Artificial Sequence: Synthetic oligonucleotide
  Antisense strand to SEQ ID NO: 1500146
ccaguuagagauaauuaac

SEQ ID NO: 1500148 - RNA, 19 nt, Artificial Sequence
  Description of Artificial Sequence: Synthetic oligonucleotide
  Sense strand starting at position 79 of SEQ ID NO: 1244590
cugguagagucacugaaga

SEQ ID NO: 1500149 - RNA, 19 nt, Artificial Sequence
  Description of Artificial Sequence: Synthetic oligonucleotide
  Antisense strand to SEQ ID NO: 1500148
ucuucagugacucuaccag

SEQ ID NO: 1500150 - RNA, 19 nt, Artificial Sequence
  Description of Artificial Sequence: Synthetic oligonucleotide
  Sense strand starting at position 113 of SEQ ID NO: 1244590
acagguaaugccugcacau

SEQ ID NO: 1500151 - RNA, 19 nt, Artificial Sequence
  Description of Artificial Sequence: Synthetic oligonucleotide
  Antisense strand to SEQ ID NO: 1500150
augugcaggcauuaccugu

SEQ ID NO: 1500152 - RNA, 19 nt, Artificial Sequence
  Description of Artificial Sequence: Synthetic oligonucleotide
  Sense strand starting at position 226 of SEQ ID NO: 1244590
gcuuguguuauaggacaau

SEQ ID NO: 1500153 - RNA, 19 nt, Artificial Sequence
  Description of Artificial Sequence: Synthetic oligonucleotide
  Antisense strand to SEQ ID NO: 1500152
auuguccuauaacacaagc

SEQ ID NO: 1500154 - RNA, 19 nt, Artificial Sequence
  Description of Artificial Sequence: Synthetic oligonucleotide
  Sense strand starting at position 235 of SEQ ID NO: 1244590
auaggacaaugcuucucaa

SEQ ID NO: 1500155 - RNA, 19 nt, Artificial Sequence
  Description of Artificial Sequence: Synthetic oligonucleotide
  Antisense strand to SEQ ID NO: 1500154
uugagaagcauuguccuau

SEQ ID NO: 1500156 - RNA, 19 nt, Artificial Sequence
  Description of Artificial Sequence: Synthetic oligonucleotide
  Sense strand starting at position 285 of SEQ ID NO: 1244590
uagccaugucaggagacau

SEQ ID NO: 1500157 - RNA, 19 nt, Artificial Sequence
  Description of Artificial Sequence: Synthetic oligonucleotide
  Antisense strand to SEQ ID NO: 1500156
augucuccugacauggcua

SEQ ID NO: 1500158 - RNA, 19 nt, Artificial Sequence
  Description of Artificial Sequence: Synthetic oligonucleotide
  Sense strand starting at position 462 of SEQ ID NO: 1244590
ccauaacccuguuauagga

SEQ ID NO: 1500159 - RNA, 19 nt, Artificial Sequence
  Description of Artificial Sequence: Synthetic oligonucleotide
  Antisense strand to SEQ ID NO: 1500158
uccuauaacaggguuaugg

SEQ ID NO: 1500160 - RNA, 19 nt, Artificial Sequence
  Description of Artificial Sequence: Synthetic oligonucleotide
  Sense strand starting at position 464 of SEQ ID NO: 1244590
auaacccuguuauaggaua

SEQ ID NO: 1500161 - RNA, 19 nt, Artificial Sequence
  Description of Artificial Sequence: Synthetic oligonucleotide
  Antisense strand to SEQ ID NO: 1500160
uauccuauaacaggguuau

SEQ ID NO: 1500162 - RNA, 19 nt, Artificial Sequence
  Description of Artificial Sequence: Synthetic oligonucleotide
  Sense strand starting at position 665 of SEQ ID NO: 1244590
gucuucaguuccucguaga

SEQ ID NO: 1500163 - RNA, 19 nt, Artificial Sequence
  Description of Artificial Sequence: Synthetic oligonucleotide
  Antisense strand to SEQ ID NO: 1500162
ucuacgaggaacugaagac

SEQ ID NO: 1500164 - RNA, 19 nt, Artificial Sequence
  Description of Artificial Sequence: Synthetic oligonucleotide
  Sense strand starting at position 776 of SEQ ID NO: 1244590
gcaacaaauugcccguaga

SEQ ID NO: 1500165 - RNA, 19 nt, Artificial Sequence
  Description of Artificial Sequence: Synthetic oligonucleotide
  Antisense strand to SEQ ID NO: 1500164
ucuacgggcaauuuguugc

SEQ ID NO: 1500166 - RNA, 19 nt, Artificial Sequence
  Description of Artificial Sequence: Synthetic oligonucleotide
  Sense strand starting at position 1212 of SEQ ID NO: 1244590
agguuuggaauguggagau

SEQ ID NO: 1500167 - RNA, 19 nt, Artificial Sequence
  Description of Artificial Sequence: Synthetic oligonucleotide
  Antisense strand to SEQ ID NO: 1500166
aucuccacauuccaaaccu

SEQ ID NO: 1500168 - RNA, 19 nt, Artificial Sequence
  Description of Artificial Sequence: Synthetic oligonucleotide
  Sense strand starting at position 1232 of SEQ ID NO: 1244590
aggagcucaccuuguaaga

SEQ ID NO: 1500169 - RNA, 19 nt, Artificial Sequence
  Description of Artificial Sequence: Synthetic oligonucleotide
  Antisense strand to SEQ ID NO: 1500168
ucuuacaaggugagcuccu

SEQ ID NO: 1500170 - RNA, 19 nt, Artificial Sequence
  Description of Artificial Sequence: Synthetic oligonucleotide
  Sense strand starting at position 1273 of SEQ ID NO: 1244590
ucuuccaggucugcagaaa

SEQ ID NO: 1500171 - RNA, 19 nt, Artificial Sequence
  Description of Artificial Sequence: Synthetic oligonucleotide
  Antisense strand to SEQ ID NO: 1500170
uuucugcagaccuggaaga

SEQ ID NO: 1500172 - RNA, 19 nt, Artificial Sequence
  Description of Artificial Sequence: Synthetic oligonucleotide
  Sense strand starting at position 1414 of SEQ ID NO: 1244590
ucaggaggccagugugaaa

SEQ ID NO: 1500173 - RNA, 19 nt, Artificial Sequence
  Description of Artificial Sequence: Synthetic oligonucleotide
  Antisense strand to SEQ ID NO: 1500172
uuucacacuggccuccuga

SEQ ID NO: 1500174 - RNA, 19 nt, Artificial Sequence
  Description of Artificial Sequence: Synthetic oligonucleotide
  Sense strand starting at position 1681 of SEQ ID NO: 1244590
uccugagaagcuggaucau

SEQ ID NO: 1500175 - RNA, 19 nt, Artificial Sequence
  Description of Artificial Sequence: Synthetic oligonucleotide
  Antisense strand to SEQ ID NO: 1500174
augauccagcuucucagga

SEQ ID NO: 1500176 - RNA, 19 nt, Artificial Sequence
  Description of Artificial Sequence: Synthetic oligonucleotide
  Sense strand starting at position 1692 of SEQ ID NO: 1244590
uggaucaucuccucgguaa

SEQ ID NO: 1500177 - RNA, 19 nt, Artificial Sequence
  Description of Artificial Sequence: Synthetic oligonucleotide
  Antisense strand to SEQ ID NO: 1500176
uuaccgaggagaugaucca

SEQ ID NO: 1500178 - RNA, 19 nt, Artificial Sequence
  Description of Artificial Sequence: Synthetic oligonucleotide
  Sense strand starting at position 1693 of SEQ ID NO: 1244590
ggaucaucuccucgguaag

SEQ ID NO: 1500179 - RNA, 19 nt, Artificial Sequence
  Description of Artificial Sequence: Synthetic oligonucleotide
  Antisense strand to SEQ ID NO: 1500178
cuuaccgaggagaugaucc

SEQ ID NO: 1500180 - RNA, 19 nt, Artificial Sequence
  Description of Artificial Sequence: Synthetic oligonucleotide
  Sense strand starting at position 2275 of SEQ ID NO: 1244590
gggagcuuacugugagcaa

SEQ ID NO: 1500181 - RNA, 19 nt, Artificial Sequence
  Description of Artificial Sequence: Synthetic oligonucleotide
  Antisense strand to SEQ ID NO: 1500180
uugcucacaguaagcuccc

SEQ ID NO: 1500182 - RNA, 19 nt, Artificial Sequence
  Description of Artificial Sequence: Synthetic oligonucleotide
  Sense strand starting at position 2339 of SEQ ID NO: 1244590
cagauuauacgacaggugu

SEQ ID NO: 1500183 - RNA, 19 nt, Artificial Sequence
  Description of Artificial Sequence: Synthetic oligonucleotide
  Antisense strand to SEQ ID NO: 1500182
acaccugucguauaaucug

SEQ ID NO: 1500184 - RNA, 19 nt, Artificial Sequence
  Description of Artificial Sequence: Synthetic oligonucleotide
  Sense strand starting at position 2341 of SEQ ID NO: 1244590
gauuauacgacagguguca

SEQ ID NO: 1500185 - RNA, 19 nt, Artificial Sequence
  Description of Artificial Sequence: Synthetic oligonucleotide
  Antisense strand to SEQ ID NO: 1500184
ugacaccugucguauaauc

SEQ ID NO: 1500186 - RNA, 19 nt, Artificial Sequence
  Description of Artificial Sequence: Synthetic oligonucleotide
  Sense strand starting at position 2584 of SEQ ID NO: 1244590
uguagagguuucgccucua

SEQ ID NO: 1500187 - RNA, 19 nt, Artificial Sequence
  Description of Artificial Sequence: Synthetic oligonucleotide
  Antisense strand to SEQ ID NO: 1500186
uagaggcgaaaccucuaca

SEQ ID NO: 1500188 - RNA, 19 nt, Artificial Sequence
  Description of Artificial Sequence: Synthetic oligonucleotide
  Sense strand starting at position 2755 of SEQ ID NO: 1244590
gcaagaaaccuugguuaua

SEQ ID NO: 1500189 - RNA, 19 nt, Artificial Sequence
  Description of Artificial Sequence: Synthetic oligonucleotide
  Antisense strand to SEQ ID NO: 1500188
uauaaccaagguuucuugc

SEQ ID NO: 1500190 - RNA, 19 nt, Artificial Sequence
  Description of Artificial Sequence: Synthetic oligonucleotide
  Sense strand starting at position 2827 of SEQ ID NO: 1244590
ccucauccauaggaagaaa

SEQ ID NO: 1500191 - RNA, 19 nt, Artificial Sequence
  Description of Artificial Sequence: Synthetic oligonucleotide
  Antisense strand to SEQ ID NO: 1500190
uuucuuccuauggaugagg

SEQ ID NO: 1500192 - RNA, 19 nt, Artificial Sequence
  Description of Artificial Sequence: Synthetic oligonucleotide
  Sense strand starting at position 2869 of SEQ ID NO: 1244590
ucacaaaucugugagggag

SEQ ID NO: 1500193 - RNA, 19 nt, Artificial Sequence
  Description of Artificial Sequence: Synthetic oligonucleotide
  Antisense strand to SEQ ID NO: 1500192
cucccucacagauuuguga

SEQ ID NO: 1500194 - RNA, 19 nt, Artificial Sequence
  Description of Artificial Sequence: Synthetic oligonucleotide
  Sense strand starting at position 3075 of SEQ ID NO: 1244590
uaaggugguuucucugaga

SEQ ID NO: 1500195 - RNA, 19 nt, Artificial Sequence
  Description of Artificial Sequence: Synthetic oligonucleotide
  Antisense strand to SEQ ID NO: 1500194
ucucagagaaaccaccuua

SEQ ID NO: 1500196 - RNA, 19 nt, Artificial Sequence
  Description of Artificial Sequence: Synthetic oligonucleotide
  Sense strand starting at position 3156 of SEQ ID NO: 1244590
caggaaaguacuugggagu

SEQ ID NO: 1500197 - RNA, 19 nt, Artificial Sequence
  Description of Artificial Sequence: Synthetic oligonucleotide
  Antisense strand to SEQ ID NO: 1500196
acucccaaguacuuuccug

SEQ ID NO: 1500198 - RNA, 19 nt, Artificial Sequence
  Description of Artificial Sequence: Synthetic oligonucleotide
  Sense strand starting at position 3193 of SEQ ID NO: 1244590
gaauucuagcagugaaguc

SEQ ID NO: 1500199 - RNA, 19 nt, Artificial Sequence
  Description of Artificial Sequence: Synthetic oligonucleotide
  Antisense strand to SEQ ID NO: 1500198
gacuucacugcuagaauuc

SEQ ID NO: 1500200 - RNA, 19 nt, Artificial Sequence
  Description of Artificial Sequence: Synthetic oligonucleotide
  Sense strand starting at position 3200 of SEQ ID NO: 1244590
agcagugaagucugaucau

SEQ ID NO: 1500201 - RNA, 19 nt, Artificial Sequence
  Description of Artificial Sequence: Synthetic oligonucleotide
  Antisense strand to SEQ ID NO: 1500200
augaucagacuucacugcu

SEQ ID NO: 1500202 - RNA, 19 nt, Artificial Sequence
  Description of Artificial Sequence: Synthetic oligonucleotide
  Sense strand starting at position 3203 of SEQ ID NO: 1244590
agugaagucugaucauaug

SEQ ID NO: 1500203 - RNA, 19 nt, Artificial Sequence
  Description of Artificial Sequence: Synthetic oligonucleotide
  Antisense strand to SEQ ID NO: 1500202
cauaugaucagacuucacu

SEQ ID NO: 1500204 - RNA, 19 nt, Artificial Sequence
  Description of Artificial Sequence: Synthetic oligonucleotide
  Sense strand starting at position 3213 of SEQ ID NO: 1244590
gaucauaugugagccauga

SEQ ID NO: 1500205 - RNA, 19 nt, Artificial Sequence
  Description of Artificial Sequence: Synthetic oligonucleotide
  Antisense strand to SEQ ID NO: 1500204
ucauggcucacauaugauc

SEQ ID NO: 1500206 - RNA, 19 nt, Artificial Sequence
  Description of Artificial Sequence: Synthetic oligonucleotide
  Sense strand starting at position 3309 of SEQ ID NO: 1244590
uagagagccuuagcuucua

SEQ ID NO: 1500207 - RNA, 19 nt, Artificial Sequence
  Description of Artificial Sequence: Synthetic oligonucleotide
  Antisense strand to SEQ ID NO: 1500206
uagaagcuaaggcucucua

SEQ ID NO: 1500208 - RNA, 19 nt, Artificial Sequence
  Description of Artificial Sequence: Synthetic oligonucleotide
  Sense strand starting at position 3320 of SEQ ID NO: 1244590
agcuucuacggacaaaguu

SEQ ID NO: 1500209 - RNA, 19 nt, Artificial Sequence
  Description of Artificial Sequence: Synthetic oligonucleotide
  Antisense strand to SEQ ID NO: 1500208
aacuuuguccguagaagcu

SEQ ID NO: 1500210 - RNA, 19 nt, Artificial Sequence
  Description of Artificial Sequence: Synthetic oligonucleotide
  Sense strand starting at position 3500 of SEQ ID NO: 1244590
cugccaucaccauggagua

SEQ ID NO: 1500211 - RNA, 19 nt, Artificial Sequence
  Description of Artificial Sequence: Synthetic oligonucleotide
  Antisense strand to SEQ ID NO: 1500210
uacuccauggugauggcag

SEQ ID NO: 1500212 - RNA, 19 nt, Artificial Sequence
  Description of Artificial Sequence: Synthetic oligonucleotide
  Sense strand starting at position 3501 of SEQ ID NO: 1244590
ugccaucaccauggaguau

SEQ ID NO: 1500213 - RNA, 19 nt, Artificial Sequence
  Description of Artificial Sequence: Synthetic oligonucleotide
  Antisense strand to SEQ ID NO: 1500212
auacuccauggugauggca

SEQ ID NO: 1500214 - RNA, 19 nt, Artificial Sequence
  Description of Artificial Sequence: Synthetic oligonucleotide
  Sense strand starting at position 3675 of SEQ ID NO: 1244590
auuguuacacucugugaug

SEQ ID NO: 1500215 - RNA, 19 nt, Artificial Sequence
  Description of Artificial Sequence: Synthetic oligonucleotide
  Antisense strand to SEQ ID NO: 1500214
caucacagaguguaacaau

SEQ ID NO: 1500216 - RNA, 19 nt, Artificial Sequence
  Description of Artificial Sequence: Synthetic oligonucleotide
  Sense strand starting at position 3676 of SEQ ID NO: 1244590
uuguuacacucugugauga

SEQ ID NO: 1500217 - RNA, 19 nt, Artificial Sequence
  Description of Artificial Sequence: Synthetic oligonucleotide
  Antisense strand to SEQ ID NO: 1500216
ucaucacagaguguaacaa

SEQ ID NO: 1500218 - RNA, 19 nt, Artificial Sequence
  Description of Artificial Sequence: Synthetic oligonucleotide
  Sense strand starting at position 3677 of SEQ ID NO: 1244590
uguuacacucugugaugau

SEQ ID NO: 1500219 - RNA, 19 nt, Artificial Sequence
  Description of Artificial Sequence: Synthetic oligonucleotide
  Antisense strand to SEQ ID NO: 1500218
aucaucacagaguguaaca

SEQ ID NO: 1500220 - RNA, 19 nt, Artificial Sequence
  Description of Artificial Sequence: Synthetic oligonucleotide
  Sense strand starting at position 106 of SEQ ID NO: 1244591
cgaggacuguauggagaau

SEQ ID NO: 1500221 - RNA, 19 nt, Artificial Sequence
  Description of Artificial Sequence: Synthetic oligonucleotide
  Antisense strand to SEQ ID NO: 1500220
auucuccauacaguccucg

SEQ ID NO: 1500222 - RNA, 19 nt, Artificial Sequence
  Description of Artificial Sequence: Synthetic oligonucleotide
  Sense strand starting at position 344 of SEQ ID NO: 1244591
auguaaugcccuugaauuc

SEQ ID NO: 1500223 - RNA, 19 nt, Artificial Sequence
  Description of Artificial Sequence: Synthetic oligonucleotide
  Antisense strand to SEQ ID NO: 1500222
gaauucaagggcauuacau

SEQ ID NO: 1500224 - RNA, 19 nt, Artificial Sequence
  Description of Artificial Sequence: Synthetic oligonucleotide
  Sense strand starting at position 345 of SEQ ID NO: 1244591
uguaaugcccuugaauucu

SEQ ID NO: 1500225 - RNA, 19 nt, Artificial Sequence
  Description of Artificial Sequence: Synthetic oligonucleotide
  Antisense strand to SEQ ID NO: 1500224
agaauucaagggcauuaca

SEQ ID NO: 1500226 - RNA, 19 nt, Artificial Sequence
  Description of Artificial Sequence: Synthetic oligonucleotide
  Sense strand starting at position 368 of SEQ ID NO: 1244591
acacuacugcauuggaaag

SEQ ID NO: 1500227 - RNA, 19 nt, Artificial Sequence
  Description of Artificial Sequence: Synthetic oligonucleotide
  Antisense strand to SEQ ID NO: 1500226
cuuuccaaugcaguagugu

SEQ ID NO: 1500228 - RNA, 19 nt, Artificial Sequence
  Description of Artificial Sequence: Synthetic oligonucleotide
  Sense strand starting at position 406 of SEQ ID NO: 1244591
gacaguauuggugggagga

SEQ ID NO: 1500229 - RNA, 19 nt, Artificial Sequence
  Description of Artificial Sequence: Synthetic oligonucleotide
  Antisense strand to SEQ ID NO: 1500228
uccucccaccaauacuguc

SEQ ID NO: 1500230 - RNA, 19 nt, Artificial Sequence
  Description of Artificial Sequence: Synthetic oligonucleotide
  Sense strand starting at position 407 of SEQ ID NO: 1244591
acaguauuggugggaggaa

SEQ ID NO: 1500231 - RNA, 19 nt, Artificial Sequence
  Description of Artificial Sequence: Synthetic oligonucleotide
  Antisense strand to SEQ ID NO: 1500230
uuccucccaccaauacugu

SEQ ID NO: 1500232 - RNA, 19 nt, Artificial Sequence
  Description of Artificial Sequence: Synthetic oligonucleotide
  Sense strand starting at position 2359 of SEQ ID NO: 1244591
uucuuugcaguuugagaaa

SEQ ID NO: 1500233 - RNA, 19 nt, Artificial Sequence
  Description of Artificial Sequence: Synthetic oligonucleotide
  Antisense strand to SEQ ID NO: 1500232
uuucucaaacugcaaagaa

SEQ ID NO: 1500234 - RNA, 19 nt, Artificial Sequence
  Description of Artificial Sequence: Synthetic oligonucleotide
  Sense strand starting at position 2362 of SEQ ID NO: 1244591
uuugcaguuugagaaacau

SEQ ID NO: 1500235 - RNA, 19 nt, Artificial Sequence
  Description of Artificial Sequence: Synthetic oligonucleotide
  Antisense strand to SEQ ID NO: 1500234
auguuucucaaacugcaaa

SEQ ID NO: 1500236 - RNA, 19 nt, Artificial Sequence
  Description of Artificial Sequence: Synthetic oligonucleotide
  Sense strand starting at position 2435 of SEQ ID NO: 1244591
gcaccuugcugagucuuga

SEQ ID NO: 1500237 - RNA, 19 nt, Artificial Sequence
  Description of Artificial Sequence: Synthetic oligonucleotide
  Antisense strand to SEQ ID NO: 1500236
ucaagacucagcaaggugc

SEQ ID NO: 1500238 - RNA, 19 nt, Artificial Sequence
  Description of Artificial Sequence: Synthetic oligonucleotide
  Sense strand starting at position 2521 of SEQ ID NO: 1244591
gcaaacaaaugcuuagaua

SEQ ID NO: 1500239 - RNA, 19 nt, Artificial Sequence
  Description of Artificial Sequence: Synthetic oligonucleotide
  Antisense strand to SEQ ID NO: 1500238
uaucuaagcauuuguuugc

SEQ ID NO: 1500240 - RNA, 19 nt, Artificial Sequence
  Description of Artificial Sequence: Synthetic oligonucleotide
  Sense strand starting at position 2530 of SEQ ID NO: 1244591
ugcuuagauacaugacgaa

SEQ ID NO: 1500241 - RNA, 19 nt, Artificial Sequence
  Description of Artificial Sequence: Synthetic oligonucleotide
  Antisense strand to SEQ ID NO: 1500240
uucgucauguaucuaagca

SEQ ID NO: 1500242 - RNA, 19 nt, Artificial Sequence
  Description of Artificial Sequence: Synthetic oligonucleotide
  Sense strand starting at position 2533 of SEQ ID NO: 1244591
uuagauacaugacgaagau

SEQ ID NO: 1500243 - RNA, 19 nt, Artificial Sequence
  Description of Artificial Sequence: Synthetic oligonucleotide
  Antisense strand to SEQ ID NO: 1500242
aucuucgucauguaucuaa

SEQ ID NO: 1500244 - RNA, 19 nt, Artificial Sequence
  Description of Artificial Sequence: Synthetic oligonucleotide
  Sense strand starting at position 2561 of SEQ ID NO: 1244591
gcaguaagugcuaggacga

SEQ ID NO: 1500245 - RNA, 19 nt, Artificial Sequence
  Description of Artificial Sequence: Synthetic oligonucleotide
  Antisense strand to SEQ ID NO: 1500244
ucguccuagcacuuacugc

SEQ ID NO: 1500246 - RNA, 19 nt, Artificial Sequence
  Description of Artificial Sequence: Synthetic oligonucleotide
  Sense strand starting at position 2562 of SEQ ID NO: 1244591
caguaagugcuaggacgaa

SEQ ID NO: 1500247 - RNA, 19 nt, Artificial Sequence
  Description of Artificial Sequence: Synthetic oligonucleotide
  Antisense strand to SEQ ID NO: 1500246
uucguccuagcacuuacug

SEQ ID NO: 1500248 - RNA, 19 nt, Artificial Sequence
  Description of Artificial Sequence: Synthetic oligonucleotide
  Sense strand starting at position 2631 of SEQ ID NO: 1244591
ggaggccugucugugcaaa

SEQ ID NO: 1500249 - RNA, 19 nt, Artificial Sequence
  Description of Artificial Sequence: Synthetic oligonucleotide
  Antisense strand to SEQ ID NO: 1500248
uuugcacagacaggccucc

SEQ ID NO: 1500250 - RNA, 19 nt, Artificial Sequence
  Description of Artificial Sequence: Synthetic oligonucleotide
  Sense strand starting at position 2633 of SEQ ID NO: 1244591
aggccugucugugcaaaga

SEQ ID NO: 1500251 - RNA, 19 nt, Artificial Sequence
  Description of Artificial Sequence: Synthetic oligonucleotide
  Antisense strand to SEQ ID NO: 1500250
ucuuugcacagacaggccu

SEQ ID NO: 1500252 - RNA, 19 nt, Artificial Sequence
  Description of Artificial Sequence: Synthetic oligonucleotide
  Sense strand starting at position 2676 of SEQ ID NO: 1244591
uggguagagucugggaaga

SEQ ID NO: 1500253 - RNA, 19 nt, Artificial Sequence
  Description of Artificial Sequence: Synthetic oligonucleotide
  Antisense strand to SEQ ID NO: 1500252
ucuucccagacucuaccca

SEQ ID NO: 1500254 - RNA, 19 nt, Artificial Sequence
  Description of Artificial Sequence: Synthetic oligonucleotide
  Sense strand starting at position 2823 of SEQ ID NO: 1244591
agagcaucauuggcagaaa

SEQ ID NO: 1500255 - RNA, 19 nt, Artificial Sequence
  Description of Artificial Sequence: Synthetic oligonucleotide
  Antisense strand to SEQ ID NO: 1500254
uuucugccaaugaugcucu

SEQ ID NO: 1500256 - RNA, 19 nt, Artificial Sequence
  Description of Artificial Sequence: Synthetic oligonucleotide
  Sense strand starting at position 2824 of SEQ ID NO: 1244591
gagcaucauuggcagaaag

SEQ ID NO: 1500257 - RNA, 19 nt, Artificial Sequence
  Description of Artificial Sequence: Synthetic oligonucleotide
  Antisense strand to SEQ ID NO: 1500256
cuuucugccaaugaugcuc

SEQ ID NO: 1500258 - RNA, 19 nt, Artificial Sequence
  Description of Artificial Sequence: Synthetic oligonucleotide
  Sense strand starting at position 2869 of SEQ ID NO: 1244591
aggagagaacuuggugagu

SEQ ID NO: 1500259 - RNA, 19 nt, Artificial Sequence
  Description of Artificial Sequence: Synthetic oligonucleotide
  Antisense strand to SEQ ID NO: 1500258
acucaccaaguucucuccu

SEQ ID NO: 1500260 - RNA, 19 nt, Artificial Sequence
  Description of Artificial Sequence: Synthetic oligonucleotide
  Sense strand starting at position 2871 of SEQ ID NO: 1244591
gagagaacuuggugaguaa

SEQ ID NO: 1500261 - RNA, 19 nt, Artificial Sequence
  Description of Artificial Sequence: Synthetic oligonucleotide
  Antisense strand to SEQ ID NO: 1500260
uuacucaccaaguucucuc

SEQ ID NO: 1500262 - RNA, 19 nt, Artificial Sequence
  Description of Artificial Sequence: Synthetic oligonucleotide
  Sense strand starting at position 2981 of SEQ ID NO: 1244591
cagagagcucagugaggaa

SEQ ID NO: 1500263 - RNA, 19 nt, Artificial Sequence
  Description of Artificial Sequence: Synthetic oligonucleotide
  Antisense strand to SEQ ID NO: 1500262
uuccucacugagcucucug

SEQ ID NO: 1500264 - RNA, 19 nt, Artificial Sequence
  Description of Artificial Sequence: Synthetic oligonucleotide
  Sense strand starting at position 2984 of SEQ ID NO: 1244591
agagcucagugaggaauuu

SEQ ID NO: 1500265 - RNA, 19 nt, Artificial Sequence
  Description of Artificial Sequence: Synthetic oligonucleotide
  Antisense strand to SEQ ID NO: 1500264
aaauuccucacugagcucu

SEQ ID NO: 1500266 - RNA, 19 nt, Artificial Sequence
  Description of Artificial Sequence: Synthetic oligonucleotide
  Sense strand starting at position 2996 of SEQ ID NO: 1244591
ggaauuuguuugcaauucu

SEQ ID NO: 1500267 - RNA, 19 nt, Artificial Sequence
  Description of Artificial Sequence: Synthetic oligonucleotide
  Antisense strand to SEQ ID NO: 1500266
agaauugcaaacaaauucc

SEQ ID NO: 1500268 - RNA, 19 nt, Artificial Sequence
  Description of Artificial Sequence: Synthetic oligonucleotide
  Sense strand starting at position 3007 of SEQ ID NO: 1244591
gcaauucuagugcaaggaa

SEQ ID NO: 1500269 - RNA, 19 nt, Artificial Sequence
  Description of Artificial Sequence: Synthetic oligonucleotide
  Antisense strand to SEQ ID NO: 1500268
uuccuugcacuagaauugc

SEQ ID NO: 1500270 - RNA, 19 nt, Artificial Sequence
  Description of Artificial Sequence: Synthetic oligonucleotide
  Sense strand starting at position 3045 of SEQ ID NO: 1244591
uaaacagaggcauguugaa

SEQ ID NO: 1500271 - RNA, 19 nt, Artificial Sequence
  Description of Artificial Sequence: Synthetic oligonucleotide
  Antisense strand to SEQ ID NO: 1500270
uucaacaugccucuguuua

SEQ ID NO: 1500272 - RNA, 19 nt, Artificial Sequence
  Description of Artificial Sequence: Synthetic oligonucleotide
  Sense strand starting at position 3052 of SEQ ID NO: 1244591
aggcauguugaaugagaga

SEQ ID NO: 1500273 - RNA, 19 nt, Artificial Sequence
  Description of Artificial Sequence: Synthetic oligonucleotide
  Antisense strand to SEQ ID NO: 1500272
ucucucauucaacaugccu

SEQ ID NO: 1500274 - RNA, 19 nt, Artificial Sequence
  Description of Artificial Sequence: Synthetic oligonucleotide
  Sense strand starting at position 3063 of SEQ ID NO: 1244591
augagagaguccuugcaug

SEQ ID NO: 1500275 - RNA, 19 nt, Artificial Sequence
  Description of Artificial Sequence: Synthetic oligonucleotide
  Antisense strand to SEQ ID NO: 1500274
caugcaaggacucucucau

SEQ ID NO: 1500276 - RNA, 19 nt, Artificial Sequence
  Description of Artificial Sequence: Synthetic oligonucleotide
  Sense strand starting at position 3068 of SEQ ID NO: 1244591
agaguccuugcaugaaacu

SEQ ID NO: 1500277 - RNA, 19 nt, Artificial Sequence
  Description of Artificial Sequence: Synthetic oligonucleotide
  Antisense strand to SEQ ID NO: 1500276
aguuucaugcaaggacucu

SEQ ID NO: 1500278 - RNA, 19 nt, Artificial Sequence
  Description of Artificial Sequence: Synthetic oligonucleotide
  Sense strand starting at position 3069 of SEQ ID NO: 1244591
gaguccuugcaugaaacuu

SEQ ID NO: 1500279 - RNA, 19 nt, Artificial Sequence
  Description of Artificial Sequence: Synthetic oligonucleotide
  Antisense strand to SEQ ID NO: 1500278
aaguuucaugcaaggacuc

SEQ ID NO: 1500280 - RNA, 19 nt, Artificial Sequence
  Description of Artificial Sequence: Synthetic oligonucleotide
  Sense strand starting at position 3191 of SEQ ID NO: 1244591
gcucuagggucugugggau

SEQ ID NO: 1500281 - RNA, 19 nt, Artificial Sequence
  Description of Artificial Sequence: Synthetic oligonucleotide
  Antisense strand to SEQ ID NO: 1500280
aucccacagacccuagagc

SEQ ID NO: 1500282 - RNA, 19 nt, Artificial Sequence
  Description of Artificial Sequence: Synthetic oligonucleotide
  Sense strand starting at position 3195 of SEQ ID NO: 1244591
uagggucugugggauauga

SEQ ID NO: 1500283 - RNA, 19 nt, Artificial Sequence
  Description of Artificial Sequence: Synthetic oligonucleotide
  Antisense strand to SEQ ID NO: 1500282
ucauaucccacagacccua

SEQ ID NO: 1500284 - RNA, 19 nt, Artificial Sequence
  Description of Artificial Sequence: Synthetic oligonucleotide
  Sense strand starting at position 3241 of SEQ ID NO: 1244591
ccucauuuguccuuuggua

SEQ ID NO: 1500285 - RNA, 19 nt, Artificial Sequence
  Description of Artificial Sequence: Synthetic oligonucleotide
  Antisense strand to SEQ ID NO: 1500284
uaccaaaggacaaaugagg

SEQ ID NO: 1500286 - RNA, 19 nt, Artificial Sequence
  Description of Artificial Sequence: Synthetic oligonucleotide
  Sense strand starting at position 3428 of SEQ ID NO: 1244591
gaggucggcucaucacauu

SEQ ID NO: 1500287 - RNA, 19 nt, Artificial Sequence
  Description of Artificial Sequence: Synthetic oligonucleotide
  Antisense strand to SEQ ID NO: 1500286
aaugugaugagccgaccuc

SEQ ID NO: 1500288 - RNA, 19 nt, Artificial Sequence
  Description of Artificial Sequence: Synthetic oligonucleotide
  Sense strand starting at position 3556 of SEQ ID NO: 1244591
cccgucucccagggugaau

SEQ ID NO: 1500289 - RNA, 19 nt, Artificial Sequence
  Description of Artificial Sequence: Synthetic oligonucleotide
  Antisense strand to SEQ ID NO: 1500288
auucacccugggagacggg

SEQ ID NO: 1500290 - RNA, 19 nt, Artificial Sequence
  Description of Artificial Sequence: Synthetic oligonucleotide
  Sense strand starting at position 3637 of SEQ ID NO: 1244591
gcgguuucuggaugacaga

SEQ ID NO: 1500291 - RNA, 19 nt, Artificial Sequence
  Description of Artificial Sequence: Synthetic oligonucleotide
  Antisense strand to SEQ ID NO: 1500290
ucugucauccagaaaccgc

SEQ ID NO: 1500292 - RNA, 19 nt, Artificial Sequence
  Description of Artificial Sequence: Synthetic oligonucleotide
  Sense strand starting at position 3638 of SEQ ID NO: 1244591
cgguuucuggaugacagau

SEQ ID NO: 1500293 - RNA, 19 nt, Artificial Sequence
  Description of Artificial Sequence: Synthetic oligonucleotide
  Antisense strand to SEQ ID NO: 1500292
aucugucauccagaaaccg

SEQ ID NO: 1500294 - RNA, 19 nt, Artificial Sequence
  Description of Artificial Sequence: Synthetic oligonucleotide
  Sense strand starting at position 3646 of SEQ ID NO: 1244591
ggaugacagaucugguuua

SEQ ID NO: 1500295 - RNA, 19 nt, Artificial Sequence
  Description of Artificial Sequence: Synthetic oligonucleotide
  Antisense strand to SEQ ID NO: 1500294
uaaaccagaucugucaucc

SEQ ID NO: 1500296 - RNA, 19 nt, Artificial Sequence
  Description of Artificial Sequence: Synthetic oligonucleotide
  Sense strand starting at position 3647 of SEQ ID NO: 1244591
gaugacagaucugguuuau

SEQ ID NO: 1500297 - RNA, 19 nt, Artificial Sequence
  Description of Artificial Sequence: Synthetic oligonucleotide
  Antisense strand to SEQ ID NO: 1500296
auaaaccagaucugucauc

SEQ ID NO: 1500298 - RNA, 19 nt, Artificial Sequence
  Description of Artificial Sequence: Synthetic oligonucleotide
  Sense strand starting at position 3978 of SEQ ID NO: 1244591
aaaucugguuucuaaacgu

SEQ ID NO: 1500299 - RNA, 19 nt, Artificial Sequence
  Description of Artificial Sequence: Synthetic oligonucleotide
  Antisense strand to SEQ ID NO: 1500298
acguuuagaaaccagauuu

SEQ ID NO: 1500300 - RNA, 19 nt, Artificial Sequence
  Description of Artificial Sequence: Synthetic oligonucleotide
  Sense strand starting at position 948 of SEQ ID NO: 1244592
ucagaaaguuucccuagca

SEQ ID NO: 1500301 - RNA, 19 nt, Artificial Sequence
  Description of Artificial Sequence: Synthetic oligonucleotide
  Antisense strand to SEQ ID NO: 1500300
ugcuagggaaacuuucuga

SEQ ID NO: 1500302 - RNA, 19 nt, Artificial Sequence
  Description of Artificial Sequence: Synthetic oligonucleotide
  Sense strand starting at position 1209 of SEQ ID NO: 1244592
gggcaggccucgugggaaa

SEQ ID NO: 1500303 - RNA, 19 nt, Artificial Sequence
  Description of Artificial Sequence: Synthetic oligonucleotide
  Antisense strand to SEQ ID NO: 1500302
uuucccacgaggccugccc

SEQ ID NO: 1500304 - RNA, 19 nt, Artificial Sequence
  Description of Artificial Sequence: Synthetic oligonucleotide
  Sense strand starting at position 1453 of SEQ ID NO: 1244592
auaggcuaccuuggaagaa

SEQ ID NO: 1500305 - RNA, 19 nt, Artificial Sequence
  Description of Artificial Sequence: Synthetic oligonucleotide
  Antisense strand to SEQ ID NO: 1500304
uucuuccaagguagccuau

SEQ ID NO: 1500306 - RNA, 19 nt, Artificial Sequence
  Description of Artificial Sequence: Synthetic oligonucleotide
  Sense strand starting at position 1454 of SEQ ID NO: 1244592
uaggcuaccuuggaagaaa

SEQ ID NO: 1500307 - RNA, 19 nt, Artificial Sequence
  Description of Artificial Sequence: Synthetic oligonucleotide
  Antisense strand to SEQ ID NO: 1500306
uuucuuccaagguagccua

SEQ ID NO: 1500308 - RNA, 19 nt, Artificial Sequence
  Description of Artificial Sequence: Synthetic oligonucleotide
  Sense strand starting at position 2757 of SEQ ID NO: 1244592
cuucaugugccaggugagu

SEQ ID NO: 1500309 - RNA, 19 nt, Artificial Sequence
  Description of Artificial Sequence: Synthetic oligonucleotide
  Antisense strand to SEQ ID NO: 1500308
acucaccuggcacaugaag

SEQ ID NO: 1500310 - RNA, 19 nt, Artificial Sequence
  Description of Artificial Sequence: Synthetic oligonucleotide
  Sense strand starting at position 2768 of SEQ ID NO: 1244592
aggugaguguaacaccauu

SEQ ID NO: 1500311 - RNA, 19 nt, Artificial Sequence
  Description of Artificial Sequence: Synthetic oligonucleotide
  Antisense strand to SEQ ID NO: 1500310
aaugguguuacacucaccu

SEQ ID NO: 1500312 - RNA, 19 nt, Artificial Sequence
  Description of Artificial Sequence: Synthetic oligonucleotide
  Sense strand starting at position 2836 of SEQ ID NO: 1244592
ucagaagcucuggguucua

SEQ ID NO: 1500313 - RNA, 19 nt, Artificial Sequence
  Description of Artificial Sequence: Synthetic oligonucleotide
  Antisense strand to SEQ ID NO: 1500312
uagaacccagagcuucuga

SEQ ID NO: 1500314 - RNA, 19 nt, Artificial Sequence
  Description of Artificial Sequence: Synthetic oligonucleotide
  Sense strand starting at position 2876 of SEQ ID NO: 1244592
gcuauagagccuugaauga

SEQ ID NO: 1500315 - RNA, 19 nt, Artificial Sequence
  Description of Artificial Sequence: Synthetic oligonucleotide
  Antisense strand to SEQ ID NO: 1500314
ucauucaaggcucuauagc

SEQ ID NO: 1500316 - RNA, 19 nt, Artificial Sequence
  Description of Artificial Sequence: Synthetic oligonucleotide
  Sense strand starting at position 2907 of SEQ ID NO: 1244592
caggacuucucaugugaaa

SEQ ID NO: 1500317 - RNA, 19 nt, Artificial Sequence
  Description of Artificial Sequence: Synthetic oligonucleotide
  Antisense strand to SEQ ID NO: 1500316
uuucacaugagaaguccug

SEQ ID NO: 1500318 - RNA, 19 nt, Artificial Sequence
  Description of Artificial Sequence: Synthetic oligonucleotide
  Sense strand starting at position 2910 of SEQ ID NO: 1244592
gacuucucaugugaaauag

SEQ ID NO: 1500319 - RNA, 19 nt, Artificial Sequence
  Description of Artificial Sequence: Synthetic oligonucleotide
  Antisense strand to SEQ ID NO: 1500318
cuauuucacaugagaaguc

SEQ ID NO: 1500320 - RNA, 19 nt, Artificial Sequence
  Description of Artificial Sequence: Synthetic oligonucleotide
  Sense strand starting at position 2981 of SEQ ID NO: 1244592
gcuaaaugcuaguuuccuu

SEQ ID NO: 1500321 - RNA, 19 nt, Artificial Sequence
  Description of Artificial Sequence: Synthetic oligonucleotide
  Antisense strand to SEQ ID NO: 1500320
aaggaaacuagcauuuagc

SEQ ID NO: 1500322 - RNA, 19 nt, Artificial Sequence
  Description of Artificial Sequence: Synthetic oligonucleotide
  Sense strand starting at position 3026 of SEQ ID NO: 1244592
aggucacacuguuaaggaa

SEQ ID NO: 1500323 - RNA, 19 nt, Artificial Sequence
  Description of Artificial Sequence: Synthetic oligonucleotide
  Antisense strand to SEQ ID NO: 1500322
uuccuuaacagugugaccu

SEQ ID NO: 1500324 - RNA, 19 nt, Artificial Sequence
  Description of Artificial Sequence: Synthetic oligonucleotide
  Sense strand starting at position 3103 of SEQ ID NO: 1244592
ucuuguguccugggccaga

SEQ ID NO: 1500325 - RNA, 19 nt, Artificial Sequence
  Description of Artificial Sequence: Synthetic oligonucleotide
  Antisense strand to SEQ ID NO: 1500324
ucuggcccaggacacaaga

SEQ ID NO: 1500326 - RNA, 19 nt, Artificial Sequence
  Description of Artificial Sequence: Synthetic oligonucleotide
  Sense strand starting at position 3114 of SEQ ID NO: 1244592
gggccagagguucauuagu

SEQ ID NO: 1500327 - RNA, 19 nt, Artificial Sequence
  Description of Artificial Sequence: Synthetic oligonucleotide
  Antisense strand to SEQ ID NO: 1500326
acuaaugaaccucuggccc

SEQ ID NO: 1500328 - RNA, 19 nt, Artificial Sequence
  Description of Artificial Sequence: Synthetic oligonucleotide
  Sense strand starting at position 3158 of SEQ ID NO: 1244592
cugguuuggccaugacguu

SEQ ID NO: 1500329 - RNA, 19 nt, Artificial Sequence
  Description of Artificial Sequence: Synthetic oligonucleotide
  Antisense strand to SEQ ID NO: 1500328
aacgucauggccaaaccag

SEQ ID NO: 1500330 - RNA, 19 nt, Artificial Sequence
  Description of Artificial Sequence: Synthetic oligonucleotide
  Sense strand starting at position 3191 of SEQ ID NO: 1244592
agcugucagcaccaaacuu

SEQ ID NO: 1500331 - RNA, 19 nt, Artificial Sequence
  Description of Artificial Sequence: Synthetic oligonucleotide
  Antisense strand to SEQ ID NO: 1500330
aaguuuggugcugacagcu

SEQ ID NO: 1500332 - RNA, 19 nt, Artificial Sequence
  Description of Artificial Sequence: Synthetic oligonucleotide
  Sense strand starting at position 3252 of SEQ ID NO: 1244592
gcuguugucccaguuuacu

SEQ ID NO: 1500333 - RNA, 19 nt, Artificial Sequence
  Description of Artificial Sequence: Synthetic oligonucleotide
  Antisense strand to SEQ ID NO: 1500332
aguaaacugggacaacagc

SEQ ID NO: 1500334 - RNA, 19 nt, Artificial Sequence
  Description of Artificial Sequence: Synthetic oligonucleotide
  Sense strand starting at position 3298 of SEQ ID NO: 1244592
ccugaucucuccugaaguc

SEQ ID NO: 1500335 - RNA, 19 nt, Artificial Sequence
  Description of Artificial Sequence: Synthetic oligonucleotide
  Antisense strand to SEQ ID NO: 1500334
gacuucaggagagaucagg

SEQ ID NO: 1500336 - RNA, 19 nt, Artificial Sequence
  Description of Artificial Sequence: Synthetic oligonucleotide
  Sense strand starting at position 3299 of SEQ ID NO: 1244592
cugaucucuccugaagucu

SEQ ID NO: 1500337 - RNA, 19 nt, Artificial Sequence
  Description of Artificial Sequence: Synthetic oligonucleotide
  Antisense strand to SEQ ID NO: 1500336
agacuucaggagagaucag

SEQ ID NO: 1500338 - RNA, 19 nt, Artificial Sequence
  Description of Artificial Sequence: Synthetic oligonucleotide
  Sense strand starting at position 3328 of SEQ ID NO: 1244592
aucucaagcucuuggauca

SEQ ID NO: 1500339 - RNA, 19 nt, Artificial Sequence
  Description of Artificial Sequence: Synthetic oligonucleotide
  Antisense strand to SEQ ID NO: 1500338
ugauccaagagcuugagau

SEQ ID NO: 1500340 - RNA, 19 nt, Artificial Sequence
  Description of Artificial Sequence: Synthetic oligonucleotide
  Sense strand starting at position 3329 of SEQ ID NO: 1244592
ucucaagcucuuggaucau

SEQ ID NO: 1500341 - RNA, 19 nt, Artificial Sequence
  Description of Artificial Sequence: Synthetic oligonucleotide
  Antisense strand to SEQ ID NO: 1500340
augauccaagagcuugaga

SEQ ID NO: 1500342 - RNA, 19 nt, Artificial Sequence
  Description of Artificial Sequence: Synthetic oligonucleotide
  Sense strand starting at position 3341 of SEQ ID NO: 1244592
ggaucaugggcacggauaa

SEQ ID NO: 1500343 - RNA, 19 nt, Artificial Sequence
  Description of Artificial Sequence: Synthetic oligonucleotide
  Antisense strand to SEQ ID NO: 1500342
uuauccgugcccaugaucc

SEQ ID NO: 1500344 - RNA, 19 nt, Artificial Sequence
  Description of Artificial Sequence: Synthetic oligonucleotide
  Sense strand starting at position 3416 of SEQ ID NO: 1244592
gagucaauggccugcuuga

SEQ ID NO: 1500345 - RNA, 19 nt, Artificial Sequence
  Description of Artificial Sequence: Synthetic oligonucleotide
  Antisense strand to SEQ ID NO: 1500344
ucaagcaggccauugacuc

SEQ ID NO: 1500346 - RNA, 19 nt, Artificial Sequence
  Description of Artificial Sequence: Synthetic oligonucleotide
  Sense strand starting at position 3446 of SEQ ID NO: 1244592
aaguccuccugguaaggau

SEQ ID NO: 1500347 - RNA, 19 nt, Artificial Sequence
  Description of Artificial Sequence: Synthetic oligonucleotide
  Antisense strand to SEQ ID NO: 1500346
auccuuaccaggaggacuu

SEQ ID NO: 1500348 - RNA, 19 nt, Artificial Sequence
  Description of Artificial Sequence: Synthetic oligonucleotide
  Sense strand starting at position 3467 of SEQ ID NO: 1244592
uuucuacaaugaugcagaa

SEQ ID NO: 1500349 - RNA, 19 nt, Artificial Sequence
  Description of Artificial Sequence: Synthetic oligonucleotide
  Antisense strand to SEQ ID NO: 1500348
uucugcaucauuguagaaa

SEQ ID NO: 1500350 - RNA, 19 nt, Artificial Sequence
  Description of Artificial Sequence: Synthetic oligonucleotide
  Sense strand starting at position 3491 of SEQ ID NO: 1244592
ccaugcagucucugagaca

SEQ ID NO: 1500351 - RNA, 19 nt, Artificial Sequence
  Description of Artificial Sequence: Synthetic oligonucleotide
  Antisense strand to SEQ ID NO: 1500350
ugucucagagacugcaugg

SEQ ID NO: 1500352 - RNA, 19 nt, Artificial Sequence
  Description of Artificial Sequence: Synthetic oligonucleotide
  Sense strand starting at position 3492 of SEQ ID NO: 1244592
caugcagucucugagacau

SEQ ID NO: 1500353 - RNA, 19 nt, Artificial Sequence
  Description of Artificial Sequence: Synthetic oligonucleotide
  Antisense strand to SEQ ID NO: 1500352
augucucagagacugcaug

SEQ ID NO: 1500354 - RNA, 19 nt, Artificial Sequence
  Description of Artificial Sequence: Synthetic oligonucleotide
  Sense strand starting at position 3494 of SEQ ID NO: 1244592
ugcagucucugagacauuu

SEQ ID NO: 1500355 - RNA, 19 nt, Artificial Sequence
  Description of Artificial Sequence: Synthetic oligonucleotide
  Antisense strand to SEQ ID NO: 1500354
aaaugucucagagacugca

SEQ ID NO: 1500356 - RNA, 19 nt, Artificial Sequence
  Description of Artificial Sequence: Synthetic oligonucleotide
  Sense strand starting at position 3575 of SEQ ID NO: 1244592
augggagauuucugaguga

SEQ ID NO: 1500357 - RNA, 19 nt, Artificial Sequence
  Description of Artificial Sequence: Synthetic oligonucleotide
  Antisense strand to SEQ ID NO: 1500356
ucacucagaaaucucccau

SEQ ID NO: 1500358 - RNA, 19 nt, Artificial Sequence
  Description of Artificial Sequence: Synthetic oligonucleotide
  Sense strand starting at position 3582 of SEQ ID NO: 1244592
auuucugagugauaagaug

SEQ ID NO: 1500359 - RNA, 19 nt, Artificial Sequence
  Description of Artificial Sequence: Synthetic oligonucleotide
  Antisense strand to SEQ ID NO: 1500358
caucuuaucacucagaaau

SEQ ID NO: 1500360 - RNA, 19 nt, Artificial Sequence
  Description of Artificial Sequence: Synthetic oligonucleotide
  Sense strand starting at position 3904 of SEQ ID NO: 1244592
agcugugauugugcccuau

SEQ ID NO: 1500361 - RNA, 19 nt, Artificial Sequence
  Description of Artificial Sequence: Synthetic oligonucleotide
  Antisense strand to SEQ ID NO: 1500360
auagggcacaaucacagcu

SEQ ID NO: 1500362 - RNA, 19 nt, Artificial Sequence
  Description of Artificial Sequence: Synthetic oligonucleotide
  Sense strand starting at position 3906 of SEQ ID NO: 1244592
cugugauugugcccuaucu

SEQ ID NO: 1500363 - RNA, 19 nt, Artificial Sequence
  Description of Artificial Sequence: Synthetic oligonucleotide
  Antisense strand to SEQ ID NO: 1500362
agauagggcacaaucacag

SEQ ID NO: 1500364 - RNA, 19 nt, Artificial Sequence
  Description of Artificial Sequence: Synthetic oligonucleotide
  Sense strand starting at position 3908 of SEQ ID NO: 1244592
gugauugugcccuaucuca

SEQ ID NO: 1500365 - RNA, 19 nt, Artificial Sequence
  Description of Artificial Sequence: Synthetic oligonucleotide
  Antisense strand to SEQ ID NO: 1500364
ugagauagggcacaaucac

SEQ ID NO: 1500366 - RNA, 19 nt, Artificial Sequence
  Description of Artificial Sequence: Synthetic oligonucleotide
  Sense strand starting at position 3951 of SEQ ID NO: 1244592
gcauaaugauaauggauaa

SEQ ID NO: 1500367 - RNA, 19 nt, Artificial Sequence
  Description of Artificial Sequence: Synthetic oligonucleotide
  Antisense strand to SEQ ID NO: 1500366
uuauccauuaucauuaugc

SEQ ID NO: 1500368 - RNA, 19 nt, Artificial Sequence
  Description of Artificial Sequence: Synthetic oligonucleotide
  Sense strand starting at position 3961 of SEQ ID NO: 1244592
aauggauaaucauaacgga

SEQ ID NO: 1500369 - RNA, 19 nt, Artificial Sequence
  Description of Artificial Sequence: Synthetic oligonucleotide
  Antisense strand to SEQ ID NO: 1500368
uccguuaugauuauccauu

SEQ ID NO: 1500370 - RNA, 19 nt, Artificial Sequence
  Description of Artificial Sequence: Synthetic oligonucleotide
  Sense strand starting at position 3964 of SEQ ID NO: 1244592
ggauaaucauaacggauga

SEQ ID NO: 1500371 - RNA, 19 nt, Artificial Sequence
  Description of Artificial Sequence: Synthetic oligonucleotide
  Antisense strand to SEQ ID NO: 1500370
ucauccguuaugauuaucc

SEQ ID NO: 1500372 - RNA, 19 nt, Artificial Sequence
  Description of Artificial Sequence: Synthetic oligonucleotide
  Sense strand starting at position 36 of SEQ ID NO: 1244593
uggcauguacaaggguaua

SEQ ID NO: 1500373 - RNA, 19 nt, Artificial Sequence
  Description of Artificial Sequence: Synthetic oligonucleotide
  Antisense strand to SEQ ID NO: 1500372
uauacccuuguacaugcca

SEQ ID NO: 1500374 - RNA, 19 nt, Artificial Sequence
  Description of Artificial Sequence: Synthetic oligonucleotide
  Sense strand starting at position 216 of SEQ ID NO: 1244593
gugacuacugauuagguga

SEQ ID NO: 1500375 - RNA, 19 nt, Artificial Sequence
  Description of Artificial Sequence: Synthetic oligonucleotide
  Antisense strand to SEQ ID NO: 1500374
ucaccuaaucaguagucac

SEQ ID NO: 1500376 - RNA, 19 nt, Artificial Sequence
  Description of Artificial Sequence: Synthetic oligonucleotide
  Sense strand starting at position 221 of SEQ ID NO: 1244593
uacugauuaggugaccuuu

SEQ ID NO: 1500377 - RNA, 19 nt, Artificial Sequence
  Description of Artificial Sequence: Synthetic oligonucleotide
  Antisense strand to SEQ ID NO: 1500376
aaaggucaccuaaucagua

SEQ ID NO: 1500378 - RNA, 19 nt, Artificial Sequence
  Description of Artificial Sequence: Synthetic oligonucleotide
  Sense strand starting at position 275 of SEQ ID NO: 1244593
aucuguucucaggguugaa

SEQ ID NO: 1500379 - RNA, 19 nt, Artificial Sequence
  Description of Artificial Sequence: Synthetic oligonucleotide
  Antisense strand to SEQ ID NO: 1500378
uucaacccugagaacagau

SEQ ID NO: 1500380 - RNA, 19 nt, Artificial Sequence
  Description of Artificial Sequence: Synthetic oligonucleotide
  Sense strand starting at position 278 of SEQ ID NO: 1244593
uguucucaggguugaauca

SEQ ID NO: 1500381 - RNA, 19 nt, Artificial Sequence
  Description of Artificial Sequence: Synthetic oligonucleotide
  Antisense strand to SEQ ID NO: 1500380
ugauucaacccugagaaca

SEQ ID NO: 1500382 - RNA, 19 nt, Artificial Sequence
  Description of Artificial Sequence: Synthetic oligonucleotide
  Sense strand starting at position 304 of SEQ ID NO: 1244593
agaugaguuucccuucuuu

SEQ ID NO: 1500383 - RNA, 19 nt, Artificial Sequence
  Description of Artificial Sequence: Synthetic oligonucleotide
  Antisense strand to SEQ ID NO: 1500382
aaagaagggaaacucaucu

SEQ ID NO: 1500384 - RNA, 19 nt, Artificial Sequence
  Description of Artificial Sequence: Synthetic oligonucleotide
  Sense strand starting at position 348 of SEQ ID NO: 1244593
cuacccauucccuggguaa

SEQ ID NO: 1500385 - RNA, 19 nt, Artificial Sequence
  Description of Artificial Sequence: Synthetic oligonucleotide
  Antisense strand to SEQ ID NO: 1500384
uuacccagggaauggguag

SEQ ID NO: 1500386 - RNA, 19 nt, Artificial Sequence
  Description of Artificial Sequence: Synthetic oligonucleotide
  Sense strand starting at position 387 of SEQ ID NO: 1244593
cugaacgagucaucccaaa

SEQ ID NO: 1500387 - RNA, 19 nt, Artificial Sequence
  Description of Artificial Sequence: Synthetic oligonucleotide
  Antisense strand to SEQ ID NO: 1500386
uuugggaugacucguucag

SEQ ID NO: 1500388 - RNA, 19 nt, Artificial Sequence
  Description of Artificial Sequence: Synthetic oligonucleotide
  Sense strand starting at position 1384 of SEQ ID NO: 1244593
caaagugguaccuggagua

SEQ ID NO: 1500389 - RNA, 19 nt, Artificial Sequence
  Description of Artificial Sequence: Synthetic oligonucleotide
  Antisense strand to SEQ ID NO: 1500388
uacuccagguaccacuuug

SEQ ID NO: 1500390 - RNA, 19 nt, Artificial Sequence
  Description of Artificial Sequence: Synthetic oligonucleotide
  Sense strand starting at position 1442 of SEQ ID NO: 1244593
ccgggagcaucuuuaaguu

SEQ ID NO: 1500391 - RNA, 19 nt, Artificial Sequence
  Description of Artificial Sequence: Synthetic oligonucleotide
  Antisense strand to SEQ ID NO: 1500390
aacuuaaagaugcucccgg

SEQ ID NO: 1500392 - RNA, 19 nt, Artificial Sequence
  Description of Artificial Sequence: Synthetic oligonucleotide
  Sense strand starting at position 2182 of SEQ ID NO: 1244593
ccuccucuugauugauuga

SEQ ID NO: 1500393 - RNA, 19 nt, Artificial Sequence
  Description of Artificial Sequence: Synthetic oligonucleotide
  Antisense strand to SEQ ID NO: 1500392
ucaaucaaucaagaggagg

SEQ ID NO: 1500394 - RNA, 19 nt, Artificial Sequence
  Description of Artificial Sequence: Synthetic oligonucleotide
  Sense strand starting at position 2387 of SEQ ID NO: 1244593
gggagugucucccaaucuu

SEQ ID NO: 1500395 - RNA, 19 nt, Artificial Sequence
  Description of Artificial Sequence: Synthetic oligonucleotide
  Antisense strand to SEQ ID NO: 1500394
aagauugggagacacuccc

SEQ ID NO: 1500396 - RNA, 19 nt, Artificial Sequence
  Description of Artificial Sequence: Synthetic oligonucleotide
  Sense strand starting at position 2529 of SEQ ID NO: 1244593
ccaagaaggucgccugaga

SEQ ID NO: 1500397 - RNA, 19 nt, Artificial Sequence
  Description of Artificial Sequence: Synthetic oligonucleotide
  Antisense strand to SEQ ID NO: 1500396
ucucaggcgaccuucuugg

SEQ ID NO: 1500398 - RNA, 19 nt, Artificial Sequence
  Description of Artificial Sequence: Synthetic oligonucleotide
  Sense strand starting at position 2588 of SEQ ID NO: 1244593
uagguagggucucuugagu

SEQ ID NO: 1500399 - RNA, 19 nt, Artificial Sequence
  Description of Artificial Sequence: Synthetic oligonucleotide
  Antisense strand to SEQ ID NO: 1500398
acucaagagacccuaccua

SEQ ID NO: 1500400 - RNA, 19 nt, Artificial Sequence
  Description of Artificial Sequence: Synthetic oligonucleotide
  Sense strand starting at position 2595 of SEQ ID NO: 1244593
ggucucuugagucaggaaa

SEQ ID NO: 1500401 - RNA, 19 nt, Artificial Sequence
  Description of Artificial Sequence: Synthetic oligonucleotide
  Antisense strand to SEQ ID NO: 1500400
uuuccugacucaagagacc

SEQ ID NO: 1500402 - RNA, 19 nt, Artificial Sequence
  Description of Artificial Sequence: Synthetic oligonucleotide
  Sense strand starting at position 2603 of SEQ ID NO: 1244593
gagucaggaaagcauaguu

SEQ ID NO: 1500403 - RNA, 19 nt, Artificial Sequence
  Description of Artificial Sequence: Synthetic oligonucleotide
  Antisense strand to SEQ ID NO: 1500402
aacuaugcuuuccugacuc

SEQ ID NO: 1500404 - RNA, 19 nt, Artificial Sequence
  Description of Artificial Sequence: Synthetic oligonucleotide
  Sense strand starting at position 2703 of SEQ ID NO: 1244593
gaacaaugcguccagguua

SEQ ID NO: 1500405 - RNA, 19 nt, Artificial Sequence
  Description of Artificial Sequence: Synthetic oligonucleotide
  Antisense strand to SEQ ID NO: 1500404
uaaccuggacgcauuguuc

SEQ ID NO: 1500406 - RNA, 19 nt, Artificial Sequence
  Description of Artificial Sequence: Synthetic oligonucleotide
  Sense strand starting at position 2729 of SEQ ID NO: 1244593
ggucucacaucuuccugaa

SEQ ID NO: 1500407 - RNA, 19 nt, Artificial Sequence
  Description of Artificial Sequence: Synthetic oligonucleotide
  Antisense strand to SEQ ID NO: 1500406
uucaggaagaugugagacc

SEQ ID NO: 1500408 - RNA, 19 nt, Artificial Sequence
  Description of Artificial Sequence: Synthetic oligonucleotide
  Sense strand starting at position 2733 of SEQ ID NO: 1244593
ucacaucuuccugaaagug

SEQ ID NO: 1500409 - RNA, 19 nt, Artificial Sequence
  Description of Artificial Sequence: Synthetic oligonucleotide
  Antisense strand to SEQ ID NO: 1500408
cacuuucaggaagauguga

SEQ ID NO: 1500410 - RNA, 19 nt, Artificial Sequence
  Description of Artificial Sequence: Synthetic oligonucleotide
  Sense strand starting at position 2752 of SEQ ID NO: 1244593
agagccaaccuggguauua

SEQ ID NO: 1500411 - RNA, 19 nt, Artificial Sequence
  Description of Artificial Sequence: Synthetic oligonucleotide
  Antisense strand to SEQ ID NO: 1500410
uaauacccagguuggcucu

SEQ ID NO: 1500412 - RNA, 19 nt, Artificial Sequence
  Description of Artificial Sequence: Synthetic oligonucleotide
  Sense strand starting at position 2754 of SEQ ID NO: 1244593
agccaaccuggguauuaga

SEQ ID NO: 1500413 - RNA, 19 nt, Artificial Sequence
  Description of Artificial Sequence: Synthetic oligonucleotide
  Antisense strand to SEQ ID NO: 1500412
ucuaauacccagguuggcu

SEQ ID NO: 1500414 - RNA, 19 nt, Artificial Sequence
  Description of Artificial Sequence: Synthetic oligonucleotide
  Sense strand starting at position 2757 of SEQ ID NO: 1244593
caaccuggguauuagaaau

SEQ ID NO: 1500415 - RNA, 19 nt, Artificial Sequence
  Description of Artificial Sequence: Synthetic oligonucleotide
  Antisense strand to SEQ ID NO: 1500414
auuucuaauacccagguug

SEQ ID NO: 1500416 - RNA, 19 nt, Artificial Sequence
  Description of Artificial Sequence: Synthetic oligonucleotide
  Sense strand starting at position 2886 of SEQ ID NO: 1244593
uuuacagauuuguuguguu

SEQ ID NO: 1500417 - RNA, 19 nt, Artificial Sequence
  Description of Artificial Sequence: Synthetic oligonucleotide
  Antisense strand to SEQ ID NO: 1500416
aacacaacaaaucuguaaa

SEQ ID NO: 1500418 - RNA, 19 nt, Artificial Sequence
  Description of Artificial Sequence: Synthetic oligonucleotide
  Sense strand starting at position 2889 of SEQ ID NO: 1244593
acagauuuguuguguucuu

SEQ ID NO: 1500419 - RNA, 19 nt, Artificial Sequence
  Description of Artificial Sequence: Synthetic oligonucleotide
  Antisense strand to SEQ ID NO: 1500418
aagaacacaacaaaucugu

SEQ ID NO: 1500420 - RNA, 19 nt, Artificial Sequence
  Description of Artificial Sequence: Synthetic oligonucleotide
  Sense strand starting at position 2890 of SEQ ID NO: 1244593
cagauuuguuguguucuuu

SEQ ID NO: 1500421 - RNA, 19 nt, Artificial Sequence
  Description of Artificial Sequence: Synthetic oligonucleotide
  Antisense strand to SEQ ID NO: 1500420
aaagaacacaacaaaucug

SEQ ID NO: 1500422 - RNA, 19 nt, Artificial Sequence
  Description of Artificial Sequence: Synthetic oligonucleotide
  Sense strand starting at position 2894 of SEQ ID NO: 1244593
uuuguuguguucuuuaagu

SEQ ID NO: 1500423 - RNA, 19 nt, Artificial Sequence
  Description of Artificial Sequence: Synthetic oligonucleotide
  Antisense strand to SEQ ID NO: 1500422
acuuaaagaacacaacaaa

SEQ ID NO: 1500424 - RNA, 19 nt, Artificial Sequence
  Description of Artificial Sequence: Synthetic oligonucleotide
  Sense strand starting at position 2896 of SEQ ID NO: 1244593
uguuguguucuuuaaguuu

SEQ ID NO: 1500425 - RNA, 19 nt, Artificial Sequence
  Description of Artificial Sequence: Synthetic oligonucleotide
  Antisense strand to SEQ ID NO: 1500424
aaacuuaaagaacacaaca

SEQ ID NO: 1500426 - RNA, 19 nt, Artificial Sequence
  Description of Artificial Sequence: Synthetic oligonucleotide
  Sense strand starting at position 2976 of SEQ ID NO: 1244593
cgguguuuagagcauaaca

SEQ ID NO: 1500427 - RNA, 19 nt, Artificial Sequence
  Description of Artificial Sequence: Synthetic oligonucleotide
  Antisense strand to SEQ ID NO: 1500426
uguuaugcucuaaacaccg

SEQ ID NO: 1500428 - RNA, 19 nt, Artificial Sequence
  Description of Artificial Sequence: Synthetic oligonucleotide
  Sense strand starting at position 2978 of SEQ ID NO: 1244593
guguuuagagcauaacaga

SEQ ID NO: 1500429 - RNA, 19 nt, Artificial Sequence
  Description of Artificial Sequence: Synthetic oligonucleotide
  Antisense strand to SEQ ID NO: 1500428
ucuguuaugcucuaaacac

SEQ ID NO: 1500430 - RNA, 19 nt, Artificial Sequence
  Description of Artificial Sequence: Synthetic oligonucleotide
  Sense strand starting at position 3394 of SEQ ID NO: 1244593
ccucauggauucuagaugu

SEQ ID NO: 1500431 - RNA, 19 nt, Artificial Sequence
  Description of Artificial Sequence: Synthetic oligonucleotide
  Antisense strand to SEQ ID NO: 1500430
acaucuagaauccaugagg

SEQ ID NO: 1500432 - RNA, 19 nt, Artificial Sequence
  Description of Artificial Sequence: Synthetic oligonucleotide
  Sense strand starting at position 3438 of SEQ ID NO: 1244593
gcaagaggacucugaucuu

SEQ ID NO: 1500433 - RNA, 19 nt, Artificial Sequence
  Description of Artificial Sequence: Synthetic oligonucleotide
  Antisense strand to SEQ ID NO: 1500432
aagaucagaguccucuugc

SEQ ID NO: 1500434 - RNA, 19 nt, Artificial Sequence
  Description of Artificial Sequence: Synthetic oligonucleotide
  Sense strand starting at position 3473 of SEQ ID NO: 1244593
guuccaagugcugaccaua

SEQ ID NO: 1500435 - RNA, 19 nt, Artificial Sequence
  Description of Artificial Sequence: Synthetic oligonucleotide
  Antisense strand to SEQ ID NO: 1500434
uauggucagcacuuggaac

SEQ ID NO: 1500436 - RNA, 19 nt, Artificial Sequence
  Description of Artificial Sequence: Synthetic oligonucleotide
  Sense strand starting at position 3494 of SEQ ID NO: 1244593
ucuggacccuaaugacuua

SEQ ID NO: 1500437 - RNA, 19 nt, Artificial Sequence
  Description of Artificial Sequence: Synthetic oligonucleotide
  Antisense strand to SEQ ID NO: 1500436
uaagucauuaggguccaga

SEQ ID NO: 1500438 - RNA, 19 nt, Artificial Sequence
  Description of Artificial Sequence: Synthetic oligonucleotide
  Sense strand starting at position 3501 of SEQ ID NO: 1244593
ccuaaugacuuagugaaau

SEQ ID NO: 1500439 - RNA, 19 nt, Artificial Sequence
  Description of Artificial Sequence: Synthetic oligonucleotide
  Antisense strand to SEQ ID NO: 1500438
auuucacuaagucauuagg

SEQ ID NO: 1500440 - RNA, 19 nt, Artificial Sequence
  Description of Artificial Sequence: Synthetic oligonucleotide
  Sense strand starting at position 3568 of SEQ ID NO: 1244593
augugaagggcuggagaua

SEQ ID NO: 1500441 - RNA, 19 nt, Artificial Sequence
  Description of Artificial Sequence: Synthetic oligonucleotide
  Antisense strand to SEQ ID NO: 1500440
uaucuccagcccuucacau

SEQ ID NO: 1500442 - RNA, 19 nt, Artificial Sequence
  Description of Artificial Sequence: Synthetic oligonucleotide
  Sense strand starting at position 3611 of SEQ ID NO: 1244593
cgaugccucacugaaggaa

SEQ ID NO: 1500443 - RNA, 19 nt, Artificial Sequence
  Description of Artificial Sequence: Synthetic oligonucleotide
  Antisense strand to SEQ ID NO: 1500442
uuccuucagugaggcaucg

SEQ ID NO: 1500444 - RNA, 19 nt, Artificial Sequence
  Description of Artificial Sequence: Synthetic oligonucleotide
  Sense strand starting at position 3675 of SEQ ID NO: 1244593
gcggucucacuguugccaa

SEQ ID NO: 1500445 - RNA, 19 nt, Artificial Sequence
  Description of Artificial Sequence: Synthetic oligonucleotide
  Antisense strand to SEQ ID NO: 1500444
uuggcaacagugagaccgc

SEQ ID NO: 1500446 - RNA, 19 nt, Artificial Sequence
  Description of Artificial Sequence: Synthetic oligonucleotide
  Sense strand starting at position 3959 of SEQ ID NO: 1244593
ggcccauacuuugagucuu

SEQ ID NO: 1500447 - RNA, 19 nt, Artificial Sequence
  Description of Artificial Sequence: Synthetic oligonucleotide
  Antisense strand to SEQ ID NO: 1500446
aagacucaaaguaugggcc

SEQ ID NO: 1500448 - RNA, 19 nt, Artificial Sequence
  Description of Artificial Sequence: Synthetic oligonucleotide
  Sense strand starting at position 3972 of SEQ ID NO: 1244593
agucuuaaaguuugacuca

SEQ ID NO: 1500449 - RNA, 19 nt, Artificial Sequence
  Description of Artificial Sequence: Synthetic oligonucleotide
  Antisense strand to SEQ ID NO: 1500448
ugagucaaacuuuaagacu

SEQ ID NO: 1500450 - RNA, 19 nt, Artificial Sequence
  Description of Artificial Sequence: Synthetic oligonucleotide
  Sense strand starting at position 3975 of SEQ ID NO: 1244593
cuuaaaguuugacucagaa

SEQ ID NO: 1500451 - RNA, 19 nt, Artificial Sequence
  Description of Artificial Sequence: Synthetic oligonucleotide
  Antisense strand to SEQ ID NO: 1500450
uucugagucaaacuuuaag

SEQ ID NO: 1500452 - RNA, 19 nt, Artificial Sequence
  Description of Artificial Sequence: Synthetic oligonucleotide
  Sense strand starting at position 91 of SEQ ID NO: 1244594
gacugagccugugugacau

SEQ ID NO: 1500453 - RNA, 19 nt, Artificial Sequence
  Description of Artificial Sequence: Synthetic oligonucleotide
  Antisense strand to SEQ ID NO: 1500452
augucacacaggcucaguc

SEQ ID NO: 1500454 - RNA, 19 nt, Artificial Sequence
  Description of Artificial Sequence: Synthetic oligonucleotide
  Sense strand starting at position 246 of SEQ ID NO: 1244594
ccugaaucugaaugugcau

SEQ ID NO: 1500455 - RNA, 19 nt, Artificial Sequence
  Description of Artificial Sequence: Synthetic oligonucleotide
  Antisense strand to SEQ ID NO: 1500454
augcacauucagauucagg

SEQ ID NO: 1500456 - RNA, 19 nt, Artificial Sequence
  Description of Artificial Sequence: Synthetic oligonucleotide
  Sense strand starting at position 1146 of SEQ ID NO: 1244594
gaagcuuagaggcaagagu

SEQ ID NO: 1500457 - RNA, 19 nt, Artificial Sequence
  Description of Artificial Sequence: Synthetic oligonucleotide
  Antisense strand to SEQ ID NO: 1500456
acucuugccucuaagcuuc

SEQ ID NO: 1500458 - RNA, 19 nt, Artificial Sequence
  Description of Artificial Sequence: Synthetic oligonucleotide
  Sense strand starting at position 1250 of SEQ ID NO: 1244594
gggagaccuucucucacaa

SEQ ID NO: 1500459 - RNA, 19 nt, Artificial Sequence
  Description of Artificial Sequence: Synthetic oligonucleotide
  Antisense strand to SEQ ID NO: 1500458
uugugagagaaggucuccc

SEQ ID NO: 1500460 - RNA, 19 nt, Artificial Sequence
  Description of Artificial Sequence: Synthetic oligonucleotide
  Sense strand starting at position 1637 of SEQ ID NO: 1244594
ggcgcagaccuccaggauu

SEQ ID NO: 1500461 - RNA, 19 nt, Artificial Sequence
  Description of Artificial Sequence: Synthetic oligonucleotide
  Antisense strand to SEQ ID NO: 1500460
aauccuggaggucugcgcc

SEQ ID NO: 1500462 - RNA, 19 nt, Artificial Sequence
  Description of Artificial Sequence: Synthetic oligonucleotide
  Sense strand starting at position 2057 of SEQ ID NO: 1244594
ccgagcuuccuguggguga

SEQ ID NO: 1500463 - RNA, 19 nt, Artificial Sequence
  Description of Artificial Sequence: Synthetic oligonucleotide
  Antisense strand to SEQ ID NO: 1500462
ucacccacaggaagcucgg

SEQ ID NO: 1500464 - RNA, 19 nt, Artificial Sequence
  Description of Artificial Sequence: Synthetic oligonucleotide
  Sense strand starting at position 2440 of SEQ ID NO: 1244594
augucauuccacuagcaca

SEQ ID NO: 1500465 - RNA, 19 nt, Artificial Sequence
  Description of Artificial Sequence: Synthetic oligonucleotide
  Antisense strand to SEQ ID NO: 1500464
ugugcuaguggaaugacau

SEQ ID NO: 1500466 - RNA, 19 nt, Artificial Sequence
  Description of Artificial Sequence: Synthetic oligonucleotide
  Sense strand starting at position 2459 of SEQ ID NO: 1244594
cguggauguaaguauacau

SEQ ID NO: 1500467 - RNA, 19 nt, Artificial Sequence
  Description of Artificial Sequence: Synthetic oligonucleotide
  Antisense strand to SEQ ID NO: 1500466
auguauacuuacauccacg

SEQ ID NO: 1500468 - RNA, 19 nt, Artificial Sequence
  Description of Artificial Sequence: Synthetic oligonucleotide
  Sense strand starting at position 2563 of SEQ ID NO: 1244594
cgcagacauacguaucauu

SEQ ID NO: 1500469 - RNA, 19 nt, Artificial Sequence
  Description of Artificial Sequence: Synthetic oligonucleotide
  Antisense strand to SEQ ID NO: 1500468
aaugauacguaugucugcg

SEQ ID NO: 1500470 - RNA, 19 nt, Artificial Sequence
  Description of Artificial Sequence: Synthetic oligonucleotide
  Sense strand starting at position 2566 of SEQ ID NO: 1244594
agacauacguaucauuaga

SEQ ID NO: 1500471 - RNA, 19 nt, Artificial Sequence
  Description of Artificial Sequence: Synthetic oligonucleotide
  Antisense strand to SEQ ID NO: 1500470
ucuaaugauacguaugucu

SEQ ID NO: 1500472 - RNA, 19 nt, Artificial Sequence
  Description of Artificial Sequence: Synthetic oligonucleotide
  Sense strand starting at position 2568 of SEQ ID NO: 1244594
acauacguaucauuagaca

SEQ ID NO: 1500473 - RNA, 19 nt, Artificial Sequence
  Description of Artificial Sequence: Synthetic oligonucleotide
  Antisense strand to SEQ ID NO: 1500472
ugucuaaugauacguaugu

SEQ ID NO: 1500474 - RNA, 19 nt, Artificial Sequence
  Description of Artificial Sequence: Synthetic oligonucleotide
  Sense strand starting at position 2934 of SEQ ID NO: 1244594
ggauuugucuucccagcug

SEQ ID NO: 1500475 - RNA, 19 nt, Artificial Sequence
  Description of Artificial Sequence: Synthetic oligonucleotide
  Antisense strand to SEQ ID NO: 1500474
cagcugggaagacaaaucc

SEQ ID NO: 1500476 - RNA, 19 nt, Artificial Sequence
  Description of Artificial Sequence: Synthetic oligonucleotide
  Sense strand starting at position 3611 of SEQ ID NO: 1244594
ggccaacccucccugaaau

SEQ ID NO: 1500477 - RNA, 19 nt, Artificial Sequence
  Description of Artificial Sequence: Synthetic oligonucleotide
  Antisense strand to SEQ ID NO: 1500476
auuucagggaggguuggcc

SEQ ID NO: 1500478 - RNA, 19 nt, Artificial Sequence
  Description of Artificial Sequence: Synthetic oligonucleotide
  Sense strand starting at position 3903 of SEQ ID NO: 1244594
ccaggaaaguuaggauugu

SEQ ID NO: 1500479 - RNA, 19 nt, Artificial Sequence
  Description of Artificial Sequence: Synthetic oligonucleotide
  Antisense strand to SEQ ID NO: 1500478
acaauccuaacuuuccugg

SEQ ID NO: 1500480 - RNA, 19 nt, Artificial Sequence
  Description of Artificial Sequence: Synthetic oligonucleotide
  Sense strand starting at position 3909 of SEQ ID NO: 1244594
aaguuaggauugugugguu

SEQ ID NO: 1500481 - RNA, 19 nt, Artificial Sequence
  Description of Artificial Sequence: Synthetic oligonucleotide
  Antisense strand to SEQ ID NO: 1500480
aaccacacaauccuaacuu

SEQ ID NO: 1500482 - RNA, 19 nt, Artificial Sequence
  Description of Artificial Sequence: Synthetic oligonucleotide
  Sense strand starting at position 3912 of SEQ ID NO: 1244594
uuaggauugugugguucau

SEQ ID NO: 1500483 - RNA, 19 nt, Artificial Sequence
  Description of Artificial Sequence: Synthetic oligonucleotide
  Antisense strand to SEQ ID NO: 1500482
augaaccacacaauccuaa

SEQ ID NO: 1500484 - RNA, 19 nt, Artificial Sequence
  Description of Artificial Sequence: Synthetic oligonucleotide
  Sense strand starting at position 26 of SEQ ID NO: 1244595
ugguguaggcgggaaguua

SEQ ID NO: 1500485 - RNA, 19 nt, Artificial Sequence
  Description of Artificial Sequence: Synthetic oligonucleotide
  Antisense strand to SEQ ID NO: 1500484
uaacuucccgccuacacca

SEQ ID NO: 1500486 - RNA, 19 nt, Artificial Sequence
  Description of Artificial Sequence: Synthetic oligonucleotide
  Sense strand starting at position 224 of SEQ ID NO: 1244595
ugugaaagcccucaccauu

SEQ ID NO: 1500487 - RNA, 19 nt, Artificial Sequence
  Description of Artificial Sequence: Synthetic oligonucleotide
  Antisense strand to SEQ ID NO: 1500486
aauggugagggcuuucaca

SEQ ID NO: 1500488 - RNA, 19 nt, Artificial Sequence
  Description of Artificial Sequence: Synthetic oligonucleotide
  Sense strand starting at position 286 of SEQ ID NO: 1244595
uagaguaaugccuagagcu

SEQ ID NO: 1500489 - RNA, 19 nt, Artificial Sequence
  Description of Artificial Sequence: Synthetic oligonucleotide
  Antisense strand to SEQ ID NO: 1500488
agcucuaggcauuacucua

SEQ ID NO: 1500490 - RNA, 19 nt, Artificial Sequence
  Description of Artificial Sequence: Synthetic oligonucleotide
  Sense strand starting at position 288 of SEQ ID NO: 1244595
gaguaaugccuagagcuag

SEQ ID NO: 1500491 - RNA, 19 nt, Artificial Sequence
  Description of Artificial Sequence: Synthetic oligonucleotide
  Antisense strand to SEQ ID NO: 1500490
cuagcucuaggcauuacuc

SEQ ID NO: 1500492 - RNA, 19 nt, Artificial Sequence
  Description of Artificial Sequence: Synthetic oligonucleotide
  Sense strand starting at position 320 of SEQ ID NO: 1244595
ucggucuucuaccucagaa

SEQ ID NO: 1500493 - RNA, 19 nt, Artificial Sequence
  Description of Artificial Sequence: Synthetic oligonucleotide
  Antisense strand to SEQ ID NO: 1500492
uucugagguagaagaccga

SEQ ID NO: 1500494 - RNA, 19 nt, Artificial Sequence
  Description of Artificial Sequence: Synthetic oligonucleotide
  Sense strand starting at position 322 of SEQ ID NO: 1244595
ggucuucuaccucagaacu

SEQ ID NO: 1500495 - RNA, 19 nt, Artificial Sequence
  Description of Artificial Sequence: Synthetic oligonucleotide
  Antisense strand to SEQ ID NO: 1500494
aguucugagguagaagacc

SEQ ID NO: 1500496 - RNA, 19 nt, Artificial Sequence
  Description of Artificial Sequence: Synthetic oligonucleotide
  Sense strand starting at position 402 of SEQ ID NO: 1244595
gugaaauaguaucaucauu

SEQ ID NO: 1500497 - RNA, 19 nt, Artificial Sequence
  Description of Artificial Sequence: Synthetic oligonucleotide
  Antisense strand to SEQ ID NO: 1500496
aaugaugauacuauuucac

SEQ ID NO: 1500498 - RNA, 19 nt, Artificial Sequence
  Description of Artificial Sequence: Synthetic oligonucleotide
  Sense strand starting at position 412 of SEQ ID NO: 1244595
aucaucauuuagggaauaa

SEQ ID NO: 1500499 - RNA, 19 nt, Artificial Sequence
  Description of Artificial Sequence: Synthetic oligonucleotide
  Antisense strand to SEQ ID NO: 1500498
uuauucccuaaaugaugau

SEQ ID NO: 1500500 - RNA, 19 nt, Artificial Sequence
  Description of Artificial Sequence: Synthetic oligonucleotide
  Sense strand starting at position 424 of SEQ ID NO: 1244595
ggaauaagcuucucagggu

SEQ ID NO: 1500501 - RNA, 19 nt, Artificial Sequence
  Description of Artificial Sequence: Synthetic oligonucleotide
  Antisense strand to SEQ ID NO: 1500500
acccugagaagcuuauucc

SEQ ID NO: 1500502 - RNA, 19 nt, Artificial Sequence
  Description of Artificial Sequence: Synthetic oligonucleotide
  Sense strand starting at position 1321 of SEQ ID NO: 1244595
gggagucaguggcuccaau

SEQ ID NO: 1500503 - RNA, 19 nt, Artificial Sequence
  Description of Artificial Sequence: Synthetic oligonucleotide
  Antisense strand to SEQ ID NO: 1500502
auuggagccacugacuccc

SEQ ID NO: 1500504 - RNA, 19 nt, Artificial Sequence
  Description of Artificial Sequence: Synthetic oligonucleotide
  Sense strand starting at position 2331 of SEQ ID NO: 1244595
gagugcucgcucucagcaa

SEQ ID NO: 1500505 - RNA, 19 nt, Artificial Sequence
  Description of Artificial Sequence: Synthetic oligonucleotide
  Antisense strand to SEQ ID NO: 1500504
uugcugagagcgagcacuc

SEQ ID NO: 1500506 - RNA, 19 nt, Artificial Sequence
  Description of Artificial Sequence: Synthetic oligonucleotide
  Sense strand starting at position 2669 of SEQ ID NO: 1244595
agaagaaauuaagggcaaa

SEQ ID NO: 1500507 - RNA, 19 nt, Artificial Sequence
  Description of Artificial Sequence: Synthetic oligonucleotide
  Antisense strand to SEQ ID NO: 1500506
uuugcccuuaauuucuucu

SEQ ID NO: 1500508 - RNA, 19 nt, Artificial Sequence
  Description of Artificial Sequence: Synthetic oligonucleotide
  Sense strand starting at position 2685 of SEQ ID NO: 1244595
aaagguaagucagagauuu

SEQ ID NO: 1500509 - RNA, 19 nt, Artificial Sequence
  Description of Artificial Sequence: Synthetic oligonucleotide
  Antisense strand to SEQ ID NO: 1500508
aaaucucugacuuaccuuu

SEQ ID NO: 1500510 - RNA, 19 nt, Artificial Sequence
  Description of Artificial Sequence: Synthetic oligonucleotide
  Sense strand starting at position 2729 of SEQ ID NO: 1244595
aagggauaaccgggucuca

SEQ ID NO: 1500511 - RNA, 19 nt, Artificial Sequence
  Description of Artificial Sequence: Synthetic oligonucleotide
  Antisense strand to SEQ ID NO: 1500510
ugagacccgguuaucccuu

SEQ ID NO: 1500512 - RNA, 19 nt, Artificial Sequence
  Description of Artificial Sequence: Synthetic oligonucleotide
  Sense strand starting at position 2812 of SEQ ID NO: 1244595
ccaagucaggccuacagau

SEQ ID NO: 1500513 - RNA, 19 nt, Artificial Sequence
  Description of Artificial Sequence: Synthetic oligonucleotide
  Antisense strand to SEQ ID NO: 1500512
aucuguaggccugacuugg

SEQ ID NO: 1500514 - RNA, 19 nt, Artificial Sequence
  Description of Artificial Sequence: Synthetic oligonucleotide
  Sense strand starting at position 2911 of SEQ ID NO: 1244595
aaggccucuugggugaauu

SEQ ID NO: 1500515 - RNA, 19 nt, Artificial Sequence
  Description of Artificial Sequence: Synthetic oligonucleotide
  Antisense strand to SEQ ID NO: 1500514
aauucacccaagaggccuu

SEQ ID NO: 1500516 - RNA, 19 nt, Artificial Sequence
  Description of Artificial Sequence: Synthetic oligonucleotide
  Sense strand starting at position 2912 of SEQ ID NO: 1244595
aggccucuugggugaauua

SEQ ID NO: 1500517 - RNA, 19 nt, Artificial Sequence
  Description of Artificial Sequence: Synthetic oligonucleotide
  Antisense strand to SEQ ID NO: 1500516
uaauucacccaagaggccu

SEQ ID NO: 1500518 - RNA, 19 nt, Artificial Sequence
  Description of Artificial Sequence: Synthetic oligonucleotide
  Sense strand starting at position 2923 of SEQ ID NO: 1244595
gugaauuagcauugccacu

SEQ ID NO: 1500519 - RNA, 19 nt, Artificial Sequence
  Description of Artificial Sequence: Synthetic oligonucleotide
  Antisense strand to SEQ ID NO: 1500518
aguggcaaugcuaauucac

SEQ ID NO: 1500520 - RNA, 19 nt, Artificial Sequence
  Description of Artificial Sequence: Synthetic oligonucleotide
  Sense strand starting at position 3286 of SEQ ID NO: 1244595
ggagcauucuguccuuaag

SEQ ID NO: 1500521 - RNA, 19 nt, Artificial Sequence
  Description of Artificial Sequence: Synthetic oligonucleotide
  Antisense strand to SEQ ID NO: 1500520
cuuaaggacagaaugcucc

SEQ ID NO: 1500522 - RNA, 19 nt, Artificial Sequence
  Description of Artificial Sequence: Synthetic oligonucleotide
  Sense strand starting at position 3288 of SEQ ID NO: 1244595
agcauucuguccuuaagga

SEQ ID NO: 1500523 - RNA, 19 nt, Artificial Sequence
  Description of Artificial Sequence: Synthetic oligonucleotide
  Antisense strand to SEQ ID NO: 1500522
uccuuaaggacagaaugcu

SEQ ID NO: 1500524 - RNA, 19 nt, Artificial Sequence
  Description of Artificial Sequence: Synthetic oligonucleotide
  Sense strand starting at position 3289 of SEQ ID NO: 1244595
gcauucuguccuuaaggau

SEQ ID NO: 1500525 - RNA, 19 nt, Artificial Sequence
  Description of Artificial Sequence: Synthetic oligonucleotide
  Antisense strand to SEQ ID NO: 1500524
auccuuaaggacagaaugc

SEQ ID NO: 1500526 - RNA, 19 nt, Artificial Sequence
  Description of Artificial Sequence: Synthetic oligonucleotide
  Sense strand starting at position 3354 of SEQ ID NO: 1244595
agccaugcuaagugugaga

SEQ ID NO: 1500527 - RNA, 19 nt, Artificial Sequence
  Description of Artificial Sequence: Synthetic oligonucleotide
  Antisense strand to SEQ ID NO: 1500526
ucucacacuuagcauggcu

SEQ ID NO: 1500528 - RNA, 19 nt, Artificial Sequence
  Description of Artificial Sequence: Synthetic oligonucleotide
  Sense strand starting at position 3357 of SEQ ID NO: 1244595
caugcuaagugugagaaca

SEQ ID NO: 1500529 - RNA, 19 nt, Artificial Sequence
  Description of Artificial Sequence: Synthetic oligonucleotide
  Antisense strand to SEQ ID NO: 1500528
uguucucacacuuagcaug

SEQ ID NO: 1500530 - RNA, 19 nt, Artificial Sequence
  Description of Artificial Sequence: Synthetic oligonucleotide
  Sense strand starting at position 3495 of SEQ ID NO: 1244595
ggcugggagugguaguaaa

SEQ ID NO: 1500531 - RNA, 19 nt, Artificial Sequence
  Description of Artificial Sequence: Synthetic oligonucleotide
  Antisense strand to SEQ ID NO: 1500530
uuuacuaccacucccagcc

SEQ ID NO: 1500532 - RNA, 19 nt, Artificial Sequence
  Description of Artificial Sequence: Synthetic oligonucleotide
  Sense strand starting at position 3524 of SEQ ID NO: 1244595
guguguaugacauacguau

SEQ ID NO: 1500533 - RNA, 19 nt, Artificial Sequence
  Description of Artificial Sequence: Synthetic oligonucleotide
  Antisense strand to SEQ ID NO: 1500532
auacguaugucauacacac

SEQ ID NO: 1500534 - RNA, 19 nt, Artificial Sequence
  Description of Artificial Sequence: Synthetic oligonucleotide
  Sense strand starting at position 3526 of SEQ ID NO: 1244595
guguaugacauacguauca

SEQ ID NO: 1500535 - RNA, 19 nt, Artificial Sequence
  Description of Artificial Sequence: Synthetic oligonucleotide
  Antisense strand to SEQ ID NO: 1500534
ugauacguaugucauacac

SEQ ID NO: 1500536 - RNA, 19 nt, Artificial Sequence
  Description of Artificial Sequence: Synthetic oligonucleotide
  Sense strand starting at position 3531 of SEQ ID NO: 1244595
ugacauacguaucaaugua

SEQ ID NO: 1500537 - RNA, 19 nt, Artificial Sequence
  Description of Artificial Sequence: Synthetic oligonucleotide
  Antisense strand to SEQ ID NO: 1500536
uacauugauacguauguca

SEQ ID NO: 1500538 - RNA, 19 nt, Artificial Sequence
  Description of Artificial Sequence: Synthetic oligonucleotide
  Sense strand starting at position 3539 of SEQ ID NO: 1244595
guaucaauguaugugcaua

SEQ ID NO: 1500539 - RNA, 19 nt, Artificial Sequence
  Description of Artificial Sequence: Synthetic oligonucleotide
  Antisense strand to SEQ ID NO: 1500538
uaugcacauacauugauac

SEQ ID NO: 1500540 - RNA, 19 nt, Artificial Sequence
  Description of Artificial Sequence: Synthetic oligonucleotide
  Sense strand starting at position 3551 of SEQ ID NO: 1244595
gugcauaucuguucccaug

SEQ ID NO: 1500541 - RNA, 19 nt, Artificial Sequence
  Description of Artificial Sequence: Synthetic oligonucleotide
  Antisense strand to SEQ ID NO: 1500540
caugggaacagauaugcac

SEQ ID NO: 1500542 - RNA, 19 nt, Artificial Sequence
  Description of Artificial Sequence: Synthetic oligonucleotide
  Sense strand starting at position 3558 of SEQ ID NO: 1244595
ucuguucccaugugugcua

SEQ ID NO: 1500543 - RNA, 19 nt, Artificial Sequence
  Description of Artificial Sequence: Synthetic oligonucleotide
  Antisense strand to SEQ ID NO: 1500542
uagcacacaugggaacaga

SEQ ID NO: 1500544 - RNA, 19 nt, Artificial Sequence
  Description of Artificial Sequence: Synthetic oligonucleotide
  Sense strand starting at position 3565 of SEQ ID NO: 1244595
ccaugugugcuagagcaug

SEQ ID NO: 1500545 - RNA, 19 nt, Artificial Sequence
  Description of Artificial Sequence: Synthetic oligonucleotide
  Antisense strand to SEQ ID NO: 1500544
caugcucuagcacacaugg

SEQ ID NO: 1500546 - RNA, 19 nt, Artificial Sequence
  Description of Artificial Sequence: Synthetic oligonucleotide
  Sense strand starting at position 3608 of SEQ ID NO: 1244595
cacccaucuguuuguggau

SEQ ID NO: 1500547 - RNA, 19 nt, Artificial Sequence
  Description of Artificial Sequence: Synthetic oligonucleotide
  Antisense strand to SEQ ID NO: 1500546
auccacaaacagaugggug

SEQ ID NO: 1500548 - RNA, 19 nt, Artificial Sequence
  Description of Artificial Sequence: Synthetic oligonucleotide
  Sense strand starting at position 3609 of SEQ ID NO: 1244595
acccaucuguuuguggauu

SEQ ID NO: 1500549 - RNA, 19 nt, Artificial Sequence
  Description of Artificial Sequence: Synthetic oligonucleotide
  Antisense strand to SEQ ID NO: 1500548
aauccacaaacagaugggu

SEQ ID NO: 1500550 - RNA, 19 nt, Artificial Sequence
  Description of Artificial Sequence: Synthetic oligonucleotide
  Sense strand starting at position 3610 of SEQ ID NO: 1244595
cccaucuguuuguggauuu

SEQ ID NO: 1500551 - RNA, 19 nt, Artificial Sequence
  Description of Artificial Sequence: Synthetic oligonucleotide
  Antisense strand to SEQ ID NO: 1500550
aaauccacaaacagauggg

SEQ ID NO: 1500552 - RNA, 19 nt, Artificial Sequence
  Description of Artificial Sequence: Synthetic oligonucleotide
  Sense strand starting at position 3617 of SEQ ID NO: 1244595
guuuguggauuuggaaaca

SEQ ID NO: 1500553 - RNA, 19 nt, Artificial Sequence
  Description of Artificial Sequence: Synthetic oligonucleotide
  Antisense strand to SEQ ID NO: 1500552
uguuuccaaauccacaaac

SEQ ID NO: 1500554 - RNA, 19 nt, Artificial Sequence
  Description of Artificial Sequence: Synthetic oligonucleotide
  Sense strand starting at position 3661 of SEQ ID NO: 1244595
uggcuaagaagcuguauua

SEQ ID NO: 1500555 - RNA, 19 nt, Artificial Sequence
  Description of Artificial Sequence: Synthetic oligonucleotide
  Antisense strand to SEQ ID NO: 1500554
uaauacagcuucuuagcca

SEQ ID NO: 1500556 - RNA, 19 nt, Artificial Sequence
  Description of Artificial Sequence: Synthetic oligonucleotide
  Sense strand starting at position 3670 of SEQ ID NO: 1244595
agcuguauuagaggucuga

SEQ ID NO: 1500557 - RNA, 19 nt, Artificial Sequence
  Description of Artificial Sequence: Synthetic oligonucleotide
  Antisense strand to SEQ ID NO: 1500556
ucagaccucuaauacagcu

SEQ ID NO: 1500558 - RNA, 19 nt, Artificial Sequence
  Description of Artificial Sequence: Synthetic oligonucleotide
  Sense strand starting at position 3674 of SEQ ID NO: 1244595
guauuagaggucugaguau

SEQ ID NO: 1500559 - RNA, 19 nt, Artificial Sequence
  Description of Artificial Sequence: Synthetic oligonucleotide
  Antisense strand to SEQ ID NO: 1500558
auacucagaccucuaauac

SEQ ID NO: 1500560 - RNA, 19 nt, Artificial Sequence
  Description of Artificial Sequence: Synthetic oligonucleotide
  Sense strand starting at position 3888 of SEQ ID NO: 1244595
ugggaauuguugguuagga

SEQ ID NO: 1500561 - RNA, 19 nt, Artificial Sequence
  Description of Artificial Sequence: Synthetic oligonucleotide
  Antisense strand to SEQ ID NO: 1500560
uccuaaccaacaauuccca

SEQ ID NO: 1500562 - RNA, 19 nt, Artificial Sequence
  Description of Artificial Sequence: Synthetic oligonucleotide
  Sense strand starting at position 3889 of SEQ ID NO: 1244595
gggaauuguugguuaggaa

SEQ ID NO: 1500563 - RNA, 19 nt, Artificial Sequence
  Description of Artificial Sequence: Synthetic oligonucleotide
  Antisense strand to SEQ ID NO: 1500562
uuccuaaccaacaauuccc

SEQ ID NO: 1500564 - RNA, 19 nt, Artificial Sequence
  Description of Artificial Sequence: Synthetic oligonucleotide
  Sense strand starting at position 125 of SEQ ID NO: 1244596
gaagaaaugccugguggag

SEQ ID NO: 1500565 - RNA, 19 nt, Artificial Sequence
  Description of Artificial Sequence: Synthetic oligonucleotide
  Antisense strand to SEQ ID NO: 1500564
cuccaccaggcauuucuuc

SEQ ID NO: 1500566 - RNA, 19 nt, Artificial Sequence
  Description of Artificial Sequence: Synthetic oligonucleotide
  Sense strand starting at position 137 of SEQ ID NO: 1244596
gguggagagaucuguacuc

SEQ ID NO: 1500567 - RNA, 19 nt, Artificial Sequence
  Description of Artificial Sequence: Synthetic oligonucleotide
  Antisense strand to SEQ ID NO: 1500566
gaguacagaucucuccacc

SEQ ID NO: 1500568 - RNA, 19 nt, Artificial Sequence
  Description of Artificial Sequence: Synthetic oligonucleotide
  Sense strand starting at position 142 of SEQ ID NO: 1244596
agagaucuguacucuguga

SEQ ID NO: 1500569 - RNA, 19 nt, Artificial Sequence
  Description of Artificial Sequence: Synthetic oligonucleotide
  Antisense strand to SEQ ID NO: 1500568
ucacagaguacagaucucu

SEQ ID NO: 1500570 - RNA, 19 nt, Artificial Sequence
  Description of Artificial Sequence: Synthetic oligonucleotide
  Sense strand starting at position 294 of SEQ ID NO: 1244596
gaccuagauuuaggaagag

SEQ ID NO: 1500571 - RNA, 19 nt, Artificial Sequence
  Description of Artificial Sequence: Synthetic oligonucleotide
  Antisense strand to SEQ ID NO: 1500570
cucuuccuaaaucuagguc

SEQ ID NO: 1500572 - RNA, 19 nt, Artificial Sequence
  Description of Artificial Sequence: Synthetic oligonucleotide
  Sense strand starting at position 306 of SEQ ID NO: 1244596
ggaagaggauuccauccua

SEQ ID NO: 1500573 - RNA, 19 nt, Artificial Sequence
  Description of Artificial Sequence: Synthetic oligonucleotide
  Antisense strand to SEQ ID NO: 1500572
uaggauggaauccucuucc

SEQ ID NO: 1500574 - RNA, 19 nt, Artificial Sequence
  Description of Artificial Sequence: Synthetic oligonucleotide
  Sense strand starting at position 350 of SEQ ID NO: 1244596
ugcagugagcuuuacgaua

SEQ ID NO: 1500575 - RNA, 19 nt, Artificial Sequence
  Description of Artificial Sequence: Synthetic oligonucleotide
  Antisense strand to SEQ ID NO: 1500574
uaucguaaagcucacugca

SEQ ID NO: 1500576 - RNA, 19 nt, Artificial Sequence
  Description of Artificial Sequence: Synthetic oligonucleotide
  Sense strand starting at position 355 of SEQ ID NO: 1244596
ugagcuuuacgauacauug

SEQ ID NO: 1500577 - RNA, 19 nt, Artificial Sequence
  Description of Artificial Sequence: Synthetic oligonucleotide
  Antisense strand to SEQ ID NO: 1500576
caauguaucguaaagcuca

SEQ ID NO: 1500578 - RNA, 19 nt, Artificial Sequence
  Description of Artificial Sequence: Synthetic oligonucleotide
  Sense strand starting at position 365 of SEQ ID NO: 1244596
gauacauugucucuguggu

SEQ ID NO: 1500579 - RNA, 19 nt, Artificial Sequence
  Description of Artificial Sequence: Synthetic oligonucleotide
  Antisense strand to SEQ ID NO: 1500578
accacagagacaauguauc

SEQ ID NO: 1500580 - RNA, 19 nt, Artificial Sequence
  Description of Artificial Sequence: Synthetic oligonucleotide
  Sense strand starting at position 366 of SEQ ID NO: 1244596
auacauugucucugugguu

SEQ ID NO: 1500581 - RNA, 19 nt, Artificial Sequence
  Description of Artificial Sequence: Synthetic oligonucleotide
  Antisense strand to SEQ ID NO: 1500580
aaccacagagacaauguau

SEQ ID NO: 1500582 - RNA, 19 nt, Artificial Sequence
  Description of Artificial Sequence: Synthetic oligonucleotide
  Sense strand starting at position 714 of SEQ ID NO: 1244596
ucauacauugauugcuaga

SEQ ID NO: 1500583 - RNA, 19 nt, Artificial Sequence
  Description of Artificial Sequence: Synthetic oligonucleotide
  Antisense strand to SEQ ID NO: 1500582
ucuagcaaucaauguauga

SEQ ID NO: 1500584 - RNA, 19 nt, Artificial Sequence
  Description of Artificial Sequence: Synthetic oligonucleotide
  Sense strand starting at position 719 of SEQ ID NO: 1244596
cauugauugcuagaggagu

SEQ ID NO: 1500585 - RNA, 19 nt, Artificial Sequence
  Description of Artificial Sequence: Synthetic oligonucleotide
  Antisense strand to SEQ ID NO: 1500584
acuccucuagcaaucaaug

SEQ ID NO: 1500586 - RNA, 19 nt, Artificial Sequence
  Description of Artificial Sequence: Synthetic oligonucleotide
  Sense strand starting at position 748 of SEQ ID NO: 1244596
ugaccagucucuucuauca

SEQ ID NO: 1500587 - RNA, 19 nt, Artificial Sequence
  Description of Artificial Sequence: Synthetic oligonucleotide
  Antisense strand to SEQ ID NO: 1500586
ugauagaagagacugguca

SEQ ID NO: 1500588 - RNA, 19 nt, Artificial Sequence
  Description of Artificial Sequence: Synthetic oligonucleotide
  Sense strand starting at position 833 of SEQ ID NO: 1244596
uguacacccuuccuguaaa

SEQ ID NO: 1500589 - RNA, 19 nt, Artificial Sequence
  Description of Artificial Sequence: Synthetic oligonucleotide
  Antisense strand to SEQ ID NO: 1500588
uuuacaggaaggguguaca

SEQ ID NO: 1500590 - RNA, 19 nt, Artificial Sequence
  Description of Artificial Sequence: Synthetic oligonucleotide
  Sense strand starting at position 998 of SEQ ID NO: 1244596
cuuguagcucuagagaaac

SEQ ID NO: 1500591 - RNA, 19 nt, Artificial Sequence
  Description of Artificial Sequence: Synthetic oligonucleotide
  Antisense strand to SEQ ID NO: 1500590
guuucucuagagcuacaag

SEQ ID NO: 1500592 - RNA, 19 nt, Artificial Sequence
  Description of Artificial Sequence: Synthetic oligonucleotide
  Sense strand starting at position 1436 of SEQ ID NO: 1244596
gggcaaaguccugagcucu

SEQ ID NO: 1500593 - RNA, 19 nt, Artificial Sequence
  Description of Artificial Sequence: Synthetic oligonucleotide
  Antisense strand to SEQ ID NO: 1500592
agagcucaggacuuugccc

SEQ ID NO: 1500594 - RNA, 19 nt, Artificial Sequence
  Description of Artificial Sequence: Synthetic oligonucleotide
  Sense strand starting at position 1444 of SEQ ID NO: 1244596
uccugagcucuuuggguga

SEQ ID NO: 1500595 - RNA, 19 nt, Artificial Sequence
  Description of Artificial Sequence: Synthetic oligonucleotide
  Antisense strand to SEQ ID NO: 1500594
ucacccaaagagcucagga

SEQ ID NO: 1500596 - RNA, 19 nt, Artificial Sequence
  Description of Artificial Sequence: Synthetic oligonucleotide
  Sense strand starting at position 1447 of SEQ ID NO: 1244596
ugagcucuuugggugagga

SEQ ID NO: 1500597 - RNA, 19 nt, Artificial Sequence
  Description of Artificial Sequence: Synthetic oligonucleotide
  Antisense strand to SEQ ID NO: 1500596
uccucacccaaagagcuca

SEQ ID NO: 1500598 - RNA, 19 nt, Artificial Sequence
  Description of Artificial Sequence: Synthetic oligonucleotide
  Sense strand starting at position 1448 of SEQ ID NO: 1244596
gagcucuuugggugaggaa

SEQ ID NO: 1500599 - RNA, 19 nt, Artificial Sequence
  Description of Artificial Sequence: Synthetic oligonucleotide
  Antisense strand to SEQ ID NO: 1500598
uuccucacccaaagagcuc

SEQ ID NO: 1500600 - RNA, 19 nt, Artificial Sequence
  Description of Artificial Sequence: Synthetic oligonucleotide
  Sense strand starting at position 2165 of SEQ ID NO: 1244596
ggaacaguucccugucuca

SEQ ID NO: 1500601 - RNA, 19 nt, Artificial Sequence
  Description of Artificial Sequence: Synthetic oligonucleotide
  Antisense strand to SEQ ID NO: 1500600
ugagacagggaacuguucc

SEQ ID NO: 1500602 - RNA, 19 nt, Artificial Sequence
  Description of Artificial Sequence: Synthetic oligonucleotide
  Sense strand starting at position 2168 of SEQ ID NO: 1244596
acaguucccugucucaaau

SEQ ID NO: 1500603 - RNA, 19 nt, Artificial Sequence
  Description of Artificial Sequence: Synthetic oligonucleotide
  Antisense strand to SEQ ID NO: 1500602
auuugagacagggaacugu

SEQ ID NO: 1500604 - RNA, 19 nt, Artificial Sequence
  Description of Artificial Sequence: Synthetic oligonucleotide
  Sense strand starting at position 2489 of SEQ ID NO: 1244596
agugcaggcucacuuagau

SEQ ID NO: 1500605 - RNA, 19 nt, Artificial Sequence
  Description of Artificial Sequence: Synthetic oligonucleotide
  Antisense strand to SEQ ID NO: 1500604
aucuaagugagccugcacu

SEQ ID NO: 1500606 - RNA, 19 nt, Artificial Sequence
  Description of Artificial Sequence: Synthetic oligonucleotide
  Sense strand starting at position 2524 of SEQ ID NO: 1244596
ggaaacauguaggaccaau

SEQ ID NO: 1500607 - RNA, 19 nt, Artificial Sequence
  Description of Artificial Sequence: Synthetic oligonucleotide
  Antisense strand to SEQ ID NO: 1500606
auugguccuacauguuucc

SEQ ID NO: 1500608 - RNA, 19 nt, Artificial Sequence
  Description of Artificial Sequence: Synthetic oligonucleotide
  Sense strand starting at position 2541 of SEQ ID NO: 1244596
auguauguguaucugggaa

SEQ ID NO: 1500609 - RNA, 19 nt, Artificial Sequence
  Description of Artificial Sequence: Synthetic oligonucleotide
  Antisense strand to SEQ ID NO: 1500608
uucccagauacacauacau

SEQ ID NO: 1500610 - RNA, 19 nt, Artificial Sequence
  Description of Artificial Sequence: Synthetic oligonucleotide
  Sense strand starting at position 2662 of SEQ ID NO: 1244596
ggaaaugguaauugucagu

SEQ ID NO: 1500611 - RNA, 19 nt, Artificial Sequence
  Description of Artificial Sequence: Synthetic oligonucleotide
  Antisense strand to SEQ ID NO: 1500610
acugacaauuaccauuucc

SEQ ID NO: 1500612 - RNA, 19 nt, Artificial Sequence
  Description of Artificial Sequence: Synthetic oligonucleotide
  Sense strand starting at position 2667 of SEQ ID NO: 1244596
ugguaauugucaguggaag

SEQ ID NO: 1500613 - RNA, 19 nt, Artificial Sequence
  Description of Artificial Sequence: Synthetic oligonucleotide
  Antisense strand to SEQ ID NO: 1500612
cuuccacugacaauuacca

SEQ ID NO: 1500614 - RNA, 19 nt, Artificial Sequence
  Description of Artificial Sequence: Synthetic oligonucleotide
  Sense strand starting at position 2668 of SEQ ID NO: 1244596
gguaauugucaguggaaga

SEQ ID NO: 1500615 - RNA, 19 nt, Artificial Sequence
  Description of Artificial Sequence: Synthetic oligonucleotide
  Antisense strand to SEQ ID NO: 1500614
ucuuccacugacaauuacc

SEQ ID NO: 1500616 - RNA, 19 nt, Artificial Sequence
  Description of Artificial Sequence: Synthetic oligonucleotide
  Sense strand starting at position 2669 of SEQ ID NO: 1244596
guaauugucaguggaagaa

SEQ ID NO: 1500617 - RNA, 19 nt, Artificial Sequence
  Description of Artificial Sequence: Synthetic oligonucleotide
  Antisense strand to SEQ ID NO: 1500616
uucuuccacugacaauuac

SEQ ID NO: 1500618 - RNA, 19 nt, Artificial Sequence
  Description of Artificial Sequence: Synthetic oligonucleotide
  Sense strand starting at position 2733 of SEQ ID NO: 1244596
caguaaugucccgaaucuu

SEQ ID NO: 1500619 - RNA, 19 nt, Artificial Sequence
  Description of Artificial Sequence: Synthetic oligonucleotide
  Antisense strand to SEQ ID NO: 1500618
aagauucgggacauuacug

SEQ ID NO: 1500620 - RNA, 19 nt, Artificial Sequence
  Description of Artificial Sequence: Synthetic oligonucleotide
  Sense strand starting at position 2792 of SEQ ID NO: 1244596
agauaccauuuaggauaaa

SEQ ID NO: 1500621 - RNA, 19 nt, Artificial Sequence
  Description of Artificial Sequence: Synthetic oligonucleotide
  Antisense strand to SEQ ID NO: 1500620
uuuauccuaaaugguaucu

SEQ ID NO: 1500622 - RNA, 19 nt, Artificial Sequence
  Description of Artificial Sequence: Synthetic oligonucleotide
  Sense strand starting at position 2907 of SEQ ID NO: 1244596
ucagguuuggugggcuaga

SEQ ID NO: 1500623 - RNA, 19 nt, Artificial Sequence
  Description of Artificial Sequence: Synthetic oligonucleotide
  Antisense strand to SEQ ID NO: 1500622
ucuagcccaccaaaccuga

SEQ ID NO: 1500624 - RNA, 19 nt, Artificial Sequence
  Description of Artificial Sequence: Synthetic oligonucleotide
  Sense strand starting at position 2908 of SEQ ID NO: 1244596
cagguuuggugggcuagau

SEQ ID NO: 1500625 - RNA, 19 nt, Artificial Sequence
  Description of Artificial Sequence: Synthetic oligonucleotide
  Antisense strand to SEQ ID NO: 1500624
aucuagcccaccaaaccug

SEQ ID NO: 1500626 - RNA, 19 nt, Artificial Sequence
  Description of Artificial Sequence: Synthetic oligonucleotide
  Sense strand starting at position 2955 of SEQ ID NO: 1244596
gaaguuguggauugagaac

SEQ ID NO: 1500627 - RNA, 19 nt, Artificial Sequence
  Description of Artificial Sequence: Synthetic oligonucleotide
  Antisense strand to SEQ ID NO: 1500626
guucucaauccacaacuuc

SEQ ID NO: 1500628 - RNA, 19 nt, Artificial Sequence
  Description of Artificial Sequence: Synthetic oligonucleotide
  Sense strand starting at position 2982 of SEQ ID NO: 1244596
aggagaguugcacauaucu

SEQ ID NO: 1500629 - RNA, 19 nt, Artificial Sequence
  Description of Artificial Sequence: Synthetic oligonucleotide
  Antisense strand to SEQ ID NO: 1500628
agauaugugcaacucuccu

SEQ ID NO: 1500630 - RNA, 19 nt, Artificial Sequence
  Description of Artificial Sequence: Synthetic oligonucleotide
  Sense strand starting at position 3044 of SEQ ID NO: 1244596
ggaagucagcgacagacuu

SEQ ID NO: 1500631 - RNA, 19 nt, Artificial Sequence
  Description of Artificial Sequence: Synthetic oligonucleotide
  Antisense strand to SEQ ID NO: 1500630
aagucugucgcugacuucc

SEQ ID NO: 1500632 - RNA, 19 nt, Artificial Sequence
  Description of Artificial Sequence: Synthetic oligonucleotide
  Sense strand starting at position 3191 of SEQ ID NO: 1244596
gggugaguuuaggucaaac

SEQ ID NO: 1500633 - RNA, 19 nt, Artificial Sequence
  Description of Artificial Sequence: Synthetic oligonucleotide
  Antisense strand to SEQ ID NO: 1500632
guuugaccuaaacucaccc

SEQ ID NO: 1500634 - RNA, 19 nt, Artificial Sequence
  Description of Artificial Sequence: Synthetic oligonucleotide
  Sense strand starting at position 3193 of SEQ ID NO: 1244596
gugaguuuaggucaaaccu

SEQ ID NO: 1500635 - RNA, 19 nt, Artificial Sequence
  Description of Artificial Sequence: Synthetic oligonucleotide
  Antisense strand to SEQ ID NO: 1500634
agguuugaccuaaacucac

SEQ ID NO: 1500636 - RNA, 19 nt, Artificial Sequence
  Description of Artificial Sequence: Synthetic oligonucleotide
  Sense strand starting at position 3272 of SEQ ID NO: 1244596
ggcaguuaaugaguguuua

SEQ ID NO: 1500637 - RNA, 19 nt, Artificial Sequence
  Description of Artificial Sequence: Synthetic oligonucleotide
  Antisense strand to SEQ ID NO: 1500636
uaaacacucauuaacugcc

SEQ ID NO: 1500638 - RNA, 19 nt, Artificial Sequence
  Description of Artificial Sequence: Synthetic oligonucleotide
  Sense strand starting at position 3276 of SEQ ID NO: 1244596
guuaaugaguguuuacaaa

SEQ ID NO: 1500639 - RNA, 19 nt, Artificial Sequence
  Description of Artificial Sequence: Synthetic oligonucleotide
  Antisense strand to SEQ ID NO: 1500638
uuuguaaacacucauuaac

SEQ ID NO: 1500640 - RNA, 19 nt, Artificial Sequence
  Description of Artificial Sequence: Synthetic oligonucleotide
  Sense strand starting at position 3350 of SEQ ID NO: 1244596
auaagagcugaguguuauu

SEQ ID NO: 1500641 - RNA, 19 nt, Artificial Sequence
  Description of Artificial Sequence: Synthetic oligonucleotide
  Antisense strand to SEQ ID NO: 1500640
aauaacacucagcucuuau

SEQ ID NO: 1500642 - RNA, 19 nt, Artificial Sequence
  Description of Artificial Sequence: Synthetic oligonucleotide
  Sense strand starting at position 3811 of SEQ ID NO: 1244596
agugaagucagcuggauug

SEQ ID NO: 1500643 - RNA, 19 nt, Artificial Sequence
  Description of Artificial Sequence: Synthetic oligonucleotide
  Antisense strand to SEQ ID NO: 1500642
caauccagcugacuucacu

SEQ ID NO: 1500644 - RNA, 19 nt, Artificial Sequence
  Description of Artificial Sequence: Synthetic oligonucleotide
  Sense strand starting at position 300 of SEQ ID NO: 1244597
aagugaagucaggguaaca

SEQ ID NO: 1500645 - RNA, 19 nt, Artificial Sequence
  Description of Artificial Sequence: Synthetic oligonucleotide
  Antisense strand to SEQ ID NO: 1500644
uguuacccugacuucacuu

SEQ ID NO: 1500646 - RNA, 19 nt, Artificial Sequence
  Description of Artificial Sequence: Synthetic oligonucleotide
  Sense strand starting at position 433 of SEQ ID NO: 1244597
gagggauucuucucaccag

SEQ ID NO: 1500647 - RNA, 19 nt, Artificial Sequence
  Description of Artificial Sequence: Synthetic oligonucleotide
  Antisense strand to SEQ ID NO: 1500646
cuggugagaagaaucccuc

SEQ ID NO: 1500648 - RNA, 19 nt, Artificial Sequence
  Description of Artificial Sequence: Synthetic oligonucleotide
  Sense strand starting at position 434 of SEQ ID NO: 1244597
agggauucuucucaccaga

SEQ ID NO: 1500649 - RNA, 19 nt, Artificial Sequence
  Description of Artificial Sequence: Synthetic oligonucleotide
  Antisense strand to SEQ ID NO: 1500648
ucuggugagaagaaucccu

SEQ ID NO: 1500650 - RNA, 19 nt, Artificial Sequence
  Description of Artificial Sequence: Synthetic oligonucleotide
  Sense strand starting at position 902 of SEQ ID NO: 1244597
gaaggaauguugcuugaaa

SEQ ID NO: 1500651 - RNA, 19 nt, Artificial Sequence
  Description of Artificial Sequence: Synthetic oligonucleotide
  Antisense strand to SEQ ID NO: 1500650
uuucaagcaacauuccuuc

SEQ ID NO: 1500652 - RNA, 19 nt, Artificial Sequence
  Description of Artificial Sequence: Synthetic oligonucleotide
  Sense strand starting at position 903 of SEQ ID NO: 1244597
aaggaauguugcuugaaag

SEQ ID NO: 1500653 - RNA, 19 nt, Artificial Sequence
  Description of Artificial Sequence: Synthetic oligonucleotide
  Antisense strand to SEQ ID NO: 1500652
cuuucaagcaacauuccuu

SEQ ID NO: 1500654 - RNA, 19 nt, Artificial Sequence
  Description of Artificial Sequence: Synthetic oligonucleotide
  Sense strand starting at position 904 of SEQ ID NO: 1244597
aggaauguugcuugaaaga

SEQ ID NO: 1500655 - RNA, 19 nt, Artificial Sequence
  Description of Artificial Sequence: Synthetic oligonucleotide
  Antisense strand to SEQ ID NO: 1500654
ucuuucaagcaacauuccu

SEQ ID NO: 1500656 - RNA, 19 nt, Artificial Sequence
  Description of Artificial Sequence: Synthetic oligonucleotide
  Sense strand starting at position 2325 of SEQ ID NO: 1244597
gccucauuugccuaaugca

SEQ ID NO: 1500657 - RNA, 19 nt, Artificial Sequence
  Description of Artificial Sequence: Synthetic oligonucleotide
  Antisense strand to SEQ ID NO: 1500656
ugcauuaggcaaaugaggc

SEQ ID NO: 1500658 - RNA, 19 nt, Artificial Sequence
  Description of Artificial Sequence: Synthetic oligonucleotide
  Sense strand starting at position 2349 of SEQ ID NO: 1244597
gcugaacucucgcugaacu

SEQ ID NO: 1500659 - RNA, 19 nt, Artificial Sequence
  Description of Artificial Sequence: Synthetic oligonucleotide
  Antisense strand to SEQ ID NO: 1500658
aguucagcgagaguucagc

SEQ ID NO: 1500660 - RNA, 19 nt, Artificial Sequence
  Description of Artificial Sequence: Synthetic oligonucleotide
  Sense strand starting at position 2579 of SEQ ID NO: 1244597
ggacgcugugucggaauga

SEQ ID NO: 1500661 - RNA, 19 nt, Artificial Sequence
  Description of Artificial Sequence: Synthetic oligonucleotide
  Antisense strand to SEQ ID NO: 1500660
ucauuccgacacagcgucc

SEQ ID NO: 1500662 - RNA, 19 nt, Artificial Sequence
  Description of Artificial Sequence: Synthetic oligonucleotide
  Sense strand starting at position 2610 of SEQ ID NO: 1244597
ugucauugucugugacauc

SEQ ID NO: 1500663 - RNA, 19 nt, Artificial Sequence
  Description of Artificial Sequence: Synthetic oligonucleotide
  Antisense strand to SEQ ID NO: 1500662
gaugucacagacaaugaca

SEQ ID NO: 1500664 - RNA, 19 nt, Artificial Sequence
  Description of Artificial Sequence: Synthetic oligonucleotide
  Sense strand starting at position 2620 of SEQ ID NO: 1244597
ugugacaucaugugugacu

SEQ ID NO: 1500665 - RNA, 19 nt, Artificial Sequence
  Description of Artificial Sequence: Synthetic oligonucleotide
  Antisense strand to SEQ ID NO: 1500664
agucacacaugaugucaca

SEQ ID NO: 1500666 - RNA, 19 nt, Artificial Sequence
  Description of Artificial Sequence: Synthetic oligonucleotide
  Sense strand starting at position 2792 of SEQ ID NO: 1244597
uguccagcucuggagagau

SEQ ID NO: 1500667 - RNA, 19 nt, Artificial Sequence
  Description of Artificial Sequence: Synthetic oligonucleotide
  Antisense strand to SEQ ID NO: 1500666
aucucuccagagcuggaca

SEQ ID NO: 1500668 - RNA, 19 nt, Artificial Sequence
  Description of Artificial Sequence: Synthetic oligonucleotide
  Sense strand starting at position 2824 of SEQ ID NO: 1244597
ggugccuuccaguggacua

SEQ ID NO: 1500669 - RNA, 19 nt, Artificial Sequence
  Description of Artificial Sequence: Synthetic oligonucleotide
  Antisense strand to SEQ ID NO: 1500668
uaguccacuggaaggcacc

SEQ ID NO: 1500670 - RNA, 19 nt, Artificial Sequence
  Description of Artificial Sequence: Synthetic oligonucleotide
  Sense strand starting at position 2895 of SEQ ID NO: 1244597
uuggguaggucccuagaaa

SEQ ID NO: 1500671 - RNA, 19 nt, Artificial Sequence
  Description of Artificial Sequence: Synthetic oligonucleotide
  Antisense strand to SEQ ID NO: 1500670
uuucuagggaccuacccaa

SEQ ID NO: 1500672 - RNA, 19 nt, Artificial Sequence
  Description of Artificial Sequence: Synthetic oligonucleotide
  Sense strand starting at position 2993 of SEQ ID NO: 1244597
aggacauucuucuagaaga

SEQ ID NO: 1500673 - RNA, 19 nt, Artificial Sequence
  Description of Artificial Sequence: Synthetic oligonucleotide
  Antisense strand to SEQ ID NO: 1500672
ucuucuagaagaauguccu

SEQ ID NO: 1500674 - RNA, 19 nt, Artificial Sequence
  Description of Artificial Sequence: Synthetic oligonucleotide
  Sense strand starting at position 3007 of SEQ ID NO: 1244597
gaagaagccuggcucuuua

SEQ ID NO: 1500675 - RNA, 19 nt, Artificial Sequence
  Description of Artificial Sequence: Synthetic oligonucleotide
  Antisense strand to SEQ ID NO: 1500674
uaaagagccaggcuucuuc

SEQ ID NO: 1500676 - RNA, 19 nt, Artificial Sequence
  Description of Artificial Sequence: Synthetic oligonucleotide
  Sense strand starting at position 3094 of SEQ ID NO: 1244597
ggcuauguggguuguccaa

SEQ ID NO: 1500677 - RNA, 19 nt, Artificial Sequence
  Description of Artificial Sequence: Synthetic oligonucleotide
  Antisense strand to SEQ ID NO: 1500676
uuggacaacccacauagcc

SEQ ID NO: 1500678 - RNA, 19 nt, Artificial Sequence
  Description of Artificial Sequence: Synthetic oligonucleotide
  Sense strand starting at position 3096 of SEQ ID NO: 1244597
cuauguggguuguccaaga

SEQ ID NO: 1500679 - RNA, 19 nt, Artificial Sequence
  Description of Artificial Sequence: Synthetic oligonucleotide
  Antisense strand to SEQ ID NO: 1500678
ucuuggacaacccacauag

SEQ ID NO: 1500680 - RNA, 19 nt, Artificial Sequence
  Description of Artificial Sequence: Synthetic oligonucleotide
  Sense strand starting at position 3101 of SEQ ID NO: 1244597
uggguuguccaagaucaca

SEQ ID NO: 1500681 - RNA, 19 nt, Artificial Sequence
  Description of Artificial Sequence: Synthetic oligonucleotide
  Antisense strand to SEQ ID NO: 1500680
ugugaucuuggacaaccca

SEQ ID NO: 1500682 - RNA, 19 nt, Artificial Sequence
  Description of Artificial Sequence: Synthetic oligonucleotide
  Sense strand starting at position 3278 of SEQ ID NO: 1244597
agcaaauaaucacuguaug

SEQ ID NO: 1500683 - RNA, 19 nt, Artificial Sequence
  Description of Artificial Sequence: Synthetic oligonucleotide
  Antisense strand to SEQ ID NO: 1500682
cauacagugauuauuugcu

SEQ ID NO: 1500684 - RNA, 19 nt, Artificial Sequence
  Description of Artificial Sequence: Synthetic oligonucleotide
  Sense strand starting at position 3305 of SEQ ID NO: 1244597
auugcaaacugagauaaau

SEQ ID NO: 1500685 - RNA, 19 nt, Artificial Sequence
  Description of Artificial Sequence: Synthetic oligonucleotide
  Antisense strand to SEQ ID NO: 1500684
auuuaucucaguuugcaau

SEQ ID NO: 1500686 - RNA, 19 nt, Artificial Sequence
  Description of Artificial Sequence: Synthetic oligonucleotide
  Sense strand starting at position 3322 of SEQ ID NO: 1244597
augcuauuaugcucugaag

SEQ ID NO: 1500687 - RNA, 19 nt, Artificial Sequence
  Description of Artificial Sequence: Synthetic oligonucleotide
  Antisense strand to SEQ ID NO: 1500686
cuucagagcauaauagcau

SEQ ID NO: 1500688 - RNA, 19 nt, Artificial Sequence
  Description of Artificial Sequence: Synthetic oligonucleotide
  Sense strand starting at position 3324 of SEQ ID NO: 1244597
gcuauuaugcucugaagaa

SEQ ID NO: 1500689 - RNA, 19 nt, Artificial Sequence
  Description of Artificial Sequence: Synthetic oligonucleotide
  Antisense strand to SEQ ID NO: 1500688
uucuucagagcauaauagc

SEQ ID NO: 1500690 - RNA, 19 nt, Artificial Sequence
  Description of Artificial Sequence: Synthetic oligonucleotide
  Sense strand starting at position 3352 of SEQ ID NO: 1244597
guaccuaauuuagguuuaa

SEQ ID NO: 1500691 - RNA, 19 nt, Artificial Sequence
  Description of Artificial Sequence: Synthetic oligonucleotide
  Antisense strand to SEQ ID NO: 1500690
uuaaaccuaaauuagguac

SEQ ID NO: 1500692 - RNA, 19 nt, Artificial Sequence
  Description of Artificial Sequence: Synthetic oligonucleotide
  Sense strand starting at position 3414 of SEQ ID NO: 1244597
gaaaguuuguaaguuaauc

SEQ ID NO: 1500693 - RNA, 19 nt, Artificial Sequence
  Description of Artificial Sequence: Synthetic oligonucleotide
  Antisense strand to SEQ ID NO: 1500692
gauuaacuuacaaacuuuc

SEQ ID NO: 1500694 - RNA, 19 nt, Artificial Sequence
  Description of Artificial Sequence: Synthetic oligonucleotide
  Sense strand starting at position 3441 of SEQ ID NO: 1244597
aguagaaaggaguguaguu

SEQ ID NO: 1500695 - RNA, 19 nt, Artificial Sequence
  Description of Artificial Sequence: Synthetic oligonucleotide
  Antisense strand to SEQ ID NO: 1500694
aacuacacuccuuucuacu

SEQ ID NO: 1500696 - RNA, 19 nt, Artificial Sequence
  Description of Artificial Sequence: Synthetic oligonucleotide
  Sense strand starting at position 3446 of SEQ ID NO: 1244597
aaaggaguguaguuccagu

SEQ ID NO: 1500697 - RNA, 19 nt, Artificial Sequence
  Description of Artificial Sequence: Synthetic oligonucleotide
  Antisense strand to SEQ ID NO: 1500696
acuggaacuacacuccuuu

SEQ ID NO: 1500698 - RNA, 19 nt, Artificial Sequence
  Description of Artificial Sequence: Synthetic oligonucleotide
  Sense strand starting at position 3619 of SEQ ID NO: 1244597
gcuuauaggccucaguaag

SEQ ID NO: 1500699 - RNA, 19 nt, Artificial Sequence
  Description of Artificial Sequence: Synthetic oligonucleotide
  Antisense strand to SEQ ID NO: 1500698
cuuacugaggccuauaagc

SEQ ID NO: 1500700 - RNA, 19 nt, Artificial Sequence
  Description of Artificial Sequence: Synthetic oligonucleotide
  Sense strand starting at position 3697 of SEQ ID NO: 1244597
agaucagauuuacagugua

SEQ ID NO: 1500701 - RNA, 19 nt, Artificial Sequence
  Description of Artificial Sequence: Synthetic oligonucleotide
  Antisense strand to SEQ ID NO: 1500700
uacacuguaaaucugaucu

SEQ ID NO: 1500702 - RNA, 19 nt, Artificial Sequence
  Description of Artificial Sequence: Synthetic oligonucleotide
  Sense strand starting at position 3719 of SEQ ID NO: 1244597
agaucuuuccaguaguugu

SEQ ID NO: 1500703 - RNA, 19 nt, Artificial Sequence
  Description of Artificial Sequence: Synthetic oligonucleotide
  Antisense strand to SEQ ID NO: 1500702
acaacuacuggaaagaucu

SEQ ID NO: 1500704 - RNA, 19 nt, Artificial Sequence
  Description of Artificial Sequence: Synthetic oligonucleotide
  Sense strand starting at position 3726 of SEQ ID NO: 1244597
uccaguaguugugugaaga

SEQ ID NO: 1500705 - RNA, 19 nt, Artificial Sequence
  Description of Artificial Sequence: Synthetic oligonucleotide
  Antisense strand to SEQ ID NO: 1500704
ucuucacacaacuacugga

SEQ ID NO: 1500706 - RNA, 19 nt, Artificial Sequence
  Description of Artificial Sequence: Synthetic oligonucleotide
  Sense strand starting at position 3727 of SEQ ID NO: 1244597
ccaguaguugugugaagaa

SEQ ID NO: 1500707 - RNA, 19 nt, Artificial Sequence
  Description of Artificial Sequence: Synthetic oligonucleotide
  Antisense strand to SEQ ID NO: 1500706
uucuucacacaacuacugg

SEQ ID NO: 1500708 - RNA, 19 nt, Artificial Sequence
  Description of Artificial Sequence: Synthetic oligonucleotide
  Sense strand starting at position 3730 of SEQ ID NO: 1244597
guaguugugugaagaaugg

SEQ ID NO: 1500709 - RNA, 19 nt, Artificial Sequence
  Description of Artificial Sequence: Synthetic oligonucleotide
  Antisense strand to SEQ ID NO: 1500708
ccauucuucacacaacuac

SEQ ID NO: 1500710 - RNA, 19 nt, Artificial Sequence
  Description of Artificial Sequence: Synthetic oligonucleotide
  Sense strand starting at position 3734 of SEQ ID NO: 1244597
uugugugaagaauggauua

SEQ ID NO: 1500711 - RNA, 19 nt, Artificial Sequence
  Description of Artificial Sequence: Synthetic oligonucleotide
  Antisense strand to SEQ ID NO: 1500710
uaauccauucuucacacaa

SEQ ID NO: 1500712 - RNA, 19 nt, Artificial Sequence
  Description of Artificial Sequence: Synthetic oligonucleotide
  Sense strand starting at position 3810 of SEQ ID NO: 1244597
gguggcuuggccuaggaaa

SEQ ID NO: 1500713 - RNA, 19 nt, Artificial Sequence
  Description of Artificial Sequence: Synthetic oligonucleotide
  Antisense strand to SEQ ID NO: 1500712
uuuccuaggccaagccacc

SEQ ID NO: 1500714 - RNA, 19 nt, Artificial Sequence
  Description of Artificial Sequence: Synthetic oligonucleotide
  Sense strand starting at position 3831 of SEQ ID NO: 1244597
ggaagugcugauggacaga

SEQ ID NO: 1500715 - RNA, 19 nt, Artificial Sequence
  Description of Artificial Sequence: Synthetic oligonucleotide
  Antisense strand to SEQ ID NO: 1500714
ucuguccaucagcacuucc

SEQ ID NO: 1500716 - RNA, 19 nt, Artificial Sequence
  Description of Artificial Sequence: Synthetic oligonucleotide
  Sense strand starting at position 3927 of SEQ ID NO: 1244597
agcaaagagacuugugugu

SEQ ID NO: 1500717 - RNA, 19 nt, Artificial Sequence
  Description of Artificial Sequence: Synthetic oligonucleotide
  Antisense strand to SEQ ID NO: 1500716
acacacaagucucuuugcu

SEQ ID NO: 1500718 - RNA, 19 nt, Artificial Sequence
  Description of Artificial Sequence: Synthetic oligonucleotide
  Sense strand starting at position 3942 of SEQ ID NO: 1244597
gugugacuuacgcaucagu

SEQ ID NO: 1500719 - RNA, 19 nt, Artificial Sequence
  Description of Artificial Sequence: Synthetic oligonucleotide
  Antisense strand to SEQ ID NO: 1500718
acugaugcguaagucacac

SEQ ID NO: 1500720 - RNA, 19 nt, Artificial Sequence
  Description of Artificial Sequence: Synthetic oligonucleotide
  Sense strand starting at position 3945 of SEQ ID NO: 1244597
ugacuuacgcaucagugaa

SEQ ID NO: 1500721 - RNA, 19 nt, Artificial Sequence
  Description of Artificial Sequence: Synthetic oligonucleotide
  Antisense strand to SEQ ID NO: 1500720
uucacugaugcguaaguca

SEQ ID NO: 1500722 - RNA, 19 nt, Artificial Sequence
  Description of Artificial Sequence: Synthetic oligonucleotide
  Sense strand starting at position 3958 of SEQ ID NO: 1244597
agugaaguuccugagacug

SEQ ID NO: 1500723 - RNA, 19 nt, Artificial Sequence
  Description of Artificial Sequence: Synthetic oligonucleotide
  Antisense strand to SEQ ID NO: 1500722
cagucucaggaacuucacu

SEQ ID NO: 1500724 - RNA, 19 nt, Artificial Sequence
  Description of Artificial Sequence: Synthetic oligonucleotide
  Sense strand starting at position 32 of SEQ ID NO: 1244598
ccaggaucuucucagaacu

SEQ ID NO: 1500725 - RNA, 19 nt, Artificial Sequence
  Description of Artificial Sequence: Synthetic oligonucleotide
  Antisense strand to SEQ ID NO: 1500724
aguucugagaagauccugg

SEQ ID NO: 1500726 - RNA, 19 nt, Artificial Sequence
  Description of Artificial Sequence: Synthetic oligonucleotide
  Sense strand starting at position 308 of SEQ ID NO: 1244598
cuuauuccuccaggaagaa

SEQ ID NO: 1500727 - RNA, 19 nt, Artificial Sequence
  Description of Artificial Sequence: Synthetic oligonucleotide
  Antisense strand to SEQ ID NO: 1500726
uucuuccuggaggaauaag

SEQ ID NO: 1500728 - RNA, 19 nt, Artificial Sequence
  Description of Artificial Sequence: Synthetic oligonucleotide
  Sense strand starting at position 506 of SEQ ID NO: 1244598
gguccaauuuccuagcaag

SEQ ID NO: 1500729 - RNA, 19 nt, Artificial Sequence
  Description of Artificial Sequence: Synthetic oligonucleotide
  Antisense strand to SEQ ID NO: 1500728
cuugcuaggaaauuggacc

SEQ ID NO: 1500730 - RNA, 19 nt, Artificial Sequence
  Description of Artificial Sequence: Synthetic oligonucleotide
  Sense strand starting at position 526 of SEQ ID NO: 1244598
ccuggaagguccuuacaga

SEQ ID NO: 1500731 - RNA, 19 nt, Artificial Sequence
  Description of Artificial Sequence: Synthetic oligonucleotide
  Antisense strand to SEQ ID NO: 1500730
ucuguaaggaccuuccagg

SEQ ID NO: 1500732 - RNA, 19 nt, Artificial Sequence
  Description of Artificial Sequence: Synthetic oligonucleotide
  Sense strand starting at position 560 of SEQ ID NO: 1244598
acaaucuugcccuaugaag

SEQ ID NO: 1500733 - RNA, 19 nt, Artificial Sequence
  Description of Artificial Sequence: Synthetic oligonucleotide
  Antisense strand to SEQ ID NO: 1500732
cuucauagggcaagauugu

SEQ ID NO: 1500734 - RNA, 19 nt, Artificial Sequence
  Description of Artificial Sequence: Synthetic oligonucleotide
  Sense strand starting at position 615 of SEQ ID NO: 1244598
augucuuggccaggaaacu

SEQ ID NO: 1500735 - RNA, 19 nt, Artificial Sequence
  Description of Artificial Sequence: Synthetic oligonucleotide
  Antisense strand to SEQ ID NO: 1500734
aguuuccuggccaagacau

SEQ ID NO: 1500736 - RNA, 19 nt, Artificial Sequence
  Description of Artificial Sequence: Synthetic oligonucleotide
  Sense strand starting at position 833 of SEQ ID NO: 1244598
cugggcaucugauccaaga

SEQ ID NO: 1500737 - RNA, 19 nt, Artificial Sequence
  Description of Artificial Sequence: Synthetic oligonucleotide
  Antisense strand to SEQ ID NO: 1500736
ucuuggaucagaugcccag

SEQ ID NO: 1500738 - RNA, 19 nt, Artificial Sequence
  Description of Artificial Sequence: Synthetic oligonucleotide
  Sense strand starting at position 952 of SEQ ID NO: 1244598
gucuuuccuuucgcaagga

SEQ ID NO: 1500739 - RNA, 19 nt, Artificial Sequence
  Description of Artificial Sequence: Synthetic oligonucleotide
  Antisense strand to SEQ ID NO: 1500738
uccuugcgaaaggaaagac

SEQ ID NO: 1500740 - RNA, 19 nt, Artificial Sequence
  Description of Artificial Sequence: Synthetic oligonucleotide
  Sense strand starting at position 965 of SEQ ID NO: 1244598
caaggagcagccugacaau

SEQ ID NO: 1500741 - RNA, 19 nt, Artificial Sequence
  Description of Artificial Sequence: Synthetic oligonucleotide
  Antisense strand to SEQ ID NO: 1500740
auugucaggcugcuccuug

SEQ ID NO: 1500742 - RNA, 19 nt, Artificial Sequence
  Description of Artificial Sequence: Synthetic oligonucleotide
  Sense strand starting at position 1129 of SEQ ID NO: 1244598
gagcaaagucgacaaguca

SEQ ID NO: 1500743 - RNA, 19 nt, Artificial Sequence
  Description of Artificial Sequence: Synthetic oligonucleotide
  Antisense strand to SEQ ID NO: 1500742
ugacuugucgacuuugcuc

SEQ ID NO: 1500744 - RNA, 19 nt, Artificial Sequence
  Description of Artificial Sequence: Synthetic oligonucleotide
  Sense strand starting at position 1136 of SEQ ID NO: 1244598
gucgacaagucagucuauu

SEQ ID NO: 1500745 - RNA, 19 nt, Artificial Sequence
  Description of Artificial Sequence: Synthetic oligonucleotide
  Antisense strand to SEQ ID NO: 1500744
aauagacugacuugucgac

SEQ ID NO: 1500746 - RNA, 19 nt, Artificial Sequence
  Description of Artificial Sequence: Synthetic oligonucleotide
  Sense strand starting at position 1454 of SEQ ID NO: 1244598
uuugcuuaucauuaaagag

SEQ ID NO: 1500747 - RNA, 19 nt, Artificial Sequence
  Description of Artificial Sequence: Synthetic oligonucleotide
  Antisense strand to SEQ ID NO: 1500746
cucuuuaaugauaagcaaa

SEQ ID NO: 1500748 - RNA, 19 nt, Artificial Sequence
  Description of Artificial Sequence: Synthetic oligonucleotide
  Sense strand starting at position 2093 of SEQ ID NO: 1244598
cccgccucuccuuaauaga

SEQ ID NO: 1500749 - RNA, 19 nt, Artificial Sequence
  Description of Artificial Sequence: Synthetic oligonucleotide
  Antisense strand to SEQ ID NO: 1500748
ucuauuaaggagaggcggg

SEQ ID NO: 1500750 - RNA, 19 nt, Artificial Sequence
  Description of Artificial Sequence: Synthetic oligonucleotide
  Sense strand starting at position 2103 of SEQ ID NO: 1244598
cuuaauagaccucgggaag

SEQ ID NO: 1500751 - RNA, 19 nt, Artificial Sequence
  Description of Artificial Sequence: Synthetic oligonucleotide
  Antisense strand to SEQ ID NO: 1500750
cuucccgaggucuauuaag

SEQ ID NO: 1500752 - RNA, 19 nt, Artificial Sequence
  Description of Artificial Sequence: Synthetic oligonucleotide
  Sense strand starting at position 2137 of SEQ ID NO: 1244598
agccacuccuaguugaaga

SEQ ID NO: 1500753 - RNA, 19 nt, Artificial Sequence
  Description of Artificial Sequence: Synthetic oligonucleotide
  Antisense strand to SEQ ID NO: 1500752
ucuucaacuaggaguggcu

SEQ ID NO: 1500754 - RNA, 19 nt, Artificial Sequence
  Description of Artificial Sequence: Synthetic oligonucleotide
  Sense strand starting at position 2152 of SEQ ID NO: 1244598
aagacuggaccgugggaau

SEQ ID NO: 1500755 - RNA, 19 nt, Artificial Sequence
  Description of Artificial Sequence: Synthetic oligonucleotide
  Antisense strand to SEQ ID NO: 1500754
auucccacgguccagucuu

SEQ ID NO: 1500756 - RNA, 19 nt, Artificial Sequence
  Description of Artificial Sequence: Synthetic oligonucleotide
  Sense strand starting at position 2162 of SEQ ID NO: 1244598
cgugggaauccgggagaau

SEQ ID NO: 1500757 - RNA, 19 nt, Artificial Sequence
  Description of Artificial Sequence: Synthetic oligonucleotide
  Antisense strand to SEQ ID NO: 1500756
auucucccggauucccacg

SEQ ID NO: 1500758 - RNA, 19 nt, Artificial Sequence
  Description of Artificial Sequence: Synthetic oligonucleotide
  Sense strand starting at position 2222 of SEQ ID NO: 1244598
gggugagguucugcggaaa

SEQ ID NO: 1500759 - RNA, 19 nt, Artificial Sequence
  Description of Artificial Sequence: Synthetic oligonucleotide
  Antisense strand to SEQ ID NO: 1500758
uuuccgcagaaccucaccc

SEQ ID NO: 1500760 - RNA, 19 nt, Artificial Sequence
  Description of Artificial Sequence: Synthetic oligonucleotide
  Sense strand starting at position 2225 of SEQ ID NO: 1244598
ugagguucugcggaaagaa

SEQ ID NO: 1500761 - RNA, 19 nt, Artificial Sequence
  Description of Artificial Sequence: Synthetic oligonucleotide
  Antisense strand to SEQ ID NO: 1500760
uucuuuccgcagaaccuca

SEQ ID NO: 1500762 - RNA, 19 nt, Artificial Sequence
  Description of Artificial Sequence: Synthetic oligonucleotide
  Sense strand starting at position 2274 of SEQ ID NO: 1244598
gcgugugguauccuacacu

SEQ ID NO: 1500763 - RNA, 19 nt, Artificial Sequence
  Description of Artificial Sequence: Synthetic oligonucleotide
  Antisense strand to SEQ ID NO: 1500762
aguguaggauaccacacgc

SEQ ID NO: 1500764 - RNA, 19 nt, Artificial Sequence
  Description of Artificial Sequence: Synthetic oligonucleotide
  Sense strand starting at position 2320 of SEQ ID NO: 1244598
acaccuaaaucugagaagu

SEQ ID NO: 1500765 - RNA, 19 nt, Artificial Sequence
  Description of Artificial Sequence: Synthetic oligonucleotide
  Antisense strand to SEQ ID NO: 1500764
acuucucagauuuaggugu

SEQ ID NO: 1500766 - RNA, 19 nt, Artificial Sequence
  Description of Artificial Sequence: Synthetic oligonucleotide
  Sense strand starting at position 2322 of SEQ ID NO: 1244598
accuaaaucugagaaguga

SEQ ID NO: 1500767 - RNA, 19 nt, Artificial Sequence
  Description of Artificial Sequence: Synthetic oligonucleotide
  Antisense strand to SEQ ID NO: 1500766
ucacuucucagauuuaggu

SEQ ID NO: 1500768 - RNA, 19 nt, Artificial Sequence
  Description of Artificial Sequence: Synthetic oligonucleotide
  Sense strand starting at position 2346 of SEQ ID NO: 1244598
cggcguaauauggaaguga

SEQ ID NO: 1500769 - RNA, 19 nt, Artificial Sequence
  Description of Artificial Sequence: Synthetic oligonucleotide
  Antisense strand to SEQ ID NO: 1500768
ucacuuccauauuacgccg

SEQ ID NO: 1500770 - RNA, 19 nt, Artificial Sequence
  Description of Artificial Sequence: Synthetic oligonucleotide
  Sense strand starting at position 2347 of SEQ ID NO: 1244598
ggcguaauauggaagugag

SEQ ID NO: 1500771 - RNA, 19 nt, Artificial Sequence
  Description of Artificial Sequence: Synthetic oligonucleotide
  Antisense strand to SEQ ID NO: 1500770
cucacuuccauauuacgcc

SEQ ID NO: 1500772 - RNA, 19 nt, Artificial Sequence
  Description of Artificial Sequence: Synthetic oligonucleotide
  Sense strand starting at position 2436 of SEQ ID NO: 1244598
ggaacugagagcuguguga

SEQ ID NO: 1500773 - RNA, 19 nt, Artificial Sequence
  Description of Artificial Sequence: Synthetic oligonucleotide
  Antisense strand to SEQ ID NO: 1500772
ucacacagcucucaguucc

SEQ ID NO: 1500774 - RNA, 19 nt, Artificial Sequence
  Description of Artificial Sequence: Synthetic oligonucleotide
  Sense strand starting at position 2440 of SEQ ID NO: 1244598
cugagagcugugugaccuu

SEQ ID NO: 1500775 - RNA, 19 nt, Artificial Sequence
  Description of Artificial Sequence: Synthetic oligonucleotide
  Antisense strand to SEQ ID NO: 1500774
aaggucacacagcucucag

SEQ ID NO: 1500776 - RNA, 19 nt, Artificial Sequence
  Description of Artificial Sequence: Synthetic oligonucleotide
  Sense strand starting at position 2490 of SEQ ID NO: 1244598
uuaucucagcugcaagaaa

SEQ ID NO: 1500777 - RNA, 19 nt, Artificial Sequence
  Description of Artificial Sequence: Synthetic oligonucleotide
  Antisense strand to SEQ ID NO: 1500776
uuucuugcagcugagauaa

SEQ ID NO: 1500778 - RNA, 19 nt, Artificial Sequence
  Description of Artificial Sequence: Synthetic oligonucleotide
  Sense strand starting at position 2531 of SEQ ID NO: 1244598
aggaguagaucucccgcaa

SEQ ID NO: 1500779 - RNA, 19 nt, Artificial Sequence
  Description of Artificial Sequence: Synthetic oligonucleotide
  Antisense strand to SEQ ID NO: 1500778
uugcgggagaucuacuccu

SEQ ID NO: 1500780 - RNA, 19 nt, Artificial Sequence
  Description of Artificial Sequence: Synthetic oligonucleotide
  Sense strand starting at position 2535 of SEQ ID NO: 1244598
guagaucucccgcaaguau

SEQ ID NO: 1500781 - RNA, 19 nt, Artificial Sequence
  Description of Artificial Sequence: Synthetic oligonucleotide
  Antisense strand to SEQ ID NO: 1500780
auacuugcgggagaucuac

SEQ ID NO: 1500782 - RNA, 19 nt, Artificial Sequence
  Description of Artificial Sequence: Synthetic oligonucleotide
  Sense strand starting at position 2735 of SEQ ID NO: 1244598
cccgaacaagucuggagaa

SEQ ID NO: 1500783 - RNA, 19 nt, Artificial Sequence
  Description of Artificial Sequence: Synthetic oligonucleotide
  Antisense strand to SEQ ID NO: 1500782
uucuccagacuuguucggg

SEQ ID NO: 1500784 - RNA, 19 nt, Artificial Sequence
  Description of Artificial Sequence: Synthetic oligonucleotide
  Sense strand starting at position 2917 of SEQ ID NO: 1244598
gaagcagaauugcuuagaa

SEQ ID NO: 1500785 - RNA, 19 nt, Artificial Sequence
  Description of Artificial Sequence: Synthetic oligonucleotide
  Antisense strand to SEQ ID NO: 1500784
uucuaagcaauucugcuuc

SEQ ID NO: 1500786 - RNA, 19 nt, Artificial Sequence
  Description of Artificial Sequence: Synthetic oligonucleotide
  Sense strand starting at position 2950 of SEQ ID NO: 1244598
ccuguucccaggcagagaa

SEQ ID NO: 1500787 - RNA, 19 nt, Artificial Sequence
  Description of Artificial Sequence: Synthetic oligonucleotide
  Antisense strand to SEQ ID NO: 1500786
uucucugccugggaacagg

SEQ ID NO: 1500788 - RNA, 19 nt, Artificial Sequence
  Description of Artificial Sequence: Synthetic oligonucleotide
  Sense strand starting at position 2962 of SEQ ID NO: 1244598
cagagaaguggccacaagu

SEQ ID NO: 1500789 - RNA, 19 nt, Artificial Sequence
  Description of Artificial Sequence: Synthetic oligonucleotide
  Antisense strand to SEQ ID NO: 1500788
acuuguggccacuucucug

SEQ ID NO: 1500790 - RNA, 19 nt, Artificial Sequence
  Description of Artificial Sequence: Synthetic oligonucleotide
  Sense strand starting at position 3174 of SEQ ID NO: 1244598
cgggucuagaauugaagua

SEQ ID NO: 1500791 - RNA, 19 nt, Artificial Sequence
  Description of Artificial Sequence: Synthetic oligonucleotide
  Antisense strand to SEQ ID NO: 1500790
uacuucaauucuagacccg

SEQ ID NO: 1500792 - RNA, 19 nt, Artificial Sequence
  Description of Artificial Sequence: Synthetic oligonucleotide
  Sense strand starting at position 3187 of SEQ ID NO: 1244598
gaaguaucugauugucccu

SEQ ID NO: 1500793 - RNA, 19 nt, Artificial Sequence
  Description of Artificial Sequence: Synthetic oligonucleotide
  Antisense strand to SEQ ID NO: 1500792
agggacaaucagauacuuc

SEQ ID NO: 1500794 - RNA, 19 nt, Artificial Sequence
  Description of Artificial Sequence: Synthetic oligonucleotide
  Sense strand starting at position 3192 of SEQ ID NO: 1244598
aucugauugucccuggcuu

SEQ ID NO: 1500795 - RNA, 19 nt, Artificial Sequence
  Description of Artificial Sequence: Synthetic oligonucleotide
  Antisense strand to SEQ ID NO: 1500794
aagccagggacaaucagau

SEQ ID NO: 1500796 - RNA, 19 nt, Artificial Sequence
  Description of Artificial Sequence: Synthetic oligonucleotide
  Sense strand starting at position 3193 of SEQ ID NO: 1244598
ucugauugucccuggcuuu

SEQ ID NO: 1500797 - RNA, 19 nt, Artificial Sequence
  Description of Artificial Sequence: Synthetic oligonucleotide
  Antisense strand to SEQ ID NO: 1500796
aaagccagggacaaucaga

SEQ ID NO: 1500798 - RNA, 19 nt, Artificial Sequence
  Description of Artificial Sequence: Synthetic oligonucleotide
  Sense strand starting at position 3194 of SEQ ID NO: 1244598
cugauugucccuggcuuua

SEQ ID NO: 1500799 - RNA, 19 nt, Artificial Sequence
  Description of Artificial Sequence: Synthetic oligonucleotide
  Antisense strand to SEQ ID NO: 1500798
uaaagccagggacaaucag

SEQ ID NO: 1500800 - RNA, 19 nt, Artificial Sequence
  Description of Artificial Sequence: Synthetic oligonucleotide
  Sense strand starting at position 3407 of SEQ ID NO: 1244598
cgcccuguccuguccagau

SEQ ID NO: 1500801 - RNA, 19 nt, Artificial Sequence
  Description of Artificial Sequence: Synthetic oligonucleotide
  Antisense strand to SEQ ID NO: 1500800
aucuggacaggacagggcg

SEQ ID NO: 1500802 - RNA, 19 nt, Artificial Sequence
  Description of Artificial Sequence: Synthetic oligonucleotide
  Sense strand starting at position 3558 of SEQ ID NO: 1244598
gagcucugcccaggugaga

SEQ ID NO: 1500803 - RNA, 19 nt, Artificial Sequence
  Description of Artificial Sequence: Synthetic oligonucleotide
  Antisense strand to SEQ ID NO: 1500802
ucucaccugggcagagcuc

SEQ ID NO: 1500804 - RNA, 19 nt, Artificial Sequence
  Description of Artificial Sequence: Synthetic oligonucleotide
  Sense strand starting at position 227 of SEQ ID NO: 1244599
acaagucacuuggcuauga

SEQ ID NO: 1500805 - RNA, 19 nt, Artificial Sequence
  Description of Artificial Sequence: Synthetic oligonucleotide
  Antisense strand to SEQ ID NO: 1500804
ucauagccaagugacuugu

SEQ ID NO: 1500806 - RNA, 19 nt, Artificial Sequence
  Description of Artificial Sequence: Synthetic oligonucleotide
  Sense strand starting at position 228 of SEQ ID NO: 1244599
caagucacuuggcuaugau

SEQ ID NO: 1500807 - RNA, 19 nt, Artificial Sequence
  Description of Artificial Sequence: Synthetic oligonucleotide
  Antisense strand to SEQ ID NO: 1500806
aucauagccaagugacuug

SEQ ID NO: 1500808 - RNA, 19 nt, Artificial Sequence
  Description of Artificial Sequence: Synthetic oligonucleotide
  Sense strand starting at position 229 of SEQ ID NO: 1244599
aagucacuuggcuaugauu

SEQ ID NO: 1500809 - RNA, 19 nt, Artificial Sequence
  Description of Artificial Sequence: Synthetic oligonucleotide
  Antisense strand to SEQ ID NO: 1500808
aaucauagccaagugacuu

SEQ ID NO: 1500810 - RNA, 19 nt, Artificial Sequence
  Description of Artificial Sequence: Synthetic oligonucleotide
  Sense strand starting at position 232 of SEQ ID NO: 1244599
ucacuuggcuaugauuuga

SEQ ID NO: 1500811 - RNA, 19 nt, Artificial Sequence
  Description of Artificial Sequence: Synthetic oligonucleotide
  Antisense strand to SEQ ID NO: 1500810
ucaaaucauagccaaguga

SEQ ID NO: 1500812 - RNA, 19 nt, Artificial Sequence
  Description of Artificial Sequence: Synthetic oligonucleotide
  Sense strand starting at position 358 of SEQ ID NO: 1244599
gcaugacgguuucuugaag

SEQ ID NO: 1500813 - RNA, 19 nt, Artificial Sequence
  Description of Artificial Sequence: Synthetic oligonucleotide
  Antisense strand to SEQ ID NO: 1500812
cuucaagaaaccgucaugc

SEQ ID NO: 1500814 - RNA, 19 nt, Artificial Sequence
  Description of Artificial Sequence: Synthetic oligonucleotide
  Sense strand starting at position 367 of SEQ ID NO: 1244599
uuucuugaagccuagcaga

SEQ ID NO: 1500815 - RNA, 19 nt, Artificial Sequence
  Description of Artificial Sequence: Synthetic oligonucleotide
  Antisense strand to SEQ ID NO: 1500814
ucugcuaggcuucaagaaa

SEQ ID NO: 1500816 - RNA, 19 nt, Artificial Sequence
  Description of Artificial Sequence: Synthetic oligonucleotide
  Sense strand starting at position 666 of SEQ ID NO: 1244599
ggccguuggauuugacuua

SEQ ID NO: 1500817 - RNA, 19 nt, Artificial Sequence
  Description of Artificial Sequence: Synthetic oligonucleotide
  Antisense strand to SEQ ID NO: 1500816
uaagucaaauccaacggcc

SEQ ID NO: 1500818 - RNA, 19 nt, Artificial Sequence
  Description of Artificial Sequence: Synthetic oligonucleotide
  Sense strand starting at position 1042 of SEQ ID NO: 1244599
ggccgagaucucgaaguag

SEQ ID NO: 1500819 - RNA, 19 nt, Artificial Sequence
  Description of Artificial Sequence: Synthetic oligonucleotide
  Antisense strand to SEQ ID NO: 1500818
cuacuucgagaucucggcc

SEQ ID NO: 1500820 - RNA, 19 nt, Artificial Sequence
  Description of Artificial Sequence: Synthetic oligonucleotide
  Sense strand starting at position 1184 of SEQ ID NO: 1244599
uuguucuugaggcaagacu

SEQ ID NO: 1500821 - RNA, 19 nt, Artificial Sequence
  Description of Artificial Sequence: Synthetic oligonucleotide
  Antisense strand to SEQ ID NO: 1500820
agucuugccucaagaacaa

SEQ ID NO: 1500822 - RNA, 19 nt, Artificial Sequence
  Description of Artificial Sequence: Synthetic oligonucleotide
  Sense strand starting at position 1251 of SEQ ID NO: 1244599
cgcgguuguccagacugaa

SEQ ID NO: 1500823 - RNA, 19 nt, Artificial Sequence
  Description of Artificial Sequence: Synthetic oligonucleotide
  Antisense strand to SEQ ID NO: 1500822
uucagucuggacaaccgcg

SEQ ID NO: 1500824 - RNA, 19 nt, Artificial Sequence
  Description of Artificial Sequence: Synthetic oligonucleotide
  Sense strand starting at position 1492 of SEQ ID NO: 1244599
ccggcucaccugugaggau

SEQ ID NO: 1500825 - RNA, 19 nt, Artificial Sequence
  Description of Artificial Sequence: Synthetic oligonucleotide
  Antisense strand to SEQ ID NO: 1500824
auccucacaggugagccgg

SEQ ID NO: 1500826 - RNA, 19 nt, Artificial Sequence
  Description of Artificial Sequence: Synthetic oligonucleotide
  Sense strand starting at position 1593 of SEQ ID NO: 1244599
uagaacuugcgguggaagu

SEQ ID NO: 1500827 - RNA, 19 nt, Artificial Sequence
  Description of Artificial Sequence: Synthetic oligonucleotide
  Antisense strand to SEQ ID NO: 1500826
acuuccaccgcaaguucua

SEQ ID NO: 1500828 - RNA, 19 nt, Artificial Sequence
  Description of Artificial Sequence: Synthetic oligonucleotide
  Sense strand starting at position 1603 of SEQ ID NO: 1244599
gguggaaguccucgauggu

SEQ ID NO: 1500829 - RNA, 19 nt, Artificial Sequence
  Description of Artificial Sequence: Synthetic oligonucleotide
  Antisense strand to SEQ ID NO: 1500828
accaucgaggacuuccacc

SEQ ID NO: 1500830 - RNA, 19 nt, Artificial Sequence
  Description of Artificial Sequence: Synthetic oligonucleotide
  Sense strand starting at position 1604 of SEQ ID NO: 1244599
guggaaguccucgauggua

SEQ ID NO: 1500831 - RNA, 19 nt, Artificial Sequence
  Description of Artificial Sequence: Synthetic oligonucleotide
  Antisense strand to SEQ ID NO: 1500830
uaccaucgaggacuuccac

SEQ ID NO: 1500832 - RNA, 19 nt, Artificial Sequence
  Description of Artificial Sequence: Synthetic oligonucleotide
  Sense strand starting at position 1624 of SEQ ID NO: 1244599
gcguguaggcguccucgaa

SEQ ID NO: 1500833 - RNA, 19 nt, Artificial Sequence
  Description of Artificial Sequence: Synthetic oligonucleotide
  Antisense strand to SEQ ID NO: 1500832
uucgaggacgccuacacgc

SEQ ID NO: 1500834 - RNA, 19 nt, Artificial Sequence
  Description of Artificial Sequence: Synthetic oligonucleotide
  Sense strand starting at position 1696 of SEQ ID NO: 1244599
cgaggaugaccaugcgaua

SEQ ID NO: 1500835 - RNA, 19 nt, Artificial Sequence
  Description of Artificial Sequence: Synthetic oligonucleotide
  Antisense strand to SEQ ID NO: 1500834
uaucgcauggucauccucg

SEQ ID NO: 1500836 - RNA, 19 nt, Artificial Sequence
  Description of Artificial Sequence: Synthetic oligonucleotide
  Sense strand starting at position 1717 of SEQ ID NO: 1244599
aguucuuggccgggauacu

SEQ ID NO: 1500837 - RNA, 19 nt, Artificial Sequence
  Description of Artificial Sequence: Synthetic oligonucleotide
  Antisense strand to SEQ ID NO: 1500836
aguaucccggccaagaacu

SEQ ID NO: 1500838 - RNA, 19 nt, Artificial Sequence
  Description of Artificial Sequence: Synthetic oligonucleotide
  Sense strand starting at position 1752 of SEQ ID NO: 1244599
gggcacaucuucuugauca

SEQ ID NO: 1500839 - RNA, 19 nt, Artificial Sequence
  Description of Artificial Sequence: Synthetic oligonucleotide
  Antisense strand to SEQ ID NO: 1500838
ugaucaagaagaugugccc

SEQ ID NO: 1500840 - RNA, 19 nt, Artificial Sequence
  Description of Artificial Sequence: Synthetic oligonucleotide
  Sense strand starting at position 1765 of SEQ ID NO: 1244599
ugaucaucgcggccaguuu

SEQ ID NO: 1500841 - RNA, 19 nt, Artificial Sequence
  Description of Artificial Sequence: Synthetic oligonucleotide
  Antisense strand to SEQ ID NO: 1500840
aaacuggccgcgaugauca

SEQ ID NO: 1500842 - RNA, 19 nt, Artificial Sequence
  Description of Artificial Sequence: Synthetic oligonucleotide
  Sense strand starting at position 2374 of SEQ ID NO: 1244599
auaggaaucuaguaaguaa

SEQ ID NO: 1500843 - RNA, 19 nt, Artificial Sequence
  Description of Artificial Sequence: Synthetic oligonucleotide
  Antisense strand to SEQ ID NO: 1500842
uuacuuacuagauuccuau

SEQ ID NO: 1500844 - RNA, 19 nt, Artificial Sequence
  Description of Artificial Sequence: Synthetic oligonucleotide
  Sense strand starting at position 2785 of SEQ ID NO: 1244599
cagagaugcucugugguau

SEQ ID NO: 1500845 - RNA, 19 nt, Artificial Sequence
  Description of Artificial Sequence: Synthetic oligonucleotide
  Antisense strand to SEQ ID NO: 1500844
auaccacagagcaucucug

SEQ ID NO: 1500846 - RNA, 19 nt, Artificial Sequence
  Description of Artificial Sequence: Synthetic oligonucleotide
  Sense strand starting at position 2786 of SEQ ID NO: 1244599
agagaugcucugugguaug

SEQ ID NO: 1500847 - RNA, 19 nt, Artificial Sequence
  Description of Artificial Sequence: Synthetic oligonucleotide
  Antisense strand to SEQ ID NO: 1500846
cauaccacagagcaucucu

SEQ ID NO: 1500848 - RNA, 19 nt, Artificial Sequence
  Description of Artificial Sequence: Synthetic oligonucleotide
  Sense strand starting at position 2880 of SEQ ID NO: 1244599
guucucauugucuagcuga

SEQ ID NO: 1500849 - RNA, 19 nt, Artificial Sequence
  Description of Artificial Sequence: Synthetic oligonucleotide
  Antisense strand to SEQ ID NO: 1500848
ucagcuagacaaugagaac

SEQ ID NO: 1500850 - RNA, 19 nt, Artificial Sequence
  Description of Artificial Sequence: Synthetic oligonucleotide
  Sense strand starting at position 2991 of SEQ ID NO: 1244599
ggaagauacugauucuggu

SEQ ID NO: 1500851 - RNA, 19 nt, Artificial Sequence
  Description of Artificial Sequence: Synthetic oligonucleotide
  Antisense strand to SEQ ID NO: 1500850
accagaaucaguaucuucc

SEQ ID NO: 1500852 - RNA, 19 nt, Artificial Sequence
  Description of Artificial Sequence: Synthetic oligonucleotide
  Sense strand starting at position 3001 of SEQ ID NO: 1244599
gauucugguucugugauua

SEQ ID NO: 1500853 - RNA, 19 nt, Artificial Sequence
  Description of Artificial Sequence: Synthetic oligonucleotide
  Antisense strand to SEQ ID NO: 1500852
uaaucacagaaccagaauc

SEQ ID NO: 1500854 - RNA, 19 nt, Artificial Sequence
  Description of Artificial Sequence: Synthetic oligonucleotide
  Sense strand starting at position 3006 of SEQ ID NO: 1244599
ugguucugugauuaaggau

SEQ ID NO: 1500855 - RNA, 19 nt, Artificial Sequence
  Description of Artificial Sequence: Synthetic oligonucleotide
  Antisense strand to SEQ ID NO: 1500854
auccuuaaucacagaacca

SEQ ID NO: 1500856 - RNA, 19 nt, Artificial Sequence
  Description of Artificial Sequence: Synthetic oligonucleotide
  Sense strand starting at position 3084 of SEQ ID NO: 1244599
guaguauugacccaugagg

SEQ ID NO: 1500857 - RNA, 19 nt, Artificial Sequence
  Description of Artificial Sequence: Synthetic oligonucleotide
  Antisense strand to SEQ ID NO: 1500856
ccucaugggucaauacuac

SEQ ID NO: 1500858 - RNA, 19 nt, Artificial Sequence
  Description of Artificial Sequence: Synthetic oligonucleotide
  Sense strand starting at position 3111 of SEQ ID NO: 1244599
ggguacucucaagagcaca

SEQ ID NO: 1500859 - RNA, 19 nt, Artificial Sequence
  Description of Artificial Sequence: Synthetic oligonucleotide
  Antisense strand to SEQ ID NO: 1500858
ugugcucuugagaguaccc

SEQ ID NO: 1500860 - RNA, 19 nt, Artificial Sequence
  Description of Artificial Sequence: Synthetic oligonucleotide
  Sense strand starting at position 3156 of SEQ ID NO: 1244599
ggugauguugcugaacauu

SEQ ID NO: 1500861 - RNA, 19 nt, Artificial Sequence
  Description of Artificial Sequence: Synthetic oligonucleotide
  Antisense strand to SEQ ID NO: 1500860
aauguucagcaacaucacc

SEQ ID NO: 1500862 - RNA, 19 nt, Artificial Sequence
  Description of Artificial Sequence: Synthetic oligonucleotide
  Sense strand starting at position 3220 of SEQ ID NO: 1244599
ggcagucacugcuccucaa

SEQ ID NO: 1500863 - RNA, 19 nt, Artificial Sequence
  Description of Artificial Sequence: Synthetic oligonucleotide
  Antisense strand to SEQ ID NO: 1500862
uugaggagcagugacugcc

SEQ ID NO: 1500864 - RNA, 19 nt, Artificial Sequence
  Description of Artificial Sequence: Synthetic oligonucleotide
  Sense strand starting at position 3270 of SEQ ID NO: 1244599
ccacgucugacuuacgaga

SEQ ID NO: 1500865 - RNA, 19 nt, Artificial Sequence
  Description of Artificial Sequence: Synthetic oligonucleotide
  Antisense strand to SEQ ID NO: 1500864
ucucguaagucagacgugg

SEQ ID NO: 1500866 - RNA, 19 nt, Artificial Sequence
  Description of Artificial Sequence: Synthetic oligonucleotide
  Sense strand starting at position 3501 of SEQ ID NO: 1244599
cucuuacugucagauauuu

SEQ ID NO: 1500867 - RNA, 19 nt, Artificial Sequence
  Description of Artificial Sequence: Synthetic oligonucleotide
  Antisense strand to SEQ ID NO: 1500866
aaauaucugacaguaagag

SEQ ID NO: 1500868 - RNA, 19 nt, Artificial Sequence
  Description of Artificial Sequence: Synthetic oligonucleotide
  Sense strand starting at position 3591 of SEQ ID NO: 1244599
ucacuuaugcagcaguuau

SEQ ID NO: 1500869 - RNA, 19 nt, Artificial Sequence
  Description of Artificial Sequence: Synthetic oligonucleotide
  Antisense strand to SEQ ID NO: 1500868
auaacugcugcauaaguga

SEQ ID NO: 1500870 - RNA, 19 nt, Artificial Sequence
  Description of Artificial Sequence: Synthetic oligonucleotide
  Sense strand starting at position 3602 of SEQ ID NO: 1244599
gcaguuauccgacaggcua

SEQ ID NO: 1500871 - RNA, 19 nt, Artificial Sequence
  Description of Artificial Sequence: Synthetic oligonucleotide
  Antisense strand to SEQ ID NO: 1500870
uagccugucggauaacugc

SEQ ID NO: 1500872 - RNA, 19 nt, Artificial Sequence
  Description of Artificial Sequence: Synthetic oligonucleotide
  Sense strand starting at position 3663 of SEQ ID NO: 1244599
ugagguaugucugccagag

SEQ ID NO: 1500873 - RNA, 19 nt, Artificial Sequence
  Description of Artificial Sequence: Synthetic oligonucleotide
  Antisense strand to SEQ ID NO: 1500872
cucuggcagacauaccuca

SEQ ID NO: 1500874 - RNA, 19 nt, Artificial Sequence
  Description of Artificial Sequence: Synthetic oligonucleotide
  Sense strand starting at position 3742 of SEQ ID NO: 1244599
ggguguucacugcauaaag

SEQ ID NO: 1500875 - RNA, 19 nt, Artificial Sequence
  Description of Artificial Sequence: Synthetic oligonucleotide
  Antisense strand to SEQ ID NO: 1500874
cuuuaugcagugaacaccc

SEQ ID NO: 1500876 - RNA, 19 nt, Artificial Sequence
  Description of Artificial Sequence: Synthetic oligonucleotide
  Sense strand starting at position 3870 of SEQ ID NO: 1244599
gggcucuaacuugggauga

SEQ ID NO: 1500877 - RNA, 19 nt, Artificial Sequence
  Description of Artificial Sequence: Synthetic oligonucleotide
  Antisense strand to SEQ ID NO: 1500876
ucaucccaaguuagagccc

SEQ ID NO: 1500878 - RNA, 19 nt, Artificial Sequence
  Description of Artificial Sequence: Synthetic oligonucleotide
  Sense strand starting at position 3887 of SEQ ID NO: 1244599
gacugauggccagggcuau

SEQ ID NO: 1500879 - RNA, 19 nt, Artificial Sequence
  Description of Artificial Sequence: Synthetic oligonucleotide
  Antisense strand to SEQ ID NO: 1500878
auagcccuggccaucaguc

SEQ ID NO: 1500880 - RNA, 19 nt, Artificial Sequence
  Description of Artificial Sequence: Synthetic oligonucleotide
  Sense strand starting at position 3956 of SEQ ID NO: 1244599
gaggguccauuugauauga

SEQ ID NO: 1500881 - RNA, 19 nt, Artificial Sequence
  Description of Artificial Sequence: Synthetic oligonucleotide
  Antisense strand to SEQ ID NO: 1500880
ucauaucaaauggacccuc

SEQ ID NO: 1500882 - RNA, 19 nt, Artificial Sequence
  Description of Artificial Sequence: Synthetic oligonucleotide
  Sense strand starting at position 3958 of SEQ ID NO: 1244599
ggguccauuugauaugagu

SEQ ID NO: 1500883 - RNA, 19 nt, Artificial Sequence
  Description of Artificial Sequence: Synthetic oligonucleotide
  Antisense strand to SEQ ID NO: 1500882
acucauaucaaauggaccc

SEQ ID NO: 1500884 - RNA, 19 nt, Artificial Sequence
  Description of Artificial Sequence: Synthetic oligonucleotide
  Sense strand starting at position 313 of SEQ ID NO: 1244600
uuaugaugugugcauguaa

SEQ ID NO: 1500885 - RNA, 19 nt, Artificial Sequence
  Description of Artificial Sequence: Synthetic oligonucleotide
  Antisense strand to SEQ ID NO: 1500884
uuacaugcacacaucauaa

SEQ ID NO: 1500886 - RNA, 19 nt, Artificial Sequence
  Description of Artificial Sequence: Synthetic oligonucleotide
  Sense strand starting at position 595 of SEQ ID NO: 1244600
ccaguugaguuguuaacua

SEQ ID NO: 1500887 - RNA, 19 nt, Artificial Sequence
  Description of Artificial Sequence: Synthetic oligonucleotide
  Antisense strand to SEQ ID NO: 1500886
uaguuaacaacucaacugg

SEQ ID NO: 1500888 - RNA, 19 nt, Artificial Sequence
  Description of Artificial Sequence: Synthetic oligonucleotide
  Sense strand starting at position 599 of SEQ ID NO: 1244600
uugaguuguuaacuaagau

SEQ ID NO: 1500889 - RNA, 19 nt, Artificial Sequence
  Description of Artificial Sequence: Synthetic oligonucleotide
  Antisense strand to SEQ ID NO: 1500888
aucuuaguuaacaacucaa

SEQ ID NO: 1500890 - RNA, 19 nt, Artificial Sequence
  Description of Artificial Sequence: Synthetic oligonucleotide
  Sense strand starting at position 788 of SEQ ID NO: 1244600
gagagacucagcuggguua

SEQ ID NO: 1500891 - RNA, 19 nt, Artificial Sequence
  Description of Artificial Sequence: Synthetic oligonucleotide
  Antisense strand to SEQ ID NO: 1500890
uaacccagcugagucucuc

SEQ ID NO: 1500892 - RNA, 19 nt, Artificial Sequence
  Description of Artificial Sequence: Synthetic oligonucleotide
  Sense strand starting at position 790 of SEQ ID NO: 1244600
gagacucagcuggguuaau

SEQ ID NO: 1500893 - RNA, 19 nt, Artificial Sequence
  Description of Artificial Sequence: Synthetic oligonucleotide
  Antisense strand to SEQ ID NO: 1500892
auuaacccagcugagucuc

SEQ ID NO: 1500894 - RNA, 19 nt, Artificial Sequence
  Description of Artificial Sequence: Synthetic oligonucleotide
  Sense strand starting at position 791 of SEQ ID NO: 1244600
agacucagcuggguuaauu

SEQ ID NO: 1500895 - RNA, 19 nt, Artificial Sequence
  Description of Artificial Sequence: Synthetic oligonucleotide
  Antisense strand to SEQ ID NO: 1500894
aauuaacccagcugagucu

SEQ ID NO: 1500896 - RNA, 19 nt, Artificial Sequence
  Description of Artificial Sequence: Synthetic oligonucleotide
  Sense strand starting at position 910 of SEQ ID NO: 1244600
cucagagauuucuaggaug

SEQ ID NO: 1500897 - RNA, 19 nt, Artificial Sequence
  Description of Artificial Sequence: Synthetic oligonucleotide
  Antisense strand to SEQ ID NO: 1500896
cauccuagaaaucucugag

SEQ ID NO: 1500898 - RNA, 19 nt, Artificial Sequence
  Description of Artificial Sequence: Synthetic oligonucleotide
  Sense strand starting at position 913 of SEQ ID NO: 1244600
agagauuucuaggaugcac

SEQ ID NO: 1500899 - RNA, 19 nt, Artificial Sequence
  Description of Artificial Sequence: Synthetic oligonucleotide
  Antisense strand to SEQ ID NO: 1500898
gugcauccuagaaaucucu

SEQ ID NO: 1500900 - RNA, 19 nt, Artificial Sequence
  Description of Artificial Sequence: Synthetic oligonucleotide
  Sense strand starting at position 1144 of SEQ ID NO: 1244600
ggcagagguccuggaucua

SEQ ID NO: 1500901 - RNA, 19 nt, Artificial Sequence
  Description of Artificial Sequence: Synthetic oligonucleotide
  Antisense strand to SEQ ID NO: 1500900
uagauccaggaccucugcc

SEQ ID NO: 1500902 - RNA, 19 nt, Artificial Sequence
  Description of Artificial Sequence: Synthetic oligonucleotide
  Sense strand starting at position 1149 of SEQ ID NO: 1244600
agguccuggaucuaagagu

SEQ ID NO: 1500903 - RNA, 19 nt, Artificial Sequence
  Description of Artificial Sequence: Synthetic oligonucleotide
  Antisense strand to SEQ ID NO: 1500902
acucuuagauccaggaccu

SEQ ID NO: 1500904 - RNA, 19 nt, Artificial Sequence
  Description of Artificial Sequence: Synthetic oligonucleotide
  Sense strand starting at position 1519 of SEQ ID NO: 1244600
accugauugguaggaguuu

SEQ ID NO: 1500905 - RNA, 19 nt, Artificial Sequence
  Description of Artificial Sequence: Synthetic oligonucleotide
  Antisense strand to SEQ ID NO: 1500904
aaacuccuaccaaucaggu

SEQ ID NO: 1500906 - RNA, 19 nt, Artificial Sequence
  Description of Artificial Sequence: Synthetic oligonucleotide
  Sense strand starting at position 2061 of SEQ ID NO: 1244600
ggucccugagccugacaua

SEQ ID NO: 1500907 - RNA, 19 nt, Artificial Sequence
  Description of Artificial Sequence: Synthetic oligonucleotide
  Antisense strand to SEQ ID NO: 1500906
uaugucaggcucagggacc

SEQ ID NO: 1500908 - RNA, 19 nt, Artificial Sequence
  Description of Artificial Sequence: Synthetic oligonucleotide
  Sense strand starting at position 2062 of SEQ ID NO: 1244600
gucccugagccugacauau

SEQ ID NO: 1500909 - RNA, 19 nt, Artificial Sequence
  Description of Artificial Sequence: Synthetic oligonucleotide
  Antisense strand to SEQ ID NO: 1500908
auaugucaggcucagggac

SEQ ID NO: 1500910 - RNA, 19 nt, Artificial Sequence
  Description of Artificial Sequence: Synthetic oligonucleotide
  Sense strand starting at position 2140 of SEQ ID NO: 1244600
agacucucccugcgggaau

SEQ ID NO: 1500911 - RNA, 19 nt, Artificial Sequence
  Description of Artificial Sequence: Synthetic oligonucleotide
  Antisense strand to SEQ ID NO: 1500910
auucccgcagggagagucu

SEQ ID NO: 1500912 - RNA, 19 nt, Artificial Sequence
  Description of Artificial Sequence: Synthetic oligonucleotide
  Sense strand starting at position 2151 of SEQ ID NO: 1244600
gcgggaauuuagcuguaac

SEQ ID NO: 1500913 - RNA, 19 nt, Artificial Sequence
  Description of Artificial Sequence: Synthetic oligonucleotide
  Antisense strand to SEQ ID NO: 1500912
guuacagcuaaauucccgc

SEQ ID NO: 1500914 - RNA, 19 nt, Artificial Sequence
  Description of Artificial Sequence: Synthetic oligonucleotide
  Sense strand starting at position 2285 of SEQ ID NO: 1244600
guguguuagagacauccag

SEQ ID NO: 1500915 - RNA, 19 nt, Artificial Sequence
  Description of Artificial Sequence: Synthetic oligonucleotide
  Antisense strand to SEQ ID NO: 1500914
cuggaugucucuaacacac

SEQ ID NO: 1500916 - RNA, 19 nt, Artificial Sequence
  Description of Artificial Sequence: Synthetic oligonucleotide
  Sense strand starting at position 2446 of SEQ ID NO: 1244600
ggccucuucucuccagaau

SEQ ID NO: 1500917 - RNA, 19 nt, Artificial Sequence
  Description of Artificial Sequence: Synthetic oligonucleotide
  Antisense strand to SEQ ID NO: 1500916
auucuggagagaagaggcc

SEQ ID NO: 1500918 - RNA, 19 nt, Artificial Sequence
  Description of Artificial Sequence: Synthetic oligonucleotide
  Sense strand starting at position 2447 of SEQ ID NO: 1244600
gccucuucucuccagaaug

SEQ ID NO: 1500919 - RNA, 19 nt, Artificial Sequence
  Description of Artificial Sequence: Synthetic oligonucleotide
  Antisense strand to SEQ ID NO: 1500918
cauucuggagagaagaggc

SEQ ID NO: 1500920 - RNA, 19 nt, Artificial Sequence
  Description of Artificial Sequence: Synthetic oligonucleotide
  Sense strand starting at position 2557 of SEQ ID NO: 1244600
ugucauaaucaaugucauc

SEQ ID NO: 1500921 - RNA, 19 nt, Artificial Sequence
  Description of Artificial Sequence: Synthetic oligonucleotide
  Antisense strand to SEQ ID NO: 1500920
gaugacauugauuaugaca

SEQ ID NO: 1500922 - RNA, 19 nt, Artificial Sequence
  Description of Artificial Sequence: Synthetic oligonucleotide
  Sense strand starting at position 2566 of SEQ ID NO: 1244600
caaugucaucauugauagg

SEQ ID NO: 1500923 - RNA, 19 nt, Artificial Sequence
  Description of Artificial Sequence: Synthetic oligonucleotide
  Antisense strand to SEQ ID NO: 1500922
ccuaucaaugaugacauug

SEQ ID NO: 1500924 - RNA, 19 nt, Artificial Sequence
  Description of Artificial Sequence: Synthetic oligonucleotide
  Sense strand starting at position 2603 of SEQ ID NO: 1244600
ugcgcuaugagcuuugcau

SEQ ID NO: 1500925 - RNA, 19 nt, Artificial Sequence
  Description of Artificial Sequence: Synthetic oligonucleotide
  Antisense strand to SEQ ID NO: 1500924
augcaaagcucauagcgca

SEQ ID NO: 1500926 - RNA, 19 nt, Artificial Sequence
  Description of Artificial Sequence: Synthetic oligonucleotide
  Sense strand starting at position 2604 of SEQ ID NO: 1244600
gcgcuaugagcuuugcaug

SEQ ID NO: 1500927 - RNA, 19 nt, Artificial Sequence
  Description of Artificial Sequence: Synthetic oligonucleotide
  Antisense strand to SEQ ID NO: 1500926
caugcaaagcucauagcgc

SEQ ID NO: 1500928 - RNA, 19 nt, Artificial Sequence
  Description of Artificial Sequence: Synthetic oligonucleotide
  Sense strand starting at position 2655 of SEQ ID NO: 1244600
gguagauuguuuccuccac

SEQ ID NO: 1500929 - RNA, 19 nt, Artificial Sequence
  Description of Artificial Sequence: Synthetic oligonucleotide
  Antisense strand to SEQ ID NO: 1500928
guggaggaaacaaucuacc

SEQ ID NO: 1500930 - RNA, 19 nt, Artificial Sequence
  Description of Artificial Sequence: Synthetic oligonucleotide
  Sense strand starting at position 2681 of SEQ ID NO: 1244600
augagauaguugaggucga

SEQ ID NO: 1500931 - RNA, 19 nt, Artificial Sequence
  Description of Artificial Sequence: Synthetic oligonucleotide
  Antisense strand to SEQ ID NO: 1500930
ucgaccucaacuaucucau

SEQ ID NO: 1500932 - RNA, 19 nt, Artificial Sequence
  Description of Artificial Sequence: Synthetic oligonucleotide
  Sense strand starting at position 2685 of SEQ ID NO: 1244600
gauaguugaggucgagaag

SEQ ID NO: 1500933 - RNA, 19 nt, Artificial Sequence
  Description of Artificial Sequence: Synthetic oligonucleotide
  Antisense strand to SEQ ID NO: 1500932
cuucucgaccucaacuauc

SEQ ID NO: 1500934 - RNA, 19 nt, Artificial Sequence
  Description of Artificial Sequence: Synthetic oligonucleotide
  Sense strand starting at position 2688 of SEQ ID NO: 1244600
aguugaggucgagaagcuu

SEQ ID NO: 1500935 - RNA, 19 nt, Artificial Sequence
  Description of Artificial Sequence: Synthetic oligonucleotide
  Antisense strand to SEQ ID NO: 1500934
aagcuucucgaccucaacu

SEQ ID NO: 1500936 - RNA, 19 nt, Artificial Sequence
  Description of Artificial Sequence: Synthetic oligonucleotide
  Sense strand starting at position 2888 of SEQ ID NO: 1244600
agacgagucacugaagcuu

SEQ ID NO: 1500937 - RNA, 19 nt, Artificial Sequence
  Description of Artificial Sequence: Synthetic oligonucleotide
  Antisense strand to SEQ ID NO: 1500936
aagcuucagugacucgucu

SEQ ID NO: 1500938 - RNA, 19 nt, Artificial Sequence
  Description of Artificial Sequence: Synthetic oligonucleotide
  Sense strand starting at position 2990 of SEQ ID NO: 1244600
uacggaagucaagagcaau

SEQ ID NO: 1500939 - RNA, 19 nt, Artificial Sequence
  Description of Artificial Sequence: Synthetic oligonucleotide
  Antisense strand to SEQ ID NO: 1500938
auugcucuugacuuccgua

SEQ ID NO: 1500940 - RNA, 19 nt, Artificial Sequence
  Description of Artificial Sequence: Synthetic oligonucleotide
  Sense strand starting at position 3076 of SEQ ID NO: 1244600
ggcgagagguuggucacaa

SEQ ID NO: 1500941 - RNA, 19 nt, Artificial Sequence
  Description of Artificial Sequence: Synthetic oligonucleotide
  Antisense strand to SEQ ID NO: 1500940
uugugaccaaccucucgcc

SEQ ID NO: 1500942 - RNA, 19 nt, Artificial Sequence
  Description of Artificial Sequence: Synthetic oligonucleotide
  Sense strand starting at position 3077 of SEQ ID NO: 1244600
gcgagagguuggucacaaa

SEQ ID NO: 1500943 - RNA, 19 nt, Artificial Sequence
  Description of Artificial Sequence: Synthetic oligonucleotide
  Antisense strand to SEQ ID NO: 1500942
uuugugaccaaccucucgc

SEQ ID NO: 1500944 - RNA, 19 nt, Artificial Sequence
  Description of Artificial Sequence: Synthetic oligonucleotide
  Sense strand starting at position 3089 of SEQ ID NO: 1244600
ucacaaaggcccugauuga

SEQ ID NO: 1500945 - RNA, 19 nt, Artificial Sequence
  Description of Artificial Sequence: Synthetic oligonucleotide
  Antisense strand to SEQ ID NO: 1500944
ucaaucagggccuuuguga

SEQ ID NO: 1500946 - RNA, 19 nt, Artificial Sequence
  Description of Artificial Sequence: Synthetic oligonucleotide
  Sense strand starting at position 3142 of SEQ ID NO: 1244600
augggaagucaucgaagag

SEQ ID NO: 1500947 - RNA, 19 nt, Artificial Sequence
  Description of Artificial Sequence: Synthetic oligonucleotide
  Antisense strand to SEQ ID NO: 1500946
cucuucgaugacuucccau

SEQ ID NO: 1500948 - RNA, 19 nt, Artificial Sequence
  Description of Artificial Sequence: Synthetic oligonucleotide
  Sense strand starting at position 3143 of SEQ ID NO: 1244600
ugggaagucaucgaagagu

SEQ ID NO: 1500949 - RNA, 19 nt, Artificial Sequence
  Description of Artificial Sequence: Synthetic oligonucleotide
  Antisense strand to SEQ ID NO: 1500948
acucuucgaugacuuccca

SEQ ID NO: 1500950 - RNA, 19 nt, Artificial Sequence
  Description of Artificial Sequence: Synthetic oligonucleotide
  Sense strand starting at position 3547 of SEQ ID NO: 1244600
ggagcagaagcuugagaga

SEQ ID NO: 1500951 - RNA, 19 nt, Artificial Sequence
  Description of Artificial Sequence: Synthetic oligonucleotide
  Antisense strand to SEQ ID NO: 1500950
ucucucaagcuucugcucc

SEQ ID NO: 1500952 - RNA, 19 nt, Artificial Sequence
  Description of Artificial Sequence: Synthetic oligonucleotide
  Sense strand starting at position 3830 of SEQ ID NO: 1244600
ugaagucuauagucucauu

SEQ ID NO: 1500953 - RNA, 19 nt, Artificial Sequence
  Description of Artificial Sequence: Synthetic oligonucleotide
  Antisense strand to SEQ ID NO: 1500952
aaugagacuauagacuuca

SEQ ID NO: 1500954 - RNA, 19 nt, Artificial Sequence
  Description of Artificial Sequence: Synthetic oligonucleotide
  Sense strand starting at position 3849 of SEQ ID NO: 1244600
uauuaaauggagugugauu

SEQ ID NO: 1500955 - RNA, 19 nt, Artificial Sequence
  Description of Artificial Sequence: Synthetic oligonucleotide
  Antisense strand to SEQ ID NO: 1500954
aaucacacuccauuuaaua

SEQ ID NO: 1500956 - RNA, 19 nt, Artificial Sequence
  Description of Artificial Sequence: Synthetic oligonucleotide
  Sense strand starting at position 3851 of SEQ ID NO: 1244600
uuaaauggagugugauuaa

SEQ ID NO: 1500957 - RNA, 19 nt, Artificial Sequence
  Description of Artificial Sequence: Synthetic oligonucleotide
  Antisense strand to SEQ ID NO: 1500956
uuaaucacacuccauuuaa

SEQ ID NO: 1500958 - RNA, 19 nt, Artificial Sequence
  Description of Artificial Sequence: Synthetic oligonucleotide
  Sense strand starting at position 3854 of SEQ ID NO: 1244600
aauggagugugauuaauug

SEQ ID NO: 1500959 - RNA, 19 nt, Artificial Sequence
  Description of Artificial Sequence: Synthetic oligonucleotide
  Antisense strand to SEQ ID NO: 1500958
caauuaaucacacuccauu

SEQ ID NO: 1500960 - RNA, 19 nt, Artificial Sequence
  Description of Artificial Sequence: Synthetic oligonucleotide
  Sense strand starting at position 3861 of SEQ ID NO: 1244600
ugugauuaauugucccuca

SEQ ID NO: 1500961 - RNA, 19 nt, Artificial Sequence
  Description of Artificial Sequence: Synthetic oligonucleotide
  Antisense strand to SEQ ID NO: 1500960
ugagggacaauuaaucaca

SEQ ID NO: 1500962 - RNA, 19 nt, Artificial Sequence
  Description of Artificial Sequence: Synthetic oligonucleotide
  Sense strand starting at position 3866 of SEQ ID NO: 1244600
uuaauugucccucacuguu

SEQ ID NO: 1500963 - RNA, 19 nt, Artificial Sequence
  Description of Artificial Sequence: Synthetic oligonucleotide
  Antisense strand to SEQ ID NO: 1500962
aacagugagggacaauuaa

SEQ ID NO: 1500964 - RNA, 19 nt, Artificial Sequence
  Description of Artificial Sequence: Synthetic oligonucleotide
  Sense strand starting at position 248 of SEQ ID NO: 1244601
cucacugaguccucucaca

SEQ ID NO: 1500965 - RNA, 19 nt, Artificial Sequence
  Description of Artificial Sequence: Synthetic oligonucleotide
  Antisense strand to SEQ ID NO: 1500964
ugugagaggacucagugag

SEQ ID NO: 1500966 - RNA, 19 nt, Artificial Sequence
  Description of Artificial Sequence: Synthetic oligonucleotide
  Sense strand starting at position 358 of SEQ ID NO: 1244601
uguugugaucuugacaaag

SEQ ID NO: 1500967 - RNA, 19 nt, Artificial Sequence
  Description of Artificial Sequence: Synthetic oligonucleotide
  Antisense strand to SEQ ID NO: 1500966
cuuugucaagaucacaaca

SEQ ID NO: 1500968 - RNA, 19 nt, Artificial Sequence
  Description of Artificial Sequence: Synthetic oligonucleotide
  Sense strand starting at position 613 of SEQ ID NO: 1244601
gcauuucuauuugguuaag

SEQ ID NO: 1500969 - RNA, 19 nt, Artificial Sequence
  Description of Artificial Sequence: Synthetic oligonucleotide
  Antisense strand to SEQ ID NO: 1500968
cuuaaccaaauagaaaugc

SEQ ID NO: 1500970 - RNA, 19 nt, Artificial Sequence
  Description of Artificial Sequence: Synthetic oligonucleotide
  Sense strand starting at position 676 of SEQ ID NO: 1244601
uccucugugcacugugaaa

SEQ ID NO: 1500971 - RNA, 19 nt, Artificial Sequence
  Description of Artificial Sequence: Synthetic oligonucleotide
  Antisense strand to SEQ ID NO: 1500970
uuucacagugcacagagga

SEQ ID NO: 1500972 - RNA, 19 nt, Artificial Sequence
  Description of Artificial Sequence: Synthetic oligonucleotide
  Sense strand starting at position 678 of SEQ ID NO: 1244601
cucugugcacugugaaaug

SEQ ID NO: 1500973 - RNA, 19 nt, Artificial Sequence
  Description of Artificial Sequence: Synthetic oligonucleotide
  Antisense strand to SEQ ID NO: 1500972
cauuucacagugcacagag

SEQ ID NO: 1500974 - RNA, 19 nt, Artificial Sequence
  Description of Artificial Sequence: Synthetic oligonucleotide
  Sense strand starting at position 723 of SEQ ID NO: 1244601
uggagcuguucucuuggga

SEQ ID NO: 1500975 - RNA, 19 nt, Artificial Sequence
  Description of Artificial Sequence: Synthetic oligonucleotide
  Antisense strand to SEQ ID NO: 1500974
ucccaagagaacagcucca

SEQ ID NO: 1500976 - RNA, 19 nt, Artificial Sequence
  Description of Artificial Sequence: Synthetic oligonucleotide
  Sense strand starting at position 726 of SEQ ID NO: 1244601
agcuguucucuugggacuu

SEQ ID NO: 1500977 - RNA, 19 nt, Artificial Sequence
  Description of Artificial Sequence: Synthetic oligonucleotide
  Antisense strand to SEQ ID NO: 1500976
aagucccaagagaacagcu

SEQ ID NO: 1500978 - RNA, 19 nt, Artificial Sequence
  Description of Artificial Sequence: Synthetic oligonucleotide
  Sense strand starting at position 861 of SEQ ID NO: 1244601
gggaauucucccgacucuc

SEQ ID NO: 1500979 - RNA, 19 nt, Artificial Sequence
  Description of Artificial Sequence: Synthetic oligonucleotide
  Antisense strand to SEQ ID NO: 1500978
gagagucgggagaauuccc

SEQ ID NO: 1500980 - RNA, 19 nt, Artificial Sequence
  Description of Artificial Sequence: Synthetic oligonucleotide
  Sense strand starting at position 890 of SEQ ID NO: 1244601
ucggguguccugaggcaga

SEQ ID NO: 1500981 - RNA, 19 nt, Artificial Sequence
  Description of Artificial Sequence: Synthetic oligonucleotide
  Antisense strand to SEQ ID NO: 1500980
ucugccucaggacacccga

SEQ ID NO: 1500982 - RNA, 19 nt, Artificial Sequence
  Description of Artificial Sequence: Synthetic oligonucleotide
  Sense strand starting at position 980 of SEQ ID NO: 1244601
gaagguagaacuuggcaga

SEQ ID NO: 1500983 - RNA, 19 nt, Artificial Sequence
  Description of Artificial Sequence: Synthetic oligonucleotide
  Antisense strand to SEQ ID NO: 1500982
ucugccaaguucuaccuuc

SEQ ID NO: 1500984 - RNA, 19 nt, Artificial Sequence
  Description of Artificial Sequence: Synthetic oligonucleotide
  Sense strand starting at position 1273 of SEQ ID NO: 1244601
ucccaucuccuguguuaca

SEQ ID NO: 1500985 - RNA, 19 nt, Artificial Sequence
  Description of Artificial Sequence: Synthetic oligonucleotide
  Antisense strand to SEQ ID NO: 1500984
uguaacacaggagauggga

SEQ ID NO: 1500986 - RNA, 19 nt, Artificial Sequence
  Description of Artificial Sequence: Synthetic oligonucleotide
  Sense strand starting at position 1430 of SEQ ID NO: 1244601
ucugcucuuuccuugagga

SEQ ID NO: 1500987 - RNA, 19 nt, Artificial Sequence
  Description of Artificial Sequence: Synthetic oligonucleotide
  Antisense strand to SEQ ID NO: 1500986
uccucaaggaaagagcaga

SEQ ID NO: 1500988 - RNA, 19 nt, Artificial Sequence
  Description of Artificial Sequence: Synthetic oligonucleotide
  Sense strand starting at position 1431 of SEQ ID NO: 1244601
cugcucuuuccuugaggau

SEQ ID NO: 1500989 - RNA, 19 nt, Artificial Sequence
  Description of Artificial Sequence: Synthetic oligonucleotide
  Antisense strand to SEQ ID NO: 1500988
auccucaaggaaagagcag

SEQ ID NO: 1500990 - RNA, 19 nt, Artificial Sequence
  Description of Artificial Sequence: Synthetic oligonucleotide
  Sense strand starting at position 1432 of SEQ ID NO: 1244601
ugcucuuuccuugaggaug

SEQ ID NO: 1500991 - RNA, 19 nt, Artificial Sequence
  Description of Artificial Sequence: Synthetic oligonucleotide
  Antisense strand to SEQ ID NO: 1500990
cauccucaaggaaagagca

SEQ ID NO: 1500992 - RNA, 19 nt, Artificial Sequence
  Description of Artificial Sequence: Synthetic oligonucleotide
  Sense strand starting at position 1737 of SEQ ID NO: 1244601
ggccuucuccagcaaggaa

SEQ ID NO: 1500993 - RNA, 19 nt, Artificial Sequence
  Description of Artificial Sequence: Synthetic oligonucleotide
  Antisense strand to SEQ ID NO: 1500992
uuccuugcuggagaaggcc

SEQ ID NO: 1500994 - RNA, 19 nt, Artificial Sequence
  Description of Artificial Sequence: Synthetic oligonucleotide
  Sense strand starting at position 1787 of SEQ ID NO: 1244601
gcuuuaaucgaggcgcuca

SEQ ID NO: 1500995 - RNA, 19 nt, Artificial Sequence
  Description of Artificial Sequence: Synthetic oligonucleotide
  Antisense strand to SEQ ID NO: 1500994
ugagcgccucgauuaaagc

SEQ ID NO: 1500996 - RNA, 19 nt, Artificial Sequence
  Description of Artificial Sequence: Synthetic oligonucleotide
  Sense strand starting at position 2002 of SEQ ID NO: 1244601
gucugcauucucugggcau

SEQ ID NO: 1500997 - RNA, 19 nt, Artificial Sequence
  Description of Artificial Sequence: Synthetic oligonucleotide
  Antisense strand to SEQ ID NO: 1500996
augcccagagaaugcagac

SEQ ID NO: 1500998 - RNA, 19 nt, Artificial Sequence
  Description of Artificial Sequence: Synthetic oligonucleotide
  Sense strand starting at position 2006 of SEQ ID NO: 1244601
gcauucucugggcaugaca

SEQ ID NO: 1500999 - RNA, 19 nt, Artificial Sequence
  Description of Artificial Sequence: Synthetic oligonucleotide
  Antisense strand to SEQ ID NO: 1500998
ugucaugcccagagaaugc

SEQ ID NO: 1501000 - RNA, 19 nt, Artificial Sequence
  Description of Artificial Sequence: Synthetic oligonucleotide
  Sense strand starting at position 2008 of SEQ ID NO: 1244601
auucucugggcaugacaaa

SEQ ID NO: 1501001 - RNA, 19 nt, Artificial Sequence
  Description of Artificial Sequence: Synthetic oligonucleotide
  Antisense strand to SEQ ID NO: 1501000
uuugucaugcccagagaau

SEQ ID NO: 1501002 - RNA, 19 nt, Artificial Sequence
  Description of Artificial Sequence: Synthetic oligonucleotide
  Sense strand starting at position 2009 of SEQ ID NO: 1244601
uucucugggcaugacaaau

SEQ ID NO: 1501003 - RNA, 19 nt, Artificial Sequence
  Description of Artificial Sequence: Synthetic oligonucleotide
  Antisense strand to SEQ ID NO: 1501002
auuugucaugcccagagaa

SEQ ID NO: 1501004 - RNA, 19 nt, Artificial Sequence
  Description of Artificial Sequence: Synthetic oligonucleotide
  Sense strand starting at position 2148 of SEQ ID NO: 1244601
ccaugaguucuaugaaaug

SEQ ID NO: 1501005 - RNA, 19 nt, Artificial Sequence
  Description of Artificial Sequence: Synthetic oligonucleotide
  Antisense strand to SEQ ID NO: 1501004
cauuucauagaacucaugg

SEQ ID NO: 1501006 - RNA, 19 nt, Artificial Sequence
  Description of Artificial Sequence: Synthetic oligonucleotide
  Sense strand starting at position 2157 of SEQ ID NO: 1244601
cuaugaaaugcccacgugu

SEQ ID NO: 1501007 - RNA, 19 nt, Artificial Sequence
  Description of Artificial Sequence: Synthetic oligonucleotide
  Antisense strand to SEQ ID NO: 1501006
acacgugggcauuucauag

SEQ ID NO: 1501008 - RNA, 19 nt, Artificial Sequence
  Description of Artificial Sequence: Synthetic oligonucleotide
  Sense strand starting at position 2486 of SEQ ID NO: 1244601
gauggaaagucucagguaa

SEQ ID NO: 1501009 - RNA, 19 nt, Artificial Sequence
  Description of Artificial Sequence: Synthetic oligonucleotide
  Antisense strand to SEQ ID NO: 1501008
uuaccugagacuuuccauc

SEQ ID NO: 1501010 - RNA, 19 nt, Artificial Sequence
  Description of Artificial Sequence: Synthetic oligonucleotide
  Sense strand starting at position 2497 of SEQ ID NO: 1244601
ucagguaacucagaugaga

SEQ ID NO: 1501011 - RNA, 19 nt, Artificial Sequence
  Description of Artificial Sequence: Synthetic oligonucleotide
  Antisense strand to SEQ ID NO: 1501010
ucucaucugaguuaccuga

SEQ ID NO: 1501012 - RNA, 19 nt, Artificial Sequence
  Description of Artificial Sequence: Synthetic oligonucleotide
  Sense strand starting at position 2772 of SEQ ID NO: 1244601
gggagucauacucguagac

SEQ ID NO: 1501013 - RNA, 19 nt, Artificial Sequence
  Description of Artificial Sequence: Synthetic oligonucleotide
  Antisense strand to SEQ ID NO: 1501012
gucuacgaguaugacuccc

SEQ ID NO: 1501014 - RNA, 19 nt, Artificial Sequence
  Description of Artificial Sequence: Synthetic oligonucleotide
  Sense strand starting at position 2892 of SEQ ID NO: 1244601
guggauggucacgauugca

SEQ ID NO: 1501015 - RNA, 19 nt, Artificial Sequence
  Description of Artificial Sequence: Synthetic oligonucleotide
  Antisense strand to SEQ ID NO: 1501014
ugcaaucgugaccauccac

SEQ ID NO: 1501016 - RNA, 19 nt, Artificial Sequence
  Description of Artificial Sequence: Synthetic oligonucleotide
  Sense strand starting at position 2940 of SEQ ID NO: 1244601
gcugaacugugcccucaaa

SEQ ID NO: 1501017 - RNA, 19 nt, Artificial Sequence
  Description of Artificial Sequence: Synthetic oligonucleotide
  Antisense strand to SEQ ID NO: 1501016
uuugagggcacaguucagc

SEQ ID NO: 1501018 - RNA, 19 nt, Artificial Sequence
  Description of Artificial Sequence: Synthetic oligonucleotide
  Sense strand starting at position 2962 of SEQ ID NO: 1244601
guucgugugguaaguguua

SEQ ID NO: 1501019 - RNA, 19 nt, Artificial Sequence
  Description of Artificial Sequence: Synthetic oligonucleotide
  Antisense strand to SEQ ID NO: 1501018
uaacacuuaccacacgaac

SEQ ID NO: 1501020 - RNA, 19 nt, Artificial Sequence
  Description of Artificial Sequence: Synthetic oligonucleotide
  Sense strand starting at position 2976 of SEQ ID NO: 1244601
uguuaugucauguguauuu

SEQ ID NO: 1501021 - RNA, 19 nt, Artificial Sequence
  Description of Artificial Sequence: Synthetic oligonucleotide
  Antisense strand to SEQ ID NO: 1501020
aaauacacaugacauaaca

SEQ ID NO: 1501022 - RNA, 19 nt, Artificial Sequence
  Description of Artificial Sequence: Synthetic oligonucleotide
  Sense strand starting at position 3271 of SEQ ID NO: 1244601
uggacuauacagugagagu

SEQ ID NO: 1501023 - RNA, 19 nt, Artificial Sequence
  Description of Artificial Sequence: Synthetic oligonucleotide
  Antisense strand to SEQ ID NO: 1501022
acucucacuguauagucca

SEQ ID NO: 1501024 - RNA, 19 nt, Artificial Sequence
  Description of Artificial Sequence: Synthetic oligonucleotide
  Sense strand starting at position 3421 of SEQ ID NO: 1244601
ggcugagcucuugcucagu

SEQ ID NO: 1501025 - RNA, 19 nt, Artificial Sequence
  Description of Artificial Sequence: Synthetic oligonucleotide
  Antisense strand to SEQ ID NO: 1501024
acugagcaagagcucagcc

SEQ ID NO: 1501026 - RNA, 19 nt, Artificial Sequence
  Description of Artificial Sequence: Synthetic oligonucleotide
  Sense strand starting at position 3603 of SEQ ID NO: 1244601
guuaucauuucgguaacau

SEQ ID NO: 1501027 - RNA, 19 nt, Artificial Sequence
  Description of Artificial Sequence: Synthetic oligonucleotide
  Antisense strand to SEQ ID NO: 1501026
auguuaccgaaaugauaac

SEQ ID NO: 1501028 - RNA, 19 nt, Artificial Sequence
  Description of Artificial Sequence: Synthetic oligonucleotide
  Sense strand starting at position 3611 of SEQ ID NO: 1244601
uucgguaacaucgacggaa

SEQ ID NO: 1501029 - RNA, 19 nt, Artificial Sequence
  Description of Artificial Sequence: Synthetic oligonucleotide
  Antisense strand to SEQ ID NO: 1501028
uuccgucgauguuaccgaa

SEQ ID NO: 1501030 - RNA, 19 nt, Artificial Sequence
  Description of Artificial Sequence: Synthetic oligonucleotide
  Sense strand starting at position 3614 of SEQ ID NO: 1244601
gguaacaucgacggaaaca

SEQ ID NO: 1501031 - RNA, 19 nt, Artificial Sequence
  Description of Artificial Sequence: Synthetic oligonucleotide
  Antisense strand to SEQ ID NO: 1501030
uguuuccgucgauguuacc

SEQ ID NO: 1501032 - RNA, 19 nt, Artificial Sequence
  Description of Artificial Sequence: Synthetic oligonucleotide
  Sense strand starting at position 3615 of SEQ ID NO: 1244601
guaacaucgacggaaacau

SEQ ID NO: 1501033 - RNA, 19 nt, Artificial Sequence
  Description of Artificial Sequence: Synthetic oligonucleotide
  Antisense strand to SEQ ID NO: 1501032
auguuuccgucgauguuac

SEQ ID NO: 1501034 - RNA, 19 nt, Artificial Sequence
  Description of Artificial Sequence: Synthetic oligonucleotide
  Sense strand starting at position 3624 of SEQ ID NO: 1244601
acggaaacaucaggaaauu

SEQ ID NO: 1501035 - RNA, 19 nt, Artificial Sequence
  Description of Artificial Sequence: Synthetic oligonucleotide
  Antisense strand to SEQ ID NO: 1501034
aauuuccugauguuuccgu

SEQ ID NO: 1501036 - RNA, 19 nt, Artificial Sequence
  Description of Artificial Sequence: Synthetic oligonucleotide
  Sense strand starting at position 3644 of SEQ ID NO: 1244601
ccgcuucugagacacauga

SEQ ID NO: 1501037 - RNA, 19 nt, Artificial Sequence
  Description of Artificial Sequence: Synthetic oligonucleotide
  Antisense strand to SEQ ID NO: 1501036
ucaugugucucagaagcgg

SEQ ID NO: 1501038 - RNA, 19 nt, Artificial Sequence
  Description of Artificial Sequence: Synthetic oligonucleotide
  Sense strand starting at position 3703 of SEQ ID NO: 1244601
ucgccuguuccugacucaa

SEQ ID NO: 1501039 - RNA, 19 nt, Artificial Sequence
  Description of Artificial Sequence: Synthetic oligonucleotide
  Antisense strand to SEQ ID NO: 1501038
uugagucaggaacaggcga

SEQ ID NO: 1501040 - RNA, 19 nt, Artificial Sequence
  Description of Artificial Sequence: Synthetic oligonucleotide
  Sense strand starting at position 3705 of SEQ ID NO: 1244601
gccuguuccugacucaaca

SEQ ID NO: 1501041 - RNA, 19 nt, Artificial Sequence
  Description of Artificial Sequence: Synthetic oligonucleotide
  Antisense strand to SEQ ID NO: 1501040
uguugagucaggaacaggc

SEQ ID NO: 1501042 - RNA, 19 nt, Artificial Sequence
  Description of Artificial Sequence: Synthetic oligonucleotide
  Sense strand starting at position 3769 of SEQ ID NO: 1244601
cgaggucugacccgguauu

SEQ ID NO: 1501043 - RNA, 19 nt, Artificial Sequence
  Description of Artificial Sequence: Synthetic oligonucleotide
  Antisense strand to SEQ ID NO: 1501042
aauaccgggucagaccucg

SEQ ID NO: 1501044 - RNA, 19 nt, Artificial Sequence
  Description of Artificial Sequence: Synthetic oligonucleotide
  Sense strand starting at position 182 of SEQ ID NO: 1244602
agcauauuguguguuuaga

SEQ ID NO: 1501045 - RNA, 19 nt, Artificial Sequence
  Description of Artificial Sequence: Synthetic oligonucleotide
  Antisense strand to SEQ ID NO: 1501044
ucuaaacacacaauaugcu

SEQ ID NO: 1501046 - RNA, 19 nt, Artificial Sequence
  Description of Artificial Sequence: Synthetic oligonucleotide
  Sense strand starting at position 184 of SEQ ID NO: 1244602
cauauuguguguuuagaau

SEQ ID NO: 1501047 - RNA, 19 nt, Artificial Sequence
  Description of Artificial Sequence: Synthetic oligonucleotide
  Antisense strand to SEQ ID NO: 1501046
auucuaaacacacaauaug

SEQ ID NO: 1501048 - RNA, 19 nt, Artificial Sequence
  Description of Artificial Sequence: Synthetic oligonucleotide
  Sense strand starting at position 190 of SEQ ID NO: 1244602
guguguuuagaaugaacag

SEQ ID NO: 1501049 - RNA, 19 nt, Artificial Sequence
  Description of Artificial Sequence: Synthetic oligonucleotide
  Antisense strand to SEQ ID NO: 1501048
cuguucauucuaaacacac

SEQ ID NO: 1501050 - RNA, 19 nt, Artificial Sequence
  Description of Artificial Sequence: Synthetic oligonucleotide
  Sense strand starting at position 191 of SEQ ID NO: 1244602
uguguuuagaaugaacagu

SEQ ID NO: 1501051 - RNA, 19 nt, Artificial Sequence
  Description of Artificial Sequence: Synthetic oligonucleotide
  Antisense strand to SEQ ID NO: 1501050
acuguucauucuaaacaca

SEQ ID NO: 1501052 - RNA, 19 nt, Artificial Sequence
  Description of Artificial Sequence: Synthetic oligonucleotide
  Sense strand starting at position 355 of SEQ ID NO: 1244602
aggcaacuucuauguggga

SEQ ID NO: 1501053 - RNA, 19 nt, Artificial Sequence
  Description of Artificial Sequence: Synthetic oligonucleotide
  Antisense strand to SEQ ID NO: 1501052
ucccacauagaaguugccu

SEQ ID NO: 1501054 - RNA, 19 nt, Artificial Sequence
  Description of Artificial Sequence: Synthetic oligonucleotide
  Sense strand starting at position 356 of SEQ ID NO: 1244602
ggcaacuucuaugugggaa

SEQ ID NO: 1501055 - RNA, 19 nt, Artificial Sequence
  Description of Artificial Sequence: Synthetic oligonucleotide
  Antisense strand to SEQ ID NO: 1501054
uucccacauagaaguugcc

SEQ ID NO: 1501056 - RNA, 19 nt, Artificial Sequence
  Description of Artificial Sequence: Synthetic oligonucleotide
  Sense strand starting at position 357 of SEQ ID NO: 1244602
gcaacuucuaugugggaac

SEQ ID NO: 1501057 - RNA, 19 nt, Artificial Sequence
  Description of Artificial Sequence: Synthetic oligonucleotide
  Antisense strand to SEQ ID NO: 1501056
guucccacauagaaguugc

SEQ ID NO: 1501058 - RNA, 19 nt, Artificial Sequence
  Description of Artificial Sequence: Synthetic oligonucleotide
  Sense strand starting at position 359 of SEQ ID NO: 1244602
aacuucuaugugggaacau

SEQ ID NO: 1501059 - RNA, 19 nt, Artificial Sequence
  Description of Artificial Sequence: Synthetic oligonucleotide
  Antisense strand to SEQ ID NO: 1501058
auguucccacauagaaguu

SEQ ID NO: 1501060 - RNA, 19 nt, Artificial Sequence
  Description of Artificial Sequence: Synthetic oligonucleotide
  Sense strand starting at position 476 of SEQ ID NO: 1244602
cgugacuguccugaauguu

SEQ ID NO: 1501061 - RNA, 19 nt, Artificial Sequence
  Description of Artificial Sequence: Synthetic oligonucleotide
  Antisense strand to SEQ ID NO: 1501060
aacauucaggacagucacg

SEQ ID NO: 1501062 - RNA, 19 nt, Artificial Sequence
  Description of Artificial Sequence: Synthetic oligonucleotide
  Sense strand starting at position 479 of SEQ ID NO: 1244602
gacuguccugaauguugca

SEQ ID NO: 1501063 - RNA, 19 nt, Artificial Sequence
  Description of Artificial Sequence: Synthetic oligonucleotide
  Antisense strand to SEQ ID NO: 1501062
ugcaacauucaggacaguc

SEQ ID NO: 1501064 - RNA, 19 nt, Artificial Sequence
  Description of Artificial Sequence: Synthetic oligonucleotide
  Sense strand starting at position 1077 of SEQ ID NO: 1244602
uaaaguaacugugcuauga

SEQ ID NO: 1501065 - RNA, 19 nt, Artificial Sequence
  Description of Artificial Sequence: Synthetic oligonucleotide
  Antisense strand to SEQ ID NO: 1501064
ucauagcacaguuacuuua

SEQ ID NO: 1501066 - RNA, 19 nt, Artificial Sequence
  Description of Artificial Sequence: Synthetic oligonucleotide
  Sense strand starting at position 1141 of SEQ ID NO: 1244602
ggaccacaguggucuauau

SEQ ID NO: 1501067 - RNA, 19 nt, Artificial Sequence
  Description of Artificial Sequence: Synthetic oligonucleotide
  Antisense strand to SEQ ID NO: 1501066
auauagaccacuguggucc

SEQ ID NO: 1501068 - RNA, 19 nt, Artificial Sequence
  Description of Artificial Sequence: Synthetic oligonucleotide
  Sense strand starting at position 1151 of SEQ ID NO: 1244602
ggucuauaucguccguugu

SEQ ID NO: 1501069 - RNA, 19 nt, Artificial Sequence
  Description of Artificial Sequence: Synthetic oligonucleotide
  Antisense strand to SEQ ID NO: 1501068
acaacggacgauauagacc

SEQ ID NO: 1501070 - RNA, 19 nt, Artificial Sequence
  Description of Artificial Sequence: Synthetic oligonucleotide
  Sense strand starting at position 1154 of SEQ ID NO: 1244602
cuauaucguccguuguuga

SEQ ID NO: 1501071 - RNA, 19 nt, Artificial Sequence
  Description of Artificial Sequence: Synthetic oligonucleotide
  Antisense strand to SEQ ID NO: 1501070
ucaacaacggacgauauag

SEQ ID NO: 1501072 - RNA, 19 nt, Artificial Sequence
  Description of Artificial Sequence: Synthetic oligonucleotide
  Sense strand starting at position 1192 of SEQ ID NO: 1244602
agcauaacauggcuguauu

SEQ ID NO: 1501073 - RNA, 19 nt, Artificial Sequence
  Description of Artificial Sequence: Synthetic oligonucleotide
  Antisense strand to SEQ ID NO: 1501072
aauacagccauguuaugcu

SEQ ID NO: 1501074 - RNA, 19 nt, Artificial Sequence
  Description of Artificial Sequence: Synthetic oligonucleotide
  Sense strand starting at position 1193 of SEQ ID NO: 1244602
gcauaacauggcuguauua

SEQ ID NO: 1501075 - RNA, 19 nt, Artificial Sequence
  Description of Artificial Sequence: Synthetic oligonucleotide
  Antisense strand to SEQ ID NO: 1501074
uaauacagccauguuaugc

SEQ ID NO: 1501076 - RNA, 19 nt, Artificial Sequence
  Description of Artificial Sequence: Synthetic oligonucleotide
  Sense strand starting at position 1219 of SEQ ID NO: 1244602
cucagauucugcuccggga

SEQ ID NO: 1501077 - RNA, 19 nt, Artificial Sequence
  Description of Artificial Sequence: Synthetic oligonucleotide
  Antisense strand to SEQ ID NO: 1501076
ucccggagcagaaucugag

SEQ ID NO: 1501078 - RNA, 19 nt, Artificial Sequence
  Description of Artificial Sequence: Synthetic oligonucleotide
  Sense strand starting at position 1552 of SEQ ID NO: 1244602
ugacguacuccuugaaguc

SEQ ID NO: 1501079 - RNA, 19 nt, Artificial Sequence
  Description of Artificial Sequence: Synthetic oligonucleotide
  Antisense strand to SEQ ID NO: 1501078
gacuucaaggaguacguca

SEQ ID NO: 1501080 - RNA, 19 nt, Artificial Sequence
  Description of Artificial Sequence: Synthetic oligonucleotide
  Sense strand starting at position 1692 of SEQ ID NO: 1244602
gugggacaguccuucagga

SEQ ID NO: 1501081 - RNA, 19 nt, Artificial Sequence
  Description of Artificial Sequence: Synthetic oligonucleotide
  Antisense strand to SEQ ID NO: 1501080
uccugaaggacugucccac

SEQ ID NO: 1501082 - RNA, 19 nt, Artificial Sequence
  Description of Artificial Sequence: Synthetic oligonucleotide
  Sense strand starting at position 1954 of SEQ ID NO: 1244602
uucgcaauccuugaaggga

SEQ ID NO: 1501083 - RNA, 19 nt, Artificial Sequence
  Description of Artificial Sequence: Synthetic oligonucleotide
  Antisense strand to SEQ ID NO: 1501082
ucccuucaaggauugcgaa

SEQ ID NO: 1501084 - RNA, 19 nt, Artificial Sequence
  Description of Artificial Sequence: Synthetic oligonucleotide
  Sense strand starting at position 2242 of SEQ ID NO: 1244602
ccuagaaugcaaugguuag

SEQ ID NO: 1501085 - RNA, 19 nt, Artificial Sequence
  Description of Artificial Sequence: Synthetic oligonucleotide
  Antisense strand to SEQ ID NO: 1501084
cuaaccauugcauucuagg

SEQ ID NO: 1501086 - RNA, 19 nt, Artificial Sequence
  Description of Artificial Sequence: Synthetic oligonucleotide
  Sense strand starting at position 2355 of SEQ ID NO: 1244602
cugggacacucuucuaaac

SEQ ID NO: 1501087 - RNA, 19 nt, Artificial Sequence
  Description of Artificial Sequence: Synthetic oligonucleotide
  Antisense strand to SEQ ID NO: 1501086
guuuagaagagugucccag

SEQ ID NO: 1501088 - RNA, 19 nt, Artificial Sequence
  Description of Artificial Sequence: Synthetic oligonucleotide
  Sense strand starting at position 2383 of SEQ ID NO: 1244602
agucaugucucugcuuaaa

SEQ ID NO: 1501089 - RNA, 19 nt, Artificial Sequence
  Description of Artificial Sequence: Synthetic oligonucleotide
  Antisense strand to SEQ ID NO: 1501088
uuuaagcagagacaugacu

SEQ ID NO: 1501090 - RNA, 19 nt, Artificial Sequence
  Description of Artificial Sequence: Synthetic oligonucleotide
  Sense strand starting at position 2491 of SEQ ID NO: 1244602
gaaugaaagcuccgugaag

SEQ ID NO: 1501091 - RNA, 19 nt, Artificial Sequence
  Description of Artificial Sequence: Synthetic oligonucleotide
  Antisense strand to SEQ ID NO: 1501090
cuucacggagcuuucauuc

SEQ ID NO: 1501092 - RNA, 19 nt, Artificial Sequence
  Description of Artificial Sequence: Synthetic oligonucleotide
  Sense strand starting at position 2493 of SEQ ID NO: 1244602
augaaagcuccgugaagga

SEQ ID NO: 1501093 - RNA, 19 nt, Artificial Sequence
  Description of Artificial Sequence: Synthetic oligonucleotide
  Antisense strand to SEQ ID NO: 1501092
uccuucacggagcuuucau

SEQ ID NO: 1501094 - RNA, 19 nt, Artificial Sequence
  Description of Artificial Sequence: Synthetic oligonucleotide
  Sense strand starting at position 2500 of SEQ ID NO: 1244602
cuccgugaaggaugggauu

SEQ ID NO: 1501095 - RNA, 19 nt, Artificial Sequence
  Description of Artificial Sequence: Synthetic oligonucleotide
  Antisense strand to SEQ ID NO: 1501094
aaucccauccuucacggag

SEQ ID NO: 1501096 - RNA, 19 nt, Artificial Sequence
  Description of Artificial Sequence: Synthetic oligonucleotide
  Sense strand starting at position 2521 of SEQ ID NO: 1244602
gucuguguuguucccggau

SEQ ID NO: 1501097 - RNA, 19 nt, Artificial Sequence
  Description of Artificial Sequence: Synthetic oligonucleotide
  Antisense strand to SEQ ID NO: 1501096
auccgggaacaacacagac

SEQ ID NO: 1501098 - RNA, 19 nt, Artificial Sequence
  Description of Artificial Sequence: Synthetic oligonucleotide
  Sense strand starting at position 2527 of SEQ ID NO: 1244602
guuguucccggaugcauuu

SEQ ID NO: 1501099 - RNA, 19 nt, Artificial Sequence
  Description of Artificial Sequence: Synthetic oligonucleotide
  Antisense strand to SEQ ID NO: 1501098
aaaugcauccgggaacaac

SEQ ID NO: 1501100 - RNA, 19 nt, Artificial Sequence
  Description of Artificial Sequence: Synthetic oligonucleotide
  Sense strand starting at position 2575 of SEQ ID NO: 1244602
cccagcaagucuuucuuga

SEQ ID NO: 1501101 - RNA, 19 nt, Artificial Sequence
  Description of Artificial Sequence: Synthetic oligonucleotide
  Antisense strand to SEQ ID NO: 1501100
ucaagaaagacuugcuggg

SEQ ID NO: 1501102 - RNA, 19 nt, Artificial Sequence
  Description of Artificial Sequence: Synthetic oligonucleotide
  Sense strand starting at position 2635 of SEQ ID NO: 1244602
gcugaugugagucaauaug

SEQ ID NO: 1501103 - RNA, 19 nt, Artificial Sequence
  Description of Artificial Sequence: Synthetic oligonucleotide
  Antisense strand to SEQ ID NO: 1501102
cauauugacucacaucagc

SEQ ID NO: 1501104 - RNA, 19 nt, Artificial Sequence
  Description of Artificial Sequence: Synthetic oligonucleotide
  Sense strand starting at position 2643 of SEQ ID NO: 1244602
gagucaauaugucugacac

SEQ ID NO: 1501105 - RNA, 19 nt, Artificial Sequence
  Description of Artificial Sequence: Synthetic oligonucleotide
  Antisense strand to SEQ ID NO: 1501104
gugucagacauauugacuc

SEQ ID NO: 1501106 - RNA, 19 nt, Artificial Sequence
  Description of Artificial Sequence: Synthetic oligonucleotide
  Sense strand starting at position 2644 of SEQ ID NO: 1244602
agucaauaugucugacaca

SEQ ID NO: 1501107 - RNA, 19 nt, Artificial Sequence
  Description of Artificial Sequence: Synthetic oligonucleotide
  Antisense strand to SEQ ID NO: 1501106
ugugucagacauauugacu

SEQ ID NO: 1501108 - RNA, 19 nt, Artificial Sequence
  Description of Artificial Sequence: Synthetic oligonucleotide
  Sense strand starting at position 2700 of SEQ ID NO: 1244602
uuuguuauuguccaucagu

SEQ ID NO: 1501109 - RNA, 19 nt, Artificial Sequence
  Description of Artificial Sequence: Synthetic oligonucleotide
  Antisense strand to SEQ ID NO: 1501108
acugauggacaauaacaaa

SEQ ID NO: 1501110 - RNA, 19 nt, Artificial Sequence
  Description of Artificial Sequence: Synthetic oligonucleotide
  Sense strand starting at position 2796 of SEQ ID NO: 1244602
cagagaacguggucacaug

SEQ ID NO: 1501111 - RNA, 19 nt, Artificial Sequence
  Description of Artificial Sequence: Synthetic oligonucleotide
  Antisense strand to SEQ ID NO: 1501110
caugugaccacguucucug

SEQ ID NO: 1501112 - RNA, 19 nt, Artificial Sequence
  Description of Artificial Sequence: Synthetic oligonucleotide
  Sense strand starting at position 3350 of SEQ ID NO: 1244602
auaaauaacugagugguca

SEQ ID NO: 1501113 - RNA, 19 nt, Artificial Sequence
  Description of Artificial Sequence: Synthetic oligonucleotide
  Antisense strand to SEQ ID NO: 1501112
ugaccacucaguuauuuau

SEQ ID NO: 1501114 - RNA, 19 nt, Artificial Sequence
  Description of Artificial Sequence: Synthetic oligonucleotide
  Sense strand starting at position 3354 of SEQ ID NO: 1244602
auaacugaguggucagaga

SEQ ID NO: 1501115 - RNA, 19 nt, Artificial Sequence
  Description of Artificial Sequence: Synthetic oligonucleotide
  Antisense strand to SEQ ID NO: 1501114
ucucugaccacucaguuau

SEQ ID NO: 1501116 - RNA, 19 nt, Artificial Sequence
  Description of Artificial Sequence: Synthetic oligonucleotide
  Sense strand starting at position 3461 of SEQ ID NO: 1244602
ccuggauucuugucaccca

SEQ ID NO: 1501117 - RNA, 19 nt, Artificial Sequence
  Description of Artificial Sequence: Synthetic oligonucleotide
  Antisense strand to SEQ ID NO: 1501116
ugggugacaagaauccagg

SEQ ID NO: 1501118 - RNA, 19 nt, Artificial Sequence
  Description of Artificial Sequence: Synthetic oligonucleotide
  Sense strand starting at position 3464 of SEQ ID NO: 1244602
ggauucuugucacccagaa

SEQ ID NO: 1501119 - RNA, 19 nt, Artificial Sequence
  Description of Artificial Sequence: Synthetic oligonucleotide
  Antisense strand to SEQ ID NO: 1501118
uucugggugacaagaaucc

SEQ ID NO: 1501120 - RNA, 19 nt, Artificial Sequence
  Description of Artificial Sequence: Synthetic oligonucleotide
  Sense strand starting at position 3566 of SEQ ID NO: 1244602
gauggagaguugucucuuu

SEQ ID NO: 1501121 - RNA, 19 nt, Artificial Sequence
  Description of Artificial Sequence: Synthetic oligonucleotide
  Antisense strand to SEQ ID NO: 1501120
aaagagacaacucuccauc

SEQ ID NO: 1501122 - RNA, 19 nt, Artificial Sequence
  Description of Artificial Sequence: Synthetic oligonucleotide
  Sense strand starting at position 3593 of SEQ ID NO: 1244602
gggugagaaugaugaagaa

SEQ ID NO: 1501123 - RNA, 19 nt, Artificial Sequence
  Description of Artificial Sequence: Synthetic oligonucleotide
  Antisense strand to SEQ ID NO: 1501122
uucuucaucauucucaccc

SEQ ID NO: 1501124 - RNA, 19 nt, Artificial Sequence
  Description of Artificial Sequence: Synthetic oligonucleotide
  Sense strand starting at position 633 of SEQ ID NO: 1244603
ugccacaucuggcugauau

SEQ ID NO: 1501125 - RNA, 19 nt, Artificial Sequence
  Description of Artificial Sequence: Synthetic oligonucleotide
  Antisense strand to SEQ ID NO: 1501124
auaucagccagauguggca

SEQ ID NO: 1501126 - RNA, 19 nt, Artificial Sequence
  Description of Artificial Sequence: Synthetic oligonucleotide
  Sense strand starting at position 1094 of SEQ ID NO: 1244603
ccauaauucuugucaggaa

SEQ ID NO: 1501127 - RNA, 19 nt, Artificial Sequence
  Description of Artificial Sequence: Synthetic oligonucleotide
  Antisense strand to SEQ ID NO: 1501126
uuccugacaagaauuaugg

SEQ ID NO: 1501128 - RNA, 19 nt, Artificial Sequence
  Description of Artificial Sequence: Synthetic oligonucleotide
  Sense strand starting at position 1126 of SEQ ID NO: 1244603
gcucaaccaccuugaguuu

SEQ ID NO: 1501129 - RNA, 19 nt, Artificial Sequence
  Description of Artificial Sequence: Synthetic oligonucleotide
  Antisense strand to SEQ ID NO: 1501128
aaacucaaggugguugagc

SEQ ID NO: 1501130 - RNA, 19 nt, Artificial Sequence
  Description of Artificial Sequence: Synthetic oligonucleotide
  Sense strand starting at position 1176 of SEQ ID NO: 1244603
ggaagauuaguguggcaau

SEQ ID NO: 1501131 - RNA, 19 nt, Artificial Sequence
  Description of Artificial Sequence: Synthetic oligonucleotide
  Antisense strand to SEQ ID NO: 1501130
auugccacacuaaucuucc

SEQ ID NO: 1501132 - RNA, 19 nt, Artificial Sequence
  Description of Artificial Sequence: Synthetic oligonucleotide
  Sense strand starting at position 1358 of SEQ ID NO: 1244603
gcagcccuugcagaauaaa

SEQ ID NO: 1501133 - RNA, 19 nt, Artificial Sequence
  Description of Artificial Sequence: Synthetic oligonucleotide
  Antisense strand to SEQ ID NO: 1501132
uuuauucugcaagggcugc

SEQ ID NO: 1501134 - RNA, 19 nt, Artificial Sequence
  Description of Artificial Sequence: Synthetic oligonucleotide
  Sense strand starting at position 1557 of SEQ ID NO: 1244603
accucucuucgcgaaggau

SEQ ID NO: 1501135 - RNA, 19 nt, Artificial Sequence
  Description of Artificial Sequence: Synthetic oligonucleotide
  Antisense strand to SEQ ID NO: 1501134
auccuucgcgaagagaggu

SEQ ID NO: 1501136 - RNA, 19 nt, Artificial Sequence
  Description of Artificial Sequence: Synthetic oligonucleotide
  Sense strand starting at position 1670 of SEQ ID NO: 1244603
gagauaccucuccgggacu

SEQ ID NO: 1501137 - RNA, 19 nt, Artificial Sequence
  Description of Artificial Sequence: Synthetic oligonucleotide
  Antisense strand to SEQ ID NO: 1501136
agucccggagagguaucuc

SEQ ID NO: 1501138 - RNA, 19 nt, Artificial Sequence
  Description of Artificial Sequence: Synthetic oligonucleotide
  Sense strand starting at position 1739 of SEQ ID NO: 1244603
uuaagaguccuucagcgga

SEQ ID NO: 1501139 - RNA, 19 nt, Artificial Sequence
  Description of Artificial Sequence: Synthetic oligonucleotide
  Antisense strand to SEQ ID NO: 1501138
uccgcugaaggacucuuaa

SEQ ID NO: 1501140 - RNA, 19 nt, Artificial Sequence
  Description of Artificial Sequence: Synthetic oligonucleotide
  Sense strand starting at position 2128 of SEQ ID NO: 1244603
gccacaagaucccugaguu

SEQ ID NO: 1501141 - RNA, 19 nt, Artificial Sequence
  Description of Artificial Sequence: Synthetic oligonucleotide
  Antisense strand to SEQ ID NO: 1501140
aacucagggaucuuguggc

SEQ ID NO: 1501142 - RNA, 19 nt, Artificial Sequence
  Description of Artificial Sequence: Synthetic oligonucleotide
  Sense strand starting at position 2129 of SEQ ID NO: 1244603
ccacaagaucccugaguuu

SEQ ID NO: 1501143 - RNA, 19 nt, Artificial Sequence
  Description of Artificial Sequence: Synthetic oligonucleotide
  Antisense strand to SEQ ID NO: 1501142
aaacucagggaucuugugg

SEQ ID NO: 1501144 - RNA, 19 nt, Artificial Sequence
  Description of Artificial Sequence: Synthetic oligonucleotide
  Sense strand starting at position 2132 of SEQ ID NO: 1244603
caagaucccugaguuuaga

SEQ ID NO: 1501145 - RNA, 19 nt, Artificial Sequence
  Description of Artificial Sequence: Synthetic oligonucleotide
  Antisense strand to SEQ ID NO: 1501144
ucuaaacucagggaucuug

SEQ ID NO: 1501146 - RNA, 19 nt, Artificial Sequence
  Description of Artificial Sequence: Synthetic oligonucleotide
  Sense strand starting at position 2164 of SEQ ID NO: 1244603
gcauguuuaggguaaaguc

SEQ ID NO: 1501147 - RNA, 19 nt, Artificial Sequence
  Description of Artificial Sequence: Synthetic oligonucleotide
  Antisense strand to SEQ ID NO: 1501146
gacuuuacccuaaacaugc

SEQ ID NO: 1501148 - RNA, 19 nt, Artificial Sequence
  Description of Artificial Sequence: Synthetic oligonucleotide
  Sense strand starting at position 2206 of SEQ ID NO: 1244603
aggguagggacguguuuau

SEQ ID NO: 1501149 - RNA, 19 nt, Artificial Sequence
  Description of Artificial Sequence: Synthetic oligonucleotide
  Antisense strand to SEQ ID NO: 1501148
auaaacacgucccuacccu

SEQ ID NO: 1501150 - RNA, 19 nt, Artificial Sequence
  Description of Artificial Sequence: Synthetic oligonucleotide
  Sense strand starting at position 2210 of SEQ ID NO: 1244603
uagggacguguuuauagaa

SEQ ID NO: 1501151 - RNA, 19 nt, Artificial Sequence
  Description of Artificial Sequence: Synthetic oligonucleotide
  Antisense strand to SEQ ID NO: 1501150
uucuauaaacacgucccua

SEQ ID NO: 1501152 - RNA, 19 nt, Artificial Sequence
  Description of Artificial Sequence: Synthetic oligonucleotide
  Sense strand starting at position 2269 of SEQ ID NO: 1244603
aguauuagcacuuguggga

SEQ ID NO: 1501153 - RNA, 19 nt, Artificial Sequence
  Description of Artificial Sequence: Synthetic oligonucleotide
  Antisense strand to SEQ ID NO: 1501152
ucccacaagugcuaauacu

SEQ ID NO: 1501154 - RNA, 19 nt, Artificial Sequence
  Description of Artificial Sequence: Synthetic oligonucleotide
  Sense strand starting at position 2273 of SEQ ID NO: 1244603
uuagcacuugugggaaaua

SEQ ID NO: 1501155 - RNA, 19 nt, Artificial Sequence
  Description of Artificial Sequence: Synthetic oligonucleotide
  Antisense strand to SEQ ID NO: 1501154
uauuucccacaagugcuaa

SEQ ID NO: 1501156 - RNA, 19 nt, Artificial Sequence
  Description of Artificial Sequence: Synthetic oligonucleotide
  Sense strand starting at position 2376 of SEQ ID NO: 1244603
aacagucucgcaugaaauc

SEQ ID NO: 1501157 - RNA, 19 nt, Artificial Sequence
  Description of Artificial Sequence: Synthetic oligonucleotide
  Antisense strand to SEQ ID NO: 1501156
gauuucaugcgagacuguu

SEQ ID NO: 1501158 - RNA, 19 nt, Artificial Sequence
  Description of Artificial Sequence: Synthetic oligonucleotide
  Sense strand starting at position 2431 of SEQ ID NO: 1244603
ggugaaucguguaugugua

SEQ ID NO: 1501159 - RNA, 19 nt, Artificial Sequence
  Description of Artificial Sequence: Synthetic oligonucleotide
  Antisense strand to SEQ ID NO: 1501158
uacacauacacgauucacc

SEQ ID NO: 1501160 - RNA, 19 nt, Artificial Sequence
  Description of Artificial Sequence: Synthetic oligonucleotide
  Sense strand starting at position 2582 of SEQ ID NO: 1244603
agcugauggugucugagaa

SEQ ID NO: 1501161 - RNA, 19 nt, Artificial Sequence
  Description of Artificial Sequence: Synthetic oligonucleotide
  Antisense strand to SEQ ID NO: 1501160
uucucagacaccaucagcu

SEQ ID NO: 1501162 - RNA, 19 nt, Artificial Sequence
  Description of Artificial Sequence: Synthetic oligonucleotide
  Sense strand starting at position 2583 of SEQ ID NO: 1244603
gcugauggugucugagaag

SEQ ID NO: 1501163 - RNA, 19 nt, Artificial Sequence
  Description of Artificial Sequence: Synthetic oligonucleotide
  Antisense strand to SEQ ID NO: 1501162
cuucucagacaccaucagc

SEQ ID NO: 1501164 - RNA, 19 nt, Artificial Sequence
  Description of Artificial Sequence: Synthetic oligonucleotide
  Sense strand starting at position 2629 of SEQ ID NO: 1244603
ggaggaguguaaucaacug

SEQ ID NO: 1501165 - RNA, 19 nt, Artificial Sequence
  Description of Artificial Sequence: Synthetic oligonucleotide
  Antisense strand to SEQ ID NO: 1501164
caguugauuacacuccucc

SEQ ID NO: 1501166 - RNA, 19 nt, Artificial Sequence
  Description of Artificial Sequence: Synthetic oligonucleotide
  Sense strand starting at position 2679 of SEQ ID NO: 1244603
cugauuuacugagacagug

SEQ ID NO: 1501167 - RNA, 19 nt, Artificial Sequence
  Description of Artificial Sequence: Synthetic oligonucleotide
  Antisense strand to SEQ ID NO: 1501166
cacugucucaguaaaucag

SEQ ID NO: 1501168 - RNA, 19 nt, Artificial Sequence
  Description of Artificial Sequence: Synthetic oligonucleotide
  Sense strand starting at position 2689 of SEQ ID NO: 1244603
gagacaguguuauugaaau

SEQ ID NO: 1501169 - RNA, 19 nt, Artificial Sequence
  Description of Artificial Sequence: Synthetic oligonucleotide
  Antisense strand to SEQ ID NO: 1501168
auuucaauaacacugucuc

SEQ ID NO: 1501170 - RNA, 19 nt, Artificial Sequence
  Description of Artificial Sequence: Synthetic oligonucleotide
  Sense strand starting at position 2695 of SEQ ID NO: 1244603
guguuauugaaauaggcaa

SEQ ID NO: 1501171 - RNA, 19 nt, Artificial Sequence
  Description of Artificial Sequence: Synthetic oligonucleotide
  Antisense strand to SEQ ID NO: 1501170
uugccuauuucaauaacac

SEQ ID NO: 1501172 - RNA, 19 nt, Artificial Sequence
  Description of Artificial Sequence: Synthetic oligonucleotide
  Sense strand starting at position 2855 of SEQ ID NO: 1244603
cugguugggucaaggauga

SEQ ID NO: 1501173 - RNA, 19 nt, Artificial Sequence
  Description of Artificial Sequence: Synthetic oligonucleotide
  Antisense strand to SEQ ID NO: 1501172
ucauccuugacccaaccag

SEQ ID NO: 1501174 - RNA, 19 nt, Artificial Sequence
  Description of Artificial Sequence: Synthetic oligonucleotide
  Sense strand starting at position 2891 of SEQ ID NO: 1244603
gcuuguguucuugugcuga

SEQ ID NO: 1501175 - RNA, 19 nt, Artificial Sequence
  Description of Artificial Sequence: Synthetic oligonucleotide
  Antisense strand to SEQ ID NO: 1501174
ucagcacaagaacacaagc

SEQ ID NO: 1501176 - RNA, 19 nt, Artificial Sequence
  Description of Artificial Sequence: Synthetic oligonucleotide
  Sense strand starting at position 3031 of SEQ ID NO: 1244603
aauaguaauguugaaagca

SEQ ID NO: 1501177 - RNA, 19 nt, Artificial Sequence
  Description of Artificial Sequence: Synthetic oligonucleotide
  Antisense strand to SEQ ID NO: 1501176
ugcuuucaacauuacuauu

SEQ ID NO: 1501178 - RNA, 19 nt, Artificial Sequence
  Description of Artificial Sequence: Synthetic oligonucleotide
  Sense strand starting at position 3040 of SEQ ID NO: 1244603
guugaaagcaguuaguuag

SEQ ID NO: 1501179 - RNA, 19 nt, Artificial Sequence
  Description of Artificial Sequence: Synthetic oligonucleotide
  Antisense strand to SEQ ID NO: 1501178
cuaacuaacugcuuucaac

SEQ ID NO: 1501180 - RNA, 19 nt, Artificial Sequence
  Description of Artificial Sequence: Synthetic oligonucleotide
  Sense strand starting at position 3050 of SEQ ID NO: 1244603
guuaguuagcuuggacaca

SEQ ID NO: 1501181 - RNA, 19 nt, Artificial Sequence
  Description of Artificial Sequence: Synthetic oligonucleotide
  Antisense strand to SEQ ID NO: 1501180
uguguccaagcuaacuaac

SEQ ID NO: 1501182 - RNA, 19 nt, Artificial Sequence
  Description of Artificial Sequence: Synthetic oligonucleotide
  Sense strand starting at position 3347 of SEQ ID NO: 1244603
ggaugaaguugcuucuacu

SEQ ID NO: 1501183 - RNA, 19 nt, Artificial Sequence
  Description of Artificial Sequence: Synthetic oligonucleotide
  Antisense strand to SEQ ID NO: 1501182
aguagaagcaacuucaucc

SEQ ID NO: 1501184 - RNA, 19 nt, Artificial Sequence
  Description of Artificial Sequence: Synthetic oligonucleotide
  Sense strand starting at position 3547 of SEQ ID NO: 1244603
caagcugaguucuccaaga

SEQ ID NO: 1501185 - RNA, 19 nt, Artificial Sequence
  Description of Artificial Sequence: Synthetic oligonucleotide
  Antisense strand to SEQ ID NO: 1501184
ucuuggagaacucagcuug

SEQ ID NO: 1501186 - RNA, 19 nt, Artificial Sequence
  Description of Artificial Sequence: Synthetic oligonucleotide
  Sense strand starting at position 3549 of SEQ ID NO: 1244603
agcugaguucuccaagaca

SEQ ID NO: 1501187 - RNA, 19 nt, Artificial Sequence
  Description of Artificial Sequence: Synthetic oligonucleotide
  Antisense strand to SEQ ID NO: 1501186
ugucuuggagaacucagcu

SEQ ID NO: 1501188 - RNA, 19 nt, Artificial Sequence
  Description of Artificial Sequence: Synthetic oligonucleotide
  Sense strand starting at position 3552 of SEQ ID NO: 1244603
ugaguucuccaagacagcu

SEQ ID NO: 1501189 - RNA, 19 nt, Artificial Sequence
  Description of Artificial Sequence: Synthetic oligonucleotide
  Antisense strand to SEQ ID NO: 1501188
agcugucuuggagaacuca

SEQ ID NO: 1501190 - RNA, 19 nt, Artificial Sequence
  Description of Artificial Sequence: Synthetic oligonucleotide
  Sense strand starting at position 3562 of SEQ ID NO: 1244603
aagacagcugucggacuaa

SEQ ID NO: 1501191 - RNA, 19 nt, Artificial Sequence
  Description of Artificial Sequence: Synthetic oligonucleotide
  Antisense strand to SEQ ID NO: 1501190
uuaguccgacagcugucuu

SEQ ID NO: 1501192 - RNA, 19 nt, Artificial Sequence
  Description of Artificial Sequence: Synthetic oligonucleotide
  Sense strand starting at position 3713 of SEQ ID NO: 1244603
guccacgcuccuuaaucau

SEQ ID NO: 1501193 - RNA, 19 nt, Artificial Sequence
  Description of Artificial Sequence: Synthetic oligonucleotide
  Antisense strand to SEQ ID NO: 1501192
augauuaaggagcguggac

SEQ ID NO: 1501194 - RNA, 19 nt, Artificial Sequence
  Description of Artificial Sequence: Synthetic oligonucleotide
  Sense strand starting at position 3723 of SEQ ID NO: 1244603
cuuaaucaucuuggaggua

SEQ ID NO: 1501195 - RNA, 19 nt, Artificial Sequence
  Description of Artificial Sequence: Synthetic oligonucleotide
  Antisense strand to SEQ ID NO: 1501194
uaccuccaagaugauuaag

SEQ ID NO: 1501196 - RNA, 19 nt, Artificial Sequence
  Description of Artificial Sequence: Synthetic oligonucleotide
  Sense strand starting at position 3770 of SEQ ID NO: 1244603
acaacuacagaguguuaua

SEQ ID NO: 1501197 - RNA, 19 nt, Artificial Sequence
  Description of Artificial Sequence: Synthetic oligonucleotide
  Antisense strand to SEQ ID NO: 1501196
uauaacacucuguaguugu

SEQ ID NO: 1501198 - RNA, 19 nt, Artificial Sequence
  Description of Artificial Sequence: Synthetic oligonucleotide
  Sense strand starting at position 3855 of SEQ ID NO: 1244603
guggccucugucuacauaa

SEQ ID NO: 1501199 - RNA, 19 nt, Artificial Sequence
  Description of Artificial Sequence: Synthetic oligonucleotide
  Antisense strand to SEQ ID NO: 1501198
uuauguagacagaggccac

SEQ ID NO: 1501200 - RNA, 19 nt, Artificial Sequence
  Description of Artificial Sequence: Synthetic oligonucleotide
  Sense strand starting at position 3857 of SEQ ID NO: 1244603
ggccucugucuacauaauu

SEQ ID NO: 1501201 - RNA, 19 nt, Artificial Sequence
  Description of Artificial Sequence: Synthetic oligonucleotide
  Antisense strand to SEQ ID NO: 1501200
aauuauguagacagaggcc

SEQ ID NO: 1501202 - RNA, 19 nt, Artificial Sequence
  Description of Artificial Sequence: Synthetic oligonucleotide
  Sense strand starting at position 3967 of SEQ ID NO: 1244603
ggacuauuaucuuuguuuc

SEQ ID NO: 1501203 - RNA, 19 nt, Artificial Sequence
  Description of Artificial Sequence: Synthetic oligonucleotide
  Antisense strand to SEQ ID NO: 1501202
gaaacaaagauaauagucc

SEQ ID NO: 1501204 - RNA, 19 nt, Artificial Sequence
  Description of Artificial Sequence: Synthetic oligonucleotide
  Sense strand starting at position 61 of SEQ ID NO: 1244604
gagccauggugaguaugau

SEQ ID NO: 1501205 - RNA, 19 nt, Artificial Sequence
  Description of Artificial Sequence: Synthetic oligonucleotide
  Antisense strand to SEQ ID NO: 1501204
aucauacucaccauggcuc

SEQ ID NO: 1501206 - RNA, 19 nt, Artificial Sequence
  Description of Artificial Sequence: Synthetic oligonucleotide
  Sense strand starting at position 98 of SEQ ID NO: 1244604
augauacagucuccuuuau

SEQ ID NO: 1501207 - RNA, 19 nt, Artificial Sequence
  Description of Artificial Sequence: Synthetic oligonucleotide
  Antisense strand to SEQ ID NO: 1501206
auaaaggagacuguaucau

SEQ ID NO: 1501208 - RNA, 19 nt, Artificial Sequence
  Description of Artificial Sequence: Synthetic oligonucleotide
  Sense strand starting at position 113 of SEQ ID NO: 1244604
uuauguaacagcuggcaga

SEQ ID NO: 1501209 - RNA, 19 nt, Artificial Sequence
  Description of Artificial Sequence: Synthetic oligonucleotide
  Antisense strand to SEQ ID NO: 1501208
ucugccagcuguuacauaa

SEQ ID NO: 1501210 - RNA, 19 nt, Artificial Sequence
  Description of Artificial Sequence: Synthetic oligonucleotide
  Sense strand starting at position 126 of SEQ ID NO: 1244604
ggcagaagaccuggucaca

SEQ ID NO: 1501211 - RNA, 19 nt, Artificial Sequence
  Description of Artificial Sequence: Synthetic oligonucleotide
  Antisense strand to SEQ ID NO: 1501210
ugugaccaggucuucugcc

SEQ ID NO: 1501212 - RNA, 19 nt, Artificial Sequence
  Description of Artificial Sequence: Synthetic oligonucleotide
  Sense strand starting at position 1110 of SEQ ID NO: 1244604
ugccacaucuggcugauau

SEQ ID NO: 1501213 - RNA, 19 nt, Artificial Sequence
  Description of Artificial Sequence: Synthetic oligonucleotide
  Antisense strand to SEQ ID NO: 1501212
auaucagccagauguggca

SEQ ID NO: 1501214 - RNA, 19 nt, Artificial Sequence
  Description of Artificial Sequence: Synthetic oligonucleotide
  Sense strand starting at position 1111 of SEQ ID NO: 1244604
gccacaucuggcugauauu

SEQ ID NO: 1501215 - RNA, 19 nt, Artificial Sequence
  Description of Artificial Sequence: Synthetic oligonucleotide
  Antisense strand to SEQ ID NO: 1501214
aauaucagccagauguggc

SEQ ID NO: 1501216 - RNA, 19 nt, Artificial Sequence
  Description of Artificial Sequence: Synthetic oligonucleotide
  Sense strand starting at position 1571 of SEQ ID NO: 1244604
ccauaauucuugucaggaa

SEQ ID NO: 1501217 - RNA, 19 nt, Artificial Sequence
  Description of Artificial Sequence: Synthetic oligonucleotide
  Antisense strand to SEQ ID NO: 1501216
uuccugacaagaauuaugg

SEQ ID NO: 1501218 - RNA, 19 nt, Artificial Sequence
  Description of Artificial Sequence: Synthetic oligonucleotide
  Sense strand starting at position 1603 of SEQ ID NO: 1244604
gcucaaccaccuugaguuu

SEQ ID NO: 1501219 - RNA, 19 nt, Artificial Sequence
  Description of Artificial Sequence: Synthetic oligonucleotide
  Antisense strand to SEQ ID NO: 1501218
aaacucaaggugguugagc

SEQ ID NO: 1501220 - RNA, 19 nt, Artificial Sequence
  Description of Artificial Sequence: Synthetic oligonucleotide
  Sense strand starting at position 1612 of SEQ ID NO: 1244604
ccuugaguuugaguuucuu

SEQ ID NO: 1501221 - RNA, 19 nt, Artificial Sequence
  Description of Artificial Sequence: Synthetic oligonucleotide
  Antisense strand to SEQ ID NO: 1501220
aagaaacucaaacucaagg

SEQ ID NO: 1501222 - RNA, 19 nt, Artificial Sequence
  Description of Artificial Sequence: Synthetic oligonucleotide
  Sense strand starting at position 1653 of SEQ ID NO: 1244604
ggaagauuaguguggcaau

SEQ ID NO: 1501223 - RNA, 19 nt, Artificial Sequence
  Description of Artificial Sequence: Synthetic oligonucleotide
  Antisense strand to SEQ ID NO: 1501222
auugccacacuaaucuucc

SEQ ID NO: 1501224 - RNA, 19 nt, Artificial Sequence
  Description of Artificial Sequence: Synthetic oligonucleotide
  Sense strand starting at position 1835 of SEQ ID NO: 1244604
gcagcccuugcagaauaaa

SEQ ID NO: 1501225 - RNA, 19 nt, Artificial Sequence
  Description of Artificial Sequence: Synthetic oligonucleotide
  Antisense strand to SEQ ID NO: 1501224
uuuauucugcaagggcugc

SEQ ID NO: 1501226 - RNA, 19 nt, Artificial Sequence
  Description of Artificial Sequence: Synthetic oligonucleotide
  Sense strand starting at position 2034 of SEQ ID NO: 1244604
accucucuucgcgaaggau

SEQ ID NO: 1501227 - RNA, 19 nt, Artificial Sequence
  Description of Artificial Sequence: Synthetic oligonucleotide
  Antisense strand to SEQ ID NO: 1501226
auccuucgcgaagagaggu

SEQ ID NO: 1501228 - RNA, 19 nt, Artificial Sequence
  Description of Artificial Sequence: Synthetic oligonucleotide
  Sense strand starting at position 2147 of SEQ ID NO: 1244604
gagauaccucuccgggacu

SEQ ID NO: 1501229 - RNA, 19 nt, Artificial Sequence
  Description of Artificial Sequence: Synthetic oligonucleotide
  Antisense strand to SEQ ID NO: 1501228
agucccggagagguaucuc

SEQ ID NO: 1501230 - RNA, 19 nt, Artificial Sequence
  Description of Artificial Sequence: Synthetic oligonucleotide
  Sense strand starting at position 2187 of SEQ ID NO: 1244604
ucaguugucaguugggauc

SEQ ID NO: 1501231 - RNA, 19 nt, Artificial Sequence
  Description of Artificial Sequence: Synthetic oligonucleotide
  Antisense strand to SEQ ID NO: 1501230
gaucccaacugacaacuga

SEQ ID NO: 1501232 - RNA, 19 nt, Artificial Sequence
  Description of Artificial Sequence: Synthetic oligonucleotide
  Sense strand starting at position 2216 of SEQ ID NO: 1244604
uuaagaguccuucagcgga

SEQ ID NO: 1501233 - RNA, 19 nt, Artificial Sequence
  Description of Artificial Sequence: Synthetic oligonucleotide
  Antisense strand to SEQ ID NO: 1501232
uccgcugaaggacucuuaa

SEQ ID NO: 1501234 - RNA, 19 nt, Artificial Sequence
  Description of Artificial Sequence: Synthetic oligonucleotide
  Sense strand starting at position 2605 of SEQ ID NO: 1244604
gccacaagaucccugaguu

SEQ ID NO: 1501235 - RNA, 19 nt, Artificial Sequence
  Description of Artificial Sequence: Synthetic oligonucleotide
  Antisense strand to SEQ ID NO: 1501234
aacucagggaucuuguggc

SEQ ID NO: 1501236 - RNA, 19 nt, Artificial Sequence
  Description of Artificial Sequence: Synthetic oligonucleotide
  Sense strand starting at position 2606 of SEQ ID NO: 1244604
ccacaagaucccugaguuu

SEQ ID NO: 1501237 - RNA, 19 nt, Artificial Sequence
  Description of Artificial Sequence: Synthetic oligonucleotide
  Antisense strand to SEQ ID NO: 1501236
aaacucagggaucuugugg

SEQ ID NO: 1501238 - RNA, 19 nt, Artificial Sequence
  Description of Artificial Sequence: Synthetic oligonucleotide
  Sense strand starting at position 2609 of SEQ ID NO: 1244604
caagaucccugaguuuaga

SEQ ID NO: 1501239 - RNA, 19 nt, Artificial Sequence
  Description of Artificial Sequence: Synthetic oligonucleotide
  Antisense strand to SEQ ID NO: 1501238
ucuaaacucagggaucuug

SEQ ID NO: 1501240 - RNA, 19 nt, Artificial Sequence
  Description of Artificial Sequence: Synthetic oligonucleotide
  Sense strand starting at position 2641 of SEQ ID NO: 1244604
gcauguuuaggguaaaguc

SEQ ID NO: 1501241 - RNA, 19 nt, Artificial Sequence
  Description of Artificial Sequence: Synthetic oligonucleotide
  Antisense strand to SEQ ID NO: 1501240
gacuuuacccuaaacaugc

SEQ ID NO: 1501242 - RNA, 19 nt, Artificial Sequence
  Description of Artificial Sequence: Synthetic oligonucleotide
  Sense strand starting at position 2683 of SEQ ID NO: 1244604
aggguagggacguguuuau

SEQ ID NO: 1501243 - RNA, 19 nt, Artificial Sequence
  Description of Artificial Sequence: Synthetic oligonucleotide
  Antisense strand to SEQ ID NO: 1501242
auaaacacgucccuacccu

SEQ ID NO: 1501244 - RNA, 19 nt, Artificial Sequence
  Description of Artificial Sequence: Synthetic oligonucleotide
  Sense strand starting at position 2687 of SEQ ID NO: 1244604
uagggacguguuuauagaa

SEQ ID NO: 1501245 - RNA, 19 nt, Artificial Sequence
  Description of Artificial Sequence: Synthetic oligonucleotide
  Antisense strand to SEQ ID NO: 1501244
uucuauaaacacgucccua

SEQ ID NO: 1501246 - RNA, 19 nt, Artificial Sequence
  Description of Artificial Sequence: Synthetic oligonucleotide
  Sense strand starting at position 2746 of SEQ ID NO: 1244604
aguauuagcacuuguggga

SEQ ID NO: 1501247 - RNA, 19 nt, Artificial Sequence
  Description of Artificial Sequence: Synthetic oligonucleotide
  Antisense strand to SEQ ID NO: 1501246
ucccacaagugcuaauacu

SEQ ID NO: 1501248 - RNA, 19 nt, Artificial Sequence
  Description of Artificial Sequence: Synthetic oligonucleotide
  Sense strand starting at position 2750 of SEQ ID NO: 1244604
uuagcacuugugggaaaua

SEQ ID NO: 1501249 - RNA, 19 nt, Artificial Sequence
  Description of Artificial Sequence: Synthetic oligonucleotide
  Antisense strand to SEQ ID NO: 1501248
uauuucccacaagugcuaa

SEQ ID NO: 1501250 - RNA, 19 nt, Artificial Sequence
  Description of Artificial Sequence: Synthetic oligonucleotide
  Sense strand starting at position 2853 of SEQ ID NO: 1244604
aacagucucgcaugaaauc

SEQ ID NO: 1501251 - RNA, 19 nt, Artificial Sequence
  Description of Artificial Sequence: Synthetic oligonucleotide
  Antisense strand to SEQ ID NO: 1501250
gauuucaugcgagacuguu

SEQ ID NO: 1501252 - RNA, 19 nt, Artificial Sequence
  Description of Artificial Sequence: Synthetic oligonucleotide
  Sense strand starting at position 2908 of SEQ ID NO: 1244604
ggugaaucguguaugugua

SEQ ID NO: 1501253 - RNA, 19 nt, Artificial Sequence
  Description of Artificial Sequence: Synthetic oligonucleotide
  Antisense strand to SEQ ID NO: 1501252
uacacauacacgauucacc

SEQ ID NO: 1501254 - RNA, 19 nt, Artificial Sequence
  Description of Artificial Sequence: Synthetic oligonucleotide
  Sense strand starting at position 3059 of SEQ ID NO: 1244604
agcugauggugucugagaa

SEQ ID NO: 1501255 - RNA, 19 nt, Artificial Sequence
  Description of Artificial Sequence: Synthetic oligonucleotide
  Antisense strand to SEQ ID NO: 1501254
uucucagacaccaucagcu

SEQ ID NO: 1501256 - RNA, 19 nt, Artificial Sequence
  Description of Artificial Sequence: Synthetic oligonucleotide
  Sense strand starting at position 3060 of SEQ ID NO: 1244604
gcugauggugucugagaag

SEQ ID NO: 1501257 - RNA, 19 nt, Artificial Sequence
  Description of Artificial Sequence: Synthetic oligonucleotide
  Antisense strand to SEQ ID NO: 1501256
cuucucagacaccaucagc

SEQ ID NO: 1501258 - RNA, 19 nt, Artificial Sequence
  Description of Artificial Sequence: Synthetic oligonucleotide
  Sense strand starting at position 3106 of SEQ ID NO: 1244604
ggaggaguguaaucaacug

SEQ ID NO: 1501259 - RNA, 19 nt, Artificial Sequence
  Description of Artificial Sequence: Synthetic oligonucleotide
  Antisense strand to SEQ ID NO: 1501258
caguugauuacacuccucc

SEQ ID NO: 1501260 - RNA, 19 nt, Artificial Sequence
  Description of Artificial Sequence: Synthetic oligonucleotide
  Sense strand starting at position 3112 of SEQ ID NO: 1244604
guguaaucaacuggugggu

SEQ ID NO: 1501261 - RNA, 19 nt, Artificial Sequence
  Description of Artificial Sequence: Synthetic oligonucleotide
  Antisense strand to SEQ ID NO: 1501260
acccaccaguugauuacac

SEQ ID NO: 1501262 - RNA, 19 nt, Artificial Sequence
  Description of Artificial Sequence: Synthetic oligonucleotide
  Sense strand starting at position 3156 of SEQ ID NO: 1244604
cugauuuacugagacagug

SEQ ID NO: 1501263 - RNA, 19 nt, Artificial Sequence
  Description of Artificial Sequence: Synthetic oligonucleotide
  Antisense strand to SEQ ID NO: 1501262
cacugucucaguaaaucag

SEQ ID NO: 1501264 - RNA, 19 nt, Artificial Sequence
  Description of Artificial Sequence: Synthetic oligonucleotide
  Sense strand starting at position 3166 of SEQ ID NO: 1244604
gagacaguguuauugaaau

SEQ ID NO: 1501265 - RNA, 19 nt, Artificial Sequence
  Description of Artificial Sequence: Synthetic oligonucleotide
  Antisense strand to SEQ ID NO: 1501264
auuucaauaacacugucuc

SEQ ID NO: 1501266 - RNA, 19 nt, Artificial Sequence
  Description of Artificial Sequence: Synthetic oligonucleotide
  Sense strand starting at position 3172 of SEQ ID NO: 1244604
guguuauugaaauaggcaa

SEQ ID NO: 1501267 - RNA, 19 nt, Artificial Sequence
  Description of Artificial Sequence: Synthetic oligonucleotide
  Antisense strand to SEQ ID NO: 1501266
uugccuauuucaauaacac

SEQ ID NO: 1501268 - RNA, 19 nt, Artificial Sequence
  Description of Artificial Sequence: Synthetic oligonucleotide
  Sense strand starting at position 3332 of SEQ ID NO: 1244604
cugguugggucaaggauga

SEQ ID NO: 1501269 - RNA, 19 nt, Artificial Sequence
  Description of Artificial Sequence: Synthetic oligonucleotide
  Antisense strand to SEQ ID NO: 1501268
ucauccuugacccaaccag

SEQ ID NO: 1501270 - RNA, 19 nt, Artificial Sequence
  Description of Artificial Sequence: Synthetic oligonucleotide
  Sense strand starting at position 3368 of SEQ ID NO: 1244604
gcuuguguucuugugcuga

SEQ ID NO: 1501271 - RNA, 19 nt, Artificial Sequence
  Description of Artificial Sequence: Synthetic oligonucleotide
  Antisense strand to SEQ ID NO: 1501270
ucagcacaagaacacaagc

SEQ ID NO: 1501272 - RNA, 19 nt, Artificial Sequence
  Description of Artificial Sequence: Synthetic oligonucleotide
  Sense strand starting at position 3373 of SEQ ID NO: 1244604
uguucuugugcugagugaa

SEQ ID NO: 1501273 - RNA, 19 nt, Artificial Sequence
  Description of Artificial Sequence: Synthetic oligonucleotide
  Antisense strand to SEQ ID NO: 1501272
uucacucagcacaagaaca

SEQ ID NO: 1501274 - RNA, 19 nt, Artificial Sequence
  Description of Artificial Sequence: Synthetic oligonucleotide
  Sense strand starting at position 3508 of SEQ ID NO: 1244604
aauaguaauguugaaagca

SEQ ID NO: 1501275 - RNA, 19 nt, Artificial Sequence
  Description of Artificial Sequence: Synthetic oligonucleotide
  Antisense strand to SEQ ID NO: 1501274
ugcuuucaacauuacuauu

SEQ ID NO: 1501276 - RNA, 19 nt, Artificial Sequence
  Description of Artificial Sequence: Synthetic oligonucleotide
  Sense strand starting at position 3517 of SEQ ID NO: 1244604
guugaaagcaguuaguuag

SEQ ID NO: 1501277 - RNA, 19 nt, Artificial Sequence
  Description of Artificial Sequence: Synthetic oligonucleotide
  Antisense strand to SEQ ID NO: 1501276
cuaacuaacugcuuucaac

SEQ ID NO: 1501278 - RNA, 19 nt, Artificial Sequence
  Description of Artificial Sequence: Synthetic oligonucleotide
  Sense strand starting at position 3520 of SEQ ID NO: 1244604
gaaagcaguuaguuagcuu

SEQ ID NO: 1501279 - RNA, 19 nt, Artificial Sequence
  Description of Artificial Sequence: Synthetic oligonucleotide
  Antisense strand to SEQ ID NO: 1501278
aagcuaacuaacugcuuuc

SEQ ID NO: 1501280 - RNA, 19 nt, Artificial Sequence
  Description of Artificial Sequence: Synthetic oligonucleotide
  Sense strand starting at position 3527 of SEQ ID NO: 1244604
guuaguuagcuuggacaca

SEQ ID NO: 1501281 - RNA, 19 nt, Artificial Sequence
  Description of Artificial Sequence: Synthetic oligonucleotide
  Antisense strand to SEQ ID NO: 1501280
uguguccaagcuaacuaac

SEQ ID NO: 1501282 - RNA, 19 nt, Artificial Sequence
  Description of Artificial Sequence: Synthetic oligonucleotide
  Sense strand starting at position 3824 of SEQ ID NO: 1244604
ggaugaaguugcuucuacu

SEQ ID NO: 1501283 - RNA, 19 nt, Artificial Sequence
  Description of Artificial Sequence: Synthetic oligonucleotide
  Antisense strand to SEQ ID NO: 1501282
aguagaagcaacuucaucc

SEQ ID NO: 1501284 - RNA, 19 nt, Artificial Sequence
  Description of Artificial Sequence: Synthetic oligonucleotide
  Sense strand starting at position 92 of SEQ ID NO: 1244605
ugggagggucucgauguaa

SEQ ID NO: 1501285 - RNA, 19 nt, Artificial Sequence
  Description of Artificial Sequence: Synthetic oligonucleotide
  Antisense strand to SEQ ID NO: 1501284
uuacaucgagacccuccca

SEQ ID NO: 1501286 - RNA, 19 nt, Artificial Sequence
  Description of Artificial Sequence: Synthetic oligonucleotide
  Sense strand starting at position 534 of SEQ ID NO: 1244605
ugcugugauauggaugauu

SEQ ID NO: 1501287 - RNA, 19 nt, Artificial Sequence
  Description of Artificial Sequence: Synthetic oligonucleotide
  Antisense strand to SEQ ID NO: 1501286
aaucauccauaucacagca

SEQ ID NO: 1501288 - RNA, 19 nt, Artificial Sequence
  Description of Artificial Sequence: Synthetic oligonucleotide
  Sense strand starting at position 536 of SEQ ID NO: 1244605
cugugauauggaugauuga

SEQ ID NO: 1501289 - RNA, 19 nt, Artificial Sequence
  Description of Artificial Sequence: Synthetic oligonucleotide
  Antisense strand to SEQ ID NO: 1501288
ucaaucauccauaucacag

SEQ ID NO: 1501290 - RNA, 19 nt, Artificial Sequence
  Description of Artificial Sequence: Synthetic oligonucleotide
  Sense strand starting at position 574 of SEQ ID NO: 1244605
agaguacugcuagaugagu

SEQ ID NO: 1501291 - RNA, 19 nt, Artificial Sequence
  Description of Artificial Sequence: Synthetic oligonucleotide
  Antisense strand to SEQ ID NO: 1501290
acucaucuagcaguacucu

SEQ ID NO: 1501292 - RNA, 19 nt, Artificial Sequence
  Description of Artificial Sequence: Synthetic oligonucleotide
  Sense strand starting at position 594 of SEQ ID NO: 1244605
gguacaucuguguagacau

SEQ ID NO: 1501293 - RNA, 19 nt, Artificial Sequence
  Description of Artificial Sequence: Synthetic oligonucleotide
  Antisense strand to SEQ ID NO: 1501292
augucuacacagauguacc

SEQ ID NO: 1501294 - RNA, 19 nt, Artificial Sequence
  Description of Artificial Sequence: Synthetic oligonucleotide
  Sense strand starting at position 689 of SEQ ID NO: 1244605
uccauuugucaccguaucu

SEQ ID NO: 1501295 - RNA, 19 nt, Artificial Sequence
  Description of Artificial Sequence: Synthetic oligonucleotide
  Antisense strand to SEQ ID NO: 1501294
agauacggugacaaaugga

SEQ ID NO: 1501296 - RNA, 19 nt, Artificial Sequence
  Description of Artificial Sequence: Synthetic oligonucleotide
  Sense strand starting at position 702 of SEQ ID NO: 1244605
guaucucagguuuauaaca

SEQ ID NO: 1501297 - RNA, 19 nt, Artificial Sequence
  Description of Artificial Sequence: Synthetic oligonucleotide
  Antisense strand to SEQ ID NO: 1501296
uguuauaaaccugagauac

SEQ ID NO: 1501298 - RNA, 19 nt, Artificial Sequence
  Description of Artificial Sequence: Synthetic oligonucleotide
  Sense strand starting at position 787 of SEQ ID NO: 1244605
aggccagugaccgaguuaa

SEQ ID NO: 1501299 - RNA, 19 nt, Artificial Sequence
  Description of Artificial Sequence: Synthetic oligonucleotide
  Antisense strand to SEQ ID NO: 1501298
uuaacucggucacuggccu

SEQ ID NO: 1501300 - RNA, 19 nt, Artificial Sequence
  Description of Artificial Sequence: Synthetic oligonucleotide
  Sense strand starting at position 791 of SEQ ID NO: 1244605
cagugaccgaguuaaguua

SEQ ID NO: 1501301 - RNA, 19 nt, Artificial Sequence
  Description of Artificial Sequence: Synthetic oligonucleotide
  Antisense strand to SEQ ID NO: 1501300
uaacuuaacucggucacug

SEQ ID NO: 1501302 - RNA, 19 nt, Artificial Sequence
  Description of Artificial Sequence: Synthetic oligonucleotide
  Sense strand starting at position 841 of SEQ ID NO: 1244605
guguguacaaacgaacaau

SEQ ID NO: 1501303 - RNA, 19 nt, Artificial Sequence
  Description of Artificial Sequence: Synthetic oligonucleotide
  Antisense strand to SEQ ID NO: 1501302
auuguucguuuguacacac

SEQ ID NO: 1501304 - RNA, 19 nt, Artificial Sequence
  Description of Artificial Sequence: Synthetic oligonucleotide
  Sense strand starting at position 1192 of SEQ ID NO: 1244605
ugguauagccagcauaaau

SEQ ID NO: 1501305 - RNA, 19 nt, Artificial Sequence
  Description of Artificial Sequence: Synthetic oligonucleotide
  Antisense strand to SEQ ID NO: 1501304
auuuaugcuggcuauacca

SEQ ID NO: 1501306 - RNA, 19 nt, Artificial Sequence
  Description of Artificial Sequence: Synthetic oligonucleotide
  Sense strand starting at position 1523 of SEQ ID NO: 1244605
ggugaacugccucaagcaa

SEQ ID NO: 1501307 - RNA, 19 nt, Artificial Sequence
  Description of Artificial Sequence: Synthetic oligonucleotide
  Antisense strand to SEQ ID NO: 1501306
uugcuugaggcaguucacc

SEQ ID NO: 1501308 - RNA, 19 nt, Artificial Sequence
  Description of Artificial Sequence: Synthetic oligonucleotide
  Sense strand starting at position 1988 of SEQ ID NO: 1244605
aucuuauauccgucgcgca

SEQ ID NO: 1501309 - RNA, 19 nt, Artificial Sequence
  Description of Artificial Sequence: Synthetic oligonucleotide
  Antisense strand to SEQ ID NO: 1501308
ugcgcgacggauauaagau

SEQ ID NO: 1501310 - RNA, 19 nt, Artificial Sequence
  Description of Artificial Sequence: Synthetic oligonucleotide
  Sense strand starting at position 2129 of SEQ ID NO: 1244605
ggaagucggcgucuugagu

SEQ ID NO: 1501311 - RNA, 19 nt, Artificial Sequence
  Description of Artificial Sequence: Synthetic oligonucleotide
  Antisense strand to SEQ ID NO: 1501310
acucaagacgccgacuucc

SEQ ID NO: 1501312 - RNA, 19 nt, Artificial Sequence
  Description of Artificial Sequence: Synthetic oligonucleotide
  Sense strand starting at position 2364 of SEQ ID NO: 1244605
ggaacaagauggucauugu

SEQ ID NO: 1501313 - RNA, 19 nt, Artificial Sequence
  Description of Artificial Sequence: Synthetic oligonucleotide
  Antisense strand to SEQ ID NO: 1501312
acaaugaccaucuuguucc

SEQ ID NO: 1501314 - RNA, 19 nt, Artificial Sequence
  Description of Artificial Sequence: Synthetic oligonucleotide
  Sense strand starting at position 2674 of SEQ ID NO: 1244605
uuaggaaugugcccuaaac

SEQ ID NO: 1501315 - RNA, 19 nt, Artificial Sequence
  Description of Artificial Sequence: Synthetic oligonucleotide
  Antisense strand to SEQ ID NO: 1501314
guuuagggcacauuccuaa

SEQ ID NO: 1501316 - RNA, 19 nt, Artificial Sequence
  Description of Artificial Sequence: Synthetic oligonucleotide
  Sense strand starting at position 2676 of SEQ ID NO: 1244605
aggaaugugcccuaaacac

SEQ ID NO: 1501317 - RNA, 19 nt, Artificial Sequence
  Description of Artificial Sequence: Synthetic oligonucleotide
  Antisense strand to SEQ ID NO: 1501316
guguuuagggcacauuccu

SEQ ID NO: 1501318 - RNA, 19 nt, Artificial Sequence
  Description of Artificial Sequence: Synthetic oligonucleotide
  Sense strand starting at position 2737 of SEQ ID NO: 1244605
gagagaaccuaauucggua

SEQ ID NO: 1501319 - RNA, 19 nt, Artificial Sequence
  Description of Artificial Sequence: Synthetic oligonucleotide
  Antisense strand to SEQ ID NO: 1501318
uaccgaauuagguucucuc

SEQ ID NO: 1501320 - RNA, 19 nt, Artificial Sequence
  Description of Artificial Sequence: Synthetic oligonucleotide
  Sense strand starting at position 2741 of SEQ ID NO: 1244605
gaaccuaauucgguagaac

SEQ ID NO: 1501321 - RNA, 19 nt, Artificial Sequence
  Description of Artificial Sequence: Synthetic oligonucleotide
  Antisense strand to SEQ ID NO: 1501320
guucuaccgaauuagguuc

SEQ ID NO: 1501322 - RNA, 19 nt, Artificial Sequence
  Description of Artificial Sequence: Synthetic oligonucleotide
  Sense strand starting at position 2859 of SEQ ID NO: 1244605
gguugagaagcacaauguu

SEQ ID NO: 1501323 - RNA, 19 nt, Artificial Sequence
  Description of Artificial Sequence: Synthetic oligonucleotide
  Antisense strand to SEQ ID NO: 1501322
aacauugugcuucucaacc

SEQ ID NO: 1501324 - RNA, 19 nt, Artificial Sequence
  Description of Artificial Sequence: Synthetic oligonucleotide
  Sense strand starting at position 2862 of SEQ ID NO: 1244605
ugagaagcacaauguuaga

SEQ ID NO: 1501325 - RNA, 19 nt, Artificial Sequence
  Description of Artificial Sequence: Synthetic oligonucleotide
  Antisense strand to SEQ ID NO: 1501324
ucuaacauugugcuucuca

SEQ ID NO: 1501326 - RNA, 19 nt, Artificial Sequence
  Description of Artificial Sequence: Synthetic oligonucleotide
  Sense strand starting at position 3024 of SEQ ID NO: 1244605
gucagaaaguucucugaug

SEQ ID NO: 1501327 - RNA, 19 nt, Artificial Sequence
  Description of Artificial Sequence: Synthetic oligonucleotide
  Antisense strand to SEQ ID NO: 1501326
caucagagaacuuucugac

SEQ ID NO: 1501328 - RNA, 19 nt, Artificial Sequence
  Description of Artificial Sequence: Synthetic oligonucleotide
  Sense strand starting at position 3026 of SEQ ID NO: 1244605
cagaaaguucucugauggu

SEQ ID NO: 1501329 - RNA, 19 nt, Artificial Sequence
  Description of Artificial Sequence: Synthetic oligonucleotide
  Antisense strand to SEQ ID NO: 1501328
accaucagagaacuuucug

SEQ ID NO: 1501330 - RNA, 19 nt, Artificial Sequence
  Description of Artificial Sequence: Synthetic oligonucleotide
  Sense strand starting at position 3035 of SEQ ID NO: 1244605
cucugaugguuuccuauaa

SEQ ID NO: 1501331 - RNA, 19 nt, Artificial Sequence
  Description of Artificial Sequence: Synthetic oligonucleotide
  Antisense strand to SEQ ID NO: 1501330
uuauaggaaaccaucagag

SEQ ID NO: 1501332 - RNA, 19 nt, Artificial Sequence
  Description of Artificial Sequence: Synthetic oligonucleotide
  Sense strand starting at position 3036 of SEQ ID NO: 1244605
ucugaugguuuccuauaaa

SEQ ID NO: 1501333 - RNA, 19 nt, Artificial Sequence
  Description of Artificial Sequence: Synthetic oligonucleotide
  Antisense strand to SEQ ID NO: 1501332
uuuauaggaaaccaucaga

SEQ ID NO: 1501334 - RNA, 19 nt, Artificial Sequence
  Description of Artificial Sequence: Synthetic oligonucleotide
  Sense strand starting at position 3048 of SEQ ID NO: 1244605
cuauaaacacuuuaguguu

SEQ ID NO: 1501335 - RNA, 19 nt, Artificial Sequence
  Description of Artificial Sequence: Synthetic oligonucleotide
  Antisense strand to SEQ ID NO: 1501334
aacacuaaaguguuuauag

SEQ ID NO: 1501336 - RNA, 19 nt, Artificial Sequence
  Description of Artificial Sequence: Synthetic oligonucleotide
  Sense strand starting at position 3074 of SEQ ID NO: 1244605
uguuuauagcauuagaaac

SEQ ID NO: 1501337 - RNA, 19 nt, Artificial Sequence
  Description of Artificial Sequence: Synthetic oligonucleotide
  Antisense strand to SEQ ID NO: 1501336
guuucuaaugcuauaaaca

SEQ ID NO: 1501338 - RNA, 19 nt, Artificial Sequence
  Description of Artificial Sequence: Synthetic oligonucleotide
  Sense strand starting at position 3175 of SEQ ID NO: 1244605
ggccuauuguaacuuaaca

SEQ ID NO: 1501339 - RNA, 19 nt, Artificial Sequence
  Description of Artificial Sequence: Synthetic oligonucleotide
  Antisense strand to SEQ ID NO: 1501338
uguuaaguuacaauaggcc

SEQ ID NO: 1501340 - RNA, 19 nt, Artificial Sequence
  Description of Artificial Sequence: Synthetic oligonucleotide
  Sense strand starting at position 3221 of SEQ ID NO: 1244605
agagauagucuuggccacu

SEQ ID NO: 1501341 - RNA, 19 nt, Artificial Sequence
  Description of Artificial Sequence: Synthetic oligonucleotide
  Antisense strand to SEQ ID NO: 1501340
aguggccaagacuaucucu

SEQ ID NO: 1501342 - RNA, 19 nt, Artificial Sequence
  Description of Artificial Sequence: Synthetic oligonucleotide
  Sense strand starting at position 3224 of SEQ ID NO: 1244605
gauagucuuggccacucaa

SEQ ID NO: 1501343 - RNA, 19 nt, Artificial Sequence
  Description of Artificial Sequence: Synthetic oligonucleotide
  Antisense strand to SEQ ID NO: 1501342
uugaguggccaagacuauc

SEQ ID NO: 1501344 - RNA, 19 nt, Artificial Sequence
  Description of Artificial Sequence: Synthetic oligonucleotide
  Sense strand starting at position 3426 of SEQ ID NO: 1244605
guagacagucgguagguaa

SEQ ID NO: 1501345 - RNA, 19 nt, Artificial Sequence
  Description of Artificial Sequence: Synthetic oligonucleotide
  Antisense strand to SEQ ID NO: 1501344
uuaccuaccgacugucuac

SEQ ID NO: 1501346 - RNA, 19 nt, Artificial Sequence
  Description of Artificial Sequence: Synthetic oligonucleotide
  Sense strand starting at position 3437 of SEQ ID NO: 1244605
guagguaaaucucccagau

SEQ ID NO: 1501347 - RNA, 19 nt, Artificial Sequence
  Description of Artificial Sequence: Synthetic oligonucleotide
  Antisense strand to SEQ ID NO: 1501346
aucugggagauuuaccuac

SEQ ID NO: 1501348 - RNA, 19 nt, Artificial Sequence
  Description of Artificial Sequence: Synthetic oligonucleotide
  Sense strand starting at position 3556 of SEQ ID NO: 1244605
uuuaguauuaguggaagaa

SEQ ID NO: 1501349 - RNA, 19 nt, Artificial Sequence
  Description of Artificial Sequence: Synthetic oligonucleotide
  Antisense strand to SEQ ID NO: 1501348
uucuuccacuaauacuaaa

SEQ ID NO: 1501350 - RNA, 19 nt, Artificial Sequence
  Description of Artificial Sequence: Synthetic oligonucleotide
  Sense strand starting at position 3583 of SEQ ID NO: 1244605
ggauaucagaucuguuuga

SEQ ID NO: 1501351 - RNA, 19 nt, Artificial Sequence
  Description of Artificial Sequence: Synthetic oligonucleotide
  Antisense strand to SEQ ID NO: 1501350
ucaaacagaucugauaucc

SEQ ID NO: 1501352 - RNA, 19 nt, Artificial Sequence
  Description of Artificial Sequence: Synthetic oligonucleotide
  Sense strand starting at position 3584 of SEQ ID NO: 1244605
gauaucagaucuguuugaa

SEQ ID NO: 1501353 - RNA, 19 nt, Artificial Sequence
  Description of Artificial Sequence: Synthetic oligonucleotide
  Antisense strand to SEQ ID NO: 1501352
uucaaacagaucugauauc

SEQ ID NO: 1501354 - RNA, 19 nt, Artificial Sequence
  Description of Artificial Sequence: Synthetic oligonucleotide
  Sense strand starting at position 3683 of SEQ ID NO: 1244605
cccagauaucaaugggugu

SEQ ID NO: 1501355 - RNA, 19 nt, Artificial Sequence
  Description of Artificial Sequence: Synthetic oligonucleotide
  Antisense strand to SEQ ID NO: 1501354
acacccauugauaucuggg

SEQ ID NO: 1501356 - RNA, 19 nt, Artificial Sequence
  Description of Artificial Sequence: Synthetic oligonucleotide
  Sense strand starting at position 3684 of SEQ ID NO: 1244605
ccagauaucaauggguguu

SEQ ID NO: 1501357 - RNA, 19 nt, Artificial Sequence
  Description of Artificial Sequence: Synthetic oligonucleotide
  Antisense strand to SEQ ID NO: 1501356
aacacccauugauaucugg

SEQ ID NO: 1501358 - RNA, 19 nt, Artificial Sequence
  Description of Artificial Sequence: Synthetic oligonucleotide
  Sense strand starting at position 3757 of SEQ ID NO: 1244605
uccuaacugguguaucauu

SEQ ID NO: 1501359 - RNA, 19 nt, Artificial Sequence
  Description of Artificial Sequence: Synthetic oligonucleotide
  Antisense strand to SEQ ID NO: 1501358
aaugauacaccaguuagga

SEQ ID NO: 1501360 - RNA, 19 nt, Artificial Sequence
  Description of Artificial Sequence: Synthetic oligonucleotide
  Sense strand starting at position 3829 of SEQ ID NO: 1244605
gucuucucaguuuauuaac

SEQ ID NO: 1501361 - RNA, 19 nt, Artificial Sequence
  Description of Artificial Sequence: Synthetic oligonucleotide
  Antisense strand to SEQ ID NO: 1501360
guuaauaaacugagaagac

SEQ ID NO: 1501362 - RNA, 19 nt, Artificial Sequence
  Description of Artificial Sequence: Synthetic oligonucleotide
  Sense strand starting at position 3917 of SEQ ID NO: 1244605
cucugcuguccagauugga

SEQ ID NO: 1501363 - RNA, 19 nt, Artificial Sequence
  Description of Artificial Sequence: Synthetic oligonucleotide
  Antisense strand to SEQ ID NO: 1501362
uccaaucuggacagcagag

SEQ ID NO: 1501364 - RNA, 19 nt, Artificial Sequence
  Description of Artificial Sequence: Synthetic oligonucleotide
  Sense strand starting at position 350 of SEQ ID NO: 1244606
auuuaaagaugugagcaua

SEQ ID NO: 1501365 - RNA, 19 nt, Artificial Sequence
  Description of Artificial Sequence: Synthetic oligonucleotide
  Antisense strand to SEQ ID NO: 1501364
uaugcucacaucuuuaaau

SEQ ID NO: 1501366 - RNA, 19 nt, Artificial Sequence
  Description of Artificial Sequence: Synthetic oligonucleotide
  Sense strand starting at position 805 of SEQ ID NO: 1244606
acauacuaugauuggagua

SEQ ID NO: 1501367 - RNA, 19 nt, Artificial Sequence
  Description of Artificial Sequence: Synthetic oligonucleotide
  Antisense strand to SEQ ID NO: 1501366
uacuccaaucauaguaugu

SEQ ID NO: 1501368 - RNA, 19 nt, Artificial Sequence
  Description of Artificial Sequence: Synthetic oligonucleotide
  Sense strand starting at position 828 of SEQ ID NO: 1244606
ccagguucuccugaguacu

SEQ ID NO: 1501369 - RNA, 19 nt, Artificial Sequence
  Description of Artificial Sequence: Synthetic oligonucleotide
  Antisense strand to SEQ ID NO: 1501368
aguacucaggagaaccugg

SEQ ID NO: 1501370 - RNA, 19 nt, Artificial Sequence
  Description of Artificial Sequence: Synthetic oligonucleotide
  Sense strand starting at position 830 of SEQ ID NO: 1244606
agguucuccugaguacuca

SEQ ID NO: 1501371 - RNA, 19 nt, Artificial Sequence
  Description of Artificial Sequence: Synthetic oligonucleotide
  Antisense strand to SEQ ID NO: 1501370
ugaguacucaggagaaccu

SEQ ID NO: 1501372 - RNA, 19 nt, Artificial Sequence
  Description of Artificial Sequence: Synthetic oligonucleotide
  Sense strand starting at position 831 of SEQ ID NO: 1244606
gguucuccugaguacucaa

SEQ ID NO: 1501373 - RNA, 19 nt, Artificial Sequence
  Description of Artificial Sequence: Synthetic oligonucleotide
  Antisense strand to SEQ ID NO: 1501372
uugaguacucaggagaacc

SEQ ID NO: 1501374 - RNA, 19 nt, Artificial Sequence
  Description of Artificial Sequence: Synthetic oligonucleotide
  Sense strand starting at position 881 of SEQ ID NO: 1244606
aggugacuucuaggcugaa

SEQ ID NO: 1501375 - RNA, 19 nt, Artificial Sequence
  Description of Artificial Sequence: Synthetic oligonucleotide
  Antisense strand to SEQ ID NO: 1501374
uucagccuagaagucaccu

SEQ ID NO: 1501376 - RNA, 19 nt, Artificial Sequence
  Description of Artificial Sequence: Synthetic oligonucleotide
  Sense strand starting at position 882 of SEQ ID NO: 1244606
ggugacuucuaggcugaaa

SEQ ID NO: 1501377 - RNA, 19 nt, Artificial Sequence
  Description of Artificial Sequence: Synthetic oligonucleotide
  Antisense strand to SEQ ID NO: 1501376
uuucagccuagaagucacc

SEQ ID NO: 1501378 - RNA, 19 nt, Artificial Sequence
  Description of Artificial Sequence: Synthetic oligonucleotide
  Sense strand starting at position 897 of SEQ ID NO: 1244606
gaaaccaguuggccagauu

SEQ ID NO: 1501379 - RNA, 19 nt, Artificial Sequence
  Description of Artificial Sequence: Synthetic oligonucleotide
  Antisense strand to SEQ ID NO: 1501378
aaucuggccaacugguuuc

SEQ ID NO: 1501380 - RNA, 19 nt, Artificial Sequence
  Description of Artificial Sequence: Synthetic oligonucleotide
  Sense strand starting at position 898 of SEQ ID NO: 1244606
aaaccaguuggccagauua

SEQ ID NO: 1501381 - RNA, 19 nt, Artificial Sequence
  Description of Artificial Sequence: Synthetic oligonucleotide
  Antisense strand to SEQ ID NO: 1501380
uaaucuggccaacugguuu

SEQ ID NO: 1501382 - RNA, 19 nt, Artificial Sequence
  Description of Artificial Sequence: Synthetic oligonucleotide
  Sense strand starting at position 900 of SEQ ID NO: 1244606
accaguuggccagauuaag

SEQ ID NO: 1501383 - RNA, 19 nt, Artificial Sequence
  Description of Artificial Sequence: Synthetic oligonucleotide
  Antisense strand to SEQ ID NO: 1501382
cuuaaucuggccaacuggu

SEQ ID NO: 1501384 - RNA, 19 nt, Artificial Sequence
  Description of Artificial Sequence: Synthetic oligonucleotide
  Sense strand starting at position 955 of SEQ ID NO: 1244606
uaaggucugaggugaaaga

SEQ ID NO: 1501385 - RNA, 19 nt, Artificial Sequence
  Description of Artificial Sequence: Synthetic oligonucleotide
  Antisense strand to SEQ ID NO: 1501384
ucuuucaccucagaccuua

SEQ ID NO: 1501386 - RNA, 19 nt, Artificial Sequence
  Description of Artificial Sequence: Synthetic oligonucleotide
  Sense strand starting at position 1039 of SEQ ID NO: 1244606
gagauaucauagucugauu

SEQ ID NO: 1501387 - RNA, 19 nt, Artificial Sequence
  Description of Artificial Sequence: Synthetic oligonucleotide
  Antisense strand to SEQ ID NO: 1501386
aaucagacuaugauaucuc

SEQ ID NO: 1501388 - RNA, 19 nt, Artificial Sequence
  Description of Artificial Sequence: Synthetic oligonucleotide
  Sense strand starting at position 1041 of SEQ ID NO: 1244606
gauaucauagucugauuag

SEQ ID NO: 1501389 - RNA, 19 nt, Artificial Sequence
  Description of Artificial Sequence: Synthetic oligonucleotide
  Antisense strand to SEQ ID NO: 1501388
cuaaucagacuaugauauc

SEQ ID NO: 1501390 - RNA, 19 nt, Artificial Sequence
  Description of Artificial Sequence: Synthetic oligonucleotide
  Sense strand starting at position 1103 of SEQ ID NO: 1244606
agaguaguagccuaguaga

SEQ ID NO: 1501391 - RNA, 19 nt, Artificial Sequence
  Description of Artificial Sequence: Synthetic oligonucleotide
  Antisense strand to SEQ ID NO: 1501390
ucuacuaggcuacuacucu

SEQ ID NO: 1501392 - RNA, 19 nt, Artificial Sequence
  Description of Artificial Sequence: Synthetic oligonucleotide
  Sense strand starting at position 1131 of SEQ ID NO: 1244606
gagggagguucuuccuauu

SEQ ID NO: 1501393 - RNA, 19 nt, Artificial Sequence
  Description of Artificial Sequence: Synthetic oligonucleotide
  Antisense strand to SEQ ID NO: 1501392
aauaggaagaaccucccuc

SEQ ID NO: 1501394 - RNA, 19 nt, Artificial Sequence
  Description of Artificial Sequence: Synthetic oligonucleotide
  Sense strand starting at position 1157 of SEQ ID NO: 1244606
aaaggaauaugggaacaaa

SEQ ID NO: 1501395 - RNA, 19 nt, Artificial Sequence
  Description of Artificial Sequence: Synthetic oligonucleotide
  Antisense strand to SEQ ID NO: 1501394
uuuguucccauauuccuuu

SEQ ID NO: 1501396 - RNA, 19 nt, Artificial Sequence
  Description of Artificial Sequence: Synthetic oligonucleotide
  Sense strand starting at position 1260 of SEQ ID NO: 1244606
aauggcuuaguuugacuaa

SEQ ID NO: 1501397 - RNA, 19 nt, Artificial Sequence
  Description of Artificial Sequence: Synthetic oligonucleotide
  Antisense strand to SEQ ID NO: 1501396
uuagucaaacuaagccauu

SEQ ID NO: 1501398 - RNA, 19 nt, Artificial Sequence
  Description of Artificial Sequence: Synthetic oligonucleotide
  Sense strand starting at position 1272 of SEQ ID NO: 1244606
ugacuaaaguguuucucac

SEQ ID NO: 1501399 - RNA, 19 nt, Artificial Sequence
  Description of Artificial Sequence: Synthetic oligonucleotide
  Antisense strand to SEQ ID NO: 1501398
gugagaaacacuuuaguca

SEQ ID NO: 1501400 - RNA, 19 nt, Artificial Sequence
  Description of Artificial Sequence: Synthetic oligonucleotide
  Sense strand starting at position 1274 of SEQ ID NO: 1244606
acuaaaguguuucucacaa

SEQ ID NO: 1501401 - RNA, 19 nt, Artificial Sequence
  Description of Artificial Sequence: Synthetic oligonucleotide
  Antisense strand to SEQ ID NO: 1501400
uugugagaaacacuuuagu

SEQ ID NO: 1501402 - RNA, 19 nt, Artificial Sequence
  Description of Artificial Sequence: Synthetic oligonucleotide
  Sense strand starting at position 1321 of SEQ ID NO: 1244606
gcaaaugacggauaaagcu

SEQ ID NO: 1501403 - RNA, 19 nt, Artificial Sequence
  Description of Artificial Sequence: Synthetic oligonucleotide
  Antisense strand to SEQ ID NO: 1501402
agcuuuauccgucauuugc

SEQ ID NO: 1501404 - RNA, 19 nt, Artificial Sequence
  Description of Artificial Sequence: Synthetic oligonucleotide
  Sense strand starting at position 1329 of SEQ ID NO: 1244606
cggauaaagcuguaaaccu

SEQ ID NO: 1501405 - RNA, 19 nt, Artificial Sequence
  Description of Artificial Sequence: Synthetic oligonucleotide
  Antisense strand to SEQ ID NO: 1501404
agguuuacagcuuuauccg

SEQ ID NO: 1501406 - RNA, 19 nt, Artificial Sequence
  Description of Artificial Sequence: Synthetic oligonucleotide
  Sense strand starting at position 1380 of SEQ ID NO: 1244606
gugauuuaauuggaccuaa

SEQ ID NO: 1501407 - RNA, 19 nt, Artificial Sequence
  Description of Artificial Sequence: Synthetic oligonucleotide
  Antisense strand to SEQ ID NO: 1501406
uuagguccaauuaaaucac

SEQ ID NO: 1501408 - RNA, 19 nt, Artificial Sequence
  Description of Artificial Sequence: Synthetic oligonucleotide
  Sense strand starting at position 1989 of SEQ ID NO: 1244606
uaucuuugguaagcaagau

SEQ ID NO: 1501409 - RNA, 19 nt, Artificial Sequence
  Description of Artificial Sequence: Synthetic oligonucleotide
  Antisense strand to SEQ ID NO: 1501408
aucuugcuuaccaaagaua

SEQ ID NO: 1501410 - RNA, 19 nt, Artificial Sequence
  Description of Artificial Sequence: Synthetic oligonucleotide
  Sense strand starting at position 1993 of SEQ ID NO: 1244606
uuugguaagcaagauugca

SEQ ID NO: 1501411 - RNA, 19 nt, Artificial Sequence
  Description of Artificial Sequence: Synthetic oligonucleotide
  Antisense strand to SEQ ID NO: 1501410
ugcaaucuugcuuaccaaa

SEQ ID NO: 1501412 - RNA, 19 nt, Artificial Sequence
  Description of Artificial Sequence: Synthetic oligonucleotide
  Sense strand starting at position 2001 of SEQ ID NO: 1244606
gcaagauugcaacacagca

SEQ ID NO: 1501413 - RNA, 19 nt, Artificial Sequence
  Description of Artificial Sequence: Synthetic oligonucleotide
  Antisense strand to SEQ ID NO: 1501412
ugcuguguugcaaucuugc

SEQ ID NO: 1501414 - RNA, 19 nt, Artificial Sequence
  Description of Artificial Sequence: Synthetic oligonucleotide
  Sense strand starting at position 2282 of SEQ ID NO: 1244606
ccagcaagauuacugaaca

SEQ ID NO: 1501415 - RNA, 19 nt, Artificial Sequence
  Description of Artificial Sequence: Synthetic oligonucleotide
  Antisense strand to SEQ ID NO: 1501414
uguucaguaaucuugcugg

SEQ ID NO: 1501416 - RNA, 19 nt, Artificial Sequence
  Description of Artificial Sequence: Synthetic oligonucleotide
  Sense strand starting at position 2367 of SEQ ID NO: 1244606
uuagaacaucugggucagu

SEQ ID NO: 1501417 - RNA, 19 nt, Artificial Sequence
  Description of Artificial Sequence: Synthetic oligonucleotide
  Antisense strand to SEQ ID NO: 1501416
acugacccagauguucuaa

SEQ ID NO: 1501418 - RNA, 19 nt, Artificial Sequence
  Description of Artificial Sequence: Synthetic oligonucleotide
  Sense strand starting at position 2392 of SEQ ID NO: 1244606
agggaacuugcccagucau

SEQ ID NO: 1501419 - RNA, 19 nt, Artificial Sequence
  Description of Artificial Sequence: Synthetic oligonucleotide
  Antisense strand to SEQ ID NO: 1501418
augacugggcaaguucccu

SEQ ID NO: 1501420 - RNA, 19 nt, Artificial Sequence
  Description of Artificial Sequence: Synthetic oligonucleotide
  Sense strand starting at position 2787 of SEQ ID NO: 1244606
uagaauugacauugguguu

SEQ ID NO: 1501421 - RNA, 19 nt, Artificial Sequence
  Description of Artificial Sequence: Synthetic oligonucleotide
  Antisense strand to SEQ ID NO: 1501420
aacaccaaugucaauucua

SEQ ID NO: 1501422 - RNA, 19 nt, Artificial Sequence
  Description of Artificial Sequence: Synthetic oligonucleotide
  Sense strand starting at position 2788 of SEQ ID NO: 1244606
agaauugacauugguguua

SEQ ID NO: 1501423 - RNA, 19 nt, Artificial Sequence
  Description of Artificial Sequence: Synthetic oligonucleotide
  Antisense strand to SEQ ID NO: 1501422
uaacaccaaugucaauucu

SEQ ID NO: 1501424 - RNA, 19 nt, Artificial Sequence
  Description of Artificial Sequence: Synthetic oligonucleotide
  Sense strand starting at position 2849 of SEQ ID NO: 1244606
gcuuuaauuugacaagaga

SEQ ID NO: 1501425 - RNA, 19 nt, Artificial Sequence
  Description of Artificial Sequence: Synthetic oligonucleotide
  Antisense strand to SEQ ID NO: 1501424
ucucuugucaaauuaaagc

SEQ ID NO: 1501426 - RNA, 19 nt, Artificial Sequence
  Description of Artificial Sequence: Synthetic oligonucleotide
  Sense strand starting at position 3008 of SEQ ID NO: 1244606
gcaugaacucuggauguag

SEQ ID NO: 1501427 - RNA, 19 nt, Artificial Sequence
  Description of Artificial Sequence: Synthetic oligonucleotide
  Antisense strand to SEQ ID NO: 1501426
cuacauccagaguucaugc

SEQ ID NO: 1501428 - RNA, 19 nt, Artificial Sequence
  Description of Artificial Sequence: Synthetic oligonucleotide
  Sense strand starting at position 3079 of SEQ ID NO: 1244606
cagacagaauuugaguuua

SEQ ID NO: 1501429 - RNA, 19 nt, Artificial Sequence
  Description of Artificial Sequence: Synthetic oligonucleotide
  Antisense strand to SEQ ID NO: 1501428
uaaacucaaauucugucug

SEQ ID NO: 1501430 - RNA, 19 nt, Artificial Sequence
  Description of Artificial Sequence: Synthetic oligonucleotide
  Sense strand starting at position 3295 of SEQ ID NO: 1244606
uucccuauaguacauguua

SEQ ID NO: 1501431 - RNA, 19 nt, Artificial Sequence
  Description of Artificial Sequence: Synthetic oligonucleotide
  Antisense strand to SEQ ID NO: 1501430
uaacauguacuauagggaa

SEQ ID NO: 1501432 - RNA, 19 nt, Artificial Sequence
  Description of Artificial Sequence: Synthetic oligonucleotide
  Sense strand starting at position 3318 of SEQ ID NO: 1244606
guccuuucugaaugauaaa

SEQ ID NO: 1501433 - RNA, 19 nt, Artificial Sequence
  Description of Artificial Sequence: Synthetic oligonucleotide
  Antisense strand to SEQ ID NO: 1501432
uuuaucauucagaaaggac

SEQ ID NO: 1501434 - RNA, 19 nt, Artificial Sequence
  Description of Artificial Sequence: Synthetic oligonucleotide
  Sense strand starting at position 3394 of SEQ ID NO: 1244606
ucuguaguugaugauaagu

SEQ ID NO: 1501435 - RNA, 19 nt, Artificial Sequence
  Description of Artificial Sequence: Synthetic oligonucleotide
  Antisense strand to SEQ ID NO: 1501434
acuuaucaucaacuacaga

SEQ ID NO: 1501436 - RNA, 19 nt, Artificial Sequence
  Description of Artificial Sequence: Synthetic oligonucleotide
  Sense strand starting at position 3399 of SEQ ID NO: 1244606
aguugaugauaaguuacaa

SEQ ID NO: 1501437 - RNA, 19 nt, Artificial Sequence
  Description of Artificial Sequence: Synthetic oligonucleotide
  Antisense strand to SEQ ID NO: 1501436
uuguaacuuaucaucaacu

SEQ ID NO: 1501438 - RNA, 19 nt, Artificial Sequence
  Description of Artificial Sequence: Synthetic oligonucleotide
  Sense strand starting at position 3502 of SEQ ID NO: 1244606
ccuguucuguauuugcgaa

SEQ ID NO: 1501439 - RNA, 19 nt, Artificial Sequence
  Description of Artificial Sequence: Synthetic oligonucleotide
  Antisense strand to SEQ ID NO: 1501438
uucgcaaauacagaacagg

SEQ ID NO: 1501440 - RNA, 19 nt, Artificial Sequence
  Description of Artificial Sequence: Synthetic oligonucleotide
  Sense strand starting at position 3855 of SEQ ID NO: 1244606
caguacuaugcccaggaga

SEQ ID NO: 1501441 - RNA, 19 nt, Artificial Sequence
  Description of Artificial Sequence: Synthetic oligonucleotide
  Antisense strand to SEQ ID NO: 1501440
ucuccugggcauaguacug

SEQ ID NO: 1501442 - RNA, 19 nt, Artificial Sequence
  Description of Artificial Sequence: Synthetic oligonucleotide
  Sense strand starting at position 3857 of SEQ ID NO: 1244606
guacuaugcccaggagaca

SEQ ID NO: 1501443 - RNA, 19 nt, Artificial Sequence
  Description of Artificial Sequence: Synthetic oligonucleotide
  Antisense strand to SEQ ID NO: 1501442
ugucuccugggcauaguac

SEQ ID NO: 1501444 - RNA, 19 nt, Artificial Sequence
  Description of Artificial Sequence: Synthetic oligonucleotide
  Sense strand starting at position 466 of SEQ ID NO: 1244607
cuggccugcuccugaaaca

SEQ ID NO: 1501445 - RNA, 19 nt, Artificial Sequence
  Description of Artificial Sequence: Synthetic oligonucleotide
  Antisense strand to SEQ ID NO: 1501444
uguuucaggagcaggccag

SEQ ID NO: 1501446 - RNA, 19 nt, Artificial Sequence
  Description of Artificial Sequence: Synthetic oligonucleotide
  Sense strand starting at position 910 of SEQ ID NO: 1244607
ugucauacuccacggacau

SEQ ID NO: 1501447 - RNA, 19 nt, Artificial Sequence
  Description of Artificial Sequence: Synthetic oligonucleotide
  Antisense strand to SEQ ID NO: 1501446
auguccguggaguaugaca

SEQ ID NO: 1501448 - RNA, 19 nt, Artificial Sequence
  Description of Artificial Sequence: Synthetic oligonucleotide
  Sense strand starting at position 961 of SEQ ID NO: 1244607
ccgagcaguugguguugau

SEQ ID NO: 1501449 - RNA, 19 nt, Artificial Sequence
  Description of Artificial Sequence: Synthetic oligonucleotide
  Antisense strand to SEQ ID NO: 1501448
aucaacaccaacugcucgg

SEQ ID NO: 1501450 - RNA, 19 nt, Artificial Sequence
  Description of Artificial Sequence: Synthetic oligonucleotide
  Sense strand starting at position 965 of SEQ ID NO: 1244607
gcaguugguguugaugaca

SEQ ID NO: 1501451 - RNA, 19 nt, Artificial Sequence
  Description of Artificial Sequence: Synthetic oligonucleotide
  Antisense strand to SEQ ID NO: 1501450
ugucaucaacaccaacugc

SEQ ID NO: 1501452 - RNA, 19 nt, Artificial Sequence
  Description of Artificial Sequence: Synthetic oligonucleotide
  Sense strand starting at position 1082 of SEQ ID NO: 1244607
caacguggcugucugacau

SEQ ID NO: 1501453 - RNA, 19 nt, Artificial Sequence
  Description of Artificial Sequence: Synthetic oligonucleotide
  Antisense strand to SEQ ID NO: 1501452
augucagacagccacguug

SEQ ID NO: 1501454 - RNA, 19 nt, Artificial Sequence
  Description of Artificial Sequence: Synthetic oligonucleotide
  Sense strand starting at position 1195 of SEQ ID NO: 1244607
ggaucucuugaguggaaac

SEQ ID NO: 1501455 - RNA, 19 nt, Artificial Sequence
  Description of Artificial Sequence: Synthetic oligonucleotide
  Antisense strand to SEQ ID NO: 1501454
guuuccacucaagagaucc

SEQ ID NO: 1501456 - RNA, 19 nt, Artificial Sequence
  Description of Artificial Sequence: Synthetic oligonucleotide
  Sense strand starting at position 1452 of SEQ ID NO: 1244607
cguggcuucggagcgagaa

SEQ ID NO: 1501457 - RNA, 19 nt, Artificial Sequence
  Description of Artificial Sequence: Synthetic oligonucleotide
  Antisense strand to SEQ ID NO: 1501456
uucucgcuccgaagccacg

SEQ ID NO: 1501458 - RNA, 19 nt, Artificial Sequence
  Description of Artificial Sequence: Synthetic oligonucleotide
  Sense strand starting at position 1453 of SEQ ID NO: 1244607
guggcuucggagcgagaaa

SEQ ID NO: 1501459 - RNA, 19 nt, Artificial Sequence
  Description of Artificial Sequence: Synthetic oligonucleotide
  Antisense strand to SEQ ID NO: 1501458
uuucucgcuccgaagccac

SEQ ID NO: 1501460 - RNA, 19 nt, Artificial Sequence
  Description of Artificial Sequence: Synthetic oligonucleotide
  Sense strand starting at position 1794 of SEQ ID NO: 1244607
uggucuugacggcgaugaa

SEQ ID NO: 1501461 - RNA, 19 nt, Artificial Sequence
  Description of Artificial Sequence: Synthetic oligonucleotide
  Antisense strand to SEQ ID NO: 1501460
uucaucgccgucaagacca

SEQ ID NO: 1501462 - RNA, 19 nt, Artificial Sequence
  Description of Artificial Sequence: Synthetic oligonucleotide
  Sense strand starting at position 2682 of SEQ ID NO: 1244607
cgagguaccuuccaggaca

SEQ ID NO: 1501463 - RNA, 19 nt, Artificial Sequence
  Description of Artificial Sequence: Synthetic oligonucleotide
  Antisense strand to SEQ ID NO: 1501462
uguccuggaagguaccucg

SEQ ID NO: 1501464 - RNA, 19 nt, Artificial Sequence
  Description of Artificial Sequence: Synthetic oligonucleotide
  Sense strand starting at position 2924 of SEQ ID NO: 1244607
ccagccugcuuuguguuaa

SEQ ID NO: 1501465 - RNA, 19 nt, Artificial Sequence
  Description of Artificial Sequence: Synthetic oligonucleotide
  Antisense strand to SEQ ID NO: 1501464
uuaacacaaagcaggcugg

SEQ ID NO: 1501466 - RNA, 19 nt, Artificial Sequence
  Description of Artificial Sequence: Synthetic oligonucleotide
  Sense strand starting at position 2981 of SEQ ID NO: 1244607
ccaugaggcucccugagau

SEQ ID NO: 1501467 - RNA, 19 nt, Artificial Sequence
  Description of Artificial Sequence: Synthetic oligonucleotide
  Antisense strand to SEQ ID NO: 1501466
aucucagggagccucaugg

SEQ ID NO: 1501468 - RNA, 19 nt, Artificial Sequence
  Description of Artificial Sequence: Synthetic oligonucleotide
  Sense strand starting at position 3032 of SEQ ID NO: 1244607
ugacucucagcccaguauu

SEQ ID NO: 1501469 - RNA, 19 nt, Artificial Sequence
  Description of Artificial Sequence: Synthetic oligonucleotide
  Antisense strand to SEQ ID NO: 1501468
aauacugggcugagaguca

SEQ ID NO: 1501470 - RNA, 19 nt, Artificial Sequence
  Description of Artificial Sequence: Synthetic oligonucleotide
  Sense strand starting at position 3266 of SEQ ID NO: 1244607
gcuucugagccuuagaguc

SEQ ID NO: 1501471 - RNA, 19 nt, Artificial Sequence
  Description of Artificial Sequence: Synthetic oligonucleotide
  Antisense strand to SEQ ID NO: 1501470
gacucuaaggcucagaagc

SEQ ID NO: 1501472 - RNA, 19 nt, Artificial Sequence
  Description of Artificial Sequence: Synthetic oligonucleotide
  Sense strand starting at position 3268 of SEQ ID NO: 1244607
uucugagccuuagagucuu

SEQ ID NO: 1501473 - RNA, 19 nt, Artificial Sequence
  Description of Artificial Sequence: Synthetic oligonucleotide
  Antisense strand to SEQ ID NO: 1501472
aagacucuaaggcucagaa

SEQ ID NO: 1501474 - RNA, 19 nt, Artificial Sequence
  Description of Artificial Sequence: Synthetic oligonucleotide
  Sense strand starting at position 3274 of SEQ ID NO: 1244607
gccuuagagucuugugagg

SEQ ID NO: 1501475 - RNA, 19 nt, Artificial Sequence
  Description of Artificial Sequence: Synthetic oligonucleotide
  Antisense strand to SEQ ID NO: 1501474
ccucacaagacucuaaggc

SEQ ID NO: 1501476 - RNA, 19 nt, Artificial Sequence
  Description of Artificial Sequence: Synthetic oligonucleotide
  Sense strand starting at position 3276 of SEQ ID NO: 1244607
cuuagagucuugugaggag

SEQ ID NO: 1501477 - RNA, 19 nt, Artificial Sequence
  Description of Artificial Sequence: Synthetic oligonucleotide
  Antisense strand to SEQ ID NO: 1501476
cuccucacaagacucuaag

SEQ ID NO: 1501478 - RNA, 19 nt, Artificial Sequence
  Description of Artificial Sequence: Synthetic oligonucleotide
  Sense strand starting at position 3396 of SEQ ID NO: 1244607
cuggaagaucuugggcaga

SEQ ID NO: 1501479 - RNA, 19 nt, Artificial Sequence
  Description of Artificial Sequence: Synthetic oligonucleotide
  Antisense strand to SEQ ID NO: 1501478
ucugcccaagaucuuccag

SEQ ID NO: 1501480 - RNA, 19 nt, Artificial Sequence
  Description of Artificial Sequence: Synthetic oligonucleotide
  Sense strand starting at position 3678 of SEQ ID NO: 1244607
guagaaugauccuccucag

SEQ ID NO: 1501481 - RNA, 19 nt, Artificial Sequence
  Description of Artificial Sequence: Synthetic oligonucleotide
  Antisense strand to SEQ ID NO: 1501480
cugaggaggaucauucuac

SEQ ID NO: 1501482 - RNA, 19 nt, Artificial Sequence
  Description of Artificial Sequence: Synthetic oligonucleotide
  Sense strand starting at position 3681 of SEQ ID NO: 1244607
gaaugauccuccucaguga

SEQ ID NO: 1501483 - RNA, 19 nt, Artificial Sequence
  Description of Artificial Sequence: Synthetic oligonucleotide
  Antisense strand to SEQ ID NO: 1501482
ucacugaggaggaucauuc

SEQ ID NO: 1501484 - RNA, 19 nt, Artificial Sequence
  Description of Artificial Sequence: Synthetic oligonucleotide
  Sense strand starting at position 3694 of SEQ ID NO: 1244607
cagugaucgcugucgucuu

SEQ ID NO: 1501485 - RNA, 19 nt, Artificial Sequence
  Description of Artificial Sequence: Synthetic oligonucleotide
  Antisense strand to SEQ ID NO: 1501484
aagacgacagcgaucacug

SEQ ID NO: 1501486 - RNA, 19 nt, Artificial Sequence
  Description of Artificial Sequence: Synthetic oligonucleotide
  Sense strand starting at position 3732 of SEQ ID NO: 1244607
cagcguuucugauugcgca

SEQ ID NO: 1501487 - RNA, 19 nt, Artificial Sequence
  Description of Artificial Sequence: Synthetic oligonucleotide
  Antisense strand to SEQ ID NO: 1501486
ugcgcaaucagaaacgcug

SEQ ID NO: 1501488 - RNA, 19 nt, Artificial Sequence
  Description of Artificial Sequence: Synthetic oligonucleotide
  Sense strand starting at position 3778 of SEQ ID NO: 1244607
agaugcugcucauggagaa

SEQ ID NO: 1501489 - RNA, 19 nt, Artificial Sequence
  Description of Artificial Sequence: Synthetic oligonucleotide
  Antisense strand to SEQ ID NO: 1501488
uucuccaugagcagcaucu

SEQ ID NO: 1501490 - RNA, 19 nt, Artificial Sequence
  Description of Artificial Sequence: Synthetic oligonucleotide
  Sense strand starting at position 3838 of SEQ ID NO: 1244607
gucacuagugggugucuau

SEQ ID NO: 1501491 - RNA, 19 nt, Artificial Sequence
  Description of Artificial Sequence: Synthetic oligonucleotide
  Antisense strand to SEQ ID NO: 1501490
auagacacccacuagugac

SEQ ID NO: 1501492 - RNA, 19 nt, Artificial Sequence
  Description of Artificial Sequence: Synthetic oligonucleotide
  Sense strand starting at position 3922 of SEQ ID NO: 1244607
cuucguagcuccugggaca

SEQ ID NO: 1501493 - RNA, 19 nt, Artificial Sequence
  Description of Artificial Sequence: Synthetic oligonucleotide
  Antisense strand to SEQ ID NO: 1501492
ugucccaggagcuacgaag

SEQ ID NO: 1501494 - RNA, 19 nt, Artificial Sequence
  Description of Artificial Sequence: Synthetic oligonucleotide
  Sense strand starting at position 315 of SEQ ID NO: 1244608
ggagaguuuggguggagga

SEQ ID NO: 1501495 - RNA, 19 nt, Artificial Sequence
  Description of Artificial Sequence: Synthetic oligonucleotide
  Antisense strand to SEQ ID NO: 1501494
uccuccacccaaacucucc

SEQ ID NO: 1501496 - RNA, 19 nt, Artificial Sequence
  Description of Artificial Sequence: Synthetic oligonucleotide
  Sense strand starting at position 460 of SEQ ID NO: 1244608
aggagaaucuaccagagaa

SEQ ID NO: 1501497 - RNA, 19 nt, Artificial Sequence
  Description of Artificial Sequence: Synthetic oligonucleotide
  Antisense strand to SEQ ID NO: 1501496
uucucugguagauucuccu

SEQ ID NO: 1501498 - RNA, 19 nt, Artificial Sequence
  Description of Artificial Sequence: Synthetic oligonucleotide
  Sense strand starting at position 605 of SEQ ID NO: 1244608
ggaagaugauguguggcuu

SEQ ID NO: 1501499 - RNA, 19 nt, Artificial Sequence
  Description of Artificial Sequence: Synthetic oligonucleotide
  Antisense strand to SEQ ID NO: 1501498
aagccacacaucaucuucc

SEQ ID NO: 1501500 - RNA, 19 nt, Artificial Sequence
  Description of Artificial Sequence: Synthetic oligonucleotide
  Sense strand starting at position 621 of SEQ ID NO: 1244608
cuuugagauagccgacuua

SEQ ID NO: 1501501 - RNA, 19 nt, Artificial Sequence
  Description of Artificial Sequence: Synthetic oligonucleotide
  Antisense strand to SEQ ID NO: 1501500
uaagucggcuaucucaaag

SEQ ID NO: 1501502 - RNA, 19 nt, Artificial Sequence
  Description of Artificial Sequence: Synthetic oligonucleotide
  Sense strand starting at position 690 of SEQ ID NO: 1244608
gguucuuucugagugagac

SEQ ID NO: 1501503 - RNA, 19 nt, Artificial Sequence
  Description of Artificial Sequence: Synthetic oligonucleotide
  Antisense strand to SEQ ID NO: 1501502
gucucacucagaaagaacc

SEQ ID NO: 1501504 - RNA, 19 nt, Artificial Sequence
  Description of Artificial Sequence: Synthetic oligonucleotide
  Sense strand starting at position 691 of SEQ ID NO: 1244608
guucuuucugagugagaca

SEQ ID NO: 1501505 - RNA, 19 nt, Artificial Sequence
  Description of Artificial Sequence: Synthetic oligonucleotide
  Antisense strand to SEQ ID NO: 1501504
ugucucacucagaaagaac

SEQ ID NO: 1501506 - RNA, 19 nt, Artificial Sequence
  Description of Artificial Sequence: Synthetic oligonucleotide
  Sense strand starting at position 838 of SEQ ID NO: 1244608
auugaaaguccugggcaaa

SEQ ID NO: 1501507 - RNA, 19 nt, Artificial Sequence
  Description of Artificial Sequence: Synthetic oligonucleotide
  Antisense strand to SEQ ID NO: 1501506
uuugcccaggacuuucaau

SEQ ID NO: 1501508 - RNA, 19 nt, Artificial Sequence
  Description of Artificial Sequence: Synthetic oligonucleotide
  Sense strand starting at position 839 of SEQ ID NO: 1244608
uugaaaguccugggcaaau

SEQ ID NO: 1501509 - RNA, 19 nt, Artificial Sequence
  Description of Artificial Sequence: Synthetic oligonucleotide
  Antisense strand to SEQ ID NO: 1501508
auuugcccaggacuuucaa

SEQ ID NO: 1501510 - RNA, 19 nt, Artificial Sequence
  Description of Artificial Sequence: Synthetic oligonucleotide
  Sense strand starting at position 865 of SEQ ID NO: 1244608
gcggucacugacuauacaa

SEQ ID NO: 1501511 - RNA, 19 nt, Artificial Sequence
  Description of Artificial Sequence: Synthetic oligonucleotide
  Antisense strand to SEQ ID NO: 1501510
uuguauagucagugaccgc

SEQ ID NO: 1501512 - RNA, 19 nt, Artificial Sequence
  Description of Artificial Sequence: Synthetic oligonucleotide
  Sense strand starting at position 971 of SEQ ID NO: 1244608
uggacacuacgcugugaaa

SEQ ID NO: 1501513 - RNA, 19 nt, Artificial Sequence
  Description of Artificial Sequence: Synthetic oligonucleotide
  Antisense strand to SEQ ID NO: 1501512
uuucacagcguagugucca

SEQ ID NO: 1501514 - RNA, 19 nt, Artificial Sequence
  Description of Artificial Sequence: Synthetic oligonucleotide
  Sense strand starting at position 1017 of SEQ ID NO: 1244608
agaugugacccgggaccua

SEQ ID NO: 1501515 - RNA, 19 nt, Artificial Sequence
  Description of Artificial Sequence: Synthetic oligonucleotide
  Antisense strand to SEQ ID NO: 1501514
uaggucccgggucacaucu

SEQ ID NO: 1501516 - RNA, 19 nt, Artificial Sequence
  Description of Artificial Sequence: Synthetic oligonucleotide
  Sense strand starting at position 1042 of SEQ ID NO: 1244608
uguagaucucaucggacag

SEQ ID NO: 1501517 - RNA, 19 nt, Artificial Sequence
  Description of Artificial Sequence: Synthetic oligonucleotide
  Antisense strand to SEQ ID NO: 1501516
cuguccgaugagaucuaca

SEQ ID NO: 1501518 - RNA, 19 nt, Artificial Sequence
  Description of Artificial Sequence: Synthetic oligonucleotide
  Sense strand starting at position 1043 of SEQ ID NO: 1244608
guagaucucaucggacagu

SEQ ID NO: 1501519 - RNA, 19 nt, Artificial Sequence
  Description of Artificial Sequence: Synthetic oligonucleotide
  Antisense strand to SEQ ID NO: 1501518
acuguccgaugagaucuac

SEQ ID NO: 1501520 - RNA, 19 nt, Artificial Sequence
  Description of Artificial Sequence: Synthetic oligonucleotide
  Sense strand starting at position 1046 of SEQ ID NO: 1244608
gaucucaucggacagugau

SEQ ID NO: 1501521 - RNA, 19 nt, Artificial Sequence
  Description of Artificial Sequence: Synthetic oligonucleotide
  Antisense strand to SEQ ID NO: 1501520
aucacuguccgaugagauc

SEQ ID NO: 1501522 - RNA, 19 nt, Artificial Sequence
  Description of Artificial Sequence: Synthetic oligonucleotide
  Sense strand starting at position 1049 of SEQ ID NO: 1244608
cucaucggacagugauuau

SEQ ID NO: 1501523 - RNA, 19 nt, Artificial Sequence
  Description of Artificial Sequence: Synthetic oligonucleotide
  Antisense strand to SEQ ID NO: 1501522
auaaucacuguccgaugag

SEQ ID NO: 1501524 - RNA, 19 nt, Artificial Sequence
  Description of Artificial Sequence: Synthetic oligonucleotide
  Sense strand starting at position 1060 of SEQ ID NO: 1244608
gugauuauaccagaagcuc

SEQ ID NO: 1501525 - RNA, 19 nt, Artificial Sequence
  Description of Artificial Sequence: Synthetic oligonucleotide
  Antisense strand to SEQ ID NO: 1501524
gagcuucugguauaaucac

SEQ ID NO: 1501526 - RNA, 19 nt, Artificial Sequence
  Description of Artificial Sequence: Synthetic oligonucleotide
  Sense strand starting at position 1171 of SEQ ID NO: 1244608
ggucacuuugucugggaaa

SEQ ID NO: 1501527 - RNA, 19 nt, Artificial Sequence
  Description of Artificial Sequence: Synthetic oligonucleotide
  Antisense strand to SEQ ID NO: 1501526
uuucccagacaaagugacc

SEQ ID NO: 1501528 - RNA, 19 nt, Artificial Sequence
  Description of Artificial Sequence: Synthetic oligonucleotide
  Sense strand starting at position 1277 of SEQ ID NO: 1244608
cucucagggcauuguaaau

SEQ ID NO: 1501529 - RNA, 19 nt, Artificial Sequence
  Description of Artificial Sequence: Synthetic oligonucleotide
  Antisense strand to SEQ ID NO: 1501528
auuuacaaugcccugagag

SEQ ID NO: 1501530 - RNA, 19 nt, Artificial Sequence
  Description of Artificial Sequence: Synthetic oligonucleotide
  Sense strand starting at position 1418 of SEQ ID NO: 1244608
gucgucuuacaacaauauc

SEQ ID NO: 1501531 - RNA, 19 nt, Artificial Sequence
  Description of Artificial Sequence: Synthetic oligonucleotide
  Antisense strand to SEQ ID NO: 1501530
gauauuguuguaagacgac

SEQ ID NO: 1501532 - RNA, 19 nt, Artificial Sequence
  Description of Artificial Sequence: Synthetic oligonucleotide
  Sense strand starting at position 2223 of SEQ ID NO: 1244608
ggcggaguuaugcacagaa

SEQ ID NO: 1501533 - RNA, 19 nt, Artificial Sequence
  Description of Artificial Sequence: Synthetic oligonucleotide
  Antisense strand to SEQ ID NO: 1501532
uucugugcauaacuccgcc

SEQ ID NO: 1501534 - RNA, 19 nt, Artificial Sequence
  Description of Artificial Sequence: Synthetic oligonucleotide
  Sense strand starting at position 2225 of SEQ ID NO: 1244608
cggaguuaugcacagaagu

SEQ ID NO: 1501535 - RNA, 19 nt, Artificial Sequence
  Description of Artificial Sequence: Synthetic oligonucleotide
  Antisense strand to SEQ ID NO: 1501534
acuucugugcauaacuccg

SEQ ID NO: 1501536 - RNA, 19 nt, Artificial Sequence
  Description of Artificial Sequence: Synthetic oligonucleotide
  Sense strand starting at position 2227 of SEQ ID NO: 1244608
gaguuaugcacagaaguga

SEQ ID NO: 1501537 - RNA, 19 nt, Artificial Sequence
  Description of Artificial Sequence: Synthetic oligonucleotide
  Antisense strand to SEQ ID NO: 1501536
ucacuucugugcauaacuc

SEQ ID NO: 1501538 - RNA, 19 nt, Artificial Sequence
  Description of Artificial Sequence: Synthetic oligonucleotide
  Sense strand starting at position 2328 of SEQ ID NO: 1244608
ugggcaaguuccuuacaau

SEQ ID NO: 1501539 - RNA, 19 nt, Artificial Sequence
  Description of Artificial Sequence: Synthetic oligonucleotide
  Antisense strand to SEQ ID NO: 1501538
auuguaaggaacuugccca

SEQ ID NO: 1501540 - RNA, 19 nt, Artificial Sequence
  Description of Artificial Sequence: Synthetic oligonucleotide
  Sense strand starting at position 2329 of SEQ ID NO: 1244608
gggcaaguuccuuacaauc

SEQ ID NO: 1501541 - RNA, 19 nt, Artificial Sequence
  Description of Artificial Sequence: Synthetic oligonucleotide
  Antisense strand to SEQ ID NO: 1501540
gauuguaaggaacuugccc

SEQ ID NO: 1501542 - RNA, 19 nt, Artificial Sequence
  Description of Artificial Sequence: Synthetic oligonucleotide
  Sense strand starting at position 2454 of SEQ ID NO: 1244608
gugcuuggcccucaauaaa

SEQ ID NO: 1501543 - RNA, 19 nt, Artificial Sequence
  Description of Artificial Sequence: Synthetic oligonucleotide
  Antisense strand to SEQ ID NO: 1501542
uuuauugagggccaagcac

SEQ ID NO: 1501544 - RNA, 19 nt, Artificial Sequence
  Description of Artificial Sequence: Synthetic oligonucleotide
  Sense strand starting at position 2527 of SEQ ID NO: 1244608
ugcuaagauguggguuuaa

SEQ ID NO: 1501545 - RNA, 19 nt, Artificial Sequence
  Description of Artificial Sequence: Synthetic oligonucleotide
  Antisense strand to SEQ ID NO: 1501544
uuaaacccacaucuuagca

SEQ ID NO: 1501546 - RNA, 19 nt, Artificial Sequence
  Description of Artificial Sequence: Synthetic oligonucleotide
  Sense strand starting at position 2609 of SEQ ID NO: 1244608
ucuggaugaagcgaauuau

SEQ ID NO: 1501547 - RNA, 19 nt, Artificial Sequence
  Description of Artificial Sequence: Synthetic oligonucleotide
  Antisense strand to SEQ ID NO: 1501546
auaauucgcuucauccaga

SEQ ID NO: 1501548 - RNA, 19 nt, Artificial Sequence
  Description of Artificial Sequence: Synthetic oligonucleotide
  Sense strand starting at position 3016 of SEQ ID NO: 1244608
cacaauugagcggaaggua

SEQ ID NO: 1501549 - RNA, 19 nt, Artificial Sequence
  Description of Artificial Sequence: Synthetic oligonucleotide
  Antisense strand to SEQ ID NO: 1501548
uaccuuccgcucaauugug

SEQ ID NO: 1501550 - RNA, 19 nt, Artificial Sequence
  Description of Artificial Sequence: Synthetic oligonucleotide
  Sense strand starting at position 3031 of SEQ ID NO: 1244608
gguauagggacacgucaua

SEQ ID NO: 1501551 - RNA, 19 nt, Artificial Sequence
  Description of Artificial Sequence: Synthetic oligonucleotide
  Antisense strand to SEQ ID NO: 1501550
uaugacgugucccuauacc

SEQ ID NO: 1501552 - RNA, 19 nt, Artificial Sequence
  Description of Artificial Sequence: Synthetic oligonucleotide
  Sense strand starting at position 3106 of SEQ ID NO: 1244608
guggcccauuuguuacaau

SEQ ID NO: 1501553 - RNA, 19 nt, Artificial Sequence
  Description of Artificial Sequence: Synthetic oligonucleotide
  Antisense strand to SEQ ID NO: 1501552
auuguaacaaaugggccac

SEQ ID NO: 1501554 - RNA, 19 nt, Artificial Sequence
  Description of Artificial Sequence: Synthetic oligonucleotide
  Sense strand starting at position 3138 of SEQ ID NO: 1244608
uugacagcucauuauguua

SEQ ID NO: 1501555 - RNA, 19 nt, Artificial Sequence
  Description of Artificial Sequence: Synthetic oligonucleotide
  Antisense strand to SEQ ID NO: 1501554
uaacauaaugagcugucaa

SEQ ID NO: 1501556 - RNA, 19 nt, Artificial Sequence
  Description of Artificial Sequence: Synthetic oligonucleotide
  Sense strand starting at position 3183 of SEQ ID NO: 1244608
ggaugaagccucuaaguua

SEQ ID NO: 1501557 - RNA, 19 nt, Artificial Sequence
  Description of Artificial Sequence: Synthetic oligonucleotide
  Antisense strand to SEQ ID NO: 1501556
uaacuuagaggcuucaucc

SEQ ID NO: 1501558 - RNA, 19 nt, Artificial Sequence
  Description of Artificial Sequence: Synthetic oligonucleotide
  Sense strand starting at position 3186 of SEQ ID NO: 1244608
ugaagccucuaaguuauua

SEQ ID NO: 1501559 - RNA, 19 nt, Artificial Sequence
  Description of Artificial Sequence: Synthetic oligonucleotide
  Antisense strand to SEQ ID NO: 1501558
uaauaacuuagaggcuuca

SEQ ID NO: 1501560 - RNA, 19 nt, Artificial Sequence
  Description of Artificial Sequence: Synthetic oligonucleotide
  Sense strand starting at position 3197 of SEQ ID NO: 1244608
aguuauuaucaagagccuu

SEQ ID NO: 1501561 - RNA, 19 nt, Artificial Sequence
  Description of Artificial Sequence: Synthetic oligonucleotide
  Antisense strand to SEQ ID NO: 1501560
aaggcucuugauaauaacu

SEQ ID NO: 1501562 - RNA, 19 nt, Artificial Sequence
  Description of Artificial Sequence: Synthetic oligonucleotide
  Sense strand starting at position 3246 of SEQ ID NO: 1244608
aaacauacucgaugguuau

SEQ ID NO: 1501563 - RNA, 19 nt, Artificial Sequence
  Description of Artificial Sequence: Synthetic oligonucleotide
  Antisense strand to SEQ ID NO: 1501562
auaaccaucgaguauguuu

SEQ ID NO: 1501564 - RNA, 19 nt, Artificial Sequence
  Description of Artificial Sequence: Synthetic oligonucleotide
  Sense strand starting at position 3247 of SEQ ID NO: 1244608
aacauacucgaugguuauu

SEQ ID NO: 1501565 - RNA, 19 nt, Artificial Sequence
  Description of Artificial Sequence: Synthetic oligonucleotide
  Antisense strand to SEQ ID NO: 1501564
aauaaccaucgaguauguu

SEQ ID NO: 1501566 - RNA, 19 nt, Artificial Sequence
  Description of Artificial Sequence: Synthetic oligonucleotide
  Sense strand starting at position 3249 of SEQ ID NO: 1244608
cauacucgaugguuauuga

SEQ ID NO: 1501567 - RNA, 19 nt, Artificial Sequence
  Description of Artificial Sequence: Synthetic oligonucleotide
  Antisense strand to SEQ ID NO: 1501566
ucaauaaccaucgaguaug

SEQ ID NO: 1501568 - RNA, 19 nt, Artificial Sequence
  Description of Artificial Sequence: Synthetic oligonucleotide
  Sense strand starting at position 3259 of SEQ ID NO: 1244608
gguuauugaguguagcaga

SEQ ID NO: 1501569 - RNA, 19 nt, Artificial Sequence
  Description of Artificial Sequence: Synthetic oligonucleotide
  Antisense strand to SEQ ID NO: 1501568
ucugcuacacucaauaacc

SEQ ID NO: 1501570 - RNA, 19 nt, Artificial Sequence
  Description of Artificial Sequence: Synthetic oligonucleotide
  Sense strand starting at position 3281 of SEQ ID NO: 1244608
aauguuuaaguuggaagaa

SEQ ID NO: 1501571 - RNA, 19 nt, Artificial Sequence
  Description of Artificial Sequence: Synthetic oligonucleotide
  Antisense strand to SEQ ID NO: 1501570
uucuuccaacuuaaacauu

SEQ ID NO: 1501572 - RNA, 19 nt, Artificial Sequence
  Description of Artificial Sequence: Synthetic oligonucleotide
  Sense strand starting at position 3508 of SEQ ID NO: 1244608
gguggagcaaccuguaauc

SEQ ID NO: 1501573 - RNA, 19 nt, Artificial Sequence
  Description of Artificial Sequence: Synthetic oligonucleotide
  Antisense strand to SEQ ID NO: 1501572
gauuacagguugcuccacc

SEQ ID NO: 1501574 - RNA, 19 nt, Artificial Sequence
  Description of Artificial Sequence: Synthetic oligonucleotide
  Sense strand starting at position 28 of SEQ ID NO: 1244609
gguagugguucuuaggacu

SEQ ID NO: 1501575 - RNA, 19 nt, Artificial Sequence
  Description of Artificial Sequence: Synthetic oligonucleotide
  Antisense strand to SEQ ID NO: 1501574
aguccuaagaaccacuacc

SEQ ID NO: 1501576 - RNA, 19 nt, Artificial Sequence
  Description of Artificial Sequence: Synthetic oligonucleotide
  Sense strand starting at position 117 of SEQ ID NO: 1244609
aucugaaacuguggugaug

SEQ ID NO: 1501577 - RNA, 19 nt, Artificial Sequence
  Description of Artificial Sequence: Synthetic oligonucleotide
  Antisense strand to SEQ ID NO: 1501576
caucaccacaguuucagau

SEQ ID NO: 1501578 - RNA, 19 nt, Artificial Sequence
  Description of Artificial Sequence: Synthetic oligonucleotide
  Sense strand starting at position 128 of SEQ ID NO: 1244609
uggugaugguggcacaauu

SEQ ID NO: 1501579 - RNA, 19 nt, Artificial Sequence
  Description of Artificial Sequence: Synthetic oligonucleotide
  Antisense strand to SEQ ID NO: 1501578
aauugugccaccaucacca

SEQ ID NO: 1501580 - RNA, 19 nt, Artificial Sequence
  Description of Artificial Sequence: Synthetic oligonucleotide
  Sense strand starting at position 138 of SEQ ID NO: 1244609
ggcacaauucugugaauau

SEQ ID NO: 1501581 - RNA, 19 nt, Artificial Sequence
  Description of Artificial Sequence: Synthetic oligonucleotide
  Antisense strand to SEQ ID NO: 1501580
auauucacagaauugugcc

SEQ ID NO: 1501582 - RNA, 19 nt, Artificial Sequence
  Description of Artificial Sequence: Synthetic oligonucleotide
  Sense strand starting at position 360 of SEQ ID NO: 1244609
cuggguaauguuuguaucu

SEQ ID NO: 1501583 - RNA, 19 nt, Artificial Sequence
  Description of Artificial Sequence: Synthetic oligonucleotide
  Antisense strand to SEQ ID NO: 1501582
agauacaaacauuacccag

SEQ ID NO: 1501584 - RNA, 19 nt, Artificial Sequence
  Description of Artificial Sequence: Synthetic oligonucleotide
  Sense strand starting at position 361 of SEQ ID NO: 1244609
uggguaauguuuguaucuu

SEQ ID NO: 1501585 - RNA, 19 nt, Artificial Sequence
  Description of Artificial Sequence: Synthetic oligonucleotide
  Antisense strand to SEQ ID NO: 1501584
aagauacaaacauuaccca

SEQ ID NO: 1501586 - RNA, 19 nt, Artificial Sequence
  Description of Artificial Sequence: Synthetic oligonucleotide
  Sense strand starting at position 362 of SEQ ID NO: 1244609
ggguaauguuuguaucuuu

SEQ ID NO: 1501587 - RNA, 19 nt, Artificial Sequence
  Description of Artificial Sequence: Synthetic oligonucleotide
  Antisense strand to SEQ ID NO: 1501586
aaagauacaaacauuaccc

SEQ ID NO: 1501588 - RNA, 19 nt, Artificial Sequence
  Description of Artificial Sequence: Synthetic oligonucleotide
  Sense strand starting at position 486 of SEQ ID NO: 1244609
gugcccagccucugugaau

SEQ ID NO: 1501589 - RNA, 19 nt, Artificial Sequence
  Description of Artificial Sequence: Synthetic oligonucleotide
  Antisense strand to SEQ ID NO: 1501588
auucacagaggcugggcac

SEQ ID NO: 1501590 - RNA, 19 nt, Artificial Sequence
  Description of Artificial Sequence: Synthetic oligonucleotide
  Sense strand starting at position 487 of SEQ ID NO: 1244609
ugcccagccucugugaaua

SEQ ID NO: 1501591 - RNA, 19 nt, Artificial Sequence
  Description of Artificial Sequence: Synthetic oligonucleotide
  Antisense strand to SEQ ID NO: 1501590
uauucacagaggcugggca

SEQ ID NO: 1501592 - RNA, 19 nt, Artificial Sequence
  Description of Artificial Sequence: Synthetic oligonucleotide
  Sense strand starting at position 489 of SEQ ID NO: 1244609
cccagccucugugaauaua

SEQ ID NO: 1501593 - RNA, 19 nt, Artificial Sequence
  Description of Artificial Sequence: Synthetic oligonucleotide
  Antisense strand to SEQ ID NO: 1501592
uauauucacagaggcuggg

SEQ ID NO: 1501594 - RNA, 19 nt, Artificial Sequence
  Description of Artificial Sequence: Synthetic oligonucleotide
  Sense strand starting at position 492 of SEQ ID NO: 1244609
agccucugugaauauauca

SEQ ID NO: 1501595 - RNA, 19 nt, Artificial Sequence
  Description of Artificial Sequence: Synthetic oligonucleotide
  Antisense strand to SEQ ID NO: 1501594
ugauauauucacagaggcu

SEQ ID NO: 1501596 - RNA, 19 nt, Artificial Sequence
  Description of Artificial Sequence: Synthetic oligonucleotide
  Sense strand starting at position 850 of SEQ ID NO: 1244609
gggugaaucgacuggugug

SEQ ID NO: 1501597 - RNA, 19 nt, Artificial Sequence
  Description of Artificial Sequence: Synthetic oligonucleotide
  Antisense strand to SEQ ID NO: 1501596
cacaccagucgauucaccc

SEQ ID NO: 1501598 - RNA, 19 nt, Artificial Sequence
  Description of Artificial Sequence: Synthetic oligonucleotide
  Sense strand starting at position 851 of SEQ ID NO: 1244609
ggugaaucgacuggugugu

SEQ ID NO: 1501599 - RNA, 19 nt, Artificial Sequence
  Description of Artificial Sequence: Synthetic oligonucleotide
  Antisense strand to SEQ ID NO: 1501598
acacaccagucgauucacc

SEQ ID NO: 1501600 - RNA, 19 nt, Artificial Sequence
  Description of Artificial Sequence: Synthetic oligonucleotide
  Sense strand starting at position 855 of SEQ ID NO: 1244609
aaucgacuggugugugaau

SEQ ID NO: 1501601 - RNA, 19 nt, Artificial Sequence
  Description of Artificial Sequence: Synthetic oligonucleotide
  Antisense strand to SEQ ID NO: 1501600
auucacacaccagucgauu

SEQ ID NO: 1501602 - RNA, 19 nt, Artificial Sequence
  Description of Artificial Sequence: Synthetic oligonucleotide
  Sense strand starting at position 856 of SEQ ID NO: 1244609
aucgacuggugugugaauu

SEQ ID NO: 1501603 - RNA, 19 nt, Artificial Sequence
  Description of Artificial Sequence: Synthetic oligonucleotide
  Antisense strand to SEQ ID NO: 1501602
aauucacacaccagucgau

SEQ ID NO: 1501604 - RNA, 19 nt, Artificial Sequence
  Description of Artificial Sequence: Synthetic oligonucleotide
  Sense strand starting at position 888 of SEQ ID NO: 1244609
gcaggugcuccauaauguu

SEQ ID NO: 1501605 - RNA, 19 nt, Artificial Sequence
  Description of Artificial Sequence: Synthetic oligonucleotide
  Antisense strand to SEQ ID NO: 1501604
aacauuauggagcaccugc

SEQ ID NO: 1501606 - RNA, 19 nt, Artificial Sequence
  Description of Artificial Sequence: Synthetic oligonucleotide
  Sense strand starting at position 1800 of SEQ ID NO: 1244609
uaccuucgagucugaguuu

SEQ ID NO: 1501607 - RNA, 19 nt, Artificial Sequence
  Description of Artificial Sequence: Synthetic oligonucleotide
  Antisense strand to SEQ ID NO: 1501606
aaacucagacucgaaggua

SEQ ID NO: 1501608 - RNA, 19 nt, Artificial Sequence
  Description of Artificial Sequence: Synthetic oligonucleotide
  Sense strand starting at position 1849 of SEQ ID NO: 1244609
ggcuuuagagcauguucuu

SEQ ID NO: 1501609 - RNA, 19 nt, Artificial Sequence
  Description of Artificial Sequence: Synthetic oligonucleotide
  Antisense strand to SEQ ID NO: 1501608
aagaacaugcucuaaagcc

SEQ ID NO: 1501610 - RNA, 19 nt, Artificial Sequence
  Description of Artificial Sequence: Synthetic oligonucleotide
  Sense strand starting at position 1872 of SEQ ID NO: 1244609
ucuccuugcucuguacaga

SEQ ID NO: 1501611 - RNA, 19 nt, Artificial Sequence
  Description of Artificial Sequence: Synthetic oligonucleotide
  Antisense strand to SEQ ID NO: 1501610
ucuguacagagcaaggaga

SEQ ID NO: 1501612 - RNA, 19 nt, Artificial Sequence
  Description of Artificial Sequence: Synthetic oligonucleotide
  Sense strand starting at position 1873 of SEQ ID NO: 1244609
cuccuugcucuguacagau

SEQ ID NO: 1501613 - RNA, 19 nt, Artificial Sequence
  Description of Artificial Sequence: Synthetic oligonucleotide
  Antisense strand to SEQ ID NO: 1501612
aucuguacagagcaaggag

SEQ ID NO: 1501614 - RNA, 19 nt, Artificial Sequence
  Description of Artificial Sequence: Synthetic oligonucleotide
  Sense strand starting at position 1885 of SEQ ID NO: 1244609
uacagaugcuccgguguca

SEQ ID NO: 1501615 - RNA, 19 nt, Artificial Sequence
  Description of Artificial Sequence: Synthetic oligonucleotide
  Antisense strand to SEQ ID NO: 1501614
ugacaccggagcaucugua

SEQ ID NO: 1501616 - RNA, 19 nt, Artificial Sequence
  Description of Artificial Sequence: Synthetic oligonucleotide
  Sense strand starting at position 1990 of SEQ ID NO: 1244609
gguacucacagcuggaaga

SEQ ID NO: 1501617 - RNA, 19 nt, Artificial Sequence
  Description of Artificial Sequence: Synthetic oligonucleotide
  Antisense strand to SEQ ID NO: 1501616
ucuuccagcugugaguacc

SEQ ID NO: 1501618 - RNA, 19 nt, Artificial Sequence
  Description of Artificial Sequence: Synthetic oligonucleotide
  Sense strand starting at position 1991 of SEQ ID NO: 1244609
guacucacagcuggaagaa

SEQ ID NO: 1501619 - RNA, 19 nt, Artificial Sequence
  Description of Artificial Sequence: Synthetic oligonucleotide
  Antisense strand to SEQ ID NO: 1501618
uucuuccagcugugaguac

SEQ ID NO: 1501620 - RNA, 19 nt, Artificial Sequence
  Description of Artificial Sequence: Synthetic oligonucleotide
  Sense strand starting at position 2106 of SEQ ID NO: 1244609
cucacugguaagggauuaa

SEQ ID NO: 1501621 - RNA, 19 nt, Artificial Sequence
  Description of Artificial Sequence: Synthetic oligonucleotide
  Antisense strand to SEQ ID NO: 1501620
uuaaucccuuaccagugag

SEQ ID NO: 1501622 - RNA, 19 nt, Artificial Sequence
  Description of Artificial Sequence: Synthetic oligonucleotide
  Sense strand starting at position 2116 of SEQ ID NO: 1244609
agggauuaaaggugcuaau

SEQ ID NO: 1501623 - RNA, 19 nt, Artificial Sequence
  Description of Artificial Sequence: Synthetic oligonucleotide
  Antisense strand to SEQ ID NO: 1501622
auuagcaccuuuaaucccu

SEQ ID NO: 1501624 - RNA, 19 nt, Artificial Sequence
  Description of Artificial Sequence: Synthetic oligonucleotide
  Sense strand starting at position 2119 of SEQ ID NO: 1244609
gauuaaaggugcuaaucag

SEQ ID NO: 1501625 - RNA, 19 nt, Artificial Sequence
  Description of Artificial Sequence: Synthetic oligonucleotide
  Antisense strand to SEQ ID NO: 1501624
cugauuagcaccuuuaauc

SEQ ID NO: 1501626 - RNA, 19 nt, Artificial Sequence
  Description of Artificial Sequence: Synthetic oligonucleotide
  Sense strand starting at position 3129 of SEQ ID NO: 1244609
guuacuugaacccgggaga

SEQ ID NO: 1501627 - RNA, 19 nt, Artificial Sequence
  Description of Artificial Sequence: Synthetic oligonucleotide
  Antisense strand to SEQ ID NO: 1501626
ucucccggguucaaguaac

SEQ ID NO: 1501628 - RNA, 19 nt, Artificial Sequence
  Description of Artificial Sequence: Synthetic oligonucleotide
  Sense strand starting at position 3329 of SEQ ID NO: 1244609
uguugcuuugauugguaau

SEQ ID NO: 1501629 - RNA, 19 nt, Artificial Sequence
  Description of Artificial Sequence: Synthetic oligonucleotide
  Antisense strand to SEQ ID NO: 1501628
auuaccaaucaaagcaaca

SEQ ID NO: 1501630 - RNA, 19 nt, Artificial Sequence
  Description of Artificial Sequence: Synthetic oligonucleotide
  Sense strand starting at position 3330 of SEQ ID NO: 1244609
guugcuuugauugguaauu

SEQ ID NO: 1501631 - RNA, 19 nt, Artificial Sequence
  Description of Artificial Sequence: Synthetic oligonucleotide
  Antisense strand to SEQ ID NO: 1501630
aauuaccaaucaaagcaac

SEQ ID NO: 1501632 - RNA, 19 nt, Artificial Sequence
  Description of Artificial Sequence: Synthetic oligonucleotide
  Sense strand starting at position 3331 of SEQ ID NO: 1244609
uugcuuugauugguaauuu

SEQ ID NO: 1501633 - RNA, 19 nt, Artificial Sequence
  Description of Artificial Sequence: Synthetic oligonucleotide
  Antisense strand to SEQ ID NO: 1501632
aaauuaccaaucaaagcaa

SEQ ID NO: 1501634 - RNA, 19 nt, Artificial Sequence
  Description of Artificial Sequence: Synthetic oligonucleotide
  Sense strand starting at position 3332 of SEQ ID NO: 1244609
ugcuuugauugguaauuua

SEQ ID NO: 1501635 - RNA, 19 nt, Artificial Sequence
  Description of Artificial Sequence: Synthetic oligonucleotide
  Antisense strand to SEQ ID NO: 1501634
uaaauuaccaaucaaagca

SEQ ID NO: 1501636 - RNA, 19 nt, Artificial Sequence
  Description of Artificial Sequence: Synthetic oligonucleotide
  Sense strand starting at position 3873 of SEQ ID NO: 1244609
acauuagcgucucuuccau

SEQ ID NO: 1501637 - RNA, 19 nt, Artificial Sequence
  Description of Artificial Sequence: Synthetic oligonucleotide
  Antisense strand to SEQ ID NO: 1501636
auggaagagacgcuaaugu

SEQ ID NO: 1501638 - RNA, 19 nt, Artificial Sequence
  Description of Artificial Sequence: Synthetic oligonucleotide
  Sense strand starting at position 3879 of SEQ ID NO: 1244609
gcgucucuuccauucugua

SEQ ID NO: 1501639 - RNA, 19 nt, Artificial Sequence
  Description of Artificial Sequence: Synthetic oligonucleotide
  Antisense strand to SEQ ID NO: 1501638
uacagaauggaagagacgc

SEQ ID NO: 1501640 - RNA, 19 nt, Artificial Sequence
  Description of Artificial Sequence: Synthetic oligonucleotide
  Sense strand starting at position 3882 of SEQ ID NO: 1244609
ucucuuccauucuguagau

SEQ ID NO: 1501641 - RNA, 19 nt, Artificial Sequence
  Description of Artificial Sequence: Synthetic oligonucleotide
  Antisense strand to SEQ ID NO: 1501640
aucuacagaauggaagaga

SEQ ID NO: 1501642 - RNA, 19 nt, Artificial Sequence
  Description of Artificial Sequence: Synthetic oligonucleotide
  Sense strand starting at position 3888 of SEQ ID NO: 1244609
ccauucuguagauggugaa

SEQ ID NO: 1501643 - RNA, 19 nt, Artificial Sequence
  Description of Artificial Sequence: Synthetic oligonucleotide
  Antisense strand to SEQ ID NO: 1501642
uucaccaucuacagaaugg

SEQ ID NO: 1501644 - RNA, 19 nt, Artificial Sequence
  Description of Artificial Sequence: Synthetic oligonucleotide
  Sense strand starting at position 3889 of SEQ ID NO: 1244609
cauucuguagauggugaau

SEQ ID NO: 1501645 - RNA, 19 nt, Artificial Sequence
  Description of Artificial Sequence: Synthetic oligonucleotide
  Antisense strand to SEQ ID NO: 1501644
auucaccaucuacagaaug

SEQ ID NO: 1501646 - RNA, 19 nt, Artificial Sequence
  Description of Artificial Sequence: Synthetic oligonucleotide
  Sense strand starting at position 155 of SEQ ID NO: 1244610
cucuuuauugcaggacaaa

SEQ ID NO: 1501647 - RNA, 19 nt, Artificial Sequence
  Description of Artificial Sequence: Synthetic oligonucleotide
  Antisense strand to SEQ ID NO: 1501646
uuuguccugcaauaaagag

SEQ ID NO: 1501648 - RNA, 19 nt, Artificial Sequence
  Description of Artificial Sequence: Synthetic oligonucleotide
  Sense strand starting at position 205 of SEQ ID NO: 1244610
cccugauacuccuuggaug

SEQ ID NO: 1501649 - RNA, 19 nt, Artificial Sequence
  Description of Artificial Sequence: Synthetic oligonucleotide
  Antisense strand to SEQ ID NO: 1501648
cauccaaggaguaucaggg

SEQ ID NO: 1501650 - RNA, 19 nt, Artificial Sequence
  Description of Artificial Sequence: Synthetic oligonucleotide
  Sense strand starting at position 206 of SEQ ID NO: 1244610
ccugauacuccuuggaugu

SEQ ID NO: 1501651 - RNA, 19 nt, Artificial Sequence
  Description of Artificial Sequence: Synthetic oligonucleotide
  Antisense strand to SEQ ID NO: 1501650
acauccaaggaguaucagg

SEQ ID NO: 1501652 - RNA, 19 nt, Artificial Sequence
  Description of Artificial Sequence: Synthetic oligonucleotide
  Sense strand starting at position 323 of SEQ ID NO: 1244610
gcaauccagcuuugggaaa

SEQ ID NO: 1501653 - RNA, 19 nt, Artificial Sequence
  Description of Artificial Sequence: Synthetic oligonucleotide
  Antisense strand to SEQ ID NO: 1501652
uuucccaaagcuggauugc

SEQ ID NO: 1501654 - RNA, 19 nt, Artificial Sequence
  Description of Artificial Sequence: Synthetic oligonucleotide
  Sense strand starting at position 416 of SEQ ID NO: 1244610
ccagccuuccugggagauu

SEQ ID NO: 1501655 - RNA, 19 nt, Artificial Sequence
  Description of Artificial Sequence: Synthetic oligonucleotide
  Antisense strand to SEQ ID NO: 1501654
aaucucccaggaaggcugg

SEQ ID NO: 1501656 - RNA, 19 nt, Artificial Sequence
  Description of Artificial Sequence: Synthetic oligonucleotide
  Sense strand starting at position 526 of SEQ ID NO: 1244610
gccaguggagauugggaaa

SEQ ID NO: 1501657 - RNA, 19 nt, Artificial Sequence
  Description of Artificial Sequence: Synthetic oligonucleotide
  Antisense strand to SEQ ID NO: 1501656
uuucccaaucuccacuggc

SEQ ID NO: 1501658 - RNA, 19 nt, Artificial Sequence
  Description of Artificial Sequence: Synthetic oligonucleotide
  Sense strand starting at position 583 of SEQ ID NO: 1244610
gggaauaagugcccucaca

SEQ ID NO: 1501659 - RNA, 19 nt, Artificial Sequence
  Description of Artificial Sequence: Synthetic oligonucleotide
  Antisense strand to SEQ ID NO: 1501658
ugugagggcacuuauuccc

SEQ ID NO: 1501660 - RNA, 19 nt, Artificial Sequence
  Description of Artificial Sequence: Synthetic oligonucleotide
  Sense strand starting at position 755 of SEQ ID NO: 1244610
acaccuugggcuggauaau

SEQ ID NO: 1501661 - RNA, 19 nt, Artificial Sequence
  Description of Artificial Sequence: Synthetic oligonucleotide
  Antisense strand to SEQ ID NO: 1501660
auuauccagcccaaggugu

SEQ ID NO: 1501662 - RNA, 19 nt, Artificial Sequence
  Description of Artificial Sequence: Synthetic oligonucleotide
  Sense strand starting at position 756 of SEQ ID NO: 1244610
caccuugggcuggauaauu

SEQ ID NO: 1501663 - RNA, 19 nt, Artificial Sequence
  Description of Artificial Sequence: Synthetic oligonucleotide
  Antisense strand to SEQ ID NO: 1501662
aauuauccagcccaaggug

SEQ ID NO: 1501664 - RNA, 19 nt, Artificial Sequence
  Description of Artificial Sequence: Synthetic oligonucleotide
  Sense strand starting at position 765 of SEQ ID NO: 1244610
cuggauaauuccucguuau

SEQ ID NO: 1501665 - RNA, 19 nt, Artificial Sequence
  Description of Artificial Sequence: Synthetic oligonucleotide
  Antisense strand to SEQ ID NO: 1501664
auaacgaggaauuauccag

SEQ ID NO: 1501666 - RNA, 19 nt, Artificial Sequence
  Description of Artificial Sequence: Synthetic oligonucleotide
  Sense strand starting at position 766 of SEQ ID NO: 1244610
uggauaauuccucguuaug

SEQ ID NO: 1501667 - RNA, 19 nt, Artificial Sequence
  Description of Artificial Sequence: Synthetic oligonucleotide
  Antisense strand to SEQ ID NO: 1501666
cauaacgaggaauuaucca

SEQ ID NO: 1501668 - RNA, 19 nt, Artificial Sequence
  Description of Artificial Sequence: Synthetic oligonucleotide
  Sense strand starting at position 787 of SEQ ID NO: 1244610
ggcuguuccgugcccugaa

SEQ ID NO: 1501669 - RNA, 19 nt, Artificial Sequence
  Description of Artificial Sequence: Synthetic oligonucleotide
  Antisense strand to SEQ ID NO: 1501668
uucagggcacggaacagcc

SEQ ID NO: 1501670 - RNA, 19 nt, Artificial Sequence
  Description of Artificial Sequence: Synthetic oligonucleotide
  Sense strand starting at position 992 of SEQ ID NO: 1244610
gacagugagggucgaauaa

SEQ ID NO: 1501671 - RNA, 19 nt, Artificial Sequence
  Description of Artificial Sequence: Synthetic oligonucleotide
  Antisense strand to SEQ ID NO: 1501670
uuauucgacccucacuguc

SEQ ID NO: 1501672 - RNA, 19 nt, Artificial Sequence
  Description of Artificial Sequence: Synthetic oligonucleotide
  Sense strand starting at position 1255 of SEQ ID NO: 1244610
gggucuguacccuagggaa

SEQ ID NO: 1501673 - RNA, 19 nt, Artificial Sequence
  Description of Artificial Sequence: Synthetic oligonucleotide
  Antisense strand to SEQ ID NO: 1501672
uucccuaggguacagaccc

SEQ ID NO: 1501674 - RNA, 19 nt, Artificial Sequence
  Description of Artificial Sequence: Synthetic oligonucleotide
  Sense strand starting at position 1269 of SEQ ID NO: 1244610
gggaacuuauccgucucua

SEQ ID NO: 1501675 - RNA, 19 nt, Artificial Sequence
  Description of Artificial Sequence: Synthetic oligonucleotide
  Antisense strand to SEQ ID NO: 1501674
uagagacggauaaguuccc

SEQ ID NO: 1501676 - RNA, 19 nt, Artificial Sequence
  Description of Artificial Sequence: Synthetic oligonucleotide
  Sense strand starting at position 1500 of SEQ ID NO: 1244610
ggugcucacccgggagaaa

SEQ ID NO: 1501677 - RNA, 19 nt, Artificial Sequence
  Description of Artificial Sequence: Synthetic oligonucleotide
  Antisense strand to SEQ ID NO: 1501676
uuucucccgggugagcacc

SEQ ID NO: 1501678 - RNA, 19 nt, Artificial Sequence
  Description of Artificial Sequence: Synthetic oligonucleotide
  Sense strand starting at position 1592 of SEQ ID NO: 1244610
ucuuccuccggagguuuaa

SEQ ID NO: 1501679 - RNA, 19 nt, Artificial Sequence
  Description of Artificial Sequence: Synthetic oligonucleotide
  Antisense strand to SEQ ID NO: 1501678
uuaaaccuccggaggaaga

SEQ ID NO: 1501680 - RNA, 19 nt, Artificial Sequence
  Description of Artificial Sequence: Synthetic oligonucleotide
  Sense strand starting at position 1603 of SEQ ID NO: 1244610
agguuuaaaucucugccca

SEQ ID NO: 1501681 - RNA, 19 nt, Artificial Sequence
  Description of Artificial Sequence: Synthetic oligonucleotide
  Antisense strand to SEQ ID NO: 1501680
ugggcagagauuuaaaccu

SEQ ID NO: 1501682 - RNA, 19 nt, Artificial Sequence
  Description of Artificial Sequence: Synthetic oligonucleotide
  Sense strand starting at position 1604 of SEQ ID NO: 1244610
gguuuaaaucucugcccaa

SEQ ID NO: 1501683 - RNA, 19 nt, Artificial Sequence
  Description of Artificial Sequence: Synthetic oligonucleotide
  Antisense strand to SEQ ID NO: 1501682
uugggcagagauuuaaacc

SEQ ID NO: 1501684 - RNA, 19 nt, Artificial Sequence
  Description of Artificial Sequence: Synthetic oligonucleotide
  Sense strand starting at position 2574 of SEQ ID NO: 1244610
cguagaagcauugacagaa

SEQ ID NO: 1501685 - RNA, 19 nt, Artificial Sequence
  Description of Artificial Sequence: Synthetic oligonucleotide
  Antisense strand to SEQ ID NO: 1501684
uucugucaaugcuucuacg

SEQ ID NO: 1501686 - RNA, 19 nt, Artificial Sequence
  Description of Artificial Sequence: Synthetic oligonucleotide
  Sense strand starting at position 3029 of SEQ ID NO: 1244610
gcuggagauuauccugaga

SEQ ID NO: 1501687 - RNA, 19 nt, Artificial Sequence
  Description of Artificial Sequence: Synthetic oligonucleotide
  Antisense strand to SEQ ID NO: 1501686
ucucaggauaaucuccagc

SEQ ID NO: 1501688 - RNA, 19 nt, Artificial Sequence
  Description of Artificial Sequence: Synthetic oligonucleotide
  Sense strand starting at position 3186 of SEQ ID NO: 1244610
ggguuaugugcagagagga

SEQ ID NO: 1501689 - RNA, 19 nt, Artificial Sequence
  Description of Artificial Sequence: Synthetic oligonucleotide
  Antisense strand to SEQ ID NO: 1501688
uccucucugcacauaaccc

SEQ ID NO: 1501690 - RNA, 19 nt, Artificial Sequence
  Description of Artificial Sequence: Synthetic oligonucleotide
  Sense strand starting at position 3252 of SEQ ID NO: 1244610
guuggaacucaauacugua

SEQ ID NO: 1501691 - RNA, 19 nt, Artificial Sequence
  Description of Artificial Sequence: Synthetic oligonucleotide
  Antisense strand to SEQ ID NO: 1501690
uacaguauugaguuccaac

SEQ ID NO: 1501692 - RNA, 19 nt, Artificial Sequence
  Description of Artificial Sequence: Synthetic oligonucleotide
  Sense strand starting at position 3305 of SEQ ID NO: 1244610
ugcuuuagucuguauaauc

SEQ ID NO: 1501693 - RNA, 19 nt, Artificial Sequence
  Description of Artificial Sequence: Synthetic oligonucleotide
  Antisense strand to SEQ ID NO: 1501692
gauuauacagacuaaagca

SEQ ID NO: 1501694 - RNA, 19 nt, Artificial Sequence
  Description of Artificial Sequence: Synthetic oligonucleotide
  Sense strand starting at position 3314 of SEQ ID NO: 1244610
cuguauaauccgcaguaca

SEQ ID NO: 1501695 - RNA, 19 nt, Artificial Sequence
  Description of Artificial Sequence: Synthetic oligonucleotide
  Antisense strand to SEQ ID NO: 1501694
uguacugcggauuauacag

SEQ ID NO: 1501696 - RNA, 19 nt, Artificial Sequence
  Description of Artificial Sequence: Synthetic oligonucleotide
  Sense strand starting at position 3325 of SEQ ID NO: 1244610
gcaguacaggucuaugaag

SEQ ID NO: 1501697 - RNA, 19 nt, Artificial Sequence
  Description of Artificial Sequence: Synthetic oligonucleotide
  Antisense strand to SEQ ID NO: 1501696
cuucauagaccuguacugc

SEQ ID NO: 1501698 - RNA, 19 nt, Artificial Sequence
  Description of Artificial Sequence: Synthetic oligonucleotide
  Sense strand starting at position 3418 of SEQ ID NO: 1244610
ggguuuaaacucggucaug

SEQ ID NO: 1501699 - RNA, 19 nt, Artificial Sequence
  Description of Artificial Sequence: Synthetic oligonucleotide
  Antisense strand to SEQ ID NO: 1501698
caugaccgaguuuaaaccc

SEQ ID NO: 1501700 - RNA, 19 nt, Artificial Sequence
  Description of Artificial Sequence: Synthetic oligonucleotide
  Sense strand starting at position 3419 of SEQ ID NO: 1244610
gguuuaaacucggucauga

SEQ ID NO: 1501701 - RNA, 19 nt, Artificial Sequence
  Description of Artificial Sequence: Synthetic oligonucleotide
  Antisense strand to SEQ ID NO: 1501700
ucaugaccgaguuuaaacc

SEQ ID NO: 1501702 - RNA, 19 nt, Artificial Sequence
  Description of Artificial Sequence: Synthetic oligonucleotide
  Sense strand starting at position 3421 of SEQ ID NO: 1244610
uuuaaacucggucaugauc

SEQ ID NO: 1501703 - RNA, 19 nt, Artificial Sequence
  Description of Artificial Sequence: Synthetic oligonucleotide
  Antisense strand to SEQ ID NO: 1501702
gaucaugaccgaguuuaaa

SEQ ID NO: 1501704 - RNA, 19 nt, Artificial Sequence
  Description of Artificial Sequence: Synthetic oligonucleotide
  Sense strand starting at position 3428 of SEQ ID NO: 1244610
ucggucaugaucugacuuu

SEQ ID NO: 1501705 - RNA, 19 nt, Artificial Sequence
  Description of Artificial Sequence: Synthetic oligonucleotide
  Antisense strand to SEQ ID NO: 1501704
aaagucagaucaugaccga

SEQ ID NO: 1501706 - RNA, 19 nt, Artificial Sequence
  Description of Artificial Sequence: Synthetic oligonucleotide
  Sense strand starting at position 3558 of SEQ ID NO: 1244610
gcuggugucagggauuugu

SEQ ID NO: 1501707 - RNA, 19 nt, Artificial Sequence
  Description of Artificial Sequence: Synthetic oligonucleotide
  Antisense strand to SEQ ID NO: 1501706
acaaaucccugacaccagc

SEQ ID NO: 1501708 - RNA, 19 nt, Artificial Sequence
  Description of Artificial Sequence: Synthetic oligonucleotide
  Sense strand starting at position 3562 of SEQ ID NO: 1244610
gugucagggauuuguccca

SEQ ID NO: 1501709 - RNA, 19 nt, Artificial Sequence
  Description of Artificial Sequence: Synthetic oligonucleotide
  Antisense strand to SEQ ID NO: 1501708
ugggacaaaucccugacac

SEQ ID NO: 1501710 - RNA, 19 nt, Artificial Sequence
  Description of Artificial Sequence: Synthetic oligonucleotide
  Sense strand starting at position 3567 of SEQ ID NO: 1244610
agggauuugucccaugcaa

SEQ ID NO: 1501711 - RNA, 19 nt, Artificial Sequence
  Description of Artificial Sequence: Synthetic oligonucleotide
  Antisense strand to SEQ ID NO: 1501710
uugcaugggacaaaucccu

SEQ ID NO: 1501712 - RNA, 19 nt, Artificial Sequence
  Description of Artificial Sequence: Synthetic oligonucleotide
  Sense strand starting at position 3669 of SEQ ID NO: 1244610
agggaagaauguuaaauag

SEQ ID NO: 1501713 - RNA, 19 nt, Artificial Sequence
  Description of Artificial Sequence: Synthetic oligonucleotide
  Antisense strand to SEQ ID NO: 1501712
cuauuuaacauucuucccu

SEQ ID NO: 1501714 - RNA, 19 nt, Artificial Sequence
  Description of Artificial Sequence: Synthetic oligonucleotide
  Sense strand starting at position 3800 of SEQ ID NO: 1244610
gcaagcugcauguuuagua

SEQ ID NO: 1501715 - RNA, 19 nt, Artificial Sequence
  Description of Artificial Sequence: Synthetic oligonucleotide
  Antisense strand to SEQ ID NO: 1501714
uacuaaacaugcagcuugc

SEQ ID NO: 1501716 - RNA, 19 nt, Artificial Sequence
  Description of Artificial Sequence: Synthetic oligonucleotide
  Sense strand starting at position 3807 of SEQ ID NO: 1244610
gcauguuuaguauaauccu

SEQ ID NO: 1501717 - RNA, 19 nt, Artificial Sequence
  Description of Artificial Sequence: Synthetic oligonucleotide
  Antisense strand to SEQ ID NO: 1501716
aggauuauacuaaacaugc

SEQ ID NO: 1501718 - RNA, 19 nt, Artificial Sequence
  Description of Artificial Sequence: Synthetic oligonucleotide
  Sense strand starting at position 3887 of SEQ ID NO: 1244610
gaaggauaucuguggagua

SEQ ID NO: 1501719 - RNA, 19 nt, Artificial Sequence
  Description of Artificial Sequence: Synthetic oligonucleotide
  Antisense strand to SEQ ID NO: 1501718
uacuccacagauauccuuc

SEQ ID NO: 1501720 - RNA, 19 nt, Artificial Sequence
  Description of Artificial Sequence: Synthetic oligonucleotide
  Sense strand starting at position 3924 of SEQ ID NO: 1244610
gggagagagucacuugcuu

SEQ ID NO: 1501721 - RNA, 19 nt, Artificial Sequence
  Description of Artificial Sequence: Synthetic oligonucleotide
  Antisense strand to SEQ ID NO: 1501720
aagcaagugacucucuccc

SEQ ID NO: 1501722 - RNA, 19 nt, Artificial Sequence
  Description of Artificial Sequence: Synthetic oligonucleotide
  Sense strand starting at position 3949 of SEQ ID NO: 1244610
uuguaucaugugcauauau

SEQ ID NO: 1501723 - RNA, 19 nt, Artificial Sequence
  Description of Artificial Sequence: Synthetic oligonucleotide
  Antisense strand to SEQ ID NO: 1501722
auauaugcacaugauacaa

SEQ ID NO: 1501724 - RNA, 19 nt, Artificial Sequence
  Description of Artificial Sequence: Synthetic oligonucleotide
  Sense strand starting at position 3958 of SEQ ID NO: 1244610
gugcauauauuacuuacau

SEQ ID NO: 1501725 - RNA, 19 nt, Artificial Sequence
  Description of Artificial Sequence: Synthetic oligonucleotide
  Antisense strand to SEQ ID NO: 1501724
auguaaguaauauaugcac

SEQ ID NO: 1501726 - RNA, 19 nt, Artificial Sequence
  Description of Artificial Sequence: Synthetic oligonucleotide
  Sense strand starting at position 102 of SEQ ID NO: 1244611
gucguucagcccuagagau

SEQ ID NO: 1501727 - RNA, 19 nt, Artificial Sequence
  Description of Artificial Sequence: Synthetic oligonucleotide
  Antisense strand to SEQ ID NO: 1501726
aucucuagggcugaacgac

SEQ ID NO: 1501728 - RNA, 19 nt, Artificial Sequence
  Description of Artificial Sequence: Synthetic oligonucleotide
  Sense strand starting at position 233 of SEQ ID NO: 1244611
ggguuaacugcucacauac

SEQ ID NO: 1501729 - RNA, 19 nt, Artificial Sequence
  Description of Artificial Sequence: Synthetic oligonucleotide
  Antisense strand to SEQ ID NO: 1501728
guaugugagcaguuaaccc

SEQ ID NO: 1501730 - RNA, 19 nt, Artificial Sequence
  Description of Artificial Sequence: Synthetic oligonucleotide
  Sense strand starting at position 346 of SEQ ID NO: 1244611
cucuguaguccucggaugu

SEQ ID NO: 1501731 - RNA, 19 nt, Artificial Sequence
  Description of Artificial Sequence: Synthetic oligonucleotide
  Antisense strand to SEQ ID NO: 1501730
acauccgaggacuacagag

SEQ ID NO: 1501732 - RNA, 19 nt, Artificial Sequence
  Description of Artificial Sequence: Synthetic oligonucleotide
  Sense strand starting at position 347 of SEQ ID NO: 1244611
ucuguaguccucggauguu

SEQ ID NO: 1501733 - RNA, 19 nt, Artificial Sequence
  Description of Artificial Sequence: Synthetic oligonucleotide
  Antisense strand to SEQ ID NO: 1501732
aacauccgaggacuacaga

SEQ ID NO: 1501734 - RNA, 19 nt, Artificial Sequence
  Description of Artificial Sequence: Synthetic oligonucleotide
  Sense strand starting at position 357 of SEQ ID NO: 1244611
ucggauguuucugacauag

SEQ ID NO: 1501735 - RNA, 19 nt, Artificial Sequence
  Description of Artificial Sequence: Synthetic oligonucleotide
  Antisense strand to SEQ ID NO: 1501734
cuaugucagaaacauccga

SEQ ID NO: 1501736 - RNA, 19 nt, Artificial Sequence
  Description of Artificial Sequence: Synthetic oligonucleotide
  Sense strand starting at position 480 of SEQ ID NO: 1244611
ggaggaaacucacaguaag

SEQ ID NO: 1501737 - RNA, 19 nt, Artificial Sequence
  Description of Artificial Sequence: Synthetic oligonucleotide
  Antisense strand to SEQ ID NO: 1501736
cuuacugugaguuuccucc

SEQ ID NO: 1501738 - RNA, 19 nt, Artificial Sequence
  Description of Artificial Sequence: Synthetic oligonucleotide
  Sense strand starting at position 881 of SEQ ID NO: 1244611
ggcugagucuaagugguga

SEQ ID NO: 1501739 - RNA, 19 nt, Artificial Sequence
  Description of Artificial Sequence: Synthetic oligonucleotide
  Antisense strand to SEQ ID NO: 1501738
ucaccacuuagacucagcc

SEQ ID NO: 1501740 - RNA, 19 nt, Artificial Sequence
  Description of Artificial Sequence: Synthetic oligonucleotide
  Sense strand starting at position 886 of SEQ ID NO: 1244611
agucuaaguggugacuaca

SEQ ID NO: 1501741 - RNA, 19 nt, Artificial Sequence
  Description of Artificial Sequence: Synthetic oligonucleotide
  Antisense strand to SEQ ID NO: 1501740
uguagucaccacuuagacu

SEQ ID NO: 1501742 - RNA, 19 nt, Artificial Sequence
  Description of Artificial Sequence: Synthetic oligonucleotide
  Sense strand starting at position 889 of SEQ ID NO: 1244611
cuaaguggugacuacauca

SEQ ID NO: 1501743 - RNA, 19 nt, Artificial Sequence
  Description of Artificial Sequence: Synthetic oligonucleotide
  Antisense strand to SEQ ID NO: 1501742
ugauguagucaccacuuag

SEQ ID NO: 1501744 - RNA, 19 nt, Artificial Sequence
  Description of Artificial Sequence: Synthetic oligonucleotide
  Sense strand starting at position 966 of SEQ ID NO: 1244611
gagagaagaucguaaacua

SEQ ID NO: 1501745 - RNA, 19 nt, Artificial Sequence
  Description of Artificial Sequence: Synthetic oligonucleotide
  Antisense strand to SEQ ID NO: 1501744
uaguuuacgaucuucucuc

SEQ ID NO: 1501746 - RNA, 19 nt, Artificial Sequence
  Description of Artificial Sequence: Synthetic oligonucleotide
  Sense strand starting at position 1649 of SEQ ID NO: 1244611
ugcugugucccgcagggaa

SEQ ID NO: 1501747 - RNA, 19 nt, Artificial Sequence
  Description of Artificial Sequence: Synthetic oligonucleotide
  Antisense strand to SEQ ID NO: 1501746
uucccugcgggacacagca

SEQ ID NO: 1501748 - RNA, 19 nt, Artificial Sequence
  Description of Artificial Sequence: Synthetic oligonucleotide
  Sense strand starting at position 2607 of SEQ ID NO: 1244611
ggcucuuccaucggcuuaa

SEQ ID NO: 1501749 - RNA, 19 nt, Artificial Sequence
  Description of Artificial Sequence: Synthetic oligonucleotide
  Antisense strand to SEQ ID NO: 1501748
uuaagccgauggaagagcc

SEQ ID NO: 1501750 - RNA, 19 nt, Artificial Sequence
  Description of Artificial Sequence: Synthetic oligonucleotide
  Sense strand starting at position 2611 of SEQ ID NO: 1244611
cuuccaucggcuuaaccau

SEQ ID NO: 1501751 - RNA, 19 nt, Artificial Sequence
  Description of Artificial Sequence: Synthetic oligonucleotide
  Antisense strand to SEQ ID NO: 1501750
augguuaagccgauggaag

SEQ ID NO: 1501752 - RNA, 19 nt, Artificial Sequence
  Description of Artificial Sequence: Synthetic oligonucleotide
  Sense strand starting at position 2639 of SEQ ID NO: 1244611
guggcagauaugugaugga

SEQ ID NO: 1501753 - RNA, 19 nt, Artificial Sequence
  Description of Artificial Sequence: Synthetic oligonucleotide
  Antisense strand to SEQ ID NO: 1501752
uccaucacauaucugccac

SEQ ID NO: 1501754 - RNA, 19 nt, Artificial Sequence
  Description of Artificial Sequence: Synthetic oligonucleotide
  Sense strand starting at position 2770 of SEQ ID NO: 1244611
cucagauucugggaggucu

SEQ ID NO: 1501755 - RNA, 19 nt, Artificial Sequence
  Description of Artificial Sequence: Synthetic oligonucleotide
  Antisense strand to SEQ ID NO: 1501754
agaccucccagaaucugag

SEQ ID NO: 1501756 - RNA, 19 nt, Artificial Sequence
  Description of Artificial Sequence: Synthetic oligonucleotide
  Sense strand starting at position 2910 of SEQ ID NO: 1244611
aagguaagcccagggaaau

SEQ ID NO: 1501757 - RNA, 19 nt, Artificial Sequence
  Description of Artificial Sequence: Synthetic oligonucleotide
  Antisense strand to SEQ ID NO: 1501756
auuucccugggcuuaccuu

SEQ ID NO: 1501758 - RNA, 19 nt, Artificial Sequence
  Description of Artificial Sequence: Synthetic oligonucleotide
  Sense strand starting at position 3074 of SEQ ID NO: 1244611
agaggcucuggcuguaaau

SEQ ID NO: 1501759 - RNA, 19 nt, Artificial Sequence
  Description of Artificial Sequence: Synthetic oligonucleotide
  Antisense strand to SEQ ID NO: 1501758
auuuacagccagagccucu

SEQ ID NO: 1501760 - RNA, 19 nt, Artificial Sequence
  Description of Artificial Sequence: Synthetic oligonucleotide
  Sense strand starting at position 3140 of SEQ ID NO: 1244611
ggagcuucuccaggaggca

SEQ ID NO: 1501761 - RNA, 19 nt, Artificial Sequence
  Description of Artificial Sequence: Synthetic oligonucleotide
  Antisense strand to SEQ ID NO: 1501760
ugccuccuggagaagcucc

SEQ ID NO: 1501762 - RNA, 19 nt, Artificial Sequence
  Description of Artificial Sequence: Synthetic oligonucleotide
  Sense strand starting at position 3141 of SEQ ID NO: 1244611
gagcuucuccaggaggcau

SEQ ID NO: 1501763 - RNA, 19 nt, Artificial Sequence
  Description of Artificial Sequence: Synthetic oligonucleotide
  Antisense strand to SEQ ID NO: 1501762
augccuccuggagaagcuc

SEQ ID NO: 1501764 - RNA, 19 nt, Artificial Sequence
  Description of Artificial Sequence: Synthetic oligonucleotide
  Sense strand starting at position 3254 of SEQ ID NO: 1244611
ucuuccuuccucugggaaa

SEQ ID NO: 1501765 - RNA, 19 nt, Artificial Sequence
  Description of Artificial Sequence: Synthetic oligonucleotide
  Antisense strand to SEQ ID NO: 1501764
uuucccagaggaaggaaga

SEQ ID NO: 1501766 - RNA, 19 nt, Artificial Sequence
  Description of Artificial Sequence: Synthetic oligonucleotide
  Sense strand starting at position 3274 of SEQ ID NO: 1244611
ggaacaggcuccuuuccau

SEQ ID NO: 1501767 - RNA, 19 nt, Artificial Sequence
  Description of Artificial Sequence: Synthetic oligonucleotide
  Antisense strand to SEQ ID NO: 1501766
auggaaaggagccuguucc

SEQ ID NO: 1501768 - RNA, 19 nt, Artificial Sequence
  Description of Artificial Sequence: Synthetic oligonucleotide
  Sense strand starting at position 3293 of SEQ ID NO: 1244611
uagugagagcugcaacuaa

SEQ ID NO: 1501769 - RNA, 19 nt, Artificial Sequence
  Description of Artificial Sequence: Synthetic oligonucleotide
  Antisense strand to SEQ ID NO: 1501768
uuaguugcagcucucacua

SEQ ID NO: 1501770 - RNA, 19 nt, Artificial Sequence
  Description of Artificial Sequence: Synthetic oligonucleotide
  Sense strand starting at position 3416 of SEQ ID NO: 1244611
acuugauucuaauuaggug

SEQ ID NO: 1501771 - RNA, 19 nt, Artificial Sequence
  Description of Artificial Sequence: Synthetic oligonucleotide
  Antisense strand to SEQ ID NO: 1501770
caccuaauuagaaucaagu

SEQ ID NO: 1501772 - RNA, 19 nt, Artificial Sequence
  Description of Artificial Sequence: Synthetic oligonucleotide
  Sense strand starting at position 3420 of SEQ ID NO: 1244611
gauucuaauuaggugaguu

SEQ ID NO: 1501773 - RNA, 19 nt, Artificial Sequence
  Description of Artificial Sequence: Synthetic oligonucleotide
  Antisense strand to SEQ ID NO: 1501772
aacucaccuaauuagaauc

SEQ ID NO: 1501774 - RNA, 19 nt, Artificial Sequence
  Description of Artificial Sequence: Synthetic oligonucleotide
  Sense strand starting at position 3432 of SEQ ID NO: 1244611
gugaguuugcuacagacac

SEQ ID NO: 1501775 - RNA, 19 nt, Artificial Sequence
  Description of Artificial Sequence: Synthetic oligonucleotide
  Antisense strand to SEQ ID NO: 1501774
gugucuguagcaaacucac

SEQ ID NO: 1501776 - RNA, 19 nt, Artificial Sequence
  Description of Artificial Sequence: Synthetic oligonucleotide
  Sense strand starting at position 3540 of SEQ ID NO: 1244611
ucaagauccugccaagauu

SEQ ID NO: 1501777 - RNA, 19 nt, Artificial Sequence
  Description of Artificial Sequence: Synthetic oligonucleotide
  Antisense strand to SEQ ID NO: 1501776
aaucuuggcaggaucuuga

SEQ ID NO: 1501778 - RNA, 19 nt, Artificial Sequence
  Description of Artificial Sequence: Synthetic oligonucleotide
  Sense strand starting at position 3623 of SEQ ID NO: 1244611
gaggcugauuccuuuguga

SEQ ID NO: 1501779 - RNA, 19 nt, Artificial Sequence
  Description of Artificial Sequence: Synthetic oligonucleotide
  Antisense strand to SEQ ID NO: 1501778
ucacaaaggaaucagccuc

SEQ ID NO: 1501780 - RNA, 19 nt, Artificial Sequence
  Description of Artificial Sequence: Synthetic oligonucleotide
  Sense strand starting at position 3625 of SEQ ID NO: 1244611
ggcugauuccuuugugaag

SEQ ID NO: 1501781 - RNA, 19 nt, Artificial Sequence
  Description of Artificial Sequence: Synthetic oligonucleotide
  Antisense strand to SEQ ID NO: 1501780
cuucacaaaggaaucagcc

SEQ ID NO: 1501782 - RNA, 19 nt, Artificial Sequence
  Description of Artificial Sequence: Synthetic oligonucleotide
  Sense strand starting at position 3626 of SEQ ID NO: 1244611
gcugauuccuuugugaaga

SEQ ID NO: 1501783 - RNA, 19 nt, Artificial Sequence
  Description of Artificial Sequence: Synthetic oligonucleotide
  Antisense strand to SEQ ID NO: 1501782
ucuucacaaaggaaucagc

SEQ ID NO: 1501784 - RNA, 19 nt, Artificial Sequence
  Description of Artificial Sequence: Synthetic oligonucleotide
  Sense strand starting at position 3733 of SEQ ID NO: 1244611
ggguguuggcucuguuaua

SEQ ID NO: 1501785 - RNA, 19 nt, Artificial Sequence
  Description of Artificial Sequence: Synthetic oligonucleotide
  Antisense strand to SEQ ID NO: 1501784
uauaacagagccaacaccc

SEQ ID NO: 1501786 - RNA, 19 nt, Artificial Sequence
  Description of Artificial Sequence: Synthetic oligonucleotide
  Sense strand starting at position 3734 of SEQ ID NO: 1244611
gguguuggcucuguuauac

SEQ ID NO: 1501787 - RNA, 19 nt, Artificial Sequence
  Description of Artificial Sequence: Synthetic oligonucleotide
  Antisense strand to SEQ ID NO: 1501786
guauaacagagccaacacc

SEQ ID NO: 1501788 - RNA, 19 nt, Artificial Sequence
  Description of Artificial Sequence: Synthetic oligonucleotide
  Sense strand starting at position 3744 of SEQ ID NO: 1244611
cuguuauacuuagaucucu

SEQ ID NO: 1501789 - RNA, 19 nt, Artificial Sequence
  Description of Artificial Sequence: Synthetic oligonucleotide
  Antisense strand to SEQ ID NO: 1501788
agagaucuaaguauaacag

SEQ ID NO: 1501790 - RNA, 19 nt, Artificial Sequence
  Description of Artificial Sequence: Synthetic oligonucleotide
  Sense strand starting at position 3750 of SEQ ID NO: 1244611
uacuuagaucucugggacu

SEQ ID NO: 1501791 - RNA, 19 nt, Artificial Sequence
  Description of Artificial Sequence: Synthetic oligonucleotide
  Antisense strand to SEQ ID NO: 1501790
agucccagagaucuaagua

SEQ ID NO: 1501792 - RNA, 19 nt, Artificial Sequence
  Description of Artificial Sequence: Synthetic oligonucleotide
  Sense strand starting at position 3752 of SEQ ID NO: 1244611
cuuagaucucugggacuag

SEQ ID NO: 1501793 - RNA, 19 nt, Artificial Sequence
  Description of Artificial Sequence: Synthetic oligonucleotide
  Antisense strand to SEQ ID NO: 1501792
cuagucccagagaucuaag

SEQ ID NO: 1501794 - RNA, 19 nt, Artificial Sequence
  Description of Artificial Sequence: Synthetic oligonucleotide
  Sense strand starting at position 3753 of SEQ ID NO: 1244611
uuagaucucugggacuaga

SEQ ID NO: 1501795 - RNA, 19 nt, Artificial Sequence
  Description of Artificial Sequence: Synthetic oligonucleotide
  Antisense strand to SEQ ID NO: 1501794
ucuagucccagagaucuaa

SEQ ID NO: 1501796 - RNA, 19 nt, Artificial Sequence
  Description of Artificial Sequence: Synthetic oligonucleotide
  Sense strand starting at position 3860 of SEQ ID NO: 1244611
ccuggacaguguucugaua

SEQ ID NO: 1501797 - RNA, 19 nt, Artificial Sequence
  Description of Artificial Sequence: Synthetic oligonucleotide
  Antisense strand to SEQ ID NO: 1501796
uaucagaacacuguccagg

SEQ ID NO: 1501798 - RNA, 19 nt, Artificial Sequence
  Description of Artificial Sequence: Synthetic oligonucleotide
  Sense strand starting at position 3913 of SEQ ID NO: 1244611
agggacagcucuuaucaac

SEQ ID NO: 1501799 - RNA, 19 nt, Artificial Sequence
  Description of Artificial Sequence: Synthetic oligonucleotide
  Antisense strand to SEQ ID NO: 1501798
guugauaagagcugucccu

SEQ ID NO: 1501800 - RNA, 19 nt, Artificial Sequence
  Description of Artificial Sequence: Synthetic oligonucleotide
  Sense strand starting at position 3978 of SEQ ID NO: 1244611
ucaguucuguuccugaaca

SEQ ID NO: 1501801 - RNA, 19 nt, Artificial Sequence
  Description of Artificial Sequence: Synthetic oligonucleotide
  Antisense strand to SEQ ID NO: 1501800
uguucaggaacagaacuga

SEQ ID NO: 1501802 - RNA, 19 nt, Artificial Sequence
  Description of Artificial Sequence: Synthetic oligonucleotide
  Sense strand starting at position 3980 of SEQ ID NO: 1244611
aguucuguuccugaacaug

SEQ ID NO: 1501803 - RNA, 19 nt, Artificial Sequence
  Description of Artificial Sequence: Synthetic oligonucleotide
  Antisense strand to SEQ ID NO: 1501802
cauguucaggaacagaacu

SEQ ID NO: 1501804 - RNA, 19 nt, Artificial Sequence
  Description of Artificial Sequence: Synthetic oligonucleotide
  Sense strand starting at position 3983 of SEQ ID NO: 1244611
ucuguuccugaacauguau

SEQ ID NO: 1501805 - RNA, 19 nt, Artificial Sequence
  Description of Artificial Sequence: Synthetic oligonucleotide
  Antisense strand to SEQ ID NO: 1501804
auacauguucaggaacaga

SEQ ID NO: 1501806 - RNA, 19 nt, Artificial Sequence
  Description of Artificial Sequence: Synthetic oligonucleotide
  Sense strand starting at position 364 of SEQ ID NO: 1244612
uccugaaccuugucaagga

SEQ ID NO: 1501807 - RNA, 19 nt, Artificial Sequence
  Description of Artificial Sequence: Synthetic oligonucleotide
  Antisense strand to SEQ ID NO: 1501806
uccuugacaagguucagga

SEQ ID NO: 1501808 - RNA, 19 nt, Artificial Sequence
  Description of Artificial Sequence: Synthetic oligonucleotide
  Sense strand starting at position 466 of SEQ ID NO: 1244612
ggcuaagcuuacuccuaaa

SEQ ID NO: 1501809 - RNA, 19 nt, Artificial Sequence
  Description of Artificial Sequence: Synthetic oligonucleotide
  Antisense strand to SEQ ID NO: 1501808
uuuaggaguaagcuuagcc

SEQ ID NO: 1501810 - RNA, 19 nt, Artificial Sequence
  Description of Artificial Sequence: Synthetic oligonucleotide
  Sense strand starting at position 513 of SEQ ID NO: 1244612
acagcagguggaugaaauu

SEQ ID NO: 1501811 - RNA, 19 nt, Artificial Sequence
  Description of Artificial Sequence: Synthetic oligonucleotide
  Antisense strand to SEQ ID NO: 1501810
aauuucauccaccugcugu

SEQ ID NO: 1501812 - RNA, 19 nt, Artificial Sequence
  Description of Artificial Sequence: Synthetic oligonucleotide
  Sense strand starting at position 574 of SEQ ID NO: 1244612
uuaacuuucuuccuuggga

SEQ ID NO: 1501813 - RNA, 19 nt, Artificial Sequence
  Description of Artificial Sequence: Synthetic oligonucleotide
  Antisense strand to SEQ ID NO: 1501812
ucccaaggaagaaaguuaa

SEQ ID NO: 1501814 - RNA, 19 nt, Artificial Sequence
  Description of Artificial Sequence: Synthetic oligonucleotide
  Sense strand starting at position 659 of SEQ ID NO: 1244612
acagcaauggcagacuauu

SEQ ID NO: 1501815 - RNA, 19 nt, Artificial Sequence
  Description of Artificial Sequence: Synthetic oligonucleotide
  Antisense strand to SEQ ID NO: 1501814
aauagucugccauugcugu

SEQ ID NO: 1501816 - RNA, 19 nt, Artificial Sequence
  Description of Artificial Sequence: Synthetic oligonucleotide
  Sense strand starting at position 743 of SEQ ID NO: 1244612
ccuagcaacugaguuacau

SEQ ID NO: 1501817 - RNA, 19 nt, Artificial Sequence
  Description of Artificial Sequence: Synthetic oligonucleotide
  Antisense strand to SEQ ID NO: 1501816
auguaacucaguugcuagg

SEQ ID NO: 1501818 - RNA, 19 nt, Artificial Sequence
  Description of Artificial Sequence: Synthetic oligonucleotide
  Sense strand starting at position 761 of SEQ ID NO: 1244612
uaacuugcagagugaaauc

SEQ ID NO: 1501819 - RNA, 19 nt, Artificial Sequence
  Description of Artificial Sequence: Synthetic oligonucleotide
  Antisense strand to SEQ ID NO: 1501818
gauuucacucugcaaguua

SEQ ID NO: 1501820 - RNA, 19 nt, Artificial Sequence
  Description of Artificial Sequence: Synthetic oligonucleotide
  Sense strand starting at position 800 of SEQ ID NO: 1244612
uccucaugucagugaacag

SEQ ID NO: 1501821 - RNA, 19 nt, Artificial Sequence
  Description of Artificial Sequence: Synthetic oligonucleotide
  Antisense strand to SEQ ID NO: 1501820
cuguucacugacaugagga

SEQ ID NO: 1501822 - RNA, 19 nt, Artificial Sequence
  Description of Artificial Sequence: Synthetic oligonucleotide
  Sense strand starting at position 819 of SEQ ID NO: 1244612
agggaacucuccuuuauua

SEQ ID NO: 1501823 - RNA, 19 nt, Artificial Sequence
  Description of Artificial Sequence: Synthetic oligonucleotide
  Antisense strand to SEQ ID NO: 1501822
uaauaaaggagaguucccu

SEQ ID NO: 1501824 - RNA, 19 nt, Artificial Sequence
  Description of Artificial Sequence: Synthetic oligonucleotide
  Sense strand starting at position 848 of SEQ ID NO: 1244612
aggugaaauguaugaaauu

SEQ ID NO: 1501825 - RNA, 19 nt, Artificial Sequence
  Description of Artificial Sequence: Synthetic oligonucleotide
  Antisense strand to SEQ ID NO: 1501824
aauuucauacauuucaccu

SEQ ID NO: 1501826 - RNA, 19 nt, Artificial Sequence
  Description of Artificial Sequence: Synthetic oligonucleotide
  Sense strand starting at position 849 of SEQ ID NO: 1244612
ggugaaauguaugaaauuu

SEQ ID NO: 1501827 - RNA, 19 nt, Artificial Sequence
  Description of Artificial Sequence: Synthetic oligonucleotide
  Antisense strand to SEQ ID NO: 1501826
aaauuucauacauuucacc

SEQ ID NO: 1501828 - RNA, 19 nt, Artificial Sequence
  Description of Artificial Sequence: Synthetic oligonucleotide
  Sense strand starting at position 878 of SEQ ID NO: 1244612
ggagauaucaaaugucugu

SEQ ID NO: 1501829 - RNA, 19 nt, Artificial Sequence
  Description of Artificial Sequence: Synthetic oligonucleotide
  Antisense strand to SEQ ID NO: 1501828
acagacauuugauaucucc

SEQ ID NO: 1501830 - RNA, 19 nt, Artificial Sequence
  Description of Artificial Sequence: Synthetic oligonucleotide
  Sense strand starting at position 891 of SEQ ID NO: 1244612
gucugugugccugugguua

SEQ ID NO: 1501831 - RNA, 19 nt, Artificial Sequence
  Description of Artificial Sequence: Synthetic oligonucleotide
  Antisense strand to SEQ ID NO: 1501830
uaaccacaggcacacagac

SEQ ID NO: 1501832 - RNA, 19 nt, Artificial Sequence
  Description of Artificial Sequence: Synthetic oligonucleotide
  Sense strand starting at position 913 of SEQ ID NO: 1244612
auaaguuaacuacgaagua

SEQ ID NO: 1501833 - RNA, 19 nt, Artificial Sequence
  Description of Artificial Sequence: Synthetic oligonucleotide
  Antisense strand to SEQ ID NO: 1501832
uacuucguaguuaacuuau

SEQ ID NO: 1501834 - RNA, 19 nt, Artificial Sequence
  Description of Artificial Sequence: Synthetic oligonucleotide
  Sense strand starting at position 965 of SEQ ID NO: 1244612
aagauuacgcuuuagggua

SEQ ID NO: 1501835 - RNA, 19 nt, Artificial Sequence
  Description of Artificial Sequence: Synthetic oligonucleotide
  Antisense strand to SEQ ID NO: 1501834
uacccuaaagcguaaucuu

SEQ ID NO: 1501836 - RNA, 19 nt, Artificial Sequence
  Description of Artificial Sequence: Synthetic oligonucleotide
  Sense strand starting at position 1032 of SEQ ID NO: 1244612
auaacucgaaguugaguaa

SEQ ID NO: 1501837 - RNA, 19 nt, Artificial Sequence
  Description of Artificial Sequence: Synthetic oligonucleotide
  Antisense strand to SEQ ID NO: 1501836
uuacucaacuucgaguuau

SEQ ID NO: 1501838 - RNA, 19 nt, Artificial Sequence
  Description of Artificial Sequence: Synthetic oligonucleotide
  Sense strand starting at position 1060 of SEQ ID NO: 1244612
augaaauaucucgaguacg

SEQ ID NO: 1501839 - RNA, 19 nt, Artificial Sequence
  Description of Artificial Sequence: Synthetic oligonucleotide
  Antisense strand to SEQ ID NO: 1501838
cguacucgagauauuucau

SEQ ID NO: 1501840 - RNA, 19 nt, Artificial Sequence
  Description of Artificial Sequence: Synthetic oligonucleotide
  Sense strand starting at position 1081 of SEQ ID NO: 1244612
gaguuaguccaaugcaaag

SEQ ID NO: 1501841 - RNA, 19 nt, Artificial Sequence
  Description of Artificial Sequence: Synthetic oligonucleotide
  Antisense strand to SEQ ID NO: 1501840
cuuugcauuggacuaacuc

SEQ ID NO: 1501842 - RNA, 19 nt, Artificial Sequence
  Description of Artificial Sequence: Synthetic oligonucleotide
  Sense strand starting at position 2254 of SEQ ID NO: 1244612
gacucagagcagggaucuu

SEQ ID NO: 1501843 - RNA, 19 nt, Artificial Sequence
  Description of Artificial Sequence: Synthetic oligonucleotide
  Antisense strand to SEQ ID NO: 1501842
aagaucccugcucugaguc

SEQ ID NO: 1501844 - RNA, 19 nt, Artificial Sequence
  Description of Artificial Sequence: Synthetic oligonucleotide
  Sense strand starting at position 2535 of SEQ ID NO: 1244612
cugucuauguaguuuauuu

SEQ ID NO: 1501845 - RNA, 19 nt, Artificial Sequence
  Description of Artificial Sequence: Synthetic oligonucleotide
  Antisense strand to SEQ ID NO: 1501844
aaauaaacuacauagacag

SEQ ID NO: 1501846 - RNA, 19 nt, Artificial Sequence
  Description of Artificial Sequence: Synthetic oligonucleotide
  Sense strand starting at position 2598 of SEQ ID NO: 1244612
gcguaaugcuagacacgga

SEQ ID NO: 1501847 - RNA, 19 nt, Artificial Sequence
  Description of Artificial Sequence: Synthetic oligonucleotide
  Antisense strand to SEQ ID NO: 1501846
uccgugucuagcauuacgc

SEQ ID NO: 1501848 - RNA, 19 nt, Artificial Sequence
  Description of Artificial Sequence: Synthetic oligonucleotide
  Sense strand starting at position 2614 of SEQ ID NO: 1244612
ggagguggcacucgauaau

SEQ ID NO: 1501849 - RNA, 19 nt, Artificial Sequence
  Description of Artificial Sequence: Synthetic oligonucleotide
  Antisense strand to SEQ ID NO: 1501848
auuaucgagugccaccucc

SEQ ID NO: 1501850 - RNA, 19 nt, Artificial Sequence
  Description of Artificial Sequence: Synthetic oligonucleotide
  Sense strand starting at position 2617 of SEQ ID NO: 1244612
gguggcacucgauaauaaa

SEQ ID NO: 1501851 - RNA, 19 nt, Artificial Sequence
  Description of Artificial Sequence: Synthetic oligonucleotide
  Antisense strand to SEQ ID NO: 1501850
uuuauuaucgagugccacc

SEQ ID NO: 1501852 - RNA, 19 nt, Artificial Sequence
  Description of Artificial Sequence: Synthetic oligonucleotide
  Sense strand starting at position 2827 of SEQ ID NO: 1244612
gcacuaucugugcauaaug

SEQ ID NO: 1501853 - RNA, 19 nt, Artificial Sequence
  Description of Artificial Sequence: Synthetic oligonucleotide
  Antisense strand to SEQ ID NO: 1501852
cauuaugcacagauagugc

SEQ ID NO: 1501854 - RNA, 19 nt, Artificial Sequence
  Description of Artificial Sequence: Synthetic oligonucleotide
  Sense strand starting at position 2829 of SEQ ID NO: 1244612
acuaucugugcauaaugua

SEQ ID NO: 1501855 - RNA, 19 nt, Artificial Sequence
  Description of Artificial Sequence: Synthetic oligonucleotide
  Antisense strand to SEQ ID NO: 1501854
uacauuaugcacagauagu

SEQ ID NO: 1501856 - RNA, 19 nt, Artificial Sequence
  Description of Artificial Sequence: Synthetic oligonucleotide
  Sense strand starting at position 2888 of SEQ ID NO: 1244612
gggaaugaaaugugcguaa

SEQ ID NO: 1501857 - RNA, 19 nt, Artificial Sequence
  Description of Artificial Sequence: Synthetic oligonucleotide
  Antisense strand to SEQ ID NO: 1501856
uuacgcacauuucauuccc

SEQ ID NO: 1501858 - RNA, 19 nt, Artificial Sequence
  Description of Artificial Sequence: Synthetic oligonucleotide
  Sense strand starting at position 2890 of SEQ ID NO: 1244612
gaaugaaaugugcguaaua

SEQ ID NO: 1501859 - RNA, 19 nt, Artificial Sequence
  Description of Artificial Sequence: Synthetic oligonucleotide
  Antisense strand to SEQ ID NO: 1501858
uauuacgcacauuucauuc

SEQ ID NO: 1501860 - RNA, 19 nt, Artificial Sequence
  Description of Artificial Sequence: Synthetic oligonucleotide
  Sense strand starting at position 2892 of SEQ ID NO: 1244612
augaaaugugcguaauacc

SEQ ID NO: 1501861 - RNA, 19 nt, Artificial Sequence
  Description of Artificial Sequence: Synthetic oligonucleotide
  Antisense strand to SEQ ID NO: 1501860
gguauuacgcacauuucau

SEQ ID NO: 1501862 - RNA, 19 nt, Artificial Sequence
  Description of Artificial Sequence: Synthetic oligonucleotide
  Sense strand starting at position 2916 of SEQ ID NO: 1244612
cccuuucuccuaggagaag

SEQ ID NO: 1501863 - RNA, 19 nt, Artificial Sequence
  Description of Artificial Sequence: Synthetic oligonucleotide
  Antisense strand to SEQ ID NO: 1501862
cuucuccuaggagaaaggg

SEQ ID NO: 1501864 - RNA, 19 nt, Artificial Sequence
  Description of Artificial Sequence: Synthetic oligonucleotide
  Sense strand starting at position 2928 of SEQ ID NO: 1244612
ggagaagucauguggucuc

SEQ ID NO: 1501865 - RNA, 19 nt, Artificial Sequence
  Description of Artificial Sequence: Synthetic oligonucleotide
  Antisense strand to SEQ ID NO: 1501864
gagaccacaugacuucucc

SEQ ID NO: 1501866 - RNA, 19 nt, Artificial Sequence
  Description of Artificial Sequence: Synthetic oligonucleotide
  Sense strand starting at position 2999 of SEQ ID NO: 1244612
acauaauagcucugugauc

SEQ ID NO: 1501867 - RNA, 19 nt, Artificial Sequence
  Description of Artificial Sequence: Synthetic oligonucleotide
  Antisense strand to SEQ ID NO: 1501866
gaucacagagcuauuaugu

SEQ ID NO: 1501868 - RNA, 19 nt, Artificial Sequence
  Description of Artificial Sequence: Synthetic oligonucleotide
  Sense strand starting at position 3008 of SEQ ID NO: 1244612
cucugugaucucgacuaag

SEQ ID NO: 1501869 - RNA, 19 nt, Artificial Sequence
  Description of Artificial Sequence: Synthetic oligonucleotide
  Antisense strand to SEQ ID NO: 1501868
cuuagucgagaucacagag

SEQ ID NO: 1501870 - RNA, 19 nt, Artificial Sequence
  Description of Artificial Sequence: Synthetic oligonucleotide
  Sense strand starting at position 3106 of SEQ ID NO: 1244612
gaugguugugaguaauaaa

SEQ ID NO: 1501871 - RNA, 19 nt, Artificial Sequence
  Description of Artificial Sequence: Synthetic oligonucleotide
  Antisense strand to SEQ ID NO: 1501870
uuuauuacucacaaccauc

SEQ ID NO: 1501872 - RNA, 19 nt, Artificial Sequence
  Description of Artificial Sequence: Synthetic oligonucleotide
  Sense strand starting at position 3169 of SEQ ID NO: 1244612
gcgugugcucuacugaucu

SEQ ID NO: 1501873 - RNA, 19 nt, Artificial Sequence
  Description of Artificial Sequence: Synthetic oligonucleotide
  Antisense strand to SEQ ID NO: 1501872
agaucaguagagcacacgc

SEQ ID NO: 1501874 - RNA, 19 nt, Artificial Sequence
  Description of Artificial Sequence: Synthetic oligonucleotide
  Sense strand starting at position 3747 of SEQ ID NO: 1244612
gcguuccuggguagaugua

SEQ ID NO: 1501875 - RNA, 19 nt, Artificial Sequence
  Description of Artificial Sequence: Synthetic oligonucleotide
  Antisense strand to SEQ ID NO: 1501874
uacaucuacccaggaacgc

SEQ ID NO: 1501876 - RNA, 19 nt, Artificial Sequence
  Description of Artificial Sequence: Synthetic oligonucleotide
  Sense strand starting at position 3748 of SEQ ID NO: 1244612
cguuccuggguagauguaa

SEQ ID NO: 1501877 - RNA, 19 nt, Artificial Sequence
  Description of Artificial Sequence: Synthetic oligonucleotide
  Antisense strand to SEQ ID NO: 1501876
uuacaucuacccaggaacg

SEQ ID NO: 1501878 - RNA, 19 nt, Artificial Sequence
  Description of Artificial Sequence: Synthetic oligonucleotide
  Sense strand starting at position 3798 of SEQ ID NO: 1244612
caccucaaugaguggaaau

SEQ ID NO: 1501879 - RNA, 19 nt, Artificial Sequence
  Description of Artificial Sequence: Synthetic oligonucleotide
  Antisense strand to SEQ ID NO: 1501878
auuuccacucauugaggug

SEQ ID NO: 1501880 - RNA, 19 nt, Artificial Sequence
  Description of Artificial Sequence: Synthetic oligonucleotide
  Sense strand starting at position 3816 of SEQ ID NO: 1244612
ugugaaauucaggaggcuu

SEQ ID NO: 1501881 - RNA, 19 nt, Artificial Sequence
  Description of Artificial Sequence: Synthetic oligonucleotide
  Antisense strand to SEQ ID NO: 1501880
aagccuccugaauuucaca

SEQ ID NO: 1501882 - RNA, 19 nt, Artificial Sequence
  Description of Artificial Sequence: Synthetic oligonucleotide
  Sense strand starting at position 3886 of SEQ ID NO: 1244612
aauguuugaguuggaagaa

SEQ ID NO: 1501883 - RNA, 19 nt, Artificial Sequence
  Description of Artificial Sequence: Synthetic oligonucleotide
  Antisense strand to SEQ ID NO: 1501882
uucuuccaacucaaacauu

SEQ ID NO: 1501884 - RNA, 19 nt, Artificial Sequence
  Description of Artificial Sequence: Synthetic oligonucleotide
  Sense strand starting at position 3929 of SEQ ID NO: 1244612
cccguuacucuguagauaa

SEQ ID NO: 1501885 - RNA, 19 nt, Artificial Sequence
  Description of Artificial Sequence: Synthetic oligonucleotide
  Antisense strand to SEQ ID NO: 1501884
uuaucuacagaguaacggg

SEQ ID NO: 1501886 - RNA, 19 nt, Artificial Sequence
  Description of Artificial Sequence: Synthetic oligonucleotide
  Sense strand starting at position 49 of SEQ ID NO: 1244613
gagagauucccuggcugcu

SEQ ID NO: 1501887 - RNA, 19 nt, Artificial Sequence
  Description of Artificial Sequence: Synthetic oligonucleotide
  Antisense strand to SEQ ID NO: 1501886
agcagccagggaaucucuc

SEQ ID NO: 1501888 - RNA, 19 nt, Artificial Sequence
  Description of Artificial Sequence: Synthetic oligonucleotide
  Sense strand starting at position 122 of SEQ ID NO: 1244613
gggcaagggcuguacaauu

SEQ ID NO: 1501889 - RNA, 19 nt, Artificial Sequence
  Description of Artificial Sequence: Synthetic oligonucleotide
  Antisense strand to SEQ ID NO: 1501888
aauuguacagcccuugccc

SEQ ID NO: 1501890 - RNA, 19 nt, Artificial Sequence
  Description of Artificial Sequence: Synthetic oligonucleotide
  Sense strand starting at position 313 of SEQ ID NO: 1244613
ccugaaggaucugcucaaa

SEQ ID NO: 1501891 - RNA, 19 nt, Artificial Sequence
  Description of Artificial Sequence: Synthetic oligonucleotide
  Antisense strand to SEQ ID NO: 1501890
uuugagcagauccuucagg

SEQ ID NO: 1501892 - RNA, 19 nt, Artificial Sequence
  Description of Artificial Sequence: Synthetic oligonucleotide
  Sense strand starting at position 457 of SEQ ID NO: 1244613
ccaucaugggaaugcuaga

SEQ ID NO: 1501893 - RNA, 19 nt, Artificial Sequence
  Description of Artificial Sequence: Synthetic oligonucleotide
  Antisense strand to SEQ ID NO: 1501892
ucuagcauucccaugaugg

SEQ ID NO: 1501894 - RNA, 19 nt, Artificial Sequence
  Description of Artificial Sequence: Synthetic oligonucleotide
  Sense strand starting at position 622 of SEQ ID NO: 1244613
augcaaaccuugcuugagu

SEQ ID NO: 1501895 - RNA, 19 nt, Artificial Sequence
  Description of Artificial Sequence: Synthetic oligonucleotide
  Antisense strand to SEQ ID NO: 1501894
acucaagcaagguuugcau

SEQ ID NO: 1501896 - RNA, 19 nt, Artificial Sequence
  Description of Artificial Sequence: Synthetic oligonucleotide
  Sense strand starting at position 1703 of SEQ ID NO: 1244613
ccaugucucccagaggcuu

SEQ ID NO: 1501897 - RNA, 19 nt, Artificial Sequence
  Description of Artificial Sequence: Synthetic oligonucleotide
  Antisense strand to SEQ ID NO: 1501896
aagccucugggagacaugg

SEQ ID NO: 1501898 - RNA, 19 nt, Artificial Sequence
  Description of Artificial Sequence: Synthetic oligonucleotide
  Sense strand starting at position 2430 of SEQ ID NO: 1244613
cccagcaucuugcugugaa

SEQ ID NO: 1501899 - RNA, 19 nt, Artificial Sequence
  Description of Artificial Sequence: Synthetic oligonucleotide
  Antisense strand to SEQ ID NO: 1501898
uucacagcaagaugcuggg

SEQ ID NO: 1501900 - RNA, 19 nt, Artificial Sequence
  Description of Artificial Sequence: Synthetic oligonucleotide
  Sense strand starting at position 2431 of SEQ ID NO: 1244613
ccagcaucuugcugugaac

SEQ ID NO: 1501901 - RNA, 19 nt, Artificial Sequence
  Description of Artificial Sequence: Synthetic oligonucleotide
  Antisense strand to SEQ ID NO: 1501900
guucacagcaagaugcugg

SEQ ID NO: 1501902 - RNA, 19 nt, Artificial Sequence
  Description of Artificial Sequence: Synthetic oligonucleotide
  Sense strand starting at position 2456 of SEQ ID NO: 1244613
aguccagccuccuguuaga

SEQ ID NO: 1501903 - RNA, 19 nt, Artificial Sequence
  Description of Artificial Sequence: Synthetic oligonucleotide
  Antisense strand to SEQ ID NO: 1501902
ucuaacaggaggcuggacu

SEQ ID NO: 1501904 - RNA, 19 nt, Artificial Sequence
  Description of Artificial Sequence: Synthetic oligonucleotide
  Sense strand starting at position 2720 of SEQ ID NO: 1244613
ucccgauccgcagaguaaa

SEQ ID NO: 1501905 - RNA, 19 nt, Artificial Sequence
  Description of Artificial Sequence: Synthetic oligonucleotide
  Antisense strand to SEQ ID NO: 1501904
uuuacucugcggaucggga

SEQ ID NO: 1501906 - RNA, 19 nt, Artificial Sequence
  Description of Artificial Sequence: Synthetic oligonucleotide
  Sense strand starting at position 2817 of SEQ ID NO: 1244613
ccagcuguagcucauauuu

SEQ ID NO: 1501907 - RNA, 19 nt, Artificial Sequence
  Description of Artificial Sequence: Synthetic oligonucleotide
  Antisense strand to SEQ ID NO: 1501906
aaauaugagcuacagcugg

SEQ ID NO: 1501908 - RNA, 19 nt, Artificial Sequence
  Description of Artificial Sequence: Synthetic oligonucleotide
  Sense strand starting at position 2949 of SEQ ID NO: 1244613
gggcgauggccucaccuua

SEQ ID NO: 1501909 - RNA, 19 nt, Artificial Sequence
  Description of Artificial Sequence: Synthetic oligonucleotide
  Antisense strand to SEQ ID NO: 1501908
uaaggugaggccaucgccc

SEQ ID NO: 1501910 - RNA, 19 nt, Artificial Sequence
  Description of Artificial Sequence: Synthetic oligonucleotide
  Sense strand starting at position 3017 of SEQ ID NO: 1244613
guuguaguuccacgaggac

SEQ ID NO: 1501911 - RNA, 19 nt, Artificial Sequence
  Description of Artificial Sequence: Synthetic oligonucleotide
  Antisense strand to SEQ ID NO: 1501910
guccucguggaacuacaac

SEQ ID NO: 1501912 - RNA, 19 nt, Artificial Sequence
  Description of Artificial Sequence: Synthetic oligonucleotide
  Sense strand starting at position 3312 of SEQ ID NO: 1244613
ccaccugcaugugaugaua

SEQ ID NO: 1501913 - RNA, 19 nt, Artificial Sequence
  Description of Artificial Sequence: Synthetic oligonucleotide
  Antisense strand to SEQ ID NO: 1501912
uaucaucacaugcaggugg

SEQ ID NO: 1501914 - RNA, 19 nt, Artificial Sequence
  Description of Artificial Sequence: Synthetic oligonucleotide
  Sense strand starting at position 3314 of SEQ ID NO: 1244613
accugcaugugaugauaau

SEQ ID NO: 1501915 - RNA, 19 nt, Artificial Sequence
  Description of Artificial Sequence: Synthetic oligonucleotide
  Antisense strand to SEQ ID NO: 1501914
auuaucaucacaugcaggu

SEQ ID NO: 1501916 - RNA, 19 nt, Artificial Sequence
  Description of Artificial Sequence: Synthetic oligonucleotide
  Sense strand starting at position 3354 of SEQ ID NO: 1244613
uggguugucagccaugauc

SEQ ID NO: 1501917 - RNA, 19 nt, Artificial Sequence
  Description of Artificial Sequence: Synthetic oligonucleotide
  Antisense strand to SEQ ID NO: 1501916
gaucauggcugacaaccca

SEQ ID NO: 1501918 - RNA, 19 nt, Artificial Sequence
  Description of Artificial Sequence: Synthetic oligonucleotide
  Sense strand starting at position 3356 of SEQ ID NO: 1244613
gguugucagccaugaucuu

SEQ ID NO: 1501919 - RNA, 19 nt, Artificial Sequence
  Description of Artificial Sequence: Synthetic oligonucleotide
  Antisense strand to SEQ ID NO: 1501918
aagaucauggcugacaacc

SEQ ID NO: 1501920 - RNA, 19 nt, Artificial Sequence
  Description of Artificial Sequence: Synthetic oligonucleotide
  Sense strand starting at position 3365 of SEQ ID NO: 1244613
ccaugaucuuggcaugggu

SEQ ID NO: 1501921 - RNA, 19 nt, Artificial Sequence
  Description of Artificial Sequence: Synthetic oligonucleotide
  Antisense strand to SEQ ID NO: 1501920
acccaugccaagaucaugg

SEQ ID NO: 1501922 - RNA, 19 nt, Artificial Sequence
  Description of Artificial Sequence: Synthetic oligonucleotide
  Sense strand starting at position 3410 of SEQ ID NO: 1244613
gggacucauugggcugagu

SEQ ID NO: 1501923 - RNA, 19 nt, Artificial Sequence
  Description of Artificial Sequence: Synthetic oligonucleotide
  Antisense strand to SEQ ID NO: 1501922
acucagcccaaugaguccc

SEQ ID NO: 1501924 - RNA, 19 nt, Artificial Sequence
  Description of Artificial Sequence: Synthetic oligonucleotide
  Sense strand starting at position 3412 of SEQ ID NO: 1244613
gacucauugggcugagugu

SEQ ID NO: 1501925 - RNA, 19 nt, Artificial Sequence
  Description of Artificial Sequence: Synthetic oligonucleotide
  Antisense strand to SEQ ID NO: 1501924
acacucagcccaaugaguc

SEQ ID NO: 1501926 - RNA, 19 nt, Artificial Sequence
  Description of Artificial Sequence: Synthetic oligonucleotide
  Sense strand starting at position 3445 of SEQ ID NO: 1244613
gguuccaucuccuauaggu

SEQ ID NO: 1501927 - RNA, 19 nt, Artificial Sequence
  Description of Artificial Sequence: Synthetic oligonucleotide
  Antisense strand to SEQ ID NO: 1501926
accuauaggagauggaacc

SEQ ID NO: 1501928 - RNA, 19 nt, Artificial Sequence
  Description of Artificial Sequence: Synthetic oligonucleotide
  Sense strand starting at position 3650 of SEQ ID NO: 1244613
ggguuaucuggugggcuca

SEQ ID NO: 1501929 - RNA, 19 nt, Artificial Sequence
  Description of Artificial Sequence: Synthetic oligonucleotide
  Antisense strand to SEQ ID NO: 1501928
ugagcccaccagauaaccc

SEQ ID NO: 1501930 - RNA, 19 nt, Artificial Sequence
  Description of Artificial Sequence: Synthetic oligonucleotide
  Sense strand starting at position 3671 of SEQ ID NO: 1244613
ccauauagguauccugcaa

SEQ ID NO: 1501931 - RNA, 19 nt, Artificial Sequence
  Description of Artificial Sequence: Synthetic oligonucleotide
  Antisense strand to SEQ ID NO: 1501930
uugcaggauaccuauaugg

SEQ ID NO: 1501932 - RNA, 19 nt, Artificial Sequence
  Description of Artificial Sequence: Synthetic oligonucleotide
  Sense strand starting at position 3675 of SEQ ID NO: 1244613
auagguauccugcaaucug

SEQ ID NO: 1501933 - RNA, 19 nt, Artificial Sequence
  Description of Artificial Sequence: Synthetic oligonucleotide
  Antisense strand to SEQ ID NO: 1501932
cagauugcaggauaccuau

SEQ ID NO: 1501934 - RNA, 19 nt, Artificial Sequence
  Description of Artificial Sequence: Synthetic oligonucleotide
  Sense strand starting at position 3722 of SEQ ID NO: 1244613
uucuuaguaccaggucaga

SEQ ID NO: 1501935 - RNA, 19 nt, Artificial Sequence
  Description of Artificial Sequence: Synthetic oligonucleotide
  Antisense strand to SEQ ID NO: 1501934
ucugaccugguacuaagaa

SEQ ID NO: 1501936 - RNA, 19 nt, Artificial Sequence
  Description of Artificial Sequence: Synthetic oligonucleotide
  Sense strand starting at position 3863 of SEQ ID NO: 1244613
ggaccucaucgcggacuua

SEQ ID NO: 1501937 - RNA, 19 nt, Artificial Sequence
  Description of Artificial Sequence: Synthetic oligonucleotide
  Antisense strand to SEQ ID NO: 1501936
uaaguccgcgaugaggucc

SEQ ID NO: 1501938 - RNA, 19 nt, Artificial Sequence
  Description of Artificial Sequence: Synthetic oligonucleotide
  Sense strand starting at position 3873 of SEQ ID NO: 1244613
gcggacuuaccacaucaga

SEQ ID NO: 1501939 - RNA, 19 nt, Artificial Sequence
  Description of Artificial Sequence: Synthetic oligonucleotide
  Antisense strand to SEQ ID NO: 1501938
ucugaugugguaaguccgc

SEQ ID NO: 1501940 - RNA, 19 nt, Artificial Sequence
  Description of Artificial Sequence: Synthetic oligonucleotide
  Sense strand starting at position 3884 of SEQ ID NO: 1244613
acaucagaaucuccugagu

SEQ ID NO: 1501941 - RNA, 19 nt, Artificial Sequence
  Description of Artificial Sequence: Synthetic oligonucleotide
  Antisense strand to SEQ ID NO: 1501940
acucaggagauucugaugu

SEQ ID NO: 1501942 - RNA, 19 nt, Artificial Sequence
  Description of Artificial Sequence: Synthetic oligonucleotide
  Sense strand starting at position 3936 of SEQ ID NO: 1244613
ccagcugauuauuaagcau

SEQ ID NO: 1501943 - RNA, 19 nt, Artificial Sequence
  Description of Artificial Sequence: Synthetic oligonucleotide
  Antisense strand to SEQ ID NO: 1501942
augcuuaauaaucagcugg

SEQ ID NO: 1501944 - RNA, 19 nt, Artificial Sequence
  Description of Artificial Sequence: Synthetic oligonucleotide
  Sense strand starting at position 3939 of SEQ ID NO: 1244613
gcugauuauuaagcauagu

SEQ ID NO: 1501945 - RNA, 19 nt, Artificial Sequence
  Description of Artificial Sequence: Synthetic oligonucleotide
  Antisense strand to SEQ ID NO: 1501944
acuaugcuuaauaaucagc

SEQ ID NO: 1501946 - RNA, 19 nt, Artificial Sequence
  Description of Artificial Sequence: Synthetic oligonucleotide
  Sense strand starting at position 3978 of SEQ ID NO: 1244613
acaugcagcucaguguauu

SEQ ID NO: 1501947 - RNA, 19 nt, Artificial Sequence
  Description of Artificial Sequence: Synthetic oligonucleotide
  Antisense strand to SEQ ID NO: 1501946
aauacacugagcugcaugu

SEQ ID NO: 1501948 - RNA, 19 nt, Artificial Sequence
  Description of Artificial Sequence: Synthetic oligonucleotide
  Sense strand starting at position 3979 of SEQ ID NO: 1244613
caugcagcucaguguauuu

SEQ ID NO: 1501949 - RNA, 19 nt, Artificial Sequence
  Description of Artificial Sequence: Synthetic oligonucleotide
  Antisense strand to SEQ ID NO: 1501948
aaauacacugagcugcaug

SEQ ID NO: 1501950 - RNA, 19 nt, Artificial Sequence
  Description of Artificial Sequence: Synthetic oligonucleotide
  Sense strand starting at position 594 of SEQ ID NO: 1244614
gggccucccagacguaauu

SEQ ID NO: 1501951 - RNA, 19 nt, Artificial Sequence
  Description of Artificial Sequence: Synthetic oligonucleotide
  Antisense strand to SEQ ID NO: 1501950
aauuacgucugggaggccc

SEQ ID NO: 1501952 - RNA, 19 nt, Artificial Sequence
  Description of Artificial Sequence: Synthetic oligonucleotide
  Sense strand starting at position 740 of SEQ ID NO: 1244614
uuccgagcauuaucuggaa

SEQ ID NO: 1501953 - RNA, 19 nt, Artificial Sequence
  Description of Artificial Sequence: Synthetic oligonucleotide
  Antisense strand to SEQ ID NO: 1501952
uuccagauaaugcucggaa

SEQ ID NO: 1501954 - RNA, 19 nt, Artificial Sequence
  Description of Artificial Sequence: Synthetic oligonucleotide
  Sense strand starting at position 1118 of SEQ ID NO: 1244614
gcuacacauuucuggaaca

SEQ ID NO: 1501955 - RNA, 19 nt, Artificial Sequence
  Description of Artificial Sequence: Synthetic oligonucleotide
  Antisense strand to SEQ ID NO: 1501954
uguuccagaaauguguagc

SEQ ID NO: 1501956 - RNA, 19 nt, Artificial Sequence
  Description of Artificial Sequence: Synthetic oligonucleotide
  Sense strand starting at position 2038 of SEQ ID NO: 1244614
ugguaugucacgugaccaa

SEQ ID NO: 1501957 - RNA, 19 nt, Artificial Sequence
  Description of Artificial Sequence: Synthetic oligonucleotide
  Antisense strand to SEQ ID NO: 1501956
uuggucacgugacauacca

SEQ ID NO: 1501958 - RNA, 19 nt, Artificial Sequence
  Description of Artificial Sequence: Synthetic oligonucleotide
  Sense strand starting at position 2119 of SEQ ID NO: 1244614
ggcggaacuccugggaacu

SEQ ID NO: 1501959 - RNA, 19 nt, Artificial Sequence
  Description of Artificial Sequence: Synthetic oligonucleotide
  Antisense strand to SEQ ID NO: 1501958
aguucccaggaguuccgcc

SEQ ID NO: 1501960 - RNA, 19 nt, Artificial Sequence
  Description of Artificial Sequence: Synthetic oligonucleotide
  Sense strand starting at position 2148 of SEQ ID NO: 1244614
gcucuuaguaucggaggau

SEQ ID NO: 1501961 - RNA, 19 nt, Artificial Sequence
  Description of Artificial Sequence: Synthetic oligonucleotide
  Antisense strand to SEQ ID NO: 1501960
auccuccgauacuaagagc

SEQ ID NO: 1501962 - RNA, 19 nt, Artificial Sequence
  Description of Artificial Sequence: Synthetic oligonucleotide
  Sense strand starting at position 2219 of SEQ ID NO: 1244614
aaugguaaguaagacagau

SEQ ID NO: 1501963 - RNA, 19 nt, Artificial Sequence
  Description of Artificial Sequence: Synthetic oligonucleotide
  Antisense strand to SEQ ID NO: 1501962
aucugucuuacuuaccauu

SEQ ID NO: 1501964 - RNA, 19 nt, Artificial Sequence
  Description of Artificial Sequence: Synthetic oligonucleotide
  Sense strand starting at position 2292 of SEQ ID NO: 1244614
agauucugacaguguaaag

SEQ ID NO: 1501965 - RNA, 19 nt, Artificial Sequence
  Description of Artificial Sequence: Synthetic oligonucleotide
  Antisense strand to SEQ ID NO: 1501964
cuuuacacugucagaaucu

SEQ ID NO: 1501966 - RNA, 19 nt, Artificial Sequence
  Description of Artificial Sequence: Synthetic oligonucleotide
  Sense strand starting at position 2371 of SEQ ID NO: 1244614
ugcugaaguuucuugguau

SEQ ID NO: 1501967 - RNA, 19 nt, Artificial Sequence
  Description of Artificial Sequence: Synthetic oligonucleotide
  Antisense strand to SEQ ID NO: 1501966
auaccaagaaacuucagca

SEQ ID NO: 1501968 - RNA, 19 nt, Artificial Sequence
  Description of Artificial Sequence: Synthetic oligonucleotide
  Sense strand starting at position 2389 of SEQ ID NO: 1244614
uuggaacuguuucuccuaa

SEQ ID NO: 1501969 - RNA, 19 nt, Artificial Sequence
  Description of Artificial Sequence: Synthetic oligonucleotide
  Antisense strand to SEQ ID NO: 1501968
uuaggagaaacaguuccaa

SEQ ID NO: 1501970 - RNA, 19 nt, Artificial Sequence
  Description of Artificial Sequence: Synthetic oligonucleotide
  Sense strand starting at position 2391 of SEQ ID NO: 1244614
ggaacuguuucuccuaagu

SEQ ID NO: 1501971 - RNA, 19 nt, Artificial Sequence
  Description of Artificial Sequence: Synthetic oligonucleotide
  Antisense strand to SEQ ID NO: 1501970
acuuaggagaaacaguucc

SEQ ID NO: 1501972 - RNA, 19 nt, Artificial Sequence
  Description of Artificial Sequence: Synthetic oligonucleotide
  Sense strand starting at position 2396 of SEQ ID NO: 1244614
uguuucuccuaaguaacau

SEQ ID NO: 1501973 - RNA, 19 nt, Artificial Sequence
  Description of Artificial Sequence: Synthetic oligonucleotide
  Antisense strand to SEQ ID NO: 1501972
auguuacuuaggagaaaca

SEQ ID NO: 1501974 - RNA, 19 nt, Artificial Sequence
  Description of Artificial Sequence: Synthetic oligonucleotide
  Sense strand starting at position 2427 of SEQ ID NO: 1244614
cgugaaauacuguaacucu

SEQ ID NO: 1501975 - RNA, 19 nt, Artificial Sequence
  Description of Artificial Sequence: Synthetic oligonucleotide
  Antisense strand to SEQ ID NO: 1501974
agaguuacaguauuucacg

SEQ ID NO: 1501976 - RNA, 19 nt, Artificial Sequence
  Description of Artificial Sequence: Synthetic oligonucleotide
  Sense strand starting at position 2588 of SEQ ID NO: 1244614
ugaauaagguaggauauaa

SEQ ID NO: 1501977 - RNA, 19 nt, Artificial Sequence
  Description of Artificial Sequence: Synthetic oligonucleotide
  Antisense strand to SEQ ID NO: 1501976
uuauauccuaccuuauuca

SEQ ID NO: 1501978 - RNA, 19 nt, Artificial Sequence
  Description of Artificial Sequence: Synthetic oligonucleotide
  Sense strand starting at position 2644 of SEQ ID NO: 1244614
gccguuuguauguuuaacu

SEQ ID NO: 1501979 - RNA, 19 nt, Artificial Sequence
  Description of Artificial Sequence: Synthetic oligonucleotide
  Antisense strand to SEQ ID NO: 1501978
aguuaaacauacaaacggc

SEQ ID NO: 1501980 - RNA, 19 nt, Artificial Sequence
  Description of Artificial Sequence: Synthetic oligonucleotide
  Sense strand starting at position 2651 of SEQ ID NO: 1244614
guauguuuaacuggugagu

SEQ ID NO: 1501981 - RNA, 19 nt, Artificial Sequence
  Description of Artificial Sequence: Synthetic oligonucleotide
  Antisense strand to SEQ ID NO: 1501980
acucaccaguuaaacauac

SEQ ID NO: 1501982 - RNA, 19 nt, Artificial Sequence
  Description of Artificial Sequence: Synthetic oligonucleotide
  Sense strand starting at position 2657 of SEQ ID NO: 1244614
uuaacuggugagugacaga

SEQ ID NO: 1501983 - RNA, 19 nt, Artificial Sequence
  Description of Artificial Sequence: Synthetic oligonucleotide
  Antisense strand to SEQ ID NO: 1501982
ucugucacucaccaguuaa

SEQ ID NO: 1501984 - RNA, 19 nt, Artificial Sequence
  Description of Artificial Sequence: Synthetic oligonucleotide
  Sense strand starting at position 2667 of SEQ ID NO: 1244614
agugacagaucuguaauaa

SEQ ID NO: 1501985 - RNA, 19 nt, Artificial Sequence
  Description of Artificial Sequence: Synthetic oligonucleotide
  Antisense strand to SEQ ID NO: 1501984
uuauuacagaucugucacu

SEQ ID NO: 1501986 - RNA, 19 nt, Artificial Sequence
  Description of Artificial Sequence: Synthetic oligonucleotide
  Sense strand starting at position 2837 of SEQ ID NO: 1244614
gauggugaggcgggauaau

SEQ ID NO: 1501987 - RNA, 19 nt, Artificial Sequence
  Description of Artificial Sequence: Synthetic oligonucleotide
  Antisense strand to SEQ ID NO: 1501986
auuaucccgccucaccauc

SEQ ID NO: 1501988 - RNA, 19 nt, Artificial Sequence
  Description of Artificial Sequence: Synthetic oligonucleotide
  Sense strand starting at position 2846 of SEQ ID NO: 1244614
gcgggauaaucccuugaac

SEQ ID NO: 1501989 - RNA, 19 nt, Artificial Sequence
  Description of Artificial Sequence: Synthetic oligonucleotide
  Antisense strand to SEQ ID NO: 1501988
guucaagggauuaucccgc

SEQ ID NO: 1501990 - RNA, 19 nt, Artificial Sequence
  Description of Artificial Sequence: Synthetic oligonucleotide
  Sense strand starting at position 3036 of SEQ ID NO: 1244614
cagaauaauugagagggau

SEQ ID NO: 1501991 - RNA, 19 nt, Artificial Sequence
  Description of Artificial Sequence: Synthetic oligonucleotide
  Antisense strand to SEQ ID NO: 1501990
aucccucucaauuauucug

SEQ ID NO: 1501992 - RNA, 19 nt, Artificial Sequence
  Description of Artificial Sequence: Synthetic oligonucleotide
  Sense strand starting at position 3090 of SEQ ID NO: 1244614
acacuaucauuggcuagaa

SEQ ID NO: 1501993 - RNA, 19 nt, Artificial Sequence
  Description of Artificial Sequence: Synthetic oligonucleotide
  Antisense strand to SEQ ID NO: 1501992
uucuagccaaugauagugu

SEQ ID NO: 1501994 - RNA, 19 nt, Artificial Sequence
  Description of Artificial Sequence: Synthetic oligonucleotide
  Sense strand starting at position 3100 of SEQ ID NO: 1244614
uggcuagaauaacuuugua

SEQ ID NO: 1501995 - RNA, 19 nt, Artificial Sequence
  Description of Artificial Sequence: Synthetic oligonucleotide
  Antisense strand to SEQ ID NO: 1501994
uacaaaguuauucuagcca

SEQ ID NO: 1501996 - RNA, 19 nt, Artificial Sequence
  Description of Artificial Sequence: Synthetic oligonucleotide
  Sense strand starting at position 3103 of SEQ ID NO: 1244614
cuagaauaacuuuguaguu

SEQ ID NO: 1501997 - RNA, 19 nt, Artificial Sequence
  Description of Artificial Sequence: Synthetic oligonucleotide
  Antisense strand to SEQ ID NO: 1501996
aacuacaaaguuauucuag

SEQ ID NO: 1501998 - RNA, 19 nt, Artificial Sequence
  Description of Artificial Sequence: Synthetic oligonucleotide
  Sense strand starting at position 3115 of SEQ ID NO: 1244614
uguaguucuuguccauuua

SEQ ID NO: 1501999 - RNA, 19 nt, Artificial Sequence
  Description of Artificial Sequence: Synthetic oligonucleotide
  Antisense strand to SEQ ID NO: 1501998
uaaauggacaagaacuaca

SEQ ID NO: 1502000 - RNA, 19 nt, Artificial Sequence
  Description of Artificial Sequence: Synthetic oligonucleotide
  Sense strand starting at position 3158 of SEQ ID NO: 1244614
gcuugugaaagauaacuug

SEQ ID NO: 1502001 - RNA, 19 nt, Artificial Sequence
  Description of Artificial Sequence: Synthetic oligonucleotide
  Antisense strand to SEQ ID NO: 1502000
caaguuaucuuucacaagc

SEQ ID NO: 1502002 - RNA, 19 nt, Artificial Sequence
  Description of Artificial Sequence: Synthetic oligonucleotide
  Sense strand starting at position 3259 of SEQ ID NO: 1244614
gggacuguuuggagaaaga

SEQ ID NO: 1502003 - RNA, 19 nt, Artificial Sequence
  Description of Artificial Sequence: Synthetic oligonucleotide
  Antisense strand to SEQ ID NO: 1502002
ucuuucuccaaacaguccc

SEQ ID NO: 1502004 - RNA, 19 nt, Artificial Sequence
  Description of Artificial Sequence: Synthetic oligonucleotide
  Sense strand starting at position 3348 of SEQ ID NO: 1244614
augggugaauaggagaaau

SEQ ID NO: 1502005 - RNA, 19 nt, Artificial Sequence
  Description of Artificial Sequence: Synthetic oligonucleotide
  Antisense strand to SEQ ID NO: 1502004
auuucuccuauucacccau

SEQ ID NO: 1502006 - RNA, 19 nt, Artificial Sequence
  Description of Artificial Sequence: Synthetic oligonucleotide
  Sense strand starting at position 3374 of SEQ ID NO: 1244614
gaaggaauuugccaaagaa

SEQ ID NO: 1502007 - RNA, 19 nt, Artificial Sequence
  Description of Artificial Sequence: Synthetic oligonucleotide
  Antisense strand to SEQ ID NO: 1502006
uucuuuggcaaauuccuuc

SEQ ID NO: 1502008 - RNA, 19 nt, Artificial Sequence
  Description of Artificial Sequence: Synthetic oligonucleotide
  Sense strand starting at position 3389 of SEQ ID NO: 1244614
agaacugagucaggaauuu

SEQ ID NO: 1502009 - RNA, 19 nt, Artificial Sequence
  Description of Artificial Sequence: Synthetic oligonucleotide
  Antisense strand to SEQ ID NO: 1502008
aaauuccugacucaguucu

SEQ ID NO: 1502010 - RNA, 19 nt, Artificial Sequence
  Description of Artificial Sequence: Synthetic oligonucleotide
  Sense strand starting at position 3428 of SEQ ID NO: 1244614
gaagguuaguuccugggaa

SEQ ID NO: 1502011 - RNA, 19 nt, Artificial Sequence
  Description of Artificial Sequence: Synthetic oligonucleotide
  Antisense strand to SEQ ID NO: 1502010
uucccaggaacuaaccuuc

SEQ ID NO: 1502012 - RNA, 19 nt, Artificial Sequence
  Description of Artificial Sequence: Synthetic oligonucleotide
  Sense strand starting at position 3430 of SEQ ID NO: 1244614
agguuaguuccugggaaug

SEQ ID NO: 1502013 - RNA, 19 nt, Artificial Sequence
  Description of Artificial Sequence: Synthetic oligonucleotide
  Antisense strand to SEQ ID NO: 1502012
cauucccaggaacuaaccu

SEQ ID NO: 1502014 - RNA, 19 nt, Artificial Sequence
  Description of Artificial Sequence: Synthetic oligonucleotide
  Sense strand starting at position 3447 of SEQ ID NO: 1244614
uggagaguuagcugaggua

SEQ ID NO: 1502015 - RNA, 19 nt, Artificial Sequence
  Description of Artificial Sequence: Synthetic oligonucleotide
  Antisense strand to SEQ ID NO: 1502014
uaccucagcuaacucucca

SEQ ID NO: 1502016 - RNA, 19 nt, Artificial Sequence
  Description of Artificial Sequence: Synthetic oligonucleotide
  Sense strand starting at position 3493 of SEQ ID NO: 1244614
cuccaugaucuuggauguu

SEQ ID NO: 1502017 - RNA, 19 nt, Artificial Sequence
  Description of Artificial Sequence: Synthetic oligonucleotide
  Antisense strand to SEQ ID NO: 1502016
aacauccaagaucauggag

SEQ ID NO: 1502018 - RNA, 19 nt, Artificial Sequence
  Description of Artificial Sequence: Synthetic oligonucleotide
  Sense strand starting at position 3597 of SEQ ID NO: 1244614
agcacauuuguuuguggau

SEQ ID NO: 1502019 - RNA, 19 nt, Artificial Sequence
  Description of Artificial Sequence: Synthetic oligonucleotide
  Antisense strand to SEQ ID NO: 1502018
auccacaaacaaaugugcu

SEQ ID NO: 1502020 - RNA, 19 nt, Artificial Sequence
  Description of Artificial Sequence: Synthetic oligonucleotide
  Sense strand starting at position 3598 of SEQ ID NO: 1244614
gcacauuuguuuguggauu

SEQ ID NO: 1502021 - RNA, 19 nt, Artificial Sequence
  Description of Artificial Sequence: Synthetic oligonucleotide
  Antisense strand to SEQ ID NO: 1502020
aauccacaaacaaaugugc

SEQ ID NO: 1502022 - RNA, 19 nt, Artificial Sequence
  Description of Artificial Sequence: Synthetic oligonucleotide
  Sense strand starting at position 3599 of SEQ ID NO: 1244614
cacauuuguuuguggauuu

SEQ ID NO: 1502023 - RNA, 19 nt, Artificial Sequence
  Description of Artificial Sequence: Synthetic oligonucleotide
  Antisense strand to SEQ ID NO: 1502022
aaauccacaaacaaaugug

SEQ ID NO: 1502024 - RNA, 19 nt, Artificial Sequence
  Description of Artificial Sequence: Synthetic oligonucleotide
  Sense strand starting at position 3650 of SEQ ID NO: 1244614
agaagacuacuuugugaug

SEQ ID NO: 1502025 - RNA, 19 nt, Artificial Sequence
  Description of Artificial Sequence: Synthetic oligonucleotide
  Antisense strand to SEQ ID NO: 1502024
caucacaaaguagucuucu

SEQ ID NO: 1502026 - RNA, 19 nt, Artificial Sequence
  Description of Artificial Sequence: Synthetic oligonucleotide
  Sense strand starting at position 3651 of SEQ ID NO: 1244614
gaagacuacuuugugaugu

SEQ ID NO: 1502027 - RNA, 19 nt, Artificial Sequence
  Description of Artificial Sequence: Synthetic oligonucleotide
  Antisense strand to SEQ ID NO: 1502026
acaucacaaaguagucuuc

SEQ ID NO: 1502028 - RNA, 19 nt, Artificial Sequence
  Description of Artificial Sequence: Synthetic oligonucleotide
  Sense strand starting at position 3677 of SEQ ID NO: 1244614
auaucucaguguccauaaa

SEQ ID NO: 1502029 - RNA, 19 nt, Artificial Sequence
  Description of Artificial Sequence: Synthetic oligonucleotide
  Antisense strand to SEQ ID NO: 1502028
uuuauggacacugagauau

SEQ ID NO: 1502030 - RNA, 19 nt, Artificial Sequence
  Description of Artificial Sequence: Synthetic oligonucleotide
  Sense strand starting at position 121 of SEQ ID NO: 1244615
ccuuacagauccuggucaa

SEQ ID NO: 1502031 - RNA, 19 nt, Artificial Sequence
  Description of Artificial Sequence: Synthetic oligonucleotide
  Antisense strand to SEQ ID NO: 1502030
uugaccaggaucuguaagg

SEQ ID NO: 1502032 - RNA, 19 nt, Artificial Sequence
  Description of Artificial Sequence: Synthetic oligonucleotide
  Sense strand starting at position 299 of SEQ ID NO: 1244615
uuuauucuugacugagguu

SEQ ID NO: 1502033 - RNA, 19 nt, Artificial Sequence
  Description of Artificial Sequence: Synthetic oligonucleotide
  Antisense strand to SEQ ID NO: 1502032
aaccucagucaagaauaaa

SEQ ID NO: 1502034 - RNA, 19 nt, Artificial Sequence
  Description of Artificial Sequence: Synthetic oligonucleotide
  Sense strand starting at position 480 of SEQ ID NO: 1244615
ucccauucuccugggacuu

SEQ ID NO: 1502035 - RNA, 19 nt, Artificial Sequence
  Description of Artificial Sequence: Synthetic oligonucleotide
  Antisense strand to SEQ ID NO: 1502034
aagucccaggagaauggga

SEQ ID NO: 1502036 - RNA, 19 nt, Artificial Sequence
  Description of Artificial Sequence: Synthetic oligonucleotide
  Sense strand starting at position 723 of SEQ ID NO: 1244615
ugccacacgcccgauuaau

SEQ ID NO: 1502037 - RNA, 19 nt, Artificial Sequence
  Description of Artificial Sequence: Synthetic oligonucleotide
  Antisense strand to SEQ ID NO: 1502036
auuaaucgggcguguggca

SEQ ID NO: 1502038 - RNA, 19 nt, Artificial Sequence
  Description of Artificial Sequence: Synthetic oligonucleotide
  Sense strand starting at position 896 of SEQ ID NO: 1244615
cagucuuaucucugaagga

SEQ ID NO: 1502039 - RNA, 19 nt, Artificial Sequence
  Description of Artificial Sequence: Synthetic oligonucleotide
  Antisense strand to SEQ ID NO: 1502038
uccuucagagauaagacug

SEQ ID NO: 1502040 - RNA, 19 nt, Artificial Sequence
  Description of Artificial Sequence: Synthetic oligonucleotide
  Sense strand starting at position 897 of SEQ ID NO: 1244615
agucuuaucucugaaggaa

SEQ ID NO: 1502041 - RNA, 19 nt, Artificial Sequence
  Description of Artificial Sequence: Synthetic oligonucleotide
  Antisense strand to SEQ ID NO: 1502040
uuccuucagagauaagacu

SEQ ID NO: 1502042 - RNA, 19 nt, Artificial Sequence
  Description of Artificial Sequence: Synthetic oligonucleotide
  Sense strand starting at position 900 of SEQ ID NO: 1244615
cuuaucucugaaggaacau

SEQ ID NO: 1502043 - RNA, 19 nt, Artificial Sequence
  Description of Artificial Sequence: Synthetic oligonucleotide
  Antisense strand to SEQ ID NO: 1502042
auguuccuucagagauaag

SEQ ID NO: 1502044 - RNA, 19 nt, Artificial Sequence
  Description of Artificial Sequence: Synthetic oligonucleotide
  Sense strand starting at position 911 of SEQ ID NO: 1244615
aggaacauguuccaaauua

SEQ ID NO: 1502045 - RNA, 19 nt, Artificial Sequence
  Description of Artificial Sequence: Synthetic oligonucleotide
  Antisense strand to SEQ ID NO: 1502044
uaauuuggaacauguuccu

SEQ ID NO: 1502046 - RNA, 19 nt, Artificial Sequence
  Description of Artificial Sequence: Synthetic oligonucleotide
  Sense strand starting at position 1037 of SEQ ID NO: 1244615
accucaguuucccuggauu

SEQ ID NO: 1502047 - RNA, 19 nt, Artificial Sequence
  Description of Artificial Sequence: Synthetic oligonucleotide
  Antisense strand to SEQ ID NO: 1502046
aauccagggaaacugaggu

SEQ ID NO: 1502048 - RNA, 19 nt, Artificial Sequence
  Description of Artificial Sequence: Synthetic oligonucleotide
  Sense strand starting at position 1272 of SEQ ID NO: 1244615
gggacauaacucugcagac

SEQ ID NO: 1502049 - RNA, 19 nt, Artificial Sequence
  Description of Artificial Sequence: Synthetic oligonucleotide
  Antisense strand to SEQ ID NO: 1502048
gucugcagaguuauguccc

SEQ ID NO: 1502050 - RNA, 19 nt, Artificial Sequence
  Description of Artificial Sequence: Synthetic oligonucleotide
  Sense strand starting at position 1273 of SEQ ID NO: 1244615
ggacauaacucugcagaca

SEQ ID NO: 1502051 - RNA, 19 nt, Artificial Sequence
  Description of Artificial Sequence: Synthetic oligonucleotide
  Antisense strand to SEQ ID NO: 1502050
ugucugcagaguuaugucc

SEQ ID NO: 1502052 - RNA, 19 nt, Artificial Sequence
  Description of Artificial Sequence: Synthetic oligonucleotide
  Sense strand starting at position 1381 of SEQ ID NO: 1244615
gacacaaguuggucuggga

SEQ ID NO: 1502053 - RNA, 19 nt, Artificial Sequence
  Description of Artificial Sequence: Synthetic oligonucleotide
  Antisense strand to SEQ ID NO: 1502052
ucccagaccaacuuguguc

SEQ ID NO: 1502054 - RNA, 19 nt, Artificial Sequence
  Description of Artificial Sequence: Synthetic oligonucleotide
  Sense strand starting at position 1447 of SEQ ID NO: 1244615
cccggagaaucucugcuaa

SEQ ID NO: 1502055 - RNA, 19 nt, Artificial Sequence
  Description of Artificial Sequence: Synthetic oligonucleotide
  Antisense strand to SEQ ID NO: 1502054
uuagcagagauucuccggg

SEQ ID NO: 1502056 - RNA, 19 nt, Artificial Sequence
  Description of Artificial Sequence: Synthetic oligonucleotide
  Sense strand starting at position 1449 of SEQ ID NO: 1244615
cggagaaucucugcuaagc

SEQ ID NO: 1502057 - RNA, 19 nt, Artificial Sequence
  Description of Artificial Sequence: Synthetic oligonucleotide
  Antisense strand to SEQ ID NO: 1502056
gcuuagcagagauucuccg

SEQ ID NO: 1502058 - RNA, 19 nt, Artificial Sequence
  Description of Artificial Sequence: Synthetic oligonucleotide
  Sense strand starting at position 1569 of SEQ ID NO: 1244615
augcucugguucucccaaa

SEQ ID NO: 1502059 - RNA, 19 nt, Artificial Sequence
  Description of Artificial Sequence: Synthetic oligonucleotide
  Antisense strand to SEQ ID NO: 1502058
uuugggagaaccagagcau

SEQ ID NO: 1502060 - RNA, 19 nt, Artificial Sequence
  Description of Artificial Sequence: Synthetic oligonucleotide
  Sense strand starting at position 1683 of SEQ ID NO: 1244615
ugucucuugucccugguua

SEQ ID NO: 1502061 - RNA, 19 nt, Artificial Sequence
  Description of Artificial Sequence: Synthetic oligonucleotide
  Antisense strand to SEQ ID NO: 1502060
uaaccagggacaagagaca

SEQ ID NO: 1502062 - RNA, 19 nt, Artificial Sequence
  Description of Artificial Sequence: Synthetic oligonucleotide
  Sense strand starting at position 2227 of SEQ ID NO: 1244615
auuugacuuucucggauau

SEQ ID NO: 1502063 - RNA, 19 nt, Artificial Sequence
  Description of Artificial Sequence: Synthetic oligonucleotide
  Antisense strand to SEQ ID NO: 1502062
auauccgagaaagucaaau

SEQ ID NO: 1502064 - RNA, 19 nt, Artificial Sequence
  Description of Artificial Sequence: Synthetic oligonucleotide
  Sense strand starting at position 2228 of SEQ ID NO: 1244615
uuugacuuucucggauaua

SEQ ID NO: 1502065 - RNA, 19 nt, Artificial Sequence
  Description of Artificial Sequence: Synthetic oligonucleotide
  Antisense strand to SEQ ID NO: 1502064
uauauccgagaaagucaaa

SEQ ID NO: 1502066 - RNA, 19 nt, Artificial Sequence
  Description of Artificial Sequence: Synthetic oligonucleotide
  Sense strand starting at position 2229 of SEQ ID NO: 1244615
uugacuuucucggauauaa

SEQ ID NO: 1502067 - RNA, 19 nt, Artificial Sequence
  Description of Artificial Sequence: Synthetic oligonucleotide
  Antisense strand to SEQ ID NO: 1502066
uuauauccgagaaagucaa

SEQ ID NO: 1502068 - RNA, 19 nt, Artificial Sequence
  Description of Artificial Sequence: Synthetic oligonucleotide
  Sense strand starting at position 2281 of SEQ ID NO: 1244615
guagaauaugagcggcaca

SEQ ID NO: 1502069 - RNA, 19 nt, Artificial Sequence
  Description of Artificial Sequence: Synthetic oligonucleotide
  Antisense strand to SEQ ID NO: 1502068
ugugccgcucauauucuac

SEQ ID NO: 1502070 - RNA, 19 nt, Artificial Sequence
  Description of Artificial Sequence: Synthetic oligonucleotide
  Sense strand starting at position 2418 of SEQ ID NO: 1244615
gagggagccucuuugguuu

SEQ ID NO: 1502071 - RNA, 19 nt, Artificial Sequence
  Description of Artificial Sequence: Synthetic oligonucleotide
  Antisense strand to SEQ ID NO: 1502070
aaaccaaagaggcucccuc

SEQ ID NO: 1502072 - RNA, 19 nt, Artificial Sequence
  Description of Artificial Sequence: Synthetic oligonucleotide
  Sense strand starting at position 2762 of SEQ ID NO: 1244615
ugauuaagagucugacaau

SEQ ID NO: 1502073 - RNA, 19 nt, Artificial Sequence
  Description of Artificial Sequence: Synthetic oligonucleotide
  Antisense strand to SEQ ID NO: 1502072
auugucagacucuuaauca

SEQ ID NO: 1502074 - RNA, 19 nt, Artificial Sequence
  Description of Artificial Sequence: Synthetic oligonucleotide
  Sense strand starting at position 2763 of SEQ ID NO: 1244615
gauuaagagucugacaaua

SEQ ID NO: 1502075 - RNA, 19 nt, Artificial Sequence
  Description of Artificial Sequence: Synthetic oligonucleotide
  Antisense strand to SEQ ID NO: 1502074
uauugucagacucuuaauc

SEQ ID NO: 1502076 - RNA, 19 nt, Artificial Sequence
  Description of Artificial Sequence: Synthetic oligonucleotide
  Sense strand starting at position 2861 of SEQ ID NO: 1244615
agacuaucauccuggcuaa

SEQ ID NO: 1502077 - RNA, 19 nt, Artificial Sequence
  Description of Artificial Sequence: Synthetic oligonucleotide
  Antisense strand to SEQ ID NO: 1502076
uuagccaggaugauagucu

SEQ ID NO: 1502078 - RNA, 19 nt, Artificial Sequence
  Description of Artificial Sequence: Synthetic oligonucleotide
  Sense strand starting at position 3000 of SEQ ID NO: 1244615
cagcuugugcaauagaguu

SEQ ID NO: 1502079 - RNA, 19 nt, Artificial Sequence
  Description of Artificial Sequence: Synthetic oligonucleotide
  Antisense strand to SEQ ID NO: 1502078
aacucuauugcacaagcug

SEQ ID NO: 1502080 - RNA, 19 nt, Artificial Sequence
  Description of Artificial Sequence: Synthetic oligonucleotide
  Sense strand starting at position 3050 of SEQ ID NO: 1244615
ggcaauucgagucaauaau

SEQ ID NO: 1502081 - RNA, 19 nt, Artificial Sequence
  Description of Artificial Sequence: Synthetic oligonucleotide
  Antisense strand to SEQ ID NO: 1502080
auuauugacucgaauugcc

SEQ ID NO: 1502082 - RNA, 19 nt, Artificial Sequence
  Description of Artificial Sequence: Synthetic oligonucleotide
  Sense strand starting at position 3075 of SEQ ID NO: 1244615
ugcaaauaauucuguaaag

SEQ ID NO: 1502083 - RNA, 19 nt, Artificial Sequence
  Description of Artificial Sequence: Synthetic oligonucleotide
  Antisense strand to SEQ ID NO: 1502082
cuuuacagaauuauuugca

SEQ ID NO: 1502084 - RNA, 19 nt, Artificial Sequence
  Description of Artificial Sequence: Synthetic oligonucleotide
  Sense strand starting at position 3076 of SEQ ID NO: 1244615
gcaaauaauucuguaaaga

SEQ ID NO: 1502085 - RNA, 19 nt, Artificial Sequence
  Description of Artificial Sequence: Synthetic oligonucleotide
  Antisense strand to SEQ ID NO: 1502084
ucuuuacagaauuauuugc

SEQ ID NO: 1502086 - RNA, 19 nt, Artificial Sequence
  Description of Artificial Sequence: Synthetic oligonucleotide
  Sense strand starting at position 3488 of SEQ ID NO: 1244615
gcagcaucaucacuauguu

SEQ ID NO: 1502087 - RNA, 19 nt, Artificial Sequence
  Description of Artificial Sequence: Synthetic oligonucleotide
  Antisense strand to SEQ ID NO: 1502086
aacauagugaugaugcugc

SEQ ID NO: 1502088 - RNA, 19 nt, Artificial Sequence
  Description of Artificial Sequence: Synthetic oligonucleotide
  Sense strand starting at position 3491 of SEQ ID NO: 1244615
gcaucaucacuauguuaca

SEQ ID NO: 1502089 - RNA, 19 nt, Artificial Sequence
  Description of Artificial Sequence: Synthetic oligonucleotide
  Antisense strand to SEQ ID NO: 1502088
uguaacauagugaugaugc

SEQ ID NO: 1502090 - RNA, 19 nt, Artificial Sequence
  Description of Artificial Sequence: Synthetic oligonucleotide
  Sense strand starting at position 3579 of SEQ ID NO: 1244615
cuacuuugccacugcaaga

SEQ ID NO: 1502091 - RNA, 19 nt, Artificial Sequence
  Description of Artificial Sequence: Synthetic oligonucleotide
  Antisense strand to SEQ ID NO: 1502090
ucuugcaguggcaaaguag

SEQ ID NO: 1502092 - RNA, 19 nt, Artificial Sequence
  Description of Artificial Sequence: Synthetic oligonucleotide
  Sense strand starting at position 3592 of SEQ ID NO: 1244615
gcaagaccacagugaauua

SEQ ID NO: 1502093 - RNA, 19 nt, Artificial Sequence
  Description of Artificial Sequence: Synthetic oligonucleotide
  Antisense strand to SEQ ID NO: 1502092
uaauucacuguggucuugc

SEQ ID NO: 1502094 - RNA, 19 nt, Artificial Sequence
  Description of Artificial Sequence: Synthetic oligonucleotide
  Sense strand starting at position 3633 of SEQ ID NO: 1244615
gaugucagagccugagaca

SEQ ID NO: 1502095 - RNA, 19 nt, Artificial Sequence
  Description of Artificial Sequence: Synthetic oligonucleotide
  Antisense strand to SEQ ID NO: 1502094
ugucucaggcucugacauc

SEQ ID NO: 1502096 - RNA, 19 nt, Artificial Sequence
  Description of Artificial Sequence: Synthetic oligonucleotide
  Sense strand starting at position 3686 of SEQ ID NO: 1244615
cuccaaaucugauaugagu

SEQ ID NO: 1502097 - RNA, 19 nt, Artificial Sequence
  Description of Artificial Sequence: Synthetic oligonucleotide
  Antisense strand to SEQ ID NO: 1502096
acucauaucagauuuggag

SEQ ID NO: 1502098 - RNA, 19 nt, Artificial Sequence
  Description of Artificial Sequence: Synthetic oligonucleotide
  Sense strand starting at position 3734 of SEQ ID NO: 1244615
uugggacuguuccuuaacu

SEQ ID NO: 1502099 - RNA, 19 nt, Artificial Sequence
  Description of Artificial Sequence: Synthetic oligonucleotide
  Antisense strand to SEQ ID NO: 1502098
aguuaaggaacagucccaa

SEQ ID NO: 1502100 - RNA, 19 nt, Artificial Sequence
  Description of Artificial Sequence: Synthetic oligonucleotide
  Sense strand starting at position 3735 of SEQ ID NO: 1244615
ugggacuguuccuuaacuu

SEQ ID NO: 1502101 - RNA, 19 nt, Artificial Sequence
  Description of Artificial Sequence: Synthetic oligonucleotide
  Antisense strand to SEQ ID NO: 1502100
aaguuaaggaacaguccca

SEQ ID NO: 1502102 - RNA, 19 nt, Artificial Sequence
  Description of Artificial Sequence: Synthetic oligonucleotide
  Sense strand starting at position 3736 of SEQ ID NO: 1244615
gggacuguuccuuaacuuu

SEQ ID NO: 1502103 - RNA, 19 nt, Artificial Sequence
  Description of Artificial Sequence: Synthetic oligonucleotide
  Antisense strand to SEQ ID NO: 1502102
aaaguuaaggaacaguccc

SEQ ID NO: 1502104 - RNA, 19 nt, Artificial Sequence
  Description of Artificial Sequence: Synthetic oligonucleotide
  Sense strand starting at position 3951 of SEQ ID NO: 1244615
ccguguuagccaggugaau

SEQ ID NO: 1502105 - RNA, 19 nt, Artificial Sequence
  Description of Artificial Sequence: Synthetic oligonucleotide
  Antisense strand to SEQ ID NO: 1502104
auucaccuggcuaacacgg

SEQ ID NO: 1502106 - RNA, 19 nt, Artificial Sequence
  Description of Artificial Sequence: Synthetic oligonucleotide
  Sense strand starting at position 3953 of SEQ ID NO: 1244615
guguuagccaggugaaucu

SEQ ID NO: 1502107 - RNA, 19 nt, Artificial Sequence
  Description of Artificial Sequence: Synthetic oligonucleotide
  Antisense strand to SEQ ID NO: 1502106
agauucaccuggcuaacac

SEQ ID NO: 1502108 - RNA, 19 nt, Artificial Sequence
  Description of Artificial Sequence: Synthetic oligonucleotide
  Sense strand starting at position 3962 of SEQ ID NO: 1244615
aggugaaucuccugaccuc

SEQ ID NO: 1502109 - RNA, 19 nt, Artificial Sequence
  Description of Artificial Sequence: Synthetic oligonucleotide
  Antisense strand to SEQ ID NO: 1502108
gaggucaggagauucaccu

SEQ ID NO: 1502110 - RNA, 19 nt, Artificial Sequence
  Description of Artificial Sequence: Synthetic oligonucleotide
  Sense strand starting at position 314 of SEQ ID NO: 1244616
agcucuguguccugauguu

SEQ ID NO: 1502111 - RNA, 19 nt, Artificial Sequence
  Description of Artificial Sequence: Synthetic oligonucleotide
  Antisense strand to SEQ ID NO: 1502110
aacaucaggacacagagcu

SEQ ID NO: 1502112 - RNA, 19 nt, Artificial Sequence
  Description of Artificial Sequence: Synthetic oligonucleotide
  Sense strand starting at position 320 of SEQ ID NO: 1244616
guguccugauguucuagaa

SEQ ID NO: 1502113 - RNA, 19 nt, Artificial Sequence
  Description of Artificial Sequence: Synthetic oligonucleotide
  Antisense strand to SEQ ID NO: 1502112
uucuagaacaucaggacac

SEQ ID NO: 1502114 - RNA, 19 nt, Artificial Sequence
  Description of Artificial Sequence: Synthetic oligonucleotide
  Sense strand starting at position 359 of SEQ ID NO: 1244616
ccucuugggucugacugau

SEQ ID NO: 1502115 - RNA, 19 nt, Artificial Sequence
  Description of Artificial Sequence: Synthetic oligonucleotide
  Antisense strand to SEQ ID NO: 1502114
aucagucagacccaagagg

SEQ ID NO: 1502116 - RNA, 19 nt, Artificial Sequence
  Description of Artificial Sequence: Synthetic oligonucleotide
  Sense strand starting at position 855 of SEQ ID NO: 1244616
gcccguuccucacugacau

SEQ ID NO: 1502117 - RNA, 19 nt, Artificial Sequence
  Description of Artificial Sequence: Synthetic oligonucleotide
  Antisense strand to SEQ ID NO: 1502116
augucagugaggaacgggc

SEQ ID NO: 1502118 - RNA, 19 nt, Artificial Sequence
  Description of Artificial Sequence: Synthetic oligonucleotide
  Sense strand starting at position 1108 of SEQ ID NO: 1244616
cacagugccuggugcaaau

SEQ ID NO: 1502119 - RNA, 19 nt, Artificial Sequence
  Description of Artificial Sequence: Synthetic oligonucleotide
  Antisense strand to SEQ ID NO: 1502118
auuugcaccaggcacugug

SEQ ID NO: 1502120 - RNA, 19 nt, Artificial Sequence
  Description of Artificial Sequence: Synthetic oligonucleotide
  Sense strand starting at position 1118 of SEQ ID NO: 1244616
ggugcaaaugcuugggaag

SEQ ID NO: 1502121 - RNA, 19 nt, Artificial Sequence
  Description of Artificial Sequence: Synthetic oligonucleotide
  Antisense strand to SEQ ID NO: 1502120
cuucccaagcauuugcacc

SEQ ID NO: 1502122 - RNA, 19 nt, Artificial Sequence
  Description of Artificial Sequence: Synthetic oligonucleotide
  Sense strand starting at position 1119 of SEQ ID NO: 1244616
gugcaaaugcuugggaaga

SEQ ID NO: 1502123 - RNA, 19 nt, Artificial Sequence
  Description of Artificial Sequence: Synthetic oligonucleotide
  Antisense strand to SEQ ID NO: 1502122
ucuucccaagcauuugcac

SEQ ID NO: 1502124 - RNA, 19 nt, Artificial Sequence
  Description of Artificial Sequence: Synthetic oligonucleotide
  Sense strand starting at position 1271 of SEQ ID NO: 1244616
ggcagauggcucuggaucu

SEQ ID NO: 1502125 - RNA, 19 nt, Artificial Sequence
  Description of Artificial Sequence: Synthetic oligonucleotide
  Antisense strand to SEQ ID NO: 1502124
agauccagagccaucugcc

SEQ ID NO: 1502126 - RNA, 19 nt, Artificial Sequence
  Description of Artificial Sequence: Synthetic oligonucleotide
  Sense strand starting at position 1272 of SEQ ID NO: 1244616
gcagauggcucuggaucuu

SEQ ID NO: 1502127 - RNA, 19 nt, Artificial Sequence
  Description of Artificial Sequence: Synthetic oligonucleotide
  Antisense strand to SEQ ID NO: 1502126
aagauccagagccaucugc

SEQ ID NO: 1502128 - RNA, 19 nt, Artificial Sequence
  Description of Artificial Sequence: Synthetic oligonucleotide
  Sense strand starting at position 1278 of SEQ ID NO: 1244616
ggcucuggaucuuagaaga

SEQ ID NO: 1502129 - RNA, 19 nt, Artificial Sequence
  Description of Artificial Sequence: Synthetic oligonucleotide
  Antisense strand to SEQ ID NO: 1502128
ucuucuaagauccagagcc

SEQ ID NO: 1502130 - RNA, 19 nt, Artificial Sequence
  Description of Artificial Sequence: Synthetic oligonucleotide
  Sense strand starting at position 1289 of SEQ ID NO: 1244616
uuagaagauuccuuccgcu

SEQ ID NO: 1502131 - RNA, 19 nt, Artificial Sequence
  Description of Artificial Sequence: Synthetic oligonucleotide
  Antisense strand to SEQ ID NO: 1502130
agcggaaggaaucuucuaa

SEQ ID NO: 1502132 - RNA, 19 nt, Artificial Sequence
  Description of Artificial Sequence: Synthetic oligonucleotide
  Sense strand starting at position 1691 of SEQ ID NO: 1244616
ucccgaucuuaggacugaa

SEQ ID NO: 1502133 - RNA, 19 nt, Artificial Sequence
  Description of Artificial Sequence: Synthetic oligonucleotide
  Antisense strand to SEQ ID NO: 1502132
uucaguccuaagaucggga

SEQ ID NO: 1502134 - RNA, 19 nt, Artificial Sequence
  Description of Artificial Sequence: Synthetic oligonucleotide
  Sense strand starting at position 2090 of SEQ ID NO: 1244616
gugagucgccauggagaca

SEQ ID NO: 1502135 - RNA, 19 nt, Artificial Sequence
  Description of Artificial Sequence: Synthetic oligonucleotide
  Antisense strand to SEQ ID NO: 1502134
ugucuccauggcgacucac

SEQ ID NO: 1502136 - RNA, 19 nt, Artificial Sequence
  Description of Artificial Sequence: Synthetic oligonucleotide
  Sense strand starting at position 2491 of SEQ ID NO: 1244616
cuccguguccucuggugua

SEQ ID NO: 1502137 - RNA, 19 nt, Artificial Sequence
  Description of Artificial Sequence: Synthetic oligonucleotide
  Antisense strand to SEQ ID NO: 1502136
uacaccagaggacacggag

SEQ ID NO: 1502138 - RNA, 19 nt, Artificial Sequence
  Description of Artificial Sequence: Synthetic oligonucleotide
  Sense strand starting at position 2493 of SEQ ID NO: 1244616
ccguguccucugguguauu

SEQ ID NO: 1502139 - RNA, 19 nt, Artificial Sequence
  Description of Artificial Sequence: Synthetic oligonucleotide
  Antisense strand to SEQ ID NO: 1502138
aauacaccagaggacacgg

SEQ ID NO: 1502140 - RNA, 19 nt, Artificial Sequence
  Description of Artificial Sequence: Synthetic oligonucleotide
  Sense strand starting at position 2494 of SEQ ID NO: 1244616
cguguccucugguguauuu

SEQ ID NO: 1502141 - RNA, 19 nt, Artificial Sequence
  Description of Artificial Sequence: Synthetic oligonucleotide
  Antisense strand to SEQ ID NO: 1502140
aaauacaccagaggacacg

SEQ ID NO: 1502142 - RNA, 19 nt, Artificial Sequence
  Description of Artificial Sequence: Synthetic oligonucleotide
  Sense strand starting at position 2503 of SEQ ID NO: 1244616
ugguguauuucccucccaa

SEQ ID NO: 1502143 - RNA, 19 nt, Artificial Sequence
  Description of Artificial Sequence: Synthetic oligonucleotide
  Antisense strand to SEQ ID NO: 1502142
uugggagggaaauacacca

SEQ ID NO: 1502144 - RNA, 19 nt, Artificial Sequence
  Description of Artificial Sequence: Synthetic oligonucleotide
  Sense strand starting at position 2913 of SEQ ID NO: 1244616
gcggucuuguucuuggaca

SEQ ID NO: 1502145 - RNA, 19 nt, Artificial Sequence
  Description of Artificial Sequence: Synthetic oligonucleotide
  Antisense strand to SEQ ID NO: 1502144
uguccaagaacaagaccgc

SEQ ID NO: 1502146 - RNA, 19 nt, Artificial Sequence
  Description of Artificial Sequence: Synthetic oligonucleotide
  Sense strand starting at position 2915 of SEQ ID NO: 1244616
ggucuuguucuuggacagu

SEQ ID NO: 1502147 - RNA, 19 nt, Artificial Sequence
  Description of Artificial Sequence: Synthetic oligonucleotide
  Antisense strand to SEQ ID NO: 1502146
acuguccaagaacaagacc

SEQ ID NO: 1502148 - RNA, 19 nt, Artificial Sequence
  Description of Artificial Sequence: Synthetic oligonucleotide
  Sense strand starting at position 2929 of SEQ ID NO: 1244616
acaguugagggcugggaua

SEQ ID NO: 1502149 - RNA, 19 nt, Artificial Sequence
  Description of Artificial Sequence: Synthetic oligonucleotide
  Antisense strand to SEQ ID NO: 1502148
uaucccagcccucaacugu

SEQ ID NO: 1502150 - RNA, 19 nt, Artificial Sequence
  Description of Artificial Sequence: Synthetic oligonucleotide
  Sense strand starting at position 2936 of SEQ ID NO: 1244616
agggcugggauaugugaua

SEQ ID NO: 1502151 - RNA, 19 nt, Artificial Sequence
  Description of Artificial Sequence: Synthetic oligonucleotide
  Antisense strand to SEQ ID NO: 1502150
uaucacauaucccagcccu

SEQ ID NO: 1502152 - RNA, 19 nt, Artificial Sequence
  Description of Artificial Sequence: Synthetic oligonucleotide
  Sense strand starting at position 2941 of SEQ ID NO: 1244616
ugggauaugugauaggcuu

SEQ ID NO: 1502153 - RNA, 19 nt, Artificial Sequence
  Description of Artificial Sequence: Synthetic oligonucleotide
  Antisense strand to SEQ ID NO: 1502152
aagccuaucacauauccca

SEQ ID NO: 1502154 - RNA, 19 nt, Artificial Sequence
  Description of Artificial Sequence: Synthetic oligonucleotide
  Sense strand starting at position 2993 of SEQ ID NO: 1244616
gggcuugauucucggcuca

SEQ ID NO: 1502155 - RNA, 19 nt, Artificial Sequence
  Description of Artificial Sequence: Synthetic oligonucleotide
  Antisense strand to SEQ ID NO: 1502154
ugagccgagaaucaagccc

SEQ ID NO: 1502156 - RNA, 19 nt, Artificial Sequence
  Description of Artificial Sequence: Synthetic oligonucleotide
  Sense strand starting at position 3088 of SEQ ID NO: 1244616
acgggagucauucguacau

SEQ ID NO: 1502157 - RNA, 19 nt, Artificial Sequence
  Description of Artificial Sequence: Synthetic oligonucleotide
  Antisense strand to SEQ ID NO: 1502156
auguacgaaugacucccgu

SEQ ID NO: 1502158 - RNA, 19 nt, Artificial Sequence
  Description of Artificial Sequence: Synthetic oligonucleotide
  Sense strand starting at position 3092 of SEQ ID NO: 1244616
gagucauucguacauccua

SEQ ID NO: 1502159 - RNA, 19 nt, Artificial Sequence
  Description of Artificial Sequence: Synthetic oligonucleotide
  Antisense strand to SEQ ID NO: 1502158
uaggauguacgaaugacuc

SEQ ID NO: 1502160 - RNA, 19 nt, Artificial Sequence
  Description of Artificial Sequence: Synthetic oligonucleotide
  Sense strand starting at position 3099 of SEQ ID NO: 1244616
ucguacauccuaugagcua

SEQ ID NO: 1502161 - RNA, 19 nt, Artificial Sequence
  Description of Artificial Sequence: Synthetic oligonucleotide
  Antisense strand to SEQ ID NO: 1502160
uagcucauaggauguacga

SEQ ID NO: 1502162 - RNA, 19 nt, Artificial Sequence
  Description of Artificial Sequence: Synthetic oligonucleotide
  Sense strand starting at position 3508 of SEQ ID NO: 1244616
gcaugaaaugcuggugagu

SEQ ID NO: 1502163 - RNA, 19 nt, Artificial Sequence
  Description of Artificial Sequence: Synthetic oligonucleotide
  Antisense strand to SEQ ID NO: 1502162
acucaccagcauuucaugc

SEQ ID NO: 1502164 - RNA, 19 nt, Artificial Sequence
  Description of Artificial Sequence: Synthetic oligonucleotide
  Sense strand starting at position 3510 of SEQ ID NO: 1244616
augaaaugcuggugaguca

SEQ ID NO: 1502165 - RNA, 19 nt, Artificial Sequence
  Description of Artificial Sequence: Synthetic oligonucleotide
  Antisense strand to SEQ ID NO: 1502164
ugacucaccagcauuucau

SEQ ID NO: 1502166 - RNA, 19 nt, Artificial Sequence
  Description of Artificial Sequence: Synthetic oligonucleotide
  Sense strand starting at position 3715 of SEQ ID NO: 1244616
auugcuaugaucuggguga

SEQ ID NO: 1502167 - RNA, 19 nt, Artificial Sequence
  Description of Artificial Sequence: Synthetic oligonucleotide
  Antisense strand to SEQ ID NO: 1502166
ucacccagaucauagcaau

SEQ ID NO: 1502168 - RNA, 19 nt, Artificial Sequence
  Description of Artificial Sequence: Synthetic oligonucleotide
  Sense strand starting at position 3717 of SEQ ID NO: 1244616
ugcuaugaucugggugaga

SEQ ID NO: 1502169 - RNA, 19 nt, Artificial Sequence
  Description of Artificial Sequence: Synthetic oligonucleotide
  Antisense strand to SEQ ID NO: 1502168
ucucacccagaucauagca

SEQ ID NO: 1502170 - RNA, 19 nt, Artificial Sequence
  Description of Artificial Sequence: Synthetic oligonucleotide
  Sense strand starting at position 3719 of SEQ ID NO: 1244616
cuaugaucugggugagaac

SEQ ID NO: 1502171 - RNA, 19 nt, Artificial Sequence
  Description of Artificial Sequence: Synthetic oligonucleotide
  Antisense strand to SEQ ID NO: 1502170
guucucacccagaucauag

SEQ ID NO: 1502172 - RNA, 19 nt, Artificial Sequence
  Description of Artificial Sequence: Synthetic oligonucleotide
  Sense strand starting at position 3763 of SEQ ID NO: 1244616
gugucaggcuguccugaua

SEQ ID NO: 1502173 - RNA, 19 nt, Artificial Sequence
  Description of Artificial Sequence: Synthetic oligonucleotide
  Antisense strand to SEQ ID NO: 1502172
uaucaggacagccugacac

SEQ ID NO: 1502174 - RNA, 19 nt, Artificial Sequence
  Description of Artificial Sequence: Synthetic oligonucleotide
  Sense strand starting at position 3893 of SEQ ID NO: 1244616
gcaggaauauuugaugcaa

SEQ ID NO: 1502175 - RNA, 19 nt, Artificial Sequence
  Description of Artificial Sequence: Synthetic oligonucleotide
  Antisense strand to SEQ ID NO: 1502174
uugcaucaaauauuccugc

SEQ ID NO: 1502176 - RNA, 19 nt, Artificial Sequence
  Description of Artificial Sequence: Synthetic oligonucleotide
  Sense strand starting at position 3895 of SEQ ID NO: 1244616
aggaauauuugaugcaaag

SEQ ID NO: 1502177 - RNA, 19 nt, Artificial Sequence
  Description of Artificial Sequence: Synthetic oligonucleotide
  Antisense strand to SEQ ID NO: 1502176
cuuugcaucaaauauuccu

SEQ ID NO: 1502178 - RNA, 19 nt, Artificial Sequence
  Description of Artificial Sequence: Synthetic oligonucleotide
  Sense strand starting at position 345 of SEQ ID NO: 1244617
uacagaaaguagcuuagau

SEQ ID NO: 1502179 - RNA, 19 nt, Artificial Sequence
  Description of Artificial Sequence: Synthetic oligonucleotide
  Antisense strand to SEQ ID NO: 1502178
aucuaagcuacuuucugua

SEQ ID NO: 1502180 - RNA, 19 nt, Artificial Sequence
  Description of Artificial Sequence: Synthetic oligonucleotide
  Sense strand starting at position 393 of SEQ ID NO: 1244617
aggaguuacugcuuaauga

SEQ ID NO: 1502181 - RNA, 19 nt, Artificial Sequence
  Description of Artificial Sequence: Synthetic oligonucleotide
  Antisense strand to SEQ ID NO: 1502180
ucauuaagcaguaacuccu

SEQ ID NO: 1502182 - RNA, 19 nt, Artificial Sequence
  Description of Artificial Sequence: Synthetic oligonucleotide
  Sense strand starting at position 400 of SEQ ID NO: 1244617
acugcuuaaugaguacaaa

SEQ ID NO: 1502183 - RNA, 19 nt, Artificial Sequence
  Description of Artificial Sequence: Synthetic oligonucleotide
  Antisense strand to SEQ ID NO: 1502182
uuuguacucauuaagcagu

SEQ ID NO: 1502184 - RNA, 19 nt, Artificial Sequence
  Description of Artificial Sequence: Synthetic oligonucleotide
  Sense strand starting at position 401 of SEQ ID NO: 1244617
cugcuuaaugaguacaaag

SEQ ID NO: 1502185 - RNA, 19 nt, Artificial Sequence
  Description of Artificial Sequence: Synthetic oligonucleotide
  Antisense strand to SEQ ID NO: 1502184
cuuuguacucauuaagcag

SEQ ID NO: 1502186 - RNA, 19 nt, Artificial Sequence
  Description of Artificial Sequence: Synthetic oligonucleotide
  Sense strand starting at position 403 of SEQ ID NO: 1244617
gcuuaaugaguacaaaguu

SEQ ID NO: 1502187 - RNA, 19 nt, Artificial Sequence
  Description of Artificial Sequence: Synthetic oligonucleotide
  Antisense strand to SEQ ID NO: 1502186
aacuuuguacucauuaagc

SEQ ID NO: 1502188 - RNA, 19 nt, Artificial Sequence
  Description of Artificial Sequence: Synthetic oligonucleotide
  Sense strand starting at position 411 of SEQ ID NO: 1244617
aguacaaaguuucuguuua

SEQ ID NO: 1502189 - RNA, 19 nt, Artificial Sequence
  Description of Artificial Sequence: Synthetic oligonucleotide
  Antisense strand to SEQ ID NO: 1502188
uaaacagaaacuuuguacu

SEQ ID NO: 1502190 - RNA, 19 nt, Artificial Sequence
  Description of Artificial Sequence: Synthetic oligonucleotide
  Sense strand starting at position 454 of SEQ ID NO: 1244617
agaagugauaguugcacaa

SEQ ID NO: 1502191 - RNA, 19 nt, Artificial Sequence
  Description of Artificial Sequence: Synthetic oligonucleotide
  Antisense strand to SEQ ID NO: 1502190
uugugcaacuaucacuucu

SEQ ID NO: 1502192 - RNA, 19 nt, Artificial Sequence
  Description of Artificial Sequence: Synthetic oligonucleotide
  Sense strand starting at position 902 of SEQ ID NO: 1244617
gacggaucaucugugguca

SEQ ID NO: 1502193 - RNA, 19 nt, Artificial Sequence
  Description of Artificial Sequence: Synthetic oligonucleotide
  Antisense strand to SEQ ID NO: 1502192
ugaccacagaugauccguc

SEQ ID NO: 1502194 - RNA, 19 nt, Artificial Sequence
  Description of Artificial Sequence: Synthetic oligonucleotide
  Sense strand starting at position 903 of SEQ ID NO: 1244617
acggaucaucuguggucaa

SEQ ID NO: 1502195 - RNA, 19 nt, Artificial Sequence
  Description of Artificial Sequence: Synthetic oligonucleotide
  Antisense strand to SEQ ID NO: 1502194
uugaccacagaugauccgu

SEQ ID NO: 1502196 - RNA, 19 nt, Artificial Sequence
  Description of Artificial Sequence: Synthetic oligonucleotide
  Sense strand starting at position 915 of SEQ ID NO: 1244617
uggucaagaguuugagacu

SEQ ID NO: 1502197 - RNA, 19 nt, Artificial Sequence
  Description of Artificial Sequence: Synthetic oligonucleotide
  Antisense strand to SEQ ID NO: 1502196
agucucaaacucuugacca

SEQ ID NO: 1502198 - RNA, 19 nt, Artificial Sequence
  Description of Artificial Sequence: Synthetic oligonucleotide
  Sense strand starting at position 1223 of SEQ ID NO: 1244617
cgaagaucgauugggaaga

SEQ ID NO: 1502199 - RNA, 19 nt, Artificial Sequence
  Description of Artificial Sequence: Synthetic oligonucleotide
  Antisense strand to SEQ ID NO: 1502198
ucuucccaaucgaucuucg

SEQ ID NO: 1502200 - RNA, 19 nt, Artificial Sequence
  Description of Artificial Sequence: Synthetic oligonucleotide
  Sense strand starting at position 1417 of SEQ ID NO: 1244617
guucgagccacaugggaaa

SEQ ID NO: 1502201 - RNA, 19 nt, Artificial Sequence
  Description of Artificial Sequence: Synthetic oligonucleotide
  Antisense strand to SEQ ID NO: 1502200
uuucccauguggcucgaac

SEQ ID NO: 1502202 - RNA, 19 nt, Artificial Sequence
  Description of Artificial Sequence: Synthetic oligonucleotide
  Sense strand starting at position 2084 of SEQ ID NO: 1244617
ggccucuugcccugggaaa

SEQ ID NO: 1502203 - RNA, 19 nt, Artificial Sequence
  Description of Artificial Sequence: Synthetic oligonucleotide
  Antisense strand to SEQ ID NO: 1502202
uuucccagggcaagaggcc

SEQ ID NO: 1502204 - RNA, 19 nt, Artificial Sequence
  Description of Artificial Sequence: Synthetic oligonucleotide
  Sense strand starting at position 2130 of SEQ ID NO: 1244617
cgcggaggucuccaagauu

SEQ ID NO: 1502205 - RNA, 19 nt, Artificial Sequence
  Description of Artificial Sequence: Synthetic oligonucleotide
  Antisense strand to SEQ ID NO: 1502204
aaucuuggagaccuccgcg

SEQ ID NO: 1502206 - RNA, 19 nt, Artificial Sequence
  Description of Artificial Sequence: Synthetic oligonucleotide
  Sense strand starting at position 2244 of SEQ ID NO: 1244617
ccgacaacucuugggagga

SEQ ID NO: 1502207 - RNA, 19 nt, Artificial Sequence
  Description of Artificial Sequence: Synthetic oligonucleotide
  Antisense strand to SEQ ID NO: 1502206
uccucccaagaguugucgg

SEQ ID NO: 1502208 - RNA, 19 nt, Artificial Sequence
  Description of Artificial Sequence: Synthetic oligonucleotide
  Sense strand starting at position 2246 of SEQ ID NO: 1244617
gacaacucuugggaggaga

SEQ ID NO: 1502209 - RNA, 19 nt, Artificial Sequence
  Description of Artificial Sequence: Synthetic oligonucleotide
  Antisense strand to SEQ ID NO: 1502208
ucuccucccaagaguuguc

SEQ ID NO: 1502210 - RNA, 19 nt, Artificial Sequence
  Description of Artificial Sequence: Synthetic oligonucleotide
  Sense strand starting at position 2280 of SEQ ID NO: 1244617
gcuuauuuaugagaaugag

SEQ ID NO: 1502211 - RNA, 19 nt, Artificial Sequence
  Description of Artificial Sequence: Synthetic oligonucleotide
  Antisense strand to SEQ ID NO: 1502210
cucauucucauaaauaagc

SEQ ID NO: 1502212 - RNA, 19 nt, Artificial Sequence
  Description of Artificial Sequence: Synthetic oligonucleotide
  Sense strand starting at position 2465 of SEQ ID NO: 1244617
ggugauucugacgcgcauu

SEQ ID NO: 1502213 - RNA, 19 nt, Artificial Sequence
  Description of Artificial Sequence: Synthetic oligonucleotide
  Antisense strand to SEQ ID NO: 1502212
aaugcgcgucagaaucacc

SEQ ID NO: 1502214 - RNA, 19 nt, Artificial Sequence
  Description of Artificial Sequence: Synthetic oligonucleotide
  Sense strand starting at position 2476 of SEQ ID NO: 1244617
cgcgcauucaagguugagu

SEQ ID NO: 1502215 - RNA, 19 nt, Artificial Sequence
  Description of Artificial Sequence: Synthetic oligonucleotide
  Antisense strand to SEQ ID NO: 1502214
acucaaccuugaaugcgcg

SEQ ID NO: 1502216 - RNA, 19 nt, Artificial Sequence
  Description of Artificial Sequence: Synthetic oligonucleotide
  Sense strand starting at position 2520 of SEQ ID NO: 1244617
gcagguauaaugcagaguu

SEQ ID NO: 1502217 - RNA, 19 nt, Artificial Sequence
  Description of Artificial Sequence: Synthetic oligonucleotide
  Antisense strand to SEQ ID NO: 1502216
aacucugcauuauaccugc

SEQ ID NO: 1502218 - RNA, 19 nt, Artificial Sequence
  Description of Artificial Sequence: Synthetic oligonucleotide
  Sense strand starting at position 2522 of SEQ ID NO: 1244617
agguauaaugcagaguugu

SEQ ID NO: 1502219 - RNA, 19 nt, Artificial Sequence
  Description of Artificial Sequence: Synthetic oligonucleotide
  Antisense strand to SEQ ID NO: 1502218
acaacucugcauuauaccu

SEQ ID NO: 1502220 - RNA, 19 nt, Artificial Sequence
  Description of Artificial Sequence: Synthetic oligonucleotide
  Sense strand starting at position 2568 of SEQ ID NO: 1244617
gauguaagcgcguuuccca

SEQ ID NO: 1502221 - RNA, 19 nt, Artificial Sequence
  Description of Artificial Sequence: Synthetic oligonucleotide
  Antisense strand to SEQ ID NO: 1502220
ugggaaacgcgcuuacauc

SEQ ID NO: 1502222 - RNA, 19 nt, Artificial Sequence
  Description of Artificial Sequence: Synthetic oligonucleotide
  Sense strand starting at position 2766 of SEQ ID NO: 1244617
gcaggcucucaugguaaca

SEQ ID NO: 1502223 - RNA, 19 nt, Artificial Sequence
  Description of Artificial Sequence: Synthetic oligonucleotide
  Antisense strand to SEQ ID NO: 1502222
uguuaccaugagagccugc

SEQ ID NO: 1502224 - RNA, 19 nt, Artificial Sequence
  Description of Artificial Sequence: Synthetic oligonucleotide
  Sense strand starting at position 2779 of SEQ ID NO: 1244617
guaacaaugaagcgucaga

SEQ ID NO: 1502225 - RNA, 19 nt, Artificial Sequence
  Description of Artificial Sequence: Synthetic oligonucleotide
  Antisense strand to SEQ ID NO: 1502224
ucugacgcuucauuguuac

SEQ ID NO: 1502226 - RNA, 19 nt, Artificial Sequence
  Description of Artificial Sequence: Synthetic oligonucleotide
  Sense strand starting at position 2786 of SEQ ID NO: 1244617
ugaagcgucagagacuaaa

SEQ ID NO: 1502227 - RNA, 19 nt, Artificial Sequence
  Description of Artificial Sequence: Synthetic oligonucleotide
  Antisense strand to SEQ ID NO: 1502226
uuuagucucugacgcuuca

SEQ ID NO: 1502228 - RNA, 19 nt, Artificial Sequence
  Description of Artificial Sequence: Synthetic oligonucleotide
  Sense strand starting at position 2876 of SEQ ID NO: 1244617
gcucaaaguagguaucaga

SEQ ID NO: 1502229 - RNA, 19 nt, Artificial Sequence
  Description of Artificial Sequence: Synthetic oligonucleotide
  Antisense strand to SEQ ID NO: 1502228
ucugauaccuacuuugagc

SEQ ID NO: 1502230 - RNA, 19 nt, Artificial Sequence
  Description of Artificial Sequence: Synthetic oligonucleotide
  Sense strand starting at position 3209 of SEQ ID NO: 1244617
aagcguuugugguuauuuc

SEQ ID NO: 1502231 - RNA, 19 nt, Artificial Sequence
  Description of Artificial Sequence: Synthetic oligonucleotide
  Antisense strand to SEQ ID NO: 1502230
gaaauaaccacaaacgcuu

SEQ ID NO: 1502232 - RNA, 19 nt, Artificial Sequence
  Description of Artificial Sequence: Synthetic oligonucleotide
  Sense strand starting at position 3213 of SEQ ID NO: 1244617
guuugugguuauuucuaau

SEQ ID NO: 1502233 - RNA, 19 nt, Artificial Sequence
  Description of Artificial Sequence: Synthetic oligonucleotide
  Antisense strand to SEQ ID NO: 1502232
auuagaaauaaccacaaac

SEQ ID NO: 1502234 - RNA, 19 nt, Artificial Sequence
  Description of Artificial Sequence: Synthetic oligonucleotide
  Sense strand starting at position 3219 of SEQ ID NO: 1244617
gguuauuucuaauacugga

SEQ ID NO: 1502235 - RNA, 19 nt, Artificial Sequence
  Description of Artificial Sequence: Synthetic oligonucleotide
  Antisense strand to SEQ ID NO: 1502234
uccaguauuagaaauaacc

SEQ ID NO: 1502236 - RNA, 19 nt, Artificial Sequence
  Description of Artificial Sequence: Synthetic oligonucleotide
  Sense strand starting at position 3224 of SEQ ID NO: 1244617
uuucuaauacuggaagugu

SEQ ID NO: 1502237 - RNA, 19 nt, Artificial Sequence
  Description of Artificial Sequence: Synthetic oligonucleotide
  Antisense strand to SEQ ID NO: 1502236
acacuuccaguauuagaaa

SEQ ID NO: 1502238 - RNA, 19 nt, Artificial Sequence
  Description of Artificial Sequence: Synthetic oligonucleotide
  Sense strand starting at position 3342 of SEQ ID NO: 1244617
gguaauauguuacuuccca

SEQ ID NO: 1502239 - RNA, 19 nt, Artificial Sequence
  Description of Artificial Sequence: Synthetic oligonucleotide
  Antisense strand to SEQ ID NO: 1502238
ugggaaguaacauauuacc

SEQ ID NO: 1502240 - RNA, 19 nt, Artificial Sequence
  Description of Artificial Sequence: Synthetic oligonucleotide
  Sense strand starting at position 3450 of SEQ ID NO: 1244617
gucacugaguggcuaagau

SEQ ID NO: 1502241 - RNA, 19 nt, Artificial Sequence
  Description of Artificial Sequence: Synthetic oligonucleotide
  Antisense strand to SEQ ID NO: 1502240
aucuuagccacucagugac

SEQ ID NO: 1502242 - RNA, 19 nt, Artificial Sequence
  Description of Artificial Sequence: Synthetic oligonucleotide
  Sense strand starting at position 3534 of SEQ ID NO: 1244617
ucagcuuacugagauuuag

SEQ ID NO: 1502243 - RNA, 19 nt, Artificial Sequence
  Description of Artificial Sequence: Synthetic oligonucleotide
  Antisense strand to SEQ ID NO: 1502242
cuaaaucucaguaagcuga

SEQ ID NO: 1502244 - RNA, 19 nt, Artificial Sequence
  Description of Artificial Sequence: Synthetic oligonucleotide
  Sense strand starting at position 3543 of SEQ ID NO: 1244617
ugagauuuagugggugugu

SEQ ID NO: 1502245 - RNA, 19 nt, Artificial Sequence
  Description of Artificial Sequence: Synthetic oligonucleotide
  Antisense strand to SEQ ID NO: 1502244
acacacccacuaaaucuca

SEQ ID NO: 1502246 - RNA, 19 nt, Artificial Sequence
  Description of Artificial Sequence: Synthetic oligonucleotide
  Sense strand starting at position 3591 of SEQ ID NO: 1244617
acugauguauuaccuggau

SEQ ID NO: 1502247 - RNA, 19 nt, Artificial Sequence
  Description of Artificial Sequence: Synthetic oligonucleotide
  Antisense strand to SEQ ID NO: 1502246
auccagguaauacaucagu

SEQ ID NO: 1502248 - RNA, 19 nt, Artificial Sequence
  Description of Artificial Sequence: Synthetic oligonucleotide
  Sense strand starting at position 3594 of SEQ ID NO: 1244617
gauguauuaccuggaucuu

SEQ ID NO: 1502249 - RNA, 19 nt, Artificial Sequence
  Description of Artificial Sequence: Synthetic oligonucleotide
  Antisense strand to SEQ ID NO: 1502248
aagauccagguaauacauc

SEQ ID NO: 1502250 - RNA, 19 nt, Artificial Sequence
  Description of Artificial Sequence: Synthetic oligonucleotide
  Sense strand starting at position 3603 of SEQ ID NO: 1244617
ccuggaucuuguucuagaa

SEQ ID NO: 1502251 - RNA, 19 nt, Artificial Sequence
  Description of Artificial Sequence: Synthetic oligonucleotide
  Antisense strand to SEQ ID NO: 1502250
uucuagaacaagauccagg

SEQ ID NO: 1502252 - RNA, 19 nt, Artificial Sequence
  Description of Artificial Sequence: Synthetic oligonucleotide
  Sense strand starting at position 3616 of SEQ ID NO: 1244617
cuagaaucuccgcaucgga

SEQ ID NO: 1502253 - RNA, 19 nt, Artificial Sequence
  Description of Artificial Sequence: Synthetic oligonucleotide
  Antisense strand to SEQ ID NO: 1502252
uccgaugcggagauucuag

SEQ ID NO: 1502254 - RNA, 19 nt, Artificial Sequence
  Description of Artificial Sequence: Synthetic oligonucleotide
  Sense strand starting at position 3957 of SEQ ID NO: 1244617
gcuguaaugagccaugaga

SEQ ID NO: 1502255 - RNA, 19 nt, Artificial Sequence
  Description of Artificial Sequence: Synthetic oligonucleotide
  Antisense strand to SEQ ID NO: 1502254
ucucauggcucauuacagc

SEQ ID NO: 1502256 - RNA, 19 nt, Artificial Sequence
  Description of Artificial Sequence: Synthetic oligonucleotide
  Sense strand starting at position 3959 of SEQ ID NO: 1244617
uguaaugagccaugagauc

SEQ ID NO: 1502257 - RNA, 19 nt, Artificial Sequence
  Description of Artificial Sequence: Synthetic oligonucleotide
  Antisense strand to SEQ ID NO: 1502256
gaucucauggcucauuaca

SEQ ID NO: 1502258 - RNA, 19 nt, Artificial Sequence
  Description of Artificial Sequence: Synthetic oligonucleotide
  Sense strand starting at position 20 of SEQ ID NO: 1244618
gaaauaaugugguccacuu

SEQ ID NO: 1502259 - RNA, 19 nt, Artificial Sequence
  Description of Artificial Sequence: Synthetic oligonucleotide
  Antisense strand to SEQ ID NO: 1502258
aaguggaccacauuauuuc

SEQ ID NO: 1502260 - RNA, 19 nt, Artificial Sequence
  Description of Artificial Sequence: Synthetic oligonucleotide
  Sense strand starting at position 28 of SEQ ID NO: 1244618
gugguccacuugcuauaaa

SEQ ID NO: 1502261 - RNA, 19 nt, Artificial Sequence
  Description of Artificial Sequence: Synthetic oligonucleotide
  Antisense strand to SEQ ID NO: 1502260
uuuauagcaaguggaccac

SEQ ID NO: 1502262 - RNA, 19 nt, Artificial Sequence
  Description of Artificial Sequence: Synthetic oligonucleotide
  Sense strand starting at position 125 of SEQ ID NO: 1244618
aggauuauuuauugagugu

SEQ ID NO: 1502263 - RNA, 19 nt, Artificial Sequence
  Description of Artificial Sequence: Synthetic oligonucleotide
  Antisense strand to SEQ ID NO: 1502262
acacucaauaaauaauccu

SEQ ID NO: 1502264 - RNA, 19 nt, Artificial Sequence
  Description of Artificial Sequence: Synthetic oligonucleotide
  Sense strand starting at position 129 of SEQ ID NO: 1244618
uuauuuauugagugugcua

SEQ ID NO: 1502265 - RNA, 19 nt, Artificial Sequence
  Description of Artificial Sequence: Synthetic oligonucleotide
  Antisense strand to SEQ ID NO: 1502264
uagcacacucaauaaauaa

SEQ ID NO: 1502266 - RNA, 19 nt, Artificial Sequence
  Description of Artificial Sequence: Synthetic oligonucleotide
  Sense strand starting at position 131 of SEQ ID NO: 1244618
auuuauugagugugcuaau

SEQ ID NO: 1502267 - RNA, 19 nt, Artificial Sequence
  Description of Artificial Sequence: Synthetic oligonucleotide
  Antisense strand to SEQ ID NO: 1502266
auuagcacacucaauaaau

SEQ ID NO: 1502268 - RNA, 19 nt, Artificial Sequence
  Description of Artificial Sequence: Synthetic oligonucleotide
  Sense strand starting at position 132 of SEQ ID NO: 1244618
uuuauugagugugcuaauu

SEQ ID NO: 1502269 - RNA, 19 nt, Artificial Sequence
  Description of Artificial Sequence: Synthetic oligonucleotide
  Antisense strand to SEQ ID NO: 1502268
aauuagcacacucaauaaa

SEQ ID NO: 1502270 - RNA, 19 nt, Artificial Sequence
  Description of Artificial Sequence: Synthetic oligonucleotide
  Sense strand starting at position 235 of SEQ ID NO: 1244618
cuuccagagguuuaccuau

SEQ ID NO: 1502271 - RNA, 19 nt, Artificial Sequence
  Description of Artificial Sequence: Synthetic oligonucleotide
  Antisense strand to SEQ ID NO: 1502270
auagguaaaccucuggaag

SEQ ID NO: 1502272 - RNA, 19 nt, Artificial Sequence
  Description of Artificial Sequence: Synthetic oligonucleotide
  Sense strand starting at position 241 of SEQ ID NO: 1244618
gagguuuaccuauguuaag

SEQ ID NO: 1502273 - RNA, 19 nt, Artificial Sequence
  Description of Artificial Sequence: Synthetic oligonucleotide
  Antisense strand to SEQ ID NO: 1502272
cuuaacauagguaaaccuc

SEQ ID NO: 1502274 - RNA, 19 nt, Artificial Sequence
  Description of Artificial Sequence: Synthetic oligonucleotide
  Sense strand starting at position 242 of SEQ ID NO: 1244618
agguuuaccuauguuaagu

SEQ ID NO: 1502275 - RNA, 19 nt, Artificial Sequence
  Description of Artificial Sequence: Synthetic oligonucleotide
  Antisense strand to SEQ ID NO: 1502274
acuuaacauagguaaaccu

SEQ ID NO: 1502276 - RNA, 19 nt, Artificial Sequence
  Description of Artificial Sequence: Synthetic oligonucleotide
  Sense strand starting at position 253 of SEQ ID NO: 1244618
uguuaagucccacauauga

SEQ ID NO: 1502277 - RNA, 19 nt, Artificial Sequence
  Description of Artificial Sequence: Synthetic oligonucleotide
  Antisense strand to SEQ ID NO: 1502276
ucauaugugggacuuaaca

SEQ ID NO: 1502278 - RNA, 19 nt, Artificial Sequence
  Description of Artificial Sequence: Synthetic oligonucleotide
  Sense strand starting at position 266 of SEQ ID NO: 1244618
auaugaaagagcggugaau

SEQ ID NO: 1502279 - RNA, 19 nt, Artificial Sequence
  Description of Artificial Sequence: Synthetic oligonucleotide
  Antisense strand to SEQ ID NO: 1502278
auucaccgcucuuucauau

SEQ ID NO: 1502280 - RNA, 19 nt, Artificial Sequence
  Description of Artificial Sequence: Synthetic oligonucleotide
  Sense strand starting at position 278 of SEQ ID NO: 1244618
ggugaauacuuuccugagg

SEQ ID NO: 1502281 - RNA, 19 nt, Artificial Sequence
  Description of Artificial Sequence: Synthetic oligonucleotide
  Antisense strand to SEQ ID NO: 1502280
ccucaggaaaguauucacc

SEQ ID NO: 1502282 - RNA, 19 nt, Artificial Sequence
  Description of Artificial Sequence: Synthetic oligonucleotide
  Sense strand starting at position 326 of SEQ ID NO: 1244618
agcaaaguaugcuccauau

SEQ ID NO: 1502283 - RNA, 19 nt, Artificial Sequence
  Description of Artificial Sequence: Synthetic oligonucleotide
  Antisense strand to SEQ ID NO: 1502282
auauggagcauacuuugcu

SEQ ID NO: 1502284 - RNA, 19 nt, Artificial Sequence
  Description of Artificial Sequence: Synthetic oligonucleotide
  Sense strand starting at position 356 of SEQ ID NO: 1244618
aaagccaugugguuuaaga

SEQ ID NO: 1502285 - RNA, 19 nt, Artificial Sequence
  Description of Artificial Sequence: Synthetic oligonucleotide
  Antisense strand to SEQ ID NO: 1502284
ucuuaaaccacauggcuuu

SEQ ID NO: 1502286 - RNA, 19 nt, Artificial Sequence
  Description of Artificial Sequence: Synthetic oligonucleotide
  Sense strand starting at position 358 of SEQ ID NO: 1244618
agccaugugguuuaagaaa

SEQ ID NO: 1502287 - RNA, 19 nt, Artificial Sequence
  Description of Artificial Sequence: Synthetic oligonucleotide
  Antisense strand to SEQ ID NO: 1502286
uuucuuaaaccacauggcu

SEQ ID NO: 1502288 - RNA, 19 nt, Artificial Sequence
  Description of Artificial Sequence: Synthetic oligonucleotide
  Sense strand starting at position 469 of SEQ ID NO: 1244618
aaaucuaugccuugguuag

SEQ ID NO: 1502289 - RNA, 19 nt, Artificial Sequence
  Description of Artificial Sequence: Synthetic oligonucleotide
  Antisense strand to SEQ ID NO: 1502288
cuaaccaaggcauagauuu

SEQ ID NO: 1502290 - RNA, 19 nt, Artificial Sequence
  Description of Artificial Sequence: Synthetic oligonucleotide
  Sense strand starting at position 501 of SEQ ID NO: 1244618
uagucauaaucagucagag

SEQ ID NO: 1502291 - RNA, 19 nt, Artificial Sequence
  Description of Artificial Sequence: Synthetic oligonucleotide
  Antisense strand to SEQ ID NO: 1502290
cucugacugauuaugacua

SEQ ID NO: 1502292 - RNA, 19 nt, Artificial Sequence
  Description of Artificial Sequence: Synthetic oligonucleotide
  Sense strand starting at position 705 of SEQ ID NO: 1244618
uggacacacugcugagaaa

SEQ ID NO: 1502293 - RNA, 19 nt, Artificial Sequence
  Description of Artificial Sequence: Synthetic oligonucleotide
  Antisense strand to SEQ ID NO: 1502292
uuucucagcagugugucca

SEQ ID NO: 1502294 - RNA, 19 nt, Artificial Sequence
  Description of Artificial Sequence: Synthetic oligonucleotide
  Sense strand starting at position 731 of SEQ ID NO: 1244618
aucucaguaugucucuauu

SEQ ID NO: 1502295 - RNA, 19 nt, Artificial Sequence
  Description of Artificial Sequence: Synthetic oligonucleotide
  Antisense strand to SEQ ID NO: 1502294
aauagagacauacugagau

SEQ ID NO: 1502296 - RNA, 19 nt, Artificial Sequence
  Description of Artificial Sequence: Synthetic oligonucleotide
  Sense strand starting at position 733 of SEQ ID NO: 1244618
cucaguaugucucuauucu

SEQ ID NO: 1502297 - RNA, 19 nt, Artificial Sequence
  Description of Artificial Sequence: Synthetic oligonucleotide
  Antisense strand to SEQ ID NO: 1502296
agaauagagacauacugag

SEQ ID NO: 1502298 - RNA, 19 nt, Artificial Sequence
  Description of Artificial Sequence: Synthetic oligonucleotide
  Sense strand starting at position 734 of SEQ ID NO: 1244618
ucaguaugucucuauucua

SEQ ID NO: 1502299 - RNA, 19 nt, Artificial Sequence
  Description of Artificial Sequence: Synthetic oligonucleotide
  Antisense strand to SEQ ID NO: 1502298
uagaauagagacauacuga

SEQ ID NO: 1502300 - RNA, 19 nt, Artificial Sequence
  Description of Artificial Sequence: Synthetic oligonucleotide
  Sense strand starting at position 737 of SEQ ID NO: 1244618
guaugucucuauucuacca

SEQ ID NO: 1502301 - RNA, 19 nt, Artificial Sequence
  Description of Artificial Sequence: Synthetic oligonucleotide
  Antisense strand to SEQ ID NO: 1502300
ugguagaauagagacauac

SEQ ID NO: 1502302 - RNA, 19 nt, Artificial Sequence
  Description of Artificial Sequence: Synthetic oligonucleotide
  Sense strand starting at position 965 of SEQ ID NO: 1244618
acugaacuaccuugugauu

SEQ ID NO: 1502303 - RNA, 19 nt, Artificial Sequence
  Description of Artificial Sequence: Synthetic oligonucleotide
  Antisense strand to SEQ ID NO: 1502302
aaucacaagguaguucagu

SEQ ID NO: 1502304 - RNA, 19 nt, Artificial Sequence
  Description of Artificial Sequence: Synthetic oligonucleotide
  Sense strand starting at position 1062 of SEQ ID NO: 1244618
ggaugauucuaauaacaaa

SEQ ID NO: 1502305 - RNA, 19 nt, Artificial Sequence
  Description of Artificial Sequence: Synthetic oligonucleotide
  Antisense strand to SEQ ID NO: 1502304
uuuguuauuagaaucaucc

SEQ ID NO: 1502306 - RNA, 19 nt, Artificial Sequence
  Description of Artificial Sequence: Synthetic oligonucleotide
  Sense strand starting at position 1167 of SEQ ID NO: 1244618
gggcaauccgaguaacucu

SEQ ID NO: 1502307 - RNA, 19 nt, Artificial Sequence
  Description of Artificial Sequence: Synthetic oligonucleotide
  Antisense strand to SEQ ID NO: 1502306
agaguuacucggauugccc

SEQ ID NO: 1502308 - RNA, 19 nt, Artificial Sequence
  Description of Artificial Sequence: Synthetic oligonucleotide
  Sense strand starting at position 1176 of SEQ ID NO: 1244618
gaguaacucugauacucag

SEQ ID NO: 1502309 - RNA, 19 nt, Artificial Sequence
  Description of Artificial Sequence: Synthetic oligonucleotide
  Antisense strand to SEQ ID NO: 1502308
cugaguaucagaguuacuc

SEQ ID NO: 1502310 - RNA, 19 nt, Artificial Sequence
  Description of Artificial Sequence: Synthetic oligonucleotide
  Sense strand starting at position 2681 of SEQ ID NO: 1244618
cggcggaggucuucggaaa

SEQ ID NO: 1502311 - RNA, 19 nt, Artificial Sequence
  Description of Artificial Sequence: Synthetic oligonucleotide
  Antisense strand to SEQ ID NO: 1502310
uuuccgaagaccuccgccg

SEQ ID NO: 1502312 - RNA, 19 nt, Artificial Sequence
  Description of Artificial Sequence: Synthetic oligonucleotide
  Sense strand starting at position 2682 of SEQ ID NO: 1244618
ggcggaggucuucggaaau

SEQ ID NO: 1502313 - RNA, 19 nt, Artificial Sequence
  Description of Artificial Sequence: Synthetic oligonucleotide
  Antisense strand to SEQ ID NO: 1502312
auuuccgaagaccuccgcc

SEQ ID NO: 1502314 - RNA, 19 nt, Artificial Sequence
  Description of Artificial Sequence: Synthetic oligonucleotide
  Sense strand starting at position 3064 of SEQ ID NO: 1244618
acgucauuccauugcuuaa

SEQ ID NO: 1502315 - RNA, 19 nt, Artificial Sequence
  Description of Artificial Sequence: Synthetic oligonucleotide
  Antisense strand to SEQ ID NO: 1502314
uuaagcaauggaaugacgu

SEQ ID NO: 1502316 - RNA, 19 nt, Artificial Sequence
  Description of Artificial Sequence: Synthetic oligonucleotide
  Sense strand starting at position 3205 of SEQ ID NO: 1244618
caguguucgaaguacaguu

SEQ ID NO: 1502317 - RNA, 19 nt, Artificial Sequence
  Description of Artificial Sequence: Synthetic oligonucleotide
  Antisense strand to SEQ ID NO: 1502316
aacuguacuucgaacacug

SEQ ID NO: 1502318 - RNA, 19 nt, Artificial Sequence
  Description of Artificial Sequence: Synthetic oligonucleotide
  Sense strand starting at position 3227 of SEQ ID NO: 1244618
ggugucugguucccuugau

SEQ ID NO: 1502319 - RNA, 19 nt, Artificial Sequence
  Description of Artificial Sequence: Synthetic oligonucleotide
  Antisense strand to SEQ ID NO: 1502318
aucaagggaaccagacacc

SEQ ID NO: 1502320 - RNA, 19 nt, Artificial Sequence
  Description of Artificial Sequence: Synthetic oligonucleotide
  Sense strand starting at position 3228 of SEQ ID NO: 1244618
gugucugguucccuugauu

SEQ ID NO: 1502321 - RNA, 19 nt, Artificial Sequence
  Description of Artificial Sequence: Synthetic oligonucleotide
  Antisense strand to SEQ ID NO: 1502320
aaucaagggaaccagacac

SEQ ID NO: 1502322 - RNA, 19 nt, Artificial Sequence
  Description of Artificial Sequence: Synthetic oligonucleotide
  Sense strand starting at position 3237 of SEQ ID NO: 1244618
ucccuugauuagguuugua

SEQ ID NO: 1502323 - RNA, 19 nt, Artificial Sequence
  Description of Artificial Sequence: Synthetic oligonucleotide
  Antisense strand to SEQ ID NO: 1502322
uacaaaccuaaucaaggga

SEQ ID NO: 1502324 - RNA, 19 nt, Artificial Sequence
  Description of Artificial Sequence: Synthetic oligonucleotide
  Sense strand starting at position 3240 of SEQ ID NO: 1244618
cuugauuagguuuguaaag

SEQ ID NO: 1502325 - RNA, 19 nt, Artificial Sequence
  Description of Artificial Sequence: Synthetic oligonucleotide
  Antisense strand to SEQ ID NO: 1502324
cuuuacaaaccuaaucaag

SEQ ID NO: 1502326 - RNA, 19 nt, Artificial Sequence
  Description of Artificial Sequence: Synthetic oligonucleotide
  Sense strand starting at position 3274 of SEQ ID NO: 1244618
uaggucuuuccugguuaua

SEQ ID NO: 1502327 - RNA, 19 nt, Artificial Sequence
  Description of Artificial Sequence: Synthetic oligonucleotide
  Antisense strand to SEQ ID NO: 1502326
uauaaccaggaaagaccua

SEQ ID NO: 1502328 - RNA, 19 nt, Artificial Sequence
  Description of Artificial Sequence: Synthetic oligonucleotide
  Sense strand starting at position 3672 of SEQ ID NO: 1244618
gggaacacaucccugucau

SEQ ID NO: 1502329 - RNA, 19 nt, Artificial Sequence
  Description of Artificial Sequence: Synthetic oligonucleotide
  Antisense strand to SEQ ID NO: 1502328
augacagggauguguuccc

SEQ ID NO: 1502330 - RNA, 19 nt, Artificial Sequence
  Description of Artificial Sequence: Synthetic oligonucleotide
  Sense strand starting at position 3673 of SEQ ID NO: 1244618
ggaacacaucccugucauu

SEQ ID NO: 1502331 - RNA, 19 nt, Artificial Sequence
  Description of Artificial Sequence: Synthetic oligonucleotide
  Antisense strand to SEQ ID NO: 1502330
aaugacagggauguguucc

SEQ ID NO: 1502332 - RNA, 19 nt, Artificial Sequence
  Description of Artificial Sequence: Synthetic oligonucleotide
  Sense strand starting at position 3761 of SEQ ID NO: 1244618
accagagcucucuggcaga

SEQ ID NO: 1502333 - RNA, 19 nt, Artificial Sequence
  Description of Artificial Sequence: Synthetic oligonucleotide
  Antisense strand to SEQ ID NO: 1502332
ucugccagagagcucuggu

SEQ ID NO: 1502334 - RNA, 19 nt, Artificial Sequence
  Description of Artificial Sequence: Synthetic oligonucleotide
  Sense strand starting at position 3774 of SEQ ID NO: 1244618
ggcagagucccugguccua

SEQ ID NO: 1502335 - RNA, 19 nt, Artificial Sequence
  Description of Artificial Sequence: Synthetic oligonucleotide
  Antisense strand to SEQ ID NO: 1502334
uaggaccagggacucugcc

SEQ ID NO: 1502336 - RNA, 19 nt, Artificial Sequence
  Description of Artificial Sequence: Synthetic oligonucleotide
  Sense strand starting at position 3875 of SEQ ID NO: 1244618
cuuguaacugcuggguaaa

SEQ ID NO: 1502337 - RNA, 19 nt, Artificial Sequence
  Description of Artificial Sequence: Synthetic oligonucleotide
  Antisense strand to SEQ ID NO: 1502336
uuuacccagcaguuacaag

SEQ ID NO: 1502338 - RNA, 19 nt, Artificial Sequence
  Description of Artificial Sequence: Synthetic oligonucleotide
  Sense strand starting at position 8 of SEQ ID NO: 1244619
agcaaacaacagugagauu

SEQ ID NO: 1502339 - RNA, 19 nt, Artificial Sequence
  Description of Artificial Sequence: Synthetic oligonucleotide
  Antisense strand to SEQ ID NO: 1502338
aaucucacuguuguuugcu

SEQ ID NO: 1502340 - RNA, 19 nt, Artificial Sequence
  Description of Artificial Sequence: Synthetic oligonucleotide
  Sense strand starting at position 230 of SEQ ID NO: 1244619
ugggcuaaucuguacccua

SEQ ID NO: 1502341 - RNA, 19 nt, Artificial Sequence
  Description of Artificial Sequence: Synthetic oligonucleotide
  Antisense strand to SEQ ID NO: 1502340
uaggguacagauuagccca

SEQ ID NO: 1502342 - RNA, 19 nt, Artificial Sequence
  Description of Artificial Sequence: Synthetic oligonucleotide
  Sense strand starting at position 614 of SEQ ID NO: 1244619
cuggucuugaacugggauu

SEQ ID NO: 1502343 - RNA, 19 nt, Artificial Sequence
  Description of Artificial Sequence: Synthetic oligonucleotide
  Antisense strand to SEQ ID NO: 1502342
aaucccaguucaagaccag

SEQ ID NO: 1502344 - RNA, 19 nt, Artificial Sequence
  Description of Artificial Sequence: Synthetic oligonucleotide
  Sense strand starting at position 615 of SEQ ID NO: 1244619
uggucuugaacugggauua

SEQ ID NO: 1502345 - RNA, 19 nt, Artificial Sequence
  Description of Artificial Sequence: Synthetic oligonucleotide
  Antisense strand to SEQ ID NO: 1502344
uaaucccaguucaagacca

SEQ ID NO: 1502346 - RNA, 19 nt, Artificial Sequence
  Description of Artificial Sequence: Synthetic oligonucleotide
  Sense strand starting at position 711 of SEQ ID NO: 1244619
ccaacugaguucuugcuau

SEQ ID NO: 1502347 - RNA, 19 nt, Artificial Sequence
  Description of Artificial Sequence: Synthetic oligonucleotide
  Antisense strand to SEQ ID NO: 1502346
auagcaagaacucaguugg

SEQ ID NO: 1502348 - RNA, 19 nt, Artificial Sequence
  Description of Artificial Sequence: Synthetic oligonucleotide
  Sense strand starting at position 717 of SEQ ID NO: 1244619
gaguucuugcuauguggca

SEQ ID NO: 1502349 - RNA, 19 nt, Artificial Sequence
  Description of Artificial Sequence: Synthetic oligonucleotide
  Antisense strand to SEQ ID NO: 1502348
ugccacauagcaagaacuc

SEQ ID NO: 1502350 - RNA, 19 nt, Artificial Sequence
  Description of Artificial Sequence: Synthetic oligonucleotide
  Sense strand starting at position 730 of SEQ ID NO: 1244619
guggcagucuuugggauga

SEQ ID NO: 1502351 - RNA, 19 nt, Artificial Sequence
  Description of Artificial Sequence: Synthetic oligonucleotide
  Antisense strand to SEQ ID NO: 1502350
ucaucccaaagacugccac

SEQ ID NO: 1502352 - RNA, 19 nt, Artificial Sequence
  Description of Artificial Sequence: Synthetic oligonucleotide
  Sense strand starting at position 732 of SEQ ID NO: 1244619
ggcagucuuugggaugaaa

SEQ ID NO: 1502353 - RNA, 19 nt, Artificial Sequence
  Description of Artificial Sequence: Synthetic oligonucleotide
  Antisense strand to SEQ ID NO: 1502352
uuucaucccaaagacugcc

SEQ ID NO: 1502354 - RNA, 19 nt, Artificial Sequence
  Description of Artificial Sequence: Synthetic oligonucleotide
  Sense strand starting at position 734 of SEQ ID NO: 1244619
cagucuuugggaugaaaua

SEQ ID NO: 1502355 - RNA, 19 nt, Artificial Sequence
  Description of Artificial Sequence: Synthetic oligonucleotide
  Antisense strand to SEQ ID NO: 1502354
uauuucaucccaaagacug

SEQ ID NO: 1502356 - RNA, 19 nt, Artificial Sequence
  Description of Artificial Sequence: Synthetic oligonucleotide
  Sense strand starting at position 762 of SEQ ID NO: 1244619
uugcguaucuacuuugauc

SEQ ID NO: 1502357 - RNA, 19 nt, Artificial Sequence
  Description of Artificial Sequence: Synthetic oligonucleotide
  Antisense strand to SEQ ID NO: 1502356
gaucaaaguagauacgcaa

SEQ ID NO: 1502358 - RNA, 19 nt, Artificial Sequence
  Description of Artificial Sequence: Synthetic oligonucleotide
  Sense strand starting at position 764 of SEQ ID NO: 1244619
gcguaucuacuuugaucuu

SEQ ID NO: 1502359 - RNA, 19 nt, Artificial Sequence
  Description of Artificial Sequence: Synthetic oligonucleotide
  Antisense strand to SEQ ID NO: 1502358
aagaucaaaguagauacgc

SEQ ID NO: 1502360 - RNA, 19 nt, Artificial Sequence
  Description of Artificial Sequence: Synthetic oligonucleotide
  Sense strand starting at position 886 of SEQ ID NO: 1244619
cugagaccuuccugauaag

SEQ ID NO: 1502361 - RNA, 19 nt, Artificial Sequence
  Description of Artificial Sequence: Synthetic oligonucleotide
  Antisense strand to SEQ ID NO: 1502360
cuuaucaggaaggucucag

SEQ ID NO: 1502362 - RNA, 19 nt, Artificial Sequence
  Description of Artificial Sequence: Synthetic oligonucleotide
  Sense strand starting at position 889 of SEQ ID NO: 1244619
agaccuuccugauaaggac

SEQ ID NO: 1502363 - RNA, 19 nt, Artificial Sequence
  Description of Artificial Sequence: Synthetic oligonucleotide
  Antisense strand to SEQ ID NO: 1502362
guccuuaucaggaaggucu

SEQ ID NO: 1502364 - RNA, 19 nt, Artificial Sequence
  Description of Artificial Sequence: Synthetic oligonucleotide
  Sense strand starting at position 946 of SEQ ID NO: 1244619
cccugauaaccucggaguu

SEQ ID NO: 1502365 - RNA, 19 nt, Artificial Sequence
  Description of Artificial Sequence: Synthetic oligonucleotide
  Antisense strand to SEQ ID NO: 1502364
aacuccgagguuaucaggg

SEQ ID NO: 1502366 - RNA, 19 nt, Artificial Sequence
  Description of Artificial Sequence: Synthetic oligonucleotide
  Sense strand starting at position 979 of SEQ ID NO: 1244619
ucugucuucucccucuaga

SEQ ID NO: 1502367 - RNA, 19 nt, Artificial Sequence
  Description of Artificial Sequence: Synthetic oligonucleotide
  Antisense strand to SEQ ID NO: 1502366
ucuagagggagaagacaga

SEQ ID NO: 1502368 - RNA, 19 nt, Artificial Sequence
  Description of Artificial Sequence: Synthetic oligonucleotide
  Sense strand starting at position 992 of SEQ ID NO: 1244619
ucuagauucuggguucuac

SEQ ID NO: 1502369 - RNA, 19 nt, Artificial Sequence
  Description of Artificial Sequence: Synthetic oligonucleotide
  Antisense strand to SEQ ID NO: 1502368
guagaacccagaaucuaga

SEQ ID NO: 1502370 - RNA, 19 nt, Artificial Sequence
  Description of Artificial Sequence: Synthetic oligonucleotide
  Sense strand starting at position 996 of SEQ ID NO: 1244619
gauucuggguucuacacua

SEQ ID NO: 1502371 - RNA, 19 nt, Artificial Sequence
  Description of Artificial Sequence: Synthetic oligonucleotide
  Antisense strand to SEQ ID NO: 1502370
uaguguagaacccagaauc

SEQ ID NO: 1502372 - RNA, 19 nt, Artificial Sequence
  Description of Artificial Sequence: Synthetic oligonucleotide
  Sense strand starting at position 1089 of SEQ ID NO: 1244619
gauggaggaucuugcgaaa

SEQ ID NO: 1502373 - RNA, 19 nt, Artificial Sequence
  Description of Artificial Sequence: Synthetic oligonucleotide
  Antisense strand to SEQ ID NO: 1502372
uuucgcaagauccuccauc

SEQ ID NO: 1502374 - RNA, 19 nt, Artificial Sequence
  Description of Artificial Sequence: Synthetic oligonucleotide
  Sense strand starting at position 1092 of SEQ ID NO: 1244619
ggaggaucuugcgaaauac

SEQ ID NO: 1502375 - RNA, 19 nt, Artificial Sequence
  Description of Artificial Sequence: Synthetic oligonucleotide
  Antisense strand to SEQ ID NO: 1502374
guauuucgcaagauccucc

SEQ ID NO: 1502376 - RNA, 19 nt, Artificial Sequence
  Description of Artificial Sequence: Synthetic oligonucleotide
  Sense strand starting at position 1335 of SEQ ID NO: 1244619
agacucaccgcucgaauga

SEQ ID NO: 1502377 - RNA, 19 nt, Artificial Sequence
  Description of Artificial Sequence: Synthetic oligonucleotide
  Antisense strand to SEQ ID NO: 1502376
ucauucgagcggugagucu

SEQ ID NO: 1502378 - RNA, 19 nt, Artificial Sequence
  Description of Artificial Sequence: Synthetic oligonucleotide
  Sense strand starting at position 1952 of SEQ ID NO: 1244619
cccggagccuccuaguuua

SEQ ID NO: 1502379 - RNA, 19 nt, Artificial Sequence
  Description of Artificial Sequence: Synthetic oligonucleotide
  Antisense strand to SEQ ID NO: 1502378
uaaacuaggaggcuccggg

SEQ ID NO: 1502380 - RNA, 19 nt, Artificial Sequence
  Description of Artificial Sequence: Synthetic oligonucleotide
  Sense strand starting at position 1955 of SEQ ID NO: 1244619
ggagccuccuaguuuacaa

SEQ ID NO: 1502381 - RNA, 19 nt, Artificial Sequence
  Description of Artificial Sequence: Synthetic oligonucleotide
  Antisense strand to SEQ ID NO: 1502380
uuguaaacuaggaggcucc

SEQ ID NO: 1502382 - RNA, 19 nt, Artificial Sequence
  Description of Artificial Sequence: Synthetic oligonucleotide
  Sense strand starting at position 2004 of SEQ ID NO: 1244619
uucaaaucucgcgagagug

SEQ ID NO: 1502383 - RNA, 19 nt, Artificial Sequence
  Description of Artificial Sequence: Synthetic oligonucleotide
  Antisense strand to SEQ ID NO: 1502382
cacucucgcgagauuugaa

SEQ ID NO: 1502384 - RNA, 19 nt, Artificial Sequence
  Description of Artificial Sequence: Synthetic oligonucleotide
  Sense strand starting at position 2149 of SEQ ID NO: 1244619
gcgauucuaauucggugaa

SEQ ID NO: 1502385 - RNA, 19 nt, Artificial Sequence
  Description of Artificial Sequence: Synthetic oligonucleotide
  Antisense strand to SEQ ID NO: 1502384
uucaccgaauuagaaucgc

SEQ ID NO: 1502386 - RNA, 19 nt, Artificial Sequence
  Description of Artificial Sequence: Synthetic oligonucleotide
  Sense strand starting at position 2150 of SEQ ID NO: 1244619
cgauucuaauucggugaaa

SEQ ID NO: 1502387 - RNA, 19 nt, Artificial Sequence
  Description of Artificial Sequence: Synthetic oligonucleotide
  Antisense strand to SEQ ID NO: 1502386
uuucaccgaauuagaaucg

SEQ ID NO: 1502388 - RNA, 19 nt, Artificial Sequence
  Description of Artificial Sequence: Synthetic oligonucleotide
  Sense strand starting at position 2592 of SEQ ID NO: 1244619
cugggucuguugcagugaa

SEQ ID NO: 1502389 - RNA, 19 nt, Artificial Sequence
  Description of Artificial Sequence: Synthetic oligonucleotide
  Antisense strand to SEQ ID NO: 1502388
uucacugcaacagacccag

SEQ ID NO: 1502390 - RNA, 19 nt, Artificial Sequence
  Description of Artificial Sequence: Synthetic oligonucleotide
  Sense strand starting at position 2596 of SEQ ID NO: 1244619
gucuguugcagugaacugu

SEQ ID NO: 1502391 - RNA, 19 nt, Artificial Sequence
  Description of Artificial Sequence: Synthetic oligonucleotide
  Antisense strand to SEQ ID NO: 1502390
acaguucacugcaacagac

SEQ ID NO: 1502392 - RNA, 19 nt, Artificial Sequence
  Description of Artificial Sequence: Synthetic oligonucleotide
  Sense strand starting at position 2630 of SEQ ID NO: 1244619
gcgcgaucuccagcguauu

SEQ ID NO: 1502393 - RNA, 19 nt, Artificial Sequence
  Description of Artificial Sequence: Synthetic oligonucleotide
  Antisense strand to SEQ ID NO: 1502392
aauacgcuggagaucgcgc

SEQ ID NO: 1502394 - RNA, 19 nt, Artificial Sequence
  Description of Artificial Sequence: Synthetic oligonucleotide
  Sense strand starting at position 2736 of SEQ ID NO: 1244619
cugaguuucccagcgcauu

SEQ ID NO: 1502395 - RNA, 19 nt, Artificial Sequence
  Description of Artificial Sequence: Synthetic oligonucleotide
  Antisense strand to SEQ ID NO: 1502394
aaugcgcugggaaacucag

SEQ ID NO: 1502396 - RNA, 19 nt, Artificial Sequence
  Description of Artificial Sequence: Synthetic oligonucleotide
  Sense strand starting at position 2882 of SEQ ID NO: 1244619
cugcuugacugucaugaag

SEQ ID NO: 1502397 - RNA, 19 nt, Artificial Sequence
  Description of Artificial Sequence: Synthetic oligonucleotide
  Antisense strand to SEQ ID NO: 1502396
cuucaugacagucaagcag

SEQ ID NO: 1502398 - RNA, 19 nt, Artificial Sequence
  Description of Artificial Sequence: Synthetic oligonucleotide
  Sense strand starting at position 2884 of SEQ ID NO: 1244619
gcuugacugucaugaagcu

SEQ ID NO: 1502399 - RNA, 19 nt, Artificial Sequence
  Description of Artificial Sequence: Synthetic oligonucleotide
  Antisense strand to SEQ ID NO: 1502398
agcuucaugacagucaagc

SEQ ID NO: 1502400 - RNA, 19 nt, Artificial Sequence
  Description of Artificial Sequence: Synthetic oligonucleotide
  Sense strand starting at position 2999 of SEQ ID NO: 1244619
ccagcauccugauucuuga

SEQ ID NO: 1502401 - RNA, 19 nt, Artificial Sequence
  Description of Artificial Sequence: Synthetic oligonucleotide
  Antisense strand to SEQ ID NO: 1502400
ucaagaaucaggaugcugg

SEQ ID NO: 1502402 - RNA, 19 nt, Artificial Sequence
  Description of Artificial Sequence: Synthetic oligonucleotide
  Sense strand starting at position 3002 of SEQ ID NO: 1244619
gcauccugauucuugaauc

SEQ ID NO: 1502403 - RNA, 19 nt, Artificial Sequence
  Description of Artificial Sequence: Synthetic oligonucleotide
  Antisense strand to SEQ ID NO: 1502402
gauucaagaaucaggaugc

SEQ ID NO: 1502404 - RNA, 19 nt, Artificial Sequence
  Description of Artificial Sequence: Synthetic oligonucleotide
  Sense strand starting at position 3192 of SEQ ID NO: 1244619
gggccaagacucgagagua

SEQ ID NO: 1502405 - RNA, 19 nt, Artificial Sequence
  Description of Artificial Sequence: Synthetic oligonucleotide
  Antisense strand to SEQ ID NO: 1502404
uacucucgagucuuggccc

SEQ ID NO: 1502406 - RNA, 19 nt, Artificial Sequence
  Description of Artificial Sequence: Synthetic oligonucleotide
  Sense strand starting at position 3320 of SEQ ID NO: 1244619
ucuagaccuuggccugaua

SEQ ID NO: 1502407 - RNA, 19 nt, Artificial Sequence
  Description of Artificial Sequence: Synthetic oligonucleotide
  Antisense strand to SEQ ID NO: 1502406
uaucaggccaaggucuaga

SEQ ID NO: 1502408 - RNA, 19 nt, Artificial Sequence
  Description of Artificial Sequence: Synthetic oligonucleotide
  Sense strand starting at position 3322 of SEQ ID NO: 1244619
uagaccuuggccugauaug

SEQ ID NO: 1502409 - RNA, 19 nt, Artificial Sequence
  Description of Artificial Sequence: Synthetic oligonucleotide
  Antisense strand to SEQ ID NO: 1502408
cauaucaggccaaggucua

SEQ ID NO: 1502410 - RNA, 19 nt, Artificial Sequence
  Description of Artificial Sequence: Synthetic oligonucleotide
  Sense strand starting at position 3411 of SEQ ID NO: 1244619
gcaucuauaccgugcuguu

SEQ ID NO: 1502411 - RNA, 19 nt, Artificial Sequence
  Description of Artificial Sequence: Synthetic oligonucleotide
  Antisense strand to SEQ ID NO: 1502410
aacagcacgguauagaugc

SEQ ID NO: 1502412 - RNA, 19 nt, Artificial Sequence
  Description of Artificial Sequence: Synthetic oligonucleotide
  Sense strand starting at position 3538 of SEQ ID NO: 1244619
ggcucuuauccgcaugacu

SEQ ID NO: 1502413 - RNA, 19 nt, Artificial Sequence
  Description of Artificial Sequence: Synthetic oligonucleotide
  Antisense strand to SEQ ID NO: 1502412
agucaugcggauaagagcc

SEQ ID NO: 1502414 - RNA, 19 nt, Artificial Sequence
  Description of Artificial Sequence: Synthetic oligonucleotide
  Sense strand starting at position 3694 of SEQ ID NO: 1244619
gggcaauccugaucuugac

SEQ ID NO: 1502415 - RNA, 19 nt, Artificial Sequence
  Description of Artificial Sequence: Synthetic oligonucleotide
  Antisense strand to SEQ ID NO: 1502414
gucaagaucaggauugccc

SEQ ID NO: 1502416 - RNA, 19 nt, Artificial Sequence
  Description of Artificial Sequence: Synthetic oligonucleotide
  Sense strand starting at position 3784 of SEQ ID NO: 1244619
uucgaaucacccgggaaga

SEQ ID NO: 1502417 - RNA, 19 nt, Artificial Sequence
  Description of Artificial Sequence: Synthetic oligonucleotide
  Antisense strand to SEQ ID NO: 1502416
ucuucccgggugauucgaa

SEQ ID NO: 1502418 - RNA, 19 nt, Artificial Sequence
  Description of Artificial Sequence: Synthetic oligonucleotide
  Sense strand starting at position 118 of SEQ ID NO: 1244620
gcuugaccugugugggaga

SEQ ID NO: 1502419 - RNA, 19 nt, Artificial Sequence
  Description of Artificial Sequence: Synthetic oligonucleotide
  Antisense strand to SEQ ID NO: 1502418
ucucccacacaggucaagc

SEQ ID NO: 1502420 - RNA, 19 nt, Artificial Sequence
  Description of Artificial Sequence: Synthetic oligonucleotide
  Sense strand starting at position 121 of SEQ ID NO: 1244620
ugaccugugugggagacua

SEQ ID NO: 1502421 - RNA, 19 nt, Artificial Sequence
  Description of Artificial Sequence: Synthetic oligonucleotide
  Antisense strand to SEQ ID NO: 1502420
uagucucccacacagguca

SEQ ID NO: 1502422 - RNA, 19 nt, Artificial Sequence
  Description of Artificial Sequence: Synthetic oligonucleotide
  Sense strand starting at position 123 of SEQ ID NO: 1244620
accugugugggagacuaau

SEQ ID NO: 1502423 - RNA, 19 nt, Artificial Sequence
  Description of Artificial Sequence: Synthetic oligonucleotide
  Antisense strand to SEQ ID NO: 1502422
auuagucucccacacaggu

SEQ ID NO: 1502424 - RNA, 19 nt, Artificial Sequence
  Description of Artificial Sequence: Synthetic oligonucleotide
  Sense strand starting at position 156 of SEQ ID NO: 1244620
aacagauucuguggucaau

SEQ ID NO: 1502425 - RNA, 19 nt, Artificial Sequence
  Description of Artificial Sequence: Synthetic oligonucleotide
  Antisense strand to SEQ ID NO: 1502424
auugaccacagaaucuguu

SEQ ID NO: 1502426 - RNA, 19 nt, Artificial Sequence
  Description of Artificial Sequence: Synthetic oligonucleotide
  Sense strand starting at position 206 of SEQ ID NO: 1244620
ucaggaguucugggaagcu

SEQ ID NO: 1502427 - RNA, 19 nt, Artificial Sequence
  Description of Artificial Sequence: Synthetic oligonucleotide
  Antisense strand to SEQ ID NO: 1502426
agcuucccagaacuccuga

SEQ ID NO: 1502428 - RNA, 19 nt, Artificial Sequence
  Description of Artificial Sequence: Synthetic oligonucleotide
  Sense strand starting at position 363 of SEQ ID NO: 1244620
cucgccaguuccucugaga

SEQ ID NO: 1502429 - RNA, 19 nt, Artificial Sequence
  Description of Artificial Sequence: Synthetic oligonucleotide
  Antisense strand to SEQ ID NO: 1502428
ucucagaggaacuggcgag

SEQ ID NO: 1502430 - RNA, 19 nt, Artificial Sequence
  Description of Artificial Sequence: Synthetic oligonucleotide
  Sense strand starting at position 378 of SEQ ID NO: 1244620
gagagcagcucugagauca

SEQ ID NO: 1502431 - RNA, 19 nt, Artificial Sequence
  Description of Artificial Sequence: Synthetic oligonucleotide
  Antisense strand to SEQ ID NO: 1502430
ugaucucagagcugcucuc

SEQ ID NO: 1502432 - RNA, 19 nt, Artificial Sequence
  Description of Artificial Sequence: Synthetic oligonucleotide
  Sense strand starting at position 390 of SEQ ID NO: 1244620
gagaucaccugagugauua

SEQ ID NO: 1502433 - RNA, 19 nt, Artificial Sequence
  Description of Artificial Sequence: Synthetic oligonucleotide
  Antisense strand to SEQ ID NO: 1502432
uaaucacucaggugaucuc

SEQ ID NO: 1502434 - RNA, 19 nt, Artificial Sequence
  Description of Artificial Sequence: Synthetic oligonucleotide
  Sense strand starting at position 391 of SEQ ID NO: 1244620
agaucaccugagugauuau

SEQ ID NO: 1502435 - RNA, 19 nt, Artificial Sequence
  Description of Artificial Sequence: Synthetic oligonucleotide
  Antisense strand to SEQ ID NO: 1502434
auaaucacucaggugaucu

SEQ ID NO: 1502436 - RNA, 19 nt, Artificial Sequence
  Description of Artificial Sequence: Synthetic oligonucleotide
  Sense strand starting at position 400 of SEQ ID NO: 1244620
gagugauuaucugcacaac

SEQ ID NO: 1502437 - RNA, 19 nt, Artificial Sequence
  Description of Artificial Sequence: Synthetic oligonucleotide
  Antisense strand to SEQ ID NO: 1502436
guugugcagauaaucacuc

SEQ ID NO: 1502438 - RNA, 19 nt, Artificial Sequence
  Description of Artificial Sequence: Synthetic oligonucleotide
  Sense strand starting at position 401 of SEQ ID NO: 1244620
agugauuaucugcacaaca

SEQ ID NO: 1502439 - RNA, 19 nt, Artificial Sequence
  Description of Artificial Sequence: Synthetic oligonucleotide
  Antisense strand to SEQ ID NO: 1502438
uguugugcagauaaucacu

SEQ ID NO: 1502440 - RNA, 19 nt, Artificial Sequence
  Description of Artificial Sequence: Synthetic oligonucleotide
  Sense strand starting at position 495 of SEQ ID NO: 1244620
ucugcagucuucucuuuga

SEQ ID NO: 1502441 - RNA, 19 nt, Artificial Sequence
  Description of Artificial Sequence: Synthetic oligonucleotide
  Antisense strand to SEQ ID NO: 1502440
ucaaagagaagacugcaga

SEQ ID NO: 1502442 - RNA, 19 nt, Artificial Sequence
  Description of Artificial Sequence: Synthetic oligonucleotide
  Sense strand starting at position 498 of SEQ ID NO: 1244620
gcagucuucucuuugauga

SEQ ID NO: 1502443 - RNA, 19 nt, Artificial Sequence
  Description of Artificial Sequence: Synthetic oligonucleotide
  Antisense strand to SEQ ID NO: 1502442
ucaucaaagagaagacugc

SEQ ID NO: 1502444 - RNA, 19 nt, Artificial Sequence
  Description of Artificial Sequence: Synthetic oligonucleotide
  Sense strand starting at position 499 of SEQ ID NO: 1244620
cagucuucucuuugaugag

SEQ ID NO: 1502445 - RNA, 19 nt, Artificial Sequence
  Description of Artificial Sequence: Synthetic oligonucleotide
  Antisense strand to SEQ ID NO: 1502444
cucaucaaagagaagacug

SEQ ID NO: 1502446 - RNA, 19 nt, Artificial Sequence
  Description of Artificial Sequence: Synthetic oligonucleotide
  Sense strand starting at position 502 of SEQ ID NO: 1244620
ucuucucuuugaugagguu

SEQ ID NO: 1502447 - RNA, 19 nt, Artificial Sequence
  Description of Artificial Sequence: Synthetic oligonucleotide
  Antisense strand to SEQ ID NO: 1502446
aaccucaucaaagagaaga

SEQ ID NO: 1502448 - RNA, 19 nt, Artificial Sequence
  Description of Artificial Sequence: Synthetic oligonucleotide
  Sense strand starting at position 514 of SEQ ID NO: 1244620
ugagguucccaauaggugu

SEQ ID NO: 1502449 - RNA, 19 nt, Artificial Sequence
  Description of Artificial Sequence: Synthetic oligonucleotide
  Antisense strand to SEQ ID NO: 1502448
acaccuauugggaaccuca

SEQ ID NO: 1502450 - RNA, 19 nt, Artificial Sequence
  Description of Artificial Sequence: Synthetic oligonucleotide
  Sense strand starting at position 520 of SEQ ID NO: 1244620
ucccaauagguguauggga

SEQ ID NO: 1502451 - RNA, 19 nt, Artificial Sequence
  Description of Artificial Sequence: Synthetic oligonucleotide
  Antisense strand to SEQ ID NO: 1502450
ucccauacaccuauuggga

SEQ ID NO: 1502452 - RNA, 19 nt, Artificial Sequence
  Description of Artificial Sequence: Synthetic oligonucleotide
  Sense strand starting at position 525 of SEQ ID NO: 1244620
auagguguaugggacaauu

SEQ ID NO: 1502453 - RNA, 19 nt, Artificial Sequence
  Description of Artificial Sequence: Synthetic oligonucleotide
  Antisense strand to SEQ ID NO: 1502452
aauugucccauacaccuau

SEQ ID NO: 1502454 - RNA, 19 nt, Artificial Sequence
  Description of Artificial Sequence: Synthetic oligonucleotide
  Sense strand starting at position 772 of SEQ ID NO: 1244620
cgaaguguuuccuucucca

SEQ ID NO: 1502455 - RNA, 19 nt, Artificial Sequence
  Description of Artificial Sequence: Synthetic oligonucleotide
  Antisense strand to SEQ ID NO: 1502454
uggagaaggaaacacuucg

SEQ ID NO: 1502456 - RNA, 19 nt, Artificial Sequence
  Description of Artificial Sequence: Synthetic oligonucleotide
  Sense strand starting at position 775 of SEQ ID NO: 1244620
aguguuuccuucuccaaug

SEQ ID NO: 1502457 - RNA, 19 nt, Artificial Sequence
  Description of Artificial Sequence: Synthetic oligonucleotide
  Antisense strand to SEQ ID NO: 1502456
cauuggagaaggaaacacu

SEQ ID NO: 1502458 - RNA, 19 nt, Artificial Sequence
  Description of Artificial Sequence: Synthetic oligonucleotide
  Sense strand starting at position 1133 of SEQ ID NO: 1244620
gcaucuuauuguuccaucu

SEQ ID NO: 1502459 - RNA, 19 nt, Artificial Sequence
  Description of Artificial Sequence: Synthetic oligonucleotide
  Antisense strand to SEQ ID NO: 1502458
agauggaacaauaagaugc

SEQ ID NO: 1502460 - RNA, 19 nt, Artificial Sequence
  Description of Artificial Sequence: Synthetic oligonucleotide
  Sense strand starting at position 1445 of SEQ ID NO: 1244620
gcgacuucgccaagucgga

SEQ ID NO: 1502461 - RNA, 19 nt, Artificial Sequence
  Description of Artificial Sequence: Synthetic oligonucleotide
  Antisense strand to SEQ ID NO: 1502460
uccgacuuggcgaagucgc

SEQ ID NO: 1502462 - RNA, 19 nt, Artificial Sequence
  Description of Artificial Sequence: Synthetic oligonucleotide
  Sense strand starting at position 1491 of SEQ ID NO: 1244620
gggcgaugccucccucgua

SEQ ID NO: 1502463 - RNA, 19 nt, Artificial Sequence
  Description of Artificial Sequence: Synthetic oligonucleotide
  Antisense strand to SEQ ID NO: 1502462
uacgagggaggcaucgccc

SEQ ID NO: 1502464 - RNA, 19 nt, Artificial Sequence
  Description of Artificial Sequence: Synthetic oligonucleotide
  Sense strand starting at position 1492 of SEQ ID NO: 1244620
ggcgaugccucccucguaa

SEQ ID NO: 1502465 - RNA, 19 nt, Artificial Sequence
  Description of Artificial Sequence: Synthetic oligonucleotide
  Antisense strand to SEQ ID NO: 1502464
uuacgagggaggcaucgcc

SEQ ID NO: 1502466 - RNA, 19 nt, Artificial Sequence
  Description of Artificial Sequence: Synthetic oligonucleotide
  Sense strand starting at position 1545 of SEQ ID NO: 1244620
cguuguugccauucguaca

SEQ ID NO: 1502467 - RNA, 19 nt, Artificial Sequence
  Description of Artificial Sequence: Synthetic oligonucleotide
  Antisense strand to SEQ ID NO: 1502466
uguacgaauggcaacaacg

SEQ ID NO: 1502468 - RNA, 19 nt, Artificial Sequence
  Description of Artificial Sequence: Synthetic oligonucleotide
  Sense strand starting at position 2683 of SEQ ID NO: 1244620
gccuuugcagauuaaggga

SEQ ID NO: 1502469 - RNA, 19 nt, Artificial Sequence
  Description of Artificial Sequence: Synthetic oligonucleotide
  Antisense strand to SEQ ID NO: 1502468
ucccuuaaucugcaaaggc

SEQ ID NO: 1502470 - RNA, 19 nt, Artificial Sequence
  Description of Artificial Sequence: Synthetic oligonucleotide
  Sense strand starting at position 2721 of SEQ ID NO: 1244620
agcgcucugucacugauga

SEQ ID NO: 1502471 - RNA, 19 nt, Artificial Sequence
  Description of Artificial Sequence: Synthetic oligonucleotide
  Antisense strand to SEQ ID NO: 1502470
ucaucagugacagagcgcu

SEQ ID NO: 1502472 - RNA, 19 nt, Artificial Sequence
  Description of Artificial Sequence: Synthetic oligonucleotide
  Sense strand starting at position 2722 of SEQ ID NO: 1244620
gcgcucugucacugaugau

SEQ ID NO: 1502473 - RNA, 19 nt, Artificial Sequence
  Description of Artificial Sequence: Synthetic oligonucleotide
  Antisense strand to SEQ ID NO: 1502472
aucaucagugacagagcgc

SEQ ID NO: 1502474 - RNA, 19 nt, Artificial Sequence
  Description of Artificial Sequence: Synthetic oligonucleotide
  Sense strand starting at position 2723 of SEQ ID NO: 1244620
cgcucugucacugaugaug

SEQ ID NO: 1502475 - RNA, 19 nt, Artificial Sequence
  Description of Artificial Sequence: Synthetic oligonucleotide
  Antisense strand to SEQ ID NO: 1502474
caucaucagugacagagcg

SEQ ID NO: 1502476 - RNA, 19 nt, Artificial Sequence
  Description of Artificial Sequence: Synthetic oligonucleotide
  Sense strand starting at position 2725 of SEQ ID NO: 1244620
cucugucacugaugaugga

SEQ ID NO: 1502477 - RNA, 19 nt, Artificial Sequence
  Description of Artificial Sequence: Synthetic oligonucleotide
  Antisense strand to SEQ ID NO: 1502476
uccaucaucagugacagag

SEQ ID NO: 1502478 - RNA, 19 nt, Artificial Sequence
  Description of Artificial Sequence: Synthetic oligonucleotide
  Sense strand starting at position 2917 of SEQ ID NO: 1244620
ggacccucauccugaaaca

SEQ ID NO: 1502479 - RNA, 19 nt, Artificial Sequence
  Description of Artificial Sequence: Synthetic oligonucleotide
  Antisense strand to SEQ ID NO: 1502478
uguuucaggaugagggucc

SEQ ID NO: 1502480 - RNA, 19 nt, Artificial Sequence
  Description of Artificial Sequence: Synthetic oligonucleotide
  Sense strand starting at position 3099 of SEQ ID NO: 1244620
acggcaaguuucccuagaa

SEQ ID NO: 1502481 - RNA, 19 nt, Artificial Sequence
  Description of Artificial Sequence: Synthetic oligonucleotide
  Antisense strand to SEQ ID NO: 1502480
uucuagggaaacuugccgu

SEQ ID NO: 1502482 - RNA, 19 nt, Artificial Sequence
  Description of Artificial Sequence: Synthetic oligonucleotide
  Sense strand starting at position 3100 of SEQ ID NO: 1244620
cggcaaguuucccuagaag

SEQ ID NO: 1502483 - RNA, 19 nt, Artificial Sequence
  Description of Artificial Sequence: Synthetic oligonucleotide
  Antisense strand to SEQ ID NO: 1502482
cuucuagggaaacuugccg

SEQ ID NO: 1502484 - RNA, 19 nt, Artificial Sequence
  Description of Artificial Sequence: Synthetic oligonucleotide
  Sense strand starting at position 3716 of SEQ ID NO: 1244620
uuugcugggucuccaauua

SEQ ID NO: 1502485 - RNA, 19 nt, Artificial Sequence
  Description of Artificial Sequence: Synthetic oligonucleotide
  Antisense strand to SEQ ID NO: 1502484
uaauuggagacccagcaaa

SEQ ID NO: 1502486 - RNA, 19 nt, Artificial Sequence
  Description of Artificial Sequence: Synthetic oligonucleotide
  Sense strand starting at position 3848 of SEQ ID NO: 1244620
caguaugacuagucgaaau

SEQ ID NO: 1502487 - RNA, 19 nt, Artificial Sequence
  Description of Artificial Sequence: Synthetic oligonucleotide
  Antisense strand to SEQ ID NO: 1502486
auuucgacuagucauacug

SEQ ID NO: 1502488 - RNA, 19 nt, Artificial Sequence
  Description of Artificial Sequence: Synthetic oligonucleotide
  Sense strand starting at position 3850 of SEQ ID NO: 1244620
guaugacuagucgaaaugu

SEQ ID NO: 1502489 - RNA, 19 nt, Artificial Sequence
  Description of Artificial Sequence: Synthetic oligonucleotide
  Antisense strand to SEQ ID NO: 1502488
acauuucgacuagucauac

SEQ ID NO: 1502490 - RNA, 19 nt, Artificial Sequence
  Description of Artificial Sequence: Synthetic oligonucleotide
  Sense strand starting at position 3858 of SEQ ID NO: 1244620
agucgaaauguuuaaauga

SEQ ID NO: 1502491 - RNA, 19 nt, Artificial Sequence
  Description of Artificial Sequence: Synthetic oligonucleotide
  Antisense strand to SEQ ID NO: 1502490
ucauuuaaacauuucgacu

SEQ ID NO: 1502492 - RNA, 19 nt, Artificial Sequence
  Description of Artificial Sequence: Synthetic oligonucleotide
  Sense strand starting at position 3921 of SEQ ID NO: 1244620
cagugcugucucugugauc

SEQ ID NO: 1502493 - RNA, 19 nt, Artificial Sequence
  Description of Artificial Sequence: Synthetic oligonucleotide
  Antisense strand to SEQ ID NO: 1502492
gaucacagagacagcacug

SEQ ID NO: 1502494 - RNA, 19 nt, Artificial Sequence
  Description of Artificial Sequence: Synthetic oligonucleotide
  Sense strand starting at position 3922 of SEQ ID NO: 1244620
agugcugucucugugauca

SEQ ID NO: 1502495 - RNA, 19 nt, Artificial Sequence
  Description of Artificial Sequence: Synthetic oligonucleotide
  Antisense strand to SEQ ID NO: 1502494
ugaucacagagacagcacu

SEQ ID NO: 1502496 - RNA, 19 nt, Artificial Sequence
  Description of Artificial Sequence: Synthetic oligonucleotide
  Sense strand starting at position 3926 of SEQ ID NO: 1244620
cugucucugugaucacagu

SEQ ID NO: 1502497 - RNA, 19 nt, Artificial Sequence
  Description of Artificial Sequence: Synthetic oligonucleotide
  Antisense strand to SEQ ID NO: 1502496
acugugaucacagagacag

SEQ ID NO: 1502498 - RNA, 19 nt, Artificial Sequence
  Description of Artificial Sequence: Synthetic oligonucleotide
  Sense strand starting at position 68 of SEQ ID NO: 1244621
agaguuccauccuucuauc

SEQ ID NO: 1502499 - RNA, 19 nt, Artificial Sequence
  Description of Artificial Sequence: Synthetic oligonucleotide
  Antisense strand to SEQ ID NO: 1502498
gauagaaggauggaacucu

SEQ ID NO: 1502500 - RNA, 19 nt, Artificial Sequence
  Description of Artificial Sequence: Synthetic oligonucleotide
  Sense strand starting at position 258 of SEQ ID NO: 1244621
auugaugaucaaugguuua

SEQ ID NO: 1502501 - RNA, 19 nt, Artificial Sequence
  Description of Artificial Sequence: Synthetic oligonucleotide
  Antisense strand to SEQ ID NO: 1502500
uaaaccauugaucaucaau

SEQ ID NO: 1502502 - RNA, 19 nt, Artificial Sequence
  Description of Artificial Sequence: Synthetic oligonucleotide
  Sense strand starting at position 261 of SEQ ID NO: 1244621
gaugaucaaugguuuaagu

SEQ ID NO: 1502503 - RNA, 19 nt, Artificial Sequence
  Description of Artificial Sequence: Synthetic oligonucleotide
  Antisense strand to SEQ ID NO: 1502502
acuuaaaccauugaucauc

SEQ ID NO: 1502504 - RNA, 19 nt, Artificial Sequence
  Description of Artificial Sequence: Synthetic oligonucleotide
  Sense strand starting at position 263 of SEQ ID NO: 1244621
ugaucaaugguuuaaguug

SEQ ID NO: 1502505 - RNA, 19 nt, Artificial Sequence
  Description of Artificial Sequence: Synthetic oligonucleotide
  Antisense strand to SEQ ID NO: 1502504
caacuuaaaccauugauca

SEQ ID NO: 1502506 - RNA, 19 nt, Artificial Sequence
  Description of Artificial Sequence: Synthetic oligonucleotide
  Sense strand starting at position 279 of SEQ ID NO: 1244621
uuguuuggauaacugagaa

SEQ ID NO: 1502507 - RNA, 19 nt, Artificial Sequence
  Description of Artificial Sequence: Synthetic oligonucleotide
  Antisense strand to SEQ ID NO: 1502506
uucucaguuauccaaacaa

SEQ ID NO: 1502508 - RNA, 19 nt, Artificial Sequence
  Description of Artificial Sequence: Synthetic oligonucleotide
  Sense strand starting at position 395 of SEQ ID NO: 1244621
gcagauccaugucuagaga

SEQ ID NO: 1502509 - RNA, 19 nt, Artificial Sequence
  Description of Artificial Sequence: Synthetic oligonucleotide
  Antisense strand to SEQ ID NO: 1502508
ucucuagacauggaucugc

SEQ ID NO: 1502510 - RNA, 19 nt, Artificial Sequence
  Description of Artificial Sequence: Synthetic oligonucleotide
  Sense strand starting at position 419 of SEQ ID NO: 1244621
aagugagucaccugaggug

SEQ ID NO: 1502511 - RNA, 19 nt, Artificial Sequence
  Description of Artificial Sequence: Synthetic oligonucleotide
  Antisense strand to SEQ ID NO: 1502510
caccucaggugacucacuu

SEQ ID NO: 1502512 - RNA, 19 nt, Artificial Sequence
  Description of Artificial Sequence: Synthetic oligonucleotide
  Sense strand starting at position 456 of SEQ ID NO: 1244621
gagggaguuaaccgagaca

SEQ ID NO: 1502513 - RNA, 19 nt, Artificial Sequence
  Description of Artificial Sequence: Synthetic oligonucleotide
  Antisense strand to SEQ ID NO: 1502512
ugucucgguuaacucccuc

SEQ ID NO: 1502514 - RNA, 19 nt, Artificial Sequence
  Description of Artificial Sequence: Synthetic oligonucleotide
  Sense strand starting at position 474 of SEQ ID NO: 1244621
agagaagauuccguagaug

SEQ ID NO: 1502515 - RNA, 19 nt, Artificial Sequence
  Description of Artificial Sequence: Synthetic oligonucleotide
  Antisense strand to SEQ ID NO: 1502514
caucuacggaaucuucucu

SEQ ID NO: 1502516 - RNA, 19 nt, Artificial Sequence
  Description of Artificial Sequence: Synthetic oligonucleotide
  Sense strand starting at position 477 of SEQ ID NO: 1244621
gaagauuccguagauggua

SEQ ID NO: 1502517 - RNA, 19 nt, Artificial Sequence
  Description of Artificial Sequence: Synthetic oligonucleotide
  Antisense strand to SEQ ID NO: 1502516
uaccaucuacggaaucuuc

SEQ ID NO: 1502518 - RNA, 19 nt, Artificial Sequence
  Description of Artificial Sequence: Synthetic oligonucleotide
  Sense strand starting at position 490 of SEQ ID NO: 1244621
augguagaacauuguuaga

SEQ ID NO: 1502519 - RNA, 19 nt, Artificial Sequence
  Description of Artificial Sequence: Synthetic oligonucleotide
  Antisense strand to SEQ ID NO: 1502518
ucuaacaauguucuaccau

SEQ ID NO: 1502520 - RNA, 19 nt, Artificial Sequence
  Description of Artificial Sequence: Synthetic oligonucleotide
  Sense strand starting at position 492 of SEQ ID NO: 1244621
gguagaacauuguuagaau

SEQ ID NO: 1502521 - RNA, 19 nt, Artificial Sequence
  Description of Artificial Sequence: Synthetic oligonucleotide
  Antisense strand to SEQ ID NO: 1502520
auucuaacaauguucuacc

SEQ ID NO: 1502522 - RNA, 19 nt, Artificial Sequence
  Description of Artificial Sequence: Synthetic oligonucleotide
  Sense strand starting at position 501 of SEQ ID NO: 1244621
uuguuagaaucagcugaua

SEQ ID NO: 1502523 - RNA, 19 nt, Artificial Sequence
  Description of Artificial Sequence: Synthetic oligonucleotide
  Antisense strand to SEQ ID NO: 1502522
uaucagcugauucuaacaa

SEQ ID NO: 1502524 - RNA, 19 nt, Artificial Sequence
  Description of Artificial Sequence: Synthetic oligonucleotide
  Sense strand starting at position 503 of SEQ ID NO: 1244621
guuagaaucagcugauaga

SEQ ID NO: 1502525 - RNA, 19 nt, Artificial Sequence
  Description of Artificial Sequence: Synthetic oligonucleotide
  Antisense strand to SEQ ID NO: 1502524
ucuaucagcugauucuaac

SEQ ID NO: 1502526 - RNA, 19 nt, Artificial Sequence
  Description of Artificial Sequence: Synthetic oligonucleotide
  Sense strand starting at position 514 of SEQ ID NO: 1244621
cugauagauugggugagua

SEQ ID NO: 1502527 - RNA, 19 nt, Artificial Sequence
  Description of Artificial Sequence: Synthetic oligonucleotide
  Antisense strand to SEQ ID NO: 1502526
uacucacccaaucuaucag

SEQ ID NO: 1502528 - RNA, 19 nt, Artificial Sequence
  Description of Artificial Sequence: Synthetic oligonucleotide
  Sense strand starting at position 530 of SEQ ID NO: 1244621
guagguauuagccaaguua

SEQ ID NO: 1502529 - RNA, 19 nt, Artificial Sequence
  Description of Artificial Sequence: Synthetic oligonucleotide
  Antisense strand to SEQ ID NO: 1502528
uaacuuggcuaauaccuac

SEQ ID NO: 1502530 - RNA, 19 nt, Artificial Sequence
  Description of Artificial Sequence: Synthetic oligonucleotide
  Sense strand starting at position 992 of SEQ ID NO: 1244621
ugguaugauucuguuugga

SEQ ID NO: 1502531 - RNA, 19 nt, Artificial Sequence
  Description of Artificial Sequence: Synthetic oligonucleotide
  Antisense strand to SEQ ID NO: 1502530
uccaaacagaaucauacca

SEQ ID NO: 1502532 - RNA, 19 nt, Artificial Sequence
  Description of Artificial Sequence: Synthetic oligonucleotide
  Sense strand starting at position 994 of SEQ ID NO: 1244621
guaugauucuguuuggaug

SEQ ID NO: 1502533 - RNA, 19 nt, Artificial Sequence
  Description of Artificial Sequence: Synthetic oligonucleotide
  Antisense strand to SEQ ID NO: 1502532
cauccaaacagaaucauac

SEQ ID NO: 1502534 - RNA, 19 nt, Artificial Sequence
  Description of Artificial Sequence: Synthetic oligonucleotide
  Sense strand starting at position 1055 of SEQ ID NO: 1244621
acucuaguuugagcacaaa

SEQ ID NO: 1502535 - RNA, 19 nt, Artificial Sequence
  Description of Artificial Sequence: Synthetic oligonucleotide
  Antisense strand to SEQ ID NO: 1502534
uuugugcucaaacuagagu

SEQ ID NO: 1502536 - RNA, 19 nt, Artificial Sequence
  Description of Artificial Sequence: Synthetic oligonucleotide
  Sense strand starting at position 1058 of SEQ ID NO: 1244621
cuaguuugagcacaaacga

SEQ ID NO: 1502537 - RNA, 19 nt, Artificial Sequence
  Description of Artificial Sequence: Synthetic oligonucleotide
  Antisense strand to SEQ ID NO: 1502536
ucguuugugcucaaacuag

SEQ ID NO: 1502538 - RNA, 19 nt, Artificial Sequence
  Description of Artificial Sequence: Synthetic oligonucleotide
  Sense strand starting at position 1067 of SEQ ID NO: 1244621
gcacaaacgaguugaagaa

SEQ ID NO: 1502539 - RNA, 19 nt, Artificial Sequence
  Description of Artificial Sequence: Synthetic oligonucleotide
  Antisense strand to SEQ ID NO: 1502538
uucuucaacucguuugugc

SEQ ID NO: 1502540 - RNA, 19 nt, Artificial Sequence
  Description of Artificial Sequence: Synthetic oligonucleotide
  Sense strand starting at position 1151 of SEQ ID NO: 1244621
aaaguauuccuaggugaag

SEQ ID NO: 1502541 - RNA, 19 nt, Artificial Sequence
  Description of Artificial Sequence: Synthetic oligonucleotide
  Antisense strand to SEQ ID NO: 1502540
cuucaccuaggaauacuuu

SEQ ID NO: 1502542 - RNA, 19 nt, Artificial Sequence
  Description of Artificial Sequence: Synthetic oligonucleotide
  Sense strand starting at position 1152 of SEQ ID NO: 1244621
aaguauuccuaggugaagu

SEQ ID NO: 1502543 - RNA, 19 nt, Artificial Sequence
  Description of Artificial Sequence: Synthetic oligonucleotide
  Antisense strand to SEQ ID NO: 1502542
acuucaccuaggaauacuu

SEQ ID NO: 1502544 - RNA, 19 nt, Artificial Sequence
  Description of Artificial Sequence: Synthetic oligonucleotide
  Sense strand starting at position 1334 of SEQ ID NO: 1244621
aggcucagagcuuaagacu

SEQ ID NO: 1502545 - RNA, 19 nt, Artificial Sequence
  Description of Artificial Sequence: Synthetic oligonucleotide
  Antisense strand to SEQ ID NO: 1502544
agucuuaagcucugagccu

SEQ ID NO: 1502546 - RNA, 19 nt, Artificial Sequence
  Description of Artificial Sequence: Synthetic oligonucleotide
  Sense strand starting at position 1382 of SEQ ID NO: 1244621
aagaaauagcacuguuaga

SEQ ID NO: 1502547 - RNA, 19 nt, Artificial Sequence
  Description of Artificial Sequence: Synthetic oligonucleotide
  Antisense strand to SEQ ID NO: 1502546
ucuaacagugcuauuucuu

SEQ ID NO: 1502548 - RNA, 19 nt, Artificial Sequence
  Description of Artificial Sequence: Synthetic oligonucleotide
  Sense strand starting at position 1421 of SEQ ID NO: 1244621
cuuccucuuuagguuuaga

SEQ ID NO: 1502549 - RNA, 19 nt, Artificial Sequence
  Description of Artificial Sequence: Synthetic oligonucleotide
  Antisense strand to SEQ ID NO: 1502548
ucuaaaccuaaagaggaag

SEQ ID NO: 1502550 - RNA, 19 nt, Artificial Sequence
  Description of Artificial Sequence: Synthetic oligonucleotide
  Sense strand starting at position 1432 of SEQ ID NO: 1244621
gguuuagagugacccuaaa

SEQ ID NO: 1502551 - RNA, 19 nt, Artificial Sequence
  Description of Artificial Sequence: Synthetic oligonucleotide
  Antisense strand to SEQ ID NO: 1502550
uuuagggucacucuaaacc

SEQ ID NO: 1502552 - RNA, 19 nt, Artificial Sequence
  Description of Artificial Sequence: Synthetic oligonucleotide
  Sense strand starting at position 1554 of SEQ ID NO: 1244621
agcccaucuccggaacaga

SEQ ID NO: 1502553 - RNA, 19 nt, Artificial Sequence
  Description of Artificial Sequence: Synthetic oligonucleotide
  Antisense strand to SEQ ID NO: 1502552
ucuguuccggagaugggcu

SEQ ID NO: 1502554 - RNA, 19 nt, Artificial Sequence
  Description of Artificial Sequence: Synthetic oligonucleotide
  Sense strand starting at position 2104 of SEQ ID NO: 1244621
ggugaucuugcugaggaug

SEQ ID NO: 1502555 - RNA, 19 nt, Artificial Sequence
  Description of Artificial Sequence: Synthetic oligonucleotide
  Antisense strand to SEQ ID NO: 1502554
cauccucagcaagaucacc

SEQ ID NO: 1502556 - RNA, 19 nt, Artificial Sequence
  Description of Artificial Sequence: Synthetic oligonucleotide
  Sense strand starting at position 2377 of SEQ ID NO: 1244621
ucgggaagucuaugacacu

SEQ ID NO: 1502557 - RNA, 19 nt, Artificial Sequence
  Description of Artificial Sequence: Synthetic oligonucleotide
  Antisense strand to SEQ ID NO: 1502556
agugucauagacuucccga

SEQ ID NO: 1502558 - RNA, 19 nt, Artificial Sequence
  Description of Artificial Sequence: Synthetic oligonucleotide
  Sense strand starting at position 2479 of SEQ ID NO: 1244621
gcaccacuggcauaaagaa

SEQ ID NO: 1502559 - RNA, 19 nt, Artificial Sequence
  Description of Artificial Sequence: Synthetic oligonucleotide
  Antisense strand to SEQ ID NO: 1502558
uucuuuaugccaguggugc

SEQ ID NO: 1502560 - RNA, 19 nt, Artificial Sequence
  Description of Artificial Sequence: Synthetic oligonucleotide
  Sense strand starting at position 2504 of SEQ ID NO: 1244621
gaguaagaccagugaagca

SEQ ID NO: 1502561 - RNA, 19 nt, Artificial Sequence
  Description of Artificial Sequence: Synthetic oligonucleotide
  Antisense strand to SEQ ID NO: 1502560
ugcuucacuggucuuacuc

SEQ ID NO: 1502562 - RNA, 19 nt, Artificial Sequence
  Description of Artificial Sequence: Synthetic oligonucleotide
  Sense strand starting at position 2679 of SEQ ID NO: 1244621
agcaguuaucucuggagag

SEQ ID NO: 1502563 - RNA, 19 nt, Artificial Sequence
  Description of Artificial Sequence: Synthetic oligonucleotide
  Antisense strand to SEQ ID NO: 1502562
cucuccagagauaacugcu

SEQ ID NO: 1502564 - RNA, 19 nt, Artificial Sequence
  Description of Artificial Sequence: Synthetic oligonucleotide
  Sense strand starting at position 2691 of SEQ ID NO: 1244621
uggagagacuuucuaaguu

SEQ ID NO: 1502565 - RNA, 19 nt, Artificial Sequence
  Description of Artificial Sequence: Synthetic oligonucleotide
  Antisense strand to SEQ ID NO: 1502564
aacuuagaaagucucucca

SEQ ID NO: 1502566 - RNA, 19 nt, Artificial Sequence
  Description of Artificial Sequence: Synthetic oligonucleotide
  Sense strand starting at position 2716 of SEQ ID NO: 1244621
uucugugauguuugcauuu

SEQ ID NO: 1502567 - RNA, 19 nt, Artificial Sequence
  Description of Artificial Sequence: Synthetic oligonucleotide
  Antisense strand to SEQ ID NO: 1502566
aaaugcaaacaucacagaa

SEQ ID NO: 1502568 - RNA, 19 nt, Artificial Sequence
  Description of Artificial Sequence: Synthetic oligonucleotide
  Sense strand starting at position 2771 of SEQ ID NO: 1244621
aaagucauccacuggguau

SEQ ID NO: 1502569 - RNA, 19 nt, Artificial Sequence
  Description of Artificial Sequence: Synthetic oligonucleotide
  Antisense strand to SEQ ID NO: 1502568
auacccaguggaugacuuu

SEQ ID NO: 1502570 - RNA, 19 nt, Artificial Sequence
  Description of Artificial Sequence: Synthetic oligonucleotide
  Sense strand starting at position 3349 of SEQ ID NO: 1244621
uggacagagauccgugagu

SEQ ID NO: 1502571 - RNA, 19 nt, Artificial Sequence
  Description of Artificial Sequence: Synthetic oligonucleotide
  Antisense strand to SEQ ID NO: 1502570
acucacggaucucugucca

SEQ ID NO: 1502572 - RNA, 19 nt, Artificial Sequence
  Description of Artificial Sequence: Synthetic oligonucleotide
  Sense strand starting at position 3415 of SEQ ID NO: 1244621
gugguccuagauuagcaaa

SEQ ID NO: 1502573 - RNA, 19 nt, Artificial Sequence
  Description of Artificial Sequence: Synthetic oligonucleotide
  Antisense strand to SEQ ID NO: 1502572
uuugcuaaucuaggaccac

SEQ ID NO: 1502574 - RNA, 19 nt, Artificial Sequence
  Description of Artificial Sequence: Synthetic oligonucleotide
  Sense strand starting at position 3492 of SEQ ID NO: 1244621
guauaaauauguccaguac

SEQ ID NO: 1502575 - RNA, 19 nt, Artificial Sequence
  Description of Artificial Sequence: Synthetic oligonucleotide
  Antisense strand to SEQ ID NO: 1502574
guacuggacauauuuauac

SEQ ID NO: 1502576 - RNA, 19 nt, Artificial Sequence
  Description of Artificial Sequence: Synthetic oligonucleotide
  Sense strand starting at position 3913 of SEQ ID NO: 1244621
agucuaaucccagagggcu

SEQ ID NO: 1502577 - RNA, 19 nt, Artificial Sequence
  Description of Artificial Sequence: Synthetic oligonucleotide
  Antisense strand to SEQ ID NO: 1502576
agcccucugggauuagacu

SEQ ID NO: 1502578 - RNA, 19 nt, Artificial Sequence
  Description of Artificial Sequence: Synthetic oligonucleotide
  Sense strand starting at position 102 of SEQ ID NO: 1244622
gaacauuuaugcuuccguu

SEQ ID NO: 1502579 - RNA, 19 nt, Artificial Sequence
  Description of Artificial Sequence: Synthetic oligonucleotide
  Antisense strand to SEQ ID NO: 1502578
aacggaagcauaaauguuc

SEQ ID NO: 1502580 - RNA, 19 nt, Artificial Sequence
  Description of Artificial Sequence: Synthetic oligonucleotide
  Sense strand starting at position 186 of SEQ ID NO: 1244622
auuccugauugggcagaga

SEQ ID NO: 1502581 - RNA, 19 nt, Artificial Sequence
  Description of Artificial Sequence: Synthetic oligonucleotide
  Antisense strand to SEQ ID NO: 1502580
ucucugcccaaucaggaau

SEQ ID NO: 1502582 - RNA, 19 nt, Artificial Sequence
  Description of Artificial Sequence: Synthetic oligonucleotide
  Sense strand starting at position 326 of SEQ ID NO: 1244622
cuucgugaauuuguauuau

SEQ ID NO: 1502583 - RNA, 19 nt, Artificial Sequence
  Description of Artificial Sequence: Synthetic oligonucleotide
  Antisense strand to SEQ ID NO: 1502582
auaauacaaauucacgaag

SEQ ID NO: 1502584 - RNA, 19 nt, Artificial Sequence
  Description of Artificial Sequence: Synthetic oligonucleotide
  Sense strand starting at position 345 of SEQ ID NO: 1244622
gucagaucacuuggcauug

SEQ ID NO: 1502585 - RNA, 19 nt, Artificial Sequence
  Description of Artificial Sequence: Synthetic oligonucleotide
  Antisense strand to SEQ ID NO: 1502584
caaugccaagugaucugac

SEQ ID NO: 1502586 - RNA, 19 nt, Artificial Sequence
  Description of Artificial Sequence: Synthetic oligonucleotide
  Sense strand starting at position 599 of SEQ ID NO: 1244622
acacguugauguccaaaga

SEQ ID NO: 1502587 - RNA, 19 nt, Artificial Sequence
  Description of Artificial Sequence: Synthetic oligonucleotide
  Antisense strand to SEQ ID NO: 1502586
ucuuuggacaucaacgugu

SEQ ID NO: 1502588 - RNA, 19 nt, Artificial Sequence
  Description of Artificial Sequence: Synthetic oligonucleotide
  Sense strand starting at position 600 of SEQ ID NO: 1244622
cacguugauguccaaagau

SEQ ID NO: 1502589 - RNA, 19 nt, Artificial Sequence
  Description of Artificial Sequence: Synthetic oligonucleotide
  Antisense strand to SEQ ID NO: 1502588
aucuuuggacaucaacgug

SEQ ID NO: 1502590 - RNA, 19 nt, Artificial Sequence
  Description of Artificial Sequence: Synthetic oligonucleotide
  Sense strand starting at position 752 of SEQ ID NO: 1244622
ccuauaaauuaggugcuaa

SEQ ID NO: 1502591 - RNA, 19 nt, Artificial Sequence
  Description of Artificial Sequence: Synthetic oligonucleotide
  Antisense strand to SEQ ID NO: 1502590
uuagcaccuaauuuauagg

SEQ ID NO: 1502592 - RNA, 19 nt, Artificial Sequence
  Description of Artificial Sequence: Synthetic oligonucleotide
  Sense strand starting at position 764 of SEQ ID NO: 1244622
gugcuaauuuauguaucuu

SEQ ID NO: 1502593 - RNA, 19 nt, Artificial Sequence
  Description of Artificial Sequence: Synthetic oligonucleotide
  Antisense strand to SEQ ID NO: 1502592
aagauacauaaauuagcac

SEQ ID NO: 1502594 - RNA, 19 nt, Artificial Sequence
  Description of Artificial Sequence: Synthetic oligonucleotide
  Sense strand starting at position 1046 of SEQ ID NO: 1244622
aggacuauuccucacaugu

SEQ ID NO: 1502595 - RNA, 19 nt, Artificial Sequence
  Description of Artificial Sequence: Synthetic oligonucleotide
  Antisense strand to SEQ ID NO: 1502594
acaugugaggaauaguccu

SEQ ID NO: 1502596 - RNA, 19 nt, Artificial Sequence
  Description of Artificial Sequence: Synthetic oligonucleotide
  Sense strand starting at position 1170 of SEQ ID NO: 1244622
guagaauagaucugugcua

SEQ ID NO: 1502597 - RNA, 19 nt, Artificial Sequence
  Description of Artificial Sequence: Synthetic oligonucleotide
  Antisense strand to SEQ ID NO: 1502596
uagcacagaucuauucuac

SEQ ID NO: 1502598 - RNA, 19 nt, Artificial Sequence
  Description of Artificial Sequence: Synthetic oligonucleotide
  Sense strand starting at position 1171 of SEQ ID NO: 1244622
uagaauagaucugugcuau

SEQ ID NO: 1502599 - RNA, 19 nt, Artificial Sequence
  Description of Artificial Sequence: Synthetic oligonucleotide
  Antisense strand to SEQ ID NO: 1502598
auagcacagaucuauucua

SEQ ID NO: 1502600 - RNA, 19 nt, Artificial Sequence
  Description of Artificial Sequence: Synthetic oligonucleotide
  Sense strand starting at position 1172 of SEQ ID NO: 1244622
agaauagaucugugcuauu

SEQ ID NO: 1502601 - RNA, 19 nt, Artificial Sequence
  Description of Artificial Sequence: Synthetic oligonucleotide
  Antisense strand to SEQ ID NO: 1502600
aauagcacagaucuauucu

SEQ ID NO: 1502602 - RNA, 19 nt, Artificial Sequence
  Description of Artificial Sequence: Synthetic oligonucleotide
  Sense strand starting at position 1183 of SEQ ID NO: 1244622
gugcuauuucuaggcacua

SEQ ID NO: 1502603 - RNA, 19 nt, Artificial Sequence
  Description of Artificial Sequence: Synthetic oligonucleotide
  Antisense strand to SEQ ID NO: 1502602
uagugccuagaaauagcac

SEQ ID NO: 1502604 - RNA, 19 nt, Artificial Sequence
  Description of Artificial Sequence: Synthetic oligonucleotide
  Sense strand starting at position 1184 of SEQ ID NO: 1244622
ugcuauuucuaggcacuau

SEQ ID NO: 1502605 - RNA, 19 nt, Artificial Sequence
  Description of Artificial Sequence: Synthetic oligonucleotide
  Antisense strand to SEQ ID NO: 1502604
auagugccuagaaauagca

SEQ ID NO: 1502606 - RNA, 19 nt, Artificial Sequence
  Description of Artificial Sequence: Synthetic oligonucleotide
  Sense strand starting at position 1205 of SEQ ID NO: 1244622
aaauuugcgucuuuguaca

SEQ ID NO: 1502607 - RNA, 19 nt, Artificial Sequence
  Description of Artificial Sequence: Synthetic oligonucleotide
  Antisense strand to SEQ ID NO: 1502606
uguacaaagacgcaaauuu

SEQ ID NO: 1502608 - RNA, 19 nt, Artificial Sequence
  Description of Artificial Sequence: Synthetic oligonucleotide
  Sense strand starting at position 1207 of SEQ ID NO: 1244622
auuugcgucuuuguacaaa

SEQ ID NO: 1502609 - RNA, 19 nt, Artificial Sequence
  Description of Artificial Sequence: Synthetic oligonucleotide
  Antisense strand to SEQ ID NO: 1502608
uuuguacaaagacgcaaau

SEQ ID NO: 1502610 - RNA, 19 nt, Artificial Sequence
  Description of Artificial Sequence: Synthetic oligonucleotide
  Sense strand starting at position 1248 of SEQ ID NO: 1244622
gugcacccuuaaguaaaua

SEQ ID NO: 1502611 - RNA, 19 nt, Artificial Sequence
  Description of Artificial Sequence: Synthetic oligonucleotide
  Antisense strand to SEQ ID NO: 1502610
uauuuacuuaagggugcac

SEQ ID NO: 1502612 - RNA, 19 nt, Artificial Sequence
  Description of Artificial Sequence: Synthetic oligonucleotide
  Sense strand starting at position 1602 of SEQ ID NO: 1244622
cagguaggugccgagaaau

SEQ ID NO: 1502613 - RNA, 19 nt, Artificial Sequence
  Description of Artificial Sequence: Synthetic oligonucleotide
  Antisense strand to SEQ ID NO: 1502612
auuucucggcaccuaccug

SEQ ID NO: 1502614 - RNA, 19 nt, Artificial Sequence
  Description of Artificial Sequence: Synthetic oligonucleotide
  Sense strand starting at position 1646 of SEQ ID NO: 1244622
gcaggucaaaggcagaaau

SEQ ID NO: 1502615 - RNA, 19 nt, Artificial Sequence
  Description of Artificial Sequence: Synthetic oligonucleotide
  Antisense strand to SEQ ID NO: 1502614
auuucugccuuugaccugc

SEQ ID NO: 1502616 - RNA, 19 nt, Artificial Sequence
  Description of Artificial Sequence: Synthetic oligonucleotide
  Sense strand starting at position 1664 of SEQ ID NO: 1244622
uuuacuccgggaugagaga

SEQ ID NO: 1502617 - RNA, 19 nt, Artificial Sequence
  Description of Artificial Sequence: Synthetic oligonucleotide
  Antisense strand to SEQ ID NO: 1502616
ucucucaucccggaguaaa

SEQ ID NO: 1502618 - RNA, 19 nt, Artificial Sequence
  Description of Artificial Sequence: Synthetic oligonucleotide
  Sense strand starting at position 1874 of SEQ ID NO: 1244622
aaggcaguaucucugaauc

SEQ ID NO: 1502619 - RNA, 19 nt, Artificial Sequence
  Description of Artificial Sequence: Synthetic oligonucleotide
  Antisense strand to SEQ ID NO: 1502618
gauucagagauacugccuu

SEQ ID NO: 1502620 - RNA, 19 nt, Artificial Sequence
  Description of Artificial Sequence: Synthetic oligonucleotide
  Sense strand starting at position 2220 of SEQ ID NO: 1244622
gaguaccuuucucugggua

SEQ ID NO: 1502621 - RNA, 19 nt, Artificial Sequence
  Description of Artificial Sequence: Synthetic oligonucleotide
  Antisense strand to SEQ ID NO: 1502620
uacccagagaaagguacuc

SEQ ID NO: 1502622 - RNA, 19 nt, Artificial Sequence
  Description of Artificial Sequence: Synthetic oligonucleotide
  Sense strand starting at position 2221 of SEQ ID NO: 1244622
aguaccuuucucuggguaa

SEQ ID NO: 1502623 - RNA, 19 nt, Artificial Sequence
  Description of Artificial Sequence: Synthetic oligonucleotide
  Antisense strand to SEQ ID NO: 1502622
uuacccagagaaagguacu

SEQ ID NO: 1502624 - RNA, 19 nt, Artificial Sequence
  Description of Artificial Sequence: Synthetic oligonucleotide
  Sense strand starting at position 2225 of SEQ ID NO: 1244622
ccuuucucuggguaagcaa

SEQ ID NO: 1502625 - RNA, 19 nt, Artificial Sequence
  Description of Artificial Sequence: Synthetic oligonucleotide
  Antisense strand to SEQ ID NO: 1502624
uugcuuacccagagaaagg

SEQ ID NO: 1502626 - RNA, 19 nt, Artificial Sequence
  Description of Artificial Sequence: Synthetic oligonucleotide
  Sense strand starting at position 2303 of SEQ ID NO: 1244622
agcauagaugaugguauga

SEQ ID NO: 1502627 - RNA, 19 nt, Artificial Sequence
  Description of Artificial Sequence: Synthetic oligonucleotide
  Antisense strand to SEQ ID NO: 1502626
ucauaccaucaucuaugcu

SEQ ID NO: 1502628 - RNA, 19 nt, Artificial Sequence
  Description of Artificial Sequence: Synthetic oligonucleotide
  Sense strand starting at position 2417 of SEQ ID NO: 1244622
aaguuugagugucuauaaa

SEQ ID NO: 1502629 - RNA, 19 nt, Artificial Sequence
  Description of Artificial Sequence: Synthetic oligonucleotide
  Antisense strand to SEQ ID NO: 1502628
uuuauagacacucaaacuu

SEQ ID NO: 1502630 - RNA, 19 nt, Artificial Sequence
  Description of Artificial Sequence: Synthetic oligonucleotide
  Sense strand starting at position 2424 of SEQ ID NO: 1244622
agugucuauaaauggcaga

SEQ ID NO: 1502631 - RNA, 19 nt, Artificial Sequence
  Description of Artificial Sequence: Synthetic oligonucleotide
  Antisense strand to SEQ ID NO: 1502630
ucugccauuuauagacacu

SEQ ID NO: 1502632 - RNA, 19 nt, Artificial Sequence
  Description of Artificial Sequence: Synthetic oligonucleotide
  Sense strand starting at position 2425 of SEQ ID NO: 1244622
gugucuauaaauggcagaa

SEQ ID NO: 1502633 - RNA, 19 nt, Artificial Sequence
  Description of Artificial Sequence: Synthetic oligonucleotide
  Antisense strand to SEQ ID NO: 1502632
uucugccauuuauagacac

SEQ ID NO: 1502634 - RNA, 19 nt, Artificial Sequence
  Description of Artificial Sequence: Synthetic oligonucleotide
  Sense strand starting at position 2478 of SEQ ID NO: 1244622
acugauuuauugcugcuua

SEQ ID NO: 1502635 - RNA, 19 nt, Artificial Sequence
  Description of Artificial Sequence: Synthetic oligonucleotide
  Antisense strand to SEQ ID NO: 1502634
uaagcagcaauaaaucagu

SEQ ID NO: 1502636 - RNA, 19 nt, Artificial Sequence
  Description of Artificial Sequence: Synthetic oligonucleotide
  Sense strand starting at position 2509 of SEQ ID NO: 1244622
ugggaagggcucuguccau

SEQ ID NO: 1502637 - RNA, 19 nt, Artificial Sequence
  Description of Artificial Sequence: Synthetic oligonucleotide
  Antisense strand to SEQ ID NO: 1502636
auggacagagcccuuccca

SEQ ID NO: 1502638 - RNA, 19 nt, Artificial Sequence
  Description of Artificial Sequence: Synthetic oligonucleotide
  Sense strand starting at position 2616 of SEQ ID NO: 1244622
gaugucagaugucuggaau

SEQ ID NO: 1502639 - RNA, 19 nt, Artificial Sequence
  Description of Artificial Sequence: Synthetic oligonucleotide
  Antisense strand to SEQ ID NO: 1502638
auuccagacaucugacauc

SEQ ID NO: 1502640 - RNA, 19 nt, Artificial Sequence
  Description of Artificial Sequence: Synthetic oligonucleotide
  Sense strand starting at position 2617 of SEQ ID NO: 1244622
augucagaugucuggaauc

SEQ ID NO: 1502641 - RNA, 19 nt, Artificial Sequence
  Description of Artificial Sequence: Synthetic oligonucleotide
  Antisense strand to SEQ ID NO: 1502640
gauuccagacaucugacau

SEQ ID NO: 1502642 - RNA, 19 nt, Artificial Sequence
  Description of Artificial Sequence: Synthetic oligonucleotide
  Sense strand starting at position 2619 of SEQ ID NO: 1244622
gucagaugucuggaaucca

SEQ ID NO: 1502643 - RNA, 19 nt, Artificial Sequence
  Description of Artificial Sequence: Synthetic oligonucleotide
  Antisense strand to SEQ ID NO: 1502642
uggauuccagacaucugac

SEQ ID NO: 1502644 - RNA, 19 nt, Artificial Sequence
  Description of Artificial Sequence: Synthetic oligonucleotide
  Sense strand starting at position 2711 of SEQ ID NO: 1244622
uccaaauaaguccauguca

SEQ ID NO: 1502645 - RNA, 19 nt, Artificial Sequence
  Description of Artificial Sequence: Synthetic oligonucleotide
  Antisense strand to SEQ ID NO: 1502644
ugacauggacuuauuugga

SEQ ID NO: 1502646 - RNA, 19 nt, Artificial Sequence
  Description of Artificial Sequence: Synthetic oligonucleotide
  Sense strand starting at position 2998 of SEQ ID NO: 1244622
ucuagugaacuguacacuu

SEQ ID NO: 1502647 - RNA, 19 nt, Artificial Sequence
  Description of Artificial Sequence: Synthetic oligonucleotide
  Antisense strand to SEQ ID NO: 1502646
aaguguacaguucacuaga

SEQ ID NO: 1502648 - RNA, 19 nt, Artificial Sequence
  Description of Artificial Sequence: Synthetic oligonucleotide
  Sense strand starting at position 3045 of SEQ ID NO: 1244622
uguuucuuaccucauguaa

SEQ ID NO: 1502649 - RNA, 19 nt, Artificial Sequence
  Description of Artificial Sequence: Synthetic oligonucleotide
  Antisense strand to SEQ ID NO: 1502648
uuacaugagguaagaaaca

SEQ ID NO: 1502650 - RNA, 19 nt, Artificial Sequence
  Description of Artificial Sequence: Synthetic oligonucleotide
  Sense strand starting at position 3099 of SEQ ID NO: 1244622
uaauaauuacgauaggucu

SEQ ID NO: 1502651 - RNA, 19 nt, Artificial Sequence
  Description of Artificial Sequence: Synthetic oligonucleotide
  Antisense strand to SEQ ID NO: 1502650
agaccuaucguaauuauua

SEQ ID NO: 1502652 - RNA, 19 nt, Artificial Sequence
  Description of Artificial Sequence: Synthetic oligonucleotide
  Sense strand starting at position 3135 of SEQ ID NO: 1244622
acauaaugccucugaaagc

SEQ ID NO: 1502653 - RNA, 19 nt, Artificial Sequence
  Description of Artificial Sequence: Synthetic oligonucleotide
  Antisense strand to SEQ ID NO: 1502652
gcuuucagaggcauuaugu

SEQ ID NO: 1502654 - RNA, 19 nt, Artificial Sequence
  Description of Artificial Sequence: Synthetic oligonucleotide
  Sense strand starting at position 3159 of SEQ ID NO: 1244622
ggaugaguagccuauugac

SEQ ID NO: 1502655 - RNA, 19 nt, Artificial Sequence
  Description of Artificial Sequence: Synthetic oligonucleotide
  Antisense strand to SEQ ID NO: 1502654
gucaauaggcuacucaucc

SEQ ID NO: 1502656 - RNA, 19 nt, Artificial Sequence
  Description of Artificial Sequence: Synthetic oligonucleotide
  Sense strand starting at position 3205 of SEQ ID NO: 1244622
gguuuaugacaguaguuuc

SEQ ID NO: 1502657 - RNA, 19 nt, Artificial Sequence
  Description of Artificial Sequence: Synthetic oligonucleotide
  Antisense strand to SEQ ID NO: 1502656
gaaacuacugucauaaacc

SEQ ID NO: 1502658 - RNA, 19 nt, Artificial Sequence
  Description of Artificial Sequence: Synthetic oligonucleotide
  Sense strand starting at position 90 of SEQ ID NO: 1244623
aaguuugacgcucagaauc

SEQ ID NO: 1502659 - RNA, 19 nt, Artificial Sequence
  Description of Artificial Sequence: Synthetic oligonucleotide
  Antisense strand to SEQ ID NO: 1502658
gauucugagcgucaaacuu

SEQ ID NO: 1502660 - RNA, 19 nt, Artificial Sequence
  Description of Artificial Sequence: Synthetic oligonucleotide
  Sense strand starting at position 310 of SEQ ID NO: 1244623
ucugcacauucuuuaggua

SEQ ID NO: 1502661 - RNA, 19 nt, Artificial Sequence
  Description of Artificial Sequence: Synthetic oligonucleotide
  Antisense strand to SEQ ID NO: 1502660
uaccuaaagaaugugcaga

SEQ ID NO: 1502662 - RNA, 19 nt, Artificial Sequence
  Description of Artificial Sequence: Synthetic oligonucleotide
  Sense strand starting at position 311 of SEQ ID NO: 1244623
cugcacauucuuuagguau

SEQ ID NO: 1502663 - RNA, 19 nt, Artificial Sequence
  Description of Artificial Sequence: Synthetic oligonucleotide
  Antisense strand to SEQ ID NO: 1502662
auaccuaaagaaugugcag

SEQ ID NO: 1502664 - RNA, 19 nt, Artificial Sequence
  Description of Artificial Sequence: Synthetic oligonucleotide
  Sense strand starting at position 314 of SEQ ID NO: 1244623
cacauucuuuagguaugga

SEQ ID NO: 1502665 - RNA, 19 nt, Artificial Sequence
  Description of Artificial Sequence: Synthetic oligonucleotide
  Antisense strand to SEQ ID NO: 1502664
uccauaccuaaagaaugug

SEQ ID NO: 1502666 - RNA, 19 nt, Artificial Sequence
  Description of Artificial Sequence: Synthetic oligonucleotide
  Sense strand starting at position 317 of SEQ ID NO: 1244623
auucuuuagguauggaguu

SEQ ID NO: 1502667 - RNA, 19 nt, Artificial Sequence
  Description of Artificial Sequence: Synthetic oligonucleotide
  Antisense strand to SEQ ID NO: 1502666
aacuccauaccuaaagaau

SEQ ID NO: 1502668 - RNA, 19 nt, Artificial Sequence
  Description of Artificial Sequence: Synthetic oligonucleotide
  Sense strand starting at position 319 of SEQ ID NO: 1244623
ucuuuagguauggaguuua

SEQ ID NO: 1502669 - RNA, 19 nt, Artificial Sequence
  Description of Artificial Sequence: Synthetic oligonucleotide
  Antisense strand to SEQ ID NO: 1502668
uaaacuccauaccuaaaga

SEQ ID NO: 1502670 - RNA, 19 nt, Artificial Sequence
  Description of Artificial Sequence: Synthetic oligonucleotide
  Sense strand starting at position 327 of SEQ ID NO: 1244623
uauggaguuuaucuggaua

SEQ ID NO: 1502671 - RNA, 19 nt, Artificial Sequence
  Description of Artificial Sequence: Synthetic oligonucleotide
  Antisense strand to SEQ ID NO: 1502670
uauccagauaaacuccaua

SEQ ID NO: 1502672 - RNA, 19 nt, Artificial Sequence
  Description of Artificial Sequence: Synthetic oligonucleotide
  Sense strand starting at position 568 of SEQ ID NO: 1244623
guuaaauaccagcaguaua

SEQ ID NO: 1502673 - RNA, 19 nt, Artificial Sequence
  Description of Artificial Sequence: Synthetic oligonucleotide
  Antisense strand to SEQ ID NO: 1502672
uauacugcugguauuuaac

SEQ ID NO: 1502674 - RNA, 19 nt, Artificial Sequence
  Description of Artificial Sequence: Synthetic oligonucleotide
  Sense strand starting at position 582 of SEQ ID NO: 1244623
guauauuccucacugggua

SEQ ID NO: 1502675 - RNA, 19 nt, Artificial Sequence
  Description of Artificial Sequence: Synthetic oligonucleotide
  Antisense strand to SEQ ID NO: 1502674
uacccagugaggaauauac

SEQ ID NO: 1502676 - RNA, 19 nt, Artificial Sequence
  Description of Artificial Sequence: Synthetic oligonucleotide
  Sense strand starting at position 723 of SEQ ID NO: 1244623
agggaacauuugcaccaaa

SEQ ID NO: 1502677 - RNA, 19 nt, Artificial Sequence
  Description of Artificial Sequence: Synthetic oligonucleotide
  Antisense strand to SEQ ID NO: 1502676
uuuggugcaaauguucccu

SEQ ID NO: 1502678 - RNA, 19 nt, Artificial Sequence
  Description of Artificial Sequence: Synthetic oligonucleotide
  Sense strand starting at position 896 of SEQ ID NO: 1244623
aucucugauguagauucua

SEQ ID NO: 1502679 - RNA, 19 nt, Artificial Sequence
  Description of Artificial Sequence: Synthetic oligonucleotide
  Antisense strand to SEQ ID NO: 1502678
uagaaucuacaucagagau

SEQ ID NO: 1502680 - RNA, 19 nt, Artificial Sequence
  Description of Artificial Sequence: Synthetic oligonucleotide
  Sense strand starting at position 934 of SEQ ID NO: 1244623
ggaagagugagccaguauu

SEQ ID NO: 1502681 - RNA, 19 nt, Artificial Sequence
  Description of Artificial Sequence: Synthetic oligonucleotide
  Antisense strand to SEQ ID NO: 1502680
aauacuggcucacucuucc

SEQ ID NO: 1502682 - RNA, 19 nt, Artificial Sequence
  Description of Artificial Sequence: Synthetic oligonucleotide
  Sense strand starting at position 1002 of SEQ ID NO: 1244623
ccuuauuaucaucauaggu

SEQ ID NO: 1502683 - RNA, 19 nt, Artificial Sequence
  Description of Artificial Sequence: Synthetic oligonucleotide
  Antisense strand to SEQ ID NO: 1502682
accuaugaugauaauaagg

SEQ ID NO: 1502684 - RNA, 19 nt, Artificial Sequence
  Description of Artificial Sequence: Synthetic oligonucleotide
  Sense strand starting at position 1038 of SEQ ID NO: 1244623
gcacuuaggugaccuacaa

SEQ ID NO: 1502685 - RNA, 19 nt, Artificial Sequence
  Description of Artificial Sequence: Synthetic oligonucleotide
  Antisense strand to SEQ ID NO: 1502684
uuguaggucaccuaagugc

SEQ ID NO: 1502686 - RNA, 19 nt, Artificial Sequence
  Description of Artificial Sequence: Synthetic oligonucleotide
  Sense strand starting at position 1113 of SEQ ID NO: 1244623
uggugccaccaauaauauu

SEQ ID NO: 1502687 - RNA, 19 nt, Artificial Sequence
  Description of Artificial Sequence: Synthetic oligonucleotide
  Antisense strand to SEQ ID NO: 1502686
aauauuauugguggcacca

SEQ ID NO: 1502688 - RNA, 19 nt, Artificial Sequence
  Description of Artificial Sequence: Synthetic oligonucleotide
  Sense strand starting at position 1205 of SEQ ID NO: 1244623
cuagguaacucuuuagucu

SEQ ID NO: 1502689 - RNA, 19 nt, Artificial Sequence
  Description of Artificial Sequence: Synthetic oligonucleotide
  Antisense strand to SEQ ID NO: 1502688
agacuaaagaguuaccuag

SEQ ID NO: 1502690 - RNA, 19 nt, Artificial Sequence
  Description of Artificial Sequence: Synthetic oligonucleotide
  Sense strand starting at position 1208 of SEQ ID NO: 1244623
gguaacucuuuagucugaa

SEQ ID NO: 1502691 - RNA, 19 nt, Artificial Sequence
  Description of Artificial Sequence: Synthetic oligonucleotide
  Antisense strand to SEQ ID NO: 1502690
uucagacuaaagaguuacc

SEQ ID NO: 1502692 - RNA, 19 nt, Artificial Sequence
  Description of Artificial Sequence: Synthetic oligonucleotide
  Sense strand starting at position 1209 of SEQ ID NO: 1244623
guaacucuuuagucugaau

SEQ ID NO: 1502693 - RNA, 19 nt, Artificial Sequence
  Description of Artificial Sequence: Synthetic oligonucleotide
  Antisense strand to SEQ ID NO: 1502692
auucagacuaaagaguuac

SEQ ID NO: 1502694 - RNA, 19 nt, Artificial Sequence
  Description of Artificial Sequence: Synthetic oligonucleotide
  Sense strand starting at position 1440 of SEQ ID NO: 1244623
ggaggaggcuagaguuaac

SEQ ID NO: 1502695 - RNA, 19 nt, Artificial Sequence
  Description of Artificial Sequence: Synthetic oligonucleotide
  Antisense strand to SEQ ID NO: 1502694
guuaacucuagccuccucc

SEQ ID NO: 1502696 - RNA, 19 nt, Artificial Sequence
  Description of Artificial Sequence: Synthetic oligonucleotide
  Sense strand starting at position 1449 of SEQ ID NO: 1244623
uagaguuaacgucagggaa

SEQ ID NO: 1502697 - RNA, 19 nt, Artificial Sequence
  Description of Artificial Sequence: Synthetic oligonucleotide
  Antisense strand to SEQ ID NO: 1502696
uucccugacguuaacucua

SEQ ID NO: 1502698 - RNA, 19 nt, Artificial Sequence
  Description of Artificial Sequence: Synthetic oligonucleotide
  Sense strand starting at position 1452 of SEQ ID NO: 1244623
aguuaacgucagggaaugu

SEQ ID NO: 1502699 - RNA, 19 nt, Artificial Sequence
  Description of Artificial Sequence: Synthetic oligonucleotide
  Antisense strand to SEQ ID NO: 1502698
acauucccugacguuaacu

SEQ ID NO: 1502700 - RNA, 19 nt, Artificial Sequence
  Description of Artificial Sequence: Synthetic oligonucleotide
  Sense strand starting at position 1453 of SEQ ID NO: 1244623
guuaacgucagggaauguu

SEQ ID NO: 1502701 - RNA, 19 nt, Artificial Sequence
  Description of Artificial Sequence: Synthetic oligonucleotide
  Antisense strand to SEQ ID NO: 1502700
aacauucccugacguuaac

SEQ ID NO: 1502702 - RNA, 19 nt, Artificial Sequence
  Description of Artificial Sequence: Synthetic oligonucleotide
  Sense strand starting at position 1462 of SEQ ID NO: 1244623
agggaauguucugugucau

SEQ ID NO: 1502703 - RNA, 19 nt, Artificial Sequence
  Description of Artificial Sequence: Synthetic oligonucleotide
  Antisense strand to SEQ ID NO: 1502702
augacacagaacauucccu

SEQ ID NO: 1502704 - RNA, 19 nt, Artificial Sequence
  Description of Artificial Sequence: Synthetic oligonucleotide
  Sense strand starting at position 2144 of SEQ ID NO: 1244623
caggccuggcgcuaaauaa

SEQ ID NO: 1502705 - RNA, 19 nt, Artificial Sequence
  Description of Artificial Sequence: Synthetic oligonucleotide
  Antisense strand to SEQ ID NO: 1502704
uuauuuagcgccaggccug

SEQ ID NO: 1502706 - RNA, 19 nt, Artificial Sequence
  Description of Artificial Sequence: Synthetic oligonucleotide
  Sense strand starting at position 2168 of SEQ ID NO: 1244623
cguuguuauguguuaugua

SEQ ID NO: 1502707 - RNA, 19 nt, Artificial Sequence
  Description of Artificial Sequence: Synthetic oligonucleotide
  Antisense strand to SEQ ID NO: 1502706
uacauaacacauaacaacg

SEQ ID NO: 1502708 - RNA, 19 nt, Artificial Sequence
  Description of Artificial Sequence: Synthetic oligonucleotide
  Sense strand starting at position 2180 of SEQ ID NO: 1244623
uuauguauuuauguggcau

SEQ ID NO: 1502709 - RNA, 19 nt, Artificial Sequence
  Description of Artificial Sequence: Synthetic oligonucleotide
  Antisense strand to SEQ ID NO: 1502708
augccacauaaauacauaa

SEQ ID NO: 1502710 - RNA, 19 nt, Artificial Sequence
  Description of Artificial Sequence: Synthetic oligonucleotide
  Sense strand starting at position 2765 of SEQ ID NO: 1244623
agcugaggcauacgagaau

SEQ ID NO: 1502711 - RNA, 19 nt, Artificial Sequence
  Description of Artificial Sequence: Synthetic oligonucleotide
  Antisense strand to SEQ ID NO: 1502710
auucucguaugccucagcu

SEQ ID NO: 1502712 - RNA, 19 nt, Artificial Sequence
  Description of Artificial Sequence: Synthetic oligonucleotide
  Sense strand starting at position 3021 of SEQ ID NO: 1244623
ucaagagaucguggccaca

SEQ ID NO: 1502713 - RNA, 19 nt, Artificial Sequence
  Description of Artificial Sequence: Synthetic oligonucleotide
  Antisense strand to SEQ ID NO: 1502712
uguggccacgaucucuuga

SEQ ID NO: 1502714 - RNA, 19 nt, Artificial Sequence
  Description of Artificial Sequence: Synthetic oligonucleotide
  Sense strand starting at position 3023 of SEQ ID NO: 1244623
aagagaucguggccacauc

SEQ ID NO: 1502715 - RNA, 19 nt, Artificial Sequence
  Description of Artificial Sequence: Synthetic oligonucleotide
  Antisense strand to SEQ ID NO: 1502714
gauguggccacgaucucuu

SEQ ID NO: 1502716 - RNA, 19 nt, Artificial Sequence
  Description of Artificial Sequence: Synthetic oligonucleotide
  Sense strand starting at position 3034 of SEQ ID NO: 1244623
gccacauccuggccaauau

SEQ ID NO: 1502717 - RNA, 19 nt, Artificial Sequence
  Description of Artificial Sequence: Synthetic oligonucleotide
  Antisense strand to SEQ ID NO: 1502716
auauuggccaggauguggc

SEQ ID NO: 1502718 - RNA, 19 nt, Artificial Sequence
  Description of Artificial Sequence: Synthetic oligonucleotide
  Sense strand starting at position 3699 of SEQ ID NO: 1244623
cgaggagauauguguaagu

SEQ ID NO: 1502719 - RNA, 19 nt, Artificial Sequence
  Description of Artificial Sequence: Synthetic oligonucleotide
  Antisense strand to SEQ ID NO: 1502718
acuuacacauaucuccucg

SEQ ID NO: 1502720 - RNA, 19 nt, Artificial Sequence
  Description of Artificial Sequence: Synthetic oligonucleotide
  Sense strand starting at position 3701 of SEQ ID NO: 1244623
aggagauauguguaaguau

SEQ ID NO: 1502721 - RNA, 19 nt, Artificial Sequence
  Description of Artificial Sequence: Synthetic oligonucleotide
  Antisense strand to SEQ ID NO: 1502720
auacuuacacauaucuccu

SEQ ID NO: 1502722 - RNA, 19 nt, Artificial Sequence
  Description of Artificial Sequence: Synthetic oligonucleotide
  Sense strand starting at position 3704 of SEQ ID NO: 1244623
agauauguguaaguauucu

SEQ ID NO: 1502723 - RNA, 19 nt, Artificial Sequence
  Description of Artificial Sequence: Synthetic oligonucleotide
  Antisense strand to SEQ ID NO: 1502722
agaauacuuacacauaucu

SEQ ID NO: 1502724 - RNA, 19 nt, Artificial Sequence
  Description of Artificial Sequence: Synthetic oligonucleotide
  Sense strand starting at position 3708 of SEQ ID NO: 1244623
auguguaaguauucuaaca

SEQ ID NO: 1502725 - RNA, 19 nt, Artificial Sequence
  Description of Artificial Sequence: Synthetic oligonucleotide
  Antisense strand to SEQ ID NO: 1502724
uguuagaauacuuacacau

SEQ ID NO: 1502726 - RNA, 19 nt, Artificial Sequence
  Description of Artificial Sequence: Synthetic oligonucleotide
  Sense strand starting at position 3730 of SEQ ID NO: 1244623
caacuaugucguggauauu

SEQ ID NO: 1502727 - RNA, 19 nt, Artificial Sequence
  Description of Artificial Sequence: Synthetic oligonucleotide
  Antisense strand to SEQ ID NO: 1502726
aauauccacgacauaguug

SEQ ID NO: 1502728 - RNA, 19 nt, Artificial Sequence
  Description of Artificial Sequence: Synthetic oligonucleotide
  Sense strand starting at position 3765 of SEQ ID NO: 1244623
ugugaacauuuaggaaaca

SEQ ID NO: 1502729 - RNA, 19 nt, Artificial Sequence
  Description of Artificial Sequence: Synthetic oligonucleotide
  Antisense strand to SEQ ID NO: 1502728
uguuuccuaaauguucaca

SEQ ID NO: 1502730 - RNA, 19 nt, Artificial Sequence
  Description of Artificial Sequence: Synthetic oligonucleotide
  Sense strand starting at position 3911 of SEQ ID NO: 1244623
auucucaucuuggccagau

SEQ ID NO: 1502731 - RNA, 19 nt, Artificial Sequence
  Description of Artificial Sequence: Synthetic oligonucleotide
  Antisense strand to SEQ ID NO: 1502730
aucuggccaagaugagaau

SEQ ID NO: 1502732 - RNA, 19 nt, Artificial Sequence
  Description of Artificial Sequence: Synthetic oligonucleotide
  Sense strand starting at position 3912 of SEQ ID NO: 1244623
uucucaucuuggccagaua

SEQ ID NO: 1502733 - RNA, 19 nt, Artificial Sequence
  Description of Artificial Sequence: Synthetic oligonucleotide
  Antisense strand to SEQ ID NO: 1502732
uaucuggccaagaugagaa

SEQ ID NO: 1502734 - RNA, 19 nt, Artificial Sequence
  Description of Artificial Sequence: Synthetic oligonucleotide
  Sense strand starting at position 3915 of SEQ ID NO: 1244623
ucaucuuggccagauacua

SEQ ID NO: 1502735 - RNA, 19 nt, Artificial Sequence
  Description of Artificial Sequence: Synthetic oligonucleotide
  Antisense strand to SEQ ID NO: 1502734
uaguaucuggccaagauga

SEQ ID NO: 1502736 - RNA, 19 nt, Artificial Sequence
  Description of Artificial Sequence: Synthetic oligonucleotide
  Sense strand starting at position 3981 of SEQ ID NO: 1244623
gucgcuugagcccaagaga

SEQ ID NO: 1502737 - RNA, 19 nt, Artificial Sequence
  Description of Artificial Sequence: Synthetic oligonucleotide
  Antisense strand to SEQ ID NO: 1502736
ucucuugggcucaagcgac

SEQ ID NO: 1502738 - RNA, 19 nt, Artificial Sequence
  Description of Artificial Sequence: Synthetic oligonucleotide
  Sense strand starting at position 140 of SEQ ID NO: 1244624
gcuaaucaacaucggaguu

SEQ ID NO: 1502739 - RNA, 19 nt, Artificial Sequence
  Description of Artificial Sequence: Synthetic oligonucleotide
  Antisense strand to SEQ ID NO: 1502738
aacuccgauguugauuagc

SEQ ID NO: 1502740 - RNA, 19 nt, Artificial Sequence
  Description of Artificial Sequence: Synthetic oligonucleotide
  Sense strand starting at position 150 of SEQ ID NO: 1244624
aucggaguuacauaagguu

SEQ ID NO: 1502741 - RNA, 19 nt, Artificial Sequence
  Description of Artificial Sequence: Synthetic oligonucleotide
  Antisense strand to SEQ ID NO: 1502740
aaccuuauguaacuccgau

SEQ ID NO: 1502742 - RNA, 19 nt, Artificial Sequence
  Description of Artificial Sequence: Synthetic oligonucleotide
  Sense strand starting at position 156 of SEQ ID NO: 1244624
guuacauaagguuaaguca

SEQ ID NO: 1502743 - RNA, 19 nt, Artificial Sequence
  Description of Artificial Sequence: Synthetic oligonucleotide
  Antisense strand to SEQ ID NO: 1502742
ugacuuaaccuuauguaac

SEQ ID NO: 1502744 - RNA, 19 nt, Artificial Sequence
  Description of Artificial Sequence: Synthetic oligonucleotide
  Sense strand starting at position 159 of SEQ ID NO: 1244624
acauaagguuaagucagau

SEQ ID NO: 1502745 - RNA, 19 nt, Artificial Sequence
  Description of Artificial Sequence: Synthetic oligonucleotide
  Antisense strand to SEQ ID NO: 1502744
aucugacuuaaccuuaugu

SEQ ID NO: 1502746 - RNA, 19 nt, Artificial Sequence
  Description of Artificial Sequence: Synthetic oligonucleotide
  Sense strand starting at position 203 of SEQ ID NO: 1244624
aagacaagguucucuguuu

SEQ ID NO: 1502747 - RNA, 19 nt, Artificial Sequence
  Description of Artificial Sequence: Synthetic oligonucleotide
  Antisense strand to SEQ ID NO: 1502746
aaacagagaaccuugucuu

SEQ ID NO: 1502748 - RNA, 19 nt, Artificial Sequence
  Description of Artificial Sequence: Synthetic oligonucleotide
  Sense strand starting at position 204 of SEQ ID NO: 1244624
agacaagguucucuguuua

SEQ ID NO: 1502749 - RNA, 19 nt, Artificial Sequence
  Description of Artificial Sequence: Synthetic oligonucleotide
  Antisense strand to SEQ ID NO: 1502748
uaaacagagaaccuugucu

SEQ ID NO: 1502750 - RNA, 19 nt, Artificial Sequence
  Description of Artificial Sequence: Synthetic oligonucleotide
  Sense strand starting at position 215 of SEQ ID NO: 1244624
ucuguuuauugggcuaaac

SEQ ID NO: 1502751 - RNA, 19 nt, Artificial Sequence
  Description of Artificial Sequence: Synthetic oligonucleotide
  Antisense strand to SEQ ID NO: 1502750
guuuagcccaauaaacaga

SEQ ID NO: 1502752 - RNA, 19 nt, Artificial Sequence
  Description of Artificial Sequence: Synthetic oligonucleotide
  Sense strand starting at position 353 of SEQ ID NO: 1244624
guaaacgcuuucuuaauuu

SEQ ID NO: 1502753 - RNA, 19 nt, Artificial Sequence
  Description of Artificial Sequence: Synthetic oligonucleotide
  Antisense strand to SEQ ID NO: 1502752
aaauuaagaaagcguuuac

SEQ ID NO: 1502754 - RNA, 19 nt, Artificial Sequence
  Description of Artificial Sequence: Synthetic oligonucleotide
  Sense strand starting at position 409 of SEQ ID NO: 1244624
aauagaagguuugaggaau

SEQ ID NO: 1502755 - RNA, 19 nt, Artificial Sequence
  Description of Artificial Sequence: Synthetic oligonucleotide
  Antisense strand to SEQ ID NO: 1502754
auuccucaaaccuucuauu

SEQ ID NO: 1502756 - RNA, 19 nt, Artificial Sequence
  Description of Artificial Sequence: Synthetic oligonucleotide
  Sense strand starting at position 430 of SEQ ID NO: 1244624
ugguucuuccuagagacca

SEQ ID NO: 1502757 - RNA, 19 nt, Artificial Sequence
  Description of Artificial Sequence: Synthetic oligonucleotide
  Antisense strand to SEQ ID NO: 1502756
uggucucuaggaagaacca

SEQ ID NO: 1502758 - RNA, 19 nt, Artificial Sequence
  Description of Artificial Sequence: Synthetic oligonucleotide
  Sense strand starting at position 583 of SEQ ID NO: 1244624
agacaaguaugagaaauua

SEQ ID NO: 1502759 - RNA, 19 nt, Artificial Sequence
  Description of Artificial Sequence: Synthetic oligonucleotide
  Antisense strand to SEQ ID NO: 1502758
uaauuucucauacuugucu

SEQ ID NO: 1502760 - RNA, 19 nt, Artificial Sequence
  Description of Artificial Sequence: Synthetic oligonucleotide
  Sense strand starting at position 1188 of SEQ ID NO: 1244624
acugcuguagauggaaaua

SEQ ID NO: 1502761 - RNA, 19 nt, Artificial Sequence
  Description of Artificial Sequence: Synthetic oligonucleotide
  Antisense strand to SEQ ID NO: 1502760
uauuuccaucuacagcagu

SEQ ID NO: 1502762 - RNA, 19 nt, Artificial Sequence
  Description of Artificial Sequence: Synthetic oligonucleotide
  Sense strand starting at position 1453 of SEQ ID NO: 1244624
gcccucugugcauaauaca

SEQ ID NO: 1502763 - RNA, 19 nt, Artificial Sequence
  Description of Artificial Sequence: Synthetic oligonucleotide
  Antisense strand to SEQ ID NO: 1502762
uguauuaugcacagagggc

SEQ ID NO: 1502764 - RNA, 19 nt, Artificial Sequence
  Description of Artificial Sequence: Synthetic oligonucleotide
  Sense strand starting at position 2354 of SEQ ID NO: 1244624
cucguaaacguuuauugag

SEQ ID NO: 1502765 - RNA, 19 nt, Artificial Sequence
  Description of Artificial Sequence: Synthetic oligonucleotide
  Antisense strand to SEQ ID NO: 1502764
cucaauaaacguuuacgag

SEQ ID NO: 1502766 - RNA, 19 nt, Artificial Sequence
  Description of Artificial Sequence: Synthetic oligonucleotide
  Sense strand starting at position 2423 of SEQ ID NO: 1244624
guuauauaaugcuuucuag

SEQ ID NO: 1502767 - RNA, 19 nt, Artificial Sequence
  Description of Artificial Sequence: Synthetic oligonucleotide
  Antisense strand to SEQ ID NO: 1502766
cuagaaagcauuauauaac

SEQ ID NO: 1502768 - RNA, 19 nt, Artificial Sequence
  Description of Artificial Sequence: Synthetic oligonucleotide
  Sense strand starting at position 2490 of SEQ ID NO: 1244624
gcguauucagaguucugcu

SEQ ID NO: 1502769 - RNA, 19 nt, Artificial Sequence
  Description of Artificial Sequence: Synthetic oligonucleotide
  Antisense strand to SEQ ID NO: 1502768
agcagaacucugaauacgc

SEQ ID NO: 1502770 - RNA, 19 nt, Artificial Sequence
  Description of Artificial Sequence: Synthetic oligonucleotide
  Sense strand starting at position 2511 of SEQ ID NO: 1244624
uagcaaggcuggucugaau

SEQ ID NO: 1502771 - RNA, 19 nt, Artificial Sequence
  Description of Artificial Sequence: Synthetic oligonucleotide
  Antisense strand to SEQ ID NO: 1502770
auucagaccagccuugcua

SEQ ID NO: 1502772 - RNA, 19 nt, Artificial Sequence
  Description of Artificial Sequence: Synthetic oligonucleotide
  Sense strand starting at position 2626 of SEQ ID NO: 1244624
ggagcuguuauuugcagga

SEQ ID NO: 1502773 - RNA, 19 nt, Artificial Sequence
  Description of Artificial Sequence: Synthetic oligonucleotide
  Antisense strand to SEQ ID NO: 1502772
uccugcaaauaacagcucc

SEQ ID NO: 1502774 - RNA, 19 nt, Artificial Sequence
  Description of Artificial Sequence: Synthetic oligonucleotide
  Sense strand starting at position 2682 of SEQ ID NO: 1244624
uugauaagccagggaggua

SEQ ID NO: 1502775 - RNA, 19 nt, Artificial Sequence
  Description of Artificial Sequence: Synthetic oligonucleotide
  Antisense strand to SEQ ID NO: 1502774
uaccucccuggcuuaucaa

SEQ ID NO: 1502776 - RNA, 19 nt, Artificial Sequence
  Description of Artificial Sequence: Synthetic oligonucleotide
  Sense strand starting at position 2720 of SEQ ID NO: 1244624
agacuugaaaggugcaaga

SEQ ID NO: 1502777 - RNA, 19 nt, Artificial Sequence
  Description of Artificial Sequence: Synthetic oligonucleotide
  Antisense strand to SEQ ID NO: 1502776
ucuugcaccuuucaagucu

SEQ ID NO: 1502778 - RNA, 19 nt, Artificial Sequence
  Description of Artificial Sequence: Synthetic oligonucleotide
  Sense strand starting at position 2773 of SEQ ID NO: 1244624
ggaucugaauucgucaggu

SEQ ID NO: 1502779 - RNA, 19 nt, Artificial Sequence
  Description of Artificial Sequence: Synthetic oligonucleotide
  Antisense strand to SEQ ID NO: 1502778
accugacgaauucagaucc

SEQ ID NO: 1502780 - RNA, 19 nt, Artificial Sequence
  Description of Artificial Sequence: Synthetic oligonucleotide
  Sense strand starting at position 2775 of SEQ ID NO: 1244624
aucugaauucgucagguca

SEQ ID NO: 1502781 - RNA, 19 nt, Artificial Sequence
  Description of Artificial Sequence: Synthetic oligonucleotide
  Antisense strand to SEQ ID NO: 1502780
ugaccugacgaauucagau

SEQ ID NO: 1502782 - RNA, 19 nt, Artificial Sequence
  Description of Artificial Sequence: Synthetic oligonucleotide
  Sense strand starting at position 2848 of SEQ ID NO: 1244624
ugcaaaugacccugauaua

SEQ ID NO: 1502783 - RNA, 19 nt, Artificial Sequence
  Description of Artificial Sequence: Synthetic oligonucleotide
  Antisense strand to SEQ ID NO: 1502782
uauaucagggucauuugca

SEQ ID NO: 1502784 - RNA, 19 nt, Artificial Sequence
  Description of Artificial Sequence: Synthetic oligonucleotide
  Sense strand starting at position 2944 of SEQ ID NO: 1244624
gucagaauuugauagugaa

SEQ ID NO: 1502785 - RNA, 19 nt, Artificial Sequence
  Description of Artificial Sequence: Synthetic oligonucleotide
  Antisense strand to SEQ ID NO: 1502784
uucacuaucaaauucugac

SEQ ID NO: 1502786 - RNA, 19 nt, Artificial Sequence
  Description of Artificial Sequence: Synthetic oligonucleotide
  Sense strand starting at position 2969 of SEQ ID NO: 1244624
ccaaacuuucgauagcaga

SEQ ID NO: 1502787 - RNA, 19 nt, Artificial Sequence
  Description of Artificial Sequence: Synthetic oligonucleotide
  Antisense strand to SEQ ID NO: 1502786
ucugcuaucgaaaguuugg

SEQ ID NO: 1502788 - RNA, 19 nt, Artificial Sequence
  Description of Artificial Sequence: Synthetic oligonucleotide
  Sense strand starting at position 3007 of SEQ ID NO: 1244624
guuaguauuuccucgucga

SEQ ID NO: 1502789 - RNA, 19 nt, Artificial Sequence
  Description of Artificial Sequence: Synthetic oligonucleotide
  Antisense strand to SEQ ID NO: 1502788
ucgacgaggaaauacuaac

SEQ ID NO: 1502790 - RNA, 19 nt, Artificial Sequence
  Description of Artificial Sequence: Synthetic oligonucleotide
  Sense strand starting at position 3008 of SEQ ID NO: 1244624
uuaguauuuccucgucgau

SEQ ID NO: 1502791 - RNA, 19 nt, Artificial Sequence
  Description of Artificial Sequence: Synthetic oligonucleotide
  Antisense strand to SEQ ID NO: 1502790
aucgacgaggaaauacuaa

SEQ ID NO: 1502792 - RNA, 19 nt, Artificial Sequence
  Description of Artificial Sequence: Synthetic oligonucleotide
  Sense strand starting at position 3010 of SEQ ID NO: 1244624
aguauuuccucgucgauca

SEQ ID NO: 1502793 - RNA, 19 nt, Artificial Sequence
  Description of Artificial Sequence: Synthetic oligonucleotide
  Antisense strand to SEQ ID NO: 1502792
ugaucgacgaggaaauacu

SEQ ID NO: 1502794 - RNA, 19 nt, Artificial Sequence
  Description of Artificial Sequence: Synthetic oligonucleotide
  Sense strand starting at position 3011 of SEQ ID NO: 1244624
guauuuccucgucgaucaa

SEQ ID NO: 1502795 - RNA, 19 nt, Artificial Sequence
  Description of Artificial Sequence: Synthetic oligonucleotide
  Antisense strand to SEQ ID NO: 1502794
uugaucgacgaggaaauac

SEQ ID NO: 1502796 - RNA, 19 nt, Artificial Sequence
  Description of Artificial Sequence: Synthetic oligonucleotide
  Sense strand starting at position 3242 of SEQ ID NO: 1244624
aagagaaucgccuguaucu

SEQ ID NO: 1502797 - RNA, 19 nt, Artificial Sequence
  Description of Artificial Sequence: Synthetic oligonucleotide
  Antisense strand to SEQ ID NO: 1502796
agauacaggcgauucucuu

SEQ ID NO: 1502798 - RNA, 19 nt, Artificial Sequence
  Description of Artificial Sequence: Synthetic oligonucleotide
  Sense strand starting at position 3385 of SEQ ID NO: 1244624
uuuaacauaucgguaauag

SEQ ID NO: 1502799 - RNA, 19 nt, Artificial Sequence
  Description of Artificial Sequence: Synthetic oligonucleotide
  Antisense strand to SEQ ID NO: 1502798
cuauuaccgauauguuaaa

SEQ ID NO: 1502800 - RNA, 19 nt, Artificial Sequence
  Description of Artificial Sequence: Synthetic oligonucleotide
  Sense strand starting at position 3386 of SEQ ID NO: 1244624
uuaacauaucgguaauagu

SEQ ID NO: 1502801 - RNA, 19 nt, Artificial Sequence
  Description of Artificial Sequence: Synthetic oligonucleotide
  Antisense strand to SEQ ID NO: 1502800
acuauuaccgauauguuaa

SEQ ID NO: 1502802 - RNA, 19 nt, Artificial Sequence
  Description of Artificial Sequence: Synthetic oligonucleotide
  Sense strand starting at position 3394 of SEQ ID NO: 1244624
ucgguaauaguagauuaua

SEQ ID NO: 1502803 - RNA, 19 nt, Artificial Sequence
  Description of Artificial Sequence: Synthetic oligonucleotide
  Antisense strand to SEQ ID NO: 1502802
uauaaucuacuauuaccga

SEQ ID NO: 1502804 - RNA, 19 nt, Artificial Sequence
  Description of Artificial Sequence: Synthetic oligonucleotide
  Sense strand starting at position 3410 of SEQ ID NO: 1244624
auauaaguguuagccacua

SEQ ID NO: 1502805 - RNA, 19 nt, Artificial Sequence
  Description of Artificial Sequence: Synthetic oligonucleotide
  Antisense strand to SEQ ID NO: 1502804
uaguggcuaacacuuauau

SEQ ID NO: 1502806 - RNA, 19 nt, Artificial Sequence
  Description of Artificial Sequence: Synthetic oligonucleotide
  Sense strand starting at position 3415 of SEQ ID NO: 1244624
aguguuagccacuauuaua

SEQ ID NO: 1502807 - RNA, 19 nt, Artificial Sequence
  Description of Artificial Sequence: Synthetic oligonucleotide
  Antisense strand to SEQ ID NO: 1502806
uauaauaguggcuaacacu

SEQ ID NO: 1502808 - RNA, 19 nt, Artificial Sequence
  Description of Artificial Sequence: Synthetic oligonucleotide
  Sense strand starting at position 3484 of SEQ ID NO: 1244624
ucauguagaccuuguauuc

SEQ ID NO: 1502809 - RNA, 19 nt, Artificial Sequence
  Description of Artificial Sequence: Synthetic oligonucleotide
  Antisense strand to SEQ ID NO: 1502808
gaauacaaggucuacauga

SEQ ID NO: 1502810 - RNA, 19 nt, Artificial Sequence
  Description of Artificial Sequence: Synthetic oligonucleotide
  Sense strand starting at position 3733 of SEQ ID NO: 1244624
cgaguugacgucuaaagau

SEQ ID NO: 1502811 - RNA, 19 nt, Artificial Sequence
  Description of Artificial Sequence: Synthetic oligonucleotide
  Antisense strand to SEQ ID NO: 1502810
aucuuuagacgucaacucg

SEQ ID NO: 1502812 - RNA, 19 nt, Artificial Sequence
  Description of Artificial Sequence: Synthetic oligonucleotide
  Sense strand starting at position 3741 of SEQ ID NO: 1244624
cgucuaaagauaggauauc

SEQ ID NO: 1502813 - RNA, 19 nt, Artificial Sequence
  Description of Artificial Sequence: Synthetic oligonucleotide
  Antisense strand to SEQ ID NO: 1502812
gauauccuaucuuuagacg

SEQ ID NO: 1502814 - RNA, 19 nt, Artificial Sequence
  Description of Artificial Sequence: Synthetic oligonucleotide
  Sense strand starting at position 3860 of SEQ ID NO: 1244624
gguugcuuaguugaaguua

SEQ ID NO: 1502815 - RNA, 19 nt, Artificial Sequence
  Description of Artificial Sequence: Synthetic oligonucleotide
  Antisense strand to SEQ ID NO: 1502814
uaacuucaacuaagcaacc

SEQ ID NO: 1502816 - RNA, 19 nt, Artificial Sequence
  Description of Artificial Sequence: Synthetic oligonucleotide
  Sense strand starting at position 3928 of SEQ ID NO: 1244624
cuugaaugcuaugcuaaag

SEQ ID NO: 1502817 - RNA, 19 nt, Artificial Sequence
  Description of Artificial Sequence: Synthetic oligonucleotide
  Antisense strand to SEQ ID NO: 1502816
cuuuagcauagcauucaag

SEQ ID NO: 1502818 - RNA, 19 nt, Artificial Sequence
  Description of Artificial Sequence: Synthetic oligonucleotide
  Sense strand starting at position 476 of SEQ ID NO: 1244625
guaugcuguggaugggaau

SEQ ID NO: 1502819 - RNA, 19 nt, Artificial Sequence
  Description of Artificial Sequence: Synthetic oligonucleotide
  Antisense strand to SEQ ID NO: 1502818
auucccauccacagcauac

SEQ ID NO: 1502820 - RNA, 19 nt, Artificial Sequence
  Description of Artificial Sequence: Synthetic oligonucleotide
  Sense strand starting at position 552 of SEQ ID NO: 1244625
gccaguauggauggagaga

SEQ ID NO: 1502821 - RNA, 19 nt, Artificial Sequence
  Description of Artificial Sequence: Synthetic oligonucleotide
  Antisense strand to SEQ ID NO: 1502820
ucucuccauccauacuggc

SEQ ID NO: 1502822 - RNA, 19 nt, Artificial Sequence
  Description of Artificial Sequence: Synthetic oligonucleotide
  Sense strand starting at position 572 of SEQ ID NO: 1244625
gccagugggcuugauagau

SEQ ID NO: 1502823 - RNA, 19 nt, Artificial Sequence
  Description of Artificial Sequence: Synthetic oligonucleotide
  Antisense strand to SEQ ID NO: 1502822
aucuaucaagcccacuggc

SEQ ID NO: 1502824 - RNA, 19 nt, Artificial Sequence
  Description of Artificial Sequence: Synthetic oligonucleotide
  Sense strand starting at position 580 of SEQ ID NO: 1244625
gcuugauagaucuacgcag

SEQ ID NO: 1502825 - RNA, 19 nt, Artificial Sequence
  Description of Artificial Sequence: Synthetic oligonucleotide
  Antisense strand to SEQ ID NO: 1502824
cugcguagaucuaucaagc

SEQ ID NO: 1502826 - RNA, 19 nt, Artificial Sequence
  Description of Artificial Sequence: Synthetic oligonucleotide
  Sense strand starting at position 644 of SEQ ID NO: 1244625
uggacaauauaggaggaau

SEQ ID NO: 1502827 - RNA, 19 nt, Artificial Sequence
  Description of Artificial Sequence: Synthetic oligonucleotide
  Antisense strand to SEQ ID NO: 1502826
auuccuccuauauugucca

SEQ ID NO: 1502828 - RNA, 19 nt, Artificial Sequence
  Description of Artificial Sequence: Synthetic oligonucleotide
  Sense strand starting at position 758 of SEQ ID NO: 1244625
uuugcuuugggauacguau

SEQ ID NO: 1502829 - RNA, 19 nt, Artificial Sequence
  Description of Artificial Sequence: Synthetic oligonucleotide
  Antisense strand to SEQ ID NO: 1502828
auacguaucccaaagcaaa

SEQ ID NO: 1502830 - RNA, 19 nt, Artificial Sequence
  Description of Artificial Sequence: Synthetic oligonucleotide
  Sense strand starting at position 790 of SEQ ID NO: 1244625
cccucugaagcauggaaua

SEQ ID NO: 1502831 - RNA, 19 nt, Artificial Sequence
  Description of Artificial Sequence: Synthetic oligonucleotide
  Antisense strand to SEQ ID NO: 1502830
uauuccaugcuucagaggg

SEQ ID NO: 1502832 - RNA, 19 nt, Artificial Sequence
  Description of Artificial Sequence: Synthetic oligonucleotide
  Sense strand starting at position 843 of SEQ ID NO: 1244625
aaagguggcucuguacaaa

SEQ ID NO: 1502833 - RNA, 19 nt, Artificial Sequence
  Description of Artificial Sequence: Synthetic oligonucleotide
  Antisense strand to SEQ ID NO: 1502832
uuuguacagagccaccuuu

SEQ ID NO: 1502834 - RNA, 19 nt, Artificial Sequence
  Description of Artificial Sequence: Synthetic oligonucleotide
  Sense strand starting at position 846 of SEQ ID NO: 1244625
gguggcucuguacaaagaa

SEQ ID NO: 1502835 - RNA, 19 nt, Artificial Sequence
  Description of Artificial Sequence: Synthetic oligonucleotide
  Antisense strand to SEQ ID NO: 1502834
uucuuuguacagagccacc

SEQ ID NO: 1502836 - RNA, 19 nt, Artificial Sequence
  Description of Artificial Sequence: Synthetic oligonucleotide
  Sense strand starting at position 1209 of SEQ ID NO: 1244625
aagaaauugccucgggagu

SEQ ID NO: 1502837 - RNA, 19 nt, Artificial Sequence
  Description of Artificial Sequence: Synthetic oligonucleotide
  Antisense strand to SEQ ID NO: 1502836
acucccgaggcaauuucuu

SEQ ID NO: 1502838 - RNA, 19 nt, Artificial Sequence
  Description of Artificial Sequence: Synthetic oligonucleotide
  Sense strand starting at position 1333 of SEQ ID NO: 1244625
gagggugugaccugaagca

SEQ ID NO: 1502839 - RNA, 19 nt, Artificial Sequence
  Description of Artificial Sequence: Synthetic oligonucleotide
  Antisense strand to SEQ ID NO: 1502838
ugcuucaggucacacccuc

SEQ ID NO: 1502840 - RNA, 19 nt, Artificial Sequence
  Description of Artificial Sequence: Synthetic oligonucleotide
  Sense strand starting at position 1472 of SEQ ID NO: 1244625
ggaugacuggaguggguua

SEQ ID NO: 1502841 - RNA, 19 nt, Artificial Sequence
  Description of Artificial Sequence: Synthetic oligonucleotide
  Antisense strand to SEQ ID NO: 1502840
uaacccacuccagucaucc

SEQ ID NO: 1502842 - RNA, 19 nt, Artificial Sequence
  Description of Artificial Sequence: Synthetic oligonucleotide
  Sense strand starting at position 1474 of SEQ ID NO: 1244625
augacuggaguggguuaaa

SEQ ID NO: 1502843 - RNA, 19 nt, Artificial Sequence
  Description of Artificial Sequence: Synthetic oligonucleotide
  Antisense strand to SEQ ID NO: 1502842
uuuaacccacuccagucau

SEQ ID NO: 1502844 - RNA, 19 nt, Artificial Sequence
  Description of Artificial Sequence: Synthetic oligonucleotide
  Sense strand starting at position 1479 of SEQ ID NO: 1244625
uggaguggguuaaagaguu

SEQ ID NO: 1502845 - RNA, 19 nt, Artificial Sequence
  Description of Artificial Sequence: Synthetic oligonucleotide
  Antisense strand to SEQ ID NO: 1502844
aacucuuuaacccacucca

SEQ ID NO: 1502846 - RNA, 19 nt, Artificial Sequence
  Description of Artificial Sequence: Synthetic oligonucleotide
  Sense strand starting at position 1485 of SEQ ID NO: 1244625
ggguuaaagaguugaugaa

SEQ ID NO: 1502847 - RNA, 19 nt, Artificial Sequence
  Description of Artificial Sequence: Synthetic oligonucleotide
  Antisense strand to SEQ ID NO: 1502846
uucaucaacucuuuaaccc

SEQ ID NO: 1502848 - RNA, 19 nt, Artificial Sequence
  Description of Artificial Sequence: Synthetic oligonucleotide
  Sense strand starting at position 1573 of SEQ ID NO: 1244625
gaaaguguccgcaggugga

SEQ ID NO: 1502849 - RNA, 19 nt, Artificial Sequence
  Description of Artificial Sequence: Synthetic oligonucleotide
  Antisense strand to SEQ ID NO: 1502848
uccaccugcggacacuuuc

SEQ ID NO: 1502850 - RNA, 19 nt, Artificial Sequence
  Description of Artificial Sequence: Synthetic oligonucleotide
  Sense strand starting at position 1622 of SEQ ID NO: 1244625
uuuguucuuacguaggaaa

SEQ ID NO: 1502851 - RNA, 19 nt, Artificial Sequence
  Description of Artificial Sequence: Synthetic oligonucleotide
  Antisense strand to SEQ ID NO: 1502850
uuuccuacguaagaacaaa

SEQ ID NO: 1502852 - RNA, 19 nt, Artificial Sequence
  Description of Artificial Sequence: Synthetic oligonucleotide
  Sense strand starting at position 1654 of SEQ ID NO: 1244625
uuuaaagacgaucgaaaga

SEQ ID NO: 1502853 - RNA, 19 nt, Artificial Sequence
  Description of Artificial Sequence: Synthetic oligonucleotide
  Antisense strand to SEQ ID NO: 1502852
ucuuucgaucgucuuuaaa

SEQ ID NO: 1502854 - RNA, 19 nt, Artificial Sequence
  Description of Artificial Sequence: Synthetic oligonucleotide
  Sense strand starting at position 2468 of SEQ ID NO: 1244625
gcacuuuaugccgucagua

SEQ ID NO: 1502855 - RNA, 19 nt, Artificial Sequence
  Description of Artificial Sequence: Synthetic oligonucleotide
  Antisense strand to SEQ ID NO: 1502854
uacugacggcauaaagugc

SEQ ID NO: 1502856 - RNA, 19 nt, Artificial Sequence
  Description of Artificial Sequence: Synthetic oligonucleotide
  Sense strand starting at position 2530 of SEQ ID NO: 1244625
gaaucacagcugggaaauc

SEQ ID NO: 1502857 - RNA, 19 nt, Artificial Sequence
  Description of Artificial Sequence: Synthetic oligonucleotide
  Antisense strand to SEQ ID NO: 1502856
gauuucccagcugugauuc

SEQ ID NO: 1502858 - RNA, 19 nt, Artificial Sequence
  Description of Artificial Sequence: Synthetic oligonucleotide
  Sense strand starting at position 2634 of SEQ ID NO: 1244625
aggguugguccggaaagca

SEQ ID NO: 1502859 - RNA, 19 nt, Artificial Sequence
  Description of Artificial Sequence: Synthetic oligonucleotide
  Antisense strand to SEQ ID NO: 1502858
ugcuuuccggaccaacccu

SEQ ID NO: 1502860 - RNA, 19 nt, Artificial Sequence
  Description of Artificial Sequence: Synthetic oligonucleotide
  Sense strand starting at position 2652 of SEQ ID NO: 1244625
augaguagccuaugccaaa

SEQ ID NO: 1502861 - RNA, 19 nt, Artificial Sequence
  Description of Artificial Sequence: Synthetic oligonucleotide
  Antisense strand to SEQ ID NO: 1502860
uuuggcauaggcuacucau

SEQ ID NO: 1502862 - RNA, 19 nt, Artificial Sequence
  Description of Artificial Sequence: Synthetic oligonucleotide
  Sense strand starting at position 2681 of SEQ ID NO: 1244625
guugaaauagccuggcaag

SEQ ID NO: 1502863 - RNA, 19 nt, Artificial Sequence
  Description of Artificial Sequence: Synthetic oligonucleotide
  Antisense strand to SEQ ID NO: 1502862
cuugccaggcuauuucaac

SEQ ID NO: 1502864 - RNA, 19 nt, Artificial Sequence
  Description of Artificial Sequence: Synthetic oligonucleotide
  Sense strand starting at position 2748 of SEQ ID NO: 1244625
guaagugacaccugagaau

SEQ ID NO: 1502865 - RNA, 19 nt, Artificial Sequence
  Description of Artificial Sequence: Synthetic oligonucleotide
  Antisense strand to SEQ ID NO: 1502864
auucucaggugucacuuac

SEQ ID NO: 1502866 - RNA, 19 nt, Artificial Sequence
  Description of Artificial Sequence: Synthetic oligonucleotide
  Sense strand starting at position 2825 of SEQ ID NO: 1244625
uggaguagcguugaugaau

SEQ ID NO: 1502867 - RNA, 19 nt, Artificial Sequence
  Description of Artificial Sequence: Synthetic oligonucleotide
  Antisense strand to SEQ ID NO: 1502866
auucaucaacgcuacucca

SEQ ID NO: 1502868 - RNA, 19 nt, Artificial Sequence
  Description of Artificial Sequence: Synthetic oligonucleotide
  Sense strand starting at position 2836 of SEQ ID NO: 1244625
ugaugaauuuaagggcaga

SEQ ID NO: 1502869 - RNA, 19 nt, Artificial Sequence
  Description of Artificial Sequence: Synthetic oligonucleotide
  Antisense strand to SEQ ID NO: 1502868
ucugcccuuaaauucauca

SEQ ID NO: 1502870 - RNA, 19 nt, Artificial Sequence
  Description of Artificial Sequence: Synthetic oligonucleotide
  Sense strand starting at position 2905 of SEQ ID NO: 1244625
ugccaauggcauggacauu

SEQ ID NO: 1502871 - RNA, 19 nt, Artificial Sequence
  Description of Artificial Sequence: Synthetic oligonucleotide
  Antisense strand to SEQ ID NO: 1502870
aauguccaugccauuggca

SEQ ID NO: 1502872 - RNA, 19 nt, Artificial Sequence
  Description of Artificial Sequence: Synthetic oligonucleotide
  Sense strand starting at position 2906 of SEQ ID NO: 1244625
gccaauggcauggacauua

SEQ ID NO: 1502873 - RNA, 19 nt, Artificial Sequence
  Description of Artificial Sequence: Synthetic oligonucleotide
  Antisense strand to SEQ ID NO: 1502872
uaauguccaugccauuggc

SEQ ID NO: 1502874 - RNA, 19 nt, Artificial Sequence
  Description of Artificial Sequence: Synthetic oligonucleotide
  Sense strand starting at position 2928 of SEQ ID NO: 1244625
auaacacucuaggaagaau

SEQ ID NO: 1502875 - RNA, 19 nt, Artificial Sequence
  Description of Artificial Sequence: Synthetic oligonucleotide
  Antisense strand to SEQ ID NO: 1502874
auucuuccuagaguguuau

SEQ ID NO: 1502876 - RNA, 19 nt, Artificial Sequence
  Description of Artificial Sequence: Synthetic oligonucleotide
  Sense strand starting at position 2966 of SEQ ID NO: 1244625
acuuaaucagaacgcugaa

SEQ ID NO: 1502877 - RNA, 19 nt, Artificial Sequence
  Description of Artificial Sequence: Synthetic oligonucleotide
  Antisense strand to SEQ ID NO: 1502876
uucagcguucugauuaagu

SEQ ID NO: 1502878 - RNA, 19 nt, Artificial Sequence
  Description of Artificial Sequence: Synthetic oligonucleotide
  Sense strand starting at position 2976 of SEQ ID NO: 1244625
aacgcugaacuauguaaga

SEQ ID NO: 1502879 - RNA, 19 nt, Artificial Sequence
  Description of Artificial Sequence: Synthetic oligonucleotide
  Antisense strand to SEQ ID NO: 1502878
ucuuacauaguucagcguu

SEQ ID NO: 1502880 - RNA, 19 nt, Artificial Sequence
  Description of Artificial Sequence: Synthetic oligonucleotide
  Sense strand starting at position 2978 of SEQ ID NO: 1244625
cgcugaacuauguaagaga

SEQ ID NO: 1502881 - RNA, 19 nt, Artificial Sequence
  Description of Artificial Sequence: Synthetic oligonucleotide
  Antisense strand to SEQ ID NO: 1502880
ucucuuacauaguucagcg

SEQ ID NO: 1502882 - RNA, 19 nt, Artificial Sequence
  Description of Artificial Sequence: Synthetic oligonucleotide
  Sense strand starting at position 2998 of SEQ ID NO: 1244625
ggaaauaccuuguuaaaug

SEQ ID NO: 1502883 - RNA, 19 nt, Artificial Sequence
  Description of Artificial Sequence: Synthetic oligonucleotide
  Antisense strand to SEQ ID NO: 1502882
cauuuaacaagguauuucc

SEQ ID NO: 1502884 - RNA, 19 nt, Artificial Sequence
  Description of Artificial Sequence: Synthetic oligonucleotide
  Sense strand starting at position 3394 of SEQ ID NO: 1244625
cacagaugguagcuaucua

SEQ ID NO: 1502885 - RNA, 19 nt, Artificial Sequence
  Description of Artificial Sequence: Synthetic oligonucleotide
  Antisense strand to SEQ ID NO: 1502884
uagauagcuaccaucugug

SEQ ID NO: 1502886 - RNA, 19 nt, Artificial Sequence
  Description of Artificial Sequence: Synthetic oligonucleotide
  Sense strand starting at position 3413 of SEQ ID NO: 1244625
gucugcuucgucuuuguau

SEQ ID NO: 1502887 - RNA, 19 nt, Artificial Sequence
  Description of Artificial Sequence: Synthetic oligonucleotide
  Antisense strand to SEQ ID NO: 1502886
auacaaagacgaagcagac

SEQ ID NO: 1502888 - RNA, 19 nt, Artificial Sequence
  Description of Artificial Sequence: Synthetic oligonucleotide
  Sense strand starting at position 3490 of SEQ ID NO: 1244625
gaaggauguugagugaauu

SEQ ID NO: 1502889 - RNA, 19 nt, Artificial Sequence
  Description of Artificial Sequence: Synthetic oligonucleotide
  Antisense strand to SEQ ID NO: 1502888
aauucacucaacauccuuc

SEQ ID NO: 1502890 - RNA, 19 nt, Artificial Sequence
  Description of Artificial Sequence: Synthetic oligonucleotide
  Sense strand starting at position 3491 of SEQ ID NO: 1244625
aaggauguugagugaauug

SEQ ID NO: 1502891 - RNA, 19 nt, Artificial Sequence
  Description of Artificial Sequence: Synthetic oligonucleotide
  Antisense strand to SEQ ID NO: 1502890
caauucacucaacauccuu

SEQ ID NO: 1502892 - RNA, 19 nt, Artificial Sequence
  Description of Artificial Sequence: Synthetic oligonucleotide
  Sense strand starting at position 3501 of SEQ ID NO: 1244625
agugaauugcugugagaaa

SEQ ID NO: 1502893 - RNA, 19 nt, Artificial Sequence
  Description of Artificial Sequence: Synthetic oligonucleotide
  Antisense strand to SEQ ID NO: 1502892
uuucucacagcaauucacu

SEQ ID NO: 1502894 - RNA, 19 nt, Artificial Sequence
  Description of Artificial Sequence: Synthetic oligonucleotide
  Sense strand starting at position 3582 of SEQ ID NO: 1244625
ucaggcuuccuugaaugaa

SEQ ID NO: 1502895 - RNA, 19 nt, Artificial Sequence
  Description of Artificial Sequence: Synthetic oligonucleotide
  Antisense strand to SEQ ID NO: 1502894
uucauucaaggaagccuga

SEQ ID NO: 1502896 - RNA, 19 nt, Artificial Sequence
  Description of Artificial Sequence: Synthetic oligonucleotide
  Sense strand starting at position 3585 of SEQ ID NO: 1244625
ggcuuccuugaaugaaauc

SEQ ID NO: 1502897 - RNA, 19 nt, Artificial Sequence
  Description of Artificial Sequence: Synthetic oligonucleotide
  Antisense strand to SEQ ID NO: 1502896
gauuucauucaaggaagcc

SEQ ID NO: 1502898 - RNA, 19 nt, Artificial Sequence
  Description of Artificial Sequence: Synthetic oligonucleotide
  Sense strand starting at position 38 of SEQ ID NO: 1244626
uggguuaaaggcuguugaa

SEQ ID NO: 1502899 - RNA, 19 nt, Artificial Sequence
  Description of Artificial Sequence: Synthetic oligonucleotide
  Antisense strand to SEQ ID NO: 1502898
uucaacagccuuuaaccca

SEQ ID NO: 1502900 - RNA, 19 nt, Artificial Sequence
  Description of Artificial Sequence: Synthetic oligonucleotide
  Sense strand starting at position 405 of SEQ ID NO: 1244626
acucuuacauuaguugaga

SEQ ID NO: 1502901 - RNA, 19 nt, Artificial Sequence
  Description of Artificial Sequence: Synthetic oligonucleotide
  Antisense strand to SEQ ID NO: 1502900
ucucaacuaauguaagagu

SEQ ID NO: 1502902 - RNA, 19 nt, Artificial Sequence
  Description of Artificial Sequence: Synthetic oligonucleotide
  Sense strand starting at position 406 of SEQ ID NO: 1244626
cucuuacauuaguugagaa

SEQ ID NO: 1502903 - RNA, 19 nt, Artificial Sequence
  Description of Artificial Sequence: Synthetic oligonucleotide
  Antisense strand to SEQ ID NO: 1502902
uucucaacuaauguaagag

SEQ ID NO: 1502904 - RNA, 19 nt, Artificial Sequence
  Description of Artificial Sequence: Synthetic oligonucleotide
  Sense strand starting at position 485 of SEQ ID NO: 1244626
ugcauauuccucuguagag

SEQ ID NO: 1502905 - RNA, 19 nt, Artificial Sequence
  Description of Artificial Sequence: Synthetic oligonucleotide
  Antisense strand to SEQ ID NO: 1502904
cucuacagaggaauaugca

SEQ ID NO: 1502906 - RNA, 19 nt, Artificial Sequence
  Description of Artificial Sequence: Synthetic oligonucleotide
  Sense strand starting at position 486 of SEQ ID NO: 1244626
gcauauuccucuguagaga

SEQ ID NO: 1502907 - RNA, 19 nt, Artificial Sequence
  Description of Artificial Sequence: Synthetic oligonucleotide
  Antisense strand to SEQ ID NO: 1502906
ucucuacagaggaauaugc

SEQ ID NO: 1502908 - RNA, 19 nt, Artificial Sequence
  Description of Artificial Sequence: Synthetic oligonucleotide
  Sense strand starting at position 579 of SEQ ID NO: 1244626
aaugguugugugcauaaua

SEQ ID NO: 1502909 - RNA, 19 nt, Artificial Sequence
  Description of Artificial Sequence: Synthetic oligonucleotide
  Antisense strand to SEQ ID NO: 1502908
uauuaugcacacaaccauu

SEQ ID NO: 1502910 - RNA, 19 nt, Artificial Sequence
  Description of Artificial Sequence: Synthetic oligonucleotide
  Sense strand starting at position 655 of SEQ ID NO: 1244626
ucuagauauggcuggguaa

SEQ ID NO: 1502911 - RNA, 19 nt, Artificial Sequence
  Description of Artificial Sequence: Synthetic oligonucleotide
  Antisense strand to SEQ ID NO: 1502910
uuacccagccauaucuaga

SEQ ID NO: 1502912 - RNA, 19 nt, Artificial Sequence
  Description of Artificial Sequence: Synthetic oligonucleotide
  Sense strand starting at position 656 of SEQ ID NO: 1244626
cuagauauggcuggguaac

SEQ ID NO: 1502913 - RNA, 19 nt, Artificial Sequence
  Description of Artificial Sequence: Synthetic oligonucleotide
  Antisense strand to SEQ ID NO: 1502912
guuacccagccauaucuag

SEQ ID NO: 1502914 - RNA, 19 nt, Artificial Sequence
  Description of Artificial Sequence: Synthetic oligonucleotide
  Sense strand starting at position 696 of SEQ ID NO: 1244626
uucugaacucagggagguu

SEQ ID NO: 1502915 - RNA, 19 nt, Artificial Sequence
  Description of Artificial Sequence: Synthetic oligonucleotide
  Antisense strand to SEQ ID NO: 1502914
aaccucccugaguucagaa

SEQ ID NO: 1502916 - RNA, 19 nt, Artificial Sequence
  Description of Artificial Sequence: Synthetic oligonucleotide
  Sense strand starting at position 762 of SEQ ID NO: 1244626
ucacaauucuaguuauagg

SEQ ID NO: 1502917 - RNA, 19 nt, Artificial Sequence
  Description of Artificial Sequence: Synthetic oligonucleotide
  Antisense strand to SEQ ID NO: 1502916
ccuauaacuagaauuguga

SEQ ID NO: 1502918 - RNA, 19 nt, Artificial Sequence
  Description of Artificial Sequence: Synthetic oligonucleotide
  Sense strand starting at position 808 of SEQ ID NO: 1244626
cgagacguggcuuaaacaa

SEQ ID NO: 1502919 - RNA, 19 nt, Artificial Sequence
  Description of Artificial Sequence: Synthetic oligonucleotide
  Antisense strand to SEQ ID NO: 1502918
uuguuuaagccacgucucg

SEQ ID NO: 1502920 - RNA, 19 nt, Artificial Sequence
  Description of Artificial Sequence: Synthetic oligonucleotide
  Sense strand starting at position 863 of SEQ ID NO: 1244626
cauugucaaggcugagaaa

SEQ ID NO: 1502921 - RNA, 19 nt, Artificial Sequence
  Description of Artificial Sequence: Synthetic oligonucleotide
  Antisense strand to SEQ ID NO: 1502920
uuucucagccuugacaaug

SEQ ID NO: 1502922 - RNA, 19 nt, Artificial Sequence
  Description of Artificial Sequence: Synthetic oligonucleotide
  Sense strand starting at position 874 of SEQ ID NO: 1244626
cugagaaacucugcuguau

SEQ ID NO: 1502923 - RNA, 19 nt, Artificial Sequence
  Description of Artificial Sequence: Synthetic oligonucleotide
  Antisense strand to SEQ ID NO: 1502922
auacagcagaguuucucag

SEQ ID NO: 1502924 - RNA, 19 nt, Artificial Sequence
  Description of Artificial Sequence: Synthetic oligonucleotide
  Sense strand starting at position 911 of SEQ ID NO: 1244626
cggguuacuuucuuggaca

SEQ ID NO: 1502925 - RNA, 19 nt, Artificial Sequence
  Description of Artificial Sequence: Synthetic oligonucleotide
  Antisense strand to SEQ ID NO: 1502924
uguccaagaaaguaacccg

SEQ ID NO: 1502926 - RNA, 19 nt, Artificial Sequence
  Description of Artificial Sequence: Synthetic oligonucleotide
  Sense strand starting at position 913 of SEQ ID NO: 1244626
gguuacuuucuuggacauu

SEQ ID NO: 1502927 - RNA, 19 nt, Artificial Sequence
  Description of Artificial Sequence: Synthetic oligonucleotide
  Antisense strand to SEQ ID NO: 1502926
aauguccaagaaaguaacc

SEQ ID NO: 1502928 - RNA, 19 nt, Artificial Sequence
  Description of Artificial Sequence: Synthetic oligonucleotide
  Sense strand starting at position 1117 of SEQ ID NO: 1244626
cggugauguccugaccaca

SEQ ID NO: 1502929 - RNA, 19 nt, Artificial Sequence
  Description of Artificial Sequence: Synthetic oligonucleotide
  Antisense strand to SEQ ID NO: 1502928
uguggucaggacaucaccg

SEQ ID NO: 1502930 - RNA, 19 nt, Artificial Sequence
  Description of Artificial Sequence: Synthetic oligonucleotide
  Sense strand starting at position 1120 of SEQ ID NO: 1244626
ugauguccugaccacaauu

SEQ ID NO: 1502931 - RNA, 19 nt, Artificial Sequence
  Description of Artificial Sequence: Synthetic oligonucleotide
  Antisense strand to SEQ ID NO: 1502930
aauuguggucaggacauca

SEQ ID NO: 1502932 - RNA, 19 nt, Artificial Sequence
  Description of Artificial Sequence: Synthetic oligonucleotide
  Sense strand starting at position 1195 of SEQ ID NO: 1244626
gggcuaaucccacacucua

SEQ ID NO: 1502933 - RNA, 19 nt, Artificial Sequence
  Description of Artificial Sequence: Synthetic oligonucleotide
  Antisense strand to SEQ ID NO: 1502932
uagagugugggauuagccc

SEQ ID NO: 1502934 - RNA, 19 nt, Artificial Sequence
  Description of Artificial Sequence: Synthetic oligonucleotide
  Sense strand starting at position 2158 of SEQ ID NO: 1244626
ugacgagaaacguggucuu

SEQ ID NO: 1502935 - RNA, 19 nt, Artificial Sequence
  Description of Artificial Sequence: Synthetic oligonucleotide
  Antisense strand to SEQ ID NO: 1502934
aagaccacguuucucguca

SEQ ID NO: 1502936 - RNA, 19 nt, Artificial Sequence
  Description of Artificial Sequence: Synthetic oligonucleotide
  Sense strand starting at position 2503 of SEQ ID NO: 1244626
auacuagugacggaugagu

SEQ ID NO: 1502937 - RNA, 19 nt, Artificial Sequence
  Description of Artificial Sequence: Synthetic oligonucleotide
  Antisense strand to SEQ ID NO: 1502936
acucauccgucacuaguau

SEQ ID NO: 1502938 - RNA, 19 nt, Artificial Sequence
  Description of Artificial Sequence: Synthetic oligonucleotide
  Sense strand starting at position 2582 of SEQ ID NO: 1244626
uuuaguuucgucgagagaa

SEQ ID NO: 1502939 - RNA, 19 nt, Artificial Sequence
  Description of Artificial Sequence: Synthetic oligonucleotide
  Antisense strand to SEQ ID NO: 1502938
uucucucgacgaaacuaaa

SEQ ID NO: 1502940 - RNA, 19 nt, Artificial Sequence
  Description of Artificial Sequence: Synthetic oligonucleotide
  Sense strand starting at position 2584 of SEQ ID NO: 1244626
uaguuucgucgagagaaac

SEQ ID NO: 1502941 - RNA, 19 nt, Artificial Sequence
  Description of Artificial Sequence: Synthetic oligonucleotide
  Antisense strand to SEQ ID NO: 1502940
guuucucucgacgaaacua

SEQ ID NO: 1502942 - RNA, 19 nt, Artificial Sequence
  Description of Artificial Sequence: Synthetic oligonucleotide
  Sense strand starting at position 2595 of SEQ ID NO: 1244626
agagaaaccuguuuccuga

SEQ ID NO: 1502943 - RNA, 19 nt, Artificial Sequence
  Description of Artificial Sequence: Synthetic oligonucleotide
  Antisense strand to SEQ ID NO: 1502942
ucaggaaacagguuucucu

SEQ ID NO: 1502944 - RNA, 19 nt, Artificial Sequence
  Description of Artificial Sequence: Synthetic oligonucleotide
  Sense strand starting at position 2598 of SEQ ID NO: 1244626
gaaaccuguuuccugaugu

SEQ ID NO: 1502945 - RNA, 19 nt, Artificial Sequence
  Description of Artificial Sequence: Synthetic oligonucleotide
  Antisense strand to SEQ ID NO: 1502944
acaucaggaaacagguuuc

SEQ ID NO: 1502946 - RNA, 19 nt, Artificial Sequence
  Description of Artificial Sequence: Synthetic oligonucleotide
  Sense strand starting at position 2611 of SEQ ID NO: 1244626
ugaugugacgcuuauaaua

SEQ ID NO: 1502947 - RNA, 19 nt, Artificial Sequence
  Description of Artificial Sequence: Synthetic oligonucleotide
  Antisense strand to SEQ ID NO: 1502946
uauuauaagcgucacauca

SEQ ID NO: 1502948 - RNA, 19 nt, Artificial Sequence
  Description of Artificial Sequence: Synthetic oligonucleotide
  Sense strand starting at position 2618 of SEQ ID NO: 1244626
acgcuuauaauagguuaga

SEQ ID NO: 1502949 - RNA, 19 nt, Artificial Sequence
  Description of Artificial Sequence: Synthetic oligonucleotide
  Antisense strand to SEQ ID NO: 1502948
ucuaaccuauuauaagcgu

SEQ ID NO: 1502950 - RNA, 19 nt, Artificial Sequence
  Description of Artificial Sequence: Synthetic oligonucleotide
  Sense strand starting at position 2619 of SEQ ID NO: 1244626
cgcuuauaauagguuagau

SEQ ID NO: 1502951 - RNA, 19 nt, Artificial Sequence
  Description of Artificial Sequence: Synthetic oligonucleotide
  Antisense strand to SEQ ID NO: 1502950
aucuaaccuauuauaagcg

SEQ ID NO: 1502952 - RNA, 19 nt, Artificial Sequence
  Description of Artificial Sequence: Synthetic oligonucleotide
  Sense strand starting at position 2698 of SEQ ID NO: 1244626
ucaugcuugacauggagga

SEQ ID NO: 1502953 - RNA, 19 nt, Artificial Sequence
  Description of Artificial Sequence: Synthetic oligonucleotide
  Antisense strand to SEQ ID NO: 1502952
uccuccaugucaagcauga

SEQ ID NO: 1502954 - RNA, 19 nt, Artificial Sequence
  Description of Artificial Sequence: Synthetic oligonucleotide
  Sense strand starting at position 2714 of SEQ ID NO: 1244626
ggaggaagucucuguuaau

SEQ ID NO: 1502955 - RNA, 19 nt, Artificial Sequence
  Description of Artificial Sequence: Synthetic oligonucleotide
  Antisense strand to SEQ ID NO: 1502954
auuaacagagacuuccucc

SEQ ID NO: 1502956 - RNA, 19 nt, Artificial Sequence
  Description of Artificial Sequence: Synthetic oligonucleotide
  Sense strand starting at position 2715 of SEQ ID NO: 1244626
gaggaagucucuguuaauu

SEQ ID NO: 1502957 - RNA, 19 nt, Artificial Sequence
  Description of Artificial Sequence: Synthetic oligonucleotide
  Antisense strand to SEQ ID NO: 1502956
aauuaacagagacuuccuc

SEQ ID NO: 1502958 - RNA, 19 nt, Artificial Sequence
  Description of Artificial Sequence: Synthetic oligonucleotide
  Sense strand starting at position 2821 of SEQ ID NO: 1244626
gggugugauccagaaagua

SEQ ID NO: 1502959 - RNA, 19 nt, Artificial Sequence
  Description of Artificial Sequence: Synthetic oligonucleotide
  Antisense strand to SEQ ID NO: 1502958
uacuuucuggaucacaccc

SEQ ID NO: 1502960 - RNA, 19 nt, Artificial Sequence
  Description of Artificial Sequence: Synthetic oligonucleotide
  Sense strand starting at position 2846 of SEQ ID NO: 1244626
acuugccguggucaaauau

SEQ ID NO: 1502961 - RNA, 19 nt, Artificial Sequence
  Description of Artificial Sequence: Synthetic oligonucleotide
  Antisense strand to SEQ ID NO: 1502960
auauuugaccacggcaagu

SEQ ID NO: 1502962 - RNA, 19 nt, Artificial Sequence
  Description of Artificial Sequence: Synthetic oligonucleotide
  Sense strand starting at position 2855 of SEQ ID NO: 1244626
ggucaaauauugguuuaug

SEQ ID NO: 1502963 - RNA, 19 nt, Artificial Sequence
  Description of Artificial Sequence: Synthetic oligonucleotide
  Antisense strand to SEQ ID NO: 1502962
cauaaaccaauauuugacc

SEQ ID NO: 1502964 - RNA, 19 nt, Artificial Sequence
  Description of Artificial Sequence: Synthetic oligonucleotide
  Sense strand starting at position 2866 of SEQ ID NO: 1244626
gguuuauggaaauguuuau

SEQ ID NO: 1502965 - RNA, 19 nt, Artificial Sequence
  Description of Artificial Sequence: Synthetic oligonucleotide
  Antisense strand to SEQ ID NO: 1502964
auaaacauuuccauaaacc

SEQ ID NO: 1502966 - RNA, 19 nt, Artificial Sequence
  Description of Artificial Sequence: Synthetic oligonucleotide
  Sense strand starting at position 2879 of SEQ ID NO: 1244626
guuuauuuguaauacacag

SEQ ID NO: 1502967 - RNA, 19 nt, Artificial Sequence
  Description of Artificial Sequence: Synthetic oligonucleotide
  Antisense strand to SEQ ID NO: 1502966
cuguguauuacaaauaaac

SEQ ID NO: 1502968 - RNA, 19 nt, Artificial Sequence
  Description of Artificial Sequence: Synthetic oligonucleotide
  Sense strand starting at position 2951 of SEQ ID NO: 1244626
uugugugcccgguccaauu

SEQ ID NO: 1502969 - RNA, 19 nt, Artificial Sequence
  Description of Artificial Sequence: Synthetic oligonucleotide
  Antisense strand to SEQ ID NO: 1502968
aauuggaccgggcacacaa

SEQ ID NO: 1502970 - RNA, 19 nt, Artificial Sequence
  Description of Artificial Sequence: Synthetic oligonucleotide
  Sense strand starting at position 2965 of SEQ ID NO: 1244626
caauucuuguuaccgagaa

SEQ ID NO: 1502971 - RNA, 19 nt, Artificial Sequence
  Description of Artificial Sequence: Synthetic oligonucleotide
  Antisense strand to SEQ ID NO: 1502970
uucucgguaacaagaauug

SEQ ID NO: 1502972 - RNA, 19 nt, Artificial Sequence
  Description of Artificial Sequence: Synthetic oligonucleotide
  Sense strand starting at position 2967 of SEQ ID NO: 1244626
auucuuguuaccgagaagu

SEQ ID NO: 1502973 - RNA, 19 nt, Artificial Sequence
  Description of Artificial Sequence: Synthetic oligonucleotide
  Antisense strand to SEQ ID NO: 1502972
acuucucgguaacaagaau

SEQ ID NO: 1502974 - RNA, 19 nt, Artificial Sequence
  Description of Artificial Sequence: Synthetic oligonucleotide
  Sense strand starting at position 2969 of SEQ ID NO: 1244626
ucuuguuaccgagaaguga

SEQ ID NO: 1502975 - RNA, 19 nt, Artificial Sequence
  Description of Artificial Sequence: Synthetic oligonucleotide
  Antisense strand to SEQ ID NO: 1502974
ucacuucucgguaacaaga

SEQ ID NO: 1502976 - RNA, 19 nt, Artificial Sequence
  Description of Artificial Sequence: Synthetic oligonucleotide
  Sense strand starting at position 2995 of SEQ ID NO: 1244626
uuaauaagacgcuagcaau

SEQ ID NO: 1502977 - RNA, 19 nt, Artificial Sequence
  Description of Artificial Sequence: Synthetic oligonucleotide
  Antisense strand to SEQ ID NO: 1502976
auugcuagcgucuuauuaa

SEQ ID NO: 1502978 - RNA, 19 nt, Artificial Sequence
  Description of Artificial Sequence: Synthetic oligonucleotide
  Sense strand starting at position 127 of SEQ ID NO: 1244627
ggaagaggucacugaguag

SEQ ID NO: 1502979 - RNA, 19 nt, Artificial Sequence
  Description of Artificial Sequence: Synthetic oligonucleotide
  Antisense strand to SEQ ID NO: 1502978
cuacucagugaccucuucc

SEQ ID NO: 1502980 - RNA, 19 nt, Artificial Sequence
  Description of Artificial Sequence: Synthetic oligonucleotide
  Sense strand starting at position 432 of SEQ ID NO: 1244627
ccugguauccacuacacau

SEQ ID NO: 1502981 - RNA, 19 nt, Artificial Sequence
  Description of Artificial Sequence: Synthetic oligonucleotide
  Antisense strand to SEQ ID NO: 1502980
auguguaguggauaccagg

SEQ ID NO: 1502982 - RNA, 19 nt, Artificial Sequence
  Description of Artificial Sequence: Synthetic oligonucleotide
  Sense strand starting at position 553 of SEQ ID NO: 1244627
gacgguccuccacaauaua

SEQ ID NO: 1502983 - RNA, 19 nt, Artificial Sequence
  Description of Artificial Sequence: Synthetic oligonucleotide
  Antisense strand to SEQ ID NO: 1502982
uauauuguggaggaccguc

SEQ ID NO: 1502984 - RNA, 19 nt, Artificial Sequence
  Description of Artificial Sequence: Synthetic oligonucleotide
  Sense strand starting at position 633 of SEQ ID NO: 1244627
caagaaucguacccacaug

SEQ ID NO: 1502985 - RNA, 19 nt, Artificial Sequence
  Description of Artificial Sequence: Synthetic oligonucleotide
  Antisense strand to SEQ ID NO: 1502984
cauguggguacgauucuug

SEQ ID NO: 1502986 - RNA, 19 nt, Artificial Sequence
  Description of Artificial Sequence: Synthetic oligonucleotide
  Sense strand starting at position 754 of SEQ ID NO: 1244627
ucugaauuccuccagcaug

SEQ ID NO: 1502987 - RNA, 19 nt, Artificial Sequence
  Description of Artificial Sequence: Synthetic oligonucleotide
  Antisense strand to SEQ ID NO: 1502986
caugcuggaggaauucaga

SEQ ID NO: 1502988 - RNA, 19 nt, Artificial Sequence
  Description of Artificial Sequence: Synthetic oligonucleotide
  Sense strand starting at position 1052 of SEQ ID NO: 1244627
cuauauacagguuguaaau

SEQ ID NO: 1502989 - RNA, 19 nt, Artificial Sequence
  Description of Artificial Sequence: Synthetic oligonucleotide
  Antisense strand to SEQ ID NO: 1502988
auuuacaaccuguauauag

SEQ ID NO: 1502990 - RNA, 19 nt, Artificial Sequence
  Description of Artificial Sequence: Synthetic oligonucleotide
  Sense strand starting at position 1058 of SEQ ID NO: 1244627
acagguuguaaauggaaca

SEQ ID NO: 1502991 - RNA, 19 nt, Artificial Sequence
  Description of Artificial Sequence: Synthetic oligonucleotide
  Antisense strand to SEQ ID NO: 1502990
uguuccauuuacaaccugu

SEQ ID NO: 1502992 - RNA, 19 nt, Artificial Sequence
  Description of Artificial Sequence: Synthetic oligonucleotide
  Sense strand starting at position 1298 of SEQ ID NO: 1244627
gggacuugucaccaaaugu

SEQ ID NO: 1502993 - RNA, 19 nt, Artificial Sequence
  Description of Artificial Sequence: Synthetic oligonucleotide
  Antisense strand to SEQ ID NO: 1502992
acauuuggugacaaguccc

SEQ ID NO: 1502994 - RNA, 19 nt, Artificial Sequence
  Description of Artificial Sequence: Synthetic oligonucleotide
  Sense strand starting at position 1302 of SEQ ID NO: 1244627
cuugucaccaaaugugagu

SEQ ID NO: 1502995 - RNA, 19 nt, Artificial Sequence
  Description of Artificial Sequence: Synthetic oligonucleotide
  Antisense strand to SEQ ID NO: 1502994
acucacauuuggugacaag

SEQ ID NO: 1502996 - RNA, 19 nt, Artificial Sequence
  Description of Artificial Sequence: Synthetic oligonucleotide
  Sense strand starting at position 1308 of SEQ ID NO: 1244627
accaaaugugaguauccca

SEQ ID NO: 1502997 - RNA, 19 nt, Artificial Sequence
  Description of Artificial Sequence: Synthetic oligonucleotide
  Antisense strand to SEQ ID NO: 1502996
ugggauacucacauuuggu

SEQ ID NO: 1502998 - RNA, 19 nt, Artificial Sequence
  Description of Artificial Sequence: Synthetic oligonucleotide
  Sense strand starting at position 1652 of SEQ ID NO: 1244627
ggcugccucuucuuuagaa

SEQ ID NO: 1502999 - RNA, 19 nt, Artificial Sequence
  Description of Artificial Sequence: Synthetic oligonucleotide
  Antisense strand to SEQ ID NO: 1502998
uucuaaagaagaggcagcc

SEQ ID NO: 1503000 - RNA, 19 nt, Artificial Sequence
  Description of Artificial Sequence: Synthetic oligonucleotide
  Sense strand starting at position 1653 of SEQ ID NO: 1244627
gcugccucuucuuuagaag

SEQ ID NO: 1503001 - RNA, 19 nt, Artificial Sequence
  Description of Artificial Sequence: Synthetic oligonucleotide
  Antisense strand to SEQ ID NO: 1503000
cuucuaaagaagaggcagc

SEQ ID NO: 1503002 - RNA, 19 nt, Artificial Sequence
  Description of Artificial Sequence: Synthetic oligonucleotide
  Sense strand starting at position 1703 of SEQ ID NO: 1244627
guuuccagucaacgauuaa

SEQ ID NO: 1503003 - RNA, 19 nt, Artificial Sequence
  Description of Artificial Sequence: Synthetic oligonucleotide
  Antisense strand to SEQ ID NO: 1503002
uuaaucguugacuggaaac

SEQ ID NO: 1503004 - RNA, 19 nt, Artificial Sequence
  Description of Artificial Sequence: Synthetic oligonucleotide
  Sense strand starting at position 1836 of SEQ ID NO: 1244627
uguccuuggagccaugaga

SEQ ID NO: 1503005 - RNA, 19 nt, Artificial Sequence
  Description of Artificial Sequence: Synthetic oligonucleotide
  Antisense strand to SEQ ID NO: 1503004
ucucauggcuccaaggaca

SEQ ID NO: 1503006 - RNA, 19 nt, Artificial Sequence
  Description of Artificial Sequence: Synthetic oligonucleotide
  Sense strand starting at position 1955 of SEQ ID NO: 1244627
cgagguguuccagaugagg

SEQ ID NO: 1503007 - RNA, 19 nt, Artificial Sequence
  Description of Artificial Sequence: Synthetic oligonucleotide
  Antisense strand to SEQ ID NO: 1503006
ccucaucuggaacaccucg

SEQ ID NO: 1503008 - RNA, 19 nt, Artificial Sequence
  Description of Artificial Sequence: Synthetic oligonucleotide
  Sense strand starting at position 1957 of SEQ ID NO: 1244627
agguguuccagaugaggag

SEQ ID NO: 1503009 - RNA, 19 nt, Artificial Sequence
  Description of Artificial Sequence: Synthetic oligonucleotide
  Antisense strand to SEQ ID NO: 1503008
cuccucaucuggaacaccu

SEQ ID NO: 1503010 - RNA, 19 nt, Artificial Sequence
  Description of Artificial Sequence: Synthetic oligonucleotide
  Sense strand starting at position 1974 of SEQ ID NO: 1244627
agcugaaucacugggacuu

SEQ ID NO: 1503011 - RNA, 19 nt, Artificial Sequence
  Description of Artificial Sequence: Synthetic oligonucleotide
  Antisense strand to SEQ ID NO: 1503010
aagucccagugauucagcu

SEQ ID NO: 1503012 - RNA, 19 nt, Artificial Sequence
  Description of Artificial Sequence: Synthetic oligonucleotide
  Sense strand starting at position 1975 of SEQ ID NO: 1244627
gcugaaucacugggacuua

SEQ ID NO: 1503013 - RNA, 19 nt, Artificial Sequence
  Description of Artificial Sequence: Synthetic oligonucleotide
  Antisense strand to SEQ ID NO: 1503012
uaagucccagugauucagc

SEQ ID NO: 1503014 - RNA, 19 nt, Artificial Sequence
  Description of Artificial Sequence: Synthetic oligonucleotide
  Sense strand starting at position 1976 of SEQ ID NO: 1244627
cugaaucacugggacuuaa

SEQ ID NO: 1503015 - RNA, 19 nt, Artificial Sequence
  Description of Artificial Sequence: Synthetic oligonucleotide
  Antisense strand to SEQ ID NO: 1503014
uuaagucccagugauucag

SEQ ID NO: 1503016 - RNA, 19 nt, Artificial Sequence
  Description of Artificial Sequence: Synthetic oligonucleotide
  Sense strand starting at position 2044 of SEQ ID NO: 1244627
ccuggauucuccucgugga

SEQ ID NO: 1503017 - RNA, 19 nt, Artificial Sequence
  Description of Artificial Sequence: Synthetic oligonucleotide
  Antisense strand to SEQ ID NO: 1503016
uccacgaggagaauccagg

SEQ ID NO: 1503018 - RNA, 19 nt, Artificial Sequence
  Description of Artificial Sequence: Synthetic oligonucleotide
  Sense strand starting at position 2045 of SEQ ID NO: 1244627
cuggauucuccucguggau

SEQ ID NO: 1503019 - RNA, 19 nt, Artificial Sequence
  Description of Artificial Sequence: Synthetic oligonucleotide
  Antisense strand to SEQ ID NO: 1503018
auccacgaggagaauccag

SEQ ID NO: 1503020 - RNA, 19 nt, Artificial Sequence
  Description of Artificial Sequence: Synthetic oligonucleotide
  Sense strand starting at position 2121 of SEQ ID NO: 1244627
ugggacgcuuccucuuaga

SEQ ID NO: 1503021 - RNA, 19 nt, Artificial Sequence
  Description of Artificial Sequence: Synthetic oligonucleotide
  Antisense strand to SEQ ID NO: 1503020
ucuaagaggaagcguccca

SEQ ID NO: 1503022 - RNA, 19 nt, Artificial Sequence
  Description of Artificial Sequence: Synthetic oligonucleotide
  Sense strand starting at position 2147 of SEQ ID NO: 1244627
ccucuuugggacuguuagu

SEQ ID NO: 1503023 - RNA, 19 nt, Artificial Sequence
  Description of Artificial Sequence: Synthetic oligonucleotide
  Antisense strand to SEQ ID NO: 1503022
acuaacagucccaaagagg

SEQ ID NO: 1503024 - RNA, 19 nt, Artificial Sequence
  Description of Artificial Sequence: Synthetic oligonucleotide
  Sense strand starting at position 2501 of SEQ ID NO: 1244627
ugacaaggaucucucuguu

SEQ ID NO: 1503025 - RNA, 19 nt, Artificial Sequence
  Description of Artificial Sequence: Synthetic oligonucleotide
  Antisense strand to SEQ ID NO: 1503024
aacagagagauccuuguca

SEQ ID NO: 1503026 - RNA, 19 nt, Artificial Sequence
  Description of Artificial Sequence: Synthetic oligonucleotide
  Sense strand starting at position 2504 of SEQ ID NO: 1244627
caaggaucucucuguugac

SEQ ID NO: 1503027 - RNA, 19 nt, Artificial Sequence
  Description of Artificial Sequence: Synthetic oligonucleotide
  Antisense strand to SEQ ID NO: 1503026
gucaacagagagauccuug

SEQ ID NO: 1503028 - RNA, 19 nt, Artificial Sequence
  Description of Artificial Sequence: Synthetic oligonucleotide
  Sense strand starting at position 2748 of SEQ ID NO: 1244627
gggaacaaggccgguuauu

SEQ ID NO: 1503029 - RNA, 19 nt, Artificial Sequence
  Description of Artificial Sequence: Synthetic oligonucleotide
  Antisense strand to SEQ ID NO: 1503028
aauaaccggccuuguuccc

SEQ ID NO: 1503030 - RNA, 19 nt, Artificial Sequence
  Description of Artificial Sequence: Synthetic oligonucleotide
  Sense strand starting at position 2759 of SEQ ID NO: 1244627
cgguuauuauaacccaaca

SEQ ID NO: 1503031 - RNA, 19 nt, Artificial Sequence
  Description of Artificial Sequence: Synthetic oligonucleotide
  Antisense strand to SEQ ID NO: 1503030
uguuggguuauaauaaccg

SEQ ID NO: 1503032 - RNA, 19 nt, Artificial Sequence
  Description of Artificial Sequence: Synthetic oligonucleotide
  Sense strand starting at position 2938 of SEQ ID NO: 1244627
aagguccugcaguaaagau

SEQ ID NO: 1503033 - RNA, 19 nt, Artificial Sequence
  Description of Artificial Sequence: Synthetic oligonucleotide
  Antisense strand to SEQ ID NO: 1503032
aucuuuacugcaggaccuu

SEQ ID NO: 1503034 - RNA, 19 nt, Artificial Sequence
  Description of Artificial Sequence: Synthetic oligonucleotide
  Sense strand starting at position 2954 of SEQ ID NO: 1244627
gauguugagaagugcugau

SEQ ID NO: 1503035 - RNA, 19 nt, Artificial Sequence
  Description of Artificial Sequence: Synthetic oligonucleotide
  Antisense strand to SEQ ID NO: 1503034
aucagcacuucucaacauc

SEQ ID NO: 1503036 - RNA, 19 nt, Artificial Sequence
  Description of Artificial Sequence: Synthetic oligonucleotide
  Sense strand starting at position 2983 of SEQ ID NO: 1244627
gguuauaugaaagggugga

SEQ ID NO: 1503037 - RNA, 19 nt, Artificial Sequence
  Description of Artificial Sequence: Synthetic oligonucleotide
  Antisense strand to SEQ ID NO: 1503036
uccacccuuucauauaacc

SEQ ID NO: 1503038 - RNA, 19 nt, Artificial Sequence
  Description of Artificial Sequence: Synthetic oligonucleotide
  Sense strand starting at position 2984 of SEQ ID NO: 1244627
guuauaugaaaggguggaa

SEQ ID NO: 1503039 - RNA, 19 nt, Artificial Sequence
  Description of Artificial Sequence: Synthetic oligonucleotide
  Antisense strand to SEQ ID NO: 1503038
uuccacccuuucauauaac

SEQ ID NO: 1503040 - RNA, 19 nt, Artificial Sequence
  Description of Artificial Sequence: Synthetic oligonucleotide
  Sense strand starting at position 3563 of SEQ ID NO: 1244627
ggaagccaucucugagugu

SEQ ID NO: 1503041 - RNA, 19 nt, Artificial Sequence
  Description of Artificial Sequence: Synthetic oligonucleotide
  Antisense strand to SEQ ID NO: 1503040
acacucagagauggcuucc

SEQ ID NO: 1503042 - RNA, 19 nt, Artificial Sequence
  Description of Artificial Sequence: Synthetic oligonucleotide
  Sense strand starting at position 3647 of SEQ ID NO: 1244627
gcaggaaucagcuggucuu

SEQ ID NO: 1503043 - RNA, 19 nt, Artificial Sequence
  Description of Artificial Sequence: Synthetic oligonucleotide
  Antisense strand to SEQ ID NO: 1503042
aagaccagcugauuccugc

SEQ ID NO: 1503044 - RNA, 19 nt, Artificial Sequence
  Description of Artificial Sequence: Synthetic oligonucleotide
  Sense strand starting at position 3648 of SEQ ID NO: 1244627
caggaaucagcuggucuuu

SEQ ID NO: 1503045 - RNA, 19 nt, Artificial Sequence
  Description of Artificial Sequence: Synthetic oligonucleotide
  Antisense strand to SEQ ID NO: 1503044
aaagaccagcugauuccug

SEQ ID NO: 1503046 - RNA, 19 nt, Artificial Sequence
  Description of Artificial Sequence: Synthetic oligonucleotide
  Sense strand starting at position 3676 of SEQ ID NO: 1244627
augcacuccguguagaaga

SEQ ID NO: 1503047 - RNA, 19 nt, Artificial Sequence
  Description of Artificial Sequence: Synthetic oligonucleotide
  Antisense strand to SEQ ID NO: 1503046
ucuucuacacggagugcau

SEQ ID NO: 1503048 - RNA, 19 nt, Artificial Sequence
  Description of Artificial Sequence: Synthetic oligonucleotide
  Sense strand starting at position 3678 of SEQ ID NO: 1244627
gcacuccguguagaagaaa

SEQ ID NO: 1503049 - RNA, 19 nt, Artificial Sequence
  Description of Artificial Sequence: Synthetic oligonucleotide
  Antisense strand to SEQ ID NO: 1503048
uuucuucuacacggagugc

SEQ ID NO: 1503050 - RNA, 19 nt, Artificial Sequence
  Description of Artificial Sequence: Synthetic oligonucleotide
  Sense strand starting at position 3914 of SEQ ID NO: 1244627
aggccaaagagaugugaua

SEQ ID NO: 1503051 - RNA, 19 nt, Artificial Sequence
  Description of Artificial Sequence: Synthetic oligonucleotide
  Antisense strand to SEQ ID NO: 1503050
uaucacaucucuuuggccu

SEQ ID NO: 1503052 - RNA, 19 nt, Artificial Sequence
  Description of Artificial Sequence: Synthetic oligonucleotide
  Sense strand starting at position 3916 of SEQ ID NO: 1244627
gccaaagagaugugauaaa

SEQ ID NO: 1503053 - RNA, 19 nt, Artificial Sequence
  Description of Artificial Sequence: Synthetic oligonucleotide
  Antisense strand to SEQ ID NO: 1503052
uuuaucacaucucuuuggc

SEQ ID NO: 1503054 - RNA, 19 nt, Artificial Sequence
  Description of Artificial Sequence: Synthetic oligonucleotide
  Sense strand starting at position 3926 of SEQ ID NO: 1244627
ugugauaaacuaugucagu

SEQ ID NO: 1503055 - RNA, 19 nt, Artificial Sequence
  Description of Artificial Sequence: Synthetic oligonucleotide
  Antisense strand to SEQ ID NO: 1503054
acugacauaguuuaucaca

SEQ ID NO: 1503056 - RNA, 19 nt, Artificial Sequence
  Description of Artificial Sequence: Synthetic oligonucleotide
  Sense strand starting at position 3927 of SEQ ID NO: 1244627
gugauaaacuaugucagug

SEQ ID NO: 1503057 - RNA, 19 nt, Artificial Sequence
  Description of Artificial Sequence: Synthetic oligonucleotide
  Antisense strand to SEQ ID NO: 1503056
cacugacauaguuuaucac

SEQ ID NO: 1503058 - RNA, 19 nt, Artificial Sequence
  Description of Artificial Sequence: Synthetic oligonucleotide
  Sense strand starting at position 159 of SEQ ID NO: 1244628
gguugugagaaauacccuu

SEQ ID NO: 1503059 - RNA, 19 nt, Artificial Sequence
  Description of Artificial Sequence: Synthetic oligonucleotide
  Antisense strand to SEQ ID NO: 1503058
aaggguauuucucacaacc

SEQ ID NO: 1503060 - RNA, 19 nt, Artificial Sequence
  Description of Artificial Sequence: Synthetic oligonucleotide
  Sense strand starting at position 172 of SEQ ID NO: 1244628
acccuuugucuuugagaca

SEQ ID NO: 1503061 - RNA, 19 nt, Artificial Sequence
  Description of Artificial Sequence: Synthetic oligonucleotide
  Antisense strand to SEQ ID NO: 1503060
ugucucaaagacaaagggu

SEQ ID NO: 1503062 - RNA, 19 nt, Artificial Sequence
  Description of Artificial Sequence: Synthetic oligonucleotide
  Sense strand starting at position 377 of SEQ ID NO: 1244628
gaaugaacuuuccuagguu

SEQ ID NO: 1503063 - RNA, 19 nt, Artificial Sequence
  Description of Artificial Sequence: Synthetic oligonucleotide
  Antisense strand to SEQ ID NO: 1503062
aaccuaggaaaguucauuc

SEQ ID NO: 1503064 - RNA, 19 nt, Artificial Sequence
  Description of Artificial Sequence: Synthetic oligonucleotide
  Sense strand starting at position 381 of SEQ ID NO: 1244628
gaacuuuccuagguuugua

SEQ ID NO: 1503065 - RNA, 19 nt, Artificial Sequence
  Description of Artificial Sequence: Synthetic oligonucleotide
  Antisense strand to SEQ ID NO: 1503064
uacaaaccuaggaaaguuc

SEQ ID NO: 1503066 - RNA, 19 nt, Artificial Sequence
  Description of Artificial Sequence: Synthetic oligonucleotide
  Sense strand starting at position 384 of SEQ ID NO: 1244628
cuuuccuagguuuguaaca

SEQ ID NO: 1503067 - RNA, 19 nt, Artificial Sequence
  Description of Artificial Sequence: Synthetic oligonucleotide
  Antisense strand to SEQ ID NO: 1503066
uguuacaaaccuaggaaag

SEQ ID NO: 1503068 - RNA, 19 nt, Artificial Sequence
  Description of Artificial Sequence: Synthetic oligonucleotide
  Sense strand starting at position 385 of SEQ ID NO: 1244628
uuuccuagguuuguaacaa

SEQ ID NO: 1503069 - RNA, 19 nt, Artificial Sequence
  Description of Artificial Sequence: Synthetic oligonucleotide
  Antisense strand to SEQ ID NO: 1503068
uuguuacaaaccuaggaaa

SEQ ID NO: 1503070 - RNA, 19 nt, Artificial Sequence
  Description of Artificial Sequence: Synthetic oligonucleotide
  Sense strand starting at position 894 of SEQ ID NO: 1244628
uuguguuaucauuaaucug

SEQ ID NO: 1503071 - RNA, 19 nt, Artificial Sequence
  Description of Artificial Sequence: Synthetic oligonucleotide
  Antisense strand to SEQ ID NO: 1503070
cagauuaaugauaacacaa

SEQ ID NO: 1503072 - RNA, 19 nt, Artificial Sequence
  Description of Artificial Sequence: Synthetic oligonucleotide
  Sense strand starting at position 906 of SEQ ID NO: 1244628
uaaucugacgcaggagaaa

SEQ ID NO: 1503073 - RNA, 19 nt, Artificial Sequence
  Description of Artificial Sequence: Synthetic oligonucleotide
  Antisense strand to SEQ ID NO: 1503072
uuucuccugcgucagauua

SEQ ID NO: 1503074 - RNA, 19 nt, Artificial Sequence
  Description of Artificial Sequence: Synthetic oligonucleotide
  Sense strand starting at position 1089 of SEQ ID NO: 1244628
augauuagacucugaaagc

SEQ ID NO: 1503075 - RNA, 19 nt, Artificial Sequence
  Description of Artificial Sequence: Synthetic oligonucleotide
  Antisense strand to SEQ ID NO: 1503074
gcuuucagagucuaaucau

SEQ ID NO: 1503076 - RNA, 19 nt, Artificial Sequence
  Description of Artificial Sequence: Synthetic oligonucleotide
  Sense strand starting at position 1105 of SEQ ID NO: 1244628
agccaauccugggcaagaa

SEQ ID NO: 1503077 - RNA, 19 nt, Artificial Sequence
  Description of Artificial Sequence: Synthetic oligonucleotide
  Antisense strand to SEQ ID NO: 1503076
uucuugcccaggauuggcu

SEQ ID NO: 1503078 - RNA, 19 nt, Artificial Sequence
  Description of Artificial Sequence: Synthetic oligonucleotide
  Sense strand starting at position 1106 of SEQ ID NO: 1244628
gccaauccugggcaagaau

SEQ ID NO: 1503079 - RNA, 19 nt, Artificial Sequence
  Description of Artificial Sequence: Synthetic oligonucleotide
  Antisense strand to SEQ ID NO: 1503078
auucuugcccaggauuggc

SEQ ID NO: 1503080 - RNA, 19 nt, Artificial Sequence
  Description of Artificial Sequence: Synthetic oligonucleotide
  Sense strand starting at position 1284 of SEQ ID NO: 1244628
ucgcauuucuccucuggaa

SEQ ID NO: 1503081 - RNA, 19 nt, Artificial Sequence
  Description of Artificial Sequence: Synthetic oligonucleotide
  Antisense strand to SEQ ID NO: 1503080
uuccagaggagaaaugcga

SEQ ID NO: 1503082 - RNA, 19 nt, Artificial Sequence
  Description of Artificial Sequence: Synthetic oligonucleotide
  Sense strand starting at position 1353 of SEQ ID NO: 1244628
guacucagcguuuaaagaa

SEQ ID NO: 1503083 - RNA, 19 nt, Artificial Sequence
  Description of Artificial Sequence: Synthetic oligonucleotide
  Antisense strand to SEQ ID NO: 1503082
uucuuuaaacgcugaguac

SEQ ID NO: 1503084 - RNA, 19 nt, Artificial Sequence
  Description of Artificial Sequence: Synthetic oligonucleotide
  Sense strand starting at position 1360 of SEQ ID NO: 1244628
gcguuuaaagaauauucga

SEQ ID NO: 1503085 - RNA, 19 nt, Artificial Sequence
  Description of Artificial Sequence: Synthetic oligonucleotide
  Antisense strand to SEQ ID NO: 1503084
ucgaauauucuuuaaacgc

SEQ ID NO: 1503086 - RNA, 19 nt, Artificial Sequence
  Description of Artificial Sequence: Synthetic oligonucleotide
  Sense strand starting at position 1367 of SEQ ID NO: 1244628
aagaauauucgaggugagu

SEQ ID NO: 1503087 - RNA, 19 nt, Artificial Sequence
  Description of Artificial Sequence: Synthetic oligonucleotide
  Antisense strand to SEQ ID NO: 1503086
acucaccucgaauauucuu

SEQ ID NO: 1503088 - RNA, 19 nt, Artificial Sequence
  Description of Artificial Sequence: Synthetic oligonucleotide
  Sense strand starting at position 1369 of SEQ ID NO: 1244628
gaauauucgaggugaguag

SEQ ID NO: 1503089 - RNA, 19 nt, Artificial Sequence
  Description of Artificial Sequence: Synthetic oligonucleotide
  Antisense strand to SEQ ID NO: 1503088
cuacucaccucgaauauuc

SEQ ID NO: 1503090 - RNA, 19 nt, Artificial Sequence
  Description of Artificial Sequence: Synthetic oligonucleotide
  Sense strand starting at position 1386 of SEQ ID NO: 1244628
agaccugauuucuagucua

SEQ ID NO: 1503091 - RNA, 19 nt, Artificial Sequence
  Description of Artificial Sequence: Synthetic oligonucleotide
  Antisense strand to SEQ ID NO: 1503090
uagacuagaaaucaggucu

SEQ ID NO: 1503092 - RNA, 19 nt, Artificial Sequence
  Description of Artificial Sequence: Synthetic oligonucleotide
  Sense strand starting at position 1473 of SEQ ID NO: 1244628
cggcuauucgcagagauuu

SEQ ID NO: 1503093 - RNA, 19 nt, Artificial Sequence
  Description of Artificial Sequence: Synthetic oligonucleotide
  Antisense strand to SEQ ID NO: 1503092
aaaucucugcgaauagccg

SEQ ID NO: 1503094 - RNA, 19 nt, Artificial Sequence
  Description of Artificial Sequence: Synthetic oligonucleotide
  Sense strand starting at position 1573 of SEQ ID NO: 1244628
cuaggcuugcccuacauca

SEQ ID NO: 1503095 - RNA, 19 nt, Artificial Sequence
  Description of Artificial Sequence: Synthetic oligonucleotide
  Antisense strand to SEQ ID NO: 1503094
ugauguagggcaagccuag

SEQ ID NO: 1503096 - RNA, 19 nt, Artificial Sequence
  Description of Artificial Sequence: Synthetic oligonucleotide
  Sense strand starting at position 1619 of SEQ ID NO: 1244628
gggugugccaagcaagaaa

SEQ ID NO: 1503097 - RNA, 19 nt, Artificial Sequence
  Description of Artificial Sequence: Synthetic oligonucleotide
  Antisense strand to SEQ ID NO: 1503096
uuucuugcuuggcacaccc

SEQ ID NO: 1503098 - RNA, 19 nt, Artificial Sequence
  Description of Artificial Sequence: Synthetic oligonucleotide
  Sense strand starting at position 2035 of SEQ ID NO: 1244628
uccguauuccuguccgguu

SEQ ID NO: 1503099 - RNA, 19 nt, Artificial Sequence
  Description of Artificial Sequence: Synthetic oligonucleotide
  Antisense strand to SEQ ID NO: 1503098
aaccggacaggaauacgga

SEQ ID NO: 1503100 - RNA, 19 nt, Artificial Sequence
  Description of Artificial Sequence: Synthetic oligonucleotide
  Sense strand starting at position 2090 of SEQ ID NO: 1244628
uccauauaggccugaaaug

SEQ ID NO: 1503101 - RNA, 19 nt, Artificial Sequence
  Description of Artificial Sequence: Synthetic oligonucleotide
  Antisense strand to SEQ ID NO: 1503100
cauuucaggccuauaugga

SEQ ID NO: 1503102 - RNA, 19 nt, Artificial Sequence
  Description of Artificial Sequence: Synthetic oligonucleotide
  Sense strand starting at position 2415 of SEQ ID NO: 1244628
acucuuguaguagauugaa

SEQ ID NO: 1503103 - RNA, 19 nt, Artificial Sequence
  Description of Artificial Sequence: Synthetic oligonucleotide
  Antisense strand to SEQ ID NO: 1503102
uucaaucuacuacaagagu

SEQ ID NO: 1503104 - RNA, 19 nt, Artificial Sequence
  Description of Artificial Sequence: Synthetic oligonucleotide
  Sense strand starting at position 2445 of SEQ ID NO: 1244628
ugcagaaucgaucacuaaa

SEQ ID NO: 1503105 - RNA, 19 nt, Artificial Sequence
  Description of Artificial Sequence: Synthetic oligonucleotide
  Antisense strand to SEQ ID NO: 1503104
uuuagugaucgauucugca

SEQ ID NO: 1503106 - RNA, 19 nt, Artificial Sequence
  Description of Artificial Sequence: Synthetic oligonucleotide
  Sense strand starting at position 3010 of SEQ ID NO: 1244628
guuuaagaagucuacaucu

SEQ ID NO: 1503107 - RNA, 19 nt, Artificial Sequence
  Description of Artificial Sequence: Synthetic oligonucleotide
  Antisense strand to SEQ ID NO: 1503106
agauguagacuucuuaaac

SEQ ID NO: 1503108 - RNA, 19 nt, Artificial Sequence
  Description of Artificial Sequence: Synthetic oligonucleotide
  Sense strand starting at position 3204 of SEQ ID NO: 1244628
acagauauuucugauugca

SEQ ID NO: 1503109 - RNA, 19 nt, Artificial Sequence
  Description of Artificial Sequence: Synthetic oligonucleotide
  Antisense strand to SEQ ID NO: 1503108
ugcaaucagaaauaucugu

SEQ ID NO: 1503110 - RNA, 19 nt, Artificial Sequence
  Description of Artificial Sequence: Synthetic oligonucleotide
  Sense strand starting at position 3294 of SEQ ID NO: 1244628
ggaacucuccuggaacguu

SEQ ID NO: 1503111 - RNA, 19 nt, Artificial Sequence
  Description of Artificial Sequence: Synthetic oligonucleotide
  Antisense strand to SEQ ID NO: 1503110
aacguuccaggagaguucc

SEQ ID NO: 1503112 - RNA, 19 nt, Artificial Sequence
  Description of Artificial Sequence: Synthetic oligonucleotide
  Sense strand starting at position 3354 of SEQ ID NO: 1244628
agguguugugaucagagga

SEQ ID NO: 1503113 - RNA, 19 nt, Artificial Sequence
  Description of Artificial Sequence: Synthetic oligonucleotide
  Antisense strand to SEQ ID NO: 1503112
uccucugaucacaacaccu

SEQ ID NO: 1503114 - RNA, 19 nt, Artificial Sequence
  Description of Artificial Sequence: Synthetic oligonucleotide
  Sense strand starting at position 3416 of SEQ ID NO: 1244628
ggaggagucccauagucuc

SEQ ID NO: 1503115 - RNA, 19 nt, Artificial Sequence
  Description of Artificial Sequence: Synthetic oligonucleotide
  Antisense strand to SEQ ID NO: 1503114
gagacuaugggacuccucc

SEQ ID NO: 1503116 - RNA, 19 nt, Artificial Sequence
  Description of Artificial Sequence: Synthetic oligonucleotide
  Sense strand starting at position 3487 of SEQ ID NO: 1244628
uggagagggucuucuccau

SEQ ID NO: 1503117 - RNA, 19 nt, Artificial Sequence
  Description of Artificial Sequence: Synthetic oligonucleotide
  Antisense strand to SEQ ID NO: 1503116
auggagaagacccucucca

SEQ ID NO: 1503118 - RNA, 19 nt, Artificial Sequence
  Description of Artificial Sequence: Synthetic oligonucleotide
  Sense strand starting at position 3706 of SEQ ID NO: 1244628
gaugcucagagaggugauu

SEQ ID NO: 1503119 - RNA, 19 nt, Artificial Sequence
  Description of Artificial Sequence: Synthetic oligonucleotide
  Antisense strand to SEQ ID NO: 1503118
aaucaccucucugagcauc

SEQ ID NO: 1503120 - RNA, 19 nt, Artificial Sequence
  Description of Artificial Sequence: Synthetic oligonucleotide
  Sense strand starting at position 3770 of SEQ ID NO: 1244628
cagagucuauugcccagaa

SEQ ID NO: 1503121 - RNA, 19 nt, Artificial Sequence
  Description of Artificial Sequence: Synthetic oligonucleotide
  Antisense strand to SEQ ID NO: 1503120
uucugggcaauagacucug

SEQ ID NO: 1503122 - RNA, 19 nt, Artificial Sequence
  Description of Artificial Sequence: Synthetic oligonucleotide
  Sense strand starting at position 3771 of SEQ ID NO: 1244628
agagucuauugcccagaau

SEQ ID NO: 1503123 - RNA, 19 nt, Artificial Sequence
  Description of Artificial Sequence: Synthetic oligonucleotide
  Antisense strand to SEQ ID NO: 1503122
auucugggcaauagacucu

SEQ ID NO: 1503124 - RNA, 19 nt, Artificial Sequence
  Description of Artificial Sequence: Synthetic oligonucleotide
  Sense strand starting at position 3772 of SEQ ID NO: 1244628
gagucuauugcccagaauc

SEQ ID NO: 1503125 - RNA, 19 nt, Artificial Sequence
  Description of Artificial Sequence: Synthetic oligonucleotide
  Antisense strand to SEQ ID NO: 1503124
gauucugggcaauagacuc

SEQ ID NO: 1503126 - RNA, 19 nt, Artificial Sequence
  Description of Artificial Sequence: Synthetic oligonucleotide
  Sense strand starting at position 3774 of SEQ ID NO: 1244628
gucuauugcccagaaucuc

SEQ ID NO: 1503127 - RNA, 19 nt, Artificial Sequence
  Description of Artificial Sequence: Synthetic oligonucleotide
  Antisense strand to SEQ ID NO: 1503126
gagauucugggcaauagac

SEQ ID NO: 1503128 - RNA, 19 nt, Artificial Sequence
  Description of Artificial Sequence: Synthetic oligonucleotide
  Sense strand starting at position 3828 of SEQ ID NO: 1244628
cauccagaucuuggauguu

SEQ ID NO: 1503129 - RNA, 19 nt, Artificial Sequence
  Description of Artificial Sequence: Synthetic oligonucleotide
  Antisense strand to SEQ ID NO: 1503128
aacauccaagaucuggaug

SEQ ID NO: 1503130 - RNA, 19 nt, Artificial Sequence
  Description of Artificial Sequence: Synthetic oligonucleotide
  Sense strand starting at position 3837 of SEQ ID NO: 1244628
cuuggauguuucucccuaa

SEQ ID NO: 1503131 - RNA, 19 nt, Artificial Sequence
  Description of Artificial Sequence: Synthetic oligonucleotide
  Antisense strand to SEQ ID NO: 1503130
uuagggagaaacauccaag

SEQ ID NO: 1503132 - RNA, 19 nt, Artificial Sequence
  Description of Artificial Sequence: Synthetic oligonucleotide
  Sense strand starting at position 3838 of SEQ ID NO: 1244628
uuggauguuucucccuaaa

SEQ ID NO: 1503133 - RNA, 19 nt, Artificial Sequence
  Description of Artificial Sequence: Synthetic oligonucleotide
  Antisense strand to SEQ ID NO: 1503132
uuuagggagaaacauccaa

SEQ ID NO: 1503134 - RNA, 19 nt, Artificial Sequence
  Description of Artificial Sequence: Synthetic oligonucleotide
  Sense strand starting at position 3840 of SEQ ID NO: 1244628
ggauguuucucccuaaauc

SEQ ID NO: 1503135 - RNA, 19 nt, Artificial Sequence
  Description of Artificial Sequence: Synthetic oligonucleotide
  Antisense strand to SEQ ID NO: 1503134
gauuuagggagaaacaucc

SEQ ID NO: 1503136 - RNA, 19 nt, Artificial Sequence
  Description of Artificial Sequence: Synthetic oligonucleotide
  Sense strand starting at position 3874 of SEQ ID NO: 1244628
gcaauucuaggucaaaggu

SEQ ID NO: 1503137 - RNA, 19 nt, Artificial Sequence
  Description of Artificial Sequence: Synthetic oligonucleotide
  Antisense strand to SEQ ID NO: 1503136
accuuugaccuagaauugc

SEQ ID NO: 1503138 - RNA, 19 nt, Artificial Sequence
  Description of Artificial Sequence: Synthetic oligonucleotide
  Sense strand starting at position 7 of SEQ ID NO: 1244629
guaauacagggcugacaaa

SEQ ID NO: 1503139 - RNA, 19 nt, Artificial Sequence
  Description of Artificial Sequence: Synthetic oligonucleotide
  Antisense strand to SEQ ID NO: 1503138
uuugucagcccuguauuac

SEQ ID NO: 1503140 - RNA, 19 nt, Artificial Sequence
  Description of Artificial Sequence: Synthetic oligonucleotide
  Sense strand starting at position 250 of SEQ ID NO: 1244629
gccugagauuaaguaauga

SEQ ID NO: 1503141 - RNA, 19 nt, Artificial Sequence
  Description of Artificial Sequence: Synthetic oligonucleotide
  Antisense strand to SEQ ID NO: 1503140
ucauuacuuaaucucaggc

SEQ ID NO: 1503142 - RNA, 19 nt, Artificial Sequence
  Description of Artificial Sequence: Synthetic oligonucleotide
  Sense strand starting at position 775 of SEQ ID NO: 1244629
guauuaaggugggcucagu

SEQ ID NO: 1503143 - RNA, 19 nt, Artificial Sequence
  Description of Artificial Sequence: Synthetic oligonucleotide
  Antisense strand to SEQ ID NO: 1503142
acugagcccaccuuaauac

SEQ ID NO: 1503144 - RNA, 19 nt, Artificial Sequence
  Description of Artificial Sequence: Synthetic oligonucleotide
  Sense strand starting at position 980 of SEQ ID NO: 1244629
ccguuccaucaguauaaca

SEQ ID NO: 1503145 - RNA, 19 nt, Artificial Sequence
  Description of Artificial Sequence: Synthetic oligonucleotide
  Antisense strand to SEQ ID NO: 1503144
uguuauacugauggaacgg

SEQ ID NO: 1503146 - RNA, 19 nt, Artificial Sequence
  Description of Artificial Sequence: Synthetic oligonucleotide
  Sense strand starting at position 982 of SEQ ID NO: 1244629
guuccaucaguauaacauu

SEQ ID NO: 1503147 - RNA, 19 nt, Artificial Sequence
  Description of Artificial Sequence: Synthetic oligonucleotide
  Antisense strand to SEQ ID NO: 1503146
aauguuauacugauggaac

SEQ ID NO: 1503148 - RNA, 19 nt, Artificial Sequence
  Description of Artificial Sequence: Synthetic oligonucleotide
  Sense strand starting at position 1148 of SEQ ID NO: 1244629
cucaauaggucauuagcca

SEQ ID NO: 1503149 - RNA, 19 nt, Artificial Sequence
  Description of Artificial Sequence: Synthetic oligonucleotide
  Antisense strand to SEQ ID NO: 1503148
uggcuaaugaccuauugag

SEQ ID NO: 1503150 - RNA, 19 nt, Artificial Sequence
  Description of Artificial Sequence: Synthetic oligonucleotide
  Sense strand starting at position 1194 of SEQ ID NO: 1244629
ggaguauagcaacgugcaa

SEQ ID NO: 1503151 - RNA, 19 nt, Artificial Sequence
  Description of Artificial Sequence: Synthetic oligonucleotide
  Antisense strand to SEQ ID NO: 1503150
uugcacguugcuauacucc

SEQ ID NO: 1503152 - RNA, 19 nt, Artificial Sequence
  Description of Artificial Sequence: Synthetic oligonucleotide
  Sense strand starting at position 1222 of SEQ ID NO: 1244629
cuguguugucagcacaauu

SEQ ID NO: 1503153 - RNA, 19 nt, Artificial Sequence
  Description of Artificial Sequence: Synthetic oligonucleotide
  Antisense strand to SEQ ID NO: 1503152
aauugugcugacaacacag

SEQ ID NO: 1503154 - RNA, 19 nt, Artificial Sequence
  Description of Artificial Sequence: Synthetic oligonucleotide
  Sense strand starting at position 1299 of SEQ ID NO: 1244629
ccacguccuguggauauaa

SEQ ID NO: 1503155 - RNA, 19 nt, Artificial Sequence
  Description of Artificial Sequence: Synthetic oligonucleotide
  Antisense strand to SEQ ID NO: 1503154
uuauauccacaggacgugg

SEQ ID NO: 1503156 - RNA, 19 nt, Artificial Sequence
  Description of Artificial Sequence: Synthetic oligonucleotide
  Sense strand starting at position 1350 of SEQ ID NO: 1244629
cuagacaugguucggaguu

SEQ ID NO: 1503157 - RNA, 19 nt, Artificial Sequence
  Description of Artificial Sequence: Synthetic oligonucleotide
  Antisense strand to SEQ ID NO: 1503156
aacuccgaaccaugucuag

SEQ ID NO: 1503158 - RNA, 19 nt, Artificial Sequence
  Description of Artificial Sequence: Synthetic oligonucleotide
  Sense strand starting at position 1393 of SEQ ID NO: 1244629
caccgcacaugcuuugaua

SEQ ID NO: 1503159 - RNA, 19 nt, Artificial Sequence
  Description of Artificial Sequence: Synthetic oligonucleotide
  Antisense strand to SEQ ID NO: 1503158
uaucaaagcaugugcggug

SEQ ID NO: 1503160 - RNA, 19 nt, Artificial Sequence
  Description of Artificial Sequence: Synthetic oligonucleotide
  Sense strand starting at position 1395 of SEQ ID NO: 1244629
ccgcacaugcuuugauaga

SEQ ID NO: 1503161 - RNA, 19 nt, Artificial Sequence
  Description of Artificial Sequence: Synthetic oligonucleotide
  Antisense strand to SEQ ID NO: 1503160
ucuaucaaagcaugugcgg

SEQ ID NO: 1503162 - RNA, 19 nt, Artificial Sequence
  Description of Artificial Sequence: Synthetic oligonucleotide
  Sense strand starting at position 1410 of SEQ ID NO: 1244629
uagacuguacgcuauagau

SEQ ID NO: 1503163 - RNA, 19 nt, Artificial Sequence
  Description of Artificial Sequence: Synthetic oligonucleotide
  Antisense strand to SEQ ID NO: 1503162
aucuauagcguacagucua

SEQ ID NO: 1503164 - RNA, 19 nt, Artificial Sequence
  Description of Artificial Sequence: Synthetic oligonucleotide
  Sense strand starting at position 1412 of SEQ ID NO: 1244629
gacuguacgcuauagauua

SEQ ID NO: 1503165 - RNA, 19 nt, Artificial Sequence
  Description of Artificial Sequence: Synthetic oligonucleotide
  Antisense strand to SEQ ID NO: 1503164
uaaucuauagcguacaguc

SEQ ID NO: 1503166 - RNA, 19 nt, Artificial Sequence
  Description of Artificial Sequence: Synthetic oligonucleotide
  Sense strand starting at position 1469 of SEQ ID NO: 1244629
cccgauucucacggaaagu

SEQ ID NO: 1503167 - RNA, 19 nt, Artificial Sequence
  Description of Artificial Sequence: Synthetic oligonucleotide
  Antisense strand to SEQ ID NO: 1503166
acuuuccgugagaaucggg

SEQ ID NO: 1503168 - RNA, 19 nt, Artificial Sequence
  Description of Artificial Sequence: Synthetic oligonucleotide
  Sense strand starting at position 1470 of SEQ ID NO: 1244629
ccgauucucacggaaagua

SEQ ID NO: 1503169 - RNA, 19 nt, Artificial Sequence
  Description of Artificial Sequence: Synthetic oligonucleotide
  Antisense strand to SEQ ID NO: 1503168
uacuuuccgugagaaucgg

SEQ ID NO: 1503170 - RNA, 19 nt, Artificial Sequence
  Description of Artificial Sequence: Synthetic oligonucleotide
  Sense strand starting at position 1486 of SEQ ID NO: 1244629
guagccuauuucuuacuau

SEQ ID NO: 1503171 - RNA, 19 nt, Artificial Sequence
  Description of Artificial Sequence: Synthetic oligonucleotide
  Antisense strand to SEQ ID NO: 1503170
auaguaagaaauaggcuac

SEQ ID NO: 1503172 - RNA, 19 nt, Artificial Sequence
  Description of Artificial Sequence: Synthetic oligonucleotide
  Sense strand starting at position 1507 of SEQ ID NO: 1244629
acacucugacaucgaaauu

SEQ ID NO: 1503173 - RNA, 19 nt, Artificial Sequence
  Description of Artificial Sequence: Synthetic oligonucleotide
  Antisense strand to SEQ ID NO: 1503172
aauuucgaugucagagugu

SEQ ID NO: 1503174 - RNA, 19 nt, Artificial Sequence
  Description of Artificial Sequence: Synthetic oligonucleotide
  Sense strand starting at position 1538 of SEQ ID NO: 1244629
cgacucaacccuugcucua

SEQ ID NO: 1503175 - RNA, 19 nt, Artificial Sequence
  Description of Artificial Sequence: Synthetic oligonucleotide
  Antisense strand to SEQ ID NO: 1503174
uagagcaaggguugagucg

SEQ ID NO: 1503176 - RNA, 19 nt, Artificial Sequence
  Description of Artificial Sequence: Synthetic oligonucleotide
  Sense strand starting at position 2034 of SEQ ID NO: 1244629
cugccuuauuacguaauaa

SEQ ID NO: 1503177 - RNA, 19 nt, Artificial Sequence
  Description of Artificial Sequence: Synthetic oligonucleotide
  Antisense strand to SEQ ID NO: 1503176
uuauuacguaauaaggcag

SEQ ID NO: 1503178 - RNA, 19 nt, Artificial Sequence
  Description of Artificial Sequence: Synthetic oligonucleotide
  Sense strand starting at position 2116 of SEQ ID NO: 1244629
ggaaguaucuucucuacga

SEQ ID NO: 1503179 - RNA, 19 nt, Artificial Sequence
  Description of Artificial Sequence: Synthetic oligonucleotide
  Antisense strand to SEQ ID NO: 1503178
ucguagagaagauacuucc

SEQ ID NO: 1503180 - RNA, 19 nt, Artificial Sequence
  Description of Artificial Sequence: Synthetic oligonucleotide
  Sense strand starting at position 2117 of SEQ ID NO: 1244629
gaaguaucuucucuacgag

SEQ ID NO: 1503181 - RNA, 19 nt, Artificial Sequence
  Description of Artificial Sequence: Synthetic oligonucleotide
  Antisense strand to SEQ ID NO: 1503180
cucguagagaagauacuuc

SEQ ID NO: 1503182 - RNA, 19 nt, Artificial Sequence
  Description of Artificial Sequence: Synthetic oligonucleotide
  Sense strand starting at position 2126 of SEQ ID NO: 1244629
ucucuacgagcuuaagagu

SEQ ID NO: 1503183 - RNA, 19 nt, Artificial Sequence
  Description of Artificial Sequence: Synthetic oligonucleotide
  Antisense strand to SEQ ID NO: 1503182
acucuuaagcucguagaga

SEQ ID NO: 1503184 - RNA, 19 nt, Artificial Sequence
  Description of Artificial Sequence: Synthetic oligonucleotide
  Sense strand starting at position 2135 of SEQ ID NO: 1244629
gcuuaagaguaguuaggga

SEQ ID NO: 1503185 - RNA, 19 nt, Artificial Sequence
  Description of Artificial Sequence: Synthetic oligonucleotide
  Antisense strand to SEQ ID NO: 1503184
ucccuaacuacucuuaagc

SEQ ID NO: 1503186 - RNA, 19 nt, Artificial Sequence
  Description of Artificial Sequence: Synthetic oligonucleotide
  Sense strand starting at position 2201 of SEQ ID NO: 1244629
uuaauagugccaggcacuu

SEQ ID NO: 1503187 - RNA, 19 nt, Artificial Sequence
  Description of Artificial Sequence: Synthetic oligonucleotide
  Antisense strand to SEQ ID NO: 1503186
aagugccuggcacuauuaa

SEQ ID NO: 1503188 - RNA, 19 nt, Artificial Sequence
  Description of Artificial Sequence: Synthetic oligonucleotide
  Sense strand starting at position 2213 of SEQ ID NO: 1244629
ggcacuuaucugcacacua

SEQ ID NO: 1503189 - RNA, 19 nt, Artificial Sequence
  Description of Artificial Sequence: Synthetic oligonucleotide
  Antisense strand to SEQ ID NO: 1503188
uagugugcagauaagugcc

SEQ ID NO: 1503190 - RNA, 19 nt, Artificial Sequence
  Description of Artificial Sequence: Synthetic oligonucleotide
  Sense strand starting at position 2228 of SEQ ID NO: 1244629
acuagagaauaggaauuaa

SEQ ID NO: 1503191 - RNA, 19 nt, Artificial Sequence
  Description of Artificial Sequence: Synthetic oligonucleotide
  Antisense strand to SEQ ID NO: 1503190
uuaauuccuauucucuagu

SEQ ID NO: 1503192 - RNA, 19 nt, Artificial Sequence
  Description of Artificial Sequence: Synthetic oligonucleotide
  Sense strand starting at position 2316 of SEQ ID NO: 1244629
cuaaacgguuucguugaau

SEQ ID NO: 1503193 - RNA, 19 nt, Artificial Sequence
  Description of Artificial Sequence: Synthetic oligonucleotide
  Antisense strand to SEQ ID NO: 1503192
auucaacgaaaccguuuag

SEQ ID NO: 1503194 - RNA, 19 nt, Artificial Sequence
  Description of Artificial Sequence: Synthetic oligonucleotide
  Sense strand starting at position 2319 of SEQ ID NO: 1244629
aacgguuucguugaaugua

SEQ ID NO: 1503195 - RNA, 19 nt, Artificial Sequence
  Description of Artificial Sequence: Synthetic oligonucleotide
  Antisense strand to SEQ ID NO: 1503194
uacauucaacgaaaccguu

SEQ ID NO: 1503196 - RNA, 19 nt, Artificial Sequence
  Description of Artificial Sequence: Synthetic oligonucleotide
  Sense strand starting at position 2322 of SEQ ID NO: 1244629
gguuucguugaauguaaua

SEQ ID NO: 1503197 - RNA, 19 nt, Artificial Sequence
  Description of Artificial Sequence: Synthetic oligonucleotide
  Antisense strand to SEQ ID NO: 1503196
uauuacauucaacgaaacc

SEQ ID NO: 1503198 - RNA, 19 nt, Artificial Sequence
  Description of Artificial Sequence: Synthetic oligonucleotide
  Sense strand starting at position 2345 of SEQ ID NO: 1244629
ugagaagugcugcagauca

SEQ ID NO: 1503199 - RNA, 19 nt, Artificial Sequence
  Description of Artificial Sequence: Synthetic oligonucleotide
  Antisense strand to SEQ ID NO: 1503198
ugaucugcagcacuucuca

SEQ ID NO: 1503200 - RNA, 19 nt, Artificial Sequence
  Description of Artificial Sequence: Synthetic oligonucleotide
  Sense strand starting at position 2347 of SEQ ID NO: 1244629
agaagugcugcagaucauu

SEQ ID NO: 1503201 - RNA, 19 nt, Artificial Sequence
  Description of Artificial Sequence: Synthetic oligonucleotide
  Antisense strand to SEQ ID NO: 1503200
aaugaucugcagcacuucu

SEQ ID NO: 1503202 - RNA, 19 nt, Artificial Sequence
  Description of Artificial Sequence: Synthetic oligonucleotide
  Sense strand starting at position 2368 of SEQ ID NO: 1244629
aucuauguguucuugguau

SEQ ID NO: 1503203 - RNA, 19 nt, Artificial Sequence
  Description of Artificial Sequence: Synthetic oligonucleotide
  Antisense strand to SEQ ID NO: 1503202
auaccaagaacacauagau

SEQ ID NO: 1503204 - RNA, 19 nt, Artificial Sequence
  Description of Artificial Sequence: Synthetic oligonucleotide
  Sense strand starting at position 2370 of SEQ ID NO: 1244629
cuauguguucuugguauca

SEQ ID NO: 1503205 - RNA, 19 nt, Artificial Sequence
  Description of Artificial Sequence: Synthetic oligonucleotide
  Antisense strand to SEQ ID NO: 1503204
ugauaccaagaacacauag

SEQ ID NO: 1503206 - RNA, 19 nt, Artificial Sequence
  Description of Artificial Sequence: Synthetic oligonucleotide
  Sense strand starting at position 2876 of SEQ ID NO: 1244629
cggauuacaucagagaaca

SEQ ID NO: 1503207 - RNA, 19 nt, Artificial Sequence
  Description of Artificial Sequence: Synthetic oligonucleotide
  Antisense strand to SEQ ID NO: 1503206
uguucucugauguaauccg

SEQ ID NO: 1503208 - RNA, 19 nt, Artificial Sequence
  Description of Artificial Sequence: Synthetic oligonucleotide
  Sense strand starting at position 2985 of SEQ ID NO: 1244629
aaguaauugcaguauguag

SEQ ID NO: 1503209 - RNA, 19 nt, Artificial Sequence
  Description of Artificial Sequence: Synthetic oligonucleotide
  Antisense strand to SEQ ID NO: 1503208
cuacauacugcaauuacuu

SEQ ID NO: 1503210 - RNA, 19 nt, Artificial Sequence
  Description of Artificial Sequence: Synthetic oligonucleotide
  Sense strand starting at position 2994 of SEQ ID NO: 1244629
caguauguaguauguuaga

SEQ ID NO: 1503211 - RNA, 19 nt, Artificial Sequence
  Description of Artificial Sequence: Synthetic oligonucleotide
  Antisense strand to SEQ ID NO: 1503210
ucuaacauacuacauacug

SEQ ID NO: 1503212 - RNA, 19 nt, Artificial Sequence
  Description of Artificial Sequence: Synthetic oligonucleotide
  Sense strand starting at position 3566 of SEQ ID NO: 1244629
acgaauucgagucacucua

SEQ ID NO: 1503213 - RNA, 19 nt, Artificial Sequence
  Description of Artificial Sequence: Synthetic oligonucleotide
  Antisense strand to SEQ ID NO: 1503212
uagagugacucgaauucgu

SEQ ID NO: 1503214 - RNA, 19 nt, Artificial Sequence
  Description of Artificial Sequence: Synthetic oligonucleotide
  Sense strand starting at position 3568 of SEQ ID NO: 1244629
gaauucgagucacucuaac

SEQ ID NO: 1503215 - RNA, 19 nt, Artificial Sequence
  Description of Artificial Sequence: Synthetic oligonucleotide
  Antisense strand to SEQ ID NO: 1503214
guuagagugacucgaauuc

SEQ ID NO: 1503216 - RNA, 19 nt, Artificial Sequence
  Description of Artificial Sequence: Synthetic oligonucleotide
  Sense strand starting at position 3712 of SEQ ID NO: 1244629
aaacuuuguggugaagguu

SEQ ID NO: 1503217 - RNA, 19 nt, Artificial Sequence
  Description of Artificial Sequence: Synthetic oligonucleotide
  Antisense strand to SEQ ID NO: 1503216
aaccuucaccacaaaguuu

SEQ ID NO: 1503218 - RNA, 19 nt, Artificial Sequence
  Description of Artificial Sequence: Synthetic oligonucleotide
  Sense strand starting at position 31 of SEQ ID NO: 1244630
aauucuuaugcauagguga

SEQ ID NO: 1503219 - RNA, 19 nt, Artificial Sequence
  Description of Artificial Sequence: Synthetic oligonucleotide
  Antisense strand to SEQ ID NO: 1503218
ucaccuaugcauaagaauu

SEQ ID NO: 1503220 - RNA, 19 nt, Artificial Sequence
  Description of Artificial Sequence: Synthetic oligonucleotide
  Sense strand starting at position 148 of SEQ ID NO: 1244630
ggaagacagucugugaacu

SEQ ID NO: 1503221 - RNA, 19 nt, Artificial Sequence
  Description of Artificial Sequence: Synthetic oligonucleotide
  Antisense strand to SEQ ID NO: 1503220
aguucacagacugucuucc

SEQ ID NO: 1503222 - RNA, 19 nt, Artificial Sequence
  Description of Artificial Sequence: Synthetic oligonucleotide
  Sense strand starting at position 160 of SEQ ID NO: 1244630
gugaacugcuuuccuauau

SEQ ID NO: 1503223 - RNA, 19 nt, Artificial Sequence
  Description of Artificial Sequence: Synthetic oligonucleotide
  Antisense strand to SEQ ID NO: 1503222
auauaggaaagcaguucac

SEQ ID NO: 1503224 - RNA, 19 nt, Artificial Sequence
  Description of Artificial Sequence: Synthetic oligonucleotide
  Sense strand starting at position 283 of SEQ ID NO: 1244630
aguuauuaccgauagcuca

SEQ ID NO: 1503225 - RNA, 19 nt, Artificial Sequence
  Description of Artificial Sequence: Synthetic oligonucleotide
  Antisense strand to SEQ ID NO: 1503224
ugagcuaucgguaauaacu

SEQ ID NO: 1503226 - RNA, 19 nt, Artificial Sequence
  Description of Artificial Sequence: Synthetic oligonucleotide
  Sense strand starting at position 336 of SEQ ID NO: 1244630
cccaacuguuccuugagca

SEQ ID NO: 1503227 - RNA, 19 nt, Artificial Sequence
  Description of Artificial Sequence: Synthetic oligonucleotide
  Antisense strand to SEQ ID NO: 1503226
ugcucaaggaacaguuggg

SEQ ID NO: 1503228 - RNA, 19 nt, Artificial Sequence
  Description of Artificial Sequence: Synthetic oligonucleotide
  Sense strand starting at position 340 of SEQ ID NO: 1244630
acuguuccuugagcaguau

SEQ ID NO: 1503229 - RNA, 19 nt, Artificial Sequence
  Description of Artificial Sequence: Synthetic oligonucleotide
  Antisense strand to SEQ ID NO: 1503228
auacugcucaaggaacagu

SEQ ID NO: 1503230 - RNA, 19 nt, Artificial Sequence
  Description of Artificial Sequence: Synthetic oligonucleotide
  Sense strand starting at position 344 of SEQ ID NO: 1244630
uuccuugagcaguaugaaa

SEQ ID NO: 1503231 - RNA, 19 nt, Artificial Sequence
  Description of Artificial Sequence: Synthetic oligonucleotide
  Antisense strand to SEQ ID NO: 1503230
uuucauacugcucaaggaa

SEQ ID NO: 1503232 - RNA, 19 nt, Artificial Sequence
  Description of Artificial Sequence: Synthetic oligonucleotide
  Sense strand starting at position 464 of SEQ ID NO: 1244630
cguucucacccucaaggau

SEQ ID NO: 1503233 - RNA, 19 nt, Artificial Sequence
  Description of Artificial Sequence: Synthetic oligonucleotide
  Antisense strand to SEQ ID NO: 1503232
auccuugagggugagaacg

SEQ ID NO: 1503234 - RNA, 19 nt, Artificial Sequence
  Description of Artificial Sequence: Synthetic oligonucleotide
  Sense strand starting at position 476 of SEQ ID NO: 1244630
caaggauuguucccgauag

SEQ ID NO: 1503235 - RNA, 19 nt, Artificial Sequence
  Description of Artificial Sequence: Synthetic oligonucleotide
  Antisense strand to SEQ ID NO: 1503234
cuaucgggaacaauccuug

SEQ ID NO: 1503236 - RNA, 19 nt, Artificial Sequence
  Description of Artificial Sequence: Synthetic oligonucleotide
  Sense strand starting at position 478 of SEQ ID NO: 1244630
aggauuguucccgauagca

SEQ ID NO: 1503237 - RNA, 19 nt, Artificial Sequence
  Description of Artificial Sequence: Synthetic oligonucleotide
  Antisense strand to SEQ ID NO: 1503236
ugcuaucgggaacaauccu

SEQ ID NO: 1503238 - RNA, 19 nt, Artificial Sequence
  Description of Artificial Sequence: Synthetic oligonucleotide
  Sense strand starting at position 480 of SEQ ID NO: 1244630
gauuguucccgauagcagu

SEQ ID NO: 1503239 - RNA, 19 nt, Artificial Sequence
  Description of Artificial Sequence: Synthetic oligonucleotide
  Antisense strand to SEQ ID NO: 1503238
acugcuaucgggaacaauc

SEQ ID NO: 1503240 - RNA, 19 nt, Artificial Sequence
  Description of Artificial Sequence: Synthetic oligonucleotide
  Sense strand starting at position 993 of SEQ ID NO: 1244630
caauuugcguuugagaaac

SEQ ID NO: 1503241 - RNA, 19 nt, Artificial Sequence
  Description of Artificial Sequence: Synthetic oligonucleotide
  Antisense strand to SEQ ID NO: 1503240
guuucucaaacgcaaauug

SEQ ID NO: 1503242 - RNA, 19 nt, Artificial Sequence
  Description of Artificial Sequence: Synthetic oligonucleotide
  Sense strand starting at position 1015 of SEQ ID NO: 1244630
cacgcagagugagugaauu

SEQ ID NO: 1503243 - RNA, 19 nt, Artificial Sequence
  Description of Artificial Sequence: Synthetic oligonucleotide
  Antisense strand to SEQ ID NO: 1503242
aauucacucacucugcgug

SEQ ID NO: 1503244 - RNA, 19 nt, Artificial Sequence
  Description of Artificial Sequence: Synthetic oligonucleotide
  Sense strand starting at position 1461 of SEQ ID NO: 1244630
uaaguaacuccagggauac

SEQ ID NO: 1503245 - RNA, 19 nt, Artificial Sequence
  Description of Artificial Sequence: Synthetic oligonucleotide
  Antisense strand to SEQ ID NO: 1503244
guaucccuggaguuacuua

SEQ ID NO: 1503246 - RNA, 19 nt, Artificial Sequence
  Description of Artificial Sequence: Synthetic oligonucleotide
  Sense strand starting at position 1474 of SEQ ID NO: 1244630
ggauacgacuaugaaacaa

SEQ ID NO: 1503247 - RNA, 19 nt, Artificial Sequence
  Description of Artificial Sequence: Synthetic oligonucleotide
  Antisense strand to SEQ ID NO: 1503246
uuguuucauagucguaucc

SEQ ID NO: 1503248 - RNA, 19 nt, Artificial Sequence
  Description of Artificial Sequence: Synthetic oligonucleotide
  Sense strand starting at position 1502 of SEQ ID NO: 1244630
gaaugaacgcuugauacuu

SEQ ID NO: 1503249 - RNA, 19 nt, Artificial Sequence
  Description of Artificial Sequence: Synthetic oligonucleotide
  Antisense strand to SEQ ID NO: 1503248
aaguaucaagcguucauuc

SEQ ID NO: 1503250 - RNA, 19 nt, Artificial Sequence
  Description of Artificial Sequence: Synthetic oligonucleotide
  Sense strand starting at position 1510 of SEQ ID NO: 1244630
gcuugauacuuuccagaaa

SEQ ID NO: 1503251 - RNA, 19 nt, Artificial Sequence
  Description of Artificial Sequence: Synthetic oligonucleotide
  Antisense strand to SEQ ID NO: 1503250
uuucuggaaaguaucaagc

SEQ ID NO: 1503252 - RNA, 19 nt, Artificial Sequence
  Description of Artificial Sequence: Synthetic oligonucleotide
  Sense strand starting at position 1688 of SEQ ID NO: 1244630
gcauguagcuucccagaac

SEQ ID NO: 1503253 - RNA, 19 nt, Artificial Sequence
  Description of Artificial Sequence: Synthetic oligonucleotide
  Antisense strand to SEQ ID NO: 1503252
guucugggaagcuacaugc

SEQ ID NO: 1503254 - RNA, 19 nt, Artificial Sequence
  Description of Artificial Sequence: Synthetic oligonucleotide
  Sense strand starting at position 2012 of SEQ ID NO: 1244630
ggcuuauagcgccaaagag

SEQ ID NO: 1503255 - RNA, 19 nt, Artificial Sequence
  Description of Artificial Sequence: Synthetic oligonucleotide
  Antisense strand to SEQ ID NO: 1503254
cucuuuggcgcuauaagcc

SEQ ID NO: 1503256 - RNA, 19 nt, Artificial Sequence
  Description of Artificial Sequence: Synthetic oligonucleotide
  Sense strand starting at position 2030 of SEQ ID NO: 1244630
gcacuaaagacucgcgaug

SEQ ID NO: 1503257 - RNA, 19 nt, Artificial Sequence
  Description of Artificial Sequence: Synthetic oligonucleotide
  Antisense strand to SEQ ID NO: 1503256
caucgcgagucuuuagugc

SEQ ID NO: 1503258 - RNA, 19 nt, Artificial Sequence
  Description of Artificial Sequence: Synthetic oligonucleotide
  Sense strand starting at position 2056 of SEQ ID NO: 1244630
cuuagagcugauuggguaa

SEQ ID NO: 1503259 - RNA, 19 nt, Artificial Sequence
  Description of Artificial Sequence: Synthetic oligonucleotide
  Antisense strand to SEQ ID NO: 1503258
uuacccaaucagcucuaag

SEQ ID NO: 1503260 - RNA, 19 nt, Artificial Sequence
  Description of Artificial Sequence: Synthetic oligonucleotide
  Sense strand starting at position 2098 of SEQ ID NO: 1244630
aacgguaguuagguuuaau

SEQ ID NO: 1503261 - RNA, 19 nt, Artificial Sequence
  Description of Artificial Sequence: Synthetic oligonucleotide
  Antisense strand to SEQ ID NO: 1503260
auuaaaccuaacuaccguu

SEQ ID NO: 1503262 - RNA, 19 nt, Artificial Sequence
  Description of Artificial Sequence: Synthetic oligonucleotide
  Sense strand starting at position 2376 of SEQ ID NO: 1244630
cguuuauuugcucaggcca

SEQ ID NO: 1503263 - RNA, 19 nt, Artificial Sequence
  Description of Artificial Sequence: Synthetic oligonucleotide
  Antisense strand to SEQ ID NO: 1503262
uggccugagcaaauaaacg

SEQ ID NO: 1503264 - RNA, 19 nt, Artificial Sequence
  Description of Artificial Sequence: Synthetic oligonucleotide
  Sense strand starting at position 2522 of SEQ ID NO: 1244630
uuuggauugacucgggagu

SEQ ID NO: 1503265 - RNA, 19 nt, Artificial Sequence
  Description of Artificial Sequence: Synthetic oligonucleotide
  Antisense strand to SEQ ID NO: 1503264
acucccgagucaauccaaa

SEQ ID NO: 1503266 - RNA, 19 nt, Artificial Sequence
  Description of Artificial Sequence: Synthetic oligonucleotide
  Sense strand starting at position 2523 of SEQ ID NO: 1244630
uuggauugacucgggaguu

SEQ ID NO: 1503267 - RNA, 19 nt, Artificial Sequence
  Description of Artificial Sequence: Synthetic oligonucleotide
  Antisense strand to SEQ ID NO: 1503266
aacucccgagucaauccaa

SEQ ID NO: 1503268 - RNA, 19 nt, Artificial Sequence
  Description of Artificial Sequence: Synthetic oligonucleotide
  Sense strand starting at position 2548 of SEQ ID NO: 1244630
agcuaaguucuagagugcu

SEQ ID NO: 1503269 - RNA, 19 nt, Artificial Sequence
  Description of Artificial Sequence: Synthetic oligonucleotide
  Antisense strand to SEQ ID NO: 1503268
agcacucuagaacuuagcu

SEQ ID NO: 1503270 - RNA, 19 nt, Artificial Sequence
  Description of Artificial Sequence: Synthetic oligonucleotide
  Sense strand starting at position 2570 of SEQ ID NO: 1244630
gcaggauuugcucggucga

SEQ ID NO: 1503271 - RNA, 19 nt, Artificial Sequence
  Description of Artificial Sequence: Synthetic oligonucleotide
  Antisense strand to SEQ ID NO: 1503270
ucgaccgagcaaauccugc

SEQ ID NO: 1503272 - RNA, 19 nt, Artificial Sequence
  Description of Artificial Sequence: Synthetic oligonucleotide
  Sense strand starting at position 2571 of SEQ ID NO: 1244630
caggauuugcucggucgaa

SEQ ID NO: 1503273 - RNA, 19 nt, Artificial Sequence
  Description of Artificial Sequence: Synthetic oligonucleotide
  Antisense strand to SEQ ID NO: 1503272
uucgaccgagcaaauccug

SEQ ID NO: 1503274 - RNA, 19 nt, Artificial Sequence
  Description of Artificial Sequence: Synthetic oligonucleotide
  Sense strand starting at position 2572 of SEQ ID NO: 1244630
aggauuugcucggucgaac

SEQ ID NO: 1503275 - RNA, 19 nt, Artificial Sequence
  Description of Artificial Sequence: Synthetic oligonucleotide
  Antisense strand to SEQ ID NO: 1503274
guucgaccgagcaaauccu

SEQ ID NO: 1503276 - RNA, 19 nt, Artificial Sequence
  Description of Artificial Sequence: Synthetic oligonucleotide
  Sense strand starting at position 2598 of SEQ ID NO: 1244630
cagagaggaaugugguuua

SEQ ID NO: 1503277 - RNA, 19 nt, Artificial Sequence
  Description of Artificial Sequence: Synthetic oligonucleotide
  Antisense strand to SEQ ID NO: 1503276
uaaaccacauuccucucug

SEQ ID NO: 1503278 - RNA, 19 nt, Artificial Sequence
  Description of Artificial Sequence: Synthetic oligonucleotide
  Sense strand starting at position 2601 of SEQ ID NO: 1244630
agaggaaugugguuuauca

SEQ ID NO: 1503279 - RNA, 19 nt, Artificial Sequence
  Description of Artificial Sequence: Synthetic oligonucleotide
  Antisense strand to SEQ ID NO: 1503278
ugauaaaccacauuccucu

SEQ ID NO: 1503280 - RNA, 19 nt, Artificial Sequence
  Description of Artificial Sequence: Synthetic oligonucleotide
  Sense strand starting at position 2605 of SEQ ID NO: 1244630
gaaugugguuuaucaauaa

SEQ ID NO: 1503281 - RNA, 19 nt, Artificial Sequence
  Description of Artificial Sequence: Synthetic oligonucleotide
  Antisense strand to SEQ ID NO: 1503280
uuauugauaaaccacauuc

SEQ ID NO: 1503282 - RNA, 19 nt, Artificial Sequence
  Description of Artificial Sequence: Synthetic oligonucleotide
  Sense strand starting at position 2609 of SEQ ID NO: 1244630
gugguuuaucaauaacaca

SEQ ID NO: 1503283 - RNA, 19 nt, Artificial Sequence
  Description of Artificial Sequence: Synthetic oligonucleotide
  Antisense strand to SEQ ID NO: 1503282
uguguuauugauaaaccac

SEQ ID NO: 1503284 - RNA, 19 nt, Artificial Sequence
  Description of Artificial Sequence: Synthetic oligonucleotide
  Sense strand starting at position 2972 of SEQ ID NO: 1244630
ggaagugucagaggaagua

SEQ ID NO: 1503285 - RNA, 19 nt, Artificial Sequence
  Description of Artificial Sequence: Synthetic oligonucleotide
  Antisense strand to SEQ ID NO: 1503284
uacuuccucugacacuucc

SEQ ID NO: 1503286 - RNA, 19 nt, Artificial Sequence
  Description of Artificial Sequence: Synthetic oligonucleotide
  Sense strand starting at position 3213 of SEQ ID NO: 1244630
gagaaagguuucuuaacac

SEQ ID NO: 1503287 - RNA, 19 nt, Artificial Sequence
  Description of Artificial Sequence: Synthetic oligonucleotide
  Antisense strand to SEQ ID NO: 1503286
guguuaagaaaccuuucuc

SEQ ID NO: 1503288 - RNA, 19 nt, Artificial Sequence
  Description of Artificial Sequence: Synthetic oligonucleotide
  Sense strand starting at position 3320 of SEQ ID NO: 1244630
cccuuugacggugaaauug

SEQ ID NO: 1503289 - RNA, 19 nt, Artificial Sequence
  Description of Artificial Sequence: Synthetic oligonucleotide
  Antisense strand to SEQ ID NO: 1503288
caauuucaccgucaaaggg

SEQ ID NO: 1503290 - RNA, 19 nt, Artificial Sequence
  Description of Artificial Sequence: Synthetic oligonucleotide
  Sense strand starting at position 3328 of SEQ ID NO: 1244630
cggugaaauugauugugca

SEQ ID NO: 1503291 - RNA, 19 nt, Artificial Sequence
  Description of Artificial Sequence: Synthetic oligonucleotide
  Antisense strand to SEQ ID NO: 1503290
ugcacaaucaauuucaccg

SEQ ID NO: 1503292 - RNA, 19 nt, Artificial Sequence
  Description of Artificial Sequence: Synthetic oligonucleotide
  Sense strand starting at position 3329 of SEQ ID NO: 1244630
ggugaaauugauugugcac

SEQ ID NO: 1503293 - RNA, 19 nt, Artificial Sequence
  Description of Artificial Sequence: Synthetic oligonucleotide
  Antisense strand to SEQ ID NO: 1503292
gugcacaaucaauuucacc

SEQ ID NO: 1503294 - RNA, 19 nt, Artificial Sequence
  Description of Artificial Sequence: Synthetic oligonucleotide
  Sense strand starting at position 3847 of SEQ ID NO: 1244630
caccaauucggcuggguaa

SEQ ID NO: 1503295 - RNA, 19 nt, Artificial Sequence
  Description of Artificial Sequence: Synthetic oligonucleotide
  Antisense strand to SEQ ID NO: 1503294
uuacccagccgaauuggug

SEQ ID NO: 1503296 - RNA, 19 nt, Artificial Sequence
  Description of Artificial Sequence: Synthetic oligonucleotide
  Sense strand starting at position 3918 of SEQ ID NO: 1244630
gggagucccuaucuggaua

SEQ ID NO: 1503297 - RNA, 19 nt, Artificial Sequence
  Description of Artificial Sequence: Synthetic oligonucleotide
  Antisense strand to SEQ ID NO: 1503296
uauccagauagggacuccc

SEQ ID NO: 1503298 - RNA, 19 nt, Artificial Sequence
  Description of Artificial Sequence: Synthetic oligonucleotide
  Sense strand starting at position 77 of SEQ ID NO: 1244631
ugcaauuccugucuagaua

SEQ ID NO: 1503299 - RNA, 19 nt, Artificial Sequence
  Description of Artificial Sequence: Synthetic oligonucleotide
  Antisense strand to SEQ ID NO: 1503298
uaucuagacaggaauugca

SEQ ID NO: 1503300 - RNA, 19 nt, Artificial Sequence
  Description of Artificial Sequence: Synthetic oligonucleotide
  Sense strand starting at position 78 of SEQ ID NO: 1244631
gcaauuccugucuagauaa

SEQ ID NO: 1503301 - RNA, 19 nt, Artificial Sequence
  Description of Artificial Sequence: Synthetic oligonucleotide
  Antisense strand to SEQ ID NO: 1503300
uuaucuagacaggaauugc

SEQ ID NO: 1503302 - RNA, 19 nt, Artificial Sequence
  Description of Artificial Sequence: Synthetic oligonucleotide
  Sense strand starting at position 89 of SEQ ID NO: 1244631
cuagauaaaucggcucuau

SEQ ID NO: 1503303 - RNA, 19 nt, Artificial Sequence
  Description of Artificial Sequence: Synthetic oligonucleotide
  Antisense strand to SEQ ID NO: 1503302
auagagccgauuuaucuag

SEQ ID NO: 1503304 - RNA, 19 nt, Artificial Sequence
  Description of Artificial Sequence: Synthetic oligonucleotide
  Sense strand starting at position 129 of SEQ ID NO: 1244631
ccuguuggguagucacaau

SEQ ID NO: 1503305 - RNA, 19 nt, Artificial Sequence
  Description of Artificial Sequence: Synthetic oligonucleotide
  Antisense strand to SEQ ID NO: 1503304
auugugacuacccaacagg

SEQ ID NO: 1503306 - RNA, 19 nt, Artificial Sequence
  Description of Artificial Sequence: Synthetic oligonucleotide
  Sense strand starting at position 210 of SEQ ID NO: 1244631
ucaucugacguuugaggaa

SEQ ID NO: 1503307 - RNA, 19 nt, Artificial Sequence
  Description of Artificial Sequence: Synthetic oligonucleotide
  Antisense strand to SEQ ID NO: 1503306
uuccucaaacgucagauga

SEQ ID NO: 1503308 - RNA, 19 nt, Artificial Sequence
  Description of Artificial Sequence: Synthetic oligonucleotide
  Sense strand starting at position 784 of SEQ ID NO: 1244631
acucuuugggagcaagagu

SEQ ID NO: 1503309 - RNA, 19 nt, Artificial Sequence
  Description of Artificial Sequence: Synthetic oligonucleotide
  Antisense strand to SEQ ID NO: 1503308
acucuugcucccaaagagu

SEQ ID NO: 1503310 - RNA, 19 nt, Artificial Sequence
  Description of Artificial Sequence: Synthetic oligonucleotide
  Sense strand starting at position 806 of SEQ ID NO: 1244631
agaagcaucuuucucagga

SEQ ID NO: 1503311 - RNA, 19 nt, Artificial Sequence
  Description of Artificial Sequence: Synthetic oligonucleotide
  Antisense strand to SEQ ID NO: 1503310
uccugagaaagaugcuucu

SEQ ID NO: 1503312 - RNA, 19 nt, Artificial Sequence
  Description of Artificial Sequence: Synthetic oligonucleotide
  Sense strand starting at position 1143 of SEQ ID NO: 1244631
uuaucuugauagucuagaa

SEQ ID NO: 1503313 - RNA, 19 nt, Artificial Sequence
  Description of Artificial Sequence: Synthetic oligonucleotide
  Antisense strand to SEQ ID NO: 1503312
uucuagacuaucaagauaa

SEQ ID NO: 1503314 - RNA, 19 nt, Artificial Sequence
  Description of Artificial Sequence: Synthetic oligonucleotide
  Sense strand starting at position 1150 of SEQ ID NO: 1244631
gauagucuagaaugaucau

SEQ ID NO: 1503315 - RNA, 19 nt, Artificial Sequence
  Description of Artificial Sequence: Synthetic oligonucleotide
  Antisense strand to SEQ ID NO: 1503314
augaucauucuagacuauc

SEQ ID NO: 1503316 - RNA, 19 nt, Artificial Sequence
  Description of Artificial Sequence: Synthetic oligonucleotide
  Sense strand starting at position 1159 of SEQ ID NO: 1244631
gaaugaucauaggcagugu

SEQ ID NO: 1503317 - RNA, 19 nt, Artificial Sequence
  Description of Artificial Sequence: Synthetic oligonucleotide
  Antisense strand to SEQ ID NO: 1503316
acacugccuaugaucauuc

SEQ ID NO: 1503318 - RNA, 19 nt, Artificial Sequence
  Description of Artificial Sequence: Synthetic oligonucleotide
  Sense strand starting at position 1163 of SEQ ID NO: 1244631
gaucauaggcagugucaug

SEQ ID NO: 1503319 - RNA, 19 nt, Artificial Sequence
  Description of Artificial Sequence: Synthetic oligonucleotide
  Antisense strand to SEQ ID NO: 1503318
caugacacugccuaugauc

SEQ ID NO: 1503320 - RNA, 19 nt, Artificial Sequence
  Description of Artificial Sequence: Synthetic oligonucleotide
  Sense strand starting at position 1170 of SEQ ID NO: 1244631
ggcagugucauguugugca

SEQ ID NO: 1503321 - RNA, 19 nt, Artificial Sequence
  Description of Artificial Sequence: Synthetic oligonucleotide
  Antisense strand to SEQ ID NO: 1503320
ugcacaacaugacacugcc

SEQ ID NO: 1503322 - RNA, 19 nt, Artificial Sequence
  Description of Artificial Sequence: Synthetic oligonucleotide
  Sense strand starting at position 1356 of SEQ ID NO: 1244631
ucaaguagugccugaggaa

SEQ ID NO: 1503323 - RNA, 19 nt, Artificial Sequence
  Description of Artificial Sequence: Synthetic oligonucleotide
  Antisense strand to SEQ ID NO: 1503322
uuccucaggcacuacuuga

SEQ ID NO: 1503324 - RNA, 19 nt, Artificial Sequence
  Description of Artificial Sequence: Synthetic oligonucleotide
  Sense strand starting at position 1357 of SEQ ID NO: 1244631
caaguagugccugaggaaa

SEQ ID NO: 1503325 - RNA, 19 nt, Artificial Sequence
  Description of Artificial Sequence: Synthetic oligonucleotide
  Antisense strand to SEQ ID NO: 1503324
uuuccucaggcacuacuug

SEQ ID NO: 1503326 - RNA, 19 nt, Artificial Sequence
  Description of Artificial Sequence: Synthetic oligonucleotide
  Sense strand starting at position 1384 of SEQ ID NO: 1244631
ggacuuacaucucugcuga

SEQ ID NO: 1503327 - RNA, 19 nt, Artificial Sequence
  Description of Artificial Sequence: Synthetic oligonucleotide
  Antisense strand to SEQ ID NO: 1503326
ucagcagagauguaagucc

SEQ ID NO: 1503328 - RNA, 19 nt, Artificial Sequence
  Description of Artificial Sequence: Synthetic oligonucleotide
  Sense strand starting at position 1468 of SEQ ID NO: 1244631
cuucuacaggcuuaagagu

SEQ ID NO: 1503329 - RNA, 19 nt, Artificial Sequence
  Description of Artificial Sequence: Synthetic oligonucleotide
  Antisense strand to SEQ ID NO: 1503328
acucuuaagccuguagaag

SEQ ID NO: 1503330 - RNA, 19 nt, Artificial Sequence
  Description of Artificial Sequence: Synthetic oligonucleotide
  Sense strand starting at position 1474 of SEQ ID NO: 1244631
caggcuuaagagugaauac

SEQ ID NO: 1503331 - RNA, 19 nt, Artificial Sequence
  Description of Artificial Sequence: Synthetic oligonucleotide
  Antisense strand to SEQ ID NO: 1503330
guauucacucuuaagccug

SEQ ID NO: 1503332 - RNA, 19 nt, Artificial Sequence
  Description of Artificial Sequence: Synthetic oligonucleotide
  Sense strand starting at position 1578 of SEQ ID NO: 1244631
gggcaaguguggucuggaa

SEQ ID NO: 1503333 - RNA, 19 nt, Artificial Sequence
  Description of Artificial Sequence: Synthetic oligonucleotide
  Antisense strand to SEQ ID NO: 1503332
uuccagaccacacuugccc

SEQ ID NO: 1503334 - RNA, 19 nt, Artificial Sequence
  Description of Artificial Sequence: Synthetic oligonucleotide
  Sense strand starting at position 1580 of SEQ ID NO: 1244631
gcaaguguggucuggaaau

SEQ ID NO: 1503335 - RNA, 19 nt, Artificial Sequence
  Description of Artificial Sequence: Synthetic oligonucleotide
  Antisense strand to SEQ ID NO: 1503334
auuuccagaccacacuugc

SEQ ID NO: 1503336 - RNA, 19 nt, Artificial Sequence
  Description of Artificial Sequence: Synthetic oligonucleotide
  Sense strand starting at position 1582 of SEQ ID NO: 1244631
aaguguggucuggaaauuc

SEQ ID NO: 1503337 - RNA, 19 nt, Artificial Sequence
  Description of Artificial Sequence: Synthetic oligonucleotide
  Antisense strand to SEQ ID NO: 1503336
gaauuuccagaccacacuu

SEQ ID NO: 1503338 - RNA, 19 nt, Artificial Sequence
  Description of Artificial Sequence: Synthetic oligonucleotide
  Sense strand starting at position 1590 of SEQ ID NO: 1244631
ucuggaaauuccgugaaga

SEQ ID NO: 1503339 - RNA, 19 nt, Artificial Sequence
  Description of Artificial Sequence: Synthetic oligonucleotide
  Antisense strand to SEQ ID NO: 1503338
ucuucacggaauuuccaga

SEQ ID NO: 1503340 - RNA, 19 nt, Artificial Sequence
  Description of Artificial Sequence: Synthetic oligonucleotide
  Sense strand starting at position 1591 of SEQ ID NO: 1244631
cuggaaauuccgugaagac

SEQ ID NO: 1503341 - RNA, 19 nt, Artificial Sequence
  Description of Artificial Sequence: Synthetic oligonucleotide
  Antisense strand to SEQ ID NO: 1503340
gucuucacggaauuuccag

SEQ ID NO: 1503342 - RNA, 19 nt, Artificial Sequence
  Description of Artificial Sequence: Synthetic oligonucleotide
  Sense strand starting at position 1614 of SEQ ID NO: 1244631
ccgagaaguuacuucgaga

SEQ ID NO: 1503343 - RNA, 19 nt, Artificial Sequence
  Description of Artificial Sequence: Synthetic oligonucleotide
  Antisense strand to SEQ ID NO: 1503342
ucucgaaguaacuucucgg

SEQ ID NO: 1503344 - RNA, 19 nt, Artificial Sequence
  Description of Artificial Sequence: Synthetic oligonucleotide
  Sense strand starting at position 1619 of SEQ ID NO: 1244631
aaguuacuucgagaccauu

SEQ ID NO: 1503345 - RNA, 19 nt, Artificial Sequence
  Description of Artificial Sequence: Synthetic oligonucleotide
  Antisense strand to SEQ ID NO: 1503344
aauggucucgaaguaacuu

SEQ ID NO: 1503346 - RNA, 19 nt, Artificial Sequence
  Description of Artificial Sequence: Synthetic oligonucleotide
  Sense strand starting at position 1628 of SEQ ID NO: 1244631
cgagaccauucucuaggaa

SEQ ID NO: 1503347 - RNA, 19 nt, Artificial Sequence
  Description of Artificial Sequence: Synthetic oligonucleotide
  Antisense strand to SEQ ID NO: 1503346
uuccuagagaauggucucg

SEQ ID NO: 1503348 - RNA, 19 nt, Artificial Sequence
  Description of Artificial Sequence: Synthetic oligonucleotide
  Sense strand starting at position 1745 of SEQ ID NO: 1244631
ggcggcccuugauuuaaga

SEQ ID NO: 1503349 - RNA, 19 nt, Artificial Sequence
  Description of Artificial Sequence: Synthetic oligonucleotide
  Antisense strand to SEQ ID NO: 1503348
ucuuaaaucaagggccgcc

SEQ ID NO: 1503350 - RNA, 19 nt, Artificial Sequence
  Description of Artificial Sequence: Synthetic oligonucleotide
  Sense strand starting at position 1955 of SEQ ID NO: 1244631
gcugcuuccgguucuguaa

SEQ ID NO: 1503351 - RNA, 19 nt, Artificial Sequence
  Description of Artificial Sequence: Synthetic oligonucleotide
  Antisense strand to SEQ ID NO: 1503350
uuacagaaccggaagcagc

SEQ ID NO: 1503352 - RNA, 19 nt, Artificial Sequence
  Description of Artificial Sequence: Synthetic oligonucleotide
  Sense strand starting at position 1980 of SEQ ID NO: 1244631
caaagaucucgcgagaccu

SEQ ID NO: 1503353 - RNA, 19 nt, Artificial Sequence
  Description of Artificial Sequence: Synthetic oligonucleotide
  Antisense strand to SEQ ID NO: 1503352
aggucucgcgagaucuuug

SEQ ID NO: 1503354 - RNA, 19 nt, Artificial Sequence
  Description of Artificial Sequence: Synthetic oligonucleotide
  Sense strand starting at position 1982 of SEQ ID NO: 1244631
aagaucucgcgagaccuau

SEQ ID NO: 1503355 - RNA, 19 nt, Artificial Sequence
  Description of Artificial Sequence: Synthetic oligonucleotide
  Antisense strand to SEQ ID NO: 1503354
auaggucucgcgagaucuu

SEQ ID NO: 1503356 - RNA, 19 nt, Artificial Sequence
  Description of Artificial Sequence: Synthetic oligonucleotide
  Sense strand starting at position 2039 of SEQ ID NO: 1244631
ggaguaaacugggaaauaa

SEQ ID NO: 1503357 - RNA, 19 nt, Artificial Sequence
  Description of Artificial Sequence: Synthetic oligonucleotide
  Antisense strand to SEQ ID NO: 1503356
uuauuucccaguuuacucc

SEQ ID NO: 1503358 - RNA, 19 nt, Artificial Sequence
  Description of Artificial Sequence: Synthetic oligonucleotide
  Sense strand starting at position 2162 of SEQ ID NO: 1244631
cgcugaauccucugggaag

SEQ ID NO: 1503359 - RNA, 19 nt, Artificial Sequence
  Description of Artificial Sequence: Synthetic oligonucleotide
  Antisense strand to SEQ ID NO: 1503358
cuucccagaggauucagcg

SEQ ID NO: 1503360 - RNA, 19 nt, Artificial Sequence
  Description of Artificial Sequence: Synthetic oligonucleotide
  Sense strand starting at position 3210 of SEQ ID NO: 1244631
gcuucugcugaaugaauga

SEQ ID NO: 1503361 - RNA, 19 nt, Artificial Sequence
  Description of Artificial Sequence: Synthetic oligonucleotide
  Antisense strand to SEQ ID NO: 1503360
ucauucauucagcagaagc

SEQ ID NO: 1503362 - RNA, 19 nt, Artificial Sequence
  Description of Artificial Sequence: Synthetic oligonucleotide
  Sense strand starting at position 3597 of SEQ ID NO: 1244631
guucuuaaauaugcuguga

SEQ ID NO: 1503363 - RNA, 19 nt, Artificial Sequence
  Description of Artificial Sequence: Synthetic oligonucleotide
  Antisense strand to SEQ ID NO: 1503362
ucacagcauauuuaagaac

SEQ ID NO: 1503364 - RNA, 19 nt, Artificial Sequence
  Description of Artificial Sequence: Synthetic oligonucleotide
  Sense strand starting at position 3601 of SEQ ID NO: 1244631
uuaaauaugcugugaagga

SEQ ID NO: 1503365 - RNA, 19 nt, Artificial Sequence
  Description of Artificial Sequence: Synthetic oligonucleotide
  Antisense strand to SEQ ID NO: 1503364
uccuucacagcauauuuaa

SEQ ID NO: 1503366 - RNA, 19 nt, Artificial Sequence
  Description of Artificial Sequence: Synthetic oligonucleotide
  Sense strand starting at position 3605 of SEQ ID NO: 1244631
auaugcugugaaggaagua

SEQ ID NO: 1503367 - RNA, 19 nt, Artificial Sequence
  Description of Artificial Sequence: Synthetic oligonucleotide
  Antisense strand to SEQ ID NO: 1503366
uacuuccuucacagcauau

SEQ ID NO: 1503368 - RNA, 19 nt, Artificial Sequence
  Description of Artificial Sequence: Synthetic oligonucleotide
  Sense strand starting at position 3767 of SEQ ID NO: 1244631
ucaggaaguuuacugucua

SEQ ID NO: 1503369 - RNA, 19 nt, Artificial Sequence
  Description of Artificial Sequence: Synthetic oligonucleotide
  Antisense strand to SEQ ID NO: 1503368
uagacaguaaacuuccuga

SEQ ID NO: 1503370 - RNA, 19 nt, Artificial Sequence
  Description of Artificial Sequence: Synthetic oligonucleotide
  Sense strand starting at position 3771 of SEQ ID NO: 1244631
gaaguuuacugucuacaag

SEQ ID NO: 1503371 - RNA, 19 nt, Artificial Sequence
  Description of Artificial Sequence: Synthetic oligonucleotide
  Antisense strand to SEQ ID NO: 1503370
cuuguagacaguaaacuuc

SEQ ID NO: 1503372 - RNA, 19 nt, Artificial Sequence
  Description of Artificial Sequence: Synthetic oligonucleotide
  Sense strand starting at position 3774 of SEQ ID NO: 1244631
guuuacugucuacaagaaa

SEQ ID NO: 1503373 - RNA, 19 nt, Artificial Sequence
  Description of Artificial Sequence: Synthetic oligonucleotide
  Antisense strand to SEQ ID NO: 1503372
uuucuuguagacaguaaac

SEQ ID NO: 1503374 - RNA, 19 nt, Artificial Sequence
  Description of Artificial Sequence: Synthetic oligonucleotide
  Sense strand starting at position 3920 of SEQ ID NO: 1244631
gucagcauugacuggaauu

SEQ ID NO: 1503375 - RNA, 19 nt, Artificial Sequence
  Description of Artificial Sequence: Synthetic oligonucleotide
  Antisense strand to SEQ ID NO: 1503374
aauuccagucaaugcugac

SEQ ID NO: 1503376 - RNA, 19 nt, Artificial Sequence
  Description of Artificial Sequence: Synthetic oligonucleotide
  Sense strand starting at position 3970 of SEQ ID NO: 1244631
guaggaauugcuugaagga

SEQ ID NO: 1503377 - RNA, 19 nt, Artificial Sequence
  Description of Artificial Sequence: Synthetic oligonucleotide
  Antisense strand to SEQ ID NO: 1503376
uccuucaagcaauuccuac

SEQ ID NO: 1503378 - RNA, 19 nt, Artificial Sequence
  Description of Artificial Sequence: Synthetic oligonucleotide
  Sense strand starting at position 72 of SEQ ID NO: 1244632
uauccuugaggguggaaca

SEQ ID NO: 1503379 - RNA, 19 nt, Artificial Sequence
  Description of Artificial Sequence: Synthetic oligonucleotide
  Antisense strand to SEQ ID NO: 1503378
uguuccacccucaaggaua

SEQ ID NO: 1503380 - RNA, 19 nt, Artificial Sequence
  Description of Artificial Sequence: Synthetic oligonucleotide
  Sense strand starting at position 121 of SEQ ID NO: 1244632
guguuuacuguggauggaa

SEQ ID NO: 1503381 - RNA, 19 nt, Artificial Sequence
  Description of Artificial Sequence: Synthetic oligonucleotide
  Antisense strand to SEQ ID NO: 1503380
uuccauccacaguaaacac

SEQ ID NO: 1503382 - RNA, 19 nt, Artificial Sequence
  Description of Artificial Sequence: Synthetic oligonucleotide
  Sense strand starting at position 195 of SEQ ID NO: 1244632
gccacuuuaugaguugaag

SEQ ID NO: 1503383 - RNA, 19 nt, Artificial Sequence
  Description of Artificial Sequence: Synthetic oligonucleotide
  Antisense strand to SEQ ID NO: 1503382
cuucaacucauaaaguggc

SEQ ID NO: 1503384 - RNA, 19 nt, Artificial Sequence
  Description of Artificial Sequence: Synthetic oligonucleotide
  Sense strand starting at position 494 of SEQ ID NO: 1244632
uguucuaaaugaguaagaa

SEQ ID NO: 1503385 - RNA, 19 nt, Artificial Sequence
  Description of Artificial Sequence: Synthetic oligonucleotide
  Antisense strand to SEQ ID NO: 1503384
uucuuacucauuuagaaca

SEQ ID NO: 1503386 - RNA, 19 nt, Artificial Sequence
  Description of Artificial Sequence: Synthetic oligonucleotide
  Sense strand starting at position 504 of SEQ ID NO: 1244632
gaguaagaauuacauuugu

SEQ ID NO: 1503387 - RNA, 19 nt, Artificial Sequence
  Description of Artificial Sequence: Synthetic oligonucleotide
  Antisense strand to SEQ ID NO: 1503386
acaaauguaauucuuacuc

SEQ ID NO: 1503388 - RNA, 19 nt, Artificial Sequence
  Description of Artificial Sequence: Synthetic oligonucleotide
  Sense strand starting at position 537 of SEQ ID NO: 1244632
cuauuuaggcccuguguua

SEQ ID NO: 1503389 - RNA, 19 nt, Artificial Sequence
  Description of Artificial Sequence: Synthetic oligonucleotide
  Antisense strand to SEQ ID NO: 1503388
uaacacagggccuaaauag

SEQ ID NO: 1503390 - RNA, 19 nt, Artificial Sequence
  Description of Artificial Sequence: Synthetic oligonucleotide
  Sense strand starting at position 586 of SEQ ID NO: 1244632
acccucaggucuccaagau

SEQ ID NO: 1503391 - RNA, 19 nt, Artificial Sequence
  Description of Artificial Sequence: Synthetic oligonucleotide
  Antisense strand to SEQ ID NO: 1503390
aucuuggagaccugagggu

SEQ ID NO: 1503392 - RNA, 19 nt, Artificial Sequence
  Description of Artificial Sequence: Synthetic oligonucleotide
  Sense strand starting at position 656 of SEQ ID NO: 1244632
gaaacagaacaguguuuau

SEQ ID NO: 1503393 - RNA, 19 nt, Artificial Sequence
  Description of Artificial Sequence: Synthetic oligonucleotide
  Antisense strand to SEQ ID NO: 1503392
auaaacacuguucuguuuc

SEQ ID NO: 1503394 - RNA, 19 nt, Artificial Sequence
  Description of Artificial Sequence: Synthetic oligonucleotide
  Sense strand starting at position 690 of SEQ ID NO: 1244632
ucuggaacggcuuacuaga

SEQ ID NO: 1503395 - RNA, 19 nt, Artificial Sequence
  Description of Artificial Sequence: Synthetic oligonucleotide
  Antisense strand to SEQ ID NO: 1503394
ucuaguaagccguuccaga

SEQ ID NO: 1503396 - RNA, 19 nt, Artificial Sequence
  Description of Artificial Sequence: Synthetic oligonucleotide
  Sense strand starting at position 695 of SEQ ID NO: 1244632
aacggcuuacuagagguaa

SEQ ID NO: 1503397 - RNA, 19 nt, Artificial Sequence
  Description of Artificial Sequence: Synthetic oligonucleotide
  Antisense strand to SEQ ID NO: 1503396
uuaccucuaguaagccguu

SEQ ID NO: 1503398 - RNA, 19 nt, Artificial Sequence
  Description of Artificial Sequence: Synthetic oligonucleotide
  Sense strand starting at position 697 of SEQ ID NO: 1244632
cggcuuacuagagguaaga

SEQ ID NO: 1503399 - RNA, 19 nt, Artificial Sequence
  Description of Artificial Sequence: Synthetic oligonucleotide
  Antisense strand to SEQ ID NO: 1503398
ucuuaccucuaguaagccg

SEQ ID NO: 1503400 - RNA, 19 nt, Artificial Sequence
  Description of Artificial Sequence: Synthetic oligonucleotide
  Sense strand starting at position 1218 of SEQ ID NO: 1244632
ugcacuuagccuggacaga

SEQ ID NO: 1503401 - RNA, 19 nt, Artificial Sequence
  Description of Artificial Sequence: Synthetic oligonucleotide
  Antisense strand to SEQ ID NO: 1503400
ucuguccaggcuaagugca

SEQ ID NO: 1503402 - RNA, 19 nt, Artificial Sequence
  Description of Artificial Sequence: Synthetic oligonucleotide
  Sense strand starting at position 1390 of SEQ ID NO: 1244632
uggagaaggcuuuaugcgu

SEQ ID NO: 1503403 - RNA, 19 nt, Artificial Sequence
  Description of Artificial Sequence: Synthetic oligonucleotide
  Antisense strand to SEQ ID NO: 1503402
acgcauaaagccuucucca

SEQ ID NO: 1503404 - RNA, 19 nt, Artificial Sequence
  Description of Artificial Sequence: Synthetic oligonucleotide
  Sense strand starting at position 1391 of SEQ ID NO: 1244632
ggagaaggcuuuaugcguu

SEQ ID NO: 1503405 - RNA, 19 nt, Artificial Sequence
  Description of Artificial Sequence: Synthetic oligonucleotide
  Antisense strand to SEQ ID NO: 1503404
aacgcauaaagccuucucc

SEQ ID NO: 1503406 - RNA, 19 nt, Artificial Sequence
  Description of Artificial Sequence: Synthetic oligonucleotide
  Sense strand starting at position 1726 of SEQ ID NO: 1244632
caaagaugcccagagcuga

SEQ ID NO: 1503407 - RNA, 19 nt, Artificial Sequence
  Description of Artificial Sequence: Synthetic oligonucleotide
  Antisense strand to SEQ ID NO: 1503406
ucagcucugggcaucuuug

SEQ ID NO: 1503408 - RNA, 19 nt, Artificial Sequence
  Description of Artificial Sequence: Synthetic oligonucleotide
  Sense strand starting at position 1999 of SEQ ID NO: 1244632
ggacacuuccgcuaaccuu

SEQ ID NO: 1503409 - RNA, 19 nt, Artificial Sequence
  Description of Artificial Sequence: Synthetic oligonucleotide
  Antisense strand to SEQ ID NO: 1503408
aagguuagcggaagugucc

SEQ ID NO: 1503410 - RNA, 19 nt, Artificial Sequence
  Description of Artificial Sequence: Synthetic oligonucleotide
  Sense strand starting at position 2141 of SEQ ID NO: 1244632
agcucaaguauucgaauga

SEQ ID NO: 1503411 - RNA, 19 nt, Artificial Sequence
  Description of Artificial Sequence: Synthetic oligonucleotide
  Antisense strand to SEQ ID NO: 1503410
ucauucgaauacuugagcu

SEQ ID NO: 1503412 - RNA, 19 nt, Artificial Sequence
  Description of Artificial Sequence: Synthetic oligonucleotide
  Sense strand starting at position 2303 of SEQ ID NO: 1244632
ggaacacaaucugaaauuu

SEQ ID NO: 1503413 - RNA, 19 nt, Artificial Sequence
  Description of Artificial Sequence: Synthetic oligonucleotide
  Antisense strand to SEQ ID NO: 1503412
aaauuucagauuguguucc

SEQ ID NO: 1503414 - RNA, 19 nt, Artificial Sequence
  Description of Artificial Sequence: Synthetic oligonucleotide
  Sense strand starting at position 2379 of SEQ ID NO: 1244632
gggcacuguuagcuaaaga

SEQ ID NO: 1503415 - RNA, 19 nt, Artificial Sequence
  Description of Artificial Sequence: Synthetic oligonucleotide
  Antisense strand to SEQ ID NO: 1503414
ucuuuagcuaacagugccc

SEQ ID NO: 1503416 - RNA, 19 nt, Artificial Sequence
  Description of Artificial Sequence: Synthetic oligonucleotide
  Sense strand starting at position 2380 of SEQ ID NO: 1244632
ggcacuguuagcuaaagag

SEQ ID NO: 1503417 - RNA, 19 nt, Artificial Sequence
  Description of Artificial Sequence: Synthetic oligonucleotide
  Antisense strand to SEQ ID NO: 1503416
cucuuuagcuaacagugcc

SEQ ID NO: 1503418 - RNA, 19 nt, Artificial Sequence
  Description of Artificial Sequence: Synthetic oligonucleotide
  Sense strand starting at position 2433 of SEQ ID NO: 1244632
auaguaguggguuaucaga

SEQ ID NO: 1503419 - RNA, 19 nt, Artificial Sequence
  Description of Artificial Sequence: Synthetic oligonucleotide
  Antisense strand to SEQ ID NO: 1503418
ucugauaacccacuacuau

SEQ ID NO: 1503420 - RNA, 19 nt, Artificial Sequence
  Description of Artificial Sequence: Synthetic oligonucleotide
  Sense strand starting at position 2435 of SEQ ID NO: 1244632
aguaguggguuaucagaac

SEQ ID NO: 1503421 - RNA, 19 nt, Artificial Sequence
  Description of Artificial Sequence: Synthetic oligonucleotide
  Antisense strand to SEQ ID NO: 1503420
guucugauaacccacuacu

SEQ ID NO: 1503422 - RNA, 19 nt, Artificial Sequence
  Description of Artificial Sequence: Synthetic oligonucleotide
  Sense strand starting at position 2458 of SEQ ID NO: 1244632
caacguuagggucacuaaa

SEQ ID NO: 1503423 - RNA, 19 nt, Artificial Sequence
  Description of Artificial Sequence: Synthetic oligonucleotide
  Antisense strand to SEQ ID NO: 1503422
uuuagugacccuaacguug

SEQ ID NO: 1503424 - RNA, 19 nt, Artificial Sequence
  Description of Artificial Sequence: Synthetic oligonucleotide
  Sense strand starting at position 2460 of SEQ ID NO: 1244632
acguuagggucacuaaagu

SEQ ID NO: 1503425 - RNA, 19 nt, Artificial Sequence
  Description of Artificial Sequence: Synthetic oligonucleotide
  Antisense strand to SEQ ID NO: 1503424
acuuuagugacccuaacgu

SEQ ID NO: 1503426 - RNA, 19 nt, Artificial Sequence
  Description of Artificial Sequence: Synthetic oligonucleotide
  Sense strand starting at position 2558 of SEQ ID NO: 1244632
aguggugucacugacauua

SEQ ID NO: 1503427 - RNA, 19 nt, Artificial Sequence
  Description of Artificial Sequence: Synthetic oligonucleotide
  Antisense strand to SEQ ID NO: 1503426
uaaugucagugacaccacu

SEQ ID NO: 1503428 - RNA, 19 nt, Artificial Sequence
  Description of Artificial Sequence: Synthetic oligonucleotide
  Sense strand starting at position 2710 of SEQ ID NO: 1244632
ccauucuagagucgaggaa

SEQ ID NO: 1503429 - RNA, 19 nt, Artificial Sequence
  Description of Artificial Sequence: Synthetic oligonucleotide
  Antisense strand to SEQ ID NO: 1503428
uuccucgacucuagaaugg

SEQ ID NO: 1503430 - RNA, 19 nt, Artificial Sequence
  Description of Artificial Sequence: Synthetic oligonucleotide
  Sense strand starting at position 2753 of SEQ ID NO: 1244632
agucuauagugguuaaaua

SEQ ID NO: 1503431 - RNA, 19 nt, Artificial Sequence
  Description of Artificial Sequence: Synthetic oligonucleotide
  Antisense strand to SEQ ID NO: 1503430
uauuuaaccacuauagacu

SEQ ID NO: 1503432 - RNA, 19 nt, Artificial Sequence
  Description of Artificial Sequence: Synthetic oligonucleotide
  Sense strand starting at position 2754 of SEQ ID NO: 1244632
gucuauagugguuaaauag

SEQ ID NO: 1503433 - RNA, 19 nt, Artificial Sequence
  Description of Artificial Sequence: Synthetic oligonucleotide
  Antisense strand to SEQ ID NO: 1503432
cuauuuaaccacuauagac

SEQ ID NO: 1503434 - RNA, 19 nt, Artificial Sequence
  Description of Artificial Sequence: Synthetic oligonucleotide
  Sense strand starting at position 2860 of SEQ ID NO: 1244632
gcaagaugugagcacuuua

SEQ ID NO: 1503435 - RNA, 19 nt, Artificial Sequence
  Description of Artificial Sequence: Synthetic oligonucleotide
  Antisense strand to SEQ ID NO: 1503434
uaaagugcucacaucuugc

SEQ ID NO: 1503436 - RNA, 19 nt, Artificial Sequence
  Description of Artificial Sequence: Synthetic oligonucleotide
  Sense strand starting at position 2865 of SEQ ID NO: 1244632
augugagcacuuuauacaa

SEQ ID NO: 1503437 - RNA, 19 nt, Artificial Sequence
  Description of Artificial Sequence: Synthetic oligonucleotide
  Antisense strand to SEQ ID NO: 1503436
uuguauaaagugcucacau

SEQ ID NO: 1503438 - RNA, 19 nt, Artificial Sequence
  Description of Artificial Sequence: Synthetic oligonucleotide
  Sense strand starting at position 2967 of SEQ ID NO: 1244632
ggauaaauugcuugucuga

SEQ ID NO: 1503439 - RNA, 19 nt, Artificial Sequence
  Description of Artificial Sequence: Synthetic oligonucleotide
  Antisense strand to SEQ ID NO: 1503438
ucagacaagcaauuuaucc

SEQ ID NO: 1503440 - RNA, 19 nt, Artificial Sequence
  Description of Artificial Sequence: Synthetic oligonucleotide
  Sense strand starting at position 2980 of SEQ ID NO: 1244632
gucugagguuaauccuaau

SEQ ID NO: 1503441 - RNA, 19 nt, Artificial Sequence
  Description of Artificial Sequence: Synthetic oligonucleotide
  Antisense strand to SEQ ID NO: 1503440
auuaggauuaaccucagac

SEQ ID NO: 1503442 - RNA, 19 nt, Artificial Sequence
  Description of Artificial Sequence: Synthetic oligonucleotide
  Sense strand starting at position 3027 of SEQ ID NO: 1244632
gucugaaucuaggucuagu

SEQ ID NO: 1503443 - RNA, 19 nt, Artificial Sequence
  Description of Artificial Sequence: Synthetic oligonucleotide
  Antisense strand to SEQ ID NO: 1503442
acuagaccuagauucagac

SEQ ID NO: 1503444 - RNA, 19 nt, Artificial Sequence
  Description of Artificial Sequence: Synthetic oligonucleotide
  Sense strand starting at position 3103 of SEQ ID NO: 1244632
ccuuaugugcuuuccgagu

SEQ ID NO: 1503445 - RNA, 19 nt, Artificial Sequence
  Description of Artificial Sequence: Synthetic oligonucleotide
  Antisense strand to SEQ ID NO: 1503444
acucggaaagcacauaagg

SEQ ID NO: 1503446 - RNA, 19 nt, Artificial Sequence
  Description of Artificial Sequence: Synthetic oligonucleotide
  Sense strand starting at position 3220 of SEQ ID NO: 1244632
uccugaagcucuccaguga

SEQ ID NO: 1503447 - RNA, 19 nt, Artificial Sequence
  Description of Artificial Sequence: Synthetic oligonucleotide
  Antisense strand to SEQ ID NO: 1503446
ucacuggagagcuucagga

SEQ ID NO: 1503448 - RNA, 19 nt, Artificial Sequence
  Description of Artificial Sequence: Synthetic oligonucleotide
  Sense strand starting at position 3221 of SEQ ID NO: 1244632
ccugaagcucuccagugau

SEQ ID NO: 1503449 - RNA, 19 nt, Artificial Sequence
  Description of Artificial Sequence: Synthetic oligonucleotide
  Antisense strand to SEQ ID NO: 1503448
aucacuggagagcuucagg

SEQ ID NO: 1503450 - RNA, 19 nt, Artificial Sequence
  Description of Artificial Sequence: Synthetic oligonucleotide
  Sense strand starting at position 3224 of SEQ ID NO: 1244632
gaagcucuccagugauaca

SEQ ID NO: 1503451 - RNA, 19 nt, Artificial Sequence
  Description of Artificial Sequence: Synthetic oligonucleotide
  Antisense strand to SEQ ID NO: 1503450
uguaucacuggagagcuuc

SEQ ID NO: 1503452 - RNA, 19 nt, Artificial Sequence
  Description of Artificial Sequence: Synthetic oligonucleotide
  Sense strand starting at position 3259 of SEQ ID NO: 1244632
ucaggaucccauugcaaug

SEQ ID NO: 1503453 - RNA, 19 nt, Artificial Sequence
  Description of Artificial Sequence: Synthetic oligonucleotide
  Antisense strand to SEQ ID NO: 1503452
cauugcaaugggauccuga

SEQ ID NO: 1503454 - RNA, 19 nt, Artificial Sequence
  Description of Artificial Sequence: Synthetic oligonucleotide
  Sense strand starting at position 3329 of SEQ ID NO: 1244632
ugguguguagcacaaucau

SEQ ID NO: 1503455 - RNA, 19 nt, Artificial Sequence
  Description of Artificial Sequence: Synthetic oligonucleotide
  Antisense strand to SEQ ID NO: 1503454
augauugugcuacacacca

SEQ ID NO: 1503456 - RNA, 19 nt, Artificial Sequence
  Description of Artificial Sequence: Synthetic oligonucleotide
  Sense strand starting at position 3434 of SEQ ID NO: 1244632
gcccguguaauuugaagaa

SEQ ID NO: 1503457 - RNA, 19 nt, Artificial Sequence
  Description of Artificial Sequence: Synthetic oligonucleotide
  Antisense strand to SEQ ID NO: 1503456
uucuucaaauuacacgggc

SEQ ID NO: 1503458 - RNA, 19 nt, Artificial Sequence
  Description of Artificial Sequence: Synthetic oligonucleotide
  Sense strand starting at position 272 of SEQ ID NO: 1244633
ggugucuuagcccaccuua

SEQ ID NO: 1503459 - RNA, 19 nt, Artificial Sequence
  Description of Artificial Sequence: Synthetic oligonucleotide
  Antisense strand to SEQ ID NO: 1503458
uaaggugggcuaagacacc

SEQ ID NO: 1503460 - RNA, 19 nt, Artificial Sequence
  Description of Artificial Sequence: Synthetic oligonucleotide
  Sense strand starting at position 316 of SEQ ID NO: 1244633
uuccacaugugaccugauu

SEQ ID NO: 1503461 - RNA, 19 nt, Artificial Sequence
  Description of Artificial Sequence: Synthetic oligonucleotide
  Antisense strand to SEQ ID NO: 1503460
aaucaggucacauguggaa

SEQ ID NO: 1503462 - RNA, 19 nt, Artificial Sequence
  Description of Artificial Sequence: Synthetic oligonucleotide
  Sense strand starting at position 324 of SEQ ID NO: 1244633
gugaccugauucucaguca

SEQ ID NO: 1503463 - RNA, 19 nt, Artificial Sequence
  Description of Artificial Sequence: Synthetic oligonucleotide
  Antisense strand to SEQ ID NO: 1503462
ugacugagaaucaggucac

SEQ ID NO: 1503464 - RNA, 19 nt, Artificial Sequence
  Description of Artificial Sequence: Synthetic oligonucleotide
  Sense strand starting at position 327 of SEQ ID NO: 1244633
accugauucucagucagcu

SEQ ID NO: 1503465 - RNA, 19 nt, Artificial Sequence
  Description of Artificial Sequence: Synthetic oligonucleotide
  Antisense strand to SEQ ID NO: 1503464
agcugacugagaaucaggu

SEQ ID NO: 1503466 - RNA, 19 nt, Artificial Sequence
  Description of Artificial Sequence: Synthetic oligonucleotide
  Sense strand starting at position 331 of SEQ ID NO: 1244633
gauucucagucagcugaaa

SEQ ID NO: 1503467 - RNA, 19 nt, Artificial Sequence
  Description of Artificial Sequence: Synthetic oligonucleotide
  Antisense strand to SEQ ID NO: 1503466
uuucagcugacugagaauc

SEQ ID NO: 1503468 - RNA, 19 nt, Artificial Sequence
  Description of Artificial Sequence: Synthetic oligonucleotide
  Sense strand starting at position 453 of SEQ ID NO: 1244633
ccucucacacuugguguaa

SEQ ID NO: 1503469 - RNA, 19 nt, Artificial Sequence
  Description of Artificial Sequence: Synthetic oligonucleotide
  Antisense strand to SEQ ID NO: 1503468
uuacaccaagugugagagg

SEQ ID NO: 1503470 - RNA, 19 nt, Artificial Sequence
  Description of Artificial Sequence: Synthetic oligonucleotide
  Sense strand starting at position 454 of SEQ ID NO: 1244633
cucucacacuugguguaaa

SEQ ID NO: 1503471 - RNA, 19 nt, Artificial Sequence
  Description of Artificial Sequence: Synthetic oligonucleotide
  Antisense strand to SEQ ID NO: 1503470
uuuacaccaagugugagag

SEQ ID NO: 1503472 - RNA, 19 nt, Artificial Sequence
  Description of Artificial Sequence: Synthetic oligonucleotide
  Sense strand starting at position 560 of SEQ ID NO: 1244633
guauguacaagcugggaaa

SEQ ID NO: 1503473 - RNA, 19 nt, Artificial Sequence
  Description of Artificial Sequence: Synthetic oligonucleotide
  Antisense strand to SEQ ID NO: 1503472
uuucccagcuuguacauac

SEQ ID NO: 1503474 - RNA, 19 nt, Artificial Sequence
  Description of Artificial Sequence: Synthetic oligonucleotide
  Sense strand starting at position 609 of SEQ ID NO: 1244633
ugacuuuacaaugguggua

SEQ ID NO: 1503475 - RNA, 19 nt, Artificial Sequence
  Description of Artificial Sequence: Synthetic oligonucleotide
  Antisense strand to SEQ ID NO: 1503474
uaccaccauuguaaaguca

SEQ ID NO: 1503476 - RNA, 19 nt, Artificial Sequence
  Description of Artificial Sequence: Synthetic oligonucleotide
  Sense strand starting at position 622 of SEQ ID NO: 1244633
gugguaaugcgauauacau

SEQ ID NO: 1503477 - RNA, 19 nt, Artificial Sequence
  Description of Artificial Sequence: Synthetic oligonucleotide
  Antisense strand to SEQ ID NO: 1503476
auguauaucgcauuaccac

SEQ ID NO: 1503478 - RNA, 19 nt, Artificial Sequence
  Description of Artificial Sequence: Synthetic oligonucleotide
  Sense strand starting at position 624 of SEQ ID NO: 1244633
gguaaugcgauauacauuc

SEQ ID NO: 1503479 - RNA, 19 nt, Artificial Sequence
  Description of Artificial Sequence: Synthetic oligonucleotide
  Antisense strand to SEQ ID NO: 1503478
gaauguauaucgcauuacc

SEQ ID NO: 1503480 - RNA, 19 nt, Artificial Sequence
  Description of Artificial Sequence: Synthetic oligonucleotide
  Sense strand starting at position 870 of SEQ ID NO: 1244633
gguaauugcagugagccaa

SEQ ID NO: 1503481 - RNA, 19 nt, Artificial Sequence
  Description of Artificial Sequence: Synthetic oligonucleotide
  Antisense strand to SEQ ID NO: 1503480
uuggcucacugcaauuacc

SEQ ID NO: 1503482 - RNA, 19 nt, Artificial Sequence
  Description of Artificial Sequence: Synthetic oligonucleotide
  Sense strand starting at position 978 of SEQ ID NO: 1244633
uagguaugauaccuucuga

SEQ ID NO: 1503483 - RNA, 19 nt, Artificial Sequence
  Description of Artificial Sequence: Synthetic oligonucleotide
  Antisense strand to SEQ ID NO: 1503482
ucagaagguaucauaccua

SEQ ID NO: 1503484 - RNA, 19 nt, Artificial Sequence
  Description of Artificial Sequence: Synthetic oligonucleotide
  Sense strand starting at position 1043 of SEQ ID NO: 1244633
cagugugccgugcucgaua

SEQ ID NO: 1503485 - RNA, 19 nt, Artificial Sequence
  Description of Artificial Sequence: Synthetic oligonucleotide
  Antisense strand to SEQ ID NO: 1503484
uaucgagcacggcacacug

SEQ ID NO: 1503486 - RNA, 19 nt, Artificial Sequence
  Description of Artificial Sequence: Synthetic oligonucleotide
  Sense strand starting at position 1050 of SEQ ID NO: 1244633
ccgugcucgauacauuaca

SEQ ID NO: 1503487 - RNA, 19 nt, Artificial Sequence
  Description of Artificial Sequence: Synthetic oligonucleotide
  Antisense strand to SEQ ID NO: 1503486
uguaauguaucgagcacgg

SEQ ID NO: 1503488 - RNA, 19 nt, Artificial Sequence
  Description of Artificial Sequence: Synthetic oligonucleotide
  Sense strand starting at position 1239 of SEQ ID NO: 1244633
cucugagaugaucgcgauu

SEQ ID NO: 1503489 - RNA, 19 nt, Artificial Sequence
  Description of Artificial Sequence: Synthetic oligonucleotide
  Antisense strand to SEQ ID NO: 1503488
aaucgcgaucaucucagag

SEQ ID NO: 1503490 - RNA, 19 nt, Artificial Sequence
  Description of Artificial Sequence: Synthetic oligonucleotide
  Sense strand starting at position 1245 of SEQ ID NO: 1244633
gaugaucgcgauuagcuaa

SEQ ID NO: 1503491 - RNA, 19 nt, Artificial Sequence
  Description of Artificial Sequence: Synthetic oligonucleotide
  Antisense strand to SEQ ID NO: 1503490
uuagcuaaucgcgaucauc

SEQ ID NO: 1503492 - RNA, 19 nt, Artificial Sequence
  Description of Artificial Sequence: Synthetic oligonucleotide
  Sense strand starting at position 1248 of SEQ ID NO: 1244633
gaucgcgauuagcuaaaga

SEQ ID NO: 1503493 - RNA, 19 nt, Artificial Sequence
  Description of Artificial Sequence: Synthetic oligonucleotide
  Antisense strand to SEQ ID NO: 1503492
ucuuuagcuaaucgcgauc

SEQ ID NO: 1503494 - RNA, 19 nt, Artificial Sequence
  Description of Artificial Sequence: Synthetic oligonucleotide
  Sense strand starting at position 1258 of SEQ ID NO: 1244633
agcuaaagaugguccuaga

SEQ ID NO: 1503495 - RNA, 19 nt, Artificial Sequence
  Description of Artificial Sequence: Synthetic oligonucleotide
  Antisense strand to SEQ ID NO: 1503494
ucuaggaccaucuuuagcu

SEQ ID NO: 1503496 - RNA, 19 nt, Artificial Sequence
  Description of Artificial Sequence: Synthetic oligonucleotide
  Sense strand starting at position 1306 of SEQ ID NO: 1244633
ggucuuucucaugggaaac

SEQ ID NO: 1503497 - RNA, 19 nt, Artificial Sequence
  Description of Artificial Sequence: Synthetic oligonucleotide
  Antisense strand to SEQ ID NO: 1503496
guuucccaugagaaagacc

SEQ ID NO: 1503498 - RNA, 19 nt, Artificial Sequence
  Description of Artificial Sequence: Synthetic oligonucleotide
  Sense strand starting at position 1988 of SEQ ID NO: 1244633
uuccguuuccgggcaguua

SEQ ID NO: 1503499 - RNA, 19 nt, Artificial Sequence
  Description of Artificial Sequence: Synthetic oligonucleotide
  Antisense strand to SEQ ID NO: 1503498
uaacugcccggaaacggaa

SEQ ID NO: 1503500 - RNA, 19 nt, Artificial Sequence
  Description of Artificial Sequence: Synthetic oligonucleotide
  Sense strand starting at position 2063 of SEQ ID NO: 1244633
aggcguucgcacuuccaau

SEQ ID NO: 1503501 - RNA, 19 nt, Artificial Sequence
  Description of Artificial Sequence: Synthetic oligonucleotide
  Antisense strand to SEQ ID NO: 1503500
auuggaagugcgaacgccu

SEQ ID NO: 1503502 - RNA, 19 nt, Artificial Sequence
  Description of Artificial Sequence: Synthetic oligonucleotide
  Sense strand starting at position 2064 of SEQ ID NO: 1244633
ggcguucgcacuuccaauu

SEQ ID NO: 1503503 - RNA, 19 nt, Artificial Sequence
  Description of Artificial Sequence: Synthetic oligonucleotide
  Antisense strand to SEQ ID NO: 1503502
aauuggaagugcgaacgcc

SEQ ID NO: 1503504 - RNA, 19 nt, Artificial Sequence
  Description of Artificial Sequence: Synthetic oligonucleotide
  Sense strand starting at position 2480 of SEQ ID NO: 1244633
cugggcucuucuuuccaua

SEQ ID NO: 1503505 - RNA, 19 nt, Artificial Sequence
  Description of Artificial Sequence: Synthetic oligonucleotide
  Antisense strand to SEQ ID NO: 1503504
uauggaaagaagagcccag

SEQ ID NO: 1503506 - RNA, 19 nt, Artificial Sequence
  Description of Artificial Sequence: Synthetic oligonucleotide
  Sense strand starting at position 2482 of SEQ ID NO: 1244633
gggcucuucuuuccauaag

SEQ ID NO: 1503507 - RNA, 19 nt, Artificial Sequence
  Description of Artificial Sequence: Synthetic oligonucleotide
  Antisense strand to SEQ ID NO: 1503506
cuuauggaaagaagagccc

SEQ ID NO: 1503508 - RNA, 19 nt, Artificial Sequence
  Description of Artificial Sequence: Synthetic oligonucleotide
  Sense strand starting at position 2512 of SEQ ID NO: 1244633
cugcuugcugcuuccaauu

SEQ ID NO: 1503509 - RNA, 19 nt, Artificial Sequence
  Description of Artificial Sequence: Synthetic oligonucleotide
  Antisense strand to SEQ ID NO: 1503508
aauuggaagcagcaagcag

SEQ ID NO: 1503510 - RNA, 19 nt, Artificial Sequence
  Description of Artificial Sequence: Synthetic oligonucleotide
  Sense strand starting at position 2530 of SEQ ID NO: 1244633
ucccuuaggaauuggugua

SEQ ID NO: 1503511 - RNA, 19 nt, Artificial Sequence
  Description of Artificial Sequence: Synthetic oligonucleotide
  Antisense strand to SEQ ID NO: 1503510
uacaccaauuccuaaggga

SEQ ID NO: 1503512 - RNA, 19 nt, Artificial Sequence
  Description of Artificial Sequence: Synthetic oligonucleotide
  Sense strand starting at position 2949 of SEQ ID NO: 1244633
uagguuagacucugagcaa

SEQ ID NO: 1503513 - RNA, 19 nt, Artificial Sequence
  Description of Artificial Sequence: Synthetic oligonucleotide
  Antisense strand to SEQ ID NO: 1503512
uugcucagagucuaaccua

SEQ ID NO: 1503514 - RNA, 19 nt, Artificial Sequence
  Description of Artificial Sequence: Synthetic oligonucleotide
  Sense strand starting at position 3082 of SEQ ID NO: 1244633
aauguaauugcuucgugcu

SEQ ID NO: 1503515 - RNA, 19 nt, Artificial Sequence
  Description of Artificial Sequence: Synthetic oligonucleotide
  Antisense strand to SEQ ID NO: 1503514
agcacgaagcaauuacauu

SEQ ID NO: 1503516 - RNA, 19 nt, Artificial Sequence
  Description of Artificial Sequence: Synthetic oligonucleotide
  Sense strand starting at position 3135 of SEQ ID NO: 1244633
acacuuugccaugagcuuu

SEQ ID NO: 1503517 - RNA, 19 nt, Artificial Sequence
  Description of Artificial Sequence: Synthetic oligonucleotide
  Antisense strand to SEQ ID NO: 1503516
aaagcucauggcaaagugu

SEQ ID NO: 1503518 - RNA, 19 nt, Artificial Sequence
  Description of Artificial Sequence: Synthetic oligonucleotide
  Sense strand starting at position 3143 of SEQ ID NO: 1244633
ccaugagcuuuacuuagaa

SEQ ID NO: 1503519 - RNA, 19 nt, Artificial Sequence
  Description of Artificial Sequence: Synthetic oligonucleotide
  Antisense strand to SEQ ID NO: 1503518
uucuaaguaaagcucaugg

SEQ ID NO: 1503520 - RNA, 19 nt, Artificial Sequence
  Description of Artificial Sequence: Synthetic oligonucleotide
  Sense strand starting at position 3263 of SEQ ID NO: 1244633
gaccuugcugcagagagau

SEQ ID NO: 1503521 - RNA, 19 nt, Artificial Sequence
  Description of Artificial Sequence: Synthetic oligonucleotide
  Antisense strand to SEQ ID NO: 1503520
aucucucugcagcaagguc

SEQ ID NO: 1503522 - RNA, 19 nt, Artificial Sequence
  Description of Artificial Sequence: Synthetic oligonucleotide
  Sense strand starting at position 3326 of SEQ ID NO: 1244633
gaacgaugucucugcaacu

SEQ ID NO: 1503523 - RNA, 19 nt, Artificial Sequence
  Description of Artificial Sequence: Synthetic oligonucleotide
  Antisense strand to SEQ ID NO: 1503522
aguugcagagacaucguuc

SEQ ID NO: 1503524 - RNA, 19 nt, Artificial Sequence
  Description of Artificial Sequence: Synthetic oligonucleotide
  Sense strand starting at position 3357 of SEQ ID NO: 1244633
ggguucuagcagugggaaa

SEQ ID NO: 1503525 - RNA, 19 nt, Artificial Sequence
  Description of Artificial Sequence: Synthetic oligonucleotide
  Antisense strand to SEQ ID NO: 1503524
uuucccacugcuagaaccc

SEQ ID NO: 1503526 - RNA, 19 nt, Artificial Sequence
  Description of Artificial Sequence: Synthetic oligonucleotide
  Sense strand starting at position 3376 of SEQ ID NO: 1244633
aguuaauuggcagaagccu

SEQ ID NO: 1503527 - RNA, 19 nt, Artificial Sequence
  Description of Artificial Sequence: Synthetic oligonucleotide
  Antisense strand to SEQ ID NO: 1503526
aggcuucugccaauuaacu

SEQ ID NO: 1503528 - RNA, 19 nt, Artificial Sequence
  Description of Artificial Sequence: Synthetic oligonucleotide
  Sense strand starting at position 3443 of SEQ ID NO: 1244633
ucagcucugaccugagaag

SEQ ID NO: 1503529 - RNA, 19 nt, Artificial Sequence
  Description of Artificial Sequence: Synthetic oligonucleotide
  Antisense strand to SEQ ID NO: 1503528
cuucucaggucagagcuga

SEQ ID NO: 1503530 - RNA, 19 nt, Artificial Sequence
  Description of Artificial Sequence: Synthetic oligonucleotide
  Sense strand starting at position 3712 of SEQ ID NO: 1244633
guugcuugccgcucauaca

SEQ ID NO: 1503531 - RNA, 19 nt, Artificial Sequence
  Description of Artificial Sequence: Synthetic oligonucleotide
  Antisense strand to SEQ ID NO: 1503530
uguaugagcggcaagcaac

SEQ ID NO: 1503532 - RNA, 19 nt, Artificial Sequence
  Description of Artificial Sequence: Synthetic oligonucleotide
  Sense strand starting at position 3763 of SEQ ID NO: 1244633
cguggagguguuuaacuuu

SEQ ID NO: 1503533 - RNA, 19 nt, Artificial Sequence
  Description of Artificial Sequence: Synthetic oligonucleotide
  Antisense strand to SEQ ID NO: 1503532
aaaguuaaacaccuccacg

SEQ ID NO: 1503534 - RNA, 19 nt, Artificial Sequence
  Description of Artificial Sequence: Synthetic oligonucleotide
  Sense strand starting at position 3981 of SEQ ID NO: 1244633
cagcauucugucgauaacu

SEQ ID NO: 1503535 - RNA, 19 nt, Artificial Sequence
  Description of Artificial Sequence: Synthetic oligonucleotide
  Antisense strand to SEQ ID NO: 1503534
aguuaucgacagaaugcug

SEQ ID NO: 1503536 - RNA, 19 nt, Artificial Sequence
  Description of Artificial Sequence: Synthetic oligonucleotide
  Sense strand starting at position 3983 of SEQ ID NO: 1244633
gcauucugucgauaacucu

SEQ ID NO: 1503537 - RNA, 19 nt, Artificial Sequence
  Description of Artificial Sequence: Synthetic oligonucleotide
  Antisense strand to SEQ ID NO: 1503536
agaguuaucgacagaaugc

SEQ ID NO: 1503538 - RNA, 19 nt, Artificial Sequence
  Description of Artificial Sequence: Synthetic oligonucleotide
  Sense strand starting at position 70 of SEQ ID NO: 1244634
ccgaccaagucuuccaaga

SEQ ID NO: 1503539 - RNA, 19 nt, Artificial Sequence
  Description of Artificial Sequence: Synthetic oligonucleotide
  Antisense strand to SEQ ID NO: 1503538
ucuuggaagacuuggucgg

SEQ ID NO: 1503540 - RNA, 19 nt, Artificial Sequence
  Description of Artificial Sequence: Synthetic oligonucleotide
  Sense strand starting at position 451 of SEQ ID NO: 1244634
guuucuuccgucuacucau

SEQ ID NO: 1503541 - RNA, 19 nt, Artificial Sequence
  Description of Artificial Sequence: Synthetic oligonucleotide
  Antisense strand to SEQ ID NO: 1503540
augaguagacggaagaaac

SEQ ID NO: 1503542 - RNA, 19 nt, Artificial Sequence
  Description of Artificial Sequence: Synthetic oligonucleotide
  Sense strand starting at position 462 of SEQ ID NO: 1244634
cuacucaucuguccgcuau

SEQ ID NO: 1503543 - RNA, 19 nt, Artificial Sequence
  Description of Artificial Sequence: Synthetic oligonucleotide
  Antisense strand to SEQ ID NO: 1503542
auagcggacagaugaguag

SEQ ID NO: 1503544 - RNA, 19 nt, Artificial Sequence
  Description of Artificial Sequence: Synthetic oligonucleotide
  Sense strand starting at position 464 of SEQ ID NO: 1244634
acucaucuguccgcuauaa

SEQ ID NO: 1503545 - RNA, 19 nt, Artificial Sequence
  Description of Artificial Sequence: Synthetic oligonucleotide
  Antisense strand to SEQ ID NO: 1503544
uuauagcggacagaugagu

SEQ ID NO: 1503546 - RNA, 19 nt, Artificial Sequence
  Description of Artificial Sequence: Synthetic oligonucleotide
  Sense strand starting at position 511 of SEQ ID NO: 1244634
gggcuuuggccuuauaauu

SEQ ID NO: 1503547 - RNA, 19 nt, Artificial Sequence
  Description of Artificial Sequence: Synthetic oligonucleotide
  Antisense strand to SEQ ID NO: 1503546
aauuauaaggccaaagccc

SEQ ID NO: 1503548 - RNA, 19 nt, Artificial Sequence
  Description of Artificial Sequence: Synthetic oligonucleotide
  Sense strand starting at position 635 of SEQ ID NO: 1244634
agacucauauauccaguga

SEQ ID NO: 1503549 - RNA, 19 nt, Artificial Sequence
  Description of Artificial Sequence: Synthetic oligonucleotide
  Antisense strand to SEQ ID NO: 1503548
ucacuggauauaugagucu

SEQ ID NO: 1503550 - RNA, 19 nt, Artificial Sequence
  Description of Artificial Sequence: Synthetic oligonucleotide
  Sense strand starting at position 702 of SEQ ID NO: 1244634
uccgcuguuggcguuagaa

SEQ ID NO: 1503551 - RNA, 19 nt, Artificial Sequence
  Description of Artificial Sequence: Synthetic oligonucleotide
  Antisense strand to SEQ ID NO: 1503550
uucuaacgccaacagcgga

SEQ ID NO: 1503552 - RNA, 19 nt, Artificial Sequence
  Description of Artificial Sequence: Synthetic oligonucleotide
  Sense strand starting at position 1444 of SEQ ID NO: 1244634
gcuccugcaccagaaaguu

SEQ ID NO: 1503553 - RNA, 19 nt, Artificial Sequence
  Description of Artificial Sequence: Synthetic oligonucleotide
  Antisense strand to SEQ ID NO: 1503552
aacuuucuggugcaggagc

SEQ ID NO: 1503554 - RNA, 19 nt, Artificial Sequence
  Description of Artificial Sequence: Synthetic oligonucleotide
  Sense strand starting at position 1453 of SEQ ID NO: 1244634
ccagaaaguugaucaugcu

SEQ ID NO: 1503555 - RNA, 19 nt, Artificial Sequence
  Description of Artificial Sequence: Synthetic oligonucleotide
  Antisense strand to SEQ ID NO: 1503554
agcaugaucaacuuucugg

SEQ ID NO: 1503556 - RNA, 19 nt, Artificial Sequence
  Description of Artificial Sequence: Synthetic oligonucleotide
  Sense strand starting at position 2220 of SEQ ID NO: 1244634
guccguucuuggcuagaaa

SEQ ID NO: 1503557 - RNA, 19 nt, Artificial Sequence
  Description of Artificial Sequence: Synthetic oligonucleotide
  Antisense strand to SEQ ID NO: 1503556
uuucuagccaagaacggac

SEQ ID NO: 1503558 - RNA, 19 nt, Artificial Sequence
  Description of Artificial Sequence: Synthetic oligonucleotide
  Sense strand starting at position 2270 of SEQ ID NO: 1244634
uacccuuagcagugaaguu

SEQ ID NO: 1503559 - RNA, 19 nt, Artificial Sequence
  Description of Artificial Sequence: Synthetic oligonucleotide
  Antisense strand to SEQ ID NO: 1503558
aacuucacugcuaagggua

SEQ ID NO: 1503560 - RNA, 19 nt, Artificial Sequence
  Description of Artificial Sequence: Synthetic oligonucleotide
  Sense strand starting at position 2279 of SEQ ID NO: 1244634
cagugaaguuauuccggaa

SEQ ID NO: 1503561 - RNA, 19 nt, Artificial Sequence
  Description of Artificial Sequence: Synthetic oligonucleotide
  Antisense strand to SEQ ID NO: 1503560
uuccggaauaacuucacug

SEQ ID NO: 1503562 - RNA, 19 nt, Artificial Sequence
  Description of Artificial Sequence: Synthetic oligonucleotide
  Sense strand starting at position 2283 of SEQ ID NO: 1244634
gaaguuauuccggaaucug

SEQ ID NO: 1503563 - RNA, 19 nt, Artificial Sequence
  Description of Artificial Sequence: Synthetic oligonucleotide
  Antisense strand to SEQ ID NO: 1503562
cagauuccggaauaacuuc

SEQ ID NO: 1503564 - RNA, 19 nt, Artificial Sequence
  Description of Artificial Sequence: Synthetic oligonucleotide
  Sense strand starting at position 2302 of SEQ ID NO: 1244634
cccugacucucuucgcuua

SEQ ID NO: 1503565 - RNA, 19 nt, Artificial Sequence
  Description of Artificial Sequence: Synthetic oligonucleotide
  Antisense strand to SEQ ID NO: 1503564
uaagcgaagagagucaggg

SEQ ID NO: 1503566 - RNA, 19 nt, Artificial Sequence
  Description of Artificial Sequence: Synthetic oligonucleotide
  Sense strand starting at position 2304 of SEQ ID NO: 1244634
cugacucucuucgcuuauu

SEQ ID NO: 1503567 - RNA, 19 nt, Artificial Sequence
  Description of Artificial Sequence: Synthetic oligonucleotide
  Antisense strand to SEQ ID NO: 1503566
aauaagcgaagagagucag

SEQ ID NO: 1503568 - RNA, 19 nt, Artificial Sequence
  Description of Artificial Sequence: Synthetic oligonucleotide
  Sense strand starting at position 2305 of SEQ ID NO: 1244634
ugacucucuucgcuuauua

SEQ ID NO: 1503569 - RNA, 19 nt, Artificial Sequence
  Description of Artificial Sequence: Synthetic oligonucleotide
  Antisense strand to SEQ ID NO: 1503568
uaauaagcgaagagaguca

SEQ ID NO: 1503570 - RNA, 19 nt, Artificial Sequence
  Description of Artificial Sequence: Synthetic oligonucleotide
  Sense strand starting at position 2333 of SEQ ID NO: 1244634
ucguaagccuugcuagaca

SEQ ID NO: 1503571 - RNA, 19 nt, Artificial Sequence
  Description of Artificial Sequence: Synthetic oligonucleotide
  Antisense strand to SEQ ID NO: 1503570
ugucuagcaaggcuuacga

SEQ ID NO: 1503572 - RNA, 19 nt, Artificial Sequence
  Description of Artificial Sequence: Synthetic oligonucleotide
  Sense strand starting at position 2570 of SEQ ID NO: 1244634
gucauuguagacuaguuua

SEQ ID NO: 1503573 - RNA, 19 nt, Artificial Sequence
  Description of Artificial Sequence: Synthetic oligonucleotide
  Antisense strand to SEQ ID NO: 1503572
uaaacuagucuacaaugac

SEQ ID NO: 1503574 - RNA, 19 nt, Artificial Sequence
  Description of Artificial Sequence: Synthetic oligonucleotide
  Sense strand starting at position 2573 of SEQ ID NO: 1244634
auuguagacuaguuuagaa

SEQ ID NO: 1503575 - RNA, 19 nt, Artificial Sequence
  Description of Artificial Sequence: Synthetic oligonucleotide
  Antisense strand to SEQ ID NO: 1503574
uucuaaacuagucuacaau

SEQ ID NO: 1503576 - RNA, 19 nt, Artificial Sequence
  Description of Artificial Sequence: Synthetic oligonucleotide
  Sense strand starting at position 2649 of SEQ ID NO: 1244634
auguuaucaccuggguaua

SEQ ID NO: 1503577 - RNA, 19 nt, Artificial Sequence
  Description of Artificial Sequence: Synthetic oligonucleotide
  Antisense strand to SEQ ID NO: 1503576
uauacccaggugauaacau

SEQ ID NO: 1503578 - RNA, 19 nt, Artificial Sequence
  Description of Artificial Sequence: Synthetic oligonucleotide
  Sense strand starting at position 2650 of SEQ ID NO: 1244634
uguuaucaccuggguauaa

SEQ ID NO: 1503579 - RNA, 19 nt, Artificial Sequence
  Description of Artificial Sequence: Synthetic oligonucleotide
  Antisense strand to SEQ ID NO: 1503578
uuauacccaggugauaaca

SEQ ID NO: 1503580 - RNA, 19 nt, Artificial Sequence
  Description of Artificial Sequence: Synthetic oligonucleotide
  Sense strand starting at position 2651 of SEQ ID NO: 1244634
guuaucaccuggguauaaa

SEQ ID NO: 1503581 - RNA, 19 nt, Artificial Sequence
  Description of Artificial Sequence: Synthetic oligonucleotide
  Antisense strand to SEQ ID NO: 1503580
uuuauacccaggugauaac

SEQ ID NO: 1503582 - RNA, 19 nt, Artificial Sequence
  Description of Artificial Sequence: Synthetic oligonucleotide
  Sense strand starting at position 2662 of SEQ ID NO: 1244634
gguauaaacuccucccaga

SEQ ID NO: 1503583 - RNA, 19 nt, Artificial Sequence
  Description of Artificial Sequence: Synthetic oligonucleotide
  Antisense strand to SEQ ID NO: 1503582
ucugggaggaguuuauacc

SEQ ID NO: 1503584 - RNA, 19 nt, Artificial Sequence
  Description of Artificial Sequence: Synthetic oligonucleotide
  Sense strand starting at position 2769 of SEQ ID NO: 1244634
cguaacuuucccuagcgau

SEQ ID NO: 1503585 - RNA, 19 nt, Artificial Sequence
  Description of Artificial Sequence: Synthetic oligonucleotide
  Antisense strand to SEQ ID NO: 1503584
aucgcuagggaaaguuacg

SEQ ID NO: 1503586 - RNA, 19 nt, Artificial Sequence
  Description of Artificial Sequence: Synthetic oligonucleotide
  Sense strand starting at position 2797 of SEQ ID NO: 1244634
cagcuauggcucugaauug

SEQ ID NO: 1503587 - RNA, 19 nt, Artificial Sequence
  Description of Artificial Sequence: Synthetic oligonucleotide
  Antisense strand to SEQ ID NO: 1503586
caauucagagccauagcug

SEQ ID NO: 1503588 - RNA, 19 nt, Artificial Sequence
  Description of Artificial Sequence: Synthetic oligonucleotide
  Sense strand starting at position 2885 of SEQ ID NO: 1244634
ccaagaguuucugaaucag

SEQ ID NO: 1503589 - RNA, 19 nt, Artificial Sequence
  Description of Artificial Sequence: Synthetic oligonucleotide
  Antisense strand to SEQ ID NO: 1503588
cugauucagaaacucuugg

SEQ ID NO: 1503590 - RNA, 19 nt, Artificial Sequence
  Description of Artificial Sequence: Synthetic oligonucleotide
  Sense strand starting at position 2937 of SEQ ID NO: 1244634
acaguucccacgugaugca

SEQ ID NO: 1503591 - RNA, 19 nt, Artificial Sequence
  Description of Artificial Sequence: Synthetic oligonucleotide
  Antisense strand to SEQ ID NO: 1503590
ugcaucacgugggaacugu

SEQ ID NO: 1503592 - RNA, 19 nt, Artificial Sequence
  Description of Artificial Sequence: Synthetic oligonucleotide
  Sense strand starting at position 2944 of SEQ ID NO: 1244634
ccacgugaugcacaaacua

SEQ ID NO: 1503593 - RNA, 19 nt, Artificial Sequence
  Description of Artificial Sequence: Synthetic oligonucleotide
  Antisense strand to SEQ ID NO: 1503592
uaguuugugcaucacgugg

SEQ ID NO: 1503594 - RNA, 19 nt, Artificial Sequence
  Description of Artificial Sequence: Synthetic oligonucleotide
  Sense strand starting at position 3656 of SEQ ID NO: 1244634
ccagaaauauaccagugua

SEQ ID NO: 1503595 - RNA, 19 nt, Artificial Sequence
  Description of Artificial Sequence: Synthetic oligonucleotide
  Antisense strand to SEQ ID NO: 1503594
uacacugguauauuucugg

SEQ ID NO: 1503596 - RNA, 19 nt, Artificial Sequence
  Description of Artificial Sequence: Synthetic oligonucleotide
  Sense strand starting at position 3734 of SEQ ID NO: 1244634
aaagucuuugccugaguag

SEQ ID NO: 1503597 - RNA, 19 nt, Artificial Sequence
  Description of Artificial Sequence: Synthetic oligonucleotide
  Antisense strand to SEQ ID NO: 1503596
cuacucaggcaaagacuuu

SEQ ID NO: 1503598 - RNA, 19 nt, Artificial Sequence
  Description of Artificial Sequence: Synthetic oligonucleotide
  Sense strand starting at position 3773 of SEQ ID NO: 1244634
ggugguuucucacccguau

SEQ ID NO: 1503599 - RNA, 19 nt, Artificial Sequence
  Description of Artificial Sequence: Synthetic oligonucleotide
  Antisense strand to SEQ ID NO: 1503598
auacgggugagaaaccacc

SEQ ID NO: 1503600 - RNA, 19 nt, Artificial Sequence
  Description of Artificial Sequence: Synthetic oligonucleotide
  Sense strand starting at position 3777 of SEQ ID NO: 1244634
guuucucacccguauguua

SEQ ID NO: 1503601 - RNA, 19 nt, Artificial Sequence
  Description of Artificial Sequence: Synthetic oligonucleotide
  Antisense strand to SEQ ID NO: 1503600
uaacauacgggugagaaac

SEQ ID NO: 1503602 - RNA, 19 nt, Artificial Sequence
  Description of Artificial Sequence: Synthetic oligonucleotide
  Sense strand starting at position 3779 of SEQ ID NO: 1244634
uucucacccguauguuaau

SEQ ID NO: 1503603 - RNA, 19 nt, Artificial Sequence
  Description of Artificial Sequence: Synthetic oligonucleotide
  Antisense strand to SEQ ID NO: 1503602
auuaacauacgggugagaa

SEQ ID NO: 1503604 - RNA, 19 nt, Artificial Sequence
  Description of Artificial Sequence: Synthetic oligonucleotide
  Sense strand starting at position 3785 of SEQ ID NO: 1244634
cccguauguuaauuugcau

SEQ ID NO: 1503605 - RNA, 19 nt, Artificial Sequence
  Description of Artificial Sequence: Synthetic oligonucleotide
  Antisense strand to SEQ ID NO: 1503604
augcaaauuaacauacggg

SEQ ID NO: 1503606 - RNA, 19 nt, Artificial Sequence
  Description of Artificial Sequence: Synthetic oligonucleotide
  Sense strand starting at position 3807 of SEQ ID NO: 1244634
uugauuguugcaggagagu

SEQ ID NO: 1503607 - RNA, 19 nt, Artificial Sequence
  Description of Artificial Sequence: Synthetic oligonucleotide
  Antisense strand to SEQ ID NO: 1503606
acucuccugcaacaaucaa

SEQ ID NO: 1503608 - RNA, 19 nt, Artificial Sequence
  Description of Artificial Sequence: Synthetic oligonucleotide
  Sense strand starting at position 3810 of SEQ ID NO: 1244634
auuguugcaggagaguaaa

SEQ ID NO: 1503609 - RNA, 19 nt, Artificial Sequence
  Description of Artificial Sequence: Synthetic oligonucleotide
  Antisense strand to SEQ ID NO: 1503608
uuuacucuccugcaacaau

SEQ ID NO: 1503610 - RNA, 19 nt, Artificial Sequence
  Description of Artificial Sequence: Synthetic oligonucleotide
  Sense strand starting at position 3832 of SEQ ID NO: 1244634
agcacuuuguuauugcaau

SEQ ID NO: 1503611 - RNA, 19 nt, Artificial Sequence
  Description of Artificial Sequence: Synthetic oligonucleotide
  Antisense strand to SEQ ID NO: 1503610
auugcaauaacaaagugcu

SEQ ID NO: 1503612 - RNA, 19 nt, Artificial Sequence
  Description of Artificial Sequence: Synthetic oligonucleotide
  Sense strand starting at position 3838 of SEQ ID NO: 1244634
uuguuauugcaauaaugca

SEQ ID NO: 1503613 - RNA, 19 nt, Artificial Sequence
  Description of Artificial Sequence: Synthetic oligonucleotide
  Antisense strand to SEQ ID NO: 1503612
ugcauuauugcaauaacaa

SEQ ID NO: 1503614 - RNA, 19 nt, Artificial Sequence
  Description of Artificial Sequence: Synthetic oligonucleotide
  Sense strand starting at position 3879 of SEQ ID NO: 1244634
cuugaauuccaguggugac

SEQ ID NO: 1503615 - RNA, 19 nt, Artificial Sequence
  Description of Artificial Sequence: Synthetic oligonucleotide
  Antisense strand to SEQ ID NO: 1503614
gucaccacuggaauucaag

SEQ ID NO: 1503616 - RNA, 19 nt, Artificial Sequence
  Description of Artificial Sequence: Synthetic oligonucleotide
  Sense strand starting at position 3880 of SEQ ID NO: 1244634
uugaauuccaguggugaca

SEQ ID NO: 1503617 - RNA, 19 nt, Artificial Sequence
  Description of Artificial Sequence: Synthetic oligonucleotide
  Antisense strand to SEQ ID NO: 1503616
ugucaccacuggaauucaa

SEQ ID NO: 1503618 - RNA, 19 nt, Artificial Sequence
  Description of Artificial Sequence: Synthetic oligonucleotide
  Sense strand starting at position 86 of SEQ ID NO: 1244635
cuuucuaaaccgugugauu

SEQ ID NO: 1503619 - RNA, 19 nt, Artificial Sequence
  Description of Artificial Sequence: Synthetic oligonucleotide
  Antisense strand to SEQ ID NO: 1503618
aaucacacgguuuagaaag

SEQ ID NO: 1503620 - RNA, 19 nt, Artificial Sequence
  Description of Artificial Sequence: Synthetic oligonucleotide
  Sense strand starting at position 134 of SEQ ID NO: 1244635
aacaguauuggucagguau

SEQ ID NO: 1503621 - RNA, 19 nt, Artificial Sequence
  Description of Artificial Sequence: Synthetic oligonucleotide
  Antisense strand to SEQ ID NO: 1503620
auaccugaccaauacuguu

SEQ ID NO: 1503622 - RNA, 19 nt, Artificial Sequence
  Description of Artificial Sequence: Synthetic oligonucleotide
  Sense strand starting at position 329 of SEQ ID NO: 1244635
ccaugacaaucgcuuaaac

SEQ ID NO: 1503623 - RNA, 19 nt, Artificial Sequence
  Description of Artificial Sequence: Synthetic oligonucleotide
  Antisense strand to SEQ ID NO: 1503622
guuuaagcgauugucaugg

SEQ ID NO: 1503624 - RNA, 19 nt, Artificial Sequence
  Description of Artificial Sequence: Synthetic oligonucleotide
  Sense strand starting at position 469 of SEQ ID NO: 1244635
gccacuuaguuucuuaaag

SEQ ID NO: 1503625 - RNA, 19 nt, Artificial Sequence
  Description of Artificial Sequence: Synthetic oligonucleotide
  Antisense strand to SEQ ID NO: 1503624
cuuuaagaaacuaaguggc

SEQ ID NO: 1503626 - RNA, 19 nt, Artificial Sequence
  Description of Artificial Sequence: Synthetic oligonucleotide
  Sense strand starting at position 470 of SEQ ID NO: 1244635
ccacuuaguuucuuaaagu

SEQ ID NO: 1503627 - RNA, 19 nt, Artificial Sequence
  Description of Artificial Sequence: Synthetic oligonucleotide
  Antisense strand to SEQ ID NO: 1503626
acuuuaagaaacuaagugg

SEQ ID NO: 1503628 - RNA, 19 nt, Artificial Sequence
  Description of Artificial Sequence: Synthetic oligonucleotide
  Sense strand starting at position 589 of SEQ ID NO: 1244635
guguaauuagagcaaacau

SEQ ID NO: 1503629 - RNA, 19 nt, Artificial Sequence
  Description of Artificial Sequence: Synthetic oligonucleotide
  Antisense strand to SEQ ID NO: 1503628
auguuugcucuaauuacac

SEQ ID NO: 1503630 - RNA, 19 nt, Artificial Sequence
  Description of Artificial Sequence: Synthetic oligonucleotide
  Sense strand starting at position 613 of SEQ ID NO: 1244635
gucauuaacccauguauuc

SEQ ID NO: 1503631 - RNA, 19 nt, Artificial Sequence
  Description of Artificial Sequence: Synthetic oligonucleotide
  Antisense strand to SEQ ID NO: 1503630
gaauacauggguuaaugac

SEQ ID NO: 1503632 - RNA, 19 nt, Artificial Sequence
  Description of Artificial Sequence: Synthetic oligonucleotide
  Sense strand starting at position 703 of SEQ ID NO: 1244635
gugauuuaguaugacaaca

SEQ ID NO: 1503633 - RNA, 19 nt, Artificial Sequence
  Description of Artificial Sequence: Synthetic oligonucleotide
  Antisense strand to SEQ ID NO: 1503632
uguugucauacuaaaucac

SEQ ID NO: 1503634 - RNA, 19 nt, Artificial Sequence
  Description of Artificial Sequence: Synthetic oligonucleotide
  Sense strand starting at position 1243 of SEQ ID NO: 1244635
gagcgcuuccuaggagaga

SEQ ID NO: 1503635 - RNA, 19 nt, Artificial Sequence
  Description of Artificial Sequence: Synthetic oligonucleotide
  Antisense strand to SEQ ID NO: 1503634
ucucuccuaggaagcgcuc

SEQ ID NO: 1503636 - RNA, 19 nt, Artificial Sequence
  Description of Artificial Sequence: Synthetic oligonucleotide
  Sense strand starting at position 1434 of SEQ ID NO: 1244635
guccaacagcucgaggaau

SEQ ID NO: 1503637 - RNA, 19 nt, Artificial Sequence
  Description of Artificial Sequence: Synthetic oligonucleotide
  Antisense strand to SEQ ID NO: 1503636
auuccucgagcuguuggac

SEQ ID NO: 1503638 - RNA, 19 nt, Artificial Sequence
  Description of Artificial Sequence: Synthetic oligonucleotide
  Sense strand starting at position 2011 of SEQ ID NO: 1244635
uggacaugcgcagaacuau

SEQ ID NO: 1503639 - RNA, 19 nt, Artificial Sequence
  Description of Artificial Sequence: Synthetic oligonucleotide
  Antisense strand to SEQ ID NO: 1503638
auaguucugcgcaugucca

SEQ ID NO: 1503640 - RNA, 19 nt, Artificial Sequence
  Description of Artificial Sequence: Synthetic oligonucleotide
  Sense strand starting at position 2020 of SEQ ID NO: 1244635
gcagaacuaucggcaggau

SEQ ID NO: 1503641 - RNA, 19 nt, Artificial Sequence
  Description of Artificial Sequence: Synthetic oligonucleotide
  Antisense strand to SEQ ID NO: 1503640
auccugccgauaguucugc

SEQ ID NO: 1503642 - RNA, 19 nt, Artificial Sequence
  Description of Artificial Sequence: Synthetic oligonucleotide
  Sense strand starting at position 2137 of SEQ ID NO: 1244635
gcaugcguaccauaucuga

SEQ ID NO: 1503643 - RNA, 19 nt, Artificial Sequence
  Description of Artificial Sequence: Synthetic oligonucleotide
  Antisense strand to SEQ ID NO: 1503642
ucagauaugguacgcaugc

SEQ ID NO: 1503644 - RNA, 19 nt, Artificial Sequence
  Description of Artificial Sequence: Synthetic oligonucleotide
  Sense strand starting at position 2167 of SEQ ID NO: 1244635
ugaaauugaacaugcguaa

SEQ ID NO: 1503645 - RNA, 19 nt, Artificial Sequence
  Description of Artificial Sequence: Synthetic oligonucleotide
  Antisense strand to SEQ ID NO: 1503644
uuacgcauguucaauuuca

SEQ ID NO: 1503646 - RNA, 19 nt, Artificial Sequence
  Description of Artificial Sequence: Synthetic oligonucleotide
  Sense strand starting at position 2171 of SEQ ID NO: 1244635
auugaacaugcguaauuaa

SEQ ID NO: 1503647 - RNA, 19 nt, Artificial Sequence
  Description of Artificial Sequence: Synthetic oligonucleotide
  Antisense strand to SEQ ID NO: 1503646
uuaauuacgcauguucaau

SEQ ID NO: 1503648 - RNA, 19 nt, Artificial Sequence
  Description of Artificial Sequence: Synthetic oligonucleotide
  Sense strand starting at position 2181 of SEQ ID NO: 1244635
cguaauuaaucuuucugaa

SEQ ID NO: 1503649 - RNA, 19 nt, Artificial Sequence
  Description of Artificial Sequence: Synthetic oligonucleotide
  Antisense strand to SEQ ID NO: 1503648
uucagaaagauuaauuacg

SEQ ID NO: 1503650 - RNA, 19 nt, Artificial Sequence
  Description of Artificial Sequence: Synthetic oligonucleotide
  Sense strand starting at position 2223 of SEQ ID NO: 1244635
aaacucuccguuuauggaa

SEQ ID NO: 1503651 - RNA, 19 nt, Artificial Sequence
  Description of Artificial Sequence: Synthetic oligonucleotide
  Antisense strand to SEQ ID NO: 1503650
uuccauaaacggagaguuu

SEQ ID NO: 1503652 - RNA, 19 nt, Artificial Sequence
  Description of Artificial Sequence: Synthetic oligonucleotide
  Sense strand starting at position 2245 of SEQ ID NO: 1244635
gcgcauuuguucucaguaa

SEQ ID NO: 1503653 - RNA, 19 nt, Artificial Sequence
  Description of Artificial Sequence: Synthetic oligonucleotide
  Antisense strand to SEQ ID NO: 1503652
uuacugagaacaaaugcgc

SEQ ID NO: 1503654 - RNA, 19 nt, Artificial Sequence
  Description of Artificial Sequence: Synthetic oligonucleotide
  Sense strand starting at position 2295 of SEQ ID NO: 1244635
gugaguagguugguccgaa

SEQ ID NO: 1503655 - RNA, 19 nt, Artificial Sequence
  Description of Artificial Sequence: Synthetic oligonucleotide
  Antisense strand to SEQ ID NO: 1503654
uucggaccaaccuacucac

SEQ ID NO: 1503656 - RNA, 19 nt, Artificial Sequence
  Description of Artificial Sequence: Synthetic oligonucleotide
  Sense strand starting at position 2311 of SEQ ID NO: 1244635
gaaguuugaaccggacaga

SEQ ID NO: 1503657 - RNA, 19 nt, Artificial Sequence
  Description of Artificial Sequence: Synthetic oligonucleotide
  Antisense strand to SEQ ID NO: 1503656
ucuguccgguucaaacuuc

SEQ ID NO: 1503658 - RNA, 19 nt, Artificial Sequence
  Description of Artificial Sequence: Synthetic oligonucleotide
  Sense strand starting at position 2358 of SEQ ID NO: 1244635
ggguuacguguggagaacu

SEQ ID NO: 1503659 - RNA, 19 nt, Artificial Sequence
  Description of Artificial Sequence: Synthetic oligonucleotide
  Antisense strand to SEQ ID NO: 1503658
aguucuccacacguaaccc

SEQ ID NO: 1503660 - RNA, 19 nt, Artificial Sequence
  Description of Artificial Sequence: Synthetic oligonucleotide
  Sense strand starting at position 2567 of SEQ ID NO: 1244635
cugcauagaccugauguga

SEQ ID NO: 1503661 - RNA, 19 nt, Artificial Sequence
  Description of Artificial Sequence: Synthetic oligonucleotide
  Antisense strand to SEQ ID NO: 1503660
ucacaucaggucuaugcag

SEQ ID NO: 1503662 - RNA, 19 nt, Artificial Sequence
  Description of Artificial Sequence: Synthetic oligonucleotide
  Sense strand starting at position 2580 of SEQ ID NO: 1244635
augugaagucuuuaucaaa

SEQ ID NO: 1503663 - RNA, 19 nt, Artificial Sequence
  Description of Artificial Sequence: Synthetic oligonucleotide
  Antisense strand to SEQ ID NO: 1503662
uuugauaaagacuucacau

SEQ ID NO: 1503664 - RNA, 19 nt, Artificial Sequence
  Description of Artificial Sequence: Synthetic oligonucleotide
  Sense strand starting at position 2626 of SEQ ID NO: 1244635
gaggaacugcucuaauguu

SEQ ID NO: 1503665 - RNA, 19 nt, Artificial Sequence
  Description of Artificial Sequence: Synthetic oligonucleotide
  Antisense strand to SEQ ID NO: 1503664
aacauuagagcaguuccuc

SEQ ID NO: 1503666 - RNA, 19 nt, Artificial Sequence
  Description of Artificial Sequence: Synthetic oligonucleotide
  Sense strand starting at position 2770 of SEQ ID NO: 1244635
gagccauugcgcccgguua

SEQ ID NO: 1503667 - RNA, 19 nt, Artificial Sequence
  Description of Artificial Sequence: Synthetic oligonucleotide
  Antisense strand to SEQ ID NO: 1503666
uaaccgggcgcaauggcuc

SEQ ID NO: 1503668 - RNA, 19 nt, Artificial Sequence
  Description of Artificial Sequence: Synthetic oligonucleotide
  Sense strand starting at position 2774 of SEQ ID NO: 1244635
cauugcgcccgguuaauau

SEQ ID NO: 1503669 - RNA, 19 nt, Artificial Sequence
  Description of Artificial Sequence: Synthetic oligonucleotide
  Antisense strand to SEQ ID NO: 1503668
auauuaaccgggcgcaaug

SEQ ID NO: 1503670 - RNA, 19 nt, Artificial Sequence
  Description of Artificial Sequence: Synthetic oligonucleotide
  Sense strand starting at position 2900 of SEQ ID NO: 1244635
gagaaagcguaagcuauua

SEQ ID NO: 1503671 - RNA, 19 nt, Artificial Sequence
  Description of Artificial Sequence: Synthetic oligonucleotide
  Antisense strand to SEQ ID NO: 1503670
uaauagcuuacgcuuucuc

SEQ ID NO: 1503672 - RNA, 19 nt, Artificial Sequence
  Description of Artificial Sequence: Synthetic oligonucleotide
  Sense strand starting at position 2911 of SEQ ID NO: 1244635
agcuauuauuuagaagaga

SEQ ID NO: 1503673 - RNA, 19 nt, Artificial Sequence
  Description of Artificial Sequence: Synthetic oligonucleotide
  Antisense strand to SEQ ID NO: 1503672
ucucuucuaaauaauagcu

SEQ ID NO: 1503674 - RNA, 19 nt, Artificial Sequence
  Description of Artificial Sequence: Synthetic oligonucleotide
  Sense strand starting at position 2951 of SEQ ID NO: 1244635
guacaauguugagcacacu

SEQ ID NO: 1503675 - RNA, 19 nt, Artificial Sequence
  Description of Artificial Sequence: Synthetic oligonucleotide
  Antisense strand to SEQ ID NO: 1503674
agugugcucaacauuguac

SEQ ID NO: 1503676 - RNA, 19 nt, Artificial Sequence
  Description of Artificial Sequence: Synthetic oligonucleotide
  Sense strand starting at position 2965 of SEQ ID NO: 1244635
acacuucuguguucuacau

SEQ ID NO: 1503677 - RNA, 19 nt, Artificial Sequence
  Description of Artificial Sequence: Synthetic oligonucleotide
  Antisense strand to SEQ ID NO: 1503676
auguagaacacagaagugu

SEQ ID NO: 1503678 - RNA, 19 nt, Artificial Sequence
  Description of Artificial Sequence: Synthetic oligonucleotide
  Sense strand starting at position 2992 of SEQ ID NO: 1244635
ggugugaagggugguacua

SEQ ID NO: 1503679 - RNA, 19 nt, Artificial Sequence
  Description of Artificial Sequence: Synthetic oligonucleotide
  Antisense strand to SEQ ID NO: 1503678
uaguaccacccuucacacc

SEQ ID NO: 1503680 - RNA, 19 nt, Artificial Sequence
  Description of Artificial Sequence: Synthetic oligonucleotide
  Sense strand starting at position 3223 of SEQ ID NO: 1244635
ccaagcuaaugguuguauu

SEQ ID NO: 1503681 - RNA, 19 nt, Artificial Sequence
  Description of Artificial Sequence: Synthetic oligonucleotide
  Antisense strand to SEQ ID NO: 1503680
aauacaaccauuagcuugg

SEQ ID NO: 1503682 - RNA, 19 nt, Artificial Sequence
  Description of Artificial Sequence: Synthetic oligonucleotide
  Sense strand starting at position 3224 of SEQ ID NO: 1244635
caagcuaaugguuguauuu

SEQ ID NO: 1503683 - RNA, 19 nt, Artificial Sequence
  Description of Artificial Sequence: Synthetic oligonucleotide
  Antisense strand to SEQ ID NO: 1503682
aaauacaaccauuagcuug

SEQ ID NO: 1503684 - RNA, 19 nt, Artificial Sequence
  Description of Artificial Sequence: Synthetic oligonucleotide
  Sense strand starting at position 3452 of SEQ ID NO: 1244635
acuauugagcuguguauga

SEQ ID NO: 1503685 - RNA, 19 nt, Artificial Sequence
  Description of Artificial Sequence: Synthetic oligonucleotide
  Antisense strand to SEQ ID NO: 1503684
ucauacacagcucaauagu

SEQ ID NO: 1503686 - RNA, 19 nt, Artificial Sequence
  Description of Artificial Sequence: Synthetic oligonucleotide
  Sense strand starting at position 3454 of SEQ ID NO: 1244635
uauugagcuguguaugaau

SEQ ID NO: 1503687 - RNA, 19 nt, Artificial Sequence
  Description of Artificial Sequence: Synthetic oligonucleotide
  Antisense strand to SEQ ID NO: 1503686
auucauacacagcucaaua

SEQ ID NO: 1503688 - RNA, 19 nt, Artificial Sequence
  Description of Artificial Sequence: Synthetic oligonucleotide
  Sense strand starting at position 3535 of SEQ ID NO: 1244635
augacuagcuccuuagaca

SEQ ID NO: 1503689 - RNA, 19 nt, Artificial Sequence
  Description of Artificial Sequence: Synthetic oligonucleotide
  Antisense strand to SEQ ID NO: 1503688
ugucuaaggagcuagucau

SEQ ID NO: 1503690 - RNA, 19 nt, Artificial Sequence
  Description of Artificial Sequence: Synthetic oligonucleotide
  Sense strand starting at position 3536 of SEQ ID NO: 1244635
ugacuagcuccuuagacaa

SEQ ID NO: 1503691 - RNA, 19 nt, Artificial Sequence
  Description of Artificial Sequence: Synthetic oligonucleotide
  Antisense strand to SEQ ID NO: 1503690
uugucuaaggagcuaguca

SEQ ID NO: 1503692 - RNA, 19 nt, Artificial Sequence
  Description of Artificial Sequence: Synthetic oligonucleotide
  Sense strand starting at position 3836 of SEQ ID NO: 1244635
uugcauuaagccgagaaca

SEQ ID NO: 1503693 - RNA, 19 nt, Artificial Sequence
  Description of Artificial Sequence: Synthetic oligonucleotide
  Antisense strand to SEQ ID NO: 1503692
uguucucggcuuaaugcaa

SEQ ID NO: 1503694 - RNA, 19 nt, Artificial Sequence
  Description of Artificial Sequence: Synthetic oligonucleotide
  Sense strand starting at position 3838 of SEQ ID NO: 1244635
gcauuaagccgagaacaug

SEQ ID NO: 1503695 - RNA, 19 nt, Artificial Sequence
  Description of Artificial Sequence: Synthetic oligonucleotide
  Antisense strand to SEQ ID NO: 1503694
cauguucucggcuuaaugc

SEQ ID NO: 1503696 - RNA, 19 nt, Artificial Sequence
  Description of Artificial Sequence: Synthetic oligonucleotide
  Sense strand starting at position 3974 of SEQ ID NO: 1244635
ugguucucaaagcguauuu

SEQ ID NO: 1503697 - RNA, 19 nt, Artificial Sequence
  Description of Artificial Sequence: Synthetic oligonucleotide
  Antisense strand to SEQ ID NO: 1503696
aaauacgcuuugagaacca

SEQ ID NO: 1503698 - RNA, 19 nt, Artificial Sequence
  Description of Artificial Sequence: Synthetic oligonucleotide
  Sense strand starting at position 51 of SEQ ID NO: 1244636
agcccagaaguguaaucuu

SEQ ID NO: 1503699 - RNA, 19 nt, Artificial Sequence
  Description of Artificial Sequence: Synthetic oligonucleotide
  Antisense strand to SEQ ID NO: 1503698
aagauuacacuucugggcu

SEQ ID NO: 1503700 - RNA, 19 nt, Artificial Sequence
  Description of Artificial Sequence: Synthetic oligonucleotide
  Sense strand starting at position 54 of SEQ ID NO: 1244636
ccagaaguguaaucuuaua

SEQ ID NO: 1503701 - RNA, 19 nt, Artificial Sequence
  Description of Artificial Sequence: Synthetic oligonucleotide
  Antisense strand to SEQ ID NO: 1503700
uauaagauuacacuucugg

SEQ ID NO: 1503702 - RNA, 19 nt, Artificial Sequence
  Description of Artificial Sequence: Synthetic oligonucleotide
  Sense strand starting at position 230 of SEQ ID NO: 1244636
aauuauaagugugcauaga

SEQ ID NO: 1503703 - RNA, 19 nt, Artificial Sequence
  Description of Artificial Sequence: Synthetic oligonucleotide
  Antisense strand to SEQ ID NO: 1503702
ucuaugcacacuuauaauu

SEQ ID NO: 1503704 - RNA, 19 nt, Artificial Sequence
  Description of Artificial Sequence: Synthetic oligonucleotide
  Sense strand starting at position 283 of SEQ ID NO: 1244636
aggaaauagauggguguuu

SEQ ID NO: 1503705 - RNA, 19 nt, Artificial Sequence
  Description of Artificial Sequence: Synthetic oligonucleotide
  Antisense strand to SEQ ID NO: 1503704
aaacacccaucuauuuccu

SEQ ID NO: 1503706 - RNA, 19 nt, Artificial Sequence
  Description of Artificial Sequence: Synthetic oligonucleotide
  Sense strand starting at position 355 of SEQ ID NO: 1244636
gugagucacucuccacacu

SEQ ID NO: 1503707 - RNA, 19 nt, Artificial Sequence
  Description of Artificial Sequence: Synthetic oligonucleotide
  Antisense strand to SEQ ID NO: 1503706
aguguggagagugacucac

SEQ ID NO: 1503708 - RNA, 19 nt, Artificial Sequence
  Description of Artificial Sequence: Synthetic oligonucleotide
  Sense strand starting at position 565 of SEQ ID NO: 1244636
cuaauuuguuacuaguuga

SEQ ID NO: 1503709 - RNA, 19 nt, Artificial Sequence
  Description of Artificial Sequence: Synthetic oligonucleotide
  Antisense strand to SEQ ID NO: 1503708
ucaacuaguaacaaauuag

SEQ ID NO: 1503710 - RNA, 19 nt, Artificial Sequence
  Description of Artificial Sequence: Synthetic oligonucleotide
  Sense strand starting at position 570 of SEQ ID NO: 1244636
uuguuacuaguugaacauu

SEQ ID NO: 1503711 - RNA, 19 nt, Artificial Sequence
  Description of Artificial Sequence: Synthetic oligonucleotide
  Antisense strand to SEQ ID NO: 1503710
aauguucaacuaguaacaa

SEQ ID NO: 1503712 - RNA, 19 nt, Artificial Sequence
  Description of Artificial Sequence: Synthetic oligonucleotide
  Sense strand starting at position 606 of SEQ ID NO: 1244636
ccuagcauaguauaucaga

SEQ ID NO: 1503713 - RNA, 19 nt, Artificial Sequence
  Description of Artificial Sequence: Synthetic oligonucleotide
  Antisense strand to SEQ ID NO: 1503712
ucugauauacuaugcuagg

SEQ ID NO: 1503714 - RNA, 19 nt, Artificial Sequence
  Description of Artificial Sequence: Synthetic oligonucleotide
  Sense strand starting at position 662 of SEQ ID NO: 1244636
agacuaaucauguggguau

SEQ ID NO: 1503715 - RNA, 19 nt, Artificial Sequence
  Description of Artificial Sequence: Synthetic oligonucleotide
  Antisense strand to SEQ ID NO: 1503714
auacccacaugauuagucu

SEQ ID NO: 1503716 - RNA, 19 nt, Artificial Sequence
  Description of Artificial Sequence: Synthetic oligonucleotide
  Sense strand starting at position 664 of SEQ ID NO: 1244636
acuaaucauguggguauaa

SEQ ID NO: 1503717 - RNA, 19 nt, Artificial Sequence
  Description of Artificial Sequence: Synthetic oligonucleotide
  Antisense strand to SEQ ID NO: 1503716
uuauacccacaugauuagu

SEQ ID NO: 1503718 - RNA, 19 nt, Artificial Sequence
  Description of Artificial Sequence: Synthetic oligonucleotide
  Sense strand starting at position 665 of SEQ ID NO: 1244636
cuaaucauguggguauaaa

SEQ ID NO: 1503719 - RNA, 19 nt, Artificial Sequence
  Description of Artificial Sequence: Synthetic oligonucleotide
  Antisense strand to SEQ ID NO: 1503718
uuuauacccacaugauuag

SEQ ID NO: 1503720 - RNA, 19 nt, Artificial Sequence
  Description of Artificial Sequence: Synthetic oligonucleotide
  Sense strand starting at position 693 of SEQ ID NO: 1244636
gcacguuguccuuccucua

SEQ ID NO: 1503721 - RNA, 19 nt, Artificial Sequence
  Description of Artificial Sequence: Synthetic oligonucleotide
  Antisense strand to SEQ ID NO: 1503720
uagaggaaggacaacgugc

SEQ ID NO: 1503722 - RNA, 19 nt, Artificial Sequence
  Description of Artificial Sequence: Synthetic oligonucleotide
  Sense strand starting at position 698 of SEQ ID NO: 1244636
uuguccuuccucuaagugu

SEQ ID NO: 1503723 - RNA, 19 nt, Artificial Sequence
  Description of Artificial Sequence: Synthetic oligonucleotide
  Antisense strand to SEQ ID NO: 1503722
acacuuagaggaaggacaa

SEQ ID NO: 1503724 - RNA, 19 nt, Artificial Sequence
  Description of Artificial Sequence: Synthetic oligonucleotide
  Sense strand starting at position 705 of SEQ ID NO: 1244636
uccucuaaguguuuacaga

SEQ ID NO: 1503725 - RNA, 19 nt, Artificial Sequence
  Description of Artificial Sequence: Synthetic oligonucleotide
  Antisense strand to SEQ ID NO: 1503724
ucuguaaacacuuagagga

SEQ ID NO: 1503726 - RNA, 19 nt, Artificial Sequence
  Description of Artificial Sequence: Synthetic oligonucleotide
  Sense strand starting at position 706 of SEQ ID NO: 1244636
ccucuaaguguuuacagaa

SEQ ID NO: 1503727 - RNA, 19 nt, Artificial Sequence
  Description of Artificial Sequence: Synthetic oligonucleotide
  Antisense strand to SEQ ID NO: 1503726
uucuguaaacacuuagagg

SEQ ID NO: 1503728 - RNA, 19 nt, Artificial Sequence
  Description of Artificial Sequence: Synthetic oligonucleotide
  Sense strand starting at position 735 of SEQ ID NO: 1244636
ugccaaagagcauguaaau

SEQ ID NO: 1503729 - RNA, 19 nt, Artificial Sequence
  Description of Artificial Sequence: Synthetic oligonucleotide
  Antisense strand to SEQ ID NO: 1503728
auuuacaugcucuuuggca

SEQ ID NO: 1503730 - RNA, 19 nt, Artificial Sequence
  Description of Artificial Sequence: Synthetic oligonucleotide
  Sense strand starting at position 800 of SEQ ID NO: 1244636
auuagaacuuaguuggaau

SEQ ID NO: 1503731 - RNA, 19 nt, Artificial Sequence
  Description of Artificial Sequence: Synthetic oligonucleotide
  Antisense strand to SEQ ID NO: 1503730
auuccaacuaaguucuaau

SEQ ID NO: 1503732 - RNA, 19 nt, Artificial Sequence
  Description of Artificial Sequence: Synthetic oligonucleotide
  Sense strand starting at position 2093 of SEQ ID NO: 1244636
cguuaccucgguuaccaua

SEQ ID NO: 1503733 - RNA, 19 nt, Artificial Sequence
  Description of Artificial Sequence: Synthetic oligonucleotide
  Antisense strand to SEQ ID NO: 1503732
uaugguaaccgagguaacg

SEQ ID NO: 1503734 - RNA, 19 nt, Artificial Sequence
  Description of Artificial Sequence: Synthetic oligonucleotide
  Sense strand starting at position 2095 of SEQ ID NO: 1244636
uuaccucgguuaccauaau

SEQ ID NO: 1503735 - RNA, 19 nt, Artificial Sequence
  Description of Artificial Sequence: Synthetic oligonucleotide
  Antisense strand to SEQ ID NO: 1503734
auuaugguaaccgagguaa

SEQ ID NO: 1503736 - RNA, 19 nt, Artificial Sequence
  Description of Artificial Sequence: Synthetic oligonucleotide
  Sense strand starting at position 2177 of SEQ ID NO: 1244636
aaugaaacugucgguuuaa

SEQ ID NO: 1503737 - RNA, 19 nt, Artificial Sequence
  Description of Artificial Sequence: Synthetic oligonucleotide
  Antisense strand to SEQ ID NO: 1503736
uuaaaccgacaguuucauu

SEQ ID NO: 1503738 - RNA, 19 nt, Artificial Sequence
  Description of Artificial Sequence: Synthetic oligonucleotide
  Sense strand starting at position 2178 of SEQ ID NO: 1244636
augaaacugucgguuuaau

SEQ ID NO: 1503739 - RNA, 19 nt, Artificial Sequence
  Description of Artificial Sequence: Synthetic oligonucleotide
  Antisense strand to SEQ ID NO: 1503738
auuaaaccgacaguuucau

SEQ ID NO: 1503740 - RNA, 19 nt, Artificial Sequence
  Description of Artificial Sequence: Synthetic oligonucleotide
  Sense strand starting at position 2228 of SEQ ID NO: 1244636
gaaguuacaugcuccugaa

SEQ ID NO: 1503741 - RNA, 19 nt, Artificial Sequence
  Description of Artificial Sequence: Synthetic oligonucleotide
  Antisense strand to SEQ ID NO: 1503740
uucaggagcauguaacuuc

SEQ ID NO: 1503742 - RNA, 19 nt, Artificial Sequence
  Description of Artificial Sequence: Synthetic oligonucleotide
  Sense strand starting at position 2718 of SEQ ID NO: 1244636
ugaagaagggucugaagca

SEQ ID NO: 1503743 - RNA, 19 nt, Artificial Sequence
  Description of Artificial Sequence: Synthetic oligonucleotide
  Antisense strand to SEQ ID NO: 1503742
ugcuucagacccuucuuca

SEQ ID NO: 1503744 - RNA, 19 nt, Artificial Sequence
  Description of Artificial Sequence: Synthetic oligonucleotide
  Sense strand starting at position 2751 of SEQ ID NO: 1244636
uggagcaagauucgaugaa

SEQ ID NO: 1503745 - RNA, 19 nt, Artificial Sequence
  Description of Artificial Sequence: Synthetic oligonucleotide
  Antisense strand to SEQ ID NO: 1503744
uucaucgaaucuugcucca

SEQ ID NO: 1503746 - RNA, 19 nt, Artificial Sequence
  Description of Artificial Sequence: Synthetic oligonucleotide
  Sense strand starting at position 2795 of SEQ ID NO: 1244636
uuguuuaaucuguuucguu

SEQ ID NO: 1503747 - RNA, 19 nt, Artificial Sequence
  Description of Artificial Sequence: Synthetic oligonucleotide
  Antisense strand to SEQ ID NO: 1503746
aacgaaacagauuaaacaa

SEQ ID NO: 1503748 - RNA, 19 nt, Artificial Sequence
  Description of Artificial Sequence: Synthetic oligonucleotide
  Sense strand starting at position 2985 of SEQ ID NO: 1244636
uguauagagaacuguguaa

SEQ ID NO: 1503749 - RNA, 19 nt, Artificial Sequence
  Description of Artificial Sequence: Synthetic oligonucleotide
  Antisense strand to SEQ ID NO: 1503748
uuacacaguucucuauaca

SEQ ID NO: 1503750 - RNA, 19 nt, Artificial Sequence
  Description of Artificial Sequence: Synthetic oligonucleotide
  Sense strand starting at position 2996 of SEQ ID NO: 1244636
cuguguaagguggacuaua

SEQ ID NO: 1503751 - RNA, 19 nt, Artificial Sequence
  Description of Artificial Sequence: Synthetic oligonucleotide
  Antisense strand to SEQ ID NO: 1503750
uauaguccaccuuacacag

SEQ ID NO: 1503752 - RNA, 19 nt, Artificial Sequence
  Description of Artificial Sequence: Synthetic oligonucleotide
  Sense strand starting at position 3447 of SEQ ID NO: 1244636
uggucuugaucucucagga

SEQ ID NO: 1503753 - RNA, 19 nt, Artificial Sequence
  Description of Artificial Sequence: Synthetic oligonucleotide
  Antisense strand to SEQ ID NO: 1503752
uccugagagaucaagacca

SEQ ID NO: 1503754 - RNA, 19 nt, Artificial Sequence
  Description of Artificial Sequence: Synthetic oligonucleotide
  Sense strand starting at position 3452 of SEQ ID NO: 1244636
uugaucucucaggaugguu

SEQ ID NO: 1503755 - RNA, 19 nt, Artificial Sequence
  Description of Artificial Sequence: Synthetic oligonucleotide
  Antisense strand to SEQ ID NO: 1503754
aaccauccugagagaucaa

SEQ ID NO: 1503756 - RNA, 19 nt, Artificial Sequence
  Description of Artificial Sequence: Synthetic oligonucleotide
  Sense strand starting at position 3483 of SEQ ID NO: 1244636
gacacauguggccauccau

SEQ ID NO: 1503757 - RNA, 19 nt, Artificial Sequence
  Description of Artificial Sequence: Synthetic oligonucleotide
  Antisense strand to SEQ ID NO: 1503756
auggauggccacauguguc

SEQ ID NO: 1503758 - RNA, 19 nt, Artificial Sequence
  Description of Artificial Sequence: Synthetic oligonucleotide
  Sense strand starting at position 3489 of SEQ ID NO: 1244636
uguggccauccauaucaaa

SEQ ID NO: 1503759 - RNA, 19 nt, Artificial Sequence
  Description of Artificial Sequence: Synthetic oligonucleotide
  Antisense strand to SEQ ID NO: 1503758
uuugauauggauggccaca

SEQ ID NO: 1503760 - RNA, 19 nt, Artificial Sequence
  Description of Artificial Sequence: Synthetic oligonucleotide
  Sense strand starting at position 3605 of SEQ ID NO: 1244636
aggauuaaaucauugucau

SEQ ID NO: 1503761 - RNA, 19 nt, Artificial Sequence
  Description of Artificial Sequence: Synthetic oligonucleotide
  Antisense strand to SEQ ID NO: 1503760
augacaaugauuuaauccu

SEQ ID NO: 1503762 - RNA, 19 nt, Artificial Sequence
  Description of Artificial Sequence: Synthetic oligonucleotide
  Sense strand starting at position 3606 of SEQ ID NO: 1244636
ggauuaaaucauugucauu

SEQ ID NO: 1503763 - RNA, 19 nt, Artificial Sequence
  Description of Artificial Sequence: Synthetic oligonucleotide
  Antisense strand to SEQ ID NO: 1503762
aaugacaaugauuuaaucc

SEQ ID NO: 1503764 - RNA, 19 nt, Artificial Sequence
  Description of Artificial Sequence: Synthetic oligonucleotide
  Sense strand starting at position 3625 of SEQ ID NO: 1244636
ccgcacauucguuugguua

SEQ ID NO: 1503765 - RNA, 19 nt, Artificial Sequence
  Description of Artificial Sequence: Synthetic oligonucleotide
  Antisense strand to SEQ ID NO: 1503764
uaaccaaacgaaugugcgg

SEQ ID NO: 1503766 - RNA, 19 nt, Artificial Sequence
  Description of Artificial Sequence: Synthetic oligonucleotide
  Sense strand starting at position 3697 of SEQ ID NO: 1244636
ggcagagacuauccucaca

SEQ ID NO: 1503767 - RNA, 19 nt, Artificial Sequence
  Description of Artificial Sequence: Synthetic oligonucleotide
  Antisense strand to SEQ ID NO: 1503766
ugugaggauagucucugcc

SEQ ID NO: 1503768 - RNA, 19 nt, Artificial Sequence
  Description of Artificial Sequence: Synthetic oligonucleotide
  Sense strand starting at position 3927 of SEQ ID NO: 1244636
gggaaagcccacugaaucu

SEQ ID NO: 1503769 - RNA, 19 nt, Artificial Sequence
  Description of Artificial Sequence: Synthetic oligonucleotide
  Antisense strand to SEQ ID NO: 1503768
agauucagugggcuuuccc

SEQ ID NO: 1503770 - RNA, 19 nt, Artificial Sequence
  Description of Artificial Sequence: Synthetic oligonucleotide
  Sense strand starting at position 3936 of SEQ ID NO: 1244636
cacugaaucugugugagac

SEQ ID NO: 1503771 - RNA, 19 nt, Artificial Sequence
  Description of Artificial Sequence: Synthetic oligonucleotide
  Antisense strand to SEQ ID NO: 1503770
gucucacacagauucagug

SEQ ID NO: 1503772 - RNA, 19 nt, Artificial Sequence
  Description of Artificial Sequence: Synthetic oligonucleotide
  Sense strand starting at position 3937 of SEQ ID NO: 1244636
acugaaucugugugagacu

SEQ ID NO: 1503773 - RNA, 19 nt, Artificial Sequence
  Description of Artificial Sequence: Synthetic oligonucleotide
  Antisense strand to SEQ ID NO: 1503772
agucucacacagauucagu

SEQ ID NO: 1503774 - RNA, 19 nt, Artificial Sequence
  Description of Artificial Sequence: Synthetic oligonucleotide
  Sense strand starting at position 3946 of SEQ ID NO: 1244636
gugugagacucaguuuccu

SEQ ID NO: 1503775 - RNA, 19 nt, Artificial Sequence
  Description of Artificial Sequence: Synthetic oligonucleotide
  Antisense strand to SEQ ID NO: 1503774
aggaaacugagucucacac

SEQ ID NO: 1503776 - RNA, 19 nt, Artificial Sequence
  Description of Artificial Sequence: Synthetic oligonucleotide
  Sense strand starting at position 3975 of SEQ ID NO: 1244636
gugugugaccuugggaaau

SEQ ID NO: 1503777 - RNA, 19 nt, Artificial Sequence
  Description of Artificial Sequence: Synthetic oligonucleotide
  Antisense strand to SEQ ID NO: 1503776
auuucccaaggucacacac

SEQ ID NO: 1503778 - RNA, 19 nt, Artificial Sequence
  Description of Artificial Sequence: Synthetic oligonucleotide
  Sense strand starting at position 2 of SEQ ID NO: 1244637
uuagaagugauguguuucu

SEQ ID NO: 1503779 - RNA, 19 nt, Artificial Sequence
  Description of Artificial Sequence: Synthetic oligonucleotide
  Antisense strand to SEQ ID NO: 1503778
agaaacacaucacuucuaa

SEQ ID NO: 1503780 - RNA, 19 nt, Artificial Sequence
  Description of Artificial Sequence: Synthetic oligonucleotide
  Sense strand starting at position 9 of SEQ ID NO: 1244637
ugauguguuucugucagca

SEQ ID NO: 1503781 - RNA, 19 nt, Artificial Sequence
  Description of Artificial Sequence: Synthetic oligonucleotide
  Antisense strand to SEQ ID NO: 1503780
ugcugacagaaacacauca

SEQ ID NO: 1503782 - RNA, 19 nt, Artificial Sequence
  Description of Artificial Sequence: Synthetic oligonucleotide
  Sense strand starting at position 13 of SEQ ID NO: 1244637
guguuucugucagcauauu

SEQ ID NO: 1503783 - RNA, 19 nt, Artificial Sequence
  Description of Artificial Sequence: Synthetic oligonucleotide
  Antisense strand to SEQ ID NO: 1503782
aauaugcugacagaaacac

SEQ ID NO: 1503784 - RNA, 19 nt, Artificial Sequence
  Description of Artificial Sequence: Synthetic oligonucleotide
  Sense strand starting at position 21 of SEQ ID NO: 1244637
gucagcauauuccaucaga

SEQ ID NO: 1503785 - RNA, 19 nt, Artificial Sequence
  Description of Artificial Sequence: Synthetic oligonucleotide
  Antisense strand to SEQ ID NO: 1503784
ucugauggaauaugcugac

SEQ ID NO: 1503786 - RNA, 19 nt, Artificial Sequence
  Description of Artificial Sequence: Synthetic oligonucleotide
  Sense strand starting at position 54 of SEQ ID NO: 1244637
ccggaaguccuacggaaau

SEQ ID NO: 1503787 - RNA, 19 nt, Artificial Sequence
  Description of Artificial Sequence: Synthetic oligonucleotide
  Antisense strand to SEQ ID NO: 1503786
auuuccguaggacuuccgg

SEQ ID NO: 1503788 - RNA, 19 nt, Artificial Sequence
  Description of Artificial Sequence: Synthetic oligonucleotide
  Sense strand starting at position 65 of SEQ ID NO: 1244637
acggaaauaucggagguca

SEQ ID NO: 1503789 - RNA, 19 nt, Artificial Sequence
  Description of Artificial Sequence: Synthetic oligonucleotide
  Antisense strand to SEQ ID NO: 1503788
ugaccuccgauauuuccgu

SEQ ID NO: 1503790 - RNA, 19 nt, Artificial Sequence
  Description of Artificial Sequence: Synthetic oligonucleotide
  Sense strand starting at position 67 of SEQ ID NO: 1244637
ggaaauaucggaggucaac

SEQ ID NO: 1503791 - RNA, 19 nt, Artificial Sequence
  Description of Artificial Sequence: Synthetic oligonucleotide
  Antisense strand to SEQ ID NO: 1503790
guugaccuccgauauuucc

SEQ ID NO: 1503792 - RNA, 19 nt, Artificial Sequence
  Description of Artificial Sequence: Synthetic oligonucleotide
  Sense strand starting at position 84 of SEQ ID NO: 1244637
accugagacgacuagguuu

SEQ ID NO: 1503793 - RNA, 19 nt, Artificial Sequence
  Description of Artificial Sequence: Synthetic oligonucleotide
  Antisense strand to SEQ ID NO: 1503792
aaaccuagucgucucaggu

SEQ ID NO: 1503794 - RNA, 19 nt, Artificial Sequence
  Description of Artificial Sequence: Synthetic oligonucleotide
  Sense strand starting at position 95 of SEQ ID NO: 1244637
cuagguuucucccuacuua

SEQ ID NO: 1503795 - RNA, 19 nt, Artificial Sequence
  Description of Artificial Sequence: Synthetic oligonucleotide
  Antisense strand to SEQ ID NO: 1503794
uaaguagggagaaaccuag

SEQ ID NO: 1503796 - RNA, 19 nt, Artificial Sequence
  Description of Artificial Sequence: Synthetic oligonucleotide
  Sense strand starting at position 419 of SEQ ID NO: 1244637
ugacauuuaccaugcugca

SEQ ID NO: 1503797 - RNA, 19 nt, Artificial Sequence
  Description of Artificial Sequence: Synthetic oligonucleotide
  Antisense strand to SEQ ID NO: 1503796
ugcagcaugguaaauguca

SEQ ID NO: 1503798 - RNA, 19 nt, Artificial Sequence
  Description of Artificial Sequence: Synthetic oligonucleotide
  Sense strand starting at position 435 of SEQ ID NO: 1244637
gcaauaaucuggcuacaug

SEQ ID NO: 1503799 - RNA, 19 nt, Artificial Sequence
  Description of Artificial Sequence: Synthetic oligonucleotide
  Antisense strand to SEQ ID NO: 1503798
cauguagccagauuauugc

SEQ ID NO: 1503800 - RNA, 19 nt, Artificial Sequence
  Description of Artificial Sequence: Synthetic oligonucleotide
  Sense strand starting at position 457 of SEQ ID NO: 1244637
gcgucucccgugucaugua

SEQ ID NO: 1503801 - RNA, 19 nt, Artificial Sequence
  Description of Artificial Sequence: Synthetic oligonucleotide
  Antisense strand to SEQ ID NO: 1503800
uacaugacacgggagacgc

SEQ ID NO: 1503802 - RNA, 19 nt, Artificial Sequence
  Description of Artificial Sequence: Synthetic oligonucleotide
  Sense strand starting at position 462 of SEQ ID NO: 1244637
ucccgugucauguagcaaa

SEQ ID NO: 1503803 - RNA, 19 nt, Artificial Sequence
  Description of Artificial Sequence: Synthetic oligonucleotide
  Antisense strand to SEQ ID NO: 1503802
uuugcuacaugacacggga

SEQ ID NO: 1503804 - RNA, 19 nt, Artificial Sequence
  Description of Artificial Sequence: Synthetic oligonucleotide
  Sense strand starting at position 513 of SEQ ID NO: 1244637
uaugguaaguguuugaaau

SEQ ID NO: 1503805 - RNA, 19 nt, Artificial Sequence
  Description of Artificial Sequence: Synthetic oligonucleotide
  Antisense strand to SEQ ID NO: 1503804
auuucaaacacuuaccaua

SEQ ID NO: 1503806 - RNA, 19 nt, Artificial Sequence
  Description of Artificial Sequence: Synthetic oligonucleotide
  Sense strand starting at position 514 of SEQ ID NO: 1244637
augguaaguguuugaaaua

SEQ ID NO: 1503807 - RNA, 19 nt, Artificial Sequence
  Description of Artificial Sequence: Synthetic oligonucleotide
  Antisense strand to SEQ ID NO: 1503806
uauuucaaacacuuaccau

SEQ ID NO: 1503808 - RNA, 19 nt, Artificial Sequence
  Description of Artificial Sequence: Synthetic oligonucleotide
  Sense strand starting at position 515 of SEQ ID NO: 1244637
ugguaaguguuugaaauag

SEQ ID NO: 1503809 - RNA, 19 nt, Artificial Sequence
  Description of Artificial Sequence: Synthetic oligonucleotide
  Antisense strand to SEQ ID NO: 1503808
cuauuucaaacacuuacca

SEQ ID NO: 1503810 - RNA, 19 nt, Artificial Sequence
  Description of Artificial Sequence: Synthetic oligonucleotide
  Sense strand starting at position 557 of SEQ ID NO: 1244637
ucauaaagucuguggucua

SEQ ID NO: 1503811 - RNA, 19 nt, Artificial Sequence
  Description of Artificial Sequence: Synthetic oligonucleotide
  Antisense strand to SEQ ID NO: 1503810
uagaccacagacuuuauga

SEQ ID NO: 1503812 - RNA, 19 nt, Artificial Sequence
  Description of Artificial Sequence: Synthetic oligonucleotide
  Sense strand starting at position 560 of SEQ ID NO: 1244637
uaaagucuguggucuauga

SEQ ID NO: 1503813 - RNA, 19 nt, Artificial Sequence
  Description of Artificial Sequence: Synthetic oligonucleotide
  Antisense strand to SEQ ID NO: 1503812
ucauagaccacagacuuua

SEQ ID NO: 1503814 - RNA, 19 nt, Artificial Sequence
  Description of Artificial Sequence: Synthetic oligonucleotide
  Sense strand starting at position 562 of SEQ ID NO: 1244637
aagucuguggucuaugaca

SEQ ID NO: 1503815 - RNA, 19 nt, Artificial Sequence
  Description of Artificial Sequence: Synthetic oligonucleotide
  Antisense strand to SEQ ID NO: 1503814
ugucauagaccacagacuu

SEQ ID NO: 1503816 - RNA, 19 nt, Artificial Sequence
  Description of Artificial Sequence: Synthetic oligonucleotide
  Sense strand starting at position 584 of SEQ ID NO: 1244637
gcagacaauuaaggaguua

SEQ ID NO: 1503817 - RNA, 19 nt, Artificial Sequence
  Description of Artificial Sequence: Synthetic oligonucleotide
  Antisense strand to SEQ ID NO: 1503816
uaacuccuuaauugucugc

SEQ ID NO: 1503818 - RNA, 19 nt, Artificial Sequence
  Description of Artificial Sequence: Synthetic oligonucleotide
  Sense strand starting at position 640 of SEQ ID NO: 1244637
cccagaaggugcucaauca

SEQ ID NO: 1503819 - RNA, 19 nt, Artificial Sequence
  Description of Artificial Sequence: Synthetic oligonucleotide
  Antisense strand to SEQ ID NO: 1503818
ugauugagcaccuucuggg

SEQ ID NO: 1503820 - RNA, 19 nt, Artificial Sequence
  Description of Artificial Sequence: Synthetic oligonucleotide
  Sense strand starting at position 641 of SEQ ID NO: 1244637
ccagaaggugcucaaucaa

SEQ ID NO: 1503821 - RNA, 19 nt, Artificial Sequence
  Description of Artificial Sequence: Synthetic oligonucleotide
  Antisense strand to SEQ ID NO: 1503820
uugauugagcaccuucugg

SEQ ID NO: 1503822 - RNA, 19 nt, Artificial Sequence
  Description of Artificial Sequence: Synthetic oligonucleotide
  Sense strand starting at position 655 of SEQ ID NO: 1244637
aucaauguuugcccaauga

SEQ ID NO: 1503823 - RNA, 19 nt, Artificial Sequence
  Description of Artificial Sequence: Synthetic oligonucleotide
  Antisense strand to SEQ ID NO: 1503822
ucauugggcaaacauugau

SEQ ID NO: 1503824 - RNA, 19 nt, Artificial Sequence
  Description of Artificial Sequence: Synthetic oligonucleotide
  Sense strand starting at position 670 of SEQ ID NO: 1244637
augaaugaaugugaccaaa

SEQ ID NO: 1503825 - RNA, 19 nt, Artificial Sequence
  Description of Artificial Sequence: Synthetic oligonucleotide
  Antisense strand to SEQ ID NO: 1503824
uuuggucacauucauucau

SEQ ID NO: 1503826 - RNA, 19 nt, Artificial Sequence
  Description of Artificial Sequence: Synthetic oligonucleotide
  Sense strand starting at position 726 of SEQ ID NO: 1244637
gggugagugccauggguua

SEQ ID NO: 1503827 - RNA, 19 nt, Artificial Sequence
  Description of Artificial Sequence: Synthetic oligonucleotide
  Antisense strand to SEQ ID NO: 1503826
uaacccauggcacucaccc

SEQ ID NO: 1503828 - RNA, 19 nt, Artificial Sequence
  Description of Artificial Sequence: Synthetic oligonucleotide
  Sense strand starting at position 992 of SEQ ID NO: 1244637
cugggaugccugcaccuau

SEQ ID NO: 1503829 - RNA, 19 nt, Artificial Sequence
  Description of Artificial Sequence: Synthetic oligonucleotide
  Antisense strand to SEQ ID NO: 1503828
auaggugcaggcaucccag

SEQ ID NO: 1503830 - RNA, 19 nt, Artificial Sequence
  Description of Artificial Sequence: Synthetic oligonucleotide
  Sense strand starting at position 1393 of SEQ ID NO: 1244637
gaggcucacuccuuuguua

SEQ ID NO: 1503831 - RNA, 19 nt, Artificial Sequence
  Description of Artificial Sequence: Synthetic oligonucleotide
  Antisense strand to SEQ ID NO: 1503830
uaacaaaggagugagccuc

SEQ ID NO: 1503832 - RNA, 19 nt, Artificial Sequence
  Description of Artificial Sequence: Synthetic oligonucleotide
  Sense strand starting at position 1457 of SEQ ID NO: 1244637
agcucuuucugggaucaua

SEQ ID NO: 1503833 - RNA, 19 nt, Artificial Sequence
  Description of Artificial Sequence: Synthetic oligonucleotide
  Antisense strand to SEQ ID NO: 1503832
uaugaucccagaaagagcu

SEQ ID NO: 1503834 - RNA, 19 nt, Artificial Sequence
  Description of Artificial Sequence: Synthetic oligonucleotide
  Sense strand starting at position 1519 of SEQ ID NO: 1244637
gagucagaacacugcucuu

SEQ ID NO: 1503835 - RNA, 19 nt, Artificial Sequence
  Description of Artificial Sequence: Synthetic oligonucleotide
  Antisense strand to SEQ ID NO: 1503834
aagagcaguguucugacuc

SEQ ID NO: 1503836 - RNA, 19 nt, Artificial Sequence
  Description of Artificial Sequence: Synthetic oligonucleotide
  Sense strand starting at position 1522 of SEQ ID NO: 1244637
ucagaacacugcucuuaag

SEQ ID NO: 1503837 - RNA, 19 nt, Artificial Sequence
  Description of Artificial Sequence: Synthetic oligonucleotide
  Antisense strand to SEQ ID NO: 1503836
cuuaagagcaguguucuga

SEQ ID NO: 1503838 - RNA, 19 nt, Artificial Sequence
  Description of Artificial Sequence: Synthetic oligonucleotide
  Sense strand starting at position 1547 of SEQ ID NO: 1244637
uugucuugcuaagaggaaa

SEQ ID NO: 1503839 - RNA, 19 nt, Artificial Sequence
  Description of Artificial Sequence: Synthetic oligonucleotide
  Antisense strand to SEQ ID NO: 1503838
uuuccucuuagcaagacaa

SEQ ID NO: 1503840 - RNA, 19 nt, Artificial Sequence
  Description of Artificial Sequence: Synthetic oligonucleotide
  Sense strand starting at position 1710 of SEQ ID NO: 1244637
ggguucauagagugacaaa

SEQ ID NO: 1503841 - RNA, 19 nt, Artificial Sequence
  Description of Artificial Sequence: Synthetic oligonucleotide
  Antisense strand to SEQ ID NO: 1503840
uuugucacucuaugaaccc

SEQ ID NO: 1503842 - RNA, 19 nt, Artificial Sequence
  Description of Artificial Sequence: Synthetic oligonucleotide
  Sense strand starting at position 1802 of SEQ ID NO: 1244637
ccuacucacguguacguaa

SEQ ID NO: 1503843 - RNA, 19 nt, Artificial Sequence
  Description of Artificial Sequence: Synthetic oligonucleotide
  Antisense strand to SEQ ID NO: 1503842
uuacguacacgugaguagg

SEQ ID NO: 1503844 - RNA, 19 nt, Artificial Sequence
  Description of Artificial Sequence: Synthetic oligonucleotide
  Sense strand starting at position 2327 of SEQ ID NO: 1244637
acaggcaaggcguauuaau

SEQ ID NO: 1503845 - RNA, 19 nt, Artificial Sequence
  Description of Artificial Sequence: Synthetic oligonucleotide
  Antisense strand to SEQ ID NO: 1503844
auuaauacgccuugccugu

SEQ ID NO: 1503846 - RNA, 19 nt, Artificial Sequence
  Description of Artificial Sequence: Synthetic oligonucleotide
  Sense strand starting at position 2375 of SEQ ID NO: 1244637
gccucagugcugugagguc

SEQ ID NO: 1503847 - RNA, 19 nt, Artificial Sequence
  Description of Artificial Sequence: Synthetic oligonucleotide
  Antisense strand to SEQ ID NO: 1503846
gaccucacagcacugaggc

SEQ ID NO: 1503848 - RNA, 19 nt, Artificial Sequence
  Description of Artificial Sequence: Synthetic oligonucleotide
  Sense strand starting at position 2570 of SEQ ID NO: 1244637
gggcuaugcacgggaucuu

SEQ ID NO: 1503849 - RNA, 19 nt, Artificial Sequence
  Description of Artificial Sequence: Synthetic oligonucleotide
  Antisense strand to SEQ ID NO: 1503848
aagaucccgugcauagccc

SEQ ID NO: 1503850 - RNA, 19 nt, Artificial Sequence
  Description of Artificial Sequence: Synthetic oligonucleotide
  Sense strand starting at position 2616 of SEQ ID NO: 1244637
uggcuuggccgggagagua

SEQ ID NO: 1503851 - RNA, 19 nt, Artificial Sequence
  Description of Artificial Sequence: Synthetic oligonucleotide
  Antisense strand to SEQ ID NO: 1503850
uacucucccggccaagcca

SEQ ID NO: 1503852 - RNA, 19 nt, Artificial Sequence
  Description of Artificial Sequence: Synthetic oligonucleotide
  Sense strand starting at position 2880 of SEQ ID NO: 1244637
acuguagacgccuguaauc

SEQ ID NO: 1503853 - RNA, 19 nt, Artificial Sequence
  Description of Artificial Sequence: Synthetic oligonucleotide
  Antisense strand to SEQ ID NO: 1503852
gauuacaggcgucuacagu

SEQ ID NO: 1503854 - RNA, 19 nt, Artificial Sequence
  Description of Artificial Sequence: Synthetic oligonucleotide
  Sense strand starting at position 3185 of SEQ ID NO: 1244637
aaugcaacauccugaggga

SEQ ID NO: 1503855 - RNA, 19 nt, Artificial Sequence
  Description of Artificial Sequence: Synthetic oligonucleotide
  Antisense strand to SEQ ID NO: 1503854
ucccucaggauguugcauu

SEQ ID NO: 1503856 - RNA, 19 nt, Artificial Sequence
  Description of Artificial Sequence: Synthetic oligonucleotide
  Sense strand starting at position 3774 of SEQ ID NO: 1244637
uggcgaaacuguuucuacu

SEQ ID NO: 1503857 - RNA, 19 nt, Artificial Sequence
  Description of Artificial Sequence: Synthetic oligonucleotide
  Antisense strand to SEQ ID NO: 1503856
aguagaaacaguuucgcca

SEQ ID NO: 1503858 - RNA, 19 nt, Artificial Sequence
  Description of Artificial Sequence: Synthetic oligonucleotide
  Sense strand starting at position 217 of SEQ ID NO: 1244638
agggaaaugagaugucagu

SEQ ID NO: 1503859 - RNA, 19 nt, Artificial Sequence
  Description of Artificial Sequence: Synthetic oligonucleotide
  Antisense strand to SEQ ID NO: 1503858
acugacaucucauuucccu

SEQ ID NO: 1503860 - RNA, 19 nt, Artificial Sequence
  Description of Artificial Sequence: Synthetic oligonucleotide
  Sense strand starting at position 230 of SEQ ID NO: 1244638
gucaguuccucuccauuau

SEQ ID NO: 1503861 - RNA, 19 nt, Artificial Sequence
  Description of Artificial Sequence: Synthetic oligonucleotide
  Antisense strand to SEQ ID NO: 1503860
auaauggagaggaacugac

SEQ ID NO: 1503862 - RNA, 19 nt, Artificial Sequence
  Description of Artificial Sequence: Synthetic oligonucleotide
  Sense strand starting at position 473 of SEQ ID NO: 1244638
gugugucugcgaagcgguu

SEQ ID NO: 1503863 - RNA, 19 nt, Artificial Sequence
  Description of Artificial Sequence: Synthetic oligonucleotide
  Antisense strand to SEQ ID NO: 1503862
aaccgcuucgcagacacac

SEQ ID NO: 1503864 - RNA, 19 nt, Artificial Sequence
  Description of Artificial Sequence: Synthetic oligonucleotide
  Sense strand starting at position 585 of SEQ ID NO: 1244638
acacacaaguuuguuacua

SEQ ID NO: 1503865 - RNA, 19 nt, Artificial Sequence
  Description of Artificial Sequence: Synthetic oligonucleotide
  Antisense strand to SEQ ID NO: 1503864
uaguaacaaacuugugugu

SEQ ID NO: 1503866 - RNA, 19 nt, Artificial Sequence
  Description of Artificial Sequence: Synthetic oligonucleotide
  Sense strand starting at position 587 of SEQ ID NO: 1244638
acacaaguuuguuacuauu

SEQ ID NO: 1503867 - RNA, 19 nt, Artificial Sequence
  Description of Artificial Sequence: Synthetic oligonucleotide
  Antisense strand to SEQ ID NO: 1503866
aauaguaacaaacuugugu

SEQ ID NO: 1503868 - RNA, 19 nt, Artificial Sequence
  Description of Artificial Sequence: Synthetic oligonucleotide
  Sense strand starting at position 593 of SEQ ID NO: 1244638
guuuguuacuauuccagga

SEQ ID NO: 1503869 - RNA, 19 nt, Artificial Sequence
  Description of Artificial Sequence: Synthetic oligonucleotide
  Antisense strand to SEQ ID NO: 1503868
uccuggaauaguaacaaac

SEQ ID NO: 1503870 - RNA, 19 nt, Artificial Sequence
  Description of Artificial Sequence: Synthetic oligonucleotide
  Sense strand starting at position 597 of SEQ ID NO: 1244638
guuacuauuccaggacgac

SEQ ID NO: 1503871 - RNA, 19 nt, Artificial Sequence
  Description of Artificial Sequence: Synthetic oligonucleotide
  Antisense strand to SEQ ID NO: 1503870
gucguccuggaauaguaac

SEQ ID NO: 1503872 - RNA, 19 nt, Artificial Sequence
  Description of Artificial Sequence: Synthetic oligonucleotide
  Sense strand starting at position 705 of SEQ ID NO: 1244638
gccugaccugcuuauaucu

SEQ ID NO: 1503873 - RNA, 19 nt, Artificial Sequence
  Description of Artificial Sequence: Synthetic oligonucleotide
  Antisense strand to SEQ ID NO: 1503872
agauauaagcaggucaggc

SEQ ID NO: 1503874 - RNA, 19 nt, Artificial Sequence
  Description of Artificial Sequence: Synthetic oligonucleotide
  Sense strand starting at position 712 of SEQ ID NO: 1244638
cugcuuauaucugggucuu

SEQ ID NO: 1503875 - RNA, 19 nt, Artificial Sequence
  Description of Artificial Sequence: Synthetic oligonucleotide
  Antisense strand to SEQ ID NO: 1503874
aagacccagauauaagcag

SEQ ID NO: 1503876 - RNA, 19 nt, Artificial Sequence
  Description of Artificial Sequence: Synthetic oligonucleotide
  Sense strand starting at position 854 of SEQ ID NO: 1244638
aggucagaauccugugcuu

SEQ ID NO: 1503877 - RNA, 19 nt, Artificial Sequence
  Description of Artificial Sequence: Synthetic oligonucleotide
  Antisense strand to SEQ ID NO: 1503876
aagcacaggauucugaccu

SEQ ID NO: 1503878 - RNA, 19 nt, Artificial Sequence
  Description of Artificial Sequence: Synthetic oligonucleotide
  Sense strand starting at position 856 of SEQ ID NO: 1244638
gucagaauccugugcuuac

SEQ ID NO: 1503879 - RNA, 19 nt, Artificial Sequence
  Description of Artificial Sequence: Synthetic oligonucleotide
  Antisense strand to SEQ ID NO: 1503878
guaagcacaggauucugac

SEQ ID NO: 1503880 - RNA, 19 nt, Artificial Sequence
  Description of Artificial Sequence: Synthetic oligonucleotide
  Sense strand starting at position 860 of SEQ ID NO: 1244638
gaauccugugcuuacgaca

SEQ ID NO: 1503881 - RNA, 19 nt, Artificial Sequence
  Description of Artificial Sequence: Synthetic oligonucleotide
  Antisense strand to SEQ ID NO: 1503880
ugucguaagcacaggauuc

SEQ ID NO: 1503882 - RNA, 19 nt, Artificial Sequence
  Description of Artificial Sequence: Synthetic oligonucleotide
  Sense strand starting at position 881 of SEQ ID NO: 1244638
ucggucuguugccauggaa

SEQ ID NO: 1503883 - RNA, 19 nt, Artificial Sequence
  Description of Artificial Sequence: Synthetic oligonucleotide
  Antisense strand to SEQ ID NO: 1503882
uuccauggcaacagaccga

SEQ ID NO: 1503884 - RNA, 19 nt, Artificial Sequence
  Description of Artificial Sequence: Synthetic oligonucleotide
  Sense strand starting at position 884 of SEQ ID NO: 1244638
gucuguugccauggaaaca

SEQ ID NO: 1503885 - RNA, 19 nt, Artificial Sequence
  Description of Artificial Sequence: Synthetic oligonucleotide
  Antisense strand to SEQ ID NO: 1503884
uguuuccauggcaacagac

SEQ ID NO: 1503886 - RNA, 19 nt, Artificial Sequence
  Description of Artificial Sequence: Synthetic oligonucleotide
  Sense strand starting at position 1753 of SEQ ID NO: 1244638
ccacucgauccauggagaa

SEQ ID NO: 1503887 - RNA, 19 nt, Artificial Sequence
  Description of Artificial Sequence: Synthetic oligonucleotide
  Antisense strand to SEQ ID NO: 1503886
uucuccauggaucgagugg

SEQ ID NO: 1503888 - RNA, 19 nt, Artificial Sequence
  Description of Artificial Sequence: Synthetic oligonucleotide
  Sense strand starting at position 3044 of SEQ ID NO: 1244638
ggagcaagcauucggaaag

SEQ ID NO: 1503889 - RNA, 19 nt, Artificial Sequence
  Description of Artificial Sequence: Synthetic oligonucleotide
  Antisense strand to SEQ ID NO: 1503888
cuuuccgaaugcuugcucc

SEQ ID NO: 1503890 - RNA, 19 nt, Artificial Sequence
  Description of Artificial Sequence: Synthetic oligonucleotide
  Sense strand starting at position 3069 of SEQ ID NO: 1244638
cugcaaauuccagggagaa

SEQ ID NO: 1503891 - RNA, 19 nt, Artificial Sequence
  Description of Artificial Sequence: Synthetic oligonucleotide
  Antisense strand to SEQ ID NO: 1503890
uucucccuggaauuugcag

SEQ ID NO: 1503892 - RNA, 19 nt, Artificial Sequence
  Description of Artificial Sequence: Synthetic oligonucleotide
  Sense strand starting at position 3236 of SEQ ID NO: 1244638
gccuguugagcugagggaa

SEQ ID NO: 1503893 - RNA, 19 nt, Artificial Sequence
  Description of Artificial Sequence: Synthetic oligonucleotide
  Antisense strand to SEQ ID NO: 1503892
uucccucagcucaacaggc

SEQ ID NO: 1503894 - RNA, 19 nt, Artificial Sequence
  Description of Artificial Sequence: Synthetic oligonucleotide
  Sense strand starting at position 3396 of SEQ ID NO: 1244638
gggcacuacuguuccugaa

SEQ ID NO: 1503895 - RNA, 19 nt, Artificial Sequence
  Description of Artificial Sequence: Synthetic oligonucleotide
  Antisense strand to SEQ ID NO: 1503894
uucaggaacaguagugccc

SEQ ID NO: 1503896 - RNA, 19 nt, Artificial Sequence
  Description of Artificial Sequence: Synthetic oligonucleotide
  Sense strand starting at position 3504 of SEQ ID NO: 1244638
ugggaagauugugcuucga

SEQ ID NO: 1503897 - RNA, 19 nt, Artificial Sequence
  Description of Artificial Sequence: Synthetic oligonucleotide
  Antisense strand to SEQ ID NO: 1503896
ucgaagcacaaucuuccca

SEQ ID NO: 1503898 - RNA, 19 nt, Artificial Sequence
  Description of Artificial Sequence: Synthetic oligonucleotide
  Sense strand starting at position 3506 of SEQ ID NO: 1244638
ggaagauugugcuucgaag

SEQ ID NO: 1503899 - RNA, 19 nt, Artificial Sequence
  Description of Artificial Sequence: Synthetic oligonucleotide
  Antisense strand to SEQ ID NO: 1503898
cuucgaagcacaaucuucc

SEQ ID NO: 1503900 - RNA, 19 nt, Artificial Sequence
  Description of Artificial Sequence: Synthetic oligonucleotide
  Sense strand starting at position 3508 of SEQ ID NO: 1244638
aagauugugcuucgaagaa

SEQ ID NO: 1503901 - RNA, 19 nt, Artificial Sequence
  Description of Artificial Sequence: Synthetic oligonucleotide
  Antisense strand to SEQ ID NO: 1503900
uucuucgaagcacaaucuu

SEQ ID NO: 1503902 - RNA, 19 nt, Artificial Sequence
  Description of Artificial Sequence: Synthetic oligonucleotide
  Sense strand starting at position 3532 of SEQ ID NO: 1244638
agcagaguauuguucugga

SEQ ID NO: 1503903 - RNA, 19 nt, Artificial Sequence
  Description of Artificial Sequence: Synthetic oligonucleotide
  Antisense strand to SEQ ID NO: 1503902
uccagaacaauacucugcu

SEQ ID NO: 1503904 - RNA, 19 nt, Artificial Sequence
  Description of Artificial Sequence: Synthetic oligonucleotide
  Sense strand starting at position 3535 of SEQ ID NO: 1244638
agaguauuguucuggagcu

SEQ ID NO: 1503905 - RNA, 19 nt, Artificial Sequence
  Description of Artificial Sequence: Synthetic oligonucleotide
  Antisense strand to SEQ ID NO: 1503904
agcuccagaacaauacucu

SEQ ID NO: 1503906 - RNA, 19 nt, Artificial Sequence
  Description of Artificial Sequence: Synthetic oligonucleotide
  Sense strand starting at position 3536 of SEQ ID NO: 1244638
gaguauuguucuggagcug

SEQ ID NO: 1503907 - RNA, 19 nt, Artificial Sequence
  Description of Artificial Sequence: Synthetic oligonucleotide
  Antisense strand to SEQ ID NO: 1503906
cagcuccagaacaauacuc

SEQ ID NO: 1503908 - RNA, 19 nt, Artificial Sequence
  Description of Artificial Sequence: Synthetic oligonucleotide
  Sense strand starting at position 101 of SEQ ID NO: 1244639
uaaggaguugcagguaugu

SEQ ID NO: 1503909 - RNA, 19 nt, Artificial Sequence
  Description of Artificial Sequence: Synthetic oligonucleotide
  Antisense strand to SEQ ID NO: 1503908
acauaccugcaacuccuua

SEQ ID NO: 1503910 - RNA, 19 nt, Artificial Sequence
  Description of Artificial Sequence: Synthetic oligonucleotide
  Sense strand starting at position 142 of SEQ ID NO: 1244639
acaggauugcacuggaaac

SEQ ID NO: 1503911 - RNA, 19 nt, Artificial Sequence
  Description of Artificial Sequence: Synthetic oligonucleotide
  Antisense strand to SEQ ID NO: 1503910
guuuccagugcaauccugu

SEQ ID NO: 1503912 - RNA, 19 nt, Artificial Sequence
  Description of Artificial Sequence: Synthetic oligonucleotide
  Sense strand starting at position 218 of SEQ ID NO: 1244639
caauguaagugggaagaaa

SEQ ID NO: 1503913 - RNA, 19 nt, Artificial Sequence
  Description of Artificial Sequence: Synthetic oligonucleotide
  Antisense strand to SEQ ID NO: 1503912
uuucuucccacuuacauug

SEQ ID NO: 1503914 - RNA, 19 nt, Artificial Sequence
  Description of Artificial Sequence: Synthetic oligonucleotide
  Sense strand starting at position 243 of SEQ ID NO: 1244639
uguagauuguaguuugaag

SEQ ID NO: 1503915 - RNA, 19 nt, Artificial Sequence
  Description of Artificial Sequence: Synthetic oligonucleotide
  Antisense strand to SEQ ID NO: 1503914
cuucaaacuacaaucuaca

SEQ ID NO: 1503916 - RNA, 19 nt, Artificial Sequence
  Description of Artificial Sequence: Synthetic oligonucleotide
  Sense strand starting at position 245 of SEQ ID NO: 1244639
uagauuguaguuugaagaa

SEQ ID NO: 1503917 - RNA, 19 nt, Artificial Sequence
  Description of Artificial Sequence: Synthetic oligonucleotide
  Antisense strand to SEQ ID NO: 1503916
uucuucaaacuacaaucua

SEQ ID NO: 1503918 - RNA, 19 nt, Artificial Sequence
  Description of Artificial Sequence: Synthetic oligonucleotide
  Sense strand starting at position 291 of SEQ ID NO: 1244639
guggcucacuucucuaauc

SEQ ID NO: 1503919 - RNA, 19 nt, Artificial Sequence
  Description of Artificial Sequence: Synthetic oligonucleotide
  Antisense strand to SEQ ID NO: 1503918
gauuagagaagugagccac

SEQ ID NO: 1503920 - RNA, 19 nt, Artificial Sequence
  Description of Artificial Sequence: Synthetic oligonucleotide
  Sense strand starting at position 510 of SEQ ID NO: 1244639
cagaaauugcgccaaugca

SEQ ID NO: 1503921 - RNA, 19 nt, Artificial Sequence
  Description of Artificial Sequence: Synthetic oligonucleotide
  Antisense strand to SEQ ID NO: 1503920
ugcauuggcgcaauuucug

SEQ ID NO: 1503922 - RNA, 19 nt, Artificial Sequence
  Description of Artificial Sequence: Synthetic oligonucleotide
  Sense strand starting at position 581 of SEQ ID NO: 1244639
ggcaguguaccucaacacu

SEQ ID NO: 1503923 - RNA, 19 nt, Artificial Sequence
  Description of Artificial Sequence: Synthetic oligonucleotide
  Antisense strand to SEQ ID NO: 1503922
aguguugagguacacugcc

SEQ ID NO: 1503924 - RNA, 19 nt, Artificial Sequence
  Description of Artificial Sequence: Synthetic oligonucleotide
  Sense strand starting at position 662 of SEQ ID NO: 1244639
uggugucuuauacauaguu

SEQ ID NO: 1503925 - RNA, 19 nt, Artificial Sequence
  Description of Artificial Sequence: Synthetic oligonucleotide
  Antisense strand to SEQ ID NO: 1503924
aacuauguauaagacacca

SEQ ID NO: 1503926 - RNA, 19 nt, Artificial Sequence
  Description of Artificial Sequence: Synthetic oligonucleotide
  Sense strand starting at position 709 of SEQ ID NO: 1244639
ucgaucuugucaguuauca

SEQ ID NO: 1503927 - RNA, 19 nt, Artificial Sequence
  Description of Artificial Sequence: Synthetic oligonucleotide
  Antisense strand to SEQ ID NO: 1503926
ugauaacugacaagaucga

SEQ ID NO: 1503928 - RNA, 19 nt, Artificial Sequence
  Description of Artificial Sequence: Synthetic oligonucleotide
  Sense strand starting at position 935 of SEQ ID NO: 1244639
uuaucuaaucaagaguugu

SEQ ID NO: 1503929 - RNA, 19 nt, Artificial Sequence
  Description of Artificial Sequence: Synthetic oligonucleotide
  Antisense strand to SEQ ID NO: 1503928
acaacucuugauuagauaa

SEQ ID NO: 1503930 - RNA, 19 nt, Artificial Sequence
  Description of Artificial Sequence: Synthetic oligonucleotide
  Sense strand starting at position 1010 of SEQ ID NO: 1244639
uguaaagacugccuagauu

SEQ ID NO: 1503931 - RNA, 19 nt, Artificial Sequence
  Description of Artificial Sequence: Synthetic oligonucleotide
  Antisense strand to SEQ ID NO: 1503930
aaucuaggcagucuuuaca

SEQ ID NO: 1503932 - RNA, 19 nt, Artificial Sequence
  Description of Artificial Sequence: Synthetic oligonucleotide
  Sense strand starting at position 1148 of SEQ ID NO: 1244639
gacugagauacgugaggga

SEQ ID NO: 1503933 - RNA, 19 nt, Artificial Sequence
  Description of Artificial Sequence: Synthetic oligonucleotide
  Antisense strand to SEQ ID NO: 1503932
ucccucacguaucucaguc

SEQ ID NO: 1503934 - RNA, 19 nt, Artificial Sequence
  Description of Artificial Sequence: Synthetic oligonucleotide
  Sense strand starting at position 1984 of SEQ ID NO: 1244639
cgccaucuucccggaaaca

SEQ ID NO: 1503935 - RNA, 19 nt, Artificial Sequence
  Description of Artificial Sequence: Synthetic oligonucleotide
  Antisense strand to SEQ ID NO: 1503934
uguuuccgggaagauggcg

SEQ ID NO: 1503936 - RNA, 19 nt, Artificial Sequence
  Description of Artificial Sequence: Synthetic oligonucleotide
  Sense strand starting at position 2188 of SEQ ID NO: 1244639
gucggagaaacaggugaau

SEQ ID NO: 1503937 - RNA, 19 nt, Artificial Sequence
  Description of Artificial Sequence: Synthetic oligonucleotide
  Antisense strand to SEQ ID NO: 1503936
auucaccuguuucuccgac

SEQ ID NO: 1503938 - RNA, 19 nt, Artificial Sequence
  Description of Artificial Sequence: Synthetic oligonucleotide
  Sense strand starting at position 2334 of SEQ ID NO: 1244639
gaagcugucccagaguauc

SEQ ID NO: 1503939 - RNA, 19 nt, Artificial Sequence
  Description of Artificial Sequence: Synthetic oligonucleotide
  Antisense strand to SEQ ID NO: 1503938
gauacucugggacagcuuc

SEQ ID NO: 1503940 - RNA, 19 nt, Artificial Sequence
  Description of Artificial Sequence: Synthetic oligonucleotide
  Sense strand starting at position 2342 of SEQ ID NO: 1244639
cccagaguaucuccagagu

SEQ ID NO: 1503941 - RNA, 19 nt, Artificial Sequence
  Description of Artificial Sequence: Synthetic oligonucleotide
  Antisense strand to SEQ ID NO: 1503940
acucuggagauacucuggg

SEQ ID NO: 1503942 - RNA, 19 nt, Artificial Sequence
  Description of Artificial Sequence: Synthetic oligonucleotide
  Sense strand starting at position 2345 of SEQ ID NO: 1244639
agaguaucuccagagugca

SEQ ID NO: 1503943 - RNA, 19 nt, Artificial Sequence
  Description of Artificial Sequence: Synthetic oligonucleotide
  Antisense strand to SEQ ID NO: 1503942
ugcacucuggagauacucu

SEQ ID NO: 1503944 - RNA, 19 nt, Artificial Sequence
  Description of Artificial Sequence: Synthetic oligonucleotide
  Sense strand starting at position 2565 of SEQ ID NO: 1244639
gagauucccugcuccaagu

SEQ ID NO: 1503945 - RNA, 19 nt, Artificial Sequence
  Description of Artificial Sequence: Synthetic oligonucleotide
  Antisense strand to SEQ ID NO: 1503944
acuuggagcagggaaucuc

SEQ ID NO: 1503946 - RNA, 19 nt, Artificial Sequence
  Description of Artificial Sequence: Synthetic oligonucleotide
  Sense strand starting at position 2658 of SEQ ID NO: 1244639
gaaggugugaccugaaugu

SEQ ID NO: 1503947 - RNA, 19 nt, Artificial Sequence
  Description of Artificial Sequence: Synthetic oligonucleotide
  Antisense strand to SEQ ID NO: 1503946
acauucaggucacaccuuc

SEQ ID NO: 1503948 - RNA, 19 nt, Artificial Sequence
  Description of Artificial Sequence: Synthetic oligonucleotide
  Sense strand starting at position 2667 of SEQ ID NO: 1244639
accugaauguucucccuga

SEQ ID NO: 1503949 - RNA, 19 nt, Artificial Sequence
  Description of Artificial Sequence: Synthetic oligonucleotide
  Antisense strand to SEQ ID NO: 1503948
ucagggagaacauucaggu

SEQ ID NO: 1503950 - RNA, 19 nt, Artificial Sequence
  Description of Artificial Sequence: Synthetic oligonucleotide
  Sense strand starting at position 2710 of SEQ ID NO: 1244639
guucuauucuucccagguu

SEQ ID NO: 1503951 - RNA, 19 nt, Artificial Sequence
  Description of Artificial Sequence: Synthetic oligonucleotide
  Antisense strand to SEQ ID NO: 1503950
aaccugggaagaauagaac

SEQ ID NO: 1503952 - RNA, 19 nt, Artificial Sequence
  Description of Artificial Sequence: Synthetic oligonucleotide
  Sense strand starting at position 2815 of SEQ ID NO: 1244639
caucaaaggucccugggua

SEQ ID NO: 1503953 - RNA, 19 nt, Artificial Sequence
  Description of Artificial Sequence: Synthetic oligonucleotide
  Antisense strand to SEQ ID NO: 1503952
uacccagggaccuuugaug

SEQ ID NO: 1503954 - RNA, 19 nt, Artificial Sequence
  Description of Artificial Sequence: Synthetic oligonucleotide
  Sense strand starting at position 2935 of SEQ ID NO: 1244639
ccagguauguguucaugga

SEQ ID NO: 1503955 - RNA, 19 nt, Artificial Sequence
  Description of Artificial Sequence: Synthetic oligonucleotide
  Antisense strand to SEQ ID NO: 1503954
uccaugaacacauaccugg

SEQ ID NO: 1503956 - RNA, 19 nt, Artificial Sequence
  Description of Artificial Sequence: Synthetic oligonucleotide
  Sense strand starting at position 2936 of SEQ ID NO: 1244639
cagguauguguucauggag

SEQ ID NO: 1503957 - RNA, 19 nt, Artificial Sequence
  Description of Artificial Sequence: Synthetic oligonucleotide
  Antisense strand to SEQ ID NO: 1503956
cuccaugaacacauaccug

SEQ ID NO: 1503958 - RNA, 19 nt, Artificial Sequence
  Description of Artificial Sequence: Synthetic oligonucleotide
  Sense strand starting at position 2939 of SEQ ID NO: 1244639
guauguguucauggaguuu

SEQ ID NO: 1503959 - RNA, 19 nt, Artificial Sequence
  Description of Artificial Sequence: Synthetic oligonucleotide
  Antisense strand to SEQ ID NO: 1503958
aaacuccaugaacacauac

SEQ ID NO: 1503960 - RNA, 19 nt, Artificial Sequence
  Description of Artificial Sequence: Synthetic oligonucleotide
  Sense strand starting at position 2975 of SEQ ID NO: 1244639
cgauguccacgugcuuauu

SEQ ID NO: 1503961 - RNA, 19 nt, Artificial Sequence
  Description of Artificial Sequence: Synthetic oligonucleotide
  Antisense strand to SEQ ID NO: 1503960
aauaagcacguggacaucg

SEQ ID NO: 1503962 - RNA, 19 nt, Artificial Sequence
  Description of Artificial Sequence: Synthetic oligonucleotide
  Sense strand starting at position 3113 of SEQ ID NO: 1244639
ucuccucagcugcaagaau

SEQ ID NO: 1503963 - RNA, 19 nt, Artificial Sequence
  Description of Artificial Sequence: Synthetic oligonucleotide
  Antisense strand to SEQ ID NO: 1503962
auucuugcagcugaggaga

SEQ ID NO: 1503964 - RNA, 19 nt, Artificial Sequence
  Description of Artificial Sequence: Synthetic oligonucleotide
  Sense strand starting at position 3143 of SEQ ID NO: 1244639
ggaguuguacaaugagauu

SEQ ID NO: 1503965 - RNA, 19 nt, Artificial Sequence
  Description of Artificial Sequence: Synthetic oligonucleotide
  Antisense strand to SEQ ID NO: 1503964
aaucucauuguacaacucc

SEQ ID NO: 1503966 - RNA, 19 nt, Artificial Sequence
  Description of Artificial Sequence: Synthetic oligonucleotide
  Sense strand starting at position 3149 of SEQ ID NO: 1244639
guacaaugagauugaguuc

SEQ ID NO: 1503967 - RNA, 19 nt, Artificial Sequence
  Description of Artificial Sequence: Synthetic oligonucleotide
  Antisense strand to SEQ ID NO: 1503966
gaacucaaucucauuguac

SEQ ID NO: 1503968 - RNA, 19 nt, Artificial Sequence
  Description of Artificial Sequence: Synthetic oligonucleotide
  Sense strand starting at position 3152 of SEQ ID NO: 1244639
caaugagauugaguucuau

SEQ ID NO: 1503969 - RNA, 19 nt, Artificial Sequence
  Description of Artificial Sequence: Synthetic oligonucleotide
  Antisense strand to SEQ ID NO: 1503968
auagaacucaaucucauug

SEQ ID NO: 1503970 - RNA, 19 nt, Artificial Sequence
  Description of Artificial Sequence: Synthetic oligonucleotide
  Sense strand starting at position 3158 of SEQ ID NO: 1244639
gauugaguucuaugccaaa

SEQ ID NO: 1503971 - RNA, 19 nt, Artificial Sequence
  Description of Artificial Sequence: Synthetic oligonucleotide
  Antisense strand to SEQ ID NO: 1503970
uuuggcauagaacucaauc

SEQ ID NO: 1503972 - RNA, 19 nt, Artificial Sequence
  Description of Artificial Sequence: Synthetic oligonucleotide
  Sense strand starting at position 3294 of SEQ ID NO: 1244639
gcaggacucccaggauaag

SEQ ID NO: 1503973 - RNA, 19 nt, Artificial Sequence
  Description of Artificial Sequence: Synthetic oligonucleotide
  Antisense strand to SEQ ID NO: 1503972
cuuauccugggaguccugc

SEQ ID NO: 1503974 - RNA, 19 nt, Artificial Sequence
  Description of Artificial Sequence: Synthetic oligonucleotide
  Sense strand starting at position 3312 of SEQ ID NO: 1244639
gcgcucuucccgcucuauu

SEQ ID NO: 1503975 - RNA, 19 nt, Artificial Sequence
  Description of Artificial Sequence: Synthetic oligonucleotide
  Antisense strand to SEQ ID NO: 1503974
aauagagcgggaagagcgc

SEQ ID NO: 1503976 - RNA, 19 nt, Artificial Sequence
  Description of Artificial Sequence: Synthetic oligonucleotide
  Sense strand starting at position 3313 of SEQ ID NO: 1244639
cgcucuucccgcucuauua

SEQ ID NO: 1503977 - RNA, 19 nt, Artificial Sequence
  Description of Artificial Sequence: Synthetic oligonucleotide
  Antisense strand to SEQ ID NO: 1503976
uaauagagcgggaagagcg

SEQ ID NO: 1503978 - RNA, 19 nt, Artificial Sequence
  Description of Artificial Sequence: Synthetic oligonucleotide
  Sense strand starting at position 3384 of SEQ ID NO: 1244639
ggaggauaucaaggugggu

SEQ ID NO: 1503979 - RNA, 19 nt, Artificial Sequence
  Description of Artificial Sequence: Synthetic oligonucleotide
  Antisense strand to SEQ ID NO: 1503978
acccaccuugauauccucc

SEQ ID NO: 1503980 - RNA, 19 nt, Artificial Sequence
  Description of Artificial Sequence: Synthetic oligonucleotide
  Sense strand starting at position 3418 of SEQ ID NO: 1244639
ugcuucuucucuccaugua

SEQ ID NO: 1503981 - RNA, 19 nt, Artificial Sequence
  Description of Artificial Sequence: Synthetic oligonucleotide
  Antisense strand to SEQ ID NO: 1503980
uacauggagagaagaagca

SEQ ID NO: 1503982 - RNA, 19 nt, Artificial Sequence
  Description of Artificial Sequence: Synthetic oligonucleotide
  Sense strand starting at position 3438 of SEQ ID NO: 1244639
ccagguuacagcugggauu

SEQ ID NO: 1503983 - RNA, 19 nt, Artificial Sequence
  Description of Artificial Sequence: Synthetic oligonucleotide
  Antisense strand to SEQ ID NO: 1503982
aaucccagcuguaaccugg

SEQ ID NO: 1503984 - RNA, 19 nt, Artificial Sequence
  Description of Artificial Sequence: Synthetic oligonucleotide
  Sense strand starting at position 3974 of SEQ ID NO: 1244639
uuagcuauuuguccugagu

SEQ ID NO: 1503985 - RNA, 19 nt, Artificial Sequence
  Description of Artificial Sequence: Synthetic oligonucleotide
  Antisense strand to SEQ ID NO: 1503984
acucaggacaaauagcuaa

SEQ ID NO: 1503986 - RNA, 19 nt, Artificial Sequence
  Description of Artificial Sequence: Synthetic oligonucleotide
  Sense strand starting at position 3977 of SEQ ID NO: 1244639
gcuauuuguccugagucuc

SEQ ID NO: 1503987 - RNA, 19 nt, Artificial Sequence
  Description of Artificial Sequence: Synthetic oligonucleotide
  Antisense strand to SEQ ID NO: 1503986
gagacucaggacaaauagc

SEQ ID NO: 1503988 - RNA, 19 nt, Artificial Sequence
  Description of Artificial Sequence: Synthetic oligonucleotide
  Sense strand starting at position 90 of SEQ ID NO: 1244640
ggccuaugucaaggagagu

SEQ ID NO: 1503989 - RNA, 19 nt, Artificial Sequence
  Description of Artificial Sequence: Synthetic oligonucleotide
  Antisense strand to SEQ ID NO: 1503988
acucuccuugacauaggcc

SEQ ID NO: 1503990 - RNA, 19 nt, Artificial Sequence
  Description of Artificial Sequence: Synthetic oligonucleotide
  Sense strand starting at position 91 of SEQ ID NO: 1244640
gccuaugucaaggagaguu

SEQ ID NO: 1503991 - RNA, 19 nt, Artificial Sequence
  Description of Artificial Sequence: Synthetic oligonucleotide
  Antisense strand to SEQ ID NO: 1503990
aacucuccuugacauaggc

SEQ ID NO: 1503992 - RNA, 19 nt, Artificial Sequence
  Description of Artificial Sequence: Synthetic oligonucleotide
  Sense strand starting at position 99 of SEQ ID NO: 1244640
caaggagaguucccucauu

SEQ ID NO: 1503993 - RNA, 19 nt, Artificial Sequence
  Description of Artificial Sequence: Synthetic oligonucleotide
  Antisense strand to SEQ ID NO: 1503992
aaugagggaacucuccuug

SEQ ID NO: 1503994 - RNA, 19 nt, Artificial Sequence
  Description of Artificial Sequence: Synthetic oligonucleotide
  Sense strand starting at position 201 of SEQ ID NO: 1244640
ggaagagcgucauuaggac

SEQ ID NO: 1503995 - RNA, 19 nt, Artificial Sequence
  Description of Artificial Sequence: Synthetic oligonucleotide
  Antisense strand to SEQ ID NO: 1503994
guccuaaugacgcucuucc

SEQ ID NO: 1503996 - RNA, 19 nt, Artificial Sequence
  Description of Artificial Sequence: Synthetic oligonucleotide
  Sense strand starting at position 366 of SEQ ID NO: 1244640
agcuaaagcugauggagua

SEQ ID NO: 1503997 - RNA, 19 nt, Artificial Sequence
  Description of Artificial Sequence: Synthetic oligonucleotide
  Antisense strand to SEQ ID NO: 1503996
uacuccaucagcuuuagcu

SEQ ID NO: 1503998 - RNA, 19 nt, Artificial Sequence
  Description of Artificial Sequence: Synthetic oligonucleotide
  Sense strand starting at position 367 of SEQ ID NO: 1244640
gcuaaagcugauggaguaa

SEQ ID NO: 1503999 - RNA, 19 nt, Artificial Sequence
  Description of Artificial Sequence: Synthetic oligonucleotide
  Antisense strand to SEQ ID NO: 1503998
uuacuccaucagcuuuagc

SEQ ID NO: 1504000 - RNA, 19 nt, Artificial Sequence
  Description of Artificial Sequence: Synthetic oligonucleotide
  Sense strand starting at position 379 of SEQ ID NO: 1244640
ggaguaagagcuugaaccu

SEQ ID NO: 1504001 - RNA, 19 nt, Artificial Sequence
  Description of Artificial Sequence: Synthetic oligonucleotide
  Antisense strand to SEQ ID NO: 1504000
agguucaagcucuuacucc

SEQ ID NO: 1504002 - RNA, 19 nt, Artificial Sequence
  Description of Artificial Sequence: Synthetic oligonucleotide
  Sense strand starting at position 519 of SEQ ID NO: 1244640
uccuuaaaguuccaggcau

SEQ ID NO: 1504003 - RNA, 19 nt, Artificial Sequence
  Description of Artificial Sequence: Synthetic oligonucleotide
  Antisense strand to SEQ ID NO: 1504002
augccuggaacuuuaagga

SEQ ID NO: 1504004 - RNA, 19 nt, Artificial Sequence
  Description of Artificial Sequence: Synthetic oligonucleotide
  Sense strand starting at position 574 of SEQ ID NO: 1244640
gcacuagugcugggagaca

SEQ ID NO: 1504005 - RNA, 19 nt, Artificial Sequence
  Description of Artificial Sequence: Synthetic oligonucleotide
  Antisense strand to SEQ ID NO: 1504004
ugucucccagcacuagugc

SEQ ID NO: 1504006 - RNA, 19 nt, Artificial Sequence
  Description of Artificial Sequence: Synthetic oligonucleotide
  Sense strand starting at position 977 of SEQ ID NO: 1244640
cgcaaucacggagaaucuu

SEQ ID NO: 1504007 - RNA, 19 nt, Artificial Sequence
  Description of Artificial Sequence: Synthetic oligonucleotide
  Antisense strand to SEQ ID NO: 1504006
aagauucuccgugauugcg

SEQ ID NO: 1504008 - RNA, 19 nt, Artificial Sequence
  Description of Artificial Sequence: Synthetic oligonucleotide
  Sense strand starting at position 986 of SEQ ID NO: 1244640
ggagaaucuucccaacccu

SEQ ID NO: 1504009 - RNA, 19 nt, Artificial Sequence
  Description of Artificial Sequence: Synthetic oligonucleotide
  Antisense strand to SEQ ID NO: 1504008
aggguugggaagauucucc

SEQ ID NO: 1504010 - RNA, 19 nt, Artificial Sequence
  Description of Artificial Sequence: Synthetic oligonucleotide
  Sense strand starting at position 1173 of SEQ ID NO: 1244640
gcuccagaaucugagcauu

SEQ ID NO: 1504011 - RNA, 19 nt, Artificial Sequence
  Description of Artificial Sequence: Synthetic oligonucleotide
  Antisense strand to SEQ ID NO: 1504010
aaugcucagauucuggagc

SEQ ID NO: 1504012 - RNA, 19 nt, Artificial Sequence
  Description of Artificial Sequence: Synthetic oligonucleotide
  Sense strand starting at position 1213 of SEQ ID NO: 1244640
gucaguuugacaugggugu

SEQ ID NO: 1504013 - RNA, 19 nt, Artificial Sequence
  Description of Artificial Sequence: Synthetic oligonucleotide
  Antisense strand to SEQ ID NO: 1504012
acacccaugucaaacugac

SEQ ID NO: 1504014 - RNA, 19 nt, Artificial Sequence
  Description of Artificial Sequence: Synthetic oligonucleotide
  Sense strand starting at position 1217 of SEQ ID NO: 1244640
guuugacaugggugucaau

SEQ ID NO: 1504015 - RNA, 19 nt, Artificial Sequence
  Description of Artificial Sequence: Synthetic oligonucleotide
  Antisense strand to SEQ ID NO: 1504014
auugacacccaugucaaac

SEQ ID NO: 1504016 - RNA, 19 nt, Artificial Sequence
  Description of Artificial Sequence: Synthetic oligonucleotide
  Sense strand starting at position 1224 of SEQ ID NO: 1244640
augggugucaaugagggua

SEQ ID NO: 1504017 - RNA, 19 nt, Artificial Sequence
  Description of Artificial Sequence: Synthetic oligonucleotide
  Antisense strand to SEQ ID NO: 1504016
uacccucauugacacccau

SEQ ID NO: 1504018 - RNA, 19 nt, Artificial Sequence
  Description of Artificial Sequence: Synthetic oligonucleotide
  Sense strand starting at position 1229 of SEQ ID NO: 1244640
ugucaaugaggguaugcuu

SEQ ID NO: 1504019 - RNA, 19 nt, Artificial Sequence
  Description of Artificial Sequence: Synthetic oligonucleotide
  Antisense strand to SEQ ID NO: 1504018
aagcauacccucauugaca

SEQ ID NO: 1504020 - RNA, 19 nt, Artificial Sequence
  Description of Artificial Sequence: Synthetic oligonucleotide
  Sense strand starting at position 1497 of SEQ ID NO: 1244640
cgcauuauucucgacccuu

SEQ ID NO: 1504021 - RNA, 19 nt, Artificial Sequence
  Description of Artificial Sequence: Synthetic oligonucleotide
  Antisense strand to SEQ ID NO: 1504020
aagggucgagaauaaugcg

SEQ ID NO: 1504022 - RNA, 19 nt, Artificial Sequence
  Description of Artificial Sequence: Synthetic oligonucleotide
  Sense strand starting at position 2367 of SEQ ID NO: 1244640
cucggcuuucucggcgaga

SEQ ID NO: 1504023 - RNA, 19 nt, Artificial Sequence
  Description of Artificial Sequence: Synthetic oligonucleotide
  Antisense strand to SEQ ID NO: 1504022
ucucgccgagaaagccgag

SEQ ID NO: 1504024 - RNA, 19 nt, Artificial Sequence
  Description of Artificial Sequence: Synthetic oligonucleotide
  Sense strand starting at position 2368 of SEQ ID NO: 1244640
ucggcuuucucggcgagaa

SEQ ID NO: 1504025 - RNA, 19 nt, Artificial Sequence
  Description of Artificial Sequence: Synthetic oligonucleotide
  Antisense strand to SEQ ID NO: 1504024
uucucgccgagaaagccga

SEQ ID NO: 1504026 - RNA, 19 nt, Artificial Sequence
  Description of Artificial Sequence: Synthetic oligonucleotide
  Sense strand starting at position 2369 of SEQ ID NO: 1244640
cggcuuucucggcgagaaa

SEQ ID NO: 1504027 - RNA, 19 nt, Artificial Sequence
  Description of Artificial Sequence: Synthetic oligonucleotide
  Antisense strand to SEQ ID NO: 1504026
uuucucgccgagaaagccg

SEQ ID NO: 1504028 - RNA, 19 nt, Artificial Sequence
  Description of Artificial Sequence: Synthetic oligonucleotide
  Sense strand starting at position 2370 of SEQ ID NO: 1244640
ggcuuucucggcgagaaag

SEQ ID NO: 1504029 - RNA, 19 nt, Artificial Sequence
  Description of Artificial Sequence: Synthetic oligonucleotide
  Antisense strand to SEQ ID NO: 1504028
cuuucucgccgagaaagcc

SEQ ID NO: 1504030 - RNA, 19 nt, Artificial Sequence
  Description of Artificial Sequence: Synthetic oligonucleotide
  Sense strand starting at position 2614 of SEQ ID NO: 1244640
ggagguucccagcagcaga

SEQ ID NO: 1504031 - RNA, 19 nt, Artificial Sequence
  Description of Artificial Sequence: Synthetic oligonucleotide
  Antisense strand to SEQ ID NO: 1504030
ucugcugcugggaaccucc

SEQ ID NO: 1504032 - RNA, 19 nt, Artificial Sequence
  Description of Artificial Sequence: Synthetic oligonucleotide
  Sense strand starting at position 2772 of SEQ ID NO: 1244640
ggucauugaucucgggcaa

SEQ ID NO: 1504033 - RNA, 19 nt, Artificial Sequence
  Description of Artificial Sequence: Synthetic oligonucleotide
  Antisense strand to SEQ ID NO: 1504032
uugcccgagaucaaugacc

SEQ ID NO: 1504034 - RNA, 19 nt, Artificial Sequence
  Description of Artificial Sequence: Synthetic oligonucleotide
  Sense strand starting at position 2773 of SEQ ID NO: 1244640
gucauugaucucgggcaag

SEQ ID NO: 1504035 - RNA, 19 nt, Artificial Sequence
  Description of Artificial Sequence: Synthetic oligonucleotide
  Antisense strand to SEQ ID NO: 1504034
cuugcccgagaucaaugac

SEQ ID NO: 1504036 - RNA, 19 nt, Artificial Sequence
  Description of Artificial Sequence: Synthetic oligonucleotide
  Sense strand starting at position 2850 of SEQ ID NO: 1244640
ggcauagucugguuuccca

SEQ ID NO: 1504037 - RNA, 19 nt, Artificial Sequence
  Description of Artificial Sequence: Synthetic oligonucleotide
  Antisense strand to SEQ ID NO: 1504036
ugggaaaccagacuaugcc

SEQ ID NO: 1504038 - RNA, 19 nt, Artificial Sequence
  Description of Artificial Sequence: Synthetic oligonucleotide
  Sense strand starting at position 3007 of SEQ ID NO: 1244640
gccuuucuguguuuauuaa

SEQ ID NO: 1504039 - RNA, 19 nt, Artificial Sequence
  Description of Artificial Sequence: Synthetic oligonucleotide
  Antisense strand to SEQ ID NO: 1504038
uuaauaaacacagaaaggc

SEQ ID NO: 1504040 - RNA, 19 nt, Artificial Sequence
  Description of Artificial Sequence: Synthetic oligonucleotide
  Sense strand starting at position 3008 of SEQ ID NO: 1244640
ccuuucuguguuuauuaaa

SEQ ID NO: 1504041 - RNA, 19 nt, Artificial Sequence
  Description of Artificial Sequence: Synthetic oligonucleotide
  Antisense strand to SEQ ID NO: 1504040
uuuaauaaacacagaaagg

SEQ ID NO: 1504042 - RNA, 19 nt, Artificial Sequence
  Description of Artificial Sequence: Synthetic oligonucleotide
  Sense strand starting at position 3136 of SEQ ID NO: 1244640
guggauugcugaugucucu

SEQ ID NO: 1504043 - RNA, 19 nt, Artificial Sequence
  Description of Artificial Sequence: Synthetic oligonucleotide
  Antisense strand to SEQ ID NO: 1504042
agagacaucagcaauccac

SEQ ID NO: 1504044 - RNA, 19 nt, Artificial Sequence
  Description of Artificial Sequence: Synthetic oligonucleotide
  Sense strand starting at position 3139 of SEQ ID NO: 1244640
gauugcugaugucucuaca

SEQ ID NO: 1504045 - RNA, 19 nt, Artificial Sequence
  Description of Artificial Sequence: Synthetic oligonucleotide
  Antisense strand to SEQ ID NO: 1504044
uguagagacaucagcaauc

SEQ ID NO: 1504046 - RNA, 19 nt, Artificial Sequence
  Description of Artificial Sequence: Synthetic oligonucleotide
  Sense strand starting at position 3142 of SEQ ID NO: 1244640
ugcugaugucucuacauug

SEQ ID NO: 1504047 - RNA, 19 nt, Artificial Sequence
  Description of Artificial Sequence: Synthetic oligonucleotide
  Antisense strand to SEQ ID NO: 1504046
caauguagagacaucagca

SEQ ID NO: 1504048 - RNA, 19 nt, Artificial Sequence
  Description of Artificial Sequence: Synthetic oligonucleotide
  Sense strand starting at position 3236 of SEQ ID NO: 1244640
augaaagagccuugucuga

SEQ ID NO: 1504049 - RNA, 19 nt, Artificial Sequence
  Description of Artificial Sequence: Synthetic oligonucleotide
  Antisense strand to SEQ ID NO: 1504048
ucagacaaggcucuuucau

SEQ ID NO: 1504050 - RNA, 19 nt, Artificial Sequence
  Description of Artificial Sequence: Synthetic oligonucleotide
  Sense strand starting at position 3238 of SEQ ID NO: 1244640
gaaagagccuugucugaca

SEQ ID NO: 1504051 - RNA, 19 nt, Artificial Sequence
  Description of Artificial Sequence: Synthetic oligonucleotide
  Antisense strand to SEQ ID NO: 1504050
ugucagacaaggcucuuuc

SEQ ID NO: 1504052 - RNA, 19 nt, Artificial Sequence
  Description of Artificial Sequence: Synthetic oligonucleotide
  Sense strand starting at position 3258 of SEQ ID NO: 1244640
ccuggagacuggugagaga

SEQ ID NO: 1504053 - RNA, 19 nt, Artificial Sequence
  Description of Artificial Sequence: Synthetic oligonucleotide
  Antisense strand to SEQ ID NO: 1504052
ucucucaccagucuccagg

SEQ ID NO: 1504054 - RNA, 19 nt, Artificial Sequence
  Description of Artificial Sequence: Synthetic oligonucleotide
  Sense strand starting at position 3454 of SEQ ID NO: 1244640
uuaacacauuccgauguua

SEQ ID NO: 1504055 - RNA, 19 nt, Artificial Sequence
  Description of Artificial Sequence: Synthetic oligonucleotide
  Antisense strand to SEQ ID NO: 1504054
uaacaucggaauguguuaa

SEQ ID NO: 1504056 - RNA, 19 nt, Artificial Sequence
  Description of Artificial Sequence: Synthetic oligonucleotide
  Sense strand starting at position 3456 of SEQ ID NO: 1244640
aacacauuccgauguuagu

SEQ ID NO: 1504057 - RNA, 19 nt, Artificial Sequence
  Description of Artificial Sequence: Synthetic oligonucleotide
  Antisense strand to SEQ ID NO: 1504056
acuaacaucggaauguguu

SEQ ID NO: 1504058 - RNA, 19 nt, Artificial Sequence
  Description of Artificial Sequence: Synthetic oligonucleotide
  Sense strand starting at position 3459 of SEQ ID NO: 1244640
acauuccgauguuaguaua

SEQ ID NO: 1504059 - RNA, 19 nt, Artificial Sequence
  Description of Artificial Sequence: Synthetic oligonucleotide
  Antisense strand to SEQ ID NO: 1504058
uauacuaacaucggaaugu

SEQ ID NO: 1504060 - RNA, 19 nt, Artificial Sequence
  Description of Artificial Sequence: Synthetic oligonucleotide
  Sense strand starting at position 3470 of SEQ ID NO: 1244640
uuaguauaaccuuggucuu

SEQ ID NO: 1504061 - RNA, 19 nt, Artificial Sequence
  Description of Artificial Sequence: Synthetic oligonucleotide
  Antisense strand to SEQ ID NO: 1504060
aagaccaagguuauacuaa

SEQ ID NO: 1504062 - RNA, 19 nt, Artificial Sequence
  Description of Artificial Sequence: Synthetic oligonucleotide
  Sense strand starting at position 3514 of SEQ ID NO: 1244640
ucuugccucacguguagaa

SEQ ID NO: 1504063 - RNA, 19 nt, Artificial Sequence
  Description of Artificial Sequence: Synthetic oligonucleotide
  Antisense strand to SEQ ID NO: 1504062
uucuacacgugaggcaaga

SEQ ID NO: 1504064 - RNA, 19 nt, Artificial Sequence
  Description of Artificial Sequence: Synthetic oligonucleotide
  Sense strand starting at position 3956 of SEQ ID NO: 1244640
uuaaguguacaauggagua

SEQ ID NO: 1504065 - RNA, 19 nt, Artificial Sequence
  Description of Artificial Sequence: Synthetic oligonucleotide
  Antisense strand to SEQ ID NO: 1504064
uacuccauuguacacuuaa

SEQ ID NO: 1504066 - RNA, 19 nt, Artificial Sequence
  Description of Artificial Sequence: Synthetic oligonucleotide
  Sense strand starting at position 22 of SEQ ID NO: 1244641
ccucucauuugucuucgua

SEQ ID NO: 1504067 - RNA, 19 nt, Artificial Sequence
  Description of Artificial Sequence: Synthetic oligonucleotide
  Antisense strand to SEQ ID NO: 1504066
uacgaagacaaaugagagg

SEQ ID NO: 1504068 - RNA, 19 nt, Artificial Sequence
  Description of Artificial Sequence: Synthetic oligonucleotide
  Sense strand starting at position 24 of SEQ ID NO: 1244641
ucucauuugucuucguaau

SEQ ID NO: 1504069 - RNA, 19 nt, Artificial Sequence
  Description of Artificial Sequence: Synthetic oligonucleotide
  Antisense strand to SEQ ID NO: 1504068
auuacgaagacaaaugaga

SEQ ID NO: 1504070 - RNA, 19 nt, Artificial Sequence
  Description of Artificial Sequence: Synthetic oligonucleotide
  Sense strand starting at position 25 of SEQ ID NO: 1244641
cucauuugucuucguaauu

SEQ ID NO: 1504071 - RNA, 19 nt, Artificial Sequence
  Description of Artificial Sequence: Synthetic oligonucleotide
  Antisense strand to SEQ ID NO: 1504070
aauuacgaagacaaaugag

SEQ ID NO: 1504072 - RNA, 19 nt, Artificial Sequence
  Description of Artificial Sequence: Synthetic oligonucleotide
  Sense strand starting at position 30 of SEQ ID NO: 1244641
uugucuucguaauuucuaa

SEQ ID NO: 1504073 - RNA, 19 nt, Artificial Sequence
  Description of Artificial Sequence: Synthetic oligonucleotide
  Antisense strand to SEQ ID NO: 1504072
uuagaaauuacgaagacaa

SEQ ID NO: 1504074 - RNA, 19 nt, Artificial Sequence
  Description of Artificial Sequence: Synthetic oligonucleotide
  Sense strand starting at position 151 of SEQ ID NO: 1244641
gaagaaaggguccacguau

SEQ ID NO: 1504075 - RNA, 19 nt, Artificial Sequence
  Description of Artificial Sequence: Synthetic oligonucleotide
  Antisense strand to SEQ ID NO: 1504074
auacguggacccuuucuuc

SEQ ID NO: 1504076 - RNA, 19 nt, Artificial Sequence
  Description of Artificial Sequence: Synthetic oligonucleotide
  Sense strand starting at position 164 of SEQ ID NO: 1244641
acguauucuuccgucagac

SEQ ID NO: 1504077 - RNA, 19 nt, Artificial Sequence
  Description of Artificial Sequence: Synthetic oligonucleotide
  Antisense strand to SEQ ID NO: 1504076
gucugacggaagaauacgu

SEQ ID NO: 1504078 - RNA, 19 nt, Artificial Sequence
  Description of Artificial Sequence: Synthetic oligonucleotide
  Sense strand starting at position 166 of SEQ ID NO: 1244641
guauucuuccgucagacua

SEQ ID NO: 1504079 - RNA, 19 nt, Artificial Sequence
  Description of Artificial Sequence: Synthetic oligonucleotide
  Antisense strand to SEQ ID NO: 1504078
uagucugacggaagaauac

SEQ ID NO: 1504080 - RNA, 19 nt, Artificial Sequence
  Description of Artificial Sequence: Synthetic oligonucleotide
  Sense strand starting at position 238 of SEQ ID NO: 1244641
gcaguaguguugucuccuu

SEQ ID NO: 1504081 - RNA, 19 nt, Artificial Sequence
  Description of Artificial Sequence: Synthetic oligonucleotide
  Antisense strand to SEQ ID NO: 1504080
aaggagacaacacuacugc

SEQ ID NO: 1504082 - RNA, 19 nt, Artificial Sequence
  Description of Artificial Sequence: Synthetic oligonucleotide
  Sense strand starting at position 253 of SEQ ID NO: 1244641
ccuuucugccucugagaau

SEQ ID NO: 1504083 - RNA, 19 nt, Artificial Sequence
  Description of Artificial Sequence: Synthetic oligonucleotide
  Antisense strand to SEQ ID NO: 1504082
auucucagaggcagaaagg

SEQ ID NO: 1504084 - RNA, 19 nt, Artificial Sequence
  Description of Artificial Sequence: Synthetic oligonucleotide
  Sense strand starting at position 254 of SEQ ID NO: 1244641
cuuucugccucugagaaug

SEQ ID NO: 1504085 - RNA, 19 nt, Artificial Sequence
  Description of Artificial Sequence: Synthetic oligonucleotide
  Antisense strand to SEQ ID NO: 1504084
cauucucagaggcagaaag

SEQ ID NO: 1504086 - RNA, 19 nt, Artificial Sequence
  Description of Artificial Sequence: Synthetic oligonucleotide
  Sense strand starting at position 256 of SEQ ID NO: 1244641
uucugccucugagaaugaa

SEQ ID NO: 1504087 - RNA, 19 nt, Artificial Sequence
  Description of Artificial Sequence: Synthetic oligonucleotide
  Antisense strand to SEQ ID NO: 1504086
uucauucucagaggcagaa

SEQ ID NO: 1504088 - RNA, 19 nt, Artificial Sequence
  Description of Artificial Sequence: Synthetic oligonucleotide
  Sense strand starting at position 271 of SEQ ID NO: 1244641
ugaagauccuguguucuuu

SEQ ID NO: 1504089 - RNA, 19 nt, Artificial Sequence
  Description of Artificial Sequence: Synthetic oligonucleotide
  Antisense strand to SEQ ID NO: 1504088
aaagaacacaggaucuuca

SEQ ID NO: 1504090 - RNA, 19 nt, Artificial Sequence
  Description of Artificial Sequence: Synthetic oligonucleotide
  Sense strand starting at position 701 of SEQ ID NO: 1244641
gcuuccaauccuggagaag

SEQ ID NO: 1504091 - RNA, 19 nt, Artificial Sequence
  Description of Artificial Sequence: Synthetic oligonucleotide
  Antisense strand to SEQ ID NO: 1504090
cuucuccaggauuggaagc

SEQ ID NO: 1504092 - RNA, 19 nt, Artificial Sequence
  Description of Artificial Sequence: Synthetic oligonucleotide
  Sense strand starting at position 736 of SEQ ID NO: 1244641
ugacccuucucugggagaa

SEQ ID NO: 1504093 - RNA, 19 nt, Artificial Sequence
  Description of Artificial Sequence: Synthetic oligonucleotide
  Antisense strand to SEQ ID NO: 1504092
uucucccagagaaggguca

SEQ ID NO: 1504094 - RNA, 19 nt, Artificial Sequence
  Description of Artificial Sequence: Synthetic oligonucleotide
  Sense strand starting at position 738 of SEQ ID NO: 1244641
acccuucucugggagaaag

SEQ ID NO: 1504095 - RNA, 19 nt, Artificial Sequence
  Description of Artificial Sequence: Synthetic oligonucleotide
  Antisense strand to SEQ ID NO: 1504094
cuuucucccagagaagggu

SEQ ID NO: 1504096 - RNA, 19 nt, Artificial Sequence
  Description of Artificial Sequence: Synthetic oligonucleotide
  Sense strand starting at position 805 of SEQ ID NO: 1244641
gaagaaagggcgcacaauu

SEQ ID NO: 1504097 - RNA, 19 nt, Artificial Sequence
  Description of Artificial Sequence: Synthetic oligonucleotide
  Antisense strand to SEQ ID NO: 1504096
aauugugcgcccuuucuuc

SEQ ID NO: 1504098 - RNA, 19 nt, Artificial Sequence
  Description of Artificial Sequence: Synthetic oligonucleotide
  Sense strand starting at position 909 of SEQ ID NO: 1244641
cagggcugcugagaagaaa

SEQ ID NO: 1504099 - RNA, 19 nt, Artificial Sequence
  Description of Artificial Sequence: Synthetic oligonucleotide
  Antisense strand to SEQ ID NO: 1504098
uuucuucucagcagcccug

SEQ ID NO: 1504100 - RNA, 19 nt, Artificial Sequence
  Description of Artificial Sequence: Synthetic oligonucleotide
  Sense strand starting at position 926 of SEQ ID NO: 1244641
aagagaucacaccgagagu

SEQ ID NO: 1504101 - RNA, 19 nt, Artificial Sequence
  Description of Artificial Sequence: Synthetic oligonucleotide
  Antisense strand to SEQ ID NO: 1504100
acucucggugugaucucuu

SEQ ID NO: 1504102 - RNA, 19 nt, Artificial Sequence
  Description of Artificial Sequence: Synthetic oligonucleotide
  Sense strand starting at position 1317 of SEQ ID NO: 1244641
guggcuaguuucucuccaa

SEQ ID NO: 1504103 - RNA, 19 nt, Artificial Sequence
  Description of Artificial Sequence: Synthetic oligonucleotide
  Antisense strand to SEQ ID NO: 1504102
uuggagagaaacuagccac

SEQ ID NO: 1504104 - RNA, 19 nt, Artificial Sequence
  Description of Artificial Sequence: Synthetic oligonucleotide
  Sense strand starting at position 1318 of SEQ ID NO: 1244641
uggcuaguuucucuccaaa

SEQ ID NO: 1504105 - RNA, 19 nt, Artificial Sequence
  Description of Artificial Sequence: Synthetic oligonucleotide
  Antisense strand to SEQ ID NO: 1504104
uuuggagagaaacuagcca

SEQ ID NO: 1504106 - RNA, 19 nt, Artificial Sequence
  Description of Artificial Sequence: Synthetic oligonucleotide
  Sense strand starting at position 2553 of SEQ ID NO: 1244641
cacuucuugccggaaggga

SEQ ID NO: 1504107 - RNA, 19 nt, Artificial Sequence
  Description of Artificial Sequence: Synthetic oligonucleotide
  Antisense strand to SEQ ID NO: 1504106
ucccuuccggcaagaagug

SEQ ID NO: 1504108 - RNA, 19 nt, Artificial Sequence
  Description of Artificial Sequence: Synthetic oligonucleotide
  Sense strand starting at position 2641 of SEQ ID NO: 1244641
augugauguguuggcuaca

SEQ ID NO: 1504109 - RNA, 19 nt, Artificial Sequence
  Description of Artificial Sequence: Synthetic oligonucleotide
  Antisense strand to SEQ ID NO: 1504108
uguagccaacacaucacau

SEQ ID NO: 1504110 - RNA, 19 nt, Artificial Sequence
  Description of Artificial Sequence: Synthetic oligonucleotide
  Sense strand starting at position 2642 of SEQ ID NO: 1244641
ugugauguguuggcuacaa

SEQ ID NO: 1504111 - RNA, 19 nt, Artificial Sequence
  Description of Artificial Sequence: Synthetic oligonucleotide
  Antisense strand to SEQ ID NO: 1504110
uuguagccaacacaucaca

SEQ ID NO: 1504112 - RNA, 19 nt, Artificial Sequence
  Description of Artificial Sequence: Synthetic oligonucleotide
  Sense strand starting at position 2644 of SEQ ID NO: 1244641
ugauguguuggcuacaacu

SEQ ID NO: 1504113 - RNA, 19 nt, Artificial Sequence
  Description of Artificial Sequence: Synthetic oligonucleotide
  Antisense strand to SEQ ID NO: 1504112
aguuguagccaacacauca

SEQ ID NO: 1504114 - RNA, 19 nt, Artificial Sequence
  Description of Artificial Sequence: Synthetic oligonucleotide
  Sense strand starting at position 2747 of SEQ ID NO: 1244641
gggcuugcacuuuauucua

SEQ ID NO: 1504115 - RNA, 19 nt, Artificial Sequence
  Description of Artificial Sequence: Synthetic oligonucleotide
  Antisense strand to SEQ ID NO: 1504114
uagaauaaagugcaagccc

SEQ ID NO: 1504116 - RNA, 19 nt, Artificial Sequence
  Description of Artificial Sequence: Synthetic oligonucleotide
  Sense strand starting at position 2854 of SEQ ID NO: 1244641
gggcucaggugugcauuua

SEQ ID NO: 1504117 - RNA, 19 nt, Artificial Sequence
  Description of Artificial Sequence: Synthetic oligonucleotide
  Antisense strand to SEQ ID NO: 1504116
uaaaugcacaccugagccc

SEQ ID NO: 1504118 - RNA, 19 nt, Artificial Sequence
  Description of Artificial Sequence: Synthetic oligonucleotide
  Sense strand starting at position 3257 of SEQ ID NO: 1244641
gcgcucucagaucaucuau

SEQ ID NO: 1504119 - RNA, 19 nt, Artificial Sequence
  Description of Artificial Sequence: Synthetic oligonucleotide
  Antisense strand to SEQ ID NO: 1504118
auagaugaucugagagcgc

SEQ ID NO: 1504120 - RNA, 19 nt, Artificial Sequence
  Description of Artificial Sequence: Synthetic oligonucleotide
  Sense strand starting at position 3352 of SEQ ID NO: 1244641
aggaaagugcuuugcucaa

SEQ ID NO: 1504121 - RNA, 19 nt, Artificial Sequence
  Description of Artificial Sequence: Synthetic oligonucleotide
  Antisense strand to SEQ ID NO: 1504120
uugagcaaagcacuuuccu

SEQ ID NO: 1504122 - RNA, 19 nt, Artificial Sequence
  Description of Artificial Sequence: Synthetic oligonucleotide
  Sense strand starting at position 3354 of SEQ ID NO: 1244641
gaaagugcuuugcucaaga

SEQ ID NO: 1504123 - RNA, 19 nt, Artificial Sequence
  Description of Artificial Sequence: Synthetic oligonucleotide
  Antisense strand to SEQ ID NO: 1504122
ucuugagcaaagcacuuuc

SEQ ID NO: 1504124 - RNA, 19 nt, Artificial Sequence
  Description of Artificial Sequence: Synthetic oligonucleotide
  Sense strand starting at position 3717 of SEQ ID NO: 1244641
ggucuagagucagaggaga

SEQ ID NO: 1504125 - RNA, 19 nt, Artificial Sequence
  Description of Artificial Sequence: Synthetic oligonucleotide
  Antisense strand to SEQ ID NO: 1504124
ucuccucugacucuagacc

SEQ ID NO: 1504126 - RNA, 19 nt, Artificial Sequence
  Description of Artificial Sequence: Synthetic oligonucleotide
  Sense strand starting at position 3735 of SEQ ID NO: 1244641
agguguggagucuauagga

SEQ ID NO: 1504127 - RNA, 19 nt, Artificial Sequence
  Description of Artificial Sequence: Synthetic oligonucleotide
  Antisense strand to SEQ ID NO: 1504126
uccuauagacuccacaccu

SEQ ID NO: 1504128 - RNA, 19 nt, Artificial Sequence
  Description of Artificial Sequence: Synthetic oligonucleotide
  Sense strand starting at position 3798 of SEQ ID NO: 1244641
cgggaaguggccuguugaa

SEQ ID NO: 1504129 - RNA, 19 nt, Artificial Sequence
  Description of Artificial Sequence: Synthetic oligonucleotide
  Antisense strand to SEQ ID NO: 1504128
uucaacaggccacuucccg

SEQ ID NO: 1504130 - RNA, 19 nt, Artificial Sequence
  Description of Artificial Sequence: Synthetic oligonucleotide
  Sense strand starting at position 3808 of SEQ ID NO: 1244641
ccuguugaaccaggacaau

SEQ ID NO: 1504131 - RNA, 19 nt, Artificial Sequence
  Description of Artificial Sequence: Synthetic oligonucleotide
  Antisense strand to SEQ ID NO: 1504130
auuguccugguucaacagg

SEQ ID NO: 1504132 - RNA, 19 nt, Artificial Sequence
  Description of Artificial Sequence: Synthetic oligonucleotide
  Sense strand starting at position 3817 of SEQ ID NO: 1244641
ccaggacaaucuugugacu

SEQ ID NO: 1504133 - RNA, 19 nt, Artificial Sequence
  Description of Artificial Sequence: Synthetic oligonucleotide
  Antisense strand to SEQ ID NO: 1504132
agucacaagauuguccugg

SEQ ID NO: 1504134 - RNA, 19 nt, Artificial Sequence
  Description of Artificial Sequence: Synthetic oligonucleotide
  Sense strand starting at position 3819 of SEQ ID NO: 1244641
aggacaaucuugugacuau

SEQ ID NO: 1504135 - RNA, 19 nt, Artificial Sequence
  Description of Artificial Sequence: Synthetic oligonucleotide
  Antisense strand to SEQ ID NO: 1504134
auagucacaagauuguccu

SEQ ID NO: 1504136 - RNA, 19 nt, Artificial Sequence
  Description of Artificial Sequence: Synthetic oligonucleotide
  Sense strand starting at position 3820 of SEQ ID NO: 1244641
ggacaaucuugugacuaug

SEQ ID NO: 1504137 - RNA, 19 nt, Artificial Sequence
  Description of Artificial Sequence: Synthetic oligonucleotide
  Antisense strand to SEQ ID NO: 1504136
cauagucacaagauugucc

SEQ ID NO: 1504138 - RNA, 19 nt, Artificial Sequence
  Description of Artificial Sequence: Synthetic oligonucleotide
  Sense strand starting at position 3823 of SEQ ID NO: 1244641
caaucuugugacuaugagu

SEQ ID NO: 1504139 - RNA, 19 nt, Artificial Sequence
  Description of Artificial Sequence: Synthetic oligonucleotide
  Antisense strand to SEQ ID NO: 1504138
acucauagucacaagauug

SEQ ID NO: 1504140 - RNA, 19 nt, Artificial Sequence
  Description of Artificial Sequence: Synthetic oligonucleotide
  Sense strand starting at position 3832 of SEQ ID NO: 1244641
gacuaugagugaggacaga

SEQ ID NO: 1504141 - RNA, 19 nt, Artificial Sequence
  Description of Artificial Sequence: Synthetic oligonucleotide
  Antisense strand to SEQ ID NO: 1504140
ucuguccucacucauaguc

SEQ ID NO: 1504142 - RNA, 19 nt, Artificial Sequence
  Description of Artificial Sequence: Synthetic oligonucleotide
  Sense strand starting at position 3905 of SEQ ID NO: 1244641
gucucugggugucuucaga

SEQ ID NO: 1504143 - RNA, 19 nt, Artificial Sequence
  Description of Artificial Sequence: Synthetic oligonucleotide
  Antisense strand to SEQ ID NO: 1504142
ucugaagacacccagagac

SEQ ID NO: 1504144 - RNA, 19 nt, Artificial Sequence
  Description of Artificial Sequence: Synthetic oligonucleotide
  Sense strand starting at position 3940 of SEQ ID NO: 1244641
gaggcuagauuguggaaau

SEQ ID NO: 1504145 - RNA, 19 nt, Artificial Sequence
  Description of Artificial Sequence: Synthetic oligonucleotide
  Antisense strand to SEQ ID NO: 1504144
auuuccacaaucuagccuc

SEQ ID NO: 1504146 - RNA, 19 nt, Artificial Sequence
  Description of Artificial Sequence: Synthetic oligonucleotide
  Sense strand starting at position 82 of SEQ ID NO: 1244642
uuaauaaacugagaagacu

SEQ ID NO: 1504147 - RNA, 19 nt, Artificial Sequence
  Description of Artificial Sequence: Synthetic oligonucleotide
  Antisense strand to SEQ ID NO: 1504146
agucuucucaguuuauuaa

SEQ ID NO: 1504148 - RNA, 19 nt, Artificial Sequence
  Description of Artificial Sequence: Synthetic oligonucleotide
  Sense strand starting at position 131 of SEQ ID NO: 1244642
ugcagaguugacuguagau

SEQ ID NO: 1504149 - RNA, 19 nt, Artificial Sequence
  Description of Artificial Sequence: Synthetic oligonucleotide
  Antisense strand to SEQ ID NO: 1504148
aucuacagucaacucugca

SEQ ID NO: 1504150 - RNA, 19 nt, Artificial Sequence
  Description of Artificial Sequence: Synthetic oligonucleotide
  Sense strand starting at position 177 of SEQ ID NO: 1244642
gccugcuauaaauggagua

SEQ ID NO: 1504151 - RNA, 19 nt, Artificial Sequence
  Description of Artificial Sequence: Synthetic oligonucleotide
  Antisense strand to SEQ ID NO: 1504150
uacuccauuuauagcaggc

SEQ ID NO: 1504152 - RNA, 19 nt, Artificial Sequence
  Description of Artificial Sequence: Synthetic oligonucleotide
  Sense strand starting at position 232 of SEQ ID NO: 1244642
cauugauaucuggguuaaa

SEQ ID NO: 1504153 - RNA, 19 nt, Artificial Sequence
  Description of Artificial Sequence: Synthetic oligonucleotide
  Antisense strand to SEQ ID NO: 1504152
uuuaacccagauaucaaug

SEQ ID NO: 1504154 - RNA, 19 nt, Artificial Sequence
  Description of Artificial Sequence: Synthetic oligonucleotide
  Sense strand starting at position 233 of SEQ ID NO: 1244642
auugauaucuggguuaaau

SEQ ID NO: 1504155 - RNA, 19 nt, Artificial Sequence
  Description of Artificial Sequence: Synthetic oligonucleotide
  Antisense strand to SEQ ID NO: 1504154
auuuaacccagauaucaau

SEQ ID NO: 1504156 - RNA, 19 nt, Artificial Sequence
  Description of Artificial Sequence: Synthetic oligonucleotide
  Sense strand starting at position 394 of SEQ ID NO: 1244642
uggagcuaaccaugaaaug

SEQ ID NO: 1504157 - RNA, 19 nt, Artificial Sequence
  Description of Artificial Sequence: Synthetic oligonucleotide
  Antisense strand to SEQ ID NO: 1504156
cauuucaugguuagcucca

SEQ ID NO: 1504158 - RNA, 19 nt, Artificial Sequence
  Description of Artificial Sequence: Synthetic oligonucleotide
  Sense strand starting at position 591 of SEQ ID NO: 1244642
gccuuucuccucugaaagg

SEQ ID NO: 1504159 - RNA, 19 nt, Artificial Sequence
  Description of Artificial Sequence: Synthetic oligonucleotide
  Antisense strand to SEQ ID NO: 1504158
ccuuucagaggagaaaggc

SEQ ID NO: 1504160 - RNA, 19 nt, Artificial Sequence
  Description of Artificial Sequence: Synthetic oligonucleotide
  Sense strand starting at position 692 of SEQ ID NO: 1244642
ggccaagacuaucucugaa

SEQ ID NO: 1504161 - RNA, 19 nt, Artificial Sequence
  Description of Artificial Sequence: Synthetic oligonucleotide
  Antisense strand to SEQ ID NO: 1504160
uucagagauagucuuggcc

SEQ ID NO: 1504162 - RNA, 19 nt, Artificial Sequence
  Description of Artificial Sequence: Synthetic oligonucleotide
  Sense strand starting at position 729 of SEQ ID NO: 1244642
aucucauguuaaguuacaa

SEQ ID NO: 1504163 - RNA, 19 nt, Artificial Sequence
  Description of Artificial Sequence: Synthetic oligonucleotide
  Antisense strand to SEQ ID NO: 1504162
uuguaacuuaacaugagau

SEQ ID NO: 1504164 - RNA, 19 nt, Artificial Sequence
  Description of Artificial Sequence: Synthetic oligonucleotide
  Sense strand starting at position 755 of SEQ ID NO: 1244642
agauucggcucucugagaa

SEQ ID NO: 1504165 - RNA, 19 nt, Artificial Sequence
  Description of Artificial Sequence: Synthetic oligonucleotide
  Antisense strand to SEQ ID NO: 1504164
uucucagagagccgaaucu

SEQ ID NO: 1504166 - RNA, 19 nt, Artificial Sequence
  Description of Artificial Sequence: Synthetic oligonucleotide
  Sense strand starting at position 824 of SEQ ID NO: 1244642
guacuaaauucuguuucua

SEQ ID NO: 1504167 - RNA, 19 nt, Artificial Sequence
  Description of Artificial Sequence: Synthetic oligonucleotide
  Antisense strand to SEQ ID NO: 1504166
uagaaacagaauuuaguac

SEQ ID NO: 1504168 - RNA, 19 nt, Artificial Sequence
  Description of Artificial Sequence: Synthetic oligonucleotide
  Sense strand starting at position 879 of SEQ ID NO: 1244642
aggaaaccaucagagaacu

SEQ ID NO: 1504169 - RNA, 19 nt, Artificial Sequence
  Description of Artificial Sequence: Synthetic oligonucleotide
  Antisense strand to SEQ ID NO: 1504168
aguucucugaugguuuccu

SEQ ID NO: 1504170 - RNA, 19 nt, Artificial Sequence
  Description of Artificial Sequence: Synthetic oligonucleotide
  Sense strand starting at position 981 of SEQ ID NO: 1244642
agcuaagguccugauaugu

SEQ ID NO: 1504171 - RNA, 19 nt, Artificial Sequence
  Description of Artificial Sequence: Synthetic oligonucleotide
  Antisense strand to SEQ ID NO: 1504170
acauaucaggaccuuagcu

SEQ ID NO: 1504172 - RNA, 19 nt, Artificial Sequence
  Description of Artificial Sequence: Synthetic oligonucleotide
  Sense strand starting at position 994 of SEQ ID NO: 1244642
auauguuguuagguaacuu

SEQ ID NO: 1504173 - RNA, 19 nt, Artificial Sequence
  Description of Artificial Sequence: Synthetic oligonucleotide
  Antisense strand to SEQ ID NO: 1504172
aaguuaccuaacaacauau

SEQ ID NO: 1504174 - RNA, 19 nt, Artificial Sequence
  Description of Artificial Sequence: Synthetic oligonucleotide
  Sense strand starting at position 1002 of SEQ ID NO: 1244642
uuagguaacuuguucuuua

SEQ ID NO: 1504175 - RNA, 19 nt, Artificial Sequence
  Description of Artificial Sequence: Synthetic oligonucleotide
  Antisense strand to SEQ ID NO: 1504174
uaaagaacaaguuaccuaa

SEQ ID NO: 1504176 - RNA, 19 nt, Artificial Sequence
  Description of Artificial Sequence: Synthetic oligonucleotide
  Sense strand starting at position 1030 of SEQ ID NO: 1244642
aggaaucuguuuccauuau

SEQ ID NO: 1504177 - RNA, 19 nt, Artificial Sequence
  Description of Artificial Sequence: Synthetic oligonucleotide
  Antisense strand to SEQ ID NO: 1504176
auaauggaaacagauuccu

SEQ ID NO: 1504178 - RNA, 19 nt, Artificial Sequence
  Description of Artificial Sequence: Synthetic oligonucleotide
  Sense strand starting at position 1079 of SEQ ID NO: 1244642
gaacaucaccguuaggcuu

SEQ ID NO: 1504179 - RNA, 19 nt, Artificial Sequence
  Description of Artificial Sequence: Synthetic oligonucleotide
  Antisense strand to SEQ ID NO: 1504178
aagccuaacggugauguuc

SEQ ID NO: 1504180 - RNA, 19 nt, Artificial Sequence
  Description of Artificial Sequence: Synthetic oligonucleotide
  Sense strand starting at position 1176 of SEQ ID NO: 1244642
cgaauuagguucucucacu

SEQ ID NO: 1504181 - RNA, 19 nt, Artificial Sequence
  Description of Artificial Sequence: Synthetic oligonucleotide
  Antisense strand to SEQ ID NO: 1504180
agugagagaaccuaauucg

SEQ ID NO: 1504182 - RNA, 19 nt, Artificial Sequence
  Description of Artificial Sequence: Synthetic oligonucleotide
  Sense strand starting at position 1188 of SEQ ID NO: 1244642
ucucacuuugggcaucaga

SEQ ID NO: 1504183 - RNA, 19 nt, Artificial Sequence
  Description of Artificial Sequence: Synthetic oligonucleotide
  Antisense strand to SEQ ID NO: 1504182
ucugaugcccaaagugaga

SEQ ID NO: 1504184 - RNA, 19 nt, Artificial Sequence
  Description of Artificial Sequence: Synthetic oligonucleotide
  Sense strand starting at position 1227 of SEQ ID NO: 1244642
ccaagauguguuuagggca

SEQ ID NO: 1504185 - RNA, 19 nt, Artificial Sequence
  Description of Artificial Sequence: Synthetic oligonucleotide
  Antisense strand to SEQ ID NO: 1504184
ugcccuaaacacaucuugg

SEQ ID NO: 1504186 - RNA, 19 nt, Artificial Sequence
  Description of Artificial Sequence: Synthetic oligonucleotide
  Sense strand starting at position 1423 of SEQ ID NO: 1244642
caguaaguuuaggcaaauu

SEQ ID NO: 1504187 - RNA, 19 nt, Artificial Sequence
  Description of Artificial Sequence: Synthetic oligonucleotide
  Antisense strand to SEQ ID NO: 1504186
aauuugccuaaacuuacug

SEQ ID NO: 1504188 - RNA, 19 nt, Artificial Sequence
  Description of Artificial Sequence: Synthetic oligonucleotide
  Sense strand starting at position 1960 of SEQ ID NO: 1244642
gcugaauucccagcgcuuu

SEQ ID NO: 1504189 - RNA, 19 nt, Artificial Sequence
  Description of Artificial Sequence: Synthetic oligonucleotide
  Antisense strand to SEQ ID NO: 1504188
aaagcgcugggaauucagc

SEQ ID NO: 1504190 - RNA, 19 nt, Artificial Sequence
  Description of Artificial Sequence: Synthetic oligonucleotide
  Sense strand starting at position 2274 of SEQ ID NO: 1244642
guuucuucucuugaucuga

SEQ ID NO: 1504191 - RNA, 19 nt, Artificial Sequence
  Description of Artificial Sequence: Synthetic oligonucleotide
  Antisense strand to SEQ ID NO: 1504190
ucagaucaagagaagaaac

SEQ ID NO: 1504192 - RNA, 19 nt, Artificial Sequence
  Description of Artificial Sequence: Synthetic oligonucleotide
  Sense strand starting at position 2291 of SEQ ID NO: 1244642
gauuucuagcucugugcua

SEQ ID NO: 1504193 - RNA, 19 nt, Artificial Sequence
  Description of Artificial Sequence: Synthetic oligonucleotide
  Antisense strand to SEQ ID NO: 1504192
uagcacagagcuagaaauc

SEQ ID NO: 1504194 - RNA, 19 nt, Artificial Sequence
  Description of Artificial Sequence: Synthetic oligonucleotide
  Sense strand starting at position 2292 of SEQ ID NO: 1244642
auuucuagcucugugcuau

SEQ ID NO: 1504195 - RNA, 19 nt, Artificial Sequence
  Description of Artificial Sequence: Synthetic oligonucleotide
  Antisense strand to SEQ ID NO: 1504194
auagcacagagcuagaaau

SEQ ID NO: 1504196 - RNA, 19 nt, Artificial Sequence
  Description of Artificial Sequence: Synthetic oligonucleotide
  Sense strand starting at position 2360 of SEQ ID NO: 1244642
uggagauguuaauuacuga

SEQ ID NO: 1504197 - RNA, 19 nt, Artificial Sequence
  Description of Artificial Sequence: Synthetic oligonucleotide
  Antisense strand to SEQ ID NO: 1504196
ucaguaauuaacaucucca

SEQ ID NO: 1504198 - RNA, 19 nt, Artificial Sequence
  Description of Artificial Sequence: Synthetic oligonucleotide
  Sense strand starting at position 2543 of SEQ ID NO: 1244642
cacuguucuuggcuaagau

SEQ ID NO: 1504199 - RNA, 19 nt, Artificial Sequence
  Description of Artificial Sequence: Synthetic oligonucleotide
  Antisense strand to SEQ ID NO: 1504198
aucuuagccaagaacagug

SEQ ID NO: 1504200 - RNA, 19 nt, Artificial Sequence
  Description of Artificial Sequence: Synthetic oligonucleotide
  Sense strand starting at position 2544 of SEQ ID NO: 1244642
acuguucuuggcuaagaug

SEQ ID NO: 1504201 - RNA, 19 nt, Artificial Sequence
  Description of Artificial Sequence: Synthetic oligonucleotide
  Antisense strand to SEQ ID NO: 1504200
caucuuagccaagaacagu

SEQ ID NO: 1504202 - RNA, 19 nt, Artificial Sequence
  Description of Artificial Sequence: Synthetic oligonucleotide
  Sense strand starting at position 2619 of SEQ ID NO: 1244642
gaagaaggucuuuggguuu

SEQ ID NO: 1504203 - RNA, 19 nt, Artificial Sequence
  Description of Artificial Sequence: Synthetic oligonucleotide
  Antisense strand to SEQ ID NO: 1504202
aaacccaaagaccuucuuc

SEQ ID NO: 1504204 - RNA, 19 nt, Artificial Sequence
  Description of Artificial Sequence: Synthetic oligonucleotide
  Sense strand starting at position 2669 of SEQ ID NO: 1244642
cgaccauggcuguaguaaa

SEQ ID NO: 1504205 - RNA, 19 nt, Artificial Sequence
  Description of Artificial Sequence: Synthetic oligonucleotide
  Antisense strand to SEQ ID NO: 1504204
uuuacuacagccauggucg

SEQ ID NO: 1504206 - RNA, 19 nt, Artificial Sequence
  Description of Artificial Sequence: Synthetic oligonucleotide
  Sense strand starting at position 2826 of SEQ ID NO: 1244642
aagcuuguaguuucguuua

SEQ ID NO: 1504207 - RNA, 19 nt, Artificial Sequence
  Description of Artificial Sequence: Synthetic oligonucleotide
  Antisense strand to SEQ ID NO: 1504206
uaaacgaaacuacaagcuu

SEQ ID NO: 1504208 - RNA, 19 nt, Artificial Sequence
  Description of Artificial Sequence: Synthetic oligonucleotide
  Sense strand starting at position 2829 of SEQ ID NO: 1244642
cuuguaguuucguuuauuu

SEQ ID NO: 1504209 - RNA, 19 nt, Artificial Sequence
  Description of Artificial Sequence: Synthetic oligonucleotide
  Antisense strand to SEQ ID NO: 1504208
aaauaaacgaaacuacaag

SEQ ID NO: 1504210 - RNA, 19 nt, Artificial Sequence
  Description of Artificial Sequence: Synthetic oligonucleotide
  Sense strand starting at position 2831 of SEQ ID NO: 1244642
uguaguuucguuuauuugu

SEQ ID NO: 1504211 - RNA, 19 nt, Artificial Sequence
  Description of Artificial Sequence: Synthetic oligonucleotide
  Antisense strand to SEQ ID NO: 1504210
acaaauaaacgaaacuaca

SEQ ID NO: 1504212 - RNA, 19 nt, Artificial Sequence
  Description of Artificial Sequence: Synthetic oligonucleotide
  Sense strand starting at position 3056 of SEQ ID NO: 1244642
ucagauucucauuauuguu

SEQ ID NO: 1504213 - RNA, 19 nt, Artificial Sequence
  Description of Artificial Sequence: Synthetic oligonucleotide
  Antisense strand to SEQ ID NO: 1504212
aacaauaaugagaaucuga

SEQ ID NO: 1504214 - RNA, 19 nt, Artificial Sequence
  Description of Artificial Sequence: Synthetic oligonucleotide
  Sense strand starting at position 3134 of SEQ ID NO: 1244642
acuggccuccuagguaauu

SEQ ID NO: 1504215 - RNA, 19 nt, Artificial Sequence
  Description of Artificial Sequence: Synthetic oligonucleotide
  Antisense strand to SEQ ID NO: 1504214
aauuaccuaggaggccagu

SEQ ID NO: 1504216 - RNA, 19 nt, Artificial Sequence
  Description of Artificial Sequence: Synthetic oligonucleotide
  Sense strand starting at position 3253 of SEQ ID NO: 1244642
cgagcagcaauguaauauu

SEQ ID NO: 1504217 - RNA, 19 nt, Artificial Sequence
  Description of Artificial Sequence: Synthetic oligonucleotide
  Antisense strand to SEQ ID NO: 1504216
aauauuacauugcugcucg

SEQ ID NO: 1504218 - RNA, 19 nt, Artificial Sequence
  Description of Artificial Sequence: Synthetic oligonucleotide
  Sense strand starting at position 3311 of SEQ ID NO: 1244642
cucucaugucuacacagau

SEQ ID NO: 1504219 - RNA, 19 nt, Artificial Sequence
  Description of Artificial Sequence: Synthetic oligonucleotide
  Antisense strand to SEQ ID NO: 1504218
aucuguguagacaugagag

SEQ ID NO: 1504220 - RNA, 19 nt, Artificial Sequence
  Description of Artificial Sequence: Synthetic oligonucleotide
  Sense strand starting at position 3739 of SEQ ID NO: 1244642
cuagaaaugguuugggcau

SEQ ID NO: 1504221 - RNA, 19 nt, Artificial Sequence
  Description of Artificial Sequence: Synthetic oligonucleotide
  Antisense strand to SEQ ID NO: 1504220
augcccaaaccauuucuag

SEQ ID NO: 1504222 - RNA, 19 nt, Artificial Sequence
  Description of Artificial Sequence: Synthetic oligonucleotide
  Sense strand starting at position 3751 of SEQ ID NO: 1244642
ugggcauguauccaaguuu

SEQ ID NO: 1504223 - RNA, 19 nt, Artificial Sequence
  Description of Artificial Sequence: Synthetic oligonucleotide
  Antisense strand to SEQ ID NO: 1504222
aaacuuggauacaugccca

SEQ ID NO: 1504224 - RNA, 19 nt, Artificial Sequence
  Description of Artificial Sequence: Synthetic oligonucleotide
  Sense strand starting at position 3762 of SEQ ID NO: 1244642
ccaaguuucccaggauccu

SEQ ID NO: 1504225 - RNA, 19 nt, Artificial Sequence
  Description of Artificial Sequence: Synthetic oligonucleotide
  Antisense strand to SEQ ID NO: 1504224
aggauccugggaaacuugg

SEQ ID NO: 1504226 - RNA, 19 nt, Artificial Sequence
  Description of Artificial Sequence: Synthetic oligonucleotide
  Sense strand starting at position 66 of SEQ ID NO: 1244643
agguuaauggcuugccaaa

SEQ ID NO: 1504227 - RNA, 19 nt, Artificial Sequence
  Description of Artificial Sequence: Synthetic oligonucleotide
  Antisense strand to SEQ ID NO: 1504226
uuuggcaagccauuaaccu

SEQ ID NO: 1504228 - RNA, 19 nt, Artificial Sequence
  Description of Artificial Sequence: Synthetic oligonucleotide
  Sense strand starting at position 68 of SEQ ID NO: 1244643
guuaauggcuugccaaaua

SEQ ID NO: 1504229 - RNA, 19 nt, Artificial Sequence
  Description of Artificial Sequence: Synthetic oligonucleotide
  Antisense strand to SEQ ID NO: 1504228
uauuuggcaagccauuaac

SEQ ID NO: 1504230 - RNA, 19 nt, Artificial Sequence
  Description of Artificial Sequence: Synthetic oligonucleotide
  Sense strand starting at position 143 of SEQ ID NO: 1244643
aguuguaucuuuccaccaa

SEQ ID NO: 1504231 - RNA, 19 nt, Artificial Sequence
  Description of Artificial Sequence: Synthetic oligonucleotide
  Antisense strand to SEQ ID NO: 1504230
uugguggaaagauacaacu

SEQ ID NO: 1504232 - RNA, 19 nt, Artificial Sequence
  Description of Artificial Sequence: Synthetic oligonucleotide
  Sense strand starting at position 144 of SEQ ID NO: 1244643
guuguaucuuuccaccaau

SEQ ID NO: 1504233 - RNA, 19 nt, Artificial Sequence
  Description of Artificial Sequence: Synthetic oligonucleotide
  Antisense strand to SEQ ID NO: 1504232
auugguggaaagauacaac

SEQ ID NO: 1504234 - RNA, 19 nt, Artificial Sequence
  Description of Artificial Sequence: Synthetic oligonucleotide
  Sense strand starting at position 226 of SEQ ID NO: 1244643
acuugugagagcugcauga

SEQ ID NO: 1504235 - RNA, 19 nt, Artificial Sequence
  Description of Artificial Sequence: Synthetic oligonucleotide
  Antisense strand to SEQ ID NO: 1504234
ucaugcagcucucacaagu

SEQ ID NO: 1504236 - RNA, 19 nt, Artificial Sequence
  Description of Artificial Sequence: Synthetic oligonucleotide
  Sense strand starting at position 268 of SEQ ID NO: 1244643
cucuucuaagcuugagaag

SEQ ID NO: 1504237 - RNA, 19 nt, Artificial Sequence
  Description of Artificial Sequence: Synthetic oligonucleotide
  Antisense strand to SEQ ID NO: 1504236
cuucucaagcuuagaagag

SEQ ID NO: 1504238 - RNA, 19 nt, Artificial Sequence
  Description of Artificial Sequence: Synthetic oligonucleotide
  Sense strand starting at position 352 of SEQ ID NO: 1244643
aagugaguccuuggagguc

SEQ ID NO: 1504239 - RNA, 19 nt, Artificial Sequence
  Description of Artificial Sequence: Synthetic oligonucleotide
  Antisense strand to SEQ ID NO: 1504238
gaccuccaaggacucacuu

SEQ ID NO: 1504240 - RNA, 19 nt, Artificial Sequence
  Description of Artificial Sequence: Synthetic oligonucleotide
  Sense strand starting at position 570 of SEQ ID NO: 1244643
gcagaaugagaucaugucu

SEQ ID NO: 1504241 - RNA, 19 nt, Artificial Sequence
  Description of Artificial Sequence: Synthetic oligonucleotide
  Antisense strand to SEQ ID NO: 1504240
agacaugaucucauucugc

SEQ ID NO: 1504242 - RNA, 19 nt, Artificial Sequence
  Description of Artificial Sequence: Synthetic oligonucleotide
  Sense strand starting at position 776 of SEQ ID NO: 1244643
gagagaaggugucauagac

SEQ ID NO: 1504243 - RNA, 19 nt, Artificial Sequence
  Description of Artificial Sequence: Synthetic oligonucleotide
  Antisense strand to SEQ ID NO: 1504242
gucuaugacaccuucucuc

SEQ ID NO: 1504244 - RNA, 19 nt, Artificial Sequence
  Description of Artificial Sequence: Synthetic oligonucleotide
  Sense strand starting at position 892 of SEQ ID NO: 1244643
acggacuccuguccuguaa

SEQ ID NO: 1504245 - RNA, 19 nt, Artificial Sequence
  Description of Artificial Sequence: Synthetic oligonucleotide
  Antisense strand to SEQ ID NO: 1504244
uuacaggacaggaguccgu

SEQ ID NO: 1504246 - RNA, 19 nt, Artificial Sequence
  Description of Artificial Sequence: Synthetic oligonucleotide
  Sense strand starting at position 955 of SEQ ID NO: 1244643
cugugauccacugagcaag

SEQ ID NO: 1504247 - RNA, 19 nt, Artificial Sequence
  Description of Artificial Sequence: Synthetic oligonucleotide
  Antisense strand to SEQ ID NO: 1504246
cuugcucaguggaucacag

SEQ ID NO: 1504248 - RNA, 19 nt, Artificial Sequence
  Description of Artificial Sequence: Synthetic oligonucleotide
  Sense strand starting at position 2387 of SEQ ID NO: 1244643
ggcuguuucuuagcgaaac

SEQ ID NO: 1504249 - RNA, 19 nt, Artificial Sequence
  Description of Artificial Sequence: Synthetic oligonucleotide
  Antisense strand to SEQ ID NO: 1504248
guuucgcuaagaaacagcc

SEQ ID NO: 1504250 - RNA, 19 nt, Artificial Sequence
  Description of Artificial Sequence: Synthetic oligonucleotide
  Sense strand starting at position 2427 of SEQ ID NO: 1244643
gggaauugauguuccauuc

SEQ ID NO: 1504251 - RNA, 19 nt, Artificial Sequence
  Description of Artificial Sequence: Synthetic oligonucleotide
  Antisense strand to SEQ ID NO: 1504250
gaauggaacaucaauuccc

SEQ ID NO: 1504252 - RNA, 19 nt, Artificial Sequence
  Description of Artificial Sequence: Synthetic oligonucleotide
  Sense strand starting at position 2558 of SEQ ID NO: 1244643
augggaggauuucagaagu

SEQ ID NO: 1504253 - RNA, 19 nt, Artificial Sequence
  Description of Artificial Sequence: Synthetic oligonucleotide
  Antisense strand to SEQ ID NO: 1504252
acuucugaaauccucccau

SEQ ID NO: 1504254 - RNA, 19 nt, Artificial Sequence
  Description of Artificial Sequence: Synthetic oligonucleotide
  Sense strand starting at position 2569 of SEQ ID NO: 1244643
ucagaaguucuguggacac

SEQ ID NO: 1504255 - RNA, 19 nt, Artificial Sequence
  Description of Artificial Sequence: Synthetic oligonucleotide
  Antisense strand to SEQ ID NO: 1504254
guguccacagaacuucuga

SEQ ID NO: 1504256 - RNA, 19 nt, Artificial Sequence
  Description of Artificial Sequence: Synthetic oligonucleotide
  Sense strand starting at position 2612 of SEQ ID NO: 1244643
guuucaugccagugggcau

SEQ ID NO: 1504257 - RNA, 19 nt, Artificial Sequence
  Description of Artificial Sequence: Synthetic oligonucleotide
  Antisense strand to SEQ ID NO: 1504256
augcccacuggcaugaaac

SEQ ID NO: 1504258 - RNA, 19 nt, Artificial Sequence
  Description of Artificial Sequence: Synthetic oligonucleotide
  Sense strand starting at position 2647 of SEQ ID NO: 1244643
ucauauuucucucgagagu

SEQ ID NO: 1504259 - RNA, 19 nt, Artificial Sequence
  Description of Artificial Sequence: Synthetic oligonucleotide
  Antisense strand to SEQ ID NO: 1504258
acucucgagagaaauauga

SEQ ID NO: 1504260 - RNA, 19 nt, Artificial Sequence
  Description of Artificial Sequence: Synthetic oligonucleotide
  Sense strand starting at position 2763 of SEQ ID NO: 1244643
aguccaguggguugauauu

SEQ ID NO: 1504261 - RNA, 19 nt, Artificial Sequence
  Description of Artificial Sequence: Synthetic oligonucleotide
  Antisense strand to SEQ ID NO: 1504260
aauaucaacccacuggacu

SEQ ID NO: 1504262 - RNA, 19 nt, Artificial Sequence
  Description of Artificial Sequence: Synthetic oligonucleotide
  Sense strand starting at position 2919 of SEQ ID NO: 1244643
aauaaauaauggcgaauga

SEQ ID NO: 1504263 - RNA, 19 nt, Artificial Sequence
  Description of Artificial Sequence: Synthetic oligonucleotide
  Antisense strand to SEQ ID NO: 1504262
ucauucgccauuauuuauu

SEQ ID NO: 1504264 - RNA, 19 nt, Artificial Sequence
  Description of Artificial Sequence: Synthetic oligonucleotide
  Sense strand starting at position 2947 of SEQ ID NO: 1244643
cagggaugugucugaucaa

SEQ ID NO: 1504265 - RNA, 19 nt, Artificial Sequence
  Description of Artificial Sequence: Synthetic oligonucleotide
  Antisense strand to SEQ ID NO: 1504264
uugaucagacacaucccug

SEQ ID NO: 1504266 - RNA, 19 nt, Artificial Sequence
  Description of Artificial Sequence: Synthetic oligonucleotide
  Sense strand starting at position 2948 of SEQ ID NO: 1244643
agggaugugucugaucaaa

SEQ ID NO: 1504267 - RNA, 19 nt, Artificial Sequence
  Description of Artificial Sequence: Synthetic oligonucleotide
  Antisense strand to SEQ ID NO: 1504266
uuugaucagacacaucccu

SEQ ID NO: 1504268 - RNA, 19 nt, Artificial Sequence
  Description of Artificial Sequence: Synthetic oligonucleotide
  Sense strand starting at position 2950 of SEQ ID NO: 1244643
ggaugugucugaucaaaca

SEQ ID NO: 1504269 - RNA, 19 nt, Artificial Sequence
  Description of Artificial Sequence: Synthetic oligonucleotide
  Antisense strand to SEQ ID NO: 1504268
uguuugaucagacacaucc

SEQ ID NO: 1504270 - RNA, 19 nt, Artificial Sequence
  Description of Artificial Sequence: Synthetic oligonucleotide
  Sense strand starting at position 2979 of SEQ ID NO: 1244643
aauagcuauguuuggagaa

SEQ ID NO: 1504271 - RNA, 19 nt, Artificial Sequence
  Description of Artificial Sequence: Synthetic oligonucleotide
  Antisense strand to SEQ ID NO: 1504270
uucuccaaacauagcuauu

SEQ ID NO: 1504272 - RNA, 19 nt, Artificial Sequence
  Description of Artificial Sequence: Synthetic oligonucleotide
  Sense strand starting at position 2980 of SEQ ID NO: 1244643
auagcuauguuuggagaag

SEQ ID NO: 1504273 - RNA, 19 nt, Artificial Sequence
  Description of Artificial Sequence: Synthetic oligonucleotide
  Antisense strand to SEQ ID NO: 1504272
cuucuccaaacauagcuau

SEQ ID NO: 1504274 - RNA, 19 nt, Artificial Sequence
  Description of Artificial Sequence: Synthetic oligonucleotide
  Sense strand starting at position 2998 of SEQ ID NO: 1244643
ggaauuuguggcugcucca

SEQ ID NO: 1504275 - RNA, 19 nt, Artificial Sequence
  Description of Artificial Sequence: Synthetic oligonucleotide
  Antisense strand to SEQ ID NO: 1504274
uggagcagccacaaauucc

SEQ ID NO: 1504276 - RNA, 19 nt, Artificial Sequence
  Description of Artificial Sequence: Synthetic oligonucleotide
  Sense strand starting at position 3068 of SEQ ID NO: 1244643
gaagcaaggcuuuguuaau

SEQ ID NO: 1504277 - RNA, 19 nt, Artificial Sequence
  Description of Artificial Sequence: Synthetic oligonucleotide
  Antisense strand to SEQ ID NO: 1504276
auuaacaaagccuugcuuc

SEQ ID NO: 1504278 - RNA, 19 nt, Artificial Sequence
  Description of Artificial Sequence: Synthetic oligonucleotide
  Sense strand starting at position 3074 of SEQ ID NO: 1244643
aggcuuuguuaauccuauu

SEQ ID NO: 1504279 - RNA, 19 nt, Artificial Sequence
  Description of Artificial Sequence: Synthetic oligonucleotide
  Antisense strand to SEQ ID NO: 1504278
aauaggauuaacaaagccu

SEQ ID NO: 1504280 - RNA, 19 nt, Artificial Sequence
  Description of Artificial Sequence: Synthetic oligonucleotide
  Sense strand starting at position 3123 of SEQ ID NO: 1244643
uaaagcuguugcccaauga

SEQ ID NO: 1504281 - RNA, 19 nt, Artificial Sequence
  Description of Artificial Sequence: Synthetic oligonucleotide
  Antisense strand to SEQ ID NO: 1504280
ucauugggcaacagcuuua

SEQ ID NO: 1504282 - RNA, 19 nt, Artificial Sequence
  Description of Artificial Sequence: Synthetic oligonucleotide
  Sense strand starting at position 3158 of SEQ ID NO: 1244643
ccagauccacggugcuaau

SEQ ID NO: 1504283 - RNA, 19 nt, Artificial Sequence
  Description of Artificial Sequence: Synthetic oligonucleotide
  Antisense strand to SEQ ID NO: 1504282
auuagcaccguggaucugg

SEQ ID NO: 1504284 - RNA, 19 nt, Artificial Sequence
  Description of Artificial Sequence: Synthetic oligonucleotide
  Sense strand starting at position 3190 of SEQ ID NO: 1244643
accuaaugauucugagcuu

SEQ ID NO: 1504285 - RNA, 19 nt, Artificial Sequence
  Description of Artificial Sequence: Synthetic oligonucleotide
  Antisense strand to SEQ ID NO: 1504284
aagcucagaaucauuaggu

SEQ ID NO: 1504286 - RNA, 19 nt, Artificial Sequence
  Description of Artificial Sequence: Synthetic oligonucleotide
  Sense strand starting at position 3196 of SEQ ID NO: 1244643
ugauucugagcuuggcaaa

SEQ ID NO: 1504287 - RNA, 19 nt, Artificial Sequence
  Description of Artificial Sequence: Synthetic oligonucleotide
  Antisense strand to SEQ ID NO: 1504286
uuugccaagcucagaauca

SEQ ID NO: 1504288 - RNA, 19 nt, Artificial Sequence
  Description of Artificial Sequence: Synthetic oligonucleotide
  Sense strand starting at position 3238 of SEQ ID NO: 1244643
ggcccaguguuccaggaau

SEQ ID NO: 1504289 - RNA, 19 nt, Artificial Sequence
  Description of Artificial Sequence: Synthetic oligonucleotide
  Antisense strand to SEQ ID NO: 1504288
auuccuggaacacugggcc

SEQ ID NO: 1504290 - RNA, 19 nt, Artificial Sequence
  Description of Artificial Sequence: Synthetic oligonucleotide
  Sense strand starting at position 3240 of SEQ ID NO: 1244643
cccaguguuccaggaaugu

SEQ ID NO: 1504291 - RNA, 19 nt, Artificial Sequence
  Description of Artificial Sequence: Synthetic oligonucleotide
  Antisense strand to SEQ ID NO: 1504290
acauuccuggaacacuggg

SEQ ID NO: 1504292 - RNA, 19 nt, Artificial Sequence
  Description of Artificial Sequence: Synthetic oligonucleotide
  Sense strand starting at position 3253 of SEQ ID NO: 1244643
gaaugugaccuuugcugca

SEQ ID NO: 1504293 - RNA, 19 nt, Artificial Sequence
  Description of Artificial Sequence: Synthetic oligonucleotide
  Antisense strand to SEQ ID NO: 1504292
ugcagcaaaggucacauuc

SEQ ID NO: 1504294 - RNA, 19 nt, Artificial Sequence
  Description of Artificial Sequence: Synthetic oligonucleotide
  Sense strand starting at position 3504 of SEQ ID NO: 1244643
gguugcucuggcugaccaa

SEQ ID NO: 1504295 - RNA, 19 nt, Artificial Sequence
  Description of Artificial Sequence: Synthetic oligonucleotide
  Antisense strand to SEQ ID NO: 1504294
uuggucagccagagcaacc

SEQ ID NO: 1504296 - RNA, 19 nt, Artificial Sequence
  Description of Artificial Sequence: Synthetic oligonucleotide
  Sense strand starting at position 3542 of SEQ ID NO: 1244643
ggccaucugggucaaugua

SEQ ID NO: 1504297 - RNA, 19 nt, Artificial Sequence
  Description of Artificial Sequence: Synthetic oligonucleotide
  Antisense strand to SEQ ID NO: 1504296
uacauugacccagauggcc

SEQ ID NO: 1504298 - RNA, 19 nt, Artificial Sequence
  Description of Artificial Sequence: Synthetic oligonucleotide
  Sense strand starting at position 3780 of SEQ ID NO: 1244643
gcuggagacucacuaccau

SEQ ID NO: 1504299 - RNA, 19 nt, Artificial Sequence
  Description of Artificial Sequence: Synthetic oligonucleotide
  Antisense strand to SEQ ID NO: 1504298
augguagugagucuccagc

SEQ ID NO: 1504300 - RNA, 19 nt, Artificial Sequence
  Description of Artificial Sequence: Synthetic oligonucleotide
  Sense strand starting at position 3828 of SEQ ID NO: 1244643
guucacuaugccggaggau

SEQ ID NO: 1504301 - RNA, 19 nt, Artificial Sequence
  Description of Artificial Sequence: Synthetic oligonucleotide
  Antisense strand to SEQ ID NO: 1504300
auccuccggcauagugaac

SEQ ID NO: 1504302 - RNA, 19 nt, Artificial Sequence
  Description of Artificial Sequence: Synthetic oligonucleotide
  Sense strand starting at position 3843 of SEQ ID NO: 1244643
ggaugaguacacggucuau

SEQ ID NO: 1504303 - RNA, 19 nt, Artificial Sequence
  Description of Artificial Sequence: Synthetic oligonucleotide
  Antisense strand to SEQ ID NO: 1504302
auagaccguguacucaucc

SEQ ID NO: 1504304 - RNA, 19 nt, Artificial Sequence
  Description of Artificial Sequence: Synthetic oligonucleotide
  Sense strand starting at position 3969 of SEQ ID NO: 1244643
uguucugaaaccugaggaa

SEQ ID NO: 1504305 - RNA, 19 nt, Artificial Sequence
  Description of Artificial Sequence: Synthetic oligonucleotide
  Antisense strand to SEQ ID NO: 1504304
uuccucagguuucagaaca

SEQ ID NO: 1504306 - RNA, 19 nt, Artificial Sequence
  Description of Artificial Sequence: Synthetic oligonucleotide
  Sense strand starting at position 484 of SEQ ID NO: 1244644
aucagugucuguggacgua

SEQ ID NO: 1504307 - RNA, 19 nt, Artificial Sequence
  Description of Artificial Sequence: Synthetic oligonucleotide
  Antisense strand to SEQ ID NO: 1504306
uacguccacagacacugau

SEQ ID NO: 1504308 - RNA, 19 nt, Artificial Sequence
  Description of Artificial Sequence: Synthetic oligonucleotide
  Sense strand starting at position 496 of SEQ ID NO: 1244644
ggacguagucucugaagag

SEQ ID NO: 1504309 - RNA, 19 nt, Artificial Sequence
  Description of Artificial Sequence: Synthetic oligonucleotide
  Antisense strand to SEQ ID NO: 1504308
cucuucagagacuacgucc

SEQ ID NO: 1504310 - RNA, 19 nt, Artificial Sequence
  Description of Artificial Sequence: Synthetic oligonucleotide
  Sense strand starting at position 497 of SEQ ID NO: 1244644
gacguagucucugaagagu

SEQ ID NO: 1504311 - RNA, 19 nt, Artificial Sequence
  Description of Artificial Sequence: Synthetic oligonucleotide
  Antisense strand to SEQ ID NO: 1504310
acucuucagagacuacguc

SEQ ID NO: 1504312 - RNA, 19 nt, Artificial Sequence
  Description of Artificial Sequence: Synthetic oligonucleotide
  Sense strand starting at position 508 of SEQ ID NO: 1244644
ugaagagugcuucagcuga

SEQ ID NO: 1504313 - RNA, 19 nt, Artificial Sequence
  Description of Artificial Sequence: Synthetic oligonucleotide
  Antisense strand to SEQ ID NO: 1504312
ucagcugaagcacucuuca

SEQ ID NO: 1504314 - RNA, 19 nt, Artificial Sequence
  Description of Artificial Sequence: Synthetic oligonucleotide
  Sense strand starting at position 548 of SEQ ID NO: 1244644
cagagauccuccuagggau

SEQ ID NO: 1504315 - RNA, 19 nt, Artificial Sequence
  Description of Artificial Sequence: Synthetic oligonucleotide
  Antisense strand to SEQ ID NO: 1504314
aucccuaggaggaucucug

SEQ ID NO: 1504316 - RNA, 19 nt, Artificial Sequence
  Description of Artificial Sequence: Synthetic oligonucleotide
  Sense strand starting at position 626 of SEQ ID NO: 1244644
cccucagcuuccgucagau

SEQ ID NO: 1504317 - RNA, 19 nt, Artificial Sequence
  Description of Artificial Sequence: Synthetic oligonucleotide
  Antisense strand to SEQ ID NO: 1504316
aucugacggaagcugaggg

SEQ ID NO: 1504318 - RNA, 19 nt, Artificial Sequence
  Description of Artificial Sequence: Synthetic oligonucleotide
  Sense strand starting at position 638 of SEQ ID NO: 1244644
gucagaucuugggcuccua

SEQ ID NO: 1504319 - RNA, 19 nt, Artificial Sequence
  Description of Artificial Sequence: Synthetic oligonucleotide
  Antisense strand to SEQ ID NO: 1504318
uaggagcccaagaucugac

SEQ ID NO: 1504320 - RNA, 19 nt, Artificial Sequence
  Description of Artificial Sequence: Synthetic oligonucleotide
  Sense strand starting at position 714 of SEQ ID NO: 1244644
gggagcagcccuuauccaa

SEQ ID NO: 1504321 - RNA, 19 nt, Artificial Sequence
  Description of Artificial Sequence: Synthetic oligonucleotide
  Antisense strand to SEQ ID NO: 1504320
uuggauaagggcugcuccc

SEQ ID NO: 1504322 - RNA, 19 nt, Artificial Sequence
  Description of Artificial Sequence: Synthetic oligonucleotide
  Sense strand starting at position 945 of SEQ ID NO: 1244644
uagcuauuguuugagcuga

SEQ ID NO: 1504323 - RNA, 19 nt, Artificial Sequence
  Description of Artificial Sequence: Synthetic oligonucleotide
  Antisense strand to SEQ ID NO: 1504322
ucagcucaaacaauagcua

SEQ ID NO: 1504324 - RNA, 19 nt, Artificial Sequence
  Description of Artificial Sequence: Synthetic oligonucleotide
  Sense strand starting at position 947 of SEQ ID NO: 1244644
gcuauuguuugagcugaag

SEQ ID NO: 1504325 - RNA, 19 nt, Artificial Sequence
  Description of Artificial Sequence: Synthetic oligonucleotide
  Antisense strand to SEQ ID NO: 1504324
cuucagcucaaacaauagc

SEQ ID NO: 1504326 - RNA, 19 nt, Artificial Sequence
  Description of Artificial Sequence: Synthetic oligonucleotide
  Sense strand starting at position 1068 of SEQ ID NO: 1244644
ccgauauuccggcaucaca

SEQ ID NO: 1504327 - RNA, 19 nt, Artificial Sequence
  Description of Artificial Sequence: Synthetic oligonucleotide
  Antisense strand to SEQ ID NO: 1504326
ugugaugccggaauaucgg

SEQ ID NO: 1504328 - RNA, 19 nt, Artificial Sequence
  Description of Artificial Sequence: Synthetic oligonucleotide
  Sense strand starting at position 1115 of SEQ ID NO: 1244644
ccuuccauguacuguagau

SEQ ID NO: 1504329 - RNA, 19 nt, Artificial Sequence
  Description of Artificial Sequence: Synthetic oligonucleotide
  Antisense strand to SEQ ID NO: 1504328
aucuacaguacauggaagg

SEQ ID NO: 1504330 - RNA, 19 nt, Artificial Sequence
  Description of Artificial Sequence: Synthetic oligonucleotide
  Sense strand starting at position 1117 of SEQ ID NO: 1244644
uuccauguacuguagauga

SEQ ID NO: 1504331 - RNA, 19 nt, Artificial Sequence
  Description of Artificial Sequence: Synthetic oligonucleotide
  Antisense strand to SEQ ID NO: 1504330
ucaucuacaguacauggaa

SEQ ID NO: 1504332 - RNA, 19 nt, Artificial Sequence
  Description of Artificial Sequence: Synthetic oligonucleotide
  Sense strand starting at position 1287 of SEQ ID NO: 1244644
ggaagaaucucugcuacca

SEQ ID NO: 1504333 - RNA, 19 nt, Artificial Sequence
  Description of Artificial Sequence: Synthetic oligonucleotide
  Antisense strand to SEQ ID NO: 1504332
ugguagcagagauucuucc

SEQ ID NO: 1504334 - RNA, 19 nt, Artificial Sequence
  Description of Artificial Sequence: Synthetic oligonucleotide
  Sense strand starting at position 1299 of SEQ ID NO: 1244644
gcuaccaaacagugauaga

SEQ ID NO: 1504335 - RNA, 19 nt, Artificial Sequence
  Description of Artificial Sequence: Synthetic oligonucleotide
  Antisense strand to SEQ ID NO: 1504334
ucuaucacuguuugguagc

SEQ ID NO: 1504336 - RNA, 19 nt, Artificial Sequence
  Description of Artificial Sequence: Synthetic oligonucleotide
  Sense strand starting at position 1308 of SEQ ID NO: 1244644
cagugauagaaaggauugu

SEQ ID NO: 1504337 - RNA, 19 nt, Artificial Sequence
  Description of Artificial Sequence: Synthetic oligonucleotide
  Antisense strand to SEQ ID NO: 1504336
acaauccuuucuaucacug

SEQ ID NO: 1504338 - RNA, 19 nt, Artificial Sequence
  Description of Artificial Sequence: Synthetic oligonucleotide
  Sense strand starting at position 1314 of SEQ ID NO: 1244644
uagaaaggauugucuccaa

SEQ ID NO: 1504339 - RNA, 19 nt, Artificial Sequence
  Description of Artificial Sequence: Synthetic oligonucleotide
  Antisense strand to SEQ ID NO: 1504338
uuggagacaauccuuucua

SEQ ID NO: 1504340 - RNA, 19 nt, Artificial Sequence
  Description of Artificial Sequence: Synthetic oligonucleotide
  Sense strand starting at position 1317 of SEQ ID NO: 1244644
aaaggauugucuccaaagc

SEQ ID NO: 1504341 - RNA, 19 nt, Artificial Sequence
  Description of Artificial Sequence: Synthetic oligonucleotide
  Antisense strand to SEQ ID NO: 1504340
gcuuuggagacaauccuuu

SEQ ID NO: 1504342 - RNA, 19 nt, Artificial Sequence
  Description of Artificial Sequence: Synthetic oligonucleotide
  Sense strand starting at position 1355 of SEQ ID NO: 1244644
cgagauuggaguugugaca

SEQ ID NO: 1504343 - RNA, 19 nt, Artificial Sequence
  Description of Artificial Sequence: Synthetic oligonucleotide
  Antisense strand to SEQ ID NO: 1504342
ugucacaacuccaaucucg

SEQ ID NO: 1504344 - RNA, 19 nt, Artificial Sequence
  Description of Artificial Sequence: Synthetic oligonucleotide
  Sense strand starting at position 1694 of SEQ ID NO: 1244644
ccgaaucagccucaggaua

SEQ ID NO: 1504345 - RNA, 19 nt, Artificial Sequence
  Description of Artificial Sequence: Synthetic oligonucleotide
  Antisense strand to SEQ ID NO: 1504344
uauccugaggcugauucgg

SEQ ID NO: 1504346 - RNA, 19 nt, Artificial Sequence
  Description of Artificial Sequence: Synthetic oligonucleotide
  Sense strand starting at position 1832 of SEQ ID NO: 1244644
ggacuuggauccugaagag

SEQ ID NO: 1504347 - RNA, 19 nt, Artificial Sequence
  Description of Artificial Sequence: Synthetic oligonucleotide
  Antisense strand to SEQ ID NO: 1504346
cucuucaggauccaagucc

SEQ ID NO: 1504348 - RNA, 19 nt, Artificial Sequence
  Description of Artificial Sequence: Synthetic oligonucleotide
  Sense strand starting at position 1841 of SEQ ID NO: 1244644
uccugaagagccugagaga

SEQ ID NO: 1504349 - RNA, 19 nt, Artificial Sequence
  Description of Artificial Sequence: Synthetic oligonucleotide
  Antisense strand to SEQ ID NO: 1504348
ucucucaggcucuucagga

SEQ ID NO: 1504350 - RNA, 19 nt, Artificial Sequence
  Description of Artificial Sequence: Synthetic oligonucleotide
  Sense strand starting at position 1962 of SEQ ID NO: 1244644
gauccucuguccgggcaua

SEQ ID NO: 1504351 - RNA, 19 nt, Artificial Sequence
  Description of Artificial Sequence: Synthetic oligonucleotide
  Antisense strand to SEQ ID NO: 1504350
uaugcccggacagaggauc

SEQ ID NO: 1504352 - RNA, 19 nt, Artificial Sequence
  Description of Artificial Sequence: Synthetic oligonucleotide
  Sense strand starting at position 1991 of SEQ ID NO: 1244644
cucgaauucugucgcagca

SEQ ID NO: 1504353 - RNA, 19 nt, Artificial Sequence
  Description of Artificial Sequence: Synthetic oligonucleotide
  Antisense strand to SEQ ID NO: 1504352
ugcugcgacagaauucgag

SEQ ID NO: 1504354 - RNA, 19 nt, Artificial Sequence
  Description of Artificial Sequence: Synthetic oligonucleotide
  Sense strand starting at position 2025 of SEQ ID NO: 1244644
agccaaucagcuuggagaa

SEQ ID NO: 1504355 - RNA, 19 nt, Artificial Sequence
  Description of Artificial Sequence: Synthetic oligonucleotide
  Antisense strand to SEQ ID NO: 1504354
uucuccaagcugauuggcu

SEQ ID NO: 1504356 - RNA, 19 nt, Artificial Sequence
  Description of Artificial Sequence: Synthetic oligonucleotide
  Sense strand starting at position 2863 of SEQ ID NO: 1244644
cccggucugucauuugcau

SEQ ID NO: 1504357 - RNA, 19 nt, Artificial Sequence
  Description of Artificial Sequence: Synthetic oligonucleotide
  Antisense strand to SEQ ID NO: 1504356
augcaaaugacagaccggg

SEQ ID NO: 1504358 - RNA, 19 nt, Artificial Sequence
  Description of Artificial Sequence: Synthetic oligonucleotide
  Sense strand starting at position 3271 of SEQ ID NO: 1244644
cggaucauuucaggucaga

SEQ ID NO: 1504359 - RNA, 19 nt, Artificial Sequence
  Description of Artificial Sequence: Synthetic oligonucleotide
  Antisense strand to SEQ ID NO: 1504358
ucugaccugaaaugauccg

SEQ ID NO: 1504360 - RNA, 19 nt, Artificial Sequence
  Description of Artificial Sequence: Synthetic oligonucleotide
  Sense strand starting at position 3551 of SEQ ID NO: 1244644
gugggugauuucuacugcu

SEQ ID NO: 1504361 - RNA, 19 nt, Artificial Sequence
  Description of Artificial Sequence: Synthetic oligonucleotide
  Antisense strand to SEQ ID NO: 1504360
agcaguagaaaucacccac

SEQ ID NO: 1504362 - RNA, 19 nt, Artificial Sequence
  Description of Artificial Sequence: Synthetic oligonucleotide
  Sense strand starting at position 3554 of SEQ ID NO: 1244644
ggugauuucuacugcuaga

SEQ ID NO: 1504363 - RNA, 19 nt, Artificial Sequence
  Description of Artificial Sequence: Synthetic oligonucleotide
  Antisense strand to SEQ ID NO: 1504362
ucuagcaguagaaaucacc

SEQ ID NO: 1504364 - RNA, 19 nt, Artificial Sequence
  Description of Artificial Sequence: Synthetic oligonucleotide
  Sense strand starting at position 3573 of SEQ ID NO: 1244644
cuguuuaggcccuguaaua

SEQ ID NO: 1504365 - RNA, 19 nt, Artificial Sequence
  Description of Artificial Sequence: Synthetic oligonucleotide
  Antisense strand to SEQ ID NO: 1504364
uauuacagggccuaaacag

SEQ ID NO: 1504366 - RNA, 19 nt, Artificial Sequence
  Description of Artificial Sequence: Synthetic oligonucleotide
  Sense strand starting at position 3625 of SEQ ID NO: 1244644
gcaggucccuucuuaauau

SEQ ID NO: 1504367 - RNA, 19 nt, Artificial Sequence
  Description of Artificial Sequence: Synthetic oligonucleotide
  Antisense strand to SEQ ID NO: 1504366
auauuaagaagggaccugc

SEQ ID NO: 1504368 - RNA, 19 nt, Artificial Sequence
  Description of Artificial Sequence: Synthetic oligonucleotide
  Sense strand starting at position 3664 of SEQ ID NO: 1244644
acaauaccuucuugggaga

SEQ ID NO: 1504369 - RNA, 19 nt, Artificial Sequence
  Description of Artificial Sequence: Synthetic oligonucleotide
  Antisense strand to SEQ ID NO: 1504368
ucucccaagaagguauugu

SEQ ID NO: 1504370 - RNA, 19 nt, Artificial Sequence
  Description of Artificial Sequence: Synthetic oligonucleotide
  Sense strand starting at position 3862 of SEQ ID NO: 1244644
cuagaaauuuaggauucca

SEQ ID NO: 1504371 - RNA, 19 nt, Artificial Sequence
  Description of Artificial Sequence: Synthetic oligonucleotide
  Antisense strand to SEQ ID NO: 1504370
uggaauccuaaauuucuag

SEQ ID NO: 1504372 - RNA, 19 nt, Artificial Sequence
  Description of Artificial Sequence: Synthetic oligonucleotide
  Sense strand starting at position 3928 of SEQ ID NO: 1244644
gaggacuguuucuagaccu

SEQ ID NO: 1504373 - RNA, 19 nt, Artificial Sequence
  Description of Artificial Sequence: Synthetic oligonucleotide
  Antisense strand to SEQ ID NO: 1504372
aggucuagaaacaguccuc

SEQ ID NO: 1504374 - RNA, 19 nt, Artificial Sequence
  Description of Artificial Sequence: Synthetic oligonucleotide
  Sense strand starting at position 3941 of SEQ ID NO: 1244644
agaccucaggccugugaau

SEQ ID NO: 1504375 - RNA, 19 nt, Artificial Sequence
  Description of Artificial Sequence: Synthetic oligonucleotide
  Antisense strand to SEQ ID NO: 1504374
auucacaggccugaggucu

SEQ ID NO: 1504376 - RNA, 19 nt, Artificial Sequence
  Description of Artificial Sequence: Synthetic oligonucleotide
  Sense strand starting at position 535 of SEQ ID NO: 1244645
uggcuuucuccugaucuca

SEQ ID NO: 1504377 - RNA, 19 nt, Artificial Sequence
  Description of Artificial Sequence: Synthetic oligonucleotide
  Antisense strand to SEQ ID NO: 1504376
ugagaucaggagaaagcca

SEQ ID NO: 1504378 - RNA, 19 nt, Artificial Sequence
  Description of Artificial Sequence: Synthetic oligonucleotide
  Sense strand starting at position 599 of SEQ ID NO: 1244645
ccuagugauuccuugauuc

SEQ ID NO: 1504379 - RNA, 19 nt, Artificial Sequence
  Description of Artificial Sequence: Synthetic oligonucleotide
  Antisense strand to SEQ ID NO: 1504378
gaaucaaggaaucacuagg

SEQ ID NO: 1504380 - RNA, 19 nt, Artificial Sequence
  Description of Artificial Sequence: Synthetic oligonucleotide
  Sense strand starting at position 603 of SEQ ID NO: 1244645
gugauuccuugauuccuga

SEQ ID NO: 1504381 - RNA, 19 nt, Artificial Sequence
  Description of Artificial Sequence: Synthetic oligonucleotide
  Antisense strand to SEQ ID NO: 1504380
ucaggaaucaaggaaucac

SEQ ID NO: 1504382 - RNA, 19 nt, Artificial Sequence
  Description of Artificial Sequence: Synthetic oligonucleotide
  Sense strand starting at position 722 of SEQ ID NO: 1244645
gcccauguauaagguauau

SEQ ID NO: 1504383 - RNA, 19 nt, Artificial Sequence
  Description of Artificial Sequence: Synthetic oligonucleotide
  Antisense strand to SEQ ID NO: 1504382
auauaccuuauacaugggc

SEQ ID NO: 1504384 - RNA, 19 nt, Artificial Sequence
  Description of Artificial Sequence: Synthetic oligonucleotide
  Sense strand starting at position 724 of SEQ ID NO: 1244645
ccauguauaagguauaugu

SEQ ID NO: 1504385 - RNA, 19 nt, Artificial Sequence
  Description of Artificial Sequence: Synthetic oligonucleotide
  Antisense strand to SEQ ID NO: 1504384
acauauaccuuauacaugg

SEQ ID NO: 1504386 - RNA, 19 nt, Artificial Sequence
  Description of Artificial Sequence: Synthetic oligonucleotide
  Sense strand starting at position 728 of SEQ ID NO: 1244645
guauaagguauauguggga

SEQ ID NO: 1504387 - RNA, 19 nt, Artificial Sequence
  Description of Artificial Sequence: Synthetic oligonucleotide
  Antisense strand to SEQ ID NO: 1504386
ucccacauauaccuuauac

SEQ ID NO: 1504388 - RNA, 19 nt, Artificial Sequence
  Description of Artificial Sequence: Synthetic oligonucleotide
  Sense strand starting at position 824 of SEQ ID NO: 1244645
ugggcagugcuuuguggau

SEQ ID NO: 1504389 - RNA, 19 nt, Artificial Sequence
  Description of Artificial Sequence: Synthetic oligonucleotide
  Antisense strand to SEQ ID NO: 1504388
auccacaaagcacugccca

SEQ ID NO: 1504390 - RNA, 19 nt, Artificial Sequence
  Description of Artificial Sequence: Synthetic oligonucleotide
  Sense strand starting at position 826 of SEQ ID NO: 1244645
ggcagugcuuuguggaugu

SEQ ID NO: 1504391 - RNA, 19 nt, Artificial Sequence
  Description of Artificial Sequence: Synthetic oligonucleotide
  Antisense strand to SEQ ID NO: 1504390
acauccacaaagcacugcc

SEQ ID NO: 1504392 - RNA, 19 nt, Artificial Sequence
  Description of Artificial Sequence: Synthetic oligonucleotide
  Sense strand starting at position 866 of SEQ ID NO: 1244645
ggucaucucccgggagugu

SEQ ID NO: 1504393 - RNA, 19 nt, Artificial Sequence
  Description of Artificial Sequence: Synthetic oligonucleotide
  Antisense strand to SEQ ID NO: 1504392
acacucccgggagaugacc

SEQ ID NO: 1504394 - RNA, 19 nt, Artificial Sequence
  Description of Artificial Sequence: Synthetic oligonucleotide
  Sense strand starting at position 904 of SEQ ID NO: 1244645
gaccgcaauuccucaguga

SEQ ID NO: 1504395 - RNA, 19 nt, Artificial Sequence
  Description of Artificial Sequence: Synthetic oligonucleotide
  Antisense strand to SEQ ID NO: 1504394
ucacugaggaauugcgguc

SEQ ID NO: 1504396 - RNA, 19 nt, Artificial Sequence
  Description of Artificial Sequence: Synthetic oligonucleotide
  Sense strand starting at position 905 of SEQ ID NO: 1244645
accgcaauuccucagugaa

SEQ ID NO: 1504397 - RNA, 19 nt, Artificial Sequence
  Description of Artificial Sequence: Synthetic oligonucleotide
  Antisense strand to SEQ ID NO: 1504396
uucacugaggaauugcggu

SEQ ID NO: 1504398 - RNA, 19 nt, Artificial Sequence
  Description of Artificial Sequence: Synthetic oligonucleotide
  Sense strand starting at position 908 of SEQ ID NO: 1244645
gcaauuccucagugaagcu

SEQ ID NO: 1504399 - RNA, 19 nt, Artificial Sequence
  Description of Artificial Sequence: Synthetic oligonucleotide
  Antisense strand to SEQ ID NO: 1504398
agcuucacugaggaauugc

SEQ ID NO: 1504400 - RNA, 19 nt, Artificial Sequence
  Description of Artificial Sequence: Synthetic oligonucleotide
  Sense strand starting at position 1023 of SEQ ID NO: 1244645
ucaucuggcccuugagacu

SEQ ID NO: 1504401 - RNA, 19 nt, Artificial Sequence
  Description of Artificial Sequence: Synthetic oligonucleotide
  Antisense strand to SEQ ID NO: 1504400
agucucaagggccagauga

SEQ ID NO: 1504402 - RNA, 19 nt, Artificial Sequence
  Description of Artificial Sequence: Synthetic oligonucleotide
  Sense strand starting at position 1071 of SEQ ID NO: 1244645
ccaggcuugcaucgacaga

SEQ ID NO: 1504403 - RNA, 19 nt, Artificial Sequence
  Description of Artificial Sequence: Synthetic oligonucleotide
  Antisense strand to SEQ ID NO: 1504402
ucugucgaugcaagccugg

SEQ ID NO: 1504404 - RNA, 19 nt, Artificial Sequence
  Description of Artificial Sequence: Synthetic oligonucleotide
  Sense strand starting at position 1136 of SEQ ID NO: 1244645
cucacagauggcugaaaga

SEQ ID NO: 1504405 - RNA, 19 nt, Artificial Sequence
  Description of Artificial Sequence: Synthetic oligonucleotide
  Antisense strand to SEQ ID NO: 1504404
ucuuucagccaucugugag

SEQ ID NO: 1504406 - RNA, 19 nt, Artificial Sequence
  Description of Artificial Sequence: Synthetic oligonucleotide
  Sense strand starting at position 1260 of SEQ ID NO: 1244645
gggugcgucacaggagaaa

SEQ ID NO: 1504407 - RNA, 19 nt, Artificial Sequence
  Description of Artificial Sequence: Synthetic oligonucleotide
  Antisense strand to SEQ ID NO: 1504406
uuucuccugugacgcaccc

SEQ ID NO: 1504408 - RNA, 19 nt, Artificial Sequence
  Description of Artificial Sequence: Synthetic oligonucleotide
  Sense strand starting at position 1326 of SEQ ID NO: 1244645
aaggguugucacugggcua

SEQ ID NO: 1504409 - RNA, 19 nt, Artificial Sequence
  Description of Artificial Sequence: Synthetic oligonucleotide
  Antisense strand to SEQ ID NO: 1504408
uagcccagugacaacccuu

SEQ ID NO: 1504410 - RNA, 19 nt, Artificial Sequence
  Description of Artificial Sequence: Synthetic oligonucleotide
  Sense strand starting at position 1392 of SEQ ID NO: 1244645
uggugcauucuugauccuu

SEQ ID NO: 1504411 - RNA, 19 nt, Artificial Sequence
  Description of Artificial Sequence: Synthetic oligonucleotide
  Antisense strand to SEQ ID NO: 1504410
aaggaucaagaaugcacca

SEQ ID NO: 1504412 - RNA, 19 nt, Artificial Sequence
  Description of Artificial Sequence: Synthetic oligonucleotide
  Sense strand starting at position 2128 of SEQ ID NO: 1244645
gggccagaagaaugaaguu

SEQ ID NO: 1504413 - RNA, 19 nt, Artificial Sequence
  Description of Artificial Sequence: Synthetic oligonucleotide
  Antisense strand to SEQ ID NO: 1504412
aacuucauucuucuggccc

SEQ ID NO: 1504414 - RNA, 19 nt, Artificial Sequence
  Description of Artificial Sequence: Synthetic oligonucleotide
  Sense strand starting at position 2352 of SEQ ID NO: 1244645
gaggaacaguuucugugua

SEQ ID NO: 1504415 - RNA, 19 nt, Artificial Sequence
  Description of Artificial Sequence: Synthetic oligonucleotide
  Antisense strand to SEQ ID NO: 1504414
uacacagaaacuguuccuc

SEQ ID NO: 1504416 - RNA, 19 nt, Artificial Sequence
  Description of Artificial Sequence: Synthetic oligonucleotide
  Sense strand starting at position 2353 of SEQ ID NO: 1244645
aggaacaguuucuguguau

SEQ ID NO: 1504417 - RNA, 19 nt, Artificial Sequence
  Description of Artificial Sequence: Synthetic oligonucleotide
  Antisense strand to SEQ ID NO: 1504416
auacacagaaacuguuccu

SEQ ID NO: 1504418 - RNA, 19 nt, Artificial Sequence
  Description of Artificial Sequence: Synthetic oligonucleotide
  Sense strand starting at position 2354 of SEQ ID NO: 1244645
ggaacaguuucuguguauu

SEQ ID NO: 1504419 - RNA, 19 nt, Artificial Sequence
  Description of Artificial Sequence: Synthetic oligonucleotide
  Antisense strand to SEQ ID NO: 1504418
aauacacagaaacuguucc

SEQ ID NO: 1504420 - RNA, 19 nt, Artificial Sequence
  Description of Artificial Sequence: Synthetic oligonucleotide
  Sense strand starting at position 2364 of SEQ ID NO: 1244645
cuguguauuacgggcaguu

SEQ ID NO: 1504421 - RNA, 19 nt, Artificial Sequence
  Description of Artificial Sequence: Synthetic oligonucleotide
  Antisense strand to SEQ ID NO: 1504420
aacugcccguaauacacag

SEQ ID NO: 1504422 - RNA, 19 nt, Artificial Sequence
  Description of Artificial Sequence: Synthetic oligonucleotide
  Sense strand starting at position 2374 of SEQ ID NO: 1244645
cgggcaguucuuuauuaca

SEQ ID NO: 1504423 - RNA, 19 nt, Artificial Sequence
  Description of Artificial Sequence: Synthetic oligonucleotide
  Antisense strand to SEQ ID NO: 1504422
uguaauaaagaacugcccg

SEQ ID NO: 1504424 - RNA, 19 nt, Artificial Sequence
  Description of Artificial Sequence: Synthetic oligonucleotide
  Sense strand starting at position 2376 of SEQ ID NO: 1244645
ggcaguucuuuauuacaug

SEQ ID NO: 1504425 - RNA, 19 nt, Artificial Sequence
  Description of Artificial Sequence: Synthetic oligonucleotide
  Antisense strand to SEQ ID NO: 1504424
cauguaauaaagaacugcc

SEQ ID NO: 1504426 - RNA, 19 nt, Artificial Sequence
  Description of Artificial Sequence: Synthetic oligonucleotide
  Sense strand starting at position 2377 of SEQ ID NO: 1244645
gcaguucuuuauuacauga

SEQ ID NO: 1504427 - RNA, 19 nt, Artificial Sequence
  Description of Artificial Sequence: Synthetic oligonucleotide
  Antisense strand to SEQ ID NO: 1504426
ucauguaauaaagaacugc

SEQ ID NO: 1504428 - RNA, 19 nt, Artificial Sequence
  Description of Artificial Sequence: Synthetic oligonucleotide
  Sense strand starting at position 2783 of SEQ ID NO: 1244645
gucucauccucagaggauu

SEQ ID NO: 1504429 - RNA, 19 nt, Artificial Sequence
  Description of Artificial Sequence: Synthetic oligonucleotide
  Antisense strand to SEQ ID NO: 1504428
aauccucugaggaugagac

SEQ ID NO: 1504430 - RNA, 19 nt, Artificial Sequence
  Description of Artificial Sequence: Synthetic oligonucleotide
  Sense strand starting at position 3148 of SEQ ID NO: 1244645
gauggucucccuugucauc

SEQ ID NO: 1504431 - RNA, 19 nt, Artificial Sequence
  Description of Artificial Sequence: Synthetic oligonucleotide
  Antisense strand to SEQ ID NO: 1504430
gaugacaagggagaccauc

SEQ ID NO: 1504432 - RNA, 19 nt, Artificial Sequence
  Description of Artificial Sequence: Synthetic oligonucleotide
  Sense strand starting at position 3153 of SEQ ID NO: 1244645
ucucccuugucaucggaga

SEQ ID NO: 1504433 - RNA, 19 nt, Artificial Sequence
  Description of Artificial Sequence: Synthetic oligonucleotide
  Antisense strand to SEQ ID NO: 1504432
ucuccgaugacaagggaga

SEQ ID NO: 1504434 - RNA, 19 nt, Artificial Sequence
  Description of Artificial Sequence: Synthetic oligonucleotide
  Sense strand starting at position 3770 of SEQ ID NO: 1244645
ggcaguguugucaggcaga

SEQ ID NO: 1504435 - RNA, 19 nt, Artificial Sequence
  Description of Artificial Sequence: Synthetic oligonucleotide
  Antisense strand to SEQ ID NO: 1504434
ucugccugacaacacugcc

SEQ ID NO: 1504436 - RNA, 19 nt, Artificial Sequence
  Description of Artificial Sequence: Synthetic oligonucleotide
  Sense strand starting at position 3773 of SEQ ID NO: 1244645
aguguugucaggcagaaug

SEQ ID NO: 1504437 - RNA, 19 nt, Artificial Sequence
  Description of Artificial Sequence: Synthetic oligonucleotide
  Antisense strand to SEQ ID NO: 1504436
cauucugccugacaacacu

SEQ ID NO: 1504438 - RNA, 19 nt, Artificial Sequence
  Description of Artificial Sequence: Synthetic oligonucleotide
  Sense strand starting at position 3937 of SEQ ID NO: 1244645
cagccucagucugagacaa

SEQ ID NO: 1504439 - RNA, 19 nt, Artificial Sequence
  Description of Artificial Sequence: Synthetic oligonucleotide
  Antisense strand to SEQ ID NO: 1504438
uugucucagacugaggcug

SEQ ID NO: 1504440 - RNA, 19 nt, Artificial Sequence
  Description of Artificial Sequence: Synthetic oligonucleotide
  Sense strand starting at position 3939 of SEQ ID NO: 1244645
gccucagucugagacaaug

SEQ ID NO: 1504441 - RNA, 19 nt, Artificial Sequence
  Description of Artificial Sequence: Synthetic oligonucleotide
  Antisense strand to SEQ ID NO: 1504440
cauugucucagacugaggc

SEQ ID NO: 1504442 - RNA, 19 nt, Artificial Sequence
  Description of Artificial Sequence: Synthetic oligonucleotide
  Sense strand starting at position 3982 of SEQ ID NO: 1244645
ucaucaggcucagcagaau

SEQ ID NO: 1504443 - RNA, 19 nt, Artificial Sequence
  Description of Artificial Sequence: Synthetic oligonucleotide
  Antisense strand to SEQ ID NO: 1504442
auucugcugagccugauga

SEQ ID NO: 1504444 - RNA, 19 nt, Artificial Sequence
  Description of Artificial Sequence: Synthetic oligonucleotide
  Sense strand starting at position 9 of SEQ ID NO: 1244646
cccugaguguguuccugau

SEQ ID NO: 1504445 - RNA, 19 nt, Artificial Sequence
  Description of Artificial Sequence: Synthetic oligonucleotide
  Antisense strand to SEQ ID NO: 1504444
aucaggaacacacucaggg

SEQ ID NO: 1504446 - RNA, 19 nt, Artificial Sequence
  Description of Artificial Sequence: Synthetic oligonucleotide
  Sense strand starting at position 11 of SEQ ID NO: 1244646
cugaguguguuccugaugu

SEQ ID NO: 1504447 - RNA, 19 nt, Artificial Sequence
  Description of Artificial Sequence: Synthetic oligonucleotide
  Antisense strand to SEQ ID NO: 1504446
acaucaggaacacacucag

SEQ ID NO: 1504448 - RNA, 19 nt, Artificial Sequence
  Description of Artificial Sequence: Synthetic oligonucleotide
  Sense strand starting at position 166 of SEQ ID NO: 1244646
ucgcaugugugcuccuuga

SEQ ID NO: 1504449 - RNA, 19 nt, Artificial Sequence
  Description of Artificial Sequence: Synthetic oligonucleotide
  Antisense strand to SEQ ID NO: 1504448
ucaaggagcacacaugcga

SEQ ID NO: 1504450 - RNA, 19 nt, Artificial Sequence
  Description of Artificial Sequence: Synthetic oligonucleotide
  Sense strand starting at position 168 of SEQ ID NO: 1244646
gcaugugugcuccuugagu

SEQ ID NO: 1504451 - RNA, 19 nt, Artificial Sequence
  Description of Artificial Sequence: Synthetic oligonucleotide
  Antisense strand to SEQ ID NO: 1504450
acucaaggagcacacaugc

SEQ ID NO: 1504452 - RNA, 19 nt, Artificial Sequence
  Description of Artificial Sequence: Synthetic oligonucleotide
  Sense strand starting at position 438 of SEQ ID NO: 1244646
ccucgaguguguuccugau

SEQ ID NO: 1504453 - RNA, 19 nt, Artificial Sequence
  Description of Artificial Sequence: Synthetic oligonucleotide
  Antisense strand to SEQ ID NO: 1504452
aucaggaacacacucgagg

SEQ ID NO: 1504454 - RNA, 19 nt, Artificial Sequence
  Description of Artificial Sequence: Synthetic oligonucleotide
  Sense strand starting at position 440 of SEQ ID NO: 1244646
ucgaguguguuccugaugu

SEQ ID NO: 1504455 - RNA, 19 nt, Artificial Sequence
  Description of Artificial Sequence: Synthetic oligonucleotide
  Antisense strand to SEQ ID NO: 1504454
acaucaggaacacacucga

SEQ ID NO: 1504456 - RNA, 19 nt, Artificial Sequence
  Description of Artificial Sequence: Synthetic oligonucleotide
  Sense strand starting at position 2364 of SEQ ID NO: 1244646
gggaaucccuccucuuauc

SEQ ID NO: 1504457 - RNA, 19 nt, Artificial Sequence
  Description of Artificial Sequence: Synthetic oligonucleotide
  Antisense strand to SEQ ID NO: 1504456
gauaagaggagggauuccc

SEQ ID NO: 1504458 - RNA, 19 nt, Artificial Sequence
  Description of Artificial Sequence: Synthetic oligonucleotide
  Sense strand starting at position 3091 of SEQ ID NO: 1244646
ggaucaauguugguuagga

SEQ ID NO: 1504459 - RNA, 19 nt, Artificial Sequence
  Description of Artificial Sequence: Synthetic oligonucleotide
  Antisense strand to SEQ ID NO: 1504458
uccuaaccaacauugaucc

SEQ ID NO: 1504460 - RNA, 19 nt, Artificial Sequence
  Description of Artificial Sequence: Synthetic oligonucleotide
  Sense strand starting at position 3092 of SEQ ID NO: 1244646
gaucaauguugguuaggag

SEQ ID NO: 1504461 - RNA, 19 nt, Artificial Sequence
  Description of Artificial Sequence: Synthetic oligonucleotide
  Antisense strand to SEQ ID NO: 1504460
cuccuaaccaacauugauc

SEQ ID NO: 1504462 - RNA, 19 nt, Artificial Sequence
  Description of Artificial Sequence: Synthetic oligonucleotide
  Sense strand starting at position 3093 of SEQ ID NO: 1244646
aucaauguugguuaggagu

SEQ ID NO: 1504463 - RNA, 19 nt, Artificial Sequence
  Description of Artificial Sequence: Synthetic oligonucleotide
  Antisense strand to SEQ ID NO: 1504462
acuccuaaccaacauugau

SEQ ID NO: 1504464 - RNA, 19 nt, Artificial Sequence
  Description of Artificial Sequence: Synthetic oligonucleotide
  Sense strand starting at position 3095 of SEQ ID NO: 1244646
caauguugguuaggaguca

SEQ ID NO: 1504465 - RNA, 19 nt, Artificial Sequence
  Description of Artificial Sequence: Synthetic oligonucleotide
  Antisense strand to SEQ ID NO: 1504464
ugacuccuaaccaacauug

SEQ ID NO: 1504466 - RNA, 19 nt, Artificial Sequence
  Description of Artificial Sequence: Synthetic oligonucleotide
  Sense strand starting at position 3329 of SEQ ID NO: 1244646
ucuuauaugcuguguucca

SEQ ID NO: 1504467 - RNA, 19 nt, Artificial Sequence
  Description of Artificial Sequence: Synthetic oligonucleotide
  Antisense strand to SEQ ID NO: 1504466
uggaacacagcauauaaga

SEQ ID NO: 1504468 - RNA, 19 nt, Artificial Sequence
  Description of Artificial Sequence: Synthetic oligonucleotide
  Sense strand starting at position 154 of SEQ ID NO: 1244647
acuuguccuucucacugau

SEQ ID NO: 1504469 - RNA, 19 nt, Artificial Sequence
  Description of Artificial Sequence: Synthetic oligonucleotide
  Antisense strand to SEQ ID NO: 1504468
aucagugagaaggacaagu

SEQ ID NO: 1504470 - RNA, 19 nt, Artificial Sequence
  Description of Artificial Sequence: Synthetic oligonucleotide
  Sense strand starting at position 166 of SEQ ID NO: 1244647
cacugaugucagcaccaga

SEQ ID NO: 1504471 - RNA, 19 nt, Artificial Sequence
  Description of Artificial Sequence: Synthetic oligonucleotide
  Antisense strand to SEQ ID NO: 1504470
ucuggugcugacaucagug

SEQ ID NO: 1504472 - RNA, 19 nt, Artificial Sequence
  Description of Artificial Sequence: Synthetic oligonucleotide
  Sense strand starting at position 169 of SEQ ID NO: 1244647
ugaugucagcaccagaaau

SEQ ID NO: 1504473 - RNA, 19 nt, Artificial Sequence
  Description of Artificial Sequence: Synthetic oligonucleotide
  Antisense strand to SEQ ID NO: 1504472
auuucuggugcugacauca

SEQ ID NO: 1504474 - RNA, 19 nt, Artificial Sequence
  Description of Artificial Sequence: Synthetic oligonucleotide
  Sense strand starting at position 181 of SEQ ID NO: 1244647
cagaaauggccauguggau

SEQ ID NO: 1504475 - RNA, 19 nt, Artificial Sequence
  Description of Artificial Sequence: Synthetic oligonucleotide
  Antisense strand to SEQ ID NO: 1504474
auccacauggccauuucug

SEQ ID NO: 1504476 - RNA, 19 nt, Artificial Sequence
  Description of Artificial Sequence: Synthetic oligonucleotide
  Sense strand starting at position 193 of SEQ ID NO: 1244647
uguggauagucacuggcaa

SEQ ID NO: 1504477 - RNA, 19 nt, Artificial Sequence
  Description of Artificial Sequence: Synthetic oligonucleotide
  Antisense strand to SEQ ID NO: 1504476
uugccagugacuauccaca

SEQ ID NO: 1504478 - RNA, 19 nt, Artificial Sequence
  Description of Artificial Sequence: Synthetic oligonucleotide
  Sense strand starting at position 195 of SEQ ID NO: 1244647
uggauagucacuggcaacu

SEQ ID NO: 1504479 - RNA, 19 nt, Artificial Sequence
  Description of Artificial Sequence: Synthetic oligonucleotide
  Antisense strand to SEQ ID NO: 1504478
aguugccagugacuaucca

SEQ ID NO: 1504480 - RNA, 19 nt, Artificial Sequence
  Description of Artificial Sequence: Synthetic oligonucleotide
  Sense strand starting at position 197 of SEQ ID NO: 1244647
gauagucacuggcaacuua

SEQ ID NO: 1504481 - RNA, 19 nt, Artificial Sequence
  Description of Artificial Sequence: Synthetic oligonucleotide
  Antisense strand to SEQ ID NO: 1504480
uaaguugccagugacuauc

SEQ ID NO: 1504482 - RNA, 19 nt, Artificial Sequence
  Description of Artificial Sequence: Synthetic oligonucleotide
  Sense strand starting at position 311 of SEQ ID NO: 1244647
ccggaaaccuugccucauu

SEQ ID NO: 1504483 - RNA, 19 nt, Artificial Sequence
  Description of Artificial Sequence: Synthetic oligonucleotide
  Antisense strand to SEQ ID NO: 1504482
aaugaggcaagguuuccgg

SEQ ID NO: 1504484 - RNA, 19 nt, Artificial Sequence
  Description of Artificial Sequence: Synthetic oligonucleotide
  Sense strand starting at position 377 of SEQ ID NO: 1244647
cuccaaauguaguccaagu

SEQ ID NO: 1504485 - RNA, 19 nt, Artificial Sequence
  Description of Artificial Sequence: Synthetic oligonucleotide
  Antisense strand to SEQ ID NO: 1504484
acuuggacuacauuuggag

SEQ ID NO: 1504486 - RNA, 19 nt, Artificial Sequence
  Description of Artificial Sequence: Synthetic oligonucleotide
  Sense strand starting at position 499 of SEQ ID NO: 1244647
uuaagccucucaguaguuu

SEQ ID NO: 1504487 - RNA, 19 nt, Artificial Sequence
  Description of Artificial Sequence: Synthetic oligonucleotide
  Antisense strand to SEQ ID NO: 1504486
aaacuacugagaggcuuaa

SEQ ID NO: 1504488 - RNA, 19 nt, Artificial Sequence
  Description of Artificial Sequence: Synthetic oligonucleotide
  Sense strand starting at position 507 of SEQ ID NO: 1244647
cucaguaguuuguuuguuu

SEQ ID NO: 1504489 - RNA, 19 nt, Artificial Sequence
  Description of Artificial Sequence: Synthetic oligonucleotide
  Antisense strand to SEQ ID NO: 1504488
aaacaaacaaacuacugag

SEQ ID NO: 1504490 - RNA, 19 nt, Artificial Sequence
  Description of Artificial Sequence: Synthetic oligonucleotide
  Sense strand starting at position 808 of SEQ ID NO: 1244647
gccugccucucaguaguua

SEQ ID NO: 1504491 - RNA, 19 nt, Artificial Sequence
  Description of Artificial Sequence: Synthetic oligonucleotide
  Antisense strand to SEQ ID NO: 1504490
uaacuacugagaggcaggc

SEQ ID NO: 1504492 - RNA, 19 nt, Artificial Sequence
  Description of Artificial Sequence: Synthetic oligonucleotide
  Sense strand starting at position 809 of SEQ ID NO: 1244647
ccugccucucaguaguuau

SEQ ID NO: 1504493 - RNA, 19 nt, Artificial Sequence
  Description of Artificial Sequence: Synthetic oligonucleotide
  Antisense strand to SEQ ID NO: 1504492
auaacuacugagaggcagg

SEQ ID NO: 1504494 - RNA, 19 nt, Artificial Sequence
  Description of Artificial Sequence: Synthetic oligonucleotide
  Sense strand starting at position 812 of SEQ ID NO: 1244647
gccucucaguaguuauuua

SEQ ID NO: 1504495 - RNA, 19 nt, Artificial Sequence
  Description of Artificial Sequence: Synthetic oligonucleotide
  Antisense strand to SEQ ID NO: 1504494
uaaauaacuacugagaggc

SEQ ID NO: 1504496 - RNA, 19 nt, Artificial Sequence
  Description of Artificial Sequence: Synthetic oligonucleotide
  Sense strand starting at position 820 of SEQ ID NO: 1244647
guaguuauuuaccacugaa

SEQ ID NO: 1504497 - RNA, 19 nt, Artificial Sequence
  Description of Artificial Sequence: Synthetic oligonucleotide
  Antisense strand to SEQ ID NO: 1504496
uucagugguaaauaacuac

SEQ ID NO: 1504498 - RNA, 19 nt, Artificial Sequence
  Description of Artificial Sequence: Synthetic oligonucleotide
  Sense strand starting at position 842 of SEQ ID NO: 1244647
gagugaagccugugcucca

SEQ ID NO: 1504499 - RNA, 19 nt, Artificial Sequence
  Description of Artificial Sequence: Synthetic oligonucleotide
  Antisense strand to SEQ ID NO: 1504498
uggagcacaggcuucacuc

SEQ ID NO: 1504500 - RNA, 19 nt, Artificial Sequence
  Description of Artificial Sequence: Synthetic oligonucleotide
  Sense strand starting at position 1094 of SEQ ID NO: 1244647
ggaggugauccaggucuuu

SEQ ID NO: 1504501 - RNA, 19 nt, Artificial Sequence
  Description of Artificial Sequence: Synthetic oligonucleotide
  Antisense strand to SEQ ID NO: 1504500
aaagaccuggaucaccucc

SEQ ID NO: 1504502 - RNA, 19 nt, Artificial Sequence
  Description of Artificial Sequence: Synthetic oligonucleotide
  Sense strand starting at position 1481 of SEQ ID NO: 1244647
ccaugacagucuucucaca

SEQ ID NO: 1504503 - RNA, 19 nt, Artificial Sequence
  Description of Artificial Sequence: Synthetic oligonucleotide
  Antisense strand to SEQ ID NO: 1504502
ugugagaagacugucaugg

SEQ ID NO: 1504504 - RNA, 19 nt, Artificial Sequence
  Description of Artificial Sequence: Synthetic oligonucleotide
  Sense strand starting at position 1483 of SEQ ID NO: 1244647
augacagucuucucacaua

SEQ ID NO: 1504505 - RNA, 19 nt, Artificial Sequence
  Description of Artificial Sequence: Synthetic oligonucleotide
  Antisense strand to SEQ ID NO: 1504504
uaugugagaagacugucau

SEQ ID NO: 1504506 - RNA, 19 nt, Artificial Sequence
  Description of Artificial Sequence: Synthetic oligonucleotide
  Sense strand starting at position 1534 of SEQ ID NO: 1244647
aagugagaguaacucguua

SEQ ID NO: 1504507 - RNA, 19 nt, Artificial Sequence
  Description of Artificial Sequence: Synthetic oligonucleotide
  Antisense strand to SEQ ID NO: 1504506
uaacgaguuacucucacuu

SEQ ID NO: 1504508 - RNA, 19 nt, Artificial Sequence
  Description of Artificial Sequence: Synthetic oligonucleotide
  Sense strand starting at position 1536 of SEQ ID NO: 1244647
gugagaguaacucguuaca

SEQ ID NO: 1504509 - RNA, 19 nt, Artificial Sequence
  Description of Artificial Sequence: Synthetic oligonucleotide
  Antisense strand to SEQ ID NO: 1504508
uguaacgaguuacucucac

SEQ ID NO: 1504510 - RNA, 19 nt, Artificial Sequence
  Description of Artificial Sequence: Synthetic oligonucleotide
  Sense strand starting at position 1538 of SEQ ID NO: 1244647
gagaguaacucguuacagu

SEQ ID NO: 1504511 - RNA, 19 nt, Artificial Sequence
  Description of Artificial Sequence: Synthetic oligonucleotide
  Antisense strand to SEQ ID NO: 1504510
acuguaacgaguuacucuc

SEQ ID NO: 1504512 - RNA, 19 nt, Artificial Sequence
  Description of Artificial Sequence: Synthetic oligonucleotide
  Sense strand starting at position 1539 of SEQ ID NO: 1244647
agaguaacucguuacaguu

SEQ ID NO: 1504513 - RNA, 19 nt, Artificial Sequence
  Description of Artificial Sequence: Synthetic oligonucleotide
  Antisense strand to SEQ ID NO: 1504512
aacuguaacgaguuacucu

SEQ ID NO: 1504514 - RNA, 19 nt, Artificial Sequence
  Description of Artificial Sequence: Synthetic oligonucleotide
  Sense strand starting at position 1677 of SEQ ID NO: 1244647
gccaguuaccaguagagca

SEQ ID NO: 1504515 - RNA, 19 nt, Artificial Sequence
  Description of Artificial Sequence: Synthetic oligonucleotide
  Antisense strand to SEQ ID NO: 1504514
ugcucuacugguaacuggc

SEQ ID NO: 1504516 - RNA, 19 nt, Artificial Sequence
  Description of Artificial Sequence: Synthetic oligonucleotide
  Sense strand starting at position 2054 of SEQ ID NO: 1244647
uggcgucaucucuaggcaa

SEQ ID NO: 1504517 - RNA, 19 nt, Artificial Sequence
  Description of Artificial Sequence: Synthetic oligonucleotide
  Antisense strand to SEQ ID NO: 1504516
uugccuagagaugacgcca

SEQ ID NO: 1504518 - RNA, 19 nt, Artificial Sequence
  Description of Artificial Sequence: Synthetic oligonucleotide
  Sense strand starting at position 2764 of SEQ ID NO: 1244647
aucugauaaugucugauau

SEQ ID NO: 1504519 - RNA, 19 nt, Artificial Sequence
  Description of Artificial Sequence: Synthetic oligonucleotide
  Antisense strand to SEQ ID NO: 1504518
auaucagacauuaucagau

SEQ ID NO: 1504520 - RNA, 19 nt, Artificial Sequence
  Description of Artificial Sequence: Synthetic oligonucleotide
  Sense strand starting at position 2765 of SEQ ID NO: 1244647
ucugauaaugucugauaua

SEQ ID NO: 1504521 - RNA, 19 nt, Artificial Sequence
  Description of Artificial Sequence: Synthetic oligonucleotide
  Antisense strand to SEQ ID NO: 1504520
uauaucagacauuaucaga

SEQ ID NO: 1504522 - RNA, 19 nt, Artificial Sequence
  Description of Artificial Sequence: Synthetic oligonucleotide
  Sense strand starting at position 2766 of SEQ ID NO: 1244647
cugauaaugucugauauau

SEQ ID NO: 1504523 - RNA, 19 nt, Artificial Sequence
  Description of Artificial Sequence: Synthetic oligonucleotide
  Antisense strand to SEQ ID NO: 1504522
auauaucagacauuaucag

SEQ ID NO: 1504524 - RNA, 19 nt, Artificial Sequence
  Description of Artificial Sequence: Synthetic oligonucleotide
  Sense strand starting at position 2768 of SEQ ID NO: 1244647
gauaaugucugauauaugu

SEQ ID NO: 1504525 - RNA, 19 nt, Artificial Sequence
  Description of Artificial Sequence: Synthetic oligonucleotide
  Antisense strand to SEQ ID NO: 1504524
acauauaucagacauuauc

SEQ ID NO: 1504526 - RNA, 19 nt, Artificial Sequence
  Description of Artificial Sequence: Synthetic oligonucleotide
  Sense strand starting at position 2775 of SEQ ID NO: 1244647
ucugauauaugucugguaa

SEQ ID NO: 1504527 - RNA, 19 nt, Artificial Sequence
  Description of Artificial Sequence: Synthetic oligonucleotide
  Antisense strand to SEQ ID NO: 1504526
uuaccagacauauaucaga

SEQ ID NO: 1504528 - RNA, 19 nt, Artificial Sequence
  Description of Artificial Sequence: Synthetic oligonucleotide
  Sense strand starting at position 3113 of SEQ ID NO: 1244647
acaucuggcucagaagauu

SEQ ID NO: 1504529 - RNA, 19 nt, Artificial Sequence
  Description of Artificial Sequence: Synthetic oligonucleotide
  Antisense strand to SEQ ID NO: 1504528
aaucuucugagccagaugu

SEQ ID NO: 1504530 - RNA, 19 nt, Artificial Sequence
  Description of Artificial Sequence: Synthetic oligonucleotide
  Sense strand starting at position 3122 of SEQ ID NO: 1244647
ucagaagauuccugauuug

SEQ ID NO: 1504531 - RNA, 19 nt, Artificial Sequence
  Description of Artificial Sequence: Synthetic oligonucleotide
  Antisense strand to SEQ ID NO: 1504530
caaaucaggaaucuucuga

SEQ ID NO: 1504532 - RNA, 19 nt, Artificial Sequence
  Description of Artificial Sequence: Synthetic oligonucleotide
  Sense strand starting at position 3139 of SEQ ID NO: 1244647
ugcaguguuuacuaauuuc

SEQ ID NO: 1504533 - RNA, 19 nt, Artificial Sequence
  Description of Artificial Sequence: Synthetic oligonucleotide
  Antisense strand to SEQ ID NO: 1504532
gaaauuaguaaacacugca

SEQ ID NO: 1504534 - RNA, 19 nt, Artificial Sequence
  Description of Artificial Sequence: Synthetic oligonucleotide
  Sense strand starting at position 3511 of SEQ ID NO: 1244647
uccaaaguuuagcugcuaa

SEQ ID NO: 1504535 - RNA, 19 nt, Artificial Sequence
  Description of Artificial Sequence: Synthetic oligonucleotide
  Antisense strand to SEQ ID NO: 1504534
uuagcagcuaaacuuugga

SEQ ID NO: 1504536 - RNA, 19 nt, Artificial Sequence
  Description of Artificial Sequence: Synthetic oligonucleotide
  Sense strand starting at position 3885 of SEQ ID NO: 1244647
auaaaugcuucuguggaua

SEQ ID NO: 1504537 - RNA, 19 nt, Artificial Sequence
  Description of Artificial Sequence: Synthetic oligonucleotide
  Antisense strand to SEQ ID NO: 1504536
uauccacagaagcauuuau

SEQ ID NO: 1504538 - RNA, 19 nt, Artificial Sequence
  Description of Artificial Sequence: Synthetic oligonucleotide
  Sense strand starting at position 3897 of SEQ ID NO: 1244647
guggauagagcucauccua

SEQ ID NO: 1504539 - RNA, 19 nt, Artificial Sequence
  Description of Artificial Sequence: Synthetic oligonucleotide
  Antisense strand to SEQ ID NO: 1504538
uaggaugagcucuauccac

SEQ ID NO: 1504540 - RNA, 19 nt, Artificial Sequence
  Description of Artificial Sequence: Synthetic oligonucleotide
  Sense strand starting at position 3925 of SEQ ID NO: 1244647
agcugugacuucuugguuu

SEQ ID NO: 1504541 - RNA, 19 nt, Artificial Sequence
  Description of Artificial Sequence: Synthetic oligonucleotide
  Antisense strand to SEQ ID NO: 1504540
aaaccaagaagucacagcu

SEQ ID NO: 1504542 - RNA, 19 nt, Artificial Sequence
  Description of Artificial Sequence: Synthetic oligonucleotide
  Sense strand starting at position 3927 of SEQ ID NO: 1244647
cugugacuucuugguuugu

SEQ ID NO: 1504543 - RNA, 19 nt, Artificial Sequence
  Description of Artificial Sequence: Synthetic oligonucleotide
  Antisense strand to SEQ ID NO: 1504542
acaaaccaagaagucacag

SEQ ID NO: 1504544 - RNA, 19 nt, Artificial Sequence
  Description of Artificial Sequence: Synthetic oligonucleotide
  Sense strand starting at position 3929 of SEQ ID NO: 1244647
gugacuucuugguuugugu

SEQ ID NO: 1504545 - RNA, 19 nt, Artificial Sequence
  Description of Artificial Sequence: Synthetic oligonucleotide
  Antisense strand to SEQ ID NO: 1504544
acacaaaccaagaagucac

SEQ ID NO: 1504546 - RNA, 19 nt, Artificial Sequence
  Description of Artificial Sequence: Synthetic oligonucleotide
  Sense strand starting at position 3931 of SEQ ID NO: 1244647
gacuucuugguuuguguuu

SEQ ID NO: 1504547 - RNA, 19 nt, Artificial Sequence
  Description of Artificial Sequence: Synthetic oligonucleotide
  Antisense strand to SEQ ID NO: 1504546
aaacacaaaccaagaaguc

SEQ ID NO: 1504548 - RNA, 19 nt, Artificial Sequence
  Description of Artificial Sequence: Synthetic oligonucleotide
  Sense strand starting at position 244 of SEQ ID NO: 1244648
cugggaugaccgugauggu

SEQ ID NO: 1504549 - RNA, 19 nt, Artificial Sequence
  Description of Artificial Sequence: Synthetic oligonucleotide
  Antisense strand to SEQ ID NO: 1504548
accaucacggucaucccag

SEQ ID NO: 1504550 - RNA, 19 nt, Artificial Sequence
  Description of Artificial Sequence: Synthetic oligonucleotide
  Sense strand starting at position 245 of SEQ ID NO: 1244648
ugggaugaccgugaugguu

SEQ ID NO: 1504551 - RNA, 19 nt, Artificial Sequence
  Description of Artificial Sequence: Synthetic oligonucleotide
  Antisense strand to SEQ ID NO: 1504550
aaccaucacggucauccca

SEQ ID NO: 1504552 - RNA, 19 nt, Artificial Sequence
  Description of Artificial Sequence: Synthetic oligonucleotide
  Sense strand starting at position 298 of SEQ ID NO: 1244648
cugagauguugcccaaguc

SEQ ID NO: 1504553 - RNA, 19 nt, Artificial Sequence
  Description of Artificial Sequence: Synthetic oligonucleotide
  Antisense strand to SEQ ID NO: 1504552
gacuugggcaacaucucag

SEQ ID NO: 1504554 - RNA, 19 nt, Artificial Sequence
  Description of Artificial Sequence: Synthetic oligonucleotide
  Sense strand starting at position 608 of SEQ ID NO: 1244648
ugugauuaucaggagucca

SEQ ID NO: 1504555 - RNA, 19 nt, Artificial Sequence
  Description of Artificial Sequence: Synthetic oligonucleotide
  Antisense strand to SEQ ID NO: 1504554
uggacuccugauaaucaca

SEQ ID NO: 1504556 - RNA, 19 nt, Artificial Sequence
  Description of Artificial Sequence: Synthetic oligonucleotide
  Sense strand starting at position 639 of SEQ ID NO: 1244648
ugagccagacccugagaau

SEQ ID NO: 1504557 - RNA, 19 nt, Artificial Sequence
  Description of Artificial Sequence: Synthetic oligonucleotide
  Antisense strand to SEQ ID NO: 1504556
auucucagggucuggcuca

SEQ ID NO: 1504558 - RNA, 19 nt, Artificial Sequence
  Description of Artificial Sequence: Synthetic oligonucleotide
  Sense strand starting at position 853 of SEQ ID NO: 1244648
augugaagucgucgacaca

SEQ ID NO: 1504559 - RNA, 19 nt, Artificial Sequence
  Description of Artificial Sequence: Synthetic oligonucleotide
  Antisense strand to SEQ ID NO: 1504558
ugugucgacgacuucacau

SEQ ID NO: 1504560 - RNA, 19 nt, Artificial Sequence
  Description of Artificial Sequence: Synthetic oligonucleotide
  Sense strand starting at position 856 of SEQ ID NO: 1244648
ugaagucgucgacacagaa

SEQ ID NO: 1504561 - RNA, 19 nt, Artificial Sequence
  Description of Artificial Sequence: Synthetic oligonucleotide
  Antisense strand to SEQ ID NO: 1504560
uucugugucgacgacuuca

SEQ ID NO: 1504562 - RNA, 19 nt, Artificial Sequence
  Description of Artificial Sequence: Synthetic oligonucleotide
  Sense strand starting at position 898 of SEQ ID NO: 1244648
gggacucaaagguguagau

SEQ ID NO: 1504563 - RNA, 19 nt, Artificial Sequence
  Description of Artificial Sequence: Synthetic oligonucleotide
  Antisense strand to SEQ ID NO: 1504562
aucuacaccuuugaguccc

SEQ ID NO: 1504564 - RNA, 19 nt, Artificial Sequence
  Description of Artificial Sequence: Synthetic oligonucleotide
  Sense strand starting at position 907 of SEQ ID NO: 1244648
agguguagaucccugugaa

SEQ ID NO: 1504565 - RNA, 19 nt, Artificial Sequence
  Description of Artificial Sequence: Synthetic oligonucleotide
  Antisense strand to SEQ ID NO: 1504564
uucacagggaucuacaccu

SEQ ID NO: 1504566 - RNA, 19 nt, Artificial Sequence
  Description of Artificial Sequence: Synthetic oligonucleotide
  Sense strand starting at position 908 of SEQ ID NO: 1244648
gguguagaucccugugaag

SEQ ID NO: 1504567 - RNA, 19 nt, Artificial Sequence
  Description of Artificial Sequence: Synthetic oligonucleotide
  Antisense strand to SEQ ID NO: 1504566
cuucacagggaucuacacc

SEQ ID NO: 1504568 - RNA, 19 nt, Artificial Sequence
  Description of Artificial Sequence: Synthetic oligonucleotide
  Sense strand starting at position 910 of SEQ ID NO: 1244648
uguagaucccugugaaggu

SEQ ID NO: 1504569 - RNA, 19 nt, Artificial Sequence
  Description of Artificial Sequence: Synthetic oligonucleotide
  Antisense strand to SEQ ID NO: 1504568
accuucacagggaucuaca

SEQ ID NO: 1504570 - RNA, 19 nt, Artificial Sequence
  Description of Artificial Sequence: Synthetic oligonucleotide
  Sense strand starting at position 1083 of SEQ ID NO: 1244648
ggacucaagguguggauga

SEQ ID NO: 1504571 - RNA, 19 nt, Artificial Sequence
  Description of Artificial Sequence: Synthetic oligonucleotide
  Antisense strand to SEQ ID NO: 1504570
ucauccacaccuugagucc

SEQ ID NO: 1504572 - RNA, 19 nt, Artificial Sequence
  Description of Artificial Sequence: Synthetic oligonucleotide
  Sense strand starting at position 1112 of SEQ ID NO: 1244648
gacagugugucucccugaa

SEQ ID NO: 1504573 - RNA, 19 nt, Artificial Sequence
  Description of Artificial Sequence: Synthetic oligonucleotide
  Antisense strand to SEQ ID NO: 1504572
uucagggagacacacuguc

SEQ ID NO: 1504574 - RNA, 19 nt, Artificial Sequence
  Description of Artificial Sequence: Synthetic oligonucleotide
  Sense strand starting at position 1114 of SEQ ID NO: 1244648
cagugugucucccugaaag

SEQ ID NO: 1504575 - RNA, 19 nt, Artificial Sequence
  Description of Artificial Sequence: Synthetic oligonucleotide
  Antisense strand to SEQ ID NO: 1504574
cuuucagggagacacacug

SEQ ID NO: 1504576 - RNA, 19 nt, Artificial Sequence
  Description of Artificial Sequence: Synthetic oligonucleotide
  Sense strand starting at position 1116 of SEQ ID NO: 1244648
gugugucucccugaaagac

SEQ ID NO: 1504577 - RNA, 19 nt, Artificial Sequence
  Description of Artificial Sequence: Synthetic oligonucleotide
  Antisense strand to SEQ ID NO: 1504576
gucuuucagggagacacac

SEQ ID NO: 1504578 - RNA, 19 nt, Artificial Sequence
  Description of Artificial Sequence: Synthetic oligonucleotide
  Sense strand starting at position 1154 of SEQ ID NO: 1244648
ggugcaaacaccugagaug

SEQ ID NO: 1504579 - RNA, 19 nt, Artificial Sequence
  Description of Artificial Sequence: Synthetic oligonucleotide
  Antisense strand to SEQ ID NO: 1504578
caucucagguguuugcacc

SEQ ID NO: 1504580 - RNA, 19 nt, Artificial Sequence
  Description of Artificial Sequence: Synthetic oligonucleotide
  Sense strand starting at position 1243 of SEQ ID NO: 1244648
ggucacucauggucaugaa

SEQ ID NO: 1504581 - RNA, 19 nt, Artificial Sequence
  Description of Artificial Sequence: Synthetic oligonucleotide
  Antisense strand to SEQ ID NO: 1504580
uucaugaccaugagugacc

SEQ ID NO: 1504582 - RNA, 19 nt, Artificial Sequence
  Description of Artificial Sequence: Synthetic oligonucleotide
  Sense strand starting at position 1244 of SEQ ID NO: 1244648
gucacucauggucaugaau

SEQ ID NO: 1504583 - RNA, 19 nt, Artificial Sequence
  Description of Artificial Sequence: Synthetic oligonucleotide
  Antisense strand to SEQ ID NO: 1504582
auucaugaccaugagugac

SEQ ID NO: 1504584 - RNA, 19 nt, Artificial Sequence
  Description of Artificial Sequence: Synthetic oligonucleotide
  Sense strand starting at position 1261 of SEQ ID NO: 1244648
auacgcaguuggucaagau

SEQ ID NO: 1504585 - RNA, 19 nt, Artificial Sequence
  Description of Artificial Sequence: Synthetic oligonucleotide
  Antisense strand to SEQ ID NO: 1504584
aucuugaccaacugcguau

SEQ ID NO: 1504586 - RNA, 19 nt, Artificial Sequence
  Description of Artificial Sequence: Synthetic oligonucleotide
  Sense strand starting at position 1273 of SEQ ID NO: 1244648
ucaagauggugaucaugau

SEQ ID NO: 1504587 - RNA, 19 nt, Artificial Sequence
  Description of Artificial Sequence: Synthetic oligonucleotide
  Antisense strand to SEQ ID NO: 1504586
aucaugaucaccaucuuga

SEQ ID NO: 1504588 - RNA, 19 nt, Artificial Sequence
  Description of Artificial Sequence: Synthetic oligonucleotide
  Sense strand starting at position 1414 of SEQ ID NO: 1244648
ucccaucuugggcaggaua

SEQ ID NO: 1504589 - RNA, 19 nt, Artificial Sequence
  Description of Artificial Sequence: Synthetic oligonucleotide
  Antisense strand to SEQ ID NO: 1504588
uauccugcccaagauggga

SEQ ID NO: 1504590 - RNA, 19 nt, Artificial Sequence
  Description of Artificial Sequence: Synthetic oligonucleotide
  Sense strand starting at position 1425 of SEQ ID NO: 1244648
gcaggauaugcauggauga

SEQ ID NO: 1504591 - RNA, 19 nt, Artificial Sequence
  Description of Artificial Sequence: Synthetic oligonucleotide
  Antisense strand to SEQ ID NO: 1504590
ucauccaugcauauccugc

SEQ ID NO: 1504592 - RNA, 19 nt, Artificial Sequence
  Description of Artificial Sequence: Synthetic oligonucleotide
  Sense strand starting at position 1531 of SEQ ID NO: 1244648
ccuuguugaguacgaugaa

SEQ ID NO: 1504593 - RNA, 19 nt, Artificial Sequence
  Description of Artificial Sequence: Synthetic oligonucleotide
  Antisense strand to SEQ ID NO: 1504592
uucaucguacucaacaagg

SEQ ID NO: 1504594 - RNA, 19 nt, Artificial Sequence
  Description of Artificial Sequence: Synthetic oligonucleotide
  Sense strand starting at position 1534 of SEQ ID NO: 1244648
uguugaguacgaugaaggu

SEQ ID NO: 1504595 - RNA, 19 nt, Artificial Sequence
  Description of Artificial Sequence: Synthetic oligonucleotide
  Antisense strand to SEQ ID NO: 1504594
accuucaucguacucaaca

SEQ ID NO: 1504596 - RNA, 19 nt, Artificial Sequence
  Description of Artificial Sequence: Synthetic oligonucleotide
  Sense strand starting at position 1719 of SEQ ID NO: 1244648
cguagaucauggguagguu

SEQ ID NO: 1504597 - RNA, 19 nt, Artificial Sequence
  Description of Artificial Sequence: Synthetic oligonucleotide
  Antisense strand to SEQ ID NO: 1504596
aaccuacccaugaucuacg

SEQ ID NO: 1504598 - RNA, 19 nt, Artificial Sequence
  Description of Artificial Sequence: Synthetic oligonucleotide
  Sense strand starting at position 2394 of SEQ ID NO: 1244648
guuagaucaaagugggacu

SEQ ID NO: 1504599 - RNA, 19 nt, Artificial Sequence
  Description of Artificial Sequence: Synthetic oligonucleotide
  Antisense strand to SEQ ID NO: 1504598
agucccacuuugaucuaac

SEQ ID NO: 1504600 - RNA, 19 nt, Artificial Sequence
  Description of Artificial Sequence: Synthetic oligonucleotide
  Sense strand starting at position 2515 of SEQ ID NO: 1244648
gguugcugugauugauuag

SEQ ID NO: 1504601 - RNA, 19 nt, Artificial Sequence
  Description of Artificial Sequence: Synthetic oligonucleotide
  Antisense strand to SEQ ID NO: 1504600
cuaaucaaucacagcaacc

SEQ ID NO: 1504602 - RNA, 19 nt, Artificial Sequence
  Description of Artificial Sequence: Synthetic oligonucleotide
  Sense strand starting at position 2516 of SEQ ID NO: 1244648
guugcugugauugauuagu

SEQ ID NO: 1504603 - RNA, 19 nt, Artificial Sequence
  Description of Artificial Sequence: Synthetic oligonucleotide
  Antisense strand to SEQ ID NO: 1504602
acuaaucaaucacagcaac

SEQ ID NO: 1504604 - RNA, 19 nt, Artificial Sequence
  Description of Artificial Sequence: Synthetic oligonucleotide
  Sense strand starting at position 2633 of SEQ ID NO: 1244648
guggauuccucuuuccuga

SEQ ID NO: 1504605 - RNA, 19 nt, Artificial Sequence
  Description of Artificial Sequence: Synthetic oligonucleotide
  Antisense strand to SEQ ID NO: 1504604
ucaggaaagaggaauccac

SEQ ID NO: 1504606 - RNA, 19 nt, Artificial Sequence
  Description of Artificial Sequence: Synthetic oligonucleotide
  Sense strand starting at position 2810 of SEQ ID NO: 1244648
ggugcuaacguggaagaga

SEQ ID NO: 1504607 - RNA, 19 nt, Artificial Sequence
  Description of Artificial Sequence: Synthetic oligonucleotide
  Antisense strand to SEQ ID NO: 1504606
ucucuuccacguuagcacc

SEQ ID NO: 1504608 - RNA, 19 nt, Artificial Sequence
  Description of Artificial Sequence: Synthetic oligonucleotide
  Sense strand starting at position 2811 of SEQ ID NO: 1244648
gugcuaacguggaagagaa

SEQ ID NO: 1504609 - RNA, 19 nt, Artificial Sequence
  Description of Artificial Sequence: Synthetic oligonucleotide
  Antisense strand to SEQ ID NO: 1504608
uucucuuccacguuagcac

SEQ ID NO: 1504610 - RNA, 19 nt, Artificial Sequence
  Description of Artificial Sequence: Synthetic oligonucleotide
  Sense strand starting at position 2966 of SEQ ID NO: 1244648
cuuugaugccugugagcau

SEQ ID NO: 1504611 - RNA, 19 nt, Artificial Sequence
  Description of Artificial Sequence: Synthetic oligonucleotide
  Antisense strand to SEQ ID NO: 1504610
augcucacaggcaucaaag

SEQ ID NO: 1504612 - RNA, 19 nt, Artificial Sequence
  Description of Artificial Sequence: Synthetic oligonucleotide
  Sense strand starting at position 3037 of SEQ ID NO: 1244648
agccuauuccuguggaagg

SEQ ID NO: 1504613 - RNA, 19 nt, Artificial Sequence
  Description of Artificial Sequence: Synthetic oligonucleotide
  Antisense strand to SEQ ID NO: 1504612
ccuuccacaggaauaggcu

SEQ ID NO: 1504614 - RNA, 19 nt, Artificial Sequence
  Description of Artificial Sequence: Synthetic oligonucleotide
  Sense strand starting at position 3586 of SEQ ID NO: 1244648
aucucacagcucugucaua

SEQ ID NO: 1504615 - RNA, 19 nt, Artificial Sequence
  Description of Artificial Sequence: Synthetic oligonucleotide
  Antisense strand to SEQ ID NO: 1504614
uaugacagagcugugagau

SEQ ID NO: 1504616 - RNA, 19 nt, Artificial Sequence
  Description of Artificial Sequence: Synthetic oligonucleotide
  Sense strand starting at position 3587 of SEQ ID NO: 1244648
ucucacagcucugucauau

SEQ ID NO: 1504617 - RNA, 19 nt, Artificial Sequence
  Description of Artificial Sequence: Synthetic oligonucleotide
  Antisense strand to SEQ ID NO: 1504616
auaugacagagcugugaga

SEQ ID NO: 1504618 - RNA, 19 nt, Artificial Sequence
  Description of Artificial Sequence: Synthetic oligonucleotide
  Sense strand starting at position 3653 of SEQ ID NO: 1244648
ugcugcuugucacuacaca

SEQ ID NO: 1504619 - RNA, 19 nt, Artificial Sequence
  Description of Artificial Sequence: Synthetic oligonucleotide
  Antisense strand to SEQ ID NO: 1504618
uguguagugacaagcagca

SEQ ID NO: 1504620 - RNA, 19 nt, Artificial Sequence
  Description of Artificial Sequence: Synthetic oligonucleotide
  Sense strand starting at position 3686 of SEQ ID NO: 1244648
gccagauggccuugaagag

SEQ ID NO: 1504621 - RNA, 19 nt, Artificial Sequence
  Description of Artificial Sequence: Synthetic oligonucleotide
  Antisense strand to SEQ ID NO: 1504620
cucuucaaggccaucuggc

SEQ ID NO: 1504622 - RNA, 19 nt, Artificial Sequence
  Description of Artificial Sequence: Synthetic oligonucleotide
  Sense strand starting at position 3752 of SEQ ID NO: 1244648
ugauccuccuguccugaua

SEQ ID NO: 1504623 - RNA, 19 nt, Artificial Sequence
  Description of Artificial Sequence: Synthetic oligonucleotide
  Antisense strand to SEQ ID NO: 1504622
uaucaggacaggaggauca

SEQ ID NO: 1504624 - RNA, 19 nt, Artificial Sequence
  Description of Artificial Sequence: Synthetic oligonucleotide
  Sense strand starting at position 3856 of SEQ ID NO: 1244648
ggaaaugacucucaccuga

SEQ ID NO: 1504625 - RNA, 19 nt, Artificial Sequence
  Description of Artificial Sequence: Synthetic oligonucleotide
  Antisense strand to SEQ ID NO: 1504624
ucaggugagagucauuucc

SEQ ID NO: 1504626 - RNA, 19 nt, Artificial Sequence
  Description of Artificial Sequence: Synthetic oligonucleotide
  Sense strand starting at position 3952 of SEQ ID NO: 1244648
gccuuucuucuugggagca

SEQ ID NO: 1504627 - RNA, 19 nt, Artificial Sequence
  Description of Artificial Sequence: Synthetic oligonucleotide
  Antisense strand to SEQ ID NO: 1504626
ugcucccaagaagaaaggc

SEQ ID NO: 1504628 - RNA, 19 nt, Artificial Sequence
  Description of Artificial Sequence: Synthetic oligonucleotide
  Sense strand starting at position 20 of SEQ ID NO: 1244649
gggugaaagguauguagaa

SEQ ID NO: 1504629 - RNA, 19 nt, Artificial Sequence
  Description of Artificial Sequence: Synthetic oligonucleotide
  Antisense strand to SEQ ID NO: 1504628
uucuacauaccuuucaccc

SEQ ID NO: 1504630 - RNA, 19 nt, Artificial Sequence
  Description of Artificial Sequence: Synthetic oligonucleotide
  Sense strand starting at position 144 of SEQ ID NO: 1244649
cagggcugagcagaugaua

SEQ ID NO: 1504631 - RNA, 19 nt, Artificial Sequence
  Description of Artificial Sequence: Synthetic oligonucleotide
  Antisense strand to SEQ ID NO: 1504630
uaucaucugcucagcccug

SEQ ID NO: 1504632 - RNA, 19 nt, Artificial Sequence
  Description of Artificial Sequence: Synthetic oligonucleotide
  Sense strand starting at position 152 of SEQ ID NO: 1244649
agcagaugauaaucuacuu

SEQ ID NO: 1504633 - RNA, 19 nt, Artificial Sequence
  Description of Artificial Sequence: Synthetic oligonucleotide
  Antisense strand to SEQ ID NO: 1504632
aaguagauuaucaucugcu

SEQ ID NO: 1504634 - RNA, 19 nt, Artificial Sequence
  Description of Artificial Sequence: Synthetic oligonucleotide
  Sense strand starting at position 406 of SEQ ID NO: 1244649
cucaaaguuucuguggaug

SEQ ID NO: 1504635 - RNA, 19 nt, Artificial Sequence
  Description of Artificial Sequence: Synthetic oligonucleotide
  Antisense strand to SEQ ID NO: 1504634
cauccacagaaacuuugag

SEQ ID NO: 1504636 - RNA, 19 nt, Artificial Sequence
  Description of Artificial Sequence: Synthetic oligonucleotide
  Sense strand starting at position 430 of SEQ ID NO: 1244649
aggucugggaucugaacua

SEQ ID NO: 1504637 - RNA, 19 nt, Artificial Sequence
  Description of Artificial Sequence: Synthetic oligonucleotide
  Antisense strand to SEQ ID NO: 1504636
uaguucagaucccagaccu

SEQ ID NO: 1504638 - RNA, 19 nt, Artificial Sequence
  Description of Artificial Sequence: Synthetic oligonucleotide
  Sense strand starting at position 558 of SEQ ID NO: 1244649
ugacccuagcuccaguaau

SEQ ID NO: 1504639 - RNA, 19 nt, Artificial Sequence
  Description of Artificial Sequence: Synthetic oligonucleotide
  Antisense strand to SEQ ID NO: 1504638
auuacuggagcuaggguca

SEQ ID NO: 1504640 - RNA, 19 nt, Artificial Sequence
  Description of Artificial Sequence: Synthetic oligonucleotide
  Sense strand starting at position 955 of SEQ ID NO: 1244649
aacgaaauuugggagguua

SEQ ID NO: 1504641 - RNA, 19 nt, Artificial Sequence
  Description of Artificial Sequence: Synthetic oligonucleotide
  Antisense strand to SEQ ID NO: 1504640
uaaccucccaaauuucguu

SEQ ID NO: 1504642 - RNA, 19 nt, Artificial Sequence
  Description of Artificial Sequence: Synthetic oligonucleotide
  Sense strand starting at position 1090 of SEQ ID NO: 1244649
agaugauguuggccaacua

SEQ ID NO: 1504643 - RNA, 19 nt, Artificial Sequence
  Description of Artificial Sequence: Synthetic oligonucleotide
  Antisense strand to SEQ ID NO: 1504642
uaguuggccaacaucaucu

SEQ ID NO: 1504644 - RNA, 19 nt, Artificial Sequence
  Description of Artificial Sequence: Synthetic oligonucleotide
  Sense strand starting at position 1332 of SEQ ID NO: 1244649
ucucaaucacgguaaacuu

SEQ ID NO: 1504645 - RNA, 19 nt, Artificial Sequence
  Description of Artificial Sequence: Synthetic oligonucleotide
  Antisense strand to SEQ ID NO: 1504644
aaguuuaccgugauugaga

SEQ ID NO: 1504646 - RNA, 19 nt, Artificial Sequence
  Description of Artificial Sequence: Synthetic oligonucleotide
  Sense strand starting at position 1464 of SEQ ID NO: 1244649
ucaaguucucuguggagaa

SEQ ID NO: 1504647 - RNA, 19 nt, Artificial Sequence
  Description of Artificial Sequence: Synthetic oligonucleotide
  Antisense strand to SEQ ID NO: 1504646
uucuccacagagaacuuga

SEQ ID NO: 1504648 - RNA, 19 nt, Artificial Sequence
  Description of Artificial Sequence: Synthetic oligonucleotide
  Sense strand starting at position 1466 of SEQ ID NO: 1244649
aaguucucuguggagaacu

SEQ ID NO: 1504649 - RNA, 19 nt, Artificial Sequence
  Description of Artificial Sequence: Synthetic oligonucleotide
  Antisense strand to SEQ ID NO: 1504648
aguucuccacagagaacuu

SEQ ID NO: 1504650 - RNA, 19 nt, Artificial Sequence
  Description of Artificial Sequence: Synthetic oligonucleotide
  Sense strand starting at position 1902 of SEQ ID NO: 1244649
cgcauaacucguccgggua

SEQ ID NO: 1504651 - RNA, 19 nt, Artificial Sequence
  Description of Artificial Sequence: Synthetic oligonucleotide
  Antisense strand to SEQ ID NO: 1504650
uacccggacgaguuaugcg

SEQ ID NO: 1504652 - RNA, 19 nt, Artificial Sequence
  Description of Artificial Sequence: Synthetic oligonucleotide
  Sense strand starting at position 1973 of SEQ ID NO: 1244649
ccgcgauuuccgguagcgu

SEQ ID NO: 1504653 - RNA, 19 nt, Artificial Sequence
  Description of Artificial Sequence: Synthetic oligonucleotide
  Antisense strand to SEQ ID NO: 1504652
acgcuaccggaaaucgcgg

SEQ ID NO: 1504654 - RNA, 19 nt, Artificial Sequence
  Description of Artificial Sequence: Synthetic oligonucleotide
  Sense strand starting at position 2412 of SEQ ID NO: 1244649
gaggaagugccagaauguu

SEQ ID NO: 1504655 - RNA, 19 nt, Artificial Sequence
  Description of Artificial Sequence: Synthetic oligonucleotide
  Antisense strand to SEQ ID NO: 1504654
aacauucuggcacuuccuc

SEQ ID NO: 1504656 - RNA, 19 nt, Artificial Sequence
  Description of Artificial Sequence: Synthetic oligonucleotide
  Sense strand starting at position 2421 of SEQ ID NO: 1244649
ccagaauguugacuccuuu

SEQ ID NO: 1504657 - RNA, 19 nt, Artificial Sequence
  Description of Artificial Sequence: Synthetic oligonucleotide
  Antisense strand to SEQ ID NO: 1504656
aaaggagucaacauucugg

SEQ ID NO: 1504658 - RNA, 19 nt, Artificial Sequence
  Description of Artificial Sequence: Synthetic oligonucleotide
  Sense strand starting at position 2427 of SEQ ID NO: 1244649
uguugacuccuuuacaucu

SEQ ID NO: 1504659 - RNA, 19 nt, Artificial Sequence
  Description of Artificial Sequence: Synthetic oligonucleotide
  Antisense strand to SEQ ID NO: 1504658
agauguaaaggagucaaca

SEQ ID NO: 1504660 - RNA, 19 nt, Artificial Sequence
  Description of Artificial Sequence: Synthetic oligonucleotide
  Sense strand starting at position 2461 of SEQ ID NO: 1244649
acccauugcgauugaaaua

SEQ ID NO: 1504661 - RNA, 19 nt, Artificial Sequence
  Description of Artificial Sequence: Synthetic oligonucleotide
  Antisense strand to SEQ ID NO: 1504660
uauuucaaucgcaaugggu

SEQ ID NO: 1504662 - RNA, 19 nt, Artificial Sequence
  Description of Artificial Sequence: Synthetic oligonucleotide
  Sense strand starting at position 2466 of SEQ ID NO: 1244649
uugcgauugaaauagucuu

SEQ ID NO: 1504663 - RNA, 19 nt, Artificial Sequence
  Description of Artificial Sequence: Synthetic oligonucleotide
  Antisense strand to SEQ ID NO: 1504662
aagacuauuucaaucgcaa

SEQ ID NO: 1504664 - RNA, 19 nt, Artificial Sequence
  Description of Artificial Sequence: Synthetic oligonucleotide
  Sense strand starting at position 2550 of SEQ ID NO: 1244649
ugcccagcgcuucuaguua

SEQ ID NO: 1504665 - RNA, 19 nt, Artificial Sequence
  Description of Artificial Sequence: Synthetic oligonucleotide
  Antisense strand to SEQ ID NO: 1504664
uaacuagaagcgcugggca

SEQ ID NO: 1504666 - RNA, 19 nt, Artificial Sequence
  Description of Artificial Sequence: Synthetic oligonucleotide
  Sense strand starting at position 2554 of SEQ ID NO: 1244649
cagcgcuucuaguuauuua

SEQ ID NO: 1504667 - RNA, 19 nt, Artificial Sequence
  Description of Artificial Sequence: Synthetic oligonucleotide
  Antisense strand to SEQ ID NO: 1504666
uaaauaacuagaagcgcug

SEQ ID NO: 1504668 - RNA, 19 nt, Artificial Sequence
  Description of Artificial Sequence: Synthetic oligonucleotide
  Sense strand starting at position 2557 of SEQ ID NO: 1244649
cgcuucuaguuauuuaaca

SEQ ID NO: 1504669 - RNA, 19 nt, Artificial Sequence
  Description of Artificial Sequence: Synthetic oligonucleotide
  Antisense strand to SEQ ID NO: 1504668
uguuaaauaacuagaagcg

SEQ ID NO: 1504670 - RNA, 19 nt, Artificial Sequence
  Description of Artificial Sequence: Synthetic oligonucleotide
  Sense strand starting at position 2601 of SEQ ID NO: 1244649
cauagcaguguguaaagaa

SEQ ID NO: 1504671 - RNA, 19 nt, Artificial Sequence
  Description of Artificial Sequence: Synthetic oligonucleotide
  Antisense strand to SEQ ID NO: 1504670
uucuuuacacacugcuaug

SEQ ID NO: 1504672 - RNA, 19 nt, Artificial Sequence
  Description of Artificial Sequence: Synthetic oligonucleotide
  Sense strand starting at position 2703 of SEQ ID NO: 1244649
cccuacaguuucguuauuu

SEQ ID NO: 1504673 - RNA, 19 nt, Artificial Sequence
  Description of Artificial Sequence: Synthetic oligonucleotide
  Antisense strand to SEQ ID NO: 1504672
aaauaacgaaacuguaggg

SEQ ID NO: 1504674 - RNA, 19 nt, Artificial Sequence
  Description of Artificial Sequence: Synthetic oligonucleotide
  Sense strand starting at position 2704 of SEQ ID NO: 1244649
ccuacaguuucguuauuug

SEQ ID NO: 1504675 - RNA, 19 nt, Artificial Sequence
  Description of Artificial Sequence: Synthetic oligonucleotide
  Antisense strand to SEQ ID NO: 1504674
caaauaacgaaacuguagg

SEQ ID NO: 1504676 - RNA, 19 nt, Artificial Sequence
  Description of Artificial Sequence: Synthetic oligonucleotide
  Sense strand starting at position 2708 of SEQ ID NO: 1244649
caguuucguuauuugaagu

SEQ ID NO: 1504677 - RNA, 19 nt, Artificial Sequence
  Description of Artificial Sequence: Synthetic oligonucleotide
  Antisense strand to SEQ ID NO: 1504676
acuucaaauaacgaaacug

SEQ ID NO: 1504678 - RNA, 19 nt, Artificial Sequence
  Description of Artificial Sequence: Synthetic oligonucleotide
  Sense strand starting at position 2709 of SEQ ID NO: 1244649
aguuucguuauuugaaguu

SEQ ID NO: 1504679 - RNA, 19 nt, Artificial Sequence
  Description of Artificial Sequence: Synthetic oligonucleotide
  Antisense strand to SEQ ID NO: 1504678
aacuucaaauaacgaaacu

SEQ ID NO: 1504680 - RNA, 19 nt, Artificial Sequence
  Description of Artificial Sequence: Synthetic oligonucleotide
  Sense strand starting at position 2732 of SEQ ID NO: 1244649
auggguuccucaucuggaa

SEQ ID NO: 1504681 - RNA, 19 nt, Artificial Sequence
  Description of Artificial Sequence: Synthetic oligonucleotide
  Antisense strand to SEQ ID NO: 1504680
uuccagaugaggaacccau

SEQ ID NO: 1504682 - RNA, 19 nt, Artificial Sequence
  Description of Artificial Sequence: Synthetic oligonucleotide
  Sense strand starting at position 2768 of SEQ ID NO: 1244649
uaaugaggccaagagcauu

SEQ ID NO: 1504683 - RNA, 19 nt, Artificial Sequence
  Description of Artificial Sequence: Synthetic oligonucleotide
  Antisense strand to SEQ ID NO: 1504682
aaugcucuuggccucauua

SEQ ID NO: 1504684 - RNA, 19 nt, Artificial Sequence
  Description of Artificial Sequence: Synthetic oligonucleotide
  Sense strand starting at position 2999 of SEQ ID NO: 1244649
cgacucugaguaggagaaa

SEQ ID NO: 1504685 - RNA, 19 nt, Artificial Sequence
  Description of Artificial Sequence: Synthetic oligonucleotide
  Antisense strand to SEQ ID NO: 1504684
uuucuccuacucagagucg

SEQ ID NO: 1504686 - RNA, 19 nt, Artificial Sequence
  Description of Artificial Sequence: Synthetic oligonucleotide
  Sense strand starting at position 3066 of SEQ ID NO: 1244649
uucuaugaguuagccaaac

SEQ ID NO: 1504687 - RNA, 19 nt, Artificial Sequence
  Description of Artificial Sequence: Synthetic oligonucleotide
  Antisense strand to SEQ ID NO: 1504686
guuuggcuaacucauagaa

SEQ ID NO: 1504688 - RNA, 19 nt, Artificial Sequence
  Description of Artificial Sequence: Synthetic oligonucleotide
  Sense strand starting at position 3176 of SEQ ID NO: 1244649
cugccaaaguucuuaaaug

SEQ ID NO: 1504689 - RNA, 19 nt, Artificial Sequence
  Description of Artificial Sequence: Synthetic oligonucleotide
  Antisense strand to SEQ ID NO: 1504688
cauuuaagaacuuuggcag

SEQ ID NO: 1504690 - RNA, 19 nt, Artificial Sequence
  Description of Artificial Sequence: Synthetic oligonucleotide
  Sense strand starting at position 3283 of SEQ ID NO: 1244649
guauuuguuugcccaggga

SEQ ID NO: 1504691 - RNA, 19 nt, Artificial Sequence
  Description of Artificial Sequence: Synthetic oligonucleotide
  Antisense strand to SEQ ID NO: 1504690
ucccugggcaaacaaauac

SEQ ID NO: 1504692 - RNA, 19 nt, Artificial Sequence
  Description of Artificial Sequence: Synthetic oligonucleotide
  Sense strand starting at position 3343 of SEQ ID NO: 1244649
uguguagucaggcagauag

SEQ ID NO: 1504693 - RNA, 19 nt, Artificial Sequence
  Description of Artificial Sequence: Synthetic oligonucleotide
  Antisense strand to SEQ ID NO: 1504692
cuaucugccugacuacaca

SEQ ID NO: 1504694 - RNA, 19 nt, Artificial Sequence
  Description of Artificial Sequence: Synthetic oligonucleotide
  Sense strand starting at position 3439 of SEQ ID NO: 1244649
guguuucuaccugaucuau

SEQ ID NO: 1504695 - RNA, 19 nt, Artificial Sequence
  Description of Artificial Sequence: Synthetic oligonucleotide
  Antisense strand to SEQ ID NO: 1504694
auagaucagguagaaacac

SEQ ID NO: 1504696 - RNA, 19 nt, Artificial Sequence
  Description of Artificial Sequence: Synthetic oligonucleotide
  Sense strand starting at position 3441 of SEQ ID NO: 1244649
guuucuaccugaucuauua

SEQ ID NO: 1504697 - RNA, 19 nt, Artificial Sequence
  Description of Artificial Sequence: Synthetic oligonucleotide
  Antisense strand to SEQ ID NO: 1504696
uaauagaucagguagaaac

SEQ ID NO: 1504698 - RNA, 19 nt, Artificial Sequence
  Description of Artificial Sequence: Synthetic oligonucleotide
  Sense strand starting at position 3728 of SEQ ID NO: 1244649
uauaguuccuggcucaaag

SEQ ID NO: 1504699 - RNA, 19 nt, Artificial Sequence
  Description of Artificial Sequence: Synthetic oligonucleotide
  Antisense strand to SEQ ID NO: 1504698
cuuugagccaggaacuaua

SEQ ID NO: 1504700 - RNA, 19 nt, Artificial Sequence
  Description of Artificial Sequence: Synthetic oligonucleotide
  Sense strand starting at position 3730 of SEQ ID NO: 1244649
uaguuccuggcucaaagua

SEQ ID NO: 1504701 - RNA, 19 nt, Artificial Sequence
  Description of Artificial Sequence: Synthetic oligonucleotide
  Antisense strand to SEQ ID NO: 1504700
uacuuugagccaggaacua

SEQ ID NO: 1504702 - RNA, 19 nt, Artificial Sequence
  Description of Artificial Sequence: Synthetic oligonucleotide
  Sense strand starting at position 3768 of SEQ ID NO: 1244649
uuggaugaauugcuaguaa

SEQ ID NO: 1504703 - RNA, 19 nt, Artificial Sequence
  Description of Artificial Sequence: Synthetic oligonucleotide
  Antisense strand to SEQ ID NO: 1504702
uuacuagcaauucauccaa

SEQ ID NO: 1504704 - RNA, 19 nt, Artificial Sequence
  Description of Artificial Sequence: Synthetic oligonucleotide
  Sense strand starting at position 3841 of SEQ ID NO: 1244649
aguguuaucccuuauagac

SEQ ID NO: 1504705 - RNA, 19 nt, Artificial Sequence
  Description of Artificial Sequence: Synthetic oligonucleotide
  Antisense strand to SEQ ID NO: 1504704
gucuauaagggauaacacu

SEQ ID NO: 1504706 - RNA, 19 nt, Artificial Sequence
  Description of Artificial Sequence: Synthetic oligonucleotide
  Sense strand starting at position 3899 of SEQ ID NO: 1244649
ccaaaugagguuuauguuu

SEQ ID NO: 1504707 - RNA, 19 nt, Artificial Sequence
  Description of Artificial Sequence: Synthetic oligonucleotide
  Antisense strand to SEQ ID NO: 1504706
aaacauaaaccucauuugg

SEQ ID NO: 1504708 - RNA, 19 nt, Artificial Sequence
  Description of Artificial Sequence: Synthetic oligonucleotide
  Sense strand starting at position 444 of SEQ ID NO: 1244650
guguguuuaauauacguau

SEQ ID NO: 1504709 - RNA, 19 nt, Artificial Sequence
  Description of Artificial Sequence: Synthetic oligonucleotide
  Antisense strand to SEQ ID NO: 1504708
auacguauauuaaacacac

SEQ ID NO: 1504710 - RNA, 19 nt, Artificial Sequence
  Description of Artificial Sequence: Synthetic oligonucleotide
  Sense strand starting at position 571 of SEQ ID NO: 1244650
cguaacaauuuccaaguua

SEQ ID NO: 1504711 - RNA, 19 nt, Artificial Sequence
  Description of Artificial Sequence: Synthetic oligonucleotide
  Antisense strand to SEQ ID NO: 1504710
uaacuuggaaauuguuacg

SEQ ID NO: 1504712 - RNA, 19 nt, Artificial Sequence
  Description of Artificial Sequence: Synthetic oligonucleotide
  Sense strand starting at position 971 of SEQ ID NO: 1244650
aaguguccugaggagcaaa

SEQ ID NO: 1504713 - RNA, 19 nt, Artificial Sequence
  Description of Artificial Sequence: Synthetic oligonucleotide
  Antisense strand to SEQ ID NO: 1504712
uuugcuccucaggacacuu

SEQ ID NO: 1504714 - RNA, 19 nt, Artificial Sequence
  Description of Artificial Sequence: Synthetic oligonucleotide
  Sense strand starting at position 1009 of SEQ ID NO: 1244650
cagacuuagcuauaagguu

SEQ ID NO: 1504715 - RNA, 19 nt, Artificial Sequence
  Description of Artificial Sequence: Synthetic oligonucleotide
  Antisense strand to SEQ ID NO: 1504714
aaccuuauagcuaagucug

SEQ ID NO: 1504716 - RNA, 19 nt, Artificial Sequence
  Description of Artificial Sequence: Synthetic oligonucleotide
  Sense strand starting at position 1045 of SEQ ID NO: 1244650
acgauuauauuguccuuga

SEQ ID NO: 1504717 - RNA, 19 nt, Artificial Sequence
  Description of Artificial Sequence: Synthetic oligonucleotide
  Antisense strand to SEQ ID NO: 1504716
ucaaggacaauauaaucgu

SEQ ID NO: 1504718 - RNA, 19 nt, Artificial Sequence
  Description of Artificial Sequence: Synthetic oligonucleotide
  Sense strand starting at position 1046 of SEQ ID NO: 1244650
cgauuauauuguccuugac

SEQ ID NO: 1504719 - RNA, 19 nt, Artificial Sequence
  Description of Artificial Sequence: Synthetic oligonucleotide
  Antisense strand to SEQ ID NO: 1504718
gucaaggacaauauaaucg

SEQ ID NO: 1504720 - RNA, 19 nt, Artificial Sequence
  Description of Artificial Sequence: Synthetic oligonucleotide
  Sense strand starting at position 1087 of SEQ ID NO: 1244650
ccuugagaaugacagauaa

SEQ ID NO: 1504721 - RNA, 19 nt, Artificial Sequence
  Description of Artificial Sequence: Synthetic oligonucleotide
  Antisense strand to SEQ ID NO: 1504720
uuaucugucauucucaagg

SEQ ID NO: 1504722 - RNA, 19 nt, Artificial Sequence
  Description of Artificial Sequence: Synthetic oligonucleotide
  Sense strand starting at position 1452 of SEQ ID NO: 1244650
gccuuaucucaaugaaaug

SEQ ID NO: 1504723 - RNA, 19 nt, Artificial Sequence
  Description of Artificial Sequence: Synthetic oligonucleotide
  Antisense strand to SEQ ID NO: 1504722
cauuucauugagauaaggc

SEQ ID NO: 1504724 - RNA, 19 nt, Artificial Sequence
  Description of Artificial Sequence: Synthetic oligonucleotide
  Sense strand starting at position 1473 of SEQ ID NO: 1244650
ccauucgugguaggaugua

SEQ ID NO: 1504725 - RNA, 19 nt, Artificial Sequence
  Description of Artificial Sequence: Synthetic oligonucleotide
  Antisense strand to SEQ ID NO: 1504724
uacauccuaccacgaaugg

SEQ ID NO: 1504726 - RNA, 19 nt, Artificial Sequence
  Description of Artificial Sequence: Synthetic oligonucleotide
  Sense strand starting at position 1627 of SEQ ID NO: 1244650
cuucuaucuaggcguagga

SEQ ID NO: 1504727 - RNA, 19 nt, Artificial Sequence
  Description of Artificial Sequence: Synthetic oligonucleotide
  Antisense strand to SEQ ID NO: 1504726
uccuacgccuagauagaag

SEQ ID NO: 1504728 - RNA, 19 nt, Artificial Sequence
  Description of Artificial Sequence: Synthetic oligonucleotide
  Sense strand starting at position 1629 of SEQ ID NO: 1244650
ucuaucuaggcguaggaga

SEQ ID NO: 1504729 - RNA, 19 nt, Artificial Sequence
  Description of Artificial Sequence: Synthetic oligonucleotide
  Antisense strand to SEQ ID NO: 1504728
ucuccuacgccuagauaga

SEQ ID NO: 1504730 - RNA, 19 nt, Artificial Sequence
  Description of Artificial Sequence: Synthetic oligonucleotide
  Sense strand starting at position 1812 of SEQ ID NO: 1244650
aacucucacgccuggagaa

SEQ ID NO: 1504731 - RNA, 19 nt, Artificial Sequence
  Description of Artificial Sequence: Synthetic oligonucleotide
  Antisense strand to SEQ ID NO: 1504730
uucuccaggcgugagaguu

SEQ ID NO: 1504732 - RNA, 19 nt, Artificial Sequence
  Description of Artificial Sequence: Synthetic oligonucleotide
  Sense strand starting at position 1813 of SEQ ID NO: 1244650
acucucacgccuggagaaa

SEQ ID NO: 1504733 - RNA, 19 nt, Artificial Sequence
  Description of Artificial Sequence: Synthetic oligonucleotide
  Antisense strand to SEQ ID NO: 1504732
uuucuccaggcgugagagu

SEQ ID NO: 1504734 - RNA, 19 nt, Artificial Sequence
  Description of Artificial Sequence: Synthetic oligonucleotide
  Sense strand starting at position 2198 of SEQ ID NO: 1244650
gggagaguauuucggaaag

SEQ ID NO: 1504735 - RNA, 19 nt, Artificial Sequence
  Description of Artificial Sequence: Synthetic oligonucleotide
  Antisense strand to SEQ ID NO: 1504734
cuuuccgaaauacucuccc

SEQ ID NO: 1504736 - RNA, 19 nt, Artificial Sequence
  Description of Artificial Sequence: Synthetic oligonucleotide
  Sense strand starting at position 2200 of SEQ ID NO: 1244650
gagaguauuucggaaagga

SEQ ID NO: 1504737 - RNA, 19 nt, Artificial Sequence
  Description of Artificial Sequence: Synthetic oligonucleotide
  Antisense strand to SEQ ID NO: 1504736
uccuuuccgaaauacucuc

SEQ ID NO: 1504738 - RNA, 19 nt, Artificial Sequence
  Description of Artificial Sequence: Synthetic oligonucleotide
  Sense strand starting at position 2216 of SEQ ID NO: 1244650
ggagacauuugaugcagau

SEQ ID NO: 1504739 - RNA, 19 nt, Artificial Sequence
  Description of Artificial Sequence: Synthetic oligonucleotide
  Antisense strand to SEQ ID NO: 1504738
aucugcaucaaaugucucc

SEQ ID NO: 1504740 - RNA, 19 nt, Artificial Sequence
  Description of Artificial Sequence: Synthetic oligonucleotide
  Sense strand starting at position 2246 of SEQ ID NO: 1244650
guugugugaccggaucgaa

SEQ ID NO: 1504741 - RNA, 19 nt, Artificial Sequence
  Description of Artificial Sequence: Synthetic oligonucleotide
  Antisense strand to SEQ ID NO: 1504740
uucgauccggucacacaac

SEQ ID NO: 1504742 - RNA, 19 nt, Artificial Sequence
  Description of Artificial Sequence: Synthetic oligonucleotide
  Sense strand starting at position 2249 of SEQ ID NO: 1244650
gugugaccggaucgaaaua

SEQ ID NO: 1504743 - RNA, 19 nt, Artificial Sequence
  Description of Artificial Sequence: Synthetic oligonucleotide
  Antisense strand to SEQ ID NO: 1504742
uauuucgauccggucacac

SEQ ID NO: 1504744 - RNA, 19 nt, Artificial Sequence
  Description of Artificial Sequence: Synthetic oligonucleotide
  Sense strand starting at position 2490 of SEQ ID NO: 1244650
acauaacuauuguuggcau

SEQ ID NO: 1504745 - RNA, 19 nt, Artificial Sequence
  Description of Artificial Sequence: Synthetic oligonucleotide
  Antisense strand to SEQ ID NO: 1504744
augccaacaauaguuaugu

SEQ ID NO: 1504746 - RNA, 19 nt, Artificial Sequence
  Description of Artificial Sequence: Synthetic oligonucleotide
  Sense strand starting at position 2591 of SEQ ID NO: 1244650
uaguauuacucuguguuac

SEQ ID NO: 1504747 - RNA, 19 nt, Artificial Sequence
  Description of Artificial Sequence: Synthetic oligonucleotide
  Antisense strand to SEQ ID NO: 1504746
guaacacagaguaauacua

SEQ ID NO: 1504748 - RNA, 19 nt, Artificial Sequence
  Description of Artificial Sequence: Synthetic oligonucleotide
  Sense strand starting at position 2599 of SEQ ID NO: 1244650
cucuguguuacguuaucuu

SEQ ID NO: 1504749 - RNA, 19 nt, Artificial Sequence
  Description of Artificial Sequence: Synthetic oligonucleotide
  Antisense strand to SEQ ID NO: 1504748
aagauaacguaacacagag

SEQ ID NO: 1504750 - RNA, 19 nt, Artificial Sequence
  Description of Artificial Sequence: Synthetic oligonucleotide
  Sense strand starting at position 2816 of SEQ ID NO: 1244650
aggagaggcuacuucuaaa

SEQ ID NO: 1504751 - RNA, 19 nt, Artificial Sequence
  Description of Artificial Sequence: Synthetic oligonucleotide
  Antisense strand to SEQ ID NO: 1504750
uuuagaaguagccucuccu

SEQ ID NO: 1504752 - RNA, 19 nt, Artificial Sequence
  Description of Artificial Sequence: Synthetic oligonucleotide
  Sense strand starting at position 3059 of SEQ ID NO: 1244650
ucugucaugcuuuaagcau

SEQ ID NO: 1504753 - RNA, 19 nt, Artificial Sequence
  Description of Artificial Sequence: Synthetic oligonucleotide
  Antisense strand to SEQ ID NO: 1504752
augcuuaaagcaugacaga

SEQ ID NO: 1504754 - RNA, 19 nt, Artificial Sequence
  Description of Artificial Sequence: Synthetic oligonucleotide
  Sense strand starting at position 3063 of SEQ ID NO: 1244650
ucaugcuuuaagcauggga

SEQ ID NO: 1504755 - RNA, 19 nt, Artificial Sequence
  Description of Artificial Sequence: Synthetic oligonucleotide
  Antisense strand to SEQ ID NO: 1504754
ucccaugcuuaaagcauga

SEQ ID NO: 1504756 - RNA, 19 nt, Artificial Sequence
  Description of Artificial Sequence: Synthetic oligonucleotide
  Sense strand starting at position 3065 of SEQ ID NO: 1244650
augcuuuaagcaugggaug

SEQ ID NO: 1504757 - RNA, 19 nt, Artificial Sequence
  Description of Artificial Sequence: Synthetic oligonucleotide
  Antisense strand to SEQ ID NO: 1504756
caucccaugcuuaaagcau

SEQ ID NO: 1504758 - RNA, 19 nt, Artificial Sequence
  Description of Artificial Sequence: Synthetic oligonucleotide
  Sense strand starting at position 3067 of SEQ ID NO: 1244650
gcuuuaagcaugggauggu

SEQ ID NO: 1504759 - RNA, 19 nt, Artificial Sequence
  Description of Artificial Sequence: Synthetic oligonucleotide
  Antisense strand to SEQ ID NO: 1504758
accaucccaugcuuaaagc

SEQ ID NO: 1504760 - RNA, 19 nt, Artificial Sequence
  Description of Artificial Sequence: Synthetic oligonucleotide
  Sense strand starting at position 3077 of SEQ ID NO: 1244650
ugggauggucccgaaugca

SEQ ID NO: 1504761 - RNA, 19 nt, Artificial Sequence
  Description of Artificial Sequence: Synthetic oligonucleotide
  Antisense strand to SEQ ID NO: 1504760
ugcauucgggaccauccca

SEQ ID NO: 1504762 - RNA, 19 nt, Artificial Sequence
  Description of Artificial Sequence: Synthetic oligonucleotide
  Sense strand starting at position 3080 of SEQ ID NO: 1244650
gauggucccgaaugcauaa

SEQ ID NO: 1504763 - RNA, 19 nt, Artificial Sequence
  Description of Artificial Sequence: Synthetic oligonucleotide
  Antisense strand to SEQ ID NO: 1504762
uuaugcauucgggaccauc

SEQ ID NO: 1504764 - RNA, 19 nt, Artificial Sequence
  Description of Artificial Sequence: Synthetic oligonucleotide
  Sense strand starting at position 3100 of SEQ ID NO: 1244650
auccauaaugccugggcaa

SEQ ID NO: 1504765 - RNA, 19 nt, Artificial Sequence
  Description of Artificial Sequence: Synthetic oligonucleotide
  Antisense strand to SEQ ID NO: 1504764
uugcccaggcauuauggau

SEQ ID NO: 1504766 - RNA, 19 nt, Artificial Sequence
  Description of Artificial Sequence: Synthetic oligonucleotide
  Sense strand starting at position 3102 of SEQ ID NO: 1244650
ccauaaugccugggcaaca

SEQ ID NO: 1504767 - RNA, 19 nt, Artificial Sequence
  Description of Artificial Sequence: Synthetic oligonucleotide
  Antisense strand to SEQ ID NO: 1504766
uguugcccaggcauuaugg

SEQ ID NO: 1504768 - RNA, 19 nt, Artificial Sequence
  Description of Artificial Sequence: Synthetic oligonucleotide
  Sense strand starting at position 3259 of SEQ ID NO: 1244650
ccaugccauaugggagaua

SEQ ID NO: 1504769 - RNA, 19 nt, Artificial Sequence
  Description of Artificial Sequence: Synthetic oligonucleotide
  Antisense strand to SEQ ID NO: 1504768
uaucucccauauggcaugg

SEQ ID NO: 1504770 - RNA, 19 nt, Artificial Sequence
  Description of Artificial Sequence: Synthetic oligonucleotide
  Sense strand starting at position 3343 of SEQ ID NO: 1244650
caaguuggucuguaucacu

SEQ ID NO: 1504771 - RNA, 19 nt, Artificial Sequence
  Description of Artificial Sequence: Synthetic oligonucleotide
  Antisense strand to SEQ ID NO: 1504770
agugauacagaccaacuug

SEQ ID NO: 1504772 - RNA, 19 nt, Artificial Sequence
  Description of Artificial Sequence: Synthetic oligonucleotide
  Sense strand starting at position 3356 of SEQ ID NO: 1244650
aucacuagggcuugaaaua

SEQ ID NO: 1504773 - RNA, 19 nt, Artificial Sequence
  Description of Artificial Sequence: Synthetic oligonucleotide
  Antisense strand to SEQ ID NO: 1504772
uauuucaagcccuagugau

SEQ ID NO: 1504774 - RNA, 19 nt, Artificial Sequence
  Description of Artificial Sequence: Synthetic oligonucleotide
  Sense strand starting at position 3609 of SEQ ID NO: 1244650
uuaacuacucgggaggcua

SEQ ID NO: 1504775 - RNA, 19 nt, Artificial Sequence
  Description of Artificial Sequence: Synthetic oligonucleotide
  Antisense strand to SEQ ID NO: 1504774
uagccucccgaguaguuaa

SEQ ID NO: 1504776 - RNA, 19 nt, Artificial Sequence
  Description of Artificial Sequence: Synthetic oligonucleotide
  Sense strand starting at position 3798 of SEQ ID NO: 1244650
ugucaccucuaguuaauga

SEQ ID NO: 1504777 - RNA, 19 nt, Artificial Sequence
  Description of Artificial Sequence: Synthetic oligonucleotide
  Antisense strand to SEQ ID NO: 1504776
ucauuaacuagaggugaca

SEQ ID NO: 1504778 - RNA, 19 nt, Artificial Sequence
  Description of Artificial Sequence: Synthetic oligonucleotide
  Sense strand starting at position 3867 of SEQ ID NO: 1244650
uuugaaauguauccagaug

SEQ ID NO: 1504779 - RNA, 19 nt, Artificial Sequence
  Description of Artificial Sequence: Synthetic oligonucleotide
  Antisense strand to SEQ ID NO: 1504778
caucuggauacauuucaaa

SEQ ID NO: 1504780 - RNA, 19 nt, Artificial Sequence
  Description of Artificial Sequence: Synthetic oligonucleotide
  Sense strand starting at position 3893 of SEQ ID NO: 1244650
agugaccuaugccuguaau

SEQ ID NO: 1504781 - RNA, 19 nt, Artificial Sequence
  Description of Artificial Sequence: Synthetic oligonucleotide
  Antisense strand to SEQ ID NO: 1504780
auuacaggcauaggucacu

SEQ ID NO: 1504782 - RNA, 19 nt, Artificial Sequence
  Description of Artificial Sequence: Synthetic oligonucleotide
  Sense strand starting at position 3909 of SEQ ID NO: 1244650
aauccagcucuuugggaga

SEQ ID NO: 1504783 - RNA, 19 nt, Artificial Sequence
  Description of Artificial Sequence: Synthetic oligonucleotide
  Antisense strand to SEQ ID NO: 1504782
ucucccaaagagcuggauu

SEQ ID NO: 1504784 - RNA, 19 nt, Artificial Sequence
  Description of Artificial Sequence: Synthetic oligonucleotide
  Sense strand starting at position 3938 of SEQ ID NO: 1244650
augauugauugagccuaga

SEQ ID NO: 1504785 - RNA, 19 nt, Artificial Sequence
  Description of Artificial Sequence: Synthetic oligonucleotide
  Antisense strand to SEQ ID NO: 1504784
ucuaggcucaaucaaucau

SEQ ID NO: 1504786 - RNA, 19 nt, Artificial Sequence
  Description of Artificial Sequence: Synthetic oligonucleotide
  Sense strand starting at position 3941 of SEQ ID NO: 1244650
auugauugagccuagaagu

SEQ ID NO: 1504787 - RNA, 19 nt, Artificial Sequence
  Description of Artificial Sequence: Synthetic oligonucleotide
  Antisense strand to SEQ ID NO: 1504786
acuucuaggcucaaucaau

SEQ ID NO: 1504788 - RNA, 19 nt, Artificial Sequence
  Description of Artificial Sequence: Synthetic oligonucleotide
  Sense strand starting at position 79 of SEQ ID NO: 1244651
uucccaaagcugggagaaa

SEQ ID NO: 1504789 - RNA, 19 nt, Artificial Sequence
  Description of Artificial Sequence: Synthetic oligonucleotide
  Antisense strand to SEQ ID NO: 1504788
uuucucccagcuuugggaa

SEQ ID NO: 1504790 - RNA, 19 nt, Artificial Sequence
  Description of Artificial Sequence: Synthetic oligonucleotide
  Sense strand starting at position 187 of SEQ ID NO: 1244651
ggugcuaugguaggagaau

SEQ ID NO: 1504791 - RNA, 19 nt, Artificial Sequence
  Description of Artificial Sequence: Synthetic oligonucleotide
  Antisense strand to SEQ ID NO: 1504790
auucuccuaccauagcacc

SEQ ID NO: 1504792 - RNA, 19 nt, Artificial Sequence
  Description of Artificial Sequence: Synthetic oligonucleotide
  Sense strand starting at position 236 of SEQ ID NO: 1244651
ugcccauagugcuccagua

SEQ ID NO: 1504793 - RNA, 19 nt, Artificial Sequence
  Description of Artificial Sequence: Synthetic oligonucleotide
  Antisense strand to SEQ ID NO: 1504792
uacuggagcacuaugggca

SEQ ID NO: 1504794 - RNA, 19 nt, Artificial Sequence
  Description of Artificial Sequence: Synthetic oligonucleotide
  Sense strand starting at position 238 of SEQ ID NO: 1244651
cccauagugcuccaguaac

SEQ ID NO: 1504795 - RNA, 19 nt, Artificial Sequence
  Description of Artificial Sequence: Synthetic oligonucleotide
  Antisense strand to SEQ ID NO: 1504794
guuacuggagcacuauggg

SEQ ID NO: 1504796 - RNA, 19 nt, Artificial Sequence
  Description of Artificial Sequence: Synthetic oligonucleotide
  Sense strand starting at position 249 of SEQ ID NO: 1244651
ccaguaacccugugaucac

SEQ ID NO: 1504797 - RNA, 19 nt, Artificial Sequence
  Description of Artificial Sequence: Synthetic oligonucleotide
  Antisense strand to SEQ ID NO: 1504796
gugaucacaggguuacugg

SEQ ID NO: 1504798 - RNA, 19 nt, Artificial Sequence
  Description of Artificial Sequence: Synthetic oligonucleotide
  Sense strand starting at position 393 of SEQ ID NO: 1244651
cccggagagguuuggugau

SEQ ID NO: 1504799 - RNA, 19 nt, Artificial Sequence
  Description of Artificial Sequence: Synthetic oligonucleotide
  Antisense strand to SEQ ID NO: 1504798
aucaccaaaccucuccggg

SEQ ID NO: 1504800 - RNA, 19 nt, Artificial Sequence
  Description of Artificial Sequence: Synthetic oligonucleotide
  Sense strand starting at position 405 of SEQ ID NO: 1244651
uggugauaggcccaaguca

SEQ ID NO: 1504801 - RNA, 19 nt, Artificial Sequence
  Description of Artificial Sequence: Synthetic oligonucleotide
  Antisense strand to SEQ ID NO: 1504800
ugacuugggccuaucacca

SEQ ID NO: 1504802 - RNA, 19 nt, Artificial Sequence
  Description of Artificial Sequence: Synthetic oligonucleotide
  Sense strand starting at position 459 of SEQ ID NO: 1244651
caauuaugccaguggcuuu

SEQ ID NO: 1504803 - RNA, 19 nt, Artificial Sequence
  Description of Artificial Sequence: Synthetic oligonucleotide
  Antisense strand to SEQ ID NO: 1504802
aaagccacuggcauaauug

SEQ ID NO: 1504804 - RNA, 19 nt, Artificial Sequence
  Description of Artificial Sequence: Synthetic oligonucleotide
  Sense strand starting at position 494 of SEQ ID NO: 1244651
ugugcuaugcuuugagggu

SEQ ID NO: 1504805 - RNA, 19 nt, Artificial Sequence
  Description of Artificial Sequence: Synthetic oligonucleotide
  Antisense strand to SEQ ID NO: 1504804
acccucaaagcauagcaca

SEQ ID NO: 1504806 - RNA, 19 nt, Artificial Sequence
  Description of Artificial Sequence: Synthetic oligonucleotide
  Sense strand starting at position 503 of SEQ ID NO: 1244651
cuuugaggguuccaugaaa

SEQ ID NO: 1504807 - RNA, 19 nt, Artificial Sequence
  Description of Artificial Sequence: Synthetic oligonucleotide
  Antisense strand to SEQ ID NO: 1504806
uuucauggaacccucaaag

SEQ ID NO: 1504808 - RNA, 19 nt, Artificial Sequence
  Description of Artificial Sequence: Synthetic oligonucleotide
  Sense strand starting at position 608 of SEQ ID NO: 1244651
uuuauaaauugggacucua

SEQ ID NO: 1504809 - RNA, 19 nt, Artificial Sequence
  Description of Artificial Sequence: Synthetic oligonucleotide
  Antisense strand to SEQ ID NO: 1504808
uagagucccaauuuauaaa

SEQ ID NO: 1504810 - RNA, 19 nt, Artificial Sequence
  Description of Artificial Sequence: Synthetic oligonucleotide
  Sense strand starting at position 616 of SEQ ID NO: 1244651
uugggacucuauguaagau

SEQ ID NO: 1504811 - RNA, 19 nt, Artificial Sequence
  Description of Artificial Sequence: Synthetic oligonucleotide
  Antisense strand to SEQ ID NO: 1504810
aucuuacauagagucccaa

SEQ ID NO: 1504812 - RNA, 19 nt, Artificial Sequence
  Description of Artificial Sequence: Synthetic oligonucleotide
  Sense strand starting at position 811 of SEQ ID NO: 1244651
cuagauuucugguguguca

SEQ ID NO: 1504813 - RNA, 19 nt, Artificial Sequence
  Description of Artificial Sequence: Synthetic oligonucleotide
  Antisense strand to SEQ ID NO: 1504812
ugacacaccagaaaucuag

SEQ ID NO: 1504814 - RNA, 19 nt, Artificial Sequence
  Description of Artificial Sequence: Synthetic oligonucleotide
  Sense strand starting at position 820 of SEQ ID NO: 1244651
uggugugucaggcagauga

SEQ ID NO: 1504815 - RNA, 19 nt, Artificial Sequence
  Description of Artificial Sequence: Synthetic oligonucleotide
  Antisense strand to SEQ ID NO: 1504814
ucaucugccugacacacca

SEQ ID NO: 1504816 - RNA, 19 nt, Artificial Sequence
  Description of Artificial Sequence: Synthetic oligonucleotide
  Sense strand starting at position 1058 of SEQ ID NO: 1244651
aaaggaagcguccacucau

SEQ ID NO: 1504817 - RNA, 19 nt, Artificial Sequence
  Description of Artificial Sequence: Synthetic oligonucleotide
  Antisense strand to SEQ ID NO: 1504816
augaguggacgcuuccuuu

SEQ ID NO: 1504818 - RNA, 19 nt, Artificial Sequence
  Description of Artificial Sequence: Synthetic oligonucleotide
  Sense strand starting at position 1407 of SEQ ID NO: 1244651
cgguccgaguucuuggcaa

SEQ ID NO: 1504819 - RNA, 19 nt, Artificial Sequence
  Description of Artificial Sequence: Synthetic oligonucleotide
  Antisense strand to SEQ ID NO: 1504818
uugccaagaacucggaccg

SEQ ID NO: 1504820 - RNA, 19 nt, Artificial Sequence
  Description of Artificial Sequence: Synthetic oligonucleotide
  Sense strand starting at position 1409 of SEQ ID NO: 1244651
guccgaguucuuggcaaag

SEQ ID NO: 1504821 - RNA, 19 nt, Artificial Sequence
  Description of Artificial Sequence: Synthetic oligonucleotide
  Antisense strand to SEQ ID NO: 1504820
cuuugccaagaacucggac

SEQ ID NO: 1504822 - RNA, 19 nt, Artificial Sequence
  Description of Artificial Sequence: Synthetic oligonucleotide
  Sense strand starting at position 1466 of SEQ ID NO: 1244651
aaagcagucgcaggaacau

SEQ ID NO: 1504823 - RNA, 19 nt, Artificial Sequence
  Description of Artificial Sequence: Synthetic oligonucleotide
  Antisense strand to SEQ ID NO: 1504822
auguuccugcgacugcuuu

SEQ ID NO: 1504824 - RNA, 19 nt, Artificial Sequence
  Description of Artificial Sequence: Synthetic oligonucleotide
  Sense strand starting at position 2195 of SEQ ID NO: 1244651
gggagacuuugucagagaa

SEQ ID NO: 1504825 - RNA, 19 nt, Artificial Sequence
  Description of Artificial Sequence: Synthetic oligonucleotide
  Antisense strand to SEQ ID NO: 1504824
uucucugacaaagucuccc

SEQ ID NO: 1504826 - RNA, 19 nt, Artificial Sequence
  Description of Artificial Sequence: Synthetic oligonucleotide
  Sense strand starting at position 2197 of SEQ ID NO: 1244651
gagacuuugucagagaaag

SEQ ID NO: 1504827 - RNA, 19 nt, Artificial Sequence
  Description of Artificial Sequence: Synthetic oligonucleotide
  Antisense strand to SEQ ID NO: 1504826
cuuucucugacaaagucuc

SEQ ID NO: 1504828 - RNA, 19 nt, Artificial Sequence
  Description of Artificial Sequence: Synthetic oligonucleotide
  Sense strand starting at position 2243 of SEQ ID NO: 1244651
ggaagaaccucagauacuu

SEQ ID NO: 1504829 - RNA, 19 nt, Artificial Sequence
  Description of Artificial Sequence: Synthetic oligonucleotide
  Antisense strand to SEQ ID NO: 1504828
aaguaucugagguucuucc

SEQ ID NO: 1504830 - RNA, 19 nt, Artificial Sequence
  Description of Artificial Sequence: Synthetic oligonucleotide
  Sense strand starting at position 2644 of SEQ ID NO: 1244651
aagggaaagugugcacaaa

SEQ ID NO: 1504831 - RNA, 19 nt, Artificial Sequence
  Description of Artificial Sequence: Synthetic oligonucleotide
  Antisense strand to SEQ ID NO: 1504830
uuugugcacacuuucccuu

SEQ ID NO: 1504832 - RNA, 19 nt, Artificial Sequence
  Description of Artificial Sequence: Synthetic oligonucleotide
  Sense strand starting at position 2677 of SEQ ID NO: 1244651
agaggaccuaucugucuga

SEQ ID NO: 1504833 - RNA, 19 nt, Artificial Sequence
  Description of Artificial Sequence: Synthetic oligonucleotide
  Antisense strand to SEQ ID NO: 1504832
ucagacagauagguccucu

SEQ ID NO: 1504834 - RNA, 19 nt, Artificial Sequence
  Description of Artificial Sequence: Synthetic oligonucleotide
  Sense strand starting at position 2680 of SEQ ID NO: 1244651
ggaccuaucugucugauag

SEQ ID NO: 1504835 - RNA, 19 nt, Artificial Sequence
  Description of Artificial Sequence: Synthetic oligonucleotide
  Antisense strand to SEQ ID NO: 1504834
cuaucagacagauaggucc

SEQ ID NO: 1504836 - RNA, 19 nt, Artificial Sequence
  Description of Artificial Sequence: Synthetic oligonucleotide
  Sense strand starting at position 2681 of SEQ ID NO: 1244651
gaccuaucugucugauagu

SEQ ID NO: 1504837 - RNA, 19 nt, Artificial Sequence
  Description of Artificial Sequence: Synthetic oligonucleotide
  Antisense strand to SEQ ID NO: 1504836
acuaucagacagauagguc

SEQ ID NO: 1504838 - RNA, 19 nt, Artificial Sequence
  Description of Artificial Sequence: Synthetic oligonucleotide
  Sense strand starting at position 2690 of SEQ ID NO: 1244651
gucugauagugcucaaacc

SEQ ID NO: 1504839 - RNA, 19 nt, Artificial Sequence
  Description of Artificial Sequence: Synthetic oligonucleotide
  Antisense strand to SEQ ID NO: 1504838
gguuugagcacuaucagac

SEQ ID NO: 1504840 - RNA, 19 nt, Artificial Sequence
  Description of Artificial Sequence: Synthetic oligonucleotide
  Sense strand starting at position 2710 of SEQ ID NO: 1244651
auaggaagaucgcuuuaaa

SEQ ID NO: 1504841 - RNA, 19 nt, Artificial Sequence
  Description of Artificial Sequence: Synthetic oligonucleotide
  Antisense strand to SEQ ID NO: 1504840
uuuaaagcgaucuuccuau

SEQ ID NO: 1504842 - RNA, 19 nt, Artificial Sequence
  Description of Artificial Sequence: Synthetic oligonucleotide
  Sense strand starting at position 2763 of SEQ ID NO: 1244651
ugccuuuaccuguagugaa

SEQ ID NO: 1504843 - RNA, 19 nt, Artificial Sequence
  Description of Artificial Sequence: Synthetic oligonucleotide
  Antisense strand to SEQ ID NO: 1504842
uucacuacagguaaaggca

SEQ ID NO: 1504844 - RNA, 19 nt, Artificial Sequence
  Description of Artificial Sequence: Synthetic oligonucleotide
  Sense strand starting at position 2832 of SEQ ID NO: 1244651
gguacacucugaucccaaa

SEQ ID NO: 1504845 - RNA, 19 nt, Artificial Sequence
  Description of Artificial Sequence: Synthetic oligonucleotide
  Antisense strand to SEQ ID NO: 1504844
uuugggaucagaguguacc

SEQ ID NO: 1504846 - RNA, 19 nt, Artificial Sequence
  Description of Artificial Sequence: Synthetic oligonucleotide
  Sense strand starting at position 2962 of SEQ ID NO: 1244651
gggagaugcugcagguuau

SEQ ID NO: 1504847 - RNA, 19 nt, Artificial Sequence
  Description of Artificial Sequence: Synthetic oligonucleotide
  Antisense strand to SEQ ID NO: 1504846
auaaccugcagcaucuccc

SEQ ID NO: 1504848 - RNA, 19 nt, Artificial Sequence
  Description of Artificial Sequence: Synthetic oligonucleotide
  Sense strand starting at position 3006 of SEQ ID NO: 1244651
uauagauggcuuugaguag

SEQ ID NO: 1504849 - RNA, 19 nt, Artificial Sequence
  Description of Artificial Sequence: Synthetic oligonucleotide
  Antisense strand to SEQ ID NO: 1504848
cuacucaaagccaucuaua

SEQ ID NO: 1504850 - RNA, 19 nt, Artificial Sequence
  Description of Artificial Sequence: Synthetic oligonucleotide
  Sense strand starting at position 3233 of SEQ ID NO: 1244651
uuguuauuaguguauagga

SEQ ID NO: 1504851 - RNA, 19 nt, Artificial Sequence
  Description of Artificial Sequence: Synthetic oligonucleotide
  Antisense strand to SEQ ID NO: 1504850
uccuauacacuaauaacaa

SEQ ID NO: 1504852 - RNA, 19 nt, Artificial Sequence
  Description of Artificial Sequence: Synthetic oligonucleotide
  Sense strand starting at position 3235 of SEQ ID NO: 1244651
guuauuaguguauaggaac

SEQ ID NO: 1504853 - RNA, 19 nt, Artificial Sequence
  Description of Artificial Sequence: Synthetic oligonucleotide
  Antisense strand to SEQ ID NO: 1504852
guuccuauacacuaauaac

SEQ ID NO: 1504854 - RNA, 19 nt, Artificial Sequence
  Description of Artificial Sequence: Synthetic oligonucleotide
  Sense strand starting at position 3276 of SEQ ID NO: 1244651
ccuuguauccucugacuuu

SEQ ID NO: 1504855 - RNA, 19 nt, Artificial Sequence
  Description of Artificial Sequence: Synthetic oligonucleotide
  Antisense strand to SEQ ID NO: 1504854
aaagucagaggauacaagg

SEQ ID NO: 1504856 - RNA, 19 nt, Artificial Sequence
  Description of Artificial Sequence: Synthetic oligonucleotide
  Sense strand starting at position 3285 of SEQ ID NO: 1244651
cucugacuuuacuguauuu

SEQ ID NO: 1504857 - RNA, 19 nt, Artificial Sequence
  Description of Artificial Sequence: Synthetic oligonucleotide
  Antisense strand to SEQ ID NO: 1504856
aaauacaguaaagucagag

SEQ ID NO: 1504858 - RNA, 19 nt, Artificial Sequence
  Description of Artificial Sequence: Synthetic oligonucleotide
  Sense strand starting at position 3708 of SEQ ID NO: 1244651
ucagucaugcuaggauuaa

SEQ ID NO: 1504859 - RNA, 19 nt, Artificial Sequence
  Description of Artificial Sequence: Synthetic oligonucleotide
  Antisense strand to SEQ ID NO: 1504858
uuaauccuagcaugacuga

SEQ ID NO: 1504860 - RNA, 19 nt, Artificial Sequence
  Description of Artificial Sequence: Synthetic oligonucleotide
  Sense strand starting at position 3709 of SEQ ID NO: 1244651
cagucaugcuaggauuaau

SEQ ID NO: 1504861 - RNA, 19 nt, Artificial Sequence
  Description of Artificial Sequence: Synthetic oligonucleotide
  Antisense strand to SEQ ID NO: 1504860
auuaauccuagcaugacug

SEQ ID NO: 1504862 - RNA, 19 nt, Artificial Sequence
  Description of Artificial Sequence: Synthetic oligonucleotide
  Sense strand starting at position 3733 of SEQ ID NO: 1244651
ggugaaggcuguuucugau

SEQ ID NO: 1504863 - RNA, 19 nt, Artificial Sequence
  Description of Artificial Sequence: Synthetic oligonucleotide
  Antisense strand to SEQ ID NO: 1504862
aucagaaacagccuucacc

SEQ ID NO: 1504864 - RNA, 19 nt, Artificial Sequence
  Description of Artificial Sequence: Synthetic oligonucleotide
  Sense strand starting at position 3821 of SEQ ID NO: 1244651
cugagaaaucugggcaccu

SEQ ID NO: 1504865 - RNA, 19 nt, Artificial Sequence
  Description of Artificial Sequence: Synthetic oligonucleotide
  Antisense strand to SEQ ID NO: 1504864
aggugcccagauuucucag

SEQ ID NO: 1504866 - RNA, 19 nt, Artificial Sequence
  Description of Artificial Sequence: Synthetic oligonucleotide
  Sense strand starting at position 3963 of SEQ ID NO: 1244651
gcugucuucuucucuguca

SEQ ID NO: 1504867 - RNA, 19 nt, Artificial Sequence
  Description of Artificial Sequence: Synthetic oligonucleotide
  Antisense strand to SEQ ID NO: 1504866
ugacagagaagaagacagc

SEQ ID NO: 1504868 - RNA, 19 nt, Artificial Sequence
  Description of Artificial Sequence: Synthetic oligonucleotide
  Sense strand starting at position 248 of SEQ ID NO: 1244652
cagucuguacaagauguua

SEQ ID NO: 1504869 - RNA, 19 nt, Artificial Sequence
  Description of Artificial Sequence: Synthetic oligonucleotide
  Antisense strand to SEQ ID NO: 1504868
uaacaucuuguacagacug

SEQ ID NO: 1504870 - RNA, 19 nt, Artificial Sequence
  Description of Artificial Sequence: Synthetic oligonucleotide
  Sense strand starting at position 305 of SEQ ID NO: 1244652
uucugagcuccggacugaa

SEQ ID NO: 1504871 - RNA, 19 nt, Artificial Sequence
  Description of Artificial Sequence: Synthetic oligonucleotide
  Antisense strand to SEQ ID NO: 1504870
uucaguccggagcucagaa

SEQ ID NO: 1504872 - RNA, 19 nt, Artificial Sequence
  Description of Artificial Sequence: Synthetic oligonucleotide
  Sense strand starting at position 474 of SEQ ID NO: 1244652
augguagguguucacugaa

SEQ ID NO: 1504873 - RNA, 19 nt, Artificial Sequence
  Description of Artificial Sequence: Synthetic oligonucleotide
  Antisense strand to SEQ ID NO: 1504872
uucagugaacaccuaccau

SEQ ID NO: 1504874 - RNA, 19 nt, Artificial Sequence
  Description of Artificial Sequence: Synthetic oligonucleotide
  Sense strand starting at position 496 of SEQ ID NO: 1244652
gugcuagaauuauuaagac

SEQ ID NO: 1504875 - RNA, 19 nt, Artificial Sequence
  Description of Artificial Sequence: Synthetic oligonucleotide
  Antisense strand to SEQ ID NO: 1504874
gucuuaauaauucuagcac

SEQ ID NO: 1504876 - RNA, 19 nt, Artificial Sequence
  Description of Artificial Sequence: Synthetic oligonucleotide
  Sense strand starting at position 510 of SEQ ID NO: 1244652
aagacaucgcagugaugau

SEQ ID NO: 1504877 - RNA, 19 nt, Artificial Sequence
  Description of Artificial Sequence: Synthetic oligonucleotide
  Antisense strand to SEQ ID NO: 1504876
aucaucacugcgaugucuu

SEQ ID NO: 1504878 - RNA, 19 nt, Artificial Sequence
  Description of Artificial Sequence: Synthetic oligonucleotide
  Sense strand starting at position 511 of SEQ ID NO: 1244652
agacaucgcagugaugaua

SEQ ID NO: 1504879 - RNA, 19 nt, Artificial Sequence
  Description of Artificial Sequence: Synthetic oligonucleotide
  Antisense strand to SEQ ID NO: 1504878
uaucaucacugcgaugucu

SEQ ID NO: 1504880 - RNA, 19 nt, Artificial Sequence
  Description of Artificial Sequence: Synthetic oligonucleotide
  Sense strand starting at position 519 of SEQ ID NO: 1244652
cagugaugauaacucaugu

SEQ ID NO: 1504881 - RNA, 19 nt, Artificial Sequence
  Description of Artificial Sequence: Synthetic oligonucleotide
  Antisense strand to SEQ ID NO: 1504880
acaugaguuaucaucacug

SEQ ID NO: 1504882 - RNA, 19 nt, Artificial Sequence
  Description of Artificial Sequence: Synthetic oligonucleotide
  Sense strand starting at position 545 of SEQ ID NO: 1244652
uagucugacugaucagaug

SEQ ID NO: 1504883 - RNA, 19 nt, Artificial Sequence
  Description of Artificial Sequence: Synthetic oligonucleotide
  Antisense strand to SEQ ID NO: 1504882
caucugaucagucagacua

SEQ ID NO: 1504884 - RNA, 19 nt, Artificial Sequence
  Description of Artificial Sequence: Synthetic oligonucleotide
  Sense strand starting at position 786 of SEQ ID NO: 1244652
gacugauuaucaccaccga

SEQ ID NO: 1504885 - RNA, 19 nt, Artificial Sequence
  Description of Artificial Sequence: Synthetic oligonucleotide
  Antisense strand to SEQ ID NO: 1504884
ucgguggugauaaucaguc

SEQ ID NO: 1504886 - RNA, 19 nt, Artificial Sequence
  Description of Artificial Sequence: Synthetic oligonucleotide
  Sense strand starting at position 1081 of SEQ ID NO: 1244652
gcucuuggaguuuaaaguu

SEQ ID NO: 1504887 - RNA, 19 nt, Artificial Sequence
  Description of Artificial Sequence: Synthetic oligonucleotide
  Antisense strand to SEQ ID NO: 1504886
aacuuuaaacuccaagagc

SEQ ID NO: 1504888 - RNA, 19 nt, Artificial Sequence
  Description of Artificial Sequence: Synthetic oligonucleotide
  Sense strand starting at position 1173 of SEQ ID NO: 1244652
ggcuuugaaccuggauaga

SEQ ID NO: 1504889 - RNA, 19 nt, Artificial Sequence
  Description of Artificial Sequence: Synthetic oligonucleotide
  Antisense strand to SEQ ID NO: 1504888
ucuauccagguucaaagcc

SEQ ID NO: 1504890 - RNA, 19 nt, Artificial Sequence
  Description of Artificial Sequence: Synthetic oligonucleotide
  Sense strand starting at position 1183 of SEQ ID NO: 1244652
cuggauagauuuggauaga

SEQ ID NO: 1504891 - RNA, 19 nt, Artificial Sequence
  Description of Artificial Sequence: Synthetic oligonucleotide
  Antisense strand to SEQ ID NO: 1504890
ucuauccaaaucuauccag

SEQ ID NO: 1504892 - RNA, 19 nt, Artificial Sequence
  Description of Artificial Sequence: Synthetic oligonucleotide
  Sense strand starting at position 1205 of SEQ ID NO: 1244652
ccgacuuugucauuugcua

SEQ ID NO: 1504893 - RNA, 19 nt, Artificial Sequence
  Description of Artificial Sequence: Synthetic oligonucleotide
  Antisense strand to SEQ ID NO: 1504892
uagcaaaugacaaagucgg

SEQ ID NO: 1504894 - RNA, 19 nt, Artificial Sequence
  Description of Artificial Sequence: Synthetic oligonucleotide
  Sense strand starting at position 1224 of SEQ ID NO: 1244652
acugcaaggcuuugaauaa

SEQ ID NO: 1504895 - RNA, 19 nt, Artificial Sequence
  Description of Artificial Sequence: Synthetic oligonucleotide
  Antisense strand to SEQ ID NO: 1504894
uuauucaaagccuugcagu

SEQ ID NO: 1504896 - RNA, 19 nt, Artificial Sequence
  Description of Artificial Sequence: Synthetic oligonucleotide
  Sense strand starting at position 1377 of SEQ ID NO: 1244652
ugguguugcgauuaagaug

SEQ ID NO: 1504897 - RNA, 19 nt, Artificial Sequence
  Description of Artificial Sequence: Synthetic oligonucleotide
  Antisense strand to SEQ ID NO: 1504896
caucuuaaucgcaacacca

SEQ ID NO: 1504898 - RNA, 19 nt, Artificial Sequence
  Description of Artificial Sequence: Synthetic oligonucleotide
  Sense strand starting at position 1385 of SEQ ID NO: 1244652
cgauuaagaugccuuagaa

SEQ ID NO: 1504899 - RNA, 19 nt, Artificial Sequence
  Description of Artificial Sequence: Synthetic oligonucleotide
  Antisense strand to SEQ ID NO: 1504898
uucuaaggcaucuuaaucg

SEQ ID NO: 1504900 - RNA, 19 nt, Artificial Sequence
  Description of Artificial Sequence: Synthetic oligonucleotide
  Sense strand starting at position 1808 of SEQ ID NO: 1244652
gagucugaucuuuaugguu

SEQ ID NO: 1504901 - RNA, 19 nt, Artificial Sequence
  Description of Artificial Sequence: Synthetic oligonucleotide
  Antisense strand to SEQ ID NO: 1504900
aaccauaaagaucagacuc

SEQ ID NO: 1504902 - RNA, 19 nt, Artificial Sequence
  Description of Artificial Sequence: Synthetic oligonucleotide
  Sense strand starting at position 1820 of SEQ ID NO: 1244652
uaugguuuauuugacuaga

SEQ ID NO: 1504903 - RNA, 19 nt, Artificial Sequence
  Description of Artificial Sequence: Synthetic oligonucleotide
  Antisense strand to SEQ ID NO: 1504902
ucuagucaaauaaaccaua

SEQ ID NO: 1504904 - RNA, 19 nt, Artificial Sequence
  Description of Artificial Sequence: Synthetic oligonucleotide
  Sense strand starting at position 1833 of SEQ ID NO: 1244652
acuagagcggccugagaaa

SEQ ID NO: 1504905 - RNA, 19 nt, Artificial Sequence
  Description of Artificial Sequence: Synthetic oligonucleotide
  Antisense strand to SEQ ID NO: 1504904
uuucucaggccgcucuagu

SEQ ID NO: 1504906 - RNA, 19 nt, Artificial Sequence
  Description of Artificial Sequence: Synthetic oligonucleotide
  Sense strand starting at position 2538 of SEQ ID NO: 1244652
auaugaauccuguggagcu

SEQ ID NO: 1504907 - RNA, 19 nt, Artificial Sequence
  Description of Artificial Sequence: Synthetic oligonucleotide
  Antisense strand to SEQ ID NO: 1504906
agcuccacaggauucauau

SEQ ID NO: 1504908 - RNA, 19 nt, Artificial Sequence
  Description of Artificial Sequence: Synthetic oligonucleotide
  Sense strand starting at position 2664 of SEQ ID NO: 1244652
cuuucuaaagaucgaaggu

SEQ ID NO: 1504909 - RNA, 19 nt, Artificial Sequence
  Description of Artificial Sequence: Synthetic oligonucleotide
  Antisense strand to SEQ ID NO: 1504908
accuucgaucuuuagaaag

SEQ ID NO: 1504910 - RNA, 19 nt, Artificial Sequence
  Description of Artificial Sequence: Synthetic oligonucleotide
  Sense strand starting at position 2702 of SEQ ID NO: 1244652
ccguccauucucuauagau

SEQ ID NO: 1504911 - RNA, 19 nt, Artificial Sequence
  Description of Artificial Sequence: Synthetic oligonucleotide
  Antisense strand to SEQ ID NO: 1504910
aucuauagagaauggacgg

SEQ ID NO: 1504912 - RNA, 19 nt, Artificial Sequence
  Description of Artificial Sequence: Synthetic oligonucleotide
  Sense strand starting at position 2704 of SEQ ID NO: 1244652
guccauucucuauagauuc

SEQ ID NO: 1504913 - RNA, 19 nt, Artificial Sequence
  Description of Artificial Sequence: Synthetic oligonucleotide
  Antisense strand to SEQ ID NO: 1504912
gaaucuauagagaauggac

SEQ ID NO: 1504914 - RNA, 19 nt, Artificial Sequence
  Description of Artificial Sequence: Synthetic oligonucleotide
  Sense strand starting at position 2901 of SEQ ID NO: 1244652
aaauacuuccguggaaauu

SEQ ID NO: 1504915 - RNA, 19 nt, Artificial Sequence
  Description of Artificial Sequence: Synthetic oligonucleotide
  Antisense strand to SEQ ID NO: 1504914
aauuuccacggaaguauuu

SEQ ID NO: 1504916 - RNA, 19 nt, Artificial Sequence
  Description of Artificial Sequence: Synthetic oligonucleotide
  Sense strand starting at position 2902 of SEQ ID NO: 1244652
aauacuuccguggaaauuc

SEQ ID NO: 1504917 - RNA, 19 nt, Artificial Sequence
  Description of Artificial Sequence: Synthetic oligonucleotide
  Antisense strand to SEQ ID NO: 1504916
gaauuuccacggaaguauu

SEQ ID NO: 1504918 - RNA, 19 nt, Artificial Sequence
  Description of Artificial Sequence: Synthetic oligonucleotide
  Sense strand starting at position 2944 of SEQ ID NO: 1244652
gguguaugaagcuacauca

SEQ ID NO: 1504919 - RNA, 19 nt, Artificial Sequence
  Description of Artificial Sequence: Synthetic oligonucleotide
  Antisense strand to SEQ ID NO: 1504918
ugauguagcuucauacacc

SEQ ID NO: 1504920 - RNA, 19 nt, Artificial Sequence
  Description of Artificial Sequence: Synthetic oligonucleotide
  Sense strand starting at position 2969 of SEQ ID NO: 1244652
agcauuagggaguguaaac

SEQ ID NO: 1504921 - RNA, 19 nt, Artificial Sequence
  Description of Artificial Sequence: Synthetic oligonucleotide
  Antisense strand to SEQ ID NO: 1504920
guuuacacucccuaaugcu

SEQ ID NO: 1504922 - RNA, 19 nt, Artificial Sequence
  Description of Artificial Sequence: Synthetic oligonucleotide
  Sense strand starting at position 3031 of SEQ ID NO: 1244652
acuguuuaucuggaaguua

SEQ ID NO: 1504923 - RNA, 19 nt, Artificial Sequence
  Description of Artificial Sequence: Synthetic oligonucleotide
  Antisense strand to SEQ ID NO: 1504922
uaacuuccagauaaacagu

SEQ ID NO: 1504924 - RNA, 19 nt, Artificial Sequence
  Description of Artificial Sequence: Synthetic oligonucleotide
  Sense strand starting at position 3097 of SEQ ID NO: 1244652
uuccaucagcugugaauuu

SEQ ID NO: 1504925 - RNA, 19 nt, Artificial Sequence
  Description of Artificial Sequence: Synthetic oligonucleotide
  Antisense strand to SEQ ID NO: 1504924
aaauucacagcugauggaa

SEQ ID NO: 1504926 - RNA, 19 nt, Artificial Sequence
  Description of Artificial Sequence: Synthetic oligonucleotide
  Sense strand starting at position 3176 of SEQ ID NO: 1244652
gcuuguguggcugcuagau

SEQ ID NO: 1504927 - RNA, 19 nt, Artificial Sequence
  Description of Artificial Sequence: Synthetic oligonucleotide
  Antisense strand to SEQ ID NO: 1504926
aucuagcagccacacaagc

SEQ ID NO: 1504928 - RNA, 19 nt, Artificial Sequence
  Description of Artificial Sequence: Synthetic oligonucleotide
  Sense strand starting at position 3188 of SEQ ID NO: 1244652
gcuagauuggauuagcaua

SEQ ID NO: 1504929 - RNA, 19 nt, Artificial Sequence
  Description of Artificial Sequence: Synthetic oligonucleotide
  Antisense strand to SEQ ID NO: 1504928
uaugcuaauccaaucuagc

SEQ ID NO: 1504930 - RNA, 19 nt, Artificial Sequence
  Description of Artificial Sequence: Synthetic oligonucleotide
  Sense strand starting at position 3270 of SEQ ID NO: 1244652
ucuggagaggcuuagucaa

SEQ ID NO: 1504931 - RNA, 19 nt, Artificial Sequence
  Description of Artificial Sequence: Synthetic oligonucleotide
  Antisense strand to SEQ ID NO: 1504930
uugacuaagccucuccaga

SEQ ID NO: 1504932 - RNA, 19 nt, Artificial Sequence
  Description of Artificial Sequence: Synthetic oligonucleotide
  Sense strand starting at position 3272 of SEQ ID NO: 1244652
uggagaggcuuagucaaau

SEQ ID NO: 1504933 - RNA, 19 nt, Artificial Sequence
  Description of Artificial Sequence: Synthetic oligonucleotide
  Antisense strand to SEQ ID NO: 1504932
auuugacuaagccucucca

SEQ ID NO: 1504934 - RNA, 19 nt, Artificial Sequence
  Description of Artificial Sequence: Synthetic oligonucleotide
  Sense strand starting at position 3317 of SEQ ID NO: 1244652
ccuagugugguggaaacau

SEQ ID NO: 1504935 - RNA, 19 nt, Artificial Sequence
  Description of Artificial Sequence: Synthetic oligonucleotide
  Antisense strand to SEQ ID NO: 1504934
auguuuccaccacacuagg

SEQ ID NO: 1504936 - RNA, 19 nt, Artificial Sequence
  Description of Artificial Sequence: Synthetic oligonucleotide
  Sense strand starting at position 3326 of SEQ ID NO: 1244652
guggaaacaugaucuuugu

SEQ ID NO: 1504937 - RNA, 19 nt, Artificial Sequence
  Description of Artificial Sequence: Synthetic oligonucleotide
  Antisense strand to SEQ ID NO: 1504936
acaaagaucauguuuccac

SEQ ID NO: 1504938 - RNA, 19 nt, Artificial Sequence
  Description of Artificial Sequence: Synthetic oligonucleotide
  Sense strand starting at position 3329 of SEQ ID NO: 1244652
gaaacaugaucuuuguagg

SEQ ID NO: 1504939 - RNA, 19 nt, Artificial Sequence
  Description of Artificial Sequence: Synthetic oligonucleotide
  Antisense strand to SEQ ID NO: 1504938
ccuacaaagaucauguuuc

SEQ ID NO: 1504940 - RNA, 19 nt, Artificial Sequence
  Description of Artificial Sequence: Synthetic oligonucleotide
  Sense strand starting at position 3334 of SEQ ID NO: 1244652
augaucuuuguaggcaaau

SEQ ID NO: 1504941 - RNA, 19 nt, Artificial Sequence
  Description of Artificial Sequence: Synthetic oligonucleotide
  Antisense strand to SEQ ID NO: 1504940
auuugccuacaaagaucau

SEQ ID NO: 1504942 - RNA, 19 nt, Artificial Sequence
  Description of Artificial Sequence: Synthetic oligonucleotide
  Sense strand starting at position 3335 of SEQ ID NO: 1244652
ugaucuuuguaggcaaaua

SEQ ID NO: 1504943 - RNA, 19 nt, Artificial Sequence
  Description of Artificial Sequence: Synthetic oligonucleotide
  Antisense strand to SEQ ID NO: 1504942
uauuugccuacaaagauca

SEQ ID NO: 1504944 - RNA, 19 nt, Artificial Sequence
  Description of Artificial Sequence: Synthetic oligonucleotide
  Sense strand starting at position 3872 of SEQ ID NO: 1244652
auggauacuuuguucucau

SEQ ID NO: 1504945 - RNA, 19 nt, Artificial Sequence
  Description of Artificial Sequence: Synthetic oligonucleotide
  Antisense strand to SEQ ID NO: 1504944
augagaacaaaguauccau

SEQ ID NO: 1504946 - RNA, 19 nt, Artificial Sequence
  Description of Artificial Sequence: Synthetic oligonucleotide
  Sense strand starting at position 3873 of SEQ ID NO: 1244652
uggauacuuuguucucaua

SEQ ID NO: 1504947 - RNA, 19 nt, Artificial Sequence
  Description of Artificial Sequence: Synthetic oligonucleotide
  Antisense strand to SEQ ID NO: 1504946
uaugagaacaaaguaucca

SEQ ID NO: 1504948 - RNA, 19 nt, Artificial Sequence
  Description of Artificial Sequence: Synthetic oligonucleotide
  Sense strand starting at position 68 of SEQ ID NO: 1244653
gugggaucuuggccucaag

SEQ ID NO: 1504949 - RNA, 19 nt, Artificial Sequence
  Description of Artificial Sequence: Synthetic oligonucleotide
  Antisense strand to SEQ ID NO: 1504948
cuugaggccaagaucccac

SEQ ID NO: 1504950 - RNA, 19 nt, Artificial Sequence
  Description of Artificial Sequence: Synthetic oligonucleotide
  Sense strand starting at position 177 of SEQ ID NO: 1244653
ccugguccuagaugagaca

SEQ ID NO: 1504951 - RNA, 19 nt, Artificial Sequence
  Description of Artificial Sequence: Synthetic oligonucleotide
  Antisense strand to SEQ ID NO: 1504950
ugucucaucuaggaccagg

SEQ ID NO: 1504952 - RNA, 19 nt, Artificial Sequence
  Description of Artificial Sequence: Synthetic oligonucleotide
  Sense strand starting at position 219 of SEQ ID NO: 1244653
gggaaaucauaccauuguu

SEQ ID NO: 1504953 - RNA, 19 nt, Artificial Sequence
  Description of Artificial Sequence: Synthetic oligonucleotide
  Antisense strand to SEQ ID NO: 1504952
aacaaugguaugauuuccc

SEQ ID NO: 1504954 - RNA, 19 nt, Artificial Sequence
  Description of Artificial Sequence: Synthetic oligonucleotide
  Sense strand starting at position 241 of SEQ ID NO: 1244653
aagucuguagagcaaugaa

SEQ ID NO: 1504955 - RNA, 19 nt, Artificial Sequence
  Description of Artificial Sequence: Synthetic oligonucleotide
  Antisense strand to SEQ ID NO: 1504954
uucauugcucuacagacuu

SEQ ID NO: 1504956 - RNA, 19 nt, Artificial Sequence
  Description of Artificial Sequence: Synthetic oligonucleotide
  Sense strand starting at position 244 of SEQ ID NO: 1244653
ucuguagagcaaugaaguu

SEQ ID NO: 1504957 - RNA, 19 nt, Artificial Sequence
  Description of Artificial Sequence: Synthetic oligonucleotide
  Antisense strand to SEQ ID NO: 1504956
aacuucauugcucuacaga

SEQ ID NO: 1504958 - RNA, 19 nt, Artificial Sequence
  Description of Artificial Sequence: Synthetic oligonucleotide
  Sense strand starting at position 328 of SEQ ID NO: 1244653
cugguugucccagagcaca

SEQ ID NO: 1504959 - RNA, 19 nt, Artificial Sequence
  Description of Artificial Sequence: Synthetic oligonucleotide
  Antisense strand to SEQ ID NO: 1504958
ugugcucugggacaaccag

SEQ ID NO: 1504960 - RNA, 19 nt, Artificial Sequence
  Description of Artificial Sequence: Synthetic oligonucleotide
  Sense strand starting at position 452 of SEQ ID NO: 1244653
gcagcuaguccugguuuga

SEQ ID NO: 1504961 - RNA, 19 nt, Artificial Sequence
  Description of Artificial Sequence: Synthetic oligonucleotide
  Antisense strand to SEQ ID NO: 1504960
ucaaaccaggacuagcugc

SEQ ID NO: 1504962 - RNA, 19 nt, Artificial Sequence
  Description of Artificial Sequence: Synthetic oligonucleotide
  Sense strand starting at position 458 of SEQ ID NO: 1244653
aguccugguuugagggaga

SEQ ID NO: 1504963 - RNA, 19 nt, Artificial Sequence
  Description of Artificial Sequence: Synthetic oligonucleotide
  Antisense strand to SEQ ID NO: 1504962
ucucccucaaaccaggacu

SEQ ID NO: 1504964 - RNA, 19 nt, Artificial Sequence
  Description of Artificial Sequence: Synthetic oligonucleotide
  Sense strand starting at position 485 of SEQ ID NO: 1244653
gaacucaucugguuccaga

SEQ ID NO: 1504965 - RNA, 19 nt, Artificial Sequence
  Description of Artificial Sequence: Synthetic oligonucleotide
  Antisense strand to SEQ ID NO: 1504964
ucuggaaccagaugaguuc

SEQ ID NO: 1504966 - RNA, 19 nt, Artificial Sequence
  Description of Artificial Sequence: Synthetic oligonucleotide
  Sense strand starting at position 577 of SEQ ID NO: 1244653
cuguuaaauggcuacuaga

SEQ ID NO: 1504967 - RNA, 19 nt, Artificial Sequence
  Description of Artificial Sequence: Synthetic oligonucleotide
  Antisense strand to SEQ ID NO: 1504966
ucuaguagccauuuaacag

SEQ ID NO: 1504968 - RNA, 19 nt, Artificial Sequence
  Description of Artificial Sequence: Synthetic oligonucleotide
  Sense strand starting at position 580 of SEQ ID NO: 1244653
uuaaauggcuacuagaaua

SEQ ID NO: 1504969 - RNA, 19 nt, Artificial Sequence
  Description of Artificial Sequence: Synthetic oligonucleotide
  Antisense strand to SEQ ID NO: 1504968
uauucuaguagccauuuaa

SEQ ID NO: 1504970 - RNA, 19 nt, Artificial Sequence
  Description of Artificial Sequence: Synthetic oligonucleotide
  Sense strand starting at position 673 of SEQ ID NO: 1244653
auuuauagggcucguuaca

SEQ ID NO: 1504971 - RNA, 19 nt, Artificial Sequence
  Description of Artificial Sequence: Synthetic oligonucleotide
  Antisense strand to SEQ ID NO: 1504970
uguaacgagcccuauaaau

SEQ ID NO: 1504972 - RNA, 19 nt, Artificial Sequence
  Description of Artificial Sequence: Synthetic oligonucleotide
  Sense strand starting at position 708 of SEQ ID NO: 1244653
uuauguaaauuaccucgua

SEQ ID NO: 1504973 - RNA, 19 nt, Artificial Sequence
  Description of Artificial Sequence: Synthetic oligonucleotide
  Antisense strand to SEQ ID NO: 1504972
uacgagguaauuuacauaa

SEQ ID NO: 1504974 - RNA, 19 nt, Artificial Sequence
  Description of Artificial Sequence: Synthetic oligonucleotide
  Sense strand starting at position 746 of SEQ ID NO: 1244653
gugagugagagcugauuau

SEQ ID NO: 1504975 - RNA, 19 nt, Artificial Sequence
  Description of Artificial Sequence: Synthetic oligonucleotide
  Antisense strand to SEQ ID NO: 1504974
auaaucagcucucacucac

SEQ ID NO: 1504976 - RNA, 19 nt, Artificial Sequence
  Description of Artificial Sequence: Synthetic oligonucleotide
  Sense strand starting at position 777 of SEQ ID NO: 1244653
gaucuuggcucucuggauu

SEQ ID NO: 1504977 - RNA, 19 nt, Artificial Sequence
  Description of Artificial Sequence: Synthetic oligonucleotide
  Antisense strand to SEQ ID NO: 1504976
aauccagagagccaagauc

SEQ ID NO: 1504978 - RNA, 19 nt, Artificial Sequence
  Description of Artificial Sequence: Synthetic oligonucleotide
  Sense strand starting at position 1732 of SEQ ID NO: 1244653
gccacaagucucggagaga

SEQ ID NO: 1504979 - RNA, 19 nt, Artificial Sequence
  Description of Artificial Sequence: Synthetic oligonucleotide
  Antisense strand to SEQ ID NO: 1504978
ucucuccgagacuuguggc

SEQ ID NO: 1504980 - RNA, 19 nt, Artificial Sequence
  Description of Artificial Sequence: Synthetic oligonucleotide
  Sense strand starting at position 1733 of SEQ ID NO: 1244653
ccacaagucucggagagac

SEQ ID NO: 1504981 - RNA, 19 nt, Artificial Sequence
  Description of Artificial Sequence: Synthetic oligonucleotide
  Antisense strand to SEQ ID NO: 1504980
gucucuccgagacuugugg

SEQ ID NO: 1504982 - RNA, 19 nt, Artificial Sequence
  Description of Artificial Sequence: Synthetic oligonucleotide
  Sense strand starting at position 1795 of SEQ ID NO: 1244653
ucuugaaacucccuggaga

SEQ ID NO: 1504983 - RNA, 19 nt, Artificial Sequence
  Description of Artificial Sequence: Synthetic oligonucleotide
  Antisense strand to SEQ ID NO: 1504982
ucuccagggaguuucaaga

SEQ ID NO: 1504984 - RNA, 19 nt, Artificial Sequence
  Description of Artificial Sequence: Synthetic oligonucleotide
  Sense strand starting at position 1969 of SEQ ID NO: 1244653
gcuagcaguguccagauca

SEQ ID NO: 1504985 - RNA, 19 nt, Artificial Sequence
  Description of Artificial Sequence: Synthetic oligonucleotide
  Antisense strand to SEQ ID NO: 1504984
ugaucuggacacugcuagc

SEQ ID NO: 1504986 - RNA, 19 nt, Artificial Sequence
  Description of Artificial Sequence: Synthetic oligonucleotide
  Sense strand starting at position 2081 of SEQ ID NO: 1244653
guggcuuagucccaggaaa

SEQ ID NO: 1504987 - RNA, 19 nt, Artificial Sequence
  Description of Artificial Sequence: Synthetic oligonucleotide
  Antisense strand to SEQ ID NO: 1504986
uuuccugggacuaagccac

SEQ ID NO: 1504988 - RNA, 19 nt, Artificial Sequence
  Description of Artificial Sequence: Synthetic oligonucleotide
  Sense strand starting at position 2083 of SEQ ID NO: 1244653
ggcuuagucccaggaaaca

SEQ ID NO: 1504989 - RNA, 19 nt, Artificial Sequence
  Description of Artificial Sequence: Synthetic oligonucleotide
  Antisense strand to SEQ ID NO: 1504988
uguuuccugggacuaagcc

SEQ ID NO: 1504990 - RNA, 19 nt, Artificial Sequence
  Description of Artificial Sequence: Synthetic oligonucleotide
  Sense strand starting at position 2342 of SEQ ID NO: 1244653
ggccgagcuccggaauaaa

SEQ ID NO: 1504991 - RNA, 19 nt, Artificial Sequence
  Description of Artificial Sequence: Synthetic oligonucleotide
  Antisense strand to SEQ ID NO: 1504990
uuuauuccggagcucggcc

SEQ ID NO: 1504992 - RNA, 19 nt, Artificial Sequence
  Description of Artificial Sequence: Synthetic oligonucleotide
  Sense strand starting at position 2917 of SEQ ID NO: 1244653
gccggagcucucgggaaga

SEQ ID NO: 1504993 - RNA, 19 nt, Artificial Sequence
  Description of Artificial Sequence: Synthetic oligonucleotide
  Antisense strand to SEQ ID NO: 1504992
ucuucccgagagcuccggc

SEQ ID NO: 1504994 - RNA, 19 nt, Artificial Sequence
  Description of Artificial Sequence: Synthetic oligonucleotide
  Sense strand starting at position 3471 of SEQ ID NO: 1244653
cccagagucuccuauaguc

SEQ ID NO: 1504995 - RNA, 19 nt, Artificial Sequence
  Description of Artificial Sequence: Synthetic oligonucleotide
  Antisense strand to SEQ ID NO: 1504994
gacuauaggagacucuggg

SEQ ID NO: 1504996 - RNA, 19 nt, Artificial Sequence
  Description of Artificial Sequence: Synthetic oligonucleotide
  Sense strand starting at position 3598 of SEQ ID NO: 1244653
cucuccaaggucuggaaau

SEQ ID NO: 1504997 - RNA, 19 nt, Artificial Sequence
  Description of Artificial Sequence: Synthetic oligonucleotide
  Antisense strand to SEQ ID NO: 1504996
auuuccagaccuuggagag

SEQ ID NO: 1504998 - RNA, 19 nt, Artificial Sequence
  Description of Artificial Sequence: Synthetic oligonucleotide
  Sense strand starting at position 3654 of SEQ ID NO: 1244653
ccugcagaagccugagaaa

SEQ ID NO: 1504999 - RNA, 19 nt, Artificial Sequence
  Description of Artificial Sequence: Synthetic oligonucleotide
  Antisense strand to SEQ ID NO: 1504998
uuucucaggcuucugcagg

SEQ ID NO: 1505000 - RNA, 19 nt, Artificial Sequence
  Description of Artificial Sequence: Synthetic oligonucleotide
  Sense strand starting at position 3690 of SEQ ID NO: 1244653
gagcgugcguucuuuguuu

SEQ ID NO: 1505001 - RNA, 19 nt, Artificial Sequence
  Description of Artificial Sequence: Synthetic oligonucleotide
  Antisense strand to SEQ ID NO: 1505000
aaacaaagaacgcacgcuc

SEQ ID NO: 1505002 - RNA, 19 nt, Artificial Sequence
  Description of Artificial Sequence: Synthetic oligonucleotide
  Sense strand starting at position 3729 of SEQ ID NO: 1244653
ccagcuuguaaagaguaga

SEQ ID NO: 1505003 - RNA, 19 nt, Artificial Sequence
  Description of Artificial Sequence: Synthetic oligonucleotide
  Antisense strand to SEQ ID NO: 1505002
ucuacucuuuacaagcugg

SEQ ID NO: 1505004 - RNA, 19 nt, Artificial Sequence
  Description of Artificial Sequence: Synthetic oligonucleotide
  Sense strand starting at position 3742 of SEQ ID NO: 1244653
aguagaagaaccggacauu

SEQ ID NO: 1505005 - RNA, 19 nt, Artificial Sequence
  Description of Artificial Sequence: Synthetic oligonucleotide
  Antisense strand to SEQ ID NO: 1505004
aauguccgguucuucuacu

SEQ ID NO: 1505006 - RNA, 19 nt, Artificial Sequence
  Description of Artificial Sequence: Synthetic oligonucleotide
  Sense strand starting at position 3754 of SEQ ID NO: 1244653
ggacauugguggaggaauu

SEQ ID NO: 1505007 - RNA, 19 nt, Artificial Sequence
  Description of Artificial Sequence: Synthetic oligonucleotide
  Antisense strand to SEQ ID NO: 1505006
aauuccuccaccaaugucc

SEQ ID NO: 1505008 - RNA, 19 nt, Artificial Sequence
  Description of Artificial Sequence: Synthetic oligonucleotide
  Sense strand starting at position 3846 of SEQ ID NO: 1244653
uuaacaggcuucuguuaaa

SEQ ID NO: 1505009 - RNA, 19 nt, Artificial Sequence
  Description of Artificial Sequence: Synthetic oligonucleotide
  Antisense strand to SEQ ID NO: 1505008
uuuaacagaagccuguuaa

SEQ ID NO: 1505010 - RNA, 19 nt, Artificial Sequence
  Description of Artificial Sequence: Synthetic oligonucleotide
  Sense strand starting at position 3908 of SEQ ID NO: 1244653
ggacuccuuucccugcuaa

SEQ ID NO: 1505011 - RNA, 19 nt, Artificial Sequence
  Description of Artificial Sequence: Synthetic oligonucleotide
  Antisense strand to SEQ ID NO: 1505010
uuagcagggaaaggagucc

SEQ ID NO: 1505012 - RNA, 19 nt, Artificial Sequence
  Description of Artificial Sequence: Synthetic oligonucleotide
  Sense strand starting at position 165 of SEQ ID NO: 1244654
ggucuugucagucagaguc

SEQ ID NO: 1505013 - RNA, 19 nt, Artificial Sequence
  Description of Artificial Sequence: Synthetic oligonucleotide
  Antisense strand to SEQ ID NO: 1505012
gacucugacugacaagacc

SEQ ID NO: 1505014 - RNA, 19 nt, Artificial Sequence
  Description of Artificial Sequence: Synthetic oligonucleotide
  Sense strand starting at position 217 of SEQ ID NO: 1244654
agcugaagccuggguaaua

SEQ ID NO: 1505015 - RNA, 19 nt, Artificial Sequence
  Description of Artificial Sequence: Synthetic oligonucleotide
  Antisense strand to SEQ ID NO: 1505014
uauuacccaggcuucagcu

SEQ ID NO: 1505016 - RNA, 19 nt, Artificial Sequence
  Description of Artificial Sequence: Synthetic oligonucleotide
  Sense strand starting at position 246 of SEQ ID NO: 1244654
agagguaucuguguggaac

SEQ ID NO: 1505017 - RNA, 19 nt, Artificial Sequence
  Description of Artificial Sequence: Synthetic oligonucleotide
  Antisense strand to SEQ ID NO: 1505016
guuccacacagauaccucu

SEQ ID NO: 1505018 - RNA, 19 nt, Artificial Sequence
  Description of Artificial Sequence: Synthetic oligonucleotide
  Sense strand starting at position 379 of SEQ ID NO: 1244654
uuuggagauuaguugguau

SEQ ID NO: 1505019 - RNA, 19 nt, Artificial Sequence
  Description of Artificial Sequence: Synthetic oligonucleotide
  Antisense strand to SEQ ID NO: 1505018
auaccaacuaaucuccaaa

SEQ ID NO: 1505020 - RNA, 19 nt, Artificial Sequence
  Description of Artificial Sequence: Synthetic oligonucleotide
  Sense strand starting at position 381 of SEQ ID NO: 1244654
uggagauuaguugguauua

SEQ ID NO: 1505021 - RNA, 19 nt, Artificial Sequence
  Description of Artificial Sequence: Synthetic oligonucleotide
  Antisense strand to SEQ ID NO: 1505020
uaauaccaacuaaucucca

SEQ ID NO: 1505022 - RNA, 19 nt, Artificial Sequence
  Description of Artificial Sequence: Synthetic oligonucleotide
  Sense strand starting at position 382 of SEQ ID NO: 1244654
ggagauuaguugguauuac

SEQ ID NO: 1505023 - RNA, 19 nt, Artificial Sequence
  Description of Artificial Sequence: Synthetic oligonucleotide
  Antisense strand to SEQ ID NO: 1505022
guaauaccaacuaaucucc

SEQ ID NO: 1505024 - RNA, 19 nt, Artificial Sequence
  Description of Artificial Sequence: Synthetic oligonucleotide
  Sense strand starting at position 390 of SEQ ID NO: 1244654
guugguauuacaggugaug

SEQ ID NO: 1505025 - RNA, 19 nt, Artificial Sequence
  Description of Artificial Sequence: Synthetic oligonucleotide
  Antisense strand to SEQ ID NO: 1505024
caucaccuguaauaccaac

SEQ ID NO: 1505026 - RNA, 19 nt, Artificial Sequence
  Description of Artificial Sequence: Synthetic oligonucleotide
  Sense strand starting at position 392 of SEQ ID NO: 1244654
ugguauuacaggugauggu

SEQ ID NO: 1505027 - RNA, 19 nt, Artificial Sequence
  Description of Artificial Sequence: Synthetic oligonucleotide
  Antisense strand to SEQ ID NO: 1505026
accaucaccuguaauacca

SEQ ID NO: 1505028 - RNA, 19 nt, Artificial Sequence
  Description of Artificial Sequence: Synthetic oligonucleotide
  Sense strand starting at position 492 of SEQ ID NO: 1244654
ccaaucugaucuuugugaa

SEQ ID NO: 1505029 - RNA, 19 nt, Artificial Sequence
  Description of Artificial Sequence: Synthetic oligonucleotide
  Antisense strand to SEQ ID NO: 1505028
uucacaaagaucagauugg

SEQ ID NO: 1505030 - RNA, 19 nt, Artificial Sequence
  Description of Artificial Sequence: Synthetic oligonucleotide
  Sense strand starting at position 701 of SEQ ID NO: 1244654
agcaguuagcaagguaaug

SEQ ID NO: 1505031 - RNA, 19 nt, Artificial Sequence
  Description of Artificial Sequence: Synthetic oligonucleotide
  Antisense strand to SEQ ID NO: 1505030
cauuaccuugcuaacugcu

SEQ ID NO: 1505032 - RNA, 19 nt, Artificial Sequence
  Description of Artificial Sequence: Synthetic oligonucleotide
  Sense strand starting at position 712 of SEQ ID NO: 1244654
agguaauggccuggagaga

SEQ ID NO: 1505033 - RNA, 19 nt, Artificial Sequence
  Description of Artificial Sequence: Synthetic oligonucleotide
  Antisense strand to SEQ ID NO: 1505032
ucucuccaggccauuaccu

SEQ ID NO: 1505034 - RNA, 19 nt, Artificial Sequence
  Description of Artificial Sequence: Synthetic oligonucleotide
  Sense strand starting at position 770 of SEQ ID NO: 1244654
ccaucagcuggugagaacu

SEQ ID NO: 1505035 - RNA, 19 nt, Artificial Sequence
  Description of Artificial Sequence: Synthetic oligonucleotide
  Antisense strand to SEQ ID NO: 1505034
aguucucaccagcugaugg

SEQ ID NO: 1505036 - RNA, 19 nt, Artificial Sequence
  Description of Artificial Sequence: Synthetic oligonucleotide
  Sense strand starting at position 967 of SEQ ID NO: 1244654
agggaugccugagcuaaac

SEQ ID NO: 1505037 - RNA, 19 nt, Artificial Sequence
  Description of Artificial Sequence: Synthetic oligonucleotide
  Antisense strand to SEQ ID NO: 1505036
guuuagcucaggcaucccu

SEQ ID NO: 1505038 - RNA, 19 nt, Artificial Sequence
  Description of Artificial Sequence: Synthetic oligonucleotide
  Sense strand starting at position 984 of SEQ ID NO: 1244654
acuccuuucccguagggaa

SEQ ID NO: 1505039 - RNA, 19 nt, Artificial Sequence
  Description of Artificial Sequence: Synthetic oligonucleotide
  Antisense strand to SEQ ID NO: 1505038
uucccuacgggaaaggagu

SEQ ID NO: 1505040 - RNA, 19 nt, Artificial Sequence
  Description of Artificial Sequence: Synthetic oligonucleotide
  Sense strand starting at position 997 of SEQ ID NO: 1244654
agggaaucccuuugcauaa

SEQ ID NO: 1505041 - RNA, 19 nt, Artificial Sequence
  Description of Artificial Sequence: Synthetic oligonucleotide
  Antisense strand to SEQ ID NO: 1505040
uuaugcaaagggauucccu

SEQ ID NO: 1505042 - RNA, 19 nt, Artificial Sequence
  Description of Artificial Sequence: Synthetic oligonucleotide
  Sense strand starting at position 998 of SEQ ID NO: 1244654
gggaaucccuuugcauaaa

SEQ ID NO: 1505043 - RNA, 19 nt, Artificial Sequence
  Description of Artificial Sequence: Synthetic oligonucleotide
  Antisense strand to SEQ ID NO: 1505042
uuuaugcaaagggauuccc

SEQ ID NO: 1505044 - RNA, 19 nt, Artificial Sequence
  Description of Artificial Sequence: Synthetic oligonucleotide
  Sense strand starting at position 1097 of SEQ ID NO: 1244654
uugcaaguucuggacaaag

SEQ ID NO: 1505045 - RNA, 19 nt, Artificial Sequence
  Description of Artificial Sequence: Synthetic oligonucleotide
  Antisense strand to SEQ ID NO: 1505044
cuuuguccagaacuugcaa

SEQ ID NO: 1505046 - RNA, 19 nt, Artificial Sequence
  Description of Artificial Sequence: Synthetic oligonucleotide
  Sense strand starting at position 1119 of SEQ ID NO: 1244654
aggagugguccacauugac

SEQ ID NO: 1505047 - RNA, 19 nt, Artificial Sequence
  Description of Artificial Sequence: Synthetic oligonucleotide
  Antisense strand to SEQ ID NO: 1505046
gucaauguggaccacuccu

SEQ ID NO: 1505048 - RNA, 19 nt, Artificial Sequence
  Description of Artificial Sequence: Synthetic oligonucleotide
  Sense strand starting at position 1189 of SEQ ID NO: 1244654
gggaguagcucgcucuaaa

SEQ ID NO: 1505049 - RNA, 19 nt, Artificial Sequence
  Description of Artificial Sequence: Synthetic oligonucleotide
  Antisense strand to SEQ ID NO: 1505048
uuuagagcgagcuacuccc

SEQ ID NO: 1505050 - RNA, 19 nt, Artificial Sequence
  Description of Artificial Sequence: Synthetic oligonucleotide
  Sense strand starting at position 1192 of SEQ ID NO: 1244654
aguagcucgcucuaaagaa

SEQ ID NO: 1505051 - RNA, 19 nt, Artificial Sequence
  Description of Artificial Sequence: Synthetic oligonucleotide
  Antisense strand to SEQ ID NO: 1505050
uucuuuagagcgagcuacu

SEQ ID NO: 1505052 - RNA, 19 nt, Artificial Sequence
  Description of Artificial Sequence: Synthetic oligonucleotide
  Sense strand starting at position 1304 of SEQ ID NO: 1244654
gagcuaugucgacacacug

SEQ ID NO: 1505053 - RNA, 19 nt, Artificial Sequence
  Description of Artificial Sequence: Synthetic oligonucleotide
  Antisense strand to SEQ ID NO: 1505052
cagugugucgacauagcuc

SEQ ID NO: 1505054 - RNA, 19 nt, Artificial Sequence
  Description of Artificial Sequence: Synthetic oligonucleotide
  Sense strand starting at position 1449 of SEQ ID NO: 1244654
cugacuuccuguucuugau

SEQ ID NO: 1505055 - RNA, 19 nt, Artificial Sequence
  Description of Artificial Sequence: Synthetic oligonucleotide
  Antisense strand to SEQ ID NO: 1505054
aucaagaacaggaagucag

SEQ ID NO: 1505056 - RNA, 19 nt, Artificial Sequence
  Description of Artificial Sequence: Synthetic oligonucleotide
  Sense strand starting at position 1609 of SEQ ID NO: 1244654
agauguuggcugugugaga

SEQ ID NO: 1505057 - RNA, 19 nt, Artificial Sequence
  Description of Artificial Sequence: Synthetic oligonucleotide
  Antisense strand to SEQ ID NO: 1505056
ucucacacagccaacaucu

SEQ ID NO: 1505058 - RNA, 19 nt, Artificial Sequence
  Description of Artificial Sequence: Synthetic oligonucleotide
  Sense strand starting at position 1610 of SEQ ID NO: 1244654
gauguuggcugugugagaa

SEQ ID NO: 1505059 - RNA, 19 nt, Artificial Sequence
  Description of Artificial Sequence: Synthetic oligonucleotide
  Antisense strand to SEQ ID NO: 1505058
uucucacacagccaacauc

SEQ ID NO: 1505060 - RNA, 19 nt, Artificial Sequence
  Description of Artificial Sequence: Synthetic oligonucleotide
  Sense strand starting at position 2413 of SEQ ID NO: 1244654
cccuuagugcucugaaccu

SEQ ID NO: 1505061 - RNA, 19 nt, Artificial Sequence
  Description of Artificial Sequence: Synthetic oligonucleotide
  Antisense strand to SEQ ID NO: 1505060
agguucagagcacuaaggg

SEQ ID NO: 1505062 - RNA, 19 nt, Artificial Sequence
  Description of Artificial Sequence: Synthetic oligonucleotide
  Sense strand starting at position 2518 of SEQ ID NO: 1244654
gggugucaacgggaugaau

SEQ ID NO: 1505063 - RNA, 19 nt, Artificial Sequence
  Description of Artificial Sequence: Synthetic oligonucleotide
  Antisense strand to SEQ ID NO: 1505062
auucaucccguugacaccc

SEQ ID NO: 1505064 - RNA, 19 nt, Artificial Sequence
  Description of Artificial Sequence: Synthetic oligonucleotide
  Sense strand starting at position 2605 of SEQ ID NO: 1244654
agagcuuugccucaucuaa

SEQ ID NO: 1505065 - RNA, 19 nt, Artificial Sequence
  Description of Artificial Sequence: Synthetic oligonucleotide
  Antisense strand to SEQ ID NO: 1505064
uuagaugaggcaaagcucu

SEQ ID NO: 1505066 - RNA, 19 nt, Artificial Sequence
  Description of Artificial Sequence: Synthetic oligonucleotide
  Sense strand starting at position 2728 of SEQ ID NO: 1244654
ugauaaagauguuuaugug

SEQ ID NO: 1505067 - RNA, 19 nt, Artificial Sequence
  Description of Artificial Sequence: Synthetic oligonucleotide
  Antisense strand to SEQ ID NO: 1505066
cacauaaacaucuuuauca

SEQ ID NO: 1505068 - RNA, 19 nt, Artificial Sequence
  Description of Artificial Sequence: Synthetic oligonucleotide
  Sense strand starting at position 2729 of SEQ ID NO: 1244654
gauaaagauguuuaugugu

SEQ ID NO: 1505069 - RNA, 19 nt, Artificial Sequence
  Description of Artificial Sequence: Synthetic oligonucleotide
  Antisense strand to SEQ ID NO: 1505068
acacauaaacaucuuuauc

SEQ ID NO: 1505070 - RNA, 19 nt, Artificial Sequence
  Description of Artificial Sequence: Synthetic oligonucleotide
  Sense strand starting at position 2732 of SEQ ID NO: 1244654
aaagauguuuauguguaca

SEQ ID NO: 1505071 - RNA, 19 nt, Artificial Sequence
  Description of Artificial Sequence: Synthetic oligonucleotide
  Antisense strand to SEQ ID NO: 1505070
uguacacauaaacaucuuu

SEQ ID NO: 1505072 - RNA, 19 nt, Artificial Sequence
  Description of Artificial Sequence: Synthetic oligonucleotide
  Sense strand starting at position 2734 of SEQ ID NO: 1244654
agauguuuauguguacagu

SEQ ID NO: 1505073 - RNA, 19 nt, Artificial Sequence
  Description of Artificial Sequence: Synthetic oligonucleotide
  Antisense strand to SEQ ID NO: 1505072
acuguacacauaaacaucu

SEQ ID NO: 1505074 - RNA, 19 nt, Artificial Sequence
  Description of Artificial Sequence: Synthetic oligonucleotide
  Sense strand starting at position 2735 of SEQ ID NO: 1244654
gauguuuauguguacagua

SEQ ID NO: 1505075 - RNA, 19 nt, Artificial Sequence
  Description of Artificial Sequence: Synthetic oligonucleotide
  Antisense strand to SEQ ID NO: 1505074
uacuguacacauaaacauc

SEQ ID NO: 1505076 - RNA, 19 nt, Artificial Sequence
  Description of Artificial Sequence: Synthetic oligonucleotide
  Sense strand starting at position 2750 of SEQ ID NO: 1244654
aguauucucuuccuuggau

SEQ ID NO: 1505077 - RNA, 19 nt, Artificial Sequence
  Description of Artificial Sequence: Synthetic oligonucleotide
  Antisense strand to SEQ ID NO: 1505076
auccaaggaagagaauacu

SEQ ID NO: 1505078 - RNA, 19 nt, Artificial Sequence
  Description of Artificial Sequence: Synthetic oligonucleotide
  Sense strand starting at position 3253 of SEQ ID NO: 1244654
ccauaaguugcccagcuaa

SEQ ID NO: 1505079 - RNA, 19 nt, Artificial Sequence
  Description of Artificial Sequence: Synthetic oligonucleotide
  Antisense strand to SEQ ID NO: 1505078
uuagcugggcaacuuaugg

SEQ ID NO: 1505080 - RNA, 19 nt, Artificial Sequence
  Description of Artificial Sequence: Synthetic oligonucleotide
  Sense strand starting at position 3318 of SEQ ID NO: 1244654
ggucucaaacuucgggauu

SEQ ID NO: 1505081 - RNA, 19 nt, Artificial Sequence
  Description of Artificial Sequence: Synthetic oligonucleotide
  Antisense strand to SEQ ID NO: 1505080
aaucccgaaguuugagacc

SEQ ID NO: 1505082 - RNA, 19 nt, Artificial Sequence
  Description of Artificial Sequence: Synthetic oligonucleotide
  Sense strand starting at position 3329 of SEQ ID NO: 1244654
ucgggauuccagcaauccu

SEQ ID NO: 1505083 - RNA, 19 nt, Artificial Sequence
  Description of Artificial Sequence: Synthetic oligonucleotide
  Antisense strand to SEQ ID NO: 1505082
aggauugcuggaaucccga

SEQ ID NO: 1505084 - RNA, 19 nt, Artificial Sequence
  Description of Artificial Sequence: Synthetic oligonucleotide
  Sense strand starting at position 3836 of SEQ ID NO: 1244654
ccugguaacuuugucauca

SEQ ID NO: 1505085 - RNA, 19 nt, Artificial Sequence
  Description of Artificial Sequence: Synthetic oligonucleotide
  Antisense strand to SEQ ID NO: 1505084
ugaugacaaaguuaccagg

SEQ ID NO: 1505086 - RNA, 19 nt, Artificial Sequence
  Description of Artificial Sequence: Synthetic oligonucleotide
  Sense strand starting at position 3837 of SEQ ID NO: 1244654
cugguaacuuugucaucau

SEQ ID NO: 1505087 - RNA, 19 nt, Artificial Sequence
  Description of Artificial Sequence: Synthetic oligonucleotide
  Antisense strand to SEQ ID NO: 1505086
augaugacaaaguuaccag

SEQ ID NO: 1505088 - RNA, 19 nt, Artificial Sequence
  Description of Artificial Sequence: Synthetic oligonucleotide
  Sense strand starting at position 3840 of SEQ ID NO: 1244654
guaacuuugucaucaucag

SEQ ID NO: 1505089 - RNA, 19 nt, Artificial Sequence
  Description of Artificial Sequence: Synthetic oligonucleotide
  Antisense strand to SEQ ID NO: 1505088
cugaugaugacaaaguuac

SEQ ID NO: 1505090 - RNA, 19 nt, Artificial Sequence
  Description of Artificial Sequence: Synthetic oligonucleotide
  Sense strand starting at position 3848 of SEQ ID NO: 1244654
gucaucaucagaggaguuc

SEQ ID NO: 1505091 - RNA, 19 nt, Artificial Sequence
  Description of Artificial Sequence: Synthetic oligonucleotide
  Antisense strand to SEQ ID NO: 1505090
gaacuccucugaugaugac

SEQ ID NO: 1505092 - RNA, 19 nt, Artificial Sequence
  Description of Artificial Sequence: Synthetic oligonucleotide
  Sense strand starting at position 3 of SEQ ID NO: 1244655
uaaguaaucgguuaaaugu

SEQ ID NO: 1505093 - RNA, 19 nt, Artificial Sequence
  Description of Artificial Sequence: Synthetic oligonucleotide
  Antisense strand to SEQ ID NO: 1505092
acauuuaaccgauuacuua

SEQ ID NO: 1505094 - RNA, 19 nt, Artificial Sequence
  Description of Artificial Sequence: Synthetic oligonucleotide
  Sense strand starting at position 48 of SEQ ID NO: 1244655
ccuccuuaugggugcauaa

SEQ ID NO: 1505095 - RNA, 19 nt, Artificial Sequence
  Description of Artificial Sequence: Synthetic oligonucleotide
  Antisense strand to SEQ ID NO: 1505094
uuaugcacccauaaggagg

SEQ ID NO: 1505096 - RNA, 19 nt, Artificial Sequence
  Description of Artificial Sequence: Synthetic oligonucleotide
  Sense strand starting at position 58 of SEQ ID NO: 1244655
ggugcauaaucauucucua

SEQ ID NO: 1505097 - RNA, 19 nt, Artificial Sequence
  Description of Artificial Sequence: Synthetic oligonucleotide
  Antisense strand to SEQ ID NO: 1505096
uagagaaugauuaugcacc

SEQ ID NO: 1505098 - RNA, 19 nt, Artificial Sequence
  Description of Artificial Sequence: Synthetic oligonucleotide
  Sense strand starting at position 162 of SEQ ID NO: 1244655
gaaugagccuaccugucuu

SEQ ID NO: 1505099 - RNA, 19 nt, Artificial Sequence
  Description of Artificial Sequence: Synthetic oligonucleotide
  Antisense strand to SEQ ID NO: 1505098
aagacagguaggcucauuc

SEQ ID NO: 1505100 - RNA, 19 nt, Artificial Sequence
  Description of Artificial Sequence: Synthetic oligonucleotide
  Sense strand starting at position 170 of SEQ ID NO: 1244655
cuaccugucuuguugagga

SEQ ID NO: 1505101 - RNA, 19 nt, Artificial Sequence
  Description of Artificial Sequence: Synthetic oligonucleotide
  Antisense strand to SEQ ID NO: 1505100
uccucaacaagacagguag

SEQ ID NO: 1505102 - RNA, 19 nt, Artificial Sequence
  Description of Artificial Sequence: Synthetic oligonucleotide
  Sense strand starting at position 266 of SEQ ID NO: 1244655
gcccgaagucuagcuguua

SEQ ID NO: 1505103 - RNA, 19 nt, Artificial Sequence
  Description of Artificial Sequence: Synthetic oligonucleotide
  Antisense strand to SEQ ID NO: 1505102
uaacagcuagacuucgggc

SEQ ID NO: 1505104 - RNA, 19 nt, Artificial Sequence
  Description of Artificial Sequence: Synthetic oligonucleotide
  Sense strand starting at position 267 of SEQ ID NO: 1244655
cccgaagucuagcuguuaa

SEQ ID NO: 1505105 - RNA, 19 nt, Artificial Sequence
  Description of Artificial Sequence: Synthetic oligonucleotide
  Antisense strand to SEQ ID NO: 1505104
uuaacagcuagacuucggg

SEQ ID NO: 1505106 - RNA, 19 nt, Artificial Sequence
  Description of Artificial Sequence: Synthetic oligonucleotide
  Sense strand starting at position 620 of SEQ ID NO: 1244655
cggcgccugguauagaauu

SEQ ID NO: 1505107 - RNA, 19 nt, Artificial Sequence
  Description of Artificial Sequence: Synthetic oligonucleotide
  Antisense strand to SEQ ID NO: 1505106
aauucuauaccaggcgccg

SEQ ID NO: 1505108 - RNA, 19 nt, Artificial Sequence
  Description of Artificial Sequence: Synthetic oligonucleotide
  Sense strand starting at position 628 of SEQ ID NO: 1244655
gguauagaauucccaucua

SEQ ID NO: 1505109 - RNA, 19 nt, Artificial Sequence
  Description of Artificial Sequence: Synthetic oligonucleotide
  Antisense strand to SEQ ID NO: 1505108
uagaugggaauucuauacc

SEQ ID NO: 1505110 - RNA, 19 nt, Artificial Sequence
  Description of Artificial Sequence: Synthetic oligonucleotide
  Sense strand starting at position 668 of SEQ ID NO: 1244655
uuuggaacuuucucuggua

SEQ ID NO: 1505111 - RNA, 19 nt, Artificial Sequence
  Description of Artificial Sequence: Synthetic oligonucleotide
  Antisense strand to SEQ ID NO: 1505110
uaccagagaaaguuccaaa

SEQ ID NO: 1505112 - RNA, 19 nt, Artificial Sequence
  Description of Artificial Sequence: Synthetic oligonucleotide
  Sense strand starting at position 669 of SEQ ID NO: 1244655
uuggaacuuucucugguau

SEQ ID NO: 1505113 - RNA, 19 nt, Artificial Sequence
  Description of Artificial Sequence: Synthetic oligonucleotide
  Antisense strand to SEQ ID NO: 1505112
auaccagagaaaguuccaa

SEQ ID NO: 1505114 - RNA, 19 nt, Artificial Sequence
  Description of Artificial Sequence: Synthetic oligonucleotide
  Sense strand starting at position 693 of SEQ ID NO: 1244655
gcauaccucucagaggaga

SEQ ID NO: 1505115 - RNA, 19 nt, Artificial Sequence
  Description of Artificial Sequence: Synthetic oligonucleotide
  Antisense strand to SEQ ID NO: 1505114
ucuccucugagagguaugc

SEQ ID NO: 1505116 - RNA, 19 nt, Artificial Sequence
  Description of Artificial Sequence: Synthetic oligonucleotide
  Sense strand starting at position 731 of SEQ ID NO: 1244655
gccaucugacagugugaaa

SEQ ID NO: 1505117 - RNA, 19 nt, Artificial Sequence
  Description of Artificial Sequence: Synthetic oligonucleotide
  Antisense strand to SEQ ID NO: 1505116
uuucacacugucagauggc

SEQ ID NO: 1505118 - RNA, 19 nt, Artificial Sequence
  Description of Artificial Sequence: Synthetic oligonucleotide
  Sense strand starting at position 790 of SEQ ID NO: 1244655
uugacuucccuaggacuca

SEQ ID NO: 1505119 - RNA, 19 nt, Artificial Sequence
  Description of Artificial Sequence: Synthetic oligonucleotide
  Antisense strand to SEQ ID NO: 1505118
ugaguccuagggaagucaa

SEQ ID NO: 1505120 - RNA, 19 nt, Artificial Sequence
  Description of Artificial Sequence: Synthetic oligonucleotide
  Sense strand starting at position 837 of SEQ ID NO: 1244655
gggagaugaucuugaaaga

SEQ ID NO: 1505121 - RNA, 19 nt, Artificial Sequence
  Description of Artificial Sequence: Synthetic oligonucleotide
  Antisense strand to SEQ ID NO: 1505120
ucuuucaagaucaucuccc

SEQ ID NO: 1505122 - RNA, 19 nt, Artificial Sequence
  Description of Artificial Sequence: Synthetic oligonucleotide
  Sense strand starting at position 938 of SEQ ID NO: 1244655
ugauuaugcgacugacaca

SEQ ID NO: 1505123 - RNA, 19 nt, Artificial Sequence
  Description of Artificial Sequence: Synthetic oligonucleotide
  Antisense strand to SEQ ID NO: 1505122
ugugucagucgcauaauca

SEQ ID NO: 1505124 - RNA, 19 nt, Artificial Sequence
  Description of Artificial Sequence: Synthetic oligonucleotide
  Sense strand starting at position 1085 of SEQ ID NO: 1244655
ggacgauaaccggguacaa

SEQ ID NO: 1505125 - RNA, 19 nt, Artificial Sequence
  Description of Artificial Sequence: Synthetic oligonucleotide
  Antisense strand to SEQ ID NO: 1505124
uuguacccgguuaucgucc

SEQ ID NO: 1505126 - RNA, 19 nt, Artificial Sequence
  Description of Artificial Sequence: Synthetic oligonucleotide
  Sense strand starting at position 1130 of SEQ ID NO: 1244655
agcguaaugcucguuuaag

SEQ ID NO: 1505127 - RNA, 19 nt, Artificial Sequence
  Description of Artificial Sequence: Synthetic oligonucleotide
  Antisense strand to SEQ ID NO: 1505126
cuuaaacgagcauuacgcu

SEQ ID NO: 1505128 - RNA, 19 nt, Artificial Sequence
  Description of Artificial Sequence: Synthetic oligonucleotide
  Sense strand starting at position 1141 of SEQ ID NO: 1244655
cguuuaagaaacgguaaca

SEQ ID NO: 1505129 - RNA, 19 nt, Artificial Sequence
  Description of Artificial Sequence: Synthetic oligonucleotide
  Antisense strand to SEQ ID NO: 1505128
uguuaccguuucuuaaacg

SEQ ID NO: 1505130 - RNA, 19 nt, Artificial Sequence
  Description of Artificial Sequence: Synthetic oligonucleotide
  Sense strand starting at position 1190 of SEQ ID NO: 1244655
uggcuacacucacuuaaga

SEQ ID NO: 1505131 - RNA, 19 nt, Artificial Sequence
  Description of Artificial Sequence: Synthetic oligonucleotide
  Antisense strand to SEQ ID NO: 1505130
ucuuaagugaguguagcca

SEQ ID NO: 1505132 - RNA, 19 nt, Artificial Sequence
  Description of Artificial Sequence: Synthetic oligonucleotide
  Sense strand starting at position 1256 of SEQ ID NO: 1244655
gaugcucugguccagauaa

SEQ ID NO: 1505133 - RNA, 19 nt, Artificial Sequence
  Description of Artificial Sequence: Synthetic oligonucleotide
  Antisense strand to SEQ ID NO: 1505132
uuaucuggaccagagcauc

SEQ ID NO: 1505134 - RNA, 19 nt, Artificial Sequence
  Description of Artificial Sequence: Synthetic oligonucleotide
  Sense strand starting at position 1258 of SEQ ID NO: 1244655
ugcucugguccagauaaac

SEQ ID NO: 1505135 - RNA, 19 nt, Artificial Sequence
  Description of Artificial Sequence: Synthetic oligonucleotide
  Antisense strand to SEQ ID NO: 1505134
guuuaucuggaccagagca

SEQ ID NO: 1505136 - RNA, 19 nt, Artificial Sequence
  Description of Artificial Sequence: Synthetic oligonucleotide
  Sense strand starting at position 1332 of SEQ ID NO: 1244655
gccuccauugcaugacaau

SEQ ID NO: 1505137 - RNA, 19 nt, Artificial Sequence
  Description of Artificial Sequence: Synthetic oligonucleotide
  Antisense strand to SEQ ID NO: 1505136
auugucaugcaauggaggc

SEQ ID NO: 1505138 - RNA, 19 nt, Artificial Sequence
  Description of Artificial Sequence: Synthetic oligonucleotide
  Sense strand starting at position 1341 of SEQ ID NO: 1244655
gcaugacaaucgcuguuua

SEQ ID NO: 1505139 - RNA, 19 nt, Artificial Sequence
  Description of Artificial Sequence: Synthetic oligonucleotide
  Antisense strand to SEQ ID NO: 1505138
uaaacagcgauugucaugc

SEQ ID NO: 1505140 - RNA, 19 nt, Artificial Sequence
  Description of Artificial Sequence: Synthetic oligonucleotide
  Sense strand starting at position 1342 of SEQ ID NO: 1244655
caugacaaucgcuguuuaa

SEQ ID NO: 1505141 - RNA, 19 nt, Artificial Sequence
  Description of Artificial Sequence: Synthetic oligonucleotide
  Antisense strand to SEQ ID NO: 1505140
uuaaacagcgauugucaug

SEQ ID NO: 1505142 - RNA, 19 nt, Artificial Sequence
  Description of Artificial Sequence: Synthetic oligonucleotide
  Sense strand starting at position 1345 of SEQ ID NO: 1244655
gacaaucgcuguuuaaaca

SEQ ID NO: 1505143 - RNA, 19 nt, Artificial Sequence
  Description of Artificial Sequence: Synthetic oligonucleotide
  Antisense strand to SEQ ID NO: 1505142
uguuuaaacagcgauuguc

SEQ ID NO: 1505144 - RNA, 19 nt, Artificial Sequence
  Description of Artificial Sequence: Synthetic oligonucleotide
  Sense strand starting at position 1811 of SEQ ID NO: 1244655
gccuaccucuugucagaaa

SEQ ID NO: 1505145 - RNA, 19 nt, Artificial Sequence
  Description of Artificial Sequence: Synthetic oligonucleotide
  Antisense strand to SEQ ID NO: 1505144
uuucugacaagagguaggc

SEQ ID NO: 1505146 - RNA, 19 nt, Artificial Sequence
  Description of Artificial Sequence: Synthetic oligonucleotide
  Sense strand starting at position 2073 of SEQ ID NO: 1244655
gggcgaugguugcuaagaa

SEQ ID NO: 1505147 - RNA, 19 nt, Artificial Sequence
  Description of Artificial Sequence: Synthetic oligonucleotide
  Antisense strand to SEQ ID NO: 1505146
uucuuagcaaccaucgccc

SEQ ID NO: 1505148 - RNA, 19 nt, Artificial Sequence
  Description of Artificial Sequence: Synthetic oligonucleotide
  Sense strand starting at position 2347 of SEQ ID NO: 1244655
ggaaguuugcgggagguca

SEQ ID NO: 1505149 - RNA, 19 nt, Artificial Sequence
  Description of Artificial Sequence: Synthetic oligonucleotide
  Antisense strand to SEQ ID NO: 1505148
ugaccucccgcaaacuucc

SEQ ID NO: 1505150 - RNA, 19 nt, Artificial Sequence
  Description of Artificial Sequence: Synthetic oligonucleotide
  Sense strand starting at position 2349 of SEQ ID NO: 1244655
aaguuugcgggaggucaaa

SEQ ID NO: 1505151 - RNA, 19 nt, Artificial Sequence
  Description of Artificial Sequence: Synthetic oligonucleotide
  Antisense strand to SEQ ID NO: 1505150
uuugaccucccgcaaacuu

SEQ ID NO: 1505152 - RNA, 19 nt, Artificial Sequence
  Description of Artificial Sequence: Synthetic oligonucleotide
  Sense strand starting at position 2754 of SEQ ID NO: 1244655
uccgguaccacugagacau

SEQ ID NO: 1505153 - RNA, 19 nt, Artificial Sequence
  Description of Artificial Sequence: Synthetic oligonucleotide
  Antisense strand to SEQ ID NO: 1505152
augucucagugguaccgga

SEQ ID NO: 1505154 - RNA, 19 nt, Artificial Sequence
  Description of Artificial Sequence: Synthetic oligonucleotide
  Sense strand starting at position 2756 of SEQ ID NO: 1244655
cgguaccacugagacauuu

SEQ ID NO: 1505155 - RNA, 19 nt, Artificial Sequence
  Description of Artificial Sequence: Synthetic oligonucleotide
  Antisense strand to SEQ ID NO: 1505154
aaaugucucagugguaccg

SEQ ID NO: 1505156 - RNA, 19 nt, Artificial Sequence
  Description of Artificial Sequence: Synthetic oligonucleotide
  Sense strand starting at position 2869 of SEQ ID NO: 1244655
ugucaaagucacuguuguu

SEQ ID NO: 1505157 - RNA, 19 nt, Artificial Sequence
  Description of Artificial Sequence: Synthetic oligonucleotide
  Antisense strand to SEQ ID NO: 1505156
aacaacagugacuuugaca

SEQ ID NO: 1505158 - RNA, 19 nt, Artificial Sequence
  Description of Artificial Sequence: Synthetic oligonucleotide
  Sense strand starting at position 2950 of SEQ ID NO: 1244655
uggaccuguuuaggaauuu

SEQ ID NO: 1505159 - RNA, 19 nt, Artificial Sequence
  Description of Artificial Sequence: Synthetic oligonucleotide
  Antisense strand to SEQ ID NO: 1505158
aaauuccuaaacaggucca

SEQ ID NO: 1505160 - RNA, 19 nt, Artificial Sequence
  Description of Artificial Sequence: Synthetic oligonucleotide
  Sense strand starting at position 3023 of SEQ ID NO: 1244655
ccuuguguuccacgucaaa

SEQ ID NO: 1505161 - RNA, 19 nt, Artificial Sequence
  Description of Artificial Sequence: Synthetic oligonucleotide
  Antisense strand to SEQ ID NO: 1505160
uuugacguggaacacaagg

SEQ ID NO: 1505162 - RNA, 19 nt, Artificial Sequence
  Description of Artificial Sequence: Synthetic oligonucleotide
  Sense strand starting at position 3056 of SEQ ID NO: 1244655
cugggucaccuacauuauu

SEQ ID NO: 1505163 - RNA, 19 nt, Artificial Sequence
  Description of Artificial Sequence: Synthetic oligonucleotide
  Antisense strand to SEQ ID NO: 1505162
aauaauguaggugacccag

SEQ ID NO: 1505164 - RNA, 19 nt, Artificial Sequence
  Description of Artificial Sequence: Synthetic oligonucleotide
  Sense strand starting at position 3224 of SEQ ID NO: 1244655
cggugaaaucccugucucu

SEQ ID NO: 1505165 - RNA, 19 nt, Artificial Sequence
  Description of Artificial Sequence: Synthetic oligonucleotide
  Antisense strand to SEQ ID NO: 1505164
agagacagggauuucaccg

SEQ ID NO: 1505166 - RNA, 19 nt, Artificial Sequence
  Description of Artificial Sequence: Synthetic oligonucleotide
  Sense strand starting at position 3776 of SEQ ID NO: 1244655
gcugaacuucuagaugcaa

SEQ ID NO: 1505167 - RNA, 19 nt, Artificial Sequence
  Description of Artificial Sequence: Synthetic oligonucleotide
  Antisense strand to SEQ ID NO: 1505166
uugcaucuagaaguucagc

SEQ ID NO: 1505168 - RNA, 19 nt, Artificial Sequence
  Description of Artificial Sequence: Synthetic oligonucleotide
  Sense strand starting at position 3960 of SEQ ID NO: 1244655
ugggaaauuuguugagcca

SEQ ID NO: 1505169 - RNA, 19 nt, Artificial Sequence
  Description of Artificial Sequence: Synthetic oligonucleotide
  Antisense strand to SEQ ID NO: 1505168
uggcucaacaaauuuccca

SEQ ID NO: 1505170 - RNA, 19 nt, Artificial Sequence
  Description of Artificial Sequence: Synthetic oligonucleotide
  Sense strand starting at position 3967 of SEQ ID NO: 1244655
uuuguugagccauacauuc

SEQ ID NO: 1505171 - RNA, 19 nt, Artificial Sequence
  Description of Artificial Sequence: Synthetic oligonucleotide
  Antisense strand to SEQ ID NO: 1505170
gaauguauggcucaacaaa

SEQ ID NO: 1505172 - RNA, 19 nt, Artificial Sequence
  Description of Artificial Sequence: Synthetic oligonucleotide
  Sense strand starting at position 241 of SEQ ID NO: 1244656
cgagguuagaacugugaau

SEQ ID NO: 1505173 - RNA, 19 nt, Artificial Sequence
  Description of Artificial Sequence: Synthetic oligonucleotide
  Antisense strand to SEQ ID NO: 1505172
auucacaguucuaaccucg

SEQ ID NO: 1505174 - RNA, 19 nt, Artificial Sequence
  Description of Artificial Sequence: Synthetic oligonucleotide
  Sense strand starting at position 243 of SEQ ID NO: 1244656
agguuagaacugugaauuc

SEQ ID NO: 1505175 - RNA, 19 nt, Artificial Sequence
  Description of Artificial Sequence: Synthetic oligonucleotide
  Antisense strand to SEQ ID NO: 1505174
gaauucacaguucuaaccu

SEQ ID NO: 1505176 - RNA, 19 nt, Artificial Sequence
  Description of Artificial Sequence: Synthetic oligonucleotide
  Sense strand starting at position 298 of SEQ ID NO: 1244656
ggaagaaaccuuugguguu

SEQ ID NO: 1505177 - RNA, 19 nt, Artificial Sequence
  Description of Artificial Sequence: Synthetic oligonucleotide
  Antisense strand to SEQ ID NO: 1505176
aacaccaaagguuucuucc

SEQ ID NO: 1505178 - RNA, 19 nt, Artificial Sequence
  Description of Artificial Sequence: Synthetic oligonucleotide
  Sense strand starting at position 300 of SEQ ID NO: 1244656
aagaaaccuuugguguuaa

SEQ ID NO: 1505179 - RNA, 19 nt, Artificial Sequence
  Description of Artificial Sequence: Synthetic oligonucleotide
  Antisense strand to SEQ ID NO: 1505178
uuaacaccaaagguuucuu

SEQ ID NO: 1505180 - RNA, 19 nt, Artificial Sequence
  Description of Artificial Sequence: Synthetic oligonucleotide
  Sense strand starting at position 415 of SEQ ID NO: 1244656
ggcagcaauucccugaugu

SEQ ID NO: 1505181 - RNA, 19 nt, Artificial Sequence
  Description of Artificial Sequence: Synthetic oligonucleotide
  Antisense strand to SEQ ID NO: 1505180
acaucagggaauugcugcc

SEQ ID NO: 1505182 - RNA, 19 nt, Artificial Sequence
  Description of Artificial Sequence: Synthetic oligonucleotide
  Sense strand starting at position 450 of SEQ ID NO: 1244656
ugcccuucugaacagaagu

SEQ ID NO: 1505183 - RNA, 19 nt, Artificial Sequence
  Description of Artificial Sequence: Synthetic oligonucleotide
  Antisense strand to SEQ ID NO: 1505182
acuucuguucagaagggca

SEQ ID NO: 1505184 - RNA, 19 nt, Artificial Sequence
  Description of Artificial Sequence: Synthetic oligonucleotide
  Sense strand starting at position 510 of SEQ ID NO: 1244656
acuagagaaucacaggaau

SEQ ID NO: 1505185 - RNA, 19 nt, Artificial Sequence
  Description of Artificial Sequence: Synthetic oligonucleotide
  Antisense strand to SEQ ID NO: 1505184
auuccugugauucucuagu

SEQ ID NO: 1505186 - RNA, 19 nt, Artificial Sequence
  Description of Artificial Sequence: Synthetic oligonucleotide
  Sense strand starting at position 615 of SEQ ID NO: 1244656
agguuaaaucgaugugaaa

SEQ ID NO: 1505187 - RNA, 19 nt, Artificial Sequence
  Description of Artificial Sequence: Synthetic oligonucleotide
  Antisense strand to SEQ ID NO: 1505186
uuucacaucgauuuaaccu

SEQ ID NO: 1505188 - RNA, 19 nt, Artificial Sequence
  Description of Artificial Sequence: Synthetic oligonucleotide
  Sense strand starting at position 715 of SEQ ID NO: 1244656
ccaugagggucagaaggau

SEQ ID NO: 1505189 - RNA, 19 nt, Artificial Sequence
  Description of Artificial Sequence: Synthetic oligonucleotide
  Antisense strand to SEQ ID NO: 1505188
auccuucugacccucaugg

SEQ ID NO: 1505190 - RNA, 19 nt, Artificial Sequence
  Description of Artificial Sequence: Synthetic oligonucleotide
  Sense strand starting at position 867 of SEQ ID NO: 1244656
cggagagcguuuccaggaa

SEQ ID NO: 1505191 - RNA, 19 nt, Artificial Sequence
  Description of Artificial Sequence: Synthetic oligonucleotide
  Antisense strand to SEQ ID NO: 1505190
uuccuggaaacgcucuccg

SEQ ID NO: 1505192 - RNA, 19 nt, Artificial Sequence
  Description of Artificial Sequence: Synthetic oligonucleotide
  Sense strand starting at position 871 of SEQ ID NO: 1244656
gagcguuuccaggaaagaa

SEQ ID NO: 1505193 - RNA, 19 nt, Artificial Sequence
  Description of Artificial Sequence: Synthetic oligonucleotide
  Antisense strand to SEQ ID NO: 1505192
uucuuuccuggaaacgcuc

SEQ ID NO: 1505194 - RNA, 19 nt, Artificial Sequence
  Description of Artificial Sequence: Synthetic oligonucleotide
  Sense strand starting at position 1188 of SEQ ID NO: 1244656
auguucuuacuuuggaagu

SEQ ID NO: 1505195 - RNA, 19 nt, Artificial Sequence
  Description of Artificial Sequence: Synthetic oligonucleotide
  Antisense strand to SEQ ID NO: 1505194
acuuccaaaguaagaacau

SEQ ID NO: 1505196 - RNA, 19 nt, Artificial Sequence
  Description of Artificial Sequence: Synthetic oligonucleotide
  Sense strand starting at position 1414 of SEQ ID NO: 1244656
acgaacaauuccuaggaaa

SEQ ID NO: 1505197 - RNA, 19 nt, Artificial Sequence
  Description of Artificial Sequence: Synthetic oligonucleotide
  Antisense strand to SEQ ID NO: 1505196
uuuccuaggaauuguucgu

SEQ ID NO: 1505198 - RNA, 19 nt, Artificial Sequence
  Description of Artificial Sequence: Synthetic oligonucleotide
  Sense strand starting at position 1440 of SEQ ID NO: 1244656
ggcuaccauuuguucuaua

SEQ ID NO: 1505199 - RNA, 19 nt, Artificial Sequence
  Description of Artificial Sequence: Synthetic oligonucleotide
  Antisense strand to SEQ ID NO: 1505198
uauagaacaaaugguagcc

SEQ ID NO: 1505200 - RNA, 19 nt, Artificial Sequence
  Description of Artificial Sequence: Synthetic oligonucleotide
  Sense strand starting at position 1451 of SEQ ID NO: 1244656
guucuauacggacacugaa

SEQ ID NO: 1505201 - RNA, 19 nt, Artificial Sequence
  Description of Artificial Sequence: Synthetic oligonucleotide
  Antisense strand to SEQ ID NO: 1505200
uucaguguccguauagaac

SEQ ID NO: 1505202 - RNA, 19 nt, Artificial Sequence
  Description of Artificial Sequence: Synthetic oligonucleotide
  Sense strand starting at position 1538 of SEQ ID NO: 1244656
auuccaguacugugacgua

SEQ ID NO: 1505203 - RNA, 19 nt, Artificial Sequence
  Description of Artificial Sequence: Synthetic oligonucleotide
  Antisense strand to SEQ ID NO: 1505202
uacgucacaguacuggaau

SEQ ID NO: 1505204 - RNA, 19 nt, Artificial Sequence
  Description of Artificial Sequence: Synthetic oligonucleotide
  Sense strand starting at position 1557 of SEQ ID NO: 1244656
ccaagaaauugagacuuac

SEQ ID NO: 1505205 - RNA, 19 nt, Artificial Sequence
  Description of Artificial Sequence: Synthetic oligonucleotide
  Antisense strand to SEQ ID NO: 1505204
guaagucucaauuucuugg

SEQ ID NO: 1505206 - RNA, 19 nt, Artificial Sequence
  Description of Artificial Sequence: Synthetic oligonucleotide
  Sense strand starting at position 1563 of SEQ ID NO: 1244656
aauugagacuuacaaaggu

SEQ ID NO: 1505207 - RNA, 19 nt, Artificial Sequence
  Description of Artificial Sequence: Synthetic oligonucleotide
  Antisense strand to SEQ ID NO: 1505206
accuuuguaagucucaauu

SEQ ID NO: 1505208 - RNA, 19 nt, Artificial Sequence
  Description of Artificial Sequence: Synthetic oligonucleotide
  Sense strand starting at position 1638 of SEQ ID NO: 1244656
gagguagccuuagcuagaa

SEQ ID NO: 1505209 - RNA, 19 nt, Artificial Sequence
  Description of Artificial Sequence: Synthetic oligonucleotide
  Antisense strand to SEQ ID NO: 1505208
uucuagcuaaggcuaccuc

SEQ ID NO: 1505210 - RNA, 19 nt, Artificial Sequence
  Description of Artificial Sequence: Synthetic oligonucleotide
  Sense strand starting at position 1640 of SEQ ID NO: 1244656
gguagccuuagcuagaacu

SEQ ID NO: 1505211 - RNA, 19 nt, Artificial Sequence
  Description of Artificial Sequence: Synthetic oligonucleotide
  Antisense strand to SEQ ID NO: 1505210
aguucuagcuaaggcuacc

SEQ ID NO: 1505212 - RNA, 19 nt, Artificial Sequence
  Description of Artificial Sequence: Synthetic oligonucleotide
  Sense strand starting at position 2176 of SEQ ID NO: 1244656
auauguuaaggucaguaga

SEQ ID NO: 1505213 - RNA, 19 nt, Artificial Sequence
  Description of Artificial Sequence: Synthetic oligonucleotide
  Antisense strand to SEQ ID NO: 1505212
ucuacugaccuuaacauau

SEQ ID NO: 1505214 - RNA, 19 nt, Artificial Sequence
  Description of Artificial Sequence: Synthetic oligonucleotide
  Sense strand starting at position 2178 of SEQ ID NO: 1244656
auguuaaggucaguagauu

SEQ ID NO: 1505215 - RNA, 19 nt, Artificial Sequence
  Description of Artificial Sequence: Synthetic oligonucleotide
  Antisense strand to SEQ ID NO: 1505214
aaucuacugaccuuaacau

SEQ ID NO: 1505216 - RNA, 19 nt, Artificial Sequence
  Description of Artificial Sequence: Synthetic oligonucleotide
  Sense strand starting at position 2187 of SEQ ID NO: 1244656
ucaguagauucugcauacu

SEQ ID NO: 1505217 - RNA, 19 nt, Artificial Sequence
  Description of Artificial Sequence: Synthetic oligonucleotide
  Antisense strand to SEQ ID NO: 1505216
aguaugcagaaucuacuga

SEQ ID NO: 1505218 - RNA, 19 nt, Artificial Sequence
  Description of Artificial Sequence: Synthetic oligonucleotide
  Sense strand starting at position 2198 of SEQ ID NO: 1244656
ugcauacugucagcauaca

SEQ ID NO: 1505219 - RNA, 19 nt, Artificial Sequence
  Description of Artificial Sequence: Synthetic oligonucleotide
  Antisense strand to SEQ ID NO: 1505218
uguaugcugacaguaugca

SEQ ID NO: 1505220 - RNA, 19 nt, Artificial Sequence
  Description of Artificial Sequence: Synthetic oligonucleotide
  Sense strand starting at position 2214 of SEQ ID NO: 1244656
acacaauucuaacugugga

SEQ ID NO: 1505221 - RNA, 19 nt, Artificial Sequence
  Description of Artificial Sequence: Synthetic oligonucleotide
  Antisense strand to SEQ ID NO: 1505220
uccacaguuagaauugugu

SEQ ID NO: 1505222 - RNA, 19 nt, Artificial Sequence
  Description of Artificial Sequence: Synthetic oligonucleotide
  Sense strand starting at position 2275 of SEQ ID NO: 1244656
ucaucucugggauggcuua

SEQ ID NO: 1505223 - RNA, 19 nt, Artificial Sequence
  Description of Artificial Sequence: Synthetic oligonucleotide
  Antisense strand to SEQ ID NO: 1505222
uaagccaucccagagauga

SEQ ID NO: 1505224 - RNA, 19 nt, Artificial Sequence
  Description of Artificial Sequence: Synthetic oligonucleotide
  Sense strand starting at position 2331 of SEQ ID NO: 1244656
ccacgcgaguuucuacaaa

SEQ ID NO: 1505225 - RNA, 19 nt, Artificial Sequence
  Description of Artificial Sequence: Synthetic oligonucleotide
  Antisense strand to SEQ ID NO: 1505224
uuuguagaaacucgcgugg

SEQ ID NO: 1505226 - RNA, 19 nt, Artificial Sequence
  Description of Artificial Sequence: Synthetic oligonucleotide
  Sense strand starting at position 2372 of SEQ ID NO: 1244656
acagaagcauucuaauuug

SEQ ID NO: 1505227 - RNA, 19 nt, Artificial Sequence
  Description of Artificial Sequence: Synthetic oligonucleotide
  Antisense strand to SEQ ID NO: 1505226
caaauuagaaugcuucugu

SEQ ID NO: 1505228 - RNA, 19 nt, Artificial Sequence
  Description of Artificial Sequence: Synthetic oligonucleotide
  Sense strand starting at position 2576 of SEQ ID NO: 1244656
gcagaaacguuucucacca

SEQ ID NO: 1505229 - RNA, 19 nt, Artificial Sequence
  Description of Artificial Sequence: Synthetic oligonucleotide
  Antisense strand to SEQ ID NO: 1505228
uggugagaaacguuucugc

SEQ ID NO: 1505230 - RNA, 19 nt, Artificial Sequence
  Description of Artificial Sequence: Synthetic oligonucleotide
  Sense strand starting at position 2605 of SEQ ID NO: 1244656
gagugcucagaugggcaua

SEQ ID NO: 1505231 - RNA, 19 nt, Artificial Sequence
  Description of Artificial Sequence: Synthetic oligonucleotide
  Antisense strand to SEQ ID NO: 1505230
uaugcccaucugagcacuc

SEQ ID NO: 1505232 - RNA, 19 nt, Artificial Sequence
  Description of Artificial Sequence: Synthetic oligonucleotide
  Sense strand starting at position 2663 of SEQ ID NO: 1244656
ucaccaagucugggauaau

SEQ ID NO: 1505233 - RNA, 19 nt, Artificial Sequence
  Description of Artificial Sequence: Synthetic oligonucleotide
  Antisense strand to SEQ ID NO: 1505232
auuaucccagacuugguga

SEQ ID NO: 1505234 - RNA, 19 nt, Artificial Sequence
  Description of Artificial Sequence: Synthetic oligonucleotide
  Sense strand starting at position 2705 of SEQ ID NO: 1244656
guggcaaagcauuauaaac

SEQ ID NO: 1505235 - RNA, 19 nt, Artificial Sequence
  Description of Artificial Sequence: Synthetic oligonucleotide
  Antisense strand to SEQ ID NO: 1505234
guuuauaaugcuuugccac

SEQ ID NO: 1505236 - RNA, 19 nt, Artificial Sequence
  Description of Artificial Sequence: Synthetic oligonucleotide
  Sense strand starting at position 2901 of SEQ ID NO: 1244656
auuaucauccugcagguua

SEQ ID NO: 1505237 - RNA, 19 nt, Artificial Sequence
  Description of Artificial Sequence: Synthetic oligonucleotide
  Antisense strand to SEQ ID NO: 1505236
uaaccugcaggaugauaau

SEQ ID NO: 1505238 - RNA, 19 nt, Artificial Sequence
  Description of Artificial Sequence: Synthetic oligonucleotide
  Sense strand starting at position 2950 of SEQ ID NO: 1244656
guaccuuuacaauggaaag

SEQ ID NO: 1505239 - RNA, 19 nt, Artificial Sequence
  Description of Artificial Sequence: Synthetic oligonucleotide
  Antisense strand to SEQ ID NO: 1505238
cuuuccauuguaaagguac

SEQ ID NO: 1505240 - RNA, 19 nt, Artificial Sequence
  Description of Artificial Sequence: Synthetic oligonucleotide
  Sense strand starting at position 3096 of SEQ ID NO: 1244656
auggcugacccuuagcuaa

SEQ ID NO: 1505241 - RNA, 19 nt, Artificial Sequence
  Description of Artificial Sequence: Synthetic oligonucleotide
  Antisense strand to SEQ ID NO: 1505240
uuagcuaagggucagccau

SEQ ID NO: 1505242 - RNA, 19 nt, Artificial Sequence
  Description of Artificial Sequence: Synthetic oligonucleotide
  Sense strand starting at position 3471 of SEQ ID NO: 1244656
uagcucuuggauuggaaua

SEQ ID NO: 1505243 - RNA, 19 nt, Artificial Sequence
  Description of Artificial Sequence: Synthetic oligonucleotide
  Antisense strand to SEQ ID NO: 1505242
uauuccaauccaagagcua

SEQ ID NO: 1505244 - RNA, 19 nt, Artificial Sequence
  Description of Artificial Sequence: Synthetic oligonucleotide
  Sense strand starting at position 3715 of SEQ ID NO: 1244656
acgauucuuugccugugau

SEQ ID NO: 1505245 - RNA, 19 nt, Artificial Sequence
  Description of Artificial Sequence: Synthetic oligonucleotide
  Antisense strand to SEQ ID NO: 1505244
aucacaggcaaagaaucgu

SEQ ID NO: 1505246 - RNA, 19 nt, Artificial Sequence
  Description of Artificial Sequence: Synthetic oligonucleotide
  Sense strand starting at position 3718 of SEQ ID NO: 1244656
auucuuugccugugauaau

SEQ ID NO: 1505247 - RNA, 19 nt, Artificial Sequence
  Description of Artificial Sequence: Synthetic oligonucleotide
  Antisense strand to SEQ ID NO: 1505246
auuaucacaggcaaagaau

SEQ ID NO: 1505248 - RNA, 19 nt, Artificial Sequence
  Description of Artificial Sequence: Synthetic oligonucleotide
  Sense strand starting at position 3852 of SEQ ID NO: 1244656
gcacauguguuugugaaag

SEQ ID NO: 1505249 - RNA, 19 nt, Artificial Sequence
  Description of Artificial Sequence: Synthetic oligonucleotide
  Antisense strand to SEQ ID NO: 1505248
cuuucacaaacacaugugc

SEQ ID NO: 1505250 - RNA, 19 nt, Artificial Sequence
  Description of Artificial Sequence: Synthetic oligonucleotide
  Sense strand starting at position 3979 of SEQ ID NO: 1244656
uuggaaagccauuaauagu

SEQ ID NO: 1505251 - RNA, 19 nt, Artificial Sequence
  Description of Artificial Sequence: Synthetic oligonucleotide
  Antisense strand to SEQ ID NO: 1505250
acuauuaauggcuuuccaa

SEQ ID NO: 1505252 - RNA, 19 nt, Artificial Sequence
  Description of Artificial Sequence: Synthetic oligonucleotide
  Sense strand starting at position 266 of SEQ ID NO: 1244657
ccgccagauccuugggaua

SEQ ID NO: 1505253 - RNA, 19 nt, Artificial Sequence
  Description of Artificial Sequence: Synthetic oligonucleotide
  Antisense strand to SEQ ID NO: 1505252
uaucccaaggaucuggcgg

SEQ ID NO: 1505254 - RNA, 19 nt, Artificial Sequence
  Description of Artificial Sequence: Synthetic oligonucleotide
  Sense strand starting at position 269 of SEQ ID NO: 1244657
ccagauccuugggauauau

SEQ ID NO: 1505255 - RNA, 19 nt, Artificial Sequence
  Description of Artificial Sequence: Synthetic oligonucleotide
  Antisense strand to SEQ ID NO: 1505254
auauaucccaaggaucugg

SEQ ID NO: 1505256 - RNA, 19 nt, Artificial Sequence
  Description of Artificial Sequence: Synthetic oligonucleotide
  Sense strand starting at position 280 of SEQ ID NO: 1244657
ggauauauguucuuacguu

SEQ ID NO: 1505257 - RNA, 19 nt, Artificial Sequence
  Description of Artificial Sequence: Synthetic oligonucleotide
  Antisense strand to SEQ ID NO: 1505256
aacguaagaacauauaucc

SEQ ID NO: 1505258 - RNA, 19 nt, Artificial Sequence
  Description of Artificial Sequence: Synthetic oligonucleotide
  Sense strand starting at position 315 of SEQ ID NO: 1244657
cucacuuuggcuugaauua

SEQ ID NO: 1505259 - RNA, 19 nt, Artificial Sequence
  Description of Artificial Sequence: Synthetic oligonucleotide
  Antisense strand to SEQ ID NO: 1505258
uaauucaagccaaagugag

SEQ ID NO: 1505260 - RNA, 19 nt, Artificial Sequence
  Description of Artificial Sequence: Synthetic oligonucleotide
  Sense strand starting at position 316 of SEQ ID NO: 1244657
ucacuuuggcuugaauuau

SEQ ID NO: 1505261 - RNA, 19 nt, Artificial Sequence
  Description of Artificial Sequence: Synthetic oligonucleotide
  Antisense strand to SEQ ID NO: 1505260
auaauucaagccaaaguga

SEQ ID NO: 1505262 - RNA, 19 nt, Artificial Sequence
  Description of Artificial Sequence: Synthetic oligonucleotide
  Sense strand starting at position 908 of SEQ ID NO: 1244657
gcugaauuaugcccucuua

SEQ ID NO: 1505263 - RNA, 19 nt, Artificial Sequence
  Description of Artificial Sequence: Synthetic oligonucleotide
  Antisense strand to SEQ ID NO: 1505262
uaagagggcauaauucagc

SEQ ID NO: 1505264 - RNA, 19 nt, Artificial Sequence
  Description of Artificial Sequence: Synthetic oligonucleotide
  Sense strand starting at position 919 of SEQ ID NO: 1244657
cccucuuaagugugaucau

SEQ ID NO: 1505265 - RNA, 19 nt, Artificial Sequence
  Description of Artificial Sequence: Synthetic oligonucleotide
  Antisense strand to SEQ ID NO: 1505264
augaucacacuuaagaggg

SEQ ID NO: 1505266 - RNA, 19 nt, Artificial Sequence
  Description of Artificial Sequence: Synthetic oligonucleotide
  Sense strand starting at position 1001 of SEQ ID NO: 1244657
aucucuguauccguaacau

SEQ ID NO: 1505267 - RNA, 19 nt, Artificial Sequence
  Description of Artificial Sequence: Synthetic oligonucleotide
  Antisense strand to SEQ ID NO: 1505266
auguuacggauacagagau

SEQ ID NO: 1505268 - RNA, 19 nt, Artificial Sequence
  Description of Artificial Sequence: Synthetic oligonucleotide
  Sense strand starting at position 1005 of SEQ ID NO: 1244657
cuguauccguaacauuuaa

SEQ ID NO: 1505269 - RNA, 19 nt, Artificial Sequence
  Description of Artificial Sequence: Synthetic oligonucleotide
  Antisense strand to SEQ ID NO: 1505268
uuaaauguuacggauacag

SEQ ID NO: 1505270 - RNA, 19 nt, Artificial Sequence
  Description of Artificial Sequence: Synthetic oligonucleotide
  Sense strand starting at position 1033 of SEQ ID NO: 1244657
aggccaauguaucaacaaa

SEQ ID NO: 1505271 - RNA, 19 nt, Artificial Sequence
  Description of Artificial Sequence: Synthetic oligonucleotide
  Antisense strand to SEQ ID NO: 1505270
uuuguugauacauuggccu

SEQ ID NO: 1505272 - RNA, 19 nt, Artificial Sequence
  Description of Artificial Sequence: Synthetic oligonucleotide
  Sense strand starting at position 1074 of SEQ ID NO: 1244657
acaguaacauuguuuauga

SEQ ID NO: 1505273 - RNA, 19 nt, Artificial Sequence
  Description of Artificial Sequence: Synthetic oligonucleotide
  Antisense strand to SEQ ID NO: 1505272
ucauaaacaauguuacugu

SEQ ID NO: 1505274 - RNA, 19 nt, Artificial Sequence
  Description of Artificial Sequence: Synthetic oligonucleotide
  Sense strand starting at position 1353 of SEQ ID NO: 1244657
ugucaccaugcuugacaua

SEQ ID NO: 1505275 - RNA, 19 nt, Artificial Sequence
  Description of Artificial Sequence: Synthetic oligonucleotide
  Antisense strand to SEQ ID NO: 1505274
uaugucaagcauggugaca

SEQ ID NO: 1505276 - RNA, 19 nt, Artificial Sequence
  Description of Artificial Sequence: Synthetic oligonucleotide
  Sense strand starting at position 1505 of SEQ ID NO: 1244657
guaacauaaugugcuuuaa

SEQ ID NO: 1505277 - RNA, 19 nt, Artificial Sequence
  Description of Artificial Sequence: Synthetic oligonucleotide
  Antisense strand to SEQ ID NO: 1505276
uuaaagcacauuauguuac

SEQ ID NO: 1505278 - RNA, 19 nt, Artificial Sequence
  Description of Artificial Sequence: Synthetic oligonucleotide
  Sense strand starting at position 1689 of SEQ ID NO: 1244657
cccuacuugcgaugggaga

SEQ ID NO: 1505279 - RNA, 19 nt, Artificial Sequence
  Description of Artificial Sequence: Synthetic oligonucleotide
  Antisense strand to SEQ ID NO: 1505278
ucucccaucgcaaguaggg

SEQ ID NO: 1505280 - RNA, 19 nt, Artificial Sequence
  Description of Artificial Sequence: Synthetic oligonucleotide
  Sense strand starting at position 1690 of SEQ ID NO: 1244657
ccuacuugcgaugggagaa

SEQ ID NO: 1505281 - RNA, 19 nt, Artificial Sequence
  Description of Artificial Sequence: Synthetic oligonucleotide
  Antisense strand to SEQ ID NO: 1505280
uucucccaucgcaaguagg

SEQ ID NO: 1505282 - RNA, 19 nt, Artificial Sequence
  Description of Artificial Sequence: Synthetic oligonucleotide
  Sense strand starting at position 2012 of SEQ ID NO: 1244657
gugauaacuuaccauagag

SEQ ID NO: 1505283 - RNA, 19 nt, Artificial Sequence
  Description of Artificial Sequence: Synthetic oligonucleotide
  Antisense strand to SEQ ID NO: 1505282
cucuaugguaaguuaucac

SEQ ID NO: 1505284 - RNA, 19 nt, Artificial Sequence
  Description of Artificial Sequence: Synthetic oligonucleotide
  Sense strand starting at position 2044 of SEQ ID NO: 1244657
agucgaugacuuuggaucu

SEQ ID NO: 1505285 - RNA, 19 nt, Artificial Sequence
  Description of Artificial Sequence: Synthetic oligonucleotide
  Antisense strand to SEQ ID NO: 1505284
agauccaaagucaucgacu

SEQ ID NO: 1505286 - RNA, 19 nt, Artificial Sequence
  Description of Artificial Sequence: Synthetic oligonucleotide
  Sense strand starting at position 2196 of SEQ ID NO: 1244657
gguuccuggagccgugaaa

SEQ ID NO: 1505287 - RNA, 19 nt, Artificial Sequence
  Description of Artificial Sequence: Synthetic oligonucleotide
  Antisense strand to SEQ ID NO: 1505286
uuucacggcuccaggaacc

SEQ ID NO: 1505288 - RNA, 19 nt, Artificial Sequence
  Description of Artificial Sequence: Synthetic oligonucleotide
  Sense strand starting at position 2207 of SEQ ID NO: 1244657
ccgugaaagcauuaucucu

SEQ ID NO: 1505289 - RNA, 19 nt, Artificial Sequence
  Description of Artificial Sequence: Synthetic oligonucleotide
  Antisense strand to SEQ ID NO: 1505288
agagauaaugcuuucacgg

SEQ ID NO: 1505290 - RNA, 19 nt, Artificial Sequence
  Description of Artificial Sequence: Synthetic oligonucleotide
  Sense strand starting at position 2209 of SEQ ID NO: 1244657
gugaaagcauuaucucucu

SEQ ID NO: 1505291 - RNA, 19 nt, Artificial Sequence
  Description of Artificial Sequence: Synthetic oligonucleotide
  Antisense strand to SEQ ID NO: 1505290
agagagauaaugcuuucac

SEQ ID NO: 1505292 - RNA, 19 nt, Artificial Sequence
  Description of Artificial Sequence: Synthetic oligonucleotide
  Sense strand starting at position 2267 of SEQ ID NO: 1244657
uccugucuuguagaugaga

SEQ ID NO: 1505293 - RNA, 19 nt, Artificial Sequence
  Description of Artificial Sequence: Synthetic oligonucleotide
  Antisense strand to SEQ ID NO: 1505292
ucucaucuacaagacagga

SEQ ID NO: 1505294 - RNA, 19 nt, Artificial Sequence
  Description of Artificial Sequence: Synthetic oligonucleotide
  Sense strand starting at position 2269 of SEQ ID NO: 1244657
cugucuuguagaugagaag

SEQ ID NO: 1505295 - RNA, 19 nt, Artificial Sequence
  Description of Artificial Sequence: Synthetic oligonucleotide
  Antisense strand to SEQ ID NO: 1505294
cuucucaucuacaagacag

SEQ ID NO: 1505296 - RNA, 19 nt, Artificial Sequence
  Description of Artificial Sequence: Synthetic oligonucleotide
  Sense strand starting at position 2270 of SEQ ID NO: 1244657
ugucuuguagaugagaagu

SEQ ID NO: 1505297 - RNA, 19 nt, Artificial Sequence
  Description of Artificial Sequence: Synthetic oligonucleotide
  Antisense strand to SEQ ID NO: 1505296
acuucucaucuacaagaca

SEQ ID NO: 1505298 - RNA, 19 nt, Artificial Sequence
  Description of Artificial Sequence: Synthetic oligonucleotide
  Sense strand starting at position 2298 of SEQ ID NO: 1244657
cggagaugcuugguuacuu

SEQ ID NO: 1505299 - RNA, 19 nt, Artificial Sequence
  Description of Artificial Sequence: Synthetic oligonucleotide
  Antisense strand to SEQ ID NO: 1505298
aaguaaccaagcaucuccg

SEQ ID NO: 1505300 - RNA, 19 nt, Artificial Sequence
  Description of Artificial Sequence: Synthetic oligonucleotide
  Sense strand starting at position 2299 of SEQ ID NO: 1244657
ggagaugcuugguuacuuu

SEQ ID NO: 1505301 - RNA, 19 nt, Artificial Sequence
  Description of Artificial Sequence: Synthetic oligonucleotide
  Antisense strand to SEQ ID NO: 1505300
aaaguaaccaagcaucucc

SEQ ID NO: 1505302 - RNA, 19 nt, Artificial Sequence
  Description of Artificial Sequence: Synthetic oligonucleotide
  Sense strand starting at position 2557 of SEQ ID NO: 1244657
acaggaaucuugcucugag

SEQ ID NO: 1505303 - RNA, 19 nt, Artificial Sequence
  Description of Artificial Sequence: Synthetic oligonucleotide
  Antisense strand to SEQ ID NO: 1505302
cucagagcaagauuccugu

SEQ ID NO: 1505304 - RNA, 19 nt, Artificial Sequence
  Description of Artificial Sequence: Synthetic oligonucleotide
  Sense strand starting at position 2558 of SEQ ID NO: 1244657
caggaaucuugcucugagu

SEQ ID NO: 1505305 - RNA, 19 nt, Artificial Sequence
  Description of Artificial Sequence: Synthetic oligonucleotide
  Antisense strand to SEQ ID NO: 1505304
acucagagcaagauuccug

SEQ ID NO: 1505306 - RNA, 19 nt, Artificial Sequence
  Description of Artificial Sequence: Synthetic oligonucleotide
  Sense strand starting at position 2560 of SEQ ID NO: 1244657
ggaaucuugcucugagucu

SEQ ID NO: 1505307 - RNA, 19 nt, Artificial Sequence
  Description of Artificial Sequence: Synthetic oligonucleotide
  Antisense strand to SEQ ID NO: 1505306
agacucagagcaagauucc

SEQ ID NO: 1505308 - RNA, 19 nt, Artificial Sequence
  Description of Artificial Sequence: Synthetic oligonucleotide
  Sense strand starting at position 2593 of SEQ ID NO: 1244657
ggaagaauugcuggaccuu

SEQ ID NO: 1505309 - RNA, 19 nt, Artificial Sequence
  Description of Artificial Sequence: Synthetic oligonucleotide
  Antisense strand to SEQ ID NO: 1505308
aagguccagcaauucuucc

SEQ ID NO: 1505310 - RNA, 19 nt, Artificial Sequence
  Description of Artificial Sequence: Synthetic oligonucleotide
  Sense strand starting at position 2686 of SEQ ID NO: 1244657
gaugcauugcuaggucaua

SEQ ID NO: 1505311 - RNA, 19 nt, Artificial Sequence
  Description of Artificial Sequence: Synthetic oligonucleotide
  Antisense strand to SEQ ID NO: 1505310
uaugaccuagcaaugcauc

SEQ ID NO: 1505312 - RNA, 19 nt, Artificial Sequence
  Description of Artificial Sequence: Synthetic oligonucleotide
  Sense strand starting at position 2698 of SEQ ID NO: 1244657
ggucauacagcucauaaag

SEQ ID NO: 1505313 - RNA, 19 nt, Artificial Sequence
  Description of Artificial Sequence: Synthetic oligonucleotide
  Antisense strand to SEQ ID NO: 1505312
cuuuaugagcuguaugacc

SEQ ID NO: 1505314 - RNA, 19 nt, Artificial Sequence
  Description of Artificial Sequence: Synthetic oligonucleotide
  Sense strand starting at position 3183 of SEQ ID NO: 1244657
guggcucgacccuguaauu

SEQ ID NO: 1505315 - RNA, 19 nt, Artificial Sequence
  Description of Artificial Sequence: Synthetic oligonucleotide
  Antisense strand to SEQ ID NO: 1505314
aauuacagggucgagccac

SEQ ID NO: 1505316 - RNA, 19 nt, Artificial Sequence
  Description of Artificial Sequence: Synthetic oligonucleotide
  Sense strand starting at position 3546 of SEQ ID NO: 1244657
ucacaaugucuuugaguug

SEQ ID NO: 1505317 - RNA, 19 nt, Artificial Sequence
  Description of Artificial Sequence: Synthetic oligonucleotide
  Antisense strand to SEQ ID NO: 1505316
caacucaaagacauuguga

SEQ ID NO: 1505318 - RNA, 19 nt, Artificial Sequence
  Description of Artificial Sequence: Synthetic oligonucleotide
  Sense strand starting at position 3549 of SEQ ID NO: 1244657
caaugucuuugaguugucu

SEQ ID NO: 1505319 - RNA, 19 nt, Artificial Sequence
  Description of Artificial Sequence: Synthetic oligonucleotide
  Antisense strand to SEQ ID NO: 1505318
agacaacucaaagacauug

SEQ ID NO: 1505320 - RNA, 19 nt, Artificial Sequence
  Description of Artificial Sequence: Synthetic oligonucleotide
  Sense strand starting at position 3551 of SEQ ID NO: 1244657
augucuuugaguugucuca

SEQ ID NO: 1505321 - RNA, 19 nt, Artificial Sequence
  Description of Artificial Sequence: Synthetic oligonucleotide
  Antisense strand to SEQ ID NO: 1505320
ugagacaacucaaagacau

SEQ ID NO: 1505322 - RNA, 19 nt, Artificial Sequence
  Description of Artificial Sequence: Synthetic oligonucleotide
  Sense strand starting at position 3553 of SEQ ID NO: 1244657
gucuuugaguugucucacu

SEQ ID NO: 1505323 - RNA, 19 nt, Artificial Sequence
  Description of Artificial Sequence: Synthetic oligonucleotide
  Antisense strand to SEQ ID NO: 1505322
agugagacaacucaaagac

SEQ ID NO: 1505324 - RNA, 19 nt, Artificial Sequence
  Description of Artificial Sequence: Synthetic oligonucleotide
  Sense strand starting at position 3558 of SEQ ID NO: 1244657
ugaguugucucacucacau

SEQ ID NO: 1505325 - RNA, 19 nt, Artificial Sequence
  Description of Artificial Sequence: Synthetic oligonucleotide
  Antisense strand to SEQ ID NO: 1505324
augugagugagacaacuca

SEQ ID NO: 1505326 - RNA, 19 nt, Artificial Sequence
  Description of Artificial Sequence: Synthetic oligonucleotide
  Sense strand starting at position 3715 of SEQ ID NO: 1244657
ucagcuuaacuggaguaaa

SEQ ID NO: 1505327 - RNA, 19 nt, Artificial Sequence
  Description of Artificial Sequence: Synthetic oligonucleotide
  Antisense strand to SEQ ID NO: 1505326
uuuacuccaguuaagcuga

SEQ ID NO: 1505328 - RNA, 19 nt, Artificial Sequence
  Description of Artificial Sequence: Synthetic oligonucleotide
  Sense strand starting at position 3728 of SEQ ID NO: 1244657
aguaaacagguuuguaaac

SEQ ID NO: 1505329 - RNA, 19 nt, Artificial Sequence
  Description of Artificial Sequence: Synthetic oligonucleotide
  Antisense strand to SEQ ID NO: 1505328
guuuacaaaccuguuuacu

SEQ ID NO: 1505330 - RNA, 19 nt, Artificial Sequence
  Description of Artificial Sequence: Synthetic oligonucleotide
  Sense strand starting at position 3729 of SEQ ID NO: 1244657
guaaacagguuuguaaaca

SEQ ID NO: 1505331 - RNA, 19 nt, Artificial Sequence
  Description of Artificial Sequence: Synthetic oligonucleotide
  Antisense strand to SEQ ID NO: 1505330
uguuuacaaaccuguuuac

SEQ ID NO: 1505332 - RNA, 19 nt, Artificial Sequence
  Description of Artificial Sequence: Synthetic oligonucleotide
  Sense strand starting at position 88 of SEQ ID NO: 1244658
augguaucccauuauucuu

SEQ ID NO: 1505333 - RNA, 19 nt, Artificial Sequence
  Description of Artificial Sequence: Synthetic oligonucleotide
  Antisense strand to SEQ ID NO: 1505332
aagaauaaugggauaccau

SEQ ID NO: 1505334 - RNA, 19 nt, Artificial Sequence
  Description of Artificial Sequence: Synthetic oligonucleotide
  Sense strand starting at position 484 of SEQ ID NO: 1244658
uuugcuuucugggcuacaa

SEQ ID NO: 1505335 - RNA, 19 nt, Artificial Sequence
  Description of Artificial Sequence: Synthetic oligonucleotide
  Antisense strand to SEQ ID NO: 1505334
uuguagcccagaaagcaaa

SEQ ID NO: 1505336 - RNA, 19 nt, Artificial Sequence
  Description of Artificial Sequence: Synthetic oligonucleotide
  Sense strand starting at position 776 of SEQ ID NO: 1244658
ccgccagauccuugggaua

SEQ ID NO: 1505337 - RNA, 19 nt, Artificial Sequence
  Description of Artificial Sequence: Synthetic oligonucleotide
  Antisense strand to SEQ ID NO: 1505336
uaucccaaggaucuggcgg

SEQ ID NO: 1505338 - RNA, 19 nt, Artificial Sequence
  Description of Artificial Sequence: Synthetic oligonucleotide
  Sense strand starting at position 778 of SEQ ID NO: 1244658
gccagauccuugggauaua

SEQ ID NO: 1505339 - RNA, 19 nt, Artificial Sequence
  Description of Artificial Sequence: Synthetic oligonucleotide
  Antisense strand to SEQ ID NO: 1505338
uauaucccaaggaucuggc

SEQ ID NO: 1505340 - RNA, 19 nt, Artificial Sequence
  Description of Artificial Sequence: Synthetic oligonucleotide
  Sense strand starting at position 779 of SEQ ID NO: 1244658
ccagauccuugggauauau

SEQ ID NO: 1505341 - RNA, 19 nt, Artificial Sequence
  Description of Artificial Sequence: Synthetic oligonucleotide
  Antisense strand to SEQ ID NO: 1505340
auauaucccaaggaucugg

SEQ ID NO: 1505342 - RNA, 19 nt, Artificial Sequence
  Description of Artificial Sequence: Synthetic oligonucleotide
  Sense strand starting at position 790 of SEQ ID NO: 1244658
ggauauauguucuuacguu

SEQ ID NO: 1505343 - RNA, 19 nt, Artificial Sequence
  Description of Artificial Sequence: Synthetic oligonucleotide
  Antisense strand to SEQ ID NO: 1505342
aacguaagaacauauaucc

SEQ ID NO: 1505344 - RNA, 19 nt, Artificial Sequence
  Description of Artificial Sequence: Synthetic oligonucleotide
  Sense strand starting at position 825 of SEQ ID NO: 1244658
cucacuuuggcuugaauua

SEQ ID NO: 1505345 - RNA, 19 nt, Artificial Sequence
  Description of Artificial Sequence: Synthetic oligonucleotide
  Antisense strand to SEQ ID NO: 1505344
uaauucaagccaaagugag

SEQ ID NO: 1505346 - RNA, 19 nt, Artificial Sequence
  Description of Artificial Sequence: Synthetic oligonucleotide
  Sense strand starting at position 826 of SEQ ID NO: 1244658
ucacuuuggcuugaauuau

SEQ ID NO: 1505347 - RNA, 19 nt, Artificial Sequence
  Description of Artificial Sequence: Synthetic oligonucleotide
  Antisense strand to SEQ ID NO: 1505346
auaauucaagccaaaguga

SEQ ID NO: 1505348 - RNA, 19 nt, Artificial Sequence
  Description of Artificial Sequence: Synthetic oligonucleotide
  Sense strand starting at position 1418 of SEQ ID NO: 1244658
gcugaauuaugcccucuua

SEQ ID NO: 1505349 - RNA, 19 nt, Artificial Sequence
  Description of Artificial Sequence: Synthetic oligonucleotide
  Antisense strand to SEQ ID NO: 1505348
uaagagggcauaauucagc

SEQ ID NO: 1505350 - RNA, 19 nt, Artificial Sequence
  Description of Artificial Sequence: Synthetic oligonucleotide
  Sense strand starting at position 1429 of SEQ ID NO: 1244658
cccucuuaagugugaucau

SEQ ID NO: 1505351 - RNA, 19 nt, Artificial Sequence
  Description of Artificial Sequence: Synthetic oligonucleotide
  Antisense strand to SEQ ID NO: 1505350
augaucacacuuaagaggg

SEQ ID NO: 1505352 - RNA, 19 nt, Artificial Sequence
  Description of Artificial Sequence: Synthetic oligonucleotide
  Sense strand starting at position 1430 of SEQ ID NO: 1244658
ccucuuaagugugaucauu

SEQ ID NO: 1505353 - RNA, 19 nt, Artificial Sequence
  Description of Artificial Sequence: Synthetic oligonucleotide
  Antisense strand to SEQ ID NO: 1505352
aaugaucacacuuaagagg

SEQ ID NO: 1505354 - RNA, 19 nt, Artificial Sequence
  Description of Artificial Sequence: Synthetic oligonucleotide
  Sense strand starting at position 1469 of SEQ ID NO: 1244658
gguuguaguucccagagaa

SEQ ID NO: 1505355 - RNA, 19 nt, Artificial Sequence
  Description of Artificial Sequence: Synthetic oligonucleotide
  Antisense strand to SEQ ID NO: 1505354
uucucugggaacuacaacc

SEQ ID NO: 1505356 - RNA, 19 nt, Artificial Sequence
  Description of Artificial Sequence: Synthetic oligonucleotide
  Sense strand starting at position 1511 of SEQ ID NO: 1244658
aucucuguauccguaacau

SEQ ID NO: 1505357 - RNA, 19 nt, Artificial Sequence
  Description of Artificial Sequence: Synthetic oligonucleotide
  Antisense strand to SEQ ID NO: 1505356
auguuacggauacagagau

SEQ ID NO: 1505358 - RNA, 19 nt, Artificial Sequence
  Description of Artificial Sequence: Synthetic oligonucleotide
  Sense strand starting at position 1515 of SEQ ID NO: 1244658
cuguauccguaacauuuaa

SEQ ID NO: 1505359 - RNA, 19 nt, Artificial Sequence
  Description of Artificial Sequence: Synthetic oligonucleotide
  Antisense strand to SEQ ID NO: 1505358
uuaaauguuacggauacag

SEQ ID NO: 1505360 - RNA, 19 nt, Artificial Sequence
  Description of Artificial Sequence: Synthetic oligonucleotide
  Sense strand starting at position 1543 of SEQ ID NO: 1244658
aggccaauguaucaacaaa

SEQ ID NO: 1505361 - RNA, 19 nt, Artificial Sequence
  Description of Artificial Sequence: Synthetic oligonucleotide
  Antisense strand to SEQ ID NO: 1505360
uuuguugauacauuggccu

SEQ ID NO: 1505362 - RNA, 19 nt, Artificial Sequence
  Description of Artificial Sequence: Synthetic oligonucleotide
  Sense strand starting at position 1584 of SEQ ID NO: 1244658
acaguaacauuguuuauga

SEQ ID NO: 1505363 - RNA, 19 nt, Artificial Sequence
  Description of Artificial Sequence: Synthetic oligonucleotide
  Antisense strand to SEQ ID NO: 1505362
ucauaaacaauguuacugu

SEQ ID NO: 1505364 - RNA, 19 nt, Artificial Sequence
  Description of Artificial Sequence: Synthetic oligonucleotide
  Sense strand starting at position 1617 of SEQ ID NO: 1244658
agggcucucugauacuaac

SEQ ID NO: 1505365 - RNA, 19 nt, Artificial Sequence
  Description of Artificial Sequence: Synthetic oligonucleotide
  Antisense strand to SEQ ID NO: 1505364
guuaguaucagagagcccu

SEQ ID NO: 1505366 - RNA, 19 nt, Artificial Sequence
  Description of Artificial Sequence: Synthetic oligonucleotide
  Sense strand starting at position 1656 of SEQ ID NO: 1244658
guagguccuguuugcagua

SEQ ID NO: 1505367 - RNA, 19 nt, Artificial Sequence
  Description of Artificial Sequence: Synthetic oligonucleotide
  Antisense strand to SEQ ID NO: 1505366
uacugcaaacaggaccuac

SEQ ID NO: 1505368 - RNA, 19 nt, Artificial Sequence
  Description of Artificial Sequence: Synthetic oligonucleotide
  Sense strand starting at position 1863 of SEQ ID NO: 1244658
ugucaccaugcuugacaua

SEQ ID NO: 1505369 - RNA, 19 nt, Artificial Sequence
  Description of Artificial Sequence: Synthetic oligonucleotide
  Antisense strand to SEQ ID NO: 1505368
uaugucaagcauggugaca

SEQ ID NO: 1505370 - RNA, 19 nt, Artificial Sequence
  Description of Artificial Sequence: Synthetic oligonucleotide
  Sense strand starting at position 2015 of SEQ ID NO: 1244658
guaacauaaugugcuuuaa

SEQ ID NO: 1505371 - RNA, 19 nt, Artificial Sequence
  Description of Artificial Sequence: Synthetic oligonucleotide
  Antisense strand to SEQ ID NO: 1505370
uuaaagcacauuauguuac

SEQ ID NO: 1505372 - RNA, 19 nt, Artificial Sequence
  Description of Artificial Sequence: Synthetic oligonucleotide
  Sense strand starting at position 2199 of SEQ ID NO: 1244658
cccuacuugcgaugggaga

SEQ ID NO: 1505373 - RNA, 19 nt, Artificial Sequence
  Description of Artificial Sequence: Synthetic oligonucleotide
  Antisense strand to SEQ ID NO: 1505372
ucucccaucgcaaguaggg

SEQ ID NO: 1505374 - RNA, 19 nt, Artificial Sequence
  Description of Artificial Sequence: Synthetic oligonucleotide
  Sense strand starting at position 2200 of SEQ ID NO: 1244658
ccuacuugcgaugggagaa

SEQ ID NO: 1505375 - RNA, 19 nt, Artificial Sequence
  Description of Artificial Sequence: Synthetic oligonucleotide
  Antisense strand to SEQ ID NO: 1505374
uucucccaucgcaaguagg

SEQ ID NO: 1505376 - RNA, 19 nt, Artificial Sequence
  Description of Artificial Sequence: Synthetic oligonucleotide
  Sense strand starting at position 2522 of SEQ ID NO: 1244658
gugauaacuuaccauagag

SEQ ID NO: 1505377 - RNA, 19 nt, Artificial Sequence
  Description of Artificial Sequence: Synthetic oligonucleotide
  Antisense strand to SEQ ID NO: 1505376
cucuaugguaaguuaucac

SEQ ID NO: 1505378 - RNA, 19 nt, Artificial Sequence
  Description of Artificial Sequence: Synthetic oligonucleotide
  Sense strand starting at position 2554 of SEQ ID NO: 1244658
agucgaugacuuuggaucu

SEQ ID NO: 1505379 - RNA, 19 nt, Artificial Sequence
  Description of Artificial Sequence: Synthetic oligonucleotide
  Antisense strand to SEQ ID NO: 1505378
agauccaaagucaucgacu

SEQ ID NO: 1505380 - RNA, 19 nt, Artificial Sequence
  Description of Artificial Sequence: Synthetic oligonucleotide
  Sense strand starting at position 2706 of SEQ ID NO: 1244658
gguuccuggagccgugaaa

SEQ ID NO: 1505381 - RNA, 19 nt, Artificial Sequence
  Description of Artificial Sequence: Synthetic oligonucleotide
  Antisense strand to SEQ ID NO: 1505380
uuucacggcuccaggaacc

SEQ ID NO: 1505382 - RNA, 19 nt, Artificial Sequence
  Description of Artificial Sequence: Synthetic oligonucleotide
  Sense strand starting at position 2717 of SEQ ID NO: 1244658
ccgugaaagcauuaucucu

SEQ ID NO: 1505383 - RNA, 19 nt, Artificial Sequence
  Description of Artificial Sequence: Synthetic oligonucleotide
  Antisense strand to SEQ ID NO: 1505382
agagauaaugcuuucacgg

SEQ ID NO: 1505384 - RNA, 19 nt, Artificial Sequence
  Description of Artificial Sequence: Synthetic oligonucleotide
  Sense strand starting at position 2719 of SEQ ID NO: 1244658
gugaaagcauuaucucucu

SEQ ID NO: 1505385 - RNA, 19 nt, Artificial Sequence
  Description of Artificial Sequence: Synthetic oligonucleotide
  Antisense strand to SEQ ID NO: 1505384
agagagauaaugcuuucac

SEQ ID NO: 1505386 - RNA, 19 nt, Artificial Sequence
  Description of Artificial Sequence: Synthetic oligonucleotide
  Sense strand starting at position 2777 of SEQ ID NO: 1244658
uccugucuuguagaugaga

SEQ ID NO: 1505387 - RNA, 19 nt, Artificial Sequence
  Description of Artificial Sequence: Synthetic oligonucleotide
  Antisense strand to SEQ ID NO: 1505386
ucucaucuacaagacagga

SEQ ID NO: 1505388 - RNA, 19 nt, Artificial Sequence
  Description of Artificial Sequence: Synthetic oligonucleotide
  Sense strand starting at position 2779 of SEQ ID NO: 1244658
cugucuuguagaugagaag

SEQ ID NO: 1505389 - RNA, 19 nt, Artificial Sequence
  Description of Artificial Sequence: Synthetic oligonucleotide
  Antisense strand to SEQ ID NO: 1505388
cuucucaucuacaagacag

SEQ ID NO: 1505390 - RNA, 19 nt, Artificial Sequence
  Description of Artificial Sequence: Synthetic oligonucleotide
  Sense strand starting at position 2780 of SEQ ID NO: 1244658
ugucuuguagaugagaagu

SEQ ID NO: 1505391 - RNA, 19 nt, Artificial Sequence
  Description of Artificial Sequence: Synthetic oligonucleotide
  Antisense strand to SEQ ID NO: 1505390
acuucucaucuacaagaca

SEQ ID NO: 1505392 - RNA, 19 nt, Artificial Sequence
  Description of Artificial Sequence: Synthetic oligonucleotide
  Sense strand starting at position 2808 of SEQ ID NO: 1244658
cggagaugcuugguuacuu

SEQ ID NO: 1505393 - RNA, 19 nt, Artificial Sequence
  Description of Artificial Sequence: Synthetic oligonucleotide
  Antisense strand to SEQ ID NO: 1505392
aaguaaccaagcaucuccg

SEQ ID NO: 1505394 - RNA, 19 nt, Artificial Sequence
  Description of Artificial Sequence: Synthetic oligonucleotide
  Sense strand starting at position 2809 of SEQ ID NO: 1244658
ggagaugcuugguuacuuu

SEQ ID NO: 1505395 - RNA, 19 nt, Artificial Sequence
  Description of Artificial Sequence: Synthetic oligonucleotide
  Antisense strand to SEQ ID NO: 1505394
aaaguaaccaagcaucucc

SEQ ID NO: 1505396 - RNA, 19 nt, Artificial Sequence
  Description of Artificial Sequence: Synthetic oligonucleotide
  Sense strand starting at position 3067 of SEQ ID NO: 1244658
acaggaaucuugcucugag

SEQ ID NO: 1505397 - RNA, 19 nt, Artificial Sequence
  Description of Artificial Sequence: Synthetic oligonucleotide
  Antisense strand to SEQ ID NO: 1505396
cucagagcaagauuccugu

SEQ ID NO: 1505398 - RNA, 19 nt, Artificial Sequence
  Description of Artificial Sequence: Synthetic oligonucleotide
  Sense strand starting at position 3068 of SEQ ID NO: 1244658
caggaaucuugcucugagu

SEQ ID NO: 1505399 - RNA, 19 nt, Artificial Sequence
  Description of Artificial Sequence: Synthetic oligonucleotide
  Antisense strand to SEQ ID NO: 1505398
acucagagcaagauuccug

SEQ ID NO: 1505400 - RNA, 19 nt, Artificial Sequence
  Description of Artificial Sequence: Synthetic oligonucleotide
  Sense strand starting at position 3070 of SEQ ID NO: 1244658
ggaaucuugcucugagucu

SEQ ID NO: 1505401 - RNA, 19 nt, Artificial Sequence
  Description of Artificial Sequence: Synthetic oligonucleotide
  Antisense strand to SEQ ID NO: 1505400
agacucagagcaagauucc

SEQ ID NO: 1505402 - RNA, 19 nt, Artificial Sequence
  Description of Artificial Sequence: Synthetic oligonucleotide
  Sense strand starting at position 3103 of SEQ ID NO: 1244658
ggaagaauugcuggaccuu

SEQ ID NO: 1505403 - RNA, 19 nt, Artificial Sequence
  Description of Artificial Sequence: Synthetic oligonucleotide
  Antisense strand to SEQ ID NO: 1505402
aagguccagcaauucuucc

SEQ ID NO: 1505404 - RNA, 19 nt, Artificial Sequence
  Description of Artificial Sequence: Synthetic oligonucleotide
  Sense strand starting at position 3118 of SEQ ID NO: 1244658
ccuugucucagaggcguuu

SEQ ID NO: 1505405 - RNA, 19 nt, Artificial Sequence
  Description of Artificial Sequence: Synthetic oligonucleotide
  Antisense strand to SEQ ID NO: 1505404
aaacgccucugagacaagg

SEQ ID NO: 1505406 - RNA, 19 nt, Artificial Sequence
  Description of Artificial Sequence: Synthetic oligonucleotide
  Sense strand starting at position 3196 of SEQ ID NO: 1244658
gaugcauugcuaggucaua

SEQ ID NO: 1505407 - RNA, 19 nt, Artificial Sequence
  Description of Artificial Sequence: Synthetic oligonucleotide
  Antisense strand to SEQ ID NO: 1505406
uaugaccuagcaaugcauc

SEQ ID NO: 1505408 - RNA, 19 nt, Artificial Sequence
  Description of Artificial Sequence: Synthetic oligonucleotide
  Sense strand starting at position 3208 of SEQ ID NO: 1244658
ggucauacagcucauaaag

SEQ ID NO: 1505409 - RNA, 19 nt, Artificial Sequence
  Description of Artificial Sequence: Synthetic oligonucleotide
  Antisense strand to SEQ ID NO: 1505408
cuuuaugagcuguaugacc

SEQ ID NO: 1505410 - RNA, 19 nt, Artificial Sequence
  Description of Artificial Sequence: Synthetic oligonucleotide
  Sense strand starting at position 3693 of SEQ ID NO: 1244658
guggcucgacccuguaauu

SEQ ID NO: 1505411 - RNA, 19 nt, Artificial Sequence
  Description of Artificial Sequence: Synthetic oligonucleotide
  Antisense strand to SEQ ID NO: 1505410
aauuacagggucgagccac

SEQ ID NO: 1505412 - RNA, 19 nt, Artificial Sequence
  Description of Artificial Sequence: Synthetic oligonucleotide
  Sense strand starting at position 44 of SEQ ID NO: 1244659
ccaagaucuggccacuaca

SEQ ID NO: 1505413 - RNA, 19 nt, Artificial Sequence
  Description of Artificial Sequence: Synthetic oligonucleotide
  Antisense strand to SEQ ID NO: 1505412
uguaguggccagaucuugg

SEQ ID NO: 1505414 - RNA, 19 nt, Artificial Sequence
  Description of Artificial Sequence: Synthetic oligonucleotide
  Sense strand starting at position 119 of SEQ ID NO: 1244659
aaacuucuagagcgggaaa

SEQ ID NO: 1505415 - RNA, 19 nt, Artificial Sequence
  Description of Artificial Sequence: Synthetic oligonucleotide
  Antisense strand to SEQ ID NO: 1505414
uuucccgcucuagaaguuu

SEQ ID NO: 1505416 - RNA, 19 nt, Artificial Sequence
  Description of Artificial Sequence: Synthetic oligonucleotide
  Sense strand starting at position 217 of SEQ ID NO: 1244659
gggucugagugcucccuga

SEQ ID NO: 1505417 - RNA, 19 nt, Artificial Sequence
  Description of Artificial Sequence: Synthetic oligonucleotide
  Antisense strand to SEQ ID NO: 1505416
ucagggagcacucagaccc

SEQ ID NO: 1505418 - RNA, 19 nt, Artificial Sequence
  Description of Artificial Sequence: Synthetic oligonucleotide
  Sense strand starting at position 221 of SEQ ID NO: 1244659
cugagugcucccugacaag

SEQ ID NO: 1505419 - RNA, 19 nt, Artificial Sequence
  Description of Artificial Sequence: Synthetic oligonucleotide
  Antisense strand to SEQ ID NO: 1505418
cuugucagggagcacucag

SEQ ID NO: 1505420 - RNA, 19 nt, Artificial Sequence
  Description of Artificial Sequence: Synthetic oligonucleotide
  Sense strand starting at position 267 of SEQ ID NO: 1244659
cagugacacgccuaggaaa

SEQ ID NO: 1505421 - RNA, 19 nt, Artificial Sequence
  Description of Artificial Sequence: Synthetic oligonucleotide
  Antisense strand to SEQ ID NO: 1505420
uuuccuaggcgugucacug

SEQ ID NO: 1505422 - RNA, 19 nt, Artificial Sequence
  Description of Artificial Sequence: Synthetic oligonucleotide
  Sense strand starting at position 519 of SEQ ID NO: 1244659
ccacgucucuaccgagaau

SEQ ID NO: 1505423 - RNA, 19 nt, Artificial Sequence
  Description of Artificial Sequence: Synthetic oligonucleotide
  Antisense strand to SEQ ID NO: 1505422
auucucgguagagacgugg

SEQ ID NO: 1505424 - RNA, 19 nt, Artificial Sequence
  Description of Artificial Sequence: Synthetic oligonucleotide
  Sense strand starting at position 958 of SEQ ID NO: 1244659
ggugauuacugcggaguca

SEQ ID NO: 1505425 - RNA, 19 nt, Artificial Sequence
  Description of Artificial Sequence: Synthetic oligonucleotide
  Antisense strand to SEQ ID NO: 1505424
ugacuccgcaguaaucacc

SEQ ID NO: 1505426 - RNA, 19 nt, Artificial Sequence
  Description of Artificial Sequence: Synthetic oligonucleotide
  Sense strand starting at position 1043 of SEQ ID NO: 1244659
ucaugaguuugcugugagu

SEQ ID NO: 1505427 - RNA, 19 nt, Artificial Sequence
  Description of Artificial Sequence: Synthetic oligonucleotide
  Antisense strand to SEQ ID NO: 1505426
acucacagcaaacucauga

SEQ ID NO: 1505428 - RNA, 19 nt, Artificial Sequence
  Description of Artificial Sequence: Synthetic oligonucleotide
  Sense strand starting at position 1046 of SEQ ID NO: 1244659
ugaguuugcugugagugca

SEQ ID NO: 1505429 - RNA, 19 nt, Artificial Sequence
  Description of Artificial Sequence: Synthetic oligonucleotide
  Antisense strand to SEQ ID NO: 1505428
ugcacucacagcaaacuca

SEQ ID NO: 1505430 - RNA, 19 nt, Artificial Sequence
  Description of Artificial Sequence: Synthetic oligonucleotide
  Sense strand starting at position 1804 of SEQ ID NO: 1244659
acgggaagccuccaaguuu

SEQ ID NO: 1505431 - RNA, 19 nt, Artificial Sequence
  Description of Artificial Sequence: Synthetic oligonucleotide
  Antisense strand to SEQ ID NO: 1505430
aaacuuggaggcuucccgu

SEQ ID NO: 1505432 - RNA, 19 nt, Artificial Sequence
  Description of Artificial Sequence: Synthetic oligonucleotide
  Sense strand starting at position 1890 of SEQ ID NO: 1244659
cgcgguucacgcuaaagga

SEQ ID NO: 1505433 - RNA, 19 nt, Artificial Sequence
  Description of Artificial Sequence: Synthetic oligonucleotide
  Antisense strand to SEQ ID NO: 1505432
uccuuuagcgugaaccgcg

SEQ ID NO: 1505434 - RNA, 19 nt, Artificial Sequence
  Description of Artificial Sequence: Synthetic oligonucleotide
  Sense strand starting at position 2478 of SEQ ID NO: 1244659
caaggaugaccagguaucu

SEQ ID NO: 1505435 - RNA, 19 nt, Artificial Sequence
  Description of Artificial Sequence: Synthetic oligonucleotide
  Antisense strand to SEQ ID NO: 1505434
agauaccuggucauccuug

SEQ ID NO: 1505436 - RNA, 19 nt, Artificial Sequence
  Description of Artificial Sequence: Synthetic oligonucleotide
  Sense strand starting at position 2487 of SEQ ID NO: 1244659
ccagguaucuucgggacac

SEQ ID NO: 1505437 - RNA, 19 nt, Artificial Sequence
  Description of Artificial Sequence: Synthetic oligonucleotide
  Antisense strand to SEQ ID NO: 1505436
gugucccgaagauaccugg

SEQ ID NO: 1505438 - RNA, 19 nt, Artificial Sequence
  Description of Artificial Sequence: Synthetic oligonucleotide
  Sense strand starting at position 2488 of SEQ ID NO: 1244659
cagguaucuucgggacacu

SEQ ID NO: 1505439 - RNA, 19 nt, Artificial Sequence
  Description of Artificial Sequence: Synthetic oligonucleotide
  Antisense strand to SEQ ID NO: 1505438
agugucccgaagauaccug

SEQ ID NO: 1505440 - RNA, 19 nt, Artificial Sequence
  Description of Artificial Sequence: Synthetic oligonucleotide
  Sense strand starting at position 2489 of SEQ ID NO: 1244659
agguaucuucgggacacua

SEQ ID NO: 1505441 - RNA, 19 nt, Artificial Sequence
  Description of Artificial Sequence: Synthetic oligonucleotide
  Antisense strand to SEQ ID NO: 1505440
uagugucccgaagauaccu

SEQ ID NO: 1505442 - RNA, 19 nt, Artificial Sequence
  Description of Artificial Sequence: Synthetic oligonucleotide
  Sense strand starting at position 2769 of SEQ ID NO: 1244659
aagagaaacugucgccaaa

SEQ ID NO: 1505443 - RNA, 19 nt, Artificial Sequence
  Description of Artificial Sequence: Synthetic oligonucleotide
  Antisense strand to SEQ ID NO: 1505442
uuuggcgacaguuucucuu

SEQ ID NO: 1505444 - RNA, 19 nt, Artificial Sequence
  Description of Artificial Sequence: Synthetic oligonucleotide
  Sense strand starting at position 2771 of SEQ ID NO: 1244659
gagaaacugucgccaaauu

SEQ ID NO: 1505445 - RNA, 19 nt, Artificial Sequence
  Description of Artificial Sequence: Synthetic oligonucleotide
  Antisense strand to SEQ ID NO: 1505444
aauuuggcgacaguuucuc

SEQ ID NO: 1505446 - RNA, 19 nt, Artificial Sequence
  Description of Artificial Sequence: Synthetic oligonucleotide
  Sense strand starting at position 2782 of SEQ ID NO: 1244659
gccaaauuggcaggugaaa

SEQ ID NO: 1505447 - RNA, 19 nt, Artificial Sequence
  Description of Artificial Sequence: Synthetic oligonucleotide
  Antisense strand to SEQ ID NO: 1505446
uuucaccugccaauuuggc

SEQ ID NO: 1505448 - RNA, 19 nt, Artificial Sequence
  Description of Artificial Sequence: Synthetic oligonucleotide
  Sense strand starting at position 3176 of SEQ ID NO: 1244659
cgcauauccugauaaagca

SEQ ID NO: 1505449 - RNA, 19 nt, Artificial Sequence
  Description of Artificial Sequence: Synthetic oligonucleotide
  Antisense strand to SEQ ID NO: 1505448
ugcuuuaucaggauaugcg

SEQ ID NO: 1505450 - RNA, 19 nt, Artificial Sequence
  Description of Artificial Sequence: Synthetic oligonucleotide
  Sense strand starting at position 3200 of SEQ ID NO: 1244659
uguugugaaagugaaacua

SEQ ID NO: 1505451 - RNA, 19 nt, Artificial Sequence
  Description of Artificial Sequence: Synthetic oligonucleotide
  Antisense strand to SEQ ID NO: 1505450
uaguuucacuuucacaaca

SEQ ID NO: 1505452 - RNA, 19 nt, Artificial Sequence
  Description of Artificial Sequence: Synthetic oligonucleotide
  Sense strand starting at position 3208 of SEQ ID NO: 1244659
aagugaaacuaguuuguuu

SEQ ID NO: 1505453 - RNA, 19 nt, Artificial Sequence
  Description of Artificial Sequence: Synthetic oligonucleotide
  Antisense strand to SEQ ID NO: 1505452
aaacaaacuaguuucacuu

SEQ ID NO: 1505454 - RNA, 19 nt, Artificial Sequence
  Description of Artificial Sequence: Synthetic oligonucleotide
  Sense strand starting at position 3210 of SEQ ID NO: 1244659
gugaaacuaguuuguuuau

SEQ ID NO: 1505455 - RNA, 19 nt, Artificial Sequence
  Description of Artificial Sequence: Synthetic oligonucleotide
  Antisense strand to SEQ ID NO: 1505454
auaaacaaacuaguuucac

SEQ ID NO: 1505456 - RNA, 19 nt, Artificial Sequence
  Description of Artificial Sequence: Synthetic oligonucleotide
  Sense strand starting at position 3302 of SEQ ID NO: 1244659
caauucccagguugaguua

SEQ ID NO: 1505457 - RNA, 19 nt, Artificial Sequence
  Description of Artificial Sequence: Synthetic oligonucleotide
  Antisense strand to SEQ ID NO: 1505456
uaacucaaccugggaauug

SEQ ID NO: 1505458 - RNA, 19 nt, Artificial Sequence
  Description of Artificial Sequence: Synthetic oligonucleotide
  Sense strand starting at position 3683 of SEQ ID NO: 1244659
ugggcaguaucuuuccauu

SEQ ID NO: 1505459 - RNA, 19 nt, Artificial Sequence
  Description of Artificial Sequence: Synthetic oligonucleotide
  Antisense strand to SEQ ID NO: 1505458
aauggaaagauacugccca

SEQ ID NO: 1505460 - RNA, 19 nt, Artificial Sequence
  Description of Artificial Sequence: Synthetic oligonucleotide
  Sense strand starting at position 3686 of SEQ ID NO: 1244659
gcaguaucuuuccauuucu

SEQ ID NO: 1505461 - RNA, 19 nt, Artificial Sequence
  Description of Artificial Sequence: Synthetic oligonucleotide
  Antisense strand to SEQ ID NO: 1505460
agaaauggaaagauacugc

SEQ ID NO: 1505462 - RNA, 19 nt, Artificial Sequence
  Description of Artificial Sequence: Synthetic oligonucleotide
  Sense strand starting at position 19 of SEQ ID NO: 1244660
aggcuuacuuucugcucaa

SEQ ID NO: 1505463 - RNA, 19 nt, Artificial Sequence
  Description of Artificial Sequence: Synthetic oligonucleotide
  Antisense strand to SEQ ID NO: 1505462
uugagcagaaaguaagccu

SEQ ID NO: 1505464 - RNA, 19 nt, Artificial Sequence
  Description of Artificial Sequence: Synthetic oligonucleotide
  Sense strand starting at position 20 of SEQ ID NO: 1244660
ggcuuacuuucugcucaaa

SEQ ID NO: 1505465 - RNA, 19 nt, Artificial Sequence
  Description of Artificial Sequence: Synthetic oligonucleotide
  Antisense strand to SEQ ID NO: 1505464
uuugagcagaaaguaagcc

SEQ ID NO: 1505466 - RNA, 19 nt, Artificial Sequence
  Description of Artificial Sequence: Synthetic oligonucleotide
  Sense strand starting at position 51 of SEQ ID NO: 1244660
ggagacauuucgcagcucu

SEQ ID NO: 1505467 - RNA, 19 nt, Artificial Sequence
  Description of Artificial Sequence: Synthetic oligonucleotide
  Antisense strand to SEQ ID NO: 1505466
agagcugcgaaaugucucc

SEQ ID NO: 1505468 - RNA, 19 nt, Artificial Sequence
  Description of Artificial Sequence: Synthetic oligonucleotide
  Sense strand starting at position 1060 of SEQ ID NO: 1244660
uuaagaucuucccgguuaa

SEQ ID NO: 1505469 - RNA, 19 nt, Artificial Sequence
  Description of Artificial Sequence: Synthetic oligonucleotide
  Antisense strand to SEQ ID NO: 1505468
uuaaccgggaagaucuuaa

SEQ ID NO: 1505470 - RNA, 19 nt, Artificial Sequence
  Description of Artificial Sequence: Synthetic oligonucleotide
  Sense strand starting at position 1061 of SEQ ID NO: 1244660
uaagaucuucccgguuaac

SEQ ID NO: 1505471 - RNA, 19 nt, Artificial Sequence
  Description of Artificial Sequence: Synthetic oligonucleotide
  Antisense strand to SEQ ID NO: 1505470
guuaaccgggaagaucuua

SEQ ID NO: 1505472 - RNA, 19 nt, Artificial Sequence
  Description of Artificial Sequence: Synthetic oligonucleotide
  Sense strand starting at position 1072 of SEQ ID NO: 1244660
cgguuaacgcgguccacaa

SEQ ID NO: 1505473 - RNA, 19 nt, Artificial Sequence
  Description of Artificial Sequence: Synthetic oligonucleotide
  Antisense strand to SEQ ID NO: 1505472
uuguggaccgcguuaaccg

SEQ ID NO: 1505474 - RNA, 19 nt, Artificial Sequence
  Description of Artificial Sequence: Synthetic oligonucleotide
  Sense strand starting at position 1156 of SEQ ID NO: 1244660
gcaggccucagagaucuua

SEQ ID NO: 1505475 - RNA, 19 nt, Artificial Sequence
  Description of Artificial Sequence: Synthetic oligonucleotide
  Antisense strand to SEQ ID NO: 1505474
uaagaucucugaggccugc

SEQ ID NO: 1505476 - RNA, 19 nt, Artificial Sequence
  Description of Artificial Sequence: Synthetic oligonucleotide
  Sense strand starting at position 1270 of SEQ ID NO: 1244660
caguuucuuuccucaggga

SEQ ID NO: 1505477 - RNA, 19 nt, Artificial Sequence
  Description of Artificial Sequence: Synthetic oligonucleotide
  Antisense strand to SEQ ID NO: 1505476
ucccugaggaaagaaacug

SEQ ID NO: 1505478 - RNA, 19 nt, Artificial Sequence
  Description of Artificial Sequence: Synthetic oligonucleotide
  Sense strand starting at position 1273 of SEQ ID NO: 1244660
uuucuuuccucagggacau

SEQ ID NO: 1505479 - RNA, 19 nt, Artificial Sequence
  Description of Artificial Sequence: Synthetic oligonucleotide
  Antisense strand to SEQ ID NO: 1505478
augucccugaggaaagaaa

SEQ ID NO: 1505480 - RNA, 19 nt, Artificial Sequence
  Description of Artificial Sequence: Synthetic oligonucleotide
  Sense strand starting at position 1286 of SEQ ID NO: 1244660
ggacaugauaaccguggua

SEQ ID NO: 1505481 - RNA, 19 nt, Artificial Sequence
  Description of Artificial Sequence: Synthetic oligonucleotide
  Antisense strand to SEQ ID NO: 1505480
uaccacgguuaucaugucc

SEQ ID NO: 1505482 - RNA, 19 nt, Artificial Sequence
  Description of Artificial Sequence: Synthetic oligonucleotide
  Sense strand starting at position 1288 of SEQ ID NO: 1244660
acaugauaaccgugguacu

SEQ ID NO: 1505483 - RNA, 19 nt, Artificial Sequence
  Description of Artificial Sequence: Synthetic oligonucleotide
  Antisense strand to SEQ ID NO: 1505482
aguaccacgguuaucaugu

SEQ ID NO: 1505484 - RNA, 19 nt, Artificial Sequence
  Description of Artificial Sequence: Synthetic oligonucleotide
  Sense strand starting at position 1289 of SEQ ID NO: 1244660
caugauaaccgugguacuu

SEQ ID NO: 1505485 - RNA, 19 nt, Artificial Sequence
  Description of Artificial Sequence: Synthetic oligonucleotide
  Antisense strand to SEQ ID NO: 1505484
aaguaccacgguuaucaug

SEQ ID NO: 1505486 - RNA, 19 nt, Artificial Sequence
  Description of Artificial Sequence: Synthetic oligonucleotide
  Sense strand starting at position 1298 of SEQ ID NO: 1244660
cgugguacuugaggagaau

SEQ ID NO: 1505487 - RNA, 19 nt, Artificial Sequence
  Description of Artificial Sequence: Synthetic oligonucleotide
  Antisense strand to SEQ ID NO: 1505486
auucuccucaaguaccacg

SEQ ID NO: 1505488 - RNA, 19 nt, Artificial Sequence
  Description of Artificial Sequence: Synthetic oligonucleotide
  Sense strand starting at position 1347 of SEQ ID NO: 1244660
gggagacaguucucuaaca

SEQ ID NO: 1505489 - RNA, 19 nt, Artificial Sequence
  Description of Artificial Sequence: Synthetic oligonucleotide
  Antisense strand to SEQ ID NO: 1505488
uguuagagaacugucuccc

SEQ ID NO: 1505490 - RNA, 19 nt, Artificial Sequence
  Description of Artificial Sequence: Synthetic oligonucleotide
  Sense strand starting at position 1348 of SEQ ID NO: 1244660
ggagacaguucucuaacac

SEQ ID NO: 1505491 - RNA, 19 nt, Artificial Sequence
  Description of Artificial Sequence: Synthetic oligonucleotide
  Antisense strand to SEQ ID NO: 1505490
guguuagagaacugucucc

SEQ ID NO: 1505492 - RNA, 19 nt, Artificial Sequence
  Description of Artificial Sequence: Synthetic oligonucleotide
  Sense strand starting at position 1398 of SEQ ID NO: 1244660
ggucaucucaagugcagau

SEQ ID NO: 1505493 - RNA, 19 nt, Artificial Sequence
  Description of Artificial Sequence: Synthetic oligonucleotide
  Antisense strand to SEQ ID NO: 1505492
aucugcacuugagaugacc

SEQ ID NO: 1505494 - RNA, 19 nt, Artificial Sequence
  Description of Artificial Sequence: Synthetic oligonucleotide
  Sense strand starting at position 1410 of SEQ ID NO: 1244660
ugcagaugccagggauaug

SEQ ID NO: 1505495 - RNA, 19 nt, Artificial Sequence
  Description of Artificial Sequence: Synthetic oligonucleotide
  Antisense strand to SEQ ID NO: 1505494
cauaucccuggcaucugca

SEQ ID NO: 1505496 - RNA, 19 nt, Artificial Sequence
  Description of Artificial Sequence: Synthetic oligonucleotide
  Sense strand starting at position 2057 of SEQ ID NO: 1244660
gcacgauuaguacgucaca

SEQ ID NO: 1505497 - RNA, 19 nt, Artificial Sequence
  Description of Artificial Sequence: Synthetic oligonucleotide
  Antisense strand to SEQ ID NO: 1505496
ugugacguacuaaucgugc

SEQ ID NO: 1505498 - RNA, 19 nt, Artificial Sequence
  Description of Artificial Sequence: Synthetic oligonucleotide
  Sense strand starting at position 3283 of SEQ ID NO: 1244660
gaaaguagauucgcaguga

SEQ ID NO: 1505499 - RNA, 19 nt, Artificial Sequence
  Description of Artificial Sequence: Synthetic oligonucleotide
  Antisense strand to SEQ ID NO: 1505498
ucacugcgaaucuacuuuc

SEQ ID NO: 1505500 - RNA, 19 nt, Artificial Sequence
  Description of Artificial Sequence: Synthetic oligonucleotide
  Sense strand starting at position 3284 of SEQ ID NO: 1244660
aaaguagauucgcagugaa

SEQ ID NO: 1505501 - RNA, 19 nt, Artificial Sequence
  Description of Artificial Sequence: Synthetic oligonucleotide
  Antisense strand to SEQ ID NO: 1505500
uucacugcgaaucuacuuu

SEQ ID NO: 1505502 - RNA, 19 nt, Artificial Sequence
  Description of Artificial Sequence: Synthetic oligonucleotide
  Sense strand starting at position 3287 of SEQ ID NO: 1244660
guagauucgcagugaagca

SEQ ID NO: 1505503 - RNA, 19 nt, Artificial Sequence
  Description of Artificial Sequence: Synthetic oligonucleotide
  Antisense strand to SEQ ID NO: 1505502
ugcuucacugcgaaucuac

SEQ ID NO: 1505504 - RNA, 19 nt, Artificial Sequence
  Description of Artificial Sequence: Synthetic oligonucleotide
  Sense strand starting at position 3496 of SEQ ID NO: 1244660
ggcucucaccugcgcuaua

SEQ ID NO: 1505505 - RNA, 19 nt, Artificial Sequence
  Description of Artificial Sequence: Synthetic oligonucleotide
  Antisense strand to SEQ ID NO: 1505504
uauagcgcaggugagagcc

SEQ ID NO: 1505506 - RNA, 19 nt, Artificial Sequence
  Description of Artificial Sequence: Synthetic oligonucleotide
  Sense strand starting at position 3738 of SEQ ID NO: 1244660
cuggguuugguaugaauag

SEQ ID NO: 1505507 - RNA, 19 nt, Artificial Sequence
  Description of Artificial Sequence: Synthetic oligonucleotide
  Antisense strand to SEQ ID NO: 1505506
cuauucauaccaaacccag

SEQ ID NO: 1505508 - RNA, 19 nt, Artificial Sequence
  Description of Artificial Sequence: Synthetic oligonucleotide
  Sense strand starting at position 3739 of SEQ ID NO: 1244660
uggguuugguaugaauaga

SEQ ID NO: 1505509 - RNA, 19 nt, Artificial Sequence
  Description of Artificial Sequence: Synthetic oligonucleotide
  Antisense strand to SEQ ID NO: 1505508
ucuauucauaccaaaccca

SEQ ID NO: 1505510 - RNA, 19 nt, Artificial Sequence
  Description of Artificial Sequence: Synthetic oligonucleotide
  Sense strand starting at position 3936 of SEQ ID NO: 1244660
cggagucaucuggagguga

SEQ ID NO: 1505511 - RNA, 19 nt, Artificial Sequence
  Description of Artificial Sequence: Synthetic oligonucleotide
  Antisense strand to SEQ ID NO: 1505510
ucaccuccagaugacuccg

SEQ ID NO: 1505512 - RNA, 19 nt, Artificial Sequence
  Description of Artificial Sequence: Synthetic oligonucleotide
  Sense strand starting at position 3937 of SEQ ID NO: 1244660
ggagucaucuggaggugag

SEQ ID NO: 1505513 - RNA, 19 nt, Artificial Sequence
  Description of Artificial Sequence: Synthetic oligonucleotide
  Antisense strand to SEQ ID NO: 1505512
cucaccuccagaugacucc

SEQ ID NO: 1505514 - RNA, 19 nt, Artificial Sequence
  Description of Artificial Sequence: Synthetic oligonucleotide
  Sense strand starting at position 3938 of SEQ ID NO: 1244660
gagucaucuggaggugaga

SEQ ID NO: 1505515 - RNA, 19 nt, Artificial Sequence
  Description of Artificial Sequence: Synthetic oligonucleotide
  Antisense strand to SEQ ID NO: 1505514
ucucaccuccagaugacuc

SEQ ID NO: 1505516 - RNA, 19 nt, Artificial Sequence
  Description of Artificial Sequence: Synthetic oligonucleotide
  Sense strand starting at position 3953 of SEQ ID NO: 1244660
gagagugugucggucagga

SEQ ID NO: 1505517 - RNA, 19 nt, Artificial Sequence
  Description of Artificial Sequence: Synthetic oligonucleotide
  Antisense strand to SEQ ID NO: 1505516
uccugaccgacacacucuc

SEQ ID NO: 1505518 - RNA, 19 nt, Artificial Sequence
  Description of Artificial Sequence: Synthetic oligonucleotide
  Sense strand starting at position 17 of SEQ ID NO: 1244661
cccagagaggcuugugaag

SEQ ID NO: 1505519 - RNA, 19 nt, Artificial Sequence
  Description of Artificial Sequence: Synthetic oligonucleotide
  Antisense strand to SEQ ID NO: 1505518
cuucacaagccucucuggg

SEQ ID NO: 1505520 - RNA, 19 nt, Artificial Sequence
  Description of Artificial Sequence: Synthetic oligonucleotide
  Sense strand starting at position 382 of SEQ ID NO: 1244661
gcuggagagcuguaauuau

SEQ ID NO: 1505521 - RNA, 19 nt, Artificial Sequence
  Description of Artificial Sequence: Synthetic oligonucleotide
  Antisense strand to SEQ ID NO: 1505520
auaauuacagcucuccagc

SEQ ID NO: 1505522 - RNA, 19 nt, Artificial Sequence
  Description of Artificial Sequence: Synthetic oligonucleotide
  Sense strand starting at position 392 of SEQ ID NO: 1244661
uguaauuaucgagaccgga

SEQ ID NO: 1505523 - RNA, 19 nt, Artificial Sequence
  Description of Artificial Sequence: Synthetic oligonucleotide
  Antisense strand to SEQ ID NO: 1505522
uccggucucgauaauuaca

SEQ ID NO: 1505524 - RNA, 19 nt, Artificial Sequence
  Description of Artificial Sequence: Synthetic oligonucleotide
  Sense strand starting at position 395 of SEQ ID NO: 1244661
aauuaucgagaccggauaa

SEQ ID NO: 1505525 - RNA, 19 nt, Artificial Sequence
  Description of Artificial Sequence: Synthetic oligonucleotide
  Antisense strand to SEQ ID NO: 1505524
uuauccggucucgauaauu

SEQ ID NO: 1505526 - RNA, 19 nt, Artificial Sequence
  Description of Artificial Sequence: Synthetic oligonucleotide
  Sense strand starting at position 883 of SEQ ID NO: 1244661
gugcuaggcaacugaauaa

SEQ ID NO: 1505527 - RNA, 19 nt, Artificial Sequence
  Description of Artificial Sequence: Synthetic oligonucleotide
  Antisense strand to SEQ ID NO: 1505526
uuauucaguugccuagcac

SEQ ID NO: 1505528 - RNA, 19 nt, Artificial Sequence
  Description of Artificial Sequence: Synthetic oligonucleotide
  Sense strand starting at position 969 of SEQ ID NO: 1244661
gggacuuacugucuugcau

SEQ ID NO: 1505529 - RNA, 19 nt, Artificial Sequence
  Description of Artificial Sequence: Synthetic oligonucleotide
  Antisense strand to SEQ ID NO: 1505528
augcaagacaguaaguccc

SEQ ID NO: 1505530 - RNA, 19 nt, Artificial Sequence
  Description of Artificial Sequence: Synthetic oligonucleotide
  Sense strand starting at position 975 of SEQ ID NO: 1244661
uacugucuugcauggagau

SEQ ID NO: 1505531 - RNA, 19 nt, Artificial Sequence
  Description of Artificial Sequence: Synthetic oligonucleotide
  Antisense strand to SEQ ID NO: 1505530
aucuccaugcaagacagua

SEQ ID NO: 1505532 - RNA, 19 nt, Artificial Sequence
  Description of Artificial Sequence: Synthetic oligonucleotide
  Sense strand starting at position 977 of SEQ ID NO: 1244661
cugucuugcauggagauaa

SEQ ID NO: 1505533 - RNA, 19 nt, Artificial Sequence
  Description of Artificial Sequence: Synthetic oligonucleotide
  Antisense strand to SEQ ID NO: 1505532
uuaucuccaugcaagacag

SEQ ID NO: 1505534 - RNA, 19 nt, Artificial Sequence
  Description of Artificial Sequence: Synthetic oligonucleotide
  Sense strand starting at position 1033 of SEQ ID NO: 1244661
agggcauaagguuggauaa

SEQ ID NO: 1505535 - RNA, 19 nt, Artificial Sequence
  Description of Artificial Sequence: Synthetic oligonucleotide
  Antisense strand to SEQ ID NO: 1505534
uuauccaaccuuaugcccu

SEQ ID NO: 1505536 - RNA, 19 nt, Artificial Sequence
  Description of Artificial Sequence: Synthetic oligonucleotide
  Sense strand starting at position 1199 of SEQ ID NO: 1244661
ggaccuauuagaggccauu

SEQ ID NO: 1505537 - RNA, 19 nt, Artificial Sequence
  Description of Artificial Sequence: Synthetic oligonucleotide
  Antisense strand to SEQ ID NO: 1505536
aauggccucuaauaggucc

SEQ ID NO: 1505538 - RNA, 19 nt, Artificial Sequence
  Description of Artificial Sequence: Synthetic oligonucleotide
  Sense strand starting at position 1219 of SEQ ID NO: 1244661
cuaggcuuuggguaauaga

SEQ ID NO: 1505539 - RNA, 19 nt, Artificial Sequence
  Description of Artificial Sequence: Synthetic oligonucleotide
  Antisense strand to SEQ ID NO: 1505538
ucuauuacccaaagccuag

SEQ ID NO: 1505540 - RNA, 19 nt, Artificial Sequence
  Description of Artificial Sequence: Synthetic oligonucleotide
  Sense strand starting at position 1235 of SEQ ID NO: 1244661
agagaaauauggcaagaga

SEQ ID NO: 1505541 - RNA, 19 nt, Artificial Sequence
  Description of Artificial Sequence: Synthetic oligonucleotide
  Antisense strand to SEQ ID NO: 1505540
ucucuugccauauuucucu

SEQ ID NO: 1505542 - RNA, 19 nt, Artificial Sequence
  Description of Artificial Sequence: Synthetic oligonucleotide
  Sense strand starting at position 1266 of SEQ ID NO: 1244661
uaggaagagcuuugaccau

SEQ ID NO: 1505543 - RNA, 19 nt, Artificial Sequence
  Description of Artificial Sequence: Synthetic oligonucleotide
  Antisense strand to SEQ ID NO: 1505542
auggucaaagcucuuccua

SEQ ID NO: 1505544 - RNA, 19 nt, Artificial Sequence
  Description of Artificial Sequence: Synthetic oligonucleotide
  Sense strand starting at position 1324 of SEQ ID NO: 1244661
ggaacaaugcagcgaaauc

SEQ ID NO: 1505545 - RNA, 19 nt, Artificial Sequence
  Description of Artificial Sequence: Synthetic oligonucleotide
  Antisense strand to SEQ ID NO: 1505544
gauuucgcugcauuguucc

SEQ ID NO: 1505546 - RNA, 19 nt, Artificial Sequence
  Description of Artificial Sequence: Synthetic oligonucleotide
  Sense strand starting at position 1380 of SEQ ID NO: 1244661
cagaguccaccuugaguuu

SEQ ID NO: 1505547 - RNA, 19 nt, Artificial Sequence
  Description of Artificial Sequence: Synthetic oligonucleotide
  Antisense strand to SEQ ID NO: 1505546
aaacucaagguggacucug

SEQ ID NO: 1505548 - RNA, 19 nt, Artificial Sequence
  Description of Artificial Sequence: Synthetic oligonucleotide
  Sense strand starting at position 1414 of SEQ ID NO: 1244661
ccaaauaguguguaaccca

SEQ ID NO: 1505549 - RNA, 19 nt, Artificial Sequence
  Description of Artificial Sequence: Synthetic oligonucleotide
  Antisense strand to SEQ ID NO: 1505548
uggguuacacacuauuugg

SEQ ID NO: 1505550 - RNA, 19 nt, Artificial Sequence
  Description of Artificial Sequence: Synthetic oligonucleotide
  Sense strand starting at position 1525 of SEQ ID NO: 1244661
agcacuuggcaagagucau

SEQ ID NO: 1505551 - RNA, 19 nt, Artificial Sequence
  Description of Artificial Sequence: Synthetic oligonucleotide
  Antisense strand to SEQ ID NO: 1505550
augacucuugccaagugcu

SEQ ID NO: 1505552 - RNA, 19 nt, Artificial Sequence
  Description of Artificial Sequence: Synthetic oligonucleotide
  Sense strand starting at position 1531 of SEQ ID NO: 1244661
uggcaagagucaucaucug

SEQ ID NO: 1505553 - RNA, 19 nt, Artificial Sequence
  Description of Artificial Sequence: Synthetic oligonucleotide
  Antisense strand to SEQ ID NO: 1505552
cagaugaugacucuugcca

SEQ ID NO: 1505554 - RNA, 19 nt, Artificial Sequence
  Description of Artificial Sequence: Synthetic oligonucleotide
  Sense strand starting at position 2109 of SEQ ID NO: 1244661
gggagccauuauucucagu

SEQ ID NO: 1505555 - RNA, 19 nt, Artificial Sequence
  Description of Artificial Sequence: Synthetic oligonucleotide
  Antisense strand to SEQ ID NO: 1505554
acugagaauaauggcuccc

SEQ ID NO: 1505556 - RNA, 19 nt, Artificial Sequence
  Description of Artificial Sequence: Synthetic oligonucleotide
  Sense strand starting at position 2212 of SEQ ID NO: 1244661
ccaguuagauaacucgagu

SEQ ID NO: 1505557 - RNA, 19 nt, Artificial Sequence
  Description of Artificial Sequence: Synthetic oligonucleotide
  Antisense strand to SEQ ID NO: 1505556
acucgaguuaucuaacugg

SEQ ID NO: 1505558 - RNA, 19 nt, Artificial Sequence
  Description of Artificial Sequence: Synthetic oligonucleotide
  Sense strand starting at position 2408 of SEQ ID NO: 1244661
ugcucauagggcuggagua

SEQ ID NO: 1505559 - RNA, 19 nt, Artificial Sequence
  Description of Artificial Sequence: Synthetic oligonucleotide
  Antisense strand to SEQ ID NO: 1505558
uacuccagcccuaugagca

SEQ ID NO: 1505560 - RNA, 19 nt, Artificial Sequence
  Description of Artificial Sequence: Synthetic oligonucleotide
  Sense strand starting at position 2409 of SEQ ID NO: 1244661
gcucauagggcuggaguau

SEQ ID NO: 1505561 - RNA, 19 nt, Artificial Sequence
  Description of Artificial Sequence: Synthetic oligonucleotide
  Antisense strand to SEQ ID NO: 1505560
auacuccagcccuaugagc

SEQ ID NO: 1505562 - RNA, 19 nt, Artificial Sequence
  Description of Artificial Sequence: Synthetic oligonucleotide
  Sense strand starting at position 2410 of SEQ ID NO: 1244661
cucauagggcuggaguaua

SEQ ID NO: 1505563 - RNA, 19 nt, Artificial Sequence
  Description of Artificial Sequence: Synthetic oligonucleotide
  Antisense strand to SEQ ID NO: 1505562
uauacuccagcccuaugag

SEQ ID NO: 1505564 - RNA, 19 nt, Artificial Sequence
  Description of Artificial Sequence: Synthetic oligonucleotide
  Sense strand starting at position 2573 of SEQ ID NO: 1244661
ggauucuagagcugcaaga

SEQ ID NO: 1505565 - RNA, 19 nt, Artificial Sequence
  Description of Artificial Sequence: Synthetic oligonucleotide
  Antisense strand to SEQ ID NO: 1505564
ucuugcagcucuagaaucc

SEQ ID NO: 1505566 - RNA, 19 nt, Artificial Sequence
  Description of Artificial Sequence: Synthetic oligonucleotide
  Sense strand starting at position 2617 of SEQ ID NO: 1244661
cccagacaucucugaagau

SEQ ID NO: 1505567 - RNA, 19 nt, Artificial Sequence
  Description of Artificial Sequence: Synthetic oligonucleotide
  Antisense strand to SEQ ID NO: 1505566
aucuucagagaugucuggg

SEQ ID NO: 1505568 - RNA, 19 nt, Artificial Sequence
  Description of Artificial Sequence: Synthetic oligonucleotide
  Sense strand starting at position 2629 of SEQ ID NO: 1244661
ugaagaucuugccugggca

SEQ ID NO: 1505569 - RNA, 19 nt, Artificial Sequence
  Description of Artificial Sequence: Synthetic oligonucleotide
  Antisense strand to SEQ ID NO: 1505568
ugcccaggcaagaucuuca

SEQ ID NO: 1505570 - RNA, 19 nt, Artificial Sequence
  Description of Artificial Sequence: Synthetic oligonucleotide
  Sense strand starting at position 2733 of SEQ ID NO: 1244661
cugaauuagcgugaaguca

SEQ ID NO: 1505571 - RNA, 19 nt, Artificial Sequence
  Description of Artificial Sequence: Synthetic oligonucleotide
  Antisense strand to SEQ ID NO: 1505570
ugacuucacgcuaauucag

SEQ ID NO: 1505572 - RNA, 19 nt, Artificial Sequence
  Description of Artificial Sequence: Synthetic oligonucleotide
  Sense strand starting at position 2744 of SEQ ID NO: 1244661
ugaagucaacucugagcaa

SEQ ID NO: 1505573 - RNA, 19 nt, Artificial Sequence
  Description of Artificial Sequence: Synthetic oligonucleotide
  Antisense strand to SEQ ID NO: 1505572
uugcucagaguugacuuca

SEQ ID NO: 1505574 - RNA, 19 nt, Artificial Sequence
  Description of Artificial Sequence: Synthetic oligonucleotide
  Sense strand starting at position 2748 of SEQ ID NO: 1244661
gucaacucugagcaagacu

SEQ ID NO: 1505575 - RNA, 19 nt, Artificial Sequence
  Description of Artificial Sequence: Synthetic oligonucleotide
  Antisense strand to SEQ ID NO: 1505574
agucuugcucagaguugac

SEQ ID NO: 1505576 - RNA, 19 nt, Artificial Sequence
  Description of Artificial Sequence: Synthetic oligonucleotide
  Sense strand starting at position 2807 of SEQ ID NO: 1244661
ugugauagaugaccaacua

SEQ ID NO: 1505577 - RNA, 19 nt, Artificial Sequence
  Description of Artificial Sequence: Synthetic oligonucleotide
  Antisense strand to SEQ ID NO: 1505576
uaguuggucaucuaucaca

SEQ ID NO: 1505578 - RNA, 19 nt, Artificial Sequence
  Description of Artificial Sequence: Synthetic oligonucleotide
  Sense strand starting at position 2835 of SEQ ID NO: 1244661
ggccaugaggcuuaaauua

SEQ ID NO: 1505579 - RNA, 19 nt, Artificial Sequence
  Description of Artificial Sequence: Synthetic oligonucleotide
  Antisense strand to SEQ ID NO: 1505578
uaauuuaagccucauggcc

SEQ ID NO: 1505580 - RNA, 19 nt, Artificial Sequence
  Description of Artificial Sequence: Synthetic oligonucleotide
  Sense strand starting at position 2865 of SEQ ID NO: 1244661
agaaguaacuuccuguuaa

SEQ ID NO: 1505581 - RNA, 19 nt, Artificial Sequence
  Description of Artificial Sequence: Synthetic oligonucleotide
  Antisense strand to SEQ ID NO: 1505580
uuaacaggaaguuacuucu

SEQ ID NO: 1505582 - RNA, 19 nt, Artificial Sequence
  Description of Artificial Sequence: Synthetic oligonucleotide
  Sense strand starting at position 2956 of SEQ ID NO: 1244661
augagaaguuccucugcuu

SEQ ID NO: 1505583 - RNA, 19 nt, Artificial Sequence
  Description of Artificial Sequence: Synthetic oligonucleotide
  Antisense strand to SEQ ID NO: 1505582
aagcagaggaacuucucau

SEQ ID NO: 1505584 - RNA, 19 nt, Artificial Sequence
  Description of Artificial Sequence: Synthetic oligonucleotide
  Sense strand starting at position 3009 of SEQ ID NO: 1244661
cgacccagcucuguagaua

SEQ ID NO: 1505585 - RNA, 19 nt, Artificial Sequence
  Description of Artificial Sequence: Synthetic oligonucleotide
  Antisense strand to SEQ ID NO: 1505584
uaucuacagagcugggucg

SEQ ID NO: 1505586 - RNA, 19 nt, Artificial Sequence
  Description of Artificial Sequence: Synthetic oligonucleotide
  Sense strand starting at position 3012 of SEQ ID NO: 1244661
cccagcucuguagauacau

SEQ ID NO: 1505587 - RNA, 19 nt, Artificial Sequence
  Description of Artificial Sequence: Synthetic oligonucleotide
  Antisense strand to SEQ ID NO: 1505586
auguaucuacagagcuggg

SEQ ID NO: 1505588 - RNA, 19 nt, Artificial Sequence
  Description of Artificial Sequence: Synthetic oligonucleotide
  Sense strand starting at position 3291 of SEQ ID NO: 1244661
ccagccuaggacuauauau

SEQ ID NO: 1505589 - RNA, 19 nt, Artificial Sequence
  Description of Artificial Sequence: Synthetic oligonucleotide
  Antisense strand to SEQ ID NO: 1505588
auauauaguccuaggcugg

SEQ ID NO: 1505590 - RNA, 19 nt, Artificial Sequence
  Description of Artificial Sequence: Synthetic oligonucleotide
  Sense strand starting at position 3433 of SEQ ID NO: 1244661
accugaggcccuuauucua

SEQ ID NO: 1505591 - RNA, 19 nt, Artificial Sequence
  Description of Artificial Sequence: Synthetic oligonucleotide
  Antisense strand to SEQ ID NO: 1505590
uagaauaagggccucaggu

SEQ ID NO: 1505592 - RNA, 19 nt, Artificial Sequence
  Description of Artificial Sequence: Synthetic oligonucleotide
  Sense strand starting at position 3561 of SEQ ID NO: 1244661
caguguugccuggaggagu

SEQ ID NO: 1505593 - RNA, 19 nt, Artificial Sequence
  Description of Artificial Sequence: Synthetic oligonucleotide
  Antisense strand to SEQ ID NO: 1505592
acuccuccaggcaacacug

SEQ ID NO: 1505594 - RNA, 19 nt, Artificial Sequence
  Description of Artificial Sequence: Synthetic oligonucleotide
  Sense strand starting at position 3721 of SEQ ID NO: 1244661
gaaugaagagguggucuuu

SEQ ID NO: 1505595 - RNA, 19 nt, Artificial Sequence
  Description of Artificial Sequence: Synthetic oligonucleotide
  Antisense strand to SEQ ID NO: 1505594
aaagaccaccucuucauuc

SEQ ID NO: 1505596 - RNA, 19 nt, Artificial Sequence
  Description of Artificial Sequence: Synthetic oligonucleotide
  Sense strand starting at position 3819 of SEQ ID NO: 1244661
gcaguaaaccuuugaaugg

SEQ ID NO: 1505597 - RNA, 19 nt, Artificial Sequence
  Description of Artificial Sequence: Synthetic oligonucleotide
  Antisense strand to SEQ ID NO: 1505596
ccauucaaagguuuacugc

SEQ ID NO: 1505598 - RNA, 19 nt, Artificial Sequence
  Description of Artificial Sequence: Synthetic oligonucleotide
  Sense strand starting at position 440 of SEQ ID NO: 1244662
gcaaauuuccagugcccuu

SEQ ID NO: 1505599 - RNA, 19 nt, Artificial Sequence
  Description of Artificial Sequence: Synthetic oligonucleotide
  Antisense strand to SEQ ID NO: 1505598
aagggcacuggaaauuugc

SEQ ID NO: 1505600 - RNA, 19 nt, Artificial Sequence
  Description of Artificial Sequence: Synthetic oligonucleotide
  Sense strand starting at position 462 of SEQ ID NO: 1244662
ggcagauaucuuggagcua

SEQ ID NO: 1505601 - RNA, 19 nt, Artificial Sequence
  Description of Artificial Sequence: Synthetic oligonucleotide
  Antisense strand to SEQ ID NO: 1505600
uagcuccaagauaucugcc

SEQ ID NO: 1505602 - RNA, 19 nt, Artificial Sequence
  Description of Artificial Sequence: Synthetic oligonucleotide
  Sense strand starting at position 496 of SEQ ID NO: 1244662
ugaaauaggucccagauac

SEQ ID NO: 1505603 - RNA, 19 nt, Artificial Sequence
  Description of Artificial Sequence: Synthetic oligonucleotide
  Antisense strand to SEQ ID NO: 1505602
guaucugggaccuauuuca

SEQ ID NO: 1505604 - RNA, 19 nt, Artificial Sequence
  Description of Artificial Sequence: Synthetic oligonucleotide
  Sense strand starting at position 639 of SEQ ID NO: 1244662
gaggaaucauagggaucaa

SEQ ID NO: 1505605 - RNA, 19 nt, Artificial Sequence
  Description of Artificial Sequence: Synthetic oligonucleotide
  Antisense strand to SEQ ID NO: 1505604
uugaucccuaugauuccuc

SEQ ID NO: 1505606 - RNA, 19 nt, Artificial Sequence
  Description of Artificial Sequence: Synthetic oligonucleotide
  Sense strand starting at position 715 of SEQ ID NO: 1244662
aguacugcugguugucaga

SEQ ID NO: 1505607 - RNA, 19 nt, Artificial Sequence
  Description of Artificial Sequence: Synthetic oligonucleotide
  Antisense strand to SEQ ID NO: 1505606
ucugacaaccagcaguacu

SEQ ID NO: 1505608 - RNA, 19 nt, Artificial Sequence
  Description of Artificial Sequence: Synthetic oligonucleotide
  Sense strand starting at position 754 of SEQ ID NO: 1244662
gucugaacuccaggucauc

SEQ ID NO: 1505609 - RNA, 19 nt, Artificial Sequence
  Description of Artificial Sequence: Synthetic oligonucleotide
  Antisense strand to SEQ ID NO: 1505608
gaugaccuggaguucagac

SEQ ID NO: 1505610 - RNA, 19 nt, Artificial Sequence
  Description of Artificial Sequence: Synthetic oligonucleotide
  Sense strand starting at position 818 of SEQ ID NO: 1244662
ccuggaugcccaggucuua

SEQ ID NO: 1505611 - RNA, 19 nt, Artificial Sequence
  Description of Artificial Sequence: Synthetic oligonucleotide
  Antisense strand to SEQ ID NO: 1505610
uaagaccugggcauccagg

SEQ ID NO: 1505612 - RNA, 19 nt, Artificial Sequence
  Description of Artificial Sequence: Synthetic oligonucleotide
  Sense strand starting at position 857 of SEQ ID NO: 1244662
cgcauuuccugagaaaucc

SEQ ID NO: 1505613 - RNA, 19 nt, Artificial Sequence
  Description of Artificial Sequence: Synthetic oligonucleotide
  Antisense strand to SEQ ID NO: 1505612
ggauuucucaggaaaugcg

SEQ ID NO: 1505614 - RNA, 19 nt, Artificial Sequence
  Description of Artificial Sequence: Synthetic oligonucleotide
  Sense strand starting at position 885 of SEQ ID NO: 1244662
uugcucaguucuccaucau

SEQ ID NO: 1505615 - RNA, 19 nt, Artificial Sequence
  Description of Artificial Sequence: Synthetic oligonucleotide
  Antisense strand to SEQ ID NO: 1505614
augauggagaacugagcaa

SEQ ID NO: 1505616 - RNA, 19 nt, Artificial Sequence
  Description of Artificial Sequence: Synthetic oligonucleotide
  Sense strand starting at position 886 of SEQ ID NO: 1244662
ugcucaguucuccaucauc

SEQ ID NO: 1505617 - RNA, 19 nt, Artificial Sequence
  Description of Artificial Sequence: Synthetic oligonucleotide
  Antisense strand to SEQ ID NO: 1505616
gaugauggagaacugagca

SEQ ID NO: 1505618 - RNA, 19 nt, Artificial Sequence
  Description of Artificial Sequence: Synthetic oligonucleotide
  Sense strand starting at position 905 of SEQ ID NO: 1244662
cgugguguccuccaggaaa

SEQ ID NO: 1505619 - RNA, 19 nt, Artificial Sequence
  Description of Artificial Sequence: Synthetic oligonucleotide
  Antisense strand to SEQ ID NO: 1505618
uuuccuggaggacaccacg

SEQ ID NO: 1505620 - RNA, 19 nt, Artificial Sequence
  Description of Artificial Sequence: Synthetic oligonucleotide
  Sense strand starting at position 916 of SEQ ID NO: 1244662
ccaggaaacgcuugaucug

SEQ ID NO: 1505621 - RNA, 19 nt, Artificial Sequence
  Description of Artificial Sequence: Synthetic oligonucleotide
  Antisense strand to SEQ ID NO: 1505620
cagaucaagcguuuccugg

SEQ ID NO: 1505622 - RNA, 19 nt, Artificial Sequence
  Description of Artificial Sequence: Synthetic oligonucleotide
  Sense strand starting at position 1034 of SEQ ID NO: 1244662
agggaaagcacuugugguu

SEQ ID NO: 1505623 - RNA, 19 nt, Artificial Sequence
  Description of Artificial Sequence: Synthetic oligonucleotide
  Antisense strand to SEQ ID NO: 1505622
aaccacaagugcuuucccu

SEQ ID NO: 1505624 - RNA, 19 nt, Artificial Sequence
  Description of Artificial Sequence: Synthetic oligonucleotide
  Sense strand starting at position 1039 of SEQ ID NO: 1244662
aagcacuugugguuagaag

SEQ ID NO: 1505625 - RNA, 19 nt, Artificial Sequence
  Description of Artificial Sequence: Synthetic oligonucleotide
  Antisense strand to SEQ ID NO: 1505624
cuucuaaccacaagugcuu

SEQ ID NO: 1505626 - RNA, 19 nt, Artificial Sequence
  Description of Artificial Sequence: Synthetic oligonucleotide
  Sense strand starting at position 1040 of SEQ ID NO: 1244662
agcacuugugguuagaaga

SEQ ID NO: 1505627 - RNA, 19 nt, Artificial Sequence
  Description of Artificial Sequence: Synthetic oligonucleotide
  Antisense strand to SEQ ID NO: 1505626
ucuucuaaccacaagugcu

SEQ ID NO: 1505628 - RNA, 19 nt, Artificial Sequence
  Description of Artificial Sequence: Synthetic oligonucleotide
  Sense strand starting at position 1190 of SEQ ID NO: 1244662
gcaacugcucuugggaacu

SEQ ID NO: 1505629 - RNA, 19 nt, Artificial Sequence
  Description of Artificial Sequence: Synthetic oligonucleotide
  Antisense strand to SEQ ID NO: 1505628
aguucccaagagcaguugc

SEQ ID NO: 1505630 - RNA, 19 nt, Artificial Sequence
  Description of Artificial Sequence: Synthetic oligonucleotide
  Sense strand starting at position 1309 of SEQ ID NO: 1244662
aggccagacugauuaagau

SEQ ID NO: 1505631 - RNA, 19 nt, Artificial Sequence
  Description of Artificial Sequence: Synthetic oligonucleotide
  Antisense strand to SEQ ID NO: 1505630
aucuuaaucagucuggccu

SEQ ID NO: 1505632 - RNA, 19 nt, Artificial Sequence
  Description of Artificial Sequence: Synthetic oligonucleotide
  Sense strand starting at position 1357 of SEQ ID NO: 1244662
gagaguacagugcaucaga

SEQ ID NO: 1505633 - RNA, 19 nt, Artificial Sequence
  Description of Artificial Sequence: Synthetic oligonucleotide
  Antisense strand to SEQ ID NO: 1505632
ucugaugcacuguacucuc

SEQ ID NO: 1505634 - RNA, 19 nt, Artificial Sequence
  Description of Artificial Sequence: Synthetic oligonucleotide
  Sense strand starting at position 1541 of SEQ ID NO: 1244662
cucaguauaguugauccua

SEQ ID NO: 1505635 - RNA, 19 nt, Artificial Sequence
  Description of Artificial Sequence: Synthetic oligonucleotide
  Antisense strand to SEQ ID NO: 1505634
uaggaucaacuauacugag

SEQ ID NO: 1505636 - RNA, 19 nt, Artificial Sequence
  Description of Artificial Sequence: Synthetic oligonucleotide
  Sense strand starting at position 1729 of SEQ ID NO: 1244662
cccaacugugagggacaua

SEQ ID NO: 1505637 - RNA, 19 nt, Artificial Sequence
  Description of Artificial Sequence: Synthetic oligonucleotide
  Antisense strand to SEQ ID NO: 1505636
uaugucccucacaguuggg

SEQ ID NO: 1505638 - RNA, 19 nt, Artificial Sequence
  Description of Artificial Sequence: Synthetic oligonucleotide
  Sense strand starting at position 1857 of SEQ ID NO: 1244662
gacugacuccucuguagaa

SEQ ID NO: 1505639 - RNA, 19 nt, Artificial Sequence
  Description of Artificial Sequence: Synthetic oligonucleotide
  Antisense strand to SEQ ID NO: 1505638
uucuacagaggagucaguc

SEQ ID NO: 1505640 - RNA, 19 nt, Artificial Sequence
  Description of Artificial Sequence: Synthetic oligonucleotide
  Sense strand starting at position 1867 of SEQ ID NO: 1244662
ucuguagaagccuguucua

SEQ ID NO: 1505641 - RNA, 19 nt, Artificial Sequence
  Description of Artificial Sequence: Synthetic oligonucleotide
  Antisense strand to SEQ ID NO: 1505640
uagaacaggcuucuacaga

SEQ ID NO: 1505642 - RNA, 19 nt, Artificial Sequence
  Description of Artificial Sequence: Synthetic oligonucleotide
  Sense strand starting at position 2151 of SEQ ID NO: 1244662
auaagauagccacagucuu

SEQ ID NO: 1505643 - RNA, 19 nt, Artificial Sequence
  Description of Artificial Sequence: Synthetic oligonucleotide
  Antisense strand to SEQ ID NO: 1505642
aagacuguggcuaucuuau

SEQ ID NO: 1505644 - RNA, 19 nt, Artificial Sequence
  Description of Artificial Sequence: Synthetic oligonucleotide
  Sense strand starting at position 2213 of SEQ ID NO: 1244662
agguguaugccagagggaa

SEQ ID NO: 1505645 - RNA, 19 nt, Artificial Sequence
  Description of Artificial Sequence: Synthetic oligonucleotide
  Antisense strand to SEQ ID NO: 1505644
uucccucuggcauacaccu

SEQ ID NO: 1505646 - RNA, 19 nt, Artificial Sequence
  Description of Artificial Sequence: Synthetic oligonucleotide
  Sense strand starting at position 2215 of SEQ ID NO: 1244662
guguaugccagagggaaga

SEQ ID NO: 1505647 - RNA, 19 nt, Artificial Sequence
  Description of Artificial Sequence: Synthetic oligonucleotide
  Antisense strand to SEQ ID NO: 1505646
ucuucccucuggcauacac

SEQ ID NO: 1505648 - RNA, 19 nt, Artificial Sequence
  Description of Artificial Sequence: Synthetic oligonucleotide
  Sense strand starting at position 2329 of SEQ ID NO: 1244662
cagugcucgccuggacaga

SEQ ID NO: 1505649 - RNA, 19 nt, Artificial Sequence
  Description of Artificial Sequence: Synthetic oligonucleotide
  Antisense strand to SEQ ID NO: 1505648
ucuguccaggcgagcacug

SEQ ID NO: 1505650 - RNA, 19 nt, Artificial Sequence
  Description of Artificial Sequence: Synthetic oligonucleotide
  Sense strand starting at position 2411 of SEQ ID NO: 1244662
agaggcuauccugaggcaa

SEQ ID NO: 1505651 - RNA, 19 nt, Artificial Sequence
  Description of Artificial Sequence: Synthetic oligonucleotide
  Antisense strand to SEQ ID NO: 1505650
uugccucaggauagccucu

SEQ ID NO: 1505652 - RNA, 19 nt, Artificial Sequence
  Description of Artificial Sequence: Synthetic oligonucleotide
  Sense strand starting at position 2470 of SEQ ID NO: 1244662
uccaguggugaccauacau

SEQ ID NO: 1505653 - RNA, 19 nt, Artificial Sequence
  Description of Artificial Sequence: Synthetic oligonucleotide
  Antisense strand to SEQ ID NO: 1505652
auguauggucaccacugga

SEQ ID NO: 1505654 - RNA, 19 nt, Artificial Sequence
  Description of Artificial Sequence: Synthetic oligonucleotide
  Sense strand starting at position 2504 of SEQ ID NO: 1244662
cuguccuggcaucaugauu

SEQ ID NO: 1505655 - RNA, 19 nt, Artificial Sequence
  Description of Artificial Sequence: Synthetic oligonucleotide
  Antisense strand to SEQ ID NO: 1505654
aaucaugaugccaggacag

SEQ ID NO: 1505656 - RNA, 19 nt, Artificial Sequence
  Description of Artificial Sequence: Synthetic oligonucleotide
  Sense strand starting at position 2509 of SEQ ID NO: 1244662
cuggcaucaugauuaauug

SEQ ID NO: 1505657 - RNA, 19 nt, Artificial Sequence
  Description of Artificial Sequence: Synthetic oligonucleotide
  Antisense strand to SEQ ID NO: 1505656
caauuaaucaugaugccag

SEQ ID NO: 1505658 - RNA, 19 nt, Artificial Sequence
  Description of Artificial Sequence: Synthetic oligonucleotide
  Sense strand starting at position 2565 of SEQ ID NO: 1244662
uuaauuacauggcaacaga

SEQ ID NO: 1505659 - RNA, 19 nt, Artificial Sequence
  Description of Artificial Sequence: Synthetic oligonucleotide
  Antisense strand to SEQ ID NO: 1505658
ucuguugccauguaauuaa

SEQ ID NO: 1505660 - RNA, 19 nt, Artificial Sequence
  Description of Artificial Sequence: Synthetic oligonucleotide
  Sense strand starting at position 2610 of SEQ ID NO: 1244662
acguguugucuggcagcua

SEQ ID NO: 1505661 - RNA, 19 nt, Artificial Sequence
  Description of Artificial Sequence: Synthetic oligonucleotide
  Antisense strand to SEQ ID NO: 1505660
uagcugccagacaacacgu

SEQ ID NO: 1505662 - RNA, 19 nt, Artificial Sequence
  Description of Artificial Sequence: Synthetic oligonucleotide
  Sense strand starting at position 3149 of SEQ ID NO: 1244662
gucagaaagcucuaggucu

SEQ ID NO: 1505663 - RNA, 19 nt, Artificial Sequence
  Description of Artificial Sequence: Synthetic oligonucleotide
  Antisense strand to SEQ ID NO: 1505662
agaccuagagcuuucugac

SEQ ID NO: 1505664 - RNA, 19 nt, Artificial Sequence
  Description of Artificial Sequence: Synthetic oligonucleotide
  Sense strand starting at position 3151 of SEQ ID NO: 1244662
cagaaagcucuaggucuaa

SEQ ID NO: 1505665 - RNA, 19 nt, Artificial Sequence
  Description of Artificial Sequence: Synthetic oligonucleotide
  Antisense strand to SEQ ID NO: 1505664
uuagaccuagagcuuucug

SEQ ID NO: 1505666 - RNA, 19 nt, Artificial Sequence
  Description of Artificial Sequence: Synthetic oligonucleotide
  Sense strand starting at position 3181 of SEQ ID NO: 1244662
aggcaaaguuccucacaca

SEQ ID NO: 1505667 - RNA, 19 nt, Artificial Sequence
  Description of Artificial Sequence: Synthetic oligonucleotide
  Antisense strand to SEQ ID NO: 1505666
ugugugaggaacuuugccu

SEQ ID NO: 1505668 - RNA, 19 nt, Artificial Sequence
  Description of Artificial Sequence: Synthetic oligonucleotide
  Sense strand starting at position 3535 of SEQ ID NO: 1244662
gacacuguggccuguauga

SEQ ID NO: 1505669 - RNA, 19 nt, Artificial Sequence
  Description of Artificial Sequence: Synthetic oligonucleotide
  Antisense strand to SEQ ID NO: 1505668
ucauacaggccacaguguc

SEQ ID NO: 1505670 - RNA, 19 nt, Artificial Sequence
  Description of Artificial Sequence: Synthetic oligonucleotide
  Sense strand starting at position 3548 of SEQ ID NO: 1244662
guaugaggacuaugagcua

SEQ ID NO: 1505671 - RNA, 19 nt, Artificial Sequence
  Description of Artificial Sequence: Synthetic oligonucleotide
  Antisense strand to SEQ ID NO: 1505670
uagcucauaguccucauac

SEQ ID NO: 1505672 - RNA, 19 nt, Artificial Sequence
  Description of Artificial Sequence: Synthetic oligonucleotide
  Sense strand starting at position 3950 of SEQ ID NO: 1244662
guuagcacuuggucucuga

SEQ ID NO: 1505673 - RNA, 19 nt, Artificial Sequence
  Description of Artificial Sequence: Synthetic oligonucleotide
  Antisense strand to SEQ ID NO: 1505672
ucagagaccaagugcuaac

SEQ ID NO: 1505674 - RNA, 19 nt, Artificial Sequence
  Description of Artificial Sequence: Synthetic oligonucleotide
  Sense strand starting at position 3953 of SEQ ID NO: 1244662
agcacuuggucucugagga

SEQ ID NO: 1505675 - RNA, 19 nt, Artificial Sequence
  Description of Artificial Sequence: Synthetic oligonucleotide
  Antisense strand to SEQ ID NO: 1505674
uccucagagaccaagugcu

SEQ ID NO: 1505676 - RNA, 19 nt, Artificial Sequence
  Description of Artificial Sequence: Synthetic oligonucleotide
  Sense strand starting at position 3954 of SEQ ID NO: 1244662
gcacuuggucucugaggag

SEQ ID NO: 1505677 - RNA, 19 nt, Artificial Sequence
  Description of Artificial Sequence: Synthetic oligonucleotide
  Antisense strand to SEQ ID NO: 1505676
cuccucagagaccaagugc

SEQ ID NO: 1505678 - RNA, 19 nt, Artificial Sequence
  Description of Artificial Sequence: Synthetic oligonucleotide
  Sense strand starting at position 121 of SEQ ID NO: 1244663
cucaguauaguugauccua

SEQ ID NO: 1505679 - RNA, 19 nt, Artificial Sequence
  Description of Artificial Sequence: Synthetic oligonucleotide
  Antisense strand to SEQ ID NO: 1505678
uaggaucaacuauacugag

SEQ ID NO: 1505680 - RNA, 19 nt, Artificial Sequence
  Description of Artificial Sequence: Synthetic oligonucleotide
  Sense strand starting at position 309 of SEQ ID NO: 1244663
cccaacugugagggacaua

SEQ ID NO: 1505681 - RNA, 19 nt, Artificial Sequence
  Description of Artificial Sequence: Synthetic oligonucleotide
  Antisense strand to SEQ ID NO: 1505680
uaugucccucacaguuggg

SEQ ID NO: 1505682 - RNA, 19 nt, Artificial Sequence
  Description of Artificial Sequence: Synthetic oligonucleotide
  Sense strand starting at position 437 of SEQ ID NO: 1244663
gacugacuccucuguagaa

SEQ ID NO: 1505683 - RNA, 19 nt, Artificial Sequence
  Description of Artificial Sequence: Synthetic oligonucleotide
  Antisense strand to SEQ ID NO: 1505682
uucuacagaggagucaguc

SEQ ID NO: 1505684 - RNA, 19 nt, Artificial Sequence
  Description of Artificial Sequence: Synthetic oligonucleotide
  Sense strand starting at position 447 of SEQ ID NO: 1244663
ucuguagaagccuguucua

SEQ ID NO: 1505685 - RNA, 19 nt, Artificial Sequence
  Description of Artificial Sequence: Synthetic oligonucleotide
  Antisense strand to SEQ ID NO: 1505684
uagaacaggcuucuacaga

SEQ ID NO: 1505686 - RNA, 19 nt, Artificial Sequence
  Description of Artificial Sequence: Synthetic oligonucleotide
  Sense strand starting at position 731 of SEQ ID NO: 1244663
auaagauagccacagucuu

SEQ ID NO: 1505687 - RNA, 19 nt, Artificial Sequence
  Description of Artificial Sequence: Synthetic oligonucleotide
  Antisense strand to SEQ ID NO: 1505686
aagacuguggcuaucuuau

SEQ ID NO: 1505688 - RNA, 19 nt, Artificial Sequence
  Description of Artificial Sequence: Synthetic oligonucleotide
  Sense strand starting at position 793 of SEQ ID NO: 1244663
agguguaugccagagggaa

SEQ ID NO: 1505689 - RNA, 19 nt, Artificial Sequence
  Description of Artificial Sequence: Synthetic oligonucleotide
  Antisense strand to SEQ ID NO: 1505688
uucccucuggcauacaccu

SEQ ID NO: 1505690 - RNA, 19 nt, Artificial Sequence
  Description of Artificial Sequence: Synthetic oligonucleotide
  Sense strand starting at position 795 of SEQ ID NO: 1244663
guguaugccagagggaaga

SEQ ID NO: 1505691 - RNA, 19 nt, Artificial Sequence
  Description of Artificial Sequence: Synthetic oligonucleotide
  Antisense strand to SEQ ID NO: 1505690
ucuucccucuggcauacac

SEQ ID NO: 1505692 - RNA, 19 nt, Artificial Sequence
  Description of Artificial Sequence: Synthetic oligonucleotide
  Sense strand starting at position 909 of SEQ ID NO: 1244663
cagugcucgccuggacaga

SEQ ID NO: 1505693 - RNA, 19 nt, Artificial Sequence
  Description of Artificial Sequence: Synthetic oligonucleotide
  Antisense strand to SEQ ID NO: 1505692
ucuguccaggcgagcacug

SEQ ID NO: 1505694 - RNA, 19 nt, Artificial Sequence
  Description of Artificial Sequence: Synthetic oligonucleotide
  Sense strand starting at position 991 of SEQ ID NO: 1244663
agaggcuauccugaggcaa

SEQ ID NO: 1505695 - RNA, 19 nt, Artificial Sequence
  Description of Artificial Sequence: Synthetic oligonucleotide
  Antisense strand to SEQ ID NO: 1505694
uugccucaggauagccucu

SEQ ID NO: 1505696 - RNA, 19 nt, Artificial Sequence
  Description of Artificial Sequence: Synthetic oligonucleotide
  Sense strand starting at position 1050 of SEQ ID NO: 1244663
uccaguggugaccauacau

SEQ ID NO: 1505697 - RNA, 19 nt, Artificial Sequence
  Description of Artificial Sequence: Synthetic oligonucleotide
  Antisense strand to SEQ ID NO: 1505696
auguauggucaccacugga

SEQ ID NO: 1505698 - RNA, 19 nt, Artificial Sequence
  Description of Artificial Sequence: Synthetic oligonucleotide
  Sense strand starting at position 1084 of SEQ ID NO: 1244663
cuguccuggcaucaugauu

SEQ ID NO: 1505699 - RNA, 19 nt, Artificial Sequence
  Description of Artificial Sequence: Synthetic oligonucleotide
  Antisense strand to SEQ ID NO: 1505698
aaucaugaugccaggacag

SEQ ID NO: 1505700 - RNA, 19 nt, Artificial Sequence
  Description of Artificial Sequence: Synthetic oligonucleotide
  Sense strand starting at position 1089 of SEQ ID NO: 1244663
cuggcaucaugauuaauug

SEQ ID NO: 1505701 - RNA, 19 nt, Artificial Sequence
  Description of Artificial Sequence: Synthetic oligonucleotide
  Antisense strand to SEQ ID NO: 1505700
caauuaaucaugaugccag

SEQ ID NO: 1505702 - RNA, 19 nt, Artificial Sequence
  Description of Artificial Sequence: Synthetic oligonucleotide
  Sense strand starting at position 1145 of SEQ ID NO: 1244663
uuaauuacauggcaacaga

SEQ ID NO: 1505703 - RNA, 19 nt, Artificial Sequence
  Description of Artificial Sequence: Synthetic oligonucleotide
  Antisense strand to SEQ ID NO: 1505702
ucuguugccauguaauuaa

SEQ ID NO: 1505704 - RNA, 19 nt, Artificial Sequence
  Description of Artificial Sequence: Synthetic oligonucleotide
  Sense strand starting at position 1190 of SEQ ID NO: 1244663
acguguugucuggcagcua

SEQ ID NO: 1505705 - RNA, 19 nt, Artificial Sequence
  Description of Artificial Sequence: Synthetic oligonucleotide
  Antisense strand to SEQ ID NO: 1505704
uagcugccagacaacacgu

SEQ ID NO: 1505706 - RNA, 19 nt, Artificial Sequence
  Description of Artificial Sequence: Synthetic oligonucleotide
  Sense strand starting at position 1729 of SEQ ID NO: 1244663
gucagaaagcucuaggucu

SEQ ID NO: 1505707 - RNA, 19 nt, Artificial Sequence
  Description of Artificial Sequence: Synthetic oligonucleotide
  Antisense strand to SEQ ID NO: 1505706
agaccuagagcuuucugac

SEQ ID NO: 1505708 - RNA, 19 nt, Artificial Sequence
  Description of Artificial Sequence: Synthetic oligonucleotide
  Sense strand starting at position 1731 of SEQ ID NO: 1244663
cagaaagcucuaggucuaa

SEQ ID NO: 1505709 - RNA, 19 nt, Artificial Sequence
  Description of Artificial Sequence: Synthetic oligonucleotide
  Antisense strand to SEQ ID NO: 1505708
uuagaccuagagcuuucug

SEQ ID NO: 1505710 - RNA, 19 nt, Artificial Sequence
  Description of Artificial Sequence: Synthetic oligonucleotide
  Sense strand starting at position 1761 of SEQ ID NO: 1244663
aggcaaaguuccucacaca

SEQ ID NO: 1505711 - RNA, 19 nt, Artificial Sequence
  Description of Artificial Sequence: Synthetic oligonucleotide
  Antisense strand to SEQ ID NO: 1505710
ugugugaggaacuuugccu

SEQ ID NO: 1505712 - RNA, 19 nt, Artificial Sequence
  Description of Artificial Sequence: Synthetic oligonucleotide
  Sense strand starting at position 2115 of SEQ ID NO: 1244663
gacacuguggccuguauga

SEQ ID NO: 1505713 - RNA, 19 nt, Artificial Sequence
  Description of Artificial Sequence: Synthetic oligonucleotide
  Antisense strand to SEQ ID NO: 1505712
ucauacaggccacaguguc

SEQ ID NO: 1505714 - RNA, 19 nt, Artificial Sequence
  Description of Artificial Sequence: Synthetic oligonucleotide
  Sense strand starting at position 2128 of SEQ ID NO: 1244663
guaugaggacuaugagcua

SEQ ID NO: 1505715 - RNA, 19 nt, Artificial Sequence
  Description of Artificial Sequence: Synthetic oligonucleotide
  Antisense strand to SEQ ID NO: 1505714
uagcucauaguccucauac

SEQ ID NO: 1505716 - RNA, 19 nt, Artificial Sequence
  Description of Artificial Sequence: Synthetic oligonucleotide
  Sense strand starting at position 2530 of SEQ ID NO: 1244663
guuagcacuuggucucuga

SEQ ID NO: 1505717 - RNA, 19 nt, Artificial Sequence
  Description of Artificial Sequence: Synthetic oligonucleotide
  Antisense strand to SEQ ID NO: 1505716
ucagagaccaagugcuaac

SEQ ID NO: 1505718 - RNA, 19 nt, Artificial Sequence
  Description of Artificial Sequence: Synthetic oligonucleotide
  Sense strand starting at position 2533 of SEQ ID NO: 1244663
agcacuuggucucugagga

SEQ ID NO: 1505719 - RNA, 19 nt, Artificial Sequence
  Description of Artificial Sequence: Synthetic oligonucleotide
  Antisense strand to SEQ ID NO: 1505718
uccucagagaccaagugcu

SEQ ID NO: 1505720 - RNA, 19 nt, Artificial Sequence
  Description of Artificial Sequence: Synthetic oligonucleotide
  Sense strand starting at position 2534 of SEQ ID NO: 1244663
gcacuuggucucugaggag

SEQ ID NO: 1505721 - RNA, 19 nt, Artificial Sequence
  Description of Artificial Sequence: Synthetic oligonucleotide
  Antisense strand to SEQ ID NO: 1505720
cuccucagagaccaagugc

SEQ ID NO: 1505722 - RNA, 19 nt, Artificial Sequence
  Description of Artificial Sequence: Synthetic oligonucleotide
  Sense strand starting at position 2602 of SEQ ID NO: 1244663
ccauuuaggugggagauaa

SEQ ID NO: 1505723 - RNA, 19 nt, Artificial Sequence
  Description of Artificial Sequence: Synthetic oligonucleotide
  Antisense strand to SEQ ID NO: 1505722
uuaucucccaccuaaaugg

SEQ ID NO: 1505724 - RNA, 19 nt, Artificial Sequence
  Description of Artificial Sequence: Synthetic oligonucleotide
  Sense strand starting at position 2634 of SEQ ID NO: 1244663
guuggaagugugcacucaa

SEQ ID NO: 1505725 - RNA, 19 nt, Artificial Sequence
  Description of Artificial Sequence: Synthetic oligonucleotide
  Antisense strand to SEQ ID NO: 1505724
uugagugcacacuuccaac

SEQ ID NO: 1505726 - RNA, 19 nt, Artificial Sequence
  Description of Artificial Sequence: Synthetic oligonucleotide
  Sense strand starting at position 2673 of SEQ ID NO: 1244663
guuucugguuggguggaaa

SEQ ID NO: 1505727 - RNA, 19 nt, Artificial Sequence
  Description of Artificial Sequence: Synthetic oligonucleotide
  Antisense strand to SEQ ID NO: 1505726
uuuccacccaaccagaaac

SEQ ID NO: 1505728 - RNA, 19 nt, Artificial Sequence
  Description of Artificial Sequence: Synthetic oligonucleotide
  Sense strand starting at position 2676 of SEQ ID NO: 1244663
ucugguuggguggaaacau

SEQ ID NO: 1505729 - RNA, 19 nt, Artificial Sequence
  Description of Artificial Sequence: Synthetic oligonucleotide
  Antisense strand to SEQ ID NO: 1505728
auguuuccacccaaccaga

SEQ ID NO: 1505730 - RNA, 19 nt, Artificial Sequence
  Description of Artificial Sequence: Synthetic oligonucleotide
  Sense strand starting at position 2705 of SEQ ID NO: 1244663
ucuggauagugucuuaauu

SEQ ID NO: 1505731 - RNA, 19 nt, Artificial Sequence
  Description of Artificial Sequence: Synthetic oligonucleotide
  Antisense strand to SEQ ID NO: 1505730
aauuaagacacuauccaga

SEQ ID NO: 1505732 - RNA, 19 nt, Artificial Sequence
  Description of Artificial Sequence: Synthetic oligonucleotide
  Sense strand starting at position 2707 of SEQ ID NO: 1244663
uggauagugucuuaauuug

SEQ ID NO: 1505733 - RNA, 19 nt, Artificial Sequence
  Description of Artificial Sequence: Synthetic oligonucleotide
  Antisense strand to SEQ ID NO: 1505732
caaauuaagacacuaucca

SEQ ID NO: 1505734 - RNA, 19 nt, Artificial Sequence
  Description of Artificial Sequence: Synthetic oligonucleotide
  Sense strand starting at position 2715 of SEQ ID NO: 1244663
gucuuaauuugaggaccuu

SEQ ID NO: 1505735 - RNA, 19 nt, Artificial Sequence
  Description of Artificial Sequence: Synthetic oligonucleotide
  Antisense strand to SEQ ID NO: 1505734
aagguccucaaauuaagac

SEQ ID NO: 1505736 - RNA, 19 nt, Artificial Sequence
  Description of Artificial Sequence: Synthetic oligonucleotide
  Sense strand starting at position 2819 of SEQ ID NO: 1244663
cuuugaaccugagaagaga

SEQ ID NO: 1505737 - RNA, 19 nt, Artificial Sequence
  Description of Artificial Sequence: Synthetic oligonucleotide
  Antisense strand to SEQ ID NO: 1505736
ucucuucucagguucaaag

SEQ ID NO: 1505738 - RNA, 19 nt, Artificial Sequence
  Description of Artificial Sequence: Synthetic oligonucleotide
  Sense strand starting at position 2851 of SEQ ID NO: 1244663
gucacaggauggucauuaa

SEQ ID NO: 1505739 - RNA, 19 nt, Artificial Sequence
  Description of Artificial Sequence: Synthetic oligonucleotide
  Antisense strand to SEQ ID NO: 1505738
uuaaugaccauccugugac

SEQ ID NO: 1505740 - RNA, 19 nt, Artificial Sequence
  Description of Artificial Sequence: Synthetic oligonucleotide
  Sense strand starting at position 2854 of SEQ ID NO: 1244663
acaggauggucauuaaugu

SEQ ID NO: 1505741 - RNA, 19 nt, Artificial Sequence
  Description of Artificial Sequence: Synthetic oligonucleotide
  Antisense strand to SEQ ID NO: 1505740
acauuaaugaccauccugu

SEQ ID NO: 1505742 - RNA, 19 nt, Artificial Sequence
  Description of Artificial Sequence: Synthetic oligonucleotide
  Sense strand starting at position 2855 of SEQ ID NO: 1244663
caggauggucauuaauguu

SEQ ID NO: 1505743 - RNA, 19 nt, Artificial Sequence
  Description of Artificial Sequence: Synthetic oligonucleotide
  Antisense strand to SEQ ID NO: 1505742
aacauuaaugaccauccug

SEQ ID NO: 1505744 - RNA, 19 nt, Artificial Sequence
  Description of Artificial Sequence: Synthetic oligonucleotide
  Sense strand starting at position 2864 of SEQ ID NO: 1244663
cauuaauguuggccuguca

SEQ ID NO: 1505745 - RNA, 19 nt, Artificial Sequence
  Description of Artificial Sequence: Synthetic oligonucleotide
  Antisense strand to SEQ ID NO: 1505744
ugacaggccaacauuaaug

SEQ ID NO: 1505746 - RNA, 19 nt, Artificial Sequence
  Description of Artificial Sequence: Synthetic oligonucleotide
  Sense strand starting at position 2997 of SEQ ID NO: 1244663
aggagucugaucugaacca

SEQ ID NO: 1505747 - RNA, 19 nt, Artificial Sequence
  Description of Artificial Sequence: Synthetic oligonucleotide
  Antisense strand to SEQ ID NO: 1505746
ugguucagaucagacuccu

SEQ ID NO: 1505748 - RNA, 19 nt, Artificial Sequence
  Description of Artificial Sequence: Synthetic oligonucleotide
  Sense strand starting at position 3096 of SEQ ID NO: 1244663
gugugucuuuaauuagaga

SEQ ID NO: 1505749 - RNA, 19 nt, Artificial Sequence
  Description of Artificial Sequence: Synthetic oligonucleotide
  Antisense strand to SEQ ID NO: 1505748
ucucuaauuaaagacacac

SEQ ID NO: 1505750 - RNA, 19 nt, Artificial Sequence
  Description of Artificial Sequence: Synthetic oligonucleotide
  Sense strand starting at position 3166 of SEQ ID NO: 1244663
gaaguuaguguguggcaga

SEQ ID NO: 1505751 - RNA, 19 nt, Artificial Sequence
  Description of Artificial Sequence: Synthetic oligonucleotide
  Antisense strand to SEQ ID NO: 1505750
ucugccacacacuaacuuc

SEQ ID NO: 1505752 - RNA, 19 nt, Artificial Sequence
  Description of Artificial Sequence: Synthetic oligonucleotide
  Sense strand starting at position 3418 of SEQ ID NO: 1244663
aaagguuggcccuaccaaa

SEQ ID NO: 1505753 - RNA, 19 nt, Artificial Sequence
  Description of Artificial Sequence: Synthetic oligonucleotide
  Antisense strand to SEQ ID NO: 1505752
uuugguagggccaaccuuu

SEQ ID NO: 1505754 - RNA, 19 nt, Artificial Sequence
  Description of Artificial Sequence: Synthetic oligonucleotide
  Sense strand starting at position 3623 of SEQ ID NO: 1244663
uccugacacccuuacguua

SEQ ID NO: 1505755 - RNA, 19 nt, Artificial Sequence
  Description of Artificial Sequence: Synthetic oligonucleotide
  Antisense strand to SEQ ID NO: 1505754
uaacguaagggugucagga

SEQ ID NO: 1505756 - RNA, 19 nt, Artificial Sequence
  Description of Artificial Sequence: Synthetic oligonucleotide
  Sense strand starting at position 3852 of SEQ ID NO: 1244663
gaggaagcuuucccauggu

SEQ ID NO: 1505757 - RNA, 19 nt, Artificial Sequence
  Description of Artificial Sequence: Synthetic oligonucleotide
  Antisense strand to SEQ ID NO: 1505756
accaugggaaagcuuccuc

SEQ ID NO: 1505758 - RNA, 19 nt, Artificial Sequence
  Description of Artificial Sequence: Synthetic oligonucleotide
  Sense strand starting at position 17 of SEQ ID NO: 1244664
guuggaagugugcacucaa

SEQ ID NO: 1505759 - RNA, 19 nt, Artificial Sequence
  Description of Artificial Sequence: Synthetic oligonucleotide
  Antisense strand to SEQ ID NO: 1505758
uugagugcacacuuccaac

SEQ ID NO: 1505760 - RNA, 19 nt, Artificial Sequence
  Description of Artificial Sequence: Synthetic oligonucleotide
  Sense strand starting at position 56 of SEQ ID NO: 1244664
guuucugguuggguggaaa

SEQ ID NO: 1505761 - RNA, 19 nt, Artificial Sequence
  Description of Artificial Sequence: Synthetic oligonucleotide
  Antisense strand to SEQ ID NO: 1505760
uuuccacccaaccagaaac

SEQ ID NO: 1505762 - RNA, 19 nt, Artificial Sequence
  Description of Artificial Sequence: Synthetic oligonucleotide
  Sense strand starting at position 59 of SEQ ID NO: 1244664
ucugguuggguggaaacau

SEQ ID NO: 1505763 - RNA, 19 nt, Artificial Sequence
  Description of Artificial Sequence: Synthetic oligonucleotide
  Antisense strand to SEQ ID NO: 1505762
auguuuccacccaaccaga

SEQ ID NO: 1505764 - RNA, 19 nt, Artificial Sequence
  Description of Artificial Sequence: Synthetic oligonucleotide
  Sense strand starting at position 88 of SEQ ID NO: 1244664
ucuggauagugucuuaauu

SEQ ID NO: 1505765 - RNA, 19 nt, Artificial Sequence
  Description of Artificial Sequence: Synthetic oligonucleotide
  Antisense strand to SEQ ID NO: 1505764
aauuaagacacuauccaga

SEQ ID NO: 1505766 - RNA, 19 nt, Artificial Sequence
  Description of Artificial Sequence: Synthetic oligonucleotide
  Sense strand starting at position 90 of SEQ ID NO: 1244664
uggauagugucuuaauuug

SEQ ID NO: 1505767 - RNA, 19 nt, Artificial Sequence
  Description of Artificial Sequence: Synthetic oligonucleotide
  Antisense strand to SEQ ID NO: 1505766
caaauuaagacacuaucca

SEQ ID NO: 1505768 - RNA, 19 nt, Artificial Sequence
  Description of Artificial Sequence: Synthetic oligonucleotide
  Sense strand starting at position 202 of SEQ ID NO: 1244664
cuuugaaccugagaagaga

SEQ ID NO: 1505769 - RNA, 19 nt, Artificial Sequence
  Description of Artificial Sequence: Synthetic oligonucleotide
  Antisense strand to SEQ ID NO: 1505768
ucucuucucagguucaaag

SEQ ID NO: 1505770 - RNA, 19 nt, Artificial Sequence
  Description of Artificial Sequence: Synthetic oligonucleotide
  Sense strand starting at position 234 of SEQ ID NO: 1244664
gucacaggauggucauuaa

SEQ ID NO: 1505771 - RNA, 19 nt, Artificial Sequence
  Description of Artificial Sequence: Synthetic oligonucleotide
  Antisense strand to SEQ ID NO: 1505770
uuaaugaccauccugugac

SEQ ID NO: 1505772 - RNA, 19 nt, Artificial Sequence
  Description of Artificial Sequence: Synthetic oligonucleotide
  Sense strand starting at position 237 of SEQ ID NO: 1244664
acaggauggucauuaaugu

SEQ ID NO: 1505773 - RNA, 19 nt, Artificial Sequence
  Description of Artificial Sequence: Synthetic oligonucleotide
  Antisense strand to SEQ ID NO: 1505772
acauuaaugaccauccugu

SEQ ID NO: 1505774 - RNA, 19 nt, Artificial Sequence
  Description of Artificial Sequence: Synthetic oligonucleotide
  Sense strand starting at position 238 of SEQ ID NO: 1244664
caggauggucauuaauguu

SEQ ID NO: 1505775 - RNA, 19 nt, Artificial Sequence
  Description of Artificial Sequence: Synthetic oligonucleotide
  Antisense strand to SEQ ID NO: 1505774
aacauuaaugaccauccug

SEQ ID NO: 1505776 - RNA, 19 nt, Artificial Sequence
  Description of Artificial Sequence: Synthetic oligonucleotide
  Sense strand starting at position 247 of SEQ ID NO: 1244664
cauuaauguuggccuguca

SEQ ID NO: 1505777 - RNA, 19 nt, Artificial Sequence
  Description of Artificial Sequence: Synthetic oligonucleotide
  Antisense strand to SEQ ID NO: 1505776
ugacaggccaacauuaaug

SEQ ID NO: 1505778 - RNA, 19 nt, Artificial Sequence
  Description of Artificial Sequence: Synthetic oligonucleotide
  Sense strand starting at position 380 of SEQ ID NO: 1244664
aggagucugaucugaacca

SEQ ID NO: 1505779 - RNA, 19 nt, Artificial Sequence
  Description of Artificial Sequence: Synthetic oligonucleotide
  Antisense strand to SEQ ID NO: 1505778
ugguucagaucagacuccu

SEQ ID NO: 1505780 - RNA, 19 nt, Artificial Sequence
  Description of Artificial Sequence: Synthetic oligonucleotide
  Sense strand starting at position 479 of SEQ ID NO: 1244664
gugugucuuuaauuagaga

SEQ ID NO: 1505781 - RNA, 19 nt, Artificial Sequence
  Description of Artificial Sequence: Synthetic oligonucleotide
  Antisense strand to SEQ ID NO: 1505780
ucucuaauuaaagacacac

SEQ ID NO: 1505782 - RNA, 19 nt, Artificial Sequence
  Description of Artificial Sequence: Synthetic oligonucleotide
  Sense strand starting at position 801 of SEQ ID NO: 1244664
aaagguuggcccuaccaaa

SEQ ID NO: 1505783 - RNA, 19 nt, Artificial Sequence
  Description of Artificial Sequence: Synthetic oligonucleotide
  Antisense strand to SEQ ID NO: 1505782
uuugguagggccaaccuuu

SEQ ID NO: 1505784 - RNA, 19 nt, Artificial Sequence
  Description of Artificial Sequence: Synthetic oligonucleotide
  Sense strand starting at position 1006 of SEQ ID NO: 1244664
uccugacacccuuacguua

SEQ ID NO: 1505785 - RNA, 19 nt, Artificial Sequence
  Description of Artificial Sequence: Synthetic oligonucleotide
  Antisense strand to SEQ ID NO: 1505784
uaacguaagggugucagga

SEQ ID NO: 1505786 - RNA, 19 nt, Artificial Sequence
  Description of Artificial Sequence: Synthetic oligonucleotide
  Sense strand starting at position 1235 of SEQ ID NO: 1244664
gaggaagcuuucccauggu

SEQ ID NO: 1505787 - RNA, 19 nt, Artificial Sequence
  Description of Artificial Sequence: Synthetic oligonucleotide
  Antisense strand to SEQ ID NO: 1505786
accaugggaaagcuuccuc

SEQ ID NO: 1505788 - RNA, 19 nt, Artificial Sequence
  Description of Artificial Sequence: Synthetic oligonucleotide
  Sense strand starting at position 2321 of SEQ ID NO: 1244664
gggaguugcugcaugaguu

SEQ ID NO: 1505789 - RNA, 19 nt, Artificial Sequence
  Description of Artificial Sequence: Synthetic oligonucleotide
  Antisense strand to SEQ ID NO: 1505788
aacucaugcagcaacuccc

SEQ ID NO: 1505790 - RNA, 19 nt, Artificial Sequence
  Description of Artificial Sequence: Synthetic oligonucleotide
  Sense strand starting at position 2328 of SEQ ID NO: 1244664
gcugcaugaguuggagaga

SEQ ID NO: 1505791 - RNA, 19 nt, Artificial Sequence
  Description of Artificial Sequence: Synthetic oligonucleotide
  Antisense strand to SEQ ID NO: 1505790
ucucuccaacucaugcagc

SEQ ID NO: 1505792 - RNA, 19 nt, Artificial Sequence
  Description of Artificial Sequence: Synthetic oligonucleotide
  Sense strand starting at position 2441 of SEQ ID NO: 1244664
gucagauauucuccaccuc

SEQ ID NO: 1505793 - RNA, 19 nt, Artificial Sequence
  Description of Artificial Sequence: Synthetic oligonucleotide
  Antisense strand to SEQ ID NO: 1505792
gagguggagaauaucugac

SEQ ID NO: 1505794 - RNA, 19 nt, Artificial Sequence
  Description of Artificial Sequence: Synthetic oligonucleotide
  Sense strand starting at position 2552 of SEQ ID NO: 1244664
cagggaucaucugcuggaa

SEQ ID NO: 1505795 - RNA, 19 nt, Artificial Sequence
  Description of Artificial Sequence: Synthetic oligonucleotide
  Antisense strand to SEQ ID NO: 1505794
uuccagcagaugaucccug

SEQ ID NO: 1505796 - RNA, 19 nt, Artificial Sequence
  Description of Artificial Sequence: Synthetic oligonucleotide
  Sense strand starting at position 2555 of SEQ ID NO: 1244664
ggaucaucugcuggaagga

SEQ ID NO: 1505797 - RNA, 19 nt, Artificial Sequence
  Description of Artificial Sequence: Synthetic oligonucleotide
  Antisense strand to SEQ ID NO: 1505796
uccuuccagcagaugaucc

SEQ ID NO: 1505798 - RNA, 19 nt, Artificial Sequence
  Description of Artificial Sequence: Synthetic oligonucleotide
  Sense strand starting at position 2686 of SEQ ID NO: 1244664
ggccacucuuccucugaca

SEQ ID NO: 1505799 - RNA, 19 nt, Artificial Sequence
  Description of Artificial Sequence: Synthetic oligonucleotide
  Antisense strand to SEQ ID NO: 1505798
ugucagaggaagaguggcc

SEQ ID NO: 1505800 - RNA, 19 nt, Artificial Sequence
  Description of Artificial Sequence: Synthetic oligonucleotide
  Sense strand starting at position 2737 of SEQ ID NO: 1244664
agaagcuuuagaggcauua

SEQ ID NO: 1505801 - RNA, 19 nt, Artificial Sequence
  Description of Artificial Sequence: Synthetic oligonucleotide
  Antisense strand to SEQ ID NO: 1505800
uaaugccucuaaagcuucu

SEQ ID NO: 1505802 - RNA, 19 nt, Artificial Sequence
  Description of Artificial Sequence: Synthetic oligonucleotide
  Sense strand starting at position 2822 of SEQ ID NO: 1244664
gggauucccugagcuaagu

SEQ ID NO: 1505803 - RNA, 19 nt, Artificial Sequence
  Description of Artificial Sequence: Synthetic oligonucleotide
  Antisense strand to SEQ ID NO: 1505802
acuuagcucagggaauccc

SEQ ID NO: 1505804 - RNA, 19 nt, Artificial Sequence
  Description of Artificial Sequence: Synthetic oligonucleotide
  Sense strand starting at position 2928 of SEQ ID NO: 1244664
acuggcuucugccugaaua

SEQ ID NO: 1505805 - RNA, 19 nt, Artificial Sequence
  Description of Artificial Sequence: Synthetic oligonucleotide
  Antisense strand to SEQ ID NO: 1505804
uauucaggcagaagccagu

SEQ ID NO: 1505806 - RNA, 19 nt, Artificial Sequence
  Description of Artificial Sequence: Synthetic oligonucleotide
  Sense strand starting at position 2929 of SEQ ID NO: 1244664
cuggcuucugccugaauac

SEQ ID NO: 1505807 - RNA, 19 nt, Artificial Sequence
  Description of Artificial Sequence: Synthetic oligonucleotide
  Antisense strand to SEQ ID NO: 1505806
guauucaggcagaagccag

SEQ ID NO: 1505808 - RNA, 19 nt, Artificial Sequence
  Description of Artificial Sequence: Synthetic oligonucleotide
  Sense strand starting at position 2930 of SEQ ID NO: 1244664
uggcuucugccugaauaca

SEQ ID NO: 1505809 - RNA, 19 nt, Artificial Sequence
  Description of Artificial Sequence: Synthetic oligonucleotide
  Antisense strand to SEQ ID NO: 1505808
uguauucaggcagaagcca

SEQ ID NO: 1505810 - RNA, 19 nt, Artificial Sequence
  Description of Artificial Sequence: Synthetic oligonucleotide
  Sense strand starting at position 3024 of SEQ ID NO: 1244664
cagucugaccugugaacca

SEQ ID NO: 1505811 - RNA, 19 nt, Artificial Sequence
  Description of Artificial Sequence: Synthetic oligonucleotide
  Antisense strand to SEQ ID NO: 1505810
ugguucacaggucagacug

SEQ ID NO: 1505812 - RNA, 19 nt, Artificial Sequence
  Description of Artificial Sequence: Synthetic oligonucleotide
  Sense strand starting at position 3105 of SEQ ID NO: 1244664
guaagaucaggcugagaaa

SEQ ID NO: 1505813 - RNA, 19 nt, Artificial Sequence
  Description of Artificial Sequence: Synthetic oligonucleotide
  Antisense strand to SEQ ID NO: 1505812
uuucucagccugaucuuac

SEQ ID NO: 1505814 - RNA, 19 nt, Artificial Sequence
  Description of Artificial Sequence: Synthetic oligonucleotide
  Sense strand starting at position 3133 of SEQ ID NO: 1244664
gcugcuacuggagauguua

SEQ ID NO: 1505815 - RNA, 19 nt, Artificial Sequence
  Description of Artificial Sequence: Synthetic oligonucleotide
  Antisense strand to SEQ ID NO: 1505814
uaacaucuccaguagcagc

SEQ ID NO: 1505816 - RNA, 19 nt, Artificial Sequence
  Description of Artificial Sequence: Synthetic oligonucleotide
  Sense strand starting at position 3135 of SEQ ID NO: 1244664
ugcuacuggagauguuauu

SEQ ID NO: 1505817 - RNA, 19 nt, Artificial Sequence
  Description of Artificial Sequence: Synthetic oligonucleotide
  Antisense strand to SEQ ID NO: 1505816
aauaacaucuccaguagca

SEQ ID NO: 1505818 - RNA, 19 nt, Artificial Sequence
  Description of Artificial Sequence: Synthetic oligonucleotide
  Sense strand starting at position 3142 of SEQ ID NO: 1244664
ggagauguuauuggcuguu

SEQ ID NO: 1505819 - RNA, 19 nt, Artificial Sequence
  Description of Artificial Sequence: Synthetic oligonucleotide
  Antisense strand to SEQ ID NO: 1505818
aacagccaauaacaucucc

SEQ ID NO: 1505820 - RNA, 19 nt, Artificial Sequence
  Description of Artificial Sequence: Synthetic oligonucleotide
  Sense strand starting at position 3212 of SEQ ID NO: 1244664
ggagaaaccuuccuagcug

SEQ ID NO: 1505821 - RNA, 19 nt, Artificial Sequence
  Description of Artificial Sequence: Synthetic oligonucleotide
  Antisense strand to SEQ ID NO: 1505820
cagcuaggaagguuucucc

SEQ ID NO: 1505822 - RNA, 19 nt, Artificial Sequence
  Description of Artificial Sequence: Synthetic oligonucleotide
  Sense strand starting at position 3300 of SEQ ID NO: 1244664
cuagaugauuucuaagcuu

SEQ ID NO: 1505823 - RNA, 19 nt, Artificial Sequence
  Description of Artificial Sequence: Synthetic oligonucleotide
  Antisense strand to SEQ ID NO: 1505822
aagcuuagaaaucaucuag

SEQ ID NO: 1505824 - RNA, 19 nt, Artificial Sequence
  Description of Artificial Sequence: Synthetic oligonucleotide
  Sense strand starting at position 3362 of SEQ ID NO: 1244664
gaggauaugcuguaugcua

SEQ ID NO: 1505825 - RNA, 19 nt, Artificial Sequence
  Description of Artificial Sequence: Synthetic oligonucleotide
  Antisense strand to SEQ ID NO: 1505824
uagcauacagcauauccuc

SEQ ID NO: 1505826 - RNA, 19 nt, Artificial Sequence
  Description of Artificial Sequence: Synthetic oligonucleotide
  Sense strand starting at position 3379 of SEQ ID NO: 1244664
uacuauaggccuuggagga

SEQ ID NO: 1505827 - RNA, 19 nt, Artificial Sequence
  Description of Artificial Sequence: Synthetic oligonucleotide
  Antisense strand to SEQ ID NO: 1505826
uccuccaaggccuauagua

SEQ ID NO: 1505828 - RNA, 19 nt, Artificial Sequence
  Description of Artificial Sequence: Synthetic oligonucleotide
  Sense strand starting at position 3380 of SEQ ID NO: 1244664
acuauaggccuuggaggaa

SEQ ID NO: 1505829 - RNA, 19 nt, Artificial Sequence
  Description of Artificial Sequence: Synthetic oligonucleotide
  Antisense strand to SEQ ID NO: 1505828
uuccuccaaggccuauagu

SEQ ID NO: 1505830 - RNA, 19 nt, Artificial Sequence
  Description of Artificial Sequence: Synthetic oligonucleotide
  Sense strand starting at position 3511 of SEQ ID NO: 1244664
cagcuuggguucccugaaa

SEQ ID NO: 1505831 - RNA, 19 nt, Artificial Sequence
  Description of Artificial Sequence: Synthetic oligonucleotide
  Antisense strand to SEQ ID NO: 1505830
uuucagggaacccaagcug

SEQ ID NO: 1505832 - RNA, 19 nt, Artificial Sequence
  Description of Artificial Sequence: Synthetic oligonucleotide
  Sense strand starting at position 3621 of SEQ ID NO: 1244664
gagagaaaccaauggcagu

SEQ ID NO: 1505833 - RNA, 19 nt, Artificial Sequence
  Description of Artificial Sequence: Synthetic oligonucleotide
  Antisense strand to SEQ ID NO: 1505832
acugccauugguuucucuc

SEQ ID NO: 1505834 - RNA, 19 nt, Artificial Sequence
  Description of Artificial Sequence: Synthetic oligonucleotide
  Sense strand starting at position 3682 of SEQ ID NO: 1244664
aaaugucaagcuuggacua

SEQ ID NO: 1505835 - RNA, 19 nt, Artificial Sequence
  Description of Artificial Sequence: Synthetic oligonucleotide
  Antisense strand to SEQ ID NO: 1505834
uaguccaagcuugacauuu

SEQ ID NO: 1505836 - RNA, 19 nt, Artificial Sequence
  Description of Artificial Sequence: Synthetic oligonucleotide
  Sense strand starting at position 3742 of SEQ ID NO: 1244664
auguaugcacucuaagaau

SEQ ID NO: 1505837 - RNA, 19 nt, Artificial Sequence
  Description of Artificial Sequence: Synthetic oligonucleotide
  Antisense strand to SEQ ID NO: 1505836
auucuuagagugcauacau

SEQ ID NO: 1505838 - RNA, 19 nt, Artificial Sequence
  Description of Artificial Sequence: Synthetic oligonucleotide
  Sense strand starting at position 164 of SEQ ID NO: 1244665
aagaguugguuccugcuca

SEQ ID NO: 1505839 - RNA, 19 nt, Artificial Sequence
  Description of Artificial Sequence: Synthetic oligonucleotide
  Antisense strand to SEQ ID NO: 1505838
ugagcaggaaccaacucuu

SEQ ID NO: 1505840 - RNA, 19 nt, Artificial Sequence
  Description of Artificial Sequence: Synthetic oligonucleotide
  Sense strand starting at position 710 of SEQ ID NO: 1244665
gcaacaaccgggugaaagu

SEQ ID NO: 1505841 - RNA, 19 nt, Artificial Sequence
  Description of Artificial Sequence: Synthetic oligonucleotide
  Antisense strand to SEQ ID NO: 1505840
acuuucacccgguuguugc

SEQ ID NO: 1505842 - RNA, 19 nt, Artificial Sequence
  Description of Artificial Sequence: Synthetic oligonucleotide
  Sense strand starting at position 717 of SEQ ID NO: 1244665
ccgggugaaaguugaaauu

SEQ ID NO: 1505843 - RNA, 19 nt, Artificial Sequence
  Description of Artificial Sequence: Synthetic oligonucleotide
  Antisense strand to SEQ ID NO: 1505842
aauuucaacuuucacccgg

SEQ ID NO: 1505844 - RNA, 19 nt, Artificial Sequence
  Description of Artificial Sequence: Synthetic oligonucleotide
  Sense strand starting at position 767 of SEQ ID NO: 1244665
ggaaguucugaguaauccu

SEQ ID NO: 1505845 - RNA, 19 nt, Artificial Sequence
  Description of Artificial Sequence: Synthetic oligonucleotide
  Antisense strand to SEQ ID NO: 1505844
aggauuacucagaacuucc

SEQ ID NO: 1505846 - RNA, 19 nt, Artificial Sequence
  Description of Artificial Sequence: Synthetic oligonucleotide
  Sense strand starting at position 770 of SEQ ID NO: 1244665
aguucugaguaauccucuu

SEQ ID NO: 1505847 - RNA, 19 nt, Artificial Sequence
  Description of Artificial Sequence: Synthetic oligonucleotide
  Antisense strand to SEQ ID NO: 1505846
aagaggauuacucagaacu

SEQ ID NO: 1505848 - RNA, 19 nt, Artificial Sequence
  Description of Artificial Sequence: Synthetic oligonucleotide
  Sense strand starting at position 776 of SEQ ID NO: 1244665
gaguaauccucuuugagac

SEQ ID NO: 1505849 - RNA, 19 nt, Artificial Sequence
  Description of Artificial Sequence: Synthetic oligonucleotide
  Antisense strand to SEQ ID NO: 1505848
gucucaaagaggauuacuc

SEQ ID NO: 1505850 - RNA, 19 nt, Artificial Sequence
  Description of Artificial Sequence: Synthetic oligonucleotide
  Sense strand starting at position 777 of SEQ ID NO: 1244665
aguaauccucuuugagaca

SEQ ID NO: 1505851 - RNA, 19 nt, Artificial Sequence
  Description of Artificial Sequence: Synthetic oligonucleotide
  Antisense strand to SEQ ID NO: 1505850
ugucucaaagaggauuacu

SEQ ID NO: 1505852 - RNA, 19 nt, Artificial Sequence
  Description of Artificial Sequence: Synthetic oligonucleotide
  Sense strand starting at position 790 of SEQ ID NO: 1244665
gagacaagguacuuuauca

SEQ ID NO: 1505853 - RNA, 19 nt, Artificial Sequence
  Description of Artificial Sequence: Synthetic oligonucleotide
  Antisense strand to SEQ ID NO: 1505852
ugauaaaguaccuugucuc

SEQ ID NO: 1505854 - RNA, 19 nt, Artificial Sequence
  Description of Artificial Sequence: Synthetic oligonucleotide
  Sense strand starting at position 895 of SEQ ID NO: 1244665
ccaacuaaggcccaugauu

SEQ ID NO: 1505855 - RNA, 19 nt, Artificial Sequence
  Description of Artificial Sequence: Synthetic oligonucleotide
  Antisense strand to SEQ ID NO: 1505854
aaucaugggccuuaguugg

SEQ ID NO: 1505856 - RNA, 19 nt, Artificial Sequence
  Description of Artificial Sequence: Synthetic oligonucleotide
  Sense strand starting at position 906 of SEQ ID NO: 1244665
ccaugauucuguucuccua

SEQ ID NO: 1505857 - RNA, 19 nt, Artificial Sequence
  Description of Artificial Sequence: Synthetic oligonucleotide
  Antisense strand to SEQ ID NO: 1505856
uaggagaacagaaucaugg

SEQ ID NO: 1505858 - RNA, 19 nt, Artificial Sequence
  Description of Artificial Sequence: Synthetic oligonucleotide
  Sense strand starting at position 909 of SEQ ID NO: 1244665
ugauucuguucuccuauca

SEQ ID NO: 1505859 - RNA, 19 nt, Artificial Sequence
  Description of Artificial Sequence: Synthetic oligonucleotide
  Antisense strand to SEQ ID NO: 1505858
ugauaggagaacagaauca

SEQ ID NO: 1505860 - RNA, 19 nt, Artificial Sequence
  Description of Artificial Sequence: Synthetic oligonucleotide
  Sense strand starting at position 941 of SEQ ID NO: 1244665
cauggauccuuggcaggua

SEQ ID NO: 1505861 - RNA, 19 nt, Artificial Sequence
  Description of Artificial Sequence: Synthetic oligonucleotide
  Antisense strand to SEQ ID NO: 1505860
uaccugccaaggauccaug

SEQ ID NO: 1505862 - RNA, 19 nt, Artificial Sequence
  Description of Artificial Sequence: Synthetic oligonucleotide
  Sense strand starting at position 957 of SEQ ID NO: 1244665
guaccuuucuaucugaaug

SEQ ID NO: 1505863 - RNA, 19 nt, Artificial Sequence
  Description of Artificial Sequence: Synthetic oligonucleotide
  Antisense strand to SEQ ID NO: 1505862
cauucagauagaaagguac

SEQ ID NO: 1505864 - RNA, 19 nt, Artificial Sequence
  Description of Artificial Sequence: Synthetic oligonucleotide
  Sense strand starting at position 995 of SEQ ID NO: 1244665
aacaaacgguuucuagauu

SEQ ID NO: 1505865 - RNA, 19 nt, Artificial Sequence
  Description of Artificial Sequence: Synthetic oligonucleotide
  Antisense strand to SEQ ID NO: 1505864
aaucuagaaaccguuuguu

SEQ ID NO: 1505866 - RNA, 19 nt, Artificial Sequence
  Description of Artificial Sequence: Synthetic oligonucleotide
  Sense strand starting at position 996 of SEQ ID NO: 1244665
acaaacgguuucuagauuu

SEQ ID NO: 1505867 - RNA, 19 nt, Artificial Sequence
  Description of Artificial Sequence: Synthetic oligonucleotide
  Antisense strand to SEQ ID NO: 1505866
aaaucuagaaaccguuugu

SEQ ID NO: 1505868 - RNA, 19 nt, Artificial Sequence
  Description of Artificial Sequence: Synthetic oligonucleotide
  Sense strand starting at position 1031 of SEQ ID NO: 1244665
uuuauaauuugaggacuga

SEQ ID NO: 1505869 - RNA, 19 nt, Artificial Sequence
  Description of Artificial Sequence: Synthetic oligonucleotide
  Antisense strand to SEQ ID NO: 1505868
ucaguccucaaauuauaaa

SEQ ID NO: 1505870 - RNA, 19 nt, Artificial Sequence
  Description of Artificial Sequence: Synthetic oligonucleotide
  Sense strand starting at position 1137 of SEQ ID NO: 1244665
cuggauuucucuuaaccug

SEQ ID NO: 1505871 - RNA, 19 nt, Artificial Sequence
  Description of Artificial Sequence: Synthetic oligonucleotide
  Antisense strand to SEQ ID NO: 1505870
cagguuaagagaaauccag

SEQ ID NO: 1505872 - RNA, 19 nt, Artificial Sequence
  Description of Artificial Sequence: Synthetic oligonucleotide
  Sense strand starting at position 1189 of SEQ ID NO: 1244665
ggaacuucagagugccaga

SEQ ID NO: 1505873 - RNA, 19 nt, Artificial Sequence
  Description of Artificial Sequence: Synthetic oligonucleotide
  Antisense strand to SEQ ID NO: 1505872
ucuggcacucugaaguucc

SEQ ID NO: 1505874 - RNA, 19 nt, Artificial Sequence
  Description of Artificial Sequence: Synthetic oligonucleotide
  Sense strand starting at position 1430 of SEQ ID NO: 1244665
cgaagagaauccgaagaaa

SEQ ID NO: 1505875 - RNA, 19 nt, Artificial Sequence
  Description of Artificial Sequence: Synthetic oligonucleotide
  Antisense strand to SEQ ID NO: 1505874
uuucuucggauucucuucg

SEQ ID NO: 1505876 - RNA, 19 nt, Artificial Sequence
  Description of Artificial Sequence: Synthetic oligonucleotide
  Sense strand starting at position 1703 of SEQ ID NO: 1244665
ggcccuguccugggaggaa

SEQ ID NO: 1505877 - RNA, 19 nt, Artificial Sequence
  Description of Artificial Sequence: Synthetic oligonucleotide
  Antisense strand to SEQ ID NO: 1505876
uuccucccaggacagggcc

SEQ ID NO: 1505878 - RNA, 19 nt, Artificial Sequence
  Description of Artificial Sequence: Synthetic oligonucleotide
  Sense strand starting at position 2566 of SEQ ID NO: 1244665
cagagugcgucgauugagu

SEQ ID NO: 1505879 - RNA, 19 nt, Artificial Sequence
  Description of Artificial Sequence: Synthetic oligonucleotide
  Antisense strand to SEQ ID NO: 1505878
acucaaucgacgcacucug

SEQ ID NO: 1505880 - RNA, 19 nt, Artificial Sequence
  Description of Artificial Sequence: Synthetic oligonucleotide
  Sense strand starting at position 2567 of SEQ ID NO: 1244665
agagugcgucgauugaguu

SEQ ID NO: 1505881 - RNA, 19 nt, Artificial Sequence
  Description of Artificial Sequence: Synthetic oligonucleotide
  Antisense strand to SEQ ID NO: 1505880
aacucaaucgacgcacucu

SEQ ID NO: 1505882 - RNA, 19 nt, Artificial Sequence
  Description of Artificial Sequence: Synthetic oligonucleotide
  Sense strand starting at position 2615 of SEQ ID NO: 1244665
gcgcguuggacagaugauc

SEQ ID NO: 1505883 - RNA, 19 nt, Artificial Sequence
  Description of Artificial Sequence: Synthetic oligonucleotide
  Antisense strand to SEQ ID NO: 1505882
gaucaucuguccaacgcgc

SEQ ID NO: 1505884 - RNA, 19 nt, Artificial Sequence
  Description of Artificial Sequence: Synthetic oligonucleotide
  Sense strand starting at position 2757 of SEQ ID NO: 1244665
acggaagaauucucucuac

SEQ ID NO: 1505885 - RNA, 19 nt, Artificial Sequence
  Description of Artificial Sequence: Synthetic oligonucleotide
  Antisense strand to SEQ ID NO: 1505884
guagagagaauucuuccgu

SEQ ID NO: 1505886 - RNA, 19 nt, Artificial Sequence
  Description of Artificial Sequence: Synthetic oligonucleotide
  Sense strand starting at position 2775 of SEQ ID NO: 1244665
cuuggauauccuuaaaguc

SEQ ID NO: 1505887 - RNA, 19 nt, Artificial Sequence
  Description of Artificial Sequence: Synthetic oligonucleotide
  Antisense strand to SEQ ID NO: 1505886
gacuuuaaggauauccaag

SEQ ID NO: 1505888 - RNA, 19 nt, Artificial Sequence
  Description of Artificial Sequence: Synthetic oligonucleotide
  Sense strand starting at position 2783 of SEQ ID NO: 1244665
uccuuaaagucuccacgau

SEQ ID NO: 1505889 - RNA, 19 nt, Artificial Sequence
  Description of Artificial Sequence: Synthetic oligonucleotide
  Antisense strand to SEQ ID NO: 1505888
aucguggagacuuuaagga

SEQ ID NO: 1505890 - RNA, 19 nt, Artificial Sequence
  Description of Artificial Sequence: Synthetic oligonucleotide
  Sense strand starting at position 2784 of SEQ ID NO: 1244665
ccuuaaagucuccacgaua

SEQ ID NO: 1505891 - RNA, 19 nt, Artificial Sequence
  Description of Artificial Sequence: Synthetic oligonucleotide
  Antisense strand to SEQ ID NO: 1505890
uaucguggagacuuuaagg

SEQ ID NO: 1505892 - RNA, 19 nt, Artificial Sequence
  Description of Artificial Sequence: Synthetic oligonucleotide
  Sense strand starting at position 2837 of SEQ ID NO: 1244665
cuaauuaugacuggagggu

SEQ ID NO: 1505893 - RNA, 19 nt, Artificial Sequence
  Description of Artificial Sequence: Synthetic oligonucleotide
  Antisense strand to SEQ ID NO: 1505892
acccuccagucauaauuag

SEQ ID NO: 1505894 - RNA, 19 nt, Artificial Sequence
  Description of Artificial Sequence: Synthetic oligonucleotide
  Sense strand starting at position 2940 of SEQ ID NO: 1244665
gcagcuguucccgaaagag

SEQ ID NO: 1505895 - RNA, 19 nt, Artificial Sequence
  Description of Artificial Sequence: Synthetic oligonucleotide
  Antisense strand to SEQ ID NO: 1505894
cucuuucgggaacagcugc

SEQ ID NO: 1505896 - RNA, 19 nt, Artificial Sequence
  Description of Artificial Sequence: Synthetic oligonucleotide
  Sense strand starting at position 3163 of SEQ ID NO: 1244665
cugaaagugucacuaacag

SEQ ID NO: 1505897 - RNA, 19 nt, Artificial Sequence
  Description of Artificial Sequence: Synthetic oligonucleotide
  Antisense strand to SEQ ID NO: 1505896
cuguuagugacacuuucag

SEQ ID NO: 1505898 - RNA, 19 nt, Artificial Sequence
  Description of Artificial Sequence: Synthetic oligonucleotide
  Sense strand starting at position 3264 of SEQ ID NO: 1244665
gggaaacuuauaugcauga

SEQ ID NO: 1505899 - RNA, 19 nt, Artificial Sequence
  Description of Artificial Sequence: Synthetic oligonucleotide
  Antisense strand to SEQ ID NO: 1505898
ucaugcauauaaguuuccc

SEQ ID NO: 1505900 - RNA, 19 nt, Artificial Sequence
  Description of Artificial Sequence: Synthetic oligonucleotide
  Sense strand starting at position 3327 of SEQ ID NO: 1244665
gcuuccuuucuugaguaau

SEQ ID NO: 1505901 - RNA, 19 nt, Artificial Sequence
  Description of Artificial Sequence: Synthetic oligonucleotide
  Antisense strand to SEQ ID NO: 1505900
auuacucaagaaaggaagc

SEQ ID NO: 1505902 - RNA, 19 nt, Artificial Sequence
  Description of Artificial Sequence: Synthetic oligonucleotide
  Sense strand starting at position 3330 of SEQ ID NO: 1244665
uccuuucuugaguaaucug

SEQ ID NO: 1505903 - RNA, 19 nt, Artificial Sequence
  Description of Artificial Sequence: Synthetic oligonucleotide
  Antisense strand to SEQ ID NO: 1505902
cagauuacucaagaaagga

SEQ ID NO: 1505904 - RNA, 19 nt, Artificial Sequence
  Description of Artificial Sequence: Synthetic oligonucleotide
  Sense strand starting at position 3338 of SEQ ID NO: 1244665
ugaguaaucuguccagcca

SEQ ID NO: 1505905 - RNA, 19 nt, Artificial Sequence
  Description of Artificial Sequence: Synthetic oligonucleotide
  Antisense strand to SEQ ID NO: 1505904
uggcuggacagauuacuca

SEQ ID NO: 1505906 - RNA, 19 nt, Artificial Sequence
  Description of Artificial Sequence: Synthetic oligonucleotide
  Sense strand starting at position 3339 of SEQ ID NO: 1244665
gaguaaucuguccagccac

SEQ ID NO: 1505907 - RNA, 19 nt, Artificial Sequence
  Description of Artificial Sequence: Synthetic oligonucleotide
  Antisense strand to SEQ ID NO: 1505906
guggcuggacagauuacuc

SEQ ID NO: 1505908 - RNA, 19 nt, Artificial Sequence
  Description of Artificial Sequence: Synthetic oligonucleotide
  Sense strand starting at position 3524 of SEQ ID NO: 1244665
gggaguauggacgaauugu

SEQ ID NO: 1505909 - RNA, 19 nt, Artificial Sequence
  Description of Artificial Sequence: Synthetic oligonucleotide
  Antisense strand to SEQ ID NO: 1505908
acaauucguccauacuccc

SEQ ID NO: 1505910 - RNA, 19 nt, Artificial Sequence
  Description of Artificial Sequence: Synthetic oligonucleotide
  Sense strand starting at position 3560 of SEQ ID NO: 1244665
cugggauguccacacccua

SEQ ID NO: 1505911 - RNA, 19 nt, Artificial Sequence
  Description of Artificial Sequence: Synthetic oligonucleotide
  Antisense strand to SEQ ID NO: 1505910
uaggguguggacaucccag

SEQ ID NO: 1505912 - RNA, 19 nt, Artificial Sequence
  Description of Artificial Sequence: Synthetic oligonucleotide
  Sense strand starting at position 3713 of SEQ ID NO: 1244665
gagccuaaugccugggauu

SEQ ID NO: 1505913 - RNA, 19 nt, Artificial Sequence
  Description of Artificial Sequence: Synthetic oligonucleotide
  Antisense strand to SEQ ID NO: 1505912
aaucccaggcauuaggcuc

SEQ ID NO: 1505914 - RNA, 19 nt, Artificial Sequence
  Description of Artificial Sequence: Synthetic oligonucleotide
  Sense strand starting at position 3748 of SEQ ID NO: 1244665
gucucaagaaucuggguua

SEQ ID NO: 1505915 - RNA, 19 nt, Artificial Sequence
  Description of Artificial Sequence: Synthetic oligonucleotide
  Antisense strand to SEQ ID NO: 1505914
uaacccagauucuugagac

SEQ ID NO: 1505916 - RNA, 19 nt, Artificial Sequence
  Description of Artificial Sequence: Synthetic oligonucleotide
  Sense strand starting at position 3959 of SEQ ID NO: 1244665
uggagugauguuggacaca

SEQ ID NO: 1505917 - RNA, 19 nt, Artificial Sequence
  Description of Artificial Sequence: Synthetic oligonucleotide
  Antisense strand to SEQ ID NO: 1505916
uguguccaacaucacucca

SEQ ID NO: 1505918 - RNA, 19 nt, Artificial Sequence
  Description of Artificial Sequence: Synthetic oligonucleotide
  Sense strand starting at position 21 of SEQ ID NO: 1244666
acagccaaugauuguugaa

SEQ ID NO: 1505919 - RNA, 19 nt, Artificial Sequence
  Description of Artificial Sequence: Synthetic oligonucleotide
  Antisense strand to SEQ ID NO: 1505918
uucaacaaucauuggcugu

SEQ ID NO: 1505920 - RNA, 19 nt, Artificial Sequence
  Description of Artificial Sequence: Synthetic oligonucleotide
  Sense strand starting at position 61 of SEQ ID NO: 1244666
ucauguuguuuggcaauaa

SEQ ID NO: 1505921 - RNA, 19 nt, Artificial Sequence
  Description of Artificial Sequence: Synthetic oligonucleotide
  Antisense strand to SEQ ID NO: 1505920
uuauugccaaacaacauga

SEQ ID NO: 1505922 - RNA, 19 nt, Artificial Sequence
  Description of Artificial Sequence: Synthetic oligonucleotide
  Sense strand starting at position 65 of SEQ ID NO: 1244666
guuguuuggcaauaaguaa

SEQ ID NO: 1505923 - RNA, 19 nt, Artificial Sequence
  Description of Artificial Sequence: Synthetic oligonucleotide
  Antisense strand to SEQ ID NO: 1505922
uuacuuauugccaaacaac

SEQ ID NO: 1505924 - RNA, 19 nt, Artificial Sequence
  Description of Artificial Sequence: Synthetic oligonucleotide
  Sense strand starting at position 72 of SEQ ID NO: 1244666
ggcaauaaguaauacagaa

SEQ ID NO: 1505925 - RNA, 19 nt, Artificial Sequence
  Description of Artificial Sequence: Synthetic oligonucleotide
  Antisense strand to SEQ ID NO: 1505924
uucuguauuacuuauugcc

SEQ ID NO: 1505926 - RNA, 19 nt, Artificial Sequence
  Description of Artificial Sequence: Synthetic oligonucleotide
  Sense strand starting at position 135 of SEQ ID NO: 1244666
aguuuagauugcuuuccuu

SEQ ID NO: 1505927 - RNA, 19 nt, Artificial Sequence
  Description of Artificial Sequence: Synthetic oligonucleotide
  Antisense strand to SEQ ID NO: 1505926
aaggaaagcaaucuaaacu

SEQ ID NO: 1505928 - RNA, 19 nt, Artificial Sequence
  Description of Artificial Sequence: Synthetic oligonucleotide
  Sense strand starting at position 952 of SEQ ID NO: 1244666
gccaacacuggcgagaaau

SEQ ID NO: 1505929 - RNA, 19 nt, Artificial Sequence
  Description of Artificial Sequence: Synthetic oligonucleotide
  Antisense strand to SEQ ID NO: 1505928
auuucucgccaguguuggc

SEQ ID NO: 1505930 - RNA, 19 nt, Artificial Sequence
  Description of Artificial Sequence: Synthetic oligonucleotide
  Sense strand starting at position 1113 of SEQ ID NO: 1244666
uggcuacagagcuaaaguu

SEQ ID NO: 1505931 - RNA, 19 nt, Artificial Sequence
  Description of Artificial Sequence: Synthetic oligonucleotide
  Antisense strand to SEQ ID NO: 1505930
aacuuuagcucuguagcca

SEQ ID NO: 1505932 - RNA, 19 nt, Artificial Sequence
  Description of Artificial Sequence: Synthetic oligonucleotide
  Sense strand starting at position 1121 of SEQ ID NO: 1244666
gagcuaaaguucccuguua

SEQ ID NO: 1505933 - RNA, 19 nt, Artificial Sequence
  Description of Artificial Sequence: Synthetic oligonucleotide
  Antisense strand to SEQ ID NO: 1505932
uaacagggaacuuuagcuc

SEQ ID NO: 1505934 - RNA, 19 nt, Artificial Sequence
  Description of Artificial Sequence: Synthetic oligonucleotide
  Sense strand starting at position 1122 of SEQ ID NO: 1244666
agcuaaaguucccuguuau

SEQ ID NO: 1505935 - RNA, 19 nt, Artificial Sequence
  Description of Artificial Sequence: Synthetic oligonucleotide
  Antisense strand to SEQ ID NO: 1505934
auaacagggaacuuuagcu

SEQ ID NO: 1505936 - RNA, 19 nt, Artificial Sequence
  Description of Artificial Sequence: Synthetic oligonucleotide
  Sense strand starting at position 1123 of SEQ ID NO: 1244666
gcuaaaguucccuguuauu

SEQ ID NO: 1505937 - RNA, 19 nt, Artificial Sequence
  Description of Artificial Sequence: Synthetic oligonucleotide
  Antisense strand to SEQ ID NO: 1505936
aauaacagggaacuuuagc

SEQ ID NO: 1505938 - RNA, 19 nt, Artificial Sequence
  Description of Artificial Sequence: Synthetic oligonucleotide
  Sense strand starting at position 1168 of SEQ ID NO: 1244666
aucccucuggguugaguua

SEQ ID NO: 1505939 - RNA, 19 nt, Artificial Sequence
  Description of Artificial Sequence: Synthetic oligonucleotide
  Antisense strand to SEQ ID NO: 1505938
uaacucaacccagagggau

SEQ ID NO: 1505940 - RNA, 19 nt, Artificial Sequence
  Description of Artificial Sequence: Synthetic oligonucleotide
  Sense strand starting at position 1175 of SEQ ID NO: 1244666
uggguugaguuagucaagu

SEQ ID NO: 1505941 - RNA, 19 nt, Artificial Sequence
  Description of Artificial Sequence: Synthetic oligonucleotide
  Antisense strand to SEQ ID NO: 1505940
acuugacuaacucaaccca

SEQ ID NO: 1505942 - RNA, 19 nt, Artificial Sequence
  Description of Artificial Sequence: Synthetic oligonucleotide
  Sense strand starting at position 1266 of SEQ ID NO: 1244666
uuccucuucugggaucuga

SEQ ID NO: 1505943 - RNA, 19 nt, Artificial Sequence
  Description of Artificial Sequence: Synthetic oligonucleotide
  Antisense strand to SEQ ID NO: 1505942
ucagaucccagaagaggaa

SEQ ID NO: 1505944 - RNA, 19 nt, Artificial Sequence
  Description of Artificial Sequence: Synthetic oligonucleotide
  Sense strand starting at position 1277 of SEQ ID NO: 1244666
ggaucugauuugggaugga

SEQ ID NO: 1505945 - RNA, 19 nt, Artificial Sequence
  Description of Artificial Sequence: Synthetic oligonucleotide
  Antisense strand to SEQ ID NO: 1505944
uccaucccaaaucagaucc

SEQ ID NO: 1505946 - RNA, 19 nt, Artificial Sequence
  Description of Artificial Sequence: Synthetic oligonucleotide
  Sense strand starting at position 1302 of SEQ ID NO: 1244666
agccauaguucaugggaag

SEQ ID NO: 1505947 - RNA, 19 nt, Artificial Sequence
  Description of Artificial Sequence: Synthetic oligonucleotide
  Antisense strand to SEQ ID NO: 1505946
cuucccaugaacuauggcu

SEQ ID NO: 1505948 - RNA, 19 nt, Artificial Sequence
  Description of Artificial Sequence: Synthetic oligonucleotide
  Sense strand starting at position 1356 of SEQ ID NO: 1244666
cagguugaucugcggaaca

SEQ ID NO: 1505949 - RNA, 19 nt, Artificial Sequence
  Description of Artificial Sequence: Synthetic oligonucleotide
  Antisense strand to SEQ ID NO: 1505948
uguuccgcagaucaaccug

SEQ ID NO: 1505950 - RNA, 19 nt, Artificial Sequence
  Description of Artificial Sequence: Synthetic oligonucleotide
  Sense strand starting at position 1358 of SEQ ID NO: 1244666
gguugaucugcggaacaag

SEQ ID NO: 1505951 - RNA, 19 nt, Artificial Sequence
  Description of Artificial Sequence: Synthetic oligonucleotide
  Antisense strand to SEQ ID NO: 1505950
cuuguuccgcagaucaacc

SEQ ID NO: 1505952 - RNA, 19 nt, Artificial Sequence
  Description of Artificial Sequence: Synthetic oligonucleotide
  Sense strand starting at position 2011 of SEQ ID NO: 1244666
cugggaucaucuuacauuc

SEQ ID NO: 1505953 - RNA, 19 nt, Artificial Sequence
  Description of Artificial Sequence: Synthetic oligonucleotide
  Antisense strand to SEQ ID NO: 1505952
gaauguaagaugaucccag

SEQ ID NO: 1505954 - RNA, 19 nt, Artificial Sequence
  Description of Artificial Sequence: Synthetic oligonucleotide
  Sense strand starting at position 2044 of SEQ ID NO: 1244666
guuuccuguccuggagguu

SEQ ID NO: 1505955 - RNA, 19 nt, Artificial Sequence
  Description of Artificial Sequence: Synthetic oligonucleotide
  Antisense strand to SEQ ID NO: 1505954
aaccuccaggacaggaaac

SEQ ID NO: 1505956 - RNA, 19 nt, Artificial Sequence
  Description of Artificial Sequence: Synthetic oligonucleotide
  Sense strand starting at position 2075 of SEQ ID NO: 1244666
acagucaugcuuuggagaa

SEQ ID NO: 1505957 - RNA, 19 nt, Artificial Sequence
  Description of Artificial Sequence: Synthetic oligonucleotide
  Antisense strand to SEQ ID NO: 1505956
uucuccaaagcaugacugu

SEQ ID NO: 1505958 - RNA, 19 nt, Artificial Sequence
  Description of Artificial Sequence: Synthetic oligonucleotide
  Sense strand starting at position 2098 of SEQ ID NO: 1244666
gucagauuaggcugggaac

SEQ ID NO: 1505959 - RNA, 19 nt, Artificial Sequence
  Description of Artificial Sequence: Synthetic oligonucleotide
  Antisense strand to SEQ ID NO: 1505958
guucccagccuaaucugac

SEQ ID NO: 1505960 - RNA, 19 nt, Artificial Sequence
  Description of Artificial Sequence: Synthetic oligonucleotide
  Sense strand starting at position 2099 of SEQ ID NO: 1244666
ucagauuaggcugggaaca

SEQ ID NO: 1505961 - RNA, 19 nt, Artificial Sequence
  Description of Artificial Sequence: Synthetic oligonucleotide
  Antisense strand to SEQ ID NO: 1505960
uguucccagccuaaucuga

SEQ ID NO: 1505962 - RNA, 19 nt, Artificial Sequence
  Description of Artificial Sequence: Synthetic oligonucleotide
  Sense strand starting at position 2101 of SEQ ID NO: 1244666
agauuaggcugggaacaaa

SEQ ID NO: 1505963 - RNA, 19 nt, Artificial Sequence
  Description of Artificial Sequence: Synthetic oligonucleotide
  Antisense strand to SEQ ID NO: 1505962
uuuguucccagccuaaucu

SEQ ID NO: 1505964 - RNA, 19 nt, Artificial Sequence
  Description of Artificial Sequence: Synthetic oligonucleotide
  Sense strand starting at position 2284 of SEQ ID NO: 1244666
cagagagugccaugcucua

SEQ ID NO: 1505965 - RNA, 19 nt, Artificial Sequence
  Description of Artificial Sequence: Synthetic oligonucleotide
  Antisense strand to SEQ ID NO: 1505964
uagagcauggcacucucug

SEQ ID NO: 1505966 - RNA, 19 nt, Artificial Sequence
  Description of Artificial Sequence: Synthetic oligonucleotide
  Sense strand starting at position 2407 of SEQ ID NO: 1244666
acgcuucuggaaugaauga

SEQ ID NO: 1505967 - RNA, 19 nt, Artificial Sequence
  Description of Artificial Sequence: Synthetic oligonucleotide
  Antisense strand to SEQ ID NO: 1505966
ucauucauuccagaagcgu

SEQ ID NO: 1505968 - RNA, 19 nt, Artificial Sequence
  Description of Artificial Sequence: Synthetic oligonucleotide
  Sense strand starting at position 2878 of SEQ ID NO: 1244666
gggauuggcacccacugau

SEQ ID NO: 1505969 - RNA, 19 nt, Artificial Sequence
  Description of Artificial Sequence: Synthetic oligonucleotide
  Antisense strand to SEQ ID NO: 1505968
aucagugggugccaauccc

SEQ ID NO: 1505970 - RNA, 19 nt, Artificial Sequence
  Description of Artificial Sequence: Synthetic oligonucleotide
  Sense strand starting at position 2926 of SEQ ID NO: 1244666
cugggauguuuccaaggua

SEQ ID NO: 1505971 - RNA, 19 nt, Artificial Sequence
  Description of Artificial Sequence: Synthetic oligonucleotide
  Antisense strand to SEQ ID NO: 1505970
uaccuuggaaacaucccag

SEQ ID NO: 1505972 - RNA, 19 nt, Artificial Sequence
  Description of Artificial Sequence: Synthetic oligonucleotide
  Sense strand starting at position 2929 of SEQ ID NO: 1244666
ggauguuuccaagguaaua

SEQ ID NO: 1505973 - RNA, 19 nt, Artificial Sequence
  Description of Artificial Sequence: Synthetic oligonucleotide
  Antisense strand to SEQ ID NO: 1505972
uauuaccuuggaaacaucc

SEQ ID NO: 1505974 - RNA, 19 nt, Artificial Sequence
  Description of Artificial Sequence: Synthetic oligonucleotide
  Sense strand starting at position 3130 of SEQ ID NO: 1244666
ccuuaucagguccaucuua

SEQ ID NO: 1505975 - RNA, 19 nt, Artificial Sequence
  Description of Artificial Sequence: Synthetic oligonucleotide
  Antisense strand to SEQ ID NO: 1505974
uaagauggaccugauaagg

SEQ ID NO: 1505976 - RNA, 19 nt, Artificial Sequence
  Description of Artificial Sequence: Synthetic oligonucleotide
  Sense strand starting at position 3138 of SEQ ID NO: 1244666
gguccaucuuaggcaaacu

SEQ ID NO: 1505977 - RNA, 19 nt, Artificial Sequence
  Description of Artificial Sequence: Synthetic oligonucleotide
  Antisense strand to SEQ ID NO: 1505976
aguuugccuaagauggacc

SEQ ID NO: 1505978 - RNA, 19 nt, Artificial Sequence
  Description of Artificial Sequence: Synthetic oligonucleotide
  Sense strand starting at position 3333 of SEQ ID NO: 1244666
ugagauguccucugcaaac

SEQ ID NO: 1505979 - RNA, 19 nt, Artificial Sequence
  Description of Artificial Sequence: Synthetic oligonucleotide
  Antisense strand to SEQ ID NO: 1505978
guuugcagaggacaucuca

SEQ ID NO: 1505980 - RNA, 19 nt, Artificial Sequence
  Description of Artificial Sequence: Synthetic oligonucleotide
  Sense strand starting at position 3459 of SEQ ID NO: 1244666
gcuugagcuggucacacuu

SEQ ID NO: 1505981 - RNA, 19 nt, Artificial Sequence
  Description of Artificial Sequence: Synthetic oligonucleotide
  Antisense strand to SEQ ID NO: 1505980
aagugugaccagcucaagc

SEQ ID NO: 1505982 - RNA, 19 nt, Artificial Sequence
  Description of Artificial Sequence: Synthetic oligonucleotide
  Sense strand starting at position 3535 of SEQ ID NO: 1244666
ggugcauugcccucggcua

SEQ ID NO: 1505983 - RNA, 19 nt, Artificial Sequence
  Description of Artificial Sequence: Synthetic oligonucleotide
  Antisense strand to SEQ ID NO: 1505982
uagccgagggcaaugcacc

SEQ ID NO: 1505984 - RNA, 19 nt, Artificial Sequence
  Description of Artificial Sequence: Synthetic oligonucleotide
  Sense strand starting at position 3578 of SEQ ID NO: 1244666
ggagaucugacgggcaagu

SEQ ID NO: 1505985 - RNA, 19 nt, Artificial Sequence
  Description of Artificial Sequence: Synthetic oligonucleotide
  Antisense strand to SEQ ID NO: 1505984
acuugcccgucagaucucc

SEQ ID NO: 1505986 - RNA, 19 nt, Artificial Sequence
  Description of Artificial Sequence: Synthetic oligonucleotide
  Sense strand starting at position 3704 of SEQ ID NO: 1244666
ccagcugucucacaacuga

SEQ ID NO: 1505987 - RNA, 19 nt, Artificial Sequence
  Description of Artificial Sequence: Synthetic oligonucleotide
  Antisense strand to SEQ ID NO: 1505986
ucaguugugagacagcugg

SEQ ID NO: 1505988 - RNA, 19 nt, Artificial Sequence
  Description of Artificial Sequence: Synthetic oligonucleotide
  Sense strand starting at position 3890 of SEQ ID NO: 1244666
gaagaaacccugugcuugu

SEQ ID NO: 1505989 - RNA, 19 nt, Artificial Sequence
  Description of Artificial Sequence: Synthetic oligonucleotide
  Antisense strand to SEQ ID NO: 1505988
acaagcacaggguuucuuc

SEQ ID NO: 1505990 - RNA, 19 nt, Artificial Sequence
  Description of Artificial Sequence: Synthetic oligonucleotide
  Sense strand starting at position 3949 of SEQ ID NO: 1244666
ggaaguguucucugagggu

SEQ ID NO: 1505991 - RNA, 19 nt, Artificial Sequence
  Description of Artificial Sequence: Synthetic oligonucleotide
  Antisense strand to SEQ ID NO: 1505990
acccucagagaacacuucc

SEQ ID NO: 1505992 - RNA, 19 nt, Artificial Sequence
  Description of Artificial Sequence: Synthetic oligonucleotide
  Sense strand starting at position 3953 of SEQ ID NO: 1244666
guguucucugagggugcaa

SEQ ID NO: 1505993 - RNA, 19 nt, Artificial Sequence
  Description of Artificial Sequence: Synthetic oligonucleotide
  Antisense strand to SEQ ID NO: 1505992
uugcacccucagagaacac

SEQ ID NO: 1505994 - RNA, 19 nt, Artificial Sequence
  Description of Artificial Sequence: Synthetic oligonucleotide
  Sense strand starting at position 3955 of SEQ ID NO: 1244666
guucucugagggugcaauu

SEQ ID NO: 1505995 - RNA, 19 nt, Artificial Sequence
  Description of Artificial Sequence: Synthetic oligonucleotide
  Antisense strand to SEQ ID NO: 1505994
aauugcacccucagagaac

SEQ ID NO: 1505996 - RNA, 19 nt, Artificial Sequence
  Description of Artificial Sequence: Synthetic oligonucleotide
  Sense strand starting at position 3965 of SEQ ID NO: 1244666
ggugcaauuccuugcccuu

SEQ ID NO: 1505997 - RNA, 19 nt, Artificial Sequence
  Description of Artificial Sequence: Synthetic oligonucleotide
  Antisense strand to SEQ ID NO: 1505996
aagggcaaggaauugcacc

SEQ ID NO: 1505998 - RNA, 19 nt, Artificial Sequence
  Description of Artificial Sequence: Synthetic oligonucleotide
  Sense strand starting at position 99 of SEQ ID NO: 1244667
ugagcaugugcccaaagau

SEQ ID NO: 1505999 - RNA, 19 nt, Artificial Sequence
  Description of Artificial Sequence: Synthetic oligonucleotide
  Antisense strand to SEQ ID NO: 1505998
aucuuugggcacaugcuca

SEQ ID NO: 1506000 - RNA, 19 nt, Artificial Sequence
  Description of Artificial Sequence: Synthetic oligonucleotide
  Sense strand starting at position 108 of SEQ ID NO: 1244667
gcccaaagauguccagaug

SEQ ID NO: 1506001 - RNA, 19 nt, Artificial Sequence
  Description of Artificial Sequence: Synthetic oligonucleotide
  Antisense strand to SEQ ID NO: 1506000
caucuggacaucuuugggc

SEQ ID NO: 1506002 - RNA, 19 nt, Artificial Sequence
  Description of Artificial Sequence: Synthetic oligonucleotide
  Sense strand starting at position 247 of SEQ ID NO: 1244667
ccacuaagcugacaaagua

SEQ ID NO: 1506003 - RNA, 19 nt, Artificial Sequence
  Description of Artificial Sequence: Synthetic oligonucleotide
  Antisense strand to SEQ ID NO: 1506002
uacuuugucagcuuagugg

SEQ ID NO: 1506004 - RNA, 19 nt, Artificial Sequence
  Description of Artificial Sequence: Synthetic oligonucleotide
  Sense strand starting at position 259 of SEQ ID NO: 1244667
caaaguaacuacgauguuu

SEQ ID NO: 1506005 - RNA, 19 nt, Artificial Sequence
  Description of Artificial Sequence: Synthetic oligonucleotide
  Antisense strand to SEQ ID NO: 1506004
aaacaucguaguuacuuug

SEQ ID NO: 1506006 - RNA, 19 nt, Artificial Sequence
  Description of Artificial Sequence: Synthetic oligonucleotide
  Sense strand starting at position 267 of SEQ ID NO: 1244667
cuacgauguuuccagcuca

SEQ ID NO: 1506007 - RNA, 19 nt, Artificial Sequence
  Description of Artificial Sequence: Synthetic oligonucleotide
  Antisense strand to SEQ ID NO: 1506006
ugagcuggaaacaucguag

SEQ ID NO: 1506008 - RNA, 19 nt, Artificial Sequence
  Description of Artificial Sequence: Synthetic oligonucleotide
  Sense strand starting at position 569 of SEQ ID NO: 1244667
ccuggacaguuugcucauu

SEQ ID NO: 1506009 - RNA, 19 nt, Artificial Sequence
  Description of Artificial Sequence: Synthetic oligonucleotide
  Antisense strand to SEQ ID NO: 1506008
aaugagcaaacuguccagg

SEQ ID NO: 1506010 - RNA, 19 nt, Artificial Sequence
  Description of Artificial Sequence: Synthetic oligonucleotide
  Sense strand starting at position 719 of SEQ ID NO: 1244667
gcuggagaccauuguguga

SEQ ID NO: 1506011 - RNA, 19 nt, Artificial Sequence
  Description of Artificial Sequence: Synthetic oligonucleotide
  Antisense strand to SEQ ID NO: 1506010
ucacacaauggucuccagc

SEQ ID NO: 1506012 - RNA, 19 nt, Artificial Sequence
  Description of Artificial Sequence: Synthetic oligonucleotide
  Sense strand starting at position 723 of SEQ ID NO: 1244667
gagaccauugugugagcuu

SEQ ID NO: 1506013 - RNA, 19 nt, Artificial Sequence
  Description of Artificial Sequence: Synthetic oligonucleotide
  Antisense strand to SEQ ID NO: 1506012
aagcucacacaauggucuc

SEQ ID NO: 1506014 - RNA, 19 nt, Artificial Sequence
  Description of Artificial Sequence: Synthetic oligonucleotide
  Sense strand starting at position 1277 of SEQ ID NO: 1244667
cugugcguccuggagaguu

SEQ ID NO: 1506015 - RNA, 19 nt, Artificial Sequence
  Description of Artificial Sequence: Synthetic oligonucleotide
  Antisense strand to SEQ ID NO: 1506014
aacucuccaggacgcacag

SEQ ID NO: 1506016 - RNA, 19 nt, Artificial Sequence
  Description of Artificial Sequence: Synthetic oligonucleotide
  Sense strand starting at position 1325 of SEQ ID NO: 1244667
gucgcugucgcuuggcaaa

SEQ ID NO: 1506017 - RNA, 19 nt, Artificial Sequence
  Description of Artificial Sequence: Synthetic oligonucleotide
  Antisense strand to SEQ ID NO: 1506016
uuugccaagcgacagcgac

SEQ ID NO: 1506018 - RNA, 19 nt, Artificial Sequence
  Description of Artificial Sequence: Synthetic oligonucleotide
  Sense strand starting at position 2242 of SEQ ID NO: 1244667
gcuguauuugggcagccaa

SEQ ID NO: 1506019 - RNA, 19 nt, Artificial Sequence
  Description of Artificial Sequence: Synthetic oligonucleotide
  Antisense strand to SEQ ID NO: 1506018
uuggcugcccaaauacagc

SEQ ID NO: 1506020 - RNA, 19 nt, Artificial Sequence
  Description of Artificial Sequence: Synthetic oligonucleotide
  Sense strand starting at position 2494 of SEQ ID NO: 1244667
cugggugagcccuggagaa

SEQ ID NO: 1506021 - RNA, 19 nt, Artificial Sequence
  Description of Artificial Sequence: Synthetic oligonucleotide
  Antisense strand to SEQ ID NO: 1506020
uucuccagggcucacccag

SEQ ID NO: 1506022 - RNA, 19 nt, Artificial Sequence
  Description of Artificial Sequence: Synthetic oligonucleotide
  Sense strand starting at position 2640 of SEQ ID NO: 1244667
agcagacguuuccgaagga

SEQ ID NO: 1506023 - RNA, 19 nt, Artificial Sequence
  Description of Artificial Sequence: Synthetic oligonucleotide
  Antisense strand to SEQ ID NO: 1506022
uccuucggaaacgucugcu

SEQ ID NO: 1506024 - RNA, 19 nt, Artificial Sequence
  Description of Artificial Sequence: Synthetic oligonucleotide
  Sense strand starting at position 2641 of SEQ ID NO: 1244667
gcagacguuuccgaaggaa

SEQ ID NO: 1506025 - RNA, 19 nt, Artificial Sequence
  Description of Artificial Sequence: Synthetic oligonucleotide
  Antisense strand to SEQ ID NO: 1506024
uuccuucggaaacgucugc

SEQ ID NO: 1506026 - RNA, 19 nt, Artificial Sequence
  Description of Artificial Sequence: Synthetic oligonucleotide
  Sense strand starting at position 2644 of SEQ ID NO: 1244667
gacguuuccgaaggaaggu

SEQ ID NO: 1506027 - RNA, 19 nt, Artificial Sequence
  Description of Artificial Sequence: Synthetic oligonucleotide
  Antisense strand to SEQ ID NO: 1506026
accuuccuucggaaacguc

SEQ ID NO: 1506028 - RNA, 19 nt, Artificial Sequence
  Description of Artificial Sequence: Synthetic oligonucleotide
  Sense strand starting at position 2767 of SEQ ID NO: 1244667
agcggucucuacccuuaaa

SEQ ID NO: 1506029 - RNA, 19 nt, Artificial Sequence
  Description of Artificial Sequence: Synthetic oligonucleotide
  Antisense strand to SEQ ID NO: 1506028
uuuaaggguagagaccgcu

SEQ ID NO: 1506030 - RNA, 19 nt, Artificial Sequence
  Description of Artificial Sequence: Synthetic oligonucleotide
  Sense strand starting at position 2869 of SEQ ID NO: 1244667
aggcucucauccucaagaa

SEQ ID NO: 1506031 - RNA, 19 nt, Artificial Sequence
  Description of Artificial Sequence: Synthetic oligonucleotide
  Antisense strand to SEQ ID NO: 1506030
uucuugaggaugagagccu

SEQ ID NO: 1506032 - RNA, 19 nt, Artificial Sequence
  Description of Artificial Sequence: Synthetic oligonucleotide
  Sense strand starting at position 2870 of SEQ ID NO: 1244667
ggcucucauccucaagaag

SEQ ID NO: 1506033 - RNA, 19 nt, Artificial Sequence
  Description of Artificial Sequence: Synthetic oligonucleotide
  Antisense strand to SEQ ID NO: 1506032
cuucuugaggaugagagcc

SEQ ID NO: 1506034 - RNA, 19 nt, Artificial Sequence
  Description of Artificial Sequence: Synthetic oligonucleotide
  Sense strand starting at position 2895 of SEQ ID NO: 1244667
ccaggucugucaccuacaa

SEQ ID NO: 1506035 - RNA, 19 nt, Artificial Sequence
  Description of Artificial Sequence: Synthetic oligonucleotide
  Antisense strand to SEQ ID NO: 1506034
uuguaggugacagaccugg

SEQ ID NO: 1506036 - RNA, 19 nt, Artificial Sequence
  Description of Artificial Sequence: Synthetic oligonucleotide
  Sense strand starting at position 2899 of SEQ ID NO: 1244667
gucugucaccuacaagaga

SEQ ID NO: 1506037 - RNA, 19 nt, Artificial Sequence
  Description of Artificial Sequence: Synthetic oligonucleotide
  Antisense strand to SEQ ID NO: 1506036
ucucuuguaggugacagac

SEQ ID NO: 1506038 - RNA, 19 nt, Artificial Sequence
  Description of Artificial Sequence: Synthetic oligonucleotide
  Sense strand starting at position 3342 of SEQ ID NO: 1244667
cccucaugcuuuggauauu

SEQ ID NO: 1506039 - RNA, 19 nt, Artificial Sequence
  Description of Artificial Sequence: Synthetic oligonucleotide
  Antisense strand to SEQ ID NO: 1506038
aauauccaaagcaugaggg

SEQ ID NO: 1506040 - RNA, 19 nt, Artificial Sequence
  Description of Artificial Sequence: Synthetic oligonucleotide
  Sense strand starting at position 3343 of SEQ ID NO: 1244667
ccucaugcuuuggauauuu

SEQ ID NO: 1506041 - RNA, 19 nt, Artificial Sequence
  Description of Artificial Sequence: Synthetic oligonucleotide
  Antisense strand to SEQ ID NO: 1506040
aaauauccaaagcaugagg

SEQ ID NO: 1506042 - RNA, 19 nt, Artificial Sequence
  Description of Artificial Sequence: Synthetic oligonucleotide
  Sense strand starting at position 3376 of SEQ ID NO: 1244667
ccaagugaguuuguggaca

SEQ ID NO: 1506043 - RNA, 19 nt, Artificial Sequence
  Description of Artificial Sequence: Synthetic oligonucleotide
  Antisense strand to SEQ ID NO: 1506042
uguccacaaacucacuugg

SEQ ID NO: 1506044 - RNA, 19 nt, Artificial Sequence
  Description of Artificial Sequence: Synthetic oligonucleotide
  Sense strand starting at position 3378 of SEQ ID NO: 1244667
aagugaguuuguggacaug

SEQ ID NO: 1506045 - RNA, 19 nt, Artificial Sequence
  Description of Artificial Sequence: Synthetic oligonucleotide
  Antisense strand to SEQ ID NO: 1506044
cauguccacaaacucacuu

SEQ ID NO: 1506046 - RNA, 19 nt, Artificial Sequence
  Description of Artificial Sequence: Synthetic oligonucleotide
  Sense strand starting at position 3471 of SEQ ID NO: 1244667
agccauugcugccauuaau

SEQ ID NO: 1506047 - RNA, 19 nt, Artificial Sequence
  Description of Artificial Sequence: Synthetic oligonucleotide
  Antisense strand to SEQ ID NO: 1506046
auuaauggcagcaauggcu

SEQ ID NO: 1506048 - RNA, 19 nt, Artificial Sequence
  Description of Artificial Sequence: Synthetic oligonucleotide
  Sense strand starting at position 3516 of SEQ ID NO: 1244667
caggguaugucuugucuga

SEQ ID NO: 1506049 - RNA, 19 nt, Artificial Sequence
  Description of Artificial Sequence: Synthetic oligonucleotide
  Antisense strand to SEQ ID NO: 1506048
ucagacaagacauacccug

SEQ ID NO: 1506050 - RNA, 19 nt, Artificial Sequence
  Description of Artificial Sequence: Synthetic oligonucleotide
  Sense strand starting at position 3518 of SEQ ID NO: 1244667
ggguaugucuugucugaac

SEQ ID NO: 1506051 - RNA, 19 nt, Artificial Sequence
  Description of Artificial Sequence: Synthetic oligonucleotide
  Antisense strand to SEQ ID NO: 1506050
guucagacaagacauaccc

SEQ ID NO: 1506052 - RNA, 19 nt, Artificial Sequence
  Description of Artificial Sequence: Synthetic oligonucleotide
  Sense strand starting at position 3520 of SEQ ID NO: 1244667
guaugucuugucugaacuc

SEQ ID NO: 1506053 - RNA, 19 nt, Artificial Sequence
  Description of Artificial Sequence: Synthetic oligonucleotide
  Antisense strand to SEQ ID NO: 1506052
gaguucagacaagacauac

SEQ ID NO: 1506054 - RNA, 19 nt, Artificial Sequence
  Description of Artificial Sequence: Synthetic oligonucleotide
  Sense strand starting at position 3547 of SEQ ID NO: 1244667
gggccuaucggauagucca

SEQ ID NO: 1506055 - RNA, 19 nt, Artificial Sequence
  Description of Artificial Sequence: Synthetic oligonucleotide
  Antisense strand to SEQ ID NO: 1506054
uggacuauccgauaggccc

SEQ ID NO: 1506056 - RNA, 19 nt, Artificial Sequence
  Description of Artificial Sequence: Synthetic oligonucleotide
  Sense strand starting at position 3693 of SEQ ID NO: 1244667
cagcauuauucucgagugu

SEQ ID NO: 1506057 - RNA, 19 nt, Artificial Sequence
  Description of Artificial Sequence: Synthetic oligonucleotide
  Antisense strand to SEQ ID NO: 1506056
acacucgagaauaaugcug

SEQ ID NO: 1506058 - RNA, 19 nt, Artificial Sequence
  Description of Artificial Sequence: Synthetic oligonucleotide
  Sense strand starting at position 3694 of SEQ ID NO: 1244667
agcauuauucucgaguguu

SEQ ID NO: 1506059 - RNA, 19 nt, Artificial Sequence
  Description of Artificial Sequence: Synthetic oligonucleotide
  Antisense strand to SEQ ID NO: 1506058
aacacucgagaauaaugcu

SEQ ID NO: 1506060 - RNA, 19 nt, Artificial Sequence
  Description of Artificial Sequence: Synthetic oligonucleotide
  Sense strand starting at position 3737 of SEQ ID NO: 1244667
uggacacacccaugcaauu

SEQ ID NO: 1506061 - RNA, 19 nt, Artificial Sequence
  Description of Artificial Sequence: Synthetic oligonucleotide
  Antisense strand to SEQ ID NO: 1506060
aauugcaugggugugucca

SEQ ID NO: 1506062 - RNA, 19 nt, Artificial Sequence
  Description of Artificial Sequence: Synthetic oligonucleotide
  Sense strand starting at position 3799 of SEQ ID NO: 1244667
gggucagccaauuguacau

SEQ ID NO: 1506063 - RNA, 19 nt, Artificial Sequence
  Description of Artificial Sequence: Synthetic oligonucleotide
  Antisense strand to SEQ ID NO: 1506062
auguacaauuggcugaccc

SEQ ID NO: 1506064 - RNA, 19 nt, Artificial Sequence
  Description of Artificial Sequence: Synthetic oligonucleotide
  Sense strand starting at position 3935 of SEQ ID NO: 1244667
ugcgcaugccuucgugacu

SEQ ID NO: 1506065 - RNA, 19 nt, Artificial Sequence
  Description of Artificial Sequence: Synthetic oligonucleotide
  Antisense strand to SEQ ID NO: 1506064
agucacgaaggcaugcgca

SEQ ID NO: 1506066 - RNA, 19 nt, Artificial Sequence
  Description of Artificial Sequence: Synthetic oligonucleotide
  Sense strand starting at position 3944 of SEQ ID NO: 1244667
cuucgugacugugcucaga

SEQ ID NO: 1506067 - RNA, 19 nt, Artificial Sequence
  Description of Artificial Sequence: Synthetic oligonucleotide
  Antisense strand to SEQ ID NO: 1506066
ucugagcacagucacgaag

SEQ ID NO: 1506068 - RNA, 19 nt, Artificial Sequence
  Description of Artificial Sequence: Synthetic oligonucleotide
  Sense strand starting at position 222 of SEQ ID NO: 1244668
acaggaugccuugagucuu

SEQ ID NO: 1506069 - RNA, 19 nt, Artificial Sequence
  Description of Artificial Sequence: Synthetic oligonucleotide
  Antisense strand to SEQ ID NO: 1506068
aagacucaaggcauccugu

SEQ ID NO: 1506070 - RNA, 19 nt, Artificial Sequence
  Description of Artificial Sequence: Synthetic oligonucleotide
  Sense strand starting at position 230 of SEQ ID NO: 1244668
ccuugagucuuggcugaaa

SEQ ID NO: 1506071 - RNA, 19 nt, Artificial Sequence
  Description of Artificial Sequence: Synthetic oligonucleotide
  Antisense strand to SEQ ID NO: 1506070
uuucagccaagacucaagg

SEQ ID NO: 1506072 - RNA, 19 nt, Artificial Sequence
  Description of Artificial Sequence: Synthetic oligonucleotide
  Sense strand starting at position 242 of SEQ ID NO: 1244668
gcugaaaggcaggguucau

SEQ ID NO: 1506073 - RNA, 19 nt, Artificial Sequence
  Description of Artificial Sequence: Synthetic oligonucleotide
  Antisense strand to SEQ ID NO: 1506072
augaacccugccuuucagc

SEQ ID NO: 1506074 - RNA, 19 nt, Artificial Sequence
  Description of Artificial Sequence: Synthetic oligonucleotide
  Sense strand starting at position 289 of SEQ ID NO: 1244668
gggacaggucugcaccuau

SEQ ID NO: 1506075 - RNA, 19 nt, Artificial Sequence
  Description of Artificial Sequence: Synthetic oligonucleotide
  Antisense strand to SEQ ID NO: 1506074
auaggugcagaccuguccc

SEQ ID NO: 1506076 - RNA, 19 nt, Artificial Sequence
  Description of Artificial Sequence: Synthetic oligonucleotide
  Sense strand starting at position 392 of SEQ ID NO: 1244668
uugggacucucagacaaga

SEQ ID NO: 1506077 - RNA, 19 nt, Artificial Sequence
  Description of Artificial Sequence: Synthetic oligonucleotide
  Antisense strand to SEQ ID NO: 1506076
ucuugucugagagucccaa

SEQ ID NO: 1506078 - RNA, 19 nt, Artificial Sequence
  Description of Artificial Sequence: Synthetic oligonucleotide
  Sense strand starting at position 600 of SEQ ID NO: 1244668
gauucuuucucggugugca

SEQ ID NO: 1506079 - RNA, 19 nt, Artificial Sequence
  Description of Artificial Sequence: Synthetic oligonucleotide
  Antisense strand to SEQ ID NO: 1506078
ugcacaccgagaaagaauc

SEQ ID NO: 1506080 - RNA, 19 nt, Artificial Sequence
  Description of Artificial Sequence: Synthetic oligonucleotide
  Sense strand starting at position 601 of SEQ ID NO: 1244668
auucuuucucggugugcaa

SEQ ID NO: 1506081 - RNA, 19 nt, Artificial Sequence
  Description of Artificial Sequence: Synthetic oligonucleotide
  Antisense strand to SEQ ID NO: 1506080
uugcacaccgagaaagaau

SEQ ID NO: 1506082 - RNA, 19 nt, Artificial Sequence
  Description of Artificial Sequence: Synthetic oligonucleotide
  Sense strand starting at position 603 of SEQ ID NO: 1244668
ucuuucucggugugcaaau

SEQ ID NO: 1506083 - RNA, 19 nt, Artificial Sequence
  Description of Artificial Sequence: Synthetic oligonucleotide
  Antisense strand to SEQ ID NO: 1506082
auuugcacaccgagaaaga

SEQ ID NO: 1506084 - RNA, 19 nt, Artificial Sequence
  Description of Artificial Sequence: Synthetic oligonucleotide
  Sense strand starting at position 615 of SEQ ID NO: 1244668
ugcaaaucugguuacagca

SEQ ID NO: 1506085 - RNA, 19 nt, Artificial Sequence
  Description of Artificial Sequence: Synthetic oligonucleotide
  Antisense strand to SEQ ID NO: 1506084
ugcuguaaccagauuugca

SEQ ID NO: 1506086 - RNA, 19 nt, Artificial Sequence
  Description of Artificial Sequence: Synthetic oligonucleotide
  Sense strand starting at position 700 of SEQ ID NO: 1244668
guuguaaucguguuugcga

SEQ ID NO: 1506087 - RNA, 19 nt, Artificial Sequence
  Description of Artificial Sequence: Synthetic oligonucleotide
  Antisense strand to SEQ ID NO: 1506086
ucgcaaacacgauuacaac

SEQ ID NO: 1506088 - RNA, 19 nt, Artificial Sequence
  Description of Artificial Sequence: Synthetic oligonucleotide
  Sense strand starting at position 702 of SEQ ID NO: 1244668
uguaaucguguuugcgaua

SEQ ID NO: 1506089 - RNA, 19 nt, Artificial Sequence
  Description of Artificial Sequence: Synthetic oligonucleotide
  Antisense strand to SEQ ID NO: 1506088
uaucgcaaacacgauuaca

SEQ ID NO: 1506090 - RNA, 19 nt, Artificial Sequence
  Description of Artificial Sequence: Synthetic oligonucleotide
  Sense strand starting at position 703 of SEQ ID NO: 1244668
guaaucguguuugcgauaa

SEQ ID NO: 1506091 - RNA, 19 nt, Artificial Sequence
  Description of Artificial Sequence: Synthetic oligonucleotide
  Antisense strand to SEQ ID NO: 1506090
uuaucgcaaacacgauuac

SEQ ID NO: 1506092 - RNA, 19 nt, Artificial Sequence
  Description of Artificial Sequence: Synthetic oligonucleotide
  Sense strand starting at position 707 of SEQ ID NO: 1244668
ucguguuugcgauaacaga

SEQ ID NO: 1506093 - RNA, 19 nt, Artificial Sequence
  Description of Artificial Sequence: Synthetic oligonucleotide
  Antisense strand to SEQ ID NO: 1506092
ucuguuaucgcaaacacga

SEQ ID NO: 1506094 - RNA, 19 nt, Artificial Sequence
  Description of Artificial Sequence: Synthetic oligonucleotide
  Sense strand starting at position 1014 of SEQ ID NO: 1244668
gcgggaaguuugaguccau

SEQ ID NO: 1506095 - RNA, 19 nt, Artificial Sequence
  Description of Artificial Sequence: Synthetic oligonucleotide
  Antisense strand to SEQ ID NO: 1506094
auggacucaaacuucccgc

SEQ ID NO: 1506096 - RNA, 19 nt, Artificial Sequence
  Description of Artificial Sequence: Synthetic oligonucleotide
  Sense strand starting at position 1015 of SEQ ID NO: 1244668
cgggaaguuugaguccaug

SEQ ID NO: 1506097 - RNA, 19 nt, Artificial Sequence
  Description of Artificial Sequence: Synthetic oligonucleotide
  Antisense strand to SEQ ID NO: 1506096
cauggacucaaacuucccg

SEQ ID NO: 1506098 - RNA, 19 nt, Artificial Sequence
  Description of Artificial Sequence: Synthetic oligonucleotide
  Sense strand starting at position 1021 of SEQ ID NO: 1244668
guuugaguccauggaagac

SEQ ID NO: 1506099 - RNA, 19 nt, Artificial Sequence
  Description of Artificial Sequence: Synthetic oligonucleotide
  Antisense strand to SEQ ID NO: 1506098
gucuuccauggacucaaac

SEQ ID NO: 1506100 - RNA, 19 nt, Artificial Sequence
  Description of Artificial Sequence: Synthetic oligonucleotide
  Sense strand starting at position 1103 of SEQ ID NO: 1244668
acugaaucccugugcaacu

SEQ ID NO: 1506101 - RNA, 19 nt, Artificial Sequence
  Description of Artificial Sequence: Synthetic oligonucleotide
  Antisense strand to SEQ ID NO: 1506100
aguugcacagggauucagu

SEQ ID NO: 1506102 - RNA, 19 nt, Artificial Sequence
  Description of Artificial Sequence: Synthetic oligonucleotide
  Sense strand starting at position 1114 of SEQ ID NO: 1244668
gugcaacucaucggugaug

SEQ ID NO: 1506103 - RNA, 19 nt, Artificial Sequence
  Description of Artificial Sequence: Synthetic oligonucleotide
  Antisense strand to SEQ ID NO: 1506102
caucaccgaugaguugcac

SEQ ID NO: 1506104 - RNA, 19 nt, Artificial Sequence
  Description of Artificial Sequence: Synthetic oligonucleotide
  Sense strand starting at position 1116 of SEQ ID NO: 1244668
gcaacucaucggugaugga

SEQ ID NO: 1506105 - RNA, 19 nt, Artificial Sequence
  Description of Artificial Sequence: Synthetic oligonucleotide
  Antisense strand to SEQ ID NO: 1506104
uccaucaccgaugaguugc

SEQ ID NO: 1506106 - RNA, 19 nt, Artificial Sequence
  Description of Artificial Sequence: Synthetic oligonucleotide
  Sense strand starting at position 1248 of SEQ ID NO: 1244668
gguagaugugcccaggaca

SEQ ID NO: 1506107 - RNA, 19 nt, Artificial Sequence
  Description of Artificial Sequence: Synthetic oligonucleotide
  Antisense strand to SEQ ID NO: 1506106
uguccugggcacaucuacc

SEQ ID NO: 1506108 - RNA, 19 nt, Artificial Sequence
  Description of Artificial Sequence: Synthetic oligonucleotide
  Sense strand starting at position 1266 of SEQ ID NO: 1244668
augggacauuggcagaauu

SEQ ID NO: 1506109 - RNA, 19 nt, Artificial Sequence
  Description of Artificial Sequence: Synthetic oligonucleotide
  Antisense strand to SEQ ID NO: 1506108
aauucugccaaugucccau

SEQ ID NO: 1506110 - RNA, 19 nt, Artificial Sequence
  Description of Artificial Sequence: Synthetic oligonucleotide
  Sense strand starting at position 1451 of SEQ ID NO: 1244668
ggcccuguggccucuguua

SEQ ID NO: 1506111 - RNA, 19 nt, Artificial Sequence
  Description of Artificial Sequence: Synthetic oligonucleotide
  Antisense strand to SEQ ID NO: 1506110
uaacagaggccacagggcc

SEQ ID NO: 1506112 - RNA, 19 nt, Artificial Sequence
  Description of Artificial Sequence: Synthetic oligonucleotide
  Sense strand starting at position 1453 of SEQ ID NO: 1244668
cccuguggccucuguuaca

SEQ ID NO: 1506113 - RNA, 19 nt, Artificial Sequence
  Description of Artificial Sequence: Synthetic oligonucleotide
  Antisense strand to SEQ ID NO: 1506112
uguaacagaggccacaggg

SEQ ID NO: 1506114 - RNA, 19 nt, Artificial Sequence
  Description of Artificial Sequence: Synthetic oligonucleotide
  Sense strand starting at position 1485 of SEQ ID NO: 1244668
agacgucugcucgauugga

SEQ ID NO: 1506115 - RNA, 19 nt, Artificial Sequence
  Description of Artificial Sequence: Synthetic oligonucleotide
  Antisense strand to SEQ ID NO: 1506114
uccaaucgagcagacgucu

SEQ ID NO: 1506116 - RNA, 19 nt, Artificial Sequence
  Description of Artificial Sequence: Synthetic oligonucleotide
  Sense strand starting at position 2447 of SEQ ID NO: 1244668
gcaccaggauggucucaau

SEQ ID NO: 1506117 - RNA, 19 nt, Artificial Sequence
  Description of Artificial Sequence: Synthetic oligonucleotide
  Antisense strand to SEQ ID NO: 1506116
auugagaccauccuggugc

SEQ ID NO: 1506118 - RNA, 19 nt, Artificial Sequence
  Description of Artificial Sequence: Synthetic oligonucleotide
  Sense strand starting at position 2468 of SEQ ID NO: 1244668
gcccauugucuuggacuaa

SEQ ID NO: 1506119 - RNA, 19 nt, Artificial Sequence
  Description of Artificial Sequence: Synthetic oligonucleotide
  Antisense strand to SEQ ID NO: 1506118
uuaguccaagacaaugggc

SEQ ID NO: 1506120 - RNA, 19 nt, Artificial Sequence
  Description of Artificial Sequence: Synthetic oligonucleotide
  Sense strand starting at position 2469 of SEQ ID NO: 1244668
cccauugucuuggacuaaa

SEQ ID NO: 1506121 - RNA, 19 nt, Artificial Sequence
  Description of Artificial Sequence: Synthetic oligonucleotide
  Antisense strand to SEQ ID NO: 1506120
uuuaguccaagacaauggg

SEQ ID NO: 1506122 - RNA, 19 nt, Artificial Sequence
  Description of Artificial Sequence: Synthetic oligonucleotide
  Sense strand starting at position 2670 of SEQ ID NO: 1244668
cagggcucccguugagaca

SEQ ID NO: 1506123 - RNA, 19 nt, Artificial Sequence
  Description of Artificial Sequence: Synthetic oligonucleotide
  Antisense strand to SEQ ID NO: 1506122
ugucucaacgggagcccug

SEQ ID NO: 1506124 - RNA, 19 nt, Artificial Sequence
  Description of Artificial Sequence: Synthetic oligonucleotide
  Sense strand starting at position 2722 of SEQ ID NO: 1244668
ccgacacuuucuguuagga

SEQ ID NO: 1506125 - RNA, 19 nt, Artificial Sequence
  Description of Artificial Sequence: Synthetic oligonucleotide
  Antisense strand to SEQ ID NO: 1506124
uccuaacagaaagugucgg

SEQ ID NO: 1506126 - RNA, 19 nt, Artificial Sequence
  Description of Artificial Sequence: Synthetic oligonucleotide
  Sense strand starting at position 2724 of SEQ ID NO: 1244668
gacacuuucuguuaggaac

SEQ ID NO: 1506127 - RNA, 19 nt, Artificial Sequence
  Description of Artificial Sequence: Synthetic oligonucleotide
  Antisense strand to SEQ ID NO: 1506126
guuccuaacagaaaguguc

SEQ ID NO: 1506128 - RNA, 19 nt, Artificial Sequence
  Description of Artificial Sequence: Synthetic oligonucleotide
  Sense strand starting at position 2772 of SEQ ID NO: 1244668
ggaggagagcucugcacaa

SEQ ID NO: 1506129 - RNA, 19 nt, Artificial Sequence
  Description of Artificial Sequence: Synthetic oligonucleotide
  Antisense strand to SEQ ID NO: 1506128
uugugcagagcucuccucc

SEQ ID NO: 1506130 - RNA, 19 nt, Artificial Sequence
  Description of Artificial Sequence: Synthetic oligonucleotide
  Sense strand starting at position 2774 of SEQ ID NO: 1244668
aggagagcucugcacaaca

SEQ ID NO: 1506131 - RNA, 19 nt, Artificial Sequence
  Description of Artificial Sequence: Synthetic oligonucleotide
  Antisense strand to SEQ ID NO: 1506130
uguugugcagagcucuccu

SEQ ID NO: 1506132 - RNA, 19 nt, Artificial Sequence
  Description of Artificial Sequence: Synthetic oligonucleotide
  Sense strand starting at position 2835 of SEQ ID NO: 1244668
cggcuaagucgugccacuu

SEQ ID NO: 1506133 - RNA, 19 nt, Artificial Sequence
  Description of Artificial Sequence: Synthetic oligonucleotide
  Antisense strand to SEQ ID NO: 1506132
aaguggcacgacuuagccg

SEQ ID NO: 1506134 - RNA, 19 nt, Artificial Sequence
  Description of Artificial Sequence: Synthetic oligonucleotide
  Sense strand starting at position 2841 of SEQ ID NO: 1244668
agucgugccacuuggacau

SEQ ID NO: 1506135 - RNA, 19 nt, Artificial Sequence
  Description of Artificial Sequence: Synthetic oligonucleotide
  Antisense strand to SEQ ID NO: 1506134
auguccaaguggcacgacu

SEQ ID NO: 1506136 - RNA, 19 nt, Artificial Sequence
  Description of Artificial Sequence: Synthetic oligonucleotide
  Sense strand starting at position 2992 of SEQ ID NO: 1244668
ugagcaugugcccaaagau

SEQ ID NO: 1506137 - RNA, 19 nt, Artificial Sequence
  Description of Artificial Sequence: Synthetic oligonucleotide
  Antisense strand to SEQ ID NO: 1506136
aucuuugggcacaugcuca

SEQ ID NO: 1506138 - RNA, 19 nt, Artificial Sequence
  Description of Artificial Sequence: Synthetic oligonucleotide
  Sense strand starting at position 3001 of SEQ ID NO: 1244668
gcccaaagauguccagaug

SEQ ID NO: 1506139 - RNA, 19 nt, Artificial Sequence
  Description of Artificial Sequence: Synthetic oligonucleotide
  Antisense strand to SEQ ID NO: 1506138
caucuggacaucuuugggc

SEQ ID NO: 1506140 - RNA, 19 nt, Artificial Sequence
  Description of Artificial Sequence: Synthetic oligonucleotide
  Sense strand starting at position 3140 of SEQ ID NO: 1244668
ccacuaagcugacaaagua

SEQ ID NO: 1506141 - RNA, 19 nt, Artificial Sequence
  Description of Artificial Sequence: Synthetic oligonucleotide
  Antisense strand to SEQ ID NO: 1506140
uacuuugucagcuuagugg

SEQ ID NO: 1506142 - RNA, 19 nt, Artificial Sequence
  Description of Artificial Sequence: Synthetic oligonucleotide
  Sense strand starting at position 3462 of SEQ ID NO: 1244668
ccuggacaguuugcucauu

SEQ ID NO: 1506143 - RNA, 19 nt, Artificial Sequence
  Description of Artificial Sequence: Synthetic oligonucleotide
  Antisense strand to SEQ ID NO: 1506142
aaugagcaaacuguccagg

SEQ ID NO: 1506144 - RNA, 19 nt, Artificial Sequence
  Description of Artificial Sequence: Synthetic oligonucleotide
  Sense strand starting at position 3612 of SEQ ID NO: 1244668
gcuggagaccauuguguga

SEQ ID NO: 1506145 - RNA, 19 nt, Artificial Sequence
  Description of Artificial Sequence: Synthetic oligonucleotide
  Antisense strand to SEQ ID NO: 1506144
ucacacaauggucuccagc

SEQ ID NO: 1506146 - RNA, 19 nt, Artificial Sequence
  Description of Artificial Sequence: Synthetic oligonucleotide
  Sense strand starting at position 3616 of SEQ ID NO: 1244668
gagaccauugugugagcuu

SEQ ID NO: 1506147 - RNA, 19 nt, Artificial Sequence
  Description of Artificial Sequence: Synthetic oligonucleotide
  Antisense strand to SEQ ID NO: 1506146
aagcucacacaauggucuc

SEQ ID NO: 1506148 - RNA, 19 nt, Artificial Sequence
  Description of Artificial Sequence: Synthetic oligonucleotide
  Sense strand starting at position 3 of SEQ ID NO: 1244669
cuuauagaagguugugaaa

SEQ ID NO: 1506149 - RNA, 19 nt, Artificial Sequence
  Description of Artificial Sequence: Synthetic oligonucleotide
  Antisense strand to SEQ ID NO: 1506148
uuucacaaccuucuauaag

SEQ ID NO: 1506150 - RNA, 19 nt, Artificial Sequence
  Description of Artificial Sequence: Synthetic oligonucleotide
  Sense strand starting at position 190 of SEQ ID NO: 1244669
ggcagucauuucuagugga

SEQ ID NO: 1506151 - RNA, 19 nt, Artificial Sequence
  Description of Artificial Sequence: Synthetic oligonucleotide
  Antisense strand to SEQ ID NO: 1506150
uccacuagaaaugacugcc

SEQ ID NO: 1506152 - RNA, 19 nt, Artificial Sequence
  Description of Artificial Sequence: Synthetic oligonucleotide
  Sense strand starting at position 249 of SEQ ID NO: 1244669
gcacuuguauuccuaugua

SEQ ID NO: 1506153 - RNA, 19 nt, Artificial Sequence
  Description of Artificial Sequence: Synthetic oligonucleotide
  Antisense strand to SEQ ID NO: 1506152
uacauaggaauacaagugc

SEQ ID NO: 1506154 - RNA, 19 nt, Artificial Sequence
  Description of Artificial Sequence: Synthetic oligonucleotide
  Sense strand starting at position 252 of SEQ ID NO: 1244669
cuuguauuccuauguaaca

SEQ ID NO: 1506155 - RNA, 19 nt, Artificial Sequence
  Description of Artificial Sequence: Synthetic oligonucleotide
  Antisense strand to SEQ ID NO: 1506154
uguuacauaggaauacaag

SEQ ID NO: 1506156 - RNA, 19 nt, Artificial Sequence
  Description of Artificial Sequence: Synthetic oligonucleotide
  Sense strand starting at position 253 of SEQ ID NO: 1244669
uuguauuccuauguaacaa

SEQ ID NO: 1506157 - RNA, 19 nt, Artificial Sequence
  Description of Artificial Sequence: Synthetic oligonucleotide
  Antisense strand to SEQ ID NO: 1506156
uuguuacauaggaauacaa

SEQ ID NO: 1506158 - RNA, 19 nt, Artificial Sequence
  Description of Artificial Sequence: Synthetic oligonucleotide
  Sense strand starting at position 356 of SEQ ID NO: 1244669
agcuuuacagcucagagga

SEQ ID NO: 1506159 - RNA, 19 nt, Artificial Sequence
  Description of Artificial Sequence: Synthetic oligonucleotide
  Antisense strand to SEQ ID NO: 1506158
uccucugagcuguaaagcu

SEQ ID NO: 1506160 - RNA, 19 nt, Artificial Sequence
  Description of Artificial Sequence: Synthetic oligonucleotide
  Sense strand starting at position 394 of SEQ ID NO: 1244669
aacacuuaggccugagguu

SEQ ID NO: 1506161 - RNA, 19 nt, Artificial Sequence
  Description of Artificial Sequence: Synthetic oligonucleotide
  Antisense strand to SEQ ID NO: 1506160
aaccucaggccuaaguguu

SEQ ID NO: 1506162 - RNA, 19 nt, Artificial Sequence
  Description of Artificial Sequence: Synthetic oligonucleotide
  Sense strand starting at position 511 of SEQ ID NO: 1244669
gcgggagaccuugacaguu

SEQ ID NO: 1506163 - RNA, 19 nt, Artificial Sequence
  Description of Artificial Sequence: Synthetic oligonucleotide
  Antisense strand to SEQ ID NO: 1506162
aacugucaaggucucccgc

SEQ ID NO: 1506164 - RNA, 19 nt, Artificial Sequence
  Description of Artificial Sequence: Synthetic oligonucleotide
  Sense strand starting at position 523 of SEQ ID NO: 1244669
gacaguuucucugcagguu

SEQ ID NO: 1506165 - RNA, 19 nt, Artificial Sequence
  Description of Artificial Sequence: Synthetic oligonucleotide
  Antisense strand to SEQ ID NO: 1506164
aaccugcagagaaacuguc

SEQ ID NO: 1506166 - RNA, 19 nt, Artificial Sequence
  Description of Artificial Sequence: Synthetic oligonucleotide
  Sense strand starting at position 715 of SEQ ID NO: 1244669
ggucuaaggcagggaugaa

SEQ ID NO: 1506167 - RNA, 19 nt, Artificial Sequence
  Description of Artificial Sequence: Synthetic oligonucleotide
  Antisense strand to SEQ ID NO: 1506166
uucaucccugccuuagacc

SEQ ID NO: 1506168 - RNA, 19 nt, Artificial Sequence
  Description of Artificial Sequence: Synthetic oligonucleotide
  Sense strand starting at position 727 of SEQ ID NO: 1244669
ggaugaaagggcuguaauc

SEQ ID NO: 1506169 - RNA, 19 nt, Artificial Sequence
  Description of Artificial Sequence: Synthetic oligonucleotide
  Antisense strand to SEQ ID NO: 1506168
gauuacagcccuuucaucc

SEQ ID NO: 1506170 - RNA, 19 nt, Artificial Sequence
  Description of Artificial Sequence: Synthetic oligonucleotide
  Sense strand starting at position 770 of SEQ ID NO: 1244669
cugggaacaucugcacuua

SEQ ID NO: 1506171 - RNA, 19 nt, Artificial Sequence
  Description of Artificial Sequence: Synthetic oligonucleotide
  Antisense strand to SEQ ID NO: 1506170
uaagugcagauguucccag

SEQ ID NO: 1506172 - RNA, 19 nt, Artificial Sequence
  Description of Artificial Sequence: Synthetic oligonucleotide
  Sense strand starting at position 906 of SEQ ID NO: 1244669
gcagcuauuggacaugaca

SEQ ID NO: 1506173 - RNA, 19 nt, Artificial Sequence
  Description of Artificial Sequence: Synthetic oligonucleotide
  Antisense strand to SEQ ID NO: 1506172
ugucauguccaauagcugc

SEQ ID NO: 1506174 - RNA, 19 nt, Artificial Sequence
  Description of Artificial Sequence: Synthetic oligonucleotide
  Sense strand starting at position 1092 of SEQ ID NO: 1244669
gucuacgucccagaaaugu

SEQ ID NO: 1506175 - RNA, 19 nt, Artificial Sequence
  Description of Artificial Sequence: Synthetic oligonucleotide
  Antisense strand to SEQ ID NO: 1506174
acauuucugggacguagac

SEQ ID NO: 1506176 - RNA, 19 nt, Artificial Sequence
  Description of Artificial Sequence: Synthetic oligonucleotide
  Sense strand starting at position 1249 of SEQ ID NO: 1244669
gggucaagucaaugccauu

SEQ ID NO: 1506177 - RNA, 19 nt, Artificial Sequence
  Description of Artificial Sequence: Synthetic oligonucleotide
  Antisense strand to SEQ ID NO: 1506176
aauggcauugacuugaccc

SEQ ID NO: 1506178 - RNA, 19 nt, Artificial Sequence
  Description of Artificial Sequence: Synthetic oligonucleotide
  Sense strand starting at position 1988 of SEQ ID NO: 1244669
ccacgaugguaacugaaua

SEQ ID NO: 1506179 - RNA, 19 nt, Artificial Sequence
  Description of Artificial Sequence: Synthetic oligonucleotide
  Antisense strand to SEQ ID NO: 1506178
uauucaguuaccaucgugg

SEQ ID NO: 1506180 - RNA, 19 nt, Artificial Sequence
  Description of Artificial Sequence: Synthetic oligonucleotide
  Sense strand starting at position 2139 of SEQ ID NO: 1244669
aagucuggugaaugaauga

SEQ ID NO: 1506181 - RNA, 19 nt, Artificial Sequence
  Description of Artificial Sequence: Synthetic oligonucleotide
  Antisense strand to SEQ ID NO: 1506180
ucauucauucaccagacuu

SEQ ID NO: 1506182 - RNA, 19 nt, Artificial Sequence
  Description of Artificial Sequence: Synthetic oligonucleotide
  Sense strand starting at position 2423 of SEQ ID NO: 1244669
uaagguagccacuguuauu

SEQ ID NO: 1506183 - RNA, 19 nt, Artificial Sequence
  Description of Artificial Sequence: Synthetic oligonucleotide
  Antisense strand to SEQ ID NO: 1506182
aauaacaguggcuaccuua

SEQ ID NO: 1506184 - RNA, 19 nt, Artificial Sequence
  Description of Artificial Sequence: Synthetic oligonucleotide
  Sense strand starting at position 2485 of SEQ ID NO: 1244669
gucaauuaugagggucgca

SEQ ID NO: 1506185 - RNA, 19 nt, Artificial Sequence
  Description of Artificial Sequence: Synthetic oligonucleotide
  Antisense strand to SEQ ID NO: 1506184
ugcgacccucauaauugac

SEQ ID NO: 1506186 - RNA, 19 nt, Artificial Sequence
  Description of Artificial Sequence: Synthetic oligonucleotide
  Sense strand starting at position 2576 of SEQ ID NO: 1244669
ccaggucuucgggaaccau

SEQ ID NO: 1506187 - RNA, 19 nt, Artificial Sequence
  Description of Artificial Sequence: Synthetic oligonucleotide
  Antisense strand to SEQ ID NO: 1506186
augguucccgaagaccugg

SEQ ID NO: 1506188 - RNA, 19 nt, Artificial Sequence
  Description of Artificial Sequence: Synthetic oligonucleotide
  Sense strand starting at position 2780 of SEQ ID NO: 1244669
gggcucuucccagggcuua

SEQ ID NO: 1506189 - RNA, 19 nt, Artificial Sequence
  Description of Artificial Sequence: Synthetic oligonucleotide
  Antisense strand to SEQ ID NO: 1506188
uaagcccugggaagagccc

SEQ ID NO: 1506190 - RNA, 19 nt, Artificial Sequence
  Description of Artificial Sequence: Synthetic oligonucleotide
  Sense strand starting at position 2847 of SEQ ID NO: 1244669
cuucccuugcaagaaagau

SEQ ID NO: 1506191 - RNA, 19 nt, Artificial Sequence
  Description of Artificial Sequence: Synthetic oligonucleotide
  Antisense strand to SEQ ID NO: 1506190
aucuuucuugcaagggaag

SEQ ID NO: 1506192 - RNA, 19 nt, Artificial Sequence
  Description of Artificial Sequence: Synthetic oligonucleotide
  Sense strand starting at position 2945 of SEQ ID NO: 1244669
cacagaugcuuacuugaga

SEQ ID NO: 1506193 - RNA, 19 nt, Artificial Sequence
  Description of Artificial Sequence: Synthetic oligonucleotide
  Antisense strand to SEQ ID NO: 1506192
ucucaaguaagcaucugug

SEQ ID NO: 1506194 - RNA, 19 nt, Artificial Sequence
  Description of Artificial Sequence: Synthetic oligonucleotide
  Sense strand starting at position 2946 of SEQ ID NO: 1244669
acagaugcuuacuugagaa

SEQ ID NO: 1506195 - RNA, 19 nt, Artificial Sequence
  Description of Artificial Sequence: Synthetic oligonucleotide
  Antisense strand to SEQ ID NO: 1506194
uucucaaguaagcaucugu

SEQ ID NO: 1506196 - RNA, 19 nt, Artificial Sequence
  Description of Artificial Sequence: Synthetic oligonucleotide
  Sense strand starting at position 3039 of SEQ ID NO: 1244669
gguagaucuacccagcaga

SEQ ID NO: 1506197 - RNA, 19 nt, Artificial Sequence
  Description of Artificial Sequence: Synthetic oligonucleotide
  Antisense strand to SEQ ID NO: 1506196
ucugcuggguagaucuacc

SEQ ID NO: 1506198 - RNA, 19 nt, Artificial Sequence
  Description of Artificial Sequence: Synthetic oligonucleotide
  Sense strand starting at position 3309 of SEQ ID NO: 1244669
ggaacaagaugguaaagaa

SEQ ID NO: 1506199 - RNA, 19 nt, Artificial Sequence
  Description of Artificial Sequence: Synthetic oligonucleotide
  Antisense strand to SEQ ID NO: 1506198
uucuuuaccaucuuguucc

SEQ ID NO: 1506200 - RNA, 19 nt, Artificial Sequence
  Description of Artificial Sequence: Synthetic oligonucleotide
  Sense strand starting at position 3442 of SEQ ID NO: 1244669
acacuacaggcuugagagu

SEQ ID NO: 1506201 - RNA, 19 nt, Artificial Sequence
  Description of Artificial Sequence: Synthetic oligonucleotide
  Antisense strand to SEQ ID NO: 1506200
acucucaagccuguagugu

SEQ ID NO: 1506202 - RNA, 19 nt, Artificial Sequence
  Description of Artificial Sequence: Synthetic oligonucleotide
  Sense strand starting at position 3451 of SEQ ID NO: 1244669
gcuugagaguagucagaau

SEQ ID NO: 1506203 - RNA, 19 nt, Artificial Sequence
  Description of Artificial Sequence: Synthetic oligonucleotide
  Antisense strand to SEQ ID NO: 1506202
auucugacuacucucaagc

SEQ ID NO: 1506204 - RNA, 19 nt, Artificial Sequence
  Description of Artificial Sequence: Synthetic oligonucleotide
  Sense strand starting at position 3512 of SEQ ID NO: 1244669
aaauguuuauuagccgaga

SEQ ID NO: 1506205 - RNA, 19 nt, Artificial Sequence
  Description of Artificial Sequence: Synthetic oligonucleotide
  Antisense strand to SEQ ID NO: 1506204
ucucggcuaauaaacauuu

SEQ ID NO: 1506206 - RNA, 19 nt, Artificial Sequence
  Description of Artificial Sequence: Synthetic oligonucleotide
  Sense strand starting at position 3514 of SEQ ID NO: 1244669
auguuuauuagccgagacu

SEQ ID NO: 1506207 - RNA, 19 nt, Artificial Sequence
  Description of Artificial Sequence: Synthetic oligonucleotide
  Antisense strand to SEQ ID NO: 1506206
agucucggcuaauaaacau

SEQ ID NO: 1506208 - RNA, 19 nt, Artificial Sequence
  Description of Artificial Sequence: Synthetic oligonucleotide
  Sense strand starting at position 3515 of SEQ ID NO: 1244669
uguuuauuagccgagacuu

SEQ ID NO: 1506209 - RNA, 19 nt, Artificial Sequence
  Description of Artificial Sequence: Synthetic oligonucleotide
  Antisense strand to SEQ ID NO: 1506208
aagucucggcuaauaaaca

SEQ ID NO: 1506210 - RNA, 19 nt, Artificial Sequence
  Description of Artificial Sequence: Synthetic oligonucleotide
  Sense strand starting at position 3525 of SEQ ID NO: 1244669
ccgagacuuccggacagau

SEQ ID NO: 1506211 - RNA, 19 nt, Artificial Sequence
  Description of Artificial Sequence: Synthetic oligonucleotide
  Antisense strand to SEQ ID NO: 1506210
aucuguccggaagucucgg

SEQ ID NO: 1506212 - RNA, 19 nt, Artificial Sequence
  Description of Artificial Sequence: Synthetic oligonucleotide
  Sense strand starting at position 3607 of SEQ ID NO: 1244669
gccacaaaccucuggugaa

SEQ ID NO: 1506213 - RNA, 19 nt, Artificial Sequence
  Description of Artificial Sequence: Synthetic oligonucleotide
  Antisense strand to SEQ ID NO: 1506212
uucaccagagguuuguggc

SEQ ID NO: 1506214 - RNA, 19 nt, Artificial Sequence
  Description of Artificial Sequence: Synthetic oligonucleotide
  Sense strand starting at position 3627 of SEQ ID NO: 1244669
aguaaagacucucccuaga

SEQ ID NO: 1506215 - RNA, 19 nt, Artificial Sequence
  Description of Artificial Sequence: Synthetic oligonucleotide
  Antisense strand to SEQ ID NO: 1506214
ucuagggagagucuuuacu

SEQ ID NO: 1506216 - RNA, 19 nt, Artificial Sequence
  Description of Artificial Sequence: Synthetic oligonucleotide
  Sense strand starting at position 3866 of SEQ ID NO: 1244669
caaacaaacuuggugugau

SEQ ID NO: 1506217 - RNA, 19 nt, Artificial Sequence
  Description of Artificial Sequence: Synthetic oligonucleotide
  Antisense strand to SEQ ID NO: 1506216
aucacaccaaguuuguuug

SEQ ID NO: 1506218 - RNA, 19 nt, Artificial Sequence
  Description of Artificial Sequence: Synthetic oligonucleotide
  Sense strand starting at position 3892 of SEQ ID NO: 1244669
uacagaauuuaauaggguu

SEQ ID NO: 1506219 - RNA, 19 nt, Artificial Sequence
  Description of Artificial Sequence: Synthetic oligonucleotide
  Antisense strand to SEQ ID NO: 1506218
aacccuauuaaauucugua

SEQ ID NO: 1506220 - RNA, 19 nt, Artificial Sequence
  Description of Artificial Sequence: Synthetic oligonucleotide
  Sense strand starting at position 3895 of SEQ ID NO: 1244669
agaauuuaauaggguuauc

SEQ ID NO: 1506221 - RNA, 19 nt, Artificial Sequence
  Description of Artificial Sequence: Synthetic oligonucleotide
  Antisense strand to SEQ ID NO: 1506220
gauaacccuauuaaauucu

SEQ ID NO: 1506222 - RNA, 19 nt, Artificial Sequence
  Description of Artificial Sequence: Synthetic oligonucleotide
  Sense strand starting at position 3905 of SEQ ID NO: 1244669
aggguuaucucagcauuac

SEQ ID NO: 1506223 - RNA, 19 nt, Artificial Sequence
  Description of Artificial Sequence: Synthetic oligonucleotide
  Antisense strand to SEQ ID NO: 1506222
guaaugcugagauaacccu

SEQ ID NO: 1506224 - RNA, 19 nt, Artificial Sequence
  Description of Artificial Sequence: Synthetic oligonucleotide
  Sense strand starting at position 3906 of SEQ ID NO: 1244669
ggguuaucucagcauuacc

SEQ ID NO: 1506225 - RNA, 19 nt, Artificial Sequence
  Description of Artificial Sequence: Synthetic oligonucleotide
  Antisense strand to SEQ ID NO: 1506224
gguaaugcugagauaaccc

SEQ ID NO: 1506226 - RNA, 19 nt, Artificial Sequence
  Description of Artificial Sequence: Synthetic oligonucleotide
  Sense strand starting at position 3955 of SEQ ID NO: 1244669
cacaaaguucuggguucua

SEQ ID NO: 1506227 - RNA, 19 nt, Artificial Sequence
  Description of Artificial Sequence: Synthetic oligonucleotide
  Antisense strand to SEQ ID NO: 1506226
uagaacccagaacuuugug

SEQ ID NO: 1506228 - RNA, 19 nt, Artificial Sequence
  Description of Artificial Sequence: Synthetic oligonucleotide
  Sense strand starting at position 9 of SEQ ID NO: 1244670
uaucuuagaugagcagaga

SEQ ID NO: 1506229 - RNA, 19 nt, Artificial Sequence
  Description of Artificial Sequence: Synthetic oligonucleotide
  Antisense strand to SEQ ID NO: 1506228
ucucugcucaucuaagaua

SEQ ID NO: 1506230 - RNA, 19 nt, Artificial Sequence
  Description of Artificial Sequence: Synthetic oligonucleotide
  Sense strand starting at position 245 of SEQ ID NO: 1244670
ggguucucccagcaugaaa

SEQ ID NO: 1506231 - RNA, 19 nt, Artificial Sequence
  Description of Artificial Sequence: Synthetic oligonucleotide
  Antisense strand to SEQ ID NO: 1506230
uuucaugcugggagaaccc

SEQ ID NO: 1506232 - RNA, 19 nt, Artificial Sequence
  Description of Artificial Sequence: Synthetic oligonucleotide
  Sense strand starting at position 338 of SEQ ID NO: 1244670
cgcagcaugccauuguaga

SEQ ID NO: 1506233 - RNA, 19 nt, Artificial Sequence
  Description of Artificial Sequence: Synthetic oligonucleotide
  Antisense strand to SEQ ID NO: 1506232
ucuacaauggcaugcugcg

SEQ ID NO: 1506234 - RNA, 19 nt, Artificial Sequence
  Description of Artificial Sequence: Synthetic oligonucleotide
  Sense strand starting at position 339 of SEQ ID NO: 1244670
gcagcaugccauuguagag

SEQ ID NO: 1506235 - RNA, 19 nt, Artificial Sequence
  Description of Artificial Sequence: Synthetic oligonucleotide
  Antisense strand to SEQ ID NO: 1506234
cucuacaauggcaugcugc

SEQ ID NO: 1506236 - RNA, 19 nt, Artificial Sequence
  Description of Artificial Sequence: Synthetic oligonucleotide
  Sense strand starting at position 345 of SEQ ID NO: 1244670
ugccauuguagagaagcaa

SEQ ID NO: 1506237 - RNA, 19 nt, Artificial Sequence
  Description of Artificial Sequence: Synthetic oligonucleotide
  Antisense strand to SEQ ID NO: 1506236
uugcuucucuacaauggca

SEQ ID NO: 1506238 - RNA, 19 nt, Artificial Sequence
  Description of Artificial Sequence: Synthetic oligonucleotide
  Sense strand starting at position 516 of SEQ ID NO: 1244670
cggcauuucgagcauugag

SEQ ID NO: 1506239 - RNA, 19 nt, Artificial Sequence
  Description of Artificial Sequence: Synthetic oligonucleotide
  Antisense strand to SEQ ID NO: 1506238
cucaaugcucgaaaugccg

SEQ ID NO: 1506240 - RNA, 19 nt, Artificial Sequence
  Description of Artificial Sequence: Synthetic oligonucleotide
  Sense strand starting at position 578 of SEQ ID NO: 1244670
gggugauaacuugagcgga

SEQ ID NO: 1506241 - RNA, 19 nt, Artificial Sequence
  Description of Artificial Sequence: Synthetic oligonucleotide
  Antisense strand to SEQ ID NO: 1506240
uccgcucaaguuaucaccc

SEQ ID NO: 1506242 - RNA, 19 nt, Artificial Sequence
  Description of Artificial Sequence: Synthetic oligonucleotide
  Sense strand starting at position 580 of SEQ ID NO: 1244670
gugauaacuugagcggagu

SEQ ID NO: 1506243 - RNA, 19 nt, Artificial Sequence
  Description of Artificial Sequence: Synthetic oligonucleotide
  Antisense strand to SEQ ID NO: 1506242
acuccgcucaaguuaucac

SEQ ID NO: 1506244 - RNA, 19 nt, Artificial Sequence
  Description of Artificial Sequence: Synthetic oligonucleotide
  Sense strand starting at position 583 of SEQ ID NO: 1244670
auaacuugagcggagugau

SEQ ID NO: 1506245 - RNA, 19 nt, Artificial Sequence
  Description of Artificial Sequence: Synthetic oligonucleotide
  Antisense strand to SEQ ID NO: 1506244
aucacuccgcucaaguuau

SEQ ID NO: 1506246 - RNA, 19 nt, Artificial Sequence
  Description of Artificial Sequence: Synthetic oligonucleotide
  Sense strand starting at position 674 of SEQ ID NO: 1244670
ggaaacauguuccaagaag

SEQ ID NO: 1506247 - RNA, 19 nt, Artificial Sequence
  Description of Artificial Sequence: Synthetic oligonucleotide
  Antisense strand to SEQ ID NO: 1506246
cuucuuggaacauguuucc

SEQ ID NO: 1506248 - RNA, 19 nt, Artificial Sequence
  Description of Artificial Sequence: Synthetic oligonucleotide
  Sense strand starting at position 704 of SEQ ID NO: 1244670
aggagaacuuagccacuca

SEQ ID NO: 1506249 - RNA, 19 nt, Artificial Sequence
  Description of Artificial Sequence: Synthetic oligonucleotide
  Antisense strand to SEQ ID NO: 1506248
ugaguggcuaaguucuccu

SEQ ID NO: 1506250 - RNA, 19 nt, Artificial Sequence
  Description of Artificial Sequence: Synthetic oligonucleotide
  Sense strand starting at position 720 of SEQ ID NO: 1244670
ucagcuuaguuggccaaau

SEQ ID NO: 1506251 - RNA, 19 nt, Artificial Sequence
  Description of Artificial Sequence: Synthetic oligonucleotide
  Antisense strand to SEQ ID NO: 1506250
auuuggccaacuaagcuga

SEQ ID NO: 1506252 - RNA, 19 nt, Artificial Sequence
  Description of Artificial Sequence: Synthetic oligonucleotide
  Sense strand starting at position 721 of SEQ ID NO: 1244670
cagcuuaguuggccaaaua

SEQ ID NO: 1506253 - RNA, 19 nt, Artificial Sequence
  Description of Artificial Sequence: Synthetic oligonucleotide
  Antisense strand to SEQ ID NO: 1506252
uauuuggccaacuaagcug

SEQ ID NO: 1506254 - RNA, 19 nt, Artificial Sequence
  Description of Artificial Sequence: Synthetic oligonucleotide
  Sense strand starting at position 722 of SEQ ID NO: 1244670
agcuuaguuggccaaauau

SEQ ID NO: 1506255 - RNA, 19 nt, Artificial Sequence
  Description of Artificial Sequence: Synthetic oligonucleotide
  Antisense strand to SEQ ID NO: 1506254
auauuuggccaacuaagcu

SEQ ID NO: 1506256 - RNA, 19 nt, Artificial Sequence
  Description of Artificial Sequence: Synthetic oligonucleotide
  Sense strand starting at position 732 of SEQ ID NO: 1244670
gccaaauauuuacaaagag

SEQ ID NO: 1506257 - RNA, 19 nt, Artificial Sequence
  Description of Artificial Sequence: Synthetic oligonucleotide
  Antisense strand to SEQ ID NO: 1506256
cucuuuguaaauauuuggc

SEQ ID NO: 1506258 - RNA, 19 nt, Artificial Sequence
  Description of Artificial Sequence: Synthetic oligonucleotide
  Sense strand starting at position 747 of SEQ ID NO: 1244670
agagauagcugugaccaca

SEQ ID NO: 1506259 - RNA, 19 nt, Artificial Sequence
  Description of Artificial Sequence: Synthetic oligonucleotide
  Antisense strand to SEQ ID NO: 1506258
uguggucacagcuaucucu

SEQ ID NO: 1506260 - RNA, 19 nt, Artificial Sequence
  Description of Artificial Sequence: Synthetic oligonucleotide
  Sense strand starting at position 750 of SEQ ID NO: 1244670
gauagcugugaccacacaa

SEQ ID NO: 1506261 - RNA, 19 nt, Artificial Sequence
  Description of Artificial Sequence: Synthetic oligonucleotide
  Antisense strand to SEQ ID NO: 1506260
uuguguggucacagcuauc

SEQ ID NO: 1506262 - RNA, 19 nt, Artificial Sequence
  Description of Artificial Sequence: Synthetic oligonucleotide
  Sense strand starting at position 2108 of SEQ ID NO: 1244670
gaaagaagccuuuggugac

SEQ ID NO: 1506263 - RNA, 19 nt, Artificial Sequence
  Description of Artificial Sequence: Synthetic oligonucleotide
  Antisense strand to SEQ ID NO: 1506262
gucaccaaaggcuucuuuc

SEQ ID NO: 1506264 - RNA, 19 nt, Artificial Sequence
  Description of Artificial Sequence: Synthetic oligonucleotide
  Sense strand starting at position 2144 of SEQ ID NO: 1244670
ggcugaauucuggaagcua

SEQ ID NO: 1506265 - RNA, 19 nt, Artificial Sequence
  Description of Artificial Sequence: Synthetic oligonucleotide
  Antisense strand to SEQ ID NO: 1506264
uagcuuccagaauucagcc

SEQ ID NO: 1506266 - RNA, 19 nt, Artificial Sequence
  Description of Artificial Sequence: Synthetic oligonucleotide
  Sense strand starting at position 2594 of SEQ ID NO: 1244670
cugggccugucacucaaua

SEQ ID NO: 1506267 - RNA, 19 nt, Artificial Sequence
  Description of Artificial Sequence: Synthetic oligonucleotide
  Antisense strand to SEQ ID NO: 1506266
uauugagugacaggcccag

SEQ ID NO: 1506268 - RNA, 19 nt, Artificial Sequence
  Description of Artificial Sequence: Synthetic oligonucleotide
  Sense strand starting at position 2605 of SEQ ID NO: 1244670
acucaauaucuguggaauu

SEQ ID NO: 1506269 - RNA, 19 nt, Artificial Sequence
  Description of Artificial Sequence: Synthetic oligonucleotide
  Antisense strand to SEQ ID NO: 1506268
aauuccacagauauugagu

SEQ ID NO: 1506270 - RNA, 19 nt, Artificial Sequence
  Description of Artificial Sequence: Synthetic oligonucleotide
  Sense strand starting at position 2606 of SEQ ID NO: 1244670
cucaauaucuguggaauuu

SEQ ID NO: 1506271 - RNA, 19 nt, Artificial Sequence
  Description of Artificial Sequence: Synthetic oligonucleotide
  Antisense strand to SEQ ID NO: 1506270
aaauuccacagauauugag

SEQ ID NO: 1506272 - RNA, 19 nt, Artificial Sequence
  Description of Artificial Sequence: Synthetic oligonucleotide
  Sense strand starting at position 2769 of SEQ ID NO: 1244670
gugagaagagccugucuuu

SEQ ID NO: 1506273 - RNA, 19 nt, Artificial Sequence
  Description of Artificial Sequence: Synthetic oligonucleotide
  Antisense strand to SEQ ID NO: 1506272
aaagacaggcucuucucac

SEQ ID NO: 1506274 - RNA, 19 nt, Artificial Sequence
  Description of Artificial Sequence: Synthetic oligonucleotide
  Sense strand starting at position 2844 of SEQ ID NO: 1244670
uccagaaaccgcugacaaa

SEQ ID NO: 1506275 - RNA, 19 nt, Artificial Sequence
  Description of Artificial Sequence: Synthetic oligonucleotide
  Antisense strand to SEQ ID NO: 1506274
uuugucagcgguuucugga

SEQ ID NO: 1506276 - RNA, 19 nt, Artificial Sequence
  Description of Artificial Sequence: Synthetic oligonucleotide
  Sense strand starting at position 2904 of SEQ ID NO: 1244670
aacagaaagccucgaggau

SEQ ID NO: 1506277 - RNA, 19 nt, Artificial Sequence
  Description of Artificial Sequence: Synthetic oligonucleotide
  Antisense strand to SEQ ID NO: 1506276
auccucgaggcuuucuguu

SEQ ID NO: 1506278 - RNA, 19 nt, Artificial Sequence
  Description of Artificial Sequence: Synthetic oligonucleotide
  Sense strand starting at position 3121 of SEQ ID NO: 1244670
cuggauuccugagcuggga

SEQ ID NO: 1506279 - RNA, 19 nt, Artificial Sequence
  Description of Artificial Sequence: Synthetic oligonucleotide
  Antisense strand to SEQ ID NO: 1506278
ucccagcucaggaauccag

SEQ ID NO: 1506280 - RNA, 19 nt, Artificial Sequence
  Description of Artificial Sequence: Synthetic oligonucleotide
  Sense strand starting at position 3193 of SEQ ID NO: 1244670
ucuugcugucaccaaauga

SEQ ID NO: 1506281 - RNA, 19 nt, Artificial Sequence
  Description of Artificial Sequence: Synthetic oligonucleotide
  Antisense strand to SEQ ID NO: 1506280
ucauuuggugacagcaaga

SEQ ID NO: 1506282 - RNA, 19 nt, Artificial Sequence
  Description of Artificial Sequence: Synthetic oligonucleotide
  Sense strand starting at position 25 of SEQ ID NO: 1244671
ccuccaaagugcuggauuu

SEQ ID NO: 1506283 - RNA, 19 nt, Artificial Sequence
  Description of Artificial Sequence: Synthetic oligonucleotide
  Antisense strand to SEQ ID NO: 1506282
aaauccagcacuuuggagg

SEQ ID NO: 1506284 - RNA, 19 nt, Artificial Sequence
  Description of Artificial Sequence: Synthetic oligonucleotide
  Sense strand starting at position 495 of SEQ ID NO: 1244671
cauggauaucgcuggcuua

SEQ ID NO: 1506285 - RNA, 19 nt, Artificial Sequence
  Description of Artificial Sequence: Synthetic oligonucleotide
  Antisense strand to SEQ ID NO: 1506284
uaagccagcgauauccaug

SEQ ID NO: 1506286 - RNA, 19 nt, Artificial Sequence
  Description of Artificial Sequence: Synthetic oligonucleotide
  Sense strand starting at position 561 of SEQ ID NO: 1244671
aagaaaggguacucgauua

SEQ ID NO: 1506287 - RNA, 19 nt, Artificial Sequence
  Description of Artificial Sequence: Synthetic oligonucleotide
  Antisense strand to SEQ ID NO: 1506286
uaaucgaguacccuuucuu

SEQ ID NO: 1506288 - RNA, 19 nt, Artificial Sequence
  Description of Artificial Sequence: Synthetic oligonucleotide
  Sense strand starting at position 717 of SEQ ID NO: 1244671
ucaccaaggcagugaugua

SEQ ID NO: 1506289 - RNA, 19 nt, Artificial Sequence
  Description of Artificial Sequence: Synthetic oligonucleotide
  Antisense strand to SEQ ID NO: 1506288
uacaucacugccuugguga

SEQ ID NO: 1506290 - RNA, 19 nt, Artificial Sequence
  Description of Artificial Sequence: Synthetic oligonucleotide
  Sense strand starting at position 859 of SEQ ID NO: 1244671
gagugaaucaaccguggag

SEQ ID NO: 1506291 - RNA, 19 nt, Artificial Sequence
  Description of Artificial Sequence: Synthetic oligonucleotide
  Antisense strand to SEQ ID NO: 1506290
cuccacgguugauucacuc

SEQ ID NO: 1506292 - RNA, 19 nt, Artificial Sequence
  Description of Artificial Sequence: Synthetic oligonucleotide
  Sense strand starting at position 916 of SEQ ID NO: 1244671
aagagaucucagcagugcu

SEQ ID NO: 1506293 - RNA, 19 nt, Artificial Sequence
  Description of Artificial Sequence: Synthetic oligonucleotide
  Antisense strand to SEQ ID NO: 1506292
agcacugcugagaucucuu

SEQ ID NO: 1506294 - RNA, 19 nt, Artificial Sequence
  Description of Artificial Sequence: Synthetic oligonucleotide
  Sense strand starting at position 945 of SEQ ID NO: 1244671
gaagucagucugggagcaa

SEQ ID NO: 1506295 - RNA, 19 nt, Artificial Sequence
  Description of Artificial Sequence: Synthetic oligonucleotide
  Antisense strand to SEQ ID NO: 1506294
uugcucccagacugacuuc

SEQ ID NO: 1506296 - RNA, 19 nt, Artificial Sequence
  Description of Artificial Sequence: Synthetic oligonucleotide
  Sense strand starting at position 946 of SEQ ID NO: 1244671
aagucagucugggagcaau

SEQ ID NO: 1506297 - RNA, 19 nt, Artificial Sequence
  Description of Artificial Sequence: Synthetic oligonucleotide
  Antisense strand to SEQ ID NO: 1506296
auugcucccagacugacuu

SEQ ID NO: 1506298 - RNA, 19 nt, Artificial Sequence
  Description of Artificial Sequence: Synthetic oligonucleotide
  Sense strand starting at position 1084 of SEQ ID NO: 1244671
cggaacucccuccaugauu

SEQ ID NO: 1506299 - RNA, 19 nt, Artificial Sequence
  Description of Artificial Sequence: Synthetic oligonucleotide
  Antisense strand to SEQ ID NO: 1506298
aaucauggagggaguuccg

SEQ ID NO: 1506300 - RNA, 19 nt, Artificial Sequence
  Description of Artificial Sequence: Synthetic oligonucleotide
  Sense strand starting at position 1157 of SEQ ID NO: 1244671
agagauuggucagagcugu

SEQ ID NO: 1506301 - RNA, 19 nt, Artificial Sequence
  Description of Artificial Sequence: Synthetic oligonucleotide
  Antisense strand to SEQ ID NO: 1506300
acagcucugaccaaucucu

SEQ ID NO: 1506302 - RNA, 19 nt, Artificial Sequence
  Description of Artificial Sequence: Synthetic oligonucleotide
  Sense strand starting at position 1161 of SEQ ID NO: 1244671
auuggucagagcugugcau

SEQ ID NO: 1506303 - RNA, 19 nt, Artificial Sequence
  Description of Artificial Sequence: Synthetic oligonucleotide
  Antisense strand to SEQ ID NO: 1506302
augcacagcucugaccaau

SEQ ID NO: 1506304 - RNA, 19 nt, Artificial Sequence
  Description of Artificial Sequence: Synthetic oligonucleotide
  Sense strand starting at position 1703 of SEQ ID NO: 1244671
cccuuccuggccugaugaa

SEQ ID NO: 1506305 - RNA, 19 nt, Artificial Sequence
  Description of Artificial Sequence: Synthetic oligonucleotide
  Antisense strand to SEQ ID NO: 1506304
uucaucaggccaggaaggg

SEQ ID NO: 1506306 - RNA, 19 nt, Artificial Sequence
  Description of Artificial Sequence: Synthetic oligonucleotide
  Sense strand starting at position 1704 of SEQ ID NO: 1244671
ccuuccuggccugaugaaa

SEQ ID NO: 1506307 - RNA, 19 nt, Artificial Sequence
  Description of Artificial Sequence: Synthetic oligonucleotide
  Antisense strand to SEQ ID NO: 1506306
uuucaucaggccaggaagg

SEQ ID NO: 1506308 - RNA, 19 nt, Artificial Sequence
  Description of Artificial Sequence: Synthetic oligonucleotide
  Sense strand starting at position 1789 of SEQ ID NO: 1244671
cggugagcuccagaaagca

SEQ ID NO: 1506309 - RNA, 19 nt, Artificial Sequence
  Description of Artificial Sequence: Synthetic oligonucleotide
  Antisense strand to SEQ ID NO: 1506308
ugcuuucuggagcucaccg

SEQ ID NO: 1506310 - RNA, 19 nt, Artificial Sequence
  Description of Artificial Sequence: Synthetic oligonucleotide
  Sense strand starting at position 1888 of SEQ ID NO: 1244671
ggaggagaauguucuugua

SEQ ID NO: 1506311 - RNA, 19 nt, Artificial Sequence
  Description of Artificial Sequence: Synthetic oligonucleotide
  Antisense strand to SEQ ID NO: 1506310
uacaagaacauucuccucc

SEQ ID NO: 1506312 - RNA, 19 nt, Artificial Sequence
  Description of Artificial Sequence: Synthetic oligonucleotide
  Sense strand starting at position 1890 of SEQ ID NO: 1244671
aggagaauguucuuguaca

SEQ ID NO: 1506313 - RNA, 19 nt, Artificial Sequence
  Description of Artificial Sequence: Synthetic oligonucleotide
  Antisense strand to SEQ ID NO: 1506312
uguacaagaacauucuccu

SEQ ID NO: 1506314 - RNA, 19 nt, Artificial Sequence
  Description of Artificial Sequence: Synthetic oligonucleotide
  Sense strand starting at position 1987 of SEQ ID NO: 1244671
uuuagauggcucggugaca

SEQ ID NO: 1506315 - RNA, 19 nt, Artificial Sequence
  Description of Artificial Sequence: Synthetic oligonucleotide
  Antisense strand to SEQ ID NO: 1506314
ugucaccgagccaucuaaa

SEQ ID NO: 1506316 - RNA, 19 nt, Artificial Sequence
  Description of Artificial Sequence: Synthetic oligonucleotide
  Sense strand starting at position 1988 of SEQ ID NO: 1244671
uuagauggcucggugacaa

SEQ ID NO: 1506317 - RNA, 19 nt, Artificial Sequence
  Description of Artificial Sequence: Synthetic oligonucleotide
  Antisense strand to SEQ ID NO: 1506316
uugucaccgagccaucuaa

SEQ ID NO: 1506318 - RNA, 19 nt, Artificial Sequence
  Description of Artificial Sequence: Synthetic oligonucleotide
  Sense strand starting at position 2026 of SEQ ID NO: 1244671
cuguuugacucagcugagu

SEQ ID NO: 1506319 - RNA, 19 nt, Artificial Sequence
  Description of Artificial Sequence: Synthetic oligonucleotide
  Antisense strand to SEQ ID NO: 1506318
acucagcugagucaaacag

SEQ ID NO: 1506320 - RNA, 19 nt, Artificial Sequence
  Description of Artificial Sequence: Synthetic oligonucleotide
  Sense strand starting at position 2028 of SEQ ID NO: 1244671
guuugacucagcugagugu

SEQ ID NO: 1506321 - RNA, 19 nt, Artificial Sequence
  Description of Artificial Sequence: Synthetic oligonucleotide
  Antisense strand to SEQ ID NO: 1506320
acacucagcugagucaaac

SEQ ID NO: 1506322 - RNA, 19 nt, Artificial Sequence
  Description of Artificial Sequence: Synthetic oligonucleotide
  Sense strand starting at position 2068 of SEQ ID NO: 1244671
ggguguauccggcacguca

SEQ ID NO: 1506323 - RNA, 19 nt, Artificial Sequence
  Description of Artificial Sequence: Synthetic oligonucleotide
  Antisense strand to SEQ ID NO: 1506322
ugacgugccggauacaccc

SEQ ID NO: 1506324 - RNA, 19 nt, Artificial Sequence
  Description of Artificial Sequence: Synthetic oligonucleotide
  Sense strand starting at position 2070 of SEQ ID NO: 1244671
guguauccggcacgucaaa

SEQ ID NO: 1506325 - RNA, 19 nt, Artificial Sequence
  Description of Artificial Sequence: Synthetic oligonucleotide
  Antisense strand to SEQ ID NO: 1506324
uuugacgugccggauacac

SEQ ID NO: 1506326 - RNA, 19 nt, Artificial Sequence
  Description of Artificial Sequence: Synthetic oligonucleotide
  Sense strand starting at position 2229 of SEQ ID NO: 1244671
gagucaagcuuagagagau

SEQ ID NO: 1506327 - RNA, 19 nt, Artificial Sequence
  Description of Artificial Sequence: Synthetic oligonucleotide
  Antisense strand to SEQ ID NO: 1506326
aucucucuaagcuugacuc

SEQ ID NO: 1506328 - RNA, 19 nt, Artificial Sequence
  Description of Artificial Sequence: Synthetic oligonucleotide
  Sense strand starting at position 2915 of SEQ ID NO: 1244671
cgcacaacagaauauuauu

SEQ ID NO: 1506329 - RNA, 19 nt, Artificial Sequence
  Description of Artificial Sequence: Synthetic oligonucleotide
  Antisense strand to SEQ ID NO: 1506328
aauaauauucuguugugcg

SEQ ID NO: 1506330 - RNA, 19 nt, Artificial Sequence
  Description of Artificial Sequence: Synthetic oligonucleotide
  Sense strand starting at position 2992 of SEQ ID NO: 1244671
ggacgucaugcugagugaa

SEQ ID NO: 1506331 - RNA, 19 nt, Artificial Sequence
  Description of Artificial Sequence: Synthetic oligonucleotide
  Antisense strand to SEQ ID NO: 1506330
uucacucagcaugacgucc

SEQ ID NO: 1506332 - RNA, 19 nt, Artificial Sequence
  Description of Artificial Sequence: Synthetic oligonucleotide
  Sense strand starting at position 2994 of SEQ ID NO: 1244671
acgucaugcugagugaaau

SEQ ID NO: 1506333 - RNA, 19 nt, Artificial Sequence
  Description of Artificial Sequence: Synthetic oligonucleotide
  Antisense strand to SEQ ID NO: 1506332
auuucacucagcaugacgu

SEQ ID NO: 1506334 - RNA, 19 nt, Artificial Sequence
  Description of Artificial Sequence: Synthetic oligonucleotide
  Sense strand starting at position 2995 of SEQ ID NO: 1244671
cgucaugcugagugaaaug

SEQ ID NO: 1506335 - RNA, 19 nt, Artificial Sequence
  Description of Artificial Sequence: Synthetic oligonucleotide
  Antisense strand to SEQ ID NO: 1506334
cauuucacucagcaugacg

SEQ ID NO: 1506336 - RNA, 19 nt, Artificial Sequence
  Description of Artificial Sequence: Synthetic oligonucleotide
  Sense strand starting at position 3027 of SEQ ID NO: 1244671
augggcaguuauuguauuu

SEQ ID NO: 1506337 - RNA, 19 nt, Artificial Sequence
  Description of Artificial Sequence: Synthetic oligonucleotide
  Antisense strand to SEQ ID NO: 1506336
aaauacaauaacugcccau

SEQ ID NO: 1506338 - RNA, 19 nt, Artificial Sequence
  Description of Artificial Sequence: Synthetic oligonucleotide
  Sense strand starting at position 3059 of SEQ ID NO: 1244671
agguuccuagaguggucaa

SEQ ID NO: 1506339 - RNA, 19 nt, Artificial Sequence
  Description of Artificial Sequence: Synthetic oligonucleotide
  Antisense strand to SEQ ID NO: 1506338
uugaccacucuaggaaccu

SEQ ID NO: 1506340 - RNA, 19 nt, Artificial Sequence
  Description of Artificial Sequence: Synthetic oligonucleotide
  Sense strand starting at position 3060 of SEQ ID NO: 1244671
gguuccuagaguggucaaa

SEQ ID NO: 1506341 - RNA, 19 nt, Artificial Sequence
  Description of Artificial Sequence: Synthetic oligonucleotide
  Antisense strand to SEQ ID NO: 1506340
uuugaccacucuaggaacc

SEQ ID NO: 1506342 - RNA, 19 nt, Artificial Sequence
  Description of Artificial Sequence: Synthetic oligonucleotide
  Sense strand starting at position 3062 of SEQ ID NO: 1244671
uuccuagaguggucaaaua

SEQ ID NO: 1506343 - RNA, 19 nt, Artificial Sequence
  Description of Artificial Sequence: Synthetic oligonucleotide
  Antisense strand to SEQ ID NO: 1506342
uauuugaccacucuaggaa

SEQ ID NO: 1506344 - RNA, 19 nt, Artificial Sequence
  Description of Artificial Sequence: Synthetic oligonucleotide
  Sense strand starting at position 3166 of SEQ ID NO: 1244671
cucaguuugggaggaugaa

SEQ ID NO: 1506345 - RNA, 19 nt, Artificial Sequence
  Description of Artificial Sequence: Synthetic oligonucleotide
  Antisense strand to SEQ ID NO: 1506344
uucauccucccaaacugag

SEQ ID NO: 1506346 - RNA, 19 nt, Artificial Sequence
  Description of Artificial Sequence: Synthetic oligonucleotide
  Sense strand starting at position 3217 of SEQ ID NO: 1244671
gcgcaacaccgugaaugua

SEQ ID NO: 1506347 - RNA, 19 nt, Artificial Sequence
  Description of Artificial Sequence: Synthetic oligonucleotide
  Antisense strand to SEQ ID NO: 1506346
uacauucacgguguugcgc

SEQ ID NO: 1506348 - RNA, 19 nt, Artificial Sequence
  Description of Artificial Sequence: Synthetic oligonucleotide
  Sense strand starting at position 3290 of SEQ ID NO: 1244671
uguguauuucaccacgguu

SEQ ID NO: 1506349 - RNA, 19 nt, Artificial Sequence
  Description of Artificial Sequence: Synthetic oligonucleotide
  Antisense strand to SEQ ID NO: 1506348
aaccguggugaaauacaca

SEQ ID NO: 1506350 - RNA, 19 nt, Artificial Sequence
  Description of Artificial Sequence: Synthetic oligonucleotide
  Sense strand starting at position 3298 of SEQ ID NO: 1244671
ucaccacgguuagaaauaa

SEQ ID NO: 1506351 - RNA, 19 nt, Artificial Sequence
  Description of Artificial Sequence: Synthetic oligonucleotide
  Antisense strand to SEQ ID NO: 1506350
uuauuucuaaccgugguga

SEQ ID NO: 1506352 - RNA, 19 nt, Artificial Sequence
  Description of Artificial Sequence: Synthetic oligonucleotide
  Sense strand starting at position 3343 of SEQ ID NO: 1244671
gacugugcuguuuguccaa

SEQ ID NO: 1506353 - RNA, 19 nt, Artificial Sequence
  Description of Artificial Sequence: Synthetic oligonucleotide
  Antisense strand to SEQ ID NO: 1506352
uuggacaaacagcacaguc

SEQ ID NO: 1506354 - RNA, 19 nt, Artificial Sequence
  Description of Artificial Sequence: Synthetic oligonucleotide
  Sense strand starting at position 3370 of SEQ ID NO: 1244671
aggcuuacugagcauuacu

SEQ ID NO: 1506355 - RNA, 19 nt, Artificial Sequence
  Description of Artificial Sequence: Synthetic oligonucleotide
  Antisense strand to SEQ ID NO: 1506354
aguaaugcucaguaagccu

SEQ ID NO: 1506356 - RNA, 19 nt, Artificial Sequence
  Description of Artificial Sequence: Synthetic oligonucleotide
  Sense strand starting at position 3379 of SEQ ID NO: 1244671
gagcauuacugaguucuga

SEQ ID NO: 1506357 - RNA, 19 nt, Artificial Sequence
  Description of Artificial Sequence: Synthetic oligonucleotide
  Antisense strand to SEQ ID NO: 1506356
ucagaacucaguaaugcuc

SEQ ID NO: 1506358 - RNA, 19 nt, Artificial Sequence
  Description of Artificial Sequence: Synthetic oligonucleotide
  Sense strand starting at position 3586 of SEQ ID NO: 1244671
gccuguaagcuccauguca

SEQ ID NO: 1506359 - RNA, 19 nt, Artificial Sequence
  Description of Artificial Sequence: Synthetic oligonucleotide
  Antisense strand to SEQ ID NO: 1506358
ugacauggagcuuacaggc

SEQ ID NO: 1506360 - RNA, 19 nt, Artificial Sequence
  Description of Artificial Sequence: Synthetic oligonucleotide
  Sense strand starting at position 3915 of SEQ ID NO: 1244671
gccugcaauuccucaagca

SEQ ID NO: 1506361 - RNA, 19 nt, Artificial Sequence
  Description of Artificial Sequence: Synthetic oligonucleotide
  Antisense strand to SEQ ID NO: 1506360
ugcuugaggaauugcaggc

SEQ ID NO: 1506362 - RNA, 19 nt, Artificial Sequence
  Description of Artificial Sequence: Synthetic oligonucleotide
  Sense strand starting at position 31 of SEQ ID NO: 1244672
cgcaucuucucaucccaga

SEQ ID NO: 1506363 - RNA, 19 nt, Artificial Sequence
  Description of Artificial Sequence: Synthetic oligonucleotide
  Antisense strand to SEQ ID NO: 1506362
ucugggaugagaagaugcg

SEQ ID NO: 1506364 - RNA, 19 nt, Artificial Sequence
  Description of Artificial Sequence: Synthetic oligonucleotide
  Sense strand starting at position 243 of SEQ ID NO: 1244672
caacucaggucuccagaga

SEQ ID NO: 1506365 - RNA, 19 nt, Artificial Sequence
  Description of Artificial Sequence: Synthetic oligonucleotide
  Antisense strand to SEQ ID NO: 1506364
ucucuggagaccugaguug

SEQ ID NO: 1506366 - RNA, 19 nt, Artificial Sequence
  Description of Artificial Sequence: Synthetic oligonucleotide
  Sense strand starting at position 363 of SEQ ID NO: 1244672
acucguauacuagaugcua

SEQ ID NO: 1506367 - RNA, 19 nt, Artificial Sequence
  Description of Artificial Sequence: Synthetic oligonucleotide
  Antisense strand to SEQ ID NO: 1506366
uagcaucuaguauacgagu

SEQ ID NO: 1506368 - RNA, 19 nt, Artificial Sequence
  Description of Artificial Sequence: Synthetic oligonucleotide
  Sense strand starting at position 576 of SEQ ID NO: 1244672
uuucucaugugggauccaa

SEQ ID NO: 1506369 - RNA, 19 nt, Artificial Sequence
  Description of Artificial Sequence: Synthetic oligonucleotide
  Antisense strand to SEQ ID NO: 1506368
uuggaucccacaugagaaa

SEQ ID NO: 1506370 - RNA, 19 nt, Artificial Sequence
  Description of Artificial Sequence: Synthetic oligonucleotide
  Sense strand starting at position 675 of SEQ ID NO: 1244672
ccugcuuccggguggcaua

SEQ ID NO: 1506371 - RNA, 19 nt, Artificial Sequence
  Description of Artificial Sequence: Synthetic oligonucleotide
  Antisense strand to SEQ ID NO: 1506370
uaugccacccggaagcagg

SEQ ID NO: 1506372 - RNA, 19 nt, Artificial Sequence
  Description of Artificial Sequence: Synthetic oligonucleotide
  Sense strand starting at position 722 of SEQ ID NO: 1244672
uaucuuagaugagcagaga

SEQ ID NO: 1506373 - RNA, 19 nt, Artificial Sequence
  Description of Artificial Sequence: Synthetic oligonucleotide
  Antisense strand to SEQ ID NO: 1506372
ucucugcucaucuaagaua

SEQ ID NO: 1506374 - RNA, 19 nt, Artificial Sequence
  Description of Artificial Sequence: Synthetic oligonucleotide
  Sense strand starting at position 958 of SEQ ID NO: 1244672
ggguucucccagcaugaaa

SEQ ID NO: 1506375 - RNA, 19 nt, Artificial Sequence
  Description of Artificial Sequence: Synthetic oligonucleotide
  Antisense strand to SEQ ID NO: 1506374
uuucaugcugggagaaccc

SEQ ID NO: 1506376 - RNA, 19 nt, Artificial Sequence
  Description of Artificial Sequence: Synthetic oligonucleotide
  Sense strand starting at position 1051 of SEQ ID NO: 1244672
cgcagcaugccauuguaga

SEQ ID NO: 1506377 - RNA, 19 nt, Artificial Sequence
  Description of Artificial Sequence: Synthetic oligonucleotide
  Antisense strand to SEQ ID NO: 1506376
ucuacaauggcaugcugcg

SEQ ID NO: 1506378 - RNA, 19 nt, Artificial Sequence
  Description of Artificial Sequence: Synthetic oligonucleotide
  Sense strand starting at position 1052 of SEQ ID NO: 1244672
gcagcaugccauuguagag

SEQ ID NO: 1506379 - RNA, 19 nt, Artificial Sequence
  Description of Artificial Sequence: Synthetic oligonucleotide
  Antisense strand to SEQ ID NO: 1506378
cucuacaauggcaugcugc

SEQ ID NO: 1506380 - RNA, 19 nt, Artificial Sequence
  Description of Artificial Sequence: Synthetic oligonucleotide
  Sense strand starting at position 1058 of SEQ ID NO: 1244672
ugccauuguagagaagcaa

SEQ ID NO: 1506381 - RNA, 19 nt, Artificial Sequence
  Description of Artificial Sequence: Synthetic oligonucleotide
  Antisense strand to SEQ ID NO: 1506380
uugcuucucuacaauggca

SEQ ID NO: 1506382 - RNA, 19 nt, Artificial Sequence
  Description of Artificial Sequence: Synthetic oligonucleotide
  Sense strand starting at position 1229 of SEQ ID NO: 1244672
cggcauuucgagcauugag

SEQ ID NO: 1506383 - RNA, 19 nt, Artificial Sequence
  Description of Artificial Sequence: Synthetic oligonucleotide
  Antisense strand to SEQ ID NO: 1506382
cucaaugcucgaaaugccg

SEQ ID NO: 1506384 - RNA, 19 nt, Artificial Sequence
  Description of Artificial Sequence: Synthetic oligonucleotide
  Sense strand starting at position 1291 of SEQ ID NO: 1244672
gggugauaacuugagcgga

SEQ ID NO: 1506385 - RNA, 19 nt, Artificial Sequence
  Description of Artificial Sequence: Synthetic oligonucleotide
  Antisense strand to SEQ ID NO: 1506384
uccgcucaaguuaucaccc

SEQ ID NO: 1506386 - RNA, 19 nt, Artificial Sequence
  Description of Artificial Sequence: Synthetic oligonucleotide
  Sense strand starting at position 1293 of SEQ ID NO: 1244672
gugauaacuugagcggagu

SEQ ID NO: 1506387 - RNA, 19 nt, Artificial Sequence
  Description of Artificial Sequence: Synthetic oligonucleotide
  Antisense strand to SEQ ID NO: 1506386
acuccgcucaaguuaucac

SEQ ID NO: 1506388 - RNA, 19 nt, Artificial Sequence
  Description of Artificial Sequence: Synthetic oligonucleotide
  Sense strand starting at position 1296 of SEQ ID NO: 1244672
auaacuugagcggagugau

SEQ ID NO: 1506389 - RNA, 19 nt, Artificial Sequence
  Description of Artificial Sequence: Synthetic oligonucleotide
  Antisense strand to SEQ ID NO: 1506388
aucacuccgcucaaguuau

SEQ ID NO: 1506390 - RNA, 19 nt, Artificial Sequence
  Description of Artificial Sequence: Synthetic oligonucleotide
  Sense strand starting at position 1387 of SEQ ID NO: 1244672
ggaaacauguuccaagaag

SEQ ID NO: 1506391 - RNA, 19 nt, Artificial Sequence
  Description of Artificial Sequence: Synthetic oligonucleotide
  Antisense strand to SEQ ID NO: 1506390
cuucuuggaacauguuucc

SEQ ID NO: 1506392 - RNA, 19 nt, Artificial Sequence
  Description of Artificial Sequence: Synthetic oligonucleotide
  Sense strand starting at position 1417 of SEQ ID NO: 1244672
aggagaacuuagccacuca

SEQ ID NO: 1506393 - RNA, 19 nt, Artificial Sequence
  Description of Artificial Sequence: Synthetic oligonucleotide
  Antisense strand to SEQ ID NO: 1506392
ugaguggcuaaguucuccu

SEQ ID NO: 1506394 - RNA, 19 nt, Artificial Sequence
  Description of Artificial Sequence: Synthetic oligonucleotide
  Sense strand starting at position 1433 of SEQ ID NO: 1244672
ucagcuuaguuggccaaau

SEQ ID NO: 1506395 - RNA, 19 nt, Artificial Sequence
  Description of Artificial Sequence: Synthetic oligonucleotide
  Antisense strand to SEQ ID NO: 1506394
auuuggccaacuaagcuga

SEQ ID NO: 1506396 - RNA, 19 nt, Artificial Sequence
  Description of Artificial Sequence: Synthetic oligonucleotide
  Sense strand starting at position 1434 of SEQ ID NO: 1244672
cagcuuaguuggccaaaua

SEQ ID NO: 1506397 - RNA, 19 nt, Artificial Sequence
  Description of Artificial Sequence: Synthetic oligonucleotide
  Antisense strand to SEQ ID NO: 1506396
uauuuggccaacuaagcug

SEQ ID NO: 1506398 - RNA, 19 nt, Artificial Sequence
  Description of Artificial Sequence: Synthetic oligonucleotide
  Sense strand starting at position 1435 of SEQ ID NO: 1244672
agcuuaguuggccaaauau

SEQ ID NO: 1506399 - RNA, 19 nt, Artificial Sequence
  Description of Artificial Sequence: Synthetic oligonucleotide
  Antisense strand to SEQ ID NO: 1506398
auauuuggccaacuaagcu

SEQ ID NO: 1506400 - RNA, 19 nt, Artificial Sequence
  Description of Artificial Sequence: Synthetic oligonucleotide
  Sense strand starting at position 1445 of SEQ ID NO: 1244672
gccaaauauuuacaaagag

SEQ ID NO: 1506401 - RNA, 19 nt, Artificial Sequence
  Description of Artificial Sequence: Synthetic oligonucleotide
  Antisense strand to SEQ ID NO: 1506400
cucuuuguaaauauuuggc

SEQ ID NO: 1506402 - RNA, 19 nt, Artificial Sequence
  Description of Artificial Sequence: Synthetic oligonucleotide
  Sense strand starting at position 1460 of SEQ ID NO: 1244672
agagauagcugugaccaca

SEQ ID NO: 1506403 - RNA, 19 nt, Artificial Sequence
  Description of Artificial Sequence: Synthetic oligonucleotide
  Antisense strand to SEQ ID NO: 1506402
uguggucacagcuaucucu

SEQ ID NO: 1506404 - RNA, 19 nt, Artificial Sequence
  Description of Artificial Sequence: Synthetic oligonucleotide
  Sense strand starting at position 1463 of SEQ ID NO: 1244672
gauagcugugaccacacaa

SEQ ID NO: 1506405 - RNA, 19 nt, Artificial Sequence
  Description of Artificial Sequence: Synthetic oligonucleotide
  Antisense strand to SEQ ID NO: 1506404
uuguguggucacagcuauc

SEQ ID NO: 1506406 - RNA, 19 nt, Artificial Sequence
  Description of Artificial Sequence: Synthetic oligonucleotide
  Sense strand starting at position 2821 of SEQ ID NO: 1244672
gaaagaagccuuuggugac

SEQ ID NO: 1506407 - RNA, 19 nt, Artificial Sequence
  Description of Artificial Sequence: Synthetic oligonucleotide
  Antisense strand to SEQ ID NO: 1506406
gucaccaaaggcuucuuuc

SEQ ID NO: 1506408 - RNA, 19 nt, Artificial Sequence
  Description of Artificial Sequence: Synthetic oligonucleotide
  Sense strand starting at position 2857 of SEQ ID NO: 1244672
ggcugaauucuggaagcua

SEQ ID NO: 1506409 - RNA, 19 nt, Artificial Sequence
  Description of Artificial Sequence: Synthetic oligonucleotide
  Antisense strand to SEQ ID NO: 1506408
uagcuuccagaauucagcc

SEQ ID NO: 1506410 - RNA, 19 nt, Artificial Sequence
  Description of Artificial Sequence: Synthetic oligonucleotide
  Sense strand starting at position 3307 of SEQ ID NO: 1244672
cugggccugucacucaaua

SEQ ID NO: 1506411 - RNA, 19 nt, Artificial Sequence
  Description of Artificial Sequence: Synthetic oligonucleotide
  Antisense strand to SEQ ID NO: 1506410
uauugagugacaggcccag

SEQ ID NO: 1506412 - RNA, 19 nt, Artificial Sequence
  Description of Artificial Sequence: Synthetic oligonucleotide
  Sense strand starting at position 3318 of SEQ ID NO: 1244672
acucaauaucuguggaauu

SEQ ID NO: 1506413 - RNA, 19 nt, Artificial Sequence
  Description of Artificial Sequence: Synthetic oligonucleotide
  Antisense strand to SEQ ID NO: 1506412
aauuccacagauauugagu

SEQ ID NO: 1506414 - RNA, 19 nt, Artificial Sequence
  Description of Artificial Sequence: Synthetic oligonucleotide
  Sense strand starting at position 3319 of SEQ ID NO: 1244672
cucaauaucuguggaauuu

SEQ ID NO: 1506415 - RNA, 19 nt, Artificial Sequence
  Description of Artificial Sequence: Synthetic oligonucleotide
  Antisense strand to SEQ ID NO: 1506414
aaauuccacagauauugag

SEQ ID NO: 1506416 - RNA, 19 nt, Artificial Sequence
  Description of Artificial Sequence: Synthetic oligonucleotide
  Sense strand starting at position 3482 of SEQ ID NO: 1244672
gugagaagagccugucuuu

SEQ ID NO: 1506417 - RNA, 19 nt, Artificial Sequence
  Description of Artificial Sequence: Synthetic oligonucleotide
  Antisense strand to SEQ ID NO: 1506416
aaagacaggcucuucucac

SEQ ID NO: 1506418 - RNA, 19 nt, Artificial Sequence
  Description of Artificial Sequence: Synthetic oligonucleotide
  Sense strand starting at position 3557 of SEQ ID NO: 1244672
uccagaaaccgcugacaaa

SEQ ID NO: 1506419 - RNA, 19 nt, Artificial Sequence
  Description of Artificial Sequence: Synthetic oligonucleotide
  Antisense strand to SEQ ID NO: 1506418
uuugucagcgguuucugga

SEQ ID NO: 1506420 - RNA, 19 nt, Artificial Sequence
  Description of Artificial Sequence: Synthetic oligonucleotide
  Sense strand starting at position 3617 of SEQ ID NO: 1244672
aacagaaagccucgaggau

SEQ ID NO: 1506421 - RNA, 19 nt, Artificial Sequence
  Description of Artificial Sequence: Synthetic oligonucleotide
  Antisense strand to SEQ ID NO: 1506420
auccucgaggcuuucuguu

SEQ ID NO: 1506422 - RNA, 19 nt, Artificial Sequence
  Description of Artificial Sequence: Synthetic oligonucleotide
  Sense strand starting at position 3834 of SEQ ID NO: 1244672
cuggauuccugagcuggga

SEQ ID NO: 1506423 - RNA, 19 nt, Artificial Sequence
  Description of Artificial Sequence: Synthetic oligonucleotide
  Antisense strand to SEQ ID NO: 1506422
ucccagcucaggaauccag

SEQ ID NO: 1506424 - RNA, 19 nt, Artificial Sequence
  Description of Artificial Sequence: Synthetic oligonucleotide
  Sense strand starting at position 3906 of SEQ ID NO: 1244672
ucuugcugucaccaaauga

SEQ ID NO: 1506425 - RNA, 19 nt, Artificial Sequence
  Description of Artificial Sequence: Synthetic oligonucleotide
  Antisense strand to SEQ ID NO: 1506424
ucauuuggugacagcaaga

SEQ ID NO: 1506426 - RNA, 19 nt, Artificial Sequence
  Description of Artificial Sequence: Synthetic oligonucleotide
  Sense strand starting at position 24 of SEQ ID NO: 1244673
gggagaucguguucaaauc

SEQ ID NO: 1506427 - RNA, 19 nt, Artificial Sequence
  Description of Artificial Sequence: Synthetic oligonucleotide
  Antisense strand to SEQ ID NO: 1506426
gauuugaacacgaucuccc

SEQ ID NO: 1506428 - RNA, 19 nt, Artificial Sequence
  Description of Artificial Sequence: Synthetic oligonucleotide
  Sense strand starting at position 118 of SEQ ID NO: 1244673
aauggagauucuugugaga

SEQ ID NO: 1506429 - RNA, 19 nt, Artificial Sequence
  Description of Artificial Sequence: Synthetic oligonucleotide
  Antisense strand to SEQ ID NO: 1506428
ucucacaagaaucuccauu

SEQ ID NO: 1506430 - RNA, 19 nt, Artificial Sequence
  Description of Artificial Sequence: Synthetic oligonucleotide
  Sense strand starting at position 121 of SEQ ID NO: 1244673
ggagauucuugugagacug

SEQ ID NO: 1506431 - RNA, 19 nt, Artificial Sequence
  Description of Artificial Sequence: Synthetic oligonucleotide
  Antisense strand to SEQ ID NO: 1506430
cagucucacaagaaucucc

SEQ ID NO: 1506432 - RNA, 19 nt, Artificial Sequence
  Description of Artificial Sequence: Synthetic oligonucleotide
  Sense strand starting at position 142 of SEQ ID NO: 1244673
ucgggauagccucacagaa

SEQ ID NO: 1506433 - RNA, 19 nt, Artificial Sequence
  Description of Artificial Sequence: Synthetic oligonucleotide
  Antisense strand to SEQ ID NO: 1506432
uucugugaggcuaucccga

SEQ ID NO: 1506434 - RNA, 19 nt, Artificial Sequence
  Description of Artificial Sequence: Synthetic oligonucleotide
  Sense strand starting at position 144 of SEQ ID NO: 1244673
gggauagccucacagaaac

SEQ ID NO: 1506435 - RNA, 19 nt, Artificial Sequence
  Description of Artificial Sequence: Synthetic oligonucleotide
  Antisense strand to SEQ ID NO: 1506434
guuucugugaggcuauccc

SEQ ID NO: 1506436 - RNA, 19 nt, Artificial Sequence
  Description of Artificial Sequence: Synthetic oligonucleotide
  Sense strand starting at position 220 of SEQ ID NO: 1244673
ucaaacacucguugagcaa

SEQ ID NO: 1506437 - RNA, 19 nt, Artificial Sequence
  Description of Artificial Sequence: Synthetic oligonucleotide
  Antisense strand to SEQ ID NO: 1506436
uugcucaacgaguguuuga

SEQ ID NO: 1506438 - RNA, 19 nt, Artificial Sequence
  Description of Artificial Sequence: Synthetic oligonucleotide
  Sense strand starting at position 286 of SEQ ID NO: 1244673
uccucauguccguucuagu

SEQ ID NO: 1506439 - RNA, 19 nt, Artificial Sequence
  Description of Artificial Sequence: Synthetic oligonucleotide
  Antisense strand to SEQ ID NO: 1506438
acuagaacggacaugagga

SEQ ID NO: 1506440 - RNA, 19 nt, Artificial Sequence
  Description of Artificial Sequence: Synthetic oligonucleotide
  Sense strand starting at position 376 of SEQ ID NO: 1244673
gcugaaucugcccagugga

SEQ ID NO: 1506441 - RNA, 19 nt, Artificial Sequence
  Description of Artificial Sequence: Synthetic oligonucleotide
  Antisense strand to SEQ ID NO: 1506440
uccacugggcagauucagc

SEQ ID NO: 1506442 - RNA, 19 nt, Artificial Sequence
  Description of Artificial Sequence: Synthetic oligonucleotide
  Sense strand starting at position 442 of SEQ ID NO: 1244673
aacaaaggcugagagauaa

SEQ ID NO: 1506443 - RNA, 19 nt, Artificial Sequence
  Description of Artificial Sequence: Synthetic oligonucleotide
  Antisense strand to SEQ ID NO: 1506442
uuaucucucagccuuuguu

SEQ ID NO: 1506444 - RNA, 19 nt, Artificial Sequence
  Description of Artificial Sequence: Synthetic oligonucleotide
  Sense strand starting at position 481 of SEQ ID NO: 1244673
ggaggacguccaugcacau

SEQ ID NO: 1506445 - RNA, 19 nt, Artificial Sequence
  Description of Artificial Sequence: Synthetic oligonucleotide
  Antisense strand to SEQ ID NO: 1506444
augugcauggacguccucc

SEQ ID NO: 1506446 - RNA, 19 nt, Artificial Sequence
  Description of Artificial Sequence: Synthetic oligonucleotide
  Sense strand starting at position 533 of SEQ ID NO: 1244673
gugaccauucagugaccga

SEQ ID NO: 1506447 - RNA, 19 nt, Artificial Sequence
  Description of Artificial Sequence: Synthetic oligonucleotide
  Antisense strand to SEQ ID NO: 1506446
ucggucacugaauggucac

SEQ ID NO: 1506448 - RNA, 19 nt, Artificial Sequence
  Description of Artificial Sequence: Synthetic oligonucleotide
  Sense strand starting at position 834 of SEQ ID NO: 1244673
gugacaaaucuggagugcu

SEQ ID NO: 1506449 - RNA, 19 nt, Artificial Sequence
  Description of Artificial Sequence: Synthetic oligonucleotide
  Antisense strand to SEQ ID NO: 1506448
agcacuccagauuugucac

SEQ ID NO: 1506450 - RNA, 19 nt, Artificial Sequence
  Description of Artificial Sequence: Synthetic oligonucleotide
  Sense strand starting at position 900 of SEQ ID NO: 1244673
cgcauuuaguguuauuuau

SEQ ID NO: 1506451 - RNA, 19 nt, Artificial Sequence
  Description of Artificial Sequence: Synthetic oligonucleotide
  Antisense strand to SEQ ID NO: 1506450
auaaauaacacuaaaugcg

SEQ ID NO: 1506452 - RNA, 19 nt, Artificial Sequence
  Description of Artificial Sequence: Synthetic oligonucleotide
  Sense strand starting at position 906 of SEQ ID NO: 1244673
uaguguuauuuauagggaa

SEQ ID NO: 1506453 - RNA, 19 nt, Artificial Sequence
  Description of Artificial Sequence: Synthetic oligonucleotide
  Antisense strand to SEQ ID NO: 1506452
uucccuauaaauaacacua

SEQ ID NO: 1506454 - RNA, 19 nt, Artificial Sequence
  Description of Artificial Sequence: Synthetic oligonucleotide
  Sense strand starting at position 1113 of SEQ ID NO: 1244673
gcagaucauuaggucuacu

SEQ ID NO: 1506455 - RNA, 19 nt, Artificial Sequence
  Description of Artificial Sequence: Synthetic oligonucleotide
  Antisense strand to SEQ ID NO: 1506454
aguagaccuaaugaucugc

SEQ ID NO: 1506456 - RNA, 19 nt, Artificial Sequence
  Description of Artificial Sequence: Synthetic oligonucleotide
  Sense strand starting at position 1191 of SEQ ID NO: 1244673
cccagaccucuggguguua

SEQ ID NO: 1506457 - RNA, 19 nt, Artificial Sequence
  Description of Artificial Sequence: Synthetic oligonucleotide
  Antisense strand to SEQ ID NO: 1506456
uaacacccagaggucuggg

SEQ ID NO: 1506458 - RNA, 19 nt, Artificial Sequence
  Description of Artificial Sequence: Synthetic oligonucleotide
  Sense strand starting at position 1192 of SEQ ID NO: 1244673
ccagaccucuggguguuaa

SEQ ID NO: 1506459 - RNA, 19 nt, Artificial Sequence
  Description of Artificial Sequence: Synthetic oligonucleotide
  Antisense strand to SEQ ID NO: 1506458
uuaacacccagaggucugg

SEQ ID NO: 1506460 - RNA, 19 nt, Artificial Sequence
  Description of Artificial Sequence: Synthetic oligonucleotide
  Sense strand starting at position 1257 of SEQ ID NO: 1244673
gugcgauucccaggguuga

SEQ ID NO: 1506461 - RNA, 19 nt, Artificial Sequence
  Description of Artificial Sequence: Synthetic oligonucleotide
  Antisense strand to SEQ ID NO: 1506460
ucaacccugggaaucgcac

SEQ ID NO: 1506462 - RNA, 19 nt, Artificial Sequence
  Description of Artificial Sequence: Synthetic oligonucleotide
  Sense strand starting at position 1258 of SEQ ID NO: 1244673
ugcgauucccaggguugau

SEQ ID NO: 1506463 - RNA, 19 nt, Artificial Sequence
  Description of Artificial Sequence: Synthetic oligonucleotide
  Antisense strand to SEQ ID NO: 1506462
aucaacccugggaaucgca

SEQ ID NO: 1506464 - RNA, 19 nt, Artificial Sequence
  Description of Artificial Sequence: Synthetic oligonucleotide
  Sense strand starting at position 1477 of SEQ ID NO: 1244673
cccucaugggccuguaauu

SEQ ID NO: 1506465 - RNA, 19 nt, Artificial Sequence
  Description of Artificial Sequence: Synthetic oligonucleotide
  Antisense strand to SEQ ID NO: 1506464
aauuacaggcccaugaggg

SEQ ID NO: 1506466 - RNA, 19 nt, Artificial Sequence
  Description of Artificial Sequence: Synthetic oligonucleotide
  Sense strand starting at position 1584 of SEQ ID NO: 1244673
gggaaagcuucccaaggcu

SEQ ID NO: 1506467 - RNA, 19 nt, Artificial Sequence
  Description of Artificial Sequence: Synthetic oligonucleotide
  Antisense strand to SEQ ID NO: 1506466
agccuugggaagcuuuccc

SEQ ID NO: 1506468 - RNA, 19 nt, Artificial Sequence
  Description of Artificial Sequence: Synthetic oligonucleotide
  Sense strand starting at position 2151 of SEQ ID NO: 1244673
uguggaagugccucgcauu

SEQ ID NO: 1506469 - RNA, 19 nt, Artificial Sequence
  Description of Artificial Sequence: Synthetic oligonucleotide
  Antisense strand to SEQ ID NO: 1506468
aaugcgaggcacuuccaca

SEQ ID NO: 1506470 - RNA, 19 nt, Artificial Sequence
  Description of Artificial Sequence: Synthetic oligonucleotide
  Sense strand starting at position 2159 of SEQ ID NO: 1244673
ugccucgcauugucugaua

SEQ ID NO: 1506471 - RNA, 19 nt, Artificial Sequence
  Description of Artificial Sequence: Synthetic oligonucleotide
  Antisense strand to SEQ ID NO: 1506470
uaucagacaaugcgaggca

SEQ ID NO: 1506472 - RNA, 19 nt, Artificial Sequence
  Description of Artificial Sequence: Synthetic oligonucleotide
  Sense strand starting at position 2161 of SEQ ID NO: 1244673
ccucgcauugucugauaag

SEQ ID NO: 1506473 - RNA, 19 nt, Artificial Sequence
  Description of Artificial Sequence: Synthetic oligonucleotide
  Antisense strand to SEQ ID NO: 1506472
cuuaucagacaaugcgagg

SEQ ID NO: 1506474 - RNA, 19 nt, Artificial Sequence
  Description of Artificial Sequence: Synthetic oligonucleotide
  Sense strand starting at position 2205 of SEQ ID NO: 1244673
acaggaaguugggagaaua

SEQ ID NO: 1506475 - RNA, 19 nt, Artificial Sequence
  Description of Artificial Sequence: Synthetic oligonucleotide
  Antisense strand to SEQ ID NO: 1506474
uauucucccaacuuccugu

SEQ ID NO: 1506476 - RNA, 19 nt, Artificial Sequence
  Description of Artificial Sequence: Synthetic oligonucleotide
  Sense strand starting at position 2305 of SEQ ID NO: 1244673
ggugaaaguccuuguggag

SEQ ID NO: 1506477 - RNA, 19 nt, Artificial Sequence
  Description of Artificial Sequence: Synthetic oligonucleotide
  Antisense strand to SEQ ID NO: 1506476
cuccacaaggacuuucacc

SEQ ID NO: 1506478 - RNA, 19 nt, Artificial Sequence
  Description of Artificial Sequence: Synthetic oligonucleotide
  Sense strand starting at position 2335 of SEQ ID NO: 1244673
caguguucggaggacagau

SEQ ID NO: 1506479 - RNA, 19 nt, Artificial Sequence
  Description of Artificial Sequence: Synthetic oligonucleotide
  Antisense strand to SEQ ID NO: 1506478
aucuguccuccgaacacug

SEQ ID NO: 1506480 - RNA, 19 nt, Artificial Sequence
  Description of Artificial Sequence: Synthetic oligonucleotide
  Sense strand starting at position 2692 of SEQ ID NO: 1244673
gaaugcuggucugaccaca

SEQ ID NO: 1506481 - RNA, 19 nt, Artificial Sequence
  Description of Artificial Sequence: Synthetic oligonucleotide
  Antisense strand to SEQ ID NO: 1506480
uguggucagaccagcauuc

SEQ ID NO: 1506482 - RNA, 19 nt, Artificial Sequence
  Description of Artificial Sequence: Synthetic oligonucleotide
  Sense strand starting at position 2720 of SEQ ID NO: 1244673
ggcuucugccugcaacuau

SEQ ID NO: 1506483 - RNA, 19 nt, Artificial Sequence
  Description of Artificial Sequence: Synthetic oligonucleotide
  Antisense strand to SEQ ID NO: 1506482
auaguugcaggcagaagcc

SEQ ID NO: 1506484 - RNA, 19 nt, Artificial Sequence
  Description of Artificial Sequence: Synthetic oligonucleotide
  Sense strand starting at position 2780 of SEQ ID NO: 1244673
cgcaucuucucaucccaga

SEQ ID NO: 1506485 - RNA, 19 nt, Artificial Sequence
  Description of Artificial Sequence: Synthetic oligonucleotide
  Antisense strand to SEQ ID NO: 1506484
ucugggaugagaagaugcg

SEQ ID NO: 1506486 - RNA, 19 nt, Artificial Sequence
  Description of Artificial Sequence: Synthetic oligonucleotide
  Sense strand starting at position 2992 of SEQ ID NO: 1244673
caacucaggucuccagaga

SEQ ID NO: 1506487 - RNA, 19 nt, Artificial Sequence
  Description of Artificial Sequence: Synthetic oligonucleotide
  Antisense strand to SEQ ID NO: 1506486
ucucuggagaccugaguug

SEQ ID NO: 1506488 - RNA, 19 nt, Artificial Sequence
  Description of Artificial Sequence: Synthetic oligonucleotide
  Sense strand starting at position 3112 of SEQ ID NO: 1244673
acucguauacuagaugcua

SEQ ID NO: 1506489 - RNA, 19 nt, Artificial Sequence
  Description of Artificial Sequence: Synthetic oligonucleotide
  Antisense strand to SEQ ID NO: 1506488
uagcaucuaguauacgagu

SEQ ID NO: 1506490 - RNA, 19 nt, Artificial Sequence
  Description of Artificial Sequence: Synthetic oligonucleotide
  Sense strand starting at position 3325 of SEQ ID NO: 1244673
uuucucaugugggauccaa

SEQ ID NO: 1506491 - RNA, 19 nt, Artificial Sequence
  Description of Artificial Sequence: Synthetic oligonucleotide
  Antisense strand to SEQ ID NO: 1506490
uuggaucccacaugagaaa

SEQ ID NO: 1506492 - RNA, 19 nt, Artificial Sequence
  Description of Artificial Sequence: Synthetic oligonucleotide
  Sense strand starting at position 3424 of SEQ ID NO: 1244673
ccugcuuccggguggcaua

SEQ ID NO: 1506493 - RNA, 19 nt, Artificial Sequence
  Description of Artificial Sequence: Synthetic oligonucleotide
  Antisense strand to SEQ ID NO: 1506492
uaugccacccggaagcagg

SEQ ID NO: 1506494 - RNA, 19 nt, Artificial Sequence
  Description of Artificial Sequence: Synthetic oligonucleotide
  Sense strand starting at position 3471 of SEQ ID NO: 1244673
uaucuuagaugagcagaga

SEQ ID NO: 1506495 - RNA, 19 nt, Artificial Sequence
  Description of Artificial Sequence: Synthetic oligonucleotide
  Antisense strand to SEQ ID NO: 1506494
ucucugcucaucuaagaua

SEQ ID NO: 1506496 - RNA, 19 nt, Artificial Sequence
  Description of Artificial Sequence: Synthetic oligonucleotide
  Sense strand starting at position 3707 of SEQ ID NO: 1244673
ggguucucccagcaugaaa

SEQ ID NO: 1506497 - RNA, 19 nt, Artificial Sequence
  Description of Artificial Sequence: Synthetic oligonucleotide
  Antisense strand to SEQ ID NO: 1506496
uuucaugcugggagaaccc

SEQ ID NO: 1506498 - RNA, 19 nt, Artificial Sequence
  Description of Artificial Sequence: Synthetic oligonucleotide
  Sense strand starting at position 3800 of SEQ ID NO: 1244673
cgcagcaugccauuguaga

SEQ ID NO: 1506499 - RNA, 19 nt, Artificial Sequence
  Description of Artificial Sequence: Synthetic oligonucleotide
  Antisense strand to SEQ ID NO: 1506498
ucuacaauggcaugcugcg

SEQ ID NO: 1506500 - RNA, 19 nt, Artificial Sequence
  Description of Artificial Sequence: Synthetic oligonucleotide
  Sense strand starting at position 3801 of SEQ ID NO: 1244673
gcagcaugccauuguagag

SEQ ID NO: 1506501 - RNA, 19 nt, Artificial Sequence
  Description of Artificial Sequence: Synthetic oligonucleotide
  Antisense strand to SEQ ID NO: 1506500
cucuacaauggcaugcugc

SEQ ID NO: 1506502 - RNA, 19 nt, Artificial Sequence
  Description of Artificial Sequence: Synthetic oligonucleotide
  Sense strand starting at position 3807 of SEQ ID NO: 1244673
ugccauuguagagaagcaa

SEQ ID NO: 1506503 - RNA, 19 nt, Artificial Sequence
  Description of Artificial Sequence: Synthetic oligonucleotide
  Antisense strand to SEQ ID NO: 1506502
uugcuucucuacaauggca

SEQ ID NO: 1506504 - RNA, 19 nt, Artificial Sequence
  Description of Artificial Sequence: Synthetic oligonucleotide
  Sense strand starting at position 3978 of SEQ ID NO: 1244673
cggcauuucgagcauugag

SEQ ID NO: 1506505 - RNA, 19 nt, Artificial Sequence
  Description of Artificial Sequence: Synthetic oligonucleotide
  Antisense strand to SEQ ID NO: 1506504
cucaaugcucgaaaugccg

SEQ ID NO: 1506506 - RNA, 19 nt, Artificial Sequence
  Description of Artificial Sequence: Synthetic oligonucleotide
  Sense strand starting at position 294 of SEQ ID NO: 1244674
gcccguaggucacuucaga

SEQ ID NO: 1506507 - RNA, 19 nt, Artificial Sequence
  Description of Artificial Sequence: Synthetic oligonucleotide
  Antisense strand to SEQ ID NO: 1506506
ucugaagugaccuacgggc

SEQ ID NO: 1506508 - RNA, 19 nt, Artificial Sequence
  Description of Artificial Sequence: Synthetic oligonucleotide
  Sense strand starting at position 384 of SEQ ID NO: 1244674
ggcagaaacugucaucacu

SEQ ID NO: 1506509 - RNA, 19 nt, Artificial Sequence
  Description of Artificial Sequence: Synthetic oligonucleotide
  Antisense strand to SEQ ID NO: 1506508
agugaugacaguuucugcc

SEQ ID NO: 1506510 - RNA, 19 nt, Artificial Sequence
  Description of Artificial Sequence: Synthetic oligonucleotide
  Sense strand starting at position 748 of SEQ ID NO: 1244674
agacuuuggcuggaagcaa

SEQ ID NO: 1506511 - RNA, 19 nt, Artificial Sequence
  Description of Artificial Sequence: Synthetic oligonucleotide
  Antisense strand to SEQ ID NO: 1506510
uugcuuccagccaaagucu

SEQ ID NO: 1506512 - RNA, 19 nt, Artificial Sequence
  Description of Artificial Sequence: Synthetic oligonucleotide
  Sense strand starting at position 956 of SEQ ID NO: 1244674
gagagccgaguuuaaauaa

SEQ ID NO: 1506513 - RNA, 19 nt, Artificial Sequence
  Description of Artificial Sequence: Synthetic oligonucleotide
  Antisense strand to SEQ ID NO: 1506512
uuauuuaaacucggcucuc

SEQ ID NO: 1506514 - RNA, 19 nt, Artificial Sequence
  Description of Artificial Sequence: Synthetic oligonucleotide
  Sense strand starting at position 986 of SEQ ID NO: 1244674
aggagagcuuagcuucuga

SEQ ID NO: 1506515 - RNA, 19 nt, Artificial Sequence
  Description of Artificial Sequence: Synthetic oligonucleotide
  Antisense strand to SEQ ID NO: 1506514
ucagaagcuaagcucuccu

SEQ ID NO: 1506516 - RNA, 19 nt, Artificial Sequence
  Description of Artificial Sequence: Synthetic oligonucleotide
  Sense strand starting at position 1021 of SEQ ID NO: 1244674
cgagcuuggaaccgucaaa

SEQ ID NO: 1506517 - RNA, 19 nt, Artificial Sequence
  Description of Artificial Sequence: Synthetic oligonucleotide
  Antisense strand to SEQ ID NO: 1506516
uuugacgguuccaagcucg

SEQ ID NO: 1506518 - RNA, 19 nt, Artificial Sequence
  Description of Artificial Sequence: Synthetic oligonucleotide
  Sense strand starting at position 2049 of SEQ ID NO: 1244674
cuggaagauuccuaccaca

SEQ ID NO: 1506519 - RNA, 19 nt, Artificial Sequence
  Description of Artificial Sequence: Synthetic oligonucleotide
  Antisense strand to SEQ ID NO: 1506518
ugugguaggaaucuuccag

SEQ ID NO: 1506520 - RNA, 19 nt, Artificial Sequence
  Description of Artificial Sequence: Synthetic oligonucleotide
  Sense strand starting at position 2112 of SEQ ID NO: 1244674
gagucuuccucuccgggaa

SEQ ID NO: 1506521 - RNA, 19 nt, Artificial Sequence
  Description of Artificial Sequence: Synthetic oligonucleotide
  Antisense strand to SEQ ID NO: 1506520
uucccggagaggaagacuc

SEQ ID NO: 1506522 - RNA, 19 nt, Artificial Sequence
  Description of Artificial Sequence: Synthetic oligonucleotide
  Sense strand starting at position 2183 of SEQ ID NO: 1244674
cucagaggcugcuuacuua

SEQ ID NO: 1506523 - RNA, 19 nt, Artificial Sequence
  Description of Artificial Sequence: Synthetic oligonucleotide
  Antisense strand to SEQ ID NO: 1506522
uaaguaagcagccucugag

SEQ ID NO: 1506524 - RNA, 19 nt, Artificial Sequence
  Description of Artificial Sequence: Synthetic oligonucleotide
  Sense strand starting at position 2306 of SEQ ID NO: 1244674
ggcauccucucugucuuua

SEQ ID NO: 1506525 - RNA, 19 nt, Artificial Sequence
  Description of Artificial Sequence: Synthetic oligonucleotide
  Antisense strand to SEQ ID NO: 1506524
uaaagacagagaggaugcc

SEQ ID NO: 1506526 - RNA, 19 nt, Artificial Sequence
  Description of Artificial Sequence: Synthetic oligonucleotide
  Sense strand starting at position 2378 of SEQ ID NO: 1244674
gcccaagccuguuuaaaga

SEQ ID NO: 1506527 - RNA, 19 nt, Artificial Sequence
  Description of Artificial Sequence: Synthetic oligonucleotide
  Antisense strand to SEQ ID NO: 1506526
ucuuuaaacaggcuugggc

SEQ ID NO: 1506528 - RNA, 19 nt, Artificial Sequence
  Description of Artificial Sequence: Synthetic oligonucleotide
  Sense strand starting at position 2388 of SEQ ID NO: 1244674
guuuaaagagaaugugugu

SEQ ID NO: 1506529 - RNA, 19 nt, Artificial Sequence
  Description of Artificial Sequence: Synthetic oligonucleotide
  Antisense strand to SEQ ID NO: 1506528
acacacauucucuuuaaac

SEQ ID NO: 1506530 - RNA, 19 nt, Artificial Sequence
  Description of Artificial Sequence: Synthetic oligonucleotide
  Sense strand starting at position 2393 of SEQ ID NO: 1244674
aagagaauguguguuugug

SEQ ID NO: 1506531 - RNA, 19 nt, Artificial Sequence
  Description of Artificial Sequence: Synthetic oligonucleotide
  Antisense strand to SEQ ID NO: 1506530
cacaaacacacauucucuu

SEQ ID NO: 1506532 - RNA, 19 nt, Artificial Sequence
  Description of Artificial Sequence: Synthetic oligonucleotide
  Sense strand starting at position 2397 of SEQ ID NO: 1244674
gaauguguguuugugccaa

SEQ ID NO: 1506533 - RNA, 19 nt, Artificial Sequence
  Description of Artificial Sequence: Synthetic oligonucleotide
  Antisense strand to SEQ ID NO: 1506532
uuggcacaaacacacauuc

SEQ ID NO: 1506534 - RNA, 19 nt, Artificial Sequence
  Description of Artificial Sequence: Synthetic oligonucleotide
  Sense strand starting at position 2401 of SEQ ID NO: 1244674
guguguuugugccaaggcu

SEQ ID NO: 1506535 - RNA, 19 nt, Artificial Sequence
  Description of Artificial Sequence: Synthetic oligonucleotide
  Antisense strand to SEQ ID NO: 1506534
agccuuggcacaaacacac

SEQ ID NO: 1506536 - RNA, 19 nt, Artificial Sequence
  Description of Artificial Sequence: Synthetic oligonucleotide
  Sense strand starting at position 2453 of SEQ ID NO: 1244674
cugucagcuucuguugaga

SEQ ID NO: 1506537 - RNA, 19 nt, Artificial Sequence
  Description of Artificial Sequence: Synthetic oligonucleotide
  Antisense strand to SEQ ID NO: 1506536
ucucaacagaagcugacag

SEQ ID NO: 1506538 - RNA, 19 nt, Artificial Sequence
  Description of Artificial Sequence: Synthetic oligonucleotide
  Sense strand starting at position 2455 of SEQ ID NO: 1244674
gucagcuucuguugagaaa

SEQ ID NO: 1506539 - RNA, 19 nt, Artificial Sequence
  Description of Artificial Sequence: Synthetic oligonucleotide
  Antisense strand to SEQ ID NO: 1506538
uuucucaacagaagcugac

SEQ ID NO: 1506540 - RNA, 19 nt, Artificial Sequence
  Description of Artificial Sequence: Synthetic oligonucleotide
  Sense strand starting at position 2456 of SEQ ID NO: 1244674
ucagcuucuguugagaaag

SEQ ID NO: 1506541 - RNA, 19 nt, Artificial Sequence
  Description of Artificial Sequence: Synthetic oligonucleotide
  Antisense strand to SEQ ID NO: 1506540
cuuucucaacagaagcuga

SEQ ID NO: 1506542 - RNA, 19 nt, Artificial Sequence
  Description of Artificial Sequence: Synthetic oligonucleotide
  Sense strand starting at position 2530 of SEQ ID NO: 1244674
auaagacaguucugcucuu

SEQ ID NO: 1506543 - RNA, 19 nt, Artificial Sequence
  Description of Artificial Sequence: Synthetic oligonucleotide
  Antisense strand to SEQ ID NO: 1506542
aagagcagaacugucuuau

SEQ ID NO: 1506544 - RNA, 19 nt, Artificial Sequence
  Description of Artificial Sequence: Synthetic oligonucleotide
  Sense strand starting at position 2635 of SEQ ID NO: 1244674
gcaggccucugaguuuaca

SEQ ID NO: 1506545 - RNA, 19 nt, Artificial Sequence
  Description of Artificial Sequence: Synthetic oligonucleotide
  Antisense strand to SEQ ID NO: 1506544
uguaaacucagaggccugc

SEQ ID NO: 1506546 - RNA, 19 nt, Artificial Sequence
  Description of Artificial Sequence: Synthetic oligonucleotide
  Sense strand starting at position 2664 of SEQ ID NO: 1244674
cacagagccaggugaguua

SEQ ID NO: 1506547 - RNA, 19 nt, Artificial Sequence
  Description of Artificial Sequence: Synthetic oligonucleotide
  Antisense strand to SEQ ID NO: 1506546
uaacucaccuggcucugug

SEQ ID NO: 1506548 - RNA, 19 nt, Artificial Sequence
  Description of Artificial Sequence: Synthetic oligonucleotide
  Sense strand starting at position 2675 of SEQ ID NO: 1244674
gugaguuaccugugaccag

SEQ ID NO: 1506549 - RNA, 19 nt, Artificial Sequence
  Description of Artificial Sequence: Synthetic oligonucleotide
  Antisense strand to SEQ ID NO: 1506548
cuggucacagguaacucac

SEQ ID NO: 1506550 - RNA, 19 nt, Artificial Sequence
  Description of Artificial Sequence: Synthetic oligonucleotide
  Sense strand starting at position 2770 of SEQ ID NO: 1244674
ccgcucucugccugggaua

SEQ ID NO: 1506551 - RNA, 19 nt, Artificial Sequence
  Description of Artificial Sequence: Synthetic oligonucleotide
  Antisense strand to SEQ ID NO: 1506550
uaucccaggcagagagcgg

SEQ ID NO: 1506552 - RNA, 19 nt, Artificial Sequence
  Description of Artificial Sequence: Synthetic oligonucleotide
  Sense strand starting at position 2798 of SEQ ID NO: 1244674
augcaaucuccuuggcaga

SEQ ID NO: 1506553 - RNA, 19 nt, Artificial Sequence
  Description of Artificial Sequence: Synthetic oligonucleotide
  Antisense strand to SEQ ID NO: 1506552
ucugccaaggagauugcau

SEQ ID NO: 1506554 - RNA, 19 nt, Artificial Sequence
  Description of Artificial Sequence: Synthetic oligonucleotide
  Sense strand starting at position 2799 of SEQ ID NO: 1244674
ugcaaucuccuuggcagaa

SEQ ID NO: 1506555 - RNA, 19 nt, Artificial Sequence
  Description of Artificial Sequence: Synthetic oligonucleotide
  Antisense strand to SEQ ID NO: 1506554
uucugccaaggagauugca

SEQ ID NO: 1506556 - RNA, 19 nt, Artificial Sequence
  Description of Artificial Sequence: Synthetic oligonucleotide
  Sense strand starting at position 2800 of SEQ ID NO: 1244674
gcaaucuccuuggcagaaa

SEQ ID NO: 1506557 - RNA, 19 nt, Artificial Sequence
  Description of Artificial Sequence: Synthetic oligonucleotide
  Antisense strand to SEQ ID NO: 1506556
uuucugccaaggagauugc

SEQ ID NO: 1506558 - RNA, 19 nt, Artificial Sequence
  Description of Artificial Sequence: Synthetic oligonucleotide
  Sense strand starting at position 2852 of SEQ ID NO: 1244674
ccagccuucugggagacau

SEQ ID NO: 1506559 - RNA, 19 nt, Artificial Sequence
  Description of Artificial Sequence: Synthetic oligonucleotide
  Antisense strand to SEQ ID NO: 1506558
augucucccagaaggcugg

SEQ ID NO: 1506560 - RNA, 19 nt, Artificial Sequence
  Description of Artificial Sequence: Synthetic oligonucleotide
  Sense strand starting at position 2983 of SEQ ID NO: 1244674
ggaucauagucacgagaga

SEQ ID NO: 1506561 - RNA, 19 nt, Artificial Sequence
  Description of Artificial Sequence: Synthetic oligonucleotide
  Antisense strand to SEQ ID NO: 1506560
ucucucgugacuaugaucc

SEQ ID NO: 1506562 - RNA, 19 nt, Artificial Sequence
  Description of Artificial Sequence: Synthetic oligonucleotide
  Sense strand starting at position 3021 of SEQ ID NO: 1244674
gggauagcauguccuaauc

SEQ ID NO: 1506563 - RNA, 19 nt, Artificial Sequence
  Description of Artificial Sequence: Synthetic oligonucleotide
  Antisense strand to SEQ ID NO: 1506562
gauuaggacaugcuauccc

SEQ ID NO: 1506564 - RNA, 19 nt, Artificial Sequence
  Description of Artificial Sequence: Synthetic oligonucleotide
  Sense strand starting at position 3055 of SEQ ID NO: 1244674
gggaccuuguuuggaacaa

SEQ ID NO: 1506565 - RNA, 19 nt, Artificial Sequence
  Description of Artificial Sequence: Synthetic oligonucleotide
  Antisense strand to SEQ ID NO: 1506564
uuguuccaaacaagguccc

SEQ ID NO: 1506566 - RNA, 19 nt, Artificial Sequence
  Description of Artificial Sequence: Synthetic oligonucleotide
  Sense strand starting at position 3059 of SEQ ID NO: 1244674
ccuuguuuggaacaagagu

SEQ ID NO: 1506567 - RNA, 19 nt, Artificial Sequence
  Description of Artificial Sequence: Synthetic oligonucleotide
  Antisense strand to SEQ ID NO: 1506566
acucuuguuccaaacaagg

SEQ ID NO: 1506568 - RNA, 19 nt, Artificial Sequence
  Description of Artificial Sequence: Synthetic oligonucleotide
  Sense strand starting at position 3101 of SEQ ID NO: 1244674
agaucuugcuguggcgaga

SEQ ID NO: 1506569 - RNA, 19 nt, Artificial Sequence
  Description of Artificial Sequence: Synthetic oligonucleotide
  Antisense strand to SEQ ID NO: 1506568
ucucgccacagcaagaucu

SEQ ID NO: 1506570 - RNA, 19 nt, Artificial Sequence
  Description of Artificial Sequence: Synthetic oligonucleotide
  Sense strand starting at position 3150 of SEQ ID NO: 1244674
ggcagucucggugcucaua

SEQ ID NO: 1506571 - RNA, 19 nt, Artificial Sequence
  Description of Artificial Sequence: Synthetic oligonucleotide
  Antisense strand to SEQ ID NO: 1506570
uaugagcaccgagacugcc

SEQ ID NO: 1506572 - RNA, 19 nt, Artificial Sequence
  Description of Artificial Sequence: Synthetic oligonucleotide
  Sense strand starting at position 3226 of SEQ ID NO: 1244674
cccggagagaucuguagau

SEQ ID NO: 1506573 - RNA, 19 nt, Artificial Sequence
  Description of Artificial Sequence: Synthetic oligonucleotide
  Antisense strand to SEQ ID NO: 1506572
aucuacagaucucuccggg

SEQ ID NO: 1506574 - RNA, 19 nt, Artificial Sequence
  Description of Artificial Sequence: Synthetic oligonucleotide
  Sense strand starting at position 3230 of SEQ ID NO: 1244674
gagagaucuguagaugcug

SEQ ID NO: 1506575 - RNA, 19 nt, Artificial Sequence
  Description of Artificial Sequence: Synthetic oligonucleotide
  Antisense strand to SEQ ID NO: 1506574
cagcaucuacagaucucuc

SEQ ID NO: 1506576 - RNA, 19 nt, Artificial Sequence
  Description of Artificial Sequence: Synthetic oligonucleotide
  Sense strand starting at position 3238 of SEQ ID NO: 1244674
uguagaugcugguguugaa

SEQ ID NO: 1506577 - RNA, 19 nt, Artificial Sequence
  Description of Artificial Sequence: Synthetic oligonucleotide
  Antisense strand to SEQ ID NO: 1506576
uucaacaccagcaucuaca

SEQ ID NO: 1506578 - RNA, 19 nt, Artificial Sequence
  Description of Artificial Sequence: Synthetic oligonucleotide
  Sense strand starting at position 3810 of SEQ ID NO: 1244674
gccacaagcacguuguauu

SEQ ID NO: 1506579 - RNA, 19 nt, Artificial Sequence
  Description of Artificial Sequence: Synthetic oligonucleotide
  Antisense strand to SEQ ID NO: 1506578
aauacaacgugcuuguggc

SEQ ID NO: 1506580 - RNA, 19 nt, Artificial Sequence
  Description of Artificial Sequence: Synthetic oligonucleotide
  Sense strand starting at position 3822 of SEQ ID NO: 1244674
uuguauugauugugcacuu

SEQ ID NO: 1506581 - RNA, 19 nt, Artificial Sequence
  Description of Artificial Sequence: Synthetic oligonucleotide
  Antisense strand to SEQ ID NO: 1506580
aagugcacaaucaauacaa

SEQ ID NO: 1506582 - RNA, 19 nt, Artificial Sequence
  Description of Artificial Sequence: Synthetic oligonucleotide
  Sense strand starting at position 3823 of SEQ ID NO: 1244674
uguauugauugugcacuuu

SEQ ID NO: 1506583 - RNA, 19 nt, Artificial Sequence
  Description of Artificial Sequence: Synthetic oligonucleotide
  Antisense strand to SEQ ID NO: 1506582
aaagugcacaaucaauaca

SEQ ID NO: 1506584 - RNA, 19 nt, Artificial Sequence
  Description of Artificial Sequence: Synthetic oligonucleotide
  Sense strand starting at position 55 of SEQ ID NO: 1244675
ggccauuauccuggcauag

SEQ ID NO: 1506585 - RNA, 19 nt, Artificial Sequence
  Description of Artificial Sequence: Synthetic oligonucleotide
  Antisense strand to SEQ ID NO: 1506584
cuaugccaggauaauggcc

SEQ ID NO: 1506586 - RNA, 19 nt, Artificial Sequence
  Description of Artificial Sequence: Synthetic oligonucleotide
  Sense strand starting at position 57 of SEQ ID NO: 1244675
ccauuauccuggcauagua

SEQ ID NO: 1506587 - RNA, 19 nt, Artificial Sequence
  Description of Artificial Sequence: Synthetic oligonucleotide
  Antisense strand to SEQ ID NO: 1506586
uacuaugccaggauaaugg

SEQ ID NO: 1506588 - RNA, 19 nt, Artificial Sequence
  Description of Artificial Sequence: Synthetic oligonucleotide
  Sense strand starting at position 59 of SEQ ID NO: 1244675
auuauccuggcauaguauu

SEQ ID NO: 1506589 - RNA, 19 nt, Artificial Sequence
  Description of Artificial Sequence: Synthetic oligonucleotide
  Antisense strand to SEQ ID NO: 1506588
aauacuaugccaggauaau

SEQ ID NO: 1506590 - RNA, 19 nt, Artificial Sequence
  Description of Artificial Sequence: Synthetic oligonucleotide
  Sense strand starting at position 115 of SEQ ID NO: 1244675
gagcgacuuuagucuuggu

SEQ ID NO: 1506591 - RNA, 19 nt, Artificial Sequence
  Description of Artificial Sequence: Synthetic oligonucleotide
  Antisense strand to SEQ ID NO: 1506590
accaagacuaaagucgcuc

SEQ ID NO: 1506592 - RNA, 19 nt, Artificial Sequence
  Description of Artificial Sequence: Synthetic oligonucleotide
  Sense strand starting at position 120 of SEQ ID NO: 1244675
acuuuagucuuggugccua

SEQ ID NO: 1506593 - RNA, 19 nt, Artificial Sequence
  Description of Artificial Sequence: Synthetic oligonucleotide
  Antisense strand to SEQ ID NO: 1506592
uaggcaccaagacuaaagu

SEQ ID NO: 1506594 - RNA, 19 nt, Artificial Sequence
  Description of Artificial Sequence: Synthetic oligonucleotide
  Sense strand starting at position 124 of SEQ ID NO: 1244675
uagucuuggugccuacaga

SEQ ID NO: 1506595 - RNA, 19 nt, Artificial Sequence
  Description of Artificial Sequence: Synthetic oligonucleotide
  Antisense strand to SEQ ID NO: 1506594
ucuguaggcaccaagacua

SEQ ID NO: 1506596 - RNA, 19 nt, Artificial Sequence
  Description of Artificial Sequence: Synthetic oligonucleotide
  Sense strand starting at position 125 of SEQ ID NO: 1244675
agucuuggugccuacagaa

SEQ ID NO: 1506597 - RNA, 19 nt, Artificial Sequence
  Description of Artificial Sequence: Synthetic oligonucleotide
  Antisense strand to SEQ ID NO: 1506596
uucuguaggcaccaagacu

SEQ ID NO: 1506598 - RNA, 19 nt, Artificial Sequence
  Description of Artificial Sequence: Synthetic oligonucleotide
  Sense strand starting at position 157 of SEQ ID NO: 1244675
cccagaucaggugguagau

SEQ ID NO: 1506599 - RNA, 19 nt, Artificial Sequence
  Description of Artificial Sequence: Synthetic oligonucleotide
  Antisense strand to SEQ ID NO: 1506598
aucuaccaccugaucuggg

SEQ ID NO: 1506600 - RNA, 19 nt, Artificial Sequence
  Description of Artificial Sequence: Synthetic oligonucleotide
  Sense strand starting at position 167 of SEQ ID NO: 1244675
gugguagaugauugucaca

SEQ ID NO: 1506601 - RNA, 19 nt, Artificial Sequence
  Description of Artificial Sequence: Synthetic oligonucleotide
  Antisense strand to SEQ ID NO: 1506600
ugugacaaucaucuaccac

SEQ ID NO: 1506602 - RNA, 19 nt, Artificial Sequence
  Description of Artificial Sequence: Synthetic oligonucleotide
  Sense strand starting at position 169 of SEQ ID NO: 1244675
gguagaugauugucacaau

SEQ ID NO: 1506603 - RNA, 19 nt, Artificial Sequence
  Description of Artificial Sequence: Synthetic oligonucleotide
  Antisense strand to SEQ ID NO: 1506602
auugugacaaucaucuacc

SEQ ID NO: 1506604 - RNA, 19 nt, Artificial Sequence
  Description of Artificial Sequence: Synthetic oligonucleotide
  Sense strand starting at position 170 of SEQ ID NO: 1244675
guagaugauugucacaaug

SEQ ID NO: 1506605 - RNA, 19 nt, Artificial Sequence
  Description of Artificial Sequence: Synthetic oligonucleotide
  Antisense strand to SEQ ID NO: 1506604
cauugugacaaucaucuac

SEQ ID NO: 1506606 - RNA, 19 nt, Artificial Sequence
  Description of Artificial Sequence: Synthetic oligonucleotide
  Sense strand starting at position 172 of SEQ ID NO: 1244675
agaugauugucacaaugug

SEQ ID NO: 1506607 - RNA, 19 nt, Artificial Sequence
  Description of Artificial Sequence: Synthetic oligonucleotide
  Antisense strand to SEQ ID NO: 1506606
cacauugugacaaucaucu

SEQ ID NO: 1506608 - RNA, 19 nt, Artificial Sequence
  Description of Artificial Sequence: Synthetic oligonucleotide
  Sense strand starting at position 273 of SEQ ID NO: 1244675
gaguauuaacggcaagucu

SEQ ID NO: 1506609 - RNA, 19 nt, Artificial Sequence
  Description of Artificial Sequence: Synthetic oligonucleotide
  Antisense strand to SEQ ID NO: 1506608
agacuugccguuaauacuc

SEQ ID NO: 1506610 - RNA, 19 nt, Artificial Sequence
  Description of Artificial Sequence: Synthetic oligonucleotide
  Sense strand starting at position 631 of SEQ ID NO: 1244675
ugaucuugccuccacguga

SEQ ID NO: 1506611 - RNA, 19 nt, Artificial Sequence
  Description of Artificial Sequence: Synthetic oligonucleotide
  Antisense strand to SEQ ID NO: 1506610
ucacguggaggcaagauca

SEQ ID NO: 1506612 - RNA, 19 nt, Artificial Sequence
  Description of Artificial Sequence: Synthetic oligonucleotide
  Sense strand starting at position 762 of SEQ ID NO: 1244675
ggcagugggccucggagau

SEQ ID NO: 1506613 - RNA, 19 nt, Artificial Sequence
  Description of Artificial Sequence: Synthetic oligonucleotide
  Antisense strand to SEQ ID NO: 1506612
aucuccgaggcccacugcc

SEQ ID NO: 1506614 - RNA, 19 nt, Artificial Sequence
  Description of Artificial Sequence: Synthetic oligonucleotide
  Sense strand starting at position 1180 of SEQ ID NO: 1244675
ggccuaaauaguggucauu

SEQ ID NO: 1506615 - RNA, 19 nt, Artificial Sequence
  Description of Artificial Sequence: Synthetic oligonucleotide
  Antisense strand to SEQ ID NO: 1506614
aaugaccacuauuuaggcc

SEQ ID NO: 1506616 - RNA, 19 nt, Artificial Sequence
  Description of Artificial Sequence: Synthetic oligonucleotide
  Sense strand starting at position 1182 of SEQ ID NO: 1244675
ccuaaauaguggucauugu

SEQ ID NO: 1506617 - RNA, 19 nt, Artificial Sequence
  Description of Artificial Sequence: Synthetic oligonucleotide
  Antisense strand to SEQ ID NO: 1506616
acaaugaccacuauuuagg

SEQ ID NO: 1506618 - RNA, 19 nt, Artificial Sequence
  Description of Artificial Sequence: Synthetic oligonucleotide
  Sense strand starting at position 1183 of SEQ ID NO: 1244675
cuaaauaguggucauuguu

SEQ ID NO: 1506619 - RNA, 19 nt, Artificial Sequence
  Description of Artificial Sequence: Synthetic oligonucleotide
  Antisense strand to SEQ ID NO: 1506618
aacaaugaccacuauuuag

SEQ ID NO: 1506620 - RNA, 19 nt, Artificial Sequence
  Description of Artificial Sequence: Synthetic oligonucleotide
  Sense strand starting at position 1331 of SEQ ID NO: 1244675
uuugguggugcugggaaau

SEQ ID NO: 1506621 - RNA, 19 nt, Artificial Sequence
  Description of Artificial Sequence: Synthetic oligonucleotide
  Antisense strand to SEQ ID NO: 1506620
auuucccagcaccaccaaa

SEQ ID NO: 1506622 - RNA, 19 nt, Artificial Sequence
  Description of Artificial Sequence: Synthetic oligonucleotide
  Sense strand starting at position 1343 of SEQ ID NO: 1244675
gggaaauugccuuaacagu

SEQ ID NO: 1506623 - RNA, 19 nt, Artificial Sequence
  Description of Artificial Sequence: Synthetic oligonucleotide
  Antisense strand to SEQ ID NO: 1506622
acuguuaaggcaauuuccc

SEQ ID NO: 1506624 - RNA, 19 nt, Artificial Sequence
  Description of Artificial Sequence: Synthetic oligonucleotide
  Sense strand starting at position 1842 of SEQ ID NO: 1244675
agcugcuuuaccuguggau

SEQ ID NO: 1506625 - RNA, 19 nt, Artificial Sequence
  Description of Artificial Sequence: Synthetic oligonucleotide
  Antisense strand to SEQ ID NO: 1506624
auccacagguaaagcagcu

SEQ ID NO: 1506626 - RNA, 19 nt, Artificial Sequence
  Description of Artificial Sequence: Synthetic oligonucleotide
  Sense strand starting at position 1844 of SEQ ID NO: 1244675
cugcuuuaccuguggauac

SEQ ID NO: 1506627 - RNA, 19 nt, Artificial Sequence
  Description of Artificial Sequence: Synthetic oligonucleotide
  Antisense strand to SEQ ID NO: 1506626
guauccacagguaaagcag

SEQ ID NO: 1506628 - RNA, 19 nt, Artificial Sequence
  Description of Artificial Sequence: Synthetic oligonucleotide
  Sense strand starting at position 2008 of SEQ ID NO: 1244675
caauuuggauucugugauu

SEQ ID NO: 1506629 - RNA, 19 nt, Artificial Sequence
  Description of Artificial Sequence: Synthetic oligonucleotide
  Antisense strand to SEQ ID NO: 1506628
aaucacagaauccaaauug

SEQ ID NO: 1506630 - RNA, 19 nt, Artificial Sequence
  Description of Artificial Sequence: Synthetic oligonucleotide
  Sense strand starting at position 2011 of SEQ ID NO: 1244675
uuuggauucugugauugca

SEQ ID NO: 1506631 - RNA, 19 nt, Artificial Sequence
  Description of Artificial Sequence: Synthetic oligonucleotide
  Antisense strand to SEQ ID NO: 1506630
ugcaaucacagaauccaaa

SEQ ID NO: 1506632 - RNA, 19 nt, Artificial Sequence
  Description of Artificial Sequence: Synthetic oligonucleotide
  Sense strand starting at position 2013 of SEQ ID NO: 1244675
uggauucugugauugcauc

SEQ ID NO: 1506633 - RNA, 19 nt, Artificial Sequence
  Description of Artificial Sequence: Synthetic oligonucleotide
  Antisense strand to SEQ ID NO: 1506632
gaugcaaucacagaaucca

SEQ ID NO: 1506634 - RNA, 19 nt, Artificial Sequence
  Description of Artificial Sequence: Synthetic oligonucleotide
  Sense strand starting at position 2014 of SEQ ID NO: 1244675
ggauucugugauugcauca

SEQ ID NO: 1506635 - RNA, 19 nt, Artificial Sequence
  Description of Artificial Sequence: Synthetic oligonucleotide
  Antisense strand to SEQ ID NO: 1506634
ugaugcaaucacagaaucc

SEQ ID NO: 1506636 - RNA, 19 nt, Artificial Sequence
  Description of Artificial Sequence: Synthetic oligonucleotide
  Sense strand starting at position 2038 of SEQ ID NO: 1244675
ucguguuaacuuuaaccca

SEQ ID NO: 1506637 - RNA, 19 nt, Artificial Sequence
  Description of Artificial Sequence: Synthetic oligonucleotide
  Antisense strand to SEQ ID NO: 1506636
uggguuaaaguuaacacga

SEQ ID NO: 1506638 - RNA, 19 nt, Artificial Sequence
  Description of Artificial Sequence: Synthetic oligonucleotide
  Sense strand starting at position 2620 of SEQ ID NO: 1244675
guucuuucccgucaccaua

SEQ ID NO: 1506639 - RNA, 19 nt, Artificial Sequence
  Description of Artificial Sequence: Synthetic oligonucleotide
  Antisense strand to SEQ ID NO: 1506638
uauggugacgggaaagaac

SEQ ID NO: 1506640 - RNA, 19 nt, Artificial Sequence
  Description of Artificial Sequence: Synthetic oligonucleotide
  Sense strand starting at position 2707 of SEQ ID NO: 1244675
gucccuaagugauauauag

SEQ ID NO: 1506641 - RNA, 19 nt, Artificial Sequence
  Description of Artificial Sequence: Synthetic oligonucleotide
  Antisense strand to SEQ ID NO: 1506640
cuauauaucacuuagggac

SEQ ID NO: 1506642 - RNA, 19 nt, Artificial Sequence
  Description of Artificial Sequence: Synthetic oligonucleotide
  Sense strand starting at position 2714 of SEQ ID NO: 1244675
agugauauauaguaucagu

SEQ ID NO: 1506643 - RNA, 19 nt, Artificial Sequence
  Description of Artificial Sequence: Synthetic oligonucleotide
  Antisense strand to SEQ ID NO: 1506642
acugauacuauauaucacu

SEQ ID NO: 1506644 - RNA, 19 nt, Artificial Sequence
  Description of Artificial Sequence: Synthetic oligonucleotide
  Sense strand starting at position 2717 of SEQ ID NO: 1244675
gauauauaguaucaguuug

SEQ ID NO: 1506645 - RNA, 19 nt, Artificial Sequence
  Description of Artificial Sequence: Synthetic oligonucleotide
  Antisense strand to SEQ ID NO: 1506644
caaacugauacuauauauc

SEQ ID NO: 1506646 - RNA, 19 nt, Artificial Sequence
  Description of Artificial Sequence: Synthetic oligonucleotide
  Sense strand starting at position 2722 of SEQ ID NO: 1244675
auaguaucaguuugcaugu

SEQ ID NO: 1506647 - RNA, 19 nt, Artificial Sequence
  Description of Artificial Sequence: Synthetic oligonucleotide
  Antisense strand to SEQ ID NO: 1506646
acaugcaaacugauacuau

SEQ ID NO: 1506648 - RNA, 19 nt, Artificial Sequence
  Description of Artificial Sequence: Synthetic oligonucleotide
  Sense strand starting at position 2739 of SEQ ID NO: 1244675
guucuuaaaccuuagguca

SEQ ID NO: 1506649 - RNA, 19 nt, Artificial Sequence
  Description of Artificial Sequence: Synthetic oligonucleotide
  Antisense strand to SEQ ID NO: 1506648
ugaccuaagguuuaagaac

SEQ ID NO: 1506650 - RNA, 19 nt, Artificial Sequence
  Description of Artificial Sequence: Synthetic oligonucleotide
  Sense strand starting at position 2747 of SEQ ID NO: 1244675
accuuaggucaauguauca

SEQ ID NO: 1506651 - RNA, 19 nt, Artificial Sequence
  Description of Artificial Sequence: Synthetic oligonucleotide
  Antisense strand to SEQ ID NO: 1506650
ugauacauugaccuaaggu

SEQ ID NO: 1506652 - RNA, 19 nt, Artificial Sequence
  Description of Artificial Sequence: Synthetic oligonucleotide
  Sense strand starting at position 2754 of SEQ ID NO: 1244675
gucaauguaucacacuguu

SEQ ID NO: 1506653 - RNA, 19 nt, Artificial Sequence
  Description of Artificial Sequence: Synthetic oligonucleotide
  Antisense strand to SEQ ID NO: 1506652
aacagugugauacauugac

SEQ ID NO: 1506654 - RNA, 19 nt, Artificial Sequence
  Description of Artificial Sequence: Synthetic oligonucleotide
  Sense strand starting at position 2974 of SEQ ID NO: 1244675
uggucacgcuugucucaaa

SEQ ID NO: 1506655 - RNA, 19 nt, Artificial Sequence
  Description of Artificial Sequence: Synthetic oligonucleotide
  Antisense strand to SEQ ID NO: 1506654
uuugagacaagcgugacca

SEQ ID NO: 1506656 - RNA, 19 nt, Artificial Sequence
  Description of Artificial Sequence: Synthetic oligonucleotide
  Sense strand starting at position 3174 of SEQ ID NO: 1244675
aaugauaccgaaugagcua

SEQ ID NO: 1506657 - RNA, 19 nt, Artificial Sequence
  Description of Artificial Sequence: Synthetic oligonucleotide
  Antisense strand to SEQ ID NO: 1506656
uagcucauucgguaucauu

SEQ ID NO: 1506658 - RNA, 19 nt, Artificial Sequence
  Description of Artificial Sequence: Synthetic oligonucleotide
  Sense strand starting at position 3309 of SEQ ID NO: 1244675
ugggucauggguuacacaa

SEQ ID NO: 1506659 - RNA, 19 nt, Artificial Sequence
  Description of Artificial Sequence: Synthetic oligonucleotide
  Antisense strand to SEQ ID NO: 1506658
uuguguaacccaugaccca

SEQ ID NO: 1506660 - RNA, 19 nt, Artificial Sequence
  Description of Artificial Sequence: Synthetic oligonucleotide
  Sense strand starting at position 3639 of SEQ ID NO: 1244675
gucuauuguauauguguuu

SEQ ID NO: 1506661 - RNA, 19 nt, Artificial Sequence
  Description of Artificial Sequence: Synthetic oligonucleotide
  Antisense strand to SEQ ID NO: 1506660
aaacacauauacaauagac

SEQ ID NO: 1506662 - RNA, 19 nt, Artificial Sequence
  Description of Artificial Sequence: Synthetic oligonucleotide
  Sense strand starting at position 3646 of SEQ ID NO: 1244675
guauauguguuuguauuag

SEQ ID NO: 1506663 - RNA, 19 nt, Artificial Sequence
  Description of Artificial Sequence: Synthetic oligonucleotide
  Antisense strand to SEQ ID NO: 1506662
cuaauacaaacacauauac

SEQ ID NO: 1506664 - RNA, 19 nt, Artificial Sequence
  Description of Artificial Sequence: Synthetic oligonucleotide
  Sense strand starting at position 158 of SEQ ID NO: 1244676
cgcugugaaucagaucugu

SEQ ID NO: 1506665 - RNA, 19 nt, Artificial Sequence
  Description of Artificial Sequence: Synthetic oligonucleotide
  Antisense strand to SEQ ID NO: 1506664
acagaucugauucacagcg

SEQ ID NO: 1506666 - RNA, 19 nt, Artificial Sequence
  Description of Artificial Sequence: Synthetic oligonucleotide
  Sense strand starting at position 162 of SEQ ID NO: 1244676
gugaaucagaucugugucu

SEQ ID NO: 1506667 - RNA, 19 nt, Artificial Sequence
  Description of Artificial Sequence: Synthetic oligonucleotide
  Antisense strand to SEQ ID NO: 1506666
agacacagaucugauucac

SEQ ID NO: 1506668 - RNA, 19 nt, Artificial Sequence
  Description of Artificial Sequence: Synthetic oligonucleotide
  Sense strand starting at position 164 of SEQ ID NO: 1244676
gaaucagaucugugucuga

SEQ ID NO: 1506669 - RNA, 19 nt, Artificial Sequence
  Description of Artificial Sequence: Synthetic oligonucleotide
  Antisense strand to SEQ ID NO: 1506668
ucagacacagaucugauuc

SEQ ID NO: 1506670 - RNA, 19 nt, Artificial Sequence
  Description of Artificial Sequence: Synthetic oligonucleotide
  Sense strand starting at position 167 of SEQ ID NO: 1244676
ucagaucugugucugaauc

SEQ ID NO: 1506671 - RNA, 19 nt, Artificial Sequence
  Description of Artificial Sequence: Synthetic oligonucleotide
  Antisense strand to SEQ ID NO: 1506670
gauucagacacagaucuga

SEQ ID NO: 1506672 - RNA, 19 nt, Artificial Sequence
  Description of Artificial Sequence: Synthetic oligonucleotide
  Sense strand starting at position 169 of SEQ ID NO: 1244676
agaucugugucugaaucca

SEQ ID NO: 1506673 - RNA, 19 nt, Artificial Sequence
  Description of Artificial Sequence: Synthetic oligonucleotide
  Antisense strand to SEQ ID NO: 1506672
uggauucagacacagaucu

SEQ ID NO: 1506674 - RNA, 19 nt, Artificial Sequence
  Description of Artificial Sequence: Synthetic oligonucleotide
  Sense strand starting at position 189 of SEQ ID NO: 1244676
gcuaccucuugccaaagga

SEQ ID NO: 1506675 - RNA, 19 nt, Artificial Sequence
  Description of Artificial Sequence: Synthetic oligonucleotide
  Antisense strand to SEQ ID NO: 1506674
uccuuuggcaagagguagc

SEQ ID NO: 1506676 - RNA, 19 nt, Artificial Sequence
  Description of Artificial Sequence: Synthetic oligonucleotide
  Sense strand starting at position 349 of SEQ ID NO: 1244676
ggaguuucgcucucguuga

SEQ ID NO: 1506677 - RNA, 19 nt, Artificial Sequence
  Description of Artificial Sequence: Synthetic oligonucleotide
  Antisense strand to SEQ ID NO: 1506676
ucaacgagagcgaaacucc

SEQ ID NO: 1506678 - RNA, 19 nt, Artificial Sequence
  Description of Artificial Sequence: Synthetic oligonucleotide
  Sense strand starting at position 943 of SEQ ID NO: 1244676
cuuuguaaacccugaguac

SEQ ID NO: 1506679 - RNA, 19 nt, Artificial Sequence
  Description of Artificial Sequence: Synthetic oligonucleotide
  Antisense strand to SEQ ID NO: 1506678
guacucaggguuuacaaag

SEQ ID NO: 1506680 - RNA, 19 nt, Artificial Sequence
  Description of Artificial Sequence: Synthetic oligonucleotide
  Sense strand starting at position 944 of SEQ ID NO: 1244676
uuuguaaacccugaguaca

SEQ ID NO: 1506681 - RNA, 19 nt, Artificial Sequence
  Description of Artificial Sequence: Synthetic oligonucleotide
  Antisense strand to SEQ ID NO: 1506680
uguacucaggguuuacaaa

SEQ ID NO: 1506682 - RNA, 19 nt, Artificial Sequence
  Description of Artificial Sequence: Synthetic oligonucleotide
  Sense strand starting at position 946 of SEQ ID NO: 1244676
uguaaacccugaguacaau

SEQ ID NO: 1506683 - RNA, 19 nt, Artificial Sequence
  Description of Artificial Sequence: Synthetic oligonucleotide
  Antisense strand to SEQ ID NO: 1506682
auuguacucaggguuuaca

SEQ ID NO: 1506684 - RNA, 19 nt, Artificial Sequence
  Description of Artificial Sequence: Synthetic oligonucleotide
  Sense strand starting at position 1082 of SEQ ID NO: 1244676
auccauuuagccugucuuu

SEQ ID NO: 1506685 - RNA, 19 nt, Artificial Sequence
  Description of Artificial Sequence: Synthetic oligonucleotide
  Antisense strand to SEQ ID NO: 1506684
aaagacaggcuaaauggau

SEQ ID NO: 1506686 - RNA, 19 nt, Artificial Sequence
  Description of Artificial Sequence: Synthetic oligonucleotide
  Sense strand starting at position 1531 of SEQ ID NO: 1244676
gugaaugacucuggccaga

SEQ ID NO: 1506687 - RNA, 19 nt, Artificial Sequence
  Description of Artificial Sequence: Synthetic oligonucleotide
  Antisense strand to SEQ ID NO: 1506686
ucuggccagagucauucac

SEQ ID NO: 1506688 - RNA, 19 nt, Artificial Sequence
  Description of Artificial Sequence: Synthetic oligonucleotide
  Sense strand starting at position 2069 of SEQ ID NO: 1244676
auugcuuucucuucuggua

SEQ ID NO: 1506689 - RNA, 19 nt, Artificial Sequence
  Description of Artificial Sequence: Synthetic oligonucleotide
  Antisense strand to SEQ ID NO: 1506688
uaccagaagagaaagcaau

SEQ ID NO: 1506690 - RNA, 19 nt, Artificial Sequence
  Description of Artificial Sequence: Synthetic oligonucleotide
  Sense strand starting at position 2108 of SEQ ID NO: 1244676
guuaaacauugaucuugaa

SEQ ID NO: 1506691 - RNA, 19 nt, Artificial Sequence
  Description of Artificial Sequence: Synthetic oligonucleotide
  Antisense strand to SEQ ID NO: 1506690
uucaagaucaauguuuaac

SEQ ID NO: 1506692 - RNA, 19 nt, Artificial Sequence
  Description of Artificial Sequence: Synthetic oligonucleotide
  Sense strand starting at position 2288 of SEQ ID NO: 1244676
ggaaccuagcacuguguua

SEQ ID NO: 1506693 - RNA, 19 nt, Artificial Sequence
  Description of Artificial Sequence: Synthetic oligonucleotide
  Antisense strand to SEQ ID NO: 1506692
uaacacagugcuagguucc

SEQ ID NO: 1506694 - RNA, 19 nt, Artificial Sequence
  Description of Artificial Sequence: Synthetic oligonucleotide
  Sense strand starting at position 2290 of SEQ ID NO: 1244676
aaccuagcacuguguuaag

SEQ ID NO: 1506695 - RNA, 19 nt, Artificial Sequence
  Description of Artificial Sequence: Synthetic oligonucleotide
  Antisense strand to SEQ ID NO: 1506694
cuuaacacagugcuagguu

SEQ ID NO: 1506696 - RNA, 19 nt, Artificial Sequence
  Description of Artificial Sequence: Synthetic oligonucleotide
  Sense strand starting at position 2302 of SEQ ID NO: 1244676
uguuaagccuuccagagac

SEQ ID NO: 1506697 - RNA, 19 nt, Artificial Sequence
  Description of Artificial Sequence: Synthetic oligonucleotide
  Antisense strand to SEQ ID NO: 1506696
gucucuggaaggcuuaaca

SEQ ID NO: 1506698 - RNA, 19 nt, Artificial Sequence
  Description of Artificial Sequence: Synthetic oligonucleotide
  Sense strand starting at position 2427 of SEQ ID NO: 1244676
uguccuuucuucucccaga

SEQ ID NO: 1506699 - RNA, 19 nt, Artificial Sequence
  Description of Artificial Sequence: Synthetic oligonucleotide
  Antisense strand to SEQ ID NO: 1506698
ucugggagaagaaaggaca

SEQ ID NO: 1506700 - RNA, 19 nt, Artificial Sequence
  Description of Artificial Sequence: Synthetic oligonucleotide
  Sense strand starting at position 2665 of SEQ ID NO: 1244676
gagcgaggguucuggaaac

SEQ ID NO: 1506701 - RNA, 19 nt, Artificial Sequence
  Description of Artificial Sequence: Synthetic oligonucleotide
  Antisense strand to SEQ ID NO: 1506700
guuuccagaacccucgcuc

SEQ ID NO: 1506702 - RNA, 19 nt, Artificial Sequence
  Description of Artificial Sequence: Synthetic oligonucleotide
  Sense strand starting at position 25 of SEQ ID NO: 1244677
gcgccauguuccuguggca

SEQ ID NO: 1506703 - RNA, 19 nt, Artificial Sequence
  Description of Artificial Sequence: Synthetic oligonucleotide
  Antisense strand to SEQ ID NO: 1506702
ugccacaggaacauggcgc

SEQ ID NO: 1506704 - RNA, 19 nt, Artificial Sequence
  Description of Artificial Sequence: Synthetic oligonucleotide
  Sense strand starting at position 47 of SEQ ID NO: 1244677
acagaaagcucuguuccca

SEQ ID NO: 1506705 - RNA, 19 nt, Artificial Sequence
  Description of Artificial Sequence: Synthetic oligonucleotide
  Antisense strand to SEQ ID NO: 1506704
ugggaacagagcuuucugu

SEQ ID NO: 1506706 - RNA, 19 nt, Artificial Sequence
  Description of Artificial Sequence: Synthetic oligonucleotide
  Sense strand starting at position 120 of SEQ ID NO: 1244677
caaguccugggucaugauu

SEQ ID NO: 1506707 - RNA, 19 nt, Artificial Sequence
  Description of Artificial Sequence: Synthetic oligonucleotide
  Antisense strand to SEQ ID NO: 1506706
aaucaugacccaggacuug

SEQ ID NO: 1506708 - RNA, 19 nt, Artificial Sequence
  Description of Artificial Sequence: Synthetic oligonucleotide
  Sense strand starting at position 348 of SEQ ID NO: 1244677
cgcugugaaucagaucugu

SEQ ID NO: 1506709 - RNA, 19 nt, Artificial Sequence
  Description of Artificial Sequence: Synthetic oligonucleotide
  Antisense strand to SEQ ID NO: 1506708
acagaucugauucacagcg

SEQ ID NO: 1506710 - RNA, 19 nt, Artificial Sequence
  Description of Artificial Sequence: Synthetic oligonucleotide
  Sense strand starting at position 352 of SEQ ID NO: 1244677
gugaaucagaucugugucu

SEQ ID NO: 1506711 - RNA, 19 nt, Artificial Sequence
  Description of Artificial Sequence: Synthetic oligonucleotide
  Antisense strand to SEQ ID NO: 1506710
agacacagaucugauucac

SEQ ID NO: 1506712 - RNA, 19 nt, Artificial Sequence
  Description of Artificial Sequence: Synthetic oligonucleotide
  Sense strand starting at position 354 of SEQ ID NO: 1244677
gaaucagaucugugucuga

SEQ ID NO: 1506713 - RNA, 19 nt, Artificial Sequence
  Description of Artificial Sequence: Synthetic oligonucleotide
  Antisense strand to SEQ ID NO: 1506712
ucagacacagaucugauuc

SEQ ID NO: 1506714 - RNA, 19 nt, Artificial Sequence
  Description of Artificial Sequence: Synthetic oligonucleotide
  Sense strand starting at position 357 of SEQ ID NO: 1244677
ucagaucugugucugaauc

SEQ ID NO: 1506715 - RNA, 19 nt, Artificial Sequence
  Description of Artificial Sequence: Synthetic oligonucleotide
  Antisense strand to SEQ ID NO: 1506714
gauucagacacagaucuga

SEQ ID NO: 1506716 - RNA, 19 nt, Artificial Sequence
  Description of Artificial Sequence: Synthetic oligonucleotide
  Sense strand starting at position 359 of SEQ ID NO: 1244677
agaucugugucugaaucca

SEQ ID NO: 1506717 - RNA, 19 nt, Artificial Sequence
  Description of Artificial Sequence: Synthetic oligonucleotide
  Antisense strand to SEQ ID NO: 1506716
uggauucagacacagaucu

SEQ ID NO: 1506718 - RNA, 19 nt, Artificial Sequence
  Description of Artificial Sequence: Synthetic oligonucleotide
  Sense strand starting at position 379 of SEQ ID NO: 1244677
gcuaccucuugccaaagga

SEQ ID NO: 1506719 - RNA, 19 nt, Artificial Sequence
  Description of Artificial Sequence: Synthetic oligonucleotide
  Antisense strand to SEQ ID NO: 1506718
uccuuuggcaagagguagc

SEQ ID NO: 1506720 - RNA, 19 nt, Artificial Sequence
  Description of Artificial Sequence: Synthetic oligonucleotide
  Sense strand starting at position 539 of SEQ ID NO: 1244677
ggaguuucgcucucguuga

SEQ ID NO: 1506721 - RNA, 19 nt, Artificial Sequence
  Description of Artificial Sequence: Synthetic oligonucleotide
  Antisense strand to SEQ ID NO: 1506720
ucaacgagagcgaaacucc

SEQ ID NO: 1506722 - RNA, 19 nt, Artificial Sequence
  Description of Artificial Sequence: Synthetic oligonucleotide
  Sense strand starting at position 1133 of SEQ ID NO: 1244677
cuuuguaaacccugaguac

SEQ ID NO: 1506723 - RNA, 19 nt, Artificial Sequence
  Description of Artificial Sequence: Synthetic oligonucleotide
  Antisense strand to SEQ ID NO: 1506722
guacucaggguuuacaaag

SEQ ID NO: 1506724 - RNA, 19 nt, Artificial Sequence
  Description of Artificial Sequence: Synthetic oligonucleotide
  Sense strand starting at position 1134 of SEQ ID NO: 1244677
uuuguaaacccugaguaca

SEQ ID NO: 1506725 - RNA, 19 nt, Artificial Sequence
  Description of Artificial Sequence: Synthetic oligonucleotide
  Antisense strand to SEQ ID NO: 1506724
uguacucaggguuuacaaa

SEQ ID NO: 1506726 - RNA, 19 nt, Artificial Sequence
  Description of Artificial Sequence: Synthetic oligonucleotide
  Sense strand starting at position 1136 of SEQ ID NO: 1244677
uguaaacccugaguacaau

SEQ ID NO: 1506727 - RNA, 19 nt, Artificial Sequence
  Description of Artificial Sequence: Synthetic oligonucleotide
  Antisense strand to SEQ ID NO: 1506726
auuguacucaggguuuaca

SEQ ID NO: 1506728 - RNA, 19 nt, Artificial Sequence
  Description of Artificial Sequence: Synthetic oligonucleotide
  Sense strand starting at position 1272 of SEQ ID NO: 1244677
auccauuuagccugucuuu

SEQ ID NO: 1506729 - RNA, 19 nt, Artificial Sequence
  Description of Artificial Sequence: Synthetic oligonucleotide
  Antisense strand to SEQ ID NO: 1506728
aaagacaggcuaaauggau

SEQ ID NO: 1506730 - RNA, 19 nt, Artificial Sequence
  Description of Artificial Sequence: Synthetic oligonucleotide
  Sense strand starting at position 1721 of SEQ ID NO: 1244677
gugaaugacucuggccaga

SEQ ID NO: 1506731 - RNA, 19 nt, Artificial Sequence
  Description of Artificial Sequence: Synthetic oligonucleotide
  Antisense strand to SEQ ID NO: 1506730
ucuggccagagucauucac

SEQ ID NO: 1506732 - RNA, 19 nt, Artificial Sequence
  Description of Artificial Sequence: Synthetic oligonucleotide
  Sense strand starting at position 2259 of SEQ ID NO: 1244677
auugcuuucucuucuggua

SEQ ID NO: 1506733 - RNA, 19 nt, Artificial Sequence
  Description of Artificial Sequence: Synthetic oligonucleotide
  Antisense strand to SEQ ID NO: 1506732
uaccagaagagaaagcaau

SEQ ID NO: 1506734 - RNA, 19 nt, Artificial Sequence
  Description of Artificial Sequence: Synthetic oligonucleotide
  Sense strand starting at position 2298 of SEQ ID NO: 1244677
guuaaacauugaucuugaa

SEQ ID NO: 1506735 - RNA, 19 nt, Artificial Sequence
  Description of Artificial Sequence: Synthetic oligonucleotide
  Antisense strand to SEQ ID NO: 1506734
uucaagaucaauguuuaac

SEQ ID NO: 1506736 - RNA, 19 nt, Artificial Sequence
  Description of Artificial Sequence: Synthetic oligonucleotide
  Sense strand starting at position 2478 of SEQ ID NO: 1244677
ggaaccuagcacuguguua

SEQ ID NO: 1506737 - RNA, 19 nt, Artificial Sequence
  Description of Artificial Sequence: Synthetic oligonucleotide
  Antisense strand to SEQ ID NO: 1506736
uaacacagugcuagguucc

SEQ ID NO: 1506738 - RNA, 19 nt, Artificial Sequence
  Description of Artificial Sequence: Synthetic oligonucleotide
  Sense strand starting at position 2480 of SEQ ID NO: 1244677
aaccuagcacuguguuaag

SEQ ID NO: 1506739 - RNA, 19 nt, Artificial Sequence
  Description of Artificial Sequence: Synthetic oligonucleotide
  Antisense strand to SEQ ID NO: 1506738
cuuaacacagugcuagguu

SEQ ID NO: 1506740 - RNA, 19 nt, Artificial Sequence
  Description of Artificial Sequence: Synthetic oligonucleotide
  Sense strand starting at position 2492 of SEQ ID NO: 1244677
uguuaagccuuccagagac

SEQ ID NO: 1506741 - RNA, 19 nt, Artificial Sequence
  Description of Artificial Sequence: Synthetic oligonucleotide
  Antisense strand to SEQ ID NO: 1506740
gucucuggaaggcuuaaca

SEQ ID NO: 1506742 - RNA, 19 nt, Artificial Sequence
  Description of Artificial Sequence: Synthetic oligonucleotide
  Sense strand starting at position 2617 of SEQ ID NO: 1244677
uguccuuucuucucccaga

SEQ ID NO: 1506743 - RNA, 19 nt, Artificial Sequence
  Description of Artificial Sequence: Synthetic oligonucleotide
  Antisense strand to SEQ ID NO: 1506742
ucugggagaagaaaggaca

SEQ ID NO: 1506744 - RNA, 19 nt, Artificial Sequence
  Description of Artificial Sequence: Synthetic oligonucleotide
  Sense strand starting at position 2855 of SEQ ID NO: 1244677
gagcgaggguucuggaaac

SEQ ID NO: 1506745 - RNA, 19 nt, Artificial Sequence
  Description of Artificial Sequence: Synthetic oligonucleotide
  Antisense strand to SEQ ID NO: 1506744
guuuccagaacccucgcuc

SEQ ID NO: 1506746 - RNA, 19 nt, Artificial Sequence
  Description of Artificial Sequence: Synthetic oligonucleotide
  Sense strand starting at position 112 of SEQ ID NO: 1244678
ggcccugauuacucucaca

SEQ ID NO: 1506747 - RNA, 19 nt, Artificial Sequence
  Description of Artificial Sequence: Synthetic oligonucleotide
  Antisense strand to SEQ ID NO: 1506746
ugugagaguaaucagggcc

SEQ ID NO: 1506748 - RNA, 19 nt, Artificial Sequence
  Description of Artificial Sequence: Synthetic oligonucleotide
  Sense strand starting at position 234 of SEQ ID NO: 1244678
ccaagauagguucggaauu

SEQ ID NO: 1506749 - RNA, 19 nt, Artificial Sequence
  Description of Artificial Sequence: Synthetic oligonucleotide
  Antisense strand to SEQ ID NO: 1506748
aauuccgaaccuaucuugg

SEQ ID NO: 1506750 - RNA, 19 nt, Artificial Sequence
  Description of Artificial Sequence: Synthetic oligonucleotide
  Sense strand starting at position 245 of SEQ ID NO: 1244678
ucggaauuccuagggacau

SEQ ID NO: 1506751 - RNA, 19 nt, Artificial Sequence
  Description of Artificial Sequence: Synthetic oligonucleotide
  Antisense strand to SEQ ID NO: 1506750
augucccuaggaauuccga

SEQ ID NO: 1506752 - RNA, 19 nt, Artificial Sequence
  Description of Artificial Sequence: Synthetic oligonucleotide
  Sense strand starting at position 494 of SEQ ID NO: 1244678
uuucuuccuggaugaagaa

SEQ ID NO: 1506753 - RNA, 19 nt, Artificial Sequence
  Description of Artificial Sequence: Synthetic oligonucleotide
  Antisense strand to SEQ ID NO: 1506752
uucuucauccaggaagaaa

SEQ ID NO: 1506754 - RNA, 19 nt, Artificial Sequence
  Description of Artificial Sequence: Synthetic oligonucleotide
  Sense strand starting at position 725 of SEQ ID NO: 1244678
aguagcuuccaugagagcu

SEQ ID NO: 1506755 - RNA, 19 nt, Artificial Sequence
  Description of Artificial Sequence: Synthetic oligonucleotide
  Antisense strand to SEQ ID NO: 1506754
agcucucauggaagcuacu

SEQ ID NO: 1506756 - RNA, 19 nt, Artificial Sequence
  Description of Artificial Sequence: Synthetic oligonucleotide
  Sense strand starting at position 739 of SEQ ID NO: 1244678
gagcuuguuugagccagga

SEQ ID NO: 1506757 - RNA, 19 nt, Artificial Sequence
  Description of Artificial Sequence: Synthetic oligonucleotide
  Antisense strand to SEQ ID NO: 1506756
uccuggcucaaacaagcuc

SEQ ID NO: 1506758 - RNA, 19 nt, Artificial Sequence
  Description of Artificial Sequence: Synthetic oligonucleotide
  Sense strand starting at position 933 of SEQ ID NO: 1244678
agacaaaucugccuugcag

SEQ ID NO: 1506759 - RNA, 19 nt, Artificial Sequence
  Description of Artificial Sequence: Synthetic oligonucleotide
  Antisense strand to SEQ ID NO: 1506758
cugcaaggcagauuugucu

SEQ ID NO: 1506760 - RNA, 19 nt, Artificial Sequence
  Description of Artificial Sequence: Synthetic oligonucleotide
  Sense strand starting at position 1153 of SEQ ID NO: 1244678
cuuggaguuucucucuaga

SEQ ID NO: 1506761 - RNA, 19 nt, Artificial Sequence
  Description of Artificial Sequence: Synthetic oligonucleotide
  Antisense strand to SEQ ID NO: 1506760
ucuagagagaaacuccaag

SEQ ID NO: 1506762 - RNA, 19 nt, Artificial Sequence
  Description of Artificial Sequence: Synthetic oligonucleotide
  Sense strand starting at position 1155 of SEQ ID NO: 1244678
uggaguuucucucuagaau

SEQ ID NO: 1506763 - RNA, 19 nt, Artificial Sequence
  Description of Artificial Sequence: Synthetic oligonucleotide
  Antisense strand to SEQ ID NO: 1506762
auucuagagagaaacucca

SEQ ID NO: 1506764 - RNA, 19 nt, Artificial Sequence
  Description of Artificial Sequence: Synthetic oligonucleotide
  Sense strand starting at position 1156 of SEQ ID NO: 1244678
ggaguuucucucuagaauu

SEQ ID NO: 1506765 - RNA, 19 nt, Artificial Sequence
  Description of Artificial Sequence: Synthetic oligonucleotide
  Antisense strand to SEQ ID NO: 1506764
aauucuagagagaaacucc

SEQ ID NO: 1506766 - RNA, 19 nt, Artificial Sequence
  Description of Artificial Sequence: Synthetic oligonucleotide
  Sense strand starting at position 1158 of SEQ ID NO: 1244678
aguuucucucuagaauugu

SEQ ID NO: 1506767 - RNA, 19 nt, Artificial Sequence
  Description of Artificial Sequence: Synthetic oligonucleotide
  Antisense strand to SEQ ID NO: 1506766
acaauucuagagagaaacu

SEQ ID NO: 1506768 - RNA, 19 nt, Artificial Sequence
  Description of Artificial Sequence: Synthetic oligonucleotide
  Sense strand starting at position 1167 of SEQ ID NO: 1244678
cuagaauugugcucuaggu

SEQ ID NO: 1506769 - RNA, 19 nt, Artificial Sequence
  Description of Artificial Sequence: Synthetic oligonucleotide
  Antisense strand to SEQ ID NO: 1506768
accuagagcacaauucuag

SEQ ID NO: 1506770 - RNA, 19 nt, Artificial Sequence
  Description of Artificial Sequence: Synthetic oligonucleotide
  Sense strand starting at position 1468 of SEQ ID NO: 1244678
gaguggguggcgugaugaa

SEQ ID NO: 1506771 - RNA, 19 nt, Artificial Sequence
  Description of Artificial Sequence: Synthetic oligonucleotide
  Antisense strand to SEQ ID NO: 1506770
uucaucacgccacccacuc

SEQ ID NO: 1506772 - RNA, 19 nt, Artificial Sequence
  Description of Artificial Sequence: Synthetic oligonucleotide
  Sense strand starting at position 1469 of SEQ ID NO: 1244678
aguggguggcgugaugaau

SEQ ID NO: 1506773 - RNA, 19 nt, Artificial Sequence
  Description of Artificial Sequence: Synthetic oligonucleotide
  Antisense strand to SEQ ID NO: 1506772
auucaucacgccacccacu

SEQ ID NO: 1506774 - RNA, 19 nt, Artificial Sequence
  Description of Artificial Sequence: Synthetic oligonucleotide
  Sense strand starting at position 1483 of SEQ ID NO: 1244678
ugaauugcaucagagaaau

SEQ ID NO: 1506775 - RNA, 19 nt, Artificial Sequence
  Description of Artificial Sequence: Synthetic oligonucleotide
  Antisense strand to SEQ ID NO: 1506774
auuucucugaugcaauuca

SEQ ID NO: 1506776 - RNA, 19 nt, Artificial Sequence
  Description of Artificial Sequence: Synthetic oligonucleotide
  Sense strand starting at position 2233 of SEQ ID NO: 1244678
ucugauucuccaugagaaa

SEQ ID NO: 1506777 - RNA, 19 nt, Artificial Sequence
  Description of Artificial Sequence: Synthetic oligonucleotide
  Antisense strand to SEQ ID NO: 1506776
uuucucauggagaaucaga

SEQ ID NO: 1506778 - RNA, 19 nt, Artificial Sequence
  Description of Artificial Sequence: Synthetic oligonucleotide
  Sense strand starting at position 2314 of SEQ ID NO: 1244678
ugggaagacauccgagagu

SEQ ID NO: 1506779 - RNA, 19 nt, Artificial Sequence
  Description of Artificial Sequence: Synthetic oligonucleotide
  Antisense strand to SEQ ID NO: 1506778
acucucggaugucuuccca

SEQ ID NO: 1506780 - RNA, 19 nt, Artificial Sequence
  Description of Artificial Sequence: Synthetic oligonucleotide
  Sense strand starting at position 2370 of SEQ ID NO: 1244678
uccgucuugggacgauaau

SEQ ID NO: 1506781 - RNA, 19 nt, Artificial Sequence
  Description of Artificial Sequence: Synthetic oligonucleotide
  Antisense strand to SEQ ID NO: 1506780
auuaucgucccaagacgga

SEQ ID NO: 1506782 - RNA, 19 nt, Artificial Sequence
  Description of Artificial Sequence: Synthetic oligonucleotide
  Sense strand starting at position 2382 of SEQ ID NO: 1244678
cgauaaugaagauggcuuu

SEQ ID NO: 1506783 - RNA, 19 nt, Artificial Sequence
  Description of Artificial Sequence: Synthetic oligonucleotide
  Antisense strand to SEQ ID NO: 1506782
aaagccaucuucauuaucg

SEQ ID NO: 1506784 - RNA, 19 nt, Artificial Sequence
  Description of Artificial Sequence: Synthetic oligonucleotide
  Sense strand starting at position 2426 of SEQ ID NO: 1244678
uuacuuugcgcucaauaaa

SEQ ID NO: 1506785 - RNA, 19 nt, Artificial Sequence
  Description of Artificial Sequence: Synthetic oligonucleotide
  Antisense strand to SEQ ID NO: 1506784
uuuauugagcgcaaaguaa

SEQ ID NO: 1506786 - RNA, 19 nt, Artificial Sequence
  Description of Artificial Sequence: Synthetic oligonucleotide
  Sense strand starting at position 2473 of SEQ ID NO: 1244678
agcaaacugugcucacaga

SEQ ID NO: 1506787 - RNA, 19 nt, Artificial Sequence
  Description of Artificial Sequence: Synthetic oligonucleotide
  Antisense strand to SEQ ID NO: 1506786
ucugugagcacaguuugcu

SEQ ID NO: 1506788 - RNA, 19 nt, Artificial Sequence
  Description of Artificial Sequence: Synthetic oligonucleotide
  Sense strand starting at position 2474 of SEQ ID NO: 1244678
gcaaacugugcucacagaa

SEQ ID NO: 1506789 - RNA, 19 nt, Artificial Sequence
  Description of Artificial Sequence: Synthetic oligonucleotide
  Antisense strand to SEQ ID NO: 1506788
uucugugagcacaguuugc

SEQ ID NO: 1506790 - RNA, 19 nt, Artificial Sequence
  Description of Artificial Sequence: Synthetic oligonucleotide
  Sense strand starting at position 2742 of SEQ ID NO: 1244678
auggcauaggcaugagaga

SEQ ID NO: 1506791 - RNA, 19 nt, Artificial Sequence
  Description of Artificial Sequence: Synthetic oligonucleotide
  Antisense strand to SEQ ID NO: 1506790
ucucucaugccuaugccau

SEQ ID NO: 1506792 - RNA, 19 nt, Artificial Sequence
  Description of Artificial Sequence: Synthetic oligonucleotide
  Sense strand starting at position 2759 of SEQ ID NO: 1244678
gaggguuuccuagagcugu

SEQ ID NO: 1506793 - RNA, 19 nt, Artificial Sequence
  Description of Artificial Sequence: Synthetic oligonucleotide
  Antisense strand to SEQ ID NO: 1506792
acagcucuaggaaacccuc

SEQ ID NO: 1506794 - RNA, 19 nt, Artificial Sequence
  Description of Artificial Sequence: Synthetic oligonucleotide
  Sense strand starting at position 2821 of SEQ ID NO: 1244678
guugcuuaggcuggaaaug

SEQ ID NO: 1506795 - RNA, 19 nt, Artificial Sequence
  Description of Artificial Sequence: Synthetic oligonucleotide
  Antisense strand to SEQ ID NO: 1506794
cauuuccagccuaagcaac

SEQ ID NO: 1506796 - RNA, 19 nt, Artificial Sequence
  Description of Artificial Sequence: Synthetic oligonucleotide
  Sense strand starting at position 3118 of SEQ ID NO: 1244678
ggguguagccuguacuauu

SEQ ID NO: 1506797 - RNA, 19 nt, Artificial Sequence
  Description of Artificial Sequence: Synthetic oligonucleotide
  Antisense strand to SEQ ID NO: 1506796
aauaguacaggcuacaccc

SEQ ID NO: 1506798 - RNA, 19 nt, Artificial Sequence
  Description of Artificial Sequence: Synthetic oligonucleotide
  Sense strand starting at position 3230 of SEQ ID NO: 1244678
uccugaggcugcucuuuaa

SEQ ID NO: 1506799 - RNA, 19 nt, Artificial Sequence
  Description of Artificial Sequence: Synthetic oligonucleotide
  Antisense strand to SEQ ID NO: 1506798
uuaaagagcagccucagga

SEQ ID NO: 1506800 - RNA, 19 nt, Artificial Sequence
  Description of Artificial Sequence: Synthetic oligonucleotide
  Sense strand starting at position 3279 of SEQ ID NO: 1244678
agagcuuuaauggguacaa

SEQ ID NO: 1506801 - RNA, 19 nt, Artificial Sequence
  Description of Artificial Sequence: Synthetic oligonucleotide
  Antisense strand to SEQ ID NO: 1506800
uuguacccauuaaagcucu

SEQ ID NO: 1506802 - RNA, 19 nt, Artificial Sequence
  Description of Artificial Sequence: Synthetic oligonucleotide
  Sense strand starting at position 3280 of SEQ ID NO: 1244678
gagcuuuaauggguacaau

SEQ ID NO: 1506803 - RNA, 19 nt, Artificial Sequence
  Description of Artificial Sequence: Synthetic oligonucleotide
  Antisense strand to SEQ ID NO: 1506802
auuguacccauuaaagcuc

SEQ ID NO: 1506804 - RNA, 19 nt, Artificial Sequence
  Description of Artificial Sequence: Synthetic oligonucleotide
  Sense strand starting at position 3305 of SEQ ID NO: 1244678
ggauccuauggcugauguu

SEQ ID NO: 1506805 - RNA, 19 nt, Artificial Sequence
  Description of Artificial Sequence: Synthetic oligonucleotide
  Antisense strand to SEQ ID NO: 1506804
aacaucagccauaggaucc

SEQ ID NO: 1506806 - RNA, 19 nt, Artificial Sequence
  Description of Artificial Sequence: Synthetic oligonucleotide
  Sense strand starting at position 3306 of SEQ ID NO: 1244678
gauccuauggcugauguua

SEQ ID NO: 1506807 - RNA, 19 nt, Artificial Sequence
  Description of Artificial Sequence: Synthetic oligonucleotide
  Antisense strand to SEQ ID NO: 1506806
uaacaucagccauaggauc

SEQ ID NO: 1506808 - RNA, 19 nt, Artificial Sequence
  Description of Artificial Sequence: Synthetic oligonucleotide
  Sense strand starting at position 3319 of SEQ ID NO: 1244678
auguuauuauucccuguag

SEQ ID NO: 1506809 - RNA, 19 nt, Artificial Sequence
  Description of Artificial Sequence: Synthetic oligonucleotide
  Antisense strand to SEQ ID NO: 1506808
cuacagggaauaauaacau

SEQ ID NO: 1506810 - RNA, 19 nt, Artificial Sequence
  Description of Artificial Sequence: Synthetic oligonucleotide
  Sense strand starting at position 3321 of SEQ ID NO: 1244678
guuauuauucccuguagag

SEQ ID NO: 1506811 - RNA, 19 nt, Artificial Sequence
  Description of Artificial Sequence: Synthetic oligonucleotide
  Antisense strand to SEQ ID NO: 1506810
cucuacagggaauaauaac

SEQ ID NO: 1506812 - RNA, 19 nt, Artificial Sequence
  Description of Artificial Sequence: Synthetic oligonucleotide
  Sense strand starting at position 3409 of SEQ ID NO: 1244678
gaacuugguugcucuccaa

SEQ ID NO: 1506813 - RNA, 19 nt, Artificial Sequence
  Description of Artificial Sequence: Synthetic oligonucleotide
  Antisense strand to SEQ ID NO: 1506812
uuggagagcaaccaaguuc

SEQ ID NO: 1506814 - RNA, 19 nt, Artificial Sequence
  Description of Artificial Sequence: Synthetic oligonucleotide
  Sense strand starting at position 3498 of SEQ ID NO: 1244678
ugcucaaguuccuuagaga

SEQ ID NO: 1506815 - RNA, 19 nt, Artificial Sequence
  Description of Artificial Sequence: Synthetic oligonucleotide
  Antisense strand to SEQ ID NO: 1506814
ucucuaaggaacuugagca

SEQ ID NO: 1506816 - RNA, 19 nt, Artificial Sequence
  Description of Artificial Sequence: Synthetic oligonucleotide
  Sense strand starting at position 3499 of SEQ ID NO: 1244678
gcucaaguuccuuagagag

SEQ ID NO: 1506817 - RNA, 19 nt, Artificial Sequence
  Description of Artificial Sequence: Synthetic oligonucleotide
  Antisense strand to SEQ ID NO: 1506816
cucucuaaggaacuugagc

SEQ ID NO: 1506818 - RNA, 19 nt, Artificial Sequence
  Description of Artificial Sequence: Synthetic oligonucleotide
  Sense strand starting at position 3597 of SEQ ID NO: 1244678
agcugugaugacugcugua

SEQ ID NO: 1506819 - RNA, 19 nt, Artificial Sequence
  Description of Artificial Sequence: Synthetic oligonucleotide
  Antisense strand to SEQ ID NO: 1506818
uacagcagucaucacagcu

SEQ ID NO: 1506820 - RNA, 19 nt, Artificial Sequence
  Description of Artificial Sequence: Synthetic oligonucleotide
  Sense strand starting at position 3651 of SEQ ID NO: 1244678
uuaggaagacgcugggauu

SEQ ID NO: 1506821 - RNA, 19 nt, Artificial Sequence
  Description of Artificial Sequence: Synthetic oligonucleotide
  Antisense strand to SEQ ID NO: 1506820
aaucccagcgucuuccuaa

SEQ ID NO: 1506822 - RNA, 19 nt, Artificial Sequence
  Description of Artificial Sequence: Synthetic oligonucleotide
  Sense strand starting at position 3839 of SEQ ID NO: 1244678
gagguagaagguuguguga

SEQ ID NO: 1506823 - RNA, 19 nt, Artificial Sequence
  Description of Artificial Sequence: Synthetic oligonucleotide
  Antisense strand to SEQ ID NO: 1506822
ucacacaaccuucuaccuc

SEQ ID NO: 1506824 - RNA, 19 nt, Artificial Sequence
  Description of Artificial Sequence: Synthetic oligonucleotide
  Sense strand starting at position 3882 of SEQ ID NO: 1244678
ggcaaaugucaugagauuc

SEQ ID NO: 1506825 - RNA, 19 nt, Artificial Sequence
  Description of Artificial Sequence: Synthetic oligonucleotide
  Antisense strand to SEQ ID NO: 1506824
gaaucucaugacauuugcc

SEQ ID NO: 1506826 - RNA, 19 nt, Artificial Sequence
  Description of Artificial Sequence: Synthetic oligonucleotide
  Sense strand starting at position 117 of SEQ ID NO: 1244679
uuucuuccuggaugaagaa

SEQ ID NO: 1506827 - RNA, 19 nt, Artificial Sequence
  Description of Artificial Sequence: Synthetic oligonucleotide
  Antisense strand to SEQ ID NO: 1506826
uucuucauccaggaagaaa

SEQ ID NO: 1506828 - RNA, 19 nt, Artificial Sequence
  Description of Artificial Sequence: Synthetic oligonucleotide
  Sense strand starting at position 348 of SEQ ID NO: 1244679
aguagcuuccaugagagcu

SEQ ID NO: 1506829 - RNA, 19 nt, Artificial Sequence
  Description of Artificial Sequence: Synthetic oligonucleotide
  Antisense strand to SEQ ID NO: 1506828
agcucucauggaagcuacu

SEQ ID NO: 1506830 - RNA, 19 nt, Artificial Sequence
  Description of Artificial Sequence: Synthetic oligonucleotide
  Sense strand starting at position 362 of SEQ ID NO: 1244679
gagcuuguuugagccagga

SEQ ID NO: 1506831 - RNA, 19 nt, Artificial Sequence
  Description of Artificial Sequence: Synthetic oligonucleotide
  Antisense strand to SEQ ID NO: 1506830
uccuggcucaaacaagcuc

SEQ ID NO: 1506832 - RNA, 19 nt, Artificial Sequence
  Description of Artificial Sequence: Synthetic oligonucleotide
  Sense strand starting at position 556 of SEQ ID NO: 1244679
agacaaaucugccuugcag

SEQ ID NO: 1506833 - RNA, 19 nt, Artificial Sequence
  Description of Artificial Sequence: Synthetic oligonucleotide
  Antisense strand to SEQ ID NO: 1506832
cugcaaggcagauuugucu

SEQ ID NO: 1506834 - RNA, 19 nt, Artificial Sequence
  Description of Artificial Sequence: Synthetic oligonucleotide
  Sense strand starting at position 776 of SEQ ID NO: 1244679
cuuggaguuucucucuaga

SEQ ID NO: 1506835 - RNA, 19 nt, Artificial Sequence
  Description of Artificial Sequence: Synthetic oligonucleotide
  Antisense strand to SEQ ID NO: 1506834
ucuagagagaaacuccaag

SEQ ID NO: 1506836 - RNA, 19 nt, Artificial Sequence
  Description of Artificial Sequence: Synthetic oligonucleotide
  Sense strand starting at position 778 of SEQ ID NO: 1244679
uggaguuucucucuagaau

SEQ ID NO: 1506837 - RNA, 19 nt, Artificial Sequence
  Description of Artificial Sequence: Synthetic oligonucleotide
  Antisense strand to SEQ ID NO: 1506836
auucuagagagaaacucca

SEQ ID NO: 1506838 - RNA, 19 nt, Artificial Sequence
  Description of Artificial Sequence: Synthetic oligonucleotide
  Sense strand starting at position 779 of SEQ ID NO: 1244679
ggaguuucucucuagaauu
